United States Patent Application Publication US 2008/0113342 A1 - sequence listing, part 12

SEQ ID NO: 44423 - DNA, 489 bp, Arabidopsis thaliana columbia
gaggtagaggatcccctagttaatttccaccgccattaacttttaactgcgaaatataaataaaatgggaaaaatatatgaaagtttaataatttatgacaatagctgcgacagttcttacagatcaaggtgcttatatttttttgtttgaaagaaagaggaatattattttttagtacacatatggggcttaagtgtgtagggtgtatatataaagtgatcacccaatataacttatcttttgtgtttgcctctcattcataactacatcagattctaagtatttctatttattttctcttcattacctttgctcatcctccatctcttatttaaaacttaattaattaccttttcaatctcttccaacaaaacttttgtccaagaagaagacatgacaactgaagatcagacaatttcaagtagtggaggatatgtcaaagctcatcaacaactgatcatgttgatcatcatcatcatgatcaacat

SEQ ID NO: 44424 - DNA, 367 bp, Arabidopsis thaliana columbia
gcttgatgcagtctgcttgaaggacataacataaatcattatcggctagacgtgactaacttcaatcaaatcctcttaactctagctcccttacaatgatatcgtaaaacactatgcatgagggataagttcgtcttacagtcaaacttagatgacgcatccccacagaccaactacgattttcactgtcccataagcctcgtccgcgacaactcgtcttccatcctaagcatagcatggtgtaatctgctaatggatcagttccagtaactcgcaagttctactgtgtgccttgatgtgagtagtgctatgaaaattcggagtctcaacacaagtgaatcagcagcaactagacaagtcagctcca

SEQ ID NO: 44425 - DNA, 1085 bp, Arabidopsis thaliana columbia
ttgtcagtgaaaacccttgatgtgtctgtgcttagtatgaaattcaatatgtaatggtgttgtttcttaaaacttgagtgttttaagtttctctattttcagtgatttgcatggttggtttttactttactcattgatttgatggcgctaaggtttttcttgtcttttgcagttttgcagctacttttaatgagaagatgatccggaccattaggcatttctcgccacatttagctgcaaagatgaggcctccccacatgtgagtaattttttattcccatggaagagttacagatggtttttgttatttactacttgagtgaacaccttgcaggcctgtcattcgtgggcgatctgcaactagaaagacagtctacatttgtggccaaccacgtttggtattcgtcttacttggcttaaccggtacttattatctctttatcatataatctctctcacctattggtatgcaacttctctgtgaactgatgcaaaatatatgattttccttatgtagccagttttgtcctgtggtttacttcatgtggtttgttatgggtcctctatgcacttaccactgcccttctcagtaagctatccttgctttcatctctttctctgtttttttgggtccagtttccatccttttgacttgtaatttttctctctcccttagtgatacttcttcatgcaagcctgagaactccaaacctcaaggcccgcttgaacacattccgtgaagaattcagggctgtctggcgtaactacagcgaactttaaagtcaacataaagcattgattcgatcttattgcaaaccaacccgggacatcacaggggtttcgaggaaagacatgaactccaattccttcatcatgtgcacaaacaatcgcagttattcttgtcttccagtagtaagctagtaaattataaggccactggtctggttacagatgcggctctttgttctagttagttgactagaactacaaggcagaatatagtgttgttttcttaaggttctttgtatactctttcagtctataaagtgtgtaagtgattcagttttacaaaatctttcattggc

SEQ ID NO: 44426 - DNA, 263 bp, Arabidopsis thaliana columbia
  unsure (1)..(263): unsure at all n locations
tnnnnnnnnnnnnnnnnnnnnnnnctaaagttagcctatatcatttgtctaaactaatcgtaaccctattaccagatccagaatcaataggtacaaaccctgtgcttgagagttgccgcgatgacgacagatagcgtgcgcatccaaggctatagctgtctggcaatgcgactgctacaaagtgtcgtcggtctatacgttccagcggtatatgcaataaatggttcgcgcgtgagtctcaattcaagcctacaacccgggtt

SEQ ID NO: 44427 - DNA, 580 bp, Arabidopsis thaliana columbia
atattgccaagttgctttccttatcgctggctgtgacagaactgctttcaatagtataactttgatataacgtcaccccacatcatcaagcatcgccgaaaccttcagctgtaacttcagcctggtccacgtttatgtgtaactccaacaataactgaaccactttggaaaacagaatgttctattctatcaaccaatcatccatcagtttagtttaaaccaatcgcttgaaaaagcaatactgcagatatgttcctcaagttgcaacagtaataaacaaaccacatggcagaattgagaacaagatatagatcagatgtgaaaacggaacaaataccaaacaaaaatatgacattaaacagtctcatctataagtggcaacaaagagacatatatgacattatttcgaaaagaattgagaagatacatctttaatatgtgaatagaacagtgagcggcaatttttgtatctcttatgacctgatacataactggtaacaacaacaaaatgatgcattgaatacgtaaatgtatatacataagacttatgcaaatagaccgtttgaccgtttgaagagtg

SEQ ID NO: 44428 - DNA, 644 bp, Arabidopsis thaliana columbia
  unsure (1)..(644): unsure at all n locations
tgtgacctaaattaatagacttttcaggttctgaatcttcagtaattccagaaaggttcaagatcaaccggaccggaagagggagatggaacttcttgatgatcaaatcgcttcctcccaaattcaaaaaccgatgagttatcggtgttcgaaaccccggtttcttgcgagatgctcaatgttttgaagttctgccttctgttgttttccatcatcgcttgtaaaactgattgttcttgcgtaagaaccggattggaactctcggaaatgttgagagattgaggttggtagagtggaatcatctggagaaaatctggttggatggagctaagggaagggttgctgaagcaattgagtattgttcctctagtttcagcttggttggagaagcagggcacgtaaactggttcggtcttggttttgtcgttgtatggtgaagaatcagttaaaggtggtaaactagacccggttccgtaagaaccgattcggattaacgtcgaaatcgggatcttcttaccgccagcagttttatgaaataccctgcagatccccattcattctgccaaatggaacagaccccaaaaattacaaacaaatggaanaaaaacaaaccaaacaaaacagagttgtaacagagcagaaca

SEQ ID NO: 44429 - DNA, 603 bp, Arabidopsis thaliana columbia
caaataaatctcttattccaatatcttgcaggattttttttttttttgggttgaaatttgatatttatttgatcaacaaaaaagaaaagattagttatggaaaaaagaaaaacaaatgaacttaaactttcattataaaaacagagcaaaaacaaacatgttgatcagcccattcttatgacgcacatgttgatcttaagaagagctcgttgttgttgccggtagtgcatgattggcgcgggatactattccactcctaataactttgtcgatggctgatgaagaggagaatgagaaggctggtggtgcctcttcccatatctctgtccacaaatgatgaatgaaggcttgaaatactagataagtgattggggcgtttaggaccaattggatgtggttgtgcgtcatatcaacttgacacatactgaagtccaaactgtaacagcgtaaggacatgtgtaaaacaagtgatatctattttgatcattttgagtgaagtcaaatagaccaatatttttggtttgaatttcttgaaaatattccttgccccatctaatcaattttctgttacgagagctaataatttcttgatagggtacgagc

SEQ ID NO: 44430 - DNA, 573 bp, Arabidopsis thaliana columbia
tgaacatatgtttgaagttgatgatgtcgttaattgtctgcgtataatataatatttaacttctaatgaaagaggtcaggtgttaagtttcttttttgttctctgttctcacttccattttactgaaattcttggatagatgggtttgttaatcttggcaaatgtgatgtgaacagtgattgtatcttgactttcttacacttgtttcaagactttctcgattgaggaattaaaacgcacagttttgtaatagtagcggcagattagagatgggctttattatcaagttgtaaaactattggggtttaaattcgaaaaacaaaaaaataggtcatggtttaaaacgcaattccattataactcaggggtttccttgtttctttatattactatatcttccagattaaaaataaaaggatcgttaaaccctaaacccgcttcttcttcttctttctcttcttctccctcaacgccgctctctatctctctatctctctctacctcaaacttattcttcgaatttcctctgaagaataatcttatcccaatagcgagtatgagttcttcaatagt

SEQ ID NO: 44431 - DNA, 605 bp, Arabidopsis thaliana columbia
ggtaaaataataggagggaagaaggaacccactattgcaaaacgtcgaggagcttaaagactccacagtaaacaaaatgaaatactggtatctaaccagaacaatgcaccaaagcatcttacactatatgctcgctaaattagtaaaagttcattgcagttagataaaatacagaacatcatctaagcaagcaaagtggccctttctatccactaagtccatgtagtattgaacaatgatatggacagtttttcaatataaaaaatcgtgaagtaacagccacaacagaacttacattgatagaacgggaattcctgaattcataatccatgccattcatgacaaaagaaaaataaaatgtgtgagttgcggcgaaccgaaagctaaaactctcttcactaaaacaatcgccgatgacttaacctttccccattatatcgtcaccagtttcaaatttcactaaaaaaggcttgtctgtttaattttttggataggaaggaagcacacaaacgatatcacgggaatggatcagaagaccaagataaacgcatacccattagattaacaatctgaatgctgcaagttgaaatgtgacctttggaagt

SEQ ID NO: 44432 - DNA, 532 bp, Arabidopsis thaliana columbia
ggagaaagttgacctaactgtccatagaagaaataaggtcgtctggctacttttggaccaagactctgggacaaacgtggctgcattacactgggaaattcatatgtgttatctttccactcatcttgcatccatggggtttccataaacgaacttgagtcacccatatcttcgggccttaaccgttttcctctgtcatcgtagccagtgtattcttctggataggcattctcatcctcatcttttggtcgcttacctctcgaggtctctcccacattgtcagtggcagggaaaggaaaagactcaataccaggatctggttttatattagcagtgccactcgacgaacccccaccaccatcctctttctgagcaccaaccccaacaaatctccaactctttgaaagacatgtacgattcactgcaggagcagccgctgaaactttctacagtgacaccaaatatcattgagttaaactcaacaatatcttagtttaattaagagaagagtgtgagatggtttaggtgcagt

SEQ ID NO: 44433 - DNA, 436 bp, Arabidopsis thaliana columbia
ctcgattcgctttcatagttgaactatccatcttacacttaacgggagtctagtagcataaccaacatttctccacgatgaaataaattcaattcccaacacttgtcatcacaataaggattctattctcttagagatcatttaatagtgccgaacttagcttggcattcacatcacaatcaatttaactcgttaataccttcgagcaatttagtttctttttaaatatcaaagatagtaacgcgtttgtacttcttcacacatattttctataacactcatattcgcatatcagggagatgtgtgagaacggggaacggattactcctttttaagactactttcaggataaattggaaatcaaatataaaacacgtttagcttaagtgcgaatgtggaaataattaattgagccgccaaagtcaatcaaccgttg

SEQ ID NO: 44434 - DNA, 460 bp, Arabidopsis thaliana columbia
agaaagatctactgcaaccgaagttatatagtaagagcacacacagttcattgactcgttgtattttagtaactcaaggtgctcgaagtttgtcccctgagaatgaaattgaatgttgttgttgtataaattaatattattgaacaactaagtagcaagcaagatgagactgattaaacaagtagcaagaaatttaacaagtaagtagcaagaggggactaattaagctttaccctgagcaaattgtaacggtgaagaccaaccatagcataaatcttgggtaaacaagccctaagcctaaaacgtgggtgtttacagtcgacagaccacagtccagctctggttcctcttggtactggaacatcatcgatatcgaaaccgtaagcaatcaatctctcatctcagttaattataggtttgctaccaaaaaaaaactagacgaaattagatcataaaaatg

SEQ ID NO: 44435 - DNA, 581 bp, Arabidopsis thaliana columbia
ccctcactgctctcatagatgtcaccggaatcctagagagcacctcctctgtcaaatcccgtggaagatcggaaatctgaaccatagtttcgaatcgaatctgtaatggaatcaaccttccaaagctgtttccttttccaccgattgcttcccgactgtgttaatttactccatctgaaaaaagaaaaaatctatctggcttcatcatcatcaggacggatacttccgcatccgaccaaaagtacccacataagtggggtttgattggtaataagtttttgacttattagtaatgggtccaaggcctgttaaagtctcaatacagcccaaattaattaggcccaatagtaacactatttgcatttgatgagaagcgggaaaatgtagagaagtcaaaataattcgtatctctctttcccaaaactctcaatctctctctctctctcacagttcctttctatcttcactaatcacttgaaatcttcgtgttacatcgcacaatcccttcgtctcccagaaaaatttctcaaatttcaccacaaaatcagatatttctattgaaatttctctttatagttgga

SEQ ID NO: 44436 - DNA, 616 bp, Arabidopsis thaliana columbia
cctattatcactttacccatacggcttagttttgtttggttacccacactcatttataattgtgtttttttcgttttttttctaaatatcaaaatttcagttgacttgtaaattcgtatgaaattgattatcattgcattgcaaataagaaaaagaaacatttagtaaaaccaaccactacattcgattaacctattatcactattaaatgttttgttagtgtttgataaaaaaaaaattgccgtgttagtaaaattttttacgggtgatcaatgatcatcatataattaaccaaaataatgtaagtctacatagttttagtattgaagatcacaaggatatcaaaaactaaagaatcatcactctctataatttagtaagctatgggtttgatcaaatttccagcatgtagtttttttgctacgtgtgcattttgttataacaagataaatatataaatgggcttacgcttcttcttttttgtgcaacaatgggcttacgctttatcccaatatttactatccaaggctccatataattagtatttgttattataagcccccacttttgagaagagatgccaaaaatgaaatgctgagagaagtacaatttgttt

SEQ ID NO: 44437 - DNA, 770 bp, Arabidopsis thaliana
aatggagaaggaagtaaggtccgtaacggcggttcggaaactgagaaagttgaggtggttgcgacggcggaactgaagtagtagaagagctaaaagtgccttctgctccgccgtatattccgtctcctccgccgtctccgccacgtcctccaccagcgaacaagcgaagagaaagactaatagagtgtaccaagatgtttctccacaggaagagaagaaagaaagagatgattttgtagcgacgacgacgccgattccacctccggcgactgtgtatcaaaagagcaataaacaggagaagaagaaaggaggagcaacgaaagactttctgattgcgttacggagaaagaagaagaagcagagacaacagagcatcgatggcctcgatctcctcttcggctccgatcctccattggtctattcaccaccaccgccgccgcctcctccaccacctttcttccaagggcttttctcatccaaaaaaggtaaaagcaaaaaaaacaattcaaatccaccgcctcctcctcctccaccaccacctgaacggagatatgaatcacgcgcatcaacctcgaagctccgaaaagctccggtggaatcacggacatccaaaccaaatccgccagctaaagtaactcaatacgtaggcacaggaagcgaatcaccactaatgccgatcccgccgccgcctcctcctccgccgtttaaaatgccggcttggaaattcgtgaagcgtggagattacgtcaggatggctagtgacatcagca

SEQ ID NO: 44438 - DNA, 625 bp, Arabidopsis thaliana columbia
tgataattgcattacattaacttgataattgcattacattaacttgataattgcattacattgtgtttacttacatgcatggattttgcgtgttttgtcggatgacacgatattcacctaatatcacattcgtatataaatcatatacaacgtctctcttaaaagaagtggttatttaaattaaaaacttagggtcaccagatcagacagtacatactaattttactaaacctattcatctcttgacatttagagagacattaagtgatacggacaactaatactaactaagctaagggggattcaaaaccagagattttgatttttgccaaatcaatgttccacacttttgttggccaaagaaacagagaataaaattcgctgtcttccacttcaacttttgtttcaagtccagtaccagtaggatatctctactactctttttagcgtcaatttataataattgtctcgctgtttctttttctgcaatggagattctaatacacatcattcagatatctgaatgtctgagatccagagatctaactaagcaataatgttgctaatttattgttccacttttgtatgctcaaggtcccaaacaagagattaaaatacaaatttg

SEQ ID NO: 44439 - DNA, 938 bp, Arabidopsis thaliana columbia
tggaataggttttaattcacaaaaattgaatatttatttggaaaataatcctaagtttgatatttatttcgtttcgagaattgaagatttaaatcaacgttttcaataggtcgaagattttagtgacatttttctcgaaaaacaatgtaatacttgttgatctggctttatcatcaccattgtactaagtattctaacatttgaaagttaatgaaaaatatttggatacataagaactacatgccgtttttactttgacaatgtgaactccttgctgtttaaaataccaaggcacatttgtcgactgattcgtgtgttcgtcgagattttttgtggattattgcaattcggagaagtttgggtcgttaaagttcgagtagggttcataaatatagtgaaaaccaccgtttggtgatacttcgtcgtcctcgacactctcagattcatcatcgaacctggtatgagctctctttcgtctttggtgctctactagttagggtttcgccattactatctccatcctctgttcccagagttagaatttttcttctgaaaacgcgaattaagctcgacgttgaaatgttttgctcttcagattaagacgcgaatttgagaggaagctttattttgtgtgtagatggcgaataatcctccgcagtcttctggtacccaggtttgctctctcttttagtcgtttcatgcttctatggaattcgaagtcactcagaagtcactcaattgatatgttctaagtaatttgatttagccaaatatagttgatcaatttcaagcgtgttagggttctttgatcttagtctctttcattgtttaatagcttggagcattcactcaattgatatgttgcgcgcctaagtgtcagaatcaacattcaatagctgttatttggtgaaagtttgttttagtgtattagtagtgtg

SEQ ID NO: 44440 - DNA, 542 bp, Arabidopsis thaliana columbia
  unsure (1)..(542): unsure at all n locations
ccattctgttacactgaccaaaagttgggtatcaagcagagtattgagaccgtttctcttctttgtcagatctttgtctgtccaacatcaaaagatacaggcaagagaaatacactgcatgcaaacttgctttaagattctattggaaagcatcaactctaatggtatgattctttcttttttttgtcttgctttaatttgaattgtttgtcttgcaaataaggagggaataaatcttgttgtcttttgcagatcaggggtacaatttttgttcactagcagttggtacatctgaagatagtaaaacatgggcctgtcaaacacgaaggatggtttctctctgctctttccttctcacggagtgtaattattcgcaggaaaggataaaagatgttattggtgtcaatgcccttctattacgtattcttattgttttaactgatcccanaagctggaagattattacaaatgaaaactttgaagatgcagaaacagctaaaaagataattattcagtttatagggagctgtaaaagtggatat

SEQ ID NO: 44441 - DNA, 586 bp, Arabidopsis thaliana columbia
atctctaacaaaagttttatgtataatggaccgaagcttgtggattttccatttttttgctttgctaaatatgagctttttctacccagtccgtcttcataaatcagtgttttatcttttctctgtcttttggagagaaggccttataatgaaatcggtttagttagtggaaaccaaaaccatatctttcgtaaattcaattcggttaagtgaaataaaagagccataccagtttaaacccaatgtccttttataatttgttttcttattttagaattggaaaactaattattgaacacacaaatggaaaatgggattgatcttccccgcgtccacgagtacactcacacgatcaccgactttattgtgttcaaaattgcacaagcaccgttagattctcctctctagtcactagatatcaaaatcaacttttatgtttttagccaagaagagatccaacgttcagttattgcctcaaattcaccaattttgactctttaacagggtttgtattcctgttaataaataataaaggcaacattaaaatatacatatacatttaaggatctatatgcaattaccaaaa

SEQ ID NO: 44442 - DNA, 534 bp, Arabidopsis thaliana columbia
tatgataccttgttgtgaaggatagccttcacttgccccatagctggttgcacgggaaaatcaataagcattgtataaacagatccaaggtttagactcaaaaacaaacaatttatataagagatagaccagaaaccagcaaactgaaactaacccgcgatatgaaagcatgaatacattgcacttcaatttttgtatcatgatgcgaaccatctccagacgatgagcgatgtctgggattctaaggtcaaggtcgtaacaagacaaagtatcccagctaacagacatggaacataaaataggttccttagagcatacaaatataaacaaacaaaaaccaagaaatggctctggaaaggatacttccagcgttctcctggaaaaataaaatggttggacctgcatgccaaacataaactattagaaagacttcgaattaggctaaagctaccaaccacaagcaactagattttaggtgacagataagttccaaactaaagctaaaatgacttagggatccaaatctgagaaaag

SEQ ID NO: 44443 - DNA, 549 bp, Arabidopsis thaliana columbia
caggtcgatccccgacacggtcgaccattataggaaacaaaatacaagtctacacacggattatacaaattctcctgaatcctgatcaacttaaccatgaaacttgaaacaatcagaattaagagaatcggcctccaaagaaagctaattatccgattgataatatatgcgacgaatgttcatcacaagaaagagtctaattcaaaaaccggcttttgacatatcgcataataatagtgcatgacagtcttaacaaaaaaactcaacgctataaataattaataaacgttgacaaaacataaaataattccaaaccgagtgcgtatctaaaaaacgataaacgtggtcgtacgtttaagactaagtaatttcaccaattaaattcccggaaaaaaaaaaacacaaaatttatcaaagaaaattaaatacaaatcaaccttaattaatgtcaagctttaaccctaagtggagatttgagtgcccacacttctcctcggatatgtgtttccgattcacatggcactcacaagacacaatcaatgtttttag

SEQ ID NO: 44444 - DNA, 464 bp, Arabidopsis thaliana columbia
tcaacgcctgtaacacccgtcgccgtctttagatccagaaagttatagactttgagatttggcgattccagtagtttaccggaatcacttataatcccagtggaaatatcggagaattggctctgttgtccgacgctgctggttgttgtcgcgccggtggttgacgagaactctgttccattgctgtggttgttcgttgtggctgcttatcattaacacagacagagagatcgagcgagatcagtaagtgtagatcttgcaggttttatgcaagaacccagtaagacttacagctacttgtagagagtacatagcatgactatggagacctgttttggcaggagagcaagaagcgaagcacgatatacaagcacccgtcaatttctagtgagccgtctctatcttgttcttcttcttcatcttcttcttgttttacgaattcagaccagagctcgtggatatgg

SEQ ID NO: 44445 - DNA, 542 bp, Arabidopsis thaliana columbia
cccaaaaaccctaaatttgttcaatctccaaaggacaatctagattgttgttaaaacgcgaaattaatcgcttaatcacgtttatcaaaaactcaaccaaactcgtttgatcaaaagacgagaaagttgaaaaggaagattcgatcactgtgatcgtctcaacggcggcgaagagcagcgttgagggtttaaggaagattcggcggcaagttggttttgcgtctccgattttttttgcagacaagacgctatgtgttgaagagtgtttagttttggagggttcctttcgtttatggtttaatcattaattaattaattataaacaactttaatttttctataattcgtatctctcatttattaatgcttgagaaataatttacattttgccccttatatttcttagattttatcggatattgcttaacagtttagaaatgagagatacgaattcatgacaataacgaattgtggattttgtcctaagttcgctaaataggttgcatgatccacactttaattattatgtatatatttatgta

SEQ ID NO: 44446 - DNA, 517 bp, Arabidopsis thaliana columbia
tatagctaagactaagattacaaatataaatagattaaagtatggatattttagtaattttcttgttaaagtcatctagatggagatgaagatttatataaattaagcaaacaaacaaaaatttattgagatgatccatccaaatgaatatccaaaaattaaaacgaacaacattcagatgaagcatttagatggaacatttagatagatcatttggatggaaatgccagatgatgaaacaaacaaggcttccgtctcttaaaatatcgtaagacatataacatggtgacacattcagcatcttgtatgatatccctcaagcaaaggagtcatctaaatttagcaactaaaagaacaatataacaagatgagaaacttaagaagcaaaacattacgatctgaatttatatgatctaatgcgtgctttgattaagagactcgataaaggttacttaagacatttaactgcatagagagtaagaaacccgtacgtgtgtcatccatcattcagtctttt

SEQ ID NO: 44447 - DNA, 536 bp, Arabidopsis thaliana columbia
tgttaagtatttcaacaaaagcatacaaatacagtgaaatgggccaatttcgtcaacttgttgggaaagtagccaataccaaactaaactctagtttattggtaagactcaactaattgtaacttcgtgaggtctattattttattattttccaaatcatgatattatcgaatcaaattaaacattgtattaataaagtacgtaaaatagttacaaccttttttttttggcaattaagaatgaaatgtaaagccaaaaaatcaacgtgtaattaaatatcaacggtcaggattgatatagaatagtctttcctttgactaagtcttaatcaaaacacaatcaaataaatatataaagaactaacgaaggcaaatgcttttttctttcttacaatctcacggagtcttgtctttagacacacacaaaaatggctaaccccaacgagtggtctcagttctacgacaataaccaaaccttcttcacaacttctaccgacgcttcaaccgctgttacaaccaccactgcccggtgataca

SEQ ID NO: 44448 - DNA, 613 bp, Arabidopsis thaliana columbia
cagactacaagaagacgaagaaacgggcgggtcggatacagtttgacccaaagcccatatgtttaattttaaggcccaattggggctttctttttgggaaattggcaaacaaaagaaattgtttagtgaaatctcatatttcgtaaataatatgaaaaaggaattattcgccagactcgggatttgatcatacaattttttttttttcgatcatacaaattacgaaagtataattttggatgtattaaaaaaaatcgggtttgcgggttttccattgcggttttcggattagcaaattccaaaaaactaaatttatgcggataacaaaacaatccggcttgaacagtaactgaagtttttgacatacggatccgtcacaactcgcaaaatattttaatccattgcaaaaagaacatactagctcggttttatttatatagcagtaaaaaatccattacttttttactagagttttttacatacaatcataaaagaatacatttaaagaagattttaagaagtaaaactcggaaaattattgcacccacaaatccgcaaccatgatttaaagtttttttaaaaaagttatattaatttatatgtgaatagataa

SEQ ID NO: 44449 - DNA, 457 bp, Arabidopsis thaliana columbia
  unsure (1)..(457): unsure at all n locations
tattgaagtaacgttaaaaattgaaaaagatatacttcaaaggctacttaacactaattgaggcatacagctggctcttaattcacttaccgacactatttcacattctgcttctatggtagactcaaactatatttcaccatgtaactcatatggggattcaggggacatctctatttactgatgacagactgccaaggtccagttctttgttattcttatttgtctcaatatggtgcgaagtcgtagagcactcttttcctccttcattttacaccataggactaggtatactcctcgcaagattatcatgggacggattatactgcaagtctcgcgaaaaaacaaaaaaaaaaaaacaaatatgattgacacagattagggataaaactcatgatagagtttgatatacgttcggaaatgcaggggtctttntaaagcaaatgatggtattagg

SEQ ID NO: 44450 - DNA, 614 bp, Arabidopsis thaliana columbia
attagtagtaatgaggttttgctaaaagtaacaagatcagttgaagcaaacaaagatgtttttagtgttgttgtttttttggacaaagatgtttttagtgtttagctttggttattgtggtacaatggtaagtcttgatctttggagttattgttttaagtcgtagcttttattctctctttatagcttttttttagcttagtatccggagataaatttgtctttcaccggcttagtttttggaagggtttgatccttgccggcttcatgtatcaaaatactatcccaccgttgtaagttgtaatcctcaatggctcaatgaatgataataaataaagttaactctttcaagtgataaaaaaaaagaaaagaagaaagcttttatcacactttctatcccctataaatagaagggatggcttgaagacacatactgaaaacagaacaaacacaaacacaaacagagaatcaacgaagaagaaaaatggtgaaggtgatgtgggtttccgttttagctctggcggcggcgattctccttttgacggtcccggtggcagaaggggtgacgtgctcgcctatgcagctggcttcatgtgcggcggcgatgacgtcat

SEQ ID NO: 44451 - DNA, 635 bp, Arabidopsis thaliana columbia
ccgctacacttgacatgaaatcttctcctatgatcaggatggcagggaagtattgtctccaagatctgatcttgctccggcaactaataccacaaccactgaaactcatgggatcgaagtagcaacagagtttaaaccggtggatcacccgatggagcccttagacaacgatcaaccgatccaatgtccactcccagagccatccattctcaatgtaagattcttgaaaaagttccaagaaaagaaaaaattagttttttttgatagtgaaaactgcaaagataggagtgtttgtagaaagcttcactctattttttatgatcacaggacgggagactctggaaagagagagtgtcggcttcttcgatgaggagacgaagtgatttggctattgtccaagatgggatggatgaagaatctgatgtttctgtgacgtcaattccatcgcggactagccaatgcaataccaaccgtccgatcttgccttcacttagtgcgccggaacacgacttgcttaatctactagaagaatgcaaagtatctggtagtatctagctaagaacctgcatggatggtctagactctttttacatttatgtgtaagaacaaaaccaactcatagtgaatgaatggta

SEQ ID NO: 44452 - DNA, 551 bp, Arabidopsis thaliana columbia
tatgtttttcttttctctataatttttgtatatttaattaatgtaaatatacaaaattatatcaaatatattatttccttatatgtttcattttaatcattttttattaaaatgaataattggacacctagatagctaggccaaaacaatttttgacattccattgacttatttacccaaaatggaaagtgtgggtgattctggctgtttagatgcttagacataatcttactttctatccaactaattattacctgtaactgtaagtttcaattttaggcattttatattaattatattaaaataaaactcataacacatagcaacacgtatagagaagaaaatatcttaaattacctttggaaatatatattttcctttaaatggactttctatataaaacataaatcacattacatatatgatacaattttccccctaaatgtctggtttcatgcccccaaaaggtaaaatatctatatgggctgtctataaagataaatgattatcactttaccatcaatcacatgccaacacgtaagggtgaaagt

SEQ ID NO: 44453 - DNA, 356 bp, Arabidopsis thaliana columbia
agattgttatttatctaaatacatttacatatatatgctatcaacctagttaactctatataagtataattggatcatgtattctgttttgtgtcattataaatatgtttaccaaaatacaaaactagttagtaagaggagagatctgcggatacttgaggggttttttcattacaaatgccaagtagaagctataatacgattctgctacgatatttggagctttttgtggttaatagaacttatgttcttggagaattagtatcaataaccagcagaaacgtaataatggactaactaaccagcatcagaaaatggatgacattcagtatattttcgtacaatatttgctatta

SEQ ID NO: 44454 - DNA, 542 bp, Arabidopsis thaliana columbia
gaattagattcgatttgcttagtttagttcattcatttattctttctttagagtccaaatcatttcgagtcattcctctgttcatgtggttttggttacttcgtcctcaagtcatctaaacttttgtggatacaaaattggctgggccttgaaaataattctctacatagctatgaaattctaaagcttacagtttaaattagttaagtttatgtgtttattttttctttagctaagatagcaacaaatcacacaaaaaacaaccctttaacgaacaaaacaaaaaaaagaacacatttgaatgggcttaacttcaatgtttcaagcccaatagacaccgacagatccaacattacaacccgattttaaaacgggtaaacaaataataaacacttcccaatcgccattgttactctgttttgagatctcctccacgcacatatcatcagatctacacttcccactcaaaattttccagaattcccaaattcttctctgtatattcctctaacactctcgaattcactccctaacttgtgatt

SEQ ID NO: 44455 - DNA, 592 bp, Arabidopsis thaliana columbia
aagcattttcttgtagagagactagggattaggagtggagctggtttgtcacttgatgttccaactcgatagaactcgaaggtgtgtttagctcctcggactcttccacaatactggaacactatattgttgtgtttggaccaggggatgaagttagcgtgtggcatacgtcaacctcaaattgtatggtttatccaccattgtatgaactaatgatgggtatggaaactcgttgggtccatacgaggtacttagatcttaaaaaaacatatagtgaagaacagaaacctaacactacaagatgagaatctaggttttatggtactaaagaaaaataagagaatgaacaatcaatattatacacattgtaccccgttcattcatcaattttataaaacagtttacatcaaaagtcatgattataacgagatcacaatccattatcttatcgtgtggcgatatcatctttctcaatggtgaaatccatacatcacatatttgtcattaaagcccaaatgctcattgtgttgtagcattaatgagcttgtccgacacctctctccaatttgtatatctgaggccgaagttgtgt

SEQ ID NO: 44456 - DNA, 607 bp, Arabidopsis thaliana columbia
cttgatcggtagctttgttacgtaaggccaatagcgaccttgacttccttcagaacgtcgggttttgttcctcatggacgcttgtgctcatcaaagaccttggagtaataatcataatgattaaaataattaaaaggtgaaataattatctagtggcgaacataaactcattttgttttgtaacatcttgaaaatggagttttgaattctctagttttccttaaaaatgtccgatgaaacgaaatataaaagatatatttataggttacaacaaacaaaatgtatattttttgtcaaagcaaaatgtatatcattatacattatagcaaacacaaaataaccctaaccagacaaattagacatgtgaaattaaacacaccatgcaacctacgtcacctaattaaaatgatgtaatgagtgacatcaattcaattttaatgaatttatttcatctagatcggaaaatgaacaggttgagtgaacactgatattcaatctttatagtattagagcaactccaaccatggaacaccaaatttagtgttcaattttttcttattatgtactcaatttagaatttctttattttaatagtttgacaacatag

SEQ ID NO: 44457 - DNA, 1013 bp, Arabidopsis thaliana columbia
aagccttttccgcagagaagagcttgaaagagcaatggctagagtaaacccaaccattactctctatagctccaaccgcaccgtcgcaccacggtttccggcaagggaaatccgcagcgaggcagcggtaaccccgtcattgctaatctgacactcatcattcttcccaagcctagtccatcgtccagaccaagcatctctgttaaaatcagattttttacatgaccggagctccggcagagtaacgtcaggcgtcttaacaaagcgtaatctaacattgcgaacgtttcggtcaaagcctaaacgtgaggtactaaacttaagaccttggtaatgacggaagagtaaaatgacggtgagattgaaatctccggcgaactcaggatgaacctgtaaagagaaagagtaagttccgttgccgaaatctttcaccggtggtctcgatttccagttctcgccggatatatcagtctcgaaatagtccccaccaatgcaaacgttttttccagattcgtctatggcttgaaatttgaattcatgaatctctccggcggttaactccacagaatcaatcccgtcgacaccgggaactgaaatctcgacggtcttcgcttctctacacggcgctcctcccggagccaaccaacctctcatcaaattcgccgtgaaattcttctgagatccagcggttatccactcgaactggacccgggtcgagtttgaagtgagattcgtcttcttcggaaccagatttcgtggagccatcatcaaggtgagattttggcggtgaggtttctctgatactagattgggtttcgttgacataaacggcgacggagaaggactgattcgaacagagtaagcattgaatctccatggctgaacgaagctttgaatcgaacaaccgtcaatactccaaacgactaacataaggaagcagacgagtgctgtaagagcaccaagccgccattgaagaagagggcttggctgtaaaatcaccaattggctcggta

SEQ ID NO: 44458 - DNA, 524 bp, Arabidopsis thaliana columbia
tgccttcttttatgactgttaaagccatgcatgaaactgtcacaaggtttttttttttttaataatatcaacctatatcaatggttttgatgtaaaactaatatatggtttatatatacttatatagtccgaccatgtagatttgcatcatgtcatgaggatttggagcacagttttagtatatagcttgatgaattaatctgattgtatggctcctaacacggattttgcaaattcaagagtttaaatctcgtaataacgtaacattagagaatcgttcatgtttttagataaatgttataaaagttgtaatttttgatattatttctcataaattagctggtttccgacttccgagaggcgataaaaaagcttatgttaaaatgtacttaagtcacatgttaaaatgcaaagtacttacctaattgtcaaatgactaaacactatggtagttaccacaacttaaaaatcaatctaaatgtccagactgatttcggtacgcgtcggtttccattgatgtttgg

SEQ ID NO: 44459 - DNA, 560 bp, Arabidopsis thaliana columbia
  unsure (1)..(560): unsure at all n locations
tctgttggcattaagcttaactacattgggggtaacaacaaaaaaaagcagacaagaacttcacttgaccataccaagttacaaaaacatgataacaaacaaagtctagtaaaattctaaatgaacgagatacaaaacctaagaatccatacaactcttaactttatgtgacattgatatattcttaaccaagattagcattgaatctatatattggaattgtaaacacaagtttaattagtacacaaaaacacgcaatcccaagtaatacatgaactgaaatggcattaatatagctcttaagttgagaaatcgggttgcaagcaattctcatctgagtaagagatttaggttcgacttaaagacgctttaaaattgaaaaagtggaagaagagatcgagcttactttggagtttcttgtccatgtacctgcattacatgaaacaaacgaagaacaaaatcagaaacacgaagaagtaggagctctatgaaaccaaaaacttcaactaaatggatacagagaaattagagatcanaaggaaaaaagtggcgaagagaac

SEQ ID NO: 44460 - DNA, 512 bp, Arabidopsis thaliana columbia
ctcttctagatgtcccatctatacataggcatgaaaaacatttaagtttctggctaagtaaaattcaattagatgaagcttttaggaggtcccaatgctgtaataagcagagcatacaaaggaaccgaaatagagatataaaagaaagaacagaaaagggaagaacagaagactgagagtaacttatatagtgttactaaaagagcacaggggctaaaggcagttcaataaataacaaaagcggattaacttacctgcatattgaggatagatatcagtttcaaattctgcttcaggtgctgcatttcaattcttttcatgctgacagaattatacagattagagatacttctccatgcattgtacagtcttctctgcaatgaaaaatataatcacttggacagagacaagcctgtactaacataaataaattcgaattttcaacacaacacagatgtacgtacgagattgttttgactgaaactgacagatttctcaacgaatagctgttg

SEQ ID NO: 44461 - DNA, 592 bp, Arabidopsis thaliana columbia
cggagttcgacaaaagaagattcagatctaaaattggtaactctagtgttacaaaatctaaaaccagtcactgagatcgaggtaggaagaaatcaataatacgaatccagctaaatcattttcagactttgaaatgaaaaaaaaaagaaacaaaaaaagtagaaaaagagagataattacatcgatcttctgctcttccaatttggcggcgagctccactttctgttcggcagtcatgttttctagagagagaggattatcggcgagtgacgaaaccctaaaaacccctttgatggaatggaattgattgctttcaaaggtaaaatataagaatggttaaactcgttttgaagtaagtgcactgagtcgggtttggtttggagtttttatatcctaaaccaaaaaacagactaaaagttttcggaccaaaccggtaaggacaagacaagaagacaaaactgaatgtactcaatagaatcgccgtctgtggggatcgaaccacggccacgtggttaaaaccacgcgctctaccactgagctaagacggctttgttgattactgagcacttgattatttaattgacatatatta

SEQ ID NO: 44462 - DNA, 470 bp, Arabidopsis thaliana columbia
ctaaaagaaagtttaagaaaatgttcgattctttcctcaaatttattgtttccccttttttgtgttcgattcgttgctcttaccattatagtttttggagctcttttgacttaaaaaagaaagaaagagagaaagcaatcaaagccgttggagactcatacctgtacccataacaacaatacacgttttataaatgggagatattaagtctgaccatattattccaagttataaaacatgttgatgtaaaaaatgtgtgaatgcacgtggattctatgaagagagctcgtgtaagcgcggtgtatgaaggtaaagagagaaatagatcaagcaacggagaggaaactcgaagggaacagtctaaacacgcgagaatgacggcaaaagctaggatgaacgtttacaaagagagcatgaaacctctgccgcctaaacgtaagaaatcgttgatgatcataagtttgatgaga

SEQ ID NO: 44463 - DNA, 463 bp, Arabidopsis thaliana columbia
atgaagaataagttcgataatgtaggttagaaatcaacaaaaatcaaatatattttttaatcactatgcaaaaactttaaacctcaaggaattatgaggctgattgagtattaaacaaaaacaacatagtcgtattgaaagcatgtggtggggttacttggagacaaaaagtataacttataaccgtattgaaagggtacagtttacacaccaagtgattaaatcgctaattctaaatgtttaccctttctatacggctattagattttaatgcacatatgtgagaaggtagaagatgaccaaacccttgtgaggttctaaaatctgctttggtcttcttcagtcagctttccttagtgaaagaataaaatgcatatatttgtttttaaaagatactatacgtgtatttaaatgtggatggtgatacatcaacaatattaagacaaatttataggttgcgcat

SEQ ID NO: 44464 - DNA, 456 bp, Arabidopsis thaliana columbia
ccattttgcggtatctatattactatcagagctttaccagatggaaatcgcgagcttaggcgagttcgattcaggtacataactgaagaacccattctgctatattacatacttctctttctgaacactgagacgatgtttgtaatgtagccgagacaagttttggggaaacacatgcgaggttatggtgggaacaaaacagagcgcgtatacaacagcaatacttgtgacttgatgatagatttacttaagtggagcagctattagacaaagaacaacaacagaagacttttattaacaacagaagacttttcggtttcattttttagttataacttgattacttgaacaaatgctaaacaaagactttcttctcaattttattgcttcttgttagatttaattagatagatcgatattcagcaattcatttctgatttgataatttatggaata

SEQ ID NO: 44465 - DNA, 801 bp, Arabidopsis thaliana columbia
aacacatcttcaagaagattaaacaacggctcgtagaaacaaaccttgttactaccactactactactactacaacttctacgttcatcgtcgtaatagcaatgtaaaggcaacctaagcattatcgattcgccatgttcctgcaactgatacttacagtgagcgttacgtatctgcgcggtgttattgatgaacttagctagtctcacacagttttgtgaaacggatttgaataaaggaagctcttttacgaaatctttgatcaaactgttgagtccctgaaactgacaagaaagattcaccatccattgatgttgactctccagattcctcagtgctttggtcttaaacttatcagagactatcccaacacatctctgaggtgaatttccacaaatacccttcaccgtctccaacaagacctcctctgcgtagttagacggcacagctccgttcacaagtaccgctcttctgtacaaactcgtcccgtttggtaaattcacaatcaaattcacaagactctcgccggactctcctggtttccaaccgtccgatgagatttggaagaacattgcgtctctgattctcgattcagcctctgctctggcttcctcgtgcttcaagtccaatctcgtggtggcgaaatctctcttggagatgattggtaaaccaacttgtgttaaaaaagctcgaaactttggatgctcaagacccgagagagaaacagagccgcaggactcgaagacccaatcagagagagaatctaaagctgactctatctgcgatctggtaagagactga

SEQ ID NO: 44466 - DNA, 520 bp, Arabidopsis thaliana columbia
cctctgttgccacaaaataaattggccttaatgtttctagtgacaatactattagttcgatcatgtatggacaactaactcaatttagttgtaccctccccaaagtatcaagtgaccattcgattagtttatggctaagagtttaatggaaatatacgttgtatattagtgtgtgttagcttttgctctgtgttagtattctggaataatatgtcttcacttgacttgttgctatttagccatgaacaagtgcataaatcgtatgtgttatcttccatgtgacgtattatttctttgagtaattttcaagaacccagaccaagtgagttgctatgattttgatattcctctgttatatggattggcactggaagaactgtaaacgacataaatcacaggagattgtggagtttctggtgtaaatttggtaacgagagggagggtatgtgctgatgaatctaagagagacatgaatttccaagcagaagaagagcaatgggaagcttttgaccttgggtga

SEQ ID NO: 44467 - DNA, 583 bp, Arabidopsis thaliana columbia
  unsure (1)..(583): unsure at all n locations
nnnnnnnnnnnnnnnnnnnnnnnctaaaggctgatcaagttgatcacaacactagcaggatgactgaattctaccttggacatggcagattgtacttcatcttcttcttcatagttgtccgcatctctctctttcttgttggtaactggcgtcaatggctgttcgatctgcagccgaattcttctaggagcagtgccttggtccacaacagagtccagatctctctgattctctcgagacctagccttgaactcaaaaatgttactgggactaatgttgcggtcaacatggctttgctcaaaggatgactgttcaggctgattgacattatagttaaatggatcgatagctgcgtaagacgatgaagcatattgcccaaaaacgttgttatgaagtggcgtcaaggtccgagaggccctggttgaagatagaatctctactgcctccttgctatcaacgttctgttcactgacccatctagaagctaaaatgtcaggaacaaattgctgcacatgaagaaacattatggtcagcccaaatcattatcagtttcaaatccttattatacattctggtaactgtg

SEQ ID NO: 44468 - DNA, 549 bp, Arabidopsis thaliana columbia
ttatttaaagtctcttttttctgaacctaccaagttagattccatggataagaaatgtagaagtaataatagaatgaatacatatgcatgttctacaaatctaattcctttatcaataattgttctactttcaatccaaaatacaatactatctttggtatctagcattttgtctatgtttaccaaccattctcagatttatatatgtaaataaaatagcatgaagaaaaaaaataatgcaataagtaactcatttggtaaataaattattattttttctgtctaactagagattgaatatgttgttctcaaatttgttatcagaaaataccttcaatatgaatatatattcacttacgtacactgttttttatcagaccaaatgtaaatggatggctcctttttaaacggctatctaaattggtggcgctataaaaaaattggtgggattaattaaagatttactatcataaccaaagaaaaaggacatgatccaccagagcaaaatcaatacaattttttcgaatgaaagagatgtgttatgaagat

SEQ ID NO: 44469 - DNA, 650 bp, Arabidopsis thaliana columbia
actgatgtgcctattttttcacgttctgtgagccatagcagtcatatttctggggtcagtcatctttctggggtttcagatggagactctgaagaaaaggttgacatggatgaaggaacattagcgttgaacttgctcatttctaggctatttttcgatctcaaacggaaaacaggagtgaagaattcagtgcaagcacgaattcaggtctgcacttttcatgattctgaaccttaggatgaacttagaaatttgagatgatttgatttctataacaaaacaaagatgtaacattttggttttaaacagcggttgttatctaacatgaggactccgagctacataggcgaactaatctgctccgatgttgacactggaaatctcccacctcatatacatgctacacgggttcttccaatggagatgagtggtgtgtgggcattcgaactagatattgaatactctggtgacgtggtgattgacgttgaaacacgggttgacatccgtgaggtggatctgcaacaaggcataaccgatacaaggttgcagccaaggtcttcaggggtagtcccgcaaattttgctgaaggtgttgaagattttgaaaaggaattagtcttccatgtggaaactgttaatgcaggagaagtg

SEQ ID NO: 44470 - DNA, 506 bp, Arabidopsis thaliana columbia
ggcaacttcccaaataaaaatcttgacaatttgaataatcttaaatttttgcctagccgatttggcgaattttatttatttatttatatgttctatttaagaaatatcagactcaccgaaatatttatttcttaacaaattaagctaaccgctctcaaatttttgttttgtcttatttcatacatattaaatccattgcaccaaaatttgaggactctatgtgttataaaaataatcaccgttttagactaaaaataaattaaaatctgcgcttccccaaaaagctataatggcgagacactccataataaaaccaatgcaatgtaatggacacatgtctttaaaagcaagaagtgaaagatagagaaagtttcaacttcaagcattacacattaccaaaaagagagatcacaaacaaagcatcttttctattttcatttatcaacaacaacaaaaccaaaaacttaattagtgtttctctgcctttttagtcccccacaaaatcg

SEQ ID NO: 44471 - DNA, 518 bp, Arabidopsis thaliana columbia
tactactttatagtatcccattttctcatcacaacaatttagcaaatctatgaaatttatgaattgtaaaatatttaaataataaagacttttaataagtttttattaaatttgttctcttaattagtgaaacaatagaaaacaggtaggctattgaacaaataaaaatgttaatgaattgatgatacaaaataagtaaatagttttaagcaattacataaacatcaaagcagaaaacaagatatgtaaataaagatttttattaaagacgttacagattatacgaattatttaatttcaggttatggaatttcttgaaaccaaaaagtaaattgtattacgtgaaaacaatcatcaaagcagaaaagctcttttgttaaaagtataggcccatattgtatggcccaaaataaaagccatttaatgggtttcagatttacggcgagtccccagagagtccccatctcgtggagaggatctcttcgtcgccgcgctcggaaacacacgccttcaatttt

SEQ ID NO: 44472 - DNA, 511 bp, Arabidopsis thaliana columbia
tgaaacgtttaatatataacaagaggttcatgatgtgtttatgtgtttaactgtgacatagcaaacaatcaatgacaactactaccaaacattgcactaaagtctttaactgtgacataacaagcaagtagtcgtaaattcattgtgacataacaaacattgcactaaagtcttctggtaaagtgtttagatgaaaagaaagagcagaatgaaaggttaatagtatgtgttcaagtaaattcataacaatcaactacaagcacaatcaattgtgcattaaagattgatgtagacaacctaatcaaactattaaaaacagagaaagcattgatcacatacaatagcctaatcaaacaattaaaaaacagagaaagcattgatcacatacaaatagagaaagcatttatcacttaagcgtgtgagctgcctgcattttaacatttttaaaatgatatactcaactacacaaaatctcaatgttcatattgcctaaacatagaagcaagcaaag

SEQ ID NO: 44473 - DNA, 400 bp, Arabidopsis thaliana columbia
taaaatggtttaaataaaatctttacacagtattcagatattacatctagcaaaagagaacacatcaacaaaaagagatgaactaaaacaaaaagagaactgaaactgaaaaataaatccaaaactgaaaatctgaaacataaaccaaatccaaacgagtactgaaacataaacgaaatctgttgaactaaaactaaagctgaaccaaaaaccgaatagagcacctctaaaaaaaagatttcttacattcattggatctgcaaacattacgtgaagaatcagaacaagcgtctatattgttctgctgtacatgtactaagaatttgtctctgtaagaaaaccagagaaagatcaatcttaaaacaatgtctatgtgactccattacgaaaaggttataag

SEQ ID NO: 44474 - DNA, 590 bp, Arabidopsis thaliana columbia
  unsure (1)..(590): unsure at all n locations
attggctcatatagtaaaacgcattaccgttcgtataagaatgtgtggcatcgatgtaaatgtataatagttttcttgtcatgttataacaaatgcttttgcaaaaaaaaaagattcttttgcagtgaaacgctcttgaaagcttgtggagctcctttcatagaacgacaataaacagtttcgtcttatttttgcattacgtcttcactttgtattctgttttccctttgatcatgaatatacatttcaacacataaactcttttgtttttcttttcttttgtctacaagaaggttaatccttccaaactttgctactttagtaacgagtttccagaaacaaatatttgaatctcacatcttcctatatcatgagctaggaggattggacagttaatacaattgaagtggagcacaatgaaaaaggtatagaggtagaattaaagacgaaaacaccttggctacataaatagagctgatcatgagctaacaggattggatagttaatagttagagacttagagtgggtacaaagtaganatcagaactgtggggcgaaacagagaaatgtggggagaatgaagagtgtag

SEQ ID NO: 44475 - DNA, 318 bp, Arabidopsis thaliana columbia
ggttatttcagcgatcttcatgagctcctttgagtgaagagctaataaaaggagatttaggaggagagggtggcattatatcctaagagcagcaaaattttcagagtagtgttttacagttttatgcacaagtacagggactgtggaaactgaaaagtaagggtattgaaagcagaaagaacttatgtgttgaactatggagcaagtggtgatgtaatggagaggcacgcgatgtataccaacagcacgtggcaatgtagagactgcgattgtgccagcgtagtagagtcctcgcgagttgcatccgcggggatcgac

SEQ ID NO: 44476 - DNA, 632 bp, Arabidopsis thaliana columbia
cgatcttacaggagtttggagattggatttatagaaatatggccattctgttatttctaatgacttgtatgttattgtagtaagagtggttaaaacctttttaaaaggaatgaagatttatgaagttgagtcgaaaaatatagaatttacttgatatttattttgaagacgaaatgaaaatcacggaaaaatagccatatttgtgttatatcaaggttaaagtctttatttgaggatctatagatcactagaacacacacgtcgttagatttttctaatctgaaacaaatttcattgacaaatacacgtttcgaaatcgatgttacaaacaccttttttaggacgacaaaaatgtttgcaatcaccgtctgtcgtacatagtggtccgcctttccgtgacttattcacagatgttggcggtgttggtgtcgttgggaagcaatcacacttgcttggtgactcgcaaaagcattggtgatgcagattctcacgcgccgccgtggctagtagccgtgtgtgaccatattttaaaaaacttgagtacaagattacaaagatactttgatcatacaaagatagatagttgaagtgggaaaattaacacagaccaggtgataatatgatgtagatgg

SEQ ID NO: 44477 - DNA, 646 bp, Arabidopsis thaliana columbia
tattagttatatctacaagagaccttcccaagccttcatcttcatcctcatccatctctgaacaatgctggaaggaatcagttttatcgatccctgctcagtttccaggacaaaacaaatgagggtgcagtatataaacccacaacagtgacatacaaatgagcattataccttttgacaaaggggagggaggacttaacacgacacgtccaatgcccttaaggttagagttccgtttaactgagctagggcctaacatagatctctcattagtccaattggcagtttctctttcttcggggcctgaatcagaagatcaatagaataagcaaaacatggattctgttaagaagaaaataagatcctccagtttttatatggtctaggataagaattaagaagcatactgatgttatggcctaacactggtgaatcttctcttgaaccatctgagtctcgctcatcagacgacggatcagacagaactaaatcttcatttggctcaggagaactttctcttctgaaagaataatctcttttcttctccaagaaatcctggaaataaataagtaacacaaaagtcaaagaggagtatataaagcaatatgcacttaagtatagataaaccgcttcagtttatgagggt

SEQ ID NO: 44478 - DNA, 565 bp, Arabidopsis thaliana columbia
atagttgtaaagagccaattgtgaggtgttcagactttttttgtttttctttaaatagaacaaaaaacgccaaaaatttcagaacgtttaggactggcaaaaatcttgtgatacattgtacatataatttcatttaatgtgatgaactgtgatttagctttttctttttatatcagttgaaatttaacttttggagaatatcataaattccatatttccactaaattatagaaaaataaagattttttgttgaagattaaaagaaactttgaccaaatttatgtagaagagatttttaacctttttaaacaatgagattatatcttccataaacataaagtggacactttgaaaatggatttcttacccaattctccttatttattttctaacttaacattttaggccttgatacaatatcagaatcggacatgaccaagaccaaaccagactgtccggttaaccatacccatatgcaaatcaagaaaaaacctatggttgcttactcatatgcaaatcaaccctaagaagattaatggttcaggagaaacacaaatcaaagatg

SEQ ID NO: 44479 - DNA, 846 bp, Arabidopsis thaliana columbia
tagaggatcccccagagatgaaagacaaggagaagaagaaccttatagagattgatcttagtgatttcataagagattccattccaatgagctttagccatatggtatccgattccccaattaggtaagaactgagcaacttcgattaagttcttcttctttcttcgtttcggtttactcgaatcggagctagggttttcactcgccggcgccgcagagaaatttcttaagagattaagcgagagtctgaaagcaccaacggtttcggttctagagattgctctgttaataagtgtcatcgccatagtgtcgctctcttcctctctctctctctctcaagtttcagccactgttgaagatcggcgactgaggttgaggaggagaagcacaacttttggtttattcacaaacagactatatgttataattaatttggttctaggtgggttttgttcggtttagaagattatctgaaacagaattggctgtgtggttccattacatagcattgttctgaataactaggatttttttgttcttacacaagactaaaagggagattagaaaacaaaacttttgatatatcctacaaaattgatgacccttttcgatcctcttgtgatcatccaacgaaattgacaatctttggaccttgtttctttttcttcacctcgacactattctgagctgaatcatcagaggtattgatcttcttgctgcttttgggctcttcagtgaaatcgtcttcaagatcgccccactaaacttagtgagcttcctcttggtgtagcacaaatcctgtcatttcagtcagggagatcaattatggtctttatagataaatga

SEQ ID NO: 44480 - DNA, 602 bp, Arabidopsis thaliana columbia
tggattttgacattcggaaataaagacaccagcgaggatcatcttcgtcttctgtggcggaggttaagaagcggttgaaccacgtggtggtggtgatggcggaggaggaggaagaaggggaaggtgagattgggagagatgagattagggattcaaggcggagggtctgtgatggtgagaggaagagatcgttggcttggagaaaagagtttgttacggcggcacggagagagagacggcgcagtaatgggtcttttagaccaagtttgtcggatacatttgttgggtttctgtcggattttcgttttccggctaccatagctttctccgattagtgagactgagatcaattagtttggaaaggcagcagttttagacaaaagatggactgaccaatttcgttaatagtgcatttgggttgttcggtttggttcgatccaaatcggaattttagaattttgggttattcaaaggatgttaaaatgggctgaagatttagggccgggccaagtccgttaaaacactaattaaagcaaaggagtggattttgggctaagaaacggttttgcttataaggtttcgggctaaagtataattaaaga

SEQ ID NO: 44481 - DNA, 257 bp, Arabidopsis thaliana columbia
tatcgaaagtgcactgattatgaaattgctctcatctgtccctctttaattaagtttgcaatcatcttagttttccgttttcttaatattaggtagatcggatgggtcaacgtgatgtggctttagaagatgaagttagatatcgatacactaatgttatcttgcactacagaaagtcatttattcagataattgcgcatatttaaccctaccaacctgagtggcctccatcttcgatcgaggtctccaacgtcaat

SEQ ID NO: 44482 - DNA, 637 bp, Arabidopsis thaliana columbia
ggatctcttgcaatcaaataatattttgacttcttgcactaaattgaagtacactatcaattttgcaatttaaaccacaacttatactaccaccaccaccattttgtggggatctgttttatttattataaaaatgatttttggagtttcaacaaatgggagttgatattgcatagaattagtaactcaaaacgttttcagtttttcattatactaagcccaattcttccagaaacttggtattatatccgaacaagattaaacgtaaatagttgcattaggatatttgtccactaattaatatttttatatacattaagaaaagcatcatattttggttatctatataaatgaaacataaatccaataaaaagtagtattaaacatttttccatgtctatttttataaatgatgttttaaaatattgtagaattaaatgaatatttttctgtagaaataattatgatacgtagaacaaaaaaacgaaataagtcttgtttaggattgttccttgtttgtggaatgttgttgtgtacaaaatttgatttattcttttcatatttgcatatattttaaaatagaagggaatgtcttattttgtcgacagaaactatttagatatataggcatagagat

SEQ ID NO: 44483 - DNA, 542 bp, Arabidopsis thaliana columbia
tgtttacaaaatgagaagtgaagactttgagatcttggaaccaaaaatttagaattgatatttatgtgagactgtgagtagtctaattcggacaatgaatcatcaaattcattgtatcaattcttttcaagtatttttcagaatttcaacttctagtgtttttatttattcatgaattctttcttgtttattttctatcctgccttttgaattttatcccctagctgcactttttattttgtttgtttgtttgaattttcaattttgttgcaatgtcctttccatttctctcttcggaaatatcgaaaatgctcctatcatcatcattgtcatacaccaaagtcaataactttagaagatattatccggctattaactcaggtacatttatctcagaagataacaaaaatcatgtacatttcatcttatgcatagtttgccatccacggttttgaatataaatctcagttttgatgaacacaatttgaatatcgcttgcattctcacgaacatttggcagagaaaaaacacaaaaacatttg

SEQ ID NO: 44484 - DNA, 493 bp, Arabidopsis thaliana columbia
tcgaggtcaaatagactgttgaaacttgttttgttgtaaaaagatgaataaagctcagatttatataggcaagagaaatgttatcgcaatttgttgtgttaatctataaatagagaaattataagatagatatagtataacaacaaatcttttaagttttacttgttcataattagtaaacagaacattcaaatgatattatctagtttttttttctaatgaagaaaatatagcaaaacattcgtgaaggttcgttatctcttttttttgttctattgattttcttaacaaccagaatcgattatctttagaatttaaaataaggatggttacgttaatcaaatatatatttgaaaaggtccatttaaagaagcccaaattataagtccaagttttaggcccaattcacgtatcgctatgctttttaacgggaaaatgttatgttttagaacaggtgaaacctaaatgtatgaattcaacactatcatatatg

SEQ ID NO: 44485 - DNA, 820 bp, Arabidopsis thaliana columbia
caaccaagaacattccgcaaagaagtgaaaaatcctaaattagatgatataatagagcaacagagcaattacatacatacccaccctaaaccaaagagaaattcaaccctaaattacaagaagaatgcgaaagaaagtaccttgatcatctcttcgtgaatcccaacgtgagcataggaatgaaaataggcaacgtcgaagtcagtacaaggcggaggagaagattccgaagtctccaatgacttgtgctcgccaagctggtcagaaaccctaagcacattggcgagaccgcctcgagggtcacgagctccggcgtgactgcgcttcttggctcggccaaaagagctgagactggggccttgcttgtcttccaattcaagctcgcggtgatggtctccgtggaaaccgttgctgaaatcgccgccagattgcatttttttcagttagacacagagagagactttctctgacgccgcttgacgacgacgactgttgtaatacttgttcttccaaaggagcctccttttttctaactaattaaaacccctaaaaaaaaatcatttttttctttggtaattatgtaatttctcttcagaagaatcatactttttctttgactagcacacaatttaaaccgtgattaggcaggatgattaatttttattattttaataatccagcaacttgggcttggtaatgggccaatacagcttctagcgggttacaaaaaaagggaagcagaaccccggcaagacttagtcggagagaagatcggaaactgaacgggacgagtaattactctttacacttcaagtaaaat

SEQ ID NO: 44486 - DNA, 459 bp, Arabidopsis thaliana columbia
cgacaatcatcttcaagtctgcggtcgcgtttgtttattttacatattatcaaattgtcatcctgttttaataaacttctaacaaaaaatattttcttaaaaaaacaaaagaagtaataaacaagagtaatttctttgtcaattataactaaaatttcactattttgatacttgtgataattgtcttataacagcataattgttgtctacttgtttttcaccaattcaagtgaagacagaatccgcgagtactcaacgaacatatattcacaaaattaccgatcctctactatacagagtatgaaaaccccaaaaacttgagaaaaaagactcagaagctaaacccacacctcaaaactgagtctctactcaggagtttagtttcaggctgactcaggttttagtatttgacacgacgaagctcgtggattgaccttggttaaagagctacaagaagaa

SEQ ID NO: 44487 - DNA, 265 bp, Arabidopsis thaliana columbia
  unsure (1)..(265): unsure at all n locations
atgatactatagagtgtcgtaaaaacacaataagtggtgcatggtgagaagatagaggatgtaatagctcagcatggagattacaccgattcatggtaggtgacacctgtgaggggtttacatgcaaaccatatgctcgccaatcgccgttaccacatacatagcataattaaacgtcgtgtatatttcttctgatcgntccaaacatgtcgtgaaaatatcttacaaactggttgtggcagatctgagcaatgtcttcatccca

SEQ ID NO: 44488 - DNA, 429 bp, Arabidopsis thaliana columbia
gactctaacccgttgaatctattgtttgtttcatggtaccgacttatgttatgtaatctttgtttttggcttttggaatttctaaaaacagatgaactataaatttattattatgatgtcaaagtataaaaatgaaaaacaaaaacaaaacggagggagaagccatgtctaatgatgagttaggtagcgtcgtgactcgagctctgccctatcgcccagctcttcacaatcagacccatccttcgtccatgtgcgttttcttctctctactctactctactctatcgtattaacacattctacactttaatcgcactatgtctcaatcaagtttagaaaagaaaaaaaacacaattttcacttatgtgttatgacaatagttaagtcatagttttgtataaagtttatttatgggacggccaaaactgt

SEQ ID NO: 44489 - DNA, 391 bp, Arabidopsis thaliana columbia
  unsure (1)..(391): unsure at all n locations
ttacaattgtagatataaaaaactgattgataggcattctcatgtacacaaaactctgatggtcgcaaaacaaataatgacatttgatgaaaaatcttttgcttgttcttgtgtatacaaaagttcaaatgattttgatatttttttgtccacggaccagttacacttaagtcaccaatgcactgtataacctatacacatcacttacataaactatcaacaatgtgcatatatgtgtatctctatctaaatggaatatataataatgggtgatgatgatggtttaatattatggtggtggttatggtggaccatgatatcaagctattgtcgcactgatgggtnttctatgtattcagatgatactcggtatcatagttgagtgatacta

SEQ ID NO: 44490 - DNA, 546 bp, Arabidopsis thaliana columbia
tctagcgatggtaagaactcgcggtgactcccggcgtccgacaagagctccggctaacactcgagctgtggcgagaacacgcagcgacgccggcgtgctgctccatctgctccggctacaactccaatcgtgggaagaacacgacgcgacgcacggcgtacagctccgacgataatctccgatgactccgacagcagctccgacgacgcggtgcccgatcccaaagctgctcgttctcctgtcgccgtcccgtcaaagcaagccgctgaggctccgcctcctccgtctcacgcacccgatgactcgcctgctccggtctcagatctgcctccgaagacctcgacggctcctccaattaacgatcccgcaccagacctcctccgaaacgccttttcatctcgagggcgtctgcattatgacccgtcggatcgatgtagcatccatcgacatcatcaggctgagagagatgcggcggatcatccatttggacactccttatgaccactgacgattaatttctacaagcaaggggttgagaggtcaagg

SEQ ID NO: 44491 - DNA, 535 bp, Arabidopsis thaliana columbia
tatacacctgaagatgatgtcagttgttggatttggcaagaagagaggacccaactcttctgagaagtagatgatgatgatgatcacacttcatgaagcttgaagttttactttctcgttagtatgaattctgcaatatccgctttgttatcgatatttgcttatttggtttttctatagacgatgtaattctcttgttcatttctccatcgaattgacttttgaccatacttttttcgacatatgttatttgcaaccttgatagcattctacaatcactgtttactctcgagccaagtacatgttcctcaacggattgacatttcagagttagaaacttagaattgtactgcaatgtgtttacatagatacaaaaatgatgtaatatgatgatacctttttataagtatatgcttttgaacgatcagaatcaaaggtttttactacaatggaaaaatctgtacaaggaagtttatcgagtaaaaaggatacaaggctaaaaaatttcttttagcatttgatggtacaatgacaa

SEQ ID NO: 44492 - DNA, 527 bp, Arabidopsis thaliana columbia
tcaatctcctgctcaaaaccgatgctatttccttcaaatctttgccattgttcttcttaatctggtttctccaatctagatctatgaactccttcatcgtcttgttctcttcgacgatcttcctcggcttgccttcatcaaaaccttttatatcttctccatcgtagtaatcttcttcttcttcttcctcttcttcctcctcttttaaatctggaaccagaggctttcgaatcgaactatccacccgttcttcgtcatcatcgacaaacaagtccaggagagagcttgcgcttgacctaacgtcacatgatctccgtcgcggctgatccgaaacggagactgatgcgttacgaacggagtatgatcgaatacgacggagctcgggagtctgaacggcggcgagagaagaagactgagcttctattgttacgagacgttcacgaagacaggaagcgcagaaaccgctggttggtttagcggaagggtgacggtggcatgaggaggaggacgacggcgattggtttgtt

SEQ ID NO: 44493 - DNA, 484 bp, Arabidopsis thaliana columbia
taaccccacacatcatttcctcaataatttaaaatttcatgaaaaattatgaattattgactcctatcttacttctattttgttacctactatattatccatttcatatatgttgacaagttgacaatgacggtgagctccacaacaaccaaacaaaaaagtttttcttttgttttaaagctccaaaaaactgacatgaaatcactgggattagatcttattgtctcccattaaggcaaatttcattagattttccctttttggaaataattttcttttcgatttatcaactatagtatatacctttttttacccccaaaaacccagggattatatatacgtaaattatttacatgcatgaatatgaatagatacagtaaattagttgttcaataaaatatttaaactttttgctctcatctccaatgaggacgccacccacgttctctgttcgttagcatcacactgtcaaatggcagcttgt

SEQ ID NO: 44494 - DNA, 489 bp, Arabidopsis thaliana columbia
ataattttggagcattgacttaaatatatatacagtttcacattgttacaaaaatgtggaagttttataatagaaaatacaattattgaaatgaaatggtaactaatagggaaaaaaatctggctgatatcagaatgggtcggtgtaaataaagcccgttttgtggtttaaacatgtctggcccgaagttaaaaaaaaaaaaaaacggccatgtcatgtgatccttccaacaacctacacgtgtcaatgtcagcgtattaccacgtcatcataataacggaagatctttccgcccatgcttaccggtgcgtctggtaacgtacacaacattaattacgtaattagacggcgttaataaaagtattcgaaacgccgtttctcatgcccgaatttgttacttgtgtcatcattgttttgcccgaattacgagagagttagttattgtgtagtaacggaatacctgccgttttagtagcgagaaacgacacg

SEQ ID NO: 44495 - DNA, 419 bp, Arabidopsis thaliana columbia
gtgtttgggcctctaatcacttgtgcttttcctcttttctcttatgacattcacctaatcttttataaagtttaagcattgtctaccactcatactttttatatattttctctactatatttaagttgacttttctttgtcaatcccaattaatttctctttggatcatttttactaaatatgaaacaattagtagaaagatgtaaaaaggggagagatgcgactccctcatgtttcaagaccttgactattagtatagtttgttcatataccatatgacctagaatataagttatcagaaaaaagaagaattatttaagggagacaaagatcaattgtcgaatcaagaagtcgtgaaaaagcagtgaaacaatttgatgggagagacaaagaacaaataattatattttagcactaat

SEQ ID NO: 44496 - DNA, 545 bp, Arabidopsis thaliana columbia
tgaccaagaaatggcaacagagagatcgattgctagctctaaccgcagaagaggaacgtattgtggtttacacggctaacaaaaactctttgcgtctccactaagttacctctgcattcaactctttttccatctgaagaagggttctctagcttcaggcaagtgaaactggaggtacataacaaataattgatgaattcaatattcagataaacgaatacattcatatgaagtaacaaattgagtacataaaggtttattggtacacataaaaagataataatcaaatcaaaacaataactttacaattcatgccactagacggcaacccaaatcgtgtgtatcctcacaaattagctgcaacaaacgtaaatacgctaaatcttaaaagaaaacccaaaacacaacagcaaaaaatgaacaagcacaaactttatgaacaaacaacataaaaatttactagtaatacaaaaaaaaaaaatgatcaaagagagggtcatatcacattattgagcaattgcatttggatccagattaggaggagg

SEQ ID NO: 44497 - DNA, 549 bp, Arabidopsis thaliana columbia
caaacatgaacaatctcaacatgagcctccttcagtcaaagaacaattctggaaccatcatcttgtaaagatttgagattcaagaccgggggcatttaccatcggcggctcagaggtaaaccgaggaggaagattctgaagaaggcgaggaaagagaggagactcccaccaacaaggcaaacttgaagagctttcttcttctttcttgggcttaaccaagtaaaagactggagacttgactctaaaatggattcaccatcaaggtaatacacctagcagaaacaaatgctattaagatcatacagacaagatatttttatgagatttggtgtgggattggatgtagaacttacgggtaagctgttcagaagaactagtgcaagagagacatggaatgtgcaagtcaagcttctttctaggatattcgggaaggactttccaaagaagttaaatagccaacgaggttgatatgcggttaaatgaactgaatgtgacatggcaatcagatcaccgacaaaaacaaacgtgccaagacaatttgaggtattg

SEQ ID NO: 44498 - DNA, 224 bp, Arabidopsis thaliana columbia
ttctccccatatgatcaacgatttctaattcaaccaataaacacacacatacacacaatgttataggaactgcgaaatttacataagcaaattaaaatccgaataaaggtttgtacctgtttgatcctaggaagatcagaaagtctcctatctttgagtattgatttgatcaaatctctcttctcctctacaaactccgtacacattaccttttcaacattttg

SEQ ID NO: 44499 - DNA, 563 bp, Arabidopsis thaliana columbia
tgtcttttgtccttttttgggtattatatgatttttcctccagtttaacttgtgatttgagtatcatcaaccaattgcttctattatttttataggaaacaaccattcttccaggcagcagttttcgacatggaagaatggtattggagattctaatatcaatgtccagactcagcatagccttgaaagtactcagatgaaggagcaagaaggatcgactttagaaaatcaacatcaacatgatttgaaacgcgcaaatgaacctcatttacaacacaaccagcctcaagaccttcatcgagctggtcaactctgggagaatcctcgcaggtccccaatcaactgggttaccggttagtgaaaagaatcccaccgggaatgtatccgatagatcccataatccagagagtgaatctcagtatatgaaactgcaaaagatgagtagtcaacaggctcggggagtggaacgcctgttaacctatgaatgttaacctataaacgcaacctaagcaagtccatttgctgctttgcttctactttaatggacaactcgataaagatag

SEQ ID NO: 44500 - DNA, 653 bp, Arabidopsis thaliana columbia
ggaagatgtcaagagtgtggcaaagcgctcaagatttacttctcggtgccaaattgaccaactttgcgctgaatattgtcgtcttctggaatgttctcgtcggtggtcgtggtcaccaaaccttgcagatttggtgttataagatttccttgtgcaagagagtcgacaacatttggggcgcaaacaacatttggggcacagttgagtgctccaatgttgtcttcactttctattctctcttgagtatcgctaaggtcttgtattatatatctgttgatgtttgaaaactacttggattttcttatgctttctagctaggttgtaacattaataaaattaagctgttccgcttcactattttaacactcaaatgaattttttgctcctagtaatatgtattagattcaaatgaaaatatttgtataatatagcaacatgtcattcttaatatcactttccatacagaaaattttagaataagaaataaagtttggtgtaatgttatgtcaggattatatatgatcaagccattcagttcccacttccattctagaaagtcaaataattgtcatatgtcatttggagaatgagaactaaaggtatagttgccaagtagagatgttctgatgcaaatcctgaattgttgtcagaga

SEQ ID NO: 44501 - DNA, 540 bp, Arabidopsis thaliana columbia
cataattattaggcttgttccttgaccaaaaaataaataaattatttggcttgtttttctatactagctatttttttttttgctaaacaaaatatactagctaattacttataaagttagtgagctctttatcaaacatttaaacaaagattatataaacaataaataccaacttagatgagttttttgtttttgtgtagcagaaaaaataaaaataaaatgaataatcttggtttagctggcgggaaagtaggtttgtagcagaccaattttgatttttgagagacgcttacgtgtggtgggtctgttgatcctcgaacgccgtgtttttgcttcacatgatcgtaacaataacgcttatgcatgtaatctaatacatcagccgataacatgggacatttgctcccctagatccttccaagaaccgcccatgtatatgaatatatcagctgtctatatggtctcaagtcttaaccttcttctaccaaaaataataaacatttttaaacctactaaatggtttcatatgtcattttattg

SEQ ID NO: 44502 - DNA, 475 bp, Arabidopsis thaliana columbia
catgatgattgataagcttttagctggtggaagtatgccttgtaaggcttgtccatgtccccttaataagaattcaagatgagatattgaccattattgaaatatttagaagagctagataagtaaataatcaagtactagatagcgtgatatggtagtcgcttaatctacatctcgcttttttacatttctatatggtcgattgtaggtccttttggggtcatttgaattgttttaatctctgttctattttagtgacttttgacatatgacaaatgacaaatctcacgagattttgaactaaaacatgtagaaatcgtgaagaagtgagccaagaggcaaaacgctataaagccaaggagtttggaggaagattatcgagaggactacctcgctaaggtcggccaaaagccagttctaacttttaacgtgcatgtatacagataacttatatatcttacagccctaacttgca

SEQ ID NO: 44503 - DNA, 508 bp, Arabidopsis thaliana columbia
ttcaatcgtatgttgtgataacctacatgctcataattttaggtacatatcgggaattacaatttacctggaaattgtggaattgttttgtgatattgcaccaaaatgtgaaattgcgtcaaccagtcaagtagaaatgtatgtgttcttcttgcatcaacctccagaaacatataaaagtaatatagctagctgagttatatatgacacagaacattaaaatatctcaatgtctactcttttttacctttatatatggcatggaattacaatattacactaacaagtaataaattatctatataaaaaaaagggaattaacaatgtcgacattagtgtatggagaatggagccatttattagccattagtgtatctacaaatcatatataacgtcacagtttttcttgccagaagaatgagaacaataaaatggcatctccttccgtaaaaaactcaatctttagatgaccaatactatcttgtgctaagcttataaatttcacaca

SEQ ID NO: 44504 - DNA, 567 bp, Arabidopsis thaliana columbia
tgaaatctataaatcgaaaagaagatttttagaatccttggcagggtcactttgttgagtcaagtggggacgtcaagatctttacaccataaaaaccaaaaatgctacgtgttcgtcacctgttggtttgtgtaataatgcaaacttagagaatactacaatacgtcgtcgtttgaagaccaacaccattcacatcaagcccataagtttaagggttcgttgcccatttgtttttttcactagaaaatattttattcggtttggtcctaaaagatgtctcaatcaattgacaacgaacttccgattaattttggttatgtgtaaaccggaccaaatgaagatgattcagaatggaaggtaaaagtaatcatcaaatttttgttatcccaaacaaaatctcaaagaagggattatcacctaagagataaacctactccaaaagaacttctaatctctctctctccctctcactatctctgcctataaaacctcaatttcaaatgaacaacaataacacaacagagtttaacaaatgacttcaaacttgtttagcatctggattgagta

SEQ ID NO: 44505 - DNA, 417 bp, Arabidopsis thaliana columbia
gaagactagaggatcgcccgacgattaatactatcaaaaactattgttatcaaatatctagagcaatccctttagtgtagcaaacacaataaattctttattccttatctcatgtataatatttaagaaatcttaaatcccttaacattagcatattagcataaccgtatgtagcaactttgattcggagatctcttaaattcaaaccaaaaatcaaaagcgatcctttaatgtagcaatgacaattatatgtgcgagatttacttaccgactacacttttttatcttgcttcaaatattacatgcaatttcaattccataactattttgtcaacattcactatcacaactaattatctaccatagctgaaatcagcaagagcttgcaaatagagatttaatcaaatcgaagtaaat

SEQ ID NO: 44506 - DNA, 583 bp, Arabidopsis thaliana columbia
tcaaacttgcatcgagacgatggatctacctaaagacgatggtaactcttctccattacgtacatctcattgattgatataaatcttatttaaaactctaattgctgtgtttcaccatagtcacggtggagatcgaggaggtacctttggagaagaaaaagactacgtttagaatcgagggctttcagatatcggagtggtacaaatcgttcaaaggaacaatcacccctgacatggccacgtggcaaaacccggatgtgtacaagaaactcgaaggaaccatgaccatcaactcatgtggaagacaatgactgtgaccgtgcgatattgacagtaaagtatgagaagatcaactctgacattaaagacccaggcaccatcatggacacttttgtagagttctttaaggagatggatgagtatcttgttgaagattttaattagagttatcttaactggttaataaagtggaacccatttaaagttatttatctacggttattgcagcatatagactagtagtggttacattgattggcatctgggatgtagtactcataaagattcaatatcataataatat

SEQ ID NO: 44507 - DNA, 460 bp, Arabidopsis thaliana columbia
attttaaccacagtaaaaaaaaaaaaaaacagaaaatccatatttcaactcaaatacacatttctatttttactttcttcttaccttacgtttgtcttttgcggatattctccaaaaaataatccttttagattactttcctcttttttaaaattgatatcctttcgcgtgtgattattaactcgaggtaatttctctaatcccagttaatatcacacgcggaatatcaaagatctgattttttgtaaacattgtaccaaaatcatcagaagattataagtggagtctttcgaagaagaacaaatttggtaaacatatcttttgatcgtatttccttattctgggaatctacaaattccttcaacgtaacaatttgccgattgggtgttgttttgtttctctcaattttttatttttgggggaaattcttcaaaatctgctaatgtagtaaaaaaaacgt

SEQ ID NO: 44508 - DNA, 501 bp, Arabidopsis thaliana columbia
tacaaccttcaaaatcaccagaagtacggcaaattaaacaaggaagaactgcatttgagagaaattgtatcatatgtcctacctttaggggactggagctgtgagtcagtagatcgtgtgctttctgtgtcatcactggagtggctattgaaagatgagtaatgagctagctttctcgttggcttctctaagcccttaaatgatgtttctcgggataaagtggacattcttgggagaacagatctcttgggtgatcctatttgagccccaactgccaatcttttagaatcaggaactgcctcgaatttatctatgtgccttttgctggagatctgtgtattaacagtttacttcactctctctttttcgcttggtttctgcacgcttcaactcaatttttgttagacaaaaattaaaaaaacaagttcctaatgttttgcactaacaacatgtatctttacctagtttatgcttttctgctttctcagcaaacttgcactc

SEQ ID NO: 44509 - DNA, 609 bp, Arabidopsis thaliana columbia
ctagatcagtgcatgtatggaactgtcttacatgatctaattagactaaaagctgtcctccattagaaattcacaccaaatgacgtgtgtttatatattgattaagattaccggtcaaattgaaatattaatatattcgtttatataattctttagaaaaaatgaagaaaactcactactacgcactgagaaaaaaacgatatcatcaacatgaacttcaggcaaattggttcctttttatcttttttgtttttttgtttttaccgtcgtctgaggttaattttacttgtcaataattatttgtattgctatatatccacacattcaaacttaagttgggctgaaattaaaataccttcatgataactcttagtacgtaagacatatacatatattttctttaacaaaaaaaaagaaatatacatatattttgcagagaataaaattcactccctcgtatcaaatatagatattgatacaaagcttacaaaacgaactttatttgtaaatcaaatggtgcttgtcgacgttgtcgtctttgagcgtattgattagttgtagcgagattcagtaacatttgaattatatatgcgatttttgggagatggg

SEQ ID NO: 44510 - DNA, 495 bp, Arabidopsis thaliana columbia
gttgttgatgtttcaataggatattaattggagataatttcaatagtttgctctaaaccccttagttggcaattcttttgacttccaaagttcatcatcctggtactccttgtacacaatatagtcatcacaatagttaaccgtccgtaaaacctatcaaattgaccttgtaatcaataggatcctcaatgattataaattctgaacttttattttggtaccattttgatgagtctaaacatgatctcgaaattattgctctcaaacaggaaatatttttacaggtttagaactggtttgttttgtatgtgcagaaagttttagaactgataaaatatttattttaacacaaattcatccggatatttgtatctaaatgcctttctaaaacgcatctataggtgatgataatatatagaagttttaaggatttgatgcgtataagcgtgtacaattgagtatacaactatttatatagatataattagtattagt

SEQ ID NO: 44511 - DNA, 584 bp, Arabidopsis thaliana columbia
gttgtactaaaaagccaacccctttgaagacataaattgagcttgagtttagggtttgctgcataccactctttttggtgttcacaactttgaaggtttagggaagatgtcaggggtgaatttctgcgcacgactgagactacccttgatcttcatcgcacccctgcatcaacattcagcaacaaacgacaggattcaaagatcaacttctaaagattgtcgttaagactcaagataaaacagctaaatatacttgtaatgctgagtaaatgacatatgaaaggattcagagatcaacttctaaagattgtcgttaagaccaaatccaaatcactgattttgttggttcagacataagaaaaaactgctaaacatagttttagattttgttggttcagacataagatgaaactgctaaacatatttctgtaatgcaaaggacgtgacatatttcaggattcagagacttacatgttggaccaaatccaagtcacacaaaagcttataatggtagattgtggttcaccataaggtaaactttggagagagattgagtttgttgtcgggaatgatggatgtagtgg

SEQ ID NO: 44512 - DNA, 549 bp, Arabidopsis thaliana columbia
aacattatgcatttgattgtattgtattgcttaataaatttcattagcagatacttttctggaaatgaataatgaagagaccatatgagggcgtcttagtcttctccctaaccaaattgaattattcacttaagaaaatggccaaaattactttcccaattaagacccaaagtatggaattaaccaaaaatataattttggagattctagaatacgaaacaagtagtaaactcaactaaattgtacgtatggattcctaaaaccgttcaaaaagtatacatctatgagttcttcttattctctgtacttctatttttctatttatatatacacatcgaaatcttcattgttcaacatatatttatatctccaaaagtgaagtagcttgagcacatacaacgagaaaatgtagttctgaatactaacgagaaaaaacttatttgagttaaaaataatggattcgttacttccaacattgatatcaaatcctacttaagtattcgtagtgtaaagtaccctttacatttacatagataatcctttttcagt

SEQ ID NO: 44513 - DNA, 541 bp, Arabidopsis thaliana columbia
gttaccttgggaagagactcaggttctgttttgcaactcccactgaccatagggctttgtcttgcctccagtgacagacagagtcatggagatgagcagagttttcatccaaggacagggaaaggacagccatcctccagccagcattagagggacagagtgaaataataacaaagtggctttcatgagtatccctttaagcactaaatgttccgcatgcaatttacacatctaataagtacttcccattggtattatggttaccatttgtcttatcattgatttgctaggtataatggtttcttattgcccctagagggacatgctgtcaacaagaatgtaccggtgagaatggaggcagaaagatcagttaggaggcagctatggtaagacatgatgtagcaaatcccgggaactggctactctaagccatctgcacacccccttgcccctgcacactcactcgagcccctcccctagtaaaaaagacaaaggctctcaattaggagttatggcctggaatgaggaagtgcgcctggag

SEQ ID NO: 44514 - DNA, 577 bp, Arabidopsis thaliana columbia
  unsure (1)..(577): unsure at all n locations
tactgtggaaagtaggtgtaggtgtgttgtggcgggtacggtttaacccggcccatctaaataagggtcgtattaaagcccaaaatcaaggttattgtttcagcccaaccactattacataaattgggtgaacttaacaaaaacaattattttttactgggcttcaaaaacatagaacatttttggagtataaaggatgataatgataatgacatgaccaaagctggtattagacgtcttaacactatcttgcgggttcaatttgatttccgctaaactaagaaaatcatacatcatcccaaaacctaaaattaatatttgtgtcacatcaattttgaatatatgagtcaaatcatttgtaaacattcttcacaagttatatcctatattttttataaaagagaatttcaaaaacagaaacgctcgtaagaattttaaaatatttccacatctaaccaatccactaacgaagacaaattagccataatttactagtcttaattaaaacaaaaaaggggataaaagtgtaaaaatgagcaattcaaagggcagagacaagaacaanagatgtagtaat

SEQ ID NO: 44515 - DNA, 559 bp, Arabidopsis thaliana columbia
ctcacaacatatctaaataaataaaaaaactgcaaaagagacacaccatacttcatcccttagctacgaaaatcagcataactggaacgttgatgcttattgctttctattttttatttctttttagagtgattgaccaaaatgaccggctgttttaaatggattgaactaactagttggattgatagaccaaaaaagaagcattggtggaagatattatggactctttgacggtacgaacttgtggaccgtggtagatgtagaaactattatgtgtatagagagaagaggggttggggttataaggataaggaagattaggatttgacttggaagtgtttctgttgaggttttgtgacccatcttctgcaatcatcacatgacggtggtcctttcgagaaagttccatggtagtagaaagagcgagtggaggagagatattaagaatgtattgagagtttgctgattagggtggttaggagatagaacagagttagtgccttttatatagacagagactgagggtgtaattgtcataagggcacgacattattaccat

SEQ ID NO: 44516 - DNA, 550 bp, Arabidopsis thaliana columbia
tgtatatcgggcctcacatcacataccctcgtttgattttctattttttttatttttatttttagttatgtgagctcctccactatagaagaaaacataaaaatcttctttatgccaaaaaagatggtaatacaaaataaaacgtgtttttttttcttagtgtggaatatatacttttcgtataacttttttgttaaatcaaaccaaaaagagtttttcaaaataaagcaagagtggaccctgaagatgtaaaaggcaataatggactgtaagagcgtggttcgtacgctacgtcgaggcgtatcttgcttactacacgactgaactaactactcgagtgcacccgtatatttatatacatacaccttaagctataagtatataactatacataaatacacacactgttctagagtaaaatacgtatgaatctgtggtcccacggagacctaaagggacctccccaagtaaagttgattatggcacacacacggtatcatcaactctctgtgtcctttctaaaatcagtggcgctctatggaaggaaagg

SEQ ID NO: 44517 - DNA, 399 bp, Arabidopsis thaliana columbia
catcttattggctcaagctatagggctggtattgaagagctaatgtgtatgaccatggtgcaaggtaatcaagaggtctttagtacttgcggattaatgaaaaacaaggagctgaaattctttggttctatctcgggacatcatgtgtctgtgcgtatcgactccggagccacaaacaacttcatgcctaaggatttagcaattcactttaagctgccagggaaggagacaaatctagtttcagttcttttgggtcatggattgcgcataaagcccgaaaataaatgcatgggaataggtttgttgattcaaggatttcctttttggtcaccgctcgtgagacggaagcatcagtgatattgggttaaaatggctttccatgttaggacggacgagtag

SEQ ID NO: 44518 - DNA, 1094 bp, Arabidopsis thaliana columbia
aaagcaaaatcgaacaaaaaccaaatcaccaaacacatcaaaaaataaaaaacgcggatcgatccgaaacaatagatacatgaaacaacgagaagacaagtttcttactattcaggattcattatccctcaacgagaatctgacgattaaaggaatctccggcagtcaattcagcgatcgtcgtcggccaaaaaaacgagagagacgtgaatgttcttttttttttcttctatgtggctttggcttattaagtgctctttttgtcaatgacacggttaagaaaaaagaaaaaaagggacccactcttttcgacatttaaatgcgttttggttttgatgtttgaatgctgacgtggccgagccaactcagagagatgcgtggaggacaaaagaatcaatcaatcttttttcttcttctttgtcgatttttgttcttttcttttttgattctatacaatcggagaataactatctttaggagattaaaatttcgtatccaattaatgtaactttttatatgtatgctaatattacgtactgttgtcaagcttttaattaaaccacctgtaagagaatatatattcgtttcacaaagaaagaagatggaatattttgattattatctttttggtattctgattaaactaacatataatagcttttcatcgcttgcggtgtaagtcaatgtaacgtgaacatgtagacgacttgaatatacaacatagtcacatagaataatatttcaactccagcagaaatttattcgtcaatcataacttttaaaaggcccaaagtagattatttagagctatcaatttaaggacacataaacatacatttgtttgtaacagaaactctttatttaaaccatttttggttctacattagtgtacttggacaagccttggttcgtggtggtagactggtagaaccagctttggtaatgggtttcttgttatatcaattgaatatgggcctaaatgtctaggcccataaaattagtaaatggcccataaattgaaatacacggagcggataagcgataaggctcttctttactctggtttcgagtttgggttgtcaaacatggcgacg

SEQ ID NO: 44519 - DNA, 523 bp, Arabidopsis thaliana columbia
gaaatcattaagtaatgtcttgttgagaagtttgtgtggtttcaaagatttaatccacacatcacacacacttttaatttactccaaacctttcacatttatgcatgagattatattagaaatttatattagaaataatttgtagtacgtaagtaaaattagtattaactaataagactaaaaagtaatatagttatctgggtttgcaacctaacacatcaacgatcccatcgaacaacaacagttacatgacccagggtgaatttatggttgacgtctcatctgagagcactctctgatctagtgtccttgttgtccacacctcaaacacgcccccaaaatgtatgacatgatttaacaacaaatataaagaaacatgatttaagacatgtggtgtgtggcaactctgccacatatgtcatggtgaggtagcgaaccggcaccaagtatttctcgatatgattccccatttaccattctttacggtagactacggtagactcataacttttattataccgga

SEQ ID NO: 44520 - DNA, 337 bp, Arabidopsis thaliana columbia
tttgttcggaatcgactatggatttggtcttaagagttgcggaaattcttttgtaggtctgacatagtttgttcggaatcattcttgttgctcaggtctcagatcattgcgattgtgtatgctgattctgatttattgcgtcgtgaggaagttaaggtgtttcaacgagattgacaacgggtgaggtacgattctgaatcggtcatcgctcgttcagagtcaattgcgttgcctcgcggcaagtttgattgaaattggtgagatatgcgatatggcactaagcgcacaaggtaacattgaatgtcgatgattgaagccaaggcttgagcactgccag

SEQ ID NO: 44521 - DNA, 622 bp, Arabidopsis thaliana columbia
gtgaaaggataaaaactgtcgtcggagatctaacgtcagcataagttaatcagaggctgagaaatgatcatctcatacgtttcgtcttcacatttgcaactaatctacaagtatttaatgtatcattaaacttttgtttacttgatgacacaaaataaaactaaataaagttttattgttagtgtttatatatttatactgaattatttagtaataattctgaaaagttgacaacaaaattcagaccttgaaattattaagggcattactgattttgatgtgattagactgcccatcactttattgcagaaaaatattaatgcatatatttatgctattggcatatggacaaaaataattatcgcgtttattttgattctatcccctttttttttagtttcccaaaaagttatctctaatatcatctcctctctctttttgttttttaatcctacactaagctttttgtattgtcgtattgccaaaaataacaaaagcttatggaaaacttgtaaacccataagctacctagtgtgttttaagatgagccctagactactcctgaagaagacaacatgtttaattatacattttaattcagattcatagatagttttagtgt

SEQ ID NO: 44522 - DNA, 495 bp, Arabidopsis thaliana columbia
tggttttcgaattttgaactttaatagtttttttttttagggaaactttaatagttgtttatcataagattagtcacctaatggttacgttgcagtaccgaaccaattttttacccttttttctaaatgtggtcgtggcataatttccaaaagagatccaaaacccggtttgctcaactgataagccggtcggttctggtttgaaaaacaagaaataatctgaaagtgtgaaacagcaacgttctcggtgtttcatgagccacctgccacctcattcacgtcggtcattttgtcgtttcacggttcacgctctagacacgtgctctgtccccaccatgactttcgctgccgactcgcttcgctttgcaaactcaaacatgtgtgtatatgtaagtttcatcctaataagcatctcttaccacattaatttaaaacaaagaaaacatcaaaatggctgaaaaagtaaagtctggtcaagtttttacctattatgca

SEQ ID NO: 44523 - DNA, 435 bp, Arabidopsis thaliana columbia
gagaaaagcatagtggagaatgtaccaaggggtttcaactcttcaaaatcattgagatatcgcgagcttgggagtgatgcatttggctcgcaagaatcagaaggtggctcccaaaactgaggaacactggttgaggccttgaaagataacatcaatcagatgcattacatgaaactcaaataagtaaataataacaatgaagtgtgccaagggatacgtaccatgttttgattgaatgcatgttcaaaggttctattaaagtctggagatgatttggaagctaaatccaacacttcttcagacaatatctgaaatggtttaacatagttttgggggaaaaaatgaagaaacttccctcgatggataaaaaaaatacaattatccaaaagacttacaccaagctcatgcagttcatcagttatctgaggtaatgca

SEQ ID NO: 44524 - DNA, 462 bp, Arabidopsis thaliana columbia
atccacgaggtatataagtcatttgggttccaatcgggttcaacaataatatttcggatttggattcggattacccaaagttcccaaatatcaaattttttataactaaactatttgaaagtacacaaaatatctagaaatcttgaatatttctatttaaaagtagattaaatatccaaaaatatctaaaatatccatgaaatcctaatatctgaaagtagctccaatcgtagacaaataggcgaaatgagctggagctaatcctggcggcaaatgaggaacaatcgccggtaaattatagtgagcgcagttagctgccaaatcatccattgacgaagatgatttaataatatcaaatgttgatcaatgagccgttaaagctcatataagtagttagggtgctactcattttttgaatctcttccatcacaaccttccccactttctcaataaagttgagtt

SEQ ID NO: 44525 - DNA, 507 bp, Arabidopsis thaliana columbia
tgaatatttagatcttttgacattgggattgtatttattgattatgcaattgcaaggaaatgtacgctctcgcactcaaattttttttaactggggcaataattaatttaagacccaacattacagttagattggaaattaaataaaaactatatgggtttgagtcaacgacttcttaacacaaatcactaaactaattagagaaagctacactatatgcattacgattcttattagttattaatcagtctctttgccataaaataaggagaacaaaccagaaagttaattaataaataatatataagttgtagtaactgtacttttttcggggaattcattgaaactttcaaatgtgttgcctattccatgaagatttagtacgttgatcgttaaagtaatcgtattattcagaatataatcaggaaaatatttatttccgctcatggtcatggatcacgatattttctggcaccgtcattgattattacttactaagatagatac

SEQ ID NO: 44526 - DNA, 563 bp, Arabidopsis thaliana columbia
ggctttctccatcatgagcttcctatacattaaagtcatgtcagaagatgattatgaatttttattgttgacacaattgctcgaaattaattaatgaaagattctttgttaaatgtttccttttttgatattgtcaaattatattatttccttttcgggactgtcttcagagatcccaataaataatagtaaaggtcgcgtcacattagcaaccttgaaattataaatcaaaacacatacacaaccaaaaaaaaaaaaaaaggagagcagaagaagttagatctttgtaatcagtatgagcaacgaccaggagaaagataacaaagatgagaactggacattgttttacgatatcgcaacgaaagtcatagccatgattggagccattgtaaccttaccgagtctagtctcgtggatgagtttggactcacaacgtaagatgttgaagatttcgtggatggatgctcgtattcctatcaaagcttacgaagactatttcaatgatctacgtgataaaaagtgaatctatatacatatttcttagttaaattttgttttctatg

SEQ ID NO: 44527 - DNA, 560 bp, Arabidopsis thaliana columbia
cggctgactcacgttgatgatgatgataacaaactataatgtggaaaatgtagtactagtaattttattgtcattgccactagtaattttcattttggaaaatgaaaatgtaatactagtaatttagaacatgtaattgtttgatatactctcgagtaaaacaaaacatgagatcataatgatttgcggtgcaactaataataatcatcttgtaaaaagctagggtaaaacaaaatcagggttaaaatgtagctggagtaacagctaacaaacctttatcagttaattaacatttagtaaatggtaaaagattatactaataaaaaaaaaaagctaagtccatatgttttccctcaccactatggctctggcctctgggagcatgattaggcgattagctgcatttctatttctaattatggttctataatataaatgtaatcgagaatttatttcttggaacgtggacagcctggagcgagatcttggaaataaactcaatgatagatgttgttaaaagttgtggaaccggatggaataaatatgtatctttgggttga

SEQ ID NO: 44528 - DNA, 536 bp, Arabidopsis thaliana columbia
aggtataatggttcaacaatcaaaggcaaaacagagattagatctaggatttggatgacttgcagcacaagcaacatatcctataaccaaaacagaaaattcctgcgcaagttacagaatgagtctagggtgaacttacccgtaaccgcctcgaagattggctacgactgctccggtgacagtacgaaggggacaacaataaacaatggtggctcaactgtctctctcccactcacgtggtggctgcttttgggttttgatatgctcagtgtttcttttgcaaacccctcgtcgtttttaacccaaggatgaagttgggccttaatgggctgatatttatgatttaaaaaacaaatagcccatatattgagacatggatgttacaatcatactaacgcactcatgattttactacctgcaacacatacagaacaaactgaatttgctgtattcagataagctacgaaaatggaagatacttgaacactttcgtgtgttttatcgagtagtgttgataacaaaggcgagttgctgga

SEQ ID NO: 44529 - DNA, 385 bp, Arabidopsis thaliana columbia
ttgtgcctagtattgttgttgatgtggatcttgtggagaagaagtgagctctcacgtgggaaagcggaggaggtggtgatcttgtcagcgggaaaatggacagaaagggggagactggagaaggtcaccggaacttcaccggagaaccaccgcagccacagtgagtcaccagatcttagccactgtcaccggagcagtcgttgtccatcggcgaggctcttaaggctaaggaaaccctagttttaatctatagctcgtctagaatgtctctagctttggtttaagatgtattgcttgtgctgcaagccatggagatcctagatctaatctctgttttgtttcacgtggagaaaccatgagtacctagccactgtaaacttgaacg

SEQ ID NO: 44530 - DNA, 627 bp, Arabidopsis thaliana columbia
cccgtataagagtcgtagtacatcgtgtgtgtatggaagctctcttggatatgaaatattattttatgtttttgatatttttgtgtatttttaataataaaaggtttggttttagctatgattatttactggtcaaatcgaaggggcttaagactctcctctggttacatttaaaaggaatcgaacgaccgtcaccgagtcgttgctttgcttcgctgtccacaagtacatgtcattaaacaacgtacttgaggaccaattggatttgtccgtgacgtagaaagaaggtgacagcctcagtggtaatagcacttcccttccgtttagaaaatttggataaggctagttagccagccggactcgcactattgccagctggcacgagtacaccaatgagtccgttacgcgcgaggagaagcgcgtggaggatcggacacgtgatatggagaaagaacgtgaggacgcgtgatgccgtgtgcgatgcgatgtgtggacacttttggggctaaaatagctaagtgacttccaaacgtgtctaggactcgttttggaccgtttgcacgtgtcgaacaggggcgcttttgacgtgtggtgaccagagtgatcagtgcatacgtttgtttggat

SEQ ID NO: 44531 - DNA, 267 bp, Arabidopsis thaliana columbia
cctcgagtatatataagaatatataaaatcgcaaataactcgcaaaccttgcaagaaaaaagcgaggaaccgtctataaaaccaatcaaaatgcaactaacattgcgaggaaactgcgagaagcctagcatatccctcgccgaattttaaccagttaaatcatatctgcttccataattatatttgaatccgtctctcctatttctagtaagaccctccgcacggttcgaacatgactagaaattctagatattttagggtttagtg

SEQ ID NO: 44532 - DNA, 505 bp, Arabidopsis thaliana columbia
atcagattagccacgtgtttagtgtttcttgccgaatttgaattcggtatatcaaataacattactatgatccgcacagttcatggtatttgaatttgatttacgattacaacaacgatattaacacagaactatcctgtaatttttgggatcgattagtaaattttaaaatattatttcaaaggctttatatatataaagaatttagagtataaacatagataaagcattatgtatttataaatcttatgctgatattgaaaaaataatggtgtatgtgatatatttaatagagtgcaatactctctcaataaattagtatagctgttatcactccttgtgtaaatgcgtatttcttgtacatgcatggtaagtagcttgtcctcgtatgtaccggattgtaatgtttgactacaaatcaagggaatcacgtggtaaatgtacaccacctaactgagagataataatcaaacaactgtgagtaggtggcacgcaaaagtagaga

SEQ ID NO: 44533 - DNA, 225 bp, Arabidopsis thaliana columbia
ttacctgttctgtaataaacgtggccatcgcatgaaagtgctggtacatgatggactgggcatctggctgtgtgcccggcggttggaacagggaaaatttcactgggctaaagttcaccagggtgataccctggcactcagtccagaacagttacaggcactgatccagggtttgccttgcagcgcattggacgacagcaagtggtcacaatgctctaaactagc

SEQ ID NO: 44534 - DNA, 548 bp, Arabidopsis thaliana columbia
  unsure (1)..(548): unsure at all n locations
tttcacaattcaaattcgaagatttgggtcttcgtatcaagagttgagattacaattctgttcttcaggaagtagaaagttgaagactttgcgactcagagccaatttctgggagtcaatccgatctgggtactgaaaaagcttcatactttacttactcatatgagaaattaggggctgatactataacacaccattgttgcaggtttgtgaagaataataatagtacgcaacttgtggaaccaccttctatagtcaatgatgaagaagaagagactgagccattgttacctgtggaatttactttagttgagagaaatcttgaagatggtttagttgaagagatcatattttcttctggtggtgagattgatgtttatgatcttcaaggtctttgtgataaggtagtttaaaacactactcctgtgctctgtttatgcttgatgatacttcaaaaactctcatttatggttatcttatgnggaaatataggtgggatggcaaggagacgttagtgaactagctgctgctttgaagaatagtatatg

SEQ ID NO: 44535 - DNA, 539 bp, Arabidopsis thaliana columbia
gtaaaattgatcggtatatattttgataatcgacttcaatttggtttatccctccttatgcttaattgcttcacttaccggttttgattctgacttgtattgatttgatatcgattatccggtttagtagcttcaagtgtttcccctgtgtccatgtatcgtcttggtcctgatgattttgaaatgttctgttttgtttgtttatgttaagaacagagtttgaagctttttttagagacttcaatggtgagccaaggaatggtatctcttacaaagtctctatgcactatgactccaagagtccgtctcaagaatccgaatatgttgcagaaactaaagactggatcttgtaatttccgtttcagaaatctccgtgtcttatgcacaccaaagctgtctcagtgggaaccgtcacctttcattcatgcttctgcagaagaagctgctgatatagtattggacaaaaccgcgaatgtgttcgaatctattgtctccgagagtgcagaggaagagaaagtagatatgtcagcgcaacaacg

SEQ ID NO: 44536 - DNA, 529 bp, Arabidopsis thaliana columbia
cattctgacaactccttttcttatctgtccttttttgcctttttattgggcccattttttgttttttctaatagtattgcggaaaaataatttcgattaaaaatggattatagcatgttttgtttgggcttttttgaacaacccaaaagatttcgagctacattacaccactagaccgcttccaaaatctgggcttactctttcagaggcccatttattttctttgtaagaaaagtaaattcaatttagtgctaaaccttactacatttattttgaaatcaaaattgactttggtacaatagtagatgagaaaaacttaactagacaaattatcggtgtcacggataatcttcttggaaggaagaacaattgctgccactggtttatccgggaatccaccgccttcatcgatgatcaatctcataccatcgatgtgaagttttccatggtgcccgctaacaacaacagtatgtttatcatccagctcctgaagaatgtatcagagaaagagatttcaaaaactaaggaa

SEQ ID NO: 44537 - DNA, 590 bp, Arabidopsis thaliana columbia
gtttctaatgtaatattataaatcttaataaatgcttgagagtcagagtaagctatttgtaacattaagcattttacctttaattttttaaaagatataaggcccaatagtagtaagagctcataagaccgtttgtatttctgaggtttatttcttctctcaaaaagaaccgcggcgattcgattgaaccaaccggttagaaaaaccgaaccggtgaagtggctcaaaaaatggattaaaggtgcttcacgtgggcagattgggttgtcgctcatgtgagcactacttgatatgctcgtaatcattacacatccttttacttattatttattttctcactacatcattaatctatagcactaaaacatttgacaaaaagaattatacattagattcttcatcagagccacactaatagtacagtttgtttaatctttgtgcaaaagaaaaagtagtacaacagtttgtttaatcttcgcatatgatttcatttgccgatttattatatgaactaaatacaaagttatgttctttttttttttttgagcaacaatacaaagttatgttctttatgaaaacatagtaataaa

SEQ ID NO: 44538 - DNA, 490 bp, Arabidopsis thaliana columbia
atcacatgcggaagagagcaaaaagactccgtcggaatctgacccaatcggacggtttggatttgagatgatgatgatgctttcggaatcttaagaggattgaccatcgatgaagcgagacttgttccgtatattgagcttcaaactgaaacctttggctctcacacatactttaagcttccacaccacccccactcgcaacctcctcctctgctcttcttcttcttcttcactcatcactcatcactcattcactctcacttgtcaattagggcagcgtcatacataacctaagcaaaacaaaaaccaagatgggcttttccactaacataaattgaaattaggcccaattatattcggcctcaatcctgatgttgttgtgtctacataaataaatgctgctaaaacatacgcactgaataaatctctgattactacaagtacaactgaagactaaagaaaataatctatctatctaccatattattaa

SEQ ID NO: 44539 - DNA, 577 bp, Arabidopsis thaliana columbia
tgtgtgcacatatggcgtatgaactaattcttttaaacaaagtatttttttgttttaatagaatttcaacacgttacaaccattatactctgtaaaacctatcgcaaattgaagtttttaaaaaatcactaattaatgttaggtaagaaaaccttttctttgtttagtttttttactataaatctaagagcagaaattggaagattttttccttttcatatatctttgaccacaaaatcacactttatctatatatatatatacttatcctaagtgtaaaaaacaaaggtccaagtctatcataaaatggctatcacaaaaaaaaaattagtcgtgtatactttcactcttctctttatcatatcttatgttcattgccagtctacatccgctagcagtcctggtattggcttattattatagtgtccacctttacttaaaaacatatttttgtctataataagtcttaatgtacatattggttatgtattaataggctttgacaacggagaagtttgcaacaattcaaattcaatccgtgtgacgcggagtggatagaggctcactgtgttttgtc

SEQ ID NO: 44540 - DNA, 312 bp, Arabidopsis thaliana columbia
ttgtctaaaaagttttgagactcaaaatcacataacttggactatacttctcaaatcatagcttagatatatacgcaatgagaatcattgtttcaagtatttttatctcagttatagtggagctctttagattctaatcataaattattagatttgagaaattgagctatgaaattgcaatcgtacatcggtagattatgtagatttcatagccgtagccattaattataacccttagtcctatatgacataactctctaagatacccataagcataaaccctatttcatattcctactactactactactt

SEQ ID NO: 44541 - DNA, 596 bp, Arabidopsis thaliana columbia
aataattaaaaagttcatattttatacctttttatattttttagtctatattattaaatttaattttcttaaaaaaaaatattgataattttaatactctctcaaattgttacaaaagaagaacaattgttagaaaagtttaatttttttattaaatagttcaaatttcataccaaaattatattttgtatataaccctatagtattcattttcaatttttttatttataaaaatgataatttttatatgctctcattttcattatagatcttgtttaacagtatcattatctacacatctaagaacttatagattgcatacttgcataaaatatttatcttttctacataaaaatattatttattaattataagtaatataaacaactctcaccacaacactctcaagctcattgtttgcgttggagagaggggcttcggaagtcgcgaaatatgacttacttattctacaaccaattattccttccaaaattattttattttttggtagaactaaagttatttccgtagtctaaaacattaattttcaattttttaagaaaatgattattttaatctccctcagtttatattgt

SEQ ID NO: 44542 - DNA, 462 bp, Arabidopsis thaliana columbia
tagaggacaggatccccgttataaacacatataacaacattgatataacacaaaaacgatatttaaacatatagcaaccccatattttggaaaataaacatgtagcaaagtggtccagtttatagaaaatgtaatgatattttgcttttccgcggtaattggcgccatgttcacgtgccaactgggtcacagctaaaagtttcattattcaaatctctaatatatttccctagtgaaattatttattttgtaattattcttcttatattgagattttaaatttaaaccaaagtcgtgggaacaatccaaatatcactcaactcctaccccacagcttgttttctatgataatttcaatatttttaaaaaacaaaatttggcgtgaaacgattcccaaatgatcttaaaattattatgaaaggaacataaattggtgatgaaaatctttaaatattgtaattg

SEQ ID NO: 44543 - DNA, 635 bp, Arabidopsis thaliana columbia
tccaattcttttatgtatatggaacgataatgtgttcacaattcgcttgggaaattcaagatcattccaaattgcacgaccaacaaaagaaaccaaaaacatgtcttcgatggtcaaaactatgccaacacgtgtaatttctagccttattgagacaacactttttgttaaaactttatcttcttttcctaaacaaaggatatattaatttctaagtcgaaatttttcgattagtacgagcgttacatatatggctaagaccagattcaccagaaagaaagaggctaataaaacaatcctcttgcctgacttgtgggtcactcattaccaaatcagtagaagcggtcgagctattaatccgatatattcataatcttatatgcattgattacgcttacatatgtcttcatgtgatctgttcatttacttatcttcatggcactataacctcttgtgtttgatttgtgattttaagctgaattatatatgatttttatttagatatgtgatgatacgtttgtatttggagctttttaggtttaattagtttgtacacaactcttgtacttttgggattgaatgagttcttatataacaactctatagtgtactgactatatgctagatgtatgagt

SEQ ID NO: 44544 - DNA, 606 bp, Arabidopsis thaliana columbia
cgtcaatatgttcgaaacatatcgaaacttcgcgcacttaaaacccaaagttcttggacattaagtatgtcacttgaatgtcatcaacagtaagatttatgtttcttggctcgtacttcgatttattactgctatgttttagactgatactttactaaatattacatggcttcatcaggagcttggtagagtgagaaagcattgccagccgatttttgcccgtatagctccgtctcagtttgtttcgggccattgttgaaaggacttcctgtgcgcttttttgtcgatcaatagtttagaccgctcttttttgttgccactttcttgcttaggggagtctttagatcgagttttcttcatcttcttactaagagcctcatcgcttaaggtttagttgatgcgatgaatctcgaaaggattatgcttccatgtttttttcctttttttggcatgggaccatgtttgtaggttttgcttcttgtaactcctaaactttcattttatatgatatttacattcttatcaaaaaaagaaatatatatataaaatggcttcatgctaaaggacatgatattaatcagatttttaaaatttaaagatggtgga

SEQ ID NO: 44545 - DNA, 434 bp, Arabidopsis thaliana columbia
caaattagtaaaaatttaaattattgcggttttagtttagattttcgagtgtgctctaaaactgtctcctttgttagggctatttactcttgtattttcgagtgtgctcttaaactgaccctttttgccgttttagtttccgaacttattataatttttagcagacatgtaattctaccaatttctaatgactcaaaattaattaaccagttgctaattttatatctataacaaatacaacaggtctgaatataaataatatcagtgaacatttgacatcatcaaatttgatagtgaaaaatgctaaagaagaacaggttcagacaatgatagcggtcatgcctcatctgctgcacatttacaaaccattgcatggattttaccggttttttgaaatacaattgtgatttccgaaatcattataagagattgat

SEQ ID NO: 44546 - DNA, 529 bp, Arabidopsis thaliana columbia
acataataacagtttgacaacagaaatttattttatcatattctggagacttacagaccaaaatcaaggtgtcaacagggccatactctgtttgaaggctctgggagaggatctagatcctgactgcttcccagttctggtggttgctggcaatcctttactatttcttggattgtgtcaacataatctctatctctgtcttcataagaccttcttgttcatatgggtccaaatttctctctttttataaggacaacaatcattggataagggaccaccctaatccagaatgacctaatttcaatttgattacatctgcaaagatcctctttccaaattaggtcattttcacaagtatcaggggattaagacttcaacatatcattttgggagatacaattaaattcattagacttcccagttgatatccctgctttccctttgattcctttagactattcattccattgcagtcagaatgcttcctatgtcaaatcatgttttgcttctgccaaactctttggtaatg

SEQ ID NO: 44547 - DNA, 539 bp, Arabidopsis thaliana columbia
taacattttattcgaaaccaaaagtcaggtggagacatcatctcgatatgcataatcttagagtttgttggaaagttaatttttgtgggatagctcatggagtttacgacaaaaataataagtgatctgttccacaatttaatcaaattaatagagtcacatgttttggtctaaactcgttaatttttgtttttggtcaaccgttaaacattatgtttaatactatcataagagagttcttatattggttgattatgaagtcgctaatctcgtggtttataataccattataaccagagcaggtaatcgttgaaaaataaatcaagtaggtcatctgctcaaggactttaatatcattataatcattataaaaacttctcttctagtttttgttttttcttaattttacgctttttttctaaaattgtatctataattttgttttgtcttattattatctttttaataattgactaaaaacttataaatttacgaatgttataagttcttttaatgaatgatacaacatgtttattttg

SEQ ID NO: 44548 - DNA, 495 bp, Arabidopsis thaliana columbia
ctttaggttgaacacattaccatttgacatttaccgcgttttttcggtgcttttattacacaaaccttcggctagaagtcaaacgtgttggctccgtgtgttctttactttttagtgcctgtaaatttgttatttcatttgttagctgatgaattatttcatgcgatcaaattttccaacaaaactaaagaattatatctgaaagtaaatttacagatattgaaagtaacattttcaagatactgtctaagtatacgaatatatatggcaaatgtgcataactttttttttttttggacaaaacaaattgtgcataacctttaaatctttaataataacgaaaacaaataattatttttcaataaacaatttaataatttaaaaatcttaaattcgtcaataaagagaggaacacttttattctagcctctgaatgtgcttcttctctctctcttttcttctttcatcttctctcttccttatcacttgacttta

SEQ ID NO: 44549 - DNA, 232 bp, Arabidopsis thaliana columbia
caaaaaactacataagtttattagtgaaattttcaagttacgattgtttttatacatgtgcttgaatactttataaattgtgtatatacaagtattaagtataaaacacacacacacacacaatgatacattctgacagcaaattctcctagttccttgccttagcgatagatgtggttacatgataacacacaaggcaacagttaaggctaaacaacttttgaaaaggtag

SEQ ID NO: 44550 - DNA, 485 bp, Arabidopsis thaliana columbia
ctgaatcctattacccagacagggactgagtatataatagttccaatcgcaaaagaaaccacaatggtaaaagatgcatacagcataggctctccatgggtaatcactttctctcatcgcattgaactcagccatgaaggtcgacactgtgctcagacatcccaacagaccagactgtatgctcgaagcaaccgtgttacatgttcacgtgttcaccggtttcccagcatatatacaatgaatgtctatcttttgtgatttgatctgtttggtagagagaggaggtgaggcagtttataccgatttcttcaaggtagccaatgctgccataacgcaagctgcaactacatttgcaatgagggtgccacatgggacccatctcaaattttgacctacctttcccagcccacgtccattgagtcgggctaagaaccatctgagccagacaccaggggctgcaactaagcaaccataccatagctgag

SEQ ID NO: 44551 - DNA, 743 bp, Arabidopsis thaliana columbia
aaaaccattctcaatatcagtatcacgatctctgtttgttgtggtttttgatatctgtgattgcaaacgatcccactgagttgtctaaatttataggcgcttatgcttttgttcttcttcatctttcaccaaattgacaccaaaccacattaacaaagactacatgatttcgtttatgcttatgggtctaagctacagtgtttcgtttccacacgtctaaaatcacatcaacttgtagactagtctttaaagtcgaacaaaactgagcaatactgtcaaatagtgtgtgggaaatggaacgatcatgtttttggacaaaacggtgatgcgggacttaggagggaactggttcaagcgtggcctgctcatgccactcaccgtttaagtttgactgccacaatttgaccattccatcacttccagtgctagctaaagtcatgccactcatgtcccattccatttgccaaacctgacaaggaaaaacaaaaactagtgtaatttagttatgttttatgccaaaattgcaaatcaaaccctataattaagttctcagcggaatttgatacctcgccttgatggccagaaagcgaggagaccttctttactggaagccttccttcaagatcaggagctagaccaacatgccatattcctatgcctttatgagttgcaacggcaacaacctcgtatggtctgtattcaaagatatccaaaaagaggtttagtttgaaagtctcaagaca

SEQ ID NO: 44552 - DNA, 502 bp, Arabidopsis thaliana columbia
cgttgaagctgaagccagtttcttgttgacttgacagatgaatcagaagaagaaaggagattaccatccagatcagatccaatcctggagccattgttaatgcaacaaagtgtttgctgttctgagaaaaatcctgtctctgagtcaatggtatggcaaatcactatcctctccatctgccacacacggtcggaccaccacttcacaagacgacgaacattctgcatttcccaagagacttggtaagacttgacttcaacaatatgatagctgtcacatttcactcttctttgataacagaattcagaagttccacataataccactcccttgtagtttcacagttttgacaggcaagcttctcattgattgtcataccaagtcctacttgtcttacacgaaatacaatgttgaattgtcactatctccgagtatttcccctctttaacaagcaagagcctacgtaaatgtgcagaaccatgcatctcctaggatacgtgat

SEQ ID NO: 44553 - DNA, 495 bp, Arabidopsis thaliana columbia
tcgaaatactccgaagctttgattccccatccaacgtctgtatctactggccaatctggatcttcctcttccaccaccatctcttcttcttcttcctcttcttcatcaacgcctctgtctttgatgaaattcgccttctccttgttctcaaaaacctccggattctgctcctttatggtggagaaagtacgctcgagggagcttctcacgtaatcttccacagcgtctgcttcactccgccgcccacgcttcgatttacgcgggacctttgtcggaaacttttcattgttctcggtttcagcaattggcgtaactgcttccttatttttgcgacgggaccgagtttgatttttggattcagggtctagtacggaatcagacgaaacagcggcgaacgtttcacgatccgggatgatatagtcaccgggaaaacaaatagtgggctgcgatgcatatcagagaagctcgaattcaagccggtgagaagcatagaag

SEQ ID NO: 44554 - DNA, 565 bp, Arabidopsis thaliana columbia
gtaccgggaggtctagtgccagaaaatgatcacgtgtgggtgcagcgctctgatgaaaattagctcgcagacccaaccactttgccaaaaaatccaacccaaatatgacacgtgtgcaaaacgatggacccacccagctggaatcaggggaaccaatggcaaagtcctcgttgagttcttacggcataacaatagcaaggggaggaatgaatatacatatgcaacaaacaatactcagatcggctctttttatttcatcatagcaattgttttatcatgaattttggcaagtaacaaaaatcaagtaacgcggagagtatatactactacttggtactagcttggaaaatcgcttaattttgtcaacgtctcctatatcatccatcccgttgtggggtagacaagcatttactaatatcacaaccgatcaaagtgcaaattattaatctcggtggggatactgatttaatttgacaaaaaaattgtatgatttttagcttcagaatgggggccacaacaacctaataccactggaattctttatattattttgtttttaaaagac

SEQ ID NO: 44555 - DNA, 554 bp, Arabidopsis thaliana columbia
cgaaatgaaagtagacaaagttttaggatagtaaattagtaacaatttcttataacaccaaaacaaatcgaagaaacggaaccgaaaccctaatcgagatcccttccttacacaaatctatttaagactgagtgatagggtgttaatagacactttatatacttcatgtctcatctgtcaagcacaccttattggaagattaatatgggacaatttgacaaagaagttaaaaacatttgataatacagtgtctgtcatttagtaagccaatgaatttagatctggaaaacaaaaataacatatttggacagtgaagaaagaattttgatacactcatagaaaacccgaaaggagaaaagcaaaaaagccagatcacaatctcaaactcgcttcttcttcttcctcactctcttattaggttcagttccttttcgattcttcgtgtggatcgctgtcggtagatttccgatttctttaggttctgctcgaaatcgtggtttagtgtttatctacatcgattcagaaaacggtgggtaacttgtagcggaagatga

SEQ ID NO: 44556 - DNA, 538 bp, Arabidopsis thaliana columbia
gatcccctcaaggcaggtggtgtttgatacaacaaactatggatatggatatggggaggtcaatatgatgtctatcataccagaaatcaatgatgatgcttggagtgttatggagtcaagttgggaagatcttaaaaagtggaaaatgaaaggaactcagtagtcaaaccaaaaactaagtgaactaatgatgtgaagagactctcagaattcatttccaaagctgtaagtgcatataaataactaaaacaacatctatcctgaaataacatataaataacatcaaaataactccttaggtaaagactgcatcaaacacacctatgccattttatgatggactgccttcttcacgactgagtaagaagctgagacttggtttctcgtggatcaattgagaaagctcaatgtcatttacatcacttgctgcattgattttgataaatcctccaccgcgaatgggatgctgtgttttgattcattgcctagcgttagttacggaagcttattaaagagatttgccactaaatttttagat

SEQ ID NO: 44557 - DNA, 545 bp, Arabidopsis thaliana columbia
tgtattggtttgttgtttctattggtgagagtaatatgtggtttggacttgggacaagtctccatcagaatatgggactaggaagattctaggcttatttgggttctaaattgctatttatgaaaaagaattgctgatatgcttcaaattgttttgtgcaattttattgcttgcaggtcccactaaattttcagattgagccaatgcatgtaatttcccaacagacttgagtcagaattttcttagaaggacttcaccgtatataacccaataaactcaccccgtgaaaccaaattaacaccatgaacgagagttaacgactcccaaggcccaacacatgacaataattaaatgatccaattgctcctagatgacaccatattcaatgatctaagtgaagtgaagtaaatacgaccaaaaaaagatagggaaaaagattacaggtagtagtagtatagtacacccactcgattctaatctaaagagaacaattcacttaccaaaatgggaagaaaaaaaaagaaaaaaaaggaagaagatgaaga

SEQ ID NO: 44558 - DNA, 598 bp, Arabidopsis thaliana columbia
agaatctaacgaatgagagaatgttccggaatcaaaatcacttttttaagaagtgggtatattaagattcgattgataaaatagatagagaaagaatacaaatttacctaaagagatatgggaggacgatgatgacgacgagtctgaggaagaagaagaagacgaagatgatgatgagagagcgagaggagataatagagaaaacacgaggcaccagaagagcacaagcgatggatgattatgatgatgatgatgatggaagctagtgtgatagacatgggagaggaaaggatgagatctagaggaggaagaagaaggatgaggaaccgccatggctgccgatttaagaggttgagattaaacgatgataaacaaagacagccacggaacggaactacaacaacacaaccactggctcttgggaatgagagacaagaaggagaaagagctattctttatggcttccatggctgagaagagaagagagaggaggcagctgttgggacccagtagtccaacttggacgtcagatgggcgccatataaattgatgacgtggtgatctcagtggaacttgtggaacggcacatttggggtga

SEQ ID NO: 44559 - DNA, 328 bp, Arabidopsis thaliana columbia
tgtgctctaaaggctgatcaatcgttgactagtcaaaaatcaagtcttcttccacacgaagctatgggctaagtatggattattgttttatattttttgtaaactttattattgatatgaataaatttagagaaaaatattaatgttttatatgtgttttggtttcgtggattacccttaagagcctattatgcttcttttcgcgagtatataacacattgtgttagaccagttcaaattgtgaatgagactatgagtgaatttgtcgttacataaaggagaccagccttcgtggagaatttctatagatcctacgaagtgacaatcc

SEQ ID NO: 44560 - DNA, 734 bp, Arabidopsis thaliana columbia
  unsure (1)..(734): unsure at all n locations
cagtttgggtggtattggttacagactgtggaacacgtggcatacattcagcttgggacttctttgataactcagagttccctagatgattatgttgaacaactctctgagctgttgattgcacttgattgcgctgcttttggtgtatcaacaaatgctgatggttagaaggtgcaaccgctggtgcaattgacaggctagaggtggataaaatattacatggggtcgcaggtgagctctggccttggatgctattgtctgaatgtaattgcatctgttgttgaggggatggagacaaagcaccagggaatgattttggcagttgctgtgaatgatttgaagacaagggagaaacaaatggtttagactgcagatccgtgctcgtggtagtccccacactagactgctgatcaggcctaactgaaaccgctatctctcctttttcggtagcttgatttccttggggcatggtaaggccattcaggtgtgactgatcgacagtgatgttctgatggatcatgttgcctctacccatccccttcagttgtttattcagctgttgaccttgtgttggctgccgctggtgtggatgcagtcttgcagactgctgaagttgtcgctgcctttgtattcagcttgattgtcactccagaagtacagactgaggactctaccanaccatgaagcgcaactgagattttgaggtttctgtgtccatagattatataggagag

SEQ ID NO: 44561 - DNA, 691 bp, Arabidopsis thaliana columbia
gtttcttcttctccacaaaacagtcctcagactcaaccacctgtttcgccccagccattatccatgcccccggtgtcgccctctcctaatattaatgctatggcacaacagaaacctcaaaaatctcagttggcgcttcatggtttgggtaggagtcctcagtctggtacttctggagtgaacaatcaagctggaaaacaaaggcagcgacaacttcagcagtctgcaagacagcatccacaccagcggcagccaacacaaggtcaacagctgaataaacaactgaaggggatgggtagaggcaacatgatccatcagaacatcactgttgatcagtcacacctgaatggccttaccatgccccaaggaaaccaggctactgaaaaaggagagatagcggttccagttaggcctgatcagcagtctagtgtggggactaccacgagcacgaatctgcagtctaaaccatttgtttctcccttgtcttcaaatcattcacagcaactgccaaaatcattccctggtgctttgcctccatcccctcaacaacagatgcaattacattcagacaatagcatccaaggccagagctcacctgcgaccccatgtaatattttatccacctctagcccgtcaattgcaccagcggttgcaccttctaaccatcagcatttgttgatacagcaaaagc

SEQ ID NO: 44562 - DNA, 565 bp, Arabidopsis thaliana columbia
  unsure (1)..(565): unsure at all n locations
gacttgggaaagcacagttgactttgggcaaaagaggttgtccaggtttgaacagtcgagaagattcctagaagaagatagcaaggaaacattgttagcattaaaatgttcttttttaaatttcgatgcaagcaagaagtgcgagatctgctgggccatcattatggtcatgaaaataacctatatttgagtcaaacctagttattttccctttagtagtttactattacacaagtctccaaaacagagcattttggacataatcatgagccctatccgcttccaaggagaaagaaccgatcatgtacgtatcccactcactaatatgctaatccaaagacggttaaggattcggtttatggttttgcttacaaaatatttcaacggtgagaaagagaaagacaaagtgaagctttattggaaaatataaaaaaccttgaaaatttcattattttttgtttttaagattttttttttggaaatttcagaattttcatttttgtcctattttcgtccctaaaaaaaaaaaaaatatgacgganaagaaattagcaagaaaaaagtg

SEQ ID NO: 44563 - DNA, 505 bp, Arabidopsis thaliana columbia
catgggaaaaaacaaattgcaacattattgatgttagattctatttgccagtttttatatgcttcagccttcactcaaagttaatggtcaagttttaactcggtgagaattcgtttgtattggctggttaaagtttgggaggttcgcatgatataccgttttgaaaactaagcttatggtacaaagccattcttgatttttttcttttttgctttggttttgtggtctatatttatctctctacctgtgccttgctcgaacattgtacacgtcacacgttgtactcttagtgcattcgcagaccacacgagccaaggcagcaattgttaaaatataaaatcaggtagaagcaaaggaaatcacaaatattaaaaagcgaatatgtattggttccaaacaaataaatgtattttaaattatctaaatacgctggtctcacaaatcttatctccctaaatagtcgagatgagtgtgtgagtgtccacgaataattcatattatacga

SEQ ID NO: 44564 - DNA, 313 bp, Arabidopsis thaliana columbia
aggatcccctggcctctgatagctatgcccccgcctctcttaatcaatctgtgattgtgtttcaggtaatcaaatacaatgaaacctgttactgaaatccgtcgcagtaaacgacaagcaggccttgatgttactcttgtagtgtcaatgaagaagaagaaaaggatactgtagaaagagaagtcggttacagaggagaatgaaatagataagactgcagagattggagaacaggtaattggcgatggttccaatggagaagaagatatcagagaataggatactggagaagaagaacatattggagaagaag

SEQ ID NO: 44565 - DNA, 476 bp, Arabidopsis thaliana columbia
cggtcggaaagattgagttaagttgtataggcaacgatggtaaagcggatttatatgatcggacggtttttatcgattatcaatgtgtttctcaagttttctaatcgtacgggtaaaaatatcacaacatgtgctttcttgcaccaattcaacggtccagatctagctttactggtttgacgaggatcaccactgctacataattgattgctattggctgaatacaaaccgtcgcggatcgctgaaataaaccgttcggatttagtttaggccgtcacatcaattaatgggctcacagataaggcccattgaatacaaaatccgattggtgcgttacgtacggtacattaaattggttgcaccagtcaaactttccggttcagtactaaccgaaatattggagtcgtcgtcttcttccgtcaagaagaaaccagaatttttacagagatttgaaaatcgtctccattttctaggta

SEQ ID NO: 44566 - DNA, 434 bp, Arabidopsis thaliana columbia
ccaaatacattgttgatagtatgcacatcgttgatagtatggtcggctaaccgcggctaaggatgacatgcaatgagaatgagattgaagcaattgattgcgacgtaacgtgtattttaattaggcttgttatcatcatctctcgaaggttagcgatttgtcgtcaaagtcagctttgactttgtttttttttctcttatttttctgtataccccacctacaaaagacataaacaaaaccgaccaaacttgaaacacacaaattaaaaaaagcttatatgatagtataagttatatctcatccaacttaacgtatcaactaactcaatagaaaaagaatgtaccctacccatgtcagtatcaccatacattcataatatatatatctgctcttagaatttatttaaattttggatggctgtttcgatacataac

SEQ ID NO: 44567 - DNA, 530 bp, Arabidopsis thaliana columbia
ctactttccatgatgatccgtgacgggttttctccaaaagctgttacatttactgctctgatgaaggtaataacaaagtatctgattacaattttaaaagtttgctgccattgtttctcaagaacttgctacaagtaagtattcagttcaggatgaaagaattctacacacagtacagacacataccaaattttcttgaaccatcgctcacgctcagaacttccaattttttttttggaatctagcagcttattgctgttcatttaattttaattaactaaagctgtgtatcctcttagattttgttgaatgatgcgaatttcgaggaggcactcaatctcttggaccaagcggcattagaagagatacatcttgatgtcttatcatacaacaccattttgcgtaaagcgtttgagaaggtaaagatatttgttgtaaaaacgcttaaagtaatgaaagtgaataaactgctttagtatacacataacttttgtctgcagggaatgattgatgtgattgagtacatagtg

SEQ ID NO: 44568 - DNA, 424 bp, Arabidopsis thaliana columbia
gcttacagcttctatgactatcaaagtaaatatatagttccatgtttatcatataaccatcttacagacacctaacctaagcatctagaagtttggagatagcagttttgcattcgagatgactcatgccatactttcatgtgatctagcagctgctcagatgattgtagattttaaaaataccttaccaactagatttacagaataaactccaatatagagctctttaaatgcaaggtgaaaatgatagaaaaaaactgctaaacgatgaaagtagaaacaatgcacatggatgagaataccaaccttgcaatgtcatcgccaatttctggtgtgatcctaaaacttcgccgtctagttttacgaatttctgatgtggatgaactgtttgaaagctagagaatattaaaaaattgcttgcaca

SEQ ID NO: 44569 - DNA, 312 bp, Arabidopsis thaliana columbia
ctttgttatttatttatttattagatggtagattatgattagctgaaataaaaggaggtgaacaaaatagttcatccttaaaccatctaaagtgcccctaattcttcaaaatcaaatgaggaacctctttcatattccacacttgaggtagtagatgtaattaaaaccgactctcaatttatagttgtgcgtctagtctgatatacctcgattatcatcgacatcaggtatgagatagatataggttttagagttttgacggggcacgacagtatttactagatatcttcaggtttttgcacaatagggata

SEQ ID NO: 44570 - DNA, 594 bp, Arabidopsis thaliana columbia
gagaatatcctcagcattgtgaaaacatgcttaaactatcaaattcataatcatgtgtctacttaaatcataaccatatcatagtgtgttatacgtactaacctcaagtgtcatacgagatgccctcttcccacgtttctttgttctgtttgcttcatcggattctttcaagagttggactccaatcatttgaagatgcttcttcgcgtcactgccttattcttcactaaatcttctccttctgctcgattctcagtttctggaacaaccacttcttcctcttcattttcatcatcatcctcatctccttcttgttcctcctcatcatcatcctcctcattgtcagcttcttttgaaatatcttcaatcgctttctccgattcacctgtaaccactgattcagtcgtttccttggattcaactgaagtttcaatcaagccttctccaagaaaccgacgtttccagaactctgtgtctccttcatgtagcttgattcgacatattaaatcgtctacttcttcatcgacctatatcaaaaacaaacttttttagatgtacaagtactagagatgcatgtttacagaatgaaagaag

SEQ ID NO: 44571 - DNA, 573 bp, Arabidopsis thaliana columbia
  unsure (1)..(573): unsure at all n locations
tatgaaagttgtgcaggctgtttgattgtaaacagaattataagccatgtaaatttcttatttgttaatggtatttttagaaccctccaccacaaccggaacagcatatagacactaatctttctagaaactccacggattcaagacaaaaccagaagagtgatgttggtgggaggttgatcaagggaatacttctgagaaatgactctcgaccgagccagtcttccacttttgtgcagtctgagcaaagagtggaaccctcagaagcagaaaactacaaacgaccttctcgaccagccaacactcgagcaggttataaaggaatacaatttaagtgaaaatgtttgcttcccaagttgggctgataattcaaaatagatggtccatgtgcagggaaagattatcatacttctggtaccatcagtgagaagcaagagaggcgtacaagaaacaaggatagacctgatcgtgttatgtgggccctcgtcgtgatggtagtgaggataaccactatcttcagcaggttctgtntctgttgttgacaataaagtaatagtttcatttcatggttgt

SEQ ID NO: 44572 - DNA, 586 bp, Arabidopsis thaliana columbia
ctctagaggatcccctctttgtcgggaatgtttttgaacatcttgagtatgttttcaagagatgcatgatgataaaaaaaattacatgaatgtaactctaaattactaaataagcatgtggcctaagaacataaaatatcgacccaccacttgtgaaaggttttgtcgttgggttaggtaatggtacttgaaatcttgtttgaaatagtgttctcgaatttagacctttcacgatatgttatttattattgttccttcgtttcaattcttctttctcacacaagatttgactacgattttttctttttgtatacacagatttattttgatcatataattccttggccggtcaaaaaggctcatttaaataaaagcccatcagaccttgaattcctctctaattgatgattaggtttttttttgggtaaagtaatgatgattagggtttaaagactcaaatgaagacaaaaaatcgaaacacaaacgacgacggaagagatgagctcccgaaatcatcatcatcagagtcctcgtctcctccgacgtcgttttcgtcgttaccgttcgacgtagctctgaattgttg

SEQ ID NO: 44573 - DNA, 535 bp, Arabidopsis thaliana columbia
tgaatatatgtcataataacatggcagacgtgagacgaccaataataaaaataacttaatgccaaaacaaatttatatgatgagatttatgagtagactcgttaaaatattcctcagtgaaaaagtattgcatacctcaatgaaattggtgtgaggtccataaaagagagttcaagaaagaaagtacacatatttacattttgagtcatcgaagttccattttacaaatattaatacgtcactgaaaaatgaaaatacctacaagaagatatatgtgtactgtgtaactgtaacagattgggtgtaagaaatcgagaattcttttacttcttattaataaagaagataaaaacacatgcttttatgcaaactatataaaagaaacacaaaacaaaattacattcacacatggaaccaactatacaataaaacattgcagttttcaatgggccacgagtcttaatgcatgtgaaccagtgatcagtgccacgtgttagctttaatttgtgaattcatatgatccacaatttacaat

SEQ ID NO: 44574 - DNA, 313 bp, Arabidopsis thaliana columbia
taagaacaaatgaacaatacatagaacagtttcaaaatgcatctcaatataaaatttctagatgttatataaactgaaaaagggcgtaggaatgctttttatgtttattaagtttctagatattctaactaattttcaagttaaaagcgacaacaaatctaaattcaataaatctaacaaatttaaaaggcttaaatttgtataaacaatttttaaaagattatttaaccattattatgaaggtgaattggggaaccttttggccaatcagccgttgtattggggacatcatcaatggtagacgcagagaaaa

SEQ ID NO: 44575 - DNA, 546 bp, Arabidopsis thaliana columbia
cagtatattgtcatattgtggtgtatatcaaaaaggcaaaatcttaactaaactccaatattttggaaaaatgtgaactacttccaattttggatatatcaacaaaaacaaaagacactacatcatgacaaagaaaaaaaaaaagagtcacttttgatgaccagtgatagagatgaagatttggtcgtaaagtagggaagattcaaaaattcacgactcattactatatactattaactttcctttagaagaaataacaccgtatctctccaatattttaaactatagttagaatatagcttgttaatattttgtacagcgcatagagatttccttattgattctgttgtctagtctatatatatcgttgaaaggtgtatctcgagaaacacaaccatcttactctacatttcccatttttgagactcctaaatcattttaaccttcttcctcaatcgtgaccatcaccaatgacgctacacgtcattgagactgcccgagtcaccccaccgactactcagtcatcaactcagccaacttgcacaa

SEQ ID NO: 44576 - DNA, 584 bp, Arabidopsis thaliana columbia
tgataagtgtaaactgttaagttgcctaacttttaaatatcgtatgttattttaaagaaattgttttggtcaaagttgctgtgcatgcaccatcgtattaaacgtctgattactcatttcattttctttgataattgggctttcaccgaagtaaaactaatcataaattatgattcatgaatatgaaggggtctttaagagtgcaacggattaatatctacctgtgaccttgaatcagtaacatgcaaccactggacttcttaatatggagttgtcactttgtatgatcgataatcaaattttgtctctggaggaattttgctgagtacacaatcgcaatgcatacaagtttcggtgatataatttaatatacttgtcagaattggtttatttatgaaaaattttagattcattaaatgtgttgacataagaattgataatctttattgcaatgcaccctaagacaaaatcaaaaccaaaaccttggatactctgactctgactaaatcccaaaagactaaaatacatgtataggaaaagaccatttcagtttccaatgtctgcaaaatgaatttatatacaaa

SEQ ID NO: 44577 - DNA, 592 bp, Arabidopsis thaliana columbia
cgtgagttgcatatggtgttgggatctatttgctaacaaagtcatactattaaaacgagattcatggtgtgcttacttcaaccttcactagctcttaaagtaacgtatcacgtatgcataaattactcgttctttaacttcttttagctaaatgttttaatattacaaaaaaaaaagttgtaattaaaaagcatatcttcaaactaaataaacccagtttataaaagagacaaggaagtgtgaaactaaaataataggcaggacatgaaagatagattcatttcatttttttctgaggattaattttacatgatgacactaattaatgattaacaacaacaatctctagttaaaacacacacaaacttaagagtaatagtaaatttgagccatgcgtatttttattttgaaggtgatagtacgacgcggtttcttgttttcccctcgtcgtgctccatttgctgttctctgcattctatgctacaaaacgctgcgtcccctctacaatttattcacgttacaaagaaatatatcaatactactttgtgatacattagaaaacgaggaataaatcattgaatccctacattgg

SEQ ID NO: 44578 - DNA, 521 bp, Arabidopsis thaliana columbia
tacagcttttgacatttgtctaactttagttctttataaagttctaactgcataattaacctttgtaaccttttatagattagactaattgattaagtttcttttaattttcataaaaccccattaactcgtgcatcagtgcatgtagggttcccttttctactttatattagaacaagttcctaagcaaagactttcgttttgttactttattttctagatatttttattactaatgttttgagatcgattagtctaggccctagtggattataacgcaatggttggtcccgaagatgcaattatgtccctaaaacagggattatgaggaagaaaagtttatactaatacaaaatcaaattgttctctatcatggagtgatcactttatttgtgtttaattttgtcgctttatctatctgcaataattttattgaaatgaaagtccaaaaaacatatacttgttttctgcactaacattccctatggaatctctctagaagcacacaagaaaatagagag

SEQ ID NO: 44579 - DNA, 414 bp, Arabidopsis thaliana columbia
taaagagatgaaaatatgtaaaaaggtgtgaaaacagagttgttggtatttgaatgtgcaggttggatatgcagagaagatcgccaatgtgtgaataaacgtcactgaggacacaaggcaatacgatagagatagctcttaacatgagagcacagtgtaatttattcttattctttgatacatgatgctgagcctaaaccaattcgtcgtatcttttatactttggtgtcaaaaaacaagagagagttagtaaaattcttctttactgactctcgttttaatggtgtatagtaagatgaattgtgtttcaaaattccagcaacacagtaaacaaaacagacatgacaaaagaatggttaccagtcacaaccattcaatatgactcgatctcacaccttggaaatgcggtgtagg

SEQ ID NO: 44580 - DNA, 482 bp, Arabidopsis thaliana columbia
tatgagaaaaaaaaagaatctaatctacataatcgtgtgttgctagctcgtccatttactaattgtctgatgggaatatagatgaaaccgaggttatggcatgggatttcacgggagacgtattcttctttcttcacattatttgtcggattgagcatgtgggatgacatgagtaaacgaatcagagcatcttcaagagaattagggagtgtcactttgaagattttgcagacgttcaaatatgatttagaccatacgactaattttattaattttggtcaaaacaaatagaaagatttagtgaaccgtgtctcatgaaagatttgcggttttaataaacgatctttatagcgagcccaacgctgtatggtgtggaagctcataacttatgcttgagtttttctcaagtgcttaagaagaccaatattgattgatagatgagaatgaattcgtataataaatgttttattctctaaaaagta

SEQ ID NO: 44581 - DNA, 219 bp, Arabidopsis thaliana columbia
ccttattcttaccaaaacaaaaaaaaacgttatttataagaaaaactaatcaggtttaagcccaacaagaggcctaatttcggcccaacttgtaaacggagccgtttaattaacacgcctgggtttgatgctcattgtcatctccaagacaaaagggtcatcaacaaagcctctcagtctcaggctctcagctaaccaaatcaaaattagtaataggaa

SEQ ID NO: 44582 - DNA, 450 bp, Arabidopsis thaliana columbia
gttacgatgtgaatttgcatgtatctcatgcctaatttgaatgcccttgaaacaggggttaattactggtggtggtggtttggccttactaaggggtatggcttatgatgggttccatcaagagtgtagaaaagcttttcgatgcctctcaacccgaacgtcatccaatcagtttgctctatgttttaaatttgtagcttttatgttgttcttaaaattcagatgacaactcttcaattttcatttatctcgctcttcatttcatgattttactctttattgtatgttatcctaggcaaagcaacattgaatcaattatatgtgtgggactcttgcaattgaggagagagacaatgtcaggacatataacacatatttggattggaatctttattgaagaatccttgcttgtatgaaagaggatgaactatttttgacgatattagaagt

SEQ ID NO: 44583 - DNA, 453 bp, Arabidopsis thaliana columbia
gacttgttctttatgtatatcggtgtatggttgttaggatgttgtatatcttacaaatcgaacaatcgaagtattacaattgctttccggtgctcaaagactgggctatgggtttaggcttggcctttaacggagaaaagcaaggatttggtgggcttctttaaatttggttcgatggacgattctaaattatgtaaattaatttgatatacagtaacatttttgtttttttaaatgttttctgctgaagtcaatttatcaataagtgtttcgtatgggctaatgtatcctttggatgataaacttaaagtatccaaagccgacaaaataaaattttaaaaatcattcaaattacgaatgtttttttctttctccaatttatatatgattttgggatctgttaccgtatatacttacacgtacgggacaagggcacacggtttcgctttcaac

SEQ ID NO: 44584 - DNA, 565 bp, Arabidopsis thaliana columbia
cgtatatttgtctttaatataattgtattaacactcttaacacttgtaaaaggagaatgaagacaagaagaaaataagttcttaacactcttatatcattgttagcaatagactgctgtaaacgtttgatcataaagtcaccaattaatcttaccaacatgtgcatcaagagaagcaacacgctcctctccaattgttgagaattctattgaccatataactcaggaatttggcaaatcgttgctccaaatgattcacggataaaaccattttgtgtttttgaaacactcacgctataaatcagtacatagaccagagctccaaattcttgcaactaatcaaatcaagcgaagagaatttaccagcggagacgacggtggagaaaatgcgttgatcaaaagggcttgaagcaaggtcccaaatctcattaggatgagagaataaaccctcacatatcaggtcagatccaccagatgacaaacgaagagaatatgaaccttaatagcatctcaaatgttggagagattagaaaaaaacacttttagtatcttgatgattaaatagg

SEQ ID NO: 44585 - DNA, 282 bp, Arabidopsis thaliana columbia
agacgatcattacttgattcggcttacaaaaccaatctatgtatctgataaagctgcaaacaaaacaactctggttcgtttgtaaaaagacaataatggctttataacaagtaacaagtactagttcattatgatcattgattactcagttggactgtataatgtgttattcctcgccaacttagtcatctctatcttagttgatgaacaaactcttggaatatctcgtttgtgatccatcaaggtatcgtagtggagatgtgataggggagaagaattttg

SEQ ID NO: 44586 - DNA, 567 bp, Arabidopsis thaliana columbia
taagagactatatgtaatgttgattgattggaggaatatgagtgaccacacacacaaagtcacaaatcctataatatattattctataatcttgtgatggttatgggttatgaccatatctttctttccactttcggcaagaaagcatgtggagaatgcccagcctgtcacgtgtcgtaatggggtttgttcgtcgtccaaccctacacatcccaaagtgggagtgggtttcggtttgtgttcacatttcacattttcaactttcattttctttcgtctatcttcaatttgataacaaagtttaattcttataaagttaataaaattgtcgaatgttttctttgctaagaatataaatcatatactctataaataaaataattggttttacaaatctttacatttggtttcttgaagaaaaaaaaaaactagaaagtaataaccagagtggtggttgtggatgtgtcaaacgtcagtgcaaccaaagagtcataagcacttgaaatatcatattaagtcttctagcagtgatggtggtcttaaacgatttaaattctataaatttta

SEQ ID NO: 44587 - DNA, 633 bp, Arabidopsis thaliana columbia
aacggccgccagtgtgctctaaaggcgcatcatcgccaagatgctggaagcagacgtctggttctactggcacgatgccagcatcggcggggggttcttgcacaccccggcaaaagagatgagctatgatccaatcaagacggataatatcatgtactcggcgtatgtgcaagtcatgagcgccatgtataacagtctcttcgatgatgatcggtacacgaagcccggcgcgctgacgatggtgtacgatgctttcctttttgggccagccgatgggtataagtttgagtgggaccagaaatctatcaacgaccaggtgtactggaatatggtgcaggaggggtacattggggtcgcgtgtgagccctggtgtatctaccagatctgcaaccaggttcctatcctggggttccgactgaatgatgcgctgtccggggaaaccgatgtcgcctctgaagtcaccaagggatacgtcaaagcctgggaagatgctggtggaggcatcataacgccagaaggtggttttacaccttctaccgcagcgacatcaagcgctcggtcgtcgtcccggaccagtggcgacgcatggtgcggactgatgatgacgcatggaacacgagctcgtgcagagag

SEQ ID NO: 44588 - DNA, 729 bp, Arabidopsis thaliana columbia
ctcaaaggccatcatcgtcctctatatgcaatttagtgctttatagtacaaaaccttccacttccctttgtccaaagttttccaatttaatttataaacaggaataatattatctaaataataaagtgaaaaataactatcattgtccaaataatttggtcgttgatcatgttactacaaagaaatgaaatccttagtagaagtatatatatatatttgtaacacactcaaaatggtaggtgtcgttagcccagtaagcccaatatgagatttaatgggccttgatattttatagaccaaacattgaaacattgcacgcctggtctcaaagaacgttaatacacgcgccgccggttgccgccaatccgctttcccgccaaattcgacaccataaatttcttctagtcgctttcgattccagttccactgaaaaaccacgaaagaagaacatttgcaccgtagttgcagaaggtaggtgaaggatttagctttctctatctttcgattttacggatttcggactcagtcggattgggttagcccgattgacaaagataattatctaaacgaagggtattatcgtcattcaagcattccataactaccttttgttccaagatcgaaagactaagaattcgtgccgtccttaggttataaaagttccgcttctcttcttcgcctttctctttcaccgatctgtgttgccgagtgccgactctccgtagtctt

SEQ ID NO: 44589 - DNA, 559 bp, Arabidopsis thaliana columbia
aaacaatggcttgttcattctaaatcggtgtcacaatatatgaggagggaatgtcgcatcttctttgaaataatcgttctacaactggatgtgtcctagttcacgatctcttgcaatatatgctcatttttgttgacttggttggttgacgatcaacatatctctataatgtttcattgaaaaattgatcaaacttatcgtcaagattataagatgaagaagatctcatgtttgatgaactatgaagataaatgtttggagaaaaagaagattgtttggtgaaaaggaagattgttttggagaaaagaaatatttttttggagaaaaggaagattgttttagagaataatagagagaattgtattgtttgttgtaataaagattatgtactatatatataaacacaaagtgtaacgaacaatgaatacaagtggtgtaatatcggaatatagttttgtgatgtacaattattcaaaccaatgcacaaaatcacaagcaaactaagtggtggctttgaagacttgtggtgtcttgtcaagtgatgttggcactagttgtg

SEQ ID NO: 44590 - DNA, 317 bp, Arabidopsis thaliana columbia
tttgcctttcttggtcttctaatattcttgcattagagatagtcgacatgaccaattccgctttctctatacactgagtctacttttctttcggcccacatatttatctcacgtcatttcattttccttcctctaccaattttctctattttacagtcacctagtatcaatatcttagaggcggcgagacacacgtgtcagagaacgcaactgtggcatctgtcagctttatggacgtggacattacaaccttaaaccaccattgagatagaaagcaaaacaagacaaaaacagaaacaaaatgataatgttgtctg

SEQ ID NO: 44591 - DNA, 429 bp, Arabidopsis thaliana columbia
taactctgtcaaagtgtcaatcatttatcagaaacttggtataggaagtaatgctcatactgaatttggattgtttttgagaataaacctgagaagtgctaatttacaagctaaggataccatgaggaaaactgctcaataagaggtaagtctcatggtttaactagtcttcacaaatgaatcttctggaatacattaaaaagccgagagtacgaagggcatggacccggaatctagtttcgacaatgcagcgtcaagatgtaattgataggtatttgaaaagaacagattatgttttaaccaacaacacatttgcaaaggaaaagatttgtacaagaacattctagttcaagagcaataaccaacgagcaaaaatcactttgtaccatttcaatgtctatttcaagagcaataactctgtcaatgctg

SEQ ID NO: 44592 - DNA, 562 bp, Arabidopsis thaliana columbia
  unsure (1)..(562): unsure at all n locations
cgttagcgttgagaaaaatcaaatgaaaactgagctttcatactttttatgagctgggttgtgtttggtttacaattttatatttactttagctttcaagagtttaaaaaacacttttacttaacatttgtaggagtctaggcgacttataaatataccacaaaaattacatcacacactaatgtaaaaagtttattttaaatattaacaaaatagtgtgaaatttagactctaaactatggatgatatactccataaaagtggcttttgttacgattaaaagttaaaaatatgattccctttgtttagttaggtaaaatttcctatctatcttatattttaaagagtgtaaataaatccaaaagtggttgaactaaaagtctacaagtattgtaagaaaaagggtttctatttagttatttacattgaaattctattaaagtgacagctaaaaggttaaatttagttctttaatttgaaatttgattgaaacttttccaaataaataccataaaaactanaggaagattagatataatgggactaggacattaataaattg

SEQ ID NO: 44593 - DNA, 518 bp, Arabidopsis thaliana columbia
ggtcaaacccccaacaagagctgatgctccacctcctccaacagaccacaaaatattccgcacaccgcttaaaccatttagtcttttcgcagcgtaatcatcaccaagcggtaagccaagtagctccaagacataacgcggagtgatctcttccagagtctcatcaatttgtgcacgtaaatccggtgcaaggctacttgctccttcctcctacacaagactcaataacaaagtatcaaatcaagaaagttcttataaagccaacgctcgtcaaattaccaaagcaagtcaaactacctgtaaaagcttcaaagcttcctcaacaaactcataaccagttataaaatcaggtggatccaatgccatagcatccctcgagacatcgagaaacgcaagcgccataactaaaaccacatcttgcttaaacgacttaggcaacctctccttaagcagagctcaccaacccgaagaactatctcagtctcaccaccttcttgcaatacacagagagcaccagg

SEQ ID NO: 44594 - DNA, 529 bp, Arabidopsis thaliana columbia
gcttattctcttgtccaaatgcctatgcatgtggcaagggtgcctttgcttgcttttctgccctcctaaacctaaatctgcagttccaaattttgagtccagctaatagggttctccattctgtgttggagcagtcttcatgtggggatttctcctctacttttcctctcctcactgtaacacaatatggagccaagttaatggtacctagaatccacacataagggctgaaatccacctgggattaacaagacagggccaggctttggatcttgtccagtgaaattttgagattgtgtgaggagctcctggtataaactgaatctggtggcagaatctctaagtgtaaagaagcatgttagccaagggaagttagggccacaactgtccagagccatgaatgcatgaatgcaaccccatctcctatgtgtgagttgtattactggagaaagttttcttgttgttgttttttatctgtatatctccttatgagacagagtctctgtctgttgccaggatggagtgcagt

SEQ ID NO: 44595 - DNA, 411 bp, Arabidopsis thaliana columbia
gaggatcacgatccccttttctcagtaaatattctcttctttgtttcaagtgatcaagtttcaatatcatatgcattgcacttgttacctttatttcaaaagtggttaaatccatattcagaaaacatacttataactttgtataaccaggtgcaattggaatatctttggctaattctttgatacacagttgttgaaaggtaaaaataaacaaaagttacagtaagaatctaaagtaaataacaaaactcgcatttgatggttcgcaagtcgccttgtatttaggtggttcgtagccgcttaaaaatgcttctaaccgtattgttgatccgtctcatctaaccgattcaattggtgcctcccaaactgtgttgtcactaactagtttgtataggatacaaaaccaaaacg

SEQ ID NO: 44596 - DNA, 547 bp, Arabidopsis thaliana columbia
cacattaaaacatatttaacatattatgtattgtgaaacctgacggcagtacaaaaagatatcatgcaatgtctgcacaaccaccagattcagcactcatacaaaacgaaactccttatcttttatgagaactgtttaagatcaatgcttaactttcaataataatgaaacaattgtgtggagaactggaaccaaaatgagctactggagactaaaacgcgaacagtcagagttcattacgcatctgctgattaattgagtcttaaaaaggtaagttagatttgtatacagaaacaagaagacaaaagaatagatcaatttggaaaaactattgtgtcagtgtcctcttctcatcttcctagtcatatttctatctcttcgtctatagaaaactaattcaccatgactgctaattctcaaaaagtgctatattgttaattagcatattctggaacgggattatacatacttttgacacagaggaaataggagtgttatccagagagcctcagaatagcgtggtgggtgctgagtatggtgctgcttg

SEQ ID NO: 44597 - DNA, 130 bp, Arabidopsis thaliana columbia
  unsure (1)..(130): unsure at all n locations
nnnnnnnnnnnctaaagatctaggaccatttttgcaagatgttaggttttctgagtctgggtattagtgtgctcattattaggtttcgcaaggaatttctttgtttgatccagtctatttcgagttctgt

SEQ ID NO: 44598 - DNA, 435 bp, Arabidopsis thaliana columbia
cacacttcatgcatctcagacaaccttaacaccaaactttcatgttcttttcaatgcctcagcgacattctctttcccgaccccaatttctctgtctctccaaatcgggagacggaacttcagattctgattctgatcccgaccctccaaaacccgaatgcgatactcgcaggcaagaactcttagctaggatcgccatgattcagacatcgaaggtccgtttgacggatttcttggacgagagatcagagtatctcaccaagtttgctgtagaagccactgcggagtttgacaaggttggagacgacgccatgaaagaccttgacgatgctagcacaagggtatgtatcagttgaaaacgataacattgtgaaatctcgtatcatatggatacagtcttaacctgtgcacaatacagttttagaatagtagaat

SEQ ID NO: 44599 - DNA, 554 bp, Arabidopsis thaliana columbia
tactctgaattttcagtctttcaattttttccagtaattgtttcagtttggttttgtttttttttcaaaaaacctaagttttgatagctaaagattttttaagattggttattttttcagtttagtttttaaagatttcttttgaataattattgtttttcgtttttgtttttgtgtatcgtttgattagggttatgtgtagtaaactaagatttccacccgcggtacaccgcgtggctagtctcccccacaaaactcccctcttgacagtatttcgtatagttgactaatagactttgttactggatttcattgtatgatatatgtctttcaatatgttacgtggaattacggttgacatttatatttcatctttcacacatatatcaccagtatatagtatgtaacaattatatttctacttggaatgtagatgaaattggaatgttgaatagcaagtcatatatgtagcgtttatcgctatcttataaaatataagttaacgtgttttatattgaatatttgaatgttgtatgaatgtttttgtagatagt

SEQ ID NO: 44600 - DNA, 543 bp, Arabidopsis thaliana columbia
gtttgttgtctgattcaatccaagcaatcatgtagtttgaatttgatttcgggatctctcttacactttccaccacggcttaaaagttcaaacaactaccaatgtgtaaattaccattacttcagtggcgacatattcatttgtcgacctacgtttttgaattatgtgggtctatggataatatgaacaaaactgagcttattgtagcccaatgggcaatataaaagtcagcccaaacgtaacacgcgtggttgtcgtcgaactgcgaaattcaagtttcttaccattcgcacaatgagcgcgtcgatttcggcttcagttttggactttttgtgttgaagactttgagcacttaaaggctgacattattcaggctcttgatagtaccatatgaagaagttgtcaacgtcccgtttgagctaaagcagtagttaaagtcgttcctcaccttttcattcccttcaagtttcttctgcctactattaagaacgatactacagatgcctaaatgttggaggcatgaatagatatgtttacatatat

SEQ ID NO: 44601 - DNA, 525 bp, Arabidopsis thaliana columbia
taactcgaaagagagctatgggagaattcagatctgaggaaaggttgatggtagaacaagctttgctagataatgcgagtgacgtgttgactgaactgaaagcagaaatggatagggagaaggctggccgggactcaggaggctaagctgcggatggcggctttagctcaagctggacagtctcaatctcatgctgagataatggctcgtaacccattaagggctaatgcggttggaaatcagggcagcaatattcagcttagccacgagatgggagaacagggacgtaacatgaaccctgatgagatgatgaatggatggggaaacaacagtcagagagaggacaaggaaccttcagaagatttcttgaatgatgaggagaatgagaatggagagacaggggaacaagaaaactggcgtgaagcaggagaatttgatttgaatagccggtaaatgaccaaggtgaagactatttgcagtctcatgtattagaaactggaaaggaaattacagttgctcttgata

SEQ ID NO: 44602 - DNA, 537 bp, Arabidopsis thaliana columbia
tcgactctagactgattttcagtacgaatacgaaccgcgatgaagagatggaatgttcttctttataatctaagcgtatattgtatttagattgatacttttttccaaattgaaaaacttatggagttctagtaagccaactcaacgttgcccaccacttcatcgtcatcttccattttctcttccttactaccatatttattgtctgaccttttaaaacattgaacaaagttttatagttcacatcgactatttgacctaacaatattatccaacgccgacaaaaaaaaataagaagaggctgacaacttcacgttgacactaaccatatactttatcagcctaactatacttaattacatggtcttagttcctctctaacgaacttaaatattttactctataatgtatggtccaataagaagctatcaaaccaaaaactgggtgtgttaaatgagagttatcaacaaaaaaggaggtaacaattgagagttaaggacactcacgtaaaagagtttttatgttaatagatagacc

SEQ ID NO: 44603 - DNA, 629 bp, Arabidopsis thaliana columbia
tcccgtgtgtgtgtgatcgagtggtgaaacgacagagaggggcgtcgttttgttgatttcttctgggtgaagatgtcaggtctcgaagatatcaagaacgagaccgttgatctggtattatttcgattctcttctcgcttaaattcttcgagtttttaatttcatttttagtgtttattcatcatgcccacaaagtgttcgatgatttgcttgaatgagaaatagatctgtttcgttgttgttccttgcatggtttcacgtttgattcttttacccttttttcttcaaatcattttccgatgattctactccttttttctttgatcgaaaactgaatcttaattcctcaagaacccgaaaaatccgcaaaaaaaaaaaaaacggattttccccccaattgtatctgcctcattttcgatgattctatcatggatcctatacaaaacccaaatcaagattccaactttattaattttggtctaaaattagggtaaaataacagatgtcttttaaaggttttaggtattaagccaaaaataagtagattttgatactgttcatcagaaaaagtagatctcccaaaaactcacagatgtgaacgctgaataaaagataagctttttagtggt

SEQ ID NO: 44604 - DNA, 471 bp, Arabidopsis thaliana columbia
tgcagtgaagacatcactgtacgtagatattggtagccgttgaaatgaaatgcagacaggaagatagggacagttgaatatggagacataacaatattgatctatctttatgatttggaatggttctttctgttggagttatgatccaattcctaagttgctaaagtctaatgtcgactattgacttgagctgagtttgaatttggattggaggagctaaaccggtttggttattgaaagaaggaaggattgagttcggtttaatcattgaagctgaagactcgacttggtttagagggtttgacgttgactataaaaaggactcgtcttcttcttttctgttcaatcctctgtaacaaacattgtatcttcttcttcttcctctgatcttgagcttgtaacggtgtgtgtaaaagcttgagaaactccattgatatagtgaattgctggtcagaatccagccgagacgta

SEQ ID NO: 44605 - DNA, 567 bp, Arabidopsis thaliana columbia
ttttgccgcatcagctttggcagcttcgaaagcctttcttgcatcttctgggcaattagagttgctagcttttaaagcttcactagccgccttcagagctgcttccttagcagcttgctcctacaaaacaacataattttgtatgtgatttgatctcctaggtgataaatcaaaaggaatccaagagaagatacatattatatagcctctgaaatcacctcaagataatctttgttcatttctgtccatgtgatcgtcttatagtgcgtttcctcctcgttgttgatatagccatttacctgagcaacagtaaaatactatgactgacgatcaaatataacaagggaaactgtagtgagaaaacaagactttgaaactgttgagaattcttctttatttcatgttccatattcgaggttggaaatttgacatagcatttactactaaacaattaccgacctcatcatcactgatgtcagaaaagttgtctgattcatccgaagtatcagcatgttcttcagccccatctttacgtttttcactttctctgcgacacagccaaataga

SEQ ID NO: 44606 - DNA, 517 bp, Arabidopsis thaliana columbia
gtcgactatacctatttttaaaataatatatactttaataaatttacatggaacttgcaaggtttcaaccaaccgatttattattgttttacgtggtagtttttttcatcatccctaaacttaagtggtatactatatagttttaccttttaacggttaaacaaatactttaaaatagaataatttaaaatttaatgaaaacagaatataaattaaaatattttttaccaatgcaaaaacttctacgtatcactttttttttttgattatcatgtgtggacaaataactgaaggtgcatgcttccaatagtaccgtgttattctgagtacattacgtcgacacgtggcaagctgtaaaatgggacccgcttaagtgccacacaaggcaacaaagtgaaaattcaaaaaagcttttttacgtttcaaatgtcatatcacgcttttgtattccctttgtattttgtgaccattggaattttataaagaaattcatcaattaacaaaaaattaattaatt

SEQ ID NO: 44607 - DNA, 593 bp, Arabidopsis thaliana columbia
  unsure (1)..(593): unsure at all n locations
tgccgtaaactgttgatagcacttcgtaatgacaaaaagtgagatctgttacttagacttccgacaactaaaaatctattcaccaattccaattaaagaccaaccaatccgacaatttgcaagcttatgacggacaaggacaattcaactaacatgagtttcggaaatggattaaaaagttaccgaagtagtagacatcgatgttcttcaatcccagtaagctcttcttcctcaggccgacgccgagtaatcgccgggaatctccgattgaagcgggaaacgagaaaccggtcttaggttcgacaacggattcgtctgctagagttatagatcccatggtgaaagagacgaacggtgagaggagaaggcccactctagaatcggatggctgggattcagggacgccgcgatcgcagctccggcggctgcggcgccaacggtgacggagacagcgacacgggaaatggagaatccggagaatgaagtggtggcagcgggggctgagaaaccgagaaagggaagcganacgaaaccatcagcgtctttttggtgtgagtgttgtttagtagttcactaacttttttgtttgtttg

SEQ ID NO: 44608 - DNA, 592 bp, Arabidopsis thaliana columbia
tttaatcataagaataaggttgaaaaattcagaaattggtggtttacggaattttacgttgcctccgattcaaaacgctacgttttagccttaaaggcttaaacctttttgtctgattgtcccggtttaccgaaccaaaattcgaacctataaataaataatctatttctggtttagttgctctggcctctgggaccgatacgttgaaggtggacctaccgttttagggttgtttaacacttgaaccgtccgtaagtcttgttaagctataatttgttagtcttggttagaaccggttcaatgtgtgtatgtatgatctacggtttatacttttttttttatttttagttggttttgtcatttctatatataaaaatgtaaatgttctttacttctttctattgtaatttgtaaatgttcgttgtctcggtatcctgcacaatctagcttcagtgacgatgttttagagaggctaaggttaggttggtaactggaatagaaaccggagcctatgtctgaaaccattttcaacggaagttctttaaatcgaccactttgtgaaataaatcttggagttgagattatttacatt

SEQ ID NO: 44609 - DNA, 470 bp, Arabidopsis thaliana columbia
gcatgtatgaaataaacataaacggacatgtaaggcaaataaaagctctggttacatgagaagaggtctttagtgtgcaaatataaaaatggtatatgactgaaacaaatgagtaaatgtattttctatcgaaaaacacaagaagactaggaaaataatctccggacatcacaatcaagaacttgaatagcctaacattatcctaagaaacatatgtaaatttcttggtcagacgatataggcaacttggtttttgaaagaccagttcaattgatctcaactgttatatagtttatcattctatagctaatacaataagaatgttcatagagagagagcaatacacacggatttgaatttgtagtggtctctaacttgaattggtccatttttccatgttttctctaatgaaacaagctttgacaatttcctttcacaataatagcttcgaaccaagaaattatagacag

SEQ ID NO: 44610 - DNA, 558 bp, Arabidopsis thaliana columbia
tgcacacaccaagttagagagaagagcaaaccaaatcacaactagacaagccacaaagataatctttttagaaagagctaaacatcaccatgcctttcataaaacttatctttatcaaacttcactaaaattatctgtatgtaagaaataggtatcaaacatcaaaaaccctatagttctgttctgtttttgtttattcaattcactttgcttcagacagaagagtttcagtttcagacaaggtaaaaagctaaaaagcctatttctttctgcacctaatcatctcacaaatcaatatcaacaaagaaaatatgtatgtaaatcaactgtcatgagctgattatatacagaaagctccggaatttgattactaattcaagtttcgaactttttgattcaaagacaccgaacagaacaaagagatgtttgatacggaatcagagagagaataagaaaacctgatttagaattgaagagagaggatggtgcgagactaatctcccacaaatcgcagtctccattgtcgagtggatgcttctcagttccaaaaacacagag

SEQ ID NO: 44611 - DNA, 467 bp, Arabidopsis thaliana columbia
tcgttggaaagcatggatcagtcagaaatatatatattcaccattattcggaaattgatagtcttttagaattgcctaattaagttttcgtatatatttattttatgggatcattaaaatagcaaacaattgtttccaaatttctccaaaacgaagaaagaattgattatcgacattatcgccgtgcatttcgatccaagcttaagtgctctacgggaaaactgaaaattcagaaacctgcgacgaccaagacttttgtcggatcgagagactcagacaagtcaacagaagagaaaatttctggctaaaagaacagaatcgttagtaacactcatataccatatgaccacttgtaattaataacttgacttgtctcagggtttggattttggaataaaacttccaatgttaagagacaaaactaatcagtaagagaccgttaatcttggcattttgtttgaaagaaa

SEQ ID NO: 44612 - DNA, 483 bp, Arabidopsis thaliana columbia
tggagcctaaccgtgtggattggattgctttaattaatcagttgcgagaaggaaacactcatgcatacttaaaggttagactttagtttcaatcattataatgacttccgctagattgttcttctgaaattcataatcaaatcaaactttgatgcatagttgtttgttgtattggcctacttcgatagtgttggttcttgactgatttccccaattgttcgatttaagcttttatgctaattggattgcgatggaggtcatttgatggggtggaagttctgtggtttgatttcgttacttcttttaatgggattcttgtggatagttttaagtgttactctaggtagtttgttcaatcaagatggtgggacgtggatgcagaggtctaacatgggtttggaagagatgatttttaatcaatttggtactggttttgatgttcaacaggtggcatatggtgcctggatgaaaatcgttcacgct

SEQ ID NO: 44613 - DNA, 263 bp, Arabidopsis thaliana columbia
gccagtaaaggatgatggagcaaaattctagcgacaacgcttattgcagatttcatcaagattttgtcagaagggatagtattagtgggcagcacaagtaagtcgaggacgttgctcaaactcaaatgctaaaaactcaagaggtcacataggaagttaggagtgtcattgatggatgaatttgtgacttgtgagcattatatggtataactaatccgtagtgggccgcggaatttgagcccatattgaacgtatctagttat

SEQ ID NO: 44614 - DNA, 635 bp, Arabidopsis thaliana columbia
cctttttttttcttgtaacatatttgtctttctttcaatctaaaaaagaaactgtaaagcatggaagaataatttctggaacattttacccacaagttatcaaatacatcaaaaaatgaagctcgcttttctgccatactatttctccatcaaaataatttgaaccaaacctaaatattgtgtggccgtaataagttgtatatataggttgataaaaaaaaacaataattagtgagaaaaaacaatttaggacgttttaaaaattattaagataaatgggccttttctatacaactattgggcccatcactgtcgtaactgattttatgtacgaagtaccgtttataacctcgctattattcggaatttacgattaaatcaccatcttctagatatcgatcaaacaggcacaactaaattcaattatctcattagcttcttccaattcgaaaccctaacaaaagccctaatttacgaaatacgccgaatcgttgacgagaatggagtttgacgaatacgagtacctggagaagacggttgaggaaggagctgggtcgaataagacaaaggaagagagtgggacgagaggagcgagaggagttcagaaagagagaaggaggagagaggcaggggga

SEQ ID NO: 44615 - DNA, 428 bp, Arabidopsis thaliana columbia
gagatgctaaaaaaggtttgcatctgtatttatttcatcatgctgcataagaatttttcatcatcactcagggatttgcgatgcactatatcatgaagttcctgagaagcattacatgtcaatgatgtaactgattgatatgttgatacgttaacctctttttacagggtgggcagtttgctgccattaacttggaatctcgagcagctctgttagcagcgaacgatgtatttactttttccatctctcgttttttttctgttcttttctatctctctattgcctttgagctatcttcattacacaaactacatttcgcctaacaatgtgattacagtgaccttaaattgatcacagggatttgcaggggctgcatccagatacattggcttaaaaacagcgatgcaattacttggccccatgtaata

SEQ ID NO: 44616 - DNA, 547 bp, Arabidopsis thaliana columbia
caaaaaagagaagaaaaacaaagagcatacctaactatggaaatctaaaaaaacaaaaataaaagaaagaaaagagaaaaagaaaaattagaaacatagaaagaaggtatagaaagatttacaaagtgggttataagcatgcaaagagaagagggtcccctcctctcctttggggcagatgatcatcaattcccaccacaatcactctcactaaatttccttttcattcttttccccaatttgcattgcagctggagataagtcttaatttacatcacctcctttgaaacaaaaccatcaattttttttcgatcgctaccggcatttggcaagttatgttttcttgatagaaaaccttagcttttctctactgtctagtcaataagttttgattcagattttttttacttgctcgtcttgtttccaacacttgtgtatgtcttcagctattctctttgcatccattgatgctccactaatcccacgttttgtgaaccgaccgcgtatacccacattccctctccatcctcagggactcttgtattgg

SEQ ID NO: 44617 - DNA, 134 bp, Arabidopsis thaliana columbia
ggagtatctcataagactaatcagaggaactctagtttaacaaacacaatgtacaatgcgtggccaaagaaggataatgaaaagcaactctacatcacggacgctcaacacaaacaatactaagccaaatcttc

SEQ ID NO: 44618 - DNA, 249 bp, Arabidopsis thaliana columbia
gttttttaccttgttatgcgtaatcaattgaacccatttcttaaattaattcaaaattatcaatttgccacgtaattgttatttacataaaatattaaatatcttcttcttttttgtaaaccaaaatattagaatatcttcaaacatatgaattcataaaagtcccgagtagtttttgtatttttcacaacgagagagagagagatcgagtataatacattcaaaagtcatcgggctatatgtggtata

SEQ ID NO: 44619 - DNA, 429 bp, Arabidopsis thaliana columbia
catccgaaccagattcggaatcggaaacggcgtcgagagtcgtcttcaaaggtgatgggttttcagaggaaacgtcatcttcatcatccgaagaagagtttcgtgcgatttctttaccttcttcgtcgcttgaagaagcactcggcggatcttctaacggattgaaacgtctcgacattgttttagggtttatgggactttggagagacttaagaggttgaaattgagatttttgctttgctgccttcaccacttcgttcttagggtttatatatattgaacaaagtgtctctctgttttccaaaaataaataatcataaaattattggaaaacgtataaaattatttattgtttttcctctctatctgcatgacgtttagatttccgatttccttccttaaaaatttggaaattagctatattgacca

SEQ ID NO: 44620 - DNA, 469 bp, Arabidopsis thaliana columbia
cgaattcaccaactgtttcaaattgaaacaaaaaaagaatgaaacacgaggacttcccgggaggtcacccatactagtactactctcacccaagcacgcttaactgcggtgttctgatgggatccggtgtattagtgcttttatgatcgcatccgttagtatatgcaatgcaatcgtatatattcttatttatagacttgatgaaccattcgccatgggttccacccgctatgtaaggataccccatctatttttaacgagctttgatgcatgataaaattctataacaatgcttgaacaagtaattctgggtccgaaatatagcccaaatcaccaatatgcccgagagagtacttaaaggtcataatttgggatcgagcaaaagtcaatggagaagttcctttgtcctgcttctatcgtcggagggctctctatgggctttacgagaaggtatcgcatgccaattttg

SEQ ID NO: 44621 - DNA, 309 bp, Arabidopsis thaliana columbia
  unsure (1)..(309): unsure at all n locations
cgtctcagtctgaataacccctcgaattctcaaatcttcgaggctggggcaaacttaaagagacttcttgcgtttgtttaggtttcttgtgcagactagttcctgggttttctgtgcacctcgctccagatgatcgtagctagcattgagaatgattgccagcggaggntgngctctgtagataagatccggaaccattgacaaagcacgactctcaggatcacaatcggcttgttggctctgcanattgccttaacattgttcgtggcgtatgctccgatgtttaatactgcaagaattatatagcac

SEQ ID NO: 44622 - DNA, 599 bp, Arabidopsis thaliana columbia
caaataattttaaggctttcctttcaaagaagtgacttattaatgcgtacatattgatgaacaataaataaaagtcagtaagtatatttaactaagaagacttgagaatatgttttaacaattatgaacttgagaaagtatttttgagacaacttcgatatatttgtactactgcagcagtaaaagtgtaaaacaaacatagtttcagaaaaatttgagaaaagttttctattgaagtgttagaaatagagtaaacaggtcaagccaattaaactaggtttataaaaatgaacgagcaggtaccaacaccgaagtcaactgaaaaactgttttattttttaaaaacttcttatctcaacgttcaatggaccagcaactatttttctacgaattgttgaatctctaatttttttaagaatcattttaaaaatatatatgtagtactgaaaatacaatggtgtctctgtatataagacacaggagaaagaggaagaagatactactgataatggttttagttatctctttacaaattaacattaattagtgcatatatatgctctttcatcgatcatgatacttttataagagtgctgagt

SEQ ID NO: 44623 - DNA, 341 bp, Arabidopsis thaliana columbia
ctctagaggagcgccgcacggaaaagaaataaaccctaatagcctatgaatgatgcgagagagtatgaaagggaaagattgatcgtgaaagggaagatgaaaggagagaagaagaacccggagatggaggccgaaacgtcgctgactcgctgagaagaagagatcatcaccaccgtgaaggtgaagtattgagagagggagatctggtttacgacactaaggagaggtagagatgacgaagaagaaaacgcagccaagataaagtgaacaggagagaggtcatcggaacctcaccgaagtaccaccacagccaccggagtcatcccttgcgacgaaccgaa

SEQ ID NO: 44624 - DNA, 452 bp, Arabidopsis thaliana columbia
ctttatcgttcacattgattagagttaaagttttcgtcttcatttttgctacttcgcttcaaagagaagagagatcgagtgtttccatatccctaaacgagaagagatatcgagtgtctcaagattgatctgtttgacgacatgggtatcaatctttcttccctctaattacaaagtttatagctttattagataaagcgtttgtgggtattatattgagcttagaaatgtttggattttcttaagatctaaggatttgttcattatttgtagcaatggactctaatgcatatggtatagaattttaattctaattcaactgatatctcctgtattagtttcgatggatcagtgtgttaactttgttgagtatacgataataatatgttaagattttggatcatgcttttactcttgggagaacgatgcttatgtatttgttttgcctttgt

SEQ ID NO: 44625 - DNA, 546 bp, Arabidopsis thaliana columbia
caatgccactgattatataagaaacctttcttgcaatggtttttgtgatctgaaactaactagttctctctcgtggtactttaaaaatgcaggattttgtcgaattatttggggactcgctcaatgttggcagttgtatgcaggaattatgaaagtgttacggctttagaggcttatgataaccatggcaacattgatataaatgctggccttcattgccttggctcttcgattggaagagagattggagacagttttgatgccatctgccttgaaaacctgaggtactaatttttgtttgaatcttttacatgtattacaaatttggttaggtacacttcatctgcagtccttttctaattgcttcatttgatgacttttaggccgtatgttggtcagcacatagctgatgatctgcaaagaaggcttgatcttctgaaaccaaaattacctaatggtgagtgtcccccgggtttctcggatttgcagtgaatatgatacagatcgatccagcttacttgctctgtgtcacatcatatggatatg

SEQ ID NO: 44626 - DNA, 159 bp, Arabidopsis thaliana columbia
agatttttagaagataaatataacagtttggaaaatataataaaaataagataagtaaaatttaggctggtaacaaaaacagggaatctcgggatatatattaattaccaaaattaaagatcatatgttaaatacttgccttacaaatttgtctcatat

SEQ ID NO: 44627 - DNA, 390 bp, Arabidopsis thaliana columbia
  unsure (1)..(390): unsure at all n locations
atattttttaatgttttcgtttttgtaatatcaaattttaattaagttaatataaaatgataatgtgcacaaacttttgaaataaatatcacattaattaaaatttaaaatacataataaagcttaattaaacatttaaaacataaaattacaacatttaaaccaagaaaacattgtgacgaagatgcaattagtgaaatttaaatgagattaagaaattctattatttaaaatttatcgattgtaattttatattaattaaattaacattaagcagttctaaatttaactagtatttctcaaactattaaaataactattactaagtattagtatttcatactaccccactcccaaaggtgggtngtgtgtgagatttagtgtttatgg

SEQ ID NO: 44628 - DNA, 467 bp, Arabidopsis thaliana columbia
aatttagattcaacaaacaacggtcatccaaagattaatatacatatgatcatgacaataaaaaataacagtcaatatttttctttataattccgtttactagtgaatcaatacaaaataattaagtaaataaacaatgataattttatcaactcagtcagcaaacgatcaattcatgattaaaaatattaagtttgttgtataattgataaaaacatacgaaatggtgatttcagcatgttttgcaacgagccaccaaagttctcaaaatataaaatattaagtatatatgtgtatgtatgtatatgcatgcgtgttaccttgaaaacgtcttcactataggagccaggagagatctgaagaggaatgtaatctccttcgttgaaacccaaatcctagcgacgttcattcccacgcggaggcttgcggagcgccgtcgtgacggtagctcttcctttagatgccgt

SEQ ID NO: 44629 - DNA, 567 bp, Arabidopsis thaliana columbia
  unsure (1)..(567): unsure at all n locations
gagaatatccctatgtcgcctagctagtcagaaaaaaataaaaataatacaatgttagaacttttgttgtccttagattttgacaattaattccctttacatgatacagtatcaattatgggagaaagaaataggagaatcttctggcaacacgtaatacttaaattgttcatctttctattagtaaaactaaaaacaaaacctaacctaccaaaccactactctccttgacctcgactaaaatcgcaaacttacctataacttctttctaggtaaaaggcaaccaaaaatattaattcaaatcaaccaccatacactcccgattcatatcgttaaattttttacacgttagcctgctagctaggatactaaaaataataagattactttatactaaggataaaaatgatctactaattttttagagtgaatctaccaattanaaagttttcaaaaataatgtatattgacttatgtgcctggattattacccatttttgggtgggaactaaagattttattccaattttctcaaactctataggtatattttttccacaaaaatga

SEQ ID NO: 44630 - DNA, 486 bp, Arabidopsis thaliana columbia
taagcgttcactaaaacaatttggctgcaaatacagatgcaagctaaggaccatacgtttggatctttttttttcttaaactatattaaaaattcaattcaattggacttgggcgaagactacagcaaagaactaaaagtctagttacaaaattggtgaatcggcatttaaccggaaaagaaaagaagctcgccgcttgtcaatagatgccaacagaccgaccggagccttacatccggcgggttcgagacccaccgcttggatctcttgtcatgttcttgtacccgttctaactatgatttaatgtaataaataaagtgcatcttttgtaatgtttttgcttaaattttcctcatggttttatgtgataaataatgtgaattgtccaagtaatgtaataatgaataaatgaaacattgatgagtatcaagtgtgtggtgttttaatggctttcaaggtaactagtattataccgcccaattgtta

SEQ ID NO: 44631 - DNA, 1106 bp, Arabidopsis thaliana
ctctccggcgatgcttcaacaacaacaacaacaacaacgtggtggtggtgttgggtttcatcatccccatctacagggacgtgcacctacgtcgtctttgtttcctggtattgataacttcacaccaacgacgtcgtttttgaactttcataatccaacaaagcaagaaggagatcaagattctgaagagttaaactcggagaagaaaagaagaatccaaacgacgtcggatttgcatcaacaacaacaacaacaccaacatgatcaaatcggaggatatacacttcaatctagcaacagtggatctacagccaccgcagccgccgcgcaacaaataccgggaaatttctggatggttgcggcggctgcggctgcaggtggtggtggtggtaataacaaccaaacaggtggtcttatgacagcttctattggtactggtggcggcggtggagagcctgtttggacgtttccttccattaacacggcagcggcagcgttatatagaagtggcgtttcgggcgttccaagcggcgcggtttctagcggtttacattttatgaatttcgcagcgccaatggcatttcttactggacaacaacagctagcaacaactagtaatcatgagattaatgaagatagtaataataatgaaggaggaagaagtgacggtggtggtgatcatcataatacacagagacatcatcatcatcaacaacaacatcatcataatattctctccggcttgaaccagtacggacggcaagtttccggcgactctcaagctagtggatcacttggaggtggtgatgaggaggatcagcaagattagacacacacaaaaacattttaacggtgggattttctgccgacggcggtagcggtgacggcgttcggcggctgtgtaaaacttttgttttcaccgttaattttttttattttctgtagtaattttttttgctaagtaaaaaaaaaaaaaaaaacacgtgagattttctttttaattttgatttttttacttgattttaaatttgatttttcttgtgagtgagtgattaaatagtacacgagattttttatgtcaggttttttggattttgaggagaata

SEQ ID NO: 44632 - DNA, 576 bp, Arabidopsis thaliana columbia
atcagtgatgttgaatctaagtgtatgacattgctagtttttgattgattgttgaaatctctaggcttgtctttagtaattgatcgatttgagggttttaaggagaaaatggtttagggtttattgattctgtatttttgtgtaacgcagctcttatggatgaccatggtggttctgatttgagcctcgaggatctcatggatgagtattcttctcgacccgcacaaatagctgaatggttatggtgtattgaatatgtagccaaatttgtcaaggatctaagctgcttactcggtaactcccgaaactcctcttacggtttttgtgtattttgagagcaagtgttaatatgaagttccttgtttcagatttgatgaacattggttatcagtactctgatgactatgggaagaggattaatgaagtcctgtctcttagagtcttggagttcatgtttgatccaagcatgagcgatgctaacggtgttggtgttgcttctgctttagaggaaaaagtggagtttgatttatctttgagtaacggtgatgttctcagaggaattctgaaagaggtatg

SEQ ID NO: 44633 - DNA, 354 bp, Arabidopsis thaliana columbia
ctctagtaaatgccgccaatgtgctctaaagaatatataatatattatacaaagtacaataatagatttagagagtggaatacatatatcatcaatagtaaataaataaatttggattcatatatagcacagttatacacataaacagacacacatagatatgcaaaatcatgatttcattgatagtgcaaggaactagtcacataggagtcggaattattgtatcaatttaaaaataaatggtgttatatcaggtgatagataaaacatgttcagaagttaattatatgtaagttattagcgtcaaagggcatgttattggaggaatttacttaaagctattgtaaatataag

SEQ ID NO: 44634 - DNA, 512 bp, Arabidopsis thaliana columbia
gctacatattattccatcataaaaagaaaattaatgtgtgtgtaagtgtgtttgaaataagtcaatatcttagtacagtaattaactaattatacgaagaagaactataagggtaaaaacggtaattacagtatttggtcagccatagttattcccgctcgtctcttgaaaaaaattcaaaccggtaaaccattttggtcatacacgttacagtaacacggtggtctggtcttcaataataaccacgtcagcagcatacagtaaaaactactttaaatgtttttttttattctcacccaagaaaataatttatttttgttttgtcgttctccttcctaaataatttttcaactaccacaattaatttaaaaattaaaaatagagtatatttggaaaggcacaaaaaaaagaaacaaattcaaaatctgaaatttctcagcctcctcgtttcttcacccagaggagagagaaatctgaggaattcgatcttcgcttaaagaagacgaaacaat

SEQ ID NO: 44635 - DNA, 601 bp, Arabidopsis thaliana columbia
ccagtgtgctgtaaagaagagcgaagaacaaaaaatctctcttttgaaaattctccttttgcaaatcattcaagtgaagcacaatcatcttcttcttcttctccagcttcatcaatctcttctagactttttgcgtttacctgaaaaactgttttgatcgtaagtatctgattgcttcgatgtcgctgtcgaatcagattcccgtttactctcgatgaccctttgcttcttcttccactttttttccacagttttctgataactcttctcagatgagaagttctaagttacttcttctcaagttcttcttcttcttcttcttcaatctgacttcgcttggtacagtgtctttctattattaattctattgctaaaaaaaaaattctaggttaagtttaaatttcaattttcaactcttattacgatgttgggttttgctaatttcgttgattgatcaaacatagttgaatcttaaatgttatgattttgaatttctggttgttttttttctgatgattttttttttttttttttgatctttaagagtatcaagttgatggagcatttgttggatcatatgggataaattatggaaggatag

SEQ ID NO: 44636 - DNA, 327 bp, Arabidopsis thaliana columbia
caagtagcagcttcaaatgaactgaaaataagacatgttgcaacaccaaccatgaaacactatgattgctcaaggaaacaattgttatgattgatcaagacatgttgcaacaacaacgccacgacatgtttgaccaagacatgaaaactattcttatgattgatcaagacatgttacactactatgattgatcaagaaaacaattgtttcttatgcaactctatatcaccaagacacatgtaatggccccgttctgtccacattcacataaagcttcacacactggttcagcgataggcacaagaacatcgttcctataatcaagct

SEQ ID NO: 44637 - DNA, 327 bp, Arabidopsis thaliana columbia
caagataacaatgtatggtgataatgatgatggcataagcagtgatgaggaaggtcgtaataaaacctataaagctgtaaattagaatacgacaatagccagcatctaccaacgtggacgtcaataagcttatagaagctgcaaaatcgtttgtcatcggagatgctctaggcataacgatgagtagcatggcatcaattaatgctggatatcaagatgcgggtcagatgttcagagagccttctacctcaacagttgcaactacaactgctccaagttcgtgcatctgctcctgttgatgaagttgcaatgagctcatcgacacag

SEQ ID NO: 44638 - DNA, 581 bp, Arabidopsis thaliana columbia
ggaataaggaaacaaagtgctgcagagacagaatggtcatagttactaaatctccgatcttgaaatgtctatttaaaattaaaaaaaaagaaagacttgttttgtgtgctttttgataactgatggatcagacttttgaatagagccgtctttttattggacttcttatatcattgtggtctctcgttagcttagttatgttttgtgtttcacattggcgtttatcaattacatgaatgaacctaaaacgcagttcacatcctcaacgatcatgtgttaattcatatttagaaaatttaatctcaagtgattctacaatggagacgtttattacatacgtgctctgttcttcctttctcgcgcctgcacatggtgtagaaaacactgatagaacgagctgggcctatctagtgggtttggtgtattgggcttgtattaatgaattgggcctgtcttctcgattttaattaaaacaattaggcatttaggctctctctcacacacccatagtcgtcttcctcgatcagtctctctctcaaattgcaaaggtttcttcgaggactttggcatactggaggttt

SEQ ID NO: 44639 - DNA, 519 bp, Arabidopsis thaliana columbia
ggtgccattgtaagagggctattgttttgacatgtcattcttgattctcagatttcgattttcatataaattatagcatactatttttgttgcataatatttgattattttcttactttcaaaaattttggtggtcggccataatatgtttttccaataaataaataaaaaaggtttatctatgtaaggtatattccttgaagtcaaatccaaatttaattacaggattatgtttcaaaacgttatctaaaacttgatccagctatttcaagagtgaactactttgtaacttaattaggactatttagggtaattgttttttcaattttacaaaaatcaaaagcaaagattaaaataatactaaagggttagtgatagaaactttgttgggatcaaaaaccttcctttgctacttctctctctgctctgtgtttatttatatatttcctataaacaaaataaaaccaaaaccgatggattggttcttcgctttacaatcccaacgcacttctctcattc

SEQ ID NO: 44640 - DNA, 487 bp, Arabidopsis thaliana columbia
taataattcaatagttgtagttcgtcacattttcatggtattgaatatagtaaaaacaaaaatgtggaaattaaataaatctttatacttttgtaataagacttttaggagttcatggaagctgttaccatcttctgtgaaaaacaaatatataatccttaaattcaacccttctaaattcttattatccaattgcgcacttagtaggagttttgccattggtcagtggaccacattattctctacttcgatacgtttggaagtgagacttttattttaccaactaatggagattcatgcaaagatatctattttactacttttttttgcttctgcaaaaccaaaaaaggttcgataactttattacgtcagattcttattttaattttatcataaacagaagacacaataatatatgatttaataaggtccgtatctaatgtaggaaaaaaatcggataatcgtaggtttatagaaccatatgtta

SEQ ID NO: 44641 - DNA, 537 bp, Arabidopsis thaliana columbia
gtatgtaaataattcacgatgacttgttatgaaaactacttgattagtattaacagaatttttgcacatttatatgtatattatattaccccccacctgaattatagttgacaatataacaaatttaacggataatccgtaaaatttagcgtgtttatattgagatacagaaaagtggtgtatcatatctttctttcttttagttagtcattttattttttatcaataattttaaaatgttatatactttaaatcttttggctaaacataattaattataagtttattttatatagacaattaataggtttctgaaaaattggaactaataacgcatatcataaacataggggtaacatttgtgtcttatgcctttaattaaaatgactttataatgttttctgaaattatttaagactaattgttttttagtagaaatagcaaatatcataagccagtgcatttgtgttatatgccaaagatggctgtttttctttataagttaggatttgattccagatttaaacttgtactaaa

SEQ ID NO: 44642 - DNA, 609 bp, Arabidopsis thaliana columbia
gtagtactagaatgggtgacctaccgggaagtcctcgtgttgcattcctcaattttattttattttttgtttaaactgtatgactctaaaacgtttaaaccatgaggccaaacttgtcttgtgatacctcttcggaaagtcgaaagggagccctccgacgaaagaagcagtacaattggttgaggtacattgttttttttactccaaatgttaacctttaagtacttttggggtctgatctgtgatctgtgcaatattatgggtcaaaacttatttgttcagacattgtttttgaataatgttcatgtatcaaagatcgttaaaactactagagttttcaaaaaaggatcaatatgattgcattgcatgaactaacgaatacgatcatactatccatcagaactctgcatctaagagttcttgggcgagagtagtactaatatggatgacctctcgggaagtcgtcctgttccattcctctttgtttttttttggttaaaactttatgactataacttttagatgatgaggcaaacttggcatgtgatcctgttgagaagccaaaggagccccaacaaaagcacaggcaatgggcgaggtacatttagt

SEQ ID NO: 44643 - DNA, 556 bp, Arabidopsis thaliana columbia
aacattttacttgtcgtgatgaattttgatagagataatcatcagagaaaacaaagagaactaaataaatgcgtataagatatgaataatatacagaagaggaaagaaataccgaatacgtaatggatataaaaccaaagtttcaattccaagacggatacgaacaagttcgagtttctctcaatgtcccactcacatgccccattaggtttaatttgtctttctgtttttttcttttttctttttattgtagcctttgtttgattgaagtcgtacgaggctcaaacttggttcgacacatggcgctaactgaattgcgagacgattgttttctaaaagttacaaaacacaactcaagatttcctgaaccagaagtcttctcttatggatctctctcactggtcactgttaattacagagacaacgcatataataaaaacaaagtcttctttttattcttttgtcttcaagttctaagcaggaaacaacaaacattttaaagaacaaagcagtgaagaaacacgcttcctgttttgatgagcagatacttagatgg

SEQ ID NO: 44644 - DNA, 522 bp, Arabidopsis thaliana columbia
  unsure (1)..(522): unsure at all n locations
aatctagggtttgagctaaaactcaaaatttaagaaccaaattacctcggggggagaatcgtcccgtagaggatcaacttcgcgaacaatctttgccatgtcgggaggagaatccgaggaagcaaaagaagaagacgacgaagctgctatcttgtgccatgccttgtctacaactacaggacacttcatcaaccaaatcgatctatcacttttctctatatcgagattatgaatatcttccatcgttactctctctcttctccaaagtcaatcttctttctcttgtcgcagtttctttacttctcttgagctctgtctgatcttccgatttcgttttgacttaaaacctaagtcttcttactttgaagcggaggtgaaaaaaaaggaatcccatctcatatgacccgacccgttactatatacgtggaccgacttgggcgttaaaanaaataggccaaggcccatattattgtaagaatccagtttctttaatgggccgtttgttatctcgaaaacatatat

SEQ ID NO: 44645 - DNA, 475 bp, Arabidopsis thaliana columbia
  unsure (1)..(475): unsure at all n locations
tcaggaggcacatgctcacttgacacaaatgtcacctaaacatatgcacaaatagtcatcactaacaattcgaccatataccacagttgaagtctaaaaatatgttacaaagtcaacatctagattcagatccaaatgtagtatagttctgttgttgttagtttcttaatccggacgtacatctaaagtcaacatcaagattcagatctagatgcagtatagttcggttgttgttagtttcttaatccggaattgttcgtttttcaaaccaatttttgcatcaaaaatgttcgtttcaaatttgttaaaaaaatctaaacccaatcttgaatcatcaagcgacaaaaaacgtcttaaattacaaaatttgtgatgaaaattatatcaaaaaaaaaaagtcaaatgatttttttctgcganaattggacggaaaatacctacatgtatacgaagaaaaagagaaagcagctatata

SEQ ID NO: 44646 - DNA, 516 bp, Arabidopsis thaliana columbia
tgcccatgttactatcttgtaggaagtcacatttttcgatctcattgctcaaacaaaatcagcagcttttaaattactttacatggtgcaagtagttcactggtacattagagacgaattgttttggccatatgaggttaatgcaataaatgagctagaacttctttatgtttttctgtgtgctcagtgacctgagattttatttattgtttacaagattgccagccatttcaagaaaataactgcttcagagattacattttaatatccaaacttcaaaaataaaattcaaggcaattgaattacatgaaatcaaggaaccttcattttgcacaaaagtacttactgccatttgtgtgccatagttagcatgtccatcggcagagtttcggctgcggagaaatctcaacaaccgaaaaacttgcaagtctccagatcccgccatgacctacacaagtgagtcctccatataaagctactgactgagttgaaaatgaaattgttggcaggaacttt

SEQ ID NO: 44647 - DNA, 973 bp, Arabidopsis thaliana columbia
ccaatcatattgacaaaccaaacattaacttcaagctttcatcaaagaatcaagtacaccagagtcaagtaatgagataaatcaatcaaactgcacaaaccaagcctgagtttcaaactttcttcagggaatcgagcagacacaccagatgagaaatcagatgaaccagcaatgttatcactcattgattaggtcacagatcaatctccagtaaacccaatcaaattgcatacaccaagctttaaacatcaagcagacacaatataaatgagatcaatcaataacacatgacaggtaaatcaaagaactcgaatttaagatcctaagcataagaaagttctatactttatcactcacctcgagagagccaaacgaatgtgaacaattaaaacccaattcgctaaataaaaaacctcaattcatatttttgttttgttaaaatcgtaaatatacccatacacatggagcaaaacaaacaaaaaaatcaaaaatttctaggttttcagcagatcgaatcaagagagaagacaagcttaaagaacacagatcagaagagcgaatcgctgatcaaaaattaacgatctaaaagaaaaaaagatgagtttttttttaccttagacgaatcgcgaaatatgtcgaaacgaaattggaagagaaaaaaataagaccttataggtatttatacatgtttcttacgcggtacgatttccaaaaaagatatatttttatttttagtccttatattttactatgaatcacaggctacacttacgttgtcataattaacaatgctatccaaattttcagcacgaaggacgacacatgtaacactaccaatgttttgcttatagattgaatattttcatgaattgtttgttgtattttttcaaatttggaacggtttttaatttctcgtgggggtgtttatgaaatatattaaactgtgggggcaaaggagagaattatgagaata

SEQ ID NO: 44648 - DNA, 831 bp, Arabidopsis thaliana columbia
ccgttagtgtcctccatggtcgtgaccaccttgtcctccgtggccaccgccataaccttcaggttacacagtttcatcactctctggtgtcaccatgcctacctaaaaataaaacattatttcaaagatattgttaagcatgtacttgcaaaatgttaaatgtgcgttcaataaagatttgaaagtatattaatgcttttttcaaaaaaggtttacaaaattaaatatacgttctaaacataatatgcacacaacttctaaaatggtactagaattccacacttcacttaagtgatgtaaatttatcaaatggtactttagtgttggatgattgaaatgtataaaatatttttatcatatatcttgtttctttaaagtagattgaaatgcatacaataattttacttgccgcagacacttcggagatgacgagaagaactgcgaagagacccaacagaagcaaagccttgaaaataagggtaatgtttggaagatgattatatatagatctcttacaaccgacgtaagttaaaactaaaaacgaaaatattaaaagtctaattctatcaggaaaagatcagaacataactgcgacaattaagaagcttctactgtctttatctccttctctgatgatcccatctctcgtatcggtttcatatatttaatgaacttcgtaagtgttggtgtatgcaaaacctcgatagtctctaggtttttagtaatgatttttttttatcctgcaggcttttggtaacttttaagaaaatatcccgtacaatatgaatatggatataatactgttacaagaagacttgaagagagtacatg

SEQ ID NO: 44649 - DNA, 546 bp, Arabidopsis thaliana columbia
tacatactgtttcttgtagaaaaccgacttttatttccctggcccaaaggcatgtcatgggtccattgaactaacacgcaatgtggatcataactattcactagcctacgtggcctttttcgaattaaattatgtcttaaaatcttgtgttatttgatctttttgtaaatcatgattaaaggagattttacaatttggtattattaaattaagattaatttcttaaaaaaaacaaaggttactcaaaattacatatcttagaaatatttgtatactaagtctttttaaataaatttcaaaagaatttcatgaacaaattattagaaacaaagtttaaagtatactgcaaatatactccacacacatgaatttttaaaagtaatatcagatttgaaatattgaagattgtaaaacgtacgattaactttatatccaagattaagtggtcaatttgttttacgtttttagatatgtttgatatatttcaaatgcacctttggagtttggaccatacgcatattgtttgataatttgatacacatagtt

SEQ ID NO: 44650 - DNA, 301 bp, Arabidopsis thaliana columbia
atcatgaacagtaaaagattcgataaagatgtgttggtgaaaaaagacatgcagagattaaaacagaaccacacgatgaaaaaagtatcatgaaaacttccaaactctttaaactgtgtcattccgacagatctccaactgaactgttacagaattaagagtcaacaccggccaaaacccggcgacatcgtgcttatcgaaaggttagttaggtagaggacaattaccatgaattatgacaataataatgatgtgacaactattagtagatatgatttgtgtctctgcaagttagttaagt

SEQ ID NO: 44651 - DNA, 363 bp, Arabidopsis thaliana columbia
tcaatctttgggttatacttaatttgtattattagttaatatatgtaaatatgttttccttaatggtattggatttattattaatggtatgaatatgtaaagaagtatttagtggaaaatatatttttctatatcccattcacctaaattccattaattgtcaaacatttagagctattagctatagtatttttatttgatatcaacaactctatttttattcgattactacacttttctttctaatgttaagatttataccaaatattttaaaatgattacaacagtaaaatcttctagtaaattgaaactacgtaaataaaaatgtttatgactttagttacttaaatatacaatttcccc

SEQ ID NO: 44652 - DNA, 486 bp, Arabidopsis thaliana columbia
ctatgaatactaataccacaatgagagagaactattatcacgaatctgtgaagcaaacgaatgaaggctctggactctctaaagtatcatttagtaaaatgaaaaataagggagaaccctaagagtatcaccagaaacgcacctgatgggcaattaattgaaactgaaaattattgaactcttgccaatacctataccagaaaagtcgaaaaaacatgtcagaaaataaaaccaggcattataaatgtatcgttggccaataaggaaacagtgagagagcttaccgatcttcaagttcgttaaaacgatttcccttgaattctagctccttcagttgatggtttacttcagcattttgtttctctgtttcttctatagctgcaacaagttttctttcttcttcctcaatctaagtagagcaggaaacaacaaccaacttctaacttaagattatatgaaattcatcatctttagagtcaacaatat

SEQ ID NO: 44653 - DNA, 553 bp, Arabidopsis thaliana columbia
tcacgggttaatggtgactttttgtgggttttttaaattttgaacttgtcagattttaacattaaacccaaactagaaaagtattcgaatcacaggttaatcagttgaaccgggcaattcgggtcgaacgtgaaaacattaggccgatatgcacatgtgaaaaacaaaattttgtcgcggacaaattacataccagatttaaaaattgtaattagtagtttatatagttgacggaaaaaaatttttagtaatttatagctaagatgggaatgagatattcatgatcttggaactaacacaaggaaaatacaagttacctcttcaaggcttgagctagcctcttggaccaagagcaaaaacaagaaattatggtccgtagtctgtaatcatcccaacatttttgtttgtgtaatattgaagcatttcgattttgtttcttttaagaagaacaaaaatgttggaatgattatgtacaaaaattttagaaaaaaaaaaaaaagaagattatgtacaaaattaaatctttaatgagagatctgagattttgtatttg

SEQ ID NO: 44654 - DNA, 479 bp, Arabidopsis thaliana columbia
aaagtcttagtttttgttttttgctaaacgagaaaaagtcttagttggggcaaaattttgcattttattttgtcaacacacaagtgtgtaatatgaatgcgaaagcaaggaccaagagacacatattcaacttcatttatatcaaagttgaatattcagctcacgtatcctatagaatatccaattgcttacgaaagattttgtttatattcaattttaatcgtatattatatgatttcttgtctaacaagaaaccaatggctactaatagcggtaatgactcattagtgaaagtgtatggttgctgccaagttccatgcatgtgacgtgttgggttaataatggttgtggagagtctctgtctacagagtactgccatttttttaatatgttttttaccaattttgataatatatttttcttcaaacaattttgatactatttagtttttgaagaatcacatcttcaaggctagagtc

SEQ ID NO: 44655 - DNA, 949 bp, Arabidopsis thaliana columbia
ccacatcgagccaatgcaatagaaagcacttcaacagggaccttctctctgtgtggtgaagtgtaacaacattaccattagaaactaaaatttgagctacaaattctattcgcttttcagctgaatttcttagtttagaaatctccaaactctgtgcaccactactgaatcctgccgtggaagctctcactaccccagctgctgccatgaagacagcgaaaacagcatacttttccttagaagtctctagtacctcgttcgcaaaaagagacatcttgttgatagaattagaccgcatataacctgacacaacccactcaatcaaatgaagaatcatcagaccgtaagtgacagtgccacgaggaccctcgtcttttaaccaaatgccaaacaataaatccaatagtctgacgtaatgaacatccaacgaagaagataaagcatacccaattcctgcaagcactacaggaacaagttcttcttgagatcccactaaagagtactcttcttccaaaagcctgcataacaattccaagcataagactttcacgtctcctgacagagaaggaacacacgcaaacgcaccagaaaccagaacactctgcgctactaaggctggttggagattacgcctgtcatcaacaacgccacgaatggcctgaaccgctacaccaacaagtgcttgagacggtcgaaatgctttcctaatccacacatagagtagtctgagaacaagtgtgtaagactcagacggaagagatacatcttgaaaagctagtatagaaataagtagctttgcttggggatctgcaacatggatagtggactcagagctaaccaaagctctcaaagcttgaaggtaacgtgaatcaaagttttggttttgaagagattcacgaatctcagaccatgcttgaataatcgcctagcagatggagcagaattttgc

SEQ ID NO: 44656 - DNA, 597 bp, Arabidopsis thaliana columbia
ggagttgccaatggcaagatcaaatagagaataaaggtgatgagcgtcatgttcatcctcatcgatctgaagttggacggtggaggacggccacaagataagaaaatggtcagaaaattagagttgaaatatttgagcttatagcaaaacaaaattgagagttgatatatcaagactcttgattgttgataccataacgaccttatgaaaaatatgatatcaatttcttttctttacgatacgaatccatgcattaacaaatagattttcatttttcaagaccggtgaacacaaaaggatgaagcattttatttggctttagcgtgacgactggtgaagtgttagcaattcaagcccctataatcaaggtgccataattttaagaaaatgcaacaaaatatctctcacagctcaaaaaaaaaacagtagtttacaaaatactgtatgcggttctcaaaaattgatatataaaaggacaaaaaataatgtgttacacgaatatattttgttttgctctagagcgaattgtactatactaaaaaaaaacacagaagtatgctagaattattaaaaagggtccaatctagtttttgtttg

SEQ ID NO: 44657 - DNA, 494 bp, Arabidopsis thaliana columbia
cccggtaagtcccagcaacaactcaaatttgcttatgagaaaaatactcaagctatttttgaaacttcgagaggattattagattatagtatgtatataaagtgacgaaatgtatatagagaaagtaataattaagtaaactggtgacgcgtagatgccaactggcaagtccgttaaaaacatgaccgtgtcaagctgtaaagctatgccttggttgacttatcctgctttgtcattggccaccggcctatcggaaaagacgcagaccaatttgccttcaccaaaataaaaattactacttactaccatatgctttttgccctgcgtttacttttcaagtcgagatcatttatttggtcaaatgaggtagaaaaaaactattctagtcaatgtagacattcgaatgaaatttgcatttataaaaaaaatgtacttggaaattcaaatgggtttataatttcattttaatcagtaccgagacatacagccacatg

SEQ ID NO: 44658 - DNA, 601 bp, Arabidopsis thaliana columbia
ggataaaaatatgacaaatctgctgcaaatgctgataaagtatatttataatattcctcctatgtgacttgttcttattcatgatcttatatttggctggtcaaaaacttcgtagaagctaaaacctcctcttgtacacattcattttcaggaagagattaaagatttgaagcaaaaagtgatgaatggtcttctgagacagacaactgttgtaagttgtgtatatcacaagatttggttctccggttaatccatttacatgacgaatcctctggtaagacagagaggtagttaaatcatttggcatttgcattctcatactccaatccatgttccggtccttccaggcgctttaaactcaccaatgggttttttaaatctgacaggtggagatggagcagaaggctaaggctctccattatgatataacaaaacatgtgagtatctctgaaaacacataagctaaatacgacagtttgttttgtaactgcatctcacactttgttcttgtgtaaatatcttgaaaaaaaccagtggattgcaaggcagcttaacattctgcagaagcgcatctactgtgctaatgagaaaggatggagaa

SEQ ID NO: 44659 - DNA, 508 bp, Arabidopsis thaliana columbia
actccctgcaaagacttcatatattgtgtattgtacaaaaccgaaccgaaaagctaagagcgagtctaagcgagagagcaaaagagaaggcactggaagttatcggaatttgcatctttttgattccgccgttttgcgtctgacgtgttcacggcggcaacctccatggacgacggtgacctcggtaacaaccaccataacttcctcggtggagctggtaatcgtttatcagccgaatctttgccgttaatcgatacgcgtcttttgtcccagtcagaacttcgcgctctctctcagtgttcttctctatctccatcttcttcagcgtctctcgccgcttccgccggtggagacgacgatttgacaccaaagatcgatcgctccgttttcaatgagtccgctggtagccggaaacagacatttctccgtctccgccttgcgcgccaccctcaaccaccggaggaacctccttcgccgcaacgtcagagagacgattcttcccgtgaag

SEQ ID NO: 44660 - DNA, 507 bp, Arabidopsis thaliana columbia
attcattgcttcaaaactactcaagaatcatatttgcaagtagtggtgtttggctctacaacgttctctctttaccatgccatggaattattccttgaaacagaaaaaaagagaacaatcatcaatattccttttgttaaagatcttgatcattgggtctccgttagactctcactcaagtctcaccaatcagctaaagatgaaattttgataatcgtttttttaacgcttattaaaacccaagagagattcatgcatgttataatccttattcatataagttttcaatgtaatatgttttacacgtcactgaatttggtagaagtttgtttatgaactttgttgctcagctaacatagactgtgttttccccccttacaatatctacccaatcaatgttttcttatactagtcaggacgttttttaaccaaaacgattgaactttcagacatatcactctcttttgtttttgtgcagatagatatacactctctaatccatattag

SEQ ID NO: 44661 - DNA, 412 bp, Arabidopsis thaliana columbia
ttattcttcattatgcgttactcgattgtactttgaacaagactaaaaacttattaattattgccaaaaagatatcttatgatgtcagcagtcatattagcgatatcatgagtggctttgttacgtcccgtcaacggtgaactcccaccgaattgcgcctcacaatgatcgggtatcgacacaacactttccatatcaaacttcgctagagaaaagaacccagctttaagatcatccaacgccgccggtaaaaacctacgagccgccgtgccatagtcatcaatgcaagtattgtacttctttaagtcttcacggtctttgatgttcttagagacggagatgagatagtttaacattttgttgactttgtttgaagtcgcatcgatagagatccacgcaagctctatcatga

SEQ ID NO: 44662 - DNA, 537 bp, Arabidopsis thaliana columbia
ctttgcttgtgacttgtataatcaatcaatacattgtattccaactccagtttgaattgtttaaaaaataatcaaatttctcttgattcttgcatttttgaatcaaagcaaatctatgtttaattttgttttcaaaattcgttaaaaaaaaaaaaaagacacgagtaaaatacggctcacacagatcatcatcacctctgctttgctttattcttgtatttgaagtgaaacggctaagcgaatgtaaaagactggtatacccttttgtgtaacgactatcctctctgactggctcaagcttgttttggaggatttaagacagacctatgtgtggagtgaacccagctctgtctcgacttcctttcaagttacttaacattactactttcatggataatattgtctcatattactttgaaatcagataccaaagaagaaggataaacaagcttgaatactcaactagaagttacaaaaagtcggtgaggaaggtcagacaatgctattttttcctcatgtcatgtacacttccagaat

SEQ ID NO: 44663 - DNA, 509 bp, Arabidopsis thaliana columbia
tttaagaattttgttttcgacacggaacatccggtcaagccacgtgggagctccccatatgataggctgaaaatcaggtggaagcgggtgcaccgagagggaaggtaggaccgaactctttcattatctcaaagtagtgtgagggcgttttctggaccttttatgtatgtacttagtggttctgaccctctatacgtacgtttgctcactacaacacaagagtttttgttgtgctatattatacggaaaggctacgtgaggcaccgacagatcattgcaaatctttgaccattgactcttatcttattttcgaacaaatttttttgggttgcgttgtttaatagattttgtcaaaaaataataattgtaaacctataccacggataaaacttacgagccaagacttaaatgatttttgaagagacattaacacatgtaaaacaagtacaaaaggaggagttgagatgaataaaatgacccaatgatagtggtaagtaatatgtcgggtg

SEQ ID NO: 44664 - DNA, 510 bp, Arabidopsis thaliana columbia
tttttatcatatgctgttgcttaatattttgagttgatcgttggtctcaaatcttgtggttagcgtaacctgattttgaacaattcattgcataagttcaagattacaacacgaaatagagataaatcatttttcagtcatagtctcatagaacaaatatctcggaacagagaacaaggattcttctatgagaaaaaaagaaatttataaagctcaaataaaaagagcatagacgaataaggttttgtatataaaaaaaggacataaaggaacaaaattaaatgcatttaaaaaaagaacaacactagcataaactattagtgggggtaattttgcgtgtctatgttgttaaaataagagagtagcttccccttcttaaccatgaagtaaggaagctcgacatcagtactaggttttgcagcggactggctcgagctttcaagtgtgtctcgaggggtacatcaacataacggaggatgtcattgtagatgacataagacccattgtgac

SEQ ID NO: 44665 - DNA, 111 bp, Arabidopsis thaliana columbia
ttgctttccgatcattcaacttttgcgacgaaatagagggggcttctatgtgtaggttgagaaaagatgtaaatcctgctgagccaaaggtttcggaatgtttttctgaag

SEQ ID NO: 44666 - DNA, 478 bp, Arabidopsis thaliana columbia
gggttacgaagggataattcaagaactaaacgaatttcaagagtttagaacagaatcatataagctcaataccgaccttaagaccaccaaaaaaccccgtaaaaaccaagccaaaacaaaaagaacatacgttgtaggatcagacaaaatggttctcaatgactcgatcgaattgctcgaagaagaagaaaggtctcttctgccactgaaatcacacccattatccgcagcgattgatgattcctcattcctagaaacaaaactcgcttccactgtcttaaaatgctgggaatagtaagctgcgttgtcttgtccaaccactatcactgcattaccattttagtccactgcctcaatactccaaaagtagaaacttttcaaaactagaattcccaaaaaaacataaactttgtgtgattctcataccagctcctgcagatacagaatcttcaccagcgtctttgttcatgccgatgtc

SEQ ID NO: 44667 - DNA, 331 bp, Arabidopsis thaliana columbia
ccattctcacttccactagatggtgcttattatctttagccttcctgattgttaattgtttttgaatgcagatgcctgaggaggagaatagcaacgaaaagagtagaaaaaggaaaagagaaccaaatccaaactctaacccgaatgaaactggtatgtctaaaatccggatttggccatattagttttggtattccttggttcttgccaaactttatcatatccctggttaaaacctgtatatgtgacttgcgatgtgtccaaaggtctggtcaacggtacaagtgatactatacgtgttgatgatgtttatgatcagagtctctcttct

SEQ ID NO: 44668 - DNA, 487 bp, Arabidopsis thaliana columbia
ataaaattattaatatttatttggacaattcactaccaaattctccaacatggggacatgacataaaatttggttgttagaataacttcacagtaaaactccatatagacacataatttatcatatacgttatctatcctttggaggtaataccattcaccaccatcaataacttttgagcctatgatggatttcttagctgaagcccgagatatgtaacacgtgatatatctttggatgcattaccatccacctttttccaaaaaaaaattgatagtgcgtcgctttctataacactatatatactgtatgaaggcaaaaacaatcagcaagcccgtctagctcagttggtagagcgcaaggctcttaaccttgtggtcgtgggttcgagccccacggtgggcgcttatttgtctttttagaaaatccccatttattttagaaatatctccgtcccaaaaaaataataataatttttagagaaata

SEQ ID NO: 44669 - DNA, 448 bp, Arabidopsis thaliana columbia
catgttttgccatttcatctttctaagttgttacacaaattgtcacttcctttgaacaagagtttcttcaattgcagttttattccagccgcacgtagtttcttaaagatatgttattcgatagctttaccatatgtactagcaaaacgaactaaacgacggcgtacgtagcgtaaagtagtgcccgcttcaaaatttcgtaatcaaaaaacacaagaagacttggtagcccaatccacataattaaatactattttaaaacaaataaattaattaaaaaaatacagtagcaaaaaagtacgatcgatgaaactgagaccgttggatcaaacctatcgaattataaaaactagatcacgagaataataccaagaaaaagaatctaataaagcagaaaattcatctccaagaaataagatagagaaattcatacttccaaaggataggg

SEQ ID NO: 44670 - DNA, 352 bp, Arabidopsis thaliana columbia
tgaaaggtgatcaagggctgggaatgtcgtggttgcatgcatggaacttggaaggtcagctgcttctgccaaacttattccccgctcccccagtgatatgacctatctgccctcacattctttcaatcagatcctctatgtccacaattattgtatcaaacaaaactgttgccagatggaaaaccgagattgatcgagcagaatcactaaccgagatatatcaatcaacgttgtagaaagtcctagcagacattgtagatgtaggtagttttgaatatattggttatatttctagctaatgaatgcattttgtaacttcatatttacaagagttcaatacaattattccaca

SEQ ID NO: 44671 - DNA, 498 bp, Arabidopsis thaliana columbia
tgacataataaaataaataaatagaaaagattttgcattattcaagtggtggtgtggaaaagctctcttacccacctctctagtctctgcacattgcacagtcacttctctttttctttattttctttatttattttattcactttttgtgacactacaaattggcatcacctgcctctcattatccttcatgcttatttccaaaaacatctctctgcttctttagtttcacatctcacacaagtctttgctctctcttaacagtttttcttctatcatctttaaactatgggaactgttgtgtatcaacaagggtttcagtctcagcttaatgagcctagggctttaaggcttaggctatcttcaccaaatcctcacttttctcaaccatttggtttagctctcaaatctcatttacttgactcctctcatgcagaggacaccgaaaccgtaacgatgacaaagctgctggttcccggtctctgactcgagtggctg

SEQ ID NO: 44672 - DNA, 529 bp, Arabidopsis thaliana columbia
  unsure (1)..(529): unsure at all n locations
tgtattattttgtcttcaatcacctacaatctaaacattcacatggatttacaaattattgtgacgtttattcaaccatcccatattctggttggtttagtagatttaaacaaaatgaaaaaattatggtgatgaagactaatgtaatttttggtaatgaaaaaatgatgtcaatactattgaaactatatcactctaacgaaaacacacacacaaagagaagttatgaaacatcaaataataacactaaatatttacgtagacgaatgtagtgttattacaactaaccccaagataaaaaaaaatacaagggggctttttgtttggaagttacactattcccatgtacattatatatatgatgttagtaaaataaatataaaaagattaaataatggtgggaagactaagaaagtaaataacaaatttaagcaggaaattaatattacaatgtaattattacctgttgttttatctttctttttcactanagagaatttttcccacgatcagaacttttttttcactt

SEQ ID NO: 44673 - DNA, 283 bp, Arabidopsis thaliana columbia
tcaattttagttgacttttcaattaaatttttaatttttgttgactcgcgccaaataaaacacgtcgttaaattaacaaactggtcaatttaacagatttaagtcaatgttaacaatttcattaaattctaaaacgacgtcgttttgtgcttaaaacaatggcaattaagaggagaaaacaaaggcccaagcccaaaataaaattaacatttttacctgtgggtaaccaggtagtctgaccggatcaccatattgaggcgcaatagtatcgtatggaggagaa

SEQ ID NO: 44674 - DNA, 583 bp, Arabidopsis thaliana columbia
ttcaagtttttgtcttccagagcagcttcatgttcactgcagatccgaagccacaagtacaaatccatagcaagaacataaatcttaaggaacggacaaccaaatggtttcttattttctattcgcagtccgttagtaaattaactcggtatcgcattcatcaacaagtatcaactaactactcaaaaaacaacaagatatcaaattgaaatccttcaatgaatcaaatactgcaaatgccaaatgtctcatggatttctctggatacacctttatatatttatcccctatctagttagtctctatgcacaaatctgttaagtcctaacaatgatgctagcaagattgctctcaaattgaagctactatgaagttcttttctaaatgggttctctaacaatatgtttactagtgcatcctcaatctaaaatgtttgcaaaacagaaactatacactaatgcaattgttgtatgaatagaagctcaaagaaaactacctggagatcacagttgaggtcaacccgacagagcgctcttccatcatattctcctggttttggtgcaaatgcaataacgaacatgaa

SEQ ID NO: 44675 - DNA, 549 bp, Arabidopsis thaliana columbia
gtcatccaggtactcgcgtagtgcatcagtcagagatgtcacaaagattcaaaactttgaatagaaaagaggcgaggaacaagaagatacagtaagtacctcggctaatttgttcaaagttctgtcgatttgcatatagtgtgcctgtaaaacaataacaaaataaatcaaatcgttgtttaagttccatatgtagctgaaacggtaaatatatatatatatatacaacattcatgcaataaacaacctcgagcaacatttcaacttcttcaacatcattttggtcgtccccacgaaccgtggctgacctcaccaaatggctctttgctctggaaatcttagcacctattgttggggacgtaggatacgaattaatttgttcatcagaatcgctaactggtgaagatgtagtcgcaatcttccttgaaaggcagagatcacccagatcatcgtcatcctctaaccacagttagaagctcatcatttacctgaaatgcttattatttcatgcatttggtttatcacagaaaatgtgcacaagaaatgtga

SEQ ID NO: 44676 - DNA, 483 bp, Arabidopsis thaliana columbia
tataaccttctaattcaagagttatcaataaatatgacataacgattagacgatatgatcatgattcgccaatgtatgatactcacttcagtttaatataaagatcgtttgacaaattttgatgcgaattaagagagtttgtatacaataatagtacattcttagaaaataattgctgttttataattctgatctatttaatacttaaaattaaatttgactagagtaaaaatgaaaaatttgtaaaagaacgttatacacaaacattgaaacgtcagttatttaaaaaatagaaaattatatattctataaaacgtacactttactcaaaacaatctcacgccgcctacagtttcataccccaagaaatcatatggagtagcataaaaactatatacatatatacataaatatatctatcaaataaaagcaaacctgtcccttcaatccaaagccttcaccaagctctaaaaagaaaagaga

SEQ ID NO: 44677 - DNA, 539 bp, Arabidopsis thaliana columbia
tatatatgtatatttttctattatagaatttttgaaacgaaattcataataatctccggacattgtgaaagatagcatattcttgcaatttaagatgtttacagtggtcaaccatgattgatattacagtgaattgattagattatggtcactcaatttaatagtaattttttcaaccactagattatcataattaatttattgtgaatatatttaattcagatgtgtataattaaatatgtaccgtaatgaacaatttgagtatttgtaacaaatacttcaaattttgggagtttatagatctagatactcttaccactttctcttcaaaaaaagagttgaatttaaatatgatatgtaaaaaaaactgatattcttaatgaaatatttcaaagttgatatctaattaaaatttcttttaacagcatgccctacataagcatttggatggttgcatgcataagtgttcaagtcaatggaattttatttctaacgagaactaaaactagtgattttggtcgtccagaagtatatgcaag

SEQ ID NO: 44678 - DNA, 314 bp, Arabidopsis thaliana columbia
ttcacggagtaagtaaaatatcaacttcttatcagcgagtttgctttgttaatcttactttcctcacacatgtcagtataaacgaagacttcagacaagagaaagtctatttactatagtgtcttgtgtcccattcgggtgactaacatgtttagacttcatagtcctgttttgcattttaatcagataccaagatatgattttaatgtgaataaaataaaagtattttacaagtttatgtaatttttatgataatatgtgctttaaatcaaaatatcttataaagtgaaacgctgaaaacataattttccaca

SEQ ID NO: 44679 - DNA, 490 bp, Arabidopsis thaliana columbia
gtagatctttgagttctaagtgttgttgctatagctggacaatcttcagcaataaggtcaaagaaataatcatacccttggatccgttttagaagtttgtcgttccgtttcttctccgcttcataggtctcctgatcaacaaaatcatccccagcatgtcgatcaacaaaagcagatgggataattggaatagaacctacaccataataccgtccctttttagtctttggagtagcctgaataatcaaacaaaaacagatgcatatcacaaaccacataacatttcaaagaactatacttaaaaattcaccaaacccatcatcaccaaacccatcatcaaacaattgatcttaatagctcaaaaggttcaatgatgcaacttatattcaatgatgcaattgaataagacttaaaaactcatacaagattgagaatagaagggataacgtgaacaacgagcatgttgcagtttaataggctgagacagttc

SEQ ID NO: 44680 - DNA, 531 bp, Arabidopsis thaliana columbia
gccatatagaatctcatatttttttttttgtatgtcgaatgtcgaatgtctcaaatgactattatattataaaattgtatatcaatgttactaagttattagaacgcaccaaaatgtacagaaaaagttcatatgataaattatattcacaaaacgtaataataagaaaatatctaattaaatttactaaatttatatgaggttaggtagcaaacataagagttttaagagtttggattttggaattggtggtgtttgtttctcaaacttcataaattagagtttaaaatgtttttctattttttgtggtcggcataagagttgaagttttaataaaataaaatagtatctgatcattttattggagaaaacataaaagatgtagtattttataagaactcgaattggtcaattttcaaaatgttagtatgaaaaataaaatatctagttatatgtactcgtatctcttgatatttttggctttaacttagggatgttagtttgatttgtctttctggataagccagtagt

SEQ ID NO: 44681 - DNA, 355 bp, Arabidopsis thaliana columbia
tggatgtcacgtgtataattatgaaaatccacgacttagaatgttcatgcattgcaattgtaagaaagcacttatgccttctatatatatattcgttgaaatgaaaacgataagagcacaaaaacaagaacaaagttgaaaaggatatgaagtgtttgtgctatgtcgtgcttttagcaattctgatcgcacaaaactctagcgatctaggagtaacatctgcgtcgagtgatggcttcgtgagtagacaaggcgtccagtttattctcaatgggaaaccattttacgctaatggcttcaatgccatactggctcgcgtacgaagccaccgattcgaccacaaggtttaagatca

SEQ ID NO: 44682 - DNA, 547 bp, Arabidopsis thaliana columbia
tgatgaaagtttaccttgttggcacttcctttctcaccatctagcttatcttgctcgagtttcttcttcttctccagtctctccctctccattttctacaacaaaaagatcggtttcttataagtgcgtgaagagaaatagcttccttcattaatttcaatagtcatagccaaatattctgagcctgagtaatgcaagtgagatgcaacgaagctataaaattgtgtttaaactgtaactatgaggtcaacctcaaatcaaaaaggaacacaaaaagctatagagattgcttaacaacaatgtcaacaacacacagttcttcccctttctacaacaaatacttttcgtagaggcgtaagttggatcacagattcacacagacaacatttacttcaattattttccatctgtatgaactaatacgccttgaaaaactcatccacacactatttgaccatttattatcaaaagacgactttacaatttgatagacaacaattggattcaagtcttatgataagaataagcctcggatctttatcagtgt

SEQ ID NO: 44683 - DNA, 473 bp, Arabidopsis thaliana columbia
catgtaatgttcataccataaggatggtgtctctagctcttttgacaccttggtatatcaattatcacagtgtttacttgacatcaaaatagttaaggcagattctggccttttggctgtaggtctaaagattctgaaagcttgaggcctgcaacatgtatgttggtagctggatcgccacaatatttagctcaactttttctctgaatcttcttggcacaatctcaacacatttgtatttcctgcagttacattcaacttgaccttggtcagctggaggtatcaaatgaaataagttggcatgggtgtccggagaaagatgccaatgctgtacgtgtagatggtcttcatgcgaaggtacatatatatgacgaaaagtatggaacagttgtatttatcgtgaggaatgaatcacttttagcctgatgagtatgtctgatggtttttgttgtagagattcttggactaaatat

SEQ ID NO: 44684 - DNA, 575 bp, Arabidopsis thaliana columbia
gccataaaaaggtttgactttaactatcacatgaaacttacattgccactaaactaaaagctttatatcactccaaatgtacttatggttcactttttgacaagcaaaatgaaagttattaattagacatttgagagttcttagacaaaacaaaccataaatgcagatctttgtatatgagcttcatttctctcatacctccttctctgttgttatctttggacaccctcagagcaccaaaggattgtgcctataagaaagcaccaaataccaaacataagagttgtttacattttaaaaaatttcagcggtttaatcaccgaaacagatttttgattgcttctgggtgctgtgtgcgaaaacgaaagatcaaagagatatttcacaaatttcggtatcaattatacggacctatattcaaaagtttgtccacgtaatttattctaatgtttgctaacaaattcgttttaaaaatcagaacattacctctctagtgagttgttgtgtgtcttttccgtctacgattgtttcggcaaaagggttcatgacactctggtttataggaacgagtatgt

SEQ ID NO: 44685 - DNA, 579 bp, Arabidopsis thaliana columbia
caaggttacattatatcttaacagaaaaaaacaggtttgcagtcagagtgactgttaccataatccagtagtcataggctcatagcgaagacatcgagaaaacatcaagtacttcttagagaagaaagagacaagggcaaagagatgagagaggcagcgcttttgtattttggaaaaacaggaaaaaaataaagatctacacagtgtcacagactcacagtaacagctgcactgtatctcatggagacccaagcaaaagaaaaatctatcaggtagacagctctacacatcccataacctaacatacacaaatctaaacacaagcaaattggtaaactacatttagcaaactaactacagggccatggagaccgaagaaaacatgatcgtgatcacgtaggcagcactatatatcccataagccaacatacataaaattagagaaaaatgcgataagctaaagcaagggatttttaaatgacaaagtaccaggttaaaaaggtcgtcagcacgtccagccatggatttccgcgtacgataattttgctgcatggttcatccttaccctcactgatgatg

SEQ ID NO: 44686 - DNA, 277 bp, Arabidopsis thaliana columbia
gatgctgttctagtgaacagcagcaaagattctaatctgttgagacttgaacaaatggctcttgatattgcagcgaaatcaaagtcagcgtcttcttcagggtttgtgaacagtgaattggtaaggcaactggcagttttagttgctgattacatgggtggaccagttttggatccagatagcacgttaagagcttggtggagtctgagctacagcttgaaagcaaccctccgtagcatggttctgccctgggttctctaactattggattggctcg

SEQ ID NO: 44687 - DNA, 503 bp, Arabidopsis thaliana columbia
atcgagtacccaaaactcaggatatgattcatttctctacacagaatagcaaccaaaccaggaaccctgaagcctcaaactgacagagaagagaactaagtagtaacaaatctgcttgttgcttaagaatacttatacactagctatatccacagggcctcctcttataaagctctgaaagcatatccattttcaaatttcaagaaccaaaaacacaaatgatcacacatttgaacctttaccggcacactaattagcttatgaaacaacaaaaccaatatactgatttgcatatgaaatttgactcgtgggagcaacaaaagaaggtgtctttgggggatttccaatatacaagcagtatcatggctatcgaagaggactaaactaagaaagagctcagagaaagcggaacgaataattaaggagagaatgagcacacacctgaggaacacaaaagagataaagcgaatcatgaggaaggagctgcagctttctcgacgact

SEQ ID NO: 44688 - DNA, 629 bp, Arabidopsis thaliana columbia
ctaccccggcccaccggagatcactagatgaggtttccactaccgcttgcgcttccgccttcacgaccacgaccacctcggcctcggcgaccacgacctctacgaccaccgcttctgcgaccaccaacactactccattgccactctatcatctttggagttggtacgatcggccttttcccaaagcttctctgagtagatgtggaccatgtggcatcttgcgaagattctgtaacagtagctgactccatttgctcgcataatgtcgacccgttattaccttgttctcccacatctattccatcttgttccccatgtgtagtagcttcagttgcaactggggcagtctcagtagtttctgtgttcccctagccaaaaaaataaaatccaattaataaaaaagttatatatctttgtgctcctaaacaataaaaacaatataaaaatttgcaatcgaaaatcttcatattacttgtctctgtttatgtcatcgtcgacaacatccatattatcagtcgtccttgtgttgttattgtttatgtcatcgttggtagttgagatattatggtagatgatggtattgcatttgttcatggtgactctgcaagaagtcataatccattgtttga

SEQ ID NO: 44689 - DNA, 693 bp, Arabidopsis thaliana columbia
caccttctctggtaatattaggcatgcagcctttgaatcctcctttaccaaagatccttccccattagcctgcggaagtggcacttccttttggaagatctcttttgtatttaggtctttctgaaccaagacagtaggggcagctaaatcacaagttttcacgggtgccgaaccattttccgtctcaaggatctcttttgcctccacattacttatggcattgttctgagtctctttggcatttaaatctttctgagttaagacagcaggagtacttgggccacatgatttcaaaggtgctaaaccattggcaacaagagcgccaaacccacattctttgatgactgttgagccattcacttgatcttttatgttagaagctacgatcaaagaagctctgtttgtggcaaagctctctttcttaaccacagggactgaattcttagggacagcattttgtctatcacggacatagaatagcatatatgccttttgattgaacacagtcttctcactaacttggacaacctacaagaacaatgtaaagaggaacttactactagctatacttgattcttgtctgttcgttacgcatcatttagcaattaaaaatgtgccacctcaacacggaactatgtagagaaaaactacagcatcaaaccaaaattttgcaatacagaaaatgtagaacac

SEQ ID NO: 44690 - DNA, 937 bp, Arabidopsis thaliana columbia
cacaaaataatggatcctaacactaatataacgattgaccatctagggactgagcctgaataacaaagatgcgcataggttatggctaaacaacctagaacatgcacttcctttgtctgccattggtctatcatgcctcatgatgaattctacaatggaatcactcaacaagaagtagggatttagaaagccatttgtcggaccgagtaatcatagaatgaacatgaagaaagatgtgtaactgtatcgagtcatttgatggctgtgggagtattaaatcatgagggatccaaacctgagacaattgcctctagatggtgtcacaaggtccaattttgatacaataaaataaaacaatcgaagggagaaaacttttgtctccgacttgagttccatgtctttaattaattgatctcacgaaatgaatcagcctctgggcttgtgcagacgaggtcggttacagaagatcctgccattggccctcaccagtgcagccatgcccacgcaaattcccgtccacaacaatgagaagaacaagtgcttatgcttataatcactcccagctgctcagcaaattttacacagtttcagattaagtttgaaagaaaatcttaactatccagcaaaagaaataccatacttactttgttttagagacattgttgcaaaccagaaactcatcagaaccacgaacaatgccactgggaagttctgagacatgaaatttacattgttataagactagaattctttgtatgctaatatagtggaaattagttctaatcttaattgataaatgcttacggctacagctcaaggcctcccttttgaggtacaggagccatgtctcggctcacagcaactatgtagtgcccttgcaagagatcaattgcatcctattgcacatagccatattaacttgcgtcaggacacattc

SEQ ID NO: 44691 - DNA, 506 bp, Arabidopsis thaliana columbia
ctagcaatgattatcaccaatactcaaatcatatcatattcatcttcatgttgctaggtctccatcagcatcatctttgtccattagtagattcttgagatatgacttggtgttttgttgtcactcgcttcaaacagaaaatcaaaagaagtctccagaagctatatccacgaacgaatcttgcttcttctttttttttattttccttttcttttttttttagattattcgatgcttaaatctcgatactgaaacaacagagaactagtcttattcttcccaatctccaatttatagcttccccatagacgacagccactgttccatgttcttcccatctgcagtttacatgtcatcagaacaaagaacaaatcaatttacaaacaaaagactcaaaccaattacttaagttcttaaaagaacatgcagataatttacatgatagctattaatgaatgatgatgataatggaaacaacattaccaggagcagcaggagagaagaag

SEQ ID NO: 44692 - DNA, 545 bp, Arabidopsis thaliana columbia
  unsure (1)..(545): unsure at all n locations
cgtccctcgggacaacaaggggtagtacaggaatattcacctgttgtccatcgactacgcctttcggcctgatcttaggccctgactcaccctccgtggacgaaccttgcggaggaacccttgggttttcggggcattggattctcaccaatgtttccggtaactcaagccgacattctcgcttccgcttcgtccaccgccgctcgcgcggttgcttccccctaaggcggaacctcccctaccgatgcattttgacatcccacagcttcggcagatcgcttagccccgttcatcttcggcgcaagagcctcncatcagtcatcgatgtcacatccaggctagtgttcagactcttaccttattagacattctatgtctgatgtattggagttggtctatatataatgatttatgttgatacttgtttgttggtttaggatcccaagttacccatctccatctgctcaatcaagacaagagattcacagtgaacaagacgtcaatcaggtaaaggcattcacttagaacatggaaataagaattgt

SEQ ID NO: 44693 - DNA, 494 bp, Arabidopsis thaliana columbia
gtcaaaacgttgttcgaaaattccgatgagtttccaactaaacgtggtatctgtatcgagataggtttgtcggataggcatgcatcagaattttctgtttatttttgatgaaacttgaaaattttagtcggaaattcgtcggaaagttccaacaactttctaagactgtaaatatacagtcaaaaattatcgatgatatttaaaaaaaataaaaatttagagtaacccaagagccaaaatactgccaaataactcctaccagatcagtatgcataatgatgatatatcgttaccttagtggccattccagcttccaagcagtggcgtactagctaatgaggagggggtcaacgacccataacctttacaaaatttattttctaagcttacttaaaaataaataatttaatactattattcagttatataatacaccgacctcataacatattattcgagctcgaccactgattccaagcatgattaaggttgta

SEQ ID NO: 44694 - DNA, 146 bp, Arabidopsis thaliana columbia
ctatcagctctgcagcccgcggcagcgcagtgtgtgcgcgctaatgacggcggaaggtgcctgggggagggcctggggaggggctggccagcgctatcgcgcccctggcacttcctaagagactgagccctttctctgcagctgca

SEQ ID NO: 44695 - DNA, 542 bp, Arabidopsis thaliana columbia
taacacttatcttagagaagactctgtccacaactgatgtgatcacaacgacacatggccgtttctcaatgcatttcaacagattaatcagtaacgacttcttgaagcctgaggagcggagtatcctagaagaagatacctacaatgatgagacgatgggagttggagccattctcgtggatcaaaggtctcaaaagtggagtgtgattttgaagagatggggccagaattactttctgagttgtggctggaacgacgttgttaaggctaataaattgaaagctggcgacgacatctgtctttgggcgtttaggtgcgatggagtcctctgttttgccatgaggcagtatagctcctattttcgtcattgacaagtttcttgtgtctgttgagattcacattggtctaatctttcaggccattcttgaggtttttggtctagttaacaaaattagggtttttattttttactaggatttctttcatctctcttttaacactttgtcgggtttttgagtttctaggattgttaaaatgcagga

SEQ ID NO: 44696 - DNA, 513 bp, Arabidopsis thaliana columbia
ttcgtttaaagttttcgtaatgaccccatgccaacaatcgattccttaatttaatacctcacatgtttatttttcatttagcattaattcactttctatttttgttttgtgatttgttctaaaaaatggttaataacatgacattttagccacttttggctatacgtttcttatgttttaggggagtatttggtgtcatcatagaacaagtagataatcaagtattttagaagtcaagaaggtttcaagagttttaacagaaaattggccaaaaggagatcgatatgcgttttcggacagattcgtagctgcgaaggttttgcatttgttgatcacttccccgtgcatggaattgagatattttggactctatgtaaatatagaagagtcaggactcgcataaatgtggagttggactcatcgatcaacgattgattttaaggcctcttgaagtgaagccttatctgaactcagacgtatgccgcgaccggtggagaagtccacttgggactg

SEQ ID NO: 44697 - DNA, 759 bp, Arabidopsis thaliana columbia
tgaagactaaacattcacaaataagaaaacatagaatacttaaactaaagattaagacaacatatcacattaagacaagttttattaaaactgaacacattaagctgaacactcatttagtccgttaacacaagaataagcaacaatatcattaaagccgaagtgatacaagtcatattgaacttaaagtaaagaaaacagacatacaagttatctaagctaaaaccacttagagaacatggaccataacatgacatacaagtgaataagcagcaaaagagtcacatttttatcttaaaaaccaaaagatcaaacacaaatttgaacataaagcaaagcccagaatctgtatacgaatccatatactgaattcgaaatcaattgttacagatcaacttgtaagaagcaattaccagatcaaaagcaccagactttaacttgccatcaaattcaacctaaacccagataaacaattaagcatcaaaaagagcaaaaaaatcaaaacttcaatcacatataagaaccttaccagcagacgaacccacaagcaggatcctatgagcatcaacattctaaccaatccaccgaaaaacagcgccacatcgttgacctcagcaaagccggtaagagtagctcttccggtggattttctgacacctcttcgatcacgaatcttgtggatcgtatgagaagagagacatgataagaaaagagacgatgaagaatttgatccgtcgaagtcgaaattcggagaaaaca

SEQ ID NO: 44698 - DNA, 297 bp, Arabidopsis thaliana columbia
tcagcttatgactttatttgatctgcgtgatattttcgtatatctaaccaaaacataagagcatccccaaccacaatacaccaaattttaacaccaaatttgatattttggtgtttcaattgttttatcatctccaaccataacaccaatttcacactaaaaatattactttttattataatattattaaacttaagattttctttatttttttaatagtttgatatacataacatatttcataactaaattattttaacttaattaatataagagtacaatcgataaattgaaaat

SEQ ID NO: 44699 - DNA, 591 bp, Arabidopsis thaliana columbia
  unsure (1)..(591): unsure at all n locations
agagattaattctaaatcctgtttttttttaaaaaaaaaaaagagagaaaagattgaaacttatctatgctcaaaactgtaaaaacaagttaaatctttatttcagccgtcaagttacttcattaaccaaagaggtattacaaagttggccaagatattacaacaggcaggattcacacacaatctctcgcttgcttcgctagactacttgtatgcataaaagagaagatacatgtctttgaaatgttgatattagcaagatatgtatcgtaattgccattctgcttcagtttccattggagactgaatgggagttagaaggggtgttccttattcgacatttaaagaagaggtgagattattaacactttcaattaggagctttactcttacagagatttgatctaaccaaagatgcttgattaaagatattgccgttgatgttttttctggtaaaaaaaagaagagaattaatattaactgtaaaaagcacaaaaaaaaacggaaaaataggacacgtggaattggtgctgatgtntacctgccactggttcctcacagcctaccactctcaaagtcgctgagaacaga

SEQ ID NO: 44700 - DNA, 449 bp, Arabidopsis thaliana columbia
gtcgtgatcaagttattatagcttgacctcgaagacctctcttcttcctctggagttgttgacttcgtagaacccatttgagctgctttctggagcaaagctgtggctgacatagccggcgatgggtggggaaagctggacctcccggtattcacagaagaagcaacaggagggaacaaattaccattgttgccattagggttagggtttgatgagataagccaaggagggatattttgatagtgatgctgtgattcttcttgcttcataggaccatggagattgctgttgctgatgatgttttgggatgacgaagagaaccccgatgttttgttgtgtttgatgatgatgatgatgaggagattttgagcttggatcataatagggtttgcatggctcttgcactctcttctgctaatgcatcgcaaaatgctctatgagttatgaac

SEQ ID NO: 44701 - DNA, 429 bp, Arabidopsis thaliana columbia
aaaaaataatgttaaagactagtcgatttagtataagtttgtaagctaagaaagaactgcagtaatggatggctccaccatcttatttagcctctatatatggccttcaagattgtgattctgatttatgaatcatcttcttcggttcaacaaacaaattttacttcaaaaagtaaaattttaaaataggttataaagacttcaacactagactatttagattctacacaagtgacctaaaccagaaaaccttgtctatacatgatcaagacctgccttaaatttaagatagttgcaatatagagcaagagtagaatgaaatttcagttgaggaggattttagcaattaccattagacttaaattacaatgacactttctgcttttttacatattgttggagcaataacataagttctcactaatgaca

SEQ ID NO: 44702 - DNA, 561 bp, Arabidopsis thaliana columbia
caaaggaagtagagaaatgagatcaaagttcttgaggaggaggttgaagcttcaggcttgggagttggatgagatggtattctcccgaaaagccctaatccatcttcacttgttacgttcaatatcgattcactcgtgctgcaattgtcacactcgatcaaaaccttgtcatctcataaattcaaatacacgtgtatttatcaacttttataacatatcaattagttttggagagattttttaccttgtagatggaaagtggcatgaacctaaacctgtcaacagagagaaatctttcatttagatggattctttctcgacatacatatatgtgacgaaaaatattgacatggaaacattatcaacccttgtagtttagatatgtagcccgatcatgtggaaaccgttagcattgcacacagaaattactatatatccctgctactatttggtcaacaaaaaaaaaaaaagctcttttatataagcgagtgtataaagttttcttataatgaattctaaatttattttcagatcttaagtcttaatatgagtttgtagtgt

SEQ ID NO: 44703 - DNA, 434 bp, Arabidopsis thaliana columbia
atccgagccaaggacgcctggagcgtaccgatttgcaggatcagacatccatttgaatgtcttttggacgttggacgtctatgatcgaatctccacattagccagcgaaaactgcataggggccaagcgaatccagaagggttctaacctaatctctaaccaactaactaacctagagattaccctaatctaatcgatcctcaagaaccctaatcactagtcaagcaacattctcaagaagacaaacccagaaattactaaaatcataccagaatgtagatctagacaagctaaacaactctagtcacagatataaatgcagaaacgaaataaattaagagtagttaaggttttaagattcataaacggcaagataaagtacgggatatcaagatggatcctttggacaaaccccgtaagtgatctatttatag

SEQ ID NO: 44704 - DNA, 797 bp, Arabidopsis thaliana columbia
ctaacaacaatataaagtgtcatgaagatgaaatggtcatgctgcaacagagtggaaatagtgaaaaaacgacaaaaaagagaattaaattaagagaagaagagaagaggacaaaagaaaggcacacgtgtatgttagagttgtgtatggttgaatggttaaaggaagcacctgagctgtttagacaagactcatggagagaacaacttttaatgcttttttatcattcattattatgaacaccttcctaaaaccaaagaattatggacatcttctttctcaattcgtatattttcatgtcgctacaaaagtcaacttcgcatgcatgatgcacctatgctaaacaatgctaacatatatagcttatgtaaaaaatgtgttttgtgaattgtgataaaaagaaatccactagctattgtattaattagttttagaaatttggtgttagttttctcaagtaaatcaattgccaaactgtccgatgattggttttgggacaagtgatgtatatattaattccatctagacattatttatttcatgaaaatcatcaggaatttttcgaagaatttgtgatctatagttgctaacgataaggaagcctactaacacgagggttgcaaaagctttttctatgcatttttgggttttgttatctaatcattgatacatcgatcaatgaatttaagttttgtaatagtaatagaaatatttaagaaaacttgatttgactatcaaagcatatctaaaacaattaacatcaatttagaactgaaatcgtaaagaggacaaatatg

SEQ ID NO: 44705 - DNA, 617 bp, Arabidopsis thaliana columbia
ctagaggatcgaccataatacatatatctaaattcgagtttcactgactactgcaacggccaattatgtggatagtcttagtaatttgaaaattttgtctctaagtgtcaacgtacggtggatattagggcttggtcactgacatcaaaggttttggattcgtataagatgtatttgaaattttgattcttgaaatttttggcatctttgtatttaaattcttttgttcgtattgaactactgattatgacagatcattagaagacgttataacaaacactacatgtaacatatctgttatcatgatttttctttctggtcgagtacatgcagtcccataattttatcaaacaaatcacgattaatacaaacgattaacaaacaaatcatagttaattacgtatacattttaaggtgggggctacgaggttgacgtgtgtttcaggacccttcccttttctgtctctttgagtttggttctttcacgtgccgccatgttcacatgtgtcatctaatacgtacatttatacatatgaaaatgcgtgttgtacgtatacgtatatatacataatacatttgtactttaacacacatttctagttttgttcaacagggtg

SEQ ID NO: 44706 - DNA, 526 bp, Arabidopsis thaliana columbia
gatatgctttgatagagctgcaactgttctctttggttgttcagctgatgagttcttccacttcactaagctcaatccattagccggtaaatatcatcaaatcgctgtactataaaagctctgagtaagtttgagatgattcctcttagatgttttgttttcaattgcagcatcaatggtgaatcaggtctttgatggagaaatgcttaggatgacgttaactcggcctcaaaaccgaaacgcgcaacacatgagagtcgcttcagttgttcctctacgatcaggagttcagcctgcaattgtaaccttgagacagatttgcacaaagaatgcttctttagggaatttttctacaacaaatcacagttcctaatgttggagtacacatataaaatgctactatcacaagttgtttgatatcttttcttacacttcattttgtccaaaatattctctacttaggctaagtcctccttggattatgttctaatttggttgttagaaaatgacttaatagtggatgtgg

SEQ ID NO: 44707 - DNA, 502 bp, Arabidopsis thaliana columbia
ttatggacggacattacaaagacttcatcgtacttatgttgacagttgacaccagataaaagattgtcgggctttacaaataaaatgaagcccattttgtgaaaccaatgagacccaattaagaagggaagaaaaacaaatcagttagtgaaagtgaaaggtcgttgaccgattccttcatcatcctcatcgttttaattttaaatcttgattctagaagaaaaagagaccattgagtggtacgcacgttccacttttctatgacaacaaactcacaaaaacgtgagagagacaacaaaaaatgaaagtttttggtcgccgaccatatcgcctaagacatagtagagagaatgagagatagatagataaaagcaaatcggcaaaaactaaagttttttccattaagtaggagttttgagcggtggtttgttttgtaatgggttgtatttgtgccctgcccgttcaccaagcgccgcctgttacgataaagatctattagatt

SEQ ID NO: 44708 - DNA, 644 bp, Arabidopsis thaliana columbia
taaccgactccaacggctttattgtaatctctctatacaacatggatccatcgattgggattagacctaattaacacttttgctttctagattaaaaaaaaaaaacgctctcacgcagcttcttctaattctttcttctttgagtgaaataaaaccaaaactctctaattcgatgatgatccaattagtagacattgaagacgtgaaaagccgatgatgatcatctctgcaacatgatccgtaagagttagattgatatcggagcggaaagcatcgattggtcggcgtggaaagcatcgttgatccaaactcgaaatatagattgatgtccatgtatagattaaaatcatcccacacacatttacgtacttaatgattgaatgagaagagaagtttgaggttaacctcgaaaccatgctacagaaataacatggtggcgatgttttggtgggactcataaggagatagaagaaaagagcgccaatttccttctctcgaccgtttccaaaaaaattaacgtcttcgctaaaccattataattcttccaaatgaacgacgtcgttttgtttcatcaatattatttcctgtcaaattatcacaatatatcaactatatataaggagatgtgatgcaaagataaggac

SEQ ID NO: 44709 - DNA, 495 bp, Arabidopsis thaliana columbia
tgtcaaggtttaaaaaacattatattcatacaatcataccatgaatgaatttgtgtaaagctgtaaactcttcttgcatcctagctattttcctcttcttcttttttctttttctgactagtcatatagattttttttttgatttttatttgatcgttggagaatcttcaaaagatgactccactcatcttttcaaaaactacctagaccatatacagggctctccgtctacaacaattagcgtccggaaaacgtaaagaagtctacaacaattagcgtcctcgtggatcagtatcgtgacatttgtgtcatggaacctatccttggcagtcgaagttaggctcactcccaacggtctaacttctaagtgctcactaaaatatgaaacactaatgttctcgaacaaacaccacctataatgactcaaccctccataaaattcgaaaactgatcttaacaaaaatatatatcagtgacgtaaaacataaatttatg

SEQ ID NO: 44710 - DNA, 821 bp, Arabidopsis thaliana columbia
  unsure (1)..(821): unsure at all n locations
atttccttgtcacactaatagaagaagaagcgactagtacggtttcgtaagaaaatatcaagagagtattcacaaatttccttttcctttgaacctctttgtattaaaataagaaaacataaccgcctccaacggctctattgtaatctctctcactcttgtgtgtatatataacatggatccatcgattgagattagacacttttgctttatagataaaaaaaaacgcagcttcttctaattcgatgatgatgatcatcatctctgcaacatgatccgtaagagttagattgatcacagcggaaagcatcgtttcatctattgatcggcgtggaaagcatcgtttctatatttcgacaaacgtaacataatatacaacaaactcggttacagagaagatggtttaattcatctaaatttggaagttggggaaaattttaggagaaatacctaaaactcaaaatgccaaaaaagatgtggcaaattggtactcctaaacaaacctatctaccaagtgatagcttagccattttacattgtaatttacacaagcaaaaaactttccatgagaaaaacaatctgaggattataactctttattattacctcatttatatatatgcatgtcaccatatcacatccaccttcgccggcaattctactccggaagctaagccgctagaagaagcaaccagcttcacgcccaacatgggattcgaaccgtacttctgttttgcttcagaaagcttcgagcaagaactgtttgcaccactgataactattgttctccttcttcttncccgatgataatgatgccatga

SEQ ID NO: 44711 - DNA, 544 bp, Arabidopsis thaliana columbia
acagtctgtgattcacagaactatgtaaacccagaagaagaaagatggaaacttgagaaagaatcttcaaagcaaaaacggaggaactttttctgctctgtgaattgatgcactgatgctctgactcatatagaattgcgttaaacatggcttcatcaatataagggatccgaactatcaatatagtaaatcagtttctctcttctcttccaaaacgtttatgtctttatacttaaaacataagagggagtaacgtttctctgtgcttgtcttgaaacagaggagagtataagagagagtaagggagctgaacagacaaagaggtgaagaattttcaacaacttttgtcttcttctgctctaaaagataaaccttttccaacgaagtcttactccttaatggtgtttcgttgacttcacgttacaacttttcaacacggtgtgtggtcttcaactcgtcattcaatctttggtcattttacctcaaaagtaaaagaaagttttttctcgttgttgtttgagatggagtggtggaagaagaagag

SEQ ID NO: 44712 - DNA, 1144 bp, Arabidopsis thaliana columbia
tctagtttttggccactagaataacttctatatttaatccaatgttaaatttatttaataatttttttttctgcacaaggtgcggattacttatctagttaaatatgtattatagaatagtatcgttgagaaaaggtatgacgatttatcaaggtttactttaggcttgggtttttttatttcttatttttcttcaaaggacttgagtttcctaatctttaattatatacgtttttcttttttcttctctacaataacatagatataattttttgttaatatttaaatcaagtcaatatgagaatggtgcaacttttgttcaagttcctgattcaagttggtgcaacttttgttgaactctcccgtaatgagattggtaacaagaacctattactgcttatacatcatgctggttcacttttgctctccatgtttggtaatgattgcttgatagctgcctttgataagaaagggtaaacaagttctctggtcactttgtgtccctttcatcaggctccttctctaattaccctgtgcagaagtttcttgatatgcttgatgaaaggtgtcttacgttgattgcctctgagtttgatagttactttgagaatttggtgaaagatcgtgttgggaactatgtagttcagcgtctcatttggggttttaaacgcaccggtattgatcttccgcacagtctcacctccgtcctcgtcacccgcagtattcatttgtgtaagcatagatatggttatcaagtcattgaggcctttgacagatccactcgtctagcttgactggccttctcttgtttacattgtctcatttttactctgtgtataccaccactccacttgtggcactctttgtataaaaactttgtttagttttcaagtgcaagtgttatttagttgtaacatccatctcttgtagctttactgggtttatgaagcgtttttttcgattcccgaacttcattttcttacaaactcaccacatgtagagatcactcgagccaaatcccaaacctacacataatccaaatgaccttccactgcacaagaatctcaagtgaagacaacaacaatctgaacctggtttaatttagaatgtaatcttcattaggttaatttgtttttggtgttgg

SEQ ID NO: 44713 - DNA, 463 bp, Arabidopsis thaliana columbia
actatccctctgtacgatcgttgaatttgttattgtgaaacaggcaatcgataggcttccattggttcctggtgttcttgaacttgtaggcatcggttacacaggagtgagtttcttcttctctttgtatcacttgaaccaaagctctcatgaacctgttttgaggatatagatgattcatcacttcacttttggatttaggattagttctctgaatttagaatccgaacatctgcaattcatatggagatatgatatcagaaattgattgctgcttctcgctagtgtttcaatcttaaaagacgtgtgtagtttgtttcaattgtgtgatggaccttattaacatttggtttttctatggcagtggttcacttacaagaagctggtcttcaaaccagacaggttaagcaattctctctttaactctgtgtttggttgcatgtaatactgaggatggaagact

SEQ ID NO: 44714 - DNA, 352 bp, Arabidopsis thaliana columbia
agagagaacgcaaaatagaagtcaaagaatctaggactcgcacctgtaaaattgcagcccggacagctcgggagcatgccgcatttgttcccatataatacacaatgtcctgtttcaaaatgcgagaagacacaagtttctgtcataacttttctttcagaaccatgatcaaaaagtgtttgagggcttaaccaatcacctgacagccagtgctatgaccaagcagaacaacaccttcagaattctctttgttgatgaggtggtttattagctggtcgatttcttgtgcatccttcatcagaagaagcaaagatatattgtttagtatattgcggaatggagagattcttag

SEQ ID NO: 44715 - DNA, 476 bp, Arabidopsis thaliana columbia
tcagaatgctgaaacatttgatctcaaacgaacttattgtagatttcgcctaacgatatcatgtgggaaggtggacaaaagccaaactttgctgctcccaaccaatctgctgcagctacaggtcaatgagcccttttctgaaaacattgacaaggtaactttgccaatcccaacacacacaatttcagtgaaactctaatggttttggcagaaatttaaccagtgaagctctcatggttttgatgcaggacaaagctgagaaagaccaagaccctcttttgcattttgttttgagatctttagttacttgtacaatcacattacacaggactctttttttttttggtgttgtttgctggaattagagaagaaaggggtcagtgttaaagtgtaaaaaaattcaaacttttgtttttgtaaattggttgcctttgtttcttgttagcttatctcatctataatcggaaaagttttcg

SEQ ID NO: 44716 - DNA, 554 bp, Arabidopsis thaliana columbia
tccaaggtccaataattttctttgttttagaaattatgaatctcttttacttttttcaaagagatgttatagcttggagcataagtgtaatgtgattatgactatctcagtggacgtgatcaatggctgcttaatgaggaagacattgtcagatactcgcgaacgttgccaaattgtattgtacgtaagcttgatgacaatggacagtttcctcttttggtaagtgatctctcttcatccaatacttagggtttaatattgatactactattaaataggttcttgaaatctctatatatcctacacttcaattatctctcttttacatctcatgttaggaggacagcttagatctggctactatcatcaagcttacttgtttttatcgccgtgggaagtcacatgattacgtttcggattacattaaacctacccctgtttgagttacaacaactattagacgagcaccggtaaatgccttactaattgctatatcttagtttttctatatgtatatagcaaaagaaataaaaggttatagtaaatactgaatg

SEQ ID NO: 44717 - DNA, 537 bp, Arabidopsis thaliana columbia
atgtgttataatatttgataaaaaatttgaatctttttaaaaatatatataattgtgttaaaaaaaactatactttttattattttattttatcttcctttaaaatgttaaatttaaatttattttcaaaaaatttgataattttaggctttttgataatgtttttcaactttttatataatatataagtacatattgttttattctaaaatcgtttagatcttaacgaatagttataggcgttagacggcctcaactaattgttataagtgttagacggaaagttaccgtccccttagcgtttattttaacattacaagacaagatacatactattaaactaatggggtattaccaggataaaaagaaagagtaaaatacgaaaggttccttaagcaagtttataaatatttatagccagaaactatagcaaaaccaataatcacaagtaaccccaaaagaacataagcaaagagagaggagccgagaaataatgacgaagacgatgatgatctttgcggcggcgatgacggtgat

SEQ ID NO: 44718 - DNA, 560 bp, Arabidopsis thaliana columbia
tgagtatgtacatatctttgttgcatcttttaaattggtgatttcgaaattattcaattgaaaagaaagattaatcagctaaaaaacttatcttggtggaactagctatatgatgacatctaataattatgatatatattattgaatttggtccgaattaactgacctaattatgtcatcatgtaagagattagtagattattcaaattattctatatctttagagaataacgagaggaagttaaatgattgtttgtgcacacggaaaattaaaacttgttctaacatttttatcgcataattgattttgatatgaatatacgcacaaatcacgaagaaaagtaagtaccatttatcaggaaaagtaaaagtaataccatcataagatttgtaaacgtaacatcctgcagtggtagagaaacaaaacaaagcattagccgaaccaaatatctacaatcaaagtgaattttgactatcaccaaaaggaataaatctaatataaactaaaccttagatacatgtatataatattgggatatagagtagcaatagtggatggt

SEQ ID NO: 44719 - DNA, 418 bp, Arabidopsis thaliana columbia
ttttgaatattatgtaaaattattcggaaaaaaactgttttacatctagtgcaacttgtgtttgatcagtttttgagattaatttacaaatataaagaaagaataagagactaataattattttgaaccaaaccagacggccatacagcctgcatatcttctatcaccagccaatccatggatagaggatattctgtttcgggtttgtttgtcaagtgtgcgagttaggtgggatgaggggagaggcattcatcgatcacagtaattccccgctacaccctctcaaacgcaatggaaagacagacaggacgaggtcttgaccgtcataatattttacattcgagttaggtacagttcaattaattctctaaatagtgacattttcgtcattcattactcaaccaaaactcataaatat

SEQ ID NO: 44720 - DNA, 389 bp, Arabidopsis thaliana columbia
gttctaataatacttttatcttatataattcaaaccaattttaaagttttatttcaaatggttatttcatttttacagatttcatatattataaatattctaaacgtttttatgttaaatattttaaacgtttaataaactttaagtaattacaatatttatcttttaataaagtgtaatattaataatgtcctacaatttcttcttttttaagcaattagcactgattttctttgtgtgtgtaagtaattagaattgatagagatatattagataagcaaattgtgagtaagtgacccctatgctatcaatatcctaagtataggacagtctagtgcgaagaaagagggtcttcggttttgggttagtaaagcttagcacgtgagacc

SEQ ID NO: 44721 - DNA, 500 bp, Arabidopsis thaliana columbia
gtgattagagattaactgatttctcataactacacagccagagaagaagaatccaggtcttacgccactggactgggtcaagtttcttgtctctgctgccattggactggtcagttctgttacattattcaaaagacagtgagaaatgtggtttatcaactctgcttttacaggtcacagtggtaagttcagtgagcctcaaaaaagctgatatcagagtcattgcagccatacttagcacagtcgttgcctactgcgttaaaacatatttcacgtaatctacactcatattaacgatacctttatccacttttgtcactatatcctgaatatctctaaagtatatgtaaatacaggtttcaaagaaacttggtagattatcaaagtcttataacaagatctgtgtatgataagcagctagacagtggaagaggtactctgcttcacttgtgtgatgaagtcatccaacaagaggtgctaattacccctgttatttttta

SEQ ID NO: 44722 - DNA, 541 bp, Arabidopsis thaliana columbia
taaacctataaaaaactacatgtacagagagaatcctttatgttatacatggcggtgcattacacattcatatggagataagactatgaggaagtgtaaaaagactaagctcggacaaagtacctggtagaaaaatccagttccactacagcatatactaatcgaaatgcacatgggaatgaacattgtagaaaatccctgctccacgaatacaaaacccatctttgatactacagatgccattctgtgatcaaacgagttataacttattgtcagctacgcaacaaacgataaaatcagttcaaatacatttttctctatctcaaatgtttctgcagacaccaggacataggttcttccttttatgttttctaaaattaacagcacatgttaatggatatataggagataatcggtaaacatcagaggctcggtacataatgcgaaaacgatatgctctttgatgtttatgggcactgaaagatacccgaataaaatgctagattccaagccatatatgatttcttcaccacttcatatt

SEQ ID NO: 44723 - DNA, 503 bp, Arabidopsis thaliana columbia
gtcttgtatacgaacacgaactccagacatagctaaccgggaaagagattccttcaagcgggttaaatataacttttctccatgtgattgaagaacatatgaaaaaatattcaaaaacgcgaatgtctccatagacaatttcacccaatcaggacaagaacacaaagagctacttgaatcccatgacatcaagcattttgtagaacctggagatgtcaagcaattcctggactttaaaacctcagcaagcttctctgtgtactgacccttgaatgcatctttacactcagactccaaatcatcattaaagaatccatatggacacgcttcttcatcccgttttcgtgtctcaccaacacaatgatcctcagctcttttagcgtattcatctttcatagttgaggttcttgaactcaaggaggaaggctttgataaatcgaggtttaggagtctgtcgaagttccttcttcttaaacggcaataaacccaagatatcaccgtca

SEQ ID NO: 44724 - DNA, 517 bp, Arabidopsis thaliana columbia
tttcttttatcacagacagagaattatcgttggaacagatccatttaatgctaaataatacagaaatgtagtaaattttcttccttgttttttttgttttacacagacactcactgagatatttccagaggaaaaatttcggatctttgttttttgtttttgcccttttttttctcctccgatgtctctgtgtgaaaaggaagaaaattaattaaccgtgtttttaaaaaataaaaatgaatactcctcgtgtacaagataataaatttgatgtacctgagatgacaatattacccctgcttggtctggtctgatatcttcaatgtgacggttcattgtgaacctagctagaccttggcagcttggctctttttcaagttttaaccatcggttttccagagaataatactgaattacctactgactatacaattttcttgtaatgaaaatatatgattttactaaataaaaataaaatatcatccagataggggtacaagggtaaaatagtcagaca

SEQ ID NO: 44725 - DNA, 363 bp, Arabidopsis thaliana columbia
tccagttactgttagagagacgtttcctaagatggtgatggaagaaagatcttgtcatactgctaacagagttggggatgtccaaatgggtaatggtcataagcgtggaagaagcgaagattcatccagcaacaatggtagtataggtgtggagactgataaacaggatatgttgtctaacaaagcccataagaagtgggtctctggaaaatgtgtgaatctttcagccgtggatgccccatgtttcacagaaatgatgactgtagatggtggtcagatggggcttgagagctctgattgtcatgaggtctacggatggcggcttcaagatgcattagaggaagtacgagatcgtgtggagaa

SEQ ID NO: 44726 - DNA, 590 bp, Arabidopsis thaliana columbia
tgacagtagtgctaattaatcgattgtaaaagtaaacaccaaaactatataaaaaaaatatttatattatttaaatctacaattatactttaataaagaacaaaaagatcacaaaatactataacaagcagagctagctcttcattaaggcatgaaactggaagcgattcttaaatatatgagcatgctaaagacatacggttaattctttcgattgattagcgaatttatttgaaaatccccattaatcttgaatatctctgattatgaaaattcaaatccatttacttaaaccatatgagaatgtaaaatggtgcttctttggatagtatatgttttattgaattttgtacaacaagcttgtccctttgttccgattcttgacttatactgactgacttgtgcatgcatatatacaaaacaacagttagagatacttaacttttcgtccaaccagcgtgtgataatgtcttttaaaagtgaagcaaaaacaatacaactaacgtgttatataacatgtgacacgataaaaatattattgtaaatctacatactatttgattcatatatgaagcatgcccttgttatac

SEQ ID NO: 44727 - DNA, 340 bp, Arabidopsis thaliana columbia
gattattgatatgttattatcctcttatcctattgttctgattctctctatttggctatttttactaattatttgtttgaagagcgttatgcgacatatgaagaatctatttctcattgttatgtcttattcgctgcagaggaaatggcaactcagtgcagattatgcaggggaaccaatttggctcgcatctgaagagaatgtctgttaacggtcgtattcaaggaggaatatttggcatttgtgaaggtctgcataagacatcatacctgtacaagaaatatttatcagtgaatcgcaaattctggatgctgatatgttaacttattttcaagggtgc

SEQ ID NO: 44728 - DNA, 353 bp, Arabidopsis thaliana columbia
tgttgttgttgacggcgcgtgtactaagaacaaaaatttagagatacaaaaggactgcgatgaacataaacgcgtaaggctacttgattaacaccagctcatgctcatcatatatattactcactaacaacaagtgttactcaatggtgattcagaaattgatagaaagcgaatccagagacataataggagaagtatcgagaactcaccaagcagtaaagtaataaaatcttaatctaacttgtgtctcattacataagtcaggcagaggacgtaacactaaaagtgtctatatcacgagatccgtggagagaactatgtcgacattggggatggagttagcagcagcaagt

SEQ ID NO: 44729 - DNA, 500 bp, Arabidopsis thaliana columbia
cacatgttaatttgcaacatacacagaagaaataagaccagaaaaacaacctcttttattagaacttaaaaatactgaagtattgaagatatttttgataatgagataacaccacaccactcatttggaatgacatactatatctgacacaataagtataatggcgcacaattgctctcatagataaagccaccaacaaagttatatcttgtgtatcgttcttgcaaccaagaacactaaacagatccacattataagttaagctataagatgaacatacaggtccaaaaacgtatctcattgttgttttcacagagaatttcgagtcatcaaattagcataactaaccccatattgcataagtgctgaatcctaattataattacataatatctcaagctaaggttaacaaaagcataccagactacgcttctcctcgaagtagacaggctcttccttaactttggccgttctcggtttcttagctttcggaacaggtt

SEQ ID NO: 44730 - DNA, 595 bp, Arabidopsis thaliana columbia
  unsure (1)..(595): unsure at all n locations
gtaacgtccgccagtagctagctactgagggacgtagctattatggtctatagatttgtggtttctttctaaaatctacgaaaatgtaacaatatgtcgttttttttgttaagcgttgggagatttcaaatggtaagaaaaagggtggatagatattgcaaataaattgactgagagagattggaattgacactgttgaataccagaatagaacagtaggtggtgtgttaggagagggtacgtagggttgggtcaaaacctaaataggaggagtctgacgaatctagtcttttgaaggtgtgtgatttcaaggcttttctttctttacctccatccacacactatgttgcacagtcctatgccctattcggtaccctatggaatgtttttttttttataaagaaaattgaattattttttgactactccaggtctctcctacaatgaaacatttctcatttatgcagtatattgataggtgtgaaaaaaaatccgcaatataagtcaagaaatatgcagtattaacagataagggcaggctttggggcctagaagcganaacaggggtccattttagatagagagagaatttggt

SEQ ID NO: 44731 - DNA, 485 bp, Arabidopsis thaliana columbia
tgcgcatattagttagcatatacagttctttgtatatacgaatgctaatttaattctcaacggttttcagacacaattggaaatcaatattaactgtaattaagtttaatcaaatataaaatcattaaaacgttgacgaaaaaagaaaagtattaattattaataattattaattccatatatggttttttacatttcaagcgtgtgagtttgtagtgtagatttgaaacacacgcgcatacaggcgcgtgggggataaacgtaactagtgtgtgtgtgtgtaggaaccaaattattagattggtcgtgacaatgtgaaccactcgctagaaaacgagccgtgattgccacgcgctttcaccacccgtctccatcgtcacgaactagccctgggagttcggttcggaccgaggaaaccgaaccgatctaaccgagaatttcggttaacggcgtaacccgaagagagaagtctgaaccgatcggtg

SEQ ID NO: 44732 - DNA, 513 bp, Arabidopsis thaliana columbia
gatgttacattttaaagctataaacaattttcagattcggatgttaccttccaagtttgatatttaatctatttttgtgaaatgttgcagatggatcctaaattcctaagaaaccagaggtatgcaaggaagcacaacgtcaagagtggcgagaatgctggtgtcgaagagtagatcttttgatcgtctgattgacagtttaagttttttttatgaatttcacttgtttagacaaaggaaccaatgttctacagtcagggattatgtctatccagattctcttatatattttgcatgttacttgatttgatgcaattctttcacttgttcgtttatgttcatgtagacctataatctgaaagctgaacctgatttacatatataggtttgtctggcctttacttgaatcaatctggttttattcacgatgcctgttacttttctagctttcacatttcatgaaaactccaaatggttctattatcatttgaaaataaccagatttgagtgtat

SEQ ID NO: 44733 - DNA, 313 bp, Arabidopsis thaliana columbia
gtgctctaaagttcactaccaatcgtcgaaggtgtgtggctgctttggttctcaggttcgagtcggtgcgccagtccgcttgatattttgtgcagtgaatcacacagtgcgtcacgcattccttccaccactatggaccctttgtcagatatagacacgctttagcagagtgtgggagagactaatgttgacgaggacgacactcgacacgacgtcccgacgcatcgtctgtcatcgaactcgtggctctcattccgcagagtcactgtcacaatgcccaacctgttccgctacacctctttggccgcagaga

SEQ ID NO: 44734 - DNA, 475 bp, Arabidopsis thaliana columbia
cagtaacggccgcgagtgtgctctaaagaaggggatatattgcaattataaacttgtctaagccattcctccacgcatccacgatgaagaaagcggtacgtgacgattgcgtggtcgaaataccggtttatccagctatatggcgttatcaaacgtaggaagagtaaagcccgcatcggagtaacttgcgtacggcttatcgccaaacatgaacacagaggtgttcttcggtgacgattcatttcgcagctcatcaggaacagcgcttgtctcgtcctggtgcagacgtcgccagacgaatttagaaacgagacgcccgaggcaggtccgagatagttgccttcaaaaccagtggctactggatcgggagagttacgccgtggcatttccacggacgcctgtgacaattatgagcgcacagtctttgcagtccgcgatgaatccttattcggcgatgaatttcgcgaattgggac

SEQ ID NO: 44735 - DNA, 476 bp, Arabidopsis thaliana columbia
caccgcttagattcggggttgataaaaccttggagctcagtttgcatgtcaacatggaacttggaaagtgaaaagataagatgaggtaagatatgaaacaaattttcggatgttttcgtatttttgccataaaattgaacaatgtgtcgttcatgcacaaggaggatcaattaatgaactgaactaacctagagcaacgtgttttcctttcttctgccttttctgattcaaaaagttgaccaaagataatgacatacacattagtgtaccaagtataaactgggacaatgccggttcggtatctatgaatgccctacacaaaaacttaaaaagatgcctttttcatatactgttactatataaatcataccaataacaatagtaataaaaatgttataaaaaacaatagtaataaaaaacaaatcttactaaattttaaataacagtttaaaaattctaaaaaacagtggaaaaga

SEQ ID NO: 44736 - DNA, 474 bp, Arabidopsis thaliana columbia
  unsure (1)..(474): unsure at all n locations
tnnnnnnnnnnnnnnnnnnnnnnnctaaagagaagcagactatctatattataaagaggaggaagtagagaacagagaggaaggctagcaaactacgtcaagggcataaaaaactctgacacacctcgtacccatgatcaagtgactagcagctagtccaatgccaagaaaactcttggaatatcctgcggctgtgtcgcgcgccactttgatgccgttcgtctgaggaagagctgaactggtgcgaacggacctattgaatagattgtcattccagcgccacgagattgatgagcatcgggtgcatagtcgctggtgttcccattccggcactttgtacgggaagatgagccaacaccatgcgcggcttgtctataatagaccctggtgtggatgcacaaatggggaaagggcaggaaactgtatcaattacatgaacgtagcctacaaaggatcggacgccatatgacgaat

SEQ ID NO: 44737 - DNA, 513 bp, Arabidopsis thaliana columbia
tgttcccttttagactaatttactttttaatcatttctaagctaagcacaatggtcctgtcgcagaatggaacttcacgattctaatgtgttacaatatattcatagtagtaatactaaccatattcatttcaattaagagaaaagaagaagggtctacatggtacggcatgaacaaaaaagcttgagctgtccataatttacacacttgcattacattcatacaaaatgctaaattacaaattttacgcacagctaataaccctaaagtttaaaagaaaatacaaacaagttaaaatgaataaaaatgaattgaatcctaatttttcacgataaaattgaagcccaatctatctcataagaaggacacttgccgagcatgaaattttcattccatggcatctctggctcttggcacatctcctgcaccataacatccgaagtcggtgaacccgaccatcactttcacccgacccggaatgttgttgtggcgctgacggctgctcagctgaag

SEQ ID NO: 44738 - DNA, 1148 bp, Arabidopsis thaliana columbia
  unsure (1)..(1148): unsure at all n locations
tatcttaaacgcagttgctcgttgcagttaacgtcaaccatgctgcatctcctgagcctagtttcaagctgtcatttcgaagcgttgtcagaatttcttataagagtaagaaactggcagctattattgttaatacaactgttttcatcgcttgattttaaaggattagtgactcgtattgtcttgtggtgtcgcatgaaacccgacagaaagcctcatttctagaggagtggttgagaggattgtgtgtgacattgaaagaggaagataatgtttctggatcaagcggcacaagcacttcgggtgggaagcagaagaaagagttgatctctagagctatacggtcgcttgccagaagtttgcgggctggacatagctctgaaatggctcaaaagttgcaggagttagatagcaatgtgaattgactgagcaagcaatgcttctcgatcgggttaacttggccctgtaatttcaactcaagtgactgtaaacagttcaacacatgtacattagctcccatgacaaattttgccaaaagcatcagaatgaaattggcggatatattatagaaaacatatgattttaattttgtgtgacatataaggattagtataacaccgtatgacccatgaaaatgagattttggagttggctgtcctcatgcgattagagagagctatcgtttttcagtaaagtataatactttgactattccaaatccaaagaagaaagacagacattggcgctaaggtaatccaaagtggtactttataacagaccggttttcgaagttttatatgtctgggccgaaccaagtattaacaacggcccattatccaaaaccctagaagccttgtttataaaatgacagtcttcctcaggagatgaaatgactttgatgcatccgtacgaaactggagctctgcaccaggtctaccacaatcatcactcatctccctgcgagccttaacggccatggatatctagcgggacaatctgttgatagaatctcacttcctctccagcgaaacgttgcgtctctcgttcttcaatcccgtacgagactttgagaaacnctgtttttgcttcgtgctatgtgattcactacttttgcgtaattggattttcacaacctaaattgatgagta

SEQ ID NO: 44739 - DNA, 639 bp, Arabidopsis thaliana columbia
ttttgaattgaacaaatgttgtttctaattcggtcaattcgaaccgaattaaccaaaatattagataatgggctcaaaattacaattataaccaaaaacattgatgggccaaactaaataaaaaccctagcccaccttaaaaacaaagtaacatagcccatttaaatttagggttttcaactaaaactgctcatgaggacgtgacggcggcagtgatgttcgacgtttgatcccacgtccgaccttctacggcaaggatagaacatgtggcggcttgaaggattgatgccatggacatggagatcatcatgactatgcatcatttccttgattgtggcttgaatttctgagatggcaagggtaagaagaagtagaagtgtcgatcactatgaaatgaggaaagagaagagatgagatgatgtctagatgtctagatcagagatgagatgaaggtgaattgatgagaagaacgatgaaagctttttttgtctgtaaattgcatgaggcggaggcggaggcgaagagaaagagatataaaaattagggttggttagaatttatataggtctgcttaataagctactaaaccgaattaacccgatcggttcgagtactgaactgacccgagccgacatctga

SEQ ID NO: 44740 - DNA, 730 bp, Arabidopsis thaliana columbia
aatatgaagtgataaactttagaatatttttttgataatatcatgctagattttaatatttaaaatatataatctgctttatcttaaaatagttaaaaataataattaagattttaaattaactttattctttttttttaaaaacaaattcgtatttaattttagtttatcaaaaagatttcttttatttcaaatctggacaaaaattgtcatttaacatatttaaaattatatttttaattgaaaatagggtagaatgtatttttcaaacaaaaactcaaaaatagggcaattttcaaaatcaccattcatagtttgtattgttatcaaatggtgcggtgagcgtggatcgaacacgcgaccttcagatccacgctcaccgcactattagagtcctcttgccgaatatattttattgtatccattacagttttggccgttgctacgacataaaatttcaactgtttcaacattgttatagtgatgtggcaatctatatcttatgtgattagatcattgttgacttttaatgctcacgaatccaatctatcgttgctatgctaatcttattcttgttagtgttttcttccttatcctttatgtagttgattaattttgaacacaaaatgtaagttctgatttaagtttcagttataaactctcatgtaaacaaactgtacaaataccttaagtcacatgcatgaaattgattttctgcttaacaaagttc

SEQ ID NO: 44741 - DNA, 594 bp, Arabidopsis thaliana columbia
actcatccctgggtttcaaaaaccttcaaagaagatttcaaatgccgattaacttctctgttgtagcaatttcaaagttttttcgttttgaaactttaacagtaaatagattgatgtttgggtttgtattttaatttatagatcctcacttaatatatgggttaccagttgattggagttggtttggaaaagggctttttgtttctattttcagcggttgtgttctttgaaaatgattaaaattttgtttttggaatggtttcaaaacggtctttaaaaaggattatggggtaatgactgtgttttacaagggtttttaaagtcttaaaacgacttctaatgactttgaaaaatggttttacaagggtttttaaagttctttaaacgacttgtaatgactatgtttatgtttcgaaaacaacaaatgcataatagatttacaaaaatggtttttaaaaccatttcaaaaaactgtgttaatttaatgactgtgttaatgtatttaatcaggttttgagaaatatgagtacaaagaaactgttctccctagaagactgtccaaccaggcagcgaagtagataatattacaagggt

SEQ ID NO: 44742 - DNA, 539 bp, Arabidopsis thaliana columbia
tttcatttttcacgtatgtttcatatttttttttgttttcttgataatacttttaatatcttagagatgtattatattttggacttaatcaattctcaaatgcttcatatttcagttatcaattctaaaacaaaattaaatctcaaaatatggtcagaagagaaaatcaggtaaaacttttttcagatgggcctaaacgggcttttaaaagtttgacaggcttaaacgggtataaagtaaacgggcttcaaaaaagttgttaaacggttgcggacctaaacgggtccgtgccttaacgggccgggtagcccatattaacaatactacgtattaaacaaaataaaagtatagaaaaccaactcaagaacctattacgatgatttgaatattggaaattagtgttatttagaattcttgttattataaagtttatgtcaaaacatactttggcaattttgaaacaaaattataccagaattataatggtatatgttttgggttcactataatgaaggttttttgttacggctatacaaaga

SEQ ID NO: 44743 - DNA, 336 bp, Arabidopsis thaliana columbia
gaaacacaactctgttgacgattctatgattcccttggaaagctctgcgaaatctgcactttacgaccataggggtgatccaacattgtacaccaccaaactgaaacacaatgtttggcaatccaagtcccttgaccactctccacaccattttttccttgagaccactctacattatctttcccatggagtaacaaaaatgttgtgcccattattctctctttcactagcaagcaaaagtctgatacaaagtagaaaacctccccttcatcaaaagccatcaggcaccacacaaccttgaatgcttagatctatgttgtaatgttgtagcaaatc

SEQ ID NO: 44744 - DNA, 447 bp, Arabidopsis thaliana columbia
tgcagattgtagatgtgtttatgagcactggaagcccacatcactgggttgattatttaatgatgcctcaagacacaaagctttcaagaaccacaagtgactcttctgatgaagctgtgtccaagtttcatcaactcatggttgagactcgagaagtactcatcaggtaagtaatgtctatctgctaagataaacacacaatttttcctctttcttacactcttggatgattgtggggaataaacttatctcttggtgtctttcttgttgcagcactgaattcacaaatatagtcgaaatttcgctcaagtgcttcacggatgtgttggtagaggaaatggaaacgcagactgaagcaggcggtttggctacagggaaaccattggcaaaggtctaccacagattgagaagcaatgaatgtgattcagctgaaccaagcaagaacgg

SEQ ID NO: 44745 - DNA, 230 bp, Arabidopsis thaliana columbia
gttggttttcttttttcgggaaaaatgttgtttaatacgcgaactttcaaaaagtagcgatttaatacgttaacttcttatatagccatttaatacgtgtaaaaattgttgaccggccatttcacacaaacgtaatcgttgatcaggccaaaatccacacgacgtgatctgacgttaccagaccgacaacggccgttaccatagtttctgttagtctccaaatacgacgt

SEQ ID NO: 44746 - DNA, 602 bp, Arabidopsis thaliana columbia
  unsure (1)..(602): unsure at all n locations
tgcgtttttgcatgttgacaatgttaagtttgataacaatgaatttcttactatttagttgtagttaaaaacaattttgactttcatttttcatatttatgtttgggttttagaaaacgatcaatcgtgaaagcttaatttttgtttttatagtattggatgagaccatatatttacataagatttctaaaaaattgtgtgttttactattttatcgaattatgttaaaaaatctattggaccatctcagtaccaaaacatttattaatttatagaagttattaatttatcgactatcgcgtggtggcgataagcctgagtggatgaataatagtgtggaataatttggtcgatatgtttgttgaattttgcccaaaagatgtcggtttcagaaattgaattttatcgtcttcttgatgaacttccatgtaatgttttttttttttatctatgaccaacttttctttggacttttgtttttcatttaatttttgcataccgtgaattctattgttaaattttattatgaatctgcagtaacttgagtttaaatcagcggttacttgacanattactcagctgtaacgaagtttaggatgttg

SEQ ID NO: 44747 - DNA, 866 bp, Arabidopsis thaliana columbia
ggaaaacattacagatttttccggcagctcgaagcgctatacggggattctaataacttggtttcttgtcccaatcataacacgcagttcatgagcagtgctcttcatggtttccatactcaaaaccctatgaacgttactacaacaacgtccaacatccataacgttgatagtgttcatggttttcatcaaagccttagtctttctaacaactacaactcctccgagcttgagctgatgacttcctcttcggaagggaatgattctagtagtagaaggaaaaagaggagttggaaagcgaagataaaggagttcattgatacgaacatgaaaaggttgatagagaggcaagatgtttggcttgagaagttgacaaaggttattgaagacaaagaggaacaacggatgatgaaagaagaggaatggaggaagattgaagctgcaaggattgataaagagcatttgttttgggctaaagagagggcgaggatggaagctagggatgttgcggtgattgaggcattgcaatacttgacaggaaagccattgataaagccgctgtgttcatccccggaagagaggacaaatggtaataatgagatccgaaacaatagtgagacacagaatgagaatggaagcgatcaaacgatgactaacaatgtttgtgttaaaggaagtagtagctgctggggtgagcaagagattttaaagcttatggagataagaacgagcatggactcgacctttcaagagatattaggagggtgctaggatgagtttctatgggaggaaatcgcagcgaagttgattcagttagggtttgatcagagaagtgccttattatgcaaggaaaagtgggaatggat

SEQ ID NO: 44748 - DNA, 560 bp, Arabidopsis thaliana columbia
taacaacacattcttacgaaattaagaaaaatggtagatctgagaatcactaaaaaaaagaaatacccagaacaatgataatcgcagatccgtaaaaccctagaaaaagcttggattttgattttgcctcgagattcaactcctttgtctctcctcctcctaacagtaactttggttgatgagaagtagaaacggtttaactaaaccaaatatttgcgatcaaaccagtaatagaaccgagacttgattgtaccgaagattatacacgggcttcaatggtctacattagtaaagttactaagcccatataatattgggttgggccgttcgaaatgaaaggataagttagtaatttagcatcggaacaaaagaaaccctaatctcgaccacttaatacgttcctcatcttccaaaaaaccctaaaagctcatttcgcagctgcctccttttcgtttgccactttttgatcaagcgaaactccaaaacacagagccatgccgccgaagttggacccgagccagatcgtcgatgtgtacgccgtgtaccggagagaagtggga

SEQ ID NO: 44749 - DNA, 507 bp, Arabidopsis thaliana columbia
catacatagtatatgctagaaatttatggtcaggagatatctctgacatttcctcataagcataacctacaaaagagacaccaaaattgcttatccctcttaatccaccccaagtataagagcctcaaatatgcttatttacctccaaatctctcagcttcctgattgtaatcaagcagcttctgctcaatcctcttcccagatgtgtaatcaaaccctgcagcaggagacttatgagacatgaactcctcgtgcaagctcgctagcctcctacacagtactggatactgcttcccttcttcaacccttctataatacaacctaattccaccaattctcaaccaaatcaatgtccaattgcagcaaaaaggacgaaactttcaaactaatcgacgagtttacagatagaaaaatccaagctttttatatcttaaaacgatgctaaacaagagaatcagtataattcaattgacccaccaaggtccccaacgaagaggaggcgtggag

SEQ ID NO: 44750 - DNA, 562 bp, Arabidopsis thaliana columbia
cggattccagggatctgttatcttggacatgcttcaaggtttgggccttaaaacaactgtttctcctgagacaatattggagagtgcacgattggtggagcgattgatgcacaaggatctggaaaaggcacattcacgaggtaaagtgcttttttcatttttagaagtcaatgctgtgaagtggctgcctgatcagtcgagtgaggatgatggagctataaacaggatattttcaagagctgcgacggctttcagaccacgaaatctgacgtgtaaccttgttaagttctggagtgaacttaaaatgatttgctggtgccccgttttagtctctgctccatttcaaactttaccatggccagttgtgacatctactgttgctcctccgaagcttgtacgtccaaaaacagatatgtggcttgtatctgcatccatgagaatactggatggtgaatgttcttctacagctcttgcatataacttggggtggttatccatccaggaggaagtgcaattgcagctcagttgcttgaacttggaaagaacaatgaaattcttattg

SEQ ID NO: 44751 - DNA, 643 bp, Arabidopsis thaliana columbia
ggccttttgagttggaggaacataattcttttggaacaaaatgaaacctgagcaggataagtaactcactttactttagataaggcatttggctagtaaggttttatagtctaataaacccgagaaagataatcttaatgcctttactcagaactcagaagcagaagactatataccagaaagcgacgaaagcatccgaattttgagcaaaataacatcaacagattccaactacagggattccaaggaatcaaaatgctagtatttccactacagttaaacatcaacaggaaacataaaagctaaggcctacaacaacgaaacacccgcaacctaaacaaagagaggaaaaagccttacttcactaagtagccttgatcttatcatctccaacaacagaaagtatgggcaaactattcaagaattcatcaagtccctcaaagaacccaatcccttccatattatctacctccctgttacttccgatcccattgcctgcatttcccccacctgccacaccaggctcttccacttcattactaaactccacattcaaatccaacctccccaggttcttagcgcctgttcccattcgttttctagtaatataactccctggtttagacataaccccagttgaaga

SEQ ID NO: 44752 - DNA, 600 bp, Arabidopsis thaliana columbia
agcgtcgcattgctataaacacacaaggatttttctattacttatgatctgagaaagaaactgaaaatatcattaaatggatcgtcaacttacccgaatatatgatatgccatgactaaatctggcgattctttgacaatatcagtccgaagatttttcaaggctgtcaacaaaatgccggagagattctagaccgacattgagaaaaaataagcagcctttagcaatttagagtggtggtttttaatctttgagcaatagatagaaacaaggatacaagaagatataccgaatcttgtggggcagcttttgccattggaagggtagtttgcttaagtggaacttttgctggatttgctgtggatttgctctgctttgacacttttatggtcgaaggaaatctgtaagagatatgcaagtcttagctaaaactaacctttttcaaaacgaataaacatataaccaactctattagctcgctcaagaatatagaactactgaagagcagcaataacattgcagtaagaacaggtagatttcagaacattcccaacgtttgagctctaatgacacaatttggttgcagtagttatgtgacag

SEQ ID NO: 44753 - DNA, 538 bp, Arabidopsis thaliana columbia
cctagaacatattaaattttgaacattcctagaaccttaaaaaaactccaaatgaccagtgaagcagttacagaccttgcattatggaattaatatgtcaaggaacaactgaaaatgtggaagtcagacggggatatgaatgaaaatagagagccttctccattgcagaggcatgtccaagtgtgcaaagtgatgaggaatgaaatgcaattaagatggcagtgctaatgcggatggaaagtgactgattttgagggataagagatggatttccctatggtccattcatggccaggtgtgagtataggcgtcccaagattatcaaacacatcctgcgtcaaagaaaatgcggttttacactaattttttttctaaaaatcttattcctctgaagtactttccaaagttcaagcaggctgcatcaggtggccaggtgaatgtggtcaatgtttagtactccttccaaagggagatagtccccagagccttctcgtggatggaatgaagacgagagtggatttcatgacatgcatttgaa

SEQ ID NO: 44754 - DNA, 542 bp, Arabidopsis thaliana columbia
gttgttatacatataaaatatccaaagaataaaagccttgtacgatcggggtattggggtccgtaccaacttgttgacattttttatgtttttggtgtgtggcagactagattgaaacaataatgactaagcaactcagtaagagtcctttttttggactcagtaaaagagtccaagttttctttgaacaacaaaattttgttgaggtgtgtatgcacttggttgggaacaaacaagtagatggcaaagatcattcgaacattggagcccaagtgttgagggcactaatcttgtcgattacagaaacgaaattatttggggaagctgcaagaaaaagtttagttaaatcttttatattccttaatcaaaatgtatcatgcatacactatatacaattcactaaagtatgatagttaaatacctaattaatatcatgatcaactcctaccggttcatctaactaatccagctcagcataaaaaccctcacgcgtcgctccaattaaggggagggcttaactagtgcccaacttactgggctag

SEQ ID NO: 44755 - DNA, 481 bp, Arabidopsis thaliana columbia
tgtttagattccaacttcctggaggtcagtatttggaggattcttccacgctgcagatatttttcgattattatggtagtacagagtcccctctttcgaaagaggtatgtctttattgttatttgtttttttccgtgcttgactagaagaaacaaaatggcatcttttgcatcaaagatagattttgactaccttttttttgtgaattttttattcactctcattatgaggacaaatgagtcaattgcagtaatgtcactgatgacgtgatttatttcatgtacagttgggactcagtaggtattatagatgacttacaatttgttatgtcatcatgtatctctgtcttcacttctaggcacttgagtgcttggtgcgattggcttctgtcaggcgctctctgttcacaaatgatgctacacgctctaattttctagctcatttgatgacgggaacaaagaaattcttcaaactggaaaag

SEQ ID NO: 44756 - DNA, 914 bp, Arabidopsis thaliana columbia
caagactgtaaaatcatactgagtcttttcatggcacaaattcaagtagtccgaacaagctcaacgtgaatataaagtctgtcgtctgatgtctatatcaggagttattgtgaatcaatgactggatgcaaagtcggtccagggccatgttctgtgggtatcatcatgtcattcccaaaacagaaggtaaattgatttcattctattatgctgtattattgttatttattacaaaatagagcaagattttatctttgatgcaagttgtatgtatctcctatttttgactcaaggtgatactgttagtgaatactgcaagttggggttggggtgtgcatactctgtgtgcagcgtcttaataaccactctcgagaactcaggtaaagcaaattctccgaactcatatattataattatttttgttaagtaaaagattatgtaccaagaaccatatagtattgttattataactggaagatgagaaattgagaatacaatgtatattgatcaccagaacaatgtatcaattttagatacaatcgaacatatattgtttaccaaaaaactagtaaatcagtgcaagtacatgaaagaatttagtgttcttactggggagagtattaaagtaccttcatatcagatagatcagttcttcatattagtaagcctatgatttatgttcttccaaagcattattgtagaattaatgaactcctctacctatgtttttaactttttaaaaagtctagtgaagccggccagttaaatttaattacgttaacaaatgaaagcttttttccataatttatgtttattacttcaatcttaaaacatcttacacaaacaccacatactgtatatatgagcaacaaataaatgataaagataaataaaaacttgattgagttacaaag

SEQ ID NO: 44757 - DNA, 508 bp, Arabidopsis thaliana columbia
ccatagaactcgaagtgaagataacaagattcttgtaaggaccaatgtctcttgccaaagatgattctacatcaaatattccataaggatcttgttgtcttgattccttataagacacaagattcatcgattttgacaagcttgaggttgcattgtcgaccctaaagcttcttgagctcaaagagaaattagtggatctcgagatgggtcctgttttctctagctccatgactcttgtggttctaagaagacgaacgtagatgaaattgagacacttcatgatgttctcggcgagcttgtttgggtgccacttctgaatgttttggccgtcttccatcaagattgtgcttgataaagattttggtggaatgtctagtgatgcatcaagtgctgctacacgatccttattaggctgaaataaatcataaatcaaaattaattgaacgaatcaaacatatgtttcaaacaaaggatcatataagaaaatcggaccttattaggagaggta

SEQ ID NO: 44758 - DNA, 480 bp, Arabidopsis thaliana columbia
taaaaaactcgactggttcaacaagactggattgtctttaaactactggttcaatgtattttgggtacataatgaaaaaaatacacaatccgccttggccacgtatccatctttggcttagttgatgatgataatacttttgttttttggtaaggctgatgatgataatagttagaagaagttcatagaataatccaatggatttccaataataaaacacagaaatagatataatccaaacaattgccaaaaataatgaataagataagggacccacaccaaaagctaaaagcgcgtgggtcagattacaaaaagcgaaaccccaaacccgtggctagacagcggacgaatccgtcccttcaaacgtggctcacctttcgaaccacagagagcagtttacactccaactgtcaaaaacgtgttcgcatgacgtcatcctcaacgtatctttatcactttcttaaactatagactgttttg

SEQ ID NO: 44759 - DNA, 536 bp, Arabidopsis thaliana columbia
tggcgggattagagaaggtagccctgaatttttaaattatattgacattaaaataaaaggaacttatacaaattttgttttttgagatggattttgcatatcttagcactagtcaatttcattgtttttattcatcttctttgagttaaggcaaagtaacaatatttatgacaattccattgttgtttttattcttgtgtagatgtattgctcgacgatttgctagttgctgaaacatcccagtcttcaagtcctgaaccagaagaagataatcctgataattgtaaaatcaaaggaaacttatatagttttgactttcatatattagtcctatggtttttgcatatctaagcactaatcaatttgactttttccaagtttgcagatttcttccttgagttaaaagtaacaaagtttcttttaacaataattgcttgaattttattctcgtgtagatatgttgctcgacgactatctaatggatgacctaagcctttaagttctgaaccagaagcttcatcctttataatgaggag

SEQ ID NO: 44760 - DNA, 468 bp, Arabidopsis thaliana columbia
ttcttttttctatgacatgcaatagtaaaaactactctatttataaattaacgtccaaatgataattagattttgtaagcgaaatttgtgaactacgctaaataattaaatacaaatgttaaaaagaagggttagatgcaatgtatcgaccatatattacaatgcaagtgcgttttcacaggacaatattatattcaaatcatagaaattgacttaaatataaaattcctgacgaagtaatatatataagattgactcataaataaatgtttctgaatgtttttaaagtttttttaaaatacatatttgcagtataaaataataaaaaacatatttaaaaattgtttctaaagacacccacagtttctatactttattttaaaatgatatatttcaattcattttcaaaattttgacaggtttaaaaaaattataatgtattttcaatatctaatataataatatata

SEQ ID NO: 44761 - DNA, 542 bp, Arabidopsis thaliana columbia
  unsure (1)..(542): unsure at all n locations
tttaatagatattaatttgtatttttaatttataaaactcaaaattaattactttcttaaactttatgcttttatctaaaacatttaatattatgaaatgtagggaatattgtttgttagtatgaccatgttcttttcttcgccgctcaatgagtgacatcgacaaaaaaatacatacggaataagtcggtggtattgttaaaatgagtcgttgttagtgttaattgagttgccgcagctgtcgcttgaaattccagtgactcttctctctttctgcaacacctctctctctctccaacgacacctctgtcgtcatcgttttgcctctgctgtcgtcgtttagctttattgatggctgacttaccgtcgtttagatctgtcgctgagacaatcgctggcgactctcttttgaacacggcctatgtttgatcctgctttacaattttttaaataaatattgaatatanaactaaaggagttagttgacactttaattttagtttttaatgcaatttattattttgatggtgtttaaatgagag

SEQ ID NO: 44762 - DNA, 472 bp, Arabidopsis thaliana columbia
taattaaaataatcaattgattttgtcgattcagactcatagattaactttattaagcgctggcttagccacaactaataatatgtaagatcaagaagtagaaattgttgtgggagataaaacaaatccaagtataaccatgatgagcaaagaatgtatgtaaaaggaaaaattcaaacagagtttcttcttgtcatgttccattgtgataggattaaaagatccaaagttatcataactctaaaacacgacccaaccacattccccatcaaaagatttgttcaaggcaagtaagtctcatatgaacaaaacctatgttcatatcacaacggtggttggattgatttcttcacctcacaggttgctgattgtagtttttcttttcttttttcttcgctgcggccaactttgccttcctcgcagctgcttcctttgcagcagctgttgaagcacatcaacctccttgcttgat

SEQ ID NO: 44763 - DNA, 625 bp, Arabidopsis thaliana columbia
tagaatgtttctccctaattcctgtcaacaaaaaaatttatacaagtacataagtaaagagagcgttttctttccttcaatagagatagccagatgattataatgctcaccatgccaaaaaccttgatccccagtatcctcacattctacaagacgtcggataagtaaacaccatccaagcgctaaaaacctgtcctcgttcctcaaaatgatattcgaaagatttctcgaaacggcttgaaagagaacttcatcttgaaatagccaatttagaagtatcatagctgggttaccatgcttagaatccttaaaccttaatgtctaaaaaacaacaacaaaagtagagaaaccaacacgtaagaacatacaagataaaagaccggacattacaacaatcaagcaaggttttaacttttcacagggtttaagatattacatgttcgataatgggtacaagaatttcactcatggcttcgtctctctcagcagcgtctataacgcacttttccaaaaaccagagtgcctcatcgatagagcctaacgaaaacaaacagattataaccccaaaagagcatgtgtaacataaataacacagattaaggataaattgaaattgaaacagtta

SEQ ID NO: 44764 - DNA, 523 bp, Arabidopsis thaliana columbia
ttaaaattactgtttcccaagtcatttcgagaatcttctccgctgagcttgctggaagtaatgcctgcctctgccaaggctgaataaaaacccaaaaatatatatcatttacagaagttctaataaactattaaaccaaagtagaaatatctcttatcgatttttaccttgaatgtactcgaagtcagggtctgaggtatttatatcgtcaaatgcaggaatagaagagccagctaaagctactgctggcacaatcatgtgcattggatttctaaaggcaagagaaacacattgtgtcaatccaccacaaacgctaagagacttatgacttattggaaaaatgtgctccaagtatcattagctctctaataacgaattagaacgaactagccatctagcatactctcgtttagtacacaactcgtctgccactatatcatcttcatatatctgaacaacttaattacaagtaacatgttcatgatcagagctggacaactaaggctcaattcaagagcaagtt

SEQ ID NO: 44765 - DNA, 590 bp, Arabidopsis thaliana columbia
tcgctccaaagattctcttcatgtttctccttcaaatcaactaatctctctgcgctataatcagatgatacagacacaaagccttctccgaagaagaagaactcgattaaacttatttgcgtccggccatagcttatatattcaaataaaataaatcggcatcatttgtaaatcttgacatgtaaattatgtcctttactttttttggtcttttttcaataacaggccttaaaacactttgggcttgtagcctggtaattctcggcgccggctcttttttttactttgttcccaaatttttatttattatttatttttcattaacatatagtagaaataattaaatttcttagattacgattaattcataattattaaaaataattgatgtaaccacaattttattgttttgttaataacatgtgaaaaacctaaaaatatcaaattcttttttccaaaataataatctattagaaacccatgaatatttaattatttataaaaattcttaactgtttagttttgtataagatatggagaactggtatggaaaactgaaaatcgactgagatgacaaggctaagatatga

SEQ ID NO: 44766 - DNA, 291 bp, Arabidopsis thaliana columbia
ctggtataatattacacattattctaattatatttttactctaagcaacagttacacatacaatcatgaccatgacttgtgaagtgatacttgtaactagatctacatttagcccatgggacttagtacataagcagcattagttaccatggggtcgaattcacagcgtaacagatgaccctcgtcgaattgcggttgtcgagctctcgcgccatgacagtggaccggtaactaccggggatcagccggatagcaatcggttaggagtctagcacccaataactggcaaat

SEQ ID NO: 44767 - DNA, 497 bp, Arabidopsis thaliana columbia
tggtataatattacacattattctaattatatttttactctattcaacagttacacatacaatattgtcaattaattgttaagtgaaaacttttaactaaatctaaatttagcccatgggccttaaaacttaagtattattagttaaaatggcctcgatttcaattccttttatatttccctcttctaattgaggttttaaagctctcccgccaatatagttgaccggtaactaccggttattagccttataccaaccggttaaaaaaaaaccacccaataactggcaaattgaaatcgctctaaccacgaaccgtctctgaatctgaccgaccaccattcttctcgcgccggcgatttcactgtttacagagaaatctcgagaaccctaacctgggtctctctagatttctttgaaatttcgagaatctagggtttaaactaaaatcgagtccttgagtttcccaatttaaatcgttatgagctctatcaatatca

SEQ ID NO: 44768 - DNA, 575 bp, Arabidopsis thaliana columbia
cgccagtgtgctctaaagagaatcatgactgattttctttagagtctgtgacacatttttccgcgatttaccctttgaaaccttgttcttggcagccagttgtgacccttcggatgctagtagatatgaggccggatcgagtcccggttgccaatggtcgagtatgcgttccgcacttcgagaagtcggtcctgttttgtcatatcttgtgtaggatgataatactttgaaggttggccgctggtccgtctggcgctcgggtaataccgagtcccctagcgtagagctttgcgcggctgcggtatctgccggcgacaggacgctctcgtcagcggaactcaacagtgccccataagaggatttctcatcgttgagtctcgatagggtgttcaggccactgctagaaaaagcggaccaggtcacatcttttttcgtggtagactcagccgcttctttttgaggtaccgagataatctgggaaagcacaatatcggccacaagctgccgaatagccttctcttttgtgacctagctcgtccgggtacgtcagaaggcaagtcggtgaccaatgatta

SEQ ID NO: 44769 - DNA, 490 bp, Arabidopsis thaliana columbia
gctcatcagagcgtggaccaacgcgccactgccagtccgtcactttgtccgcatggatctccgcgttttcttcccgtttgtttaatgtttctctcctctttaattattgtaattaattagtaaaaataatagactacttcaagttgttaagtttgttaaccatagttaatcgttgacaaagaaaaaagaaaaaccatagttaattggtcaacttggttaaccaactatagtttacgattttggtcttctaagtttacaattgagccaatttcattttcatccacattgtatttgatgttgcaaatagccaaataatatataacctattagtagattaataatatgtcctacgagtataaggacataaaatttgaatgataagtgccgctagcaaaatactctgaattcacaagttagggaaaactcgattatgctgcgcaatcaagtgggagtgacataaatcaaagtagttggttcaagagtatagtga

SEQ ID NO: 44770 - DNA, 710 bp, Arabidopsis thaliana
ctttggttgtcttgtcttctgagttctgactaatcttatgagtcgtcaagtctcgcaggaaacacatggcgggaactttgacgttattctttttttcttacttaagcatcttttcgtaaatgggtctttaaacttaaagcccaataatcattaatgggcttatatatataaaatggttaggggtaaatgtgtaaaaatccacttagcaaagacttgaggttgatgatataccacccacatagcggcgcattatagataaggaggggaaaatcagctttttggagaagaaaccaaagaaaacattcgaaaccctaaaatctccattagaattcgaaaatgacaaagaagagaaagctcgaaggagaagaatctaacgaagctgaagaaccgtcgcagaagctgaagcagacgccggaggaggagcagcagcttgtaattaaaaatcaggataatcaaggagacgttgaagaagttgaatacgaggaagtagaggaagagcaagaagaagaagtagaagatgatgacgatgaagatgatggtgatgagaatgaggatcagacggatgggaatcgtatagaggcggcggcgacgatctggatctggcaatcaagaagatgatgacgatgaaccaattcaggatctgttggaacattttcaaaggagcaagttttgagtcttcttaaggaagcagcggagaagcatgttgatgt

SEQ ID NO: 44771 - DNA, 615 bp, Arabidopsis thaliana columbia
aaaaacagagaaaagcaattaaaaaaggtctttgtttgttactaataaaaacagaacataaacttttagagaaacaaccactagaaatttcatatatgcatgaataaacttctttagcaagaaattgaatctcttaatggcatctctttgtcataaatttcgtatacatagacaaaatcaaaaccctaatcacaatgtaacagagaggaaatcaagttcttttaaaactacaagtcagacattgtaaactatatatatacctgtttatactgaagctccaaggtgtaagaaagaagcaagggactaaaatcggtggtgtcaggtctcgagaccgagacgatcgcagccttgggaagctcgtcgaatatttgacttccaccgccgagagaagaagaagctgccgccgccgcagcatcagctctggtcattctgatgactccgtctgacttaacgccgttaggaagtagtaatttatccgtcgacatcgattaactccccaaaccgtcgtcgaaactcgccgttcacgattgcatgtccgaaatactcgagattccactgatcaataaatcgacgttatataggtgtctattgattttagatttaatttagaatata

SEQ ID NO: 44772 - DNA, 705 bp, Arabidopsis thaliana columbia
tgtgatagatgatatctacattgtaacaaaatatgccatataaattggtattttcctttacatatgaagaaaagggaaaggaaaaattaaatggaaattcatgtttcacccaacccctttattagactcttaaagtgtcattttctcaaagggaacagagaagaaagagacttctcatttccctcataccttttgccatccctatttttctctctctaattctttacaactgcttttctcttctcaccaagaacaaaaattcattaagttaagaagaagaaaaaaaaaactttttgaaataaataacattatacccctcctttttcccataaaattcatcaagattatctcaaaatcattcaccaattctctcttcttatggagcttttcccttcacaacctgacttgtacttgaagatcagccgaagaagagaagaagaacaagaaaaagaaagtcaagaactacaagaacaagaagtcgaaaggagattagggtttcagagtaaagcctcagatttagacaacaagtcttcaaataatctcatccacactctccagttcacttcaaacaatgaagccaccaagattaatagtaatcaagaacacaaggaatctctcgatcaagacttgagatctattttcatgatgagaccaataagaggaatcctctttaccagaatcaagtccttgaccactactactact

SEQ ID NO: 44773 - DNA, 515 bp, Arabidopsis thaliana columbia
ggtgtgaaaatttctggtttgttttagatgagatgcatatatgtatgtatgaacgaaaacagagaaaaaaaatgggagggacggacacaatactgctgttgttgagccttaaacggctttgacaagctgtcttttttccttaatactgtatgtgtgcataactcatataccacattcatcattttgtgtaacttgcttaaagatccattccatggatagctctcttaactatggcctcttgtttctgcgtacggatgcatttataaaatgttgttttttcatttcgctaatttgacatttatggtagatacgtgtgtttttggaaggacacaccaaaatactagtagacgaagacaccaaaccccacttggtgtgcatatcaaagtcagaagatggagactacttggaagtttatttgatcaaaactcgtgtttgacgttgtagcttattaagaaatgacttttaactctcaaggtttacctggaacatcgttttctttttcagcgaatttctgg

SEQ ID NO: 44774 - DNA, 490 bp, Arabidopsis thaliana columbia
aaatcaaatgttacattttctacaatgcccatgccttcccaagattccacttcctttttgtttttcagttgcttagataaagaaaggtgatagttaaaaaacgaaccaacacataacaagatgttgcaaaatcctacttatgggatgataattttgtcttttagagagaaatgaagaaaatgatcatgttgtgaaaaagacccaaatcttttttcctatggaagcatcatttccttggcgctctgtttcttcttcttcttctccttcgttctcctcttcgatcatgctgatattctcatcatcttcttcaccatgctctcttatttcaccactgcctcctacttccaactgcggatcttcgactgggttctatcctgtgttgttaaccttgaacacagtttctgtttcaacctatataaaaaaaccatggttcaaaattatatcctaagattaccatgcccatatgttcaactcagacagaaattaagaa

SEQ ID NO: 44775 - DNA, 784 bp, Arabidopsis thaliana columbia
acacaatgtcacaatctcatgtattgccatagataagttccggtttaaaatgattatcgatcatatattcatattgatcaagtagttaccattatctgttgtctgttactgtaagacttatattactgtcttgttggtaattaatatatccatttaacttgatacataaaacatatctgacaaacccttaacataatatttaaagtctgatccaaaatctaaacatttctcatctcatttaatattcgtccgtctgttccaaattgttgcaatttaccaacacagcctggcaccgtcgctcgtgcatgcatggtatatagtatataattaaaccttaagactatatattagaataaaaatctttaaaactatatattataaattgaaaatctaaacgaatccacaatgtaccctaatccacgagtgcctcttacgtacaaagaaggttccttgtgacatgttttgaatcatttaaatcattgttttgataatacctccaaaatgagctgttccccggatgtcccacgtccgtacaaaaacccaaacttgggaaccttcatcgtactttccctcagatccttcttaacctctatatataatctcattcttacacacattcaatatatctctaatcttcgcttaaaactctcaagaagccctaaaaaccattcacaattacatcaaaaaataccttttcaaattctttttttacattcataaagctaagtatctcgaatagattaagatctatctatggctcagattaactttgagggtttgagag

SEQ ID NO: 44776 - DNA, 542 bp, Arabidopsis thaliana columbia
gaggatcgaggatccccagtgtagtatctgttcttatcagtttaatatctgatatgtgggccatcgcaaacagaatattaactctattttttaagggaggaagcccgtttagatagcttgctatctgggctttcacgagtctcccatgcgttgcactattgcgagggcttggctcaacccgccatttattcagtctaaggaaataagtacaaagctaaagtgattaaatcgaaaagccaaataaaatccatgaacgtccgtctttcttgtatagcccatgacagttgggcttaaggagcccataatcaaaacccatacaaaagatgtatatattagtacctaaataaattgcaattcgaccactctgtttcctgagatttatctcagtacccgatactctaaaattgacttacctgaaattcaacataacgattctcaaacttccacgtggcaatatcacgtccttgcacttggtcttcacgattttcgtttttaaacgacgtcgtttcaaagagcattataccgtcgtcgatgtcgagaat

SEQ ID NO: 44777 - DNA, 568 bp, Arabidopsis thaliana columbia
cgccagtgtgctctaaagacagggggaacagcaaagcagttcaagaatggagacatacagcgggacgcattgtgactgatgaagggtataagagatgaagagtgaaaagtcgttggtcgcaaagaggtgagtatcctgcgccttttgtgggtgtgaggagaaaagttcgatcgaaagcagagcgaatgatgcttcgttcggtcgggagccgtgtgggttttccgatttgggaagtgagttagggcaagccagttagggcactactttttgatgcttcaacggatcgagtcttaaacagccaatgaacgcttacaaggtccacactagtccctcgctacgcacggaccatctaaggtaacgtatataagcatcatcctgccgacaccctttaatcttttttccttttcttttccagctctctttgccttttggcttagatcaagtgtagtatctgttcttttcagtttaatctctgaaagtgttctaaggaacacaacattgattaatcttatttttggtctgagcggcaggacctctgtgcttgcgcatgtcctgctgcacagtgtca

SEQ ID NO: 44778 - DNA, 548 bp, Arabidopsis thaliana columbia
tctagactatttcaaaaagactagaatactgaatcacaaaagtatacagacatgccataggctgcagagtagaagaaattccagggaaaagagatgcggcagagtagcttagagagacattcttagtacaacttttaatatatttatatacatattcgggtagtactcagaatccctggcaaatcataacatgctatcagtcacttctttatacatttccaaagtctctaccagaaaggagcaagttaaaacatctgacaatactaagggttaagaatatctaacataatcataacatgctttcagtcacttctttatacatttccaaagtctctaccagaaaggagcaagttaaaacatctgacaatactaagggttaagaatatttaacattaccagttgaactttttcaggttttgcccaacagattttcgtcgactcccagatttatcagctggcttttgcactgtagcagagaagagggtctctatttctgatacatcaaattctgatggactagcagaaaagaaagaaaaatatgattaatt

SEQ ID NO: 44779 - DNA, 649 bp, Arabidopsis thaliana columbia
ccatttctacttttattttgttctgattggttcaaataataattaaaaaattaaacaataaaaataataataaaatttatattattttataaaattgaatttctcagtgatggagatggtcttaataaccacgattctacgttcccctcgaggaaagttgtcacctaaaaaataatttattatgttaatttatactcactataacttaagttctaaggttgatttaaactgttttatatcttctgttctcatttctttatgccgactcgttcataattatttcttacttaaaggctaaaaaaaaagattatgttggtatgagcccacatcactctatatctatctagaattggctctgatatcattgtaaaatcatgactatcaaattgtatcatcatatatctgttggctcccaagcccatggaaattgaaccccactctcgtttgacgggcattgagcaaatttaggagtgtcgaaagacttctttactaacttaatttgcaaatcatcataaatatatcctttgatgctagttcatgttttcaccttacatacacacaattagaatagctgcaaacgcacgtgcatgaaattagctgaaccttttaaggtatcgcgatcccgcagaatatgtagctaagcaatgaa

SEQ ID NO: 44780 - DNA, 655 bp, Arabidopsis thaliana columbia
tttttcaactttttttttgttctagatatgatacaatattaaggtgactcatctccaattttcgtcagtttccaaagttttgctgctttagtgtaatgttgcagaaagttcaaaactgtactatctcccactatcataaaccaatctgctttgtatgccaacgaccactaaactagcaacacttcattctcattcttgtatgaaactattctcgcaattccataaatgtcttcatctgcagtctggtttatgctacatgtccccggagctctcggcgtctgacacacacttcacccaaaaaggattgagagcagttcaattcatcatgctcagtggatcacttttcatgatttatcgattaaaaaaattgcaagtagacgagaacagatggaaaactcttacacgcaagtacacagaaaaagccccttttccggcaaaggatttggagtgtaacttgtataatcaaaactccagtgacagccaaaaagtctcaatctttataaagacccacaaaaacttgcggactccagagtgagtgtgagaatcggagatgtctttttcagtagtagcagctttaccggtgcttgtagcagtagtggtactgtggacatggcggatcgtgaagtgggtctggataaaccaaagatgcttgaga

SEQ ID NO: 44781 - DNA, 557 bp, Arabidopsis thaliana columbia
taacggccgccagtgtgctctaaagtggaagcaaaccataaggaatgggccaagcagtattgggaggtggtatcatggtcttgcgatgtatgtggcgactcgttctcgcgatcagatagtctactgcgacatcagcggaggagacattgaagactcttcatagctagggaatgttatgctttcggcagtccttgttcacgccccgtaattgccaaatacattcgcccaaggctgtgtaggtacgagcgatggttgtcatggcttgacgatatgcaatccccatagtcctccgaatcatgcgctgcttagtttacctgttagcgaagtatgaagacctcaatttctgacagcaaaatccacggtgctagttcagatccgcgagtagagtcatgagggaatggcgaaactaagaagaaagtgaatgcgtcgcgtcgaattgtagaaaagtttcaagatctattgactatgaaaagactaaacactaggtgatcgaaccttttttcaaccaaataaacccaattactccaccggtccctcattttaatacgctgatatgt

SEQ ID NO: 44782 - DNA, 615 bp, Arabidopsis thaliana columbia
tgaaatgaccgatcaataatttttacatgtattaaatacccatatacgaatttcacgtattaaataactatattttaaaagttcgcatattaaacgaacatttttcatctaaaatatttcacttgacaaatatttttcgtgtcaatatttttcgatcaaagcattctgaagtaattgcaatgctttgatctacacacataaaactcgttgacaaatctccattatgttttagaaaattgagtcagcaaaaagtgcatgagttgtagttaaaggttgatccgattatactacaaaatataactttattgctcatcttattctactcttaagtctataactattaataatcatgtataaaccactgttataggtaacgtctataatgttataagcatggacaaaatatttgatagcaatagtgtactaaaaagctactcctaaaagaggattaggaaataaagcatgtgccagacatagtgaatgagaaagaaagagagattttgtaataattgagaaaatatgaagcaatcctttgccatgcctactttatctatagcttcctcacttcaattaaattaaattatatttgtaattaagcgattatgtttatatata

SEQ ID NO: 44783 - DNA, 475 bp, Arabidopsis thaliana columbia
tgctattgtcatttggcagaaagcaaggaagcatcattgttggttcaaccgaattcttcctttgctgggttatcaaattggtataacgtccttaagcaagagtgcagtagagtgtcatttatcaaagatttggatttcaaaaatatttcagaattgggaggtttgaattttgacagcttcaacaatgaagtccatgcgcacatcaatgagatgaacttggaagctttggccaaaatggtagaaactctaagtggcttatccatggaaaattcgtccaagggtctcatttcctgtcaagatgtctacaaacaatatattatgaatttgttagatacattggagagtagaagagatcttgattttggaagtgcagagagtttccagggcttcctcggtcaacttgagaagacatatgaccactgtagagtatatgtcagaatcttggaacctttgcaggctgtggaaatcctgaaac

SEQ ID NO: 44784 - DNA, 534 bp, Arabidopsis thaliana columbia
tgtcagaatcttggaacctttgcaggctgtggaaatcctgaaacggcatttcacgttagttctaccgccaaatggttcctatatgcacatccctgatagttctacatggcaagaatgtcttatcttactgattaacttttggataagattagctgatgagatgcaagaggtaaaatcatctaatccaagtttggtggagaatcttaccttgagccctgaatgcattagcagctgttttactctactcataaaacttgtaatgtatgacagtctgtccccaagtcaggcttgggctgcaatacttgtctaccttagatctggcttggttggtgattgtgccactgaaatcttcaatttctgcagagccatggtcttctctggttgtggattcgggcccatttctgatgtcttctcagatatgtcctctcggtatccaacagctttgcaggatcttccacacctgtatttgagtgtccttgaacctattttacaagatttggtatctggggctcctgaaacacaaaatctttaccg

SEQ ID NO: 44785 - DNA, 544 bp, Arabidopsis thaliana columbia
  unsure (1)..(544): unsure at all n locations
tattaagcaacacacagatgcagaagcaacctacatgctctacttacagagaatataatctatagtttacttccagtatcagttttcaatcaaaagacagagattttacaagacagaatctgatatgcataagtctaaataagcaaacttgataattgaaacccagatagtcagaacagataaaacagagatataaagactacatacgtagaggaaaagatttgatctttcaagattgtttgattgaaaatcggcaaacccagaagagttaacgaaagaagaatcaagacccatatgcggaaaaaattaactcgctacaataaaccatgcaaaatcaaaaacctgtgactagggttccaaaagaatcatacggcagaaacagagtcgacaccagaaaaagagtgatctttcggcttacgcaaacgagaaaaatcgtcggagttaccagtggcgacactccancgctatgctctcgctcactctgcgcactctttctctctcaaacctctgatggacgaaataattcactttgaggccttgagaa

SEQ ID NO: 44786 - DNA, 1017 bp, Arabidopsis thaliana columbia
cccgtttatgtacagaaacaaacaaactgaatgattctataatgtttaaaagatttatattctataccaaaaattttcccatctctttggcttttcgatggttaaaagaatggttctgcacttttactctattcaaacctatacacctgcaagaacatgaaacatgttgaaacaataagctctagaaacagattgggcaccaaaatccatatcaagagcaagctgtttataggaattgagaaaccgcctaaccggtaaaccttagatttcaataagtttagtagacttacatgctatatgtaaaagggaagtcacaccaacatggataatctgtagcaaacagattacaacacagcacagtaaatggttaaagtcaggtttagtttctcaaactgctagatgaatatcggcaattgcaatattcaatctgtgaagatgtaagagttttagactgaccatgaatttacctgagtttatcggtgttggtcctgcttcctttgtttgtcggggcctaagtatttttccatggattcctttttatgttcaggatcaagactgaaaggagaaataatctacatgagtctttaatactttgcaaataacagatatttccagccgtatttccaaaatatttaatatgaaccgacctatttctgatgccaacaagagcactatgtacagctctagcacaagctgaagcaggtgctatagcagctgttggaactccctgaacaacagttgcaaatgctgatccagctccgtctccacgttgatacttcttcaaaggtgtgcggactaatgcagaagctgtctttcctattccatcaccgatgctctcacatgcctataaaacctcagcaatgtaaaatatctgatccaggagcagaaatgcaggacatgtattgcctttacactcaccttaagcatgccttgcttagcatttctaggctgattatgtctgacattcgtcttcgttctgcattggggttgtggcaatgatggtgacttgcaaatata

SEQ ID NO: 44787 - DNA, 1359 bp, Arabidopsis thaliana
  unsure (1)..(1359): unsure at all n locations
cccagctccaaatgtgtcaaaatcgtttgcataacctgccagatccacagagaaaatttagaatattgtctataacaacgttttttcccgcccactatctcacaagatcagacacttgatcatataaatgttagaacaacgggtttcaagatttggcattaagtttttttaaatacctcttccttcatgtcaaatttttgagaggcagattcaatgactagcgagcatatcttctcgtgttgctttgtctcagtggaaaatacatgggtgagaaattttccaactgcatattcatcgacaccatcactgaacaagaagggggaaaacaaaggtaagcttaaaatcctcttaattcaatgccatgacagttgatagttccacacgaatcacctgtgtgcaagactccgaagctttagatatgtgtcattatcataaaagagatgacaatatgacaaccgcccgtcgcgaccagcacgtccaatttcctgtaacaaagacatttagtttctcgagaatgttatatgtacgctgatcactaggcttaagaaggaaacccaaaaaaaatttaacctgaacgtattcttccatactgcctggcacgctgaagtgtattacctaaagcagactcagaaaacttagaagcatgtatatacatgagatgcgaatagttgaagttatgttcaagcattctaagtattggcattagacttacagctcctacatctcccttgtcaagtcccatgccgaatgctacagttgcaacaaccttccaaaacatatataaaatatttgaatactgaaatctgcttaactttttcagtgatagtttgcatgaataaactggacataaagcgtatggaaattagtgaactttttttctcaccactctaatcttgttggaacaaaatgactcctgtatgcgaacacggtccttcgcaggaagaccactgtgataaccctggatagatcaagttaagcttgattagagtgtaattagctatagatacaggtatgtcggagatttcaatatggaaacaacctttgcattgatgttgttatcgcgtaaatacttgcttatcatgtcagtctcatactgcgcaaacacagcccaaagttgcttaagttagcatcatgcatgatacagtaagaaataaataaaaagtatattgtagagcgtgaaaaaaagccgaagataagtaagtactctcacctgaaatttgcagtacacaatgatgcttcgaatctccttatatggaggagacccatcaaaatcaatagatctttcattctggtatattttcagatttcagtcagtacaactcgaggacgagcaaaagagtanaaatattaccaagacac

SEQ ID NO: 44788 - DNA, 523 bp, Arabidopsis thaliana columbia
ataacacaattttgtttgactttgtttgtgtggagaagttatatatacggacaaatgttacatggtaaacacacacttttaaaattttcaatttggaaactaacaaaaatacatttaactttttaacaaatagttaaacaaaaaacaaattccccctagttttccggctatactcatatatcaccgtagagtcgtagcgcatacatttgaaattatctacactcaatcactcatgactcgcatatgctcataaatacgtctatcgtacaaattcattactgatagaattctaatagaaaataaagtcattagtgaaagatataaatgatttaaaggttgtatacagtatacactatacaacacaagaaaaacttaaaagatgcaacttctttaaaatccaatacagaattattaacaaacattataacttttattataacctatagtttcgtgcaagaagaatcaaacgacggttaaactagacctatcagacacaaagactataatgtctaatgttggttta

SEQ ID NO: 44789 - DNA, 489 bp, Arabidopsis thaliana columbia
tcaaatattttagattcgggcccatctacggcccactttcaaaccaataaagcctaaaatcatcatcgattttaactttatttatcctctgggttcagaaattaaaatttcaaataaaaggccagattatcaatttctcacaagtcataacgtcaatcataagactcgaatttaaatttttgaatttagagaaagactcataacgaataaagctgatccagtttttgcttttgcattcattgctggattattcatttgaataagtaaagagtatatacatacaccaaaggggttaaggattcaaccattggtaacaacatcccaaatacaatgactttgtaaagaagaatcagctatattgattattgaataaacaaacactcttttatttctttttaaaacaactatatagcttcaaccaaacgcaaagtaaccatcttttgacccttctttaaacaacgtctcactccaccattccatggtgaagca

SEQ ID NO: 44790 - DNA, 992 bp, Arabidopsis thaliana columbia
cacaaagctatcgatatgaacaaaaaataaattaaagaaaagatacacataaaaaaaaacattaactaaaaaatatatataaatataaacaaatgataataacgcattagtgtattaaaacccttgtaaattgtaatgagcggaacaagttctggttctatggtttatactcctgatgatgagaggatgttgtggatgataagggtgtctcatatttcgtagcagcttataacaaccatcgtggatctccactttcacatgtggtacaataaaataaaggatgacaatacacatctgttgtgcatgtaagttttctttatcaataaaacaataaacaaacttgtgattaaaaattatggcttacttatccttaaacatttctccaggttgtccgtatatgaaagaattgtgtgaaaatatgatacgagtcatatgaatacaatcaacaggctgttagtgaattgaaatagattttgtacaataagacaaaagattttatttcgatctacttaagataaaagtgtttgtttatttggaagctacaaccccatgaatccgatgccagcgatgtagtatttggagtgatctcctattagattgcgttaaaaaaaaatatatattatttttcttcaatcgataacgttttgaacacgtcaaacaaccaccaagttaaaactaggttattgcagaaactgagcaacgcaacagaaaaagaaaaacaaaatggaggaagaactcaagagcttcgtcaaagtatggggttctgcaataatctctgtctcttactgttactatataccatcgaagatcaaaagcggtgttcatcgattactctcaggttcttcctgtctgtgttctgtttcttgttcttcatttgttcttcgtctttacgattttctcttccaccactgcgttttgcctctctatacttgctaattttaagctcatcttatttgccttcgacaaaggtcctcttttaccacttcccgcta

SEQ ID NO: 44791 - DNA, 531 bp, Arabidopsis thaliana columbia
catcatcagtggatctccactttcacatgtggtacaatacaataaaggatgacgatacacacaactgttgtgcatgtaagttttctctataaaaaaaaaaacaattgtgattaaaaattatggctgacttatccttaaacatttctccaggttgtccgtatatgaaagaattgtgtgataatatgatacgagtcatatgaatacaattaacaggctgttagtgaattgaaatagatttagtacaataagacaaaagattttacttcgatctacttaagagaaaagtgtttgtgtatttggaagctacaaatacgttattaactcaaagaatccgatgccagcgatattgtattttgagtgatctcctattagattgctttttaaaaaaatacattatttctcttcaatcgattacgtttggaacacgtcaaacaaccaccaagttaaaactaggttattgcagaaactgagcaacaacaaaaaacaaaaaaaaatggaggaagaactgaagagcttcgttaaagtatgggg

SEQ ID NO: 44792 - DNA, 942 bp, Arabidopsis thaliana columbia
tttacaaaagcctcttgttacttgctatatagcataatggataaagtgaaagaaggataaagatatcttgttttataggggagcaataggtgctttttggcccaaaaatttgaaatttagcatttttacaatgggctaatagagttaggcattttctatgaactgaattgacaaaattacccctagagttgaatcaatgtcatcttcttcttcttcaatgacctcacaaacatctctacaccaacaaccttgttctaatcaacccaatagaatcaaataactgtttttaatggaagaaagctacaccctaaatggatacataaacgcttttaaaataatcaaatctattaagattttaatgattttccttctttctctttaaaaataaaacgagagatgatagaattctgatttacatcgagaaattaaaattcagaaaaggtatggatgataatcgcatgcttcgtcaaagaagaagatcaacgacgctggatctgaatcaaaattttggttgaggagatggagaagcaattgagcatcaatggtgagttcagcagtaggtttcatgtcattgaagagccagcgaaataatcgaattttatgggagagcgattgactttgacgacatctccgcaatcgttcggtgataaacgaaacgagaaggaaaaaaaaaacataacgagtaaagtcaataatccattaaattaaagggtaaaacggtcgatgtattaagttataagtacctaaatctataaaaaactagaaaaatgctggaatccacaatggcatagagaaaaagtggttaattcataattgatcatgatttatagagcctcaataagtaaaagagtgcctatgtcactgtaatcattgcctccaaaatagctgcaacataaacatttctttctgtgtaattctatttttagtagtagttataattta

SEQ ID NO: 44793 - DNA, 644 bp, Arabidopsis thaliana columbia
acatttcaatgactcccaaaaacaggtaattataggtgatagtgttttataattttcacccctttcagcttacactcactcttttattttttttctcgccgtcgcgactaccacctccgccgctgccattgacggagccaactgcctccctctcattatagccaaatcccagaaattttgattattttgctggctcttcaatgacatgaaacctactgttgaactcaccattgatgctcaattacttctccatcacctcaaccaaaatttcgattcagatctagcgtggttgatcttcttctttgacgaagcaagcgattatcatccataccttttctgaattttaatttctcgatatcaatcagaattctatcatctctcgttttattttaaaagaggaagaaggaaaaccattggaatcttaatagatttgactattgtttaagattggatcctttgggttcactatatagtatccatttaggatttaactttcttccattaaaaagaagttacttgattttattgggttgattagaacaaggttgttggtatagaaatgtttgtgaagccatcgaaaaagaagaagaagatgacattaattaaactctaaagtaattttgtcaattcagttcatagaaaat

SEQ ID NO: 44794 - DNA, 517 bp, Arabidopsis thaliana columbia
accgagctcacaatatagatccattgtcattttctaatacatacaaaagaccaaataatattcgctatttcacatgaagattatctacattgttggaagcgcaagttgggtttcgatcacatatttgatcatgtccaaaataagggaatgtcatattctaacagatttgatatgcaaaaatcaagattgtgagaagattctactaagactaccaaaccaacgttaacggcaaaaaagaaaaggcaacggcgaaaccttccggtcaccactcgaagttggactctcctttaagcaatagagtatatcaacatttatcaaataaatagttgttgttttgagacctaagttcatatatggacataatcaagatggtgtcaacagttttgggttaggtgtgcttcagacttaatctttgagctgggtaagattgcctttctatctagtgttacgagctagcgtgtctctgtaacaggttgtcttcgggtaagtttggcttgcagcttgagcttgtggtggg

SEQ ID NO: 44795 - DNA, 1060 bp, Arabidopsis thaliana columbia
atagtcattgactcaaacccgtaatgtgcgttggctttcatcaggtccgttaaaggcccagaatcttcaacttattgaaaccatatattgctcaatttccaaaaccagcttggtttaattttaaggactccgataaccggacttacatattaaactctgctcctggtttattcttcaaataagctggttgggagagttgtcaatttgtcatgtttgatgttggatacacgtgtccctcagttatacattgcactaattggacggtaattgagatttggcataattaaatctccgatttctaaccagtaaccgccatctccatccttttaactgttaactttttaagagaaaaatatgcacagtgatgaccttgctttgaatcaaaacatatatcttaaaataaataaagatatagacgacaaaaagttaatgtacatagtaactgataaatatatagatcaatttagatatagtactcatagctaaaaacaaattaaattggtggaggatacacttagatatgttccttagtttctcattgcattgaattgaaatatgaacggtactgaaatagtccgtacacatagctagcaaactattgattatatatgtacgatatcgaagattagttatgctttgctaacgtatgtttagcaaagcatgttatcagtattactagtcccacctactgaggcgctcgaacactgagcctaaccagagtcataacagcctcatactgaggaaataatagcgtaacgctaattcaaatcatcacatcctcaagtgcaaggaactaaagtaaaacagagaattgaagtacgtaagataaaatcaaaagtcttttgttgtgttaaattctccattaatctcactcttaactttttttaaacacttgataaaataaaaaattatattaatgtatgaagcattactttcattctactccgctaattttattaacaacatttatcaattgaatactaatatttcaaggataaaccagccttgtagagagcacaaccttccgatgtagtgttgaaagcatgaatgacgtgaagaa

SEQ ID NO: 44796 - DNA, 591 bp, Arabidopsis thaliana columbia
ccaggtccctctttctgattccgaagttcttggctgaatcaagctcggtgaactgttggtctctaattggctcgagtaggattgatgcgtcacatccctgttacatgtaacatgttcccaacaattaatgatgatgatgagatggaataaatacgaagaacaaattcgagtttttctccatctctttcaaagagtatggaaacgaaattttgtgacttatctatatcagaaaaaacagtgaatattttcatgcatgtgcttagtctctctttttttttttttttggtcaagtgcctagtctaatctattattttcatccataaattgtataactcagattaacaacatgtgatcatctccaatatatcctcgaccattatatctgtttttcatacgtgtcagaataatgaaattagttttgctatatttatcaaaccaaataaaacaaaataataatgttgctatttagcttataattttattttggcaaatgcctataaatttaagttaaataacaacattattatataaagaaacatgcctatgaatttagcacaaaaccattatatcccatgttgtaaatgacatgat

SEQ ID NO: 44797 - DNA, 661 bp, Arabidopsis thaliana columbia
ctcagaatttccgcagttcgtcaaatgtaaaacaaactagtaataacacagggttgacaagagctatcagtgcaaagtctagtctagggaatggaaagtccgcgtctcggcgttatgatcatagtattgtcaacagagaatcacatcctttgtcccagaatatggaggaaattaaagaccttcatgaaattttgcctgctgtacaatctgacctgggtagttctgtaaacactttgtatcaaaaatttgatgaggagaaggtggatcctgcaaatgagtctcagttcgaatttgacgttgtcactaaacacattgaacctgttgagtcgatatctcatgaaaaagaagatgcaaatgcacttcaaagcgagttggtaactgggaatgaaactgttgttccttttgaggaaataaaaaaagctggtgaagttcctactgctggaagtgacgaagttggtgcagaaaatttccctttagaagagcccttggtaaacggtaatgaaactgatgttccttttgaactattaaagaaagctggtgaagttcctactgctggaagggacgaagttggtacagaaattttgcctccagaagagcccttggtaaatgggaatgaaactgatgttccttttgaggaattaatgattactggcgaagctag

SEQ ID NO: 44798 - DNA, 445 bp, Arabidopsis thaliana columbia
atattgtttgatgttgatatgttataagaaagaatataaacctcatattaaaggtaaattgagattataacaaatggaaaatccttaaatacaatctcgatgtttatttaagattttacataattaaaggttcacactctttttttttattttttttttatttttaggttcactctccttgattgatccatactctctctggtttgggtcaaacatgcagccgaaactcacaacggaagaattattgaatgatacgttcaaggtcttgaacatggtacgtcacagcgtgcaccaaattttattggaaactcaagataacctctgagatataggttcaagtttcagatccttaaatggtccaacgaagaagttccgatttaggatttctagccacataggtaatttgaggattccgatggtggtgtcgcttatattttggaggggt

SEQ ID NO: 44799 - DNA, 736 bp, Arabidopsis thaliana columbia
aatgagtccaatgtctgatagatcagtagctgccgattttcacctcgttgccatagactcgggtgttccacggcggcctcctgctggaaaacgggcaagcgaccaagaaatttatccaagattagttgagttactcctcaatagtagccaatattcttcgaatttgttacatgaaataacagaaggaagtttaggatatccacaggcagaagatggtgaagaaacatctaatgttcgatctgtagtaacaccagttgtacgcgagtttcgaaatggtttccgagctggtctcagggatttgcaagagtttcacatcttccttgtcacccttcatcagaaattagatgtgttgcttcgggcattttttagtatgatggacaaaacaatgtgtgcagattttgacagagaagactttgctgttcctgagtcaccttcacatactcatgggcatgaggtgaatcattatccatctccctcaaaagatcgggtgcctagtgataacagctctgatcacagtgagtcagatatgcaaaaatcagttcctaggacaccaaattcagaaaacaaagaagacgggtcttcgcctaagtcacgtgaaagttggcacggaagatccggtaaaggtggagaatctcttagcagtcagcgtttggcagcaaagctccgtgacttccataagtttgcaaaggtttgtcgcttcgagctttgatcactatgttctaatttgtaaagtagg

SEQ ID NO: 44800 - DNA, 1580 bp, Arabidopsis thaliana
ggaagatctcttggatttgacgagtttgcaatgaacatagtctctaccatctctttgctcaatctagcacagtcagaaaagatagacttcgttaaactctgatcaacaaaagtagaaacaaagagaaagaagaaaactttcacttcacttacttagaagagctcgatctaagacgttcccaatgcagctgtttgggaggttggtctgaaaaagattgcttttttacatcattttgaaccacaaaaggttgagacggtggaacaagaggaggtggtctggtcggaggaggaagagcaggaactttgctctgttgagaagaagattcaccaatgttgataacaaaatctcttcttgatgacgcagtgtgagagagcaaaacagacttcacattccgactaaagtcattccaaatcggcggcgaactatcgagaaacttccggaataacccatcaggagaagtggaaactgaagagtagagagacgaaagtggtgttcttatgaatcctctgtctggtgaagtagaagcagaggagatacgaggaaacccaaatcccatattttgattccagaagctaaacattcttagagaagacgacccatttccgttatagttcttccttactcttagtctctccggtgacggagactggaggttagtggcgtctgagtatctagggtttggtggagacatggtgatagagaatgacctagctggagaaacccaaccggagcaggaggaagagcatgaatgagaagggcttgagttcgctgagccagggagagaagccattggtgagaagaacacatcttcttcttcttcttcgtcttcttcgtttacctctgtttcatagttgttatggtggaagctacgaggaggtaatggtggtaatggtcgtatctccggcgagtcttgcttcaagaaaaaagtacctccggttctaatatggtcagattcctctgtattgaggtaaaaaacttctgaaggagaagtagtagcagccatgttgaagttagtggtgatatgactctgttcatcaccatagctgcttgtgttgctactagaacaatgagagttctttaaatgacgagtttgccctcggtggcggccgtagagaaacaaggctaagcctatgactgtagcaatgacaagaacggcggagagagctgggaggagaagtgtaggtgaagtgtggtgtggtttagaggagcgagggaggactaaggcggagatattagccggaaaagttggaaagacggcgaaagttgtcggaggagtaggcggaagaggaggaggtggagaaggaggggaggattcaagagggaagaaaggagggctaatgggggatagaggaagaggaagaggtgattcatagtcatagaggagacgacggctgagagttacggtggatgcgtaggataaaggagacggtggtgcgcatgttagcaggaagaagaagatggcgaaccaaaagttctgcatttttttctgcaaagcaaagctctctctctctttctttgtcactgttcaacacacaataagagagtgaaagaagttaatggggcactattatggatgtacc

SEQ ID NO: 44801 - DNA, 904 bp, Arabidopsis thaliana columbia
cgtaacaaaataaggaaaagcgtagttagagaatacgcaccggtttttggtcctgtctcttccttagcttgatccagataaacctgagatcataaagtacaaacgaaaatgaagatctacatactttgtattgatcgtataaactcgtctgattgaatatgaaaatacaacaaacacacacattggacaaaatgcaagagaaagggatcaaaaaccagctcgacgaaaaattaaacggaattcgaagtgatcaactattacatagaaatcaaagacattagatagaaaaattcaccagattgttgccggatgtcaagtagtaataggagaatccaccggaaagtgccgcgattgcaccggtggagaaccggaaagcgccagaaccagatttgctttgagatccaaatgcgacagggaatgtaatcggagctgacctagcgagtcgccggaagaaggaagtagccatgatggtttagatctctgagaaagaacaaaatggtttggaggaggactagggagggggttttagaatctggggaaggagagtgaatgctacgctatggagatgtgtactctaagaacagtggaattctcatttgttaactttttttttttgttttacaacaagaacattaggaagaagcagtaaacatctgatttagaagaacacagccactaaagaaaaacgaactataaaactcaaatttattgaggtcaatctttgattaatttttattgatctaaatcgtcgttgcaaagaaataacttcgagcgaagtccacacacttaggactcagcaattcaaaataagcatagaagccatagcaaacgtttggtttctaagcatctaagttcatctttctagctacaaacttgagagagagaccccgcttgttgtgttgag

SEQ ID NO: 44802 - DNA, 612 bp, Arabidopsis thaliana
gatgcgaattcaattagccgtagctgagtcctctttgcaattgtggtagggcaacgacagttacaaagtcatggacaaatgaaaatccgggtagaaaatttttcagatgtgggactcatggcttcatcaattgggcagatgaggagaagccatttggttggcaaaaagagagtttattggaggctcgagatgagattcgtcaactgaaagagtctttgaggtcaatgaaagaatagttaccgagtgggtcagggtctgctactaacgaggatatgaagaagcacaaggaagagaagaataagcttgaagaggagaagaagaagcttgagaaggagaagaagcagcttgaggaggagaagaagcagcttgaggaggagaagaagcagcttgaatttgaagttatgggtgcgaatgagagggaaaaagtgcttaggcagttgattgtgttgtcttggggatgttcactgttgtcattgcaatgtgtctgggaatgggaaagaagtaggctttgtaatagggagttatggatgctaggaagttctttgcattgttttatggatgtctaatgctagttgttttagaagttctttgttgtttgctgtgttgttgttg

SEQ ID NO: 44803 - DNA, 1025 bp, Arabidopsis thaliana columbia
cgttcttctagtactagtagaccatcccgcctgaagaactaacgggcaaatgcaatgtcaatttttcacaaatccaatccaatacgaagcccattaagtgtcataagttccacaaggtagaatatgtatcccccaaagcaagggaaattggaagataagctatcaatttcgcaccagctaattaagcacaaaagattcctcgttgtaacaatatttgtgtcgattgtctagctaagaaggtcagagtacgagaatcttttttctccatgtaagcacatcgactctggattgactctctttagaagaaaacctccgtccgctaacttaataaaatgatgtttgacgaaaaaaaagaagagattcaaatcacaaaaccaaatttcaaatttaaaggtgagactaaaaaatctttatttttatttggatatttagtgccgactatcaaagatgaaagaatcaaactcgcatattgtttagttcgagtagtgtcttcttatttacgaaagctatgaccctaattctctttgacgattattaaaaccaacacacaagattttgacatccacaacaatagcaattatctattaaagaacaaaccaaactactagattaaacagatgtgcttgttacattcaaaacacataatacgtttatttaattactcaagacgaacttggtaccattgaacagaacccacttctccatcaatttctagttcacatacagctttaaccaagaaatctacggcttcatcaaggtcatcgaacctagccaggtctggtggcaaagagttcacctggccaattttcgagccaccctctgagcttagccttgagttcgtcttccgtcacaaactgctcatcttgtcctgcctctaacagtacgtatgtatccgagttcgaatgcacccttcttctccttgttgcacaaacctatattatataatcacattaactagacatttgttaaatcatactaagttaacctttaacctcatgagttcagtaatttaatttccgggattg

SEQ ID NO: 44804 - DNA, 856 bp, Arabidopsis thaliana columbia
cgggtacgagcttctgatccacattacaacaatatcaaccttatcatcttgtatatgagtctcgcgtaacatatttgtttgtctatggaatttcaatccggaatagaattcatcgtggtggctactacactaattcatcattgctttatataacaaaagaagatttttagcaaaaaaaagttattttttgttacagataaacagtttagctaatctatcacaaatgaggaatattagattagagaataaaattgtactaaaatataggaatctactttcataaaacgcatagctttaaataaaaagaatgtgttgtctgccatttacttaaattaaatatatgcctatttcctaaagaatactcgtttatcgcatattagccacacataaactatataatttaaccttgtaaaaactttatgtgattatgtaatacaatctacattacactcacacgaccaatttcaatttcccttctccatccctatccaagattcttctctacacatagtcaatcattgtttattacacctacaatattttattttaattaaaaatttggtgaaaaaatctatatgattttaggataggagccaaaaacatttttaaaaattatttgatcgattttgaaggattatattattaacatgatatcagtaaaattgtggaactttagccccttggaattggccacgaggcaacaccaacctctttggttatgacgtaggagacactaacgacataatttatgttgattcggaaggcacatgctttggtcgatttgtttaaatgattctatgttttgtgatcgacaagccgaaatataaacaaatgcctataaagccaacaaaaaaca

SEQ ID NO: 44805 - DNA, 522 bp, Arabidopsis thaliana columbia
atgcctcccacaaattgtcatccgaaccaaacaaaatcttttcctctgttggatctaatgctgttgacttctgcaatgcatttatattttcaggcgctttaataaatgattgttctgatggaccagaaccctccatctgaccaaatttcgcctggactgaaatgttcctttcacgggaatcatcttcctgtaaactttcaaaattgggcatactatttgaacttggaactgatgtctgggagaacaataatttctccgggtatgtggatctagggagcatatgactatcctgtacatcgccttgattcagaaatgaagtaggttgattagtgacagaggaagtcctgtttgcagaaccatgctgtgcagctaatctgttcatctggctggaagaaaaggcattgtgaggtgcatttgtccactaacaggcataccgtacaaggaaggttcaaattgttgagccattaagttcgcctgcacatggtcaggggtaatcatgagcccactgggatgaacctttga

SEQ ID NO: 44806 - DNA, 833 bp, Arabidopsis thaliana columbia
tattcttataatactaaggaaaccaaatcagctgatcaatgtaaaaaaataccaggagcagcacaaagatccaagacatggtctcctggggagataccaagagctgagacagcggcaccggaagctgcatcgattccgtacatctgaaacccgaagaaagaacaagtgaggttaagaaaaaccgaatgagcgagaggagagttggtatttgattgctctctctcaccatgccttgctgataggccttggttctggctatatgaacatctggagggatggagtaaaatcctggtaaccaattcaccttctccagtttacagttaatttcggattcaatctcttcgaaagcatcctcgaatccaggtttcaaccttcaaacggacctctccggtttcaatgccaaattcagaaattttgagaaaagcaaaggaggggtctcaagttaccttacataacgtggaattgaatctccgtgagtatagattgaaggatcaaggccattcgcctctagaaagctaaggaaactctccggtaactgtagcttggacgtttcttccatgagaaacccgagagagagagagagagaagtgttcggtcggaaaattaattaagtcggagaatcgccgggcgagaacagagaagataagggcttaggctgaagcccaaagcctttttgtatgtatactcaaaaagcccaaacgttttgaccgatgaaacaaacaaaggcttgttacttagtttttacacttttacttgttcatctttttttttttggttttcacttatagagaaacacagcttttattgaatttggtacacgaaagttttgatta

SEQ ID NO: 44807 - DNA, 559 bp, Arabidopsis thaliana columbia
atagatagttgtgtcgctggcaaatccaagctttctcaagaataaagcaatctcttgagcgttgtaacatgtcttggaccctactacaccagttgtatggcaatttttcttctcaagtatgtcgattctaaggtctactgctatgaaacggccaccggatttacggctatgagtcctcaaccgctcaaccattgattcagccactgcattcacttcaggttgcaactccaaagacccaaacattgctaaacaggctacaggatcagtttcgccatcttgtgaggattttctcaagtttacagaagggaagtatgatgcaactcgaatgtttcctttagatttaaagatgggatcaatgtgctctttaatgtaatcttctgtaactctggtagggaccttcacaatggccatgttccttagagaaacttcttcaggcaattttttcacaactttaacgacattttccaagcttttaatcagcttatccgcatcatagatatcttcaaaattcctagataaagcagttaaaattagtttagaaatctaagaaacaaattag

SEQ ID NO: 44808 - DNA, 734 bp, Arabidopsis thaliana columbia
ctaatgctgacgacttctgcaatgcattcatattttcaggcactttcataaatgatttttctgctggaccagaatcctccatctgacaaaatttatcctgcgctgaaatgttcctctcacgggaatcatcttgctggaaattttcaaaattgggcctattatttgaatctggcactgatgtctgggagaacaacgctttctcctggtatgtggatcgagggtgcatttgactatcctgaacatcaccttggttaagaaatgaagttggctgattggtcagagagtaactcctgtttgcagaaccatgcggtgcagctaatctgttcatctgaacggaagaaaaagcattttgaggtgcatttgtcccactaacaggcataccgtacaaggaaggtccaaactgttgagccattaagttcgactgcccatgctcaggggtaatcatgagcccactggatgaaccttgaacagctggtgagatgccgcgatgcatccagtttgtatttcctgtcatgagatctggctgaaaccagttactagacgcattctgaagagggatgccattaatcatacgtgattgggtatcacttgcgcaacttccattgactgcatttctattcaaagaattgagctgcctggcctctagctgttgcttttgaagttgttgttgcatttgatattcatgcatttgcttaaccataacttgctgcttcagtagttgcatatcattgaat

SEQ ID NO: 44809 - DNA, 540 bp, Arabidopsis thaliana columbia
tatggtaatttttcaatctatatataaggttcgcaaacacacaaatttattctgaaagctagacttgattctcaagacttcccccacatatattagcattaaatacgtttctcttttatattacttattaacttcccaatatgcaaagtgagaaaaagtaattaaagtgtgagattatacaccttaaccacatgttgatcttaattaatcttaccctctatacctcaaagccaaagagttaaagctgcagtagtatccaacctccatgcaaatccaccaaactccatcttccacacatcacacggcaacgttttagtgtacttcgtttctcgccacgtgtattccattctcaccttacacgtaaaagttcggtagtcacaaaacgtcgccgtttggtcaaccaccaaccacactatcacctctcttccgaatccgccgtctccggttactatcctccggtaagcctcgttaaccatcaccacacggttcgaaccatccgatatgaaaccaggacacgtgtctttatctaaagcatatgtg

SEQ ID NO: 44810 - DNA, 536 bp, Arabidopsis thaliana columbia
catattcggtaatataatttgtatgtatctttattttaaaattttaaatgtggttggctaatattgatgtatgatattacatgttgttaacatcactgtagatctctttgattagcgtaggctaatcgtgattttggctgactggggttgtcggagccctgttagtttcgtgatttggtttccattggtctggattaattttgactggttttggaaaaggtgcgttggtcatcggtcgatacaaccaataatctgaaataattgtaaaaaagaaagtctattgtgaaagtaaggaaacaaaaatcaccaaaagccaggagaacttgagaaaaaaaaaagaacatatttaaaatttgatggagaagatcaagagaatccgatgagaaaaaaaaaagaacatacttaaaacttgatggagaagatcaagagaatccgacctgaaacacagtaaaaagagaagaattcaacaacatcatgataaacttttcaatccacaaccaagccaaaatcaccatcatcattattattcaaaaatg

SEQ ID NO: 44811 - DNA, 692 bp, Arabidopsis thaliana columbia
cgaatctacctgctaatgcaagaggcggtcaggcaaagacaccttctaatcccatgggctctacaactttcaatcactgatgtattagatcaaccctccaatcgtgtttggtaggaattttccattaaaaaggtacgaaatttgtatcacccattttgtaccctatctagatctcacagtccaagataactacaggcatggaggctaggctagatcttaattttaaccattagtaaagtatcttaccacctcatgggattgaattgattcaatgttttgcaaaacggccaaaagtgtatgaattgagtgatgagacacagttataaagcggttacaaaaccggactagccggtataatccattaaacagattcttctcatacagttgaatcttccatagctttgatcaattttatagttttttactgaatgtacacagaaaatcttggtacaatgttggcttcattagtccttttagccttcaactatcttcactggcgtcctgcagaataaaaccgaaaagaaagctttcagggcacttttttcgatcaaatttacccagtgtattagttgattgatttcacatacccgaaaggactctgcttgattgataacagctcaatgtcaagctgcaaaagaaagataacataaatgaacaccactttagaagccaacaaaaatttcaatccattc

SEQ ID NO: 44812 - DNA, 724 bp, Arabidopsis thaliana columbia
catgtcaagtgaaaaaacaaaaaaagtctctgtttacggtgtgtgaaatgctaagagagtccacatgaagaaaactttatggacaaggaccacggaagaagcaattgaatgagtgatctttacatcacagaaacggatctcatcgaaagaatgtaagaagagtatgagaaaataataaactacatagattttcgaaatattgattcagaagattaatatgttatttttttccactcacactactcattttacaagagatactccagagattttatgtgcaactctgtaatttgattcaagattccttcactggaatcaacataaagatggaatatctgagtcacctttccaacgaatattcgaatataattatgagaatattcgaatataattatgagaatattcccactttaatattaaatataataccataatcgtcaacatctcagtctttaaaaaaacagaaaaaaaaaatcctacaataccaccaaaaaatattacttttctctctgtttcgccttcaaaaaaacgttcaacaacaataacgaaaaaaaaagaaggtgcacatgataatgataatactaatatagaaagaatctctgacctcttaaggaaatgcagagattagtgagtatggtttctctgtctctcaagtgtgtggctttagaactcgttaaaaaccattcccaaacccatcaaaaaaaccaaagccttccctctctct

SEQ ID NO: 44813 - DNA, 696 bp, Arabidopsis thaliana columbia
caaatccactacctgacccttaaatcaaccttaagggttttgataatttaatatgaaaaatgttttagaagaaagatagaggcgtttttttgcctacgatgctgtctcacgtgtgtgaccaaatcaaacatttcttttctcctttacattagctagtaacaaaatcaaatatatgatgaacagaagatctacaacaaaatgatattaataagtcaaagtgtcttcttctactttcctatagcaatgcggtgaaacggcgccgttcatggcttacgtggtgtgcttacctacactccaattaggcaaattttccactgaatgccgccgtctctttatatttctttattcccaattacttcagtccattagtaatttaaaaatgcattattgtttcgttgaacttctggtacctaaagttcatttgcttaattagtcgacacaagacacttgaacgcgacagttttgatcaacaacgacataaaattggtgttaaacagatgcttagatgttcgataaatcaactacttatttttacaacggtattcctattttaaatatcaatcttataacataatctcaatctcaatttttgaaaattagtattgttttgtggcccttcttccaaaaatttattttctgaagtgaatgcaacaagatagattttacctttatatatttagtaaaatcaatgttata

SEQ ID NO: 44814 - DNA, 334 bp, Arabidopsis thaliana columbia
tttctggtttttttttttttttttttttgttaaaaatgtatcgaccttcaggaaagtctttgtgttgcaacactctttttttttggttttgctatttcgtttcggttacaaaggtatgactccagtacttttagaccgtgaagccaaacatggtatgtgataccttttcggaaagccgtaagatagctctccgatgaatcatgatggataattgaattcctcgatttctagtgtgctactccaaatttggaccttaatggatctttagggccgcttggtgatctttgcaacagtgcatgcaaaaattatatgtttagactttgtcttcgaatat

SEQ ID NO: 44815 - DNA, 588 bp, Arabidopsis thaliana columbia
aaatacaactaatggtttatgtaacaaagaaaacaataaagcaagttatacgctgttttcttagtcaagtacttcaacgtattcatcatttccgtcaaatttttatgtgacttttttgcttggaaataatcttctttttatctatgaaatatcagtaacaaatacgaaaatcatatgcagcaatccatctgttacatcgcaaaacactcaaattgatcgaaactctcatgtagacaaagatataattgatcacatgtcgaaagagatatcattgatcttggttgtactcaaagcccatttaaattttgcagtatttgttttcaatggttgaattaatttttgttaggtattaaatcatagtttcttaatctttatgctcttaactaaaagatcttattaccaaaatgaataaagagaatattaggtttgataaatttaagcagtatttgtcttattttttatagaacttatcttacatagatctaaagatatggcggatttgggtggaggaaggacaaaaacatagaattttagtttttatttgttcgttttgcaccaaaatccgctctaccccgcaaagacaataga

SEQ ID NO: 44816 - DNA, 280 bp, Arabidopsis thaliana columbia
tccccgagaaatcaagggttgtcctcctatccagtcgtcgaaggtgtctgtctttaaaatatcgccgatcgatagttatgagtctgagtttcttctgaggaaacaggacgtcgtttgcgtagtttgtaactatgaaattgaaaatagtaaaacacgaatacataacagaagctattacattttttttatcatatctatactctatagtagtagcatccccattactcgggtcaacgacactagaaagtcgatactctgatttgactgaggttgtctcaga

SEQ ID NO: 44817 - DNA, 181 bp, Arabidopsis thaliana columbia
cgccagtgtgcgacaattatatggagagagttgatcaactttcatatatataattttcaaattagacggaagttagtcaacaccgtcaagatgtagtcaatatacacgtcacatatcgacatgtctaaaacgacatcgatgacatcgatgaactgtcaatgcaattgactttgcaacatct

SEQ ID NO: 44818 - DNA, 528 bp, Arabidopsis thaliana columbia
cacaaaccgaaagattagggcagctagatttactaaggcaccaaatcaatactatggaaagtagatgcagctccaacttgttctctggattcatcttagagtaggtatgggaaagttcctgttgaaaagatatagggtagtcaatccttattagatttcatgtgactgttgcagaagatggaataattttccagtaaaatgacatactaatatctcctgaaggttagaaagatcagtagctgctttcccttgatttattaacttcattataattcgaccagctaaaacagcatcagatggcagtacagcaggccaattggctcccctacactcatgctggtgttcttgaatgagatcagtcgcaaaataataaatatcagctgatgtaacgccttttatatgctcaacaatatcatcaggtagtttttgaaaaatgtgatgcttatccatctcatttgtagacagcattccacctgattggatttggcaggactctgagcagtacacaggtattgagcatgatggaca

SEQ ID NO: 44819 - DNA, 989 bp, Arabidopsis thaliana columbia
gtattggcttcactgccatgtggcaagtaacccaatgacacaaaaagcatcacaggcttgggtctatgccacttgatttccagtttgcacgaccatgattctccttccttcaggtatggaacagaaaccagcccaaaagattgctgaattttctttatgctccctgtttcagactcggattcattgttgccctctgccccatcaataccacagatttcaacatgatggctttctagagaaaacggttctgcttctcttgggctaaacaaaccaccaccacccacatcaactagattaatcttcaattcaccactgtatacggcatgaccctttgaagttaccacgattggcatcgcaaaatcttctccaactagggcaggaccagaagcacctagactgacgtccacctgtggttcgggttcatcaacttgagtagctttctggccaaatactgcaagaactgggtcctttgttggcagagattcaacacgattttcatgcttccagacaggtaaatcctccattgcagcaggactctcggctcttgaacagattgtgaaaagaggccccaattttgcaagaactgaaagacactcaagcttgccgctttgctctgcagatgaaacaaagaaatgtgtgaaaagttaggcagccaagaaaacaacttcccttttgctttcataagatagatacaagttctgaagcttcagttttgctaattggtaactgagaatacgaaaacgtccaaaacaggtttgaatttcaatgaataactgcaatacgtgcaaagtgtgttagatacaaacaacacccttataattaaatcacactaaccagacttgattgcatatgtcaaccttaaccaattattcggcacaagcaccagcaatggcgcattctccacttggctaccacttttcacagtgttagacgccgaagcccacagaggcctctgggaatttctgatgacaaagttgcatgtagattga

SEQ ID NO: 44820 - DNA, 398 bp, Arabidopsis thaliana columbia
agaacacacgttgctaactaagttgttggtgggttacaataatgtttaactaagacaaataatacatgtgtgaaagagacttaagttcgcagtatcctacctgagttcttacaaggaaacaatggcttcccatcttcaattcttcgcctatcactttggttgtcgtatctttctggacttcttaaacccgactccgttctcctgtggacaataaagttccatgaattagctcacagagaaggtttatgcatataacattatcagatggtatcaaccagcttcagtggatgctgacctttttgtaacatctataagcactttgacctgaaaactcctgtccgcttttagagatatatacctacgaagagcaagaaaattcagagacaacaaatttttag

SEQ ID NO: 44821 - DNA, 523 bp, Arabidopsis thaliana columbia
ttgattctgaatgcaatgttaagagaacaatatcagatctggtgagagaatgtggaatcggaaaacattaccgtcgctagtgggggaaggagcaggagctaaggattgagcgccggcgaatggagagatgacggcgaaaacgaaagcgaataaagcgattacggcaacggagttcctcgacgccatctcaagattttacggaggacaaaattgaagaagagtacgagagagagagagacgaaatctgaatgaacaagtccggcgagagagacgacgaacgacacggacaaccaaaaacccctttggatcatatatatggctataacgcgtttttatagtaattgactgtttaccgggtatagccggtaatccactctagaacttttctgtcaattgttcaaaggagttaactgacatgtgtcattttctggctaaatgaccgttcctagttggttcgtttaatttctttctattccctcagcaaatggaattggaattgattgtaattattatcaaatttagc

SEQ ID NO: 44822 - DNA, 540 bp, Arabidopsis thaliana columbia
  unsure (1)..(540): unsure at all n locations
ggtcaaaggggataccacacctctcttcatgtattcacgaagctaaaacccataccactcgtcgatgaaaaatctctatcacaaacggttctcttatattacccctctctctatacgaaaaagttttgaaaagaatggtagtagtagagtaatgatgtgatggtgagaagaaagattgggaaagttgaatatgattgtgaggtgaaaggagagtgtgatgatgaacgttggttagttgtagttgtagttgtagttgaaggtgaaggagatggttgtgttgtaggggttgttgtgatgttagggtaaggtggaaaggttgtatgttgtaaagagatttgagtttgaggattgttggtttgattgctcagatgttgttgaactgagggaggaggaggagctggagntggaactggacaatagacaggtgtagtagggattgttatgggtcgtagtggtcttcgtgttgaaaaggttttgttgcttgttaaacaggttggagtcaagatgttgtgttgctgtatgaaggataaagatttgaat

SEQ ID NO: 44823 - DNA, 586 bp, Arabidopsis thaliana columbia
cttgacaagtaaactccacaacaagtgtcattttcgaaagcaaaccaaataattaaagcattaactagatccaaatagcatcggtctcagtcaaaatttcagaaccctagctagactaattatataaagagaaatcatttactaattattagagtgaaagcaaggagaagggtaagtgagattgtgagaatatatcgttgatcttcaactactacaatgtgtgaaatttatgacctaaacccttttatagtattgaagcttacactgcacacagtttacttttatagaaacccattcaactaatttaaaacattgaagctgaatatgtatagttttcaattaatataccaaataattgttgaaatgtttgtgatgcaggaccatgaagaaagcaataatgggttccgagagagaaaggctcagaggcattccatttggggaaaatctgcatttgagtaataacaatttgggatatgaaaatttaacggaaaaataaataatggcgtatgacatgtgatggtgactcttttcttctagggtttgattatgttggtttagggtttctgttgttggagagagctagaga

SEQ ID NO: 44824 - DNA, 500 bp, Arabidopsis thaliana columbia
tgaaaaattgtttaaacctgaggacatacagattcaaaaaaatgaagagtttaccagaatctggtatagatcttcttctgttgatttcatagagagacccttcacaacaacagtggcggatggggtctagcaaaaaccataaaaatataggaacggattttttaaatgtcttcgcaacaaaagaatatagaccagggatgagagaatattttatacagcagaaaaatgatcctggttatgtctatcttcatattctcttcgcctctcactttcattccagtgatccccctcatagctgtcctcccggtaactccgcccatggctccgacctctaggagatcttgatctagagaactccccacgtccggtagatcgagatcgtgacttctcatatctcttatgaggactctcatctctttcgcggctgtaacatcttttgtccactccctatcacgtgaatccattctctatctcgagaattccgttctctgtcctgcgga

SEQ ID NO: 44825 - DNA, 670 bp, Arabidopsis thaliana columbia
aaagggaattcatgtctgtggagagagaatacgaagaagagagaagagacgggcacgaagcgggcaagagagagagatttgttgggcaataataatgtaaatatatatgtgtttgtttgctaactctctcttctcttctcaacaacagttacaaaacgcatttttcgtagttttttaaacagagactaattaattccttcacggacaaatgttccctaattgcattaccaacattttttaaaatttgataaaactatctatgtatctccttcatttggtcattttttaaaatgtttttcatgatcatttgttatttttcagtttgtatattaagtcgtttattacaatttccaatcaattagtactattcttactaataataataatttgtatttcaattatcaatttaatgtcttgagattttcccaaaacgaaaaatccaccgattattagattgttttagattcggtatttgtttatccgatatcatcagcctattcttttgcagattatatataaattccaacaaatccgcaacaactttaacgtaacagcatgatatgaaaacacagtgtttacaataagactcatcatcatttcttgagttataatagatgagtcctattgtaaacactagacaacgtcacgggtgactcatttatgtccatgt

SEQ ID NO: 44826 - DNA, 386 bp, Arabidopsis thaliana columbia
tcatcgtagatttgtttgaaattcttcaaattgagccggtatcaagacatggcgggaagtgaagcggtagaagataaggagataaaatcggcggtttcaagctgtgaagcgtatttcgagaaagtacaatcaaggaagaatctacccaaatctcttcaagaaacccctaaactctgctttcgccggaatcccagtctcctccttccctcaagtccccggcggcagaggtaaaaattagaaagatcccatttttttcgattcctccaaatttcctgatttctcgtttaaagtttgagacctggcaatggtttagatccaattagtgttttgtttgatcgtagtgatagagattcaagcggaaacacctgtatcagaagcagtaaaga

SEQ ID NO: 44827 - DNA, 472 bp, Arabidopsis thaliana columbia
ggagaggagacgttaattctaatctatcaccctccttaagtctaataagtgtgaggagtcaagttagagacataaaacaaactcacttgggaggaagtcccatgactatccctatatatggtttttattttcttgttacttttgttttgttttggttgtcttattggttctcaggaaatgaatagcaattggagtaatcaacagagatgcgagcaagtggttggtataaagttttccaaaattttcaaaaacactctttcgcaacgtcgctagaaaagctcgagagtgcgatctaatggttttgggataatatctttctcaacaacaatgtcaaaccactcgaacgcaacctagaagttgtatgatcgagtgatctcctagtaggatttcccgaaaacactcgatcgcaaggtagagtgagagcgaccacagaacttcaatgacaactcatgcttccataaagtcaaataga

SEQ ID NO: 44828 - DNA, 311 bp, Arabidopsis thaliana columbia
tgataccttgttatgatgtattgtaaacatatcaaattaactaaaaatatatatgcagatttaggtagtcgaaatacaaacgatagtttttatattaagtggctagatttcgtgattaatatactacgtgggtagattcataatacttaagttaaaagtcactaatcgatcagatagacagcagaaatactcctacacttacgaaacttcaggagaagcgattttcaacaatgcttacaagttagttacacgtaaagatcttagtaatatctcagaatatatataaagtatcttccaacgacggtaggaaa

SEQ ID NO: 44829 - DNA, 373 bp, Arabidopsis thaliana columbia
aaattcactctattgcataccaccgttcgacttcatctgatttcgtcggctctaggtacactctttatccatttaatccgggcatgtaccttccccactacgtaactattcactgtcacacctaaaggtgttaacataataacaaagatacacaagtttgcacgcgttaattaacttgtctctatgcaaattttgcataatggaatatacgtgtaataccatgtaaatatacgcgtgtaaaagcaaaacgcatgaatcgtatgatgtgtgttaacaaatttggaaagtttttgctcttttgctgccaccaaatcttcgtattatatttgggacattaccattttaacgagatggtcattgccattgggaccat

SEQ ID NO: 44830 - DNA, 532 bp, Arabidopsis thaliana columbia
tagtagctaatatatggcggtaaaatgaatgaataaaagaagcaatgtaaaattattggtggttcaggatgatcagctaatgtatccgtcttcattggagaacgaatggtttctagtgattttagcaaacagcggtaccggaatttgggttccggtcatgaaacggacgacacttgctgggaaatcacacgagctctcaagatttgaagctaccatgaattttcctttacttgtcatgattagttgaaaaaacagactctgaccgtctttaaaatactaaactagtggagagactatttgaattaagaacgtgaatgtctgtttgtgtttttggacagtgttgaaaaacttggtgggcccagaccccgccgcttatcttgtccgttacatttgcctccgtgaagatattttccaccactgtttttttgagctattttaatcgtaaggctgcgatcggctgtggcaccattcaacggccatgatgtttctgtatcgttagacagcattacagcgaataactaataattattaa

SEQ ID NO: 44831 - DNA, 511 bp, Arabidopsis thaliana columbia
aagatcgtccattctcattgcatcaaatttttctgacccgatcacttccagttccggacaataatcatttttcaaaaccagacccaactcttcaagtaacaaccgagcttttgtcagactaaagcagccacagactttaacgaattttttcttcaatttcgagtggttgttccgttcaaaatcgaagccttttttcatctgtagacatgtttacagatattagaatcatcgttcttcaatatgttaaatcagggttttaaaaaactgcaaaaccggtttataaaattccgcaaaatacctttgctatttcaagccgttgactctcacgtttctgtttcaactcgtcttgtgccctcattcgttcagcaaccttagcagctctcatctcggcttcaattctagctttctctgcatattttgtgaaagaaacgtaagaggcaaacatcgaaaagtttgagactttattttactttcataagaacacgtagtagtgtaccttcacgttgtgctc

SEQ ID NO: 44832 - DNA, 547 bp, Arabidopsis thaliana columbia
gccgttaaagtactgtgcttcgagtttttcttccaccggccaacggaattacggtgcttcttcttcgccgtctccgattgtaatttgtaagagtaatggaatttccgatggtctttgggtgaagcggaggaagaacaatcggagatttggtagtttaatagttaagcaggagaaaggagacgtgacggagattcgagttccggttccgttaactttggagcaacaagagaaggagaaacaaaatcgagatgatgaagaagatgaaatcgatgaaggagatgtagatcctgaagatctcaaatacgtcaatgaaatcaaacgggtccgtgatccctttggctgagtgaaattgtagatagttgaatcagattgtactgaagtattttgtgtgtgtttaggtaattgagcttcttaggaggattggagatatgatcttcagtgaggtaagctacattttcatggtcctgtgttggtttttagtattggttttgattaacccgagctttgtgtgtgtttgcatattataggttaagttgactattatgat

SEQ ID NO: 44833 - DNA, 532 bp, Arabidopsis thaliana columbia
tccacttgacaccgtcgataatcttgcacagctacaatgattcaataatcaagagaattatattgtataaacagataagaaaacatggagatatagcaccctatttcactaataacataccgtcagaaacatcaactagatatcttccagctagacccacaacatcaagaaccgatgatgctgaaccagtgacaagaagatgacttcggcgtgagatatatccttggtgttgtttgagcatctcagatagaagtccttggacgtgggttccaatgctttgccgtgaatgatcaagtgcacaaagagagtacacttggataagaagttgaaggtgatcatgaatcaaagaatgcagttctcccatttgggcttgagtgaagccatttattgtcctgttttctgacgaagcaactgcttcagtagcagaaacccttctcccaggtggtgcaatgggtaagataggtacaagagggcgtaacaatctgccagcctgttcaggagaattgtttttgtgatgaatggagatattttg

SEQ ID NO: 44834 - DNA, 522 bp, Arabidopsis thaliana columbia
catgtaaacgcaacaaacaatcgaagcccaatagatatgtcaaacacactcaagtctattactaattgaatcctaagaacacaatcgaaagattccttgagaataatttaagagtgttaagcaagcatatatttcacatccctggttcacaatcatcaaagggttctcttttctcgacgcgatataaaacattggtcttgtaatgcaaaggcatttccaacaaaagggagagaaaagactaaagtgtgtagatcaatcatgagaagaaacaataccaccaccaccaccacactctagtctaatcttgaaaatataacactctctttctttgttcctcatctttcatcttcctgtagaacttccaagacccgcacaagggtaaaccgctctcacagatatatctgtttctttcttgtttgatggttcattagatggaggaggttcgctcctgctgttgctgatccttttgactttttttgctttgattgttttggtacaacaaactgatcagtctgttgaggt

SEQ ID NO: 44835 - DNA, 543 bp, Arabidopsis thaliana columbia
cccaataaactcattgtaagttgaaaagtcaaaactaccataaatcaacaagtattttcaacttacaatattttcagctttagatgtaagtgcatcaagtcaaggagcatctgtgtaattcacaattacatggatagaagattcgtacatactgcaaaccttagcaacctcagcacatgattttttttccttgtaagtcaagaacttccacctattcacttaaaaaaagtgctttacaatgtctctgtgtcacatccaaattgccaacatcactactcttgtcccgaacattattaagtaaaataagggttacttaaacactgcaataccatgacagtcaatctgatcgtggagagggtagtcacttagtaaagtgactaaaggacaggtagcatatacgtagagcatggatacgctggacaaagggatgatttgcatcctagtcaggatggagcagaatgcttgagatttcacacactactcaagagctgcacacaatttaaaacttaggaactgtcaagggcttcaagatggctgactaga

SEQ ID NO: 44836 - DNA, 811 bp, Arabidopsis thaliana columbia
agagtcatatcataaataaaattaatattaataaaataaatgggttttttgcaagacaaatttgcaagtacacgattttgaatcaacattaataaaaagtacaatataattaatccaccgttttaatacgggttaaatctttaatttattattttttaataacaattaatatatataaatacttaataataattataaactgtaaaaatataaatattttataaaaataaaatttgcaagttttaatatatattacttttaaaaaataaatcatcccgcggtatacccgctataaaatctagttgtatatattggataaaccaggtatctcctaattttacacatatttgatatatttattcagaatgtacttttaaatactaataatgttagaattggatataattactaattaagatttaaatacaactaatttaagctatcggcaacccaaatcactcctgcgtatttattaatgaaaactatcattacgaaaaataaagcaattgagaaatatccaaagataatgttcagtgagtttcatttatggtagagaatgtctttggggcgaatagggtaaggaaggatagcgtgaggtttctcaaggactcgggacttggcttagaaggtatatgcagcaaatgcggcgtgtgggaagcatatagggccagcggtatggtggaatagatgataggttgggtggttcacaagaaggttgtttaaagttatcatatggtgattatatggaattggggtggtatgctggtggtgtagtgttagactggtgaaaggatgaatgtgaggttgggta

SEQ ID NO: 44837 - DNA, 515 bp, Arabidopsis thaliana columbia
cgttcctctcatactaaaatatttttattgaatcaaagaagtattttatttttattttaagtaaacgcatagttaagagtttcgatatacaagcaatgttcgattagttaaacgtaccgtaatgagagtcgtccatgcatgcatggctaaacgttgaggtcttttcttgattccctttttgttgtatctcaacatcatttggagatttcttgagctctgatccggcttgggatcctcagtggaaccgcttggaaactggaataagcttaagaatgcagaagcagtcactgatgctatcatttcaacagtgaatagttaattacgtttctcccacggtaggttttgaggacaaacgtgacatgataaatcgtgtattaaactagtgtgtaataacctaatatcttccattagcagatcgatggagggccgcacaagagaaactgatgctggagcaatgctatgatcttttgagttagaggtcatatatagatcatttgaagaactgaactgatatg

SEQ ID NO: 44838 - DNA, 574 bp, Arabidopsis thaliana columbia
ttcattgatttttatttttattaaaaaaaaaatcaagataattcatgttatatttttcttcttacttggttggatcttgatcggtgaattattggtgtatgcactcactgtcacccaatatgcaaaacttttgattctgatataaagatgccagcaactaactaattccacatttatggactaatggttaagtagtgttcagtaaaaatggaacatagtataagcatctaaatttcttttatattgatactcatatacaacaagatttggagcattcaatgtgatagtttgaaagagttcaaatttactttaatgttaaggtaatacatacatatttttacatgaatttcacaccaaccacaaacatttcacattaacactcttctcttgttcactctcacttgtatctgaaagaaaaactaaaaataaagtggaggagagattgtctctatagctttttgcaaaagagaaacaaaaaaaaaaacgaacgtacgtgtgagagacgattgggacatgagtgtcaattaatggcagattccactctttttaataatcagagaagtattattattag

SEQ ID NO: 44839 - DNA, 561 bp, Arabidopsis thaliana columbia
gttttgttctataaagaaacatgaatatcaggattaaaaagagctaaagtgaaaacggcataataatttgacatacaatgtcacgtgaactaatttgcttggtaacgtaaattaagtgagatcactttgcaaatctcactttctttaaatatcttattaaagcaaattccagaatgtcgtcatattttaatgataatagaacaagtggaattctcaattcattacatcatatttatatggtgtatcgatttatattacttgtatatctatatataactaaacgcacaataacttagaatataatttttcgctacacatgcaaattgattttgcaaggtatatagtcattcagattgatcatttgtagttacttggttggttttaaattagcaacgaaatcacgtaagcgtcaacataaggaaacatgtagaataaaagtgaatgaactaatcactaattaagaaaaaatattagtttaaaccagtgtttcacgcccgacccgaaccgtccggtccgaccggttaacccgtaatccgaacatttttccggtttgggtttagt

SEQ ID NO: 44840 - DNA, 552 bp, Arabidopsis thaliana columbia
taacagcaacctgttgaccataattcatccaccactattattttatttttaacttgatggacataaaagggtggccgacccataagtggaagagtccaaaaagcaaaggattacgaacgaactactaacaagttgggtcgccgacctcccaagagtagcaagacgatacagaagcttttcttttcttgtattcggttctttcatttaaataacgatagtataacaacgttagaaattaaactgatctgatagttcaaatgaaataatgaccaaccatatatagtaacgcgcctaacgcgttccacaaaaaaaacataaatggcttaagtttgaggggtccttatagtcagtcgcatattctttggtcgcataggtacaacaaaaggtcacgacgatagactctccaccgatcacttacttgccgattcacattctcccatcttctgcgcatcccttgtcgctactactttcgaaccttctcgattccaatttcttatccgaaaccctacggaagacagacctaagtttctcagctactgacctaccgtgaac

SEQ ID NO: 44841 - DNA, 635 bp, Arabidopsis thaliana columbia
agaccaaatcttttagggtctctcgtgttgttgggtttcttcatcttctttgtaaatggagaagaatgctctaattcgagctcattgattgggcatgagtctgagttcaagatgttgcaacatcagcttcgtggggttttcactgttgtcgatgattgttcgtttagggtttctcgttttgataatcgctctggttccgaggttcattggtggggtgctatgtcttctgattttgataatatgactaatgatggctttgttatctctgatcagaagcttaatcaaacattcaaaaactcatcttttattgttcggttgttgggtaatgttacttgggataagttaggtgtggtttgggtttgggacttacctactgcttctgattttgggcatgttctactctctaatgcgacggaatcagatacttcaaaagctgaatctcctccttcagagagcaatgatgttgctccagggaaatcgaataacagtgagccttttaaggctcctactatgtttgataattgtaagaaactttcggataagtataggcttaggtggagcttgaatgcagagaaaggttatgttgatattggtttagaggctactcctggtgtattgacctacatggcgtttgg

SEQ ID NO: 44842 - DNA, 580 bp, Arabidopsis thaliana columbia
gtggagaaatcactttttaacaacaacggcatttcgtgaagaagaagctagagctaaagtcaaaagcagaaaagagtgaggaatctggaatcgccattgatgcagattcagtgacacaaccccaagtgattgaagattcagaagagagagagtggagatttttgagaaataagcgttttggggtttctggagtatggaagcttcggcgtgacgccgacggagaaacgtaaatctcgatgttacagtttcagattccaatctctcttcttcttctctgtactccgatttgctttgctctctttggctttaagtccccctttgactctcttccgaattttttagattttttttttattgctaagctcaattaaatatttgtccttttgttaatttctctttgtttttattctaaatgaatttatacataagagcttttaataaacggcatttactgaattcccaacatttaatttcgttattcttttaaaagcatcgtaatgttctattgaatgggtcacagttgattaaataaatatatggcttcttttttgaaaatatgcaatgtataaatgaaaatgga

SEQ ID NO: 44843 - DNA, 698 bp, Arabidopsis thaliana columbia
tcgttcgaaaacgcatctatcaatcttggtcttttatgttcctaaaagataatttacacactcccagacatgtaataattaaaccagcattagcatacaagacgacaagaaaaactcaccaaaaaatgataattttagttgtgacccctttttcacagtataaattctttttaaaactttatgcaaaattgtattaaattatattatatgaaataaatttaagtaaaattgttgctttttaaaatttaacctctttatattaccattatcataaaacagaatgaatctaaatagaaaaattcccaaacaaaatctcaactatttaaaagttgcccagattcatatacacgatttcatatataaattttttcagttttatcctaaaataaaactaattttatttatttaaaatatcaaatttatattgattttctaaataaataccaaagggtgataaaatagtttggtatttgatttgaggttagttttgatttaaaatgttagtaataatgagtcgcgttttattggttgccggcttaaatacttgaaatgactcggacgaacgtcattggccaggcaacgtgtaaagcatcctacgtggcgtttacttcccaacgaagtagcgagtacaaaaaccaacatcattgtactcgcgcgagtaggtcgacgaaataaaaatctcacctttttgaccccag

SEQ ID NO: 44844 - DNA, 548 bp, Arabidopsis thaliana columbia
  unsure (1)..(548): unsure at all n locations
ttcttcatccttggngggaaacttcaccaagtaccatattctggtccagggtctctgatccagtagaatgactaattctgtcaaagacacttctcccagattttggtttcttggcatcttcggctgcttcggcgacactttcataacagtagccatgggattcacaaccctagcaacagatcgaattttccgagctggatcagggtcagatgagttttgagtagatgtggacaccactgaacgaagacgttttaatgaggattcagtcgaactatttgccggccttgatatagctagagcatctcgcacagcaaactgaagcagccggcgagagacatcaggtttagcttccctctatcaaacaagtcaaagaaaacaaaatcagagaaccataaccagtatccatacattggctttacagcaggacaaatactggaacaaggcaaccttataacacaaagataagagtaatacggacgtctgacttgttagtctcatacaaagcagaacgcaaagatgccctctgaccaaaactttacactgagaat

SEQ ID NO: 44845 - DNA, 525 bp, Arabidopsis thaliana columbia
tatctatggaacgcctttgataatgttatccttgagttcaaaggcatgtcagcggaaacaacaaatttacaatctttaagcaaaatttacaggagcagttgctcctatattctatgatcatgaattttcacaaatgaggtacaaactttgctaatctgcattacctgttagctccaagtactgtatgatgaatgtttctgaattgaccacaacaagctccaagtgtaggaggaaacagaaaagaacatacttggctcacattcttctcttcttcttcttctcatgtcttatgtctcttcctcaagttccttatggttggcaagtgcctttcaattgaatgtggacacccgaaaaaagtcaaaagattccggcagcttttttcaccatcttcttctgttccttgagaactcaaatggctcaagtaagtcttgccttcatagatatagctaagctgttgccacagcgaaacccttagcccaatcgccacaggagcactcgccacaaagagatagactagaacaaggc

SEQ ID NO: 44846 - DNA, 449 bp, Arabidopsis thaliana columbia
aaaagttttacaaaatacaagcccaactcatactcaagactgagattgaaatagttaataacttttctaccggatctgtaaaaaaaataaaaaatgacgggacgaaagtaaataaatgttcatctaaattttatttattttatacgtaaaggataatgatgagtcttctagattctgaaaacagtagcctgcttttttcgaccgtttgctatgcttctaagctaaaagtaaaaaaatagaaagcatcgttgaaagagaatgataaatgtacatggcaggtcacaaagctgacacgtgtcgtacacatgttagtaggtgatgacgtgttataatattttggcagagagcgaaatcccatgcgtcggtatagggaacacaatagcatgagtcgtgttaaaagtcttctaatcgtcagactctttgcttttgctctagttattatatgatta

SEQ ID NO: 44847 - DNA, 552 bp, Arabidopsis thaliana columbia
cgaaaaaatgcaaaatcatatgaagtaaaaaaataatacggtattgtatatagcctattttaacaactttacatatattgatttcatataattattctgtattttttggacgtgaaggataaaattacaaaaataaacgattttgacgttttttggtacaaaaaccatcaataacatggtcttagatcttaaccatatatggttcctacaaaagtcttatacattaactttgtgtaggtgatcaatctacatcaataatttggtcttgtagggattcttcaaaagtcatcatgtaggaaacatttttaagatacattagtcgatcaagcatcccttacccttgggtataataactagagcatatagatcaaagattggactaccgagtaaagcatcatgagcagtaaaaacaagagttatccgcgaaagtaatgtcggttttatatgtgataacgcatgcttgagttcgagtacgaaaaagaaaaataacaaatttgataaacagatagcgaggaaggcttttcgaaaaaaagcagagtcaaaacttgtttt

SEQ ID NO: 44848 - DNA, 517 bp, Arabidopsis thaliana columbia
cttctcaacgaatttgtactcaatttgagaattttatctaatagggtttgatgtttaaccttgcgtgccaatggcattaatatagatcaaatttatacaatttttcggcaggagtgtgattgtctttatgctattgagcttatgcaattgaataataactgtgattgtgacaatggaaactcatggtttatcaacatcttcaggttcgtgggatttgtgtgtgtaatgatgagaatatagctacttcatcaagagataggaccataagggtttggtcactggatccatctgataagcgcaagtatacctccgagaaaattctgctgggtcatactagctttgttgggccacttgcatggatcccaccaactgatgaataccctgaaggaagacttgtctctgggagtatggatactttcgtttttgtttggaatctgatgaatggagagaatattcagacattgaagggtcatcagatgcaagtcacttggtgttgctattgataatgaggacatag

SEQ ID NO: 44849 - DNA, 482 bp, Arabidopsis thaliana columbia
cttcatctcatctcttcttcttcctttccttctctgattcttctacttctcatctctatttcttctgttttctcatcaccttctgttacttcttttaataagtgattctgaccttatcagaaatacacaatgcttatgttttgatgtgttggtctttgaggaccttactccctagctggagtgttccaaaatctttgtcacattagtgtctcttctctatgcttcatatcaaccattgtctcctttcccttgcctttatgtatctctcatcacttgttgagcttgattcttgataacaaagatcgacaaaattggaatataaggactgttgttggaacaaaatcaaatgacttcgaacacaattattggatcgtaaaaggctttgacagaggaaggttgcaactaggcgtcgacattcgggtacccatacccgatccgttcttttttggggtatcgggtctattcgggtagagggttgagaa

SEQ ID NO: 44850 - DNA, 373 bp, Arabidopsis thaliana columbia
ccggtactcaaattcggttaaaacaaaccgtcaggtgtataaaagataaaacaggaagagaagaaacgggaaggagggttatggtctagatagacaatcacagagtcagttctcaatctcaaatatcagcagtccaatcaagatcagatgttccgtaccagagtagattttctttttgactagatcacatcatcatcacacagacacaattatcactttcgcgctgtcgtaagttgcgggatacagctcgtaaatgcatcagacaacatccatcgttcggatcatgactcgtaagcaaagtagctcagtcattgtgtgtgccgagttgtcgcgtgcggcaacagtatcttacgtgtcaacgacagtgtcccac

SEQ ID NO: 44851 - DNA, 554 bp, Arabidopsis thaliana columbia
taacaataaaaaaaattaaaaataacaaaataatatttaattttaccagacaaggttatatggtggaacgagtttgggtctatattaatacgggataatatagtacgagtgaaatcttagaattagcaattagaatacaatcatataatcttagacactaaacagaacaaacaacataacatgaacaaaacaactataccttaaaattcaaattattagatacaaatatttgaccaacggtgtaccgcagagtaaatttcacattatatcgtctaattgatcagatataaaaaacaattaatttgtatatacatcaaactaacaaaaatacacagattttctaaatatctttatattattccgcaaaacaaaacaaatctaacaatctgtttactatgcaaaatacaaatacaatatcattaccataaattaagagaaaaaattatcatcggatttaggtcgtcatcttaagagtgagaatcccaaagaggataatgatgcaagatataatgcacagtaattgcttggacattgatcccaccaagaatgcatgg

SEQ ID NO: 44852 - DNA, 591 bp, Arabidopsis thaliana columbia
  unsure (1)..(591): unsure at all n locations
ttccctctctatcacacccataaccaagtatactcttgtacttcttggccattaacgctaatcgttccacttcagggcctaacacaaagatggcacagatgaataagtagaatgtaatttacagtttacacacacttggtgattcaagaaacactataactagtagagactgaaacactcaattgttagtagatgatcacanctaacaacttgtatgcggtgttacttggctgatgtagattgacccattgtgaaagcccaagtcactgggcctttcataagttaagcccatgtgactgttgctgaaatgatcttatctacaacttcttactcttggagcatctgtgcctcccttgaatgaagcttgttgtggagtcacgggtggagcaaccaagctacgtctcttgatgaactggtcagatcttggtgatgctacaagctctcatgtaagaaggaagaggcatctccctcaaagcaacaagaaccaccttgataccagatataaacgtgaaccaccattggttgtttgttgcagtatctgatacagtgtcgtagtacgacagaagctgttttaaagacggcattggtgag

SEQ ID NO: 44853 - DNA, 538 bp, Arabidopsis thaliana columbia
atttgagacggacggataatagaaagtttgggaggttgtttgggttagggtttggctcggcgtttgtgacatggaccgggactggccggtgaggttctgtttggttatggctcatcgtgagaattagcatttgtttaggatgaagaatgagatgaggatttggagagaagtgtcaagtgaaagatttgtttctctctctcaagagttgtttgtgttgtgtgagagagagagagaggagaaaagagaatggcctaaaaagttggagaaaatttgagaatttaatgggaaatttttgagtgagagagaaagagagagggagagagagacttagctattgaatgtagttaggggaaatgggaaatatttaaggaaaaaatatgggtttttaagaaatatacaaagagaataatgttagcaaatagattgttcaaactagtaagacatcaaaaacattttctgttcaatctagtcaagcaattttgtttaggacagtactataattttttagtccatgtattattcaatattattatttata

SEQ ID NO: 44854 - DNA, 1266 bp, Arabidopsis thaliana columbia
tatgcataatttatttagtatattatgaccacttgtattctgaagattttttctctttgttaattccttaaaaataatattaaataataaattttatgtaaaaataacaaaatataataatatgggacaaagggagtagttcattacttaagttatacatagaatgatttttttggttgaaaaatgcaaaaacaaatgttatgatggttctaacaacagtagtgtaaaggatatagttaaagttaaagtatatacattttatatcaagtaattttttctgttttattttttaatacaaaaaggtacaaacgaaagaaagaaaaaagcactttgaaaaactgtatagtaattttatctgtggaagatatactccctattttggatcgttgggtcaaactgataataaagtctgctctatatatatagacgaaataaatttctaattgaagacaaaattaaagtctgtatatagacaaaatctaatatgaaatatagaaaaaatctaatatgaaatatagacaaaatccaatatgaaatatagacaaaatctgaaatttcatgataataagtgtcataataatgaaaatatagacacaatctgaaacttaaagtacattccaaataaagtggaaaagctgttttttcatccgatatataaataaacgcaagagtagctagttctctcacaaaagctaaccatcaagcattccaataccaaaacattgtttagctatggcaaaccaatactttaggatggcttttcttctttgcctcttcttgtctctctcttgtaagtaaatgtgaatttttgattgcgaattcgtaaaatagtgaagttgttcacatttttgtataattaaccaattatacaagttgtgtggaaatgtaatttatgtttaccatgttaaattctgccgttttaaaaacaaagtaaaaaaaaactcacatgttctaagttaaacttaagctatttttactactataatctatctttcttttatatttttggatttaaaaaaacatttggaatttttcttttactacagatcatatatgtgattaatgtttctagtttttgaaaacatatacagtatactaatttgatacctttgttttttcttaaaataaattgaagatcaaagcatacgaatcgaggctagggaaggcaaagcatgtataggcaattgttacggatcttctgctcctccggtgcctcctaacgcttctctttcgatacctcctaactcttctccttcggttaaactt

SEQ ID NO: 44855 - DNA, 451 bp, Arabidopsis thaliana columbia
tttctctcttctccaacgagagctcactaaatttctcgacaaaaggccatcttgagaccaaacactcggttccacaaatgagaagcgtcccaagccgagtagcaagcaagaacaatataagcctagtagcaatataagcttctattgtccctcgtttcgtgaccagctcaatgctctgcatccattaacaaatctttcactttttactcaaaaccttaaggtctttttaataaccgcaattaattttagaccgaaacctagactaataatattcacgttaaaaaaacaaaaagagctagatatttttgtcatttaaaaggtctatagaagtcaaaagagaaccacaaggattttattggaactcgatcaatacgaatccttttaactaaatcgaccaattcaaaacaaatcttcaatttctcaaggtcctggattggggttttttggttgg

SEQ ID NO: 44856 - DNA, 507 bp, Arabidopsis thaliana columbia
gtagcaatcgttgaaactgaaatgattggtactcaacatagtatttgactattgattaaataacataacaattatcatatttttttctttctaaatatttggttttaggtctaatcagtttaattcattaacacgtcttcaaagctctgactatcaaaagctcattagctgtcttgatggaatttgtgttatcaacaagttgtgttctgtacaaacaatctgccaaacattttatttatctttcaacaaaaagcaaaacaaaattcaattattgttcagatagaaatattactcctatgatcacaattcacaacttcttaatatatgatttatggcatttcacattggacaaatgaatggaaaatcaataggcgatttaagatacgaagattatatttttaaaaatgattatggattttgtattgactaatgactattgaggaatctggtcatatatgatatcagttgatttggacaacctcatcttgacgcattagtatgtcaaaa

SEQ ID NO: 44857 - DNA, 884 bp, Arabidopsis thaliana columbia
cccatcaatatttgaaatttttgtttacaaggtttaactatttggtagttgttcatacttgtgtttaaatgttaatgttaacccccttgccccgttttcgaatcttattcttgcactctgctattattttatttttccatttatgcagtctttaactctttccacttttgtacatatcaaatttatacattttaaaggaacaattgaggaacaaaaagaatatatcatatcatttcttcaccactaatatagaagaattttgtaataaaaattggtctagacggtgcgtaggcgtttgacttggcgctcatgagggtataggcgccttgatttttttctagacggggaagcaaatcggtggaccggtctaaacggtcaaaatcggtttagacggtcaaatcgtttagtttataatttggtaattttattgaattttgtattttcaaagcccaccccatgatcaggcctgttgagttttgttatatatattattttccaataataatgagtttgatgaaatcaaagtggaaacgtccaattttaatgagttttatgcccatttgggctttcatttaataaaatgaaatggtcgacaaaaaaaaatcgtccaattaaatacgttatcgttctcggttcagtggacctaaaccaattcttcaaatgtctcaatccgtgactgtgttagttggacttgagcttataatagtatgactgtatgagtaacagtcgccctacgttaaaaagacaggcgtcttcctggaaacggattcacactatgacacaaaccacgagaactcaggaaatttgttttattagatacattatttcgctatcatgcattttaatggaccaagattcttaagttttctaatggatagattata

SEQ ID NO: 44858 - DNA, 697 bp, Arabidopsis thaliana columbia
tactcccaggaaaagctcgaacgaccttcaacaaaagggtacctgtacccgaaaccgacacaggtgggtaggtagagaatacctaggggcgcgagacaactctctctaaggaactcggcaaaatagccccgtaacttcgggagaaggggtgcctcctcacaaagggggtcgcagtgaccaggcccgggcgactgtgtaccaacaacagaggtcttcgaacagtactgcttgccggacacgccaccggaaccttatcactcgatgccatcgtaacaacacccttttttcttgttctttagtttggttcgagtgttttgcttttggtcttataagagaggagtgatgtttgcatgaggaaagcatgacgtgaatgattccatgcgtgacacgtcattcggattgatgatgtggcgaacaatggcgacaaaatgacacgtggccggattttaagctcttggacaaagtattgcacacttggcaatgtttgcgacaccggcttttgtgctttgtttgacgagttctaaattgcaacttttgacaatttttgcgtaaactaaggatctttctatccaaaattgcattaatgatttcaaaggtgtaacgatacagtagcaccataaatatgacgacattatctttcgcataaaaagagaaagatataatatagcagttaatacaaccatatagcacgtaatta

SEQ ID NO: 44859 - DNA, 630 bp, Arabidopsis thaliana columbia
caatcgaagctgtgattacctgtagcgtcttgtgtagtcttattttaggtaagtgatcttttctggtgaagaatttagaagattgtgggggtactctgaaacttcttaggattgtggaattggtttttttcttttagggtttgttgagtcgtgaagttgtttgtgtctgttggatctctgaatggctgagaagaaagaattagggttaccaaagcctagtattaatttgaaagagcaattagcaagaactactctgaagaatctgaggttacaagggcatacttacattgagctacgtgaggatgggaaacgttttgtattcttctgcactttgtgtcttgctccttgctacagcgacacaatcttgcttgggcacttgaatggaaaccttcacaaggagagattggcatgtgctaggatcacacttcttggaacgaatccttggcctttcagtgatggtgtacttttctttgatagtcaactggagaagaagaagagaaatcccagtttctggtggtgaaggggttcatgatacgttggagcattgtagtgatgatgaaagatttgctattgtcaagtatgattacacgaaacaaatggagataatgtgcatctgcagtactgatgatg

SEQ ID NO: 44860 - DNA, 544 bp, Arabidopsis thaliana columbia
gttactatgtccgatctccatatacacgtaaatatataaaaatagcatcgtgaattaatttgaaaaacattcctagctatttaacttggctttatatatagaaatatgagagcatatacatatattggcccaacatttcctggtagaacaagcgcattcaccatatgaagtgcttcgagaagaacaacactatgggtccttatttatccataaacatcgacaaaattattggtaggtacgttaataaaaataatttcctcatcgcatcaaatatttgattataaaattttaaaaatcaacctgtatattaataactggatgattcaaaataaactagaaaattattttcttaaaaatttatagaatggtaaaaagatggttttaaaactcatttatttaaatactacttacatattcagatcagaggagattgtagcttacgtcatatgttatataagtaaaagaaatggtagaaaaagtaagagaaaagaagaccaggggagaagaaccttgtgattgtggaggaagactaggccacacgaaa

SEQ ID NO: 44861 - DNA, 460 bp, Arabidopsis thaliana columbia
atttaatttctatagtacggtatatttcaaaaatctatcatggatttgtttttgttataaacacatcttaataagacaatctatcatggatttgtttgtttttgttaataagacacaactttcaaatctcataaatatcaatccttaagatgtgtttataacaaaaaagttacaaagccaacaacacatgattttatcaaaaatattactaatatgattctgtaagataaatattaagaacttaccattaattcgcttttaagatactacatgacttcttaatatttattttaataagacacaactttcaaaacctcataaatatctatccttaagatgtgtttataacacaaaaagttacaaagccaacaacacatgattttatcaaaaatattaataaccctgattctggacttcaaatcacagtcgaccaaaatgatctaatttagcaattaaaaag

SEQ ID NO: 44862 - DNA, 639 bp, Arabidopsis thaliana columbia
gaatagccagctttcttaaacgttatagctaattgctacgtattaattataccacactttgaagatccaataaagaagcataattgtacaataagagtattaaaatgaaaacaatcattagagataaatatttaaatttctccagaatatgattgaagacacttggaagcatatttatatgagtcaaatcaaattaattccgcaacaagctaaagaaaaccataaacccaaggtttgagagagattacaccgtggaaagatatgtcaattctgatacaaaaataaaatctaagtagataaaaaagcaaacgattcttcatgatcaaaagcaaaaaaaaaaaaccctagtttcttgattcatcctaacacaaaacaaaaaaaaacaaaaaaagaaagaaagagatttgtgaaagaaggattggttagtatggcggtggagctctggctgtaggggcccaaataacatcagagccgacccatgtggcaacgtgtacattgataccccacacgactctcctccacgttcccgccatctgtcctgactcttcacgccaccagagaccggcggagattgtcctctctttccctgtccccgcgagtgtttttgtcttcttcgccggtaccggtgatagaaggttg

SEQ ID NO: 44863 - DNA, 526 bp, Arabidopsis thaliana columbia
cgaggacgaaacaaattttggaatcatcaattatacgaaaaaaagaagaaagaaaaaagaggtttcatgaatcacagtagtgctgacaatcttcgaaccatttgtgggtttcatacaatcgatcaccaatagaacaaaagagaaacagaggaacagaaagaatagaaggagtgggaagtgtatgaggaagctgtgtccgaacatagacaaagacgatggtctggagacggtgttggaagttccgataccggaggagatgttttccggtatgggcaacaacgttgcacttaggtggcaaaatatgatgacgtggatgaaagctcaaacgtctgataaatggtcgcaaccgcttatcgccgctcgtatcaacgagctccggttccttctctacctcgttggctcgcctcttatacctctccaggttcaagtcggtcactctgttcataagcccgtcaaagattgctccattgtaagtcattcaaaatcaatccttatgaaaacataacaaagatgttgaaaatatgat

SEQ ID NO: 44864 - DNA, 600 bp, Arabidopsis thaliana columbia
  unsure (1)..(600): unsure at all n locations
cggcagttttgtaatattttgtttttgtttaagaatatgttagagcatctgtaatgtagggttctctttataatttgagagagttttgttgattttgttgattaaaaaaataaaatcaaaacaaattattttgagagagttgacctcttaaaagagagtttggaagccgagaaagtcagacacgtggtagtagatgataggttgattttatgtaacaagaggaaaaagaaaatcttttgtctttttattttttctttgtgtcgggataactcccaaacttctatctctccccatttcgagcaaaggcaagaaatttctgatttcgttcagtgtggtgagttaacaatcatgaaccttgcggtgtgtatgtgttcctgtcgccggagtcatcatctctaaacccttttctcgccatcatcggtcggaggttaatctaatgagacatttaggatgtgaattagagagaagacgttgaaggaagctctagtttcttcgtagtagtatgaatcaagctcttttcctttgtagataatgattaaagtttgtcgtntatgggtgaaatcaaaattggagtttataaagtttacaaaattaggggta

SEQ ID NO: 44865 - DNA, 421 bp, Arabidopsis thaliana columbia
tgaaaacatttttcaaaatataggttcggtatcagttgcatttggcgtttggaaaaccaaaaaaaagcaacacatacaatcaaaattgaggtttccataaacagcgtgaatgtgaaatgttcttcgatctcttaacttgactctttggaagcagagtaaggcaggacgttttctcctattaacatgtgccctttcccatatagttcgagccaaatcaaataatggattctaaacgattgtaaacagttccatagtaaaatgaatagatgtggacctctttaagaccctaagacatgacaccatataataaaaatgttcctgtatgtgacatttgaaacttgattgcgaacaaaacacaagtatatatgcaaaaccccttaactgcatcatagcaaagagaagatagacagacatgtgaaac

SEQ ID NO: 44866 - DNA, 494 bp, Arabidopsis thaliana columbia
cacactccacacgagatctacactacattcaatctaggattacgcagagaaaccatgagatcatcaagacgaaacgaatcattttaccttgttgatgatatataagactgtgaagcagatcaatagaatcaaatgaagaacagagataaacaacgagatttaaagcgatagagatctcagagtaaccagaattacctaagaaaatcgatggcaatgcgaaattgagggagcgagattcttcgcccttcgttgtcggagctgagcgaagaagaagaaatgagagaattctctttgtggggaagaggcgagttttgacacgagccttttattggctccagaaatagggtcacactagaaagaatcaagtgtaacgcactattctatacactcggggactgtaggaccgttagatcatcgagattgaaattgtgagccgttgattgtaattgctaaaatgaataatataattatggaagtatacgactgcgttatcg

SEQ ID NO: 44867 - DNA, 362 bp, Arabidopsis thaliana columbia
gaggcaaccgaatgcacctctggtctggggcaccggactgtccggtgtacaccggacagtgtccgtgcaccaccggacagtgtccgatgcaccagaggactcaaactcaaacttgccaccttcgggaatttctagaggcactccgctataattcaccggactgtccggtgtacaccggacagtgtccggtgctccaaggaagagccgcctcaggaactcgccagcctcgggaaatcgcagcagctgctccgctataattcaccggactgtccggtgtacaccggactgtccggtgaatcagcagagcaacggctacttcgcgccaacggtcacctgcaggcgcattctatgcgcgccagaag

SEQ ID NO: 44868 - DNA, 523 bp, Arabidopsis thaliana columbia
acaatgctgtttacgcaaactactgccaacacggttagttttctttagttataaattttgtgcggtctcaaattattataaaccctcgattgaagtcgagacgtgtacttacgttagtgctatgtcacattcttacaaaaaatggtttgttaaacttattttcatatatacaaaggtcgacacgagtttatggatagtatcggtatcaactgtaatgaagtatcccgttctggtggagccttggcaattcctgagttaacaataaagttccttgcacctttacgtgtaatattcttactctcttttccaagaatatttgttctcttttatagagttaatgtttgtatttatgttgatatcttcgagcagagtggatgtaggtttgtggtgaaaacgaggatatcggggatatctttggtgcgcatttactttgaacagttcatctttaaacttccaaatcaagaggtatatttagttgctccacaagccttttgtgttggtttctgcttgtgtatagttttga

SEQ ID NO: 44869 - DNA, 1264 bp, Arabidopsis thaliana
ttattggtaagaaatgctatgccatgctattgcatttctactttagcttatggtttcaaacaatgtattgctctaaactgcaaaatgatcgagttatttttttccctttgaaattggtaatgaaaacaaaacagtaagcgaattctgttcaaaagaaccaatcattacttctccaataatatctctgatacaagaacaccaaaataaactttgtttgaagactacaactctaaagtttatccatcaagtgcgccaagagctttcatgtcctctaagaaagctgtgtacgaatcatcaatgctctgtggctttgaagctgcagatgtcttggctggctctaccttcaccgttgcagcagaagccatagctcttggtgtaaaactcaagctcgaggctatcgaagtctttggctttggtttcgtcacagttgctgattctcttctgactcgaaccgacgcagggacctgcagatcaacaacaacgccataaaaatcggttgattcgatgtttgggattcatatgcgatatatcaaaaaggtgttgcgaattcatgtaactcaccatggatgtaagctcaggtgtgtgttgagcgagtggtctcctgacaacagtaggagcagcggattttacaaaagatggtttgtttggtacatatggtctgatcattgcttgaccgtcttgaaaactagacggtggtggtcctggtggaagtggcggtctcatcataggaggcggtccaggcggtgggccatacggtggtcttgggattagatgaccaacaaacattccaggatgaggaggatgcatatcgagtggaggcggtggaggtggaaaacgcaacattcctggaggaggatgaacatcaggttgaaaattagtcagtgaagcagcagctcctgcaaatgttgattgatgttgctgatgtaaaggtgctggtggtggtggtgcaaccatctttgagaggttagcgttttgaaaactactggcgttagattctgcaggacgactctcagattcattgcttggaatgccaggtggtgggagaagagggacggaagttatattagcattctgcaaaatagatatggaaaaatctgtaatcaagtttcaatctttcttcatttgatacacgaaaacacataaattgccaccattttaagatagctatcagtaacagaatgaggttttaccatgcgattgtcgaaggtaaaatctgatgattccgggaatctaccatcgccttgacttccacttagacggggat

SEQ ID NO: 44870 - DNA, 481 bp, Arabidopsis thaliana columbia
atccgatgtcgtccagcggttaggatatctggctttcacccaggagacccgggttcgattcccggcatcggagcttttttattatttttgaattgaatttatttgggctttaagaagggcttagcatatttctatctggggctttgtttttaaaaggctagtttatgactagcccaaattcattgtgcttaacatgtaaacccaagtcattgatcaagtcatacgtaaactatcatctatagtttggtttctctatagaagaattttgcaagattagtctctttcggttttcttaagtgtttgtcttctttaagctcaaagacattttcattagagaaataactgctcatatcgaaaggtgagtatgcaaagttccttaaaaccattttgttttttttaaatggtttctacactcacgaaggtacaaagcacacccaaacaagaacggaacggaacttttttacttttgatagacgtattt

SEQ ID NO: 44871 - DNA, 603 bp, Arabidopsis thaliana columbia
cggtgatcgtagatagataagagagagagatgaacaaaaaactagttaaaagaaacgaaaagagagagagagaaaggaggtgactttaatggttccaaaagaaagggtctgattcgaattacacggactttccataaacataacaacaacccttttctccgcgattccagcttcaccatgaaacaaagccatcaacaacaaaatctaaacagagagatgagacaattaaagaaactttgcccttcaaaatttttccgatcaagctacaagttaacaggattcgaaccctaactgtgaaattgaagaaaaatcttccaaagttgaaaatttcaatccaaatacagaaacaacaagagagaatcagatacaacaaatatatcaacttttttttttctttctcgagatcattttagagaaaccatgtcagctgctgcgagagagaggggaagaaaaaaaaaactttccggcgttacctttatttttttcctttgccgagagattactctgcgccgtctgtgagaattacgaaaaacgtggagcgaagttagagagagaggagaagaagatatatatctatcagaagatgttgagttgaaatgagtg

SEQ ID NO: 44872 - DNA, 451 bp, Arabidopsis thaliana columbia
tattattctataatagacttttggtcaatgataagttaaaatacattcgcatataaaaaatcgtacattcatatatagaaaagataacaaatattataatctaagaatgaaaaccgtacaattcattttccatattggcaaaaatgaaaattaaataagaaatgatcatataagttatcgatatacaaaatttcatcttaattaaaaaaaaaaaaaaattcaggtaaattgagttttaacgaaaaaaaaaaatagtgtgttatacacggtatagactacacccaaatacaatttagataaacaatctatatttttcttaaaacaacgattaacataagatatctacgaatgccactttccataacaacaagaaacaatacaacaaaacgataacttattattttagtttttgaatataatataaattatagattgcttatctataatttat

SEQ ID NO: 44873 - DNA, 625 bp, Arabidopsis thaliana columbia
gaattagacgcgtatacttataagcatatatgatatatttatcatctattaaaacgacctaaagactaaagttaataaataggaaatatcaccacttaactggttttgaattggaaatttatctgcaaattgtgattattaataatattatatatccctttatagctttgaactttgatacgccaattatctttacctaagcgtactttattgtccgtctcacgtatatataagatataattgtatatttctagctctatgcgatgttactgtttacgtagtaattatactttttcttaaagtaagtgtagttaattatataatcaagtatcacagaataataaaagatcagaaaatttaatattaaaagtgagttttgctctagtgtttgtttcattttgctcacaaatcagtattatagttcttcttaaggatagacattcttaatgacaatctgctgctgaagcagatataactcgtcttttcgtttcctaaataaaggttatggttctggtattatgattttaaaacatatacaagattaaaaaaaaagagaatataaagaaggagagattctgattttggtcgagattctgtgtaatgccacttgatgctgcccaagtcc

SEQ ID NO: 44874 - DNA, 544 bp, Arabidopsis thaliana columbia
tgcgataatccttatttcgtttttatattaagatcaaatctaccgtatctatgcatgattttacagtttctaaaatctctttctgcagagggctgatgcatccacgtgtatgagacggaatttacaacacctgaaggaaagaagtatgcatctttaaatttcatttagtctttgtatcatgcttattctctattgttgcaactgattagttgttttaaattacgcagatattagtttttcaaggcgtcgaaggaggtctaatgggcaatgtcggtaagattataaggacatccaaattatcgctcgctcaggcgcattcgccaatgccaagcctatgttaaacctgggcagttgttgtaggcagttagctcgggaacaagcgcaactagctagtgaaaaaacgtcgctttcggaagctggatctacccctctatcgcaccatgctgcatcctcgtctgatctagcagttagcactgtgacttctgttgtcccagcacatctgcagcacttactggacattcttcaagccctattcaagcgggtt

SEQ ID NO: 44875 - DNA, 585 bp, Arabidopsis thaliana columbia
ggatctttgtaataatagaggtttcgtcatgttttgcgaggtactagtcatatcgtttattttactcacccactctccagtctccactaatgaatatacacatatatactaccaataatagagctttgctgatcacatttagaattgggatcatatacagtataagtgataaatttgattgtatattaatattctactgctgcaatattagctgcatcggattgtaaactgacgaaagaagaaattaaaaccaagcttgcgtcaatcacttggtgagtttcaagtgaatgtgggtttgttttgtgaactgattcaatttgaacgagctcaaaagttatgtttatgattttgtttttctttccaggaaagtgtactttctttcttgttatctggaaaattctccgggaagtcaaaccgcgatttcgacggattcttgtcggctttgaggattctgatcaaactatttcttcttcacaatatcacacagaattgttttcattttataggttcgcatttatataagttgaccaaacagaagacaaagcagttgaaggcaaagtgtattcaatacaaagagtagacgac

SEQ ID NO: 44876 - DNA, 101 bp, Arabidopsis thaliana columbia
tgcatcgttcggtactgacggtcggccagatttccgacctggcgggcaagttgctctcatctactgttgatgaagtcgagcagatgggaccgctgaagcga

SEQ ID NO: 44877 - DNA, 503 bp, Arabidopsis thaliana columbia
taatactgtatatttgagcataaagacagttaataatcctagtgtaaaatagaagaccagaccagaaacaccactttctcaatggtatcatatgttacacattttatcactcaaatctgtttatgaatcttatgatagactcaattatttcaacagatttatggtggtagtacaatggctattgatgattcgacatatgtaaataggttatagtgagagtcttgtggttttaacttgtgcattgtaaacgttttaagtggcaaattttatagatgtcggagattaagatgtgtttcgatcttggattcataaatttacataagaagaaaaacatgaagttatatataagatttgatacataaaaaggcaaagtataaatgctaatatatggctttcaagctggaaactaggcgggttcggcggatcctgtccatgaaagctcaccacacaaaattaaaatttaggaacccttagggttgtttgtatatatataggtagggagc

SEQ ID NO: 44878 - DNA, 502 bp, Arabidopsis thaliana columbia
tgcataaatatacacagatatatagataaactacacctaatcatgtagtaattattgttttggtttgggagcacagaaccagctcatggtagagtccatagcacagcttcagaaaaaggtaatacactaattaagagactatcgttgttatggttgtgcctaggcctggacgtttgagtttacgggtccggttttagtttggttctattttttggtttttgcagtttaggatccaatcaagtaattggtttgagagatcgttacgaccaaactattggtatttcgagtagttatggttattcggtctacaaataactaattattttaggtgtataacaggtatttcgattcgctgaatattgcagtctggttcccgtactttcaggaatgaagttataatccactcggatatttacgaattttggatcgcttctctatgaagtacctctcggtttggttagagtctggttattttgcctaggactacttttgccatgcaaac

SEQ ID NO: 44879 - DNA, 527 bp, Arabidopsis thaliana columbia
cggctgccataagttgctttgaagttttgctttgttgctgggggtcctcctgctatggtaaacttcaagcttgaaggttgatgttgaagggtaccacccttgggatgtttctctatattgatttcggtatcaccagtgactctacacaattctagtggtctcggaacagttgagaaaacccatagaccaacacaggccccacagagcttgcagtccagtacaacagaactaggatcagagtttaatgtgtcaggaagtgttgggttctcattattccctgatatgccatttggaattggggttgattcagagatgcttagaagctcgcgggtagcagtttctggcagtaaatcaatagtctctgtacccctagccgtctcactcaatttatctttgcagtccacaatataaggaagtgcccgcggttcccagcacataaactgataagtttttgtgcctggaaataccaatgcatcagcattacaatcagatatgactcaatattatacaaaacctctcagaaaaga

SEQ ID NO: 44880 - DNA, 671 bp, Arabidopsis thaliana columbia
atgacggtaaaaaaactagtaactcatacaggaaaaaagacaagaaaaagagagaaaataagagtacctataggatgaagtgattaatcattgtatgttaatgttagtgttataatatgtaattagtgcttgtatatggggatgttggattattatttcctaatttgtttggggttttttgatgcctcaaggataggaagatgattcttttattaattgatggaaaattatgtgggatatgtggtgaattgatgtcaatattaattgttgttcttgattcataaatgttaatgattctatcataaactcttttcttccgattggttgcaattcgattcgtattagatttaatttacttgcatgtttataagaaaaatatttaatattcaataaagagaaagagaaagtatagaaatttttaaaattccatcgtttaagcataggatataaagtaaatatataccacttagaagttcaagatttaagtttatgaactcgttttcaactaaaatatatttcttaacaaatactaatattaaacagataatgagagacgctcaaagaaagtaactgatgattgtgatgatgatgacgtgtaaaatgtaatcatccattatatgtacatatgagtatatgttaagagaagtgaaggcatgcatgtgtagtgagag

SEQ ID NO: 44881 - DNA, 583 bp, Arabidopsis thaliana columbia
tgatccaaaccgacaagattcttacctcaaaaaaaaatcgcaaataaagaatcatgtagctccacttcttatttatttgctatttttttctagcaaatggaaaccattttttgattccatagcctctatttcattatcttctatcggtcaaatatgaaaaagagtcatcacactcacaacggtccactctattgacacatttaagcatttgaagatattacaaaatgaaatagtatcgcatatatagataaaatctcttgaaaatgtgttttcagagaaacaaacatccctccccgaggaatggtcgcagagcaatcattcaacgtaggaggcgaagatggagaaggagaaggagaaagctcgggagtgatgggaatggatcctgatgtattggctcaaacttattggtatctccatgttcaagaccggagagcttggacacatgaactcgatatccgaccatcaaacccaaatttctagctagtacttaaaaaaaaatacaagttgattggtttatgattttattcaatgctattttagccaaatgtgtatgtatgtgtattcttgtgtttgtaatgtaatt

SEQ ID NO: 44882 - DNA, 507 bp, Arabidopsis thaliana columbia
gtattttgagataaatgacaaatatcttcttgaattaggtcttagcttgaagatgaacaagtgggagagtagacaaaacgtgggatagattacgagaaattcagaggtgaaggaacatagtaagagaaaggtaggttcggccacagcagattcctagaccggctctcatgcagcacgatgctttattttgtatgcctaaccatgtgactgcagtctctccatttaattcagttggccgctacttgtttctttgtttttctttcctaaccatggttagtttgtaacactggttagtggttactcacacacttgttactacttccaaccttttccctctttttcctctgttgtcttcaaaatgtaagacactttaatacttcttaatatgttgattggctttgtcactttgtagaccctgattttcaactatttcggtaaacttttgtaaaacaatttgggtttaaatctctcatgttttactagttgtacatctcagctaatgacaat

SEQ ID NO: 44883 - DNA, 534 bp, Arabidopsis thaliana columbia
tatttgtgagatttctatatatttttatggatatacaaagtgaatttaatccaataaatgatcttctgttataaaaacaatgaatcaaatggattggcctacatgaagctttggtttggggacaaagaaaatatagagagggaaaggtctcacaagtcacaaaatattatacaaaaaaataaaaacaaagcacatgttctgacacatgaacatggttccttcttcacttctccttttctttctaacagctcatttctctctatctctccactcttccactactctcagcctcccactcaattcattcttctctttcccttgcattttataatgctttttgcctttttttcccttatattagcattgcattgtcataaattcctatgtatatgttacaactgatgattgattttcttgttctttaattgtctatagtatatatatagagctagggagctaatttatgtatatatgtatagacatggcttctctataagcttaattgtacatgtgaaggacagaaagagaagtgta

SEQ ID NO: 44884 - DNA, 481 bp, Arabidopsis thaliana columbia
caaccgcagtaattgcttgttaccaatttaaccaaatttataggaagagttagtgatcaaagaacttggtgaacggtaaagtaagtgtaacattacagatttgattaacaaatgtgattgttacaacaaaactcaacattatccaattgttaccctccatttcaacagcagaaaaatatcaaaacgctcgagaatccgaatcatcagaagctctaaaagcatgcttttagaggacaacagacatttctactcctatcgcgaagtcttgatccctcttgcttgtttcttcttatcccttttcttcatagttttggtggttgaccgctcctgctctgtttcatgggtttggtttcctcacaggcacaggctgctttgtggaagcatttggccgtggaacctgattctgttgattgagtcttctccttgcgaataggctcttcctcttcacgagatactcacttgttgtcacagttacttcaac

SEQ ID NO: 44885 - DNA, 550 bp, Arabidopsis thaliana columbia
gcaatgaagatggctttctccattgcgatttattgtgagctcgtcgtcgtcaaagttaacgccttacgtatctcgagttagttatctgttccctgtgtttcttcaattaaatttgaagacttattgcaatttgattaaatgggtatttgattatagggacgaggactaagtggaattgataatggggctggttgttcttgttctcgtagtgtcacgacaatgattggtatgtctgattttagcctcttcgtatggtctatttgtctcaatatctatttgatgttacttggattatgaaagacgagatttttttgacttaagagtgcatgtttccatatgcaggtaatgaattcattcgatgccaagatgagtcaaagatcttacagttgcagattgttgatgcccttcgttcagcgagagaggcaaggagcgtcacgattgctttttaagttaatacaggggaattattcacttagtgctgatgatttcatgatattctatattattgtgctcgatcaccggatcctgtggtaagcttgatatatgacaa

SEQ ID NO: 44886 - DNA, 507 bp, Arabidopsis thaliana columbia
  unsure (1)..(507): unsure at all n locations
gttgttgttttttgcaacaaaggttttttggttaaactacaaataattaaaacaaagggagtatttattttgttgttgtttgtgaagtgatatatttatctccccgattttccaccaaatcagctaggatgacacacatatgaatcctttgttgacattcctatgacataatatatgaccaactaatacataacaaacataaatctcgtaaggacagcccactctattaaaagtcaatggtaagtgaagggggagaaaccatcctacgctggccttgctgacaccctgtaactcttacgtatctacgtattcttcttttaattaataaacagtggaattaattaattatattggggaaaagaaattattgttaattggttgtcacagatgatatgagtatggagagacagatcatgtaatgaagttgtattaaatataatctagtgtgatttttaatagtataaatagcanttgagataattagtatatagggtctagattatttag

SEQ ID NO: 44887 - DNA, 576 bp, Arabidopsis thaliana columbia
cgcgtccccttcttactaaagctattaaaggtttgcacctggcataccaaaaatgttcatgccattgctttgtgtgttcttgaattctgaaatttttaaggatttggatttttgtatttgcttagctttcaagccgttgaggataagaattggtggttcgctgcaagatcaagttatttacgacgtaggaaatctcaaaactccttgccgtccattccaaaaaatgaacagcggtttgtttggattctctaaaggatgcttgcacatgaaacgatgggacgagctcaacagtttcctaaccgcaaccgggtaagctaattcactttcggtttagtttcattaacgttcacattttcctcttttgaagaatcttgagttagttgtgtttgcttgtttttatcgagcagagcgctagtgacattcggtttaaacgctttgcgtgggagacacaaactccgcggaaaggcgtggggtggtgcatgggatcacatagacactcaagatttcttaaactacacagtctcgaagggttacgttattgattcttgggaattcggtacaacaaacatttaaaaa

SEQ ID NO: 44888 - DNA, 380 bp, Arabidopsis thaliana columbia
aaaaaaatatgtgatttattttcaagaatttaagtcaattaaaaagaatcatttacgaatgtaaaacttttctgttaatgaattatgattttatatattgattacactattgtttaaagttgaaattttaatgtcagtaaatatataaaaattctaaataaataaaaaaaagttaaaatatatttttgattcaatatacataaaattttgggttatccgtataattaattaaaaggtgaattgacttcttctatatttgctaaatttatcacataatacttttttattttgtttattcatccatcttcctcagtacgcttcacaattgagaagagacactcttcactgttcatataacgtccccattgttgaattcgaga

SEQ ID NO: 44889 - DNA, 541 bp, Arabidopsis thaliana columbia
gacgtaaaagcaaagctccaccaccgttagattattatcatatctctaaatagattttaaattttgtttctttttaaaaaacattttttgtttccttcttcttccccgttaagcgggaaaattctgtcgggatctccggcaacaaacgcgccggagtcaagattttgtctctcaactgcttctcctttctttccccattgtaaatttctaaactttagccagaaattgacccaaaaccctaaaatttgtgtttttggttctccgacctaataatggaggagtctcgaggatcttctgatcaagaagatgaacaaattgttcaagtcagggaagctttaatgtgtccgacggtgaaaagtttgaatctttacgaacggcgaggttcttaaactacacaacggcatctatcgacgacgatgtctttgaccttcctctcgatgcgtttgtgtgtagacaccggaagggtttgatcaacggcgaagatctcgtttccagggtggggaactccgtcgttgaactggattgagtgggttaatgtaat

SEQ ID NO: 44890 - DNA, 593 bp, Arabidopsis thaliana columbia
  unsure (1)..(593): unsure at all n locations
caattttatcagtttactgcctctttataaagaattaataataaaaatatatatatcaaccttgaagaatgtctgtcgctttcgaagccttttctccctgcaatagtattaaccaacagatcatcatcatcaactccaaagtatatccattaataatgtaaagctttcatagattcacagagaaaacaaagtacacatgtgttcatgttttatcttcatgtttaagcagtaaagcaaagataaaattggaacttgttttcagtatcttatatttcagaggtaagttaacaattttaattagcagacaaaatcaatattatattaaagcgataaacacacacaaaagaattttcttaagctgaagacaaaaaaagggaaaatttaatttacacagagagaaaaagcagaattatgaattctcattcccaccaattaaaaacgagtaatgactcagtcaaactcaatcctcccactcactcaaatcagagaagaagaagataacagacgcgcgaaattatttgaacctaatttctgataacaaaattcaatttgggattggatcggaanaagggattgaatttgctactgtatga

SEQ ID NO: 44891 - DNA, 621 bp, Arabidopsis thaliana columbia
ccgactcactcctacaattcgaactcgctcgaccagactcactcaactcaccgaaatcgctacccaactcactaccgctctttttactactactcttcttcccgctcttgctccaccacgacaaaagcttcgtctccgtcaccggaggaagatcctcaaccacaattctaccggaaccagaacaaacattgtccctgaaaacaccagagtgatcgatcgctggcgttacagaaacagtctgcttcgagttgacacaacccattcccagaatttcgctcctccgcgtcaacaacacatgtgtaccggaactatctcttaaaccggcgccggttattgtgattcggatctccggtgaatgatgaaactattgctgttgcggttttcgttagatatatacagagagaaaagtttagagaatgttgtttttttcttttagagtttttgatttctgcgtgaattgcggaagacgaaatcaaaaattaaacagagatagatcaaaagtaaatgtcgtgtaatcaaaaatagaaatgtttaaggcgaaatctacggcaagattttttggatcgacagtgaataatgatgacttgattgatcactctcttttactttctgtgttaagta

SEQ ID NO: 44892 - DNA, 560 bp, Arabidopsis thaliana columbia
attctctttcagccactccgtcattcccattttctcagattctaggctcatctcatcgttcaccgtctcaatcttgtacatctcaaacttctgattccttgttgggtaattttcaacaaaccattccattccgctgcttccttttccgtttcccacatcgatgaatacccgcctcgagtagctctccaggtccaagttgtctcccataaggtctgggaggtaccgagtccgtttgaagtatgttcttgatttccttgaagctgctcttggtggttcaaggagaacatcctctagctttctcaaagctttttccctggcatcttcttctgtgataccgagaagctttctcccggtggcgactaagctctgtttttgctctgtttcccctgttttcctcatcgtcattaccgtatactcagagctctttacgtaaactatctcgtagtttggatgtttcaagaaatttggaggaagatcttgaaggttgagctggacggtgaagatgccgccaactttaagagtcctgtctataaattcagcagagtcaatgtggcgagaat

SEQ ID NO: 44893 - DNA, 419 bp, Arabidopsis thaliana columbia
gctgaatttgcaagggaattagcaagtccattttgacctgaaggtgtaattagaggataatgccacctcagaagcctagctgcagcactccatgcagctaagggatctccagcacgaacagcagagaggagtatctccctaagcacaaccatctgcgaagtgctccaatgggactcgaacagggagacaatggaatgatgatgcattttcccagcgtcaggtaggcgcccagtttcctttaccagcaagcacaggagaagatacaatatattatcaaggtatggtacatggatagataccaagatagtgacaagtgatgataacaaagataactccagagaaccatgctcaatctaacccaagggaggaaaagtcatgcctatgctggcaaactcacatttgttaaccgacacttttga

SEQ ID NO: 44894 - DNA, 540 bp, Arabidopsis thaliana columbia
ggtgttattagctactgtttatgagaaaatatatttattggaacttggaaagctatttatatatattcttctttggaatattatcaagagttcaaggtttgtaaatgaattatacgtactgttgtagatagatttgactattatttaactatattagatagaatatatagatagaactagaagtctagaagtgagaattatattgtgtagattgtttcttctatatttgtatgctcgtctaacatttattattattattattattattatgccaaactgtgttattattaaaatatttaaaaagttattaatttattgaagttatactatatgtagctagaatgccttttggcgtaacatgtttctcaagtatttgtcaacttccgttttcactgtattctctaggttcattatcggtccaagaaattgattttaagccctcttcacttctctttctaggaatctactggttttttagaatacatctatctcggaaactgactcgttggtaaaggctatttctgcagctaaggaatggaa

SEQ ID NO: 44895 - DNA, 298 bp, Arabidopsis thaliana columbia
aagatatttcccagactcctttgtagtgcaataatggcttttttccaaggttgggccatggaatgtgagaaggagtgataagtacaacttctggaacatgcacttgaagggtcagggtgtgtcctccctttcctgctggctggagtgtagaaatagtactggagagacattttgggccatgtttccccaagatggtagaaaaaacagaaaaagtaccatgactgatgggtgctacttacttcaagaaattaggtgagagagaaatatacttttatcttattcaagtcactgttatctc

SEQ ID NO: 44896 - DNA, 434 bp, Arabidopsis thaliana columbia
atttaatacttccattaaaatcaagcttcaaaactctacataatgtagagtcgtctaacgcgaaagtgcataatctgattgtggctcagccgtcaaattcctgtcatcgagttcttcatccatgtgccaatattctctgtaattacccctagctaagcgttggcgtgtcgtatacacgtcgcaagaatatcattgagtgaaatatagaagaatcaattcaataactgttcatatggtatcagagcaaagatctctaaaaacgtaactttttctttgccagagtgaccatctattcttcttctgttgtttgatgcatcattcaatggaattgttagtgactgcgaatgatgcattttcaagcaacaggcaaactcttgatacggaggcgcgagtcattcctgctggcttttcaccactacgacaatttcgaacta

SEQ ID NO: 44897 - DNA, 498 bp, Arabidopsis thaliana columbia
agttctcaacagttacagaagctgatgacctagtgcttcttcgagtgactttcgaactctcctctttaggaggcatgttcttaaaaccttgtgtcaaaatgaaacaagacattggtgaaaacaataaaggatgatttagatttgggaattcaagtaggtgaaacatacataccacccaaacaactaaaaaggaaacacaaagcaaaaatgaaacagtttacacagaatgtgagtgataccatctcaatatgattcaatacaagagataccatctctaagactagatacatagaatcaatttccagaactgaaattgaagcaccatttacatatacagctatatcaaaatgatataactttaactcaagggcttgctttttttcacaagcacaaaagaaaaaagttcaaactttgggaaatcgtctgaatctgaagagaatgaggagtagtcacagcaaagagagtagattcctaaaaacaaacaagtcaattttgaat

SEQ ID NO: 44898 - DNA, 441 bp, Arabidopsis thaliana columbia
gcaggtcgatgactctagtgcccatcttattggctcgagttcgtgcatcgaataacgcgacgtcgctcgtttcccgcacacatcatttgagtttttatttttattttattttcacttttcaaattttcatttttcctcataatttttttgaattttgtcaatcactttccaatgagatttaaggttaaattcaattaaaacaggaccattataagtgtaagctgatatatatttggcagcttatatttaagttaacaagaatccaagaaactttataatttaataaatgatgaaagcctgaaaatggtggaagatgtctgtttttgtgggggttcttatttattttttgtctcccctcgtgtgaatgtatttttgcggtgttttttttttttatattgccaagaaaatatcatatgatagtataaaaataagtttttttgt

SEQ ID NO: 44899 - DNA, 675 bp, Arabidopsis thaliana columbia
  unsure (1)..(675): unsure at all n locations
tacgagctctactcatatgaggtgtttaaccctaaagctggagattcactggaacgacccttgaatgttgtgttaaatagataggatattctttaacttaactcatattgcttcatcagaaatggtttggtgcctctagtttaagatttagctactagtttgacgagcgatagtctctttcattcctttgatttatttggtagaacattctttagattgaagttttaacctaaccccatgattgttcatcatctaacatctaactgcaggtcaagtcttactcggacaacttcaagtggaaaggcaatcctcaaccagaaaactgatgttacaccttcttccaattcttctcgagcaaaagaagaaacctcatttgatattaattctcatgtttctttgttattttagcatctgtgagctttttggttgaaaagaaccattatccatggctatgtttacttattacaataatatgatgatgatgatgaaacacactcctttgatatttcatcaagatttctgatcacttctttactggtttatttcgaattcgtgtgattggattatgaaagagagagataattatggtcggagcgaatgaaacataagatccaaaattcgaattganagaagatacaacagaagaaagattgttgacgatacatacatatatga

SEQ ID NO: 44900 - DNA, 520 bp, Arabidopsis thaliana columbia
  unsure (1)..(520): unsure at all n locations
ctnnnnnnnnnnnnnnnnnnnnnnnctaaaggcccaacatcaccgtattcatcgttccactcgtacttcacagcgtttgctgcccactcaggaaaggattgttcgtcttgatagttctcccccttctctgctggtttttctgaaggaatgacagtgacgtacttctcgtagtcatagtcctttggctcgacccgccccttctcacgagctagggcagacacctcaatattcttggtgttttgtacatttgtaacgtctgcgagggcatctctcaccgtagataccacgaagttgctggtgtcatccatgacgaccaaaggaatagtctgataccaaagattgtcagtaaacccaatcactgaagagacccaaggaaattgaggtgtagttagcttactcgtttcaacgcttggaagatccaatgagcagaagaagtggagagaaattaagaggaaagacgacaagaccaaagaaaagaggaagcagtatggggtggaaaggcacacaagtgaaaaataga

SEQ ID NO: 44901 - DNA, 680 bp, Arabidopsis thaliana columbia
tgaatctagtttggaaagtctcatccttgtcaaaggaaaaaggaggggacttagatatatatataaaccctatatacacagattatagttagacctctctcaagctctgtatcattttcttctcaaaaatctgcagtgtgtacaaagaacagaaaatacaataataaatgagtaaatggttgtttctttcttgagctcgaatgaaatgtttttacattttttctgcttcttatgaaaccagtgtttgttcagtattttggttgaacactgattacatcaagaataaagatgattatttatgacaaatgcagtagaaattggattgattaccattaattatggacgattttgaagcaggagtactttttatcatacccaattttataagtgtaaattaaattatttatcaacttctatagactataaatgaaatcaagactgttactaatttcctgatttgcccaaagcaaaaagaagaacacaaaaacaaagcatcgaagagacaaaaagatgaacaataaatttggcgggaagaagccgacgggaacaccagtcactagcgtggtcgacagtcgtagttgtagcctctctgctcgccggagcctccgtcgttcacaatatatacaagccagatctcctaagttgtctttctttacaaatgtatgtaaggtgttcgatga

SEQ ID NO: 44902 - DNA, 881 bp, Arabidopsis thaliana columbia
tatagaaatagatacagaaaaacacacatatgtattatatagttcagtaacatatcttagttacgtgttcttcatcattcagatatcattattgacaaacaaacaaaaattgacttcgaaatgacaaaaccctaactcttcgtatcacatatacagatagacatatcaccttggagaaacttcggtctcgctaatttcatccatgggagctcttctctctctttcatttgagagagagagaaatagaaaacagaaagagagagagtcttaagaaacggtgggatgatgaagaagagattttaaggcaaaagcaacaataaacaaagaagaagaaagaagatgataacctttgtgggccgggcccaattagacctttgggagggatcatgacgttgtcgttgcccgaaacgagttttaaaatatgaatttggtgacgtcatcgttgcgatatggcatagaccaatctgcccgaacacctgaccgttgtgcccgaaggtggtccttttcctgagttagcagtttctatggtccttaagcgaaaccaaagtcaacaggtcaaataaaaaactcgaaactgtgtctcaagtttttttcttattgtttatcaacagtttttaaaatatatgttggtttctcatgttaaatgtatttttcgtagagcttctattttaaaatttcgttgattgttaattgaaaatttgataaatgaacattgtttggtatatacttcataatctaatctagctggactaggcatcctagccaaacataattatccactaattggtgaagagactgagtttgagcaaattaagagaatcttggtaaatggaattcctcaattctagggcaaaaaaaaccacatcaaagttcaaatttca

SEQ ID NO: 44903 - DNA, 595 bp, Arabidopsis thaliana columbia
tgcaaaaaatgaacgacaacaattgaaactcactggcaccttcaaattatggaatgaagacgatgaaaggcttattcgaaaaagttggagatggtaggcaaagactgagtagtccaccgtggtctgaggctaaaatacggtgacccgctccgaaaaattgatcaatggtgggacttgcaaaagggttgacaaaaaaaatctacggagacagtggcatgccggttctctagccaccatcagtgctaaaaagattatattattggctgcttaaagtcatattgccacaaccattcaccattctcaaagtcgtagtggcaatatgacacctttaagcaaccaataccataattgttttagcactcacataggccagagatccgacgtgtcaccgtctccctagacttctttgtcaaccctttcacaaggaccaccattgacatgttttctagtctggtcaccgcatttcagccttagaccacagtggactacttagtcgtagcatatcttctccaactttcccaaataattccttcatcatctttgttccataatccattggtgccggtgagctctactcaaccatcaagattcattt

SEQ ID NO: 44904 - DNA, 344 bp, Arabidopsis thaliana columbia
ctgatcttgcagagggtcaccgatgtggatatgtttttcaagtcagcctgagctgggctcagtgtctgtctttgcaagtagtctcaggtattgtccttctatatggcctctccatgtggcatttctaccaagatagcagaacttcttacatgaaggctcaggattcccaagagcaccaaagatggaagctgtgaggttgttttaaggcttaagctagaaactggttagcatcacttacaacatattctcctggttatcgcaattcaccagaccatctcagattcaggggaggagaagtagcagtatattaggtaggaattttaagagttatatatgctgggagg

SEQ ID NO: 44905 - DNA, 546 bp, Arabidopsis thaliana columbia
ccaaaccggaccggactgaaatttatacggacgctgaaaccctaatttatcaattcaaagacgctggggaatcagaaaccctaattaagcgattctgtgaacaacatgatgcgaaacgtgttggcagagcggctcgcgatttcgcaccatctctatctcatcaccgtcccccttctcgatcatgaaatgtgtatgggacaaacagaaaacttcttggcttgtgatggcttttagcgaggtgaatttgtaagccacgctcttatatatataagtaagtatatggtcattgaatttcatgttgatattcgctttcactttgagaacaacttcaaaattcagatcgtgaccaactatttcatcaattgctctgttatcagacaggctatcaaaagaggaaaacgcgttggtataatttgaatgtacgacgagtatgaaaacacaaaattcttgaataagaaaaggcttcatgagtagtagtagtagccaatagaccatgtgaaccatccttacctgaatttgcccatataaggtcgttgcccgagattt

SEQ ID NO: 44906 - DNA, 595 bp, Arabidopsis thaliana columbia
tgataaccattagctgatgccacaaaccattcatatcacaggttcaaaccaattggaaaaatctagcttccaaattcttaccagctgtgttttggtcttcaagatcaatttcttgtcgaagctttgcttcgacgtttcggagctcagtaggaatcggctttccttctgttaaaccatataaaccaaaatcagaaaaacgaaaaatacacatcgaatcaatgattgtttcaacagatactgaaaaaaaaaatcatcactagaccttgaagggcttctcttatcagccgcttctgctcatagaccttacgctcatcaccttccaagcttttcctgtagatatactctttttttaaccttacgagtctgcgttgcatcgtgattcgtcgtgaggctaaaacacggatgtggcggattagggttttaggtaagggtttcgagagaagccggaagaagaagacgactgaagaaaaatagcgaagtgttgagaaaacggcaaggtgtttgtcattcaaaacgtgaggcggagatagctagctattttgggcggtttatttattatgtgggctaaagaagccataggaaaagaaaaaaatag

SEQ ID NO: 44907 - DNA, 455 bp, Arabidopsis thaliana columbia
taaataaaattgagattttccggaacgtactgatctgtttgcaaataaggacgtatatataacagtatcaaatatatttgttgttataaggcaataatatattttctgagatattgcgtgttacaaaaaagaaatatttgttaagaaaaaaaaagatggtcgaaaaaggggagtaggtgggggcgagcggcttttgattagttaataaaagaaaccacacgagtgacctaccgattcgactcaacgagtctaccgagctaacacagattcaactcgctcgagcttcgttttatgacaagttggtttttttttttattttttaaatttttcatcttcttgggtttggttgggtcactcttcaggtcaggtgtgtaaaaaagaaagaaagaaaagagagattgttgtgttgtacccctttgactaaaatctaatgaacttttttaacacaacaaaac

SEQ ID NO: 44908 - DNA, 576 bp, Arabidopsis thaliana columbia
tgatcggcttcctgaaagttcagagcgaggaaatttgccagggcatttgataatgcagcaaaccaataacaaccaggctattcaaaaccttggtactaatatgctggcgggattaagaagtcagccgttgcaagatgcaccaaattcctctctggccttggtaccacctcagcaacaaaggtacatgggaattggaagtacaagaaacacgcaggatcaaggatcaaattctgtcagtgtctctggcgcttcgctaggtggactagatgcgatgctgccttatggctctgatagtatgaaccctggtacatcttttcatagaaagagagaaagtcaagaaggacaaatgtcttctatgcctggcttgaataagcgaacaagggtttcacatatgggtcctgatggggttccgcacaacagttagggcaacgtatggatggccttcatggatccgatacaaattggaaaaatacgcttctacaacaccaagacatgctaggcagaagtattcagtaccaaatacaagtattcagaggttttcacacaccaaatggaaggggttatgaacaggaaggt

SEQ ID NO: 44909 - DNA, 407 bp, Arabidopsis thaliana columbia
ctagtaacggccgataggaggcgtgaataaacataaataaatcaaatctacaaatccaaaactagaataaatttgtccaaaacctttcctaaatagtaattcagattacattcattgaaaaagagataagatagtatatatatatataggactaagtatcgtattcatgaagagattgtgtacataaatgacttatgaggctatcgaagaaggttcacagtaattacaaaagatatgattgagttacctaatatgagtacgggtaattctcgaagagatattattattagtcgagattgatttaaacttagctatagcaagagaatatatactgtaacactgaatatatgaaaggagaaatggtgccagctaatttaagtcgaaggatcacaactattctcttgggt

SEQ ID NO: 44910 - DNA, 312 bp, Arabidopsis thaliana columbia
ccgataaaatggtcattaaaaatttaaagaaggtttaaatgaaagtggataaaacaaaaggggtagagttacaaaagggcatcgtgaaaaaggcatcagaaagacattttcttttaattatgcacacgttattttaatggagtacagtgttaaattttatatgagaaggatatatatgtcatatcaaatcaatgtagttaccatatattagagtaattaacgtataacaagacataatgagccagcaagagagatacacacaatggtttggagatagacattgtttaagaatatagttttgttatattatat

SEQ ID NO: 44911 - DNA, 734 bp, Arabidopsis thaliana columbia
gtctttcttctaactcattgaagtattcacccctcataaattcgagtcccaccatttcccccaaatttctgacatttttctctgttacacgctttccttcttcttctctttctccgatttttattttttttactatttgtgattttgaattttccggcgatggcgtcaacgtcggcggaaatggaccaattaacatcaggcgcgagaatcggataatatttatcttgagaacgcttaggaagtgtctcgtcttcgttctctctctcgtcctttctcttctccttattcttcgtctccgtcctcgtcgccgtgtctctcctctttcatcgcctgaggatgaggctgttccggctccttcgaggcgatggagacggaagatggcgtggaagctggaggaggaagatacggctagacgtcgttccttagcggaaggcgttgagatggccggagatggagagatctcttgttcgttgttttacggacgtcgtggtaacgctttattctctcggtcgtggttgcctatttccggcgaacttaggtaaagcttcgatttttgcatgcacacaattaggattctccgattaagatttcgattttgacttttagttttggatttatttgtgtgtcttcagggggattttgattattatccatggattgaatgaacacaggtgaaaaaaatcaatctttttttcttttctctgtttctctgtatttcgatgagttctaaaatg

SEQ ID NO: 44912 - DNA, 538 bp, Arabidopsis thaliana columbia
gagaataattaaccttccaatcgatcagtttcatacacatggcaatttaagtcactcttatgcatccaattctctatagttcttgcaaaaccaaacgacaaaattttgtggaatatgcaaaatccaaagcaaaataaggcatgaaaacaacgatcaaaattgaaaattgaagtgttttaaagaatgatcgtgctcaagttcttcactttgcaaactcattaacatttacggatatatatctctagaaacaaaaaatacaaagaattataaatctataattcgaaacgacaaagagtaatataatacaggcaatatatagttacatgtaggacacaaacggcgtggaagcgatgacttgtggccaatgagcatgagatatggacaaaaacggaggtggtcagagagattaaaacagagaaagtgttagggaattgacatggccctagaagattttagggtttgactatatataagtgaaggtgaaatttcaaaacctaagaagctgaagtgtagatacagattctagaacagcttgttg

SEQ ID NO: 44913 - DNA, 558 bp, Arabidopsis thaliana columbia
ccattgggtagaagtgggacttttcttcatttgtttatgatgattatgtgaaattgcaaacttcagtcaaattagttttacaacaccatattggtcttgttttcctggtttgatgtctctctctgctgtgatatcttgattttaaaaatcatactaggtctctggtccaaggccattcgatgtgattgccaaagaatattattcggcaagatcagatgctataaaagcaaaggagaagcgtgataaaagaggacaggagcaagcaggcctagccattcgcaagctcaagcaagagatatctcatcttggttaaatttaatcttgagtaatgaatcagtcaataatttatgtcatgagatatttgagtttgttttgcagggttatcagaagcaatgttggaatctgaatttcagcgtgaacatgcttttgaaagtgctacagaacaagaattaacctgtcccatttccgataaccttcatgagtcagttgaggctgacgatgactctgttcagatgttagataatttgaccttgaatacaatcctgctgagagctgtga

SEQ ID NO: 44914 - DNA, 1072 bp, Arabidopsis thaliana columbia
tttcgtgaagtaactgcctcattgttcttctgtctccaattaatttaacacacatggctcttctaataatggttttgattttggttaattttgtagatatccaagatatggatgtgaaagttgaaacacaggttgaccatagtgagttgatatgcttggtattattaactgtggatcaaaaacaatgagaaggaagttgaccaaaaaaaaaataaacaaaagtgagaaggattgttcatagttttttataaaaacaatctgggcctttttatgggcatttattttttcatgaaaaatgcttctaagcccaagtaggtgtcgcacccctgcccaccccatgtgggccgtacctaggtgtgtcttagatgaagctaaaccatttttcatagactcatccataaaaagtatgcaagttaaaacaaaaaaaatactggttttggtaaaatttgcaactcctgtcacaattactaaggcttgaacctttcttcacatagatgtagcacaactacaatttttttttatatgcaaattagttgctggaaacgtgaactcgatagaagcaaaatgaaaaaaagaagtcaattctgttttcaactgaatccttttgatttcacacactattcatttcctaaactgagaaaaagcaagaaaagatacagtatctaccaaatcataatgtacccatttctttcttataacctttaagagctttcacacaacttggccaaaataaaaataaaaaagaagctttcatttcacacaccaacacatatctctaaacacataaatctctggaatttacttccttatacgtctctattctttatcagcatatttatacaagagagccaaatgagaactcactcatctcataaaaacaaaaacaacaacacacatttcaaagaactctgaaatggcaaaccaaaaagggttacatgtagtgatgatgatcatcactgtttggcttctttatgcagcacctaatatccatggatggggaaaagaaggtcatgaaatcatctgtaaaatcgctcaggttttgattttttcatctactttttctttcagacta

SEQ ID NO: 44915 - DNA, 567 bp, Arabidopsis thaliana columbia
agccatttggctccaacaagaggatcccctgtaaaaccctgagatttttcgtgtttattaggaacttaagagactgaagaaatcgcatcatcacgaaggaagatatagtagtagcagtagtgttagtaggcaagaagaagaagaagatgagttagtaatttcaaacaggaaagaaactcagcaacaaagtgacgtgaagatgcagaagaagaggatcgagaatcattttggtggctttaaacgtctgaaagtgaaagggctaataaagccgtaacgtgacagcttcaagtttcctcctaactacaattcttttaaattggctgatctctaacaatacaggaaaagcaaaagaaaaaaggaatcaaaagcaaaaaaaaatattcagtatctgattttattgtcattatgttttttaatcatgggagaaagaagaagaagaagcaacagacaaaagaaggaaaaaagcatttaaccagccaagccaaccaaccaaccaaccaaccaacactattggtttctttttaggatttccaaatctttgattctttgtgcacatctgtacacacc

SEQ ID NO: 44916 - DNA, 458 bp, Arabidopsis thaliana columbia
agatttattctatttgtcacattgttgtagttggttttatttgtaagtaaaaaagaaaaacttgaaaagaccagggaagaaccaatctcttaatacatatttcttaagataaaatttcattaaaatacaatacaatagatgtttcattaagtatgtttcgattttcataaaaatactttatagaatttttcttttagaatggatcgtgaatatgacggctctttgacctcttcgcctagttgacttggtaaaagagataatcaatacaatactacaagtgatctttagtggaaaaaatagatttctaattaaagttctgaaagtttattattaaagtatcacaccttctttctatataaatcatcgtttcttaactctacaaaccactacagaaaaaattaaaatgtttaactcctatcctaaccttttagtcttggctattgctcttgcactatctt

SEQ ID NO: 44917 - DNA, 471 bp, Arabidopsis thaliana columbia
ccctcgccccccctcccacccccctcccccccgctcacccgacccgcaccccccctcccggacgacgccgtgctgcccgccgtgctggtccccgcaccgcaggcggtgctggatactcaggaggcggtgccggcgcatactcaggaggaggcggtggtgggtaccaggagacgtaccggaggttacgcatctggtggacgtggtgctgcgcgaggatacggtgctcgtggacgcagtgcggcaggtggctacggaggcggtgatggtggaagtcacggacgcggtgctggcggctggtaatcaaagatagacttgtttgcctgctgttgctctgtctttggcttacatttggttttctgtcaccacttctggcttgcctatagttcgtctggcttacttttttcatgaaacactttagtttaactcttctttgtctggcacgaaatgttaattcgtgtgttgtcactaaat

SEQ ID NO: 44918 - DNA, 534 bp, Arabidopsis thaliana columbia
catctttcatgctcttctctcccttcccgttttcttcactagctgttgtcttctcctcgttttgttgtccggtttcctcattccctgagttttgttcctctggttgtccgttttcttcattctttgaggtctctgatgtttccccctgccccgtttccataggttgttcttgtttggtcgcatctgtgaatgtcacatccgtattcgaatcctgttcttgcccttgtttatttccttgttccacatccggctgttccttcccttgtccctgctcttgcccttgagtccctttgggctgagtcccagcgtcctcgtcccgctgttgtttctgttccttttcaaactccttgacgacttttttcatctgaccctcctcactctcttgcaccgtctggttctccttgccgttatctttctctttttcctcggaaattttgtcatagttgttttgttgggtccttgtgtttgagtctttgagctcgtcgtttcactcttctctttcgctgacttcagttgctcgtcttcagactttac

SEQ ID NO: 44919 - DNA, 469 bp, Arabidopsis thaliana columbia
caacatttaaaatgttaagaccttcaaagtttaacaagagaaacaaaatcatttcatctacctctgtctcggtagttcaactacgtgtaaggttgtccacccagaaaatcatttttaaagattacgaatctgaggatttggcggcgataagggttagactaatattgttgttctctccaatctgaggacttaagtgcaatttgacctaaacatggaattaaaccaaacctaaataagaataaatgtcatttaaaaactacaaaccaaaacaatccaaaaggtagatatactatcgcaaaagaatattgtaatccaaactaaaccaaaataatattggattgacttattagatacttttctttgaaactaaaagtcaactagaacccaatctttgttctaaattgaaagtctgagactactatagttaagcagctaaccatggaattattgttgtcctatgaaaaatgac

SEQ ID NO: 44920 - DNA, 527 bp, Arabidopsis thaliana columbia
tacatacgttcatcaagtgtatacatatgaatcaaatattttcacaagatttccatcgatatgtatgtattatatatatcattaattcgatcgtacatgtcgcttggtgattcatcaaaatttcatgttttccttcaagtaacatacgatcgattgctgccaagaaatcaatttgaatcagattagtacttaattatcacgttaaatcttataaccaaaatattcgccattaaacattatcttgattttattgtttttgagaattacaaaacttacgagaaggcagaggatgacacaagcagctgcacctgggaacaatgcgtaccagaaattcaagtgatggaactttgctccatctatgaacattagtggtaagctcgccgctgtaattttatcagatgaattatagataataatcaatatcaactctcaaaatatgtaaattaattgacgagaagcaaataataataataaaatcgcatttgactttctttcttaattaaagagactgagaaaattgtgaagag

SEQ ID NO: 44921 - DNA, 518 bp, Arabidopsis thaliana columbia
atataattaaattatatagatggattgttttatcaatatacggacaagtagagcgaaatctaacaaccactatcagggcaaacgactatgtcgagaaagattaatttcaaatgaacaacgaagaaaaagtctagtatcagcttaacaaaccgcgccaaggcagcagctatagttcgaaagaagattagcggagaaaagttgtcttcgacatgatagatatgatggaacatgagaggtgacgaaagaagagaaatgtggaggaatattgttgagtgtttggtacggtgttagaaaagtagtgaataggtggtgaatagtatgatcatgatgttattgagagagttgatgctgtgctatgaaatatggaatgattaaaatgaggaagtctgcgcgtcgcgagatgtatagaggatgagggttaggacatggcatcaaggtttgagtagagtgatgggattaagaatgttgaggtctatggtatagagaatagcgagagtatgattgaatgtgagcgaggt

SEQ ID NO: 44922 - DNA, 299 bp, Arabidopsis thaliana columbia
taatttcggtcagatggacataggtaatattttggtacagcagaaagtgtaaaatcttaaaaactgcatagtacagttgtacaaatttcacaaaaatggaaataaatcacaaattttttgtaacaaaaaacggaagtaaaatcattggttaaggcacgcgtcgtcctgcaatgacttattagcggtttcctcatcatatctctctcactctcatttcactttctgcgcaaagagggcaggaagaggtttcttctccaattattgcatatgtctctccaaaatgtctaattaatggtttt

SEQ ID NO: 44923 - DNA, 589 bp, Arabidopsis thaliana columbia
acatgtaatatgtataagaaacaaccgaaatgacattccatgcgttccattagaacgcttcacgtaataagtgtatggatttgaatagaacaaaacttttgaataagaaacaacccaaatgacatttcatacgttccaagaacatttctaggtcgagttttaaaaatgttgattggcttgcgtataggcacaatccaagaagaaactataactttaaactcacatggggtgggacgtaatgtgtgctcgttttagttcattgcttaagtcgttggtccacataaagatatatcttttgagaatcgaagtggcatgaggacccaagaaaagaaaaaacaaaagtgcacgtatgtacttgttcgatacatacataacacataatatactatcaattatgtaaactcttgaagtggactagcgtacgatactgtcctaccggtttcagaaataaaagtggtaaaaagacatgtcttcctcttgtcgatctctcattcgttgctccattacgtcttccttttttctcctcgtataaatgtatctaacttgcgtctaacatgcgaacatgcaaaaattgggtggccaatagact

SEQ ID NO: 44924 - DNA, 932 bp, Arabidopsis thaliana columbia
gtatcctaacatcaatatcaaaattatcatcaatatcttgttggaatgattcgtttgctaagtgctgtagaagcttgtctatattgagcgtgtcatgtaggaactatgtcttgatgatattgtcttagcatgtatgccatacttctattctatgttttctcccactattatctgattctgtattaattctttgtttctttgtgttactcaggagagatatagctcctcatctaaagtctataatggggccctggtggttttcgcaatttgatttggcatctgaagtttctcaagcagcaaagtcgtctttccaggttggctcctcgtttggtaattcagttttcttggtggaggttattttactttatgtttgaatgccccgctttctattataaactctattgtcgttttattagaccagtaaccttttagttctgctcagggggcactttgttatagcatcaatattcagaatttcaattagctgtctattgtttaaacaggcagcattccctgcccaggaaaagagattgcacgccttgaatttatgttcagctgagatttttgcttatctggaggaaaatctcaaacttacacctcaaaatttatctgataaatcacttgcttcagatgaattagaagaaatgtaccagcaggtacttcatctcggtgattcttcttgctatggtgaagtttttccttctttgggttttcgtttaccatgtcttatttccattgttttcagatgatatcgtcatctctggtggggttggctacacttctagatattttgctccgcgaacccgataatactggctctgcaaacattaattctgaatcaaaacttgcctcaaaggctagggcagtagcaactcctcagctgagaagatgttctcttcccataaatgctttctgaactttctaaaatctga

SEQ ID NO: 44925 - DNA, 555 bp, Arabidopsis thaliana columbia
atcaatatatatgagggctactaatttcttctcttaaagtgtccacctaaacaacaatatcttttacaataaaattaaaaatgatttacaatgttcatttaatgcatacttataatagttattattaataattaataattaactctaccactaataaaagttactcattaaggcctctcaaatcatccacatcaacttttataaaatactctctcgataccacatcatcaatataactcacgtagcactcttttaatatttttctattagtgctattttcgtaataaatgaagacggtggttagatacgttacgaacgatcaaacgaatcagcttcctcgtaagacataatctctcttttcttcttttttttgtcaaagattttttttttaattgcaaactgaatttatattaatgatgttatctgtaaaggtttcttagtcattgtggctgattcctatatctgattgaaacattctagatgtgtacatagaagtgccaaatgatgtgctacattattacaagaacgatgggtaaatgtgacataattgagaga

SEQ ID NO: 44926 - DNA, 423 bp, Arabidopsis thaliana columbia
gtacctttcattagatctctcatcttagcttgcaacttagtatccatcatcattattttctgcaatttaaaaaaatattttctatgtacatgtagttaatacattagaattttatttatagctcataccccaaaaactacgcacatattacatatgtatattatattaattattaacagtaagctacataaaatttgtggatttgcgaattagaccaaccgttattacgttaataacaatattggaactttgttttcaaaacaagagaatatatcatcgaatccactgtcaaaacatacaaattatcgaagtagctatacttcgacagtttgatctgcgttcaccaggaatcacttgttttaatcgcgtattttcattttgacgagcgcaatttttacgtgcaagtgtgaactaatagttggt

SEQ ID NO: 44927 - DNA, 451 bp, Arabidopsis thaliana columbia
tgctgaccaaagagggttttgttatggactttaatagacaagaaggatttaagcaaaaacttccctttaacccaagtctttcttagagaattaggttaattgttggagcttcctatattttatataggccatgatacaacttatactctaacctaaacgtaaaaagaaagcacttaaacattgaaaggaaattatgaaaaccaaactcataaaaaaaccacagaagctaattaattaattaaaaaaaaaagttaattaagccgtcctaccgtggcctaatcaatctaacaatagtctcatatcaggtttaagagacttgcaaagataatgaagtaatttctcttatggttttaaaagaaaaataaaagtctattgtgagagttatttgtagataaaacttaaagccctgatctcatctttgggtgaacgcctcaaaggttttatcgcgata

SEQ ID NO: 44928 - DNA, 547 bp, Arabidopsis thaliana columbia
atagcttaattctattgattgaacatttaactgacacttatcttaattttattttttccatgatcttggaaagaaatatgtgtaaatatatatctcatatcttcaactatattttgttgagattacatatgtccacgtcttgtcttagtttgttctatatatggataagccatctttttacttctattagaacctgaactcatctgcctcaacacaaacaaaaaaagaggtctactagaagacttgagtaaagcatggacaatgagaaagggacaagttcctcggatttaacgacgagacaaaggaagcctcttggttggaaagcgatgccttatatcataggtatgtataatcactgtccaaatttagatcattgtctcatcttttggtaaatataagatgcggcttataatatgtgacaaaaaaaaaaaaagatgcggcttataatattgatgatgtagggaatgaaacattggagaggcttgcacattcggtttgatggcgaatttcatggtgtatatggtaagagagtatcatatggaccaag

SEQ ID NO: 44929 - DNA, 368 bp, Arabidopsis thaliana columbia
aaaacacaaaaacacaacacaaacaaaaaaaccaacccacaaagaccataacccaaaaccaaagaacaagaatgttgttatatgatgagaccaaaaccaagagaacagtaagtgtggtttaaaacaacaacatagttgcaagtacatagagataacatacactacacgtacaagcatttaataattgacataccagatttggaacagcccaaccaagtgtagcagataatatagtcatgacctaaaagtataaacaagacataaaccaatacaaaacttgaagagtacagtgaactacacaacacaataccattaagacattaaacaaaaacttacaaacaaagctgataaacaaccagctaatacaa

SEQ ID NO: 44930 - DNA, 612 bp, Arabidopsis thaliana columbia
gacttgcaatggccttggggtgaagcattatctttggtaattgcttaactaagattaggtgatatgtatagattatacgatgaattagcatatttagcagggttgagtttaggaacatcagcatttaagcagggttatgttttgagagcatcaattagaacgaatcaggttttagtttctctgcttccacaaaaaacattttgtcgtctccttagcaaccattatatcagttttcaactttatctgaacattgatgtcgaagataatcggtttcgtttgcattaccagaaaacttcatgttggaaagacagaattagtgtagttggtttaatccctaatgatgaatgaactgtgtcacaccacactactacaagcgagttctctaacccttgaaatgggtttgtaatcttcacccaagagaaaatctaactactctacataatctccgctgaaaaaacactaatgggcctaaaaacaaaattagatttgaattcggaatgcaaaagaaaaactaatgggcctaaaacccttgagagtttgctagaattggggggtcttggaaaaatgtagaaaagagaatcaagtgaaaagaatcaggcgagagagagagag

SEQ ID NO: 44931 - DNA, 561 bp, Arabidopsis thaliana columbia
tggtttgcaatttttttttcttctgatttgttttaaattaggttttttatttatttatttaagaaacaattgcaaaccaaaaaaaaaaaatgtgaactacatgcatatgtaaagcattttatttatataatcaattagaacatcatgatttttataaaatatggtagtgtgaaaatcaaaagtttaacgtgtacattgttagccattttggtcacttgtaacagctagaatagtcggggcgtcagaagttacaaatgaagttatttaaattcgccttttgatcattttgctggtgtcttttgactaaaaagattgcaatcgccattaccaaaatcttcctgactttatttaaagagtcaattttgttgtttggaacaaaaattattgaaactttagaatatatatagttctgagaatgttgaagatatagatatttgattccaactaacgagaacttttaaccatttggacaagctgcaattcatttaaagagagggatgcatgaaaacaatttgaattgcatacaaagaatacgtattattatactataaattattagta

SEQ ID NO: 44932 - DNA, 167 bp, Arabidopsis thaliana columbia
ggtaccgagtagcggcggaactcacggcgaatggatccgaaagtcttcaaaaaaggacggtgaggccagacaagcggtggccgaggaattggcgggtcgctaccacgatggcgcgtccatccgatccctggcacgcgaatccggtcggtcctacgggctagtgcaaa

SEQ ID NO: 44933 - DNA, 561 bp, Arabidopsis thaliana columbia
agaagattaaggcacacaatgtcagcttaatgctcatcattgagatgactttgtgatgatgagtttagttatttagatcattgattgagatgtctaattaatgaagggtttatataagtttgaagagagagaaagatttagggagtgttcatgattttcttgcatggatgatgatgttatacaatgcatgttacgttcatcttattattcattaatatgaccctttaaaatttattaatcttctaattaatttatgtttggaccgcgaggagtacatttatagtaatagtgtgaagaaaagaaaagaaaagggtatcacatggcaatgtagttggaagaacaaaagtgggttaacaaagcccacatgaattttgctaagttttattttctttgggggttacaaaaggttgttaagagaatattgggattacatttcttttcttcttttcactttggtctgtcctaaatgatggcatgcgaacacatattcgtatggagtcatcttggtcttactaaaattttatagttaacaaaaatattaatcaagatatggacggacta

SEQ ID NO: 44934 - DNA, 548 bp, Arabidopsis thaliana columbia
tacttcattctctttaataccttcaagagtttttgaatgtgatgtttcacagacgaggaaagtctatctccacggccagattccaggtacaaagataagtctacaagacgtaagaacaacacatacacagaattagctaaccatcaagactcttctgtgaacttaaaacgaaacaagtaagcactgaaaacaaaattcacacaaacattatcataactaactaacaactaatcagagcacactagatcataggttaccaaagtctgcatgagtaagggattcacagataattaaatccatgttaaaaagcacgaattccaactaacactacatctacttcataatgtagtaacattaggaattgtaaaagtaagtttatatgcatcaaatcattgtcaatgataatcagttcgcataaacaaaatcccatatttttgagaaactggcgagaataaaattgagcagaagaacaaatttaccgtgtcttcggtaacggcggaaagaatcaaacggagaaagaggatcgtcaatggtagaagcctttttat

SEQ ID NO: 44935 - DNA, 570 bp, Arabidopsis thaliana columbia
tgttccagccggacttgaacaaaagatgctcgaacttctgccgtatcttacggaggacgacaaagagaacggaagaaccctaaagctacctccagtcaaagagattaacgctaaagacaacgtcctccgaatcaccatcgagataagtcctgaaaacattgagaaactcaaggagagagccaagaaagagtcaacacgcgctgagcttcacttgtcaacgttcgtagtcacgttcgcccatgtgtggacatgcatggtgaaggcacgtagtggtgacccaaaccgaccggttcgtttcatgtacgctgctgattttaggaactggttagaaccacagtccctgtgacatacttcgggacttgtgtcttagccatggatttctataaatacaaagctaaggagtttatgggagaagatggatttgtcaacaccgtcgagattctcagtgattcggtcaaacgtttggcttcacaaggggtagagtcaacttggaaagtgtatgaggaaggaacaaagacaatgaaatggggtaacagttgttggtcgaaaagggtcgaccagattgggatg

SEQ ID NO: 44936 - DNA, 480 bp, Arabidopsis thaliana columbia
tgtagataatgtaatttcttcctcaagatctgaagaatcataaatcacatagtttagtcaatgttacaatacacacgactaaaagaaaaattacaaaattttattgatagaatttaaaatataccactagacactagacttttgtcttttcattagtcattaccgcttgatatttttactatcttacgcatgttatgaaagattataaagcttaggttttgggtagcaaaaaagggttaggaaaaagaaaaccatactatttgttatccgaaaatgtcaaactaattcctctaactgtggtaaaaggttataaaatcaaatcctctagattgatgtaagtgatttttaaatagttattcggtcagatcacaagttaatgatgaacttttcagggttcaatacatggcgattttagccatggatccccaacgggatcacgggattacgctcaactgaccggtttggacgggtcttaatata

SEQ ID NO: 44937 - DNA, 579 bp, Arabidopsis thaliana columbia
gtgaaagagaactatggtgggtttgttctttttgaggcggtcatttgttttctggcagattcaacatatacaaagtctctttaggcttttttaagcttgtgatactaatagaacacttgatgattgtcagatctcagattacatttttaatactcttcttttaacgtgctagcaacatattcctgttttccgtaatgacattaactgagtcttttcttttccagatggaatggatcctcctaacgtggagaaaagggcacaaaagttcttaaactggggacagcgtaatcaggaatctctgggtagactgtttgcaaccttttttattaaggtgctatatcgttttacctttaaacccaaacaccgattacaaaacaagctgcagtacatgcttttgtataacgaattagcatttctgtcttgcagttacaatctgtagaattcctttggagacaagggctctgcgtcagtgtgctgaatggtctttggatatctaaaaagtggaaaaaagttggcgttggatcattagtgtaactataaaaactctattcagtaagattcatttgcttcttacttttt

SEQ ID NO: 44938 - DNA, 583 bp, Arabidopsis thaliana columbia
  unsure (1)..(583): unsure at all n locations
tagtttgatattttatgcatttagaaaataaacatgtttacatgctaaatgttataggttgatcgcgaaaaaaataatacggaagaaaggaaaaacatttgcaaaccggaggaccaaaacagcaataaaattgaaaatttggtttgccgaattaaattatttttctatttcattattagtaaaactaattaataatttatttaacacgaaaactcgattgcgattttttgagagtgagaaagagccagcgaggcctggaaacaaaaagcgtgaaggagaccgtagcaagtaggaagaagaaaccagacctggcttcgtctctgatagatcgtccaattttctatccgaattttggccaactgattctggtttcggtggatgaacaatgaacagaacgagagagatcctgataacatcaacaacaagaagaagaaaaaggaatctccattgttgatttactccgtctcgaaagcanagaaacgaatcgtgtctaagtcagaaggagcccttatcgccgatacgtcctctcttctgggttttggaaagagtctctttgtggaatgacctgacatgaagatgcact

SEQ ID NO: 44939 - DNA, 606 bp, Arabidopsis thaliana columbia
tagtacggccgccagtgtgctctaaaggctcattgtaaagaacaagttacttttgacgaatagcttggatatgctgctcactgtcctgctgtaatgtagctacctgagttgtaggcaccgtccagcgttcgctgactgatttagggttcaagacataagaaagacataaagttatgcgctcgggccggggctaatccgtgcttatgcatttcaatgccagagctgcaatctggctctgaagacgatatttgcagtgttatgtcacagttgggacaatcaatctaattaagaattatcccggagcaaatatattctctgcactcaaaaaactgtcagagccaagtctcgccagcgaccgatcgtacttggaaaagtgtttctattataagattgcgggattcgtatcgtacggtgccgtgaatgccactctgacacccgttgatgacatttaatactagtactagactactagtagacattcagggttcagtactatgtccctccaagtcgatttcacaaaacagtctctcatatgcgaatgcgatcttgatcgactctgtccaagtttagtaggaagaggtggtggagatggcatgaacactggac

SEQ ID NO: 44940 - DNA, 551 bp, Arabidopsis thaliana columbia
ctagatatcttgatatgcaagaatgatgaagcaacagtttcttcttagcataaaagaagatgacgaggcgtgaaagtgggctgggcattttatttccattattgggcttttaaaagcccatcataatgaattttgaaaaaaatggaggagcatcaaaactaataaaaatggcgaaactgaagaacacacgattcagattttcaaaattgaattttgtagtgatctctctcctatataaacttcctcactcttcttccatttcaaatctctctctctgtagtcaaaattagggtttatttattcataaggaagagcatttcgaattctgtagttcaaaattgaagatcatgtcggcgtcaacggtgtcaatcaccgctagtcctaggacaataaggcggacgcggtttctctccggtgagaagaaatctaattttgattcccgccgagcgaatctcatgccaatgcggcaattggagagtcgtctgctggtacgatcaaggatctgattcgcgccgaggctgccgggtgagagatccaacaccgtacgacgt

SEQ ID NO: 44941 - DNA, 460 bp, Arabidopsis thaliana columbia
tattcgctaatgcgttgagctcaaagcatccacgacaagataagtagaaaaaaaaagacatccttttttggttcttcttcttcttcttcttcggacaaaaaggtcagtttttgctttttggttctcgtgctttgattttttttatttgtttattgagaagagaaacagtttcttaaccgtaaatctctctactcaaatctgtacaacccatgtgaggacttttaaagccaagatttcaacttgtttgtttttagtaattttaaaagacttgtgtgtttgcggagagcttcaaagttttcgtaattaagaattaaattccagctcttctttacttatttttgaatttactctgtttcgaatctttatatgtttcaggaagaaggtgttgactgattcttaagatgggtttgtgttaagtttgtgagtatagttgaaagtttcagttcaatttcaatggagc

SEQ ID NO: 44942 - DNA, 637 bp, Arabidopsis thaliana columbia
  unsure (1)..(637): unsure at all n locations
agaaggtgaactgccaatgattgcgacaantatgggtgcatctatcacagctgaaagtctaagcgcaatgtggttagagcgagctaactgaacagtttgtgtactagagagcagggccaacccacgctcaattgaggagcattaatgttctgcagagctgttgtcaaggctagggtcccttgaagctgcaatacccgatgaagggcggctggaggaacatccggcagaaaacttagcgccctgtgctatcagtcgctgatatgtagtctgctgaggggctagacaagcgcgggtaaccgataacgaagggcccaaaaaaagtttctgattacatgatctacaaaggtgcacacaattcacagtgtcgatcgaggaggaagctctttctttcaggctcggtcatcgcctggcagatcattgcgacaatattggatgagtcacctggtatctttattccgcaaaataacccagcatgcctaaggtgacgtccgcgcgtgctgcagctggtaccagccggcacaatcctcttgctgaggatattattggcacgaggtcactccgaacggcccccagtaagaagatcaagcgcagatcgatagcagacggagatcaggaggatggggagcgctttgtggat

SEQ ID NO: 44943 - DNA, 632 bp, Arabidopsis thaliana columbia
actaagtaaacttctaagttaagtccacttctgaaatctttcacacagctgtaacaaagctactttaatggatcaccaaattttagacaaaccttccttttttcctaagaatgccagtgtgcactcaatcatgtaaaagaattttccggggtagaaaataaaagttatggagatagaaagaaccttgtagatattaacatattctcggtatctttgcacatgctgaggcctcacagaaaatccatatgcatccctgttcataaaaccaacctcattaacttccctaagtactaagaatatagatgaaatcaagatcaatgatcactagattctcaactagtgatctaaaaagacaacattttgctcagcaaatcgagagcagagagattaactgagaaaccgcaatttcaaaaaacaaattccatcaaatgtagtaaattagaaacaaaaacacaacgagataagcaatgtagcaatggagaagctcgaaaggcgataccttttgtggtcagacttagaaacggcgtcggcgatcataattccttagttggagaacgagatctctccgaatagaggcggtgatagttgaaagagatggctgagcgcagaagaagaagatccggtggagcaag

SEQ ID NO: 44944 - DNA, 392 bp, Arabidopsis thaliana columbia
caacgagcaaaaggataaaaagagagaaagtgaaatacctgataggactccacttcaggcttcagatctggaaacgtcacagagaaacagattgggcggcggcggctttaatgtatgggaaggggtcgtaagtaaaccctaagttgaagacacgtgtgatgtcctgagctaccacgttaaatgagtaggtggtgttaagaatcagatgacttctattgggctatatttaaaatccgtacgggcccaaatcatgtggggatggcgacgtgaataataagttgtcataacattcttgttttacaacgaaagctgcgttcaaagagatcattttactttgtattatatttatctagtttggatggaattcattttcgattacattgtattataaa

SEQ ID NO: 44945 - DNA, 575 bp, Arabidopsis thaliana columbia
gtcttcactataacacgttttaattcacatatatatgtaatatgtgtatcggagtgatcataggtattatacgagaactgcattcctcagttgtaacctcatcaccgacacatgattcttgatcatgtcctcgggagtatggaccacaaaattttgtagagatagactgccttctcgctatttgatcaatcgctttgcttctttgtattttctatactggtttggtattatattcacttcaggggttcatttttatcttgtaccaaatcgtcttcaaccattatcatttaatgactagaatttgatgatttggtgcaagaatgtgatttgctttcatgttttttataactttttagcatgggatcacatatatggttatgcataaagcttaattttgttaactccaattttcattacgaattaaatatttacattcttatgaaaaacacgtgaaaattaattttaacttacaattctttttttctttatcttttcatctttcaattcggtaatcataataagaacttataaaaagaggaatgtacgcggaaggatgcaaacaaactaaaaagaag

SEQ ID NO: 44946 - DNA, 463 bp, Arabidopsis thaliana columbia
tagaaataaatcaactttctttttataaattttttgcttttattcgttaaaaaatagataatatctcagccaattcttgaattaatctctgtaaataattttgtacatatactctattcttttgtcacaaatggaaagtgaacattaaagggggaaatagagaactatatattaaaaaaaagttaccggctcgacttgaagatcatcagagccgagccgaatagagctgatgggggcaaaacttctgagtatagctaaaacggagcttagagcataagctcagtcttacacgtgctctccttctgacacgtgccaaacacgccgatccttctcttcttaacaggtaccacatgatacgcacgtgacaccggttcgagccttaaagttaggtcaagctttatctcgccggagcccttcacagccggcgcaggaatgccaaaacctcagagacattgctctcgga

SEQ ID NO: 44947 - DNA, 520 bp, Arabidopsis thaliana columbia
gaatattccctgctccagccaattgccaaccgaagacctagaagcagagatttttctttatcttgtcgacaatttctcgaggtattcagggtgactcatttgtttcaatgcacgctatttcaattgagtgagttctttgtctttttttccgctgtaacctctaacttatccatatagtgaagcatcaggggtttttccaggcatgtgggaaaattctgaagtctcagaggcagagggaagcttagaactcgggctcagtaaatggaaagttgaactacttgccgcactacaagtgggtgctacagaggtccaatctatgattctgaaggtagtcttgttttaaggtgtttcactttttaaaataatatctttgttctcaagcttgtgtttttgtgtcgtcaattttcttgcagggtggtggcatgatcacattcgccaaagtttatcagttggtatgaaatcgataacagtttgtgtgttttacttcttcttctctgaggcgatacaaataactggtata

SEQ ID NO: 44948 - DNA, 346 bp, Arabidopsis thaliana columbia
accacacccatccacagacacgccgcacacctccacgcccaaagccacaccaaccatgtccaaaactcaccaccaagactcaaccccaccacgccctcaccaagcaaccctacacagatcgcaaaacacaacaccgggaacccgatcgtcagcaatacaataccgcaaaacgcacccaacaggcacccaaggcgaccggatcacaaagccggccacacaggccgagccacaagacacgtcggcactagcagcaacgcaccaatctccgccgcggcaaaaccgaccacggacatgaggcacaggccgacgaaggcagccgagacggtcaccgacttcaagacggccc

SEQ ID NO: 44949 - DNA, 566 bp, Arabidopsis thaliana columbia
  unsure (1)..(566): unsure at all n locations
nnnnnnnnnnnnnnnnnnnnnnctaaagggacgagtggtggagtactttgcgtcagtactctaggcggaaggaagcggcagaacggcggtctagaaagcggccatgtggaggataacatacagcaggcgctcaagaggcgatcggcatgacattctttcggagattgatgggaggaacgtggcccacgtcctctatggaaacttagctatcactcagatgctatggctccgcagatcgcaggacaacgaagtcgccggcaaaaccgccccctcggggatgccgctcaacctcgaggcggcccaaatcgaggagttggagactatcccaggtaagctagattcgattgttgacatccataacgagttggagttctcgcaatggtacgaagatgtggaagcgagtctgctggaatccagttatgatgagtatcagtaggtatcctccaacttttgacagcgagccaacgattaacgggttattgtttctagggcttgtcttaacgaactgcaaacgtccaaatctcatcttgatgtcctgctttccgacacgtcttctacccttgata

SEQ ID NO: 44950 - DNA, 633 bp, Arabidopsis thaliana columbia
gtaacgtcgatggccacaacttctacgaaatgatatttacaaaaagatctgagatatcgggaccttgattcggaatccacctgagtatttttgtaaaatagggaaataaggaaagtagttattattaaatatcctcaaaaaatattattggttaatactttatttactttcatattataaataatattcggtattttttattaaaaggaaaatttcccaagttaaacggaaattgaggagtgggatatataacacgagtgtttggctcagccttgttacgaaactttagcgatctccttctttgatcatctgatctctcttcctctcagcaagataaaagcaaaagcaaactttccttttttcaggtttttgccgttaactcaaaattgcctcatctttctctaatctctctatattagaaccctaaacccacagcaaataatcaaacccatcttcttccaacaaaatcatcggcttctatgtaaacgataacgtagacaacgtgatcgatgtcaagcggatctacaacgactacgacggagaactacgaaagagcgaaaaattgtttttcgatttcaagtgcattcactcgtgctgaagaagaagatgatgacgttcgaagagaagaagatt

SEQ ID NO: 44951 - DNA, 460 bp, Arabidopsis thaliana columbia
gtctatgtgctgttacgtgtctgcctgaaacgaatatattgttgcaaaacatgtatgtaataagagaatagtttagcaatcttgtacaaataaaattagttaggctaaattcggcgggttgcgaaatgttcaactacgtgaggttaaattatattgaattgttcctgacttcatgtaatccttactcttggatgagtcacaccgtataagttcagtagtccggctttgattgtctacatagaaacttattaaagacttgccattagtcaagtcgcacaattaatatcagttgatatgtaaacatgttacagcttggatactgaatctacagcttaatctgtgctcttcaattcaatgatcatcatgtactagtgatgcgttgtggttcacgctaatatttctcgtgtggattcgatcgctcactctgcactacgcggacactgatatgtggatcggtgca

SEQ ID NO: 44952 - DNA, 559 bp, Arabidopsis thaliana columbia
taatgtaaaacttttaacaaaagagttttgaaacattttttttttaatcgttgacatattatcgcaaaaaaaaaatacaaaaacaaattcatcaaaaggtgtgtcaaggctcaagtttaacttgttttcctttaaacttttgtcacaaaaacgttcaacatgaattttctagtaaatcatataaaagacacacaaaagcaatatacatcgcaggataatttcaaaagaaatggtatcagaaaagcaaacttctttacaaataaatgtatttaacttcctcaggacaaatacaagaatacaaaaacataccaaactcctcagagcttctttattacagaatcaaacaataaaattctacatcggagagtaaccaccggaaaagaaaaggagaatgaagataggcggttttgtttccgaaacaaatttccaagaatccagtaaaatttttggttcccgatgatacatcatactaatcacgataaaacaaaacgcacacagaagtaaaggaagtacctttgagcagtcttgtggtttagattctcattcagctctagactgg

SEQ ID NO: 44953 - DNA, 530 bp, Arabidopsis thaliana columbia
acggccgccagtgtgctcaatataagcaacaatagtaaatggtaacaaacttaaatagagagatataaatagtaaggtttttaataaaatccaaacggtagaggctaaccgaaaaagattctcgcgtgatcgtgaaaaaagaattataaagaattataaggtttggttagggagggaaaaaagaaacgaagcaagaggttcggaaagaatagagagaaggagaaagagtgaagaggacaacagagtataaagcagttatagctttacaaccttgtatttgtgagaccattcatggagcttatgagttctcaactttttttcttttctaattaaatctctcattaccttttaaatctatccccaaacttgttaaccaaaaaaaacagagaagaaatctcccaaatcctctttttttttgtttgttctaccgtttctcatatatctctctgtctccgatcttatgtggatcggactagtgtcattggcagtgaagtttcattgactttggggtttcgcttttgatgctgtga

SEQ ID NO: 44954 - DNA, 634 bp, Arabidopsis thaliana columbia
ccattcagactctggtgacaaagaagcgcatcgctctagcaagcatggtggctggatcactttaccgttcatgctcggtttgtgtttttgactcttttgtttatgtgaactcaaaacataaacagatgttgatgattgtaaagtttttatgtggtgcagttacattgttaggcatgtcgataacttattttggatgggtaatgaacttgatcgtcttcttgatcgaggaattcaacatcaagagcatcgcagctgttcagatttcaaatattgtcaatggagttgtcaacatgttgcctgttgtcgcagccatcctagccgattccttttttgggaacattcctgtcatctcagcctccgctttcatttctctaactgtaagttttaacactcaccaattcttttatgtgttatgagtgttttaaaaacggtatcggcagttactaggcaaccgttttgaccgcctaaaattacacagacctagtttaaggcgctcagacaatgcctaaacaactgtttcgaccgcctaaaatgtatatacgcctagttttagtgcattttctaattttcaagtaggtcttactctatatcatagttacaacgtcatatatcgcttgatgtcattaaagaatgt

SEQ ID NO: 44955 - DNA, 238 bp, Arabidopsis thaliana columbia
gtcacgatagactgacccaacgatgcgaaaggctaacctttgcctacatgcatcttaaccgtccaaatttaaccgcatttactgtcacaaagatcaaacggtgacaaagagcactgagcaccagtactacacttcaagtagccttcgacgatactagcagaatcattatctatctatgctctggttctccatagtatacgtaaaatccatggctccgagaatcagaacaatcggaagt

SEQ ID NO: 44956 - DNA, 589 bp, Arabidopsis thaliana columbia
tatttacttgaactgtcccaaactttgatgctaaatgaaagagaacttgtctttagataaatcatgtagtctacttggttaacatggctattggcctatttactcaactttttacgcagaggtgaagtagaactatcgtgctcaaaggttaacacaacattgttgtccttacatattttactcagttttgatattttaaggagtttagatcttggatatgtgaacaatttattcgtttcatttgattctaattttggtctaatgatttaccatatgatgcaattatagaaagttattttacagaaagtctgttcaactcaaaattagtgaggagtttaacgaaccagacattaagtattaattctgaaaaaacatttgatcatgcaagcaatactatatttacatatacatgatttatattatgtaagttatttcatataatcgtcgataagacctaacgttcattacagaaacaaaaaacagaacatacaatatctttatgcatgaatcataaatcgaaaagaagacgcatgcatggggaatttaactgttataattaattttgtatagcttcacgcaataacatgaa

SEQ ID NO: 44957 - DNA, 566 bp, Arabidopsis thaliana columbia
attctagtattatacctcggggattctttccaaacaataaaaaaaaaattgtaaaagttttttttataataaatcataagctaaattattcgaagatattaaactgtatcaaactaaagaaacgaaataatcaactgattggtaaaatgtacatcagaagtgtacatttttttattactatcatatatttgtcaaatatttttgaaacaaattaccttaattctcaaccgtccgatttcagtcctagacgacaatacatatcttcagaaagatcgacggtgataattctatggtacaaaaaaaacaaatagcttcgaaaaattaaggaaatattaataaaaaaaacctggttagttaaatgacgtcacactgacccaacgatgcaaaaggctaacccttgcctacatgcatctcaaccgtccaaatttaaccgcatttattttcacaaagatcaacggtgataaagagcaccagtactacaatttaagcacctccgacgatagcaaaagtagaagaaagcagtttcatcattttctttccttcaaaaagtgaatgcaaaatcaatg

SEQ ID NO: 44958 - DNA, 563 bp, Arabidopsis thaliana columbia
gtcgactctacacgattctctatatataccttgaatcttacacattttgcttacatctaaaatagaaaatgaaccagtaattagtttttgtttggatccataaatatcacatatattacttaattatttcatataatttatcactcaaattacatttctgtataccagttgtagtattttaatgaataactctactagtaaattgtaacattcaaacagaaataaaaatgaaaaatgtaaatgtaaagatataatcgtgatctgaaataggatggtttacaatacgtaagagaatacgaatgtacatcatgagtatcaaaacaaatcaagattcataccaaaaggaagagaaaaaacatatcaacatatgcataggttagcgtcttagcgagcgtgcggaaccgagggtgccttggtttgctggccccaaaatgggtgggcttttaggggcccaatattgttacttacagaggctaaaatggatcctactgttttccctttacaaaaacggagacaggccttgtatatacgagttcagaccaaagcgcttagaatgaagtaat

SEQ ID NO: 44959 - DNA, 191 bp, Arabidopsis thaliana columbia
atcccctaacttcacatcattatgcaaccatcaccattgtccatctccagaactttttcatcatctcacattgaaactccatagccattaaacgtgcccaaatcctccctttctgtttttcattgggcttgggtttcatgctccagcgctgtacctgctgccttgcacacacatcctcaacactctgagcc

SEQ ID NO: 44960 - DNA, 522 bp, Arabidopsis thaliana columbia
gactctagtcaaacccccgataggtagttagttctttcaattcctggttaacttttgtttcaagagaaccgaatgtggaccaaaaacaaaattcactcagctctcaaaacgccaataacttccatattacctattccggttagactagtgtttctttatatacaccaaaagctttcttttcttcttcctatgccttggtttcttctgccagagccttcgattttcgcttcccggttctagagcgtttacgggatgttccagaaccttccagcttccatttcaggtctccattagcaagcagagattgttgactatggtaagtcctgagactagtcaccgtagcatacacaacagcctcacttctcggttcagcaaccactcttctctcaaccacaccgctttgcccgcaactggattcttctaccgctttctctctcaggctttgtagcacagcctccttgtcaataatctctacatgctcttctgttgaaatctacacaggttatttgaaaatgttgtgag

SEQ ID NO: 44961 - DNA, 519 bp, Arabidopsis thaliana columbia
ccctataatatgattatagatagctatcatcatcaatgatgtcatcatatctatatgtatgttcctgcacaatttgatatgctggtcatcatcaatgatgtcatcatatatatgatctttattctaattgaataacattagtcttaggagtttgtattaatctttaatcaaataacacatgcatgtttctactaacttcactaaacactattcccacagagggtttgaagaagaagcaagcaaattctgaagcccaatcacaaggacgtcacgtgattcttgccaaaagtagaactgtgtcgttttggatctggtcttagtgttagaacatatcaggagacaaaagggacaaatggttcagagagtagttgaatggagggtgtgttttgggaggagatgacttcttgtatggttgttgtataagctcaagaaagagcttgatattataaaccttgttaatagtggattccgagtaacaatgtcaaggcatgagtaggcgctttcacactgaaacctgaa

SEQ ID NO: 44962 - DNA, 562 bp, Arabidopsis thaliana columbia
tttctgactttcgtttgatgagttcttagcggggttgaattcgtattgaagagagctttctaacaaggtatagatcaagttctaattcttcctgaaaagaaatccaccattaaagatcataaagctcacttccatggagaaaaattaaagaggggagaaggtgaggcttaccaaactcttcaaccaaagctgaatacatgaagttctgtagacactttcagtcctccatgcgatctagtggtttgtcatttgtgttgagaaagttgttatcccaaaactgctaaatcgcactcctgagcttttactctcatgttgtgatcgagtattccagcaaaaaatttgaatttttttcatttcaccactcgatcacatccctaatgttcacttcagctattattcatttccttacaatcaaagacacaacaaaaacaaatcaaaggtaacaagtaaataaaaagtatatatagggatagtcatgggacttcccccaagtgagattgtataagtgctagcttgactcctacacttattaggtggagagatgtgatagagggacttgaga

SEQ ID NO: 44963 - DNA, 374 bp, Arabidopsis thaliana columbia
tcaagcgattacaatgaattggaagttttgatgagatttcaagacctttcttcatcaacttcgatttgattattttagggcaacttgtgatcggattttgttgtgagttaggttgatcgtgcttctccatattagagctttagttttgggttgtattcagctttggtacaagagtttggtaagcctcatcttcttccttattcaaattttatccgtggaagtgagtttcaagctctttaatggtggatttcgtttcaggaagaattagaacttgatctataccttgttagaaagctctcttcaataaaaaaccaacgccgctgaaaattcaccaaacgaaagtcgaaaacgatcggaatctgattggtaaatat

SEQ ID NO: 44964 - DNA, 832 bp, Arabidopsis thaliana columbia
ctgattttaagtagccgatgataacaaagagaacaacccagcaacaatttacctggccggtatacttgcgtcttcctttgtaaaccctcccaaaagatccttcaccgacaagctctatcacatgataatcctcgacacccatatctgaacacgattggctttttttatctgtcaaataaagcaccgttttagcttcaaacggtaaaatgacggtacccagacccaaataagcagaattgagggagagtctactatattcagtctaattcgattaaaagctagtttctaaactagggttccgttccgatttcttgtttagcataagcaaaaagtagcgaatcgaaaaactggaaacatccaaattaagcttgaaatgcagatcctaaacctgattggcgagtaaacggggaaatcgaagatttgagatagtaaagaagaatattgaaccgtggctcacgaaaatgcgtaaaataggcgaagtggtggctgccggagatggtagaactgggaagtcggcgacgagaaacagcggaggaggtcttcggcggtgaaactaggagagatccgttggatcgatggttgaagagagagataaactctgcgtttggatattctcggaaacttttgaaattcaaaaagagggaaaaatctttgagtcagagtagtgtgtactctctctctctctctctcaaaccttataaaaaagtaaaaacaaaccacaagtcgtaatttccggtttattttaaaaacaaaagaactcaaaaatataaattatttatcattttccaaattggttcctaaaatattattttgattataaataaaatattgt

SEQ ID NO: 44965 - DNA, 534 bp, Arabidopsis thaliana columbia
catacataccacccgagcaaaaccttcaggattatgttcaagggcagcttcccagttctcatcaattcctttctgttcaaatatatcaatcaagatagtaccaaaagtcagaaatgacacgaaaaggtaacaatcaaattaggagaacataagaaactaaccaaagtgaaagattgcatccaggaatcacaaaagagttatttgccactaaagtaatacaagagtccagtacatgtaacataagtaagaacaattaacctgacgaattgcagcttcaattttcctctgtgcttcaacatcaaaaggatctgcatacagaagggcctgcaaggagggaaatacacaagcagggttatttgtagtggtagatgtaacttaatgtgtggaaaaaagagaagctagtaactctttcaaagccagttatcctgaaaatcagttttattttgaagtaaggcttacaagttcctcttccttctgacgctgtaaaacagatcgctgacgatgccgtcacgcaaaacatcctgtaacttattt

SEQ ID NO: 44966 - DNA, 520 bp, Arabidopsis thaliana columbia
tgaccgttttgatacccattgaaatgtatatggacctatgacctgactcctgaaataattatgtgtggacctaattatttataaattcttagtgacaagttgtttcgaacactttcaaattttattatagctctagtttatatgattagctagatgagttgattagacttttacgtttgaaaacaccgtggcaaataaaaaaagacacaaaatttggaaaaaatctagatagaaatcagccaaaatgtcattgtgccaagatgtagtgacaatctccagacaaccaccttgatgaatgtcttgttagtacagataacaccatgaccaaaagaagaagaaagtgtgattctgtaacttttgtttttatctgtccatagatttttgaacgagaagtttcttctgaggattagcataaaccacgtagctcggcgaagatcaacatcagggcaatgtttttgcagacaagttgaattgaaagagggaccatgagagcacatggaaggttttggcttcaattttg

SEQ ID NO: 44967 - DNA, 715 bp, Arabidopsis thaliana columbia
ggggtctgatgcttataatgcactaacagctcagggctaataagaaatatatgatcataatctgctaatctgttttctttttcttgcaagagatgccattcaacacaatctaagcgataacattctaatcaagaattccaaaagccggacttgggatatttgatgtctttatcatacaatctctcgtatagttgttaattgcattcaccacatgccacaaatcaactcttttcattcttaaaattgacttttttggttgaataattgggcctcaaaaacagattatgacaagttaacaacgatctggcttggtttgatttcggaaccagcacgacatactaaaacttgcatcggactttctaatctgattctgatgagcaaccatagcattaaatatctcgataaagtatccattcgccaaagttaaaaagagagaaaatgtaaaatatcaataagccaactaacagtaacacgacgcgatcagtaacttaacattttttttctcaataccaaaaactccaaatacaaaaaaacacagcttataatgttctcaaagcaactggaaagataaattggagagagacaaaactaacttcgaagtgtacccaagaaaatacccacagtctcaagagcacattgcaacgatgatgagcctcatcgtgcaatcagagtcttcttcctcttcgtccacctttcggcgtgtactgtctgtggg

SEQ ID NO: 44968 - DNA, 415 bp, Arabidopsis thaliana columbia
taacacgaactcgtggtcatgctcatgatcgtgatgatgatgatggtggtcgtgtgatgccatttccgagagactcgaatcttcttccggtagctgtgttgactttgagtagagctactactgggattctgggatcattaagcacagtttttaatggtagaatctttcgatatgttacgagcctaggtgaaacgagatgctttctctgtcgggagcataagatgacggtaagtacccctgtcatatgttaagtgtttgaaggcaaaattacagtagaggaaacgtatgttaactgacaccaagttggtatcacagtccaagacttaatatctttcactttgtagaagcgacggttgcttacacaataaagagcacaaaatagaggaatttgtggataggttgtttcataaggagg

SEQ ID NO: 44969 - DNA, 455 bp, Arabidopsis thaliana columbia
ttacaaacttcgtttgtccaacaatttggattgtcggcggtttggttttcgggttctgcctctttgacattttttcctctatagctaagattccgagcttggtgttttgcctcgacggtgtttaggtggttgttctggcaaagtgtctttgctttgggtcggatacaactcattgtctgtctatccatagcaaatctatttgagatatgcatatagtcttctcaagatgcttctatctaggcatttctttgccataccaccaataacgccgcatctacaaaaactgttaagaaacttgttgtggttctgtcttgccaggttatgaaggttagaaatttgaaattgtatgacagttactcatcttcataagaggaatcattttctttagtttgtcgcggacatcttcgatagttctctatcaaaagatattcaaaaataaagacatctgtttgtat

SEQ ID NO: 44970 - DNA, 494 bp, Arabidopsis thaliana columbia
ccccaaagaaagatggtagataaaagtcatttaagtaaattaattttttggtgagtcatttaagtaaattattaaccctttaatgttcaggatgaaaataattatttaaatccaccacatatataataaataattaattttaacttaaaatgttgaccgtaattaacacaagacttggatcataattaatgaattttgtataagacagtcgttttttttttcgtcttttgagacacgcaatcgattttgggttaacacaaaccattaatacaactacatagtgggtcggtcgatgcagtccgtaatgtaacgtttgttaaggaaaattaaagagatgaatacaaagaattgtttttaaggaacaaaaaagtgtgtgtaatgtttatgaccaaaatatcctctaggttagacaaactctctataatattggtcaacaaatacatgcgtgtgcgtctatatataacatagatgcagagaatagacatctttgctgg

SEQ ID NO: 44971 - DNA, 513 bp, Arabidopsis thaliana columbia
ctgatctcttatctgattatatcacacgaaaacatgtataaaggatcgagtatcgagcggaaaaaaaccaagcgattgtggtgtttaccttgttctttctttggaatggtagaggtaaacgaaaaggttgctgatcgttgaggtggttgccgtggagatgaactctgagatgttgattttctgcaaagacaatcaggtctcattgttttgttcttgtgtttgaaaatgtgtgttgtgttatttcttgagcaagcgtttggataatttacctaacaggtggtggaggcgtttcccggattgtagcacgaacagctataaaagagcaaaccaatcagttagtaagaaatcttgaatcttggattgtgtacaacagacacatagaagatacagactcaccatttcggaattggttcaatcatctgcatcctctaaacctgcttcaaagtacttaagcttttcaagatttgtagcagtcataattccacccgctgataaagattgcatcttagtgag

SEQ ID NO: 44972 - DNA, 601 bp, Arabidopsis thaliana columbia
ccgatttaattcgggtgtcaaaaaagttctacaatcagtcgggaacaataagaattataaatggtctaaaagcaaaatcgaagaagctcacgagtatgaaagagagaacgcgtaaatgaggaagaacaagagcaaatggcggcgatgatcgccggcgacggagatcggatcggtccttcgtgtacggatatgtgctcgcaaacactataggaggctcaattagatctcgcacttccaacgtttgttacaataccgaaatcatccgaaccgatccctaaaaatgaaccgtactggttttaaaaaaccgcttcctcaaacccggtttatatgcataacaatctttttttttctttctcaaagatccctctcgcctctcggtgtccttgtatacagtacttcagttttccgatctctttcagattctgttgccaaacttcatataaacttagtgagcggaactggatttgggtaattctctccaaacgagttctttgttggttactttccactgttttggcagtaagattagactagaacacagaaagggcgttcttttcggatcatcttagaggtttcagtgttctaaatcatgaatttatga

SEQ ID NO: 44973 - DNA, 645 bp, Arabidopsis thaliana columbia
ggcgaatgcacatatattaaacactacactttaattcttgcagaattacgattcaaaactctttttttctttattctttcgaatcagtgctgcatttgacatgttcaaaacatgattctacttattattgactattgaggtcgtgtcgtgttataacatatgatttcgttggaaaactgtaaatacactaaagattagagattcgtagtttcatttattaataggtctaggggagttaaataagtttttgttttatatggtttttctaaactcataaaacccgaaatacagaatgaattaagtcaaggattaaagcaaatgattttgattgtaaatgactacatcacatgtagctttctagacacgtaaagtcaaataaatacaaataaattagatcacgacgtgagcaatttccttatccgactgtatttaaacgtctcaacaaactgacccgccaaaataatcataaataaatttccataattcgaattatataaacttaataacaaaaacaattatccttccttaatcctattttgtttttacttgattcttcattctcagaaatcttgaccatgaaggaggatcgtcgtcttcctcacaaacgcgacgccttccaattcttgaaaaccaaggctgcgtacg

SEQ ID NO: 44974 - DNA, 558 bp, Arabidopsis thaliana columbia
tttttgtttataatgtgctgcattggcgagttttgaattttttgatttggcgaaatcgcagagagtacacggagaaggtaaggagtgataatgaacgaaaatgctggccgttcgccggagatcttattcagtcttttcttcctcccattactgtctccaagttccggtggtggtcgcatgagcttgcttctctgcttacgaaatctccggtctctgttgatgattctgatccgtcctttcgtcggaaggccaaagcaaagactagacagtgtaaaaagcgctccatcgtcgaaatttgtgcgacggcgccgaagatccagttagcagaagattatgtggtgcacaagaagaagatcaaaaccacgaaatccaaagattccggtgatcgggaattcactaacaaggttcttatacaaataacttttaaatctatgaaacttattatagatgatgtcaaatctctggagacgtttgtgtaggattaaactcgatagtcaatacttaaggagagcaaattataaaatcttcttatgttgcaattttctaaatcaattggtg

SEQ ID NO: 44975 - DNA, 537 bp, Arabidopsis thaliana columbia
gaagaagaagaaggatgtctggtggggaaataataaatggtatactcacagattagattagaatactggggtcaatgtggaggaaacgaaaagtggagtggaatctctttgaagcacctttccaccttgaataattttaactttgctcatcttctcttcacaccaatgcaaattctcttcgttcatttcattcatccttaacactcttgaaaccactttcaaatctattaatcccatcaatatctccatttcctcctctatactcatcttcttcttcctcatgtatttccctcctcgacgcatctctttcagcttcgtctttttctgttcaccattatatatcaacataatgttgttaataatattagaatactactcacaaaaaaagtgagtaaaagacattatttaataatgataaaacttagaaaactttaatactaataaaaaccactacactacatgtcttggttaagtaagactatttttgattgttgtgagaagtgagtcatgcataaagtagtagaagatgtggaagtt

SEQ ID NO: 44976 - DNA, 446 bp, Arabidopsis thaliana columbia
tatatatgtacatacattgtctaccaaatttaatgaccatagtgctcattaattaaaattgagcgtacttctgtttcggaagctttctcttcaaggacacgcatggcttcatcaggttggggcactgtgaaagctggaactccaagctgaaatatgaacaatgaagatgaggcaactatggagaatattgctaagttacaatttaacagagttatagccaccttgaaaattccagccttctcaccagcaatttttccaagtgtatcacctgtgatgcattccacagataagaaagaaattataaaaacgaaatgtaactcaaaatatgtctgctcatttaatgcaagcatagacttcatgctttaaagttgtgatatgaaaaaaaaagagtagaggcatggacaatattcgtatggcatgctgagaagattccagttacaaaccta

SEQ ID NO: 44977 - DNA, 528 bp, Arabidopsis thaliana columbia
tttgatagagtttcgttgcttagttagttcaatagattgacatgaatcttttctttggaattgcaggtctttcattgcctttatgacagttttcttttctcatcttacaacaagtttccaggaggatagagacataaacgaagctcggattgtatcgttctttttagcttttattcacatccgaaagtcctgtagtttagattctgttatcttgcggttttgagttaatcagaaacagagtaatcaatgtaatgttgcaggctagatctttcatctttggaaatttatttttttctcatgcaatttctttagcttgaccatgagtgactaaaagatcaatcagtagcaatgatttgatttggctaagagacatttgtccacttggcatcttgatttggatggttcaacttgcaagacccaattggatacttgctatgacaactccaactcaagagtgtcgtgtaactaagaaccttgactaatttgtaatttcaacccaagtcatgttactatatgtttttttgtttg

SEQ ID NO: 44978 - DNA, 499 bp, Arabidopsis thaliana columbia
atgactataccgtgccaattttgttagtatgagctttggaatgcttgccatggatggaagatgagcttttgcaggtgtgtttagtaaaagtgtttaagtaccagtacaattcgtttttaatttgcatggactgcttttggattggttaaaattttataagtttaacaaactacaccatacttgaattgtagtttacatgtgaaatttacacaatcgtcagtactaagatacaaattacataatacacattgttcttcactactatgattacatgagatttgttgttacttgcactgaaaggagtaatccacatgacctaaatagaaaggaattcaatatcatagaaggcatccagatgtacaaaatacgtttagctcgataatcattactttcatagattcattatttatggtttaaaactcgagcgtataagctctttaggccgtcatgagatttaaaacaaccaatcatgataggccattgtatcaactaacatttt

SEQ ID NO: 44979 - DNA, 557 bp, Arabidopsis thaliana columbia
tgtaattaattatcaaaacattacaaaaagaactacttgtcaaattcttataatacaatgtattaatatttattgataaaacaataatttagtcaatattacagtggctcaacaagtaaaaaataaaagtcactcaacatttatccaactcatcaatatccagattgtgtattaaattttcaaaataaaataaaacacaccaataaagaaacaaaaatcctcaactttacctttcttctctctgtctaaagatggagtcagagccagaccaaagcttcaaagacctctcatggtttcttcaagcaatcaaagacccacaacaaactttcttcaatcttcaaaccctatctttctcctcttccggaaacaccacgcattgtcagctaataacagagagctccatgaacatcaacgtcactagagacaacctcacttcactttcccagatcttcatcgagctagcaacatccttagagacgcagacgtctctcaggaacttggaattcgaaggaatcttttgggaatcgagctgttgcagagcttgggtttgttgttag

SEQ ID NO: 44980 - DNA, 616 bp, Arabidopsis thaliana columbia
cagtggatagacaacatgtgccggtggaagagtacacagataatgtcagaaagattgttcagcatttgaaggttttgatatgcttctttgatccactctaatgcatggacttacttttcttgaagtgtgattcctttaaagactaatgactctgttttgtagaaatgttcacctacaatgctaattgtgcttataactccaccaccaattgatgaagctggacgtcaaagttatgcagagtaggctttattatgatccttttcttctttgcatttttgtttctcaaagcatttagtccgacatgtttcttaaatgagccagtgattgtgttacatcagatcaatctacggtgagaaagctatgaaagagcctgagagaacaaacgaaacaacaggggtatatgcacaacattgtgttgcattggccgaggaactcggtctgcgatgtgtcaacttatggtctaagatgcaggaaaccaatgattggcagaaaaagtacctaaggtctgtatctaagtctgatctgaaatgttgttggtttttccaacactcatctcctctcaatcatggttgttgttataaatggtcttgctcgttgttgttgctataacagtgat

SEQ ID NO: 44981 - DNA, 369 bp, Arabidopsis thaliana columbia
ctaaaatcgatgtcctggtctttgaattctcggtcccggtcgacgatttcaactcctggtcgacaaatcctcgaccactcctcggacacggtcgatgaagtctcggacctggtcgacgatttgtgaaatctctcatctcaatagacaaacactaacaatggcggtcgaagaagattcacgtctcatacgtctcctacacaagtacaacccgacaatgcccgcggtactagattaaatctaaaacttctattcatagtaaagttcttcctcagatagagtctttcaaatatctcctctcttataagtagtatcatttgagttgaaatatttaaaaaggtggtggaggagctgaagagaatttgggacata

SEQ ID NO: 44982 - DNA, 507 bp, Arabidopsis thaliana columbia
agattctgctcctcgacggtattcttccccataacaaacagagattcattcacagagaaactccaaatccataagctaagcttctccgatcggttccagattctgccgcacccatcaaaggccggcttcaaaaccaagcaacaaacaaaatttgtagaagacgaagacgatgctcgaaaaggaagcaacaaagtggttcttgtagacggaaacagaaaatgtagggctgagggagacggagagacgaaggaagagaaaggagtgaagtagctttctctgcaaatgacaataaggatcctctttctttcgtgttctaatttgtgacaaagggtatatattggtctttgtttcttcgtctacatgtaacatttgtttactatatgtacagagcagttgcactagtgggtgtgagctcgtgtcagtttgaaatgtcgaaaattttattattatttatacttagtgtcatgatgcaagataccacatttttaatgaaaaaaaggaagatta

SEQ ID NO: 44983 - DNA, 477 bp, Arabidopsis thaliana columbia
gtacatttgggaaatcatctcactctcagaggtttcccactaagcattcagctattagacaggtgatttggctttaatcattatgcattggaatcgtttctgtgtaaagtttctccattttcattcttgttcaatgaattcagatcatcaattgcatatggaaccacccagatgcaccagttgtatatcttgcttgtgatatgttgggacaagaggatgttctcttagaagtttctagaacgtttggctccaagatttatgtggacaaagctacaaacttggaatgtttcagatcgttaatggttatagttcccgaaattgtctctgaagatccttcttccaggtttcacatattcagtgggttccctaaactgtatgaaagacaagtgcaaagcttgctgaggcaagatcgaaacttcagagtgagctcttatcatccgtccttcagctcagtggtatgtttgtgatgatgaagat

SEQ ID NO: 44984 - DNA, 543 bp, Arabidopsis thaliana columbia
gttaattacaataattgttaaatgtaattaaataaaagtgcgttaactacaataattggatattggttatttgcaaaattcatgttcttaaatcatcagtctaaacaaaaaaattagattagccgaagatttcttcttctacccttgatgatactatttgggatgggcttgcttagatgtgccgaatccaattctcgtttttgggtctatctatatttgggctgggctttataagaggcgaacgcatgtcgaacaatcaatttttttttaattttatatgtcttttgggagtctgttctgtcgtattgattaataaagtaaaaaatcttagccacaaaattaaatcatctccaagacgtatcaatatcatcatcaatccaccaatgaaaagttctctctttttttttccactcttactctgttctcgctacagaatctcctgggaaaaaaaaaaaagaaacttgatccacccgaattccccaaatcttcacaatttctggaaactctctcgatcgtgaagcagaaaagtgaggttcaaatggg

SEQ ID NO: 44985 - DNA, 431 bp, Arabidopsis thaliana columbia
ggttcgacgtttcgttatcttcataatcttaagctttcgaaggtttgtatcatctttatgttcctcttgttttccaacttagaacccttcaatttttgttccaaaagaaaggaatagtctgatacagatgtactttgttcattcaaataatggtctacaaaaagtaatttaaagaatacaagttttgaagagttgtgcatttcctctttctctgtttcaagcagcaacaaaaattgcactttgtatagctattacattgcattttctgacaaacctatttcacaaagatataaatatgaatgctacggcaagctaataattttacagatttctttgaagtgatcatggaagggactgtttgcgaaacttttttcaacgactagtttgctgcgaggctgtataaatttgtcgagagagcaataatgctagtg

SEQ ID NO: 44986 - DNA, 468 bp, Arabidopsis thaliana columbia
tggtgaaaaattggatctgaaatctcaaaactcaaaaatcttctctcggtaatctcaacgatcgatgctcttataaaattaatcggaataaatataaatggaagaagaggtctctcgtcactaatgagaggaaaaggccattgggctagaggttaaccaagcccaaaccgaaacataatctaaacaaacctaagttcagttatctataatatcggtttagtttagattatgtttcggtttgagcaatttcatttcggttagagtcagtttaattcggtttgtttttcaaaaccatttcttcaaacaattccttcaatttttttgtatggataaaattggaaaatgtttgtcttagcgatatcttctccttcaacgactctcatcaaaccattaaaacgaaatgggccaaaccggtcaccggttcgaaaaatcctttgcctgagcgagaggaagcagacaaaaccagta

SEQ ID NO: 44987 - DNA, 641 bp, Arabidopsis thaliana columbia
  unsure (1)..(641): unsure at all n locations
tgtttttgttcattcttcacagatttaattgtcacatacccaacgtatatggatggacctgtagatttaattccagttttacccttttcttcttcctttcatctgattttgtttgctgctttttttttgttttctggggaatatggaaaaggttaggtttcatatttggacctttttttttggtgttgaatttttcttcttaatttttatgcaaacatggaaaaggacatgcgatgataatcctgaatctactagtgcttagatctgatgaatactggattattaaaaaaaaatattactaaaaatttcaatgatctagggtttcttcagatctttaaatttgttgctgattttactcgatttctcttagtctgggtgcagttgatggagctccagctattttgaccatccaatttcaccagaaaccctaaatcacaagactatgtaagcattttccttatggctcttcttcctgatttttgattcagctaatttggtgatgaaccgtttatatatatctgtaatcgtactttaccctgaaaatatgtacgtaccatatgtgtcatgtgtatttttattattttataaatggttgtgatnatattgagacatgaatgaatgatgcttcaatgtatgtagtg

SEQ ID NO: 44988 - DNA, 589 bp, Arabidopsis thaliana columbia
cattccattcattctctaatgcatcatcacatgctaccataatcaaaactaaagttaacccattatcttcctacatctactataatgtattttaaaattctaaatgggaaattattttctttccactttattgcagtacaaatctatttcatgttgaaatttcatatagtacataagatgatatagtacaaagccatattgaatgaactaaaagtacatcaaaagttccatattggtttagttatcacatactatgaggttaaaagaggaacccattttcccactaactccaataacgaattcatcaatcttagatgtactttgatcaacaacgaaggcatcactctggagccgttgatccaactacgatttgaaccctaatggtaaagactttattaatcaatcatatacttaatttagacttgaggatcgtaaaaatgggaagactcggttcaaaatttacttttacttgtagcagagaagaatcagcggttgggaagagtagttacagattataatcaaaccgaatcttcgatatacacataagctgtgaaagatcgagagatggtagaattaaaagacgatttta

SEQ ID NO: 44989 - DNA, 584 bp, Arabidopsis thaliana columbia
actcaaataatagcacctttgatcaataaacaacttaacacgtgaagcgcttaataaatcaaagacctattcttcgggtttcagttactgtgaacaaagtaatggtcaatcatatgataggttcctgcacttattttatagagaagaaagcaaaagaaacatttctgattcttgcctgttggcagcccctggagagtggtcccacgagtcatattaacactccagtcacattcatcaccaggttgttccatagcaacacagacagcaaccgcatctcctttctcaacatgggcagtgcaagccagtacacctggcacatagacctaccaaagacccataagagaaattagtacatatttgttcacttaaaagcccggagtttctcagctagattgtcaaaaactataacgaaatacaaccaagatagggattcatattccaacccaactcccagcagcatagtgacaggatagaagcttaagccctcccaatggaatactttaagatcgcataattttaagtatcaatgtgactagccactaaagtttcactgagagagcgtcaagattacctgggctcctctc

SEQ ID NO: 44990 - DNA, 827 bp, Arabidopsis thaliana columbia
ctatctgctgccactatctctccctcatcattcataagtatagcaattgcagtagcttccctccagtgctgcacacatatctatattctctcccctttttgaggtctgtgcaagcaagataagaatttagatctcatcagttttgtatactgtggctttcccatcgatatctaggatctactatatttgaattatggatatatgtaaactatatcataaaacggggtgaatgtataagcaaactgtaggccgaaaattaatataacttaccaagagcatgagcaacaataatacttggcaggttttgaagaaatatttccccctcaaggatatctaaggagcgaaaacgaaaatgtatgagaaataccccatgatgaaataagatactaagagtcataaattgtaagctgaagtacaaagaagaatcttactatgtaaagaaggcaatctgaaaactctatggttcaaatccaccgcaattccattaggaacacgaaacatcccagcccttgacaacatagctgttcccatgccgatatatagtccactgcgttcacgatagtaaggatctacaataacatttcaactgttaaagttaaaaacatttcacaagtttcgtagttggcacccctaaaacttatggataatataacactttcaagaaaaaatactggagagaaagcttatctaatacgactggattattgaggaaaactactctttaaaatttgaacgcattccaccgagtatactgtttgactcttttggctgccataatttattactcaaataatagcacctttgatcaataaacaacttaacacgtg

SEQ ID NO: 44991 - DNA, 635 bp, Arabidopsis thaliana columbia
cgttattttttttggtaaaatatgataaaatgacatttatgttaaaaatatatccgtaaaattatgtcaccatgcacaatttcttgcaagattattgtgttaattacaagactgtattagtgtatatccattatcttgtaaacaatggataattgcatgaattatttattcatttatgtgatagtaatatttggcatcatctgtctattgtccacgtggccacagtatctaatgtgaactggtactgtaataaacattgaagttcgtcatccgcgaggctgcagcgacacatgtcatctaactattgagttaagatcctgccgacaacaaaatagagtggggcccacgtgcgtaatgaggaccacgagggaacggtgctcctttactttcctgtcctttttaaatctaaaattacgacgcttaaacttcgttaacacatcacttctatgcaatcaatagttgctaatgcatcgccattatgcaattattccaggagattacacaaatcttgttttaaacaatacaaacaaaacttttaaatttcacgataacagtactataatgttactaatttttttttataaaactgaaatttgggaacaatgccatgttattaacatctgttatttgaagtg

SEQ ID NO: 44992 - DNA, 457 bp, Arabidopsis thaliana columbia
gaattatttgagcgtgtaaaacaacaacgtagacttcaacgtacataaaaaaaaagtttatcactgataaagtaggcaagacattccaaccaaaaagaatttggcaagataaacgaagttatatgaactagagaatcaagctatacaacaaatctttgttcgatttttttattaataatatacatacatgataatattttaataagatgcctcagacggactgtgcagtactgcatgataatatcatttttatttttgtgcattgcatgagaacttatatgtcacgaaaaaataatttaatttgtaagataattttagaaaccgtcatcaatgtgagtacagacgaagataatggtttgagaggacacgtgtagattagatcacggtcggagattgtcccaaatttcttcagatcacgagtctacatcgttgttgtgtgtttaagggtggtccggtt

SEQ ID NO: 44993 - DNA, 584 bp, Arabidopsis thaliana columbia
  unsure (1)..(584): unsure at all n locations
tttgtttttgttgtttgagagcttatcatccactttccatagaggcccttcacttgaataaaacatcataaatttttgtccccttgtgtgttttttcccgttacaactatcctttcagataagagtaatcacccacaatctataaccaaagttgtggcaattatgatttctagcttcataatcaatgtaatgaagcccacgccttcgcgagtgttttatttaattatgaaccgtgtcgtttagtagcccacatgaatcggagccgttattagcccacatgaatcggcgtcgtttaatagtcatacgactcgccgtcgttttagttgtagcacacgactaggcgcgtcttttttattatatactcgaagagtctttttaattgcactgcatcacatgttacattttcgacgtctcttctttcggattgccaaaaccctaattggggactgaatttggagagctttcgtgaattgaagccgccgcctctgttgcaattagcaaaggtatctcttttctttgggtatcgatggcttgatcactatagacaatggatggacagcaaaaagaacganactttgaagctt

SEQ ID NO: 44994 - DNA, 316 bp, Arabidopsis thaliana columbia
gaggatcacaaaatccctcacattataaatattacattctctcaaaatactacagtcagagacatctaagaaaaaggtgacgatggatgtaatttaattattcccttgctcttaccatacacaaagtggaattatactttccctatagtaaaagccaaagactccaaaacaacaaatccttaccatggaagaaaaaaactttgttctctctttttatttagtgtactctcattctcatacaccaccaaattaattaaaaaatgattgatatatctaattacagtattcataatccatgaagaccaaacaccccccc

SEQ ID NO: 44995 - DNA, 390 bp, Arabidopsis thaliana columbia
aacattattacatagactttaatgatgtatagcaaatagccacctctaatttgaaattgcgataaatcaagtaagaaagaagagactaaaattgttcaccgatacgaaagatctaacaagaagatcccggttcatgagagagggcgacggtgcgacggtcaggagctccatcccactaccttaaggggatctccaacgcagagagactgtgacaattgctcaattatacagttgataatcagttaataagaagtatatgacttatcaaagatcgtaaattatgacgccaaaatctggacaatcatcgagatcgagatacagacgtggaattctcacagattctcatagaagacacgtatctccatatgactccacgtttctcattacaga

SEQ ID NO: 44996 - DNA, 550 bp, Arabidopsis thaliana columbia
ttttgtttgttgattcttcggtgatatttgtcctttaagtatatgtactagatacatcagctacacagtcaaaaaccaaattttgacatgtttaagatacctttaagtccataatttattcgattactaatttaattttgtttctggttattctgtatttctctcatttgtcatgtctccactacctcgctgatgttacacaccaagtatattggaaaattattcagtaataataattcatactcttttaagttttccaacgatatatttatcatccatcacacgtcaaagtttgcggcgagtctcgtcggtgatgacgtgccaattgacggcccacgcgcggcttagtagcgcgtgggaagagggtaaattactaaatcatattattgtggtaagatttgtcgcgggaatgagagaagcggttaaactttctaacttctatgttgggatttataagacatcaatcaaaacacagtacttgacataatcgcaagcctgacgtcaaaataccaccataagatgcgcgtagtcattagttttgatagttcta

SEQ ID NO: 44997 - DNA, 594 bp, Arabidopsis thaliana columbia
tgaggcagaggataacttcaagccaatcttcacccaaaagctacaacaaaagatcaagaacataccatgacttgtagaccaatcaatagcagtaacagcctttgtatggccggttaacgaaatcgacattctactaggcatttcggtttgcaacgaggatccttttggtctatgtctaaccgaagatagaacatggcgaggtacatcagaatctgagatgctcccaagaactgagattaataacaaattagcataaggcaacagtacaaccacaaagctagtgaagcagattaacaagcatcaaacactaaattctaaacagcgaattgattaagcatggttcgcaattaccagtaggagagctataaggtttctgactcaaatcggaactttgatctggagtcggaatcgttgaaagggaggctagaagtgatctctctctcttggatacgtaccggcctggaaccggaaccggaaccggaaccggtattgaaaacgacgagctggtttgagatccgaataggaccgtgtggaggatcggtctcgcggtggttttattgcgctccccgggactggatatggcccttagaagga

SEQ ID NO: 44998 - DNA, 542 bp, Arabidopsis thaliana columbia
tctaaaacttttaaccactagatagtagaaaatcaaagatataaaaatattttggaagaaagaaatatatctttataattagaaatatatctttataatttgaaatgtatgattatagaaacaaaaagataactttataactttgaaattatatgtctatgaaaaaggttctatatattagaaaaccaaagatttaaagatatttaagaaaatagaaatatatgagtaacatctcaaatccaaagcttggtcaatgagagagagagcgctactaaatcgtcaaaagagaataaagctaggaaaaatatataaagttggtttgggggtttgtcacgaatgaaaatagaaaattaaaaatgtaaacaagagaaagaaacgcaagaaaaagtcaataaaatgattgttgggaattcatggattttgcaggggtattgatgatcatttcattcaaagaaatctaagatatgtaataatttattctatgttcacaaactagaaacacaaatgaataaaagagctaccatttgcagaatcaattatgt

SEQ ID NO: 44999 - DNA, 503 bp, Arabidopsis thaliana columbia
gtcaaccgaaattggtgaacaatcgtttagaaatgtaaccatcccaatttcatcatgatgctagttataatttatgagaatatcttataccttgacaaaatatatatatctttccaaaaaaaaaaaaaaaatttggatctcaagattctcaagtctcaactaacatgaaaaggcatttggatcgagattatagcatctaattttcacaaaatatggaccaccaccacctcaagaacgcaccaaagacccccactgtctataaatttgaccaatttttcataagtaaaactcaaacataaacacgaaaaaaaggattgcaatggctaatatagtttggtgtaacattgccatgttcttgttggtctcgttgtttctcactgacgatgctgttgttgttcttgatgccttggacaacgttcccaataatatcaagaaccaaccttaccgaaccggttatcatttccagcctccaaaaattggatgaacggtatgatgacgttata

SEQ ID NO: 45000 - DNA, 642 bp, Arabidopsis thaliana columbia
atgttttcagttataattacatcagtcaatagctcgattaaatggcaaattaacactcgtctaaccacttaataatgctcgcagattaggaagaatacaatcagaactcgaaaagaatgaaaagagaacaattgtttttgaactaaatcagcttcaaaacaactcacggtttgcatttagacttggtttactcgtgatatctcaacttcaatttttttctttgtggccgaattttaacaaaaaaatagcttttagcaaactcaaaatgaaaaaaacaaatggctaattaaaagatcccaacatgtttcgtgaactcggtatcagctttggccaagctctcttgttaacgactgatttcaattggtaatagttctgttccttcttatattctcttaacatgtttatattcttaagtttaataactaacagtagttcctttctagggatgaagttgagcttagaatggttatggagctgattttttttcgtgcttcagtctcaacttcatttttttctttatggccaattttacaaacaaaattggcatttagcaaaaaccaaaatgaaaacatatggctaatttaaagttccaatgatttatggtttctgtgtccatatagattatgacaaggaatagccata

SEQ ID NO: 45001 - DNA, 314 bp, Arabidopsis thaliana columbia
aagatgcaagcagaagctgctgcaatcacttcactattcagcgagattactgagattttagggacggaggttgtcgaactagatgagaccacgcggctcatgtcgcatgtgtcgagggagctgtctctgataatggagtatgggtttgttggacggaaggtgttcgtcaaaatgctgcagtgggattttcaggtgaggatgagaaggctcagaaagttcgtcatgaagaaggtgacttcgagccccgtgggtcatgagagtacgagtgtcgtcaggggagatggtggagtagtttcgggggaggacaggttaga

SEQ ID NO: 45002 - DNA, 482 bp, Arabidopsis thaliana columbia
aagaagcctaggtaaagatttttgattcacatgtagactcacctggttcaacaacttggtcttgtgtttctttccattttctcccacagcgattacatatctagcccgcgttatcgcctgatgtagtgatgagcacagaaaaaaagaaaaagctgtggcaataacatttgcttgggacaggagtcaagtttctccttgaaattgttgggcttgttcttcatggctgtttctttagagctgtagcgccaaatcaggctgttgggaatcgacacgaacaccagaagattgttttgcaggagaatcaggcgaatgaactccgatgttcaaatctggtgggagattgaaattctcttgtctctgcttcaactggacttgtggagtaatgcctctcgccattgagactggacatggaatcttgagaaatcagaagttggggcagccatctgagggaaaacaattggtcggttgttttgaaatggttg

SEQ ID NO: 45003 - DNA, 578 bp, Arabidopsis thaliana columbia
cgccgcgacatcgattctccttgattctcccttgcgtcgatccaccttttctctacgccgttttcactctccggtgtcgtcaacacttcttaactccattcccgtctttacaaattttagttcatcaaatccgaatgagttgtttggcttcatgaatcacggcttggactgctttttcaactctcaagcttttctcatccacgatctcctctacaatcttaatttctcaagtggaccttgattaatgatttgatttaggtccaaaaataatacttttgggttttctattttgtacttttaagcctataataaattttggttacctaataaaacccgaataacccggaataaatttaattcggttaaagttcggaatcaattttaaagcttagaaccgacccaaataacccgtgtaccgaccgacccgaaccgagatttatttcggtgagattcggtgaaattttttgtaaaccgaatttcccaaaaccgattacccgacatgaccgaactccaaggcctacttctaaccaaatacaagtggtacattatcatctagattaatgacacattttccaatg

SEQ ID NO: 45004 - DNA, 511 bp, Arabidopsis thaliana columbia
tcaatcccataatcttcttctttttttcatctgttttactattttgcattagttgaaaaataaacgcccatcaaattcagtcatggaggctgcttgcttatgtacgtatatgattaatgttcaacagaaggaaactgaagtgcaaaagagtttctatgtaggttaaagacggacaccttggtggtaagctaagtaacaacttcctctagctgacaacaacagaaacttaatgataacagagaaagattagaaaacaaaagcttttttcacagagacgagagactcacctacaagaaatttcaactaaaaccagttttgtttcattacgctcatacaaaatcacactgtacaagatgctgactctaaactccaacttcatgatccactttccagtaattgttatcgttgaactctttcattcctcagtctttaggtcctcagccatctccttgttcatcttcatcgcttgctccatgcctttctctgtcacttgtgcttccactcccacaaa

SEQ ID NO: 45005 - DNA, 556 bp, Arabidopsis thaliana columbia
atctttgtgttataatttatctttagctactgacctcggtgacagatagagaaccatcaagagaaggtaaatcaatcatatctctaaaagcgaatatgtttttccttaactcaaccatcaaaatgaaatttgctgagcatttcggcgaagaaccctccaaagtgttctttctaggtgtattcgctttcgtctttgagttctttactgacaaaggagacgcggtcgcggtgaggagtagaaacatgttttgtagaattgaaactctttggagaagaagcttgtgcaacagaagaagagatctgtgaaactgtgcgtctgatctctttatttttctttttttcgacattgttctttgatgttgttgtgcgtctaaaatcgtgttttcctttgataagcctttttagagcaagccctcttgcgacctaaacacaacatcataaagaataatattttaacatgttaatgcaaacataaatgtagatgtgagtcaaaacacattaagttctgtaaaaataaaattcttttttcagtttacctttctgataaaataagtgtg

SEQ ID NO: 45006 - DNA, 456 bp, Arabidopsis thaliana columbia
tagaaatcacatttttcgaatgaaatttctgtgtaatgaataatgatgttgaaatatgtaatgatgtaatgatatcggatcgaaatcacatcttctgatataaaactttgaatatttaaaagatttagattggccacacatattaaaatagaattacccgttaaaaataatgtggtccgaatatttctcgcatgtctgacgtgtaataggtaagtcgcacgttttcgtattgaccaagactaacactgcatagcattagaatgatgttacaaatgttcaacctattatggtgatctcattttatatttgaccttataaaatacaccgtaccgacccctaactgttgaacatgaataagcaatattattatctttataactaaaataatagagaacctgtaagaatacttacttattctttcccctacatgttcttatgttcattatagcattacaa

SEQ ID NO: 45007 - DNA, 557 bp, Arabidopsis thaliana columbia
cttactcttgctttctattattcgtttgtcacacaaaatgatactttgtatataaaaaggaaagaaccagtaaacttcacagcgaaaaatatccatacaagcataaactatgactaatcatcaagattaatgattgagtatccaaaaaaattcagtcagcacacaaaccatggaaaggaacaagtcatagtgcacttcaacagtctcaaagtatccgaccatctccttcggccataatattcagtaagtccatggaagatcaaacatttgccaaaagattccaatttcaagaaaagcatattctacaatgcaactgcctaaagaatactataatggtaaccagcatacactttacccagcacaaggcataaatggtatcatattcccgcactttcatattttgagaagtccatgtcattacggaatttttttggctgtcagtttcaaagtattaaatagaacaaactgagactttggtaaagcgtaacgtaaatttcgtaccttctcgtccaaatcaccgagtggtggtccgtgaatatttcgccagtatatggtgc

SEQ ID NO: 45008 - DNA, 405 bp, Arabidopsis thaliana columbia
ctagcttacccatccggtaaactcgttttaggagatccatttatactcaaaaaccctcattagaaaatagcccaaaatttatatgttgttgatgttactatgcattctctatatggctatagatgtatgtgatatcagattatctacatgcatttagctgaatacattacaggaaatagacttacaattactaagtagttatgtacatctatctggacaattataggtcacatttcaaaagacataatttaaattttaacatctgaccaaatctacagttgtctataaggtacatctgcatgctgtttttcatgtgaacgcatgggtgcccaaaacatgtatgggcaaagatcctgagatatcacaaaatattgttgttcccaagttccaacaggtcctaaggta

SEQ ID NO: 45009 - DNA, 475 bp, Arabidopsis thaliana columbia
  unsure (1)..(475): unsure at all n locations
nnnnnnnnnnnnnnnnnnnnnnctaaagctctaaagtgagtttgttatcattcgaagctgactggtgaagcagcaggaatgtccctatggcttacgacggcagaaccagtgaaacagccaacacagccaaaactggagtgcagagactgtgtccgattaagatcgactctgaaattatgcttgggtatgtttgggattcttgcacagctacactacgatgccacctaggatgatccagaatgtctttggcaaatccaccgggcgttttgagttggcctctaagtcggtgcggcatttttcaaacggtcggccgttgcatacattactttgcaaggatggatagtcagtatttacgcctctctggagagcactcttcccgtcgcccaactcgggcctctgtcgcgcacgaggagcgctcgctgcaaatcagcattgacgcgccccaaaatcggtgatgatgcttgcatagtatata

SEQ ID NO: 45010 - DNA, 593 bp, Arabidopsis thaliana columbia
tgaagagtagattctcaaattataaacttttttatacagacaaaaaaaaagttgaatatctccgaagagattcagattaatcgacataatatgcttctctgcattgttcttagctcatgagagatctcaagcaccaattgttgctgaatcttttccacaatatcagacacaacaccttcagattcaccaccaaaatccaaccaaagacatggctttattagatcagtttcaatgatctgatccaatgatcttgtaggagagtcagagcagagtaaactccagtcaaaatgtctcatcgtctcgtgaatcagatcatcttctctaagggatgattctagattgaggactctcgagctcttcgatggcgagaaaggccaaaacttgatgtcttgacggtaaatctcgcggagaatctcgtcggtgtaatcaagaacaagaagaagctggtcgttgtgactaccgtgtgagaattcatcgagtagtgatgtgtcttcgttgcaccttgccataagattagtccaattcaatcttgaagcttcaagaactttcttcacaaactcatgaacagattcttttctataagacaatggtag

SEQ ID NO: 45011 - DNA, 571 bp, Arabidopsis thaliana columbia
ggtcgacacgatcccccttaacctaatgaagatcttagtaattaaaaagccttctaattaagtatcattggtttctaagtttatatattttacataggattctctcctttaccatttactataaattttctttcgtcccaactttagttcgaaattaaaatcattatcccaataccacttgttaattaagtagaaaacacatttttcttacatcatatatggtttcttattgaaattgtgattaccatatacgtggtcaagagtttcgtcaagtccttttatatccattccattccctattcctacagtgataaatatatgcacaattttatacatttgtgtattattgataagtctcctaaatgcaaatgcactcctgagtcttgactagaacaagcattcgagtactatttagaaacataatgggacaagaaatttctgtcctacagatcatatataattgtctattaggtacatacaatatcaatatgttaaattgataatatcaaaataaaatagagttcttatggtctaatgaatttatatatgcaaacacagatgcatatgtggg

SEQ ID NO: 45012 - DNA, 268 bp, Arabidopsis thaliana columbia
gttttcatagctaaacatgtatgccaattatttttgtgccatgctctttctacttgttatttcctaaaccaaatatcttctctttatgatctttaaactaacctcttttcagctatacttccaacaatagtatttgtaattttcttggttaaatatatacagttgtcaaggcatgaaccttgctcaactttaaaacaagtgtctttataaaataaatgtcgttaagacgttaacccgtcgctaatccgttgttaaattcaattgccaa

SEQ ID NO: 45013 - DNA, 256 bp, Arabidopsis thaliana columbia
taagttcattatctataggttttatttatatttctagacgtgcatatatataggaacatttatatatacgaacgagcaatattttacgttacatgacctacgaagaacataatagataaatattcctataattaatgtatgttgtgtcttgtctctcctttcctatttagtttttcgcacgttgtgacatattaaaatagtgaaaaactactaattgtggtgcagagagtggtggtacgatcaagaagtgtggagt

SEQ ID NO: 45014 - DNA, 632 bp, Arabidopsis thaliana columbia
ctttagaaaacaacagtaaaatttaaatataaaaacaacactagcttccatgattatttttcataaccatttataattgcgtcatcttgtaagttgtaacgcattgcctttcttactatgtaacggttgttgcatatttttgtgtacataaatttatacacaaagataaaaagtgactaagcttaaaatatccttgaaaaagcctttgggtcattaacatggtgtaagactacaggcgcattcagcaattggagttccgattctattacagtaagagggaacagaaccgtaataatcgcgacacatttgttcgcatttgttagcatcgcatggaaccattggccagaaaacggggcaagtttgttccatcattctcgtctctctcgcacctttaaacaaacatcagaaaatttgtgacattaattaacaggatttggcttcttataaagataagattaaaactactatttaaaagataatctgtacctgaggctgaaacgatgaagatggtcatgataagaacagcgaaatttatgaggttctcatggttttatgtttttctttttctaacaagacgtaacttgaacggggtacgagctcgaatcgtatcatggcatagctgttcatgtgtg

SEQ ID NO: 45015 - DNA, 493 bp, Arabidopsis thaliana columbia
gaaccaatggtgaatattgccgttaagaaccagccggttttttttaggctatgtgacaccgtgcttcgccgtttcaccgaaggaatagcagtagacaacatgtcaggatttgatgttttatgggtacatgcaagaactagggaaatgaaggacattccatctgccaacgcatggttaaatcttattacaccgactgcttcagcatatgaggttttgacattaaggatgtgaatgtcccacaaaggtcttgatctatcaagaggaatcaatgtgagacgtgagatataatcatcgacgaagctttgtccaccttcacatatatcttctggatctatgtatggtacgattacatgatcttctacattgacttcggtctcgatccatttttcaccattttcagactattaagataagacagatggagaccaaaacactatcatgtcaaatctcaagtaggatttaagcaaaatttatacatatatctacaaaacac

SEQ ID NO: 45016 - DNA, 495 bp, Arabidopsis thaliana columbia
tcggagcatccaaaccaggttttgtcaatctaatttatcttctcctctcccggagaagaaggaaacttacaatttacaaagaacgagcttcaatagaaatttccaaagaaattaccgtcggcgaatcgttaggctcgagaagaatcaccaaattcgaaggggagagagactgaattttcttttgattcacgtaacaacaacgctcagagactatgtcgtcggaggtgaaacagctgatcgtcgttgctgaaggcaccgccgcgtttgggtccttattggcaaaccatcgtctccgactatctcgagaaaatcatcaggttttaatttttatgaacgttgtatctctttaaatcctcgttatttgaatttcattcggagttagggtttagctgataccgttcgaatcaggctttaatttcaattggttagatcaaacctttgtttacctctgattcccaatgttttgatgttcgttgttagtactgtgtttatgta

SEQ ID NO: 45017 - DNA, 386 bp, Arabidopsis thaliana columbia
tagttacagaacacaacttactttgttttttggtttgggctgtgttgaaaattgagcttagggttttatgtaacagttgtcttagctcatagttacggttaaaaagctctcaactttgtctccctaatgataattgaattcaatcttgtttatgatttgtctctattgggtcgatctttaactgaatctatctacataaagatccaaccgttttaagaatcttagggttcttatcatcttgttcaaaactaagattctgttttttggtgtggcagataatttagatatggaagctactcagaaacatatgattcaagaaggatcttcaatgttttaccatcaaccatcttcagtcaaacaaatggacctttctgttcagacatttg

SEQ ID NO: 45018 - DNA, 416 bp, Arabidopsis thaliana columbia
cagcaaagtcaatagtcagggccaagttaatccctctgctcccttcctccccgctgggcctggagccttgtgggtgagacagcctttatcactggggaagcatacgttttccaggccaatggattcagtgcttcggctgtatctcatgccttgacactagatgtcagcgaagggtaattgttgtctcaatttagaggccagcttaggtagctgctggcacccttggttcatgttttatagcaaatgtgaagtatggctccgttcccgttgcacacatatattacaataaaagggggtatcggcgcctagtgtttttaaaggctagtcataaaagatgaataacgaggcagtttaaagctaaaagacagctgccaagttcaatggccatgatggatgctaatacccagtgtagagaa

SEQ ID NO: 45019 - DNA, 442 bp, Arabidopsis thaliana columbia
gtaccgagctcatatttctggtttctcatccaataatcacaattctgtactacatagttatcacaaatcctttgagataatatttctgcatatactattggtcaagacaaagcaaatcctttgtatttgccgaccaaaaaaaaaaaatccttaaactctctccttacgcgctcttttatttaaatttagcggagaactattacaacgttgactcaacgcgccatggatgcgcgtgagattaaaacacaaaaaatatttcttttgacaaaaattgaaattagccgtatctgctaattccatggcggaaaaaggaacggcgacgaaaactacagagtagaagaaataagagacactctcttactcttactcttcctcttgctcattttcgtaagagacgatggcggaagtatcagcaaaatcggtgacgattgaggaaatggcg

SEQ ID NO: 45020 - DNA, 298 bp, Arabidopsis thaliana columbia
  unsure (1)..(298): unsure at all n locations
agttttaatnatgtattgtatacacttggtttgtctctcgaaatatctctatagagaaatgcagttaatgcgtaaagcaaatgggcgcattatatatgtaatgcgtatggaccatttaaaggagaaaaagcaaacctttcgtttcgtcggagaaaaaaataggttagatacggcgcacacagaaatgtattgtggtccacataaatagcatgatactcgacccatgtgacatcatggagacatatgggtatacattatgaatagacccctcgcaaagacacagaccacaacaaactct

SEQ ID NO: 45021 - DNA, 508 bp, Arabidopsis thaliana columbia
aagaattgtttttctaatataattgcctatatgattgtttctgatatagttaaatataattttcaaatgaccagttaaatatggtcagttactttacacataaagacatgattatgttatctttaaagattcacaacaatttgaagtcaagggaaaaaacaaaaattatttttgcttgccacaaaggacgattaaggctttttattttctttgccaaaataggggaaaaaatcattttcccacttctatactatcatctcatattggactctctttattttacttttagttgttgggctttgtctttcgtttgggttttcttcggtttcctgtgctctttgagttggaggttttttcaacaaactcttagcctctttagaagattgtattccttgtttcagcatcattttgagaacgataagattatttacattgttccttgtttcagcatcattttgagatatcaacaattattcaacacagtcaaaaagacaagttgttcagctat

SEQ ID NO: 45022 - DNA, 523 bp, Arabidopsis thaliana columbia
atctataatatgaaccagattttattcatatttttcaattttatttcctctgcattccctaaatataattggtaatgaaaccgagtcacgaaaatatctttcaaactagtgatgcatgttatcctccattcatttcagtttttcttattttaatagttcctctttctatacaaattgtatttattgttattaaaaaacatcctacgaccgaaaaagatgcgaaaagcttagattataaagaaattttaaacccaaaatgtaacgaaagtgtgtttaattcaaaagaaaagaaaaaggtaaaggaaaagtgtggaaaatagtaatagcttttatgtgttagttaatatatttaggcatgatgggaataactattatactttaggcatgaatttctaacattatcaatggattcgtagaacatattctactgtctctagaagcttttctaacacttgttattggtcataaaatgaaataataggataaattagacatattgacaaaaaatactccaaataatata

SEQ ID NO: 45023 - DNA, 362 bp, Arabidopsis thaliana columbia
tcggttttaagagcttggtcgtcataagcagaagaatcgtggttagaagagaaattaggtcgctgatactcaaaggcgtcgccggtagagagaggagagagggtaacaagtctcgtcggacggtggaattgaacggccgtatgtcacggtgatgtcgtagcctccactataaggcatcggatcgtattcggtgaaatcgtcgacgtcattgtcgtcgttggtgtaatacggcatcgtttttggagtcttcttcttcttctttctgattcctcttatggatctctcaagaaatgaagattgtgagcttcctctgtatacatggcgactactacgtacgataagtcaagcggtgacacgtggcg

SEQ ID NO: 45024 - DNA, 443 bp, Arabidopsis thaliana columbia
cggattccggttgtacgtagactgaatcgttactatgaaaatttgtcattagtaaaatttgattttaaggtcatgcactttcaatcatttggatgcaaatttgaaatagattttcttatagattttttctcgagcaaaatatctcaaaagcactacgatcaaaagcttgtcagcgagacattgggacacgttggcacatagcaggacaactcactcatctaaccggtaaacggaccaacatcagacatgagattacaatcgttgacgtgtcattattatccacatggtcttctcttattggtatacattgttagatctcagattatgcagttgtagcgccagagagaagatctaattgcatgagggttaacttaacacgtgtcgactgttgcttcgttcaactttagatcagcatttaggatccaagtaggtgtacaattaga

SEQ ID NO: 45025 - DNA, 556 bp, Arabidopsis thaliana columbia
ggtccttcaaaaattcaaatcatagtattatgttgcagggttcaggcgaggttcgtgaaatatttgacttttaagacaaagacagtaatctttcggtatgttattcctggtatagaaagagtgttaaaaacacaaaagacatcaaacaagatgatcctacttagacagtaatctttcggtatggtattcccccactttctcacaacaacaatgtctccattgtggtcagatgagtggtgaatcatagggttttagtctgtagtcttattgaaccttttcttatatattcggtgtacataatatattatcgaacatttttaccggaatttgcttgttcgacttagtttgcacctaaaatcacaaggttattttgatgttaaatgttgcttgtctaacaaggcaaatagaacataggcagacattattatccatcgtaagaaatacaatgtaaagagtagtaactaatttagagtgcagcatgatagaggggagaagataatggcgtaatgctacatttggtagagggattgatggtattgagctcctgaccacttgg

SEQ ID NO: 45026 - DNA, 518 bp, Arabidopsis thaliana columbia
ggaatactggtcatcccagatgtattctggtgaatatttgacctgaaaccacctcccaactggtgatcaaggttgtaacccataaggtcatttgaaccagtaggacgttgcttctgcagctgagatggatttccaaagtcagacccggtagccagaagcttgccaccatctccagaatattcttcatttcgatgagactgataaacatcagcattagcactattgtcaaatccaggagtaggaatcatctggccaaccgcagataattcctggcgaccattatttattgtacctgtcgaaatatagtctatgaataaaagaatcgggacagaatttttactcttatacaatagaatctaacatcagatctgactgatagttacctctgtacatgcgattagttggcaatagcttccagtttcggttgttgcatctgataagttattactactattgaatttgctcgtatccaccataggggtggccgataactttgacccaccatgcgaaccccaggt

SEQ ID NO: 45027 - DNA, 631 bp, Arabidopsis thaliana columbia
atgtatcctttatgtcagattgattgtttgatcatgaacaacaacatccagactctaaaattagcagttgctgcccatcatgccgaggaattgagcttggttattggtcaattcccattctttttttaattcagctaatcttttaattattagctaaccatttgtcttttccattgagaaaatccctattgtcgttaagaaccatgcaaacttgaacgagtttctccatctcacactttgtggtcgcaaaaccaccggtcccatagtctctccccaaccaaattctttcctttgtgcttaggtattctagtttgaatcatttattcaggagataaatataacattctcgttatctaactatctttatttcttctcttctagcttccaattggagttttgtgtctgacatttattaatctctttcgctacagttgctcgtcgtaggaggagctgacatcaatcctgcagatctgaagggaaattctccacttcatttaatgccctcttgatggcgggacgagtgttgcagccaccacctcaaaggagatactgtaagtattttttcttatttttcttatgttatttcttatttatgaatgtgcaggctctgcattttactgcaaggagaagt

SEQ ID NO: 45028 - DNA, 486 bp, Arabidopsis thaliana columbia
tgatgcattagtattatgttgcatcaccgatattatatttctagttgttggagttctatctagtgactacatcaaattgatgtacactcaatatctatctagtaccaccgtgcatatgtccctaatgatagagaagcgttcaaagttgtcagggaaacattttcactcttatagaagtctaactagttttaagtcgtgctagtctttcttccttatatttcatataaataggtcagtggtgcttgtcgttaaatatacaacattgtctgaaaatatattacctcctacatggacatttctagtatctcctacacaagtataatctcatatagttacaacacaactatttgagcaaatgtttactattttggattcatatagttcttaaaaccaacatgcataatattctttattaataaataaccttcagataacacgactttaatttacagtcaattagaagtgttgatgattgatttttagaga

SEQ ID NO: 45029 - DNA, 427 bp, Arabidopsis thaliana columbia
gatatgaacgtccaactttaaagttgagatagaaggaatgtcaatcatacagttggaaatgcggctagtgccatcggaagaaggagaaataacttctcaacggccagcctgaggccagccgctggtgatgtttcaaaaccttagaatatcgctctctcactcactatccagaccaaaactcttgtatcatttatcgatattgataagaaaattcttgtattgatttttacccacttacattcttagtagtccgtttttattaagcgcatagtcattttttggttaacatctaatgcaaatagactaattaaaaaggtgtgttacaaaagatatcacaaagagtaaattacatctatatattagctgagaatacttattcaaacacaacaagtatatgcatatcaagctctcgttaaatagtcgtaag

SEQ ID NO: 45030 - DNA, 607 bp, Arabidopsis thaliana columbia
tgaattatcaacacagctgcaaaccatgttcagaatgtcggtgaaaggtgcagaattttttccaccatccaaccccggatccccttccaaatgatcataggcaatgagtttctgcttgcaacaaacaaagaattaaaaacatatacagaacattaatagaatgacaggagatacattacataagtacagagtcaaatgaatctgaaacgaaaaaactttaatggagcaaacgtccagggatactcagagcaatttaccacacaaaaaaaatacatacatgaagacaatccaaagcagcatcaaatatttttaagttctttgtctcaaatgcaaggcgtagaggtttcagcacaagctccacttccgctccccctaatgtgtgtccagcatttgctaaggaaacgtttatagtctcactttttgactggctagcctgctgcgctacttcagcactcgtgactttttgcggttcatctgcttctaccccagttttttcacctccaccttcagcttgtgaactgaagttaaatataaagtgtcagtgtagacgaaataaactgttgaacaagccacctttacatataaatctcaaaaccctttaagaaat

SEQ ID NO: 45031 - DNA, 588 bp, Arabidopsis thaliana columbia
taattagcattattttgaaaaattgtgaaagtttctaaaagaaacaaatgattcttgattatatagtcttttaaatatcagatataatttcatttgagaaaaacgcaaaagaatagttctcacgacattttttattttcgttaatcaaataaagctatttggctaattaccttttaaaactatattgaaaaccggactacaagttcatgttaacaaaagcataccaaataaaaactttgcaacaaaaaagttcatgtttgactaaagaaaaccggacattataatccaataaacaatatagaccaaataaaactggcaacacccacaccgactaatgaaatttaaagtcgatgagataatgaattaggtttgatgttgaaatcatgatttataatagcttaataggaaccggaccatagaaacatgtgcgaaaacgacaacaaggagaagcagaagaagaagcaacacggtgatgggtttgctgggctccattgcatgtgatcgtgatccagatttacaattcttttattttacctttgcattatacatatatccataatatattattcgaagaaatttatctgatag

SEQ ID NO: 45032 - DNA, 604 bp, Arabidopsis thaliana columbia
ctatttttttttttttttatgtataatactatgatactggtgaccagaggggaagtaatataatagtcatttttatctcctttctggaattcaagagcttcttatttctcgttgattcatcatgttttgtattcttcattgttgatgtcatggttctaattagtaaattatcaaccatacagagctctaaacttattagtaatatttgagattacatatgtaaaacactcaagatgatagctaacgttttcctcccaaatttagcatattgagcttctaagtttatgccagtttcaattactaaagccaaatttagatgatatgtgcagaattaactgctattgtttgtgaggtttatgtacaactttcaaaagttagcaaatagaggctgttaggtttcattagtcttgtaaattggtttgagatttgagactggaggagacaacttacaagacacatgatagtttttctcacttgcaaattttcaatcataagaggaataataatccatcactacatatatagttgctaaatgacccaacctagaaccataatttatgctcttaaagaaagacaaaaaaagacagccgatggggaacatatg

SEQ ID NO: 45033 - DNA, 628 bp, Arabidopsis thaliana columbia
tgactcctttctatatggtgtaaataatctacaaacaaatttatttccaaatcgtttgatggatcttcaacatagtttttttttgtaccaagcaatttataacaattgtggtttaagaacattggttgaggtttggtttggtgtacaatcatcactggtaaaccgaaattgacttcttctttttccatttttcttttagaaaattcatagtattaaagtacaatattcctcttgcatttactatttggcacacatatatacaaaatccagtatcccactcttgtgagccagccatcaaaagaagaaagagagagagaaaaaatgaatatgaaaacatcaaagatgaagttcacaaaagagatgatagagtctatcaaagacaagctcccgaggctcagcttcctccgacaatgctacggtggttgcggcgaccggacgcatttactcccttgctccatcgccaccacttccacccgcttttggaacctctccgaccgtcccgtggagctccagattcgggtcggttcaattctaaaacggggccacactctcaaacctggccgttccaagaagcttagacacagaagcattcacagagcttacgttgatgaccaggaaggacgtagat

SEQ ID NO: 45034 - DNA, 632 bp, Arabidopsis thaliana columbia
ttctacatagcactgcagtccatccagcatataaagaaagcagaccacccttttggatgattccaaccaatgcggtcctgtattcatatgtgatgaaaatatcattagaacatattgaaagcacaagaggaaattaaagaaagggtaatgggaaacaaatctcaatgtgaactaattttattaagctaggaaacctttacgagacaagagaacattggaatgattatgaagcgagttacaaaagtttaggattaagctttcaaaatatttaccagcaattgcgataatgtgaactgacttgcatctgctgttttatgcgctcactaggcgtgaagataaaagaagttgcaatgcttgcagaaccaccagctaagcagtgggctagggagcaatattcctgaaatttcaagaatttagtaatatgactttacttattctgcgaaacaggccatcagaagaatggagacatgcgagaaaaaagagaccttaggagaaagaggaagcagagttcctttaacggtttcataagtgaacgtatagagggcagagataggagctgatgaggcaatgttgctagcaatccctcgataaagtccagaaaaacctgaatacatattgggatgtaattatgt

SEQ ID NO: 45035 - DNA, 339 bp, Arabidopsis thaliana columbia
cataattatgttcctatcatatatttcccaatttatacgataagtcacaaatctattactttcttggtcaaaaattatatgagttacacataaataattttaagagtatacacattctttaaatatttactttcttggtcatatatcagatcagttacaccgaacacctaaattttcaaagatgtatagattctttgaatgacactatattctctttatctaaataaactctctttaaaacgctctgaaaccaagattttctacaacaatacggacggattctcgatagaattacgccttgagacccggatcactcaccacctcaccactaaatgtgga

SEQ ID NO: 45036 - DNA, 498 bp, Arabidopsis thaliana columbia
tcaaatactcaagtaagcttaactttttccaagtttctctttcacgggttgaatcgagtggctcagatataagaggtcgagtaatgttgaggaagtagtgtgcagatggtgaatcaggttggtcgagtataccataggtgagccaaaattggcagggacgaaacctcaaatcgacgatcgagtacagtggatgtaatcgagtagctcttgagacgacgacggtaaacgaggtggagactcgacttagacgggaagtgacggttaacggcgaagtgaagtggttgagtgattcaaggtgaaacgtaatcggtggtcgagtgggactttgaactcgactgcggcggctgtaattctttccagctgcggtcgagtggtttcggcgaggtcgagcgtagcttggtttcagaggtcaagttgattcttgcgatcgagtggtggaaaactgaatagaggttggtcgagtgaaatttcaaaagcagtggtggagattgagtttga

SEQ ID NO: 45037 - DNA, 566 bp, Arabidopsis thaliana columbia
taatggatcgaaggagatacgattaaccttttttctgaaaaagagcaacaaactaattgtacgtgaaaaaagtaaaactaatcatctaaacttatgtattattaaatgcaaagcaccaccttgttttagcatctaaacatatgtattatatatattaaaaatggcacaaccgtgagcaactaaagcaatgattaataaataaatcaagaccaatctcaaatccattgaacttgaattataattaatacaaccccctaatttgttatgagccagttatacatcttcttcattagacaataagacagtccaaccataatacatatatacattatacttttcagacagctaaaatgttatgtatcttcgaatactttaataattgtatatacgttattgctcatcacaaaaaaaagtctaatttatctaacaaacattatactcaacagaagatgacaatccgaaaaagaaaaaaaacgcttttacttttccccgaatcaaacaccttcgctcgaataataaaattatcaaacactctttctccttagtggaagcacaacacaatttat

SEQ ID NO: 45038 - DNA, 409 bp, Arabidopsis thaliana columbia
tttctcgtcattaaaatgtttttttgtatattttgagattgttaatgtgtagtattatgtagtactgagaaggtacaaatatttgttatatagggtatctttattttaatacaagaaaatataaacttccaaatcaagctttaatgcatgaacattataaaaaaaatctgaatggattgaagatagagattataaccgtttttcttatttactacatgtattatcactactgattgacatatgtagaactatagtccaaatatttatagagtggtaacatcaaaacaataaaataggataaaatgtttagctagcaaatttagtttttaacagcaaaaatcatcaataaatatcaatctggtaatgttatttaaacatgatgcaactgatataattatttagtaatata

SEQ ID NO: 45039 - DNA, 324 bp, Arabidopsis thaliana columbia
gccagtgtgctccaaaggctctgaaggtattgtaagcaatctcgagtttcaaatcttgttttattgttttcttataagttcgtggtgggatcgtctctttttgtctgaaaatgtctaaagcctgtgcttaaagaaagatgtgtgggcttttcgagatattctcggatttgaaagtttgaaactttgaattagtgtactcgtcttgataactttaaaggtggtgcctaatggttgtagtaagcaatgatagttaccttcgctctccatttgtgtgaatgttgatgatgagtttgttgtcagatcgatatatatatattgatctgt

SEQ ID NO: 45040 - DNA, 976 bp, Arabidopsis thaliana columbia
cccaaatcatggatattgagacattaaatgttattattcatccagtagcaatcactcttctcacaaaaagtaggtttcgccaaccttattttttttccttttgagtactaaatactgttttacgtaggacaatcttggtggtcgttcaaatgagttaattttaggagatctatgtaagacgatctttttggtctttaaattagttgattttgggagttatgtaaggataaattagttgatttaatttatttttgtagggaaaacagagctttcttcacttataaaggaggaggcaaaggtgaagaaaatgagtaaaagctgtgggcctgatactccatatggttatttgttagatgcttacaaagaagcagctggcacatatggatattttccgactactttgagactatccatattgatccctaaaaacggtcactaaataaaatggtcgcaataacgtctcatatttgtgacggtttttgagactgacttatgtggtcgtatattagcgatggtttagagatacatattagtaatcatatattgagactaaattgtgacagtatctaaaatcgtatattagcgacttcttagtgaaaaactattaaaatttttttgaaaaaattaactaacaaatagaaaaaataaaaacaaataaggaaatatgaaataaatataattttctatttttaaaaatcataacaaacacataaatacaataacatatatcaattgatttattaaatattgatatcgacattgatggagcgatggagcgacgataggcgtggggcaacaaaaccatggcggtggcagagggtctgggatgtgatggtgtcaagaggttttgaggtgcgccagtggacgattcaagttgacatgtgttggtggtgaatttgtggagactttcagatgttgtactggtggcgctagttcttcagatttgcaatcatctataacaaattgattcttcata

SEQ ID NO: 45041 - DNA, 585 bp, Arabidopsis thaliana columbia
atcaccaactatgtcaatctaaaccgtaaacgtataggggaacacatcaaaataaaaattgtccctcatctcactcgactcaccacagaatatgcaagatttaaaacagccacattctctcgtctagcaccattggagaaacggtattttattgcgagccaagagataaaagcaagctttggaacttcttgggagaaccagattactcgcgaccaacttacctttactctgcggcttcgtattttctcccgtgaaatagtgtcggtaagcgtctgttccatgcttccacgttactctgtcattaccaacatgtgggttaggtaaaaggagaggccatgatcttgtgacaagattcttgtctatgattctcgtcagttgcaaatttctgcctcgacgaaactgccaagtattattcacaacctctattaccatagcatctctcctcagcccaacaatatcaggaggatttagaggcatcgttgcgtttcaaagttaacatcccaatttggaagaagtttaggaagaattttttagaaataagttggaacgtagcactttttcacaaataatttgcaaagtaggtag

SEQ ID NO: 45042 - DNA, 540 bp, Arabidopsis thaliana columbia
gacagtcaacaagatgtcccatcaactaagaagctaaagaaaaccattcagttcaaaccactggcttctgacaagaaaacaaaccaagatgcaacaaagagatcaagtcttgcacctttaaatccagtaagagaccaatgtcgagttcccatcaatgccaaaccagctatagttcaacaagaaaagaagacgggtccatctgcaatggtagttgagccaacaatgctggtcatgatgtttcctcctggtgaatctctcccttccattgatctgcttaaggcgaggtttggacgctttggacagttggatcaatcagccatcagagtttcctggaaatcctcgatctgccgtgttggcttcctgtataaactcgatgcgcagactgccttaagatatgtatcaggaagcaaatctctctttggcaatgtgaatgtgacatactttctccgtgacatgaaagcttcttctgcatccggagatcatgaactgaagaaagccaagaggcccaagacagacaaacccatcactaaaccattgaac

SEQ ID NO: 45043 - DNA, 480 bp, Arabidopsis thaliana columbia
gttgttttcagtcgaataaactaacacgtcgacctaatcgtgtacctacgtgtttttgtttttgaccaaaataatgtatatattacatggactaatttaaatatgagtctacaaattacattacaattaatttaacggaaaattaataattagggttcataaaataaaaaaaaaaacaaaagatagattgaaataagaaaatacagccgatgattatgaatttaagcgaatattctaaataattcagctgttatacaaattttacctacgaaaagcattgtcgactgttttagaacaaattattctaaattaatattaaatcaactcacataaaaaattaatagacgctcgaacaagttaaatattttaagaaatcaaataagaaaatgtaattttttggatttaaaatagatcaaacccaaaataatatgaatcaacttaagaaaacataaagtcgaacgtcaaaaccaatataatatg

SEQ ID NO: 45044 - DNA, 498 bp, Arabidopsis thaliana columbia
gtcttgactgacctaatttgacttttgtattcttggggagataagtgtttggattttttgttaattgttctttggtgtgaatctggaatgattcctctttgatgttgtgcaggggatatatacctaaagtttaacattagaatcaaagagggtagtttttacttataacgttgcattggtacatgtgggaaaattgtggagctaggtttagtggatttttttttctttaacttgaatgatcttgttgaaggtttctgggggtttgcctaacctggagatgtttgatgaatgggtggactgtggtgtaattggtggaaattctcgtctggtgtatagagggtgcatcggcgattttgtttgttgatttattgcatgtttttattggaaatggcctcaaatctcaaaaactggtgtttggaagttccttaagtaatgatggccttgattttctggcaacaatttacgcagagtacgagatgtggatatgaagcgtgatta

SEQ ID NO: 45045 - DNA, 355 bp, Arabidopsis thaliana columbia
cttaaagaaatatgtttgtagatagattatctagaacttagtgataattatcgtggacgtattcatgttttagaagcaggcttttgagtttctcacttaattcatagttctgtttttctttattgagctgaaatttttatagttgattcttctattattggtactacaaaagtataaataactacgaagagtcgatggggagaaaagggccaaatttagtggtacctacattaatataaaattcaataatgttaggtaaagtgacatatctcactttatcccaatcactttcgggacccacacttttttaaatatttgttattcaattgttcatactacaagcccaagcctcttc

SEQ ID NO: 45046 - DNA, 549 bp, Arabidopsis thaliana columbia
  unsure (1)..(549): unsure at all n locations
cccccatctggaaagaattgattgaatgggaaaggaaattagttgtacctagacctgaagatctatcaacgtcatcgcttagtggagttcaggaagacaaatctgtgtcaacttctctaggtactgcttaagaatcgtttgattcctccagtcctgtccaaatctcaacatgtctgacaaggtttagctttaggatttgcgcagacagttttggtcgtgttaaaggaatcagtgaggcggcgaacttcacttcatagcatttatcaggtatgagcttaaacttgttttttctctgaagctatgtgttttcttctgaacaccttcgtattggcataaacagggagataaagaagctgtcccagtagctgttcttttctctggtggattggattcgatgattcttgctgcgctgttgcatcagtgccttgatccaaaatgtaaccattccccncacactgtttctgtctcggccaacaattctgaaactaatcaaaagaagtaatatctatttcttcagatgaagttgacgccttaatgtcagttttgatg

SEQ ID NO: 45047 - DNA, 278 bp, Arabidopsis thaliana columbia
atgagaattacctcaagtccactctctaactcgctagcccgataccaagtgcagtcactcccactcctatcaatataacatccttcctcgtgtaaccaaacggcgtcgtctataaccaccttatctcaccacacagtttgcgtcaggactactacgacgatagactacgatgtaacttcctagagatggagtgcagaccttggtttttgaagcagaatcgtcttcagtgtcagtagagtttgacctaactccacatctcattctccgtctctctcccc

SEQ ID NO: 45048 - DNA, 460 bp, Arabidopsis thaliana columbia
ccctggtaaaccagggctagaaaaatgaaccaaattagaaaaagtggttcggttcaagtttaccatggtttcggtttgtttggttagaaccgaagactttttagattctcagtgtaatttcactttcagcttcacacatccactcatcatcattgatcgagatctctccggcgacaaaaacacagcgagcgactgacgaaaattaaacacttcgccgtcacagacactctctctatatatataatctccggcgatggagagtttcgctcttcactctctctccaccaccgccacttccaccttactctcccatcatcatcatcaccatccctcacgtctctctcttctccgtcgtacctcttcgagatctccgccttcaacaatctccctccgatctctctccgttcaacctctctccttccctcttctcaaaccaattcctcgattctccacacgaatc

SEQ ID NO: 45049 - DNA, 566 bp, Arabidopsis thaliana columbia
tttttatataataaaacgcaggtgatcctaaaagttttcaaagcccaaagactaattgtaagatccgataaattactcgaattttggtgactaatgttacttaaacccaaatagtggaattaacactctttaccagtagaccaaagcaacttggtttaatttattttcttcaatttaccagatcatgatgccgtttaggaccattggactagtccatgctgagtgaaaataattcactcaaaagaataccgtaaatcagaattttccacgtttatcaaataactgactaaaaagcacacataacaaaattttcatgcatcaacttgtactaaaatttatagaaaactggcgtatattggtaaataaatagcagaaacaaaagtggaaaagttttgtggcgccacttgcgaagtgaactttggagctggagcacagctggacacgagcagtggggctgcagctgctaagtgctgacccaaattggggtccaacctttcctcttataacggtccaatatatattaccgttatgttcatacaatatagtaatttatatatatatatata

SEQ ID NO: 45050 - DNA, 608 bp, Arabidopsis thaliana columbia
cctctgtcttgtttccctttcatacaaaattttaaacaaacactagaaattaatcgatctgattatcttcacaacataaaattgtttaacacaaatggaattttcaaagcacagtagacattatttggaccaatcaaaacgagattttctattaagaaccgaccaaaaccaattgagaaaaaaccccatggaagtaattcgagagattctcaaattaccttactttcaaacgagacctttctatggcgcacaggaaaattagtgtccaagctttccattctcagtctttgctactctcttttatgcttttgcttttcttcttctccttattctttttttacctcagaactccgacgagagaagagaaccggaaacgccttcgtctccactcaaacggcatcgttgtgagataagctcagaaattattaagcctacctaagaagtccactaactgttgataaaaaggcccattgataaattccttttttcttcattattattttttgcaacgaatttggagttttactccaacagaaaaaaggattaaatatattagaaaccgaatattttgactttgctaagaaacaaaaatgaacatgttcacatgt

SEQ ID NO: 45051 - DNA, 521 bp, Arabidopsis thaliana columbia
tgagtctttttatggtttacatgattctttgtctatgattgtttagggtactacatatgtctacgagtccttctttaggccatatctctcacagcatgagaatgacatagaccatagtttgctcgagctaaggactagagcaggagatatggctgttatatactggcaacgagttgcaagttatggtcagaccagaatccttgagattttgcagtatgttgctgcacaatcaactccaagaccgcagccacctcaggtatatttaataatctgcaatgagtatcgttacttgctgcatttttccttgagaaccagtcaatacatctatgatacaatatctaattgaatatgcatttaatgttctgtcatatttgtattcgtttgtgattcagaaacgtggaggtagagctaatcaagctcctgcgaacgctaagaaagcccctgtcccccaatcagaacctgaagaagtatcattgtcctcgtcttctagctcatcttcaagtgaaaatgaaggtaatgag

SEQ ID NO: 45052 - DNA, 581 bp, Arabidopsis thaliana columbia
cagttcagatgcttaacggttcccatgtcatttcactcaacatcatcgtgagtttctgaatgggttagcttcataaccttgaagaagagtcgaaaatcgttgccaactgtgacatcatgagccattacaagcaagtgattgagttttatacggaaagaagctgcagcactattcaccatttcctctgatagaacaagctctggcaacgaatgcaactgtctgcttataaagagataacaggtagaaatcatcactaatcagtcacataacagcaaagaattaagaaaaagaagactagtgaaaagtagagcgcacctattcctaaaagcagaaacccgggcatgaacgaatgatatcatgatcacgatgagtaagacatccgaagaaacagataagaaaggcaacccggaaaactcgaatataagccaggctacagttgatataatgataaccccaaagaaagatgtcgctcctccataagagcaagtcagcagctacatcaaagaacaaagccatacaaaaatcacaaacagtagctttttgctggacctatgaactcatcatgcgtatccagagatttg

SEQ ID NO: 45053 - DNA, 639 bp, Arabidopsis thaliana columbia
taataaataaatgaataatgttttatattatgcttccattcgaggaaatcactcaatctatagtgtgaatacaatttccattatttatgtttatagtatacatagtcccaccgacgaatgagttattttccaaacattaaatcataaattatttcatccaagtttatcaattatccacaaaatatcattgcaatcccccccaaaaaacaaaaccaatcaagtttagcgctttgttaaaacgccatgatatatgatcaagcttggtataaaaaacctgatcatatatcctatgaacaattctttgtttttaattattcccttacaacaaattcctttcacacgtatactatagtgtataatttaacttaaaacgatttctatttttattttctaacttcagaagctaccattattgttgaactgttgttgctgctgtaagaaccagaattcttcatcagtttctccaatgttccataaactgtctgaagaagaagcagcaccattaatgttttcaaacagctgaggttctctgctcttgcatagccgttagatcttcgtctaataaccactatagtcgagataattatcaggtaataattgtgaactcctaaattctgatctggataatactattcccat

SEQ ID NO: 45054 - DNA, 454 bp, Arabidopsis thaliana columbia
cgccagtgtgcagtgtgctctaaagtcaacaggcaaggtcaagccgcaaataccaggagttgctgtctcggccgagaacgccgtcaagcagcaggactgcacggaatacattgttcttcaaaaactccgatggatgggtgaagacgagagttggcgcatttggggtcatgccaccccaacatctgtcgacgatctcagcagtcctttctttgccaccggaatgtcattcgacgatcgccatgaggcgatgaaagacgcagcaatgggattgaggaagtaatcctgctaggcctgttttcccaactcatggccctaggggaagattgcgagcttccgacgaaaacggtatattgtcagatcatagtgagctatcccactacaacgcgacataggactgttcatatgaaacctatgtttcctggatatccgggacataacggacttcgaaacgttg

SEQ ID NO: 45055 - DNA, 382 bp, Arabidopsis thaliana columbia
agagaatatggttcactcaagctttaagctccattggcgaacatcagccattagacaactctatagtgcctggtatcaagcatcaagagtataccaatggcagcttggatcatcattccttaaacacagcagagccgatgagtaacggtttcatctcacaggaaggatcaggaaaaaacgaaacaccaatgccgtcagagcttatcacctcgtgtgttgcatcttggctcatgatgcaggtaaaggaaataattttgtcttggactaacgaaagtgtaatcgaaatcaagaataccaaagttttcacttgatgcggttttgatgagaactctttgtgtgttattacctgcagatgatctcgaaagaagcagtacccaccagc

SEQ ID NO: 45056 - DNA, 580 bp, Arabidopsis thaliana columbia
ctgattgtgatccacgtatgagatattcttgtgtctcgggatcttatatatgtttgaatggtttttgtacttgtacgtagtacagtatattattataaacaaatgcttatttattgcttttatcatcgtaggaaggttttttcaaggatgataataaaatctatttagaaaacgtttcaatagagtttgtgtttatgttgatgtttagaaagataaagactagtagtttttatttttgggtcaacacagaaaaaatagtttatggaatcatttttgacattctagttcgtctatatggactgccaaaacggccattatcgttaatattgtttaaaacatttcatgaatgacttatttcaccttcatacttttaggtgctattttgcatgatacatagataatagattaaaaatcatgataaattgtgaattacatattattattttttaaacaaaaattatttcaggataaaataaacaatggtagccccaaactggacagacccaagctgaggttgccaacctcacaacctagcgaggcagccctcccacgatccctgtagacgttgtcttcatcagta

SEQ ID NO: 45057 - DNA, 561 bp, Arabidopsis thaliana columbia
aatagctttggttggactgtttcatatcggtcgaatacagattatggaatcgtcttaataatttgcttttcatattgcttgcagccgatatcatggcttctgaaaataatgatgatgatattggtggtgggtctaatgaaagtggtgaagctccattatggacttacatgaccaagaaaacaaaacaaggagcaaaaggaagatcttggtcttttaagtgtaacatatgtggtgaaccaagagcggctcttattcgagagtgagagcaaatttgcttggaataaaaaatgcgggtattgctccttgtaagaaagtaactaggtgtgaaaggctcaatatgcaaaggttagaagacgagtttgagaagaagaaaagcgagtctggagctagagcggttcctttgccttgggaaacaagttctgtagcttcttctgcctttaagaagagaaagtctagcatctcccctgcttgaaagagcatttggtattgaggtcagagatcagttggatcaggaaattgcaagaatgttttcacaggaggactccatttaatcttgcagga

SEQ ID NO: 45058 - DNA, 900 bp, Arabidopsis thaliana columbia
tataaagatgatagtttatgattttaagactcacctcccagagctcaaatgggacagcatactcattatacaactgtgttacacttttaagttccgaggagacctccatggccatttcatttgctgcatttgctaagttggtatcatcactagaatcaccatccagtacttgcccgttctggtcagagtcctgcatggcaaccgaggactcaaaattggaagctatagcttcaagtttgtccctgatcttaatttggaactgaagaactgcgagttttccttcaagcagatcaagcaatccactgtcagaaacaccttgagcagaacctactaaaccatcgctattactcgcattcttggcctgtaaaactgcttgacttaggtcgtctcgcctaaattcacaaggcagcaacccattagagatgaaaaaggaagggagagtagaagaaacaagtaatgtgacttagggaaacattcaacatttaatttagggatatattcaacacataacataaaagaatgtttaccttcgttcaagggtaggactgtcccctaaactaatagcacgtctctctgcaagccttagaaacacgtgagcagcaagcacatgttgtctctttgacacatagtattttgcaagaagatcaaaatattttgcttgatctgatgaaatctgtgttcctgagtgacccagcggagatgatccagtagatacagccccgacctatggcataaggagacaaatgtgagtattcctataaagtagttgcagtgtctaccactaaacctgacttattttttgtttcgcagttggtggcagactgaggctgctagtttttagctatggaggttatttcagtataacaagtagacaaattcctgaacatttaaggttatgcc

SEQ ID NO: 45059 - DNA, 795 bp, Arabidopsis thaliana columbia
cttcatggatctgtactgtgctgcggagaggatgagtatcaacgacgaaccataccatagtggcagaggacttctcggatctcccgcaaaactttccgctaccgtcaaaaaccactctaacaacggcaccggttactacaacaatcatcaatctctccaataccagaagctacaagctatccaggtaatcaatcacaagcaaaactctcttaaacacttgatctttgagtttttgtgtgcgattgtgctgattggtttgttttcatttgtcttcttgtgcagtttcagcagctaaagcagcaacagttaatgaaacatcgtcgccaattggtgcgtcagaacagaggagtaagagttaatggcaacaaaaatgttggtccagtggatttgtcgtcttctgcatggtctaatcagtttccgaggcgtgatgttatgagagctgtattcatcggggaccataccggaaaacgtggctcaaccggaaccggtgtcttcttacctcgaagtgttaaccatacttcaagaactgagactcgagagaagcctagtaagttcctaaaaagctcaattccccaaatgtcaatctttggtatattttagttttatgatgagaactgtttttactcttgggtttagctatatcgacggttttggttccggctagactggctcaggtcctgaatctgaatttaggcgaaccggtccggtctacggctactctcaacggtatccagattaacacaacctcgagagcttatttaagttaattgagcggtcaattttatcacagttggt

SEQ ID NO: 45060 - DNA, 220 bp, Arabidopsis thaliana columbia
taggaatttacacagtcaattatgtttttatagtaagaaaattggaagatgttccaaagcaaaaattgtagattaattaagaaattatttatcaacttgagtacctgtaagacggacaagaaagcagcgcgattatcattgggtaagtcaacattaagtttaatggcgatgttaagcatgactaaacaccaagagtggcagtcatgcaccatcatggatg

SEQ ID NO: 45061 - DNA, 559 bp, Arabidopsis thaliana columbia
gttgatgttattcaggatccaacatgtataccaccaaagtttccgattgatttacatttttgtttcataaacataatgttctatgaaacataaggatccaacatgaatttaatgtctcatgtgccagttgatctgattatgtttccgggtgtaattcaccaaacatgcatattaaagcaacaaagatcagttttatattaaacacaagtttactcctcctaatcaccaaatctaaaagtagattagtaccaaattaatcttacgttttgggataagaaactaatctttcgttttctgtaacaatcatgtttccatcgcatgttgagggtgaagcatcagtgttcgttaagagagaaatagatgtatatatgttttgcaaaatcaaatgaaaattaaaaagacaggtcaaatactcaaaatgataatagtatgaagctttctgtttgagagaagtaaaggctaaggaatctcatacacacatatatgtatacggcaccaaccattgccattaccaatccattttatttacatcatcttactacatatatatatatatgta

SEQ ID NO: 45062 - DNA, 464 bp, Arabidopsis thaliana columbia
ggcttcagaacattaagggcaacaaaccaggtttttgtttctactacttatgacttatctgtctataggattgtgtgtccatgtctagaggtttaatccaattccagacatactcttgttttgtctgctgattctgctatagatccattttcattatttcatacaaaggtctgcttcaatgttgagtatgagaaaaaaaaaagtttactttgtatggttagataaggatgcagctgataagaggaagctagtgagcaaatggcacccaacgacaaagggaacacttagaaggaactacaggataccttcgaaagccgaagaaaccgtttgcttaaagccattgcgtctcttctctcagatgatgatcattttagagatgcaacatctcacaaggtaacataacaagtctatagttaacacttaacagtccttgtgaaaatacctaactgagacactattgcagg

SEQ ID NO: 45063 - DNA, 485 bp, Arabidopsis thaliana columbia
atatctttctgatttgcgagttttaatgctttgtgtttgtaataactactgagctcatgttggattttgataggtgtctgcaacatacataattgaacttcataggtttatatgtcaatacgagtaatgcaagcagtttgtttgtcctgattcttagtggcgcacgcaagtatgtgtttctgctgtaaatatggacgtataatgatatgtaggcttttaggtgggcattttgttagctgctatttgctcataaaggacctactgacatttcttctagtttttctttagttcatcactcatttcggccttatggttaaagaattattcctctctttcttttgtactgagtactcgtggttccttgtctcctttatacgttatttcttatatgattttgtgtattgggtgttagttaatgaagatttatcctgggttgtgcttttgtttcagggtggagactcgaggttcgatggcagtgaacgtgt

SEQ ID NO: 45064 - DNA, 551 bp, Arabidopsis thaliana columbia
tacgtcgctactagctttttcacctggggaagccaacacaaacatattatctttggggagaatcccaaaaaaaggaaagttgaaaaagagtaatcttttaattttgatttcttaagactcttaaatacttggaactgattgctaactgacaaccaaattatggattttaagatctattatcgatcaaagactcatagttatacgtactaatcaacctacctaacctacctacctcaaataccattgtaagctaaaaaggatgaatcatcgagttaggctctcatttgtcattaagcttcttctttgtttcactagtcattaagcgttgcacattatacgcaactttcattaaatgcagacttcgataaatccggtactaaagactatagagtgtgacaaaaaaaaaaaagagtacaagagtgaaatctcataaaataatacaaagacaaacaaaaattcccaaaacaaacaatttggaaagaaaggtcactgaataatgaaaaaggaaaatgccatctgcacatcatgcaaccattaaaagaaatttttta

SEQ ID NO: 45065 - DNA, 524 bp, Arabidopsis thaliana columbia
tttaattaaaatttgaatttacgacgagatttcaatttggggtttagaaacagtgtttttctcaggatctctacttgtgaagttttcgcttgtgttttcttagtgttttctccttgtgttgtgttgtagtttttggggatttatgtagatttcaatttctttttttttttgtattttcggtaagttttatcaactttttttgaaaatcgtataaatacttaagagtgatactcattttttttttgaattccttttatatgctgagagcttttttttaattttgaattattattatttaacatctgacattttaattttataatcagtaattgcatgaatatgaggcattattgttactgtaccatatcgcatgcggcccattttaagcccaaatcaaggaataacttttgaaggacatttaaagttgacccacaaaaaataactttcatcttcaatttcgaatcgataaccctaatttctcacagacgagcaagagaaagagccaaagccgtttcttcaggtaa

SEQ ID NO: 45066 - DNA, 493 bp, Arabidopsis thaliana columbia
caagaatttaaccatcgacgaataatttggtcagtctcgtctagtgtccaattgatagacatatcttagcatttatgattacaacgagatagatcttgacctctatattaaaattcatcattcatgtatattacgactaaattgatcttaagaagttcacatacatagttatgtttggcttttgaacaacagctgagatgctattgaattcctagggatagctttcaactgctccataatcgtctatttatcttctaagttagatctaagagagattgtcttcgtcttattagttaccaaatctagattacctgcaatagtgcggatgatcacctaacaaagaaaaaaaaaaaaaaaaaaagtaatttgatgggctagacttttaagtaaaaggccttaggagagttgggccaatctttgactaagccccaagagtcataagacatccaaaaaagttcctaatgcatttgttaattgggaaaaatgtcattaa

SEQ ID NO: 45067 - DNA, 609 bp, Arabidopsis thaliana columbia
  unsure (1)..(609): unsure at all n locations
gggcggggaaaagctacaaatttactaaatagtaaagcccaacttcaaagggtctttggtgagcctagcccaattgatacagttgacctgttcagtataacgatttgatctcggttactctctcattaccattacggcattactcattaggcttttgaatttatttattcattaaggagtcaacttgtaaactcgtgaagaattaaaacaaaaaaactcacgtactattgaccagtcactgacgtggattgataatccaattgtcaactaaaattcagtattccaataatgcaacataacaaccagtctgacagtataccggattataccgaatttgtgttagatcggattggtgggaccataacaacccataactcgcacgtgctggccagctaatatttttaccacattttctttaagaaactttaaaaggcaatctaaaaattgaaaagaaaaagatgaaaaaaagagagagaggaagaagatacgatcacatggccaatgagtaaagtcatggcctaaactagagctcttggtggttggtacttagagaggcctggatctttgtcacagaagcagaatatgtnattttgatgttaatgcctggta

SEQ ID NO: 45068 - DNA, 465 bp, Arabidopsis thaliana columbia
cgccatccgccagtgtgctctaaagtgaaagagaacacagaatttgtccacattcagaaaaggctacgaacaagatacttatattggtgacatactgaccaatcacagaaagaagcagccatatatggctaatatgtgatcggctaattgggcacctttgttatgttacacagttacgaaaaaaaaacttgaaccaaagatatagttgatgatccataaccaaaaactgggttaaatcctgttctagtgttgaaacgaatcaccaacgacattgctataggtgtgcttactgaccattcacacgaacagtagccataaagctaacatgtgactggctaattaccaccctaatcaaaacaggacatgataacaacgaatcctaacaaactaaaatgcgaagttgaagattttagcatgagctctaattcgttccaagatgatatcgcgtgttgaacgcattgtgag

SEQ ID NO: 45069 - DNA, 511 bp, Arabidopsis thaliana columbia
aaaactctattgggttataggtttgttaaaaatgtagtgggcttagatgtagttttgtatagggttgaccaaatattttttggttagattttggatttccatagatattcggtttgttcagttatacataatattcaatggatagtgtgactgaaatccgttcgaggatatttagtattatctagaaccgaaccggattcctttttcggtttggcttggttcggttcttcggttccggtttttatgcctaagccgttctaacttctatggttaattgaagaatgtgaaatggtggttaatattcaagaaattttaggaagccgaagtactaaatttagatactgaagaaaagaagaagaagcataagaagaggcctaaatgcccagagaattaaacaaatgggcctttaacaatatttttaacaatcagatctcaaaaagctaaagccttaatatataaacaaacatcaatctctggccgtcaaaggttacatctatcgccgccgctgaga

SEQ ID NO: 45070 - DNA, 323 bp, Arabidopsis thaliana columbia
ctgactctatagcctcaaggtttcgatatatttcggagtcacgtaattgtacttgtagtgatgtgtattcattaatctgctttctcttttcgatcttggtggaattttgtaggtttatttcagcttattctgtattcttgctgcgtctgcgtttggagcttatcttcacatgctcttgaatatctgtggaaccattattaagcagtgatgggtattaagtttattggagcatgtgttgtctagtcctccatataaacttgttcgtgttgtgtctatttagtcatctttatcttaagttattgtcatgattctttgacgctaat

SEQ ID NO: 45071 - DNA, 456 bp, Arabidopsis thaliana columbia
catctttcaaaggttcgattgtagtaactaaatgacgattgaattattaactcttcaaattgctcattttttaaattccataattcaattctctcttcataatttaaattatgtacaccatgtgatcgcaattggcatatacggaaagccagaaatttttaaacatgaaacaaaattaaactaatgagaaagaaagtaattcaatagtactagtacattctgacattacaaacatataataaaacataaaacataaagacaactaaaaggcacaagctagcgttatgaaattagttctcagatgctgaatcactttgatgagtttcgtttaaatttagtcctccttcagatccctaaatgttgaataatcctcctcgtcgtcgtggtcgtgatgtccttgttgtagaagaataattcgtgaaacaaattctggtgataccctctaaccacatgttc

SEQ ID NO: 45072 - DNA, 545 bp, Arabidopsis thaliana columbia
gcaaagtatgaagttcttactctgggaggagatttcaagtggtatatctttttatgatgactcaaatagaccatgtatatgtgttttcagtatctttgacattttggcttatggtattttcttcttcttttccaatttgtatttattctatcactcattgtaatcttgaaacttttatattcgttgacttcgtaagcagaagacttagacaccattcatacgcttacaaactaaaacgcaggttcctctctctttctttcacgcgcaattatttagtttttccacaagaaaataattacatttcattagcaaaattgtgtgaactcatcttcatacacttgaagataagaggtgacgtactcgtaaagacatgacaggactaggactaaaaataaaaactctggataattcgaaggcaatggatatatcaactcaagagtcaactggcccataggcaccttttcattatcttttcctgtcacgactgagtcagagcctattgaacaaatgttacggtaacaacatgtaagggcgttaatgttgtg

SEQ ID NO: 45073 - DNA, 507 bp, Arabidopsis thaliana columbia
cgataaattatagatttcattcatgggcacatctttagcgtaaaccagccataaaaagaattctatatcattttagttctctatagtttcatgatcttggactcttggtcgctagttctttaacaaaaaaaaaaaaatcttggtcgctaataaccgggaaatataaaaaggaatctcaaccggaaagtaccgataattttaagtaaccggttcaaagcatttttgggcctttataatgggccgagaatccataccaccatacgacgtgttcgaaacgcgccgatgacacaaaaagccaataaattctcggagggaaattagtgacaaatccctaaacttcaacggacaccacaaaatccccaaatcgagagagcggttaaagaaacttcgactttgatctcttttcttgaagggatcggcaagagatggcgttggacggtgacgaaacagtcgcaggtggagattctaaccaccggtgactactgcagcggcgactacagaggagaa

SEQ ID NO: 45074 - DNA, 511 bp, Arabidopsis thaliana columbia
tgattccttaacatttgattccaacagagctcgattttgcagactgtgatggagcttcagataacaggacttattcgcatgccttcaaaaagacgtccagattttgtgcaaagagtggcttttggttcttaagaatagtttcaatactttattccattgtaagtgtactttaatcaatatgtgttctgtgttcataacctgtttccatgaatctattcagagtcatccgtttatagagaatagaactggcgttaaaaagaaaaaaaaaacactgaattatcttaatataaacagaatcgtaaaactcatctttcatgaatctgctaagacgtagctgagacttgtcaacacacgttagctcttaaccctttctttttccatagttgaagtttcaaaaccatgggaaagtctttctgtgtaaacattttcaagtctcctccctaaagaacctgtgacttgcgaagtctttagaatccccagctttgagttttggctacctctgcccttattt

SEQ ID NO: 45075 - DNA, 559 bp, Arabidopsis thaliana columbia
  unsure (1)..(559): unsure at all n locations
taaacaagatgccattaatatgtaagctgctctatgtcactctctcgtatatatccatgttacgcgatgatctcttagagtcttacagaaattctttgggcctttgtgaatttctatatgcagatttcttggtactttccggcctgaacaagggagccaggcggtttgggagttgcgttcagattcccactctaatggacgaagtggagagataagcatgggggaagatgaaaagtaggttctgtgactgctaacttggatttcataaattcaacaataatatgcctatataattagttgctgtcatgtaggtagaaaggttttgaggtttccattttcttctttagacatattttgatgatttatgagtcacatgagttctaatatcttatacctatttgctatgcattaagtttacgaatttgaaaaatataggctctacatatctcgacattatccattcactggaattttattctccaccataacttccagtttagatcctcanaactgttgtgacctaatcatacgaaataacataggatttagatcaaggagg

SEQ ID NO: 45076 - DNA, 449 bp, Arabidopsis thaliana columbia
gtcatttgtcaaatcagattctcctagtattggccgtggaagaggatccgttggatcagacaccgtttcacctttcgctgctgaacctcctcgccaatcgccgcctccaccgcagcaacaacagtctcaatcgcagcaacagcgttcacaaccacaacagcagcagccgcgttcgcaaccacagcagcagcctaatgatgaatctcagggaagtcctgtatttgtgaagctgcaggagatgcaggacgcaacttcgtctccaccaccaccagagtctagacctggtcaagctgatccacctgataacatattccatgcattaggcaacgaattttcacatcctagtggagcaggtcgaggctagcctcttgtggaatctgctccaatccgacaagaagattaccggcaaattcgacgctcttcgcctccgacgcagcagcagagagtac

SEQ ID NO: 45077 - DNA, 349 bp, Arabidopsis thaliana columbia
tcatttggtgttcggatggtgtattgatacaatgagatccatgtgcgattttgtatccatatgtggaatttaggactattgtttaagattattcactacagtctactactagtatttttgtgatgtaaaatgcattcaccctaggtccctatgcattcaccctagatatatctttggctgtgaatgatatactattcattcaatgttcgtaggaaactcgaaaagcatgttcttttgaacaaaatactctgtcatgtcacattagttacttcaccagttctagacatgattatactgataatctgtttggttatatcaccttcgttgatagaatagtccttttgacacg

SEQ ID NO: 45078 - DNA, 364 bp, Arabidopsis thaliana columbia
ggtaggtccatcaataagttttgaattcatttcggcatatgaataatgagccatactggatatcaaagtctattcaattaaacatgctttaagtagaaacaggagtaatatgtagaacaatgtgcttcaaatatttatgaggtaatgaatgggaatgatgatacactcgtcgttctgtcaaccaatattttttgaataatttgcagtttcttcaaacttagaagatgacaagttaccagacgaatatggttgccatggcttatagccaaagactcgcatctgtacctgtttgttctacgttatagttttctagatgattaaattttgggtagtacgataagattctacatagaatcacagttgt

SEQ ID NO: 45079 - DNA, 325 bp, Arabidopsis thaliana columbia
gcttaggctcctgagaaattgtgaaatagtgtctttagcaaaagaattacagaatctcattttttggttggaaaattatgatattgtgattatattgaagaaattgatgataaaggtgatgatgattatatggtgatcatgatgatattaataaagctaatgatgatgttaagtatgataatttatggtttaatatggtgaaccataaaccattacaacttactccaaacgatccactaactcactgacccatcaactcattatgatctaaatagtagaattattagggttgatgaattagattagatcaaaattgacacatata

SEQ ID NO: 45080 - DNA, 624 bp, Arabidopsis thaliana columbia
tggaatatatattggaaaggtcgcttgaagactacattatgttcttatattattacatgcttttctacattaaaatgtatctagtattttgttccggctaatctcctaaagtaaaatatactttttgttttggtcaatttacttaatgcctaattgatcagaatttattattccggcggtttgtatttcattgatgtgttacgtgtactagttaatactgattttctcttattttatccattcaaatatgagatgatatatattgttaaaaaaacaataactaacgtttaatttcttaaaagctctaacaacatcataagtcataacgcaaacgtcaaagagaataattaaaaatagttatcaactatctaactctatattaaggaagagagacgatcacgaaaagtaagtaagtgacttgtatatatataagtgagatctaaaaaatccataacggtatttggaatttcaccagttttgttctcctctctcttcgttgcctcacttctgtatctccctcttttggtccttctagaaactctcttaagattctcataattttacagtctggattttattttgttaccaatttgttttttttcaagaacgcgtatcaaattttga

SEQ ID NO: 45081 - DNA, 589 bp, Arabidopsis thaliana columbia
atcctacttcaggccatcgacatactccttctcttgtacgcaatggacacaacgcttcacaaactcgccctttcgggtttccagatgtattttcttcaggcattagtgagattgatacagaaacatctgagttgttcccgtgtctgtttcgtctcctaggggttattctccagagagctccttgggtcatcttcgacatcagatgtggtgaagttaatcttgcacccgagtgattgtactgctcgggttaaagctgcatattccttggtagctcgatttgctgattctctagctacccaactcaaatgcctttctcttagcaactctgcacttaatgactccattgcgaaagatatctcgtccactcttctttctgctgcttctttctcctgtttcaaatcaattagaatgttaaaaactttgatacattatagagccatagagagcaggtaagggagattagttaattaagttaccttttgcatttcggaatatttcctgtcatggctctacattggactccaatatctgcagctttagcttcctcaggacaagccaccggagatggaactggggccaaagggtagga

SEQ ID NO: 45082 - DNA, 561 bp, Arabidopsis thaliana columbia
tgctccaatggcaccgcagtgtctagttttcccttcacaacccaaaggtaatactggtctaacaacatatgtaacttttccctggaggaaaccaaggcttcattagaatgcacacaacaaaagcagaaagacactaagaaatggaaatcctggacaatagaacatgcacttgctttatcaagacagtgaaagaaaaacaattgagccccatacaagaggatttctcaaactcatgcttcgtgctcgaggtaaagccttccatttctaccctaatagcaaaatacgttttttcaacaatgaaggacaaatttctcaggtaaaaagagatacctccttggctgctttacaagcgacaggtgaaacttcctaaagcaatcagtcccaacagccccatagagaacagcaactgggcttccagctcttgaatcaaaatgaacatgatcgaagtcgaatagctcaggcccctgaacagcatctccaacactgacatccaacgaaatgcatcttagaaataaaaacaaattgtgatcttaccaaaacaaaacaagaagaagagacagt

SEQ ID NO: 45083 - DNA, 574 bp, Arabidopsis thaliana columbia
ttcttcacccattcctcttcctcctactgcaagaggaggatccatgtcgctcttcttctgtccttctttgactagtaatggaccggtttctggttccacgacttcagcattatcctttagatcgcctctatctttggctaaaccagcttcgtctatcttcttctgctccactctgtcttgaatctctccttcactaaccatgtctccaaccatctcattattctcatcctgcttgtttctcacgccatcatcaacatccagtttgattctttcatctccctctttcgtttttagcttaggctctgcttggtttctctgagcaacattcttctctattcttcttgcctcatcaccaacaactggttttgtaaatttatcttctttctttggtcccaagttaatccttcctccctccagcttctgacctatttcaccatcttcctttttctcaacaactttggcatgttccttggatgtcactctagcatctatggtcggcgttctgctaatctctttttccttcaccttctgtccagtcttaagctgacgtatatcagcgatcattctttctctc

SEQ ID NO: 45084 - DNA, 488 bp, Arabidopsis thaliana columbia
ggttcaaaaagcaattaattaagttcaaatatttgttcgagagataaaaatgtttgaatattatttcgtagactcacctgagaagtagtaatcatcgtcaaggattagataatcataaagatctcgatcaagaaccgaaaccggactcgcgttagacttattctccggcgactcactctcttttccgataaactcatcagcccgaatattctttgattctcctagaagcgcagtcttctccgacgacgacttactcttagatggagaaagaaaccaacgaactttcttggctccgttaacgtcatttcgattctcactcttcttcttcttcgcaactttcctcggctcatctttaaacttcttagcaactttctcgtactccttcttcttcggcgcacgaagtggcaatggcggcttctcggaatcttccacaaccttctcgaaccttttagacctcgagaaagacgatgatccgacaagttctctct

SEQ ID NO: 45085 - DNA, 497 bp, Arabidopsis thaliana columbia
agtaaaaaatgaaagaacatatcatacctttcatatttcttttttcaaaattatcattataaactgaaattgtccttccatagcttctcttttttgttctctgtccataacctacaaatctctttaaaccaacccaagacaatagtaaccaaacaaactaaaattggaccattggtagggaaagagagagcgacacttttgaaactgcccattagcttagaatgtaccatgaaactttgtcagcttagctacagataggcacagagagtacaattcataaaattttataagcttttttctccttcccaagagtatacatctcaaactagaaccaaaacaaagttaggatacagagatgaacacttttgatttatggatcgttgtaagcatttaatttgacaatatgagtaactatagttaaaaactcaagattatatgaaaattaaatgaatatttataatatttataagcttaatttaacattgaaagatgggggt

SEQ ID NO: 45086 - DNA, 492 bp, Arabidopsis thaliana columbia
caaatctacattcacattacacatagaactcaataaaattggtgatagaagtgacaagtttgaagtttgtagtaattaccagggcctaatgagattcctgatggctgagcaaatgatgtagtctgagggctgcatcaacacataaaatatagcataagtaaaggacacacgtcaagtaataagtaatttcaaaatctagtgtatacatacgtggaaccgttgaggtttctttcataaccatttccactgaaaactcgagtaataccatcaagcacactgtattcccaaatctggcgctgacctgccattgcaatgtataccttctcattcaccggctcaaagcatacgtcccaaggagaattcaaaagctgaaaatttcatagtccaacaatgttcttattctcgagaatattgcagattcaataaattaataattctacatatatctgaaaagaaacggcttgagttatgtgaaaagaaacctatgttttg

SEQ ID NO: 45087 - DNA, 633 bp, Arabidopsis thaliana columbia
taataattatcacgttgttttattacttgtatcattaacattttaaaaatggaagaagataagtaaaagttttgaagaggggacagaagaaactgttgcttaaccttatcctcatccacgcactctgcatgcaattctcaccttgtttttatttatttatagtttggtcttcaaacttttcttttttcacattttaaaccccataactgttagcatcatccttctatgtctaaggtttgtgttgattgtattttgatgagatatgcttggaacagtttagaatctttagatatatatcatgaaagaggttaatgttcttttattttcctacaaaaaaatattaaatataataactttgattggtagactattaaataaatgaaaaaatagataaaagaataaatataaaagagatcaaaagtgaaatcatattttttatataaaataaatgataagatttatctatatatttttaaatttaggagaaattgtttttttggtccttttttttaaaaaccataacaataatcttttttatttaacattttaatacaagagttttgtgactatttagagagatcgacaagtatgaggacccattagtaactatgccccgtaaatgaataatattac

SEQ ID NO: 45088 - DNA, 428 bp, Arabidopsis thaliana columbia
gagtagagctcataatactgctcgaatagctttcgggtgttctaaatgtcactttagtttctcttaatctacttgttacttcattgtccacatatgaaatagactaaagatcatcatcccatagcaaaaaatgtctttcatatcccaatttcttgtgtcataaaatgtctttcaaatcactaaagatcatgtaaatctacttggtttctcactgttcatagatggaaactgactacagatcttgatctaatagcaaacaatgtacttagaacagtatatatcataaaaagggatccacaattttttgtaaaaatcagatcttttgattagctcattaccgaaaagaaacgcaatacttcttttaaaaggatatttctcgtcctaggtaaccaaaagcagtggcgccacgagctaaattgtcgatgttg

SEQ ID NO: 45089 - DNA, 496 bp, Arabidopsis thaliana columbia
tccccatctactgggcctttattatataacatcacaaactaaacaaagcctcattgcaacgagtagaaaagtaaaataaaagaagagtacggagtggagagctagagagagtaggtaggtcataggtggatagggtagagagtcatgtaggctaataggttaagcatgtttatggaccgtccaggctcctcggctccgaccctatggtccgtctctttgtctttatgtcgcaggcttctctctgccacgtgcattcttttctctcctcatatttccttgttagggcacagcaacatgccaaattggacatattcaatccctctctctcccactatatgtattttctattcttgtttcattattgttatgttattaaatcttttgatgcttaattattaatcacgtcctacatttcagcgacgctaatcaaaggcaagaatgcaacatatgactagatgagtgatgagtccgattacaactctgataaatgacttcg

SEQ ID NO: 45090 - DNA, 551 bp, Arabidopsis thaliana columbia
cataagttcgcaagaaaacttctacactcttcacatactcagcaatagatgatagatacctggatgaacctgcaacatacaaaaaagttaaaatgaaagtcagatacatcaacaaaaaccagtactaatcgagttgtcattctcagtccagttttcagaattgtcttacatgatataatgctagaatctcatactcctgacctccttgctccttgctatcgtatcctcatcatcaccaaacttgaagataaatgtactagctattactgcaaacaccaaatgcaaaactttatttctgagactaataaaacctgagatatcaaactttgttgcactaaaagagtaacaatttcaactactagagctatgcattttactatttgtgctaagacaaaagaacagagttttaatcacagagaggcagaggaaacatacttgatcaagaccaaactccaagaaacgttgcaggttatgtcttgagtagacaaaataaatagagactagccatagagaatacttgtgatagaagaagagatctgcaaaagagaaga

SEQ ID NO: 45091 - DNA, 822 bp, Arabidopsis thaliana columbia
tcatcccctaaaaccaaaggcaaaaattgcatagatcagaaaatatttgttgcaactattgaaattatttttgttggttcgaaatttttacatatttatgttggttatgactcttatggaaatgataatgtgttttaaggaataaaattaaaattgattctgtttcatactaaaatatcaaacaaaaaaaaaaaatttgttttggcaaagaataaaggttttagtgtactctttctctgtggttaactttaaagttttggaagcatgtcggcgaagctggaaggagattctttacgtagtagataggccacaggtggtttcaatcttccccaacaaccagacgaaatcaaacataaatctgtaacagtcgaagaaactctcactctttaattgatcaatggcgtctcttcaaatcagtggctccgttaaattcgagccgttcgttggattcaaccggatccgccatttccgtccgatcgccagtctcggatttcctcgttttcgacggagattcagtatcggacggtcattgttgcttcgtcgttcttcttccttctccggtgactctcgtgagtctgatgaagagagatttatcacagacgcagagagagatggttctggctccgttcttggctttcagctcactcctcctggtaaatgtcgttaaactcgtgattgagttcttcatagtgtttcttccaatttcctcaacgaacagtgatttattctctgatttgtgcataatctagggattttgtgatggtttatcgaatgtgatttcaatttgtaaaaagtgaatgattctcttgaattttgcttgtg

SEQ ID NO: 45092 - DNA, 587 bp, Arabidopsis thaliana columbia
atttgtatatatgtttacttattggatgatttcatcagtaatttgtcgggatttccaagctccagtttttcgaatatggcggaagtaagtcttggtatgcttatagacattgtggacgaagagtggatgagggacactttgcctgatgatggtaaccctttttcctcctacattatacctcaagatcattgtgtttctcctattttctatttcataagagattattgttgcagatcttccattgcctccagtgcttgctgttaaaactgatgatactgaagaaaccagtatggctctttgtttttttctttgctttgctttacagtttacatagctttatgattcttaaggtctaaattctttggaatatagtcttttcttaaaactgctagctgtgaatccacactggtgatgcatttctgatccaagatgttaaacacccatattgagaccttgaaatgtcataaggaaagtaatggagacacatacgtcactttttgtgtatgtttcaaacatagtaagctcaaatttgagctttgtttcagagggtttctgagatttacaactttcacttccaagatacctat

SEQ ID NO: 45093 - DNA, 545 bp, Arabidopsis thaliana columbia
tttaaaagcacaagttgatagagtatatatagaacaacaatctatgatgtcacacaatgccaaaacaccctcggaccgtgctgctgagatctttcatagagtcgattgggactcatttgggatgggagcacaattttcagaagaatcatcacccagtagtaaaccgattggccaaagcgatgatcgcattgtcagatctcccaaaaggagagtctcacccgaaggaggggtcagcttgaagattaagaagctcatggactcaaccgagatgatggggtttgcggctagagggttactaatgaacgagtacaagagtcgggttgaatctgccaatgttggtaggcctttaaaggcttggagagagtattttatgaaccgtggattataacttgcaagttaaactcccgttaggaatattagtttagtaatgaggtttaagtccacaggccacaacaaatggacatgtttttacttgtctaatatagatttagctagattttttttttcgacacacatgaactcttatctatctcgttgttgttgtt

SEQ ID NO: 45094 - DNA, 514 bp, Arabidopsis thaliana columbia
catttttctaacctttttccgtcaacaatttcctaacatctttttcaacaattaatggacctttttttgtatcattgtgtgtacatattcccataactagacatcaacacaaacatacacatgaggacaataaatgacaaaaaaaagtcagatcgaccaattttatcatccggattttgataccataatggataatcttgatacaatattgagtcgatataaaaagaaatcatactcatttataatttattattataaaatgacgtctcatatcggatttatgtgatatgatgatgatacaagtatattatatgaacggacctgttgagattttgtttgactttttttttatatcaaaaatagtcaaacatttaacacatttgtaaaaacgtcatcgtttctttcctgcgtacataatcttttaatgggcctttccaaatttgcggggcaggtatctttgtatcaaattggaagttcttccaaacaaaaaaaaagaaaaggaaattacacataa

SEQ ID NO: 45095 - DNA, 508 bp, Arabidopsis thaliana columbia
gtttttaaaatagtagtagtagtagtaataaaataaaagtattgagagagagagacttgcctcgagaaaaccaatctctctctcgagcatctgaactctcgccgcctctctgcgtttcccgtacaaatctggatactctggtggagacttaggacgaggcggtggtagagacgacggagcaagagacgatgaactcactccaccagcagctgattcttttcctcctccttcgccaccgccagaaggagcagacattttcggagagaaatggtttggagtgtctcaagagagaaacatgcagtggtgttattacttaggagagaagtgaaccagaagaagagaagaggaagcggcgagtgagtgagaaaaacaatgcaaagaagaaagaaaaagagaaagagagagagatgagtgtgtagtagtagagaggaagagagagaggtgggtcgcagaggaagtaattatagcatctgacaaggattattacttaccttcctctgcccctttt

SEQ ID NO: 45096 - DNA, 622 bp, Arabidopsis thaliana columbia
tgatccagacaaagaaagtatcagagagcatggagatggagctctttaatctaagaaatgctctcggacaattgaatgatacagttgcgtttacccagagaaaactaaatgatgccatcgatgagagggataatctccaagatgaggttttgaatctgaaagaagaattcgggaagatgaaatctgaggctaaagaaatggaagctaggtacatagaagctcaacaggtagacaacaacacaattagatttgacaagacacgtccattttctcagtcctttttgcaatacttacttaaaatttgtttatcttcttctcacagattgctgaatcaagaaagacatatgccgacgagagagaagaagaagtgaagctattagaaggatcagttgaggaacttgagtatactatcaacgtactagaaaacaaggttaaaactaatcattttttactatgtaacagcttattttaatcgatgtgcttaattgtctgacggaggcgtatttcaataggttaacgttgtcaaagatgaagctgaaagacagcgtctgcaaagggaggagctggaaatggagcttcatacgatacgccagcagatggaaagtgcaagaatgctgatgag

SEQ ID NO: 45097 - DNA, 503 bp, Arabidopsis thaliana columbia
tccacaagtttcaacgagtgctcaattgatagtggcagaaaacataggagttttgtggtgagcctcttccagattcaggctctacccattcctgtggcgaacgttaactcccagatccacctcaaagcttgagatccgaattaattcgaaggctgaatttgtctaccatcaatgcatcttcgtcataacaacttcgtgtaacctgtccaatccgcctctttcaatctcgacgacaagtgtctctacttcaatcctatgggcatctcagcgtaaccgccgcatcatcaccattggtggtagcgtggagtctagatcagccaaaacagggtcaaaagctacgacctagattccaattgacagaattatctcgtaaccggatatgggcaaatacgatatataaccatagtgacaccgtcgattgagagccagcaagtttatgcattcacaaagcatagccagagatgaatattgcgaccagattgtagggtgacatagaatggttt

SEQ ID NO: 45098 - DNA, 644 bp, Arabidopsis thaliana columbia
gtggtaccttcaacactgctagtaaggaggtgttggcaagcagaagaattatcagagttaggcgcacagatcgatctgctactgcaccaccagcttctaatccatttactggaattcgtttggttccttttactgctcctgctccttctactgctgctgcagaaacgactaaacctctgtctgcgggaaaacaagagacactggctgatggaaggtctgatgctaccaaggaaactgattgtgacagtagagaaaagagtgacgcaattgatgctgtaggaaaacaagagacacagggtgatgaaatatctgctaagaccaaggatattattgatggtggagagaaagagatgagtgaggcagttaattccgtagagggtggtggagctgtaaacaagaatgaagacgagattaagacaacgatggttactgaagttgctgctggggaagagactgtaaaagatgacaacaacaatagcaacactgttgagggaagtgactgtgttgtcaaggatacaggtggtaatcagactgagaaagaaggaaaagagggcgatggaaatgaagacacagagaaaaatggagatagtggagccttgagctccttcaccagcactcaagtagcaaaaacgcattcacaggac

SEQ ID NO: 45099 - DNA, 453 bp, Arabidopsis thaliana columbia
ttgcttataggactccgctggcaccttatgagaaatcaaagtttttgggttccggggggagtatggtcgcaaggctgaaacttaaaggaattgacggaagggcaccaccaggagtggagcctgcggcttaatttgactcaacacggggaaacttaccaggtccagacatagtaaggcttggcagactgagagctccttcgagattctgtgcgtagttgaacagatccgtcctacctagagacgtctctctgtcaacctctacgtctgccgatccatagatgatagatccgaccaccaccaattcttccacaacccataaaggctcagcttttttcttcaattgattgaattggaacttccccagattccgacagtaagcaacgcatgcatctgtatagagtcaacaacacaaatcacaaaaaggaatcagctttgaactaatttgcctaacgg

SEQ ID NO: 45100 - DNA, 478 bp, Arabidopsis thaliana columbia
aattatgtaaacgagttgtgtttaaaactttaaactattgaagcttgtgtgcatatatattcatataaatttctaattctcgtgagtttcattataattccccccagtctatatatctctctttatttcagaaaagtaataaaagtcgaagatatttatatcaagagttataattgagttttatgagagatgtaaaagaaaaagataaagaataaaaaataataattgagatttgagaagaagaagaaaaatgatgagggaagtaaagggggaaaaaaaagatataaatcagataattaaagttttagattgtttgatggatgtaatgattagtaaatgtatttgtaattttatgagaggtggtgtagtatgtgtaataagtatttaaattaaatgaatgtgtgtatggagtgtgtgggtgtatatatttatgaaaaaggggttgaatatattaaaaatgaatgtgttggtatttatg

SEQ ID NO: 45101 - DNA, 614 bp, Arabidopsis thaliana columbia
tgtttttgataattgagtgtttttattagatatatgaaatctaaggcaaagctttagataccagattgttgtttaggaggaaagctaacaactttaactctattttggcaaagaactgatcatcggttgcatgtgttactagattcataattgccaaaattgagttaaagaagttagctttccactcaaataaatgtggtagcttaactcgaattgtacatgtgtagtatactgtttttgtatttgtttctagacttcattttggcaaaaaaaactgatcatcatattgtatatgtattttgcatttgttttcgagacttcattttatctttacctaagttttatgacatggtgtttttgcaggaggatatgttgtgcagccagataagttgccgaattacgtagtccctgatctcaccggctttaaggtttttgatttcaccctctaaactcttatgttccttttatctttgatacttctagtatgtaccttgcatcttaattgaaacttgagaaccaacattagtgagaaatctcttacaagtcttgttggtagaactccttaggttcacctgataattacttggtttgtcttgttgtaggttttgagtagg

SEQ ID NO: 45102 - DNA, 564 bp, Arabidopsis thaliana columbia
  unsure (1)..(564): unsure at all n locations
tnnnnnnnnnnnnnnnnnnnnnnnctaaagcgacagtaaccaagatattatcggccggttcgctgtctacgccagcctgcatccagagtggagcgcaggggagtggtacaacgtggccgacaacgcacagtggtccacctggtcggtcaagtggcccatcatctgagagtactttgggctaaagggagtggcgcctacagacggaccgggcccggatcccagcgtatacatccaggagaacaaggggaaatgctttgagatggagaagaagtatgggctcaaaggcggcagggtgggaaatgacaagagcctgacgatcgtctccaactttctcatgaaccagttcgactttgaccggcagtcgatctgaccaagatgcatgccgcgtgggggagcgcgaaggaagagaccgacgtccagggagcctggcatgttgccttcaatcgcttccgcgctgccaatattattcctagctcctttacctagatgctacctagagtanagtattcgtcggcttcagagcaatacgttgttgatcatcatgattcgtcgacagtactgtga

SEQ ID NO: 45103 - DNA, 539 bp, Arabidopsis thaliana columbia
tacaaaaaaatctgtttgttggctaaagagaaatcgaaggaattagtcttttcacccatttttctctctctgtgtggcttcttcttcttcttcttcttcctatcaaaatcatcatcatcatcttctctatattactaaaatagagagagccaacaaaagagaggagagggcgtaaaacagcagacggtggcgcaccgtagcaccgccccctcctaacctgcgcctttcttccttctctttcatcttttttttatccggtttcaggaattattcctctcctcctctctcaggtcgcttcgatgccaaggcagaatagtttcctgatttttgattcttaccttcgattttggcttcatctatcttcttcttcagatgcattcacgtagaaaactctggcggacattaaaggaaccctagctttactccggtcttgttagatcgcctctatcggcgccgatcggtggtttgatttcaatccaagagacagaaacgcagaggttcatttctcaggatgctttggatcatgagattctcggttt

SEQ ID NO: 45104 - DNA, 524 bp, Arabidopsis thaliana columbia
cggtgaagatatcacttgctgagttgcagtcttctaacttgtattgtatgaacgcagctggatcataaagtcacctttagaaatcacagtgccatcaaagcggacaccctggccagactcttcctcagagctcccagcggcggcgatcaaagaggcaaaaagcaactctaagccaagagtgtcgaagagcaagagctataaggagatacaagaacctaaagctttcgatggtgtcaaagtgtcagcaactagctgaagaagcttctatagatagatcgagtttcatttcatattctttttcaccgtaaatatcggaaaattgttttgtgtgcattagcttcattgtatacagtacaaaaatcatatgagatgttttaagttcttcaaatcgatacttagctctaaaacaaaacttggaagacaacatagtctcctgacttctcttaaccttagaacagcaaaaatttcagacaacaaaaacaggtgcagtggactcactaacttgagccatggttgatttctgt

SEQ ID NO: 45105 - DNA, 1025 bp, Arabidopsis thaliana columbia
catccatcatctccgatcatcgttcgatacagctggattaagcataacattatatatatattaacgttttactacctaacagagtaattaagtcgaacaagtggtggtgagaaacaaacaaacctcaacatcatcagggttgtcgaagatttcgtcaggtgttgcaaaggaaaagtcctttgcaatcttacagcaagctccacaaccttctacgcacttccaagtcaactcctttgtcgttccgccggagaaaccgcttgtcgacatcgttggccgcttattcgccggcttgactttcttagctttaggttgtgaaacttgggaccgcctcgtggcagagataatcgtcctactcattggtgccgtcgataacgcaagcgacatatccatttttcttttggcgcaaattagagaagcaagaaatgttgtcaagataagattagaacccaaatggcgaaagccggttcaaccgcaaattgtgaatttgcatccggttcagtcgcaaaccattttttttatccggttcagtcgcaaaccattctttatacaacaacaagatccactttttattgttggtacatagcattggctctcatatattgattcttcaagaaacaaaagtttcaaaaacttacacgcgtttcctttctttgtttgtttgtgtacaaccaaacctcatcttactatgattttctattctcgtgaaacaaattgagcaacaatacacaaagagacaagaagacaataactatgggttgtcacagcttgggacagtttcttacaaactcactactcgcatcttttgggtcttatcagtgtgtcaataataacccaataataatggcggattgtttttgtttttctgtctccgattcgaattgtgctacaaggtcagtgtttagaaggggtttatactgttctctattgaatattcatgttatgttacttcgattagttggttgtgctctgttttgttttcagaatggtgtcaacttcaaaagcgcagtatttggacagtagactaa

SEQ ID NO: 45106 - DNA, 529 bp, Arabidopsis thaliana columbia
agctccaatattacaattgctttgcttccctaaaattgtagaatttaaaatttatgacaaaaatgcataaacccacgactttgcaattatacttactcacatgttctaagttctaacaactattaccattttaaaaactttctatcgcaatgttacaatacacctattcttttctgtcactttgttcacgtgtttagttttcagtttgttacaataacacaagttggtaaggatatgcttatcatcaatatctttaaacctgtgttagagtcgctttccctaagaacgaaatcaaacgcatgattcatcacaatcttgaactgaataaaaaggatgctagatagaccgcaatgtacttaaacgatcaaacgcaaagttgtatcaaaagtaaacacatcactgtcacaaattcaaccagagataaattgatgcaatgaacataaacatcacagtttattaagccaaacattatttgctaagattcttacatctgtgcaatcagacaagatcaacacagtagacataagag

SEQ ID NO: 45107 - DNA, 418 bp, Arabidopsis thaliana columbia
tcacacagagtaatttaaaacgttgaattagtcgctgtcgtaatttgatcgccggaattcagatcggagaaacaataaaaatgctcactgaattggaattgaagaaaaaaatctcaggagaaaatatttaacagcgaaagagactgaaatgagagagagagagagaacctgaggaagagaacagcgaaggagcgacagaggctctggaagttcttaatgggcttttttagtcaggcctttattaaatatatgttgactaaagaaacgacatgatgttattactgttgaggataaaaacgacgtggagttcagttatttaatatcagaacaatggggtgttttctccaaagtcttttaatatggaggagacggagagtcgttgaacaagaaaaataatctgaagcagccatggagatag

SEQ ID NO: 45108 - DNA, 554 bp, Arabidopsis thaliana columbia
gataacaaattactctctaactagtaaagctgttttaaatgggctataacccgcggaccagatccaactcttaaaaaaagtctataagtcataaggacaaaaaacaaaaaacaattgaggaaggacaagaaattttattaaaaaaatgttgccaatttgccattccaactacagttaggtttaatgatgtcaacatcagatatttttcgagctaccttgcgaatggctaatcacgcaagcacgttcctggaggttgacgttacacgtatatggcctatcctacgttcaagattaaacttcttcaatcctttttttttttttttttttcaattatctctgttttgaataaaatctactacgtacagttgcgaaaattttagttgaatcttgttcatccagaagtagaaaatagcacatctattggaaagactaaaactgttttcatattttcttatgctaaaaatacaaacatttcgtttggaaaaaaggttgtagaaattacacaaaatagatctcacagtttaatctcatggcaaaaaaagaaaaagaaggat

SEQ ID NO: 45109 - DNA, 548 bp, Arabidopsis thaliana columbia
gatggtgtctccagtttctcatggagctgtcagtcctaataaaaaataaatagaagcggtttaggccgacgcactctaaactaatcgattaaagaaaatagctaatacttaattcaaaagcctcatttttattttaatacatgagtactcactaccaaaatcatatcacgattcgtcgaaacttttaatcactagaatcagacccatcttcaattcgatgaagagagtcacacgacgatggatatgctaagacccgcaaaccgcgtacacaactccgctttccttcttccactcaaagtaccatcaaccaaatcacatgacaacttccaatatggagccaagtctcaaaaactaaggagccatgcacccctaagttttctaacatgcataataataataataaaaacttttatatgcaaaaataatcagaaaatagtagcacttggcgacaaagatttatgcattcttttggcctttgcaatttatttctcttaaagagtcttgtaatatttcaacactaagatacacgttccgatattaatatggga

SEQ ID NO: 45110 - DNA, 577 bp, Arabidopsis thaliana columbia
gtctgaaccgaaagactcgttgccctctactccctcatttctctctgaagatacgtttgttccagaggatgatcctctcttggtgtcagtttcaaaagtcgaacaaattacaccaaatagtttggatgtggaatggaacgaggatggttgtgtgccaggaccacagaagctacaagtgaggagaccagtaaaacgtgaagacacggacgggaataataatctttcttataccgagtttacaatgcatcccgaatcaatgcctgttgtgaaccagaaatggagccaacatttcctgtcatggaatgggatgcatctggcaatagcaacaacatgaatgaaggcgagcttatgtttgactacgaagacatggaattcgaacctcaaacatatttctcgctgaccgagttgctcacaacagatgatagtggccagtgcgatggatatggagatgacaaggatgcttcaggaatcacggataacccaaaccctcaggttgaggcaatggaacagtgcacgtcatttctctatgaaaatacaattccatgtcagatatgcaagcatgtggagccaggacctg

SEQ ID NO: 45111 - DNA, 1269 bp, Arabidopsis thaliana
aattttgtttgaaagaaattaagtttttgagccaaagtgtggaatagctgtctgatgttgatttttctacttaaacccaaattgaaatatttactaaacataaaaaagaaagaatgagaataatttgtatttatttgtattggtccccgaaaaagactaggaaaggagacaaatgaatgaataatgataccaagaaacttgtttagagccgatacgattctctaccgagtaccgacactatttaatggtactactctagaattgtatagataaaatttggtcccaaaaaatatgcaaatattatctcaaacaaaatcttacctaactagatttagctaagggcttattctttgtaataaattaatttttacattaaaccaagtcagcaataaagaataacaaggagagggccaagttctttattttatctactttctttttagtttccaaagttccaaagtgtattttactataaaggtgaaactacagattggtttttaagctttttgagctttaaagttgcatcaccactgttactatcaaagttgcaacctacctttttcataatttgacagataggttatgtagtttagacacataatttagagattctctaatcttattgcttcgtatataacaaataaggtgtgtatcatttagaagaaaatgatagtggttgggaaactatgagtaatttaataaggagtattagtgtattactttgtggtttgaattaagtgtgtaaccaagttttctttaattcaggcgaggagggcgttgagagcactgaaggcattagtgaagcttcaagcgttggtgaagggacacatagtaaggaaacaaacggctgatatgctgcgtcgaatgcaaacgctggttcggctccaagcacgagctagagcttcgcgttcttctcacgtttctgactcttcccatccgccaacactaatgattccatcttccccacaatctttccatgcacgatgcgtttcagaggctgagtacagtaaagtcattgccatggatcaccaccacaacaaccaccgttcaccgatgggttcaagccggttattagaccaatggaggacagaggaaagtctatggagcgcaccaaagtacaatgaagatgatgacaaaatcctagaagtcgacacttggaagcctcacttcagagagtcaccaaggaaaagaggatctctagtggtcctacaagtgtggagacagtcccaattaaggtctagacaggaagcacagtggtggttaaggaga

SEQ ID NO: 45112 - DNA, 936 bp, Arabidopsis thaliana columbia
tattttgggccaaattcttcatcctttaacccaaatcttatctttcatgggccgagatttatatttcgtatttgtagttctcatatgcgattttccgatttttttaaacaaattacttgctacttcttaattcttatgatgatgcatcagacaataaaacaacatcactatttgcactatgctcacagattgagggtttttaatataatggccacgtataatatgaccgtttatgtggaagttcttttattatattattgtggaatgcaaatggacaaggacaacagagatactaattataaaatcaaaacaaaaagatactaattctaaaataaaaagaagaagatactaattataaatcatttataattgtttcctttttctcgtaatatcacctgctcgattcagtatcataaaatatatactaatgtatcagaataaatattcgattactatgttttctatgattagaggttttttaattatatctatagtttccttactataaaacaaatcaaattacgtctttttttaggttaaccacaaaaacccatataaaatctttgtctgtctatattccttcatggccgcagagaattttacggacataaacccttctttgaccataccttacctccgttgcaagcattcccctctgaaatctatcggaagataaaaggcaaattaggagagagaaaatattttttctcataatctgtgttaacgtacgagatgggaaactgtgccatcaagccaaaggttctcaaagattctgacgaggatcttgttccggtggagcgagagacgacggttccgactgatcttgacaaagatccggcgcagaagaacgagaacatcatttctcctaacgctgcggaggaagctgcggctgcggcacgacggagcgagaagggaaaagagattttgattgaagat

SEQ ID NO: 45113 - DNA, 541 bp, Arabidopsis thaliana columbia
gaacgcttcaataaggtgcctaacatgaccaaacactatccatagctctgagaatattaatactgatataaaattaccttccttccttcactaagcttctgtctaactatttgccccaaagtaggctgcaaaaatacagaacaaagtgaataatactctataacacaaaattttcaaactgtttagagaaaaagaatgttactttaacaggttgaaagaactgatcaacaacatcttgcaccgcattatcctcacgaggcgaagaaacttccggagcaaccgaagaagctagattcgactgagaagcagcagcagcagcactagacgtttcagcattgtgaatcctacgcttcggctgccttctctgacgttgctctccgggcgttcttatcgccctccacgtaaatatcaccgcaatcgcaagccccgcaatcgcaccaattgatcttgaatcctaaatcacaacaacatcaatagcaaaaacaaatcaacttacataacaataataactcaaaagtttcgatctttctaatccaaatca

SEQ ID NO: 45114 - DNA, 503 bp, Arabidopsis thaliana columbia
atccccttcaatctttgcttctatatcggtactcctaaaatctagcgaaaacttctcttttgtctctcaagtcagactcaattcccatggacttctccgtcaaaccttccggcggctcaccttctccgtcatcttccacctcttcttctacgcctcatcgtttcaaaatccgttaccacaccaaccgctactgccgctgccgtctcaggattctccccctccgccgccgctgatcgagatccgatgcattcctggtgggaatcagtctcaaagcaacgttctcgcatcctctctctttcatctcttctctccggcgattctcactttgaagacggtgacgtaactccgatctcctctcttgcagattccgatcggccggcgttatcgttactctcttctcgtgctgcttactctttgatatcgaattctctttgcaatccagcttctggttctggatctgatccgctttgtcaatggctatacgaaacttatctctcctctga

SEQ ID NO: 45115 - DNA, 443 bp, Arabidopsis thaliana columbia
taattttggttcgacaagaataatatttatctcttacataagtctttgacttattaatgtattgtactttattcgtaactcaaaattatgcaataaggacagaaccttaagggtatcagtttcccacacgtatgcagatgttaccacacgtgcaagagactgcggagacacatctgcagtgacgccgtcgaaaaataagcgccagtggccctagtcactcttgcagtcaccactgtcgccgtccgtctcaccttctccttcctagggaacattcctcctctttcagaccagattctaggttagggtttcatcatcatcggctaaagtctcaatctttgagatctccgttatctgttgatctcattattctctgattttgtgtagtttcacaagcgaacgccttttgatacattcttcgggttttgtcgtaattgcaaaagctt

SEQ ID NO: 45116 - DNA, 463 bp, Arabidopsis thaliana columbia
aggtatccaactccggatcacctcttaaagtcactgtcctcccatgatacaaaaaggacaactcatgcctctcccaattgaccttacaatctcctaaggttctcagccatgcaattcccaatatcacatcaactggaccaagatccaaggtgataaaatgtgttgtcaactccaattcctgcccacaaccaactggtagagtcatcgtcactttatcacacaagcctaaaccttgaacagtgattcctgtacccaatcttatatgaaagttagggaaataaaattgtgtgtggcaccactgtccaacatgacaacaacctctcctttacaaatagatcctttcatcttaattgttgtataagatggcaaacccatgtatgatgaaaacgataattctgcaaattgagcaactgaatcatggaattcttcttccacgctattaatctctaaaacttccatttca

SEQ ID NO: 45117 - DNA, 523 bp, Arabidopsis thaliana columbia
tgaagtggggttctatgttttttttatgcctttatttatttatgattattagtatttttccggtttttgtgtaaaggtagaagaatatgacaaaatcttacttgtggagaagataaggaagccgtggagagagacggacggacaaccaacggaggagagaggaaaatatagaatggtcaatacaaatgtagtagacgaattgtgtcgtggaaaaaagaatgtaatgccaaaaacacatgttagtgtggatgtgaaagcgcattggttcgatttgggatggccggatgggcatattgcctctaatgtttggttggattcgatatccgttttgatttgtcttgagtttgtagttacctagaggtttttatatggatgcattgcgggtatgaataggagaacgatcgatatagtttttgagtagggtattcgttcgaaatatatcatgtcaagtcctatatcaacttaacatttttccatttgctactaaaacataatctacttctgcttcatgttgatactattt

SEQ ID NO: 45118 - DNA, 479 bp, Arabidopsis thaliana columbia
ctagccgtagcaagaatcacagaaggctgactcattttcgatcgattttatcccgattgaaatattaaaccaaccatttcgtgatttttgctgattcccagaaaacaaacaaacccccttttcgaaataatcaacagaagaacaagctagggtttggtgattgaggatcaaaaaacaggggaaagaaaaaggtgcagagaactgtaaattgaagagaagaagaaaaatagggtttttaccaagcttttctcataattaattaacgcggggaggttttagtataaatatatatctattggggtttatttaaatatacgaaaataagtaaagggctattttgttatttatgaaaagtaataagaaaatataaagaacaactatttgttcactacttcactgacagacataacggctgagactccttggaagcttttagagacggcaacaatggcggctacgaaagctctggaatttgtttt

SEQ ID NO: 45119 - DNA, 548 bp, Arabidopsis thaliana columbia
tgcaaatactaaacacgaatagaaagattgaaaagtttttcatttattttggatagatatttagatgtttttctttgttattggcttttgtgtttcagattttatatatgcacacatttgtattactattgttggcatagtatctaaaatggcacataatatcttataataatcatattagatatacatgaatttattaacatttaattattaagaaaatggtaaggtcaagtaacgagttgcagataatactaaaacttatgtggaagatcaaatgataactaaagtaaccaattgtgcataagcaaatcttcaataattaccctattaatttataaatcatatcatactatcaatgtaacctattaagtaataaagtatttgttttaaaaatcttactttaaaagtaatacacaagttgtcaaatactataaacagcaaagcatataaagacaaattaaataaggtttgtgcatgtgttcttgtaataacgggtgtcaaaaatatgaaatggtaccatagccccgacccatattggtcatgatcat

SEQ ID NO: 45120 - DNA, 510 bp, Arabidopsis thaliana columbia
gtcaaatgaagcatgcagcttgaagagggcacaatcgtcctttcccctgatatttatcccatatttaatacatgacgctaatggttagcttgagtactgagtaactttaagcgacatttataagtatcaatgaagctcgagtactgatattattaacatcttgggaattaaatagctcactatcaggggaaaactgaaaagcgaacaaaaattattggaagaagaaattattgccaaccgtacagttacaagtataaatgtcgatatatcgacacaccaaaaaaaaactattgcattcacatttaaaaaaaaaaaaaaaaaaaaaagatgtatactagtataatagtatatctgtcacaaacacatatcaggagaacatctatcacgaaccccatgactcatttaaggagtctttctttttttggttttctatgaaaaaccaaaacaaattaatatgataaatatcgatagtagttttaaagtaatatttcatattgaatatggatatgg

SEQ ID NO: 45121 - DNA, 512 bp, Arabidopsis thaliana columbia
cattttaaatctttcttcttccatatagtcatataagagagagttttgtgtcttgaatatttttagtatgtctaacattttaaaatgtcattacatgaaaacatttgcatgtcaatatgaccaatttaccataagacacataaatgaaaagaaagaagacaatatggtaagtcatattcataaaacgtaatgataaaaaagattcaaaagaaaattattaaattaataaaagattaagtagcaaacatctaacttacaacacaattaacctttttaggcattatcgagtaatgactattgatagagaaacatttaacgaaacaagaagagtataatactagtaatgattgatacattaccatgattttgtctgtttgtaaaacattagctaagaatgagattaatagaggatttacaatatgaatttttgatttctttcaattggatttgcaaatcttttaatttaaatcatggtgaaagacacatagcatatctttgtgatgatgatgtga

SEQ ID NO: 45122 - DNA, 522 bp, Arabidopsis thaliana columbia
gatttaaaatttctctatgtaatggagtttttaattgaaccaacagtagacagtaattaaaaatgttaatcttaggacaaaaaatatttggttggaagttggaattgaggttccagagatgaatgatggctaatcccagagtttctcttcctctcttatttttgacttgtccttgttcttctacactgacatgaacaacttcaacgcctcgaatctttctcctccttttgcttccttctctcaccacatttcctcgccaccagaggacggtttcagagcttccgggagatgttttcgtttgtgggtttcgtggtgttcctctctggatttttcctgggaattctcgccgtcttatccgctgaagctgcgggatttatgtatctcctgaagcgattgaatcgcaagagagatctgtattgagtcaaaacccgtctctgatccatctatcaaggattttaacctcgcgaatccatcgatttctgtatcacaaacaggtgatcgctctaattctctttttgagtt

SEQ ID NO: 45123 - DNA, 565 bp, Arabidopsis thaliana columbia
  unsure (1)..(565): unsure at all n locations
cttaagaaatgtggcgcggagtagagtgtggctccaatgatcgattccatatacaagtcgaaaacttgagccatatgggaatctccaagtctagaatggctggtgtaaagatcgagtgcgaggtcatttataaggaagactcggaagacgaggcggtagttagaatcgttaatgctgaaaggccattaggcacaaactttggatggctgaacaacgatcttcttgctccactagctcatcgtggtctaacagccgaaatccagctgagtttcaacagcgagttattggacaagatcgacctccagatattccaccgaggcgaggggagatattttcccaagacgatactcttggttatcttcaatgttttttccatctaaaatctaagtattttagttatgcaaagcgtatgaaatatttaaaagtacaatttgtatgcattttgtttggtcgattatatgatatttaaataagaatatatttctaccgagataatcatgagttttgtcacaaattggtaattacttgtaaggtttctgcncattcattacttatcaaaaaaata

SEQ ID NO: 45124 - DNA, 513 bp, Arabidopsis thaliana columbia
tatctctaattgtcaatgaaatgtacaaacatatatcccttattctttcatcttagaacatatttttaggatctcttgaacggttgattttgtttgttgtgatcgaggatatgttgttaattgttatttgattgttggtgagtatggagtgttggtgggtaatgggtataagataggcgattaagatgcaaagaacaaacctacctcggtctcattcgatatttgtgctcgttctttagattaaaacatagtcgcaacaacatataacaaaaaaaaatctgtaacaaaacaatgggtttgttttataatctaatgagtaaatgtacatgaatcaaccaaaattactgaatgcccaattttagttcaacatgagttaaaacagattttaaaactaatataaaacgtcgtcaatttcaaattctaatggttggatcgatttaaaagcccaaatataagaaggtgatcgttaaaggcccaattaaattgaatcctaatatatcaagtgagagtgtt

SEQ ID NO: 45125 - DNA, 597 bp, Arabidopsis thaliana columbia
aaacagagagaagttttcttcgtgaaaaacaaaaacggtgagtctttttcgttgaagttgaagtagaagtcatcatggtcaacgtcaactacaagagaacggacgtaaacgaaacggtgcacgagagcgtccactaaaccaaccacagtatcacaccactactcaaccgatgccaacaaggcataaaccacgactctccaccaatcaaaacgcttcactttttctttcctaaactacccttcccctcgccgatactgtagggacaaaattgtcaaagaacactcgcttcatcatcagggaaatataaagggaagaacagaaaaaccttttcggctaataattgaaaaatcccttattcgaagattcctttggcgattcgtagtagtagcttacggcggcggaagatcgatgtcgacgaactcggcgagtgatggggatttcggaactaattcggtgccggcagagatggctgaggctcagtacgtgagagcgaagacttcagtgtggtgggacatagagaattgcaagtccctacggtcttgatgctcatggaattgctcagaatatcacttcggcgcttcagaagatgactattgt

SEQ ID NO: 45126 - DNA, 100 bp, Arabidopsis thaliana columbia
  unsure (1)..(100): unsure at all n locations
catgcctgttccgacgcgccgtcagcggcctggtgaaactgnggctttcgcttgtccacgaaggccgccatcccttccttctgatcgtcgaacgcgaaca

SEQ ID NO: 45127 - DNA, 587 bp, Arabidopsis thaliana columbia
ttattattatttgtgattataccaaaaaaatagagggcataaatagagggcataaaaatttcatatagtcatacactcgagagttgcttttcatcttctccctcacattccatcaacactggagaattcacctattaaaggatggtggtgcacagttaaccacatgcagatttacaatttttttcagataaaattgctagtaaatcccatccaggcaagaactttatttactaattgatctaagaatgtcaaaaaaaaaaagctcatccaacagacacatttagacctttgtatgctccaagagaagagatggagaaaacgtacagagataatggtggtaaaagcagagatagataccagcttttcgagtaatggtgatctcgagcgagacaccaacttcttcaaaccatataacccaagttgatatctgtttaacctcatcaatggccacagcattgacatcaatgcccaatcatttaagcatagcttctgtaacattgtgtctagctttggcttgctcttgagaatgattctctgcgacattgtgtataaagcacaaggtgaaggacgtgggacgtttcactagt

SEQ ID NO: 45128 - DNA, 571 bp, Arabidopsis thaliana columbia
  unsure (1)..(571): unsure at all n locations
tctttgaatatttatttttcttttccgatatcttaattttaaaatatcaattaattatatcaaaatcaaactactaataatgatggacggtcgttgcccgttggcatgtttcgacggtacttcagtgtcatgtgccgaagaaattttttcacttcgatcgagaatatgttcaaaagcaaaaccaaaagagtgtgggggatctggtaatcttaactttcgtgtggacttttcagacaaagagaaattaaaacgaacaaccaactcatttatggctcaccaatattcattcgttttcatcattattttcgatattattttgtttcatcaatccatggttggagaatgagtgaacacctatgtatttaatgttgttgattttggttcaaatagttttgatagtaactctcatcccaactacggacgctatgcttgccttttttcttttccagtgataacattataacatttgtactgcccaaactaattggtagtgagtagcncccaaataccacttatatattacggtttaatccattttgaatgtggaatttcattctctcacttgcaatat

SEQ ID NO: 45129 - DNA, 610 bp, Arabidopsis thaliana columbia
ccacaaaaaaaaagttattttgatgataggaattaatgatggatcgtgcggcgacaacgttttccaaacattgtgtgtatacctaccatttattttcgtaaaacattccaaaattgttatgcagtgaaaggaacaataaacaagtagtatgtgataaaaagcatcgttatctttaaaagacgtgtgattaagagttgatgaacaagaaaattatacacttggtaaaggtgttgcctagtggcagagtctggtcaacatgttccaatgcttacaaattcccagttaagccattaattaatgattgattaaaaatcccttggctctgcttatttctacactttctcgtctctatcgttttatttacatatataagcatataataaatacaccatcatatgaagatttgtataataaatatgagattagtacaattcattaaaaaatataagaatgtgtcaaaatcttactaatcagatcatcatataaggcatacaagtctccatttaaggaaataatataatttttgttataaagagaatcagtttctcaaaacgcaggtttttgagcagagtcgcaagtagattaatttaaatcattaaatgttggaagt

SEQ ID NO: 45130 - DNA, 1375 bp, Arabidopsis thaliana columbia
gttatctcaacacataaatacaactgtgttacaaaatccatgattctaatgaagaagcagtcaggattttagtaactaacctgagcaatttcgcttagccaaaatcgagattagtgttaacaacaatatctcgaatgcttcagcaatgaaagagccagttttatttgacatcattaattgttgtcacttgttacaacttctgcttcgggtctaagttctgtagtttcctcttgtttctctatcctcaggctcggactactattgggctgaggaatctgtgtagatagtgatgggtaaaatgaggcactgtgttttgcacattaaatggcggtgtaagaatcgaaggtttaacttaccattggatgagatttataagacagaacattgttatcggatgaaagagatgagtctgagggcctgtgaaacagcaaatgagctatcgatcgatctatcgggtttgtatcagtttcgatatccatgaatccagcatacctggatgagaccacatacagatatcaaagattagaatctaagagaaatgaaggacgagtacaagagcccaagtggaagtttctaaagaagagagttactaaatctgtcaagactcgagtctaatcctatataaagttataagttggcatcaagaactttacttagcaacaggtgataaagggtgaacatattgaataattatgtaggatgtggtgcttacttgtctgcttcaccagtcacgagatgcgagcctgcgcctttctccggtctgtttccaccatgatgtctctgttccgcactttttgctaatcggtataagctgtctcttatgcaaagctttgtcctaacatccaactggagcaagcaagtgtattatcaaccaagtaagcaaatgtatatgtaaatttattaacatatatacactttgatatcaatcacaaaggaacagcaaacttttaccgattcccaggaagccttttccttatatcaacaattatctattgacaagttgtacctgttctataacttgttgaagctggcgaaaacttgttgcttccagtgaaatgtcatccacaacagagctaacacaagaacttccctgcatatttgatgtttccaattcagttgcagcttttctgtggtcattctcaagcccaatcttctggataggagcagcatcaggaaacaccatggagtctgtcttactactcttcttggtatttgcagcaaaagaaggaggcatatcttgcccaggcagcaagttggctctcgtttcaaagaccttcctaaaccgatcatcaacagttggaccttgtaagctctcgattgattgtgcatgatttgatgtgtatgactcatttgaagcagaggaaggactgggttt

SEQ ID NO: 45131 - DNA, 814 bp, Arabidopsis thaliana columbia
tctctggcacctggaaaagccataacttgttcatttccttcactaaatggtcacttctatttacttccctctcgttttcagcatccagtgagtgacttggcccccctactgataaatctcgcccatacaagaaaggataagcttcatgcgcatcagaacctcgggtacgctttgaaggccctgctgaatcatcattaacctcgtcaccgtcacggtcgacaacagtgccttcaacactatctgcacgttgtattcgtagataaggcctatcaacagtgcttccaccatcatccaggctccgtttacgagtactaggccctcgtgattcatatgaagcagcacgatcaccaacctcacttcctgaaggctgcctccacaacacttcctttcctctatcactaaattggtaattatcacgggtcacagacatgttcagctgcgcagaggatgatgcaccagctgcattttgataaaagcttagacctacatttgatactaatcttctcttaactgaagtttcagcctcgtcaacatcttcattttgctgctgtcccatgccttcattagcaaaccatccattgattccacttgttgcgctagtgccacgtgtcactcccattttcttactcgtttcaggaagattggcatttatagcagcaaacggaaccggccgagaagtggtcaatgaatcacaaattctgacggttacaccacataaactacaatccagtaaaggtaatctggattctgacttatattctggacccaaaacttcataatttccagaggcttttcgggatgaagccgagaattg

SEQ ID NO: 45132 - DNA, 525 bp, Arabidopsis thaliana columbia
gctgttacgagtttttaacacttccgtcgtcttctcaggtttggttcttctcatttatgttaaaccattatgtatggtaattctagaatgtagatctggttcgttctcatggatcttgattaatatgtttgtttaatccacgtattagcactaattttggattattatttggaactgttatcattagataagttttgaattatttgcttaagtaagtaaagaagataagagaaaataatatttattagtctgaacataatcttatcttaagataaacagaatttatttccaaaaaaataagtttttgttaaactaaacacaatttattaccagcaataaaaagattctgtttaatgttgttatcttaataactgatcttttgtctgttttttagttgttgttgttgtttatgacaagatcttgttctatccattaaaaccaaagaaatggaggaaggtcataaagaaccattggtgctaagagttgaaggatcacattgttctttatcagagatggatgattttg

SEQ ID NO: 45133 - DNA, 517 bp, Arabidopsis thaliana columbia
ccccacagctcttctggcatcccagtgatttttatctttgcactagcatgacagtaataagaatttcttactctgcactctgtctttcctagattccgtttagatccatgcctctagggtacatttgccatggcaataccacttcaaatgtcaacctagaagactgttctcccatacaggttaccatttcaaatgtacactgactaaagttccacttcaataacatttaagggagtcccttaatccccagtattagaatgcccccagaatcacactttgcagtcctacaataaggagagttttcttctcttcaaaagtgtcactttctgacatttcctgaatctgggcgtctgctttggttgccatctgaccttttggctggtagctattctcctctgtccatcatcattataagcgtcaactattattttgctgataaactcagaagtgccatttactagattattttggtcaataaaatgccagatagactagatttactatatcttttaaagta

SEQ ID NO: 45134 - DNA, 355 bp, Arabidopsis thaliana columbia
agacagagacatactcatagcaagcaatccacgttcattatagaaggtatagttagagtaacgcaagtagcatcctgcattcaaggcaaaaccttctttggatggtaagcagctcgtaaccgataaagctccatctgctaagcataatttgcacaactcatcatttagcgttcgccagcatactcccaacccgtaaaccgttaaatcccggattcccattttagccaccgagaaacctcgactatatggagccgcctcaacaatggatttggtcacttcctttactaaacctttgaattctgcagacttctccttatcactagcacatatctacattcccaaaatggtcgacata

SEQ ID NO: 45135 - DNA, 503 bp, Arabidopsis thaliana columbia
tgagattgatttttctacactaaaaattattttctaatcaaacatatgattcatgttggtagtagattcttcactagctagctattagaatatgtcccacatcgagactttgataaattgtggagcaatatataagtatgtggtaaacctccactcattgaggtagcttttgggtatgagttaggcccatactaatattgtatcagagccaagtttcaatgtgtctcgattgtgtaccacccgttgatgtccagtcccacaaacttcacgcttcaaatgttcaatcctgagcgtgagggggtgtattagaatatgtcccacatctagactttgataaattgtggagcaatatataagtatgtagtaaatatttaatttttcttggatttattttttcattaatttgttaataataacctgttatttgacttcataaaatgttcatcacatatgtgtcagcacaagccaatgttatcatatatatgactctgcacaaaatgggc

SEQ ID NO: 45136 - DNA, 820 bp, Arabidopsis thaliana columbia
tattcttgtagttgacggatcatgtctaaaagttgaaacctttatatgctcaatctccatggataagttctcaaaccactactaccaaatgacagatccatcaagtatcttttacttgagaacaaaccaaacgaagaagagatccaaagactcgcccttttaacaaaaccaaaatgaatttgatagtgttgaagtaataagcattttgtccgatcaaatcttcattattagaatgaactgcaacagaatctattacatatatatagcacacaaagcaaaacaatactcaactatacacatacaacaaactcaggacgtgtgatctatctaattccttgtctaattccaccactaactctctagagatcagaaaccaccaacgagaagagagagtccgagcaagaagagccaaacaatatgaatcaataacaaagcttgtccaggaacagaagcacttcctgcattacctgtgtcacaagctccttttttgactacgcgagcgccatggcaagctgcgtcgggacaaccgcaccagtacgtgactccatcggttccacaaaccggatccgcccggaaacagttgattgtgcatccaccccgatccttaacccgagggcatacgtcaccgcgggatttatctgggaaatcatccgcagcttgtaaaccgatcaagcagagaactaagaaaaggaaacgaatgctcagtgttaacgacggcatcacgtgaattgttgatgacgagagacagatttctaaaacccagaaatctaatccttcagaagaaccctagagattcgtggcggatggagaggaggtttct

SEQ ID NO: 45137 - DNA, 558 bp, Arabidopsis thaliana columbia
gcttccgtagagtatcgcttattgctcttaattcttacatcacaaaaaagttggttactttagttaggtacttgaaaatctgcacgttgtgtctgtagtaaaattataatgaaatttattcacttcatagaatcattacctgattttagcgagtagctcttgtttttgtgacatcacaaagttggagaatacttcatccgtataaacttttgtgtcatcagctactaacacaagcatagagaattacatttttagtttcataccaattaaagtatggcaacatccttattagtatgaacctaactcacacccaaaagctatctcaatgagtggaggtttatcacatacttatatattgctccacaatttatcaaagtctcgatgtgagacatattctaatacacccctctcacgctcagaattggacatctaaagcgtaaaatttgtgggattggacatgcacgggtggtcccaatcgagacaaattgaaaccttgggctctgataccatattagtatgggcctaactcacaccaaagctagctcaatgagtggaggt

SEQ ID NO: 45138 - DNA, 1008 bp, Arabidopsis thaliana columbia
ctatagtaagatatgtaatagaaaattttaactcccattttttattttgttctagtccaattattctcaggaccagtcatggtcaagactatacaactctgtaactagttaagaaagaaattagcgatgactcaatacaaattcttgccaatagttcaagacgctcttgaacttttttcaatgtagatgctcatattacagatataactttggtcatgtacatattcaatggattgaatgcgaagtatgaaaacatcatgattgttaaatattaaacaccgccatttgtcactaggtcgaacttgcttctccaagaatatcatctccaacacaaagaaagcttgagtcacgcgagtcatgcttcatcaccaaatcttttagcagtgttactcaaacaaatgttcgttgttaagacaaccaatctcaatacaaccactgtcctgaaagtcgaagaaaatattacgaagggagaaactgagaacaccacaatgaccaattttgcaacaaccataattatagaaaccctctattagaatatatcccacatcgagactttaataatttgtggagcaatatataagtatgtggtaaatctctactcttgagttaccttttgagtattagttaggctcatactaatatggtatcagagcctatagtttcaatgtgtctcgattgtggaccacccgtggatgtgaagttccacaaacttcacgcttcagatgtccagtcctgagcgtgagggaggtatgttagaatatgtcccacatcgagactttaataatttgtcgagcaataaataagtatatggtaaacctccacttttaagctagcttttgggtgtgagttaggcccatactgatactctcagtctctcattacattaaattttacttagtttttgtatccaatatatttaaagtttatatccaagagatcactaaactcaaggaaaatttaacaactagaaaattattagaccttatcatgaattctttccagcctcag

SEQ ID NO: 45139 - DNA, 581 bp, Arabidopsis thaliana columbia
ccgttattctatatctatctcaaaacaaaatatacaatccataaaatcatacactacaaagttaagtctttttgtttgtatttttttttcatttactaatagcaagttatcatttgtagatagagagtattgaattgtattgttaatttgttattgttgtattattgaatgaacgtcttttttcttctaagcaagttatcatttgtgaatagggagtataaaccgtattgttaattgtgtaataattgaataaaaagggtacaagattatatataagcatttcatattattgaatgaaagggtacaatttatatataagcatttcatattttgtccacataattggggtttagtggtggttgagaattagagaaatattgaaagaaactaacccctggtttaataaactttgaaacaaaaaaatacatgtacgagaagtttggatttgggccaaagatccaaacagtttacacggtaatcagtaacatgcgatctgactactttctaacgttactcagaaagtatccaaatttgggaaagacattatagtggtcttttaggcagaagtctactagactttt

SEQ ID NO: 45140 - DNA, 517 bp, Arabidopsis thaliana columbia
  unsure (1)..(517): unsure at all n locations
tgccgtagttgcttgacgttgtngtgtattcaccactttcgtagcccttcttcatagaccttgcttcctgatttgatagaagacaaatcagtaaacgatcaccacattttttgatgttaaacaaattttctttaccatatgtcataaaaccaactgcaccgtataaatctctggatcatgcccgcgtactcacattacgtaagagatgaaagtaaactacatcctcctacaatctttttgtttcccaagctgccaaacaatccaaaaccgttgtagtcatttttaccatcatccatatatggtgaatcggtgatgacggtttaaaaaagaacttttttcttccatctttttattttgccgactgattttgtctcatctaatataatatcaaatcatacaagattcagaactttatatgattaaacatcctcagtggtagtgacagttgggaagagtaagatttacgtactcaattatttaattgcttcaaaactgtaaaaatgtatagaccaacaac

SEQ ID NO: 45141 - DNA, 558 bp, Arabidopsis thaliana columbia
tggaaagaagatgactgtgaaacaagctcatgagtatgtcaaaggagctacttctcggttcattagagctagtaaagaggcaatgaagcttggtgccgataaatctgctattgtcgatatgcgatcttcgctcactacacggccacacaactgattaaaaatcttgtttgcattcgtcttcctatgttttgatctgaaaatgtgtgattttatgtatggaaactagaattgaggaacaaagaaatagacaaaattcattgttaatgttagtgatatgttgagcaatcgaaagatcttcataaactcccaatataactgaagcccaattaggcccatatataaatattcaacaaggcccaaaatgagttgcatcaatttctttagttggagacttttcttcaattgtttattgttaggggcagtggagtgaaggagaaacaacaatgtcgccaatttctaagattctaggaggatgcaggacactgatggcgaaggcggtgactaatgcgacggctaccggcgccgagcgttgatagaagaggaggaattcataagatt

SEQ ID NO: 45142 - DNA, 591 bp, Arabidopsis thaliana columbia
tttatctcaaaatccgttgatttatacaaagatccgctgtagcacaatggttaaaacagctgtctaaacatctgatttccgagttcaaagctcggcagtggaaaaatatttttctttttaattttttatattagaatgaaattgaaaacgcctcacttttaatgcagtcaagacgaaactagtctctcgatatctgttttaatgagagagatagaaaaaggtttctaaactgttagtttgagagctcgttgacgaataataacatcgttttcacttttcactacagagtaggatttagtgattggtgaatctttattctctatgatcaagatttattagattatccaaaagaatggagaacattaatcagataaactgttagcaatttgactatacaactcaagatcctaaatcctaaacctttcttctaaaccatacaagtctaacaaacaaaaaaatgcaagtatgatgaagaaccatgatcagatttttagccaaaaagtttgtttattgttgcactactctctctaagaaactcattttgaataaacccccaaaatatcccttccattagctggaaacaaggtttga

SEQ ID NO: 45143 - DNA, 497 bp, Arabidopsis thaliana columbia
ccagtgctcggactcgggctaagacccggaagacggcgaactctgctccgcccgaccccagggctcggactcgggctaagacccggaagacggcgaactccgctccgcctgaccccagggctcggactcgggctcggcccagaagacgacgaactccgcttcacccgaccccagggctcggactccgccctggcctcggccgaacgatctccgcctcgcccgactcgaggggtctgggctcagcctcggcacaaaagacagactcgaccccggcttcggaggagcccccacgtcgcccgacctggggcacaggcccgcctacgtcaacagggagcgccatcatcatcctaccccgagccgagtcgggtcacgaagaacaagaccggcgtcccatctggctagctccaccagatggacaatgatggcgccccacaagctctgtgacgacggcggctctcagctctcttacggaagcaaagcaacgttagcaaggactc

SEQ ID NO: 45144 - DNA, 577 bp, Arabidopsis thaliana columbia
  unsure (1)..(577): unsure at all n locations
cccagagagtgtgttcaagcgatgatngtagaagaaaagacaaagttttggaataagcggacgaaaacctagacaggcccgtgtaagatggagatttgttttaaagatttatcaaatcaataactactaacctaagcaagtaacgaagccgtggctctcacaaattagcccaaatcctcaaatttcaccaaaagtcttcgaatttattctccagtatcagtttctctgggaaaaagttctacttttgcggactctgaggaaatcttttgtatctgtacaccattcatgggttaatccgattaaacccgtgttgctccgttagggtttaagagaattgccgccttcaccggccatggctgctaaacttgtgtcctcctcggcttcttctttggttccatccattttctcgccgtttcaacctcggagttcctttcaggtgacaatttcttaatttgtagtcagcctttagagttcttctatgctgcatctggtgttcatgctccaatgtattgctcgacagatgttctcctatgtggtttgagcattgacaatatcatttgactagtagaaaattagt

SEQ ID NO: 45145 - DNA, 544 bp, Arabidopsis thaliana columbia
gactcggatcccccttactatactacgatattttaatagctccaaggaaacaaattgttactattctctggttagtaaacagtcactgaagttgcattttatcaatatgttggcacataacatacctaaagacctcataagctatgatctatgtatgcaggttcagcttctccacgatgtttttctcccacagtaagttacatctaaaaactgcagctaagttactactgtataggtgatgatatctccaacatctctatgctactaaacttgtaggagagaactgagttcgtaagctcagtctacctatgctgctgatatcagaaaacagtgtaaggaatagatgctgctagggctcatacgaagaagccaactcggtaaagctagtttacggttccttatcttgcttgacggtacgcttttaaccaagcctaatccatataagaaaagcaaacaactatgaaaacagggcaagaagatgcagacgacggtacgcaatgagactggagtactggcagggggcctaacagacagtaaggggggt

SEQ ID NO: 45146 - DNA, 480 bp, Arabidopsis thaliana columbia
aaagtttcactcatcccaattattacgaggttagctttttggacgaggaaccatataccaagagccaccaacattataatcacccaggcaccgacgcctatcgcaaacgccaccgcaatattcattttcgcttaattgtttttcacagtcaacaatttgtgtgtgcgtgtgtcttgcgtagtagtttatctgtttatgattagttttatgtgatgtacactttagcaatacaaaaatggtatatataattaaataaagcttttactatatctaatatcaatcatcagatcacgatgacatgtgtttattatatctaatattacattgactgtgatatatgtatgctagagtactatgaattatgtattttatgcttatattataggtttgagtatatccttctttgtttgaatcatatctttaagtatatgatatatctatgtacatagattgtaacatttttgattaaaaatatagggt

SEQ ID NO: 45147 - DNA, 526 bp, Arabidopsis thaliana columbia
gcgactcttgtgttttcgcttcaagttccttgaatactgccttgccgacctcattcaagcttaaaaggacatatcaatgtctgtttgtagcaagaaggagcagggctatcaagatagagataagagggctataaagttatcacatggcgtttcctgttcatccagctcagcatcctctgatcatcaatccagattctttgtcgagatgcagaagacaaagttgatgctttgggggttgaaatcccagaagaagaaaaaggaggccgaggcaaagcggcttcttgagacggatgttgggacgtagacagttgctcacgaggcgacaattaaattcaaaaagtcgcacctgaggcgacttctgtagagggaaacaaggttgtgaatcctccttccttggccactgaaccaagtcataccgaggcgaatgagaaacgtcaagtttctaaaactatcgcccttgaagcaggtgtgttgccgatcgtcaccccgaagaacggatgcgtcgatggtgatggccttgcggttg

SEQ ID NO: 45148 - DNA, 496 bp, Arabidopsis thaliana columbia
aggatcccacaataagagtagacagttagcatctataacaatttttaactaatcagaattaaaaataataatactgagatgttcatccatatatattatagaaatttactaaattatcgactaaatgggactttggatatgactcatatgagtaaatttattcatattcaatagaactttggatatgaatatgagtaaatcactaattctattgcaaattttgatgaccgattaagtacgttatggaatgtggaatttgactttatttgggtagacgttttacattaatttcatcgccaaaccttttattcgtagacttggcaaattttcaaattacaccttggtcaccaaaactctattgtaagacatttgttaaaataatactaatagtgtgcgttcagcaagaataacaactttgatagagtttgtattgttttgggcattgacaaattgttccttgcctaacctcttctctagatgagtagataagggttta

SEQ ID NO: 45149 - DNA, 1177 bp, Arabidopsis thaliana columbia
tatctgtaagacacttggcttgtcattttaattatattcctcatctcctgcaatcaaattattatttagggtccgcgttacgggatatgacacttgtgttcctaagattgatatccagatggccttgtgtgaacatttctcttcatgtggagaggtcacgcaagtcgtggttctgcctaggtttgtcgcttctatcttcctccaatttgtcccagctctcaagttgttgactctaactaattaaagactctttgtttctgttgaattcggcagcggttcaggttccatttatcttcaaggagaaagatgtgaggacaaggcgcttcaactaaatggatgtaaaatgggaggaatgaatcttgtagttgaatctgttttgatagaacccgaagacctaaaaaaagaaaagggcgcgccatcatcacgcctactggccatactggctatacgcccttaagtacgtacaaatatttgatttcttattcttggtaacaaactcaaacctggatctcatcatccgtttccttgtttatattttgatatttaggttgtttatgcaaggcgtatgagcttaagaagaagaagatggagatggagatggagatggagatgggtgagaagaagaagaagaagaagattgagctgatgaaggtagataaagtgcttaagaagcatatggcgaataagaagaagatggatatgagcacgaaaaaagaggatggagatggagagtttggacatggctctcttttaggagaagacgaacctctttaaatgttatttacctttgttttttatgttaacagtaagtaagctaagttatcatcatctaccttgattctcacccatgcacgtatgatatgtctttctctggatgttaaaaaaataatagtaagctcaataatcgttatctgctagttattcaaagcaacctttgttttctaattttttctagctacttcagtttttccttgagatcacacactcttcaacataccctatgatattaaaacacaagaccagcaaaagcatctttatcgcaacatgtaatgttaaaggtatttccttgaaattgacaattactactactcaaggatacaagaatatcaatatagtaagtgtgtatttattacttaaataaagtatgtataccatccaacctaccatcgaagtccta

SEQ ID NO: 45150 - DNA, 566 bp, Arabidopsis thaliana columbia
tacaagcagctctgagtccacagggtcgtagtaggctctcgtaggttactatgtacttgtaacaaatatttgtggtcactatagaaatggttcttgagagacgactgtataattatttttttaaattataatcttttgggtcaaattgagaatatttgatattattttactgaattataataaacgccgttaaaactctcgttagttaacggctgactctgaagtgaaaactgaaaagtcgaagggtctctttatattttcagaatcaaaatctgaaatttatctctcggtcgatccagtcttcgtgagtgacttcgacgacgacgacgagtcacactactcttgagcttctcatacttcgtaagttcactctcctcttctctaaattgacaaactttttcttcgttttctgctattattgacgacgagacttgattttgttttgaaatgaaatggttcaagtagctgacttcgactatgttcttttgggtttttgtcattgaatcttacttgtctgatttggtcgatgtttaatcaattcaacacttaaagattcaatttttgga

SEQ ID NO: 45151 - DNA, 589 bp, Arabidopsis thaliana columbia
ggatcccctgccaaccatttgtacgtatttagacatacaatcgaagaatgatgtgacacatgagacattaatttggataagcttctccgttaacattcaagttttaataggtaacaagggtaattaaccaaacttatattcaaattaattacgttaaacagtaaacacaaatgaatctaactaactaattgactccggcatagtatttctataggtttggacataggggcagttgaaaagtttcacttctaattcccaagacaattaagttgcacaaaaagcattgaatatccgaatattcaagattaattcatacatgtacattttcgcaaaatacaaactctttaatccccttcttttttctctctctctctctctctacctatatgatatcactttctatattccaatttcactttcaaattaatattctttcctttggaaggtaaaagcccacgaaactttcacatccatgtgaccatgtctaagcttctcgagaccctagaagaagaaaagacagtagagcagaaacccagaagccaagaagaagaagatcatcaagatagctcgaagaaagaagagttgttag

SEQ ID NO: 45152 - DNA, 773 bp, Arabidopsis thaliana columbia
tatgggaaacagttagatatatcttgaagttattattttgcagacacttgatgggcagtactattgagttcctttggtgctgtcccacaaccttcaatatcaagatctaatggttcttgtttggtcactgatgcagacttatccttgctttttccccataaaagtaatataaagtcccacgataatgaccattgatcctatcacactttttgtcatgccacatatatagttcatttgttagatattattagcaataaaagtcaaaaagaaccatttaattagctttacgtgaaagaaacccatctactaattagctttctcctatgtaatcatttctaatcccatatttaatccggttcaaattcagttatataacacacagattaaaggtctattatgggtctcaatgatattctataaagctaacaatttttaaaattgtctattgcaatgcatgcatcaatttggtgtaaagcgtaaaattccaattacacatttgaatgcagatgaaagggtctttaatataggcatattctctactctcttgtacttactagtcaatagatatttgaatatgtattgtgcaatattattgtattatgatgagtttgatctaatttaaaattgtttgtttgtaatacgttgttcatcaattgtttatttatttgttttagttgaagttgttagatattttaaacatagtaaatgatataaataagtagaaagaaacattaggttaccttccacagtatatttgctcatgaaggaaagag

SEQ ID NO: 45153 - DNA, 471 bp, Arabidopsis thaliana columbia
tgacacgtgtaattattggcaccggcatttgaccgtaaccgacacattacctggcacgtggtggactactggatttgtgttctcaaaccctaataaatatcagacgttagtctatcaatttaatattccaccaaagtcaaggtgcaaatgcgacaatgttatacattacattatattcccgtgtaatttcgaccttagttacaaccaatttacatgaaaatcttaatttttataaaaaacaatatacaaaatgaaatttcttatcaggtgcttaaatcctttattaaagtgattcatattgtaataagcttggctaatagcaaggacgttaaagaaagattatatgaatcattttgcattatgtataggtttagattttatctgttgaaaagagaaatatgatcgaaatactgacgatttccaacgtgcacacgattcacgctgcagaatctcttttcagtttcacattag

SEQ ID NO: 45154 - DNA, 649 bp, Arabidopsis thaliana columbia
cccctatccccatctccacatctaaaactatttttttttcatgtagagcaaggacagcatgcggttaatatcagatgattttagataaaggacagaatcgaaaagcaaacctttaaacagaagaaactggaagaaagtatagaaaaccaatgaaggaaagcaagagaatagtttctttccaaagcttggcacctgcaacacattgacgcttattcacttatttctggacagaggtgaataggtttgcaatgaaccaaaaaaagtgatgaaagcaaagcaaataccttgatttaacagtggtgtggacaagggccgacgcttggaagggaaatttggaaacaatagttaacacactgatgaaggcattggccaacaaataacagatcaacgagaccactgtgaagcttgtgaggggaggaattggttgacccattaggaaggagtagaacaatgaacttataagaggtaaaacagctagaagcagaaatggggatggcatttctaaattgtactctacagcagaaagtaatggtggcactgataatttgttgtcccattgattagcttgccgcataagagcgaacattatgacggcaaatgagaagccaactatctgcaatatcagacgcaacatgaagaaatgttcaat

SEQ ID NO: 45155 - DNA, 930 bp, Arabidopsis thaliana columbia
tttattttatctaataatttaagggtttttgattttaaaatgaataataataataaatacaaaaaagaaaggacagaaggaaggagtgatgtgtggtagagagagacagttcaccgtcggcgagtccagctggcggtggtgggagcccaccgtgtcaccttaatcatcgctgcgctgccctgtcttttttccattattaatttttagcaagaagaagactgggctttctaaattagttattaatgggctttgggctttcgtggttagggttgtgtaggggcttaatcgtcatttcggagatagaataaaccctaatctccatggatgggctctccgatgtttgtctttttgatttttgaaatttgattttcaaaaataaactaaagcatcattgcctcccattatcgtcacgcacgcagatcaatgattctctcactctgcttctcattcacgcttcttctttgaattcacttttctattcctttctttttctccgtccgagagagtatagagagacccatttcttcgatccatccgctgagaaaaaaaaggtaccgtcgtattgttctctcatgtttctgggtttctttttgtttcgaaatatattcttctcgtttgcagtgtgattttgagggtttccttgtctaaaaaatgcagtttttaattaatggatttacaatagaaatgtagttagattcttcgacaccatcttcgttttcgattggatctacatgttatgctctctctttttccttggaatactatgtcagattgagtaatggttgtccttgtattgaattacagaagaaaaccaagcagtagtagaatggatcattcagcgaaaaccacacagaaccgtgttttgtcagtgaagatgtggccacgagtaagagtacccgtctcatgcttgttgagcggatgaccaagaac

SEQ ID NO: 45156 - DNA, 856 bp, Arabidopsis thaliana columbia
tctcttcactcttcattcacttcctcaatgcactcctctccctgacacctctcgttactaaatattctatctgagattgtaatttctctcttaattagctcttattcatcctcccatccattttttatctactatttcattacatacctttgaatgttaatatctgttttgctctcacgacctaaaaagagaaacttatctctttaccatctacttgtccacatcttctacattaccaagatagtatattcattttatcatctttaggacgtaaagaacgatgcataccaagaactgatgaaccttgacatctttccgaccgaaccaggttcgtgattgcgcaatgcttgttcctgaatacctatgttttctgcttctaactgcaaagaggaaataacaggacagcttgcatcattgaccatgcccaccctcactctctaattatacatacactagtttacctttttgactttctgttggagttcatcaacagcctgctgtaaggattgtatagtttttgatacaatatcttcgtatacggtttccacttcagccatcgaatctaggctgaaaatgatcccttcctgtataaacacatcttctagcattttgatgtcttcgttgctcatcctctctttcatctgtataaaataacaataatgcaaatgtatcttctacatcccgttttctgaatattagagagaatgaggaaatggctgacgtagagtcttaaccttttctaggatcccccacatttttcatctttggtaacgaggagggttcccctgtgccttcgcagattcacttcactagcacgtggtgatgcttttatgtgttttgcctgtacagtaaatgg

SEQ ID NO: 45157 - DNA, 590 bp, Arabidopsis thaliana columbia
gtttctaaattttcgtttagccaaggttttgtttctcttttgtgactatttgaaattaaaaccctcaagcattaccaaaaagatgaggccttaaagcaaatatgccttaactcacaagattctctgtctctctcttccctctttttcttattctttctctttctttttttgtcctctttctcctaaactctttcgaatctctttttttctttttctttctggcttctccatcaggaagattccgatgagaaactcgccgtccaagaacgggtcggcgggagggcattctcgtacttatacagacacaatctggtctccctttgtcaagtcaggtttgggaatatctcccaacagatcctacgccctagtctccctcctcatcctcctcatagtcggcgcttttatctccacgcgcctcctcctcgacaccaccgtaagtccctcaaaacgacacagtccacttgtcgtttagctgaaactaatttttcggtgtttagtttctttatgggtttgaattttgtgcttttgtcacgtgagagaagaattttctattagtactattgatcggaagtgtctttggtggttggtgt

SEQ ID NO: 45158 - DNA, 227 bp, Arabidopsis thaliana columbia
ccatttcttatcctttagagcttgagtcacagtatttggttcggagatgatgtcgttcggtgagagcctcggtgagactggttgtggcttctggtgccgtgatgctgtgttcggatctagtattcctttggtgagtatctgctggtgcatcagatcgtgaattagatctggcagcaacggtagtttgatcttggtgacaaggcagtgctacttgatttaacaaccgg

SEQ ID NO: 45159 - DNA, 696 bp, Arabidopsis thaliana columbia
tgacaacgattttcccttcagatccatcttttttcagtttccgtttgccaaaaatagtcttcatcgaaattttaccaaggaactcagcttcctcctttgtctgtgtgcccccaagaacttttgggtcacttgtaagcgcttcaagcgaataaccaccttttatccgccgtgcagaatcccataatcgtgccatgtgcatagtgtcggcatgaaaaccagaaatctcaattccatggttcctaatgatgtggctatcgaaactgtagttgtgccagacctgaaacgaagaaagccaacctgtaagggtttaaggatagctaaaaatgttcacagtaaaaaagacaacaagaaagtggaataagttttagaaggactcagaaaatgaaaatatcacagaatatgtagaaacaatcaaggtgtagtttataacttacttttctgatgaacgagtcttcaaaatatggtttaaactcggccaacacctccctgccattttcaccaagaacatcaacccagatgcacgattttccattcccaaaatctgcttctggcccacagtaaatactgaaacatattaattcaccgtggtcgacaggcgtttcttccttaacctcaatcccggacacctataagcatagagtaatcagtttgtcaattgtataaatatttctgagctgcagggatgcaacttaaata

SEQ ID NO: 45160 - DNA, 418 bp, Arabidopsis thaliana columbia
gggtttgtgtttacgaacctactcataaagcagagtacaacaccacttcttgtaactcgtataactcgaagctctctctctcttcagtcttcaccagcacaccttcttacatctgttttcccaacaaaaaccacgtaagtgtattctcttcatatatcaaaaaaacaatcacaaaattacgggtgattgggtgggtgaaagacattaaatgatttaccttgtgatacttctcgtcttcttcacggtctatgtaagccaaaagatcatcttgtctcattaaagcctcatgtaaagcctgaatcattggagagtgttggcgttaatatacacacacaaagacagttgcttttcatattacttaatagtagtcactgaacatggaattgagaggcttcctttagaccttttttgtagcgat

SEQ ID NO: 45161 - DNA, 518 bp, Arabidopsis thaliana columbia
gatgctatgtatacaaaaaagatagaataacgaaaaggtatgatctcgagcattgaaccattgcatttgtatatacatgaaggattcatgcttgcaaaaagatcctcacggaacaaaattcattgagatttggagaaaaacatattaatttttagtgagaaaggaataatatcgtaacagttaatttgcatctctatagtaagaaaatagatcgaattccttcagctccaacttttttatttattttcttttacaacaatttgctaatcattatattattttaatcaccatgcttgtaaattaacaaattgtatataacatcagggggaatgaacttaactaaataatattctatttatcatgtgaatctcttttatatcttatggtccacttgccgaccccacttccccatgcagcccacaacatattcatatcaccttttttcgtcgtgaatatcataaaaaaagtttggtgataatcggtatcaaacagtgaaaggaatggtatatatagagcaa

SEQ ID NO: 45162 - DNA, 550 bp, Arabidopsis thaliana columbia
atccccaatataaaaagttaagctctttgctagtttcgatttgttgttatacaaagaaaattgtatataaatttacgtcacgttattttattcttgacaatttttttttttcctccccaaagaaaaagtaaagttcatgaaaagggcgtgacgatcttttaaagaaaaagttctcttttctgttgacaataaggtttacattgaggggaaaaaatattaaattgagagtgagagaactggggaaaatcaagatttctattactatatctatatatgtgtttgattatatgcgcttttttttcctcactaatgattttttcccccaataatgttgtcatatatattcacattctgtttacttgcaatgaatgtttttccttgattccaggatctccactgaaagacaaatttattttattttaaatcctttgaatttatataattttccttgtaagaatagactcacggtcacaagacaaaactatatcagttgattttcaatctatatggaaccaacactttcaattcttgagaaaatatgtaaacaata

SEQ ID NO: 45163 - DNA, 594 bp, Arabidopsis thaliana columbia
cttactatctaaaagaaaatatgcattctaatgggatcatgatgttgatgaaaccaggtaccttgatcacaaccaatttaccgggagaatcccagacgcattctacaagcatccattcctcaaagaaatgtgagttctcacccaatttttgaagagttcatcaaagctttgactcagacaaaatagcaaacccatcgagtataagaatttgaacaatgtgaactgttttgtgtgaaatccatctggatgagtttatgatgactggtttttcagaaaagttgaatgttttctttcttcattctccactctgacgataaggagttctgtttctattttgcaggtacattgaaggcaacatgttcaagtcaggcgtgaacccaattggtacccacaaagttttagaagtttctgatgccgattttgccgtgtgaccggatagaagattccaggaaggttctcgagaaaacgtctcagaaccacctagagattgttccactttagccctcttcactattattattttttgtatggtctgtggatttgcaaatgaaagaaagcataagactacaagtttttatcttcatattgtatagt

SEQ ID NO: 45164 - DNA, 463 bp, Arabidopsis thaliana columbia
gatggcttttctcggatgatatgagaatttagacaaaatgagaatcgtcctaatcctagacgtaagcaaacaaaaacaagtatcaacctttataagagaacttcttattgcttaaccaagtcctgaaaataaactgtacaacaaaaccccaaatctccaatgttctttgaatagttgagtaagtcttgaatctattccatcgaccaccaggtgtaacagaaacctgtaaaacaatattaaagtagcaaactttcaaggaattgaatcattaaacaaaacgatattgattaaaagtacattactttatacctcaacttgtttttgttgagtgttgttcttaaaccaagcatcctcttgaccaatatcttctactctcttcttcctcacttcttcttttctcttctttgtcacttcctccgtttccaccgttacacttccgttcacatacttcaccaaactaccg

SEQ ID NO: 45165 - DNA, 852 bp, Arabidopsis thaliana columbia
acccttctttctttgatacaagtatagaataacactcttgctgatgaataataatgtttcataggtggaccaccaacgagcgcttcataccttgtgattgtttttcagtggatgataagttgcctcagtggccgtcacatgattctttcaatgatagaaaacgattttactcggtaagatagattaacaacactttttttttgttctcttctttttaagcagtgattttttttgttttttgttcatttaggtgaaggagtcggaattgcaaaacaatgattggattaatctgtatttggaacttgtactctgtgcaattcaaaaggtcagaatctcagatgtaagtcttgtttttcttttctgcatatcaaatgatgacataccatgagtgagtcagtgcaactgttggttataatcattaacttgtggtttttgttgttccaaaactgtgtggttttgctgctgtagagcgatctgtccaagctgaagattgtgaaagcggtgatagaaaccaaggaagatatggtgcccccaaatgagagactcaacgccaaaactgcagtggtctacataacttttaagggattggccaatgctcgtattgctgctggtgagcattatgaacgtaaagctatcattagaagaatcttcaatgagcatacaggtcacttgtctctccttggtgatttgattggagagaaaaagttcgtaaacattgaccctgttacttatttcaactctcccgcgtatctagaagacatcactcacgagctgccgccggagtcgccctggatggatattttggcgggaacagggtccatggatcagatagattaaaaccagttattttgt

SEQ ID NO: 45166 - DNA, 1458 bp, Arabidopsis thaliana columbia
ctctcctctgtcgggattttctctctcttcttcaccctatctcgttcgtaattacatctcctctttgcaccaagcctgattcttagagcttgggggatgaatagcaccagttttgttgtccatctctgttaaacggttcgtgttttgtaatagttatggatgacaaaagctgaatatatcatcatttctatatcgatgcctcatattcgttgttacattggattttccgttatgcgtcataatcgttcattttaattgatgtctgttcttaatcaattaattccctgaagtgtgttgttattcctctagtcgaaataaattgtatagaatctatgtttctttccgagttactatagtatgttttgcgttgatattgatctcgtttttttttttttttaatggtgcaattacatgttgcaatgcatttaggttggatagtacaagaaatggaccctgaaagtgattctaaatcaatgatctctgtttttttttttgtagttatattggaagagaagggactttgtgatgtatacaagggcattaaagaggaaccagagatggggtttggtattgcagcaagccaagtacttagttaggccagtcgttcgtgactatacggtttccagatattgtggattcacaaataaattaaccaatagtgaaaatttgacaagaaagtctctacttggttcattttctccccgcggtggtactattgcctcgggaaatcatttaagtattttgaagaatagccagttgcgtagttttagttctgagggtgatggaaggaatgctagtgaggataaacatatctctttgaacaaagagaatggtgtagatgatggaaaaaccgggaaggagaaaagtaataacggtgttgggcatttggattctcatgctcaacttggagaacaagaccaaatagaatggctcaataatgagaagcttgctagtgaatgcaaaaagaaggagtcacctttcgttaatagacgagaaagattcaaaaacgagttcttacggagaatccaaccttgggaaaaaatacagctttcttgggagaccttcccttactacatccagtaataatctacaacatgtttttttttctcgcttgttgtgtttctttctccatttctgcttatggattctgctcattatcttttcacagcgaccacacgaaagatattttggtggaatgtgttacctcacatataagacaaaagaatgccgcttccatatatggtgcccgtttagattcttcaagtggaagaatattgctccagagtgttccaggtttgttattgactatagaataaaaatggcagaccaggatttgatgttgccttctgttatcaagtaaaaatattgaggaaatgttagatgccaataagaaatttgaattttattcaggtactgagctttaccgggagaggttggtacgagcacttgctcgagatg

SEQ ID NO: 45167 - DNA, 653 bp, Arabidopsis thaliana columbia
  unsure (1)..(653): unsure at all n locations
ttcttcaccacccaaaacctcccaaattttttgttttcctaaggtttctcaagagcaggaacaaataacaaaacatatctaatctagatcgatggaatcatcttccaatcacatggtatgcgtaaacgcataatagattgtaagatttgtgtatatattttatgtttatttgaaagtgtgtataaatcttatgtttttaagcgcagatatgtcttttgaagatagaatctcctacgccgggatggaagaaatccttggaaaaattactcaagacaattaatggtttcttaatctatcacttttctcgtttaattatcttaattttatcatttcatttcttactttgtcttcacttctttttctgaatgcataatgtttttgttttgtatttatacatacataattttcaagatttaacttatgtgtatcgtttgcacttacaaaacccaattatttaaaacaattgttgtgtatcatctccggaatataaccatgaccatcgaattaatctttcggatagttttgtgtagtctagagatgatagtactataaacatgtttccgtttcaatctcttcgctttatcgaacaaatcgttattgtagccagtttgttaatattggactctttttaatatganatgcaagaatatatt

SEQ ID NO: 45168 - DNA, 730 bp, Arabidopsis thaliana columbia
caaagtacatttctttttttctaatgctttgaccatactaacccccttatttttcacgctacccattcttactccaattaaattcttctagaagataaatcattctattcaaaaacgtttaccaatgatcttagctgtaattaacgcaattaaatcatgcttaaggtatttagaaaagggtaaaacggtaacatactttatcgatacataaattggtcaactagcgtaatttaacttttgtccccattgcgtatataaaccgtcgactatcgaagccaacacctcaatttttcccacatttttctctcatctgcctacggttgcagattttattttattaacacagaaaaacaaaaaaaagtataaacagagtccacgaatttgggaaagtttaagatcaagacatgaagaaaactggaatcatcgcagcctccatctctgtcgcggcttctgccacggcgatctccgccggctctaccaacacctccgtgtcattctcttcgccggaatctaatctctctcgtcaggtaaaaaaagaagaatcaagctcttgtttatttgtttctcggtagcatttaaagttcctcctctgtttcaagtactcacaataagtttctcatagtcaaaaatttatcaaattacaaagttggagagtttttaacttttacatggattcggatgtgtaaagaataatttttagctgctgattctatacaaaggattacgtatg

SEQ ID NO: 45169 - DNA, 817 bp, Arabidopsis thaliana columbia
  unsure (1)..(817): unsure at all n locations
gaaacaaagtcaagatgtcgtcgacatggatttcccgaatgatgttaatgctgctcctttgcaggaacttccctggattcctgaacattgcgacatttccaaaggggatgacttgtcttcatctggtaatgagattggtccagtggctgaacccaacatttcatcaggaaaagttgtatttaatcagacaagcaaaacacagtcttcagagaacaaacgtgaggacaaagagccaaacatctcgttgatgtctcttagtaagtctaagccaaatgaagagccaaaaacatgcggtgaagctgatggaaaggttagtccatgtttaaccaacagaaactctggtcttaaaagtttgtggattagtcggttttcttctaaaggttcgttccctcagaaaaaggcaagtgaaacggctaaagaggccaatgcttcagcctcagacgcagctaaaacccgtgattcacggaaaatgctggcagacaagaatgttataagacccagtatcagctcggtagatgggcccgataaaccggacactgtccttcctatagtttcgtcaatgagaatagagtcttcagaagcaatggcttctttgtttgctagaagattagaagcaatgaaaagcatcatgccctcaggttctttagctgagaatgcagaggaggaacagagggatctaatttgtttctactgcggtaaaaagggtcattgtttacgggattgtttggaagtaactgatactgagctcagagatctagtacagaacataagtgtgcggaatgngagagaagaagcgtcaagtctatgcattagatgt

SEQ ID NO: 45170 - DNA, 506 bp, Arabidopsis thaliana columbia
taatcttcatctttccatcattggcactaaacctgagaacccaaatcacatgtcaagatacttcatcgaccagttaatattgaatttgattaaagctaacacagacctgaaactagatcccaaaaaaaaaaaaaaaaaaaaaaactgagacttggcaaaattctaacaatacccagatctcaaaccctattctataacaagtttggttctaaacatatcagaagaacccagatcgatgcacacaaaatcaagatcgaaacttacgtatatcgatttccagcaggcttaagatccacgacttgaacaacaatttcgggtctaacagaggaggaatcaagggattgattggctaatactgtcgcgataccatcttgggtcactgagttctccatctctatcttaatctctagctctatctcttctttctctttagaattcactaggaaatgggaggccaaatggttttgttttgtaaaagcaagatttgcgcgggacgtattagattt

SEQ ID NO: 45171 - DNA, 585 bp, Arabidopsis thaliana columbia
ccatggatcaaaatcgagtgacaaaatgtttgaaagtatagcatcctctgcattgttgactttgttcctgccttcatttgcgaacagagagtgctccacactggacatggatttctcaccaaatccatttggaagatgcaatctatcactgcccctaacttcacaaggtagggaagaacgagaagccatatgatttgtatccaaactggaacttgacaaattagacagcaaccgcgagtggataatatcctcttcagggtgaggccgttggctatccaatgttgatatatcctccacttgcaatttagagcttccttgcatttgcgattgcaaatctgatatccaatcccaccctggcctagtgcgggggatcctatcctctaacgagatagctttcttatcagtgtttatagaactatctatcctacattgctctaaatctggcaactttgatacttcagaaccaggttgtctaatagaaccttgatcactttgactaccaatcgccattgtaatatcaggacgttcaccctacaattcatagttaccgcatgcatgaacaccatccacaagttgttacagtag

SEQ ID NO: 45172 - DNA, 1120 bp, Arabidopsis thaliana columbia
catcatcatcatcatcacagaagattccaagtttcagacttgaatgttcggacttagacccacatatcttcacctccttcagcccacattccccatttccatctcactctcgggttactcatcatacatgtcgatatcagattgcttcttactctaggatctttgtcctggtgaatcatcagtctcatgtctgtcacacctctgtccttatcaccaatagacctgatgacagacactgtttgatgaacattggtatgatctgacatctgtacacgtgctgttatttgcctcaggctgtctgtctccttcatatcacctaggccgccttggctttggaaatgtgtttcgatatctgaccaagtcctgggactcaaactaagagaagtaatgccagggaatgctttgaggattgttgccagtccaagttctaacctctcagattgttctatagactttactgaatccactgcaagctttttgatcttgttgccaaaactgatgttgctgattaatctgtacatatcaggagatacgagctctaaagtcttcagatcttgaaactccccaaaactaacaccttcagcgtcctccacagaaagatggcattgcaccaacttgggcgtttcaactagaagagatttaggcttgttgcattttagcttcagttcaagcaggtttggcgccacgatagccaaggaaagtggagcattcgacacagtccaatgacaactctttaggtgaagaaaatggattcttggttccttaagtcctccaacaccaatcaaattcagctcttgaagaaaagggaaacaatcattgaccttctctagattctcatcatcaagtctgatgaattcaagtgtcaagtatctgagattaggcatctcagtcaggccaactacagagagccaagcattcttcacctctagtttcactaacttactacctgcaagatacaaatagacttaatctagttactatcatatatcatcatcatcatcatcatcatcatcatcgtcttccaataaaaaacttctatttcaaacgaatccgaaacgaaactagaggaaatgatgatggagaaaaaaaacttacagtttgaagaaatgagcgccaaaat

SEQ ID NO: 45173 - DNA, 798 bp, Arabidopsis thaliana columbia
aaaagcttttattttgcttttgagtgcactacaagaaatattggtattgatagcacaaatttatagcgcatttttcgtaaatgctatcatagattttgttctagataagagactatataatagcgttttttagctgctaattataaaaatacataagcgaaaacctaaaatactctttccgccaacacttagtaaaattccactaaagcgccacatggaaaatttgggttattccttagtcaagaaaatcgagtactctaaacactctatcttgaccaaaaaaaaaagagtaaacactctatcttcgagctctccgacgaagggattccccgacgaagtccggtctccgacgaataaactcagacgaccatcgagcttcttcatagatccgtcaatcttcacctctgttacctgaaatcgagtaaaaggtaagatttctaacttggtttcatcctttacaagttcaattccttctaactttggctttagatttcagatttcagatttagggtttatcaaatcaatttcatagttaggattaccaaacaattaagggttttcaacttataagtaaggctgcatatcaaatcgattacagatttagggttcaaacaatttagggttctcaaatcgatttcatactttaataatcatctctgttggcaggaatttcttgcaggacagcgcataaccatctctttattcaaaaggtttagtaatttcttagtcttatgagtcgttaatgtgtctgttaaagaaaaattagtgttaatgtgattgttttgtgtattacacatg

SEQ ID NO: 45174 - DNA, 878 bp, Arabidopsis thaliana
gtctctttcttcgaaaaaaccattcacagtcaagaacaagagctcactagaaagaaaaaaaactaaagaagtgagtaaaaatttcatttcttctgatcgccggaaaatggcagcgacgttaaagatcgtcgtcttccggcgaaatcctactgctgaagaatgtcacacgtaaaatccaactctcgcttaaaacccttttagcaagagcctcgaaatttccgatttagaaactttttttctttcttgatggcgacgactaacgctcacacggcgactcaacagacaccaccaccaccacctcctcctcctccagctcctgctcctccggcgatggatgggttaacaacagacgagctaacagcaaaagcattaaacaagagatacgaaggtttaatgacggtgagaacaaaagcagtgaaaggtaaaggcgcgtggtattggactcatcttgaaccaatcctcgtacgcaacaccgacactggtctccctaaagccgtgaagcttcgttgttctttatgcgacgccgttttctccgcctctaatccttcacgcactgcctctgagcatctcaaacgcggcacgtgtcctaatttcaactctgttactcccatttccaccatcactccttctcctacctcttcctcttcctctcctcaaactcatcaccggaaacgtaactcctccggcgctgtcaccaccgcgattccttctcggcttaaccctcctcccatcggaggctcttatcacgtcacgccgataaccgttgttgatccttctagattctgcggcggagagttgcattattcaactcctccgccgccgcagcatttgatgctctccggtggaaaagatgacttgggtcctttagctatgcttga

SEQ ID NO: 45175 - DNA, 739 bp, Arabidopsis thaliana columbia
aaaataatagttttagtattaaacccactcggggaaaaaaaacacataaaaaaaccaaaatcgatttcattgattttttccatattcacagcgaaagaatcgatccttaatacaaaattccttcaagatctcacatctcttataagctttctcgataccatcattttcctttctttttttcttttcttcgattctaatttggttctgccggatcttcaaccttgtctgaagaagacattttctagggtttctagagattggtcgggttttcggttcaagtaaatggtggatcagcctatcgtacgctccacttcattaggttatcaacgacaatattcatcatctaataatcatcatcaaggtcttgcttcgattctgaatctctgctgctgctgcttcgatagtgttcttcgacaatcaccaggtgttattgaaaagcaatgctgagcgtgatccgagtgcatcttccttctgaaattcccattgtgggctgtgaattgactccttacgtccttgttcgtcgtcccgataagaactccaccactgatgacgtccctgaatctgctcctcttgaaggctacttcttgagatacagatggttagatttctgattggctctttgtctaattgctttcttggatcatttggcgaattggggtttacaaagattgaattttgatctgaattcagagatttctcatgtagatgttctgatttaggtcgtcaaatggtttttgtg

SEQ ID NO: 45176 - DNA, 532 bp, Arabidopsis thaliana columbia
agaaaatatgtatgggccggggcaagactcctaggtatctagagagttgcatttcaaacctaatgataatagattatttaaagttttagaaaaatggaactcgtgactcgtgcactgagaaatcattatcaaattcgtaaaatattagagagcaaaaagtctgaacaagacattttccttttcatgagttactgccttgttcgttttggatatttcctccgttttataatataagttgttatagaccaaattttttgtttcacactataaattgttttcaagtttttatgcaagttatatattactttaatactttatgattatttatattttacagtctcttttatgattggctgaactttttaaaagttaatatgcttaatatgtgtgtttttagctaaaacaacttatattgtgaaacggagagaatattattttttagtatctgtttcatatttttatatctagatactagttaatcaaaaaaaagatctataatttcgacaaccctgaaattctaattcgttaataa

SEQ ID NO: 45177 - DNA, 828 bp, Arabidopsis thaliana columbia
tcagatttaacttcatttatctttcttaagtgtttcttgcagactaagtattgaaaaaactattggttaacaagatggatattgaggtaattttaaatagttttttttttttcagtttagttcgtgcaatgttgcgttttactgtaaaatctattgggttattgttgtcaacaaaaaagaagaagaacatattgttatcgttaagttgaaaatcttgtttaatgacctttacttagggtgatgatcaattggacttggatgtggaagcttattcacgaaactacgaaggacgaaacctagtgctgaggctacttcatatcgcagagaattctgttggcccgatgttcactgacgatttggaacttgaagcccttcgacttgcctatgatcttatccggaatgacggaattgtctgtgacatgcgtttgttcacagttatagctgaaaaaatacaaggcagattaggagaaggttatctcttggatgaaaaatggcgtcttactaagaacaacaatttcgtcaaacaagacagcattctaagaaacgacttagaaagtgctacggtaaggaaaagtgactataaaactttgcttgcgcaacaagattccatattgtacatctaatcttctattcttttgcaggacgaactctagaaagaccgacttgcacttcgtcagtattgactccattagagatgtgtagcaatgatttcgagtagcacttcatactaccgtgggttttttaaaccttcccctagttttgttgatgttattccgagaattagcaaaccgtaacgaagatgttcttggcaaccatcttttgatggga

SEQ ID NO: 45178 - DNA, 1005 bp, Arabidopsis thaliana columbia
atttagcatcattcctcccatgtgattcttctatatatatatttaagatgttccatttgtgcaagactttgtactacctcctttttatacttcttcatacaacctcacttcctttctacttcaccaaatctagtctatttctcttatcctacttgggaattgttaaatattgttctttgagttaacgttgagaaacaaactttacgttatcaagaaaatttgggcaatgcacacaccatctactcaatgattcaatttccttgggatttatgagttccaattctaaaagtactaaaggttccacctattcttctaagttttttttttggatttttgaaacttatgcttgtacttagaataggtttttctaactcttaacatctaaatggttttctacgccgattcctttgtttgcgtttcacacacacacacaataaaacatatataaacgtaaacaaaatatcagaaaatataaacatagaaaattacatcataatattagacatcaagttcatacatcatttaagttacaatcttttaagttatacattacattcctaaattgttatgttatacatattgcattttctaattatacaagtatacccatcctaaaaattatacaagtacaaaccatcttaaaagttatataactaggcgaagggctttattggtccacactagacttctaagccactatactacaataagagggttagtaccctacataccttcgctttggacttgttatggtgaacttaactgtaaatattcctacacataatacaaggacacctagaactagtccagtaatcctccatagatttccgaggtggattgcatcagtcaaagtggaaggaaacatacgagacgagccctcaggtggtcctgctatgactatcagacacacactagcatagtttccagtcccgtcacacaaacggaaccaaatcaccagatctccatatgggcgataaaaacgacacatccttggacagtgtccca

SEQ ID NO: 45179 - DNA, 514 bp, Arabidopsis thaliana columbia
  unsure (1)..(514): unsure at all n locations
ctcagttatttaactgcggtctctctatgttgcaggctgaaataatgaaaacccataatagtgaggtaataacgtttttcctctacttatgtatatttcatgtatacaccatcattgtctctacattaccagacattttgtgtctgtctaaatgtagctctattgtcattttgatgacacacagttcactgatactagtacttgaatttgcagctaaaggaattttcgaagcagcctccattgctggccaaaagacaatgcttgagaagaacccttaccggtccgtggtaagaaggtgaagtcaaagcaagaagaacctgctaatgtaatacaggaccactcaaaaggaagacactgggagagtaatatgtaatagaagatagtgctactgtacaggagnaattacagagacgcttacaatgtaganatcttttgagctgaaatttactaagagtgcagtctgtgtagagtatgagagctttccatatgaattcatattttccataacatatgt

SEQ ID NO: 45180 - DNA, 543 bp, Arabidopsis thaliana columbia
gctgaatttaactaagagtgcagtctgtgtagagtatgagagctttcaatatgaattcataattttcataaacatatgtaaaactttcagatttagctatagagaagatgtgactaactcagaaagacaatccgttaattggagagtgaggtaaactccggctgtaatgtgacctggaagtagtactagacgatggaccaaagatccgggaatcacctctttgaattctcaaattgcttctcttcctactatcccagcctatctcttcttcaaccgctttagcaaatgcgctatgcaccggatcacagctttcacacaacagcctcaagacttgcttaattgatggcctagaccggccttctttctcggtacacaatctcacaaccgtcacaactgcatcaagttgttttcctccagcatcattaatagagtctttgattctcgggtctaccaactcgaggtgttttgatttcgccaacaaaaaccgctgagacatttccacaaggttcctaccttcatcaactgctcttctcccggttatga

SEQ ID NO: 45181 - DNA, 825 bp, Arabidopsis thaliana columbia
  unsure (1)..(825): unsure at all n locations
cttatttcatcttgttgtttggtatgggattatttgatgtttttttcttgtatcatatggtttggggtgtaacatatatataaacctattaatttctttaagaaaacatataagcctatttttatttccaattaaacataaactaaaaatcaaaatatatatactcatagttatcatacatacgtttagggaacgagatattggtgtaactaacactactcctaaactctcatacaatgaaaattctaattaaataaggatatgaaaacaaatactatttgacacttcgattagaaaaatatatgtatcattaaaattcgaagactaagaactgaaagtggattaacattcagcaattcaaatttgatggccaatttcattttatatatatgtatcactcataaacttatgagtttcctctagttgatacttacactttttacatattattggcattttagaatttaagaattaaactgtttctaattttaaaattcaatcatttttttgacattttctgtaaaactaatagttttgagtttttgttttggatttttgcatgctaaaaaagatagttgcttgagaattttcattttcttttcaacttggaaaatatttatatgcaacagatagtttcattacattgtcccataagtaaaagaaaaagagaaaaaattaactcaggaaaatgtaatcccgatttaattaacctcgaatacgcatacttcgataaactttgaaaattantacaacgagactagtacacgtggacaatggtgattgataggtatacaagaagggtcaaagcaaaatagtcacaaatag

SEQ ID NO: 45182 - DNA, 1032 bp, Arabidopsis thaliana columbia
agtttttttttttaatttatcagttttatcacactactacacactttaacttataagaaaagtttatttttgtcttcccccatttatttaggatataatgtaaacggattcaaatgggttagtccgtttaagcctgcgggcttagcaggtttgatgaaaattaaatggacaattgtatctttaattacagagacgagtgacgagcgacgagtgacgagcgacgagtgacaagcgacgagtgacgagcgacgagtgacgagcgacgagtgacgagcgatgaccaaatcctacagaaagatgtctaatagtagcacgcaagtgactattcatatgattgaccaaatatcttttcgaaagacattttgattcttagtttaattataagggttccacgtcccgcgcgccaatcattttgcaaattatagtgttctactttgcacatacaatattaaaatttatctaatcattgcaacgccgtcattttggcgttcaacgtttctgctccaccctgataaattagtttttatattaaaacgaacgtctcgaggaatagagttaaccaagccagttattgaataatgaagccctatgtgagatactatatatggcatcttgatagctctcaaagctttgaaatcaattaagagatactatatatggatcacatactgaaaattatagcataaaactaaaaagtctaagtgagatactatggatgatggatcacatatacattgtagtcatgaagttcttaacgttgaaaagatctatacaattccaagtttattgaaaatgaagaataaattgtagttggagcaatcgcagaaaccaatcgaccatttgccgtcagcttgaggtttgccgccatgcatcgccttcaacttccatcactcacagtcactctgtcaattcttcacccccacaaaaggaaaataaatttctaaaatgtaaatgcctagtgataatatatataaggaggatattattctcagttttattaaacgtcgtcttataacgttcattaatgttata

SEQ ID NO: 45183 - DNA, 1039 bp, Arabidopsis thaliana columbia
agaatcccagccttgttaatctttttacagagcatgttatgaccataatggggtgaccaagcattcatattctggtgattcctggataacaacatcaagaggttgtgcccttccagtagaaataaggaagcatgcattgagaaactgtggctgctttctgcttctcaaagctcaaatctttcacacttctgcacagattaccaacacagcccatattaccaatgtcaatagaaagttcccaagcaaactcaatcgggatggcaagaaaagtgaaaagaaaatcaacgaattcttctctgcactcagcatagagaacagccctgtctgtctttctaacataaactttcaaagttaagagattgtctgcagctcctgcaacactgctttcttgtacaagtggtgtcaacattttacgtttccttgacatgcaatgtttcctcaggaaggtgtctgtcaatggagcttccgaagtgaacaaacaccctagcaaagttagaatctacatttacaaaagaaagtagtgtaagaaagatcgttattaagaagttgtcatcaagggtagatataaaaagttcaagtacctcttcaaaaccaacatcaataagcatttcttgcagcttatcaaaaccagagtaaccaaaatcattgaggacattcaaaacaagacccatagagttcaatgccactttgagatcatccgtaataacaaatgatgttctgcagctgggaaatactccatcagcttgctgttcttcaaccggaatctcacggtgcatagagcttccacaacgacacttcatggtactaacattgctgaataacttacggcatgcttcagtagaaacaaaatttgggcagacaaagaacttggtcgcctcggtgtcatcaatgttgagctttagatctctgccatgactccccttcgcactccgaggatgcagcaagaaatgcttacaagcttgagactcgaaattatcaacgtccatgtctgcaacacttttgtaaagattgtgtaacaaccaacgactgaagactgcgg

SEQ ID NO: 45184 - DNA, 615 bp, Arabidopsis thaliana columbia
cttgcagttcagagacaaagtgagaagcgtatttgtttgtctttcctttgatttagtagtgtgtgagtgtaaaaggactaaacaagtaacaactactttcttattaggtgttggccccaggaggaggcaaagaaccaatggaacttctcaccaattttcttggaagggaaccatcaacacaagctttcatcgctagccggacaaactatagtttgtagtattttgcacctaacattaggttccagtgaatctggtagctggtgaaaataaacatttctttggttgttagagacatcgtttattgatgtttgttaatgtgttgagaggacctagcggtttaggtggaaactgtaatcattcattcttagtttcttacctttctctgcatcgcaatctcaaattacgaagagttatataacatagtgatcatcattgagcatgtacggtgttgaagataaggacttgtctcgatcaatttacaagacagattctaatattatggttttctctcgtattaagacaagaatagtattgtctttttggttactttggaaataggattgtacaggccttaaaggtaagtagttcaggcatacgtaaagaaaagagttcaga

SEQ ID NO: 45185 - DNA, 1058 bp, Arabidopsis thaliana columbia
tggaaactgaagcatgtataggccaataaattacattctccaaggaaattgcttaaatgtgttcgcttaagtaagtatacagacaaacaaacaaaaacactgatccattacactttactttccagcaatttctattagctatttaaggcgacactatgcatgttgtaacatgagcagacaaaacttacgtcgaaaaccaacctcagttgattagaggcgtacccatctgcgaatctgcacctatatcagttgcgaagtccttaggcaatgggatatttaattccgagcaaacaagcttcacaatattagccgttacacctcccatagacatcttgttcagtgttactgcaatggaaaatctgttgttgatgtcacagaagcctgttgatcctcctaaccctgaatgtccaaagccaaccagagacccatcttgagaaatggcgcgcttaaaaccaagcccaaactttccatcaggcactactaagccactgtagtctccagcacccatgaaagcatcatggatcctcgggttgctaaacatattatgaatatcatgttgatgatcatcgctattgatctcagttttgccagcagaactgttagtatcaactagcctggctaaactttctgtatttgactctctgctgctactagcactcataaactgtttctcatcataaagcttcctctcttgatgatcttttgatttacccttttctgtagctgccatctccttaccctttttcttttgtgttgtgtctttcaacgacgtgaatttcggaacatgggtgtgctacctagtggtggctggattaaagaggaatgtggaggggcactaggccaccatctgctagggttgcatagtaccttgcaagtgcacgagcagagcaatgtccattagccgcagggattatggtctgcgcacattcaatgtgttaaataagactggcaagttggttgccatttgtatgatcttgtcaggctgaaatgtggaaggaagctcaggttggctggcaatggacgaaagcttgctcatttcatcagtgtcgaacgtcaat

SEQ ID NO: 45186 - DNA, 579 bp, Arabidopsis thaliana columbia
ctaaaggtaaagatgcgcatgtccgcgtccagttgtaatccataattgtaataagctagggccagagacactccgctgccgggaatcacaccaggtatgtctggatgctggatatccccgcttgagagagcagcgtccttcctaggcacattgttgtggataccggcaagcagaatgccaacattgttggctgtggacggacttggttgcagagaaagcgacaggtaataaagagcgagtatgtctcggacaccaggcgcagacctggacgaaccattggcaggagcggttgacatgccatcttggtaaatttttgccagcgagagtaacgagttgcttgtggtggataacgctgcttttctcgcaagcccttcagggacatacttgattccagggggtgttccacaaggtccaaataccaactttgatgtctgtaaagccttatccggatagagcaaaatagtctcttggggatcgtggcggtcgctatatatccagggcgcgattcttgagagaatgcggcgaaaatatgcttaatgattccttggatgccatagcgccttcgtcccgcgcttatca

SEQ ID NO: 45187 - DNA, 1293 bp, Arabidopsis thaliana columbia
gaaaaccggaaaagataggatctccttttctttctttcttttagtgaaatagatgataaacttgtttctgctaaaagaggtgtttattttggaaattatgaattttctggtcaatgtgatcttagaattttaaataggctggattttgtgacctgattccgtgtcttatatctgtatttactatatttagatgattctctgataactgatgttttaaaaagaagataattttgataaagaagtgattacgaactttccaacattaaaagtttagagtttatttgattttatatctaaccttggtttatatgtttttgatggggtttactaattatattataccattcaagttgaaatatatacaagttttttttgttttaccctaaattctctaatgtgatatatataatatataattcggatcggattcaaccaaaccatgaacgagatttacattttgccgttttccgaaatgttttgggcttcgtaaagaactaaaggtgatatttagatattgggtatctatttgttgtattgggcttaaaagtttacttttttggcccaaaattaatcaactaaaataagatcaccaatggaaaaagaaacaaaaaaaccagtaaaacatatgcagaaaatgtaaatttacagggcctaatataatctgcttgaccatgccattgcgacataacaaatgttacacaagtagtgtacctataaagtagtgtacctataatatattaacagtgatcaatttcagtgtataaaaaaagtcttcttaaatcatcttttaattccaacaatatgacattcacaaacttatctatgatttttttaaaaaaaaattcacacgtgtgctcaatttatgtttcttttagttcttccacgtgatttgatgcaagaaaaatgattagactgtatgttaaaaagcatactagagaaattaattataaaacatcaatcagttgaagtaattatcaaaaccgcatgcttttttagctaaatctgtgattgtactgacgcagatgcataaattcaaacgcaaacgctgatctctacattagccaaacaagaatagcgtccaaatttacgactggtttcacgtgcaccaaaccgtagggtataatatctctctctcactctccaacatccccactcttcccaagaaacttctataactgcatcagcccactctctagtctctgactaacgaacttccattttcaaaattcgaatttctaatttctagtttcaagctttcgtacggagaaaaaatgaaggagatcgcgatgagga

SEQ ID NO: 45188 - DNA, 829 bp, Arabidopsis thaliana columbia
tctttggtttcacttcaatcaaagtttacttgttcacacaaaacaagtttatttggtcctcaaaagtagtaactaactaatagtaccacgatgatcgtttacaccaaattacaattttttatagaaacccatgcaagactaatcttctatcaatggtttcaagttttcaaccgtggaccgagcgtcatgtgttatactaatcaaaacatattaaaacacttcgcctttgtaatatagctacgacttttgcattgacaaagaaatcgaaaagcttgacttttccattgtgaggaataagatctctagcttttagccaagtggtacataataacatcgtactttcgtccactttttagatgcttttattacgtttcccattaagaattcaagagaaaatttaaattgttttaactctatgtaaatctagaaaagtcaaaattattatggagaaagaataaactcattatggtctcccaaactgattttacaaccgattaaatgaagattgtccgataccggtaacaaggagttggccgacggtgaagcccttcttgagaccgatcacagcctacgtgaccgatgtggtgccttattcagagttcagtcatgaagctcgtacacggtatgaagcccctcgtccctgcacttaaatgaaactatgtagttttgcccaaaaaaccccaaattgatattctacttccctaaacctttaaacacttgttgtaaacccaggaagagggtgtgatctccgtttgaactcgcaaagaagctgatgaagaagcttagagacgcatcagccatcctctatcttgatcaagagttttgaaga

SEQ ID NO: 45189 - DNA, 787 bp, Arabidopsis thaliana columbia
gatcttcttgaaagccacttcttgcctaacgtccctggcatcttcgccctcttggaagacttaaccgcctttttacccaatacctcccgtctatccaaagagaggcaggcacattcccgttacccaaaataccgtctctaacttcggtcacaagacctttggtctccatgcaagcaggacagaggctgaaaaatggtcactcgttttacctggcttacagtacccttgtgaagccgatcaaagcctgaatgaggcgtttgctgattgctacagcaattttaactttcaggtcacttctgccgctgataacctcgaaaagatctcttcctttctccacatgaaacacagcatggcttggttcaatcaagtaaaaggagttgcggatgatgttgctgcatcctttgaaggatccggcacccttgctgactgctctccacatgggttggttgctaaccaagtcatggtcgttctctctaccccggaacatcttccagaatcaccaaattgtattgctgataagcgtgcaacctatgagttcggttaccagctcaaaagcacagttcgcaacctccctccccttgcggaacacattgccgccttctctcagacatatatcaggatgtttcctaaccatcccttcttcgggacgtttgggtcgaaaactcttgatcatggcccgttctggaaaataaggcctattggctccagccttaccgataacagctcctacctcacttatcccatcgattgtcaagcaagcattcaaaggcccagccacgtaggtgtt

SEQ ID NO: 45190 - DNA, 515 bp, Arabidopsis thaliana columbia
cgtttagctaagattttattgttgattgccattagtttttgaatctaaatagttgctatttatttgcgtgcaggggagtgtcgtgttattgggtcatatttggaatcattggcccatatagtccagtgtaccaatctttgaatacgactggcccgataatagagtcagggattcgaaatagttccgcgtttttttcaatatgttaaatgaccagtatacccatggacgaatacttgatttagtcttagacattataaaaaactactcttcaaaggttgtaaagtttcccaatgatttccaattaataatatagttgatatgacaatccttcactacattattagttacctaagattgcattatctacaaccataacttacccgactattcattgttgtttatttaagagtaggaatttcattatttttgaaatacgtaattctaagatatgtctcaccaaatatacctgacgatttgctagccaagatagccaaaaatggctaacaaatggttgg

SEQ ID NO: 45191 - DNA, 691 bp, Arabidopsis thaliana columbia
ggtggtagactggtaggtagattcggtggacgagaatgctccaaatggcgatttgttttgcttttaaaacagaaaaggtctcatctttatgaagaaaacccaactcctcagttaacatcggaccatactctttggctctgctgagttcttgattcatcaaagaaaccaattctattcagaatagcaattaacgttagtattaccaaaacgatgacatgttcaaaacgacggcgaacgatccgtcttccgcccagtgcaacatatccaaaacgcggcttttgatgtgattaatggatctcttgaaaatgctttggttgatacgacggataacaaaaactagagctgatatattcgcaagtaatccaaaaagcttcctccatgagctccttgtgtggttgaccaatgttgcaactatcataataacctcagattatatcttaaagaacttataataacagtaccatgttccccacatgttccatagatcaaaacataaaaacccaaaacataaagttctcggcttttcagtatcatcttaacttcgtcttaggataagggtacaagacacaaccataatctagagaagactagcaaaagagtgacgaatcaatcactggcttggtgaacggtcttcgtcatactggcccccatgcgggctttggctcctgcttctggtgggttcaggagtgta

SEQ ID NO: 45192 - DNA, 712 bp, Arabidopsis thaliana columbia
tcctctgtcatactatggttttgattgtgttaagatgtttgatgcttaatacttgttgataagtttatataagcctttgtgtttcacttcctcttgtatggtggtgtaaaaccattgttgatacaggtagttctaatacttgttaatattcattacctcagagtagctaaatgccattagaaactttacctaatgtgttcattatgtagacatagtgtggcctttagaaatattcaaggtatttcagactattctacacattgttgcagttttatgtccttggatgttacagaagattatctttgagttggacgaagttatgaaatttagaattatgatgcagaaaagatgaaactcggattacagcttaatagttttcttatgccaagcttgataagtaatattatttcattaactaagaatttacaagactaggaattttgtgctaccttccaaggttactctgacttctgtgtcttgatggtgaaaatctgatactcaaggctaactgatgtgtgatcatttttaccggtttagggtagatcttccaactttggacagtgttgagtggggtttaacccatgtagccttagctatagattgttaaatgatctgattgatccctggatttttttgggttgtttaggactggtctgcatattcgcacttgacattttgagattcccattgttgtctgtctatttgatccaga

SEQ ID NO: 45193 - DNA, 475 bp, Arabidopsis thaliana
acaggcactaagaggtctgtattggctccagaaaaccaaaagtctagaagtgtgagtgttacgaatccttctgttgtaaatgttgaatccatgaggaatcatggtttggttggttgtgatgatgatgatgaagacatgcctcctggatttggtcctgtagctgcgaaagatgacgatgatttaccggaatttaactttaattcctccagtggaccggttacttcttctcctcgaccaccgttgcagtcccggtctttggatcaagtaagggagctcatactcaagtatggaaattcaacaggtagtggtagtaaacgtacatgggatggtcatgatgatgatgatgacgacgacattcctgaatggcaaccgcaactgccaccaccacctcctgacttgagtcctcaatttcatagcggaaccatggccagaccaccagcacaacgacctgttgcgggaccaccgagtggatgga

SEQ ID NO: 45194 - DNA, 752 bp, Arabidopsis thaliana columbia
tgtttgtgtcataatctttaggacacaattattttctgctagtcttagattgaaactttgtgattgtctatgcgtgtttttgtatgaggacttcgtgagccatgaggcttgccctcattgagtgatcttcgattgctatctttctcttttgcaggttggttaagttaagagtttgttttcaatcttttttggcagttttgtaattaaagaatactttgggccaagccacgaaattaacgcgtggaccagctttgtctcacaatttggtatcatagaccggtcgtgtggctttgcgaggtcggtggcatgccttgtgatcggtatccgatagtattccttcaaaagggtgaaaaaaactgtttggcagatcggattaagttgatatttcttctagcgttatattgactcttctagctttctataaagtccaagatttctccttagcaagagtagctagttagaaacagcagtcatagatcagtcgcccatactcccacacgaggcagcataggagatttttagacaatgggcgaaaacccgatccaacaataatttggtgcaaagaaagaccttgaagagggaaccaaacccatgaaacttcgaatatgtactaaaatgtggtttacttgtcttatggtctattttaccttaacttacaaaccatttctgactctaaaaatacttgaatatcttctcttagctttgatatcacaccaaacacttcctaatatataagaaatcaaatcaagtta

SEQ ID NO: 45195 - DNA, 850 bp, Arabidopsis thaliana columbia
  unsure (1)..(850): unsure at all n locations
caaataaatgcatttagattctttctatttttttaaaaaaaatctaaaattacaataaccaactcgacggacaccaaacaaacatctctctctatcattttggcatatcaccttcaagatttagtaagccatgacacgttaaaaataaaatttaaaaacaccttacggattgctatataaatcaattggaagccgtcacggcctactcaaatcaacttccgtgtggtaatcagtctcatagctgatcatccgattcaatccaaccacataccagaaaaaacaaagatttcttacaaattaaagattcaagatgctttataaaaaatctacaacaaaaaccctgcgcgtgggagcngtcggccgtaggtcactactaaaagaagcatattgaagcttctcaaaccatctacatcagcgttcacaaactttctaaaattatgctacataatcacatcatttaatgacaagcccgttttgttgggctgtggtttgtcgggctgatatgctattaagaagcccatacacactacatcaaaggataacgacagaaccacttacatgtgttttgggctaaatcgatattaagaaacccatgtagacaagataagcactatgatgccacatcagcaaaaaaacctacgtaaatcctgaagccaaatcttctctcttcgccaaaacatttagggaaatttgtaattaaaacctaaatttttttaataatttgaaaactaacacctcaaaaattagaagacaatattgtgtataatatatgtaataaagacaactttaacttctatttgtacccacattcttcgtcttcctatacttaattttttttctgcaacttatt

SEQ ID NO: 45196 - DNA, 787 bp, Arabidopsis thaliana columbia
cagactacagattgttgaagtgcgttccacaaaacgaaatattattaaagtaggcaattaaaatttgtcggcattcccaactgtatcagatttgttatcacttctccatcaagcaatagtaaggaacaaaaatgttgaatagtatcagtgtatcacttaatggtgtttctggctatttttatcaagccatacacggcatctataagttacagattattaagaatagcgatatataactgtacaaacaatagactactttaagttttggctatttgatagacttgtaatttttggaaaatttaaaacaaaaacaactgcatcgaaacgaccctttactatctcgttgcgatacaattacagtaaaattttattgttactgaaacgaaaggaactgcttggcaagttacaaggcagggtaaggagacagacgatggagtttggtaggacaatgtacacaacttgatgttttctaagagttagctatataaataattaaaattttagtccaaattcaattatgtatccaagaaaatacaactgccgaaaacatttctctatgtttagtgttttttctttttctttttcgtgcaagttttatctattattttcccaacatcacggcctgcaggcacagagttttgtggtcaatacgtgatggtgtgattagacatatgtattaacctagatagcatggcccacgaggcacgagcttgagagttcattaatctttcattacactgatttttttattcaaacataatcatcacatcatccggttcaaaaaagg

SEQ ID NO: 45197 - DNA, 679 bp, Arabidopsis thaliana columbia
tttttaatataggaattttttaaactattgaaatttctgtaatgtaaaggttgaaattttaaacatcaattatgttgaatgagaaagaaaaataaaattaagcattgttgtctaatctatatgaagctgaaagaggtagtaatcagatgtgggcgcgagatcgtaacatgtggcccaacatgtgggcccaacggtgtctctgaaaacatgatacggtcactttcacgtgcaaaaagcccaacgtgtgaatacagtttttgttttaagcccatttatcattggccccacacaccggcctctccaaatattattcaccaatttagaaacgcagtataattattatattttgaacccaaaaataaataaattgaaaaggctttataattatttaaatgaaaatattatgtataagctattcgaaaaacaacgaacacgactcggtaagttttaaaacctctaaaatttgcttttgacataaagataaaatgaatcatttcttaagacgtaatgataaaattatatataatatagcaaagactaataatgtgaagttgaagcttatacgttacaccaacttgaaattatagctaaattatgaagtctttatttcataatcctaaagcagattgcatttggaagcaatacaaatcaaacttttagtcagctccaccaaaagttg

SEQ ID NO: 45198 - DNA, 616 bp, Arabidopsis thaliana
cagaaataagaaacgtgcacgagtaagcttgggatctggatcaaacagaaaggtgaagaggaagaaagcgcaaagcggtcttaacaaatttgtcgttggtaggagaaatgttgcagtcaatagtaacttaatggccgttgagttgaaccaccaagtccctggaaaaggaaagaggacggttagaaaaagaccagagaggatcgatgaggataattcccacctagtcaatagaatggctaatattgttaggcctaaaagcgaagaagttgaagaagatgaggaagaagaagagcaaacattcagagacattaatgaagactgggcagcaggtgaaactcctagagagatggaggaggactgggccaatgaaacaccaaacagaatgatgacgccgatgcaagtggatgatgaaagtgacaacagtgtaggagttgaatcagaggatgaagatggtggtggtcagtttgtggattatagtcagagaaacaagtgggggttagattggaatagtaacctaaatgtggcaatagaggaagacgaggaagaagaagttgtgggggttggcgggtcgaaggagaagatgacgcagaatgagtgagactctgaagatgatgat

SEQ ID NO: 45199 - DNA, 823 bp, Arabidopsis thaliana columbia
caaactcaggaagagaccttcgcttcccaaaacgaggccgaagaatgccttgaggcattcggatagcatcgcgggtgaagtgtcttgtcgttcagataagggaagttcggatgtggaagagcggaagatttgcattttgtctgaaagaccgcatttgtggagtagtgtgtcaacttcattctggacgaggaggtttatgtggttctcgatcattaatccaatgttggttacgtattgggacgcaacatcgtgtcttagcaatggttgttggatcgcgcataaacagttgatgaggaatatttttgagggtgtttcgttgttctgcaaaaagatcataagaagaaatgaaagttaggataattttttgggctatgaacgttgacgtataaactgtactggttttatataggcaaatgatacctgtggtggggatgggctgctagagagtagagcatcgactgaggttaactggcttgagtcagaacttgttctgcttcttctgggtaattggccgctcttctttgatttatgcgcctctgctgcttgctcgcacatctgcggatttgagaaagttgagaaatctgcttcaatgcacaatcatggttttcgatgcacacgatatttcataagtttgagctttcatgtaccttaataatagggtcaagcagtgcagagaggacgggatcaaaagccggtttctctcctgaagcagaaaccatcatactgttgtaattctcgataatctcaagagtaagagaaactccttctcggacagctggaggaggagagagatcacggctacaggtggagggtacgtagaagt

SEQ ID NO: 45200 - DNA, 400 bp, Arabidopsis thaliana columbia
gggttttgcttgtttaaactgcaacagaaataataatccttgaattcaaacaaaatccgaaattatcaacaaattctctaatcgaatcttctccaatccgcgaatagtaacatggtagagcaaatcttaaaattttcctagagactagttcaagagtttccatgattgcacagcatccaaaacgggaaagacaagacagagagatataggaaaatcaaacgcacctcgaagaagagtgattccggcgtcagtattatgaatattttttgggcaatttcttcgtctccggtgagaatcaagcttttagtctctttgacgcagccattttttaatattaaaggagttttgtgaaaatttcagaggaatttatttaaataatcaaaagacttcgaacaatagc

SEQ ID NO: 45201 - DNA, 445 bp, Arabidopsis thaliana columbia
cccaagttagactactacttatatcgatacaatatagttaacacaaaatatttataaaattattgatatatattttgttatcttgttaacataataaatatcagttaattcataatatattattacttatatatttgataaacaatatcatttgaataagataaaagatgtcgataacaattttcttatgttgttaaataatttattatgagcgaaagagtatttttgtctaacttataaaagttgaaaataattatgcagaaactataaatatatttttagtttttatgttttttaggtacataaattaatatagcccatcgtaatacactcagaaaattgtactttcaatgtatagagaagtttaggtaacgaacaaattactttttccatacgctcattaactagcttgccaatttttttcaatcaagtagactcacgttga

SEQ ID NO: 45202 - DNA, 516 bp, Arabidopsis thaliana columbia
taaaatttttagttcaaatagaccaagtaaccatgaaagtataagattgttagtgtatgaatgtggaattttgtgataaaaatttcattaacttataaaaatatgaatttttgttaaaaagttgttgtgtattttgtgtatgcattatttaagttttcttaatttggttttaaattttcatattttataaaattcagaaaactagcaaagtgaatagaccttagttgtacttagttgaccaaacaaaaaatattaatttgtataaataagacaagaaaattaatagtatctattataagcaacgcgtatgactgaagtctttttgattataacctgaaaataaaaaataaaaagaaaacggtatgtaattatatatcttcgtagaagtccgtcaacatacttgtacctattggtttcagttgtccaccgtttttataggtttttgtaggtttaggtggttaatgaaaaaggagagagaatgaatatgattggtagattttaatagtttgtttggta

SEQ ID NO: 45203 - DNA, 326 bp, Arabidopsis thaliana columbia
tatacttctctgaacgttaacatctcaatttggtcaatcagactgtattcatcagtgtagagggaatcaaaattttatagccacaacttcacgagtataagacgaagaagagtttcaatgaacaaatcaacaaatgatggaagggcttttatatcttagtttcatcaatcatgactcgacgtatgtcgcgcttaatgctgatatctacaaagtcattgcactgcataacccagagcagactatatcattcatcaactataatctgagtagccacaacgaagatgcgtttcagtacacagatcaactaatgatgggagaggtattgg

SEQ ID NO: 45204 - DNA, 263 bp, Arabidopsis thaliana columbia
tttataaaataaaattcatatgtttattttgatcaatcattctttaagaaaaatgtattttcattttgaataatttatttaaattaattagattgctatattagtatttggcttgtttataacttatccaaacccttgaaattcaggacgccttatatcggggctcggatttcgtcgtccatctcgagaaaatggagttgctgggacagaggcatatgcctcacgaagcatgtgccacgaactgcgaaaactcagaccaactt

SEQ ID NO: 45205 - DNA, 1203 bp, Arabidopsis thaliana columbia
tggtccctccaaaattatagtatgtatcttctaacaatcatataagataatagcaacacttgagaatccaaaaacacaaaaggtcagttcgatgtatatagtcaatcatctaaaaagcaatatagcttctaaatggttccctacagtatatagtttcttttgtttattcaacaaagatgatctggaaccagctcattatgggttttctgaccctcccacactttattcttatatacttttaaattaattagtatcatacaataaataatcaaacacacatattcttcgaagacaagagttagctgatcggttcaaatttagttagtgattgtagctagaacagtttttaattaactgttagggagtgatcacgaacagaagattattagaggctaagatgttatatggacttttgacacagaaataacaccacaagatgagggaaaagataaagatgattatgacttatataggcttatgtctatgtcgtctatgatgtattcgaatcttctaaagacatattgaaaaatcacatgtaacatcgttacaaattgtgggtcgatcggaactatatgacgtattcatctttttgacaattctggacctgtttaccaacagaatatattcaaaattcgtatttagaaaaaagcaatttcatatcaatgatacgaaacaatatgattggaaattcaagaacatcattaattgattttactttacattaataagagaataatagactacacattcaatgagcaatgaattgaatcttcttttttagtttatattcactattcaaaaatttcattttagttttacaattgttcttacctctttcccaagaaacaaatcctaaaaacgaaccctagtaagtagtaaaagaattgatttaaaacggcatgatatgtgtcgttttggtgtcgtaagccgaaaggcaagatcttgaattcaccttcgaaggcctttaggaagaatccgtttaacattacgtttaacggccggaagagcaattgctctgtaacagtaacagaattttcgtaactccgttaacacttgtaacagcttccaaagctttatcttctttgaatagataagaaacactccacagcaccgtctacggcgtgctccgtcgccgccgttgacactttcatcagcttcttaaccaccgtcttcaaacactcgccatctccgccgcaaatttcc

SEQ ID NO: 45206 - DNA, 520 bp, Arabidopsis thaliana columbia
cagatcgctgcttcagttttgtagtgccgggatattcagattggcttctaggagaagtttgaccaacctccacctgatgtagggaaggagcttcttgtggcaaaactttatccccttttgtgttatcatcactgcttccgtcatgctcacgtccagaaaaccatgttgcactgctaactgattcgttgggtgaactccttccagcgggctttgcactcgagtcagggcttccagctcgggagccccacctaagccgagcaatatcagctataacattccacaacgacctaccatttcttttaaaaatagcattccccactgctgcattgccttctgtggctcctggatgaggagttcctgagcagaatccgttaccacatttcatctgaaggtccctttgctcctgaaccaccagatgatcgccttgagtcccgctcttcaattgattgctttcagctctttgctcctcagtctccggatttatactccatgtttggctttttacaaactcccaacatat

SEQ ID NO: 45207 - DNA, 590 bp, Arabidopsis thaliana columbia
  unsure (1)..(590): unsure at all n locations
gattctgattgatcttgttgcttttccagtgtaggcatgtgaaagatgaattttacgaggttgaatcagtagatgttattaatgaggggttgaggaaagtgttgggaaccggaagaggaacccataatctgattggggaatgtgtatgagtttgtacatagttcatgtttctgaagcaagagattgaagttgtttagagaggctggtgttctaaaagtgacgagactataggctaagcttccccttgactatggttggcaaatccatcaacatacgtcatatgatgtgttctacggaatgtgtaaggtgctattgtactaaaaaagttggcaatttttagttgtaaaatttgttttacttatcaaacccaaacaagccaaatattctacacacatttatagtcttttcttttcagagtcttccaatttataattcagataaatagcaagtagttgggctccaattcaacaatttatcaaccacatatataagaatatacaacaaagagatanaagaaaaatacagaaaacaaacaaaggtaaatcaagtttcaaaccagtcgtcgataagatctaactgagttttggttt

SEQ ID NO: 45208 - DNA, 662 bp, Arabidopsis thaliana columbia
gaggatcccatattttcgaattaattttatttgataatattttataaaaaatagatatattaaagaaggtttttatgttttttcttttaatttgtatgaaaaatctttaaactataaatcaaataaaattgagggaataatagacaagtgacagattttcttcggttactaaaagagcaaaatcaattcattttaatattttgacgaaaacaaaacaaaaaaaaaaatcattttaatattttatgtccatcagcccgttgaattaggcttaaatggcggcgacacattaaagcttctttaattgcgccactaatatgatatgcgccactaatatgatatcccctacctcatatcaatcattgtaagtgtcattatagtttcttacatatattaacataacaattaaaaagaaagggttgccttccatgccaagccagcacatggaccgaattgttactcgctacagtgaggtgactggtgagatgggaacaagttgccatgatgtatgcaggtaagtgagggatgaacgcctgtctgtgttgctgcatgcctgcatgtgctatttgtatgtgccaaggtggtgtgatctgccccgaggaatgtctagagaagggtttctgctgtgattgctgagcaataataacgagagcgaggacaaaatt

SEQ ID NO: 45209 - DNA, 508 bp, Arabidopsis thaliana columbia
ctcaacaagtcaacaacattttatgaatcatatcaatgtttggggtacacaatcgtgaagataataacggagaaagcttgctaaagacttaaaagtggtgtttgtgaagcagtctatatggcccactattaaacatatgtgatatcatgcatgagttttggttactcattcaaaagtatgctgaacaattctttttttgttttcaaaaattacgggtatgttagattattttgagttaactaaaaagcatagaagattaaaaaaatgttacattttttatataaaatattacaactacatctagtgccggcttagcacatgtgcttaaggtgctaggacatatggtctagggtccaaaaaaaaaaaaacatgatatgattacataatagcactggatctacaaaatgtttgagccggtcctgactacatcacataatttcatgctaatgtttttgtgtgttcttacgcctaacgtcttctctacacaaaacaaaaacatgatcatgat

SEQ ID NO: 45210 - DNA, 473 bp, Arabidopsis thaliana columbia
  unsure (1)..(473): unsure at all n locations
gagataaaagagtcttcatgctacgttaaatagtacgaaattgtaaaatcatgaatatatatgctttaaatacctccagttcaccgactcacttgttgtagcttttgcagggattaggtgttcatagttactttattaaagttgcattacattaagtcattaacgttacgagttacgactccgttttgtcaactggccggcacctatccgcgantcattgacacatctacgtggtgtcaaacgttacagcctaagtcctaaccactcgttcgatgatgctaccctcaccgcctcacgtgtcggagcaacgtttaaatctttgttggtgatgggtttcttctgcacgtgaatctagttttatcgcgggtcatttgtttagtaaaggcaaatccctgaattatgatttatgatcacttgatgacaataagatttgagaaatgtatcatcaaaatgtcacggcaaatggagcaggt

SEQ ID NO: 45211 - DNA, 486 bp, Arabidopsis thaliana columbia
gtatcgatctgttggataactctggtgattctcaaagtcccactacctgaagtatttatctcctcttgggttgggaatcccagaagatcctcagtgggtggagaatttactttgacagcgctcgtcatatctgactgtacgtccgctaggcccttttgtagcagacatgtcctcaaccagggtcactgagtcgcacttttctgtgacatttaacactatggatttgataaaggagtatattaattaagagatagattccaaccacacactgaagaggttcaaagcagttctctgttgacctccatttcctgtgagcatccaagctgccttattgtcaactactgcagtatggagttcctgaataggcgtgcaagatgttcttagtgatctattattccaacaacatgttttaatttgagatccgttacattgcatgatgaagacagttttaacaagatgctctgtacattggactcgagctgcaaa

SEQ ID NO: 45212 - DNA, 479 bp, Arabidopsis thaliana columbia
ctagaggatggatcacctaattattgcaagtgattggcaaaaaaggaatcttgatcaatggatattttgagatgctaaaatgcttgttagactcgacgactcaataatggatgtaatcattcctcttccactgaaaaatctcataacacgattcacatcacatatctttttagacaaaaaatctttagtttccgtaccgtttatcacatcaatggatattttaagcctaatgcatgcacgttctttgaaatgtgtggacttaaattgatttctttagtttctcttttgttgtcattcactactcactactcactagccgtttgtgctttcaagagttgaatgaagaagaactaaggaaaaatacgttttcacgtgaagatttgggagacaagtctaaggaagtggggcattcatggtccacgaggactgaacttaatggatcatgatttgaccagtttgcccttgtcggcttctgtgtg

SEQ ID NO: 45213 - DNA, 580 bp, Arabidopsis thaliana columbia
catctccaacaacaggagatggaatctttcttggctatagcttgtgcccataatggctgaaatggctaataccatcttctgaatctcgttccatgtagatattcccaaaggtccgataattgatgagcgttcataatccttaatcaataataatatccaaggaaaaggtttgcagagatatattcataacatcaaagataacatgttctctacagtctccaccatatccttagacactgccacgaaccggtgctatgaaccggtgaatgcatgaaacatcactccaattcgccttcactgtcaatcccaatacccagatcaaatatacaaattacatcactgtatagtaccacttggcagagggaaatgacaactatcgaaaacgccacttcattcttgggccaatgacttgtacattttataaacgatcaagtcaaatatatcacaatcaaacacgaataaaagccatatttcctcataaaataactaaaagtcacattttactcataaattaacgtacctattcatgttatttctacgttgactcaaactaactttatccaagaacaagatgaacgat

SEQ ID NO: 45214 - DNA, 595 bp, Arabidopsis thaliana columbia
cagagaaagtgagagagagagaaatgatgggtagcttgaaaataatatctccaccacctccggcgacaagattccggcaacgagtaacggcgaacggagatgggtttccgacatttcttccgaagagatacaaaacataaaagatccattcgcaagagctttagctcaaaggattgtacgaattcctgttcctcttcaggttcttcttctttttctctgtctcttgcatgagtagctaaaacagagaatctttgtccttagtttcttgaattttgtgtaagaagatgaaaatgtgtttgcagatgggaaactttagaggcagtgtaatgagtagctgtatcaaaccacttgttcaattacacgacaaaagtcccgttgttcttctccattgtttcgacaggtattttattttttttactgacagtataattatttttatgaactcactgtgtctgaattttacttttgtcggaattcttttgggcttttagttcttgtcttgaatggagacgtacttatcctctgcttgaacaagcttgtcttgagacttgggctattgatgttcttggttggggatctcagatcttggtaagat

SEQ ID NO: 45215 - DNA, 1012 bp, Arabidopsis thaliana columbia
tgcacacaaataatataactattactagcgataataagactcaggatacatgaagtgcttgtagaatcattttttttaaaagtggtgtcttgatttggaccataaaacagtatgtgggtcagaatcaggaataaatcaaagaatgggtgggggtccaaatgatgggaaaagttaaagtgggcttcatgactaaaggaataaaggcccctaaaagctgtttcttccttcatcatttgtctaacatgcctctttctcctcacactttctttactctcttctccactttaatttgatcctatcagattagactaaacctcattacataattagccccaccgaaacttaattggggtccatactatattgtctttatataattttgaacactatcctcaatatgacaacaactatataatgatccaattgttagagcaattagatgtgacatcaaaatcaaataacacagtttatgcatgcatgaaattgttagagcaataagatgtctttatcaatatacttttatttgtatataccaaaatgatgagcctgtcttccactattggacatactcatgatttcaacaccaccaaattaaagagacaactctttggccttcccattctatcttcactctttattgctactttagttgacacaatgttcacttaagtttactactttaatttatttattttgaacaacaaaagattaaaatacaaaattccctgataatgtgctacaaattacggaccacatcaattctcccacattttaatatgaatttttctttcttgatttttgttaagttatcaataaataagagaagtttttataagtgaaaaaaaaaaaagatgatttcgacatgtttgtattaaacgtataagatgaccaaaacactgacaaaaacggagaaacgtaccggtgccggagaatttaaaattctcacgtgtggtcggcggagaaacctcaagtctcttgtgaagaatgtaagtggttttgatgacgtcgatgg

SEQ ID NO: 45216 - DNA, 525 bp, Arabidopsis thaliana columbia
tgtggaaggataatgtgcgtttatctaagaattctcagtatcaatccacccttgaaaatacagctaatgacattatcattgctttgctttaatttttatttttccttaatttaatttacaccacggcggccccacaccaccccaaattacgaatacataatagttggaaaataaatggaaataaaaataaaatatataattatcccttcacaacctcatccctccttcgctaccttcggaccttcctcattcctcctcttagctttagccactttttaaccctagtttttcccgccgccaccatcccccatggcttccgaggcgaatcagcttcagcaagcgcaactcgcgatggttctcggctccgattccgcgcccttcgagacgctaatctctcacctcatgtcttcttccaacgagcaacgttcctccgccgagtctcttttcaatctcgctaaacaaagcaatcccgataccctctctttgaagcttgctcatcttcttcagctttctcctcatcccgaa

SEQ ID NO: 45217 - DNA, 667 bp, Arabidopsis thaliana columbia
ccgccattatcaatatgaacaaaggaaattgtgaacattcactcttatcaaccaatcgagaacagagacaatcgcaaggtataaataggttgggttgcgagtccgttattggatcttcaaccgttttaccgttattcacccctgaagaaaccactggtaaccggcaagaacactttcggagaccgagagacagcagttaaaggcgaagagatacaaccgttcgtatcatcgcttttctctcatttcgtttttacacattttaaattctcgatattaaaacttttatgaagtttcaaatattataatatttaaactttataaaaatgattcgatgatatttaatatcatatgacgaggttagatggtgggacgggttgggatccatattaatatgagacagtatattaccggtgaaatcataaaactaacaatctgtataaaattggcaataaaaataaaattctacaatcttaaacactaaacaaaacaaacaatattaacaaaacaaatacaaattaaagttttaatttttaattagaaaatatcgtcatgcagaacctttaaatttcaacctaatttcacccactctaatgtaaaccttttcttcgtatcataaaatattatataaaacaccctgtttcttcctctaattccactcttctctctc

SEQ ID NO: 45218 - DNA, 588 bp, Arabidopsis thaliana columbia
tgcactacaagaaaatcagtatacattatacaactaggcaagatccatcttgataaacaataatgcttcgagtttactaactttgtcgttagctttttcgagcttatcacaaacttcctgcattgctggtagaaaatcgttaatgagcgtgtcctctccggccgcagtagtctcatgctctgacacagagtcctctttgcaaatctcaaacctctgttgtgaacccataggcttggcgtaacgagttaagtatatcatgttggtggtaatacatgaagttgtcttggaatcaacttctttagttctcactattgctggttgcctaacaatcaaacctcgagattcaagctgctttacactatagaagaagttccttccatcgataccaaactctttcgcaagcagattttgtgcatcaccattgtctctacatgaacatatactgttaattatcacaactctgtaactaactataaagtgaaaacatgaatttaacttacctagcaatagccaaacgttcaagaacacgacgttgaatcgcgggaatagtcgtgttattcgattgagtatcgtcaagcgacgaagtag

SEQ ID NO: 45219 - DNA, 385 bp, Arabidopsis thaliana columbia
  unsure (1)..(385): unsure at all n locations
ggtctgcgcctggattagacttgagaattcaactacgatgaataagcaatgtgcagaatctacattagtgntattgaatggagcgccaggggacncaaagacaagactacatcaggattgtacaaacgatatagtcccagattgcagatattatgatagtgccgacgacaggttgtttaggtgaattctgatgctagcttgaanatatctgattancgatacactacattttgatnttctcgagaattttgtcatgcactgactctaatccgtttagagatgattagcttngtccaaatgtgtttttttcgagggccaattccgcaatataacagtaatctgtctttaatcatgcctagattggcttattccttgtcgtataaga

SEQ ID NO: 45220 - DNA, 164 bp, Arabidopsis thaliana columbia
tgctctgctaaggcctcaacatacttctgctgtttatcagatctcaatcccaaaaccacaaacgatactcctagacacgtgtttatcacagcattgttgttcattgcttccgagagagacattgcaatcttgttcgccattcctgtgtagccacagccatcagt

SEQ ID NO: 45221 - DNA, 630 bp, Arabidopsis thaliana columbia
ttttgttattaatgttacaagaaataaaagataatgatcatccatcattcatgatgtcatcttgttcacacttgcacaaacctaataagttatatacaagacatttttctagtttggttagattaggtttcttttccaaaaaccgaactatcaacttttttttgtgtcaaaattttcaaaaattaaataaaattgactgtctaaaaaatcacaaaagactatgcaaatttctctttagtaatatatcaattttgatccaaatgaaaatgtaggggtcgttatgtaaacaaatgaaaacatgaggaccctccgggcggtgtatagttcacacttgacaaataggggttttggagttaggcccttccatcctaatcgcgcttccgtcgccgacgccattttactcgccgtcgtcatctccggccacgcttgtcatcgttcgcaattaatcgaaatcgaaattttccggtaagtatcctcctttcttattaccgtatcattcgagagttggaatcggatcggaaatgtaattggttttgaggcaataggttaatcgtatgtgcaatggtggagttcgagtgtgatcgaaaactcatttgctgagagattgataaatggttgatagtatgattg

SEQ ID NO: 45222 - DNA, 858 bp, Arabidopsis thaliana columbia
tgcctccggttctcgatacagtttacgagcagactgggatgcagccgcggttggatcggtactctaagcaagtgaccgcctcgacagctaagaggttgatgccatggtttggtcgttacttgtgattgataatcattgaaagtgtaaagtgttattttattttaatcccgttggaaaacttggtttattcgtaagtgtttgaggttgtattttttactttaattgtattcgtatatatgttgaatgtgaaataaaaatgagagacaaattttcaggaatttgcagagaccataaggttattttgtagtatgtaatgtatgtacatattgagtggtgtttgatgtgtgtatcaagtctaggcttattgtaatttatcctttgagatgctagaggacaacaaaatctagtggagaccagactgaattagagaagtaaaatgccaaagaaatgctttgtttgaatcactatatatgttacaaacctagccacaaccaaaggagaaactaaagagcaggacaaggtattttgaaaagaaaggagcaactcacaggtacatatagattacggtttctctctctctgtctctttatgatccccagtttggtatgttggccgtggcttcatttatcatcttcactagtgttacctgccaatacattaatgaagagaactgagctgtgtttgtaatcattcgcagggaagttgccgcgtaattcggcccaccgactggaacataaaatgggtaatgtgttttagaaaaatgaaggcaggacatgtaaacataccacactttgtgaaacaccacggtggaggcattgtaaggttccttggtggtggtttgctatcatacgatctttt

SEQ ID NO: 45223 - DNA, 559 bp, Arabidopsis thaliana columbia
tatttataatcatggactataataataatttgatattattttctatctaaaatattactccactgtacattaatgatcgattttttaaaatgaaaaaccttaaattttaagttgtatttgttttgttagtattatttgggttgtttagtgtttaagattatatcattttattttttgttttaaatttaggatttcacttgtggtataccatatcatattagtatcaatccaaacttgttccaccatataactccgtcccgtaaaattaaacagcattttgttattttttgtttaataatatttttaattaaaaacatatttaaaagtttcaatttttatggaatgcattcggtctcaaattaaacatcattttatggaatgcattcagtctaaaaattttacaatgtcgtgaaagcgttgataactgcctaaccaaatatagataacacatgtagaatagtaacgtgagagtaattgggcttatttaataacgaaagtagtgaactagaggtagaagcttgaaatatgtaggaaattttgcaaaatctgccatattatt

SEQ ID NO: 45224 - DNA, 704 bp, Arabidopsis thaliana columbia
tctggctttatgataccatctttaagtgctctaagcaatatgtctcattgtctcgagcatgcaagatttcatgaacacttcaactctgagtttagatgagagggccaaatccaaattaataatttatttagagtaaaataattatttgatgttcacttcatatacacatcatgcatcaatctctatttcaacccattagttaaataagtatgtaatgaatttctttgggatatgttatcaaatactcataatgtttttaataatgcggtgatattataaaacttaattgatgatcatatatggtagattataagtgatcgtatgggagttattaaatgaaccaggaaccacataaactttttgctaaactcatgttgttgtttttctcttctttgctcttatagtcttatctaaatcatgcttctgtgtaacaatatatatgtttttgatattattaattaagcagttttttttttgttttgtaaaatcatacatcacaataaaattaaaccaataaaaaaatggaaaaaaacccggaaaacctttaattttgttttgaatgattagtttatgtttattatacattacattcattaataaacccatgaaatgcctactgtatgagccacttgttgagctcgtcaaaactacacaaagtttcaaacgtatctccgccgttgaccaataccaccatttgtcatatg

SEQ ID NO: 45225 - DNA, 538 bp, Arabidopsis thaliana columbia
tgagactgaagattatttcataataaatactttggctcatcagccactatacttactaaaacaatttactctctctctctctctgcaatgtcacaacctctcaccaccagacccaccgttaccggaatatctataatccctttccgacaaccgccgcctctctgttctttcctcttcgtcatcgttcttttcgtcgccactttctacactctccatcatccagacgccgttactcctcctcttctattttctcgaaatgcctataatgcccttcgtctccgccgcctcttcctctcctctgcttctaacgccaccatctcctcttacctccgtgaattgacccgtcatcctcacctcgccggaactaaaccctctttagacacacttcactacgtctttaaccatttccaaagcctcggacttgagacccatgtcgccgaatacgaagctctcttatcttatcctacgcacatctccgtcacggcaagttttagcaacacgacgactcttgagtttgacttaaacgacgttcccggag

SEQ ID NO: 45226 - DNA, 563 bp, Arabidopsis thaliana columbia
ccatatatttatggtgaaactatatttaccgatttaaatgtaattctttttgtacaatagtataaataatctatgatttttaaaaaaaaatcaagatataagtttgtttaatttataggattaataaaattagtagatttggacactggaaattacaaatcatccgagttttagaactaaagcagacctattaaggatgaaaatcatctgagaaatgactatccgaggaaaacgaatgccacggtgcatcaaaacactgctttaaacagctaagtgcattttgtactcgcactatatacagtactcatcgaaacgatacttggatacttgagatgatcaacatcagattctttcgaatcattttgcatcatcaggtttttggccaccagctacgctactggaagaactgtggtctcgtacgctcggagaagatgaacacttgctagaatgagagctttcttctattgagttgttgttgttgttctcttacatctctttgtcttctctggcctttgcaatgtaccttcaaaatacaatttcgcgaataactgtgaagataataa

SEQ ID NO: 45227 - DNA, 173 bp, Arabidopsis thaliana columbia
ccaaaatagacatatccattaaatattttacgtaaaaacaaacgctaaacgaaaaagtcagtcgaaccataatgtaatacttatatcacttacgcataaaaagtctttcatatcattcatatcgacttccgatgccgcttctgggagaacatcgatcactggatccaggaaat

SEQ ID NO: 45228 - DNA, 540 bp, Arabidopsis thaliana columbia
aacgcatttaataaaattgtaagagcaaactcgcactgatacgtagaataaatttgttgcttttgccttcacgacaccattacctatagttaatactccaaaagaaatagcagattcaacatacaacgtgcaagaccaaaaaacaaatgactcgtaatctccagagaatcataattcataacatgggagattgtccacaaaaaacataaattccctttcatgtctttttgttagaaaacccatttcttaaggcccaacaaaaaacataatcccctttcatgtctttttgttagaaaccccatttatctttcttgaggcccaatttgaaaacccacattttctttcacctaacccaccaaagcctttgcacatgttgacgtgaacaccaaactaacacgtgtcatactgccagtggttatgataaatgctcataccataccagagtcatagagtttttggttggtgaaagatttgacggatgccttcttctcatttctcaccgaactcctccaaacccaacaaaagtgttcatattagcaa

SEQ ID NO: 45229 - DNA, 545 bp, Arabidopsis thaliana columbia
ccataggtaaaaagatatagacagataaaaattaccaaactaatccaaaattctatattcatataaatattccaagtccaacaaggaaaaatcataatagtataaattaatcccttagtatttatcttagcatcatcatcgccgtcatcgtcactttgtctcgtccaccttttaaaaaccctctctaaagtctccgaaacatcttctctcttaaacaaatcctctctgattcgatgggttttagcaaagaagagattagtaaaaccagaaagctttggtcatctctatggagaggaatcaaaactatattcgttttgttcacaatgttcttctcttttctccttgtctctgctcctatcttcctcgccgtcgccgatgctctcctcccttccgctctcctccaccgcttctcttcgccggcgactctctcttctcatctcaccaactacgatttccgtcactccctcatcgatattcctttaatctcaatcattagatccgctgttatactctgtgagtaaaaaaaagattcaaactgtacaaaa

SEQ ID NO: 45230 - DNA, 317 bp, Arabidopsis thaliana columbia
cataagttgtcaacaatttatgaaatgtttggcaacccaaaaatgaagaacttgtttctggtaagtttgataactgacttgtatagtgttccgctagaaaagattgaggatgcataatctatatcagtatttttgaagtatatttttaaagttaacatttattatagtaaattatcacacagaatgtcattatctatacctatgtatgtaaaaaatctcacaattaattatctactatctatataatcgaacacatttacaagattgtaacattttagatataattggaaagtagataagtatctgttgcaataaat

SEQ ID NO: 45231 - DNA, 103 bp, Arabidopsis thaliana columbia
tctcgcgtacttgccctgctcctcgatgctggcgaggatcgctgcacggcgctcgtccagctcgcgcaggtagccaggcagtcttccaggagacgcacatggg

SEQ ID NO: 45232 - DNA, 524 bp, Arabidopsis thaliana columbia
taatctgacaaattctgtttcttgggagtgtaatgagtatttagaattgatcaacaaaaatattcaacattttttttgaaaaactaaagtgaagacccgcttcaaatataaaaatcagtcgaactaagttttggtcgatctcccaacaaaagtatacaaccaaaaaaagtcacactttaagcttctttcactatttgttttcagatcccacaaaaagggaagtaaacaaatcgttaagaactcttcaaaacctccacttcgaacaatatgtttgcaaaagacacatgtcgttgagatttctacttcccaaaatacaaccgagtaggcgaagattacaataatgatctcatattttatattgacaaataagaatatttcaataatcatcatctaattcaaaaaggataagaatgaaaataagcaccagctaatctaatttaattataccgcagaatctaagaaaatcatctggatcatggtcttaacatggcctacatgaataggttgagtacacttattattaa

SEQ ID NO: 45233 - DNA, 498 bp, Arabidopsis thaliana columbia
gggaaaggaataaaggcttccgacaaagcaaaggagcataattaaataactaatcataacaatgttagttaaagacttaaaagtaaaatggaaatggaaatttatctctctattcaagaaaaacttttaggcttttagctgaatgtactgatgagtgacgcctacaatctcacacaattctttgttccttcatctataaatgaaactgtagtaccttcatgtgaattagaatgttgatttttgttattaactaaattgaaaccatacatacaccacacgaagtctccttttctttattttgctgtgtgttaatgaaaatgtaatatttacatgtaaatgcagttgttgatgttagatataaatatgcgtacgacaaaatttacagacgaatcggatagagaaaacataaatgttatcaacacccaaggttgtagtgttgtacaacgttacaaaaagaagcaaagaattaaaaccaaaaaaaaaaaaaaaaaaagtagg

SEQ ID NO: 45234 - DNA, 633 bp, Arabidopsis thaliana columbia
taatgatcccatcatgctgcatgttgattttctgcttgaccaatgcttcaatcagaaagttaagaattttgaagaaatatttaagtgcttgatacattatgccacaggagtcaatctttatgtagttggataaattttggaggtttaaatgtctggaactgagaacctaaagtagtttgccatgtatgctttaggtttcacatccctagtggctgttatttgatgagcttctttgtatttagtgataaagttttcatggttattaagtgtctatgagttccagatctcgccgcatgatgcgaagttctgaaaatgtgtgatactctgtttcagttctttgtcatatttatgctctttttacatcggtgattgtttttagtatgtcatttatattttttctatcagtgcattgattgagtttcagagcctgtgttagatagcttatgcttgtttctcttgggtattccttatgtttgtgcatgatataatcccatcttgattttgagatgcatcttgtgtgaccttatgttatgactctgtgatcatcttttttagcttatgcaatcgctattgactgagtgttggaaatcacttttccagctgaacagagagagagatgtgaagagagatgag

SEQ ID NO: 45235 - DNA, 438 bp, Arabidopsis thaliana columbia
tgctatggctctcaaatagaggaaaactaacaaaacacagcacaagattaaaactcacaaaaaatcaatgccctaaattcacaattgaaacttggtaacatccattgaaagtttcactgtaaactagatagcacttgggacatagcaacgcatacggttttctcatcgacgaaactgtggcgaagatctagatactcaagagaacgtatgcattcagctatattgtccctgtatatgactcataaacttctgtaactagatacataacaatcatcaatgacccaaaaaccaaattcatcactattaaacacacatcataaacattccccaatctcaattttaccaaagtctaactcaaaatctcaatttgaacacactatatatctcctcctcctatagctatcaaatagaggcataggaacaaaacgcagcacaaga

SEQ ID NO: 45236 - DNA, 528 bp, Arabidopsis thaliana columbia
tccccaccatcatcctcttcctcttcttcttcatagaatgaccctgaggatctcagttccttcaccttccgaaactcgtcgtaatgtgcttttctgtgtgcgttgaaacgttcatttttaccacttccagaacctgtggttttgcacacaaaaaaaatagatatatcgggatgacctaacaaaagaacctatatatgacagtagatttgtttggttttagaggaggaccttcttcatcttgatccattggatctgcttcttcttcttcttcatcagacgagctccagccaccaccaccagaaccctggctactatttctactggaagaagctgctgcatcattcagaacattcctcagttcttcagctcgttgcatatcatcaacacattcatcaaacgctcttcctctaggagacaaagaacctggcacaatcaatcacggattagaacagatcagaactgattcaagttaaccttacatctagagtgacaaatttccacatcaactaaccaattgcagggacaaga

SEQ ID NO: 45237 - DNA, 541 bp, Arabidopsis thaliana columbia
ttttcattattatatgtccatctttattttggattatatgctcgctcttgtaacttttgcgtttttttctacttggaaaattaatatttatagtcaatgaaagttaaatactatagataaccaatgaggtgtccttcatccatacgttgggtataaatgaatgaataatgtattttgtcacatttagacccccaccactattgtgagaattttgtaggtctctaattgatatgttttttttttcacagaacgaatccaacaacaggtatatcgctcatagtttaaggtattcgaaaccgttaaaaaaaagttaacatggcaagtatcagtatcacctgacaaaataattagttgcctatgattggaaagaaaaagaagcgccgaaattgtagtttggttaagattgtcttgacagttgtagctccgacccaaatgatatataggggcagacttaaagcccaatggcgtgatattatgatgggctcctagtaactgttagaacctgaggaaacttgtgtgaggacatcagatggtcaatgtg

SEQ ID NO: 45238 - DNA, 449 bp, Arabidopsis thaliana columbia
ccacagaagttgtagagagattatagatgatggactctttgtatgtcattctgttttttcagacagctaaacgttatttaaaaaataaaaatacaatgcattaaaaacaaccatcctcgacttgtgctcacgcaacgctaccgtcttcatcattttaacctctctcgaccattttaacctctctcgaccctttttgtttttcattttttttaattaattattttcaaactaaccgaacccaatcaactaaatttacccctatttaactcaattttgaccagaaaaccaaaaagttcgattaatttcgataacaaaataaaataataacatggttcttaaacccaacccacacgaagaatcggactgccttttggggccacttggccattgtgtcaaccgggtttgaccacaagtcaattaaaaaaaaattatttaatatatttaatatt

SEQ ID NO: 45239 - DNA, 437 bp, Arabidopsis thaliana columbia
aaaaaaagaaaaaaaagaccccaaaaagaaaaaaaaaaaaaaaaaagacaccagagagaaacgaacacacacagggaaacccaagaacatagcaggcacacgccataaccacacggccaaagcgactaagaagaaagcagaaggattagctacaatataaagatgtattacataagtaaagcgtggagcatacacgcgtatgtagcgcgtacgtatacgttgagcatgaggaaaagagaaaaacacattgtggatagaaaaacgaaaggaccagtacacaacagaacaacaacaacacgacacaggaagaaaaatgtacagaaccacgcagctctcacagccaaagaatggcctcaaagacatagttgagacgagaaattctaaggtttgaccatcaatttacagacttcatacgagcacacagactaacacaccac

SEQ ID NO: 45240 - DNA, 617 bp, Arabidopsis thaliana columbia
  unsure (1)..(617): unsure at all n locations
agcgttaagaaaagagagttattcttttatctttgttcttataatcttcttcaaaactatagtacctggaccaaacgatataggtggagatatgtttcccaacactcctcccacgataacttttgcatgtccacatatgtctatccaaattgtgtttaacttaagagccgatgccttactttctaaaaggatactactatgtttcactctgatgcaaacttagtgtggctagcatatcctgaaagaaactccaaattgcacactgcatgacaaaacacatgcttctgatagcaattctgattttaaaatacaagaataaccgtctttggtctctagccccaagtgtacctatcacctaaaagaaatgtttgaaagttttggcattgtccatcactagcatcatcaacggctccaatgtagctagatcactgattttccatggtgatctggtcctttgatggtgtttgatcttccttattagttcagaaaccagcatttcccggattaaatatcgaaagaaaaaaaatgtggttccgatacaagaattataagaaaatagtgagcattacaaataccanactaaaagggtgcaaccggaagtacacaaacatgggatt

SEQ ID NO: 45241 - DNA, 443 bp, Arabidopsis thaliana columbia
aaacccatctatactttgatcaattggttaagatagaggagtatgtagagtgataaaattattgttgatacttgttaaataaataaataaaaagaagaaagacttgaatatttttggcatagttctttattggataaatctatgatttcaaatttggttcaatatttccagtcttttactaatatctgcatatggactttgtcaataagcctaaaggttgttgtcgtatcgtctttttcttatgaatttgaaatcatgcagtgtagtcaagaggttatcacatcagttgaaagtacaacacgtttacaaagtttgaaacatttcatcccgatcatcatagcatacagtgaagtaaaataatcaaagtctttattttgttggttaagacattaaaacatcctttggaacgaccactctctctttcccatcaggcgatcccgcga

SEQ ID NO: 45242 - DNA, 299 bp, Arabidopsis thaliana columbia
gtgactcacactcacttaaggttttgaaattacaagattttagaaattggaatggacatgtatatgtattgtcggtgtgttgtcttataacctcttaatgggaatcggattcaaaacaaaccctctcattccacgtttgtaaagcacgtgcatctacaagaatttaagattttggtttaaaggtacactcgatttgatcagaacgagacgattagatacaattaaatacccatttagttactgtcggtagtattaattttccggctgcttcctgtcgcgtgtattgtattggttctgtg

SEQ ID NO: 45243 - DNA, 812 bp, Arabidopsis thaliana columbia
tgcggcattgcagacacatgttatttatataatatcggtccaaaccaaaagcatcttcacttatcctaaacacacaataggaaaattatggaatgtcttatcacaaaactaatcacacaaacacacattgtggcttgagttgattatttcttatggaaactgagataaaaagacaaaagaagttatgggcactctcaggacatagtactgaataggaaacaagagaaaaaggaattgaagtggtgttacagaatatgaaaagcagtgttttttcttcaatctccaattaatggtgtgggctttgattgtttgtcacatgcatcattaacatggacccatacctatttactcctattttttcttcccaatatttgtaggttttataggtttctctcaaacttttggtctaatttgtcttcttctcatggaggaaattgttacataggtcttaagttattgtctgtgtttttatagaccgaatcaaacatagcaaaccaaaatttgagtatgttacgtgaagacaatgggtagatttatcttgaagttcgaattttggtttgctttatttccgttaaacgtcaatagttaaacttcatgagtatgctttagctttggatccttagttccttacaatactcacttgtgatttaagtatgataagtgagtataccaaactttggtggtacaatggtcaacgaataatagagtgaaagaagacaaagaaacaagaagaagagacatatatctaatcacaattgacatcgtagagtttaggatagctataaagtgaaagatagactcctacatggcta

SEQ ID NO: 45244 - DNA, 584 bp, Arabidopsis thaliana columbia
cggctcaattaagatttaacaaagcgaatggataaatttggatggatttgtaagcctaaactgtttaggtagaagaagtagaattgatttttccagaaaattcggggtcacgagatttgagtatgctagcattctaagattgtgtgtaactttaggtatatattaagattttatttcctttgttttaatatatgttattgcgtttacattattattaagcaaaatataaatagatacatggaaaggtaagttaatataagctatttcctcaaaccatatcattaagtgtgtgttaaatttctatccaaaataaaatgaacaaaaatggtagctacacttctccaaagactttccgtgacttgagtgatgagccaagaaatgtgtgatatttattttcttcttttatcaactttttctctgttttcagtttatactttatagttttcctacatttctcgtgaacattataagaaaccaatagaaaggtatatagatgtaatattgcttgaaactccaaattaatatttgtctcctttcttatgaaagttaatttggtcatcgtacttcgtttgatttaatatatt

SEQ ID NO: 45245 - DNA, 580 bp, Arabidopsis thaliana columbia
cttgcatccgccctgagaattgattagaaggtgatgggtattacctgagctgtaacaagttgtaagcgcccagataactgtagtaactgttgaagagccgttcctcgggacttggtaatctggaagaacagtataacataattaaaccaagcaaatattacagaattaacaaattccttggctctactcttatctcttaccttaaccaatgtattaagaagctgctggttttttggtgcttgggacatgatgtaatgactatgattcaccattatgctgtatatccatggaagaagatgcctcccagcacaagccctgttgaagtaaatgcaactgtgttaagaccagcgaatcaaacatgttttgggttatatcattatagccaaagattaaacaaagaaaaaagaatttgctactctagagaagaacaatgaagtttaaagagtcgactttattttcaataataagaatagatgagacaacttgcgaacaggaaacaaggagatcagagaaccaacctttgtctgccacatagcagccaaagcttctagagtcttgaatgcagtggaggggtccattg

SEQ ID NO: 45246 - DNA, 565 bp, Arabidopsis thaliana columbia
cgaaagactaaacataaatcattaatttttgatctgttaaacataaatctcacctcatttagacaaatttcttataagtacacttacgctctcacctcatttagacaaatttcttataagtacactcaagcgtattatgtctcatatccggtttgatgcagaatgctgctaaagagttcaacgacatttacagtgttttgtaagacatatttctaaaaaagtttttaaagaaaatatccatttagagataactacaacataacatatgaccaaagcataggattgaaacaaataaaagaaaaggaaactagtctacgcctatttcttgcttcatttaagagaattgtaatagagatacaaggagactacaactgcagcttcattttattcataatactctgatttatatatcaatacttgttattttaataatgcttggtgactgtagatgattatggccgtctctacctttcagttcaaggcttctcttcatctgaattagaacgaggtccaggcaccgaatccacgaaaaactcctctattcatacagataaagagataatgt

SEQ ID NO: 45247 - DNA, 476 bp, Arabidopsis thaliana columbia
cttcactgtatatgatagttttatttttttattttccaactgtcttgatttcaaattaaaaggttaacggttattgcctttttaaaggttagcaaaaaactaaaaatatggacctaacccataatcacgttctttacccagttccagttccaccatacgtctttatgcatgctattacaaaaactatgggatgttatttcattccttctgaatatcaatgtaaattggaaacatgttcctcagcttcaaaattgtgatacttgtagatattctcgtatatatgtagaattatccatggacgaacaaaaaattacttattttcagaactttataacaaacattttaattagttaatcatcgtttaaatacacattatatcctatgaaactttttctctgaaaactagcatcatcatggagttattaattagtctatatttaagcttataacagtctatatatatatatatatatata

SEQ ID NO: 45248 - DNA, 543 bp, Arabidopsis thaliana columbia
tcatctcttgcttcttctgattatcatcatcatcaccttcaaacgctagccaagacggggatcgacttagccctatatcacctgatctcaccttcttacttgggctgatgatcacagttccgcctttggaacattcatctttctccatgattgtttttttgacagaggaacttgatgacgaataaaggttcaaattaaggtccaggtctgtcctatgatcttcaaatgtctctgattgggtctacaaaataaatttgaaacatgtatcacttcatgtttgtgtgcatatccttacatatatataagttaattttacgcattcataccttagcctctaggtgaagctgaacatcaggctttatcaacatggcgctatctgactttgatctttgaaagaacagagtagtagtgttcttctcaaatttggtttgtttttgatctccttgtttgctccttttgaaagaaccatgaaacgattctccaaaaactttcatatgatccctctttttagaacagagtgtccatcatgtggagaaacattag

SEQ ID NO: 45249 - DNA, 417 bp, Arabidopsis thaliana columbia
aaagaagtctataggaccctcctcaagttatggcttaggaagactcggcacaactaatatctggtcatactctgagttgttgaggatagacagttattggaggaatggtaacaattgatatgcgactgagactatgcatgacagggaaacgttatgagtagtatgctgcaacagtgtgagacacgtgaaattaaaaccctcttcaccgggaaggtgtggtagcagaggtaggtagatttctgacttcgacgacagcatcctatacagagtgagttgcacgatagcgacacatagagagacatatcgcttgcttgtttctttgtttgttctccatcctttcacattcacaaattaacagaaaagcagccacgtgggtcaaagcacgcgtgagaagtaacttagaggccagtgaacagg

SEQ ID NO: 45250 - DNA, 489 bp, Arabidopsis thaliana columbia
tttttattttattacaagaaacgtcgatcagtaatgtctttttgtcacaaaattaaaagtgttatccagtttactcacgttatttatttaataaattaaagatagtaaaaaatttcaaaatatttattatgttcaaacttatatgaagtttcaaatattataaatatttgaactttaaaaattttaaactttgtaaaatgtgtaatatagttttaatatataaattctataaaaagttgataatattaataatttctgagatctataacaattaaaaatatatatattatgtgaaccattttaaaaaaactttaaattgagttgaatcagatgtcttttaaatagaaatataagttaaaagaagaataacaaaatgatgtctaatattgttggacggggatatatagtgtgacggatttggatagatattaatatgagacgatatattacaagtgaaatttcttggaacttacaatccaaatacaatta

SEQ ID NO: 45251 - DNA, 575 bp, Arabidopsis thaliana columbia
gccctatgcgaagaaagaaaatggtggtagctagagaccaagtgatggatttttacaaacgtgttcatagtgtcctcacagataaagagttgtcgaaattagaagatttgaggcagcttattcgatcaaaataatcttacaataaagaagttatcttcaacaccgacatcatatctcttttatatgattcacagtgtcattgatgaaatgaaaagttggttgataatatttgttgcgttggggatgggttatttgatgttcgaatcctgggttttgtttaaaaatttcgtctattaatgtatatagcttagattgttgtatataagcttagtttggttagtatagatttcatatagagtctgtacaggttggtattctataaaccaatcttaattttggtttagaggcttatggtttaggccaatatcagtttgtatataaaccccaattgtactcttttgctaattaatgagaatgagattgttttactaatatggtatcagagcaaaatatctcgatctcagtctcgtaacacacttttccgatttgattcactggaatccactggagtttgt

SEQ ID NO: 45252 - DNA, 460 bp, Arabidopsis thaliana columbia
gaggagaccagcaatagtttgtgtggcctgactatgttatagggtaggatttttttctctctgtgacaccaaaccaattatttcagaaatatatcttattccaaagagagtttggatcaaatgcaaagattagcttatatgacaacatttttttctatgacaacatattatgtgtttaattacgtctacaagatgtcaaagagattataaaaaaaaaatgtcaattttggtcttatatacgatgaccaaatattagtttggttggatacaaggccactaatatttttctacttatataagcttacgtcaaacttctaaacctagtggtatttctattaaacaatgatctcggttcgcatacttaagtgattaagtaaacggtcattctttctttttgtcttttgaattttatgttaaattaaactcaaaataggaggccaatgttgttacaacaagtgct

SEQ ID NO: 45253 - DNA, 1058 bp, Arabidopsis thaliana columbia
tatagtagtttaaaactttaggttaaatcgttttgaaaatttgttttcgatggaatttgtattttgaaagcttgcatgagtagacgaatacccattattttttggtaaataagaatgcatggagtcatattttggttcccgaaggcttaaaagaataataataggtgaatttccaataggttttatctcatctatctcttccataagtttgtcacattatttttgtcgacttgtggatcacattttaatactactattatatatatatatctccaacaatcgaaataatgtttgggagaaaagtatgccaatggatttgagtctctagatctgatttgtgtttgtgtgacaaacaaagataatgtaaaagatgtgtggagcttagggaattatagaaaaaacattttctgtagttttatgtttaggatcgaatgttcaccctttttgtacttatatctacttcattaatttctttcgttgatcctttcatcttgtggttgagaattcctcgattatatcacgtgaaaatatttagtttctctgcactttagaaaatatccattaattgagttacaatatatatatatggcaggtctgaagccgattttattaaggaaatcgttaaagaggttgagagagttctagccacatttacaagcgaggacacagaagatcatcactgtgtcaatttttgaaattgtatccttgattgaacctgcaaaaagagaaaagaggtcaagatgagcgaaatcaagaatctcctgattctcgtcgtggatgcagcaaaccgttaagcttttgaagggcctcgtcgtgggttgccttgcccatcaagaactgccgttggtgttggtttttactcaagtttactactatgttaagttgtctatttgcttcattgaggagatattctcatcatgttttaggaaagggtgtgttggcaaactagtcacctattgtattccatcttgttatgaaatctatcagagagtcaccgacgagaggtagtcttaactacccaaaagagctttgtcttaaagccctgcaaggaggacttg

SEQ ID NO: 45254 - DNA, 575 bp, Arabidopsis thaliana columbia
aagaaaacaagtaacctatttgggtactcatttaattctatataataaattaatactataacaatatgtaatcattttctctccctatttgtttctcactctctttgttttcctcaacacaatggctttgacatttgacggcgtcgaaaagagattcgagatcaccttctcagcctcgacatccaacgaaaatatacgccacgagaaatgtgttggaccagattctgaaacccgtcggcggtttcgatcgatgtggtggctccatcgctgttgccttctatacggtggctgcgtcatagtgattgtgaggtggtggctctgatgctttgcttcgcaatgtctaaatcaacttatccagtagaccacgtccataaatacttaaaagactatgatttttcactatcaaccatctaaacatatcgacgacatagatgaatatagacaatgttatttacaaatttagagtgtaaggttttagatgtaactatagcaacaaacttaacgcatgactggcgaacaattgttagataagaaattggattaggttgatggatgcttatatatgaataaagtgg

SEQ ID NO: 45255 - DNA, 602 bp, Arabidopsis thaliana columbia
cctgtttcgacttgatagagatatggtacaagtagtcaatgaaacgtattttctaattaagttaagttataaacattttaatagtaaatggagcacgtaatttgcattatgcaaaaacacacatatgcttagttctaataggatattctcttttccgaatgaactatttttggagcggtggactttttttttttattaaccgatattaattagataacattcaggagagccattcataatactgttattcatctctgtcatatgatgcagttcggtatagatttttcgtgtcaaattgtccgttttgatatttgcactacgaaagattaaagataaagaaaagctagtgaactttctcttatcgtttcgtaatttttcttctgatcattcggttatacgtgaactttctcttatccttcgtaatttttcttctgataattcggttagagaaaatatatactatcttcgaccctcaacacagtttattaacaaaatatataaataactcaggacttttttcttttttttgctattgaaaacgtttgcaaaaacctacaaagagactacatctaaaatgtacaagagactttacatattgattg

SEQ ID NO: 45256 - DNA, 287 bp, Arabidopsis thaliana columbia
ctgctggagacaaggtgcacaaactgtcaaatgagtggctgcaagggaagcctggtggcaggcagcagaggccctgacacttcctccagacacaagtgggacatgcttctgttactgtggtgggaagtttggggatgtcagtcacagccattcaccctttgggttctgaccaatggaggaagtgacaaaaaagccggattggaatcaagggacatctctttaactgatgagaatgcttgaaaattgtaaaatacagacctcctggtcaactgtgctgaaggacatgg

SEQ ID NO: 45257 - DNA, 548 bp, Arabidopsis thaliana columbia
caaaattattatgcttacgcaagtcacataacttaagttaacatactatggctgaaaaaggtttattcctatcagagtatgtaatttctaaataatgatatagatttccatccaagatggttacagggggtccaatgttacttcattacgtttacagaactcctgccggtacttaagatgcagggccattttgctagacacaaccttggtccgtcatggcttgagctatgttcaaaaatgctgcaatcgttgctccatgaagtagtgccctgacatcaaaaccgaatattattccaatcctttggattcacaatagtaacgagcacgaggaagctacagagcagcttaggccaacatagtacagtaactgttggcttatgacgaggagaaaaacttactcaggactttctttttgataaccgaaatcatttgctgctttaagagctttgtcataagtctgcttcagtgcttcctatcaatatcagagcagttatcttaatagggaattatcacaggccaaagctgtaaatttttgaaagaaatatgag

SEQ ID NO: 45258 - DNA, 551 bp, Arabidopsis thaliana columbia
tactatgtagaatcgtttatcgtggcatgtgttacacccacatatctcttccttttgaaacttttttttaagtcttttgtcttcttcgtgctcttttttggtttgtttcttggctgtattcttaataacaaaattgagaatagtctatggtattaagggtcgccgttcagtgcgtaagaatgcggtttccaaaatcggccatgaagttggccgcagacaaattcagaatcgtgtcttcttctcattcttatcgtcccaagaaattgcattttctaaaggatttcatttttaaaaacaaatactctaaaatcatttctaactacctgtcttaatgtcgatttttggaatttagctccgccaaaaccaccaatatatgcgttctttactcttagagatcaatattctaatcaggtatgctttacgtttttcggcttaaatacacgtttatattagtgaccgaatcattaaacaaacaggatgtgttgctctctctattagcgatatgtgtagtaggaacgatatcacgagaacggtcattcgaacgtgaggat

SEQ ID NO: 45259 - DNA, 539 bp, Arabidopsis thaliana columbia
gctatcgacgcatcttcttctttctctgcatcatcatcatcttcttcgtcagaggatttaccagctttgcttgatcctccttcttgtatcgcttccatgtgagcttgagctccaactttcactgcaaccaaaccaaaatttcaaatttcaaattacggtttaaccaaaccggatagtgccaaatactgaaaatctgcaacagaatcaatttaaccgttcgatttaaccagaattaataatcgaaccggagagagtgcaacaaaactagagaatttcaactaaacgattcagtaacggttacggtttggtaaaaccggataaatcaatcaaacgagagaaagacacaaatcaatttcagtttggccattacggttcgataaaaccagatcaacaaaaccggagaaagaaacagatcaatttcaatccaacgactcggtgtacagtgacggttcaaccaaaccggaaaggtaggtttacttgaacttactagatctagcaccggcgggagtagaagcagcgacggccgccgcagaattagc

SEQ ID NO: 45260 - DNA, 409 bp, Arabidopsis thaliana columbia
ccagccccgaaagcacacaccacccccgaaaccaacaaccccggagcaccaccgatcaagccaggaacaacaagcccaacccggatgaccaccgaaggccgccaatgtcacgcagcccaccagacctgtccgcgacgaggaaggcaaaaactcccgagccgagatcgagaccgacgacaaacacagaaaaccagccaggacacaagcacccaacaacgttaccgaaagctccggcaaccgcaacagatgagcaaccgctacgtgcagacctcaacccgccgcccgcaaacacagacgacgccggtaggaaccacgcaacaaccagggagagaggacgcaaacgcagaaccagatcaaagcccgccccggaacaaccggacaccctaccaaccgtaccagcgagaacaac

SEQ ID NO: 45261 - DNA, 1010 bp, Arabidopsis thaliana columbia
cctcttaaattccatgactacaaagttttgcttatagagctaatgttgatttgctttatttcttttggctcattaaacacatatatattagcattaagttctgtttcctctggcacaagctagctgataaaattcctctaatgtgtgatattattaggagaaacacttagcctttaactttcatacaacagatagattcattggacaaataggttcaagataaccaatgtcattagagctggtttagtacctctgatggagaatcatgcattatatttatttaaccgaaagttacctttgatcttcacattctatcatctccttcttgtcgtcataatcattcttaaacattatatgtatgattactcatgtatacaaccatcaattttcaaactacaaaagaattggaatttagccactgattagcaagatatttttcatggctactaaaatgattatcgattggccaccaaaatggttttcgccactgaatttatttggttaacgtcgtgaccatatttggccacagccaaatcggtaaacatatgacctttttttacaattctgaaagatggatttatagtcgttaattgcgactcaaaattttcactatcatcatctatcccatataaaagaacaacaatatttctcaatttatcatgtgagactcataacaacacatctcaactttttgtttgacataatatttttcacccgaaatatatactatccgaaagagagtagatgtacaatcttgtcgtacatccaaagactactacaatattgtttacttgactaatacattttgtggtaatgaaaaaaaaaagacaaagaaaataaaacatgtaccatgtttattaaaattttcctatgtgctaagatctacatacattatgtctttatcgacaagatgattaagtacccggatcaatcgaaaactgttttctctactacactgttcgttttcaaataatgtggacattattcacatttttttgacatgacattat

SEQ ID NO: 45262 - DNA, 630 bp, Arabidopsis thaliana columbia
ctgcaaatgcaacacttcaaagtgtttctttttttcttctattatgtggacaagtgcatttgttgtgggtaaagggaaaaagtttttcaatcatttatgctcctgatgggcatggtgctgactagtttttggctacagaaattctttagaggtcgaagatcaatggccattgagcgctcgaaggtgcggcatgatttctgtgaaacctatgggaataattgccagaatgttgataggtactttttctttggtctattatgtttgctatagtttttttttggtctttaaatggttctatggttaattagttgtatatttttttgcctacatccagacattgctttgagccaggttcaagtttcctccggcagtttctgttttttttcaaggcacaaaactcgggagattttgtgatacttgtggagacttgtcgtctactgcagagtttcgttgacagcagtggtatttccaatatctatgcctgcttcttttgttgacacttttgttcaattcattcatgggtttgatcaacgtgcttttcctttcttggtaactcttatgtaaggggaagcatgttccaagtcttcattttgcttaatcagtctttttatggcgttcatactcttattt

SEQ ID NO: 45263 - DNA, 507 bp, Arabidopsis thaliana
acgaggaaacatcacctcgtcttggagccactgatcttgacgagtgtgaggatccagcggaaatggacacacgggaagagcggatgactgaagctgagctatggcagcaactggagcatgacctttaccacgattcttcggagcaacctgaagaaaccgatgtggcacgagaaataagagaagaagaagaagccgtcattgcagaggccggtgtggcccgccggagagccagacgtgcgagatgaaagaatcccgcagattcctcccagcgggtaaaatcatgcatattgtcacggtgcggcccgaggcgtacgagcctaacgaagaagaagacgaagatggttctgccctcgagaggcctgagacagtggagacggtggaggagggtagagtaggaatatttctgacgccgaggtcattgtatagtaaggtgaggttatcgcagaggatgataagcgatcattgcatgcctgtttacaggcgacagatcgaacggctaatacaaga

SEQ ID NO: 45264 - DNA, 470 bp, Arabidopsis thaliana columbia
attttaccgtattattcctaaaacacctgcctcatatatatatgtttatgtaaagtatgaagagtgactgaccctcttttaaaaaagaggcataatgagaggagaaaaaatagacttacacatttctctcacgtcgagtttgatactttactttgagtgattcattcttttggatttttgtcttcttgttcaaaaatgatcctcggattctcttcattttagaagaatctattgaagaaaaacaaaattcaacaataacaatagtggcacagaaaaaataacagtaataattttcactgttctatcttattttttgatgaaaaaagatgttgcttgagaatgaaactacgttgttttggaaaacatgaagtcatgaaccattcttgtctccaagccaatcacagattctcagcctcatgaaaaaaaaaatgaatacaatttttgattcgatttttgtcgaaagaaaaagt

SEQ ID NO: 45265 - DNA, 492 bp, Arabidopsis thaliana columbia
  unsure (1)..(492): unsure at all n locations
gtcgactcatcccctctccaatttgagatatacaatttatttttctataatctataatgttttgctttcattccgattatacccttgataatgatgattacgtgagggtaatttcgttatttacaattaaactcacataattacaaaataatgttgccttgccctgagataaacatcaccaaaaaatgtttcctagtttctttcttagagcaaacaatttgttttcaaaaaattattatttttggcagctcagcaaaattatttaattctttctgtcagttcatcaaataatttaaatatttagtccatgtgataataatatgtagcgcagagagtaaaagtaaataaattcatttacagaattgttttgtaaccaattagatagcagtactttaatatctgaggctattttcgtcattatcaaattatggcgangatttttggagggagtgggaaaaaaaaaatcgactcatgaatgacgtgacctccatt

SEQ ID NO: 45266 - DNA, 493 bp, Arabidopsis thaliana columbia
tcatttgcacgaaaaaaacaagagcaatgtaaaatatctttgtacctttggtgagtttctgaccagaggttcgttcgcattaagatccttgagatcaccgaagagcttagagtgatgtgaattgttgctatttccaagttcttgttcctcatcttgtaatttgttgattttgtctaaaagctctttcatgtaatctatggcatctcctaatatcgatgtcctgtccatctgatttttttgaacataccaataatcattattttaaaacacttttaaatgatttatcacttttcagccggttctgtagattcccttaaaagtaagaacacaataattaaacaatcttgaagaagaaaactaaggtttcaaaaaagaagaaacaaacacataatgttaaaatacaaaaggctgaatttgaaaccaattttataactaattcactcatttaaaaggacgaatcttttgttgattttcctgagaccaattttttgaa

SEQ ID NO: 45267 - DNA, 544 bp, Arabidopsis thaliana columbia
gctcgaattcgtatcaaactatgtaaagcattttgtaatatatatacaacactcatgtgatgataagtacatagaggtatgcaatggaatatataacagctaatttaaaactctgcaacctcggattcattatttgcgaaatttgtcaataaaaccacaccacactgcaagggacccgtcaaggctctctcaaatacaacaatggtttggtttatatcataaaacggatcagaatctttggcaaagatacgaaccaagaagattccaacaaggtttcttcctctgttgttgttgttgttggattggtacgcgtgtaagatcttcattcttgtgtaacaaattccacattatgtgtatgtcttcatactcgcaagaactcacgtcatgttctaacctcaaaagtcctacaacacaaaagaacaatcatttagtgttttttaaaaacacttaacaacgatttattcgggttttatcgaaacgttcgaataatccgataggtgactatatcctccatagtaaagattttcctcaagaccatcacgga

SEQ ID NO: 45268 - DNA, 407 bp, Arabidopsis thaliana columbia
atcttacgtacgctttgaatgatgaaggatctactttaattttcttgctatttgttctttgttaacaagaaaagaaacagaggcagaaagaaactcacaatgagctcatcaacacgattgtgatttgtcagagtcactttgcctatattgttacaagagatactgccaggatacaaactaattatgtcatgtgctacaatggcgtcagctctagtgatgcttatggaaggagaatttcaacacaaacgagaagatatatagattgacgcaaattgagagactctataacttgataacagcagattcgtccgtattagtagtatacgaatgttttagctatatagctgttgctgtggccaaatgggccagcaagtcaaatgcgacatcaacaaacggtgacgtagact

SEQ ID NO: 45269 - DNA, 618 bp, Arabidopsis thaliana columbia
tgaagaacacaaaaatgtccatctctgtcatggccaattctcacctgaatcagccatatgcatctgcttctcctactcctcaggaaaaaggtttctttttcatttaaaaattggttttggtttttgttgctttcgaacgcaatgctgaagattgtgtttggtcatctggttcgtgacttgtatcaggaagaacttgtagatacgcgggtcaagcagtggtaactaaaaacaatctctgctcgagcttatttgaatttgggcatttgggtttgatggaattgtcactttggttcacagagagctcttcctatacgagtaataacagtggggaaaaagagatcagaaggtgttcgactcttggtcgatgaatacaaaatcaagcttaaaccttactgttcctttgaagattcattggttcgctccaatcctcgaaatgctcagtacgtttccttgaatttgacagacccaactcaggaaattttattgttggtagctttctctggaaaccaatagtttttttattccagggatgttagagctcaggtcgaggatgaagaagtggctatgatgaagcttattgggtctgatgattgggtattaatagtacctccttagatt

SEQ ID NO: 45270 - DNA, 412 bp, Arabidopsis thaliana columbia
gaggatggatccccattaagcttttaacattctgaagttttgacttcatgagctcgtcagctttgacttcacctcagtggacacactgccagaaaaatacacaaggattaaagcaagattcacctatatcaaacacttagaaaaagggattagaaccatagagtttatttcatcatcttgtggagaaaactgactctgaagatcagatacagaaatatctcacaatccttagatgacaaacaaaaagaaacgaatgttgggggcgatttttggtacttctgctggctttaccccatttgggccggctctgaacaaaaaatgagaagagcttcacttttgtctaactgaatcttttcaaccaattatgtgccgccatttgctaaactttctgtagacagaaccgtacatgatt

SEQ ID NO: 45271 - DNA, 472 bp, Arabidopsis thaliana columbia
atttgaatttatttttcaagagcatggaacaggcacagggatgtcgcctctagttggacagcaatttgccagcgatatgactgattcatatgttgttgaagatggacatcattgacatggacactagttattgaagagctcaatccatgtgttattattcttcatgtttttttctttccaaacatttatgattcttgtagtttgtaaaaaagttctattgtatttctatctgtatccgaccaagagtggaaagaataatttgaaaacgtgatgcatgataatgtgacagtaaatttagaattggaaaatatgttattgctctgatatagtcttcagtagacatcagacgtatatattatatacacaagatggacctaattctaattatttacaagagaatattagaatagtacatgataggagacattatagagattgatattgattcgaaactcgctgttttcttcctaca

SEQ ID NO: 45272 - DNA, 440 bp, Arabidopsis thaliana columbia
cgttttgatcacacaccgcatcgaatgaaaatacaaatcagcaacaacaaacaacaacaaaaaaggtatatattatacgaaataaatgtataaaatcaatcggtcgatgtcaataagtatagaactcagccaattcttcaacggatcctccttcttgaccagacttgagcatccacagcaagtgctcgaacaaaacgacttcacaagctacaacaatctcacgatcttgttcgatggatctagaagaagaccgatccacgagttcttgaaagagtgggtgagagatgatgtctggtctaagcatgtaaggtcttcgagtttgaccaacgtaaaccacatggagattgttgtcttctgagagttcgtcggaaacagcggctgatgaggttgagtggtggtggttcttggcgaaagaaggccatttcttcatagccgactta

SEQ ID NO: 45273 - DNA, 502 bp, Arabidopsis thaliana columbia
ctagccattgtactttccttgataagctgtgtattgaaatggtttttgaatttacagccaaagtcattcggattctctggaacaaaagataagcggtctgtttctactcagcgtgtaagttatctgtacgtgttttctttgtaagatgagtttaatggttacaatacataataagagaattgaactttttaggtaactgtgttcaaacagcaagctagcaaattggctgcgcttaacaagagattgtttgggatcaaagttggtgacttctggtaagccaacatattcttgaatgttttcatttggacatatttatgtggtcttagtgttaatgatgattgctgccgttttccagcaatgtcaaagagggccttctccttgggcagctcatgggaaacagatttactatcacattaaggtaagaatataactggacatttataaaagaatctcttatgatcctctgtcaacttccagattctcttctttaagaaacattttg

SEQ ID NO: 45274 - DNA, 645 bp, Arabidopsis thaliana columbia
gtaatttctcatgaaagtatctagagtttttagcattaaaatagagaaatttgtagatgaaattaagtagtttctaaaacattggctaattaagttttgaaaactattgtctactttgctaaatttcgttttacttacttctatttcacgtaagttcggataagatagtcggactaatcctcatttagatatatacaagaaactatggatcgtttactttaagtatcgcactaatatcttctctaagtgtgggtgcttgctagcttgctgcttgggcgtgcgagtgtgaagtctagtattttgcaactttatgacttaactaacatttgaacttgccaacttggtttagtttaagtggctatctaattttatttcaattaacacatgcagtggaaatgtttgatgtcacagaagaaaataaaataactaatgactagcatccaaaatttatagtgatccatgtgataagatcaaccaaatgtttgtagcccatgatttttttatgggtcgacaccaatattttttttttagttggattgacaggtttaatcagaattgacctaacccaacaaccaaatcaaagaagtagtggtacatatattcttgtggcaagcattactacgagattgaaaatgtgagtaatag

SEQ ID NO: 45275 - DNA, 623 bp, Arabidopsis thaliana columbia
ccaaccactagtcctcggctgcaacaaaagtttattagatcacttcaagaagtaaaagatatacttagaatttctacagtaaattcaaatacatctgtatctaagaacatgaactaaggttaacaagtaaactcattttacttccctttaatcatgtatgaattcttcttggagaagtctttccaaggtgatctctccccaaactccacagcgacacaagtttcacacaaacttatcaaacactctgttttctatttctctgttttaacagcaatcttttgtatcttgaaaattggagatgatgcttgcaacacgttgtccttatccaccacaaaagcagagtatatatatgaatatgactcttacagagagcatcaaggaaacaatttggataaaaagattgctataataattggttctttgcaatcaaaatatgaagtgaactgtgacagtccaagagctatatatgtttgtctaaaaatatgaaacgggaacatatagaagttgagctacacttcataagggatatgccaagattggtctctctggtcaacctactgacatattgtgtaaggacaaagttgtgtaatgacatcagaagcaggtaaatgaatattagatgt

SEQ ID NO: 45276 - DNA, 367 bp, Arabidopsis thaliana columbia
ttctaaggatcttgtctctcttagattaccaagctcctttcactcatccctcgtctaaacattcattttctattttgatatcgatcaccataacaaaaatattgaactatgtatatttgttgtcaaatctgaatttcgggtagagaagataatgtggaactaccatgcatatatacatatatactttcaaaaaccaaatttagagaagtctttagttatttgtcgttttagaacaatgtcagtcatcactactattggaccagggaattgaaaacagtagatctaatattgaagcttcttagacataaaaatgtatatatgaaaatatatatgttaagaacttaagatagtagaattattatcatta

SEQ ID NO: 45277 - DNA, 713 bp, Arabidopsis thaliana columbia
gatctagactaagttatgaatacaatatatgttaataaaaacacaccaaaaagtgaaacgatcatctacaaattgaccgacatgaagcttagtattaccatattcgtcaaacttttcacctttaaatttgaatccttcctttttctctacagtattatatgcttttttttccacgatcgccaacaaccggacaagtataatggaaacaacaacacgttatctcgaatatgcataatgtcaaaaaattacctccacgtaaaacgaaacctgttgcacaccaagccgtgacttaaaaataaagaccactattcgataatgcaagatacggctaaaaacactcaatcatgagccacattatcaaataatcatttaaccgcttcccaaagcctaacagataaaagatgtcagtcgataaaacacataaatgtcagaatctaacatctccatgtgatacttgtgtgtgttgtcacattcacttcttcactcatcataacaacatcggcccacgacgccggttataagatgcggcgaacctgatccgttaaaaataccactagacaattttttatattttttatttaaaattattatagagtgaaaactgaaaacaacttattcacgattcatcggttatttatgtcttttatgtggtcaaacttttttattagtattattataaataaaacgggaacggctacatttgaagggggaaa

SEQ ID NO: 45278 - DNA, 169 bp, Arabidopsis thaliana columbia
  unsure (1)..(169): unsure at all n locations
nnnnnnnnnnnnnnnnnnnnnnntaaagttgatagctgtatattgaattaatcagatgtcttgcacaggtgaagtatttttaagtgggatttttgctgcagctaagtttggtttagaagtgtctttacatttgacagattattatcagcattattattgttataaaata

SEQ ID NO: 45279 - DNA, 451 bp, Arabidopsis thaliana columbia
tttaatttgtttgaagagttctataaaccaattaaactcgaataacaacagatcaattaaaacactacaaccactatggttttaaggtttaaaatgtaatgactacatctcgttgaagagagtaaaagaatcaagaaaaagttttatttaaaagctcaagtagaagaaccgcagctggaaaccttagcagttcataacactcggcattggctcgccaatacactcatcggtccatcctctatcgctcgtattaactcttaccccaaacgtaaatctctttgcatgagccggtcctccttctttcacacatctacaaaattcaccacaaacccgatataagctcaataaagcccaaaattgatttgtttacccacttgctaataaattggtgatacctgtaagaaggtattggccaattcttcctcaaacaaatatcattcaacgtttgtct

SEQ ID NO: 45280 - DNA, 601 bp, Arabidopsis thaliana columbia
cactgtatcgacaacctgcagttaatgagaaataacaaacttttacttctctctctaaatctaatatagtatggtcatttttagatggtttggtcattttgagatcttgaagcgtataagccccgccatatacaagataaaatgtttacttggttctctttgggagtccaagactgcgagttggctgggagttatttgtgtgttgtctgaaattctgttgcccaaagttacagtgatttcagcaacgttaccaggagatattcaagggagagagtggatgcaggtcatgtgataaaggttgggttagatcagattctacaagtacataatgttacaactcaaacatggaatggatcttcgggagtatggagattgcttaacaatgctatggagatgtaaacctatgagacggaggagacaatctttcttttcaagactgatgtgccacatgaggatgagatatgatttaagcggactgctctctacatgaagcacaaatggcgatccaagagactgcattcatttacatacgacgtttgattggaagacagcttctgtatctagtcctgaaatgcattgtttcaggataaatctttggatt

SEQ ID NO: 45281 - DNA, 277 bp, Arabidopsis thaliana columbia
  unsure (1)..(277): unsure at all n locations
nnnnnnnnnnnnnnnnnnnnnnnctaaaggggccagccaatataatactgggagcatccactgtttagcangcattcgcgtagcctcacacgagacaggtagggcggggtcctttcagcaagatcttggtggtatgtgcaagggtatctgcatgttggtcgcggggattagatggatccctcagggaagctggtgcgcgnaatcgtccatccttttgtcgtagctccagacgttntcgtctgaggtcgttccatgtaggagtttntgccccattcta

SEQ ID NO: 45282 - DNA, 414 bp, Arabidopsis thaliana columbia
tattgtgaaacgtagtaaactgttgtgctctgttgtgttggcttgctctcttgtgttcgcttgatatcttgtgtacacttggttagattatgttctgttgttttcgcttactctcatgtgttcgcttactatcttgtgtatgcttgctctcttgtgttgtcttgctctattgtgaaacatagttaagaattgtgttctttgtgttcgcttgctctcttgtgtgctcttcctctgttgtcatctcagttcatctgttgtgttctcttgctttattgtgcaaaaaaaagctaaaagagttgtgctctgttgtgtttacatattgctctcttgtgttctcatgctttgttgtcatcttagttcatatgttttgttctagactttctattgaccaggttcacgtatgtgacatgtttt

SEQ ID NO: 45283 - DNA, 445 bp, Arabidopsis thaliana columbia
aaattaggcaatttcacgtatattgccgtttagtttaaatgcatgcatacaagctttcgatgtggtagttattaaacttacatcaaaattcactaaaaattaaagaacaaaatcaaatcgatgtaatcaaatttatttataaaaacaaattaataaattgaattagatattaaaatcaacgtaaattaaaggaatggtgggaagacatgaatcacacgtcgaaaacacacctacccgaaggtttctggagagtagacaaagagacaaacatagaggtgtgagtttggtttggttttgggttttggggggttggtagtgtttgaggtccatatgcctcgatcttccgcgttctattaattaattttctctattagaaatattatctaattgttccactccatcgaaccatgcacatatataatgatatgtataagcccatcaaagt

SEQ ID NO: 45284 - DNA, 505 bp, Arabidopsis thaliana columbia
tccttcctcccaataccatcggtgggatttcgaagtctctcggttttataacccaacaaaggaggagaaagaacatctatgcataacagagtaatgccggcaaaaagcccaccatgattttttgttggttaatctttatctaagcccattaatgttttattacgtacaacccctagaagatctctctcatgattttagaggtaataaacaatcaaatatactcacacaactgagttcttatcagggtcatccctgcacaggccaattcagcttcagtaagcgccagagaaattagcttctcacatcctaaatgtgacaatgactagctcacttgacctcagggtcgtgattgagtttggtggttgtggccggtgagtaggacgggtggaagctggttttgtatgtatggggcagtggtggtgctgagttatgttgtaatcactgttttttactgtgagtgtaggaaacgccatggtagcagtgatgcatttaatgctgatgaggt

SEQ ID NO: 45285 - DNA, 677 bp, Arabidopsis thaliana columbia
  unsure (1)..(677): unsure at all n locations
aatataaacaaaactggacttaaaaagatttaaaaaaatttaagtacgaacatttttaagaacgtgcagccaataaaacagctgcgtgacagcctctctcaacaaaaaaaactctctcaagagagttgtctctctcattttttttctgttttgaattatttttggtcaaattaatcaaaagaactcagccagtttcttgagagaactctccattggaggtgctcctagagtaatataggatttggaacgatttgtattaaaatgaaaaatcctatattattcaaatatgaattctaaaaagctttttaaatcatgtgttattgtattaataattttaaaatatataatcaaattcaatattattggaaatattttaagtaatggttttgaagtaactttggtgagttaggcgaaatttgagtgattagtaaaaaattcaaacatctaactctcatggtttgaggtggaaaagtttttgataacaaaattcttaattcaccaaaactcacctaaatcatctctaaacacattaaaactcaacaccccccccccatttttgttgaacaaaattcatcattagtttatcgttttcaataataatccacacattttgtataaagtatttgtcgacnaaaataattgcaaataagctaaaatatatggttgggttcctattg

SEQ ID NO: 45286 - DNA, 539 bp, Arabidopsis thaliana columbia
aaaatctttttttgtttgtcttggactttgttgagaaagatgaattcatttatactcaaccagtttgcctatttcggcgaagaaaaatcgcaagtcttatttgtaaaagagaagaaccaagacacagtgtacgacggtttcttaatttacctttttgaaaccacggttttcgaattagcttgcggatgttgcgttcatggcgttccaacagttcatcaactccataagattgagacaacaaagggcccgagaattcgatcttgtccccatcaccctgtcatgtcaaggcttaagtcatcagtatcattgagcatgcttgtcactaaacacaaaaagtagacaaactaaatcatgcctatttttcctctctcctctgaactttaggtgaaagcgtggagagagagagagagaagattaaaaaaaaaattaaacagctgaggaaacatgatctgactaccaacggtaatctggtccaatatttctactttttgagctgtatacacatttcaccgtacttatatgtatgttgcatatatact

SEQ ID NO: 45287 - DNA, 942 bp, Arabidopsis thaliana
  unsure (1)..(942): unsure at all n locations
ggtgtggatggacagtggagtgaagatttctagaaactctcatgcgttttagtgttagagttctcctcattttctcaactccatccccttccagtaccttgacacgtacaattcctgaaacaacaacacaaaaatctatgtgaattcagctctcacgatcatctatcaaatcactttatcagtaattcacattttaaagttatatcatgttctggactaacaatgataaccattttatgtgatatttgaatccatatgctggtggcaaagaagaacagagcatttgtattatgtcacacaaattcagcaatcaagtgaatgacgagtttataagggatgtaagatgagattttacctcaggcaaagaggtttcacgattgcagcttggctacttcccataagtcttcactgcctcgtagttactcaatgtcctttatgttcctaggaatcacaaggtcgttgtaagacggcaagaacgaaaaaagagtggaatcgactgatggtgtattatatttttatttattattattaggtcattggtgcaaatatctgaagcaaacctgcacaaaccaattcagctaaaataagcaccagagaaattagctttcacatcctaaatgtgacaatgactagctcacttgacctcagggtcgtgattgagtttggtggttgtggccggtgagtaggacgggtggaagctggttttgtatgtatggggcagtggtggtgctgagttatgttgtaatcactgttttttactgtgagtgtaggaaacgccatggtagcagtgatgcatttaatgctgatgaggttgctatttaaaaatttagtccaacacttttttgttgttgataatctcttgtgaaatcattttctttacgaatttatcattgatttaagagagaaaataactttgcaacatcacngagagagatatgtgtg

SEQ ID NO: 45288 - DNA, 322 bp, Arabidopsis thaliana columbia
ttcttcttctattttctatcggtttgaatgaattgaatgtttggcacttggaaagtcattcgatggattgtgtgatagaaacatacaagccctggggatcaaacttggtgcggagatgtttgatgaactaggagagtatgtagggacgcttaaatataggtatcgtcggcattaattcgagattcctttgtggtttgagcgtttacgttctccttcgcctcttctcgcggccgtgcagtttctttcttcgtgtgcccctgtgaagcttggcgttgtctgttatgtcctgttatgtctggtggtgtgtctgttggtcgtttta

SEQ ID NO: 45289 - DNA, 435 bp, Arabidopsis thaliana columbia
tgacgattaagtaggtccaatttggaaataagagaaagaataggataattggatagtaggacttttgggccaatgggacgagtcatgatggttctctcgacgattgcttagtgtggagctgaagctatctcagcttttgtcccgtgatcgtcgggaattatttattaccatctcttttttaagcttgtcgttgtcggagaaacatactcgatgcaatacctcattctatagcatatgtggtttttacatttttcacacgaatcaagtttaagtctacatttctataaagtcactaattttaaccaaggacaaatcagatatacagttttaatacaaaaagtatttaaacattttttaaattttgaatcaagatttaatgtgaaagggataactattatttagaacaaccacacattgttttcttatgatccaaaa

SEQ ID NO: 45290 - DNA, 609 bp, Arabidopsis thaliana columbia
attttcatattgatgacgagctctgacctcatactccacaggccattttgaaaagctatgtggtggctggatcagacactgccaatccagaaaaatttctggcgtacatggttccttccttggatgaggtagacatgcctctccataaactgatctctcttttacacaaattttgacaagtcaagaaaagttcagtttgattgatgtgttatcaatttatgttgctgtgccagttgtctaaggatatccatgatgaaaacgaagaaatctcttacacttgggttcgcgaatacctctgggatgtatgtactatagccaatgtggtttaagtgaaattttgattgtttgagttgcagattgaaataaatatgtcacctgatgttataacaggtacaacccaatgcaaacgatcctggcacatacctggtatcatttgacaatgggaccgctagctatctggtattgcatcggtttttgttacatattccagttgtgtatcttttttttcttctgtctataatactttgggatgaccgttgagaatttggcagccctacccatgaggttgacttgaggagaaaaggccagggaaggaagacttctgatgag

SEQ ID NO: 45291 - DNA, 568 bp, Arabidopsis thaliana columbia
ggtcatgtgaatgacattgatatattacagtccattgagacaattgatgaagcgtctggcaaagtagatgagcaagtggatgatcccaaaagcagaagttgctatgaaacagcttatctcgatggaagtacaagatctaaaagctcaattcaagataactccaagaggaaacatcaaaaatcaagcaactccttttctggtaattttctgttaacaaattcaaatccctctcactgggctgatcatgaagtagaattacctcaagcaataactacgactagtgaagtttctatggtgacagatgcgggaacgagcatctttcagtctgaaatcattgcaagatctagaagtaatgctcgagaaaatagatccaagaccgagcattcaggctctgttgagtcttcttcaattaacttggagccaagagattcaattccagtactgcaaggtagccatgtaaaagattcactgaatccctctagtgttgatgctgaaggtttagtagttgaaaatattactagcagcgatcaatcaaaagaaacgggtgaatgtgttgcactaacagatg

SEQ ID NO: 45292 - DNA, 580 bp, Arabidopsis thaliana columbia
ttttgataaagaaatattaaaagttaaaaaaaaatatattataagtttaagtataattataaaggaacaataatactattatctaaagtcggttgtcacgacatgagtcaattatttcaatacaatcaatttttgttgccatatgaaattatttaatataatttttgtcttttgttttcgttttttcttcttattagaattatgttatagtttaaattaaagttggtgattaaattacagtattaagctaagaaaaaaaaaatctaattcaattttttttttttttttttaattcaattttgttttactcatttcctaaagattatctttatttacaagaagtctttgaaaatcacatggattccagttgtcccagaattaataattctgcctgtgtctcctcaagttacacgcacatgctcatttttttgcttcaagttgcaaaatgcaaaatatctatttaactatatgttattcttctctttactttttgtttttctttttttgtcgtcaagattgcattaagaacccaaaggacattacagagatacaaggagggccgttaaagatcaatactttt

SEQ ID NO: 45293 - DNA, 255 bp, Arabidopsis thaliana columbia
ggtctcactggtcaccgacaactacaagaacaaactgcaggcgcagatttagccgtccgactaacgtgcgctttcaattacattatacagaagtctctctttctttcattgacggtgatgaagaccagctcaaagtcaggtcagaatccatcaatcctggcctcatcactgtgaaaaatctctactttcacgcatctctagatcttccatagagggatcgatcaaaagctgtagtcgctctgtcgtccacgtagc

SEQ ID NO: 45294 - DNA, 359 bp, Arabidopsis thaliana columbia
acttatgtgactgtccaagagctattatacgccctacaatttgttgtttttcaagtcacacccgctattcaagaaggtccttatccagggatacagtcgattctgagtcgggagaagaggttgttgatctaaatcctcactaggtggtttcgtttaaggtgtgcaatgacaaggagcttggtagtaagggcaagggtacaaacgttgtattagctgttaaagtatgtcttacctgagaatcatatacctcttttaggcttatctgctaattgtaatttcgcctctctaattgtatagttaccgcgttgatcctatcttccgtcccgaagccgaccgttgatccagcccaagatgttttg

SEQ ID NO: 45295 - DNA, 502 bp, Arabidopsis thaliana columbia
caagcttgaacaaaacattggcattggttctctttctccatctcaaagaacattatggtttaatcttgatttgatttatacatgtttacccttagtcatgtgtgtttcataaatcatatctccattttggatttgatctatttcatagaaaactttgctctatagttctagagctctagagtttctctttctacttgtcagaaatcataaaccttaacatgtagtagtgatatctctgtttttcttttcttcttacaaaccttaaacaacaaactttttttgatcatgattattattcttatttttaaaccctcagaagtgaatatattgatatatctatctctactcgtcagcaagctttcctcatgcttctctcgtcattcatttgcttagtcataatgatgttgtcttatagtctacattgtcttaaggaacggttagctacgatttgtttatacatttaagtaggctcagaattatgcaacagaagatagtttcagag

SEQ ID NO: 45296 - DNA, 887 bp, Arabidopsis thaliana
tgcctttttttttttacttaatcaggaaaggaatcttctgatgcgtactagcaagaaacacaacattggttctttttttcaaacacaaaagtttttaagtaactacattaatcaacatgataaagaaagaggtcaaagtttaatacacttcaataacagtatccgatctagaaataaacatgttattacagattttattagacaaagaaagagtagcacacaatttagaattattatttttcttctttttgaaagaaaaacagctagaaagtctgtttgttattgaacaaatgattctacgaaaaaagaactataatctaatacaaaaggttatacacaaacccccctcctatgattcatccctattgacaaataatttaaagataagaagaagaaaaaaaaatcaaaatgatgaaaaaacctagagaaagatcacaataccttaccaatttataacttaaaaagatccaaatctcttactatactcactcacacaccagaaggttaactcaaagatatcaaatatcaacctaaatggttccttgttgtcttattcttctcgcccttcatcatataccactcggcatcgtctttaactcgttcaatgtcgttctaatctgctcttgaaccaactctaatctccttgaatacacttccaattccagaatctgttgtttcctccaccgctcatctgcaaccgccttgtttcctcctccctctacaccaaaaccgaaattgaacggccgtgtaaacatggggcttagcgagccaaaaccatgaccaccaccaccaccaccaccaccaccaagacccggaaaccctcctcccattgcagccatcatcatacttgttgtcccattcatcatctctttgatcacaggagagac

SEQ ID NO: 45297 - DNA, 529 bp, Arabidopsis thaliana columbia
cacgtttataaatttaacaactttacaggaagaaagaggaatcaaatcttacgttgtgaagtctttaataagcatggggcatttagatagatcttaaatttatggggagataacagaaatttggaaaactagggtatcagtgaaaaatggtcaaaatcagaatcaatttgcaatacttaaaattattagggatttttctatccactatgtataaataaatcgcaaattggcaactagccgttacgatctctctatctctctctcttttaaaaattcaaaaacttaggaactttttacattcacaatcttgcagattcttgcatattttctttcctttaacgagcgcaaaaaatctgagatttgttaaataacccattctgatttccggagtgattttcattcatggcgtcttctccagcaaagaacaagatctctgtttctccttcttctctattctcttcctcttcgccttcaatgccttccagaccaaaccctaagcaaagaaactcggaaaccggagatctgatgc

SEQ ID NO: 45298 - DNA, 383 bp, Arabidopsis thaliana columbia
gttagcgtgcatgacggaagttgggcggatcagaattgatggcacaaaaatatgacacagaagaggtcatcataggaatcgatatcgaaagaaaaaaaaagtatgacaaaaattccagatctgacgcgaattctaaccaagagtaaatataaaaaaccgtaacaggtgagaatcggaatcgtattcacgaaggagatcagccaggccgtggctaaaaagaaccctagattctccgagaaccagttagattatatctccaatttatctgttttctcctcgaagccagcgagcgagagaggagagagagagaaatggaaagagaaggagatgaaacgctttttataacgacaggtgaaaagcaaaaggcgggctttggcctttgg

SEQ ID NO: 45299 - DNA, 189 bp, Arabidopsis thaliana columbia
cattaggcattttattaacacttcgtggctccaaactcccttccatcaactttcactaccccccaacttaggatttatagcctcaagttgtattttaagttcaagaagggtgtggttcaaaagaggggtagaaagaatgggtcacgactggtaaagtgtttgccaaagaaagatccaaaggctcaaagt

SEQ ID NO: 45300 - DNA, 276 bp, Arabidopsis thaliana columbia
tatcccctgaacacttaagatgttcttctttttcttcaaaatttggtatttttacttaatgccaggcaaccaagtcccagttactttttcggccaaagttctgtgaagtatatatgatcaaatatagacatcctagactcacacggcacaccaaactagatagagaaactcacttttgccaattccgtgaactctatcgactttgtgaaatgaggacgccgtaaaagttatctgcaggaaaatgtatatattattcagtcaagcaggactgcagaa

SEQ ID NO: 45301 - DNA, 594 bp, Arabidopsis thaliana columbia
  unsure (1)..(594): unsure at all n locations
atcccccccttgcattcacatcgggaagatattctgcagatggttgacgatcgtagaaccttcttccaagaattcatccagaagtctctttattacctaagctcggttcacagccaaaaccatgacactttccctgtcacagtgaagctccttcgcgtactatttaataacatcaacgaggtgcttggttcagtagatactggagtcaatgattttatgcaggctttagcaaagaatatgtgtcacccgatgaccaagtacgtaggcaacttggctgctgaaataaagcatggcccttgtgtgcaactgatgaatgtagtgaatgagatggagagatcaaactcagatacaaggagagagctacaagatgctagagaaaggattagacttgcagaagagacaaagatcaacgctttatcaaagctgaaaaaagctgaagatcaagttcagaggatgacaacatctgccaaatttcttctacccgcgagtcagaagaaacaagctgaacattctattaccggcaaggtaaaatttcgataatgagttttgtntgtgaaagctcaaatgattaagtaagcgctaaaagggtttttg

SEQ ID NO: 45302 - DNA, 401 bp, Arabidopsis thaliana columbia
ttattcaataaggcttggtcactaaccaagatttgacaagtgagaacgtatacaaatggtgttgacttacactgcacactgcgattgtttggctgtgtaagaattgtgccgttgaaggttaaagatagaaaacaaaacaaaagtacgaaaggtagtacaaagaagtcgagagcaataggtgtgagtgtgacccattatcactcctaatgatgcttcacgtcaaccgcagcattgctaaatctcagctttatcattccccccccctaccagactatcacacggatgtgacacctttcccggttaacatatcgccgttacttgtctatctcttaatcggagattcggtatgataataattattacggattggagttttaatttagtattagaatatttataat

SEQ ID NO: 45303 - DNA, 558 bp, Arabidopsis thaliana columbia
gcaaatttgttaaaagtattgattggtaactgtattgtagttttaataaaaaaacaagaaaacgccttttgtatgtttcttaatcacagtgtatgaatggtgacatagaccgcccccaaaaccgtaccgtaactgtaacagtataaaaaatctctatatatacatatatatctatgtatttttgttattatttgaaccgtcccatactttttccgtatcacaaaatacagtcatcattcgaaccgcaaaactatatatagtatttcggtttttgaattcaaaatgaaggagaagaggaataggcagattaatataatttcgttatttctttttaatttcctatcttcaatttttcctcacccactgaatttgactatgccattaaaaatgtgtatactaatcatcataccgtcaataaatagagtttgtgggaaacacacgacagacacgtcatcagctctcgacggcgcgtttccatgcctttattaccttcacgttgacccacatgccctgttttttttttttggtgtctacggtatatttttgtgaaaatgtact

SEQ ID NO: 45304 - DNA, 582 bp, Arabidopsis thaliana columbia
ttacaaaaaaattagcatatgtaacatttttagccgtattatattacatattttatttatacatttttgtttttgacaacaatttatacattatttgtaaataattagtggtgcccgagtagaataacgttctagatccgccactgactctaaagacaccaagcccctcgagttaccggtacctcaggagcatatcccgctcctcacgagtcgttgggaccctcatgtccctcgagcaaacaattctaaacgcttccgagcatatcttcagactctctcatggatttgcgtaggacacctttatacctcaccatccatcatatcccctcgggaacactcttatgaccaattctcggctatctcgtaaacacacctatttcttaggttatttacttaacctttccaaaaatagacaagtcctttatggaaaactttccattcttggaaaccgcacaacacattcttaaataagacaactcaagtcaaatctaagaaaacaaatactcatcttataaatcatcaaatgtcatgatcgttacaactccaaacgaaaataaaaatgaaagagaaataagaacaaca

SEQ ID NO: 45305 - DNA, 382 bp, Arabidopsis thaliana columbia
gaatgaaccacctgttctctatgactctatgaattgcactgacttacactcttatctgcagcgaatccactaccgcgagcacccttgtggcttaagctggagtctggaggaggattctactagtctgttgcttcccttttgttttgatgaattctcaactttagtcttaatgtgtcagcaggatttttgtgtttgcctctcttttttttccggaatcttatgctcccttgtttaagagaatcgtatgatcttgaatttactattgaatatgcttttgcatccttatactcttttccttaagataaccacatgatcatgaaatcactattggaaccaacatccccttttaagcattcgcatagcgttactatagtgtaatgaa

SEQ ID NO: 45306 - DNA, 596 bp, Arabidopsis thaliana columbia
tatcttaaaaaatatttataataataatagattcttcttttgggttattaacgtaattttggggcaaattggcaaagaaaaataaagagcattgaatttataaatatttttggaatttaccatgttattttatttcacatttttttactatgcgataaaaaaaacagtatttacgaaaataccatcatttgcagattttgcctgattgtataaaaaaaacttacaactaccagtgacctggctctcgtggcgtcaaagttacagttggagataatgaggacttgccgtccaacatgcacggcggcggaaactccaatccggcgtcattactccccaaaggcctcgatatcaaactcgttgttccaccaccgtgagtgttctagtttttcaatcgaaattcctaggtttgtgatacttcaattagggtttaggtttgtaatatttgaattagggtttaggtttgtgttgttacgttttctaacattcgaacatcattgaaaacgttgagcaccattgtaatatctcttttgatatttacctaaatattcttgttcttcttccaattgtttggatgcagtattataaaggctagagga

SEQ ID NO: 45307 - DNA, 517 bp, Arabidopsis thaliana columbia
tctagtaacggtgatctatatgcttcggttcatctgttattgttatatttgattatcgatcatcgttattacgagttgcttgtcaatcgttactacttattagttctgtgtcataattaagctttattagggtttttatttagaataatcgttcacaaactgacatagttcatattgttttactaaaggcacgttttatagatttattgattcatgtattgtttggtttggtataaatcgttggtttaacctagtttgagattctgatgcttaacggtttttttttccgatattcatcatcaagattgtttataattatacataaatgccttcaccatgattggagcatgttacaatacattcactgcataatattgaagattcacagttatagttttactcatgattactctttcattataaatatacaatataaatctctaattaattaatacgctctctctttttctgtttagattttcagctcctccttgatttcaaaaccatggacaagaat

SEQ ID NO: 45308 - DNA, 561 bp, Arabidopsis thaliana columbia
tatgtaaaaggtagtgaacacaacacctcaatgtgaatcattcatgcatcttcacttgggattcgacgcagaggtatcaaaaggaaaatccactttacctacgtttcagttttgtgtgtttgttatattcttggttttgatgtttttttaagtggaactggaatagggaatagcagatgatcttgagattcatcatatcgttgtgaatgactgggaccgcggtgtggatgctgaccagaatgtggttctgatatctgtccctagtgttcttagcccaaaccttgcaccaccgggaaaacatgttctacacgcttactgtcctggaaccgaacctttcggtctgtgggaaggtcttgatagaagaagtgccgagtacaagaatctcaaatcccaacggtccgaggtacctattcatttttgtaatcttcagttctctgaatacgaaaaaacaaatcttaaccaaaatgtactggtaccgtttggtgaaggtgatgtggagagcggttgagcgggcattagggctagggttcacaagagaaaagtgcgaggtgagtttggttg

SEQ ID NO: 45309 - DNA, 564 bp, Arabidopsis thaliana columbia
atgaaattatgcaattgtgtttatcagtaatgagcatatcgatagatgtttttggtgatttattggacctattagaggagcatatgtttcttctgattaggcttctttatgtctatggatgtctgtgatggtttattggtgttataaagttgttgacatttgtgtgtggtagattcttgagagggcaatcgaggaatgtggagatgaccttgattcagccattagatgtttgaatcagcttcgtttagaatctgccaataagaattctgattctgctacaaaccaatctcctgttgtaatccaggaaccaaatgttgaacctcaacagcaaggtagttttgtgtcctactgatctctaaacagtttactagtttcagtgtattctgcataagtcgtagactcgctctacaaagttttaattatgaaacgggttttggtatttgtaggatcagccaaggaggaaccaaatgtcttgaacttggatggtacagagtgggttgagctttttgttagggaaatgatgaatgcttctgacatgaaagacgccaaagcccgtgctgcaag

SEQ ID NO: 45310 - DNA, 577 bp, Arabidopsis thaliana columbia
agtacaaaagcctccgaccccaacttatagtcctcccatatatccaccaccaatacaaaagcctccgacaccaagttatagtcctcctgttaaaccacctccggtacaaatgcctcctacaccaacttatagtccccctataaaaccaccaccagtacataagcctccgacaccaacttacaagccccctataaaaccaccagtgcataagcttcgacaccaatttacagtcctccaatcaagccaccaccagtgcacaagcctccgacaccaatttatagtcctccgatcaaaccaccaccagtgcacaagcctccaacaccaacttatagtcccccggtcaagccaccgccagtgcataaacctccaacaccaatatatagtcctccaatcaagccaccaccagtgcacaagcctccaacaccaatttacagtcccctgttaaaccacacctgtgcaaacgcctccaacaccaatatacagtcccctgtaaagccacaccagtgcataagcctccaacaccgacttacagcctccagtaaaatcactccgttcagaagctcctaccctacttata

SEQ ID NO: 45311 - DNA, 432 bp, Arabidopsis thaliana columbia
caggattttgtatacaatgtactcactgtgacagcaaggtaagagcctgagcttgtctccaacagtgtagtcttcaaggcaaatagcacaagtgaatgcagtagtgttatcttcatgaaacgaactgaatataagactcggcattgctttcaccaagcggcggctcataccgtgaaactcacgcactcgagaggaccgagatgtccgccttcttattcgatgcctacgcacaaagaaacaagtagcgagaacagccgacattgcaagcagcgagataaacgaaaccgccataatagaccacgccgagttctcaaaacttgggatcaaccaaactttcgtatcggggaaaccgcatactcctttaaaacttctcccgtttctttcgtaacaaagaccgcatgaatccttatacctccagagttacctgccact

SEQ ID NO: 45312 - DNA, 527 bp, Arabidopsis thaliana columbia
gaggatagaggatccctgtttcgacatccgaaaatggttgtgtaactgttacaagtggagatgggtctaaagaagtattcgataggtgcatattggctatcgcacgccccagatgctctgagattgcttggtgaagaagtaacgtttgacgaatctagggttcttggtgctttccaatacgtttacaggttcgaaattcaaaactttatatatcatcctcaattaaaaaaatgaagtgattcattaaatttttgtcatcaattgcagcgatatatatctccatcacgacattgatttgatgccaaggaaccaagcagcgtggagtgcgtggaatttcttgggaagtacggaaaagaaagtatgtgtaacatactggctcaatatacttcaggtatacaaaaacaatctacatgcttttaaataccggtttcgcaacaaatcaatgactttaagctaaaccttgatgatatctactggtgtagaaccttggcgagaacagtgaacattctttgtacacttacccagac

SEQ ID NO: 45313 - DNA, 609 bp, Arabidopsis thaliana columbia
tcaaaaagaccaaagatgaaaagaaggctaagaaggtggaatttgcttctaagcaacagaaggtcaaggctaatttccccaaagctgctgctgcatccaagggtcctaaggtgggaggtggtggtggcaaacgctgaagagcttaaagccatcttttctcactctgcgtcttttctgctagtagctacttttagtagttgatgttcatttctgaatatttgcaaaacataaaccttgttatttcgtttttgtctctcacttttgctactcttataatatcagacttgagaattttgctgcttatgaactttatttcactgctctctcttgtcctcctatcattaaaatcagaagagtttgtgttcctataataactctttttaaaacattgtttactatcttgctacgcaatctcatatcacccggttgtgttcaatagccgattctaattgcaactactgagctaacagcaaccttggttatgtatcttatgctcttttgctaaaatcgatttaaggattgttgtgaacatgctgcaacttcaattgttacggattgcatcagaactgaaattgcattgtaaggacacgatgaataactggtgatttt

SEQ ID NO: 45314 - DNA, 417 bp, Arabidopsis thaliana columbia
caatcagtgcatcagaagtaggatatcagacttatctttattcacattttttatgggatcttgtccttgattcatgtttaaggttgacggtgatgtcaaacggctactgaaaggtggaagtgaagtagatgatatcttgacagcagtaatcatcatgaacttgacaatagttcaggtgtgctaccttcatgcatcttttgtaacttactatggttttgtggctcagagctgtttcagtttctaagtatgctgacatctcataattttgcttagtctcccactaataggacaggtccaaggttgttgttatggatgctgatggaactcgatcaaagggtattgctagagccctgagaaaagttgggattaatgcaagtcgttcaggcataattcacattgcacacaattcgttacctt

SEQ ID NO: 45315 - DNA, 589 bp, Arabidopsis thaliana columbia
attgaataattatcaaatagttctacttacttgctctctagatcagcaatgtaatcgacgaactgttgcactctcccttcacctacaaaaggtaagacaaaataacatgtagcttcctttatttctaaattccgtaacaataaaactatacagaattgttcttgagaaatatcttctctagtaaaaaactttctgctccaagatttgtttgtttatagccatttatgttgataattaaccaatccagaaagttattttgtatccaaacatatatttaaaaaatgtcgtgcaaattttgacaattggccaaaccttggttctgtgtaaaagaagggctttttgctccaaccaatgcattccacaaagctttcggagaagcatattgcattgcctatacataaaacagcaaatcaaacaaaagctttgatagctaaaattattcttgaatgtatgttttctggtttaccttccagttggtggcggcgaagtagacacaagaaagtgcaatgccaagactcccatacctcagtatatctcgtcgagagccctgaaacctgttggaaaattgcatctgaatctcaagtatatg

SEQ ID NO: 45316 - DNA, 431 bp, Arabidopsis thaliana columbia
caatcctgcgcttattgataacttgcaaaaaattgggtactttcacaagttgcatgatgtatttcaagcgtaacaaatatgttttgagtgatatacagtaatataacaaatatagcaactagtcttggaaactttcaaattctttcagaaattcacaaatatgtgtggaaactttcgcctaaatgttgaaaatcttgtacaaacttttggaaactttcaagacttgttgatttgcttcactatcaattatctgactttgattccttgtcgtcaatttctttctatcttaatgtttcaaacttatatgtatgtcgtgacgagctgtgacgagcggtgatacaagacacaagtccataaccggcctttgatgcacatgtctttttgccacctccacctccgaaaaaacttaagtctacacgtagaataaaagg

SEQ ID NO: 45317 - DNA, 479 bp, Arabidopsis thaliana columbia
ctgacttgctatttgtaggtggcgttaattgttttcctatcccatattggaagctttgtaccagcagatgcagcaactgttggtttaactgacaggtctaacgtcatacattctttttgatctttttacaatcgctttttatgtatattttcgttactaagattagtcgtactacaacaggatcttttgtgcaatgggaagcaagttcatgaccgcggacaatctacattcatgatagatctgcatcaagtaggaatgatgctcaggtattccaaactgcttctatttttaacttgatttcaattagctccactactgataggccttgtgagccggtctcagtctcttcagtcagttagtgacttctagttcacgaggtccattatttaagttcatggggacccaagaatgaagatatcaatcaaaattcaactgtgcattgctcatgacttatgatcgtgtcctaatcattgtgaccg

SEQ ID NO: 45318 - DNA, 292 bp, Arabidopsis thaliana columbia
agagctcgccttcttctcgacgccgctcgccctccccttcccccgcccctccctctccccggcccccccctgcagtggcctcggcggcccggcgcggctcgccagcgcgcagcgccagacgtggccagcagcgtcgcggcggccggcgaccggccctagccagcgtccggcggccggctcggcggcaatggcgcgcggcccctgcgcaggcgcgccccggcgcgggcagtgctgcctcagcgcgggccctgctctcgtcgcatgctgctgcctcggcgcgggcaccccggcg

SEQ ID NO: 45319 - DNA, 444 bp, Arabidopsis thaliana columbia
cttagttctcgtatgtttctacgcatttatgcaactttctaccctacaagtacaaggcacgaagcactagcttattaaatttaaaagatatttaacaaatattgtttttaatttacctttggtccttctcctttcccttttgtatattatgtgtggcctcgtgttttgtctttatttatgtagttgctgcttaactttttgccaaagtagcattttatccaacttctacataaaacatatagtagctcaagtttagtctatcaaggtagtagtacacttgagaattaactaagagaagcctcttaaagattgtttacattttataaacacttacttcgactagttacaagttgaagtgttgaataacttttttttttaaaaagaatctattctaaatgccaaatttctggggtataataaactatgtatatagatgatagatga

SEQ ID NO: 45320 - DNA, 425 bp, Arabidopsis thaliana columbia
gtcaatccactacagtattctatgcaaatagtacaaatatatacgctatatgatgacattattgttatactatactatatcttacgtactgcaatcaacatatatgatttaatttgtagaaaatactgatatacggattatgctcgagcagatgtatatttggctatcactccataattgacgtataactaataagagggcatgtaagggcataaactgcagtaaagagactgtcctagtattcatgaacgaggttgcacgtgtggctcagcttgtaagctgtagattaagactaagtgactgtcgatctgatggagcaaatgattattgccgttcttgatctgcgcggttaagcgccaatgccagctcatcgagtcatctggtggagtcacgtgggagccgtctccgatgcagaacgcattccc

SEQ ID NO: 45321 - DNA, 473 bp, Arabidopsis thaliana columbia
tgtttttggccttcagagttgagacaacctgaggggtttgattcctttgtatccatccttccatacaaaactgaccccaccttatatatttgcatttatatttcatctccatccattatcaatttatttgtttatcactaatttgtttttgttttgtatgctctcagttgtaatacatgcagagtgacaccaatgagtatgtatccatcttatagaataatactgttgaaaaatggaaatgatcaattggctattctaatctaaatttcaagaattggataaaggcaataattctccaccattgcattaacttttcttcttcttttttttggcacatgaactttcaagatgcatgctcaaagaccaattatgttgtttaaataaaggagagggttggctagagagagagagggagatggagagaagatagtcctagactctgggggcaaattgacaactggagcatgttgttg

SEQ ID NO: 45322 - DNA, 178 bp, Arabidopsis thaliana columbia
tttatgaggctgaaaagaatctgaaaattacatgaatttgtttatattaaattattgagttggtcatatgtaaactgttagcaagtttggatgagtttgtattccaagtatcgatgatttattagccgacattaaaagaaaaagtcaacaacacaatgaatctgtagttacaattttg

SEQ ID NO: 45323 - DNA, 154 bp, Arabidopsis thaliana columbia
aattcaggcagtggtcttatacacacgaaactttagagccaaaattcgattagtaaaataaactaaaagaatgtaaattcaagtaagttttcagtatttttggttaatcctctcaagtctcatcacactttcattgtacatgtagccgtacata

SEQ ID NO: 45324 - DNA, 512 bp, Arabidopsis thaliana columbia
tgcacatggataaattcaaattttccataattccatgaaatggcaaaattttcacaaaagcctgcaagtactgcagtgatattctatttaagactactggagatgaacaggccagtatcggtgggtggtgatgatggctagaaaagtgactagatagaaagacgcaagattgatcggttataattgtgcatataaacttttataaacaaaaattgaccggagagattttgcatgtaaatggatgtgactttaaaatatataaatccatatatcatgggcttctagaaaaaacaaaaccatccgaagaacaaaaaacaagaaatcaggttgtgagaactaggatcgaatttagaactatagaattgtccaaattgagtaacatatatgtatcattgtgcaagtgaacacatatataacacaacacaagagttgtgataatcatgaggcagcatacgttccacatcatcgcatatatagatcaagggaataacgaagacttcatatgtttggca

SEQ ID NO: 45325 - DNA, 401 bp, Arabidopsis thaliana columbia
tgtttataactattcgactgcactgcacaatgaagcctctgaagaacaaaactaaagcataggtttttactaccatgagaaataagcctattattggtcccgtgaaatctagcatgtagaacagaataatagaaaacaacgcaatcccaaacaatgcattcgaaagcagtctgttaccattttttctccttcaactcaatttatgtttataagccaacaagatttcacgcgttatttaactcaggccataaactgatgtttaacatttgtatgaatgctatacatcatgaacatcgaacatagaagactttcctttgtttctatattcatatatatatagactgtagtaaatatttcccaagtaaagcacgagacaattttattaagatatagtaattgag

SEQ ID NO: 45326 - DNA, 527 bp, Arabidopsis thaliana columbia
tcgtctatcgtacaccttcaaaaatattgtacaccgaatctatgagatagagaattatttggtgtacttgaaagtttatgagatagtgtacagacatcagtgtacaaaatgatgtacactagtatattgaagtaataggttatatattcaaaaatattatacaccatatctataaaatagagaattatttggtgtatttgaaggtttatgagatagtgtacaaattcagtgtacgaaatgatgtacaccagtaaattgaaataatggtttatatatttcctattagtataccccaaatgttgtacgttatgtctaccaatctcacaagctatcatttaaaattgtgtacatcattctgtcattattctcgtatatcataatattgtacaccaacatgtacaccattaaatttaatgatattaaatcatttaaaaattgtgtacacatcccgtcaccaatatcatgattttaatggtacaccattccgtattcatttaaaaattgtgtacaccatagaaatttcctaa

SEQ ID NO: 45327 - DNA, 564 bp, Arabidopsis thaliana columbia
cacgactctttatcttctttggtctcttccgatgtcaatttatcttccacagtgaaaggtatgcttcaatacttgaatacattactggcttctcatcgtctaaaacacgtctcttgaggcaccatattatattttgaatcggatggtatgggtaactcagtaaaaagaatgaagaactggtatttactaattttcctcgtgggtgacttggtagtggagttactatcttggtatgaagatagctctgttattgatttggactgtatgcttacctagtggaatctgtaaaatgaatttaaacttgtctgatgcgaccagctctgctgatacattgttacgattttgcaggtacaataaaagtgatatctgtgaaattatccaaatctggttcaccgcttgttgttctagccacacgtcatgcattcctttttgacactagtctaatgtgttggctgagagtggctgatgactgcttcccggcctcaaattttagtagctcctggaatttgggctcagctccatgcggcgagcttgctggtttgcaggttgatgtcagaaagtaca

SEQ ID NO: 45328 - DNA, 547 bp, Arabidopsis thaliana columbia
cttgtttacttttgttgtgaaagagatatcatcattcagcttaaattaaaatagaaaacagcatcattagtattacttaaatagactaaaggaaatagagtaagtaatgaaattttttgactctgttgtgaacagtcttattttaagacactgttaattgtaagtgttcaacgtgaacctaaaagtactcaattttctttatttctttaaccaaacttttggtcatatctataatcaaaatcaaatgctttattggattacagtttgaacgcatgatcatgttcttgactgatatggccgtattaagcaatagtactctaaatctttaatcttttggacccatcaaagacccttttagttaatagaaactgagactcttctttttgttagcgttttttgagtatagaatatgaatttgctttgaagactttcctttagatcaatctctttcatcaagacttggtctggttttggaacttcattgtctgatataactcttattttcttccagtggctctagcggcacgacaactgtgacacctggcac

SEQ ID NO: 45329 - DNA, 555 bp, Arabidopsis thaliana columbia
aacacaaaattaaaaaaaagttattaggagataaacctaaacaaaacaaaacaaacaaacaaacttaaagtctcacaaaatcttcactgaaatatattttggattgttgatatacacatacaccaagtcaaagatcaatgggggataacgtgtgcaacagctaaatcattttttaaaaggaagtgacctgttggacttttttgaggtctcaatcacaaatcctttttaatgtaaatatatgcatatgcattgagcgctaatgatttacgtttaagtttgttctttaatctgtttctcgttgacaacaacaaaagatcatatcaagtataaaaatatattaatctcacgatcaaccacttgctgttaaatacttaaattacatataaatgttttgaacatgaccaagaaaataatgatcatgaaatgtcaaaacaagatacaccgtaaccatataactctacaaactaagataatcatgttgtttatataatttattgtgtaaatgtgcaattccaaataggtaactataaaaagagcctagttattataatttgt

SEQ ID NO: 45330 - DNA, 579 bp, Arabidopsis thaliana columbia
gaggtaatatacttatagtggttagttttagagagtaatgagggtgtgataataaagcatatagaggaaggtaattatgtgaagggggtcaaaagtagaaagaaatagaaaagagagaagaaggggccaaaaagggaattggagtgatgattctaagacttagctttctttggggaaaatgatgttgtcttcactccctttttcttcacccacatttacactcactcacacacatgaaaaaatccacttaccacttgaatcttcttcctctccattttatataaatgttgtatatctatatttgcttctcgttttttagtctttctaagattacttttttttttttaattttactttattatgagttaagaaagagaataaagaaaacagtatcacaagaactaaattacatacatgatacatatatggatatgattctccaatatgcatcttctaccttcgataaacgtatttacaacttgtgcaacaaatgtttttaagaaatcaagctgaaagtttatagaagaaaaaacaaagacttacgtccaatatttgtcaagaaacaccatatgtgatatg

SEQ ID NO: 45331 - DNA, 601 bp, Arabidopsis thaliana columbia
gatgttattatcaaagacttacattaaccatattttaggtaaccatgtgtaacaaataagaagtaactgcccatttgatcacttacgctcaattggatcaaggaataaacgaatcttaatgatatcttagcttttccgatgggatatatatatattatgatttataagataagtttgcatcaaatgtcacaataaggcatataaaaggcttaatgtgcgccgtagaaaattgaaggaactttatacttttgtagttccatgctaatgattgcacctgcaatattgtttgtcaagggaaaagcatagttgtagatcctacttaattgtgagttttttcaatggttgataaaaaaaaaaaaacttttccgcttactaaaattcacttttttagcatcacatatatattatatatccgtttgtcatataacatagttatctccaatttgttagcaaacattcctattgaaagaacatacttatatttcatatctatataaacacactgtttctaattaatatgtagaaacggagcacagacatagggttatataacacatgtgagtaaatatataccttggataggagacctttgataggtttt

SEQ ID NO: 45332 - DNA, 132 bp, Arabidopsis thaliana columbia
cagaaatgcctttcctcgtaatctatcactaaacttagtatcttaacttcatataccttctccttagccaccacgaaaagccaaaaagactcgtcactcacattcttctacataactcgttcacttgtctcc

SEQ ID NO: 45333 - DNA, 609 bp, Arabidopsis thaliana columbia
ttgagtcatttcatttgaaatagactaggccacatcaacttctatattatcatcagtttaatgtacatgcatgtataatggctatgcagttgactcttgaatagaaataagttgttagcatttctaactttttgatcaggctaccctcaaattttgggattcctaacctaaaaaatgttgtcagctatttcgtaaaaaatttgtttctaaaagaaaattgtaaaatttgaactagtaattatcttttgatataatcctcaaagaactaacttttctttttaagaagttgcacaccaacctaactatttaaaaggatacaatttaagaaaaaaatgccttatgcaaagaaaatgatatatagatttgatagataaaagtaagaaacatgataactattaacgtaaacaaagataaatgaacttcaaaacagagataagagaaaatggccacataacattatatgacctatgcataaactctccttatcaaaccattaaacatgtatgcagtgaccggcacgcgtatcgcttttttcagataatgtatctaacattaatttacatctatatatagtagttcatcaagaatatattctagcgtatgtagtaa

SEQ ID NO: 45334 - DNA, 546 bp, Arabidopsis thaliana columbia
agttgaccagatctaattatatatgtaaaaaaatgtatatataaaattcataattcttttttatatatattattttactttttagttagtcgttttataatatttacaatatgaattaataggtttatttgaaaacactgaagaaaaatgacaaaacaaaacgtgccgaaagttctttttttcttttttgtttatacagttcttctgggtatttaagttttttaataaagggtttgcaattatgtgtattcaagttttcttgtgggatcgatatgaaagttttgacctaacttctcgtataaattaaacaagcgcatttaagtatgcacctttattgacgactacataacccattaatgtaatttatgaatgctatagatagatgtaaatatcgatttttacgtacacgcgaagttactggaaaagaagccattaatgcgtcaccatgtacactgcttcgccacgaatcaatgatatgctcttttggatttatacagttttctgaatgaaatatatctagtcattttaagttacatgatacaaata

SEQ ID NO: 45335 - DNA, 608 bp, Arabidopsis thaliana columbia
ttttcaatggtgctttatcatgcttctaaggatatacatagtcacccattggtttaatatttgttgttaccaagaacgctctgtcacaatttagtcatacattgcgattttatcactagtggcgagtatggtaaaaagtttcacaactaatattgtgatggaatttgggactatataagttagtcgagagatgtgatccgttgaacaatattaagtagcagaagatcaaatagcaatgagcagtagcagaatattttcacaactaattaatcattcttacattgtaaagaactagtattactcactctcaacaattgcatgtctcatacagtaataccgatgtgtcataaaaatgtgaattttgcttcgattgcaaaacacaaattagtgttttcactctgtgagctttgaagttgcagaaatcacaaccccaattggattctaaactctagctaggcatgtacatttgcttcgattcaaaataagaatgttttcactgtcagatcaaaggttcaataagtgataaccattttaagcagatcaagcatttatattgcttgatattttgtccatctaccaacatttacaattcatttcttttacaagta

SEQ ID NO: 45336 - DNA, 571 bp, Arabidopsis thaliana columbia
  unsure (1)..(571): unsure at all n locations
gaggatagcagctcccaatttggttactataatataaacaaaattgatgacattcatcaataaatttggattatgacagaaaaattagttaaaaaagcaaacatgttcaaacaaagaaatattctgaatactaaaaaactaattttcagatctattccaccattcaccaaccacatggttgttgtatttatgaactctactatacaatagaggcaaaattccagcaatgagagctatgaaacagaagaattttgagttgttttgtcgataaaatattaactatgaatggggaaagtttaccaatcacagcaagtgttggatacctacaatggctctagatgtcggtagacttgtgtgttttcaaagatattcacaagatcattaggacttttttcgattacaaaatgtgtgcttagattgatgaaattacaaaagaacctcgagtttctagtctacgaatgtcttagacttataaacgaacaaacaaatcgttttctagtctatacatcccttgaagcttatctagcgaagttgtaatgaacanaatggttatggaggatttcctagagag

SEQ ID NO: 45337 - DNA, 432 bp, Arabidopsis thaliana columbia
ttatcttctttcttcttcgctgagcttactctgtaatcttgtgaactctcgttgataattcaaagaggaaacggagataaaggagaaaactttagagcgtgttcaagttaataacagttctgtcgataatggaaaagctcttcgtaccatcatttcccaaaactttttttgaattatcagactccagctaaagtagagaattcgcctgaacttcatccaaaatccagaaagaaaaacctatcattcaccaagaagaaagaacccaatatcattcccgacgagcaattcgattacttgtgtagaaacggaagtttgctcgaagctgagaaagctctggactcgttgtttcaacaaggttccaaggtaaaacgaagcacttacctcaaattgttggaatcgtgtattgattctggttctatccatttgggtcgt

SEQ ID NO: 45338 - DNA, 597 bp, Arabidopsis thaliana columbia
tttcgtggagaagggggtttagtaatcaccacgcgcatctctttgcgcttgtgcaagcttttggtcggctaaagtgttaattgctaggaggtgatatccaaacgctcacaatgcgcggcagatacatgtcttctggtacgtaactacgtatcgcatgtgtaatggaacacgagaagaagaatgagatataaatggtggctcgcgttagatttaatatctatttatactgctataaaattttccagattgttgtcaattctttctattaacaaatcttgctattattttgttcaggtatattttccagatcaatttttttttttggttttataaccttagaattaactacatttcacaagacacgatgaaatatttttttgaatattcatttctttcattgttagcgaaaaaattatgttttcaatgttattcatctcttattcattgtacaatatataagtgtcaacattcataagtttctgatcatacagactattcatcgttgatatggcgatattttcttaagtaggcgaaactacccatacatttttctaacattgttcgtaaaactagaaggatttgtcatatgatacaatg

SEQ ID NO: 45339 - DNA, 453 bp, Arabidopsis thaliana columbia
caatatccattgtaacaatacagatacagtgtctgttcaaacatgcaaattacaaaaaggaaatgaaataaccttaagtgctcaccaagtcaggtacttatattgtgcatcacaataggctctcacataagatggttccatctactcccacaattggattgtaatctcaaacaaagcctgaaggaagaagatgatagattcacaatcaaaattaccaataaaaccttagcaattggccgctgagtatatacctgatagtactctagaaacgcagagaaaaaagccataagtttataattgctagacgaaaacctaaaacacgtcaacagagacgagatcgcaaatatgaaataaacagtaaatatcccatcccatgggaaagtctacaaataaatctcaagatcagtcatttacaactcagcattaggtttacttgcaattgagtaatttgga

SEQ ID NO: 45340 - DNA, 436 bp, Arabidopsis thaliana columbia
agcacacatagtgtctggagagttagatattatggtagaaatttcttgtgaccctaatccaacacttgcaaggaggttaatatagaagaaaccagattcatatgagatggaatttgaattatcaatctactaagactactaagaggagataatacaaagaatatatccatagaggaagtccaatacgattaacgtgagacgtcctgcataatacgagaaggtttcctctagactctctcgaatctagacaattggaattttatgttttgtgtgacaagtgctggcaattgacccgatttctgatcgatgctacaaaaaaaccacttcacttacagattgatagtaggagagtacgcactaaagcccccaaacgctatcctagcgctgaacgactataggatgccgaccaatccggtgtgagccacagatgcgacat

SEQ ID NO: 45341 - DNA, 500 bp, Arabidopsis thaliana columbia
cacaaatggtaacgtttaaacttttttccctagtcttttttaaacatcaaaccgctgtcctccaagttgtagcagattaatcaaaaagaaaggcgtcaatacagagtgaaagtagttcttgtggatcttgaagataatgtgaagaactaaatataaaagtttaaccaaagaaacacatctcctgatcaactaacatgcgcaatcaaaatagaaagaaaaaaaagaataattcgttttgaaagtttatctcgtaaatatttatcaaacaaaaaggtgattaataaaaacctttcatcactttccttgaagcttgtatcctccgattgcgtttattagcctcgcgttttagtttattttttgaatgtccgacctctgtggcggctcctaagaatccggtctgagttccgtcgctgtcattgtcaatgtctccttcgatcgttaatccttcaatcctagccgcaatggagtccctttcaccccaacatctacatctatacgta

SEQ ID NO: 45342 - DNA, 485 bp, Arabidopsis thaliana columbia
tagttgatttgatatgagtttatctttctatagcatctattcgttgtatatatctgtatatatttcttgttggtcagatatattcgttaattatacgtaagcaattaagcataaatatctaatcgaattttgtaaactggtttgataagccatcaatgcatcagtcaagaatgaatcattgcaactaagttgatataattcaatttaccatagaactcaaatgttgatatcttcttatggattttctgatcttctacattattagaaagaaacttgatttaccagtaatgatgatacatatccaatagaacgaaataagccaatctttataggttttggtagtaaagttacaacatcagagacatgtatgtattgtctctcagaagataacaaagctcccatcttttccgattcaaagagcttctctttctgttggcatcttcagaaccatagcttcaccatctgcataacccacaaatatagat

SEQ ID NO: 45343 - DNA, 575 bp, Arabidopsis thaliana columbia
gcagaatggtatttatatatcttcggctgatcagtagcatgtctagttaataaaaccaattaagtacttataatatataaccacaattttttttaataactacacattttgcctactaaacataaagggtatattatatactacaaacaaatccacaaaagtaaaatctgcgacgaaatggtattcatcttcggctgagtaggatctacggtataaaggtagttaggtcactatgtcatgacgtcttacggggcatcagattgcgctggctgtaggtgttctttaaacaaatgtatgtagccattgattacaacatttacgtcagaatgtggagcatcaatgaagaatatcgacacacgacaatctgagtcagaatgtgtaaacataacatacatatatgccaatacgatattaattacgtttttattattagataatcacattattccatatcctttccaatcacgaggtccatacatgattataatccataacatattacatacaaacatacatcaggagggacctttggttaccagatcccaaaatatctggaacccaatcgatgaaaatta

SEQ ID NO: 45344 - DNA, 594 bp, Arabidopsis thaliana columbia
tttttgatatcaagttcgaattcattataacacaaccaatcaattccagaatttttctaaatttctcaagcaagttacaactccatgccttgaaaaggataagagaaatggagaaaatacccaaattacgagaataccacgctgcctcgcgagttcgacgactctgataacattaggaactatagattttcctcctttcacttgcgtcacagcaccttcctctatgaaatcgttctgcccacaaaaaatgaattcaatcaaactctccaaaaccccagaaaacacacaaacaaaatcaacagagagagagagagatggagacctgcatgtcgatgacgagtagagccgtgttcctccatctctcggccatagttcgttccccacaaagcgaacaaagagagattttcgagcatagtgatgcttgaattgtaaattattagattggtgtggctcctttggcggaatacggcccatctgtcttctcattcggcccaacaataaagacaataatatcctcgccggattttgtgtctttgtgttgccaagaaccaagatatatctaacgactggtactgaggagcaaaacaacggttg

SEQ ID NO: 45345 - DNA, 284 bp, Arabidopsis thaliana columbia
  unsure (1)..(284): unsure at all n locations
gaaattcattaaaaaagtaagagagagaagaggaaaaagagaaatgagtccctaacgagagggctttgctttactggactaagaaacccactttacatgtggaaaaatattattgatcaatttttttatttgtaactgaaaatataaatcaatcataaaaatatacttaactccttcccctcatngggattcgggattgggaatgtattttaccgttgggtttgctctaagaaccacgaaactctttgctattattttgaccaaattctcaatggtgaaagggt

SEQ ID NO: 45346 - DNA, 520 bp, Arabidopsis thaliana columbia
gaaacacgtcaactgaatagtaatatttgttgagttacataacggtaagaaaaatgtaaataaagctaaaatatgattctccctgatatgaccaatgaaccaaaaaaaatcagtttacgaggttgtttattcccatcaggaccagttactgaataaatatgagtcaactgaatatcatacagttttagcatggggaagacaggtaggaaagcaataccagaagttcatacctatcaaggagaacatctttccagcaggagcctgagtcgtggatgcagaaagggtcgctccttggggatcgaacatgtaaaagtagccaccagaaacaatagacagaagatcacacatgaagtaacagctaagaaggcccaacccatagttgagagtttcacccttaattctccactgtgaaagaagctgaagactacaaatctcctctctggtcaatgtaacccttctaaaatggcaactatagctggtccttgaaattcactgaaaaagaagagtacgttaataagag

SEQ ID NO: 45347 - DNA, 552 bp, Arabidopsis thaliana columbia
tttgtttaagatttaggttcacatttaacaaaggagaaaattttatactactagtagaatccactgttcagctaacggcttgcctttgctcagcttgaccgacataccctaacacttatatttttgccttccatagtgggatttgtacaaagttaaatttgcaaagtagccatacttaattataattagttttctgattagttgtatcaaaaatgatctaatagtttgattcgttttctagtggtagaatcacatgtataacatttattgaaaaatcaatctttttacaatgaaaagatgaatttgtatgggtaagaagcatgagcggcttgagcagcggctttatgtgagaaatcgaagccccacatgtccccaaattcaaattatagattaatccaaatgaaatctgattaacgcactaatcgatacttaaggttttaaattactctcattcttcgcttacattacttatataaaaccctctctcgcatccttcctcagttaatcatcactgctctcttctccatctcgctttcactcgctctctctctt

SEQ ID NO: 45348 - DNA, 492 bp, Arabidopsis thaliana columbia
gggttccattgtgtctcgaagcagctgctcgggttggtgttcagatgaaagagcagcttgtgttcggagaatcagtgcgcgatgccatgattgtagagtactcatctatggatggataaatgctaggtagcgaggaaagaagctaaatggctcaagaacacgagtgggagacttaggattaagcagaggagtcttaaccttcatgttgacaatggggacacgaaaaatcatatccctcaaccacattggtttcttattcatattatgaaccagatttacatttggtgagaaacggcaagacacataagttttatttaaactgaaactgtggaaacaaaacaaaagaagtgaagctgttacttggtctgatccttgagacatgttcggatcaaacttattatcagttgcaactcagaagaaacagcaactctggaaatactttttagatctgtcctaagatgacttctgccctgtaaccttgaagtcagacgg

SEQ ID NO: 45349 - DNA, 467 bp, Arabidopsis thaliana columbia
cgataaaataatattttgtttaaaaacttctatgtaattatatgatctcattagtatcatacattaataattgtataatatgattttagtattgcttgttttttcttaaatatgcattaatcttgtgtagagttcacttattatattttacaacatcttaatcttttttttaattattttttacggataaaaattattagtttacttgtatttggttttgaaaagatattccattttaagtgtcaattacaaaatgtttaattaaggtatgaccctgaccttaaccaaatgagcaaagagaatcttttctactttcttgcatcgatccaaaaggaaatttttttttctggatttcgaaagggaatctaattgagcaaaagaagtaaaataagataacaaattatacatggtaaaaccgttatagcaacaaaaaccttaaataacataacatgtggtaaaaaagttat

SEQ ID NO: 45350 - DNA, 561 bp, Arabidopsis thaliana columbia
tacaattcttgaaatggtagcaaattctttgaacccttgaggtaaagacttgtgaaattctcagcacatagtattgttactattcatctttgtattctacatatataaataagcaaaatcttacttcctgagtattcaagttttattgaactctcataataaaaatggtattgtttatgtgtactatgtcacatcatatagcaagttatatctcacagcaatcaaaacttttagttataacatagttataacatagttgcctagttggtgtataggaggactataggtaattaattttctgaacaaaaaaatgtagtttgagcaagtaatttaagaatgggctttacaggcccataaactcaaaaccagcatccacagcacatgcatgctgtttcgaaacagtaaaacggcaaagcgttcaattgtgaaaaagtaaaacagcatcacagcccttgatcagctctgtgtatttttggcgggaaaatcaaccagaaaaaccctcgaagatcagcgagagagagagaagtagattgagaggcgagagagataatggcagatgaa

SEQ ID NO: 45351 - DNA, 496 bp, Arabidopsis thaliana columbia
  unsure (1)..(496): unsure at all n locations
tgatttgacgcaagagtcggacggattaaggttgataggtctcacatgaatcgaaagactcatgtattggctcgggaagggatcatagaacttttctcttcatgaatggctagatactctacttacattaaagggacttacttagatgaccgagatgagtgtatgttgtgagtaagtctgtaaggtgagctgttntgtgttgatntgtaagtgtttgatgtttgaagtgtttcagatgggtaaagtgtatgaaatgtggcatctgtgataactgtaagagtttagtgaggtttaataagagtgttggttttcttaaaatgatagactgaagtcaggtttaataaagaagttttaaatgagggaaagaaaagagaagtcttgtgatttggttaacacacgcgatttgtgaatagtgttcgagtgtttattcgaatactaaaggtagcgaagaaaaaagttgtgattatttgggtgtaattgtgagagtttgttgagt

SEQ ID NO: 45352 - DNA, 575 bp, Arabidopsis thaliana columbia
tatctagatcatgtttcgaaagaagggaaagaggttggatcatgcttcgaaactttattttgccaattccttacttatttagtagatgacacagcaacaaaaagccatccgaaagacaagcacaaagtacgaaacctagcccaattagagaccacggaccgccaagaagaatggggcagatatataattgacaaagaacaaaaaaaccagaaaaaccggaataattcagaaaatacatggaattctatttagaccggattagtcttcaaatgcaaatattatcgattttgggtcagggctgttttctttcaaactaaatagggccggtcagctcgaaccaatcgtggttagcctgtggggaaaattgcgaaccagaagtagcaggtgaggtcggtcagaaacagatggttctcgctacctccacgaagtagcaggtactcttctttctcttttcaaaccctaaatcatcttgaaaccctaaactttcgatttgaatctttcggtttctgatatcttcaaattttcaattgcaggggcttacttttcctgacgatggtagttgttgaatcccttgt

SEQ ID NO: 45353 - DNA, 614 bp, Arabidopsis thaliana columbia
taactcaacctaatcttatgctagtacgatcgataatcgagcaacgtgttaattaaaaaatgtagaacggacaactatatacaaaaccacaaggagagatctaagaaattcaaactccagaaacaccacgcaatgattctacgaacatgtttaggatgagaatcctaaaagagaagaagaagcggctgaagcacgacgatattaacagagcgacggaacaatggaacgaacctgtagacggaagcggcggatgtcagaagaagctaggcgaaatcgagtttgccaaagaaaaaccctagaatcggaaaactgagcgatggatttattggtgtttatatactctaaatgggccacacttaagaagctaacgtcaatttttaagcccatatttatattttatacttttgagagttagtatgaaatacaaatatgggcttttgagtatggtccttttaagagaaaaagcccatactttagataacatatgggctttttaagtccattgaaattcacattagcttctacctttttgtcggctagcttctacctatttcacaggtataaagactggttcgaaaggcgcgtctacgcctcttgatgaatgaaagaaaggg

SEQ ID NO: 45354 - DNA, 473 bp, Arabidopsis thaliana columbia
cccacaggcaaaccaaactcctttagtaactcgggcaatggcttctgcatttttcctgataacgagattagaaaccaacaatttgttgaggaaagatgcggctccttaactgtcgaatgaaacagcaagaatgagtacaaaaataaccaacctttgattttgttcaccaaccattttgttcctccttcgatgctcgaagacaaagactggaacaaagaatgtttacagattatagaagatcacaacattgcatcattgagctaaatcatgttttgaagaaacccacaggaacactagtagcacaaaacagtctcaaaaaattatctactcttaagatcttgttccttctacgccaaaattcgtctaatatcatcacaaacgatttcaaaactgaagaattgcaggaaactcttatacaatccaatgaacatatgacagatttgttagaaaattgcagaaataaagcgcaattg

SEQ ID NO: 45355 - DNA, 516 bp, Arabidopsis thaliana columbia
acagacgtaaagattaacccgcagagaacagaatcattgtatgattctgtgattccacaggttatattaacagtcacacttttcggcaaaacctcttattagagcaacataacaaataagtcagtgttttctagtgaagttatgcttctctagatagctaccaaattcacactttatatcaccaatcaaagcctaaacttttccattaaattttttttattgcgagagtcatattatcattcacaatgaacacaaatgccaataagctcctctaaagatgaaccaactagaaccttatctaacccggtagctaatcatttctcaaccatcaatcctcgactatgagcacgaaagcacagaaaaccaaaaagctactttctcaagcataattcgatacaacattgacacaactaaaaccaatcatcagaccctcacaccaacaaacattaagatcaatctcgcttaaagtacgccgcttatgaaaattacactttgtatcaccaatcacagtctcta

SEQ ID NO: 45356 - DNA, 583 bp, Arabidopsis thaliana columbia
tatgtactgtccttccaaaactttcaaaggtattacattttctttttagctctcacacgctggtgatagaaatttctaatattaatagattaattgttgttaattttctcatttcaggggaaagccactcttttaggtttaagtttggccttcttattatgctctggccgagaaggctgcctccaatttgtcaattcgggtgggatggatcaacttgtatatttgtttggtcatgatggtcagaattctaccaccattactttgctgttgcttggagttgttgagcaggctacacgccattcagttgggtgtgaaggatttttaggttggtggcctcgtgaggatggaagtatccatctggtaagagtgagggctactgtcttctgttgaaattacttatgcagaaaccatgccatgagattgcctctcttgcaatttatattcttcgtcgtttgagaatttacgaggttatatcaagatatgaggtacctccatatcaagaatcttgtgttgtttggcattatgttgataggccctttatgttaatattgttactaatattctgtctatcagtttgcagtgt

SEQ ID NO: 45357 - DNA, 221 bp, Arabidopsis thaliana columbia
tcaacgttatcatattatatgtttgtattaatgtatgatgtatataaaacgacgtttgcaatacttgaatataagtgagccgagtggacctcgtcaaaataaaaaacgttaattcactttaaactaatactaaaatagctgcataattatataaagggaacctttactattacaacttggggcatcatttttattgtcattcacacgtaataaccaccatt

SEQ ID NO: 45358 - DNA, 573 bp, Arabidopsis thaliana columbia
catacattagacttagcatctgaaattcaagggagaacatttgtacaaggtctgcaatttgatgaaggagaaaatgtgggatgtgaaatctcaaagttaggtggtctctctaaagaatatgcaattttaagggacatcattgattcttcgtccataaagaattccttatcaaggtaattattgcagttatttgagcattttgacttttatttcaccactgcacatattttagcctacttgaactataaaagtaaacatgcatggaaagtggaaaaagtctttttatgtagtccacctaagttttctgtgtcgcgctcatttatgtgtttgttggactcactgggaaggttgagaatattgtctaggcgtctagcgaataaagtgagtatttatacactttaccctgatgaaagctgttggtgctttgctaatatgtatgctgtactagttataagatcatcttcgtgtagcaaggggccatctgattgttagtcttttgtgaatattactacctttttagatttttgttttactcttaattatttgtatgatcaatttagtcttggtttgcga

SEQ ID NO: 45359 - DNA, 139 bp, Arabidopsis thaliana columbia
atgagacatgttcttgtttgttattttttggcttatgggtaggttatgatctcaatgtaatagttataatctcataagaattatcgccgaataataatcggaaccctaagttctgttctgcgacaagtttttagttagc

SEQ ID NO: 45360 - DNA, 544 bp, Arabidopsis thaliana columbia
tgttgcgtgtttggttatctcttctttcttctctctcacctaaatcaagggatttgttctgatcaactttgaacagaatttacaacaaatccctagaaaaatctgacccttccttcttcctcaggaagatttaagatacttgttgataaggatattcggaagaagcttttgaaatttttggcaaaggtctcatttgatccgacttttctggtaatttttttccctttattgtttgtttttccaacagatctgaacatttttgttacgattaatcaaatttctgtgttcttaaattggatttggggaaattttgagtagcgagatagatcttatcaaagctgggttaaatcgaatttgcgtttatagaaaagctgggtttagatcgaaatgaatcatttttgattgtatagaagctgtgttttattggaattggatcaattttgattgtatcgaagctgcgttaaatcgaaatgattgattatattgaagctgggtgtgatcgaattgaatcgggtatttgatgatcatgtgatgaattgaagac

SEQ ID NO: 45361 - DNA, 313 bp, Arabidopsis thaliana columbia
gatacgggtacatatgaattggtagattcgaattctagcgtcatgcatatgcaactaataatacaattttattcttatctttcaaaaatgtcacatgatatatgtctcttctctctcgtcgacaattgatgctctatgctcaactttatacaaaagcataagcactacgcacctctagtcgatagggtgtctagagacaagcgactaatgatacaattttctacagagttcgaatggtgatgacggacggagtagacaaatccgtcaacagtttaatccgcattatccttagggtagacaacaaaccattgcg

SEQ ID NO: 45362 - DNA, 348 bp, Arabidopsis thaliana columbia
gatttcttatgtgatcttccatgttgccgcttgttcgtttgttctatttgttcaaacattcaagattccaggagaagcaattaatgccttgatcaagcttgtaagagatacagccgagtctttcgttcccaaattgtgtaaggtagtagttgatgtaatctctgaagcgtttactatcttgtttgatttggcgaaaggacgagtcataagaatttcagattccatctcattgaatatcgctgatgtgagggacaaaggaatgccatggtttgaccaatttcttaaggaatggtcgaaagttttgtacggatttatcgatatgttatcgactatggttagtggtttatg

SEQ ID NO: 45363 - DNA, 550 bp, Arabidopsis thaliana columbia
caatcacgtcataattacgttacttatcatacgtgaattttaatttcttaaaacagatccaatatgtaatcatggatctttgcttactcctgaatcctttcttagaatcgacttcaatggtttcaaagacataacctcatgctcatcgaaggaactaaaacttcctttcgatgtcctccctcttgattctccttgaacttattcgtatctcatcaacttcatcctttatgctcacaatttttcttggagccttttctttttgtacacttaactctactagttctcgatcgactgataatgtttccttttcttccatgttttctccaacattacatgtgttattagagccaatatcagaattttcttcctttgatacaactttaccaagtttctgtggttggccaagtgttactttcttcaaggcctgtgtggctaataatttcaccaagcaatcgtagaatcgtctccagatattgataggacattgaagttctcgttctgtgtttttctttttttgatcgactaaagagaaaagcatgttttggttttt

SEQ ID NO: 45364 - DNA, 605 bp, Arabidopsis thaliana columbia
ccatggatatatcaagtgataaggttcatacagtcaagcgcacaaggttttatgattgagaattatagagacagtgacaaagaggcagttcgctcggcaagtcagaattaatgtcgagagatacaagcaacatcgatggtttaaagtttcaggtggagtcatcagtattacagggaagtaatacacgttcgtaaaagatggtttgtgatttcaggtggagctttagagttgaggagtttctcggttatcttaagtacaaagacaaggtctgagtatactgggttttcaacgcatcaggtgttagctatgagaagaaataagttgctgtttggatataattcggattggtcaagtgtgtgaagaagacagagtttcgagaacgggtaagagatgtcagaaacgttcaagcataagaaggttgcaacaggagttaaaaggaaagtttttcaggtttaaaggatgcttgatggtagttcagacattggtatatcagttgcatgattaagaagatcagcaaagctgaagtacaagctcaagataaaagtttattgaagtgattctcttaggagacggtaagagacaagtgcaaggtcttgcaaagaatt

SEQ ID NO: 45365 - DNA, 639 bp, Arabidopsis thaliana
  unsure (1)..(639): unsure at all n locations
gaagtgatgacaggaggtgacggtggtggagaagaagacggtggaggtgacgaaacaaccggtggtggtggtgatgatgatacaaccggcggcggagattgcggcggagaaggaggtggtgtaaccggaggtggagcagatggagtggtgggctgagtctgtaacggaggaggtgcagttgttgaagaatttgacgacggtggtgataaaatcggtaaaggaggaaccaaactcatttctatatcgaatacgaatctgaagcagcaaactttcttctaacacagtcgttatcgatccatttaaactccaaaaattgaagctttgtgaacaaacaaaccctaattccacaaatcggatcaaaatcaacctaaattacgcaacctgaagtcaaacctactaaaatcaacctaaattcccaaaatctccaatcactagccctagaattccaaacccagatggaaaaactcgagctttaagctcatatgcagctacacacgaaactcagagcagacccagattaataaacactagaaagtccaaactttgaagctttttcactcggaagattcgaaattggagcaagaatcgagaaggtaagtgagattgagnaatggagaagggaatgtggtgaaagggaag

SEQ ID NO: 45366 - DNA, 503 bp, Arabidopsis thaliana columbia
tcaaagaatatggaaaatagtatatttaaatttgagaagaatgacacatgtcgaatgaatagagcgccacttgtcagatttttagagtacaagtttgaggaaaccttactttattatataagatgtggttggttacttgttcgtcttcttaatttttcgacaattattaaataaaattgtgatgattgaaaactatataataaagacaaagtttgggaaaataaaaataaaataaagaaacgtgcgagagagtataggtggtagattctttttcagcttgttcacttgagtataattttttttttttttttttttaaacattatattaataaccgatacaaatgttatgaccaaaagtcacacagttttttgaagttccatacacaatatagccataaactaaaagtatatagagataataaccaaatcatccgcttcggttaccttttgagatcagcataatagaaccattagccacgtccacggttcccgcgtccacgatt

SEQ ID NO: 45367 - DNA, 550 bp, Arabidopsis thaliana columbia
gtgagagctgtggtcactcggaagggcaatggtgggggagttgtcgtgcttgtcataaggttgggactatgaaacgtttttctgaaggttctgagtcaagtgctagtggtggtggtggcaacggtactggcttgggttttacggagggtaagggtttgtcttggttacctgagcaagctacggttcagccacatcgattgactgatgttattcatggcattactcaacaacaatggagaatttcactgtatgagatatcacttcttgtggtgtttattgattcgagtatttgttgttttgttatgtgtttgttttgatgattgcattttattatgttaaggcctggactttttgggaatgaagttgctagagtacttggtggtggtcttgctccaggttttatgctgtctttatgattttaattctcagtctttcgctcttgacttactatggtgttgtttttttgtaggttctctgattttgattggtggtgacctggtattgcaagagtacttgttgtgcaggtaggagatgtgattatggtgtttga

SEQ ID NO: 45368 - DNA, 597 bp, Arabidopsis thaliana columbia
ccaacaaaggcaagagttaaccttttaacttgtgagaaagatcttctgacacaagtgccccaaaagcatagtagcacctagttgaaaccgagtagatcttcatcctagcttcgtcttcactgaaatgtccaaaacgagatatatcatgttacagctccaaaaatgatctaagtaaacacacagatccgtcatacacagtagtggatttctcacttatttaacctaaaatccctagaagaacatacacagagagagagagagagagagagagttttgaattggggatttacctgccaacaatctgagctagggttttgatgtagctatcaatgatttcatctctagtaggctcaccctgaggtggctccacgacgacaagccagtgctcgaaatcgcaaccatcgagcaggatcgtctccttaggtggcctgttcgaccagttgggattcgggtcgttcagagaagacgatgtagcctgcgtcgagagacctttgacagacacaaggccgccacggaaaacggaggaaaaagcggcgaccagaggacgggaccggctgagcagagaagacgccggagatttggcgagaggagcagatg

SEQ ID NO: 45369 - DNA, 475 bp, Arabidopsis thaliana columbia
caaaccaggaaattttcatactctgattcggttccatttgaaacctaaaaaaatcaagcttaaccgggaaacaattgccaaccatttacgaattttctcagtcccactatcgaagaagttgtgatgacgacgacgagggcgaagtccaaattccagtctctctcagcatgtcgcttcacagccgttaccggaacccaatacctcaccgagcacttactccaagactttaccataacccaattcctcgccgggaaccgacggaactttcccaacaccgtttcccttagctgtcatcactccaatcaaaaccctaaaatccgtcacattatccgattggtggctaacaaagaaaggcacagatttgtgtattaaaggattcgaatccaatggtgcatctggagtaagactgttttcatcaggaacaatctcaaagcgacatgaaagtacaactcttgaagcaattgatgggattcaa

SEQ ID NO: 45370 - DNA, 475 bp, Arabidopsis thaliana columbia
tctttcttttttacaagttgggccacttaatgatacgaaaatgtgaaattttgatcaatctttattaggaattcaaacataaagataccaaatttgagaagaaacatatatattcattcatatgggaaactaatggtttccagagtcacaccataaaaagagaagaagattgggttacattactcgtgaatagtaccaagtttaggacgccaagctcgctgaagaagccgtttgctgaatccgaaccaaactggtgctgcatcagcagactcacattgtaatcttgaagctgcattcagtttagccgccatggctgcaagaacttcttctgttgtatcccccttggtgtctcgtcctcatcttgttattccctagcggagacgaagagacgaataagtcattaagttcctgtcggctacgtccatgtgatgatgatgaacaacggttgccgctctcggcgactcggagatgcaag

SEQ ID NO: 45371 - DNA, 522 bp, Arabidopsis thaliana columbia
attttataatattatattatttatccaagctataaatatcaaaaaaaaatcatgatcattttacagtaaaaacatagtaatagaatatgaatattttctttcatatttgctaatatattattaatcatatcataggatatcacatatagctatctaaaacttaaagatattatagattttggccactacaatagattatatacctaatccaatgttaaatttatttaatatttattcttaaacaaaagtaaatgcagtttcaagtataatcttattatattatagagtgctaaatattttacgttgttatgttctgatactctaaatattttacgtttattgtagccatttccgcatttattttacactacagatttacttgggaaaaaaccgccatctatctataatttagacgtttaatacatgtaacattaactgcggttaaaagctaatcatggttgtttaggatatatataatatatcgtttcacatgttgacacatggaatgtcttagtagagtgg

SEQ ID NO: 45372 - DNA, 400 bp, Arabidopsis thaliana columbia
tttcgatttaccaaattaaatcaaactttgaggaactcgctagccagctgaagaagggcataaatctggcttcctatgaggtatgacacttgtattcgcaagaacagtctattgcaatcgattcaaaatcttaaaaatctctcctgttggattgcagaacttgtacataaccttgtcaagttccagaggttcaacagtggcgcctcctactatagttcattcttctgttctactcacattcggttcaacttcgcggttggagcaacttgctcaaactatcactagctcccattccagtaatatcggcctaaacctatccgtctttggtgaggttacgcgcgtccgtcattcctctgtcttgccgctttcacctgccacatcatcgaccccttccccttcg

SEQ ID NO: 45373 - DNA, 492 bp, Arabidopsis thaliana columbia
tacccgagggaggcataacagataagactccacaaaaaaaaaaaaaaaaagcgagagagaaatcaaaaccttgtaaggtttcttagggtttcaatcgaagcgggagagaaaatctcagaagagaagccatggatgaagctttgacgaacgcttctgcaatcggtgaccaacgccagaaaatcgaacagtacaaactcatcctctcctctgttctctcttccaacgatcttctccaagctcagagattcatcgatcacagtaatttcgcatctcccttctttctcatggtttcaacttcataagagattcgacaactgctttttgttcttatggaattcggtttatatcagaatttctggtttgattttgatttttgcttcctcacaatttttccagttctttccgatgatgtcccgttggtggtttcgaggcagcttttgcagtctttcgcacaagagcttgggagattagaccggagacgcagaaggagat

SEQ ID NO: 45374 - DNA, 450 bp, Arabidopsis thaliana columbia
tctagaccataaagcagaaacatgaagttcaacaaacagtacccataatctataatttcttacatacttgaaactgtagtaatcaatatattcaaaatataggtgtagaaacctttaatctattgaccaacttctagatagtgatctttagacaattatcattttcttcaaatgatttttttctatataaaaatagatgttgagggaatgcaccaaacacttcccatgaagaaaaagttgttgccatatctattttttatttatggtagcgagctccatagttttcatcttaagtcatattctcacatcaaacttagacctacttcttctgttaaaagaatagtttaattaatactgttttgttacataattggtaaatataattatttttattcacctaatcgggtaatcgacctcacacatctattataaagaaaaggtataattggg

SEQ ID NO: 45375 - DNA, 606 bp, Arabidopsis thaliana columbia
cgtgaccgattacatctcgacacgtgcaagcgtcttacctacgaacgcatttggtccgcgagacatggacgctggttctcggagttagaaggagggactctactgactaggggcaaaaacgttatgtaattgcttacgtggaattcattaagcttttgttaaaatgaatttgctattttatatgtttgaggtttagcttttgagggagcactttcaaaagaaaagatgaatttggctttgagattttatgaaataagataatgtaagacagattcgaacttggtttaaatatttagtaatgactaatgacagagaggagatgtagcagcacccgttcgtaatctaaaggagccaaatagctaattagcttcttaattaaaccattgattaaattattgcttcacagttttgctttgattaataaatgcaaatacagaggtttacacttgtttaattgagtttgcatgtgctccaaggtttactagattgagtcaattaattttgtgtcattactagaaacaattctatctcaaattagtacaagatactagaaatcgtgttcaatatatagtcttatgtagagatacaaacaattctttagtagat

SEQ ID NO: 45376 - DNA, 430 bp, Arabidopsis thaliana columbia
ggatcccctaaccttatccaatttaccaaaatcagctcttttctttggtaagtctaaaaattaaaactcacgtgccacatatgcgcgtggtattttaaaaaagtaataaaagtcaattaattacaatttgggataaattaccaaaagttctcaaaggttctcaattcgacacaaaaagccctaatctctgcttctgtaaagttcaacatttggcggagtcaaagaaacagagtgattctctgatccgattccggcgaaagaggacgaaacaaacggaacttgttcatcatcttctccagaaatgacgtcgtttcaggtgatgcgttcttcgaattcgagaaactcggatctatctcgtcgcatctcttctgcttctacttcttcttcgtctataagacctcaacaacagttccggcgagatctaacaagt

SEQ ID NO: 45377 - DNA, 549 bp, Arabidopsis thaliana columbia
caacagtttttattgttacagaataacaaagggaataataagaaacttacagatttgatatgttacatatcatatgtatctaactttgtaacaagggctcaactctctctgaacattttatccaatgcccctacatatctatctatatacatcatagatgattgtttgatcgggaaaaacaagtgactacattggtgcgggtaatctccggttataggaggatcctgtccccgaacccgagcctgatcgagatggggaatgagacggggcttgaactggggacgagttaagaatctcgagacggggcttgagctggggatgagttaagaatctccttaccaaggtctttgatcttgttgataagcagcgattgctctgtctgaagctggagcaaatactgttcttgttcgtcctccaaactttccagctcttctaaagcttcagcaagaccttcaagatctccatcgtcaatcaaattctgaaactttaatcatcacctgcttcatctggttggacagtaacagagctttgttaaacggtgtgccagga

SEQ ID NO: 45378 - DNA, 563 bp, Arabidopsis thaliana columbia
gaaaaagatttcatctttgagtttttcattcatctatcggttgtttccattctcaggtttcagtcgaaaattccctctctttcttttcgatttgatctgggtttcattgtacatagctcgatcttcaagtttcgtcatctgggtcttgtaaagttttagacttttagggttgttttacttgtgaagtttctctcttttctaatggattctctgggtaattgatcgattagggtttaagattttagcggtggggaaagctgtttggttctagaattctatcttgattaacgtcacttgcagctttctcacaggttttggaattgtactaggttttgattgataatcatagattggtagtgatttgggagtttcttgattgtgtaatcatggcggaggctattggtgctgtatctttggtgggtcatcgaccttcaattgtgaggattacagtgaagaatgaattgaaaacgcagaaatcacagagcattgttcgctttccggtgaaggtagattatagtgcgaaaggtgttctctctcatttgatgacgcagagtgtgaaaaag

SEQ ID NO: 45379 - DNA, 460 bp, Arabidopsis thaliana columbia
ctgatttgttgagcaaattggtcaaatcaccgcgcatgtgctccgatgagcgcctaggcggacgatttttagaacaagggttttgaatgttatcttctcaatcagtttttcttttcttataatcttcatatattttagactcacgtcatcaacctagtgaatagattagtaacagagaaaacaactccctaaaacctaattgttcacaacacgttagctagccgcttgaactaaaagaaaatctgaccaaaccctaccagatctagtaaacaaagttctaagactaagccatgagttcctaaatcaatgccgtattctttctttgacgatgtctcggacttacagcttcactcttcccatcgatagaaaaccaccgtcttcgaggtttgtagaagaggactgaataaaaaatcattagcggacgttatctctgatctccgatcacttgtctagataaaca

SEQ ID NO: 45380 - DNA, 483 bp, Arabidopsis thaliana columbia
ggcctttttaaataaatccacttacctacctatgaatccagtatatcaacaaatcgtacgaaaatgtaccaattagagatttcaatatgattgaagtgcatgcagcatgtgtatatgtttttatataaagcgaaagaaatgcatgtgtatttcagtatttgtttagtacaaactacaaactaaaagtgaaacgagctaggatacgacaagatctatatatggatttttgaaatatttcatgcatgcatacattctcccaatatataacgtctaattattataaaactgtaatcaacgatggtgtacatgctaatcatgaattcagtgaaagctttattagagaaggaacatagagtgattagtccatgtttgtggagaatgtatgtagtactgcctgatcattttccttgtacctcttccaatagaatggtccgatccgacccgtttactaatcgtcatgcggcccatattcatgaatggtta

SEQ ID NO: 45381 - DNA, 495 bp, Arabidopsis thaliana columbia
gattctttaaggatccagcttataatttctccaagccttgactaagcacatagacattcatttataaacatacaacactgattaaagaaagccaacaaaataaatgacatagaaaccttacaagtgtctctttaattaaatgtattaaacaaaggtttcctcagggcaactaataacattaggtaaagattatcctttagctgttcataatacttgtgctaaagatgacaaaccaacaattttccaaagccaaacacaaatctgaatccgaatccacattctcactacatcatctccgtcctgatatcaatcgaaaacacgaaaaaaaaactcaatccaaatcatctataaatcctagtgatgaatcatgttcacaagtttgttctctagaattctatagcaaaaacatgaagcataagtttactattcagagttagctttaggggcaaatgatttcttaccaaggagcttcatccttcggtgaaccagccgggt

SEQ ID NO: 45382 - DNA, 499 bp, Arabidopsis thaliana columbia
tgagacacttactagttgagctggaccaggttcgaaaagtatggccagggtataagctataccagtcacacagtatacaagacagatgaggacaacataattgtctgtaactgttgatcttggattgttgaagaagtagaacatggatagataaacaagcggcttaacgatggtgttgaagtgatcaactgtgtctttcgctaggaagtaagccaggctgctcattccggctcggctttctctccaatagtgtagtttatccagagagaaagatcttaatgcagtaatcttacacaagagagctgaaaaaaacaaaaaattgttgccagaatagatgaaagaagcaaagttgttgtcaaaatagcttgaaagtttctacttacaaacagcaataactgtatatgtatatccatggcaccaaacgtttcatcgctcactttagcaagcggtcctaagcagataccagcaagtaaaagtattaggtaatctacagctagtg

SEQ ID NO: 45383 - DNA, 590 bp, Arabidopsis thaliana columbia
tccttttttgttttttaactctctttagacaaaaccttcggctttagatgaaaacataaccaaaaagacagatctccattatgaatcaacttgaatatttcacttgtcgtctaaggcctattaataacctgatgttgaatatatcagattcctctagctcgatacttgccaacatggagaggaaatgttatagatgtggaaatggagatgaatccaggtcgtgttctaggtatgtcactgtccgtaaacgcagaaggtggtgcagttggagctaaatcaggagcaggtgatttccgagtagaaattgactggatcaaagccttgagattgccgtaaatgttgaacaatatagcaatgtatgattgtttttgttgttcttggttttagcttgtaaaaaacaaggcctgaggagttgatgatacttgatggctaaaaaatcgttgcattgtcttttcactttgaggcacgtttttaccatgtcataaaataaaaaatcaaaaggtattattaatcttttgtttttagcctaccttattggtcacaagtttattataagtagttaataatgtaatggtcgtgattgaataagg

SEQ ID NO: 45384 - DNA, 327 bp, Arabidopsis thaliana columbia
ccgcatttggaagaaagtatgaggaattatgagtggttctgttttgctagctaggctatgaagattagcatacaagttccgttacgtttacgcagcttggcatctttagaggagaatttgattatcgatggttgtatgtggacatcttcgttatgtactataaaaaaaactcttggagatgggtttacttgcttggattgtaatgtcacgagtatttctgtttttgattcttgtattgttcatttgtggtttccctcttctatctttgtatttctttggcctttttagtgttaatcttctgcttctcttttatagggttttagttcc

SEQ ID NO: 45385 - DNA, 417 bp, Arabidopsis thaliana columbia
cagcccgagagagaactagcgtggctaacacgacatcgtctccgagtttactagagggaagcgaagtcaagcttctgatgttggtttggtcctctttgagagatctcactaactctatcatcttttcatcaagataggtcggatatttgatcaaagaccggtcataagacggagttagattctccggcatgctttgaagttcttgtttgcagatttgagcccaagctttgataaaagtgcttgacgttttcccgtctaaaacagcatggtgtgctgcaacacctatggagaatccttggttaggaaacaacgtgatttgtatggagaaagcggtcgctgagtcatcagaaaccggtaacttgggaacccaggcatgtaactctgacaaaggacgcttgtcataaccggaaagatgag

SEQ ID NO: 45386 - DNA, 422 bp, Arabidopsis thaliana columbia
gttaaggtagagtcgttgttatacgaaaggttagttattacatcactaaggtttacgaagagaagaattaattgagttttcggtgggcagcaacgaataaacctttgaacgctacatgcaaaagttagaaacttctttttggactataaagattgttataaagattgtttgaaatcaataaagatgatcgttcgtctttcaaatttatttaaaacattaattatacggcatacgcaattgattattattaaccttaaccatcttgaaaatcgaaattgacgacttaattttatgaactcttgatttattaatttgacggtgcgttgataaatggtaagcttcaacggtgcttgctcctggtctcgttgctatacatcctgtcatgcagcaacaacaacatcaaccaaaactacactttttgt

SEQ ID NO: 45387 - DNA, 341 bp, Arabidopsis thaliana columbia
aaatagagtgacgaaaaagaaaagggactaagtgctaaaagtctaagacgatcaagagtgcccctcacaaaagtagctgacggaaaattaatacaaggtgaaacgaactagtcgcagaggtattggagaaatgaaaagagagtaagtgctagaaaattttgcatggtggaacgtggaagttgttaatattcatatgttggtttgcttcagctttcatgcattttcattcatttagagcttctttaggtgcatatgcattgtatttgtccaaataattcaattactaattaaataagcttgaaacaccataaaatttaaaatttatgggggtaaaatgaccc

SEQ ID NO: 45388 - DNA, 478 bp, Arabidopsis thaliana columbia
actccttttggagtcttgcttgagacttggtttgagaaatctcttttaagcatttcaccgaaggtgaagcttttcttggaaggctctaagctcatgagtgatgttgtcccaaggaaatgcaagtattggttgaactccagatagatttaagaggccatcacaaacatagagacaaagatcagatatcttcgagaaagagcccaaaagcctgttgtaactgtccgtgttgagccggcggaggaacggaatcttaggctctgttaaggcttctgctgcaaacctctctaatgcttcaacatgagatttgagttttacctgactttatctcaaatctgcaaccactttctggttcttctgctcagaacaaagaacgagtgattggatgcaatctaagagggcatcgagacagtgtgaaatttcggttcttgcaagcgttgctgctctcgcaggggtgacaagaatctcccgaagacaaaac

SEQ ID NO: 45389 - DNA, 555 bp, Arabidopsis thaliana columbia
ctagaggaagaggagccccgcaatttaagcctattcttcttcctttttattaaatgtacacattaattgaacctatcatatcatagtatcaatttaaaaaaatacaataaaatcccatcattagtgttatctaaaataaaaacactaattatgacgtgatcttaaattaatttttagataaacaaaaacgaaaacagaatcacacaaatgatgacgtggcaattccctacgtgtaacaccacacacagtaacgttcctctcctcactctaagcccaaaaatctctctttttttttttttttatctcgcgtttataagaatcctctctctctctctctcacattattttctgtttggaatcttggatctttctttctgagatcattcgtcttttgtactgattttgagagatttcatttttgtttgtttacgatccgccgccgtggatttttgttttccgatgacgatcaaagatgagtcggagagttgcggtacgagagccgtcgttgcttcgccgtcacaagaaaaccctagacattactggatgaaacttgat

SEQ ID NO: 45390 - DNA, 618 bp, Arabidopsis thaliana columbia
ttttaaacttagttagatttataaattttaatcactttcttattattgttagactttatattttgttaaacatgatctgattatttttattattaataaaactcaaacatatcttttctcgcgatttcatgaagaaaaatattttaaatttgtttatacaatatttctcaaacaataaatcaaactcaaaatgatgaatattataaattgttgttgttattttagaaaaataaattttaatgaaaaaaccctcaagtttagacttatccattttaaaactctcaacttatttttaaatagaaaaacccagtggtcagtgttttcacactcggtccgaccggttgaaccgtgacccaaacatttttctgatttaggtttagtgctaaaacccgacaagttcaaaatctaaaaaacccacaaaaactcactattaacctatgatccggtgaaccggtcgggtgtgggttttaaaatattctctttattttggaatataatatgagattttagactttattcaatcatttttagagatcttttcagttcgtaaactcattttatggtttcgattatgacgaagactttacaatgcagcgttaaaaatgaacgaatggtgag

SEQ ID NO: 45391 - DNA, 624 bp, Arabidopsis thaliana columbia
tataactttctctagaattgtattcgcggccgttgacgctattggcggcggaagtgtcatcggcgtatacaattgaatttaaaagaatcatcatcacacgtaacacataaatcgatatattcttttaaaaaatattgataccaaagaaaataattgaataagtattactgaaaacagtttatatcatatctgatagactgatacagttgaattgctgataccaaacaaaaaaatgtttaaagaatttctataatatctgatacagttgaattttatcaatttctacatccatattccatattactgatatttaaattatcaaattgagtataggatgattttgacatatacaaaaaaaaattaattttgtcacaagattgctaactttattatatcatacgatttcataagtagttttttttataaagattataaataattcacttttattgtttacatatcatataaaaaagtctaaatttcataataaatcgtcaatacttatattcgaaggtttttgtgcgtagaagtaactattgaagggcaatattcttgcaaatacaacgattatgtttaagaacattaaaggtagggaagatattgtttagaaatatttaataatgt

SEQ ID NO: 45392 - DNA, 438 bp, Arabidopsis thaliana columbia
cgacaccgatgttgacgttgaagctattgctcattattgtggttttaattgtggtgtttactgttaagccttgggagagtaatggtgggggaggtggaggtgcacctcgtcaagctactccggttcaagctcagccaccgccacctccggctgtgaatcggcggctactacgctaaataattttctttctgaggttccctctgtctatgcatgagcatatctatgttttgaagattgttttttattttacagtattttgtctttaatgtttttgtaatgttttggttggttaaactctgtgtatatataatgcgatcaccacatttctgtgttgtattatggaacgattcgcctatgctttacaatcgacttaagtcaatttgaccgtctacgatattattattcggagagatctatcagaatcgatggtcaaaatga

SEQ ID NO: 45393 - DNA, 538 bp, Arabidopsis thaliana columbia
  unsure (1)..(538): unsure at all n locations
acgacatccccgtttttgcgtaaaacaagtggtattttgttacgataaaaaacaggtcaaaaaaaaaatttgttaattgaatgtttaacacgtttccaaaatttataaatgttcatattcagcttacattgtactagcatcggcagtagttgattgaatactagtgtcgagtgacatcagcttgatatcaaagcatgattgattacattatataatatccatttgtaaataatccacctctcaaaaaaaaaaaaattaataaataaataatccacctccgttcatatataaagattgtcacggtggtctaccttaacactacaaaggcagtccacgactgagaaaaaaaaagcagttcaaatttttttcgtatgtgttaaggatggagtacattcatagagcgatcatctacattctactccaagatcaatgtggagtatctgtattacttttagttttgtaaagagattatacataatttaaatatggtacattcntcattacaggtctttgagctgtggcgttcctagccatgatg

SEQ ID NO: 45394 - DNA, 420 bp, Arabidopsis thaliana columbia
cacctctttgtatcaatcacctctgctcttctaacaccttccataagaaaatatgtttgaatcttggagttcaaggaagaggacgaagattacaagcgtaacttatgaaaacataataaactaataaaagattgttgaaagaaaagaagattatgagtatctgaagaatatgtatagtagaggtgagcatgatcgtttattttaggaaagtaaatccttcgtcattacaatcaaacgacttcgttgatattttagtattaacgcaattagttctccattattttatttaagagaaaagattttttttatttttgacatatatcaacatatgaacgataatttgacatgtatcatatgatcacgcgagttactaactttagaaactatattttatatagtgcaattatatgacataatatt

SEQ ID NO: 45395 - DNA, 298 bp, Arabidopsis thaliana columbia
caaattaaatcatacatggtaaataagaggtcccaaagaccaaaagcattaaatttaaggtaatgcgtctggttactattctcccaaacgaaaagagccaaaagcaaccgatcaactggagaccagtaaccgcacattcacttcaactcccccaccagagacaagatcagataatggagttttctgccacgtggcctaatcctagtggtgcgtaccgataaaggtgtcaacacctttccgtaagcctggggcagtcaacgacggtatcatgaatcatggcacctttgatcatgagggc

SEQ ID NO: 45396 - DNA, 540 bp, Arabidopsis thaliana columbia
ccacgctgaacaacacaaaaagaacagcacatacttcagtctctaagaaattaattattaaacagagagttaacattatacagctaaccatgagagccaattatgatgctttccttgatcagatttggtcgtatactcataccaagaagatgcatcaacaatgatgcaattattcaagcaagtgataaactagaaaagagctaagcacacactgagcaacacataaacagcaccacatacttcactctttaagcaattaattgagaaagaacatcatcaaaatcagcagtaaagagtcaatagagcagatttggctgtatactcatatcaaggagataaatcaacattaatgcaattacagaatcaagcaagccagtgtaacgagctatacgcacagtaagtaacacaaacaacactacatacttgattctctaagaacctacttgagaaaaagcatcaccaaatcctagtagagagtcaataagcaaggaatagagataatgaaaattaggtcaaaaatgtaattcccgataagaactg

SEQ ID NO: 45397 - DNA, 392 bp, Arabidopsis thaliana columbia
  unsure (1)..(392): unsure at all n locations
aggatgatcctctagtaacgtaaagagagcgcgagcgggccgagcgtaggcgcactgcgaacgcgtcctcgtccgacacctgggcgaccagccccgcgctagcaatggtggaatcaatgtactgcgtgccatcaaaatcgccacgctgacaacgacagtaccccggccggtactcgactcgtcgccagaggcgaaagagacacagaagatagtgcctgaaactggaggacctgcgatcaaagcttgagccgtgcagccttacagggtgcaagatgacctatcgaccactgcacctactacctacgccgggacaaaaagcggncaggcaggctgatgctcactatcccgccagttctcaatctagtacaaggctgtcgcgataaccgccccaa

SEQ ID NO: 45398 - DNA, 495 bp, Arabidopsis thaliana columbia
ggacagaggcttgtcttgtgatttcctgcaagatgcaaaataagttattgaccaaaaattaaccaaaaaccaagatctagtatgaagcatcatgaggtataaataccttgacttgcttcaaaatgccatccagagaaatgagagatgctaatcttgagtcttcagctgccgtcgaagggtttggaataggagaactgccttcttccaggttaagcaaagctgcatcacttttcatttgttgtaaaatctgataaagaaagcaaacgaaagtcagagcacaagaacgtttctaagataaaaatcaaagcacccagaactatatcgtttattttcaggtgcggtctagtacctttcttcttttgtggtcaacggactcaagagctgatcgaagcttagacacttgaccagcatcttctgcctcttctgccgccaaggtaccagcaatatcctgtaccacagttccatattaggcatcactccaaactaattactcag

SEQ ID NO: 45399 - DNA, 622 bp, Arabidopsis thaliana columbia
attatcctggtattacagaggcagaccatatcagatctcgttctcgcggtaaaaagcacattagaggtaactggttctgtattttcttttactacattgaaatgatctgggagttgacaatgaccgaaaatttacggattctgatgttgcttaacatcaccagaatctccccagtatatgtatgtataccaattggtttgattgattaggaatccataagatcttaatagaatattgccagtgtcatagtgaagtggaaaagtgctgagagttggtttacactttcttctgttgcttttgcgttggtgacaaaaaaggtcaattttcaattaaaatttgagttatttgtggtatacatctgcgttagatcaatgtcttgatgtgctgagagaaatgaaacatttgtcatgttgatctgtttgagtgattgctgcttggttgctctgtgtcttaaggtaagaagaagatgatcatggatgatgatgccaagtcttcattgacgaggaagctgagtaagttctctctaatctaaaaataaacatctgatggtcttcttacttcccaaaacagcgagagacaccatacaaaagtagtcttctgactcaaagttgatgtttagttg

SEQ ID NO: 45400 - DNA, 573 bp, Arabidopsis thaliana columbia
ttgaacgttgctatatataaatgtaaaggcgaacgcataagaaaagaaaaatggagaatgaagcttttgtagatggtgaattggagtctcttttggggatgttcaactttgatcaatgttcatctaacgaatcgagcttttgcaatgctccaaatgagactgatgttttctcttctgatgatttcttcccatttggtacaattctgcaaagtaactatgcggccgttcttgatggttccaaccaccaaacgaaccgaaatgtcgactcaagacaagtaagtttaagtaaaaaatgttaagtttcctatgtttacatttgtcgaatattaacccataacggtaatgcaaagcaggatctgttgaaaccaaggaagaagcaaaagttaagctcggaaagcaatttggttaccgagcctaagactgcttggagagatggtcaaagcctaagcagttataatagttcagatgatgaaaaggctttaggtttagtgtctaatacatcaaaaagcctaaaacgcaaacgaaacgcaacagagggatagctccgatctcagagcctatcgctaggggggt

SEQ ID NO: 45401 - DNA, 644 bp, Arabidopsis thaliana columbia
ttctcagcaaaagcagccatacctacatcggtgagctcacggcaagctctaagcttaagtctcttcaaattcctacaccggagagagatcttaacaagcgcttcgtcgccgatactaacagatctacgatcgcatttcaacgaaagcttagtaacggaatcgaatcgagagaagagagaaggaatcgaagtaatcagatctgagcgagcgtggagagaaagacggtaacgattctgtccttcgacgatcatccaccgacgacaaaccagagcacatcttttccgattaccggagtttaagaactggaacaccaaagctaagcactcgtcaggtaaactcgatgtgtagtcaggttgtgaaatctcagattcgattgattcaatcgggaatttcagtgtaaacgatttgcttcgtcgtcgattgaggatggaatttccggcggcggaggttgattggcccatccacgaaagtctccgggtggtcgtcgtcgtcgtctgcggcgtagaggagaattttgatttcgattttggatattgattttgtcggttagtgagtttgagcgttggttgaaaggtaaggttgtgaaattagtttgtggaaactgttgcttacagttttcatttagatttttgagtgaaattgtt

SEQ ID NO: 45402 - DNA, 669 bp, Arabidopsis thaliana columbia
tgaaaatccaataaacaagcgggacctcgatttgaaatctctttatccagatccatctctccgtcacaatcttccatctaccgtcaccggaaccggcgagttagtcgtcgggattccagatctgtttgtctacgtcttccttctgtctctgtgttcatcagagtaccaattcgctcgattgttgctgcatttcgcgaattgtattaggtttatagcgtctatgaactcctgttttcgctcgatttgagtaacctaggtatttctctacgttgattgtttggatttgaagaaaaggcgcaaagtatgagtagaaatttcggaagtttcatgaagatttgagggattgagttaggtattgtagttgtagagagaatgcagagtttatcgagctcggctccgacaccggaggcgatattagaatggttacagaaggaaatggggtacaggcaattaggtccgtataatggatcgagcaaatctcatgttccttctattgatgctataaggaagatttgtagagggaatatgatacctatatggaattttttgataaaccgagtgaaatcggagaagacagtggagagaattaggcggaatattacggttcatgggggaagtagtaatgctagcattgggagttcggtaatccttgggaagaggagagtagag

SEQ ID NO: 45403 - DNA, 463 bp, Arabidopsis thaliana
ttcatgatgctatgagttagatcaagaaaaaggataattcttagttactactactatatatggttagctatattttctatatacaaagttggttttttagaaatttgtgtggtcaagtattggaattaataataaccttaatattaatagttggtgatagatgttaatggaccattatgtcgatcatcaaagtgatagtgatgatgatggtgaatgtgttaggaggaggaggcaggattaacaatatgagagtgatgatgagcacaatgcagactggttttggaccacctccaccaccacaaccacccaccttcactcactatccccatctccctctcaatctctttgggtacactcttctattccctctttttcatgtaatgatgatgatgatgatagtacatgatgcacaaacataacatgatacgatttgagaccagaagaatgccactcatatttggct

SEQ ID NO: 45404 - DNA, 571 bp, Arabidopsis thaliana columbia
taaaatatttctcactgcaaaaagaatgaataagaacatacgaggaagaatgttaaagacagcaaaaaaaagaaataagtcgtatctagttggttgatatccaactgtcgtttcttcatcagataaatttccaataatttcagacgacaccaactccagtgttactccagttgccatgcggcttatcttcaacctatttttgaaggctattaagtattaacatatttcacatctccaaattaaacatttgctacctaccttaattgacacattcaaatctaagctcctttgcgatattaattatgacttataaaccaactttaagacagaaaaaaaaattgtttgtcacacataatattaattgcatgatagagcaatgagagaagaacacattagtgttgggaaagaattttattactctcataagaatgaactagataatcatccacgttgtgtgaggggacaacaaactattagatatttgaagaagttttattatacagaattatatatatctcccattgtcaacaacggatgccattttttcttataaagagaggccatggattat

SEQ ID NO: 45405 - DNA, 405 bp, Arabidopsis thaliana columbia
cagtggacagtgtactatgtgtactgtatatttcacaatctatacacgagtgaaattttataatatatgaaaatattcacaaatagcaggaatgtcataagatcaatgctattagtaccttagacagaaggtatcttatctgaacatgtgcaaacatgcctatatttgcgtgcgtgacagaagcttactttacttggatttacgttggctacttcccgatgaggaaatcttatgttcaaaaataaaataaaaaacatatttgcaatatactatattttgttaattcactattaatctataaatgtgccaaattttatctctttgtttgtttgttctcgcaatggaaatcttctcttcccttcttgattcttgtacagcatctagcaatagttaattgttatataa

SEQ ID NO: 45406 - DNA, 587 bp, Arabidopsis thaliana columbia
attattaattaattaattaattaattaagcaaaaagtttaataattcatattggttaaaccaaaccgaaccgaaccatttgggttgagaagaaacataaccgaaaggtttgagtctaagcttgggtttggtttggactggtttgagtttggttggttcggttcggttaaaatgctcatccctacatggaagatagtgatggatcggactccctgatttccatgttcgtccaactaccattcctcgagaatttgcctcaagcgatggtgaatcgaagacagatagaatggaaaaaagctgataggaaagcaaaacgaagatacaaagtgattcatatattcaaagcctagaggcaagaagactatacgtaaaagatcaatctctagcagaatatctccaacgttagtgttgttgttgccgccatcacttgtggaattcataggtttgtgaagtatagctcacgaaatatgaatcttttttacaacatattgtttcctgtacgcatgacctagcaaatcatgatagacgaatacaaatttatttataattcttttgccaatcttggggacgcttttacgggaaagaaaa

SEQ ID NO: 45407 - DNA, 452 bp, Arabidopsis thaliana columbia
aggccatcttatcactgaggctcaagattaggggattctgttactgtcatccacaaccagagcctttttctgtgtgtattatgttgattcccctgatcagaaagtaattaattacccaatagaaccgaaaatacaatgtctgtcaaaaagacagaaaccataactcttaaaaagccttaaacattattgagataaccagaatgcgatataaaaataagtacctggggaaacttccgcaagcatcagaggccgtactcaaacaccaccttcaagcactatacaccatcacaaacaaacacatcaataatctgatccataaaaagttccacaaaagatggcaccatcataaacacacacatcataatctgatccacaaaagtaccacaggagatggcagacatgggttatcgaagcagctaagaaaatcattaatatgtttgaggcactttgag

SEQ ID NO: 45408 - DNA, 542 bp, Arabidopsis thaliana columbia
atcatacaaaacagagaaccctaatgtatctttctcaaatcccaattcacaaaaccctaaacttgataacatttaaaaatataaccctaactaatcgtcgatctacagaggcaaacagaaagaatcataccttcaaaaagcagttggagtatggtttaaccttaacctccgatttgcttcatccaactctccgatttgtcgcagatgttgagcaccgtcggttgagatgatgataacggcggaagggagacgggtttcatcggtttactcttccgatttgatgatgcagatgccgaattctgcggatcgagctatcgttcctctgtatatcgtcgtcggattttataagagaaaatgaaaccaatcgataaatgaaaaaaacagacacaagagaactgaaaaacaaagagatatgttggaaaataatatgtttttataacatcatatgaaaagtagtacatatactattcacaattagtaatatagtcggttttgattgggtgtgagagtagtcatgtggggcatatttagtcggtcaagtt

SEQ ID NO: 45409 - DNA, 582 bp, Arabidopsis thaliana columbia
catctgtgaaaacaagatataagaaaaagaagtaggggtgaaacaaatcaaacacaataaaaaaacctagctagctagctaggatcggagttgcataataatgagtcgatagaagatgttatataagtctccgtgcaaccacctttcacgaccaaccagcacgaaggacatgaaatgaaagcaacaacatgacacagagggaagatcacatgcattgccttgggttttagattcaaattttagggtcagattttgagtactgtaatatgtgtgtttaaataaggtaaaaactataagaaatttttttaagaaacttcttacttgatttatcatttgttccaatatttttgtgaagatgtaccaaacatatccaagaaaataatttcaccaatctggtagataatgaatgattcgatatagtatgtatgtgctataaaaacttttatcaatgcttaaacttagaatagctttgaccatatctaaactatgttataaaataacttttaaaatattctttttttagacaaattcttaagatgtattatatgttatttgaacatttctttgaaatgcccattatta

SEQ ID NO: 45410 - DNA, 672 bp, Arabidopsis thaliana columbia
tatttctaatttacattcttttttctaaactttgtaagttttcaattcaaaaacagaaactacatcatcaaatttaacagatatattacaaatagtgataaaaatgtgacgaaacatatatgtcgtttactaaatcgtattcaatataaacatttatcggtactcggtgaattaattttaaagaaaaaatgataaagtaataataatttcacaaaaatgtgcaattgtacatgaagattgaagaactctattagaaacattaatttcatgtgaatttatattttagatatttagattgtaataaaaaaaaaaattgtccctattggtgatgctatgttaacaaactcagcctaaaccaaataaggatgtaaatacatatatgttgtggaaagaaaaaaaaaagaggcataatcatggtaaaatacatgttgtgttacgaaacgtaactatatatatacagtagctttggatcattgctaaaattctacgagggttgcgtagaaaacttgatccatctcactattttatggattcctttcaaaatgtataacgttttttgtaataacgtggattttgctacgaacatgatgaacaagagtgacgcattttgttgtggaagaaaagtgagcatgtcctatggagatgggacaatagttatttaattcataataa

SEQ ID NO: 45411 - DNA, 671 bp, Arabidopsis thaliana columbia
tgagagaataccattgacgcaagtggagaaaagatgcctagagtgtgcgaggatactcttaactcgttcaccgatgaactcaaatcactgagtcagataagcaaccgagtcaacaaagtagaaagattctgagaaaccctgatcagaagatttgttgaggtgagagatttaggaaccaaccattgtctcgttgagagatagagaggcaaaaacaaaaagtcgctttcagaaaaaattgcgtctttacgttgtttccaatagtcacggtttagtgtttttcaaaattaaaccggactggctatttaaaccggtttgaacttacagtgttgtgaaaagagaactggtccacttttagtagctggagacctcctacactatgaatctaccgtgagtgttcttgatgtttcaacatcccacacaagaatctcttatttccacaatgatgaagctgagtttttatggtctttacactataaattaattattttttgtgaacttaattgttttgtacatctacaaaaaaaattatttagtgcatgccaacattttatttgacaattccagcaaacaaatcttatcccttacgatttatgtacgattgtttctattatttgtgtatcatttgcgataataatcagacacgtgaaattttacataataattacatatat

SEQ ID NO: 45412 - DNA, 652 bp, Arabidopsis thaliana columbia
  unsure (1)..(652): unsure at all n locations
tgtaacaatggaagagaacgtggcaaagatgattcgacttcatcggttatgcaacaaacggctaagtatttgagaagtagtagcacgagtttctctgcgtcttctttgctttactcttcttcttcttctgctacttctaatgttagaccaaatcttaaataaatgcatgggtaattatgtttttaagtgaacaagtttctatgtctaaagtttttgttttatctatatatgacgttgagatgaactcggtgtttcaaaccaagaaaaattaacggagactaatctcgtcttaccttttacattttcttccgtcaaggcgtcaagttgatttttttttgaaaatcaaataaagaaaaaactagtgaaaacagatatgaggaggtcataactcataactgtgactcacgagataaatcatgtatcgtggctgacggtcacggaaccttttgctttgtacccattttttcgaggtttgtcaggaaggcggataattagtgtccgtcactatatactctataacttaataattttatatcaattagatacaaatgtttaattaaaaaataaaatagcaaacccttaccgaagaccagtgtgtatataagtacgaaatagattgancagaattgttgccagataataatagtataga

SEQ ID NO: 45413 - DNA, 589 bp, Arabidopsis thaliana columbia
gttgaatcaattttcgccgttgacaaagcttaccgttccaaatcacagagatgtacaagtcaggacagaccagttgataacttacgaacgatcgaaacgaaagtcttctcttcatgatgatgaagatcttatttcgaaacgccgatgcttagattttcagcgaaaaatagaagacaacgagtgtgcaaacgacggcgttttcgttgcgcctcctaggtttaaaagtggtcaagtgtctatacgacagcgttctgacgctcctctctcttctcaggcggtgaaacacgacgagtttgcaaacgatgctttctacaagccttggttggatagtttccggctgaaacgacagcgtttgggtgacgatgaagatccttcctcttcttcttctccatctgaagttgatatcgctgctctcactctcttacagttttcctgtgatagacgccatccgcaaacacaaacgctaacgcggccgcagccgaaactcacaaaactcaactgcagaggccgccgcgcaacttcaatcacaaactcaaacggcgcctcctaagtctgatttgttcaagtgtagcatctgtgaaaaagtgtt

SEQ ID NO: 45414 - DNA, 493 bp, Arabidopsis thaliana columbia
gtatacggaagtgcgtataggcttatctttgatttgaccaatgatgggggacaaacaattttattgtttcgtaattcttaatgagcagtcctttaaactttgaaaatataggtccttaatatcaatagaattagaatttagtttaatgttgtccttttcatatagggtttctatatgtgtatcttgcattcttatttttgtcctgagtgtacgatttattccgaaactgtgagaattttttcagaatattatgcgggattttcgtggtagtggtcgccgcttacgcacaaagaaaggattgggaaaaagcgaaggagcaacgtggttctcctccttcgttgacctgtcttcatcgcaatgactcagcatagcacatgtgaccaatatcttctcctagttatccgttgacgtttaaaatcttttagtcaacaaaccaatcagcacctcataatgtacaacattttctgagtctctcatatatactttgatgaaa

SEQ ID NO: 45415 - DNA, 564 bp, Arabidopsis thaliana columbia
gtttcagaggaagaggaaaaagaagaagacagccgtagaatagagcggcggcgaggaacaagaggaacgaggcaagagagaggagtatcgaagtggagaagacgactacgagtcgcgagaaagtgagtgccgagagatacgagtccacgccttattatcatattacgtgtccgttttagttgcctagagactcgcgaccagtttgttaatagaggacaggtcatatccggtttggataaaccggcctatctatgattccggttacaaaattattaactctttcgtgaatttttgctaggattattgaacaaaaccaaataattagattagaaacaaattactgttgaatgttgattaatggtcttctatgttcttgtagtggactatttttgagcttgatgaattttataagcctgagattaacccagaacctaatcaaaccgtgctaaactgcaaataagctgagatgataaaaattggtcttgcttacagaacaaagatgaaacaaaacaagaaagaaagcacgtataataataacatccagaagaggttcaggttaaagtg

SEQ ID NO: 45416 - DNA, 518 bp, Arabidopsis thaliana columbia
ccaacgatttgttgtagactgggaaatgattcagacttgtgtgtgctatttattccatggattttttgatcgcctactatgaaggcgatgttaaagatgatgttgaccaagttttgatcaaagtcgaatacagagagactaaatatacaacaacaaaaaaaaaaatcaaaagctttaaattcacacacacaaatttcgatagtagctatggatttaagacaagtgtaagaagaaatcacactagttttcaacgtaaggaggatgatgaagatgacattattgtatccacatttgtcacccattttttggaaacagatgataatattattaaatctttggttaattaaatactaagggaaagaaataacacaaaagtggttgtagtatagcggttagtacccgacgttgtggccgtggggacccgggctcgaatcccggcagccacactttttgttacctcttcttttttatttccagcaggggtagtttcgacattacattaatcacgtgatcattag

SEQ ID NO: 45417 - DNA, 498 bp, Arabidopsis thaliana columbia
cctgttattgtaactaccattaatttgtataaaactcgtcggcaatagcttcatgacctctttctctcaaggctaagctcttgtaatctctgttgagaatttgttgtggagtatgatgataatgacgaataatctggaattacgtctttcgatttttcagtgattttgaggttaattggaaattagagtgcaaaattgggatttagatggggattgctgatgaatctaaatgtgttttccccttgacgagtctccagatcgggtaattttatctatctatttgatctgcattgccgcttttttttttttttataagttatgattcacaggatcaatgattctgcagttaattacgtgacctgtttttgaatgaagtacaagcttgttgagcctttaattggaaaactatgttgtctttccagacaaaacaagatctgtttttgtggttttgacaatttattatctaagttctgcaattaaagctatcacttatttgtg

SEQ ID NO: 45418 - DNA, 599 bp, Arabidopsis thaliana columbia
ccgattacaaaatttatagcatcttcgaggcagtccactgctttagatcctttatttctacaatttcagatgtctctttgccacaatctaactcttaattttttcatactgtatatgatagtcatagctattatcaacagttttatttcaaacttgacgaacaatctaaactagataaaaagttaggaaagtcgtaaataccaagcagaattgagataccacttcttggaaaaatcaacagctctatttaatgaaaatattgccaacttatatcgaaatactttggaatatatgagaagtcatagatacgtgtcaatttggttgcacttgtaaaacccatccacgccgacgcagcatttgtcaacgcccatctctcgcgtcccacgtttgactcacatgattcctgcttcggtgataagccactcttattttagtttgcaatttccgtctgtgagacgagttgtttctttttttcttctcaatactaaatttatgttattagttttgcttgaaataaacctgataagaatgagttatagcaaccacaaattgtttttgagtagatttttactttctatactttattgtaaacatgaaca

SEQ ID NO: 45419 - DNA, 298 bp, Arabidopsis thaliana columbia
atcagaggatctagagaatccccctagcttgaagagggattagtaggcaatattaataacaattaactgaatatggcaagtttcaagttatgaggtttgccttatattgcttctactcgagttctcggtgcatcaatgccgaccactggttgcggaagagagcccttcagattcaggtaacataagaaagattatgagggaacttctcaaaagatcagaagagctgaaggtaagatcgaaagacggccaaacggttctaggcacccttgattcaaaacggctcagccctggtgggacg

SEQ ID NO: 45420 - DNA, 1135 bp, Arabidopsis thaliana columbia
aatcatgtcactaggtaatacacgcctaatcaggctgtaccaaccttattgtcaaagaatcgaagtggtttaccttgaaaatagccgcagaacagggcgcacgaaccgttgataggtgtaagaactcagcgaatgttttccaagtaaggtgattcaggacccgcaacatttgatcatagctaccaatggcaagaaactgaccacacggagaccaggaaacagtcttgacaccaagtccacattcatatgcctggtacttaaacagacacctaccatctggagaataaattagaacctgcccaaaaggtacaaattttagagatatctccaacaaaccaaacataacaaaattccaataactatctaaaaatagcatcaataccaaaacgatacataccttatattcaagaggcgaatcccacactacaatagaactatcatcaggtgaccactcaagatcagccaagtccaaggtatcaacagcaaagctacccattatctcccatgattgacaagacaaaaggttaacataatccttacagtcacgccgtgtacatatagccgcaaacttcccatcttgattgaatgaaactcccttggaaccatgctttggccactgaacatgaacacacgccgtgtttaaaagagaccaaaccgttaaccgcagctgaaactctgacgtagtgagtatatgacggctatctggactccacctagcgtatgaaataccagcaggaccttcatcaatcttgcaagtccattctggttgagtcaaagaccaagcttgaatcatcggttttttataaagaccacaaagaatgtactctgaatcaagagcccattctatgtagcttattttatctaagcaagaaaacaattgcacaacctgcattcacatccataacattgaagattagtacatagaaagaaaaataaactcaacgacatttatcatctctaaggttaaaagttccaaatttagcaacccaagttagtataatccaatttaagcacacgatctagttgcatttgaacattagaagaagtaagatccaaaaatctcctagctgaaattgccatctaatcaagggtttaggtgggtaattactaaatcgagcttgcttatcctgaacga

SEQ ID NO: 45421 - DNA, 522 bp, Arabidopsis thaliana columbia
ttttgcttgtcttcagtggaaagagggttgatagagctacgaaaactgggaatagagcaacagttgtgggaaggcttctcgacgagaaatcgatcagctacactcgcctacttcttcgaatcacgatctcgatgctgattcatagtaaagtctcttccttttctttgatagaagaaattttcgttttgtatatctctcgtcatgtaagtttcacgaagaatctgttgtgtcattgtattttttatgttttcccttttcacacttaagtgtgtaagcttttggtattcttatttttgcaatcaattccaaaaagttttggaggacgatactgggtaaaaaataggatatcgaaaacactgatcacgaaaaattcatgttaccattactgtttttataaaccatgttttgaggatgggatagaagaattgaacctcgttaatctgtgattagattctgaattttgacacttatatgactcgatgaaattctaaccaaatcctgctttctttttttttgtgggaa

SEQ ID NO: 45422 - DNA, 357 bp, Arabidopsis thaliana columbia
  unsure (1)..(357): unsure at all n locations
tatttggaacacaattcccagtagtgtgaattataagacattctcggggttacataaaatacagtagcttcaggctattgtatgattcgtggaggctcgcacaggaatggacaaagcttacaagtggaggccaaaatgagcaatagacagtaatgatatatggacttcattaggacnatctcctggaggaatgaacaatctgtcgtgtacactgtatcgagtcttttcgcgcatcacatatttgaaccattccgtagctcaaaatgtattgagctctgtctcttttgggtgaagtaaaagtgttgattgctctctcatgtgagtaactatatcaagaagagnagagccaatgacctg

SEQ ID NO: 45423 - DNA, 345 bp, Arabidopsis thaliana columbia
cgactccccacgatgcaaggtaggtcatagtaaccaagtcagaccatgctggggaccatctgcaggtgtgttggaaacaaagtatattttcatgctattgaatgtatattgggtgaaccaatgaataaacgaacaattttagcaaatcacttgtctttctggctctcaggacaaacaccaaaatggccttgctattaaaatgtaaaccttttctttcttcctgaaccaagactctcaggccgtgcagactttctgttcttaactttggtttccttggctgggcacggtggctcacacctgtaatctcagcacttcgggaggccgaagtgggcagatcacctgagg

SEQ ID NO: 45424 - DNA, 562 bp, Arabidopsis thaliana columbia
acatattgacattgtatatgagagacctagaagtgttcatatggaatgacatgtgttggtggctttggcatgttccttttcaatctatagattgagtcatagaggtctccaatggaatgaggttgtactgcactattacgaggatttatatcttgctcacgagccatgcaatgtccttttgtttgcttactcaacaaaccaaattgtcaccgttttgtgtcatgccactaagggtgaagatttacgaaatggcaatgcaataagccaattaattagaaacgacataatcatcgttatgattttaatgtacacgatggagttatgttcaatgcagtttggacctatgtaaatgcatgcatgacacgagttcatatgtaatgtctcacaggttattaatacgttctgtaatagctatgacatttgagtttatagaatcaaaatagagagtcataaaagttactacattacttctctaatcgaaatatcaacaagaaaagaaatttgtgtatgcatccgtctaaaccagggattcgcatgtttgcagttgatgttgttgagatat

SEQ ID NO: 45425 - DNA, 544 bp, Arabidopsis thaliana columbia
gtcacttccacatcaactgatttcaaggtttgaattctattattaatcttttgagttttgattttgctggaaactgtttgatttcttcttcatgtacagactattgaaagcaaaaaagtttgtaactattattgagataaaacttcgtggcgtgttaaaaaaaatataattagttagattttttttttttgttacacaaactgcatttttattacccagaagcaacgtaatctgaaaacagagaatttgagatacacaatgggatacacaattagttagattattagtttgattttgtatgcgtcaaaaaattagtaccataattttatctcaataagctgagaacatatagcatcaaccatgaatattgtgattcatattattttaaaatttcttttgttttgccagatgcgtccaccactcgtgataggcggacgttcgtatgggagggtccaaattctctgctcctgtttttgaaagcctccttctcctgatcttggagacctcaagaccaaacgatgaccaaatgccagatggagaaatt

SEQ ID NO: 45426 - DNA, 340 bp, Arabidopsis thaliana columbia
  unsure (1)..(340): unsure at all n locations
nnnnnnnnnnnnnnnnnnnnnnctaaagtcagggcttctaaataaaagaaattaaggatgattagtaaggaagtcgcctaccaagagattcacctatcacggtacacttcaacaccgaagcagagttgttgaatcgagttttcattcccttctctaatctctactcaccaagtctccactgatatgtctctctattagatacatctgaattagttcccacgcggcgactacatacatatccagtgtgattcctcgttacgttacagcgctttcgtaatcgtctagttactggaaaatatccagaggtttgaatacatatacctatcattgtatctagaca

SEQ ID NO: 45427 - DNA, 526 bp, Arabidopsis thaliana columbia
ttttttcaactttagtgtattttgatttctttggctcagtttgatttatcggttttggttacgtttcgatgttggttcagtacgattttaaaccaggaaaatcaatttggtcacaaacacattttgatacaaacattttggttcagctttggtttatatgcttatatccctaagattaaatatcctaaaatcaatactatctcaaagtggccgtgtgttttgctttttaggacctttgaaacttgaaattaaaaaaattcctaactgataattttaattatatttgtgtaaattttgtataggaccgagcatctaaacaaaatgcaagaggacactacagatgatcttcagactgttggattagtcctatacaacattttggaggtaagttgttatatacaaataatgacatttagagagtggataaactgtataaaactaatcaagatattggaaacaggtagaggcaaatctgcaggaaaggaggagagtggtggaagtgtgtgacacagtagtgaacgtggag

SEQ ID NO: 45428 - DNA, 547 bp, Arabidopsis thaliana columbia
tacagtgcttggatttgacaaaaatataaaacgacaaaaaaggttgtaattagaaaagaaagaaaggaaatgataatgttgtttataatgatgatgttacttgcttttggtagtggatcacatactgatgttaagattagacttttttttttttttttttttttggtcctagtcgtttactttttaagttaggattgaataattggatagttaggataactcaaagaagagatttgttagcttgttaacgagattcaatgtaagaaattagttaacgatcgagttgggaggcgaagtgttcaagatccgctttgactgcttcgggagttatgcataaattatagattttgtacttttgccccatatctttaatatgcacatatcccacccaccccctttttgtagtcttttgtacattaaccaaatattttagcatatgaaattatgttcaaatgactctataagaaaaatgactctattataaaaacagcattgctttgaatcacacactcgagtttgaaaaggacactatagctagctgtttggc

SEQ ID NO: 45429 - DNA, 327 bp, Arabidopsis thaliana columbia
ccaaaacacacatattttctccttcatatatatcttcagtctatactgcacaataaaaataataatttgaagaagtaactaaataaatattggagagctaaattgaagtaaattgcatatttttgtacttgtttggatccaattgaaagagccgaggtttgataccaccggcgatacaaggacatagtgttagctctttaatgggccaaaatctcggcccaactataaatggtttcattgaccgataattagtgccactgatttcaattttgaaattcgaatcctcctcctttggaattcagaaaccctagagttcttcagcgagcg

SEQ ID NO: 45430 - DNA, 459 bp, Arabidopsis thaliana columbia
ccgacagacgacactataagtcatatcgggaatcagtggcagacctatatccatgtgttaaattgatatacgcgcataaagatgaacgttcgcatatcagcagcctaggaattatagtccctcagttatatatgcgagtacttgctaaacttaactgcaatgacctctaggacaagggtctactcaccataccagaaccgattccagcaatcagaaactctttccattggatatctggccggtggcatagtaagtagctgttcgtctaaacatacaatatagtttgtttgtacaaaaaagaatcgatgcatacaacaattttgccacattattgctggagtgagacaatgcaagcttgtacaagatgcttagaattatgattgttcatcaacccttgcgaatcaaagaaggccacatgcgaatatctcttgttttgatgtccatgagttttggttatag

SEQ ID NO: 45431 - DNA, 497 bp, Arabidopsis thaliana columbia
tgaaaaaacaccatgaatatcaaatcatatgaaacatcaaaatcagattctccgaatttcatttgacctaaaattattggcttatgcaatctccaccaacaaggcagctataataacgcggagaaagagatcgacaggaaaaagaagaggaactggcgacgctaatgactacttaaggtttcggtgagagataagaaggcaacgtacctcaaccgggaacgcatagccctaccgcgagaaccaccgggacgtgaggtcgagaaaagcggagaacgaacgacttcgacaatctgaagcttgtaacacaaggatataaattgagtgtccggcgtatccggcgagagtgtaccaccatttatagaatgatcaaccaaacataacgaaaaggcatatctatatataaataaaccacattttaataaattgagtttaagtccacccatcacagacaaaatacaagacatttggtctatatccggttagattgccttgtttag

SEQ ID NO: 45432 - DNA, 299 bp, Arabidopsis thaliana columbia
tgagatatctaactttggagtgtatgcaggctctctgttgcaaaattaaccattcatatcaattactctccaaagtgtttatttgtattgtttacacatatgtaaagagacgaccgtagttatcaaaagcattttggtcacagcacagtaagcttaacaatcaatcagcaagtgacatcaaatgattacaagtgaatagagagacaaagagacttcgagcactgctgtggctcctgatgcatcgtcagtagcagcacgagctttcaccaattcacatactataggcactgcaagcacat

SEQ ID NO: 45433 - DNA, 526 bp, Arabidopsis thaliana columbia
gtaaaaaaaaagaaaagaaaatttacttatcttattacggaagttagcatattctctagggttaaacttggctctaaaaccatgccaatattgtgaacttgaaagtattgagtttattgatgtatgttaatagtattaacacaagagataatactaggagtgacctcgaaaatatgttaacttccctaagaaaatgagttcaatttcttttcttttttttactagctaggattcctaaaacgaattggtagattcaacatccgagaaacaattctcgcaaaacaaaaaaaaacggaggaaaggattctcggattttatgtatatttggcttgaaagggtctgagaaatcaactgcactttagatggccttgtttttgaaaaaaaaaaagaaattggcaaggaaactacctaggcttgacgaaagctcttttctaaagaacaacaatcttaatttgttttgtttattttgaaggtgacacaaaaaagggactatgccatatgaacatagaactgacattaggctgga

SEQ ID NO: 45434 - DNA, 372 bp, Arabidopsis thaliana columbia
taattttaatataaatttgcaaataatatttttgtttactaagaattttctttaaacaatgttaaaagtttggagaaatgtatgatttcataacactattttttcaattatattatatatttaacaatagcaccccttttttttatcagattatgtatttattgttaagtttgaactgtaacagtagatccctaatttataatgagttattttctacgcgaacgagtttagaaaaggcgaacttatgagaacgagtgagagactgcagatagagagatgattgatatcgatttttttgctgctggttttttcaatgttttcaatttgcagattttggtatacttttttttttttttttttcggggtttttgg

SEQ ID NO: 45435 - DNA, 534 bp, Arabidopsis thaliana columbia
accttaaacaacagaatgtgccaaaagtgacagcatttttgtgttatattttcttgtatgatctgttttttttttctactttataagatgtaactatagtttaggtacatattaatttaagagatatatcatcaatcaagtgggtgtttaatattttatactagtttatttccaattacttgtgtaatcgtttcataactcgatgagctgctgtgagatataaaattatatatgttttgatgggtttcttatgacttgcagttttgtgcatatataattaaacaaaagcgacccatgttatgagcataattaaataaagatcaaaataattaaataaagaaatctatgaaacttaacaagctgtttaggaacaaaaagaagagttgaaaactcattaacaatgaagagtggtaccctaaaacaaatcataattaaaatacgataagcactaaaatacataataatttttttattacaaataacgcatgtgtatcctaattgcacgttcatcacctaatcatcaaaacatttaca

SEQ ID NO: 45436 - DNA, 490 bp, Arabidopsis thaliana columbia
tgaaactaactcatgcaacaatcaatcatgcacaagcacatataaaccatggggacttaacctcacatggtttatcaacaatcaaccacaataaatcaagcaatcatacaagcaagatttaatcacaacaataaccagattaaccgacttaacgtataaccgaggatccaagtaatcaatgcataattaacacctaatccattctagttctcatcaaacaattaaacaaacaagttggtttacatgtgttcatcgaacaacatgcaaccacatgcaacacgcataacctgaactcaccttggcttagctctcaggaaacgactactctcgaatccctatacagattacgatccgaccaagctttctccgaagtaatggatctaagcattggatcgaaccgacctcttaagaaatattctaatactaagggcggaactacttaccgattaattacactaagcataattaatcattactctaatcatgatta

SEQ ID NO: 45437 - DNA, 453 bp, Arabidopsis thaliana columbia
caactaagctgaaaaaatcttcttaagctttaccaaaattcttgctgtaatcaaccttagaaatgttaaagaggtagattcggaacaaaaataaaataccaaagattgtgatcttctcaaacaaatcttggacctatagacccatcaggccatcacacagtgacacagaccagattggtagtttctacattcagtcacacacacgcacacacaatctgtctcttatttgtgagttacatatatagagagagacagagaaagagagaagagagagagatagagagagagagaccaactttggtagctatgtgtaggtatacagtttgaattcaatccaactgggatgaagctcaattcaattgatctagagaaatcccttgacccagtagttgaccagccaacagcatcgtatgcagcctctcgtgggatgaaatccatcccacaacacatatc

SEQ ID NO: 45438 - DNA, 536 bp, Arabidopsis thaliana columbia
cactgatcttaagagcttccttattcaatcccctcacatagttccccaagtacctttgtaacaagtaagctacctgatcttccaacatctttgaactctgcaaatcaaaattctcaccgtaaaagggaaaaaacaaatgtaaaatcaataatcgtgagaaggagaatgaaaatcctcgaagagttcgatttcgatcggactagaaacggaatcgaaggagaggcatgaggatcgtttcctcaagagcacgcaagaggcggttggaaatgtgaaatagtcatgactcaatgacttgggggagagtttcggctctgtaaaaggaatataaaaatatctgctgttgatgacggtgcagtgcagtgtgttgctgtgttgtttatcaattgtcgacataaactttattattaaaaagaaaaaactaatcagtaactggactaaaccaaaatttaattaagttcaaaaataatttaaccggtggagaaattctataccatataaccaattagataagtcggatttcgcagccaatttttgat

SEQ ID NO: 45439 - DNA, 324 bp, Arabidopsis thaliana columbia
gctacccgtctcgttccagttcctagccgcatcggcccaatgtttcgtgggtgatgtgcaagagatctgacatagaaggcaagagagtcaacgtcgaacataaatctgagggccacgacctcgctcccgctgcgattggaaggctcttacctgcgttcatgatcggtctacggctagttcacgtggctagtcgagtcattggatgtgtgaccagaataccagtgatctgagaacatacatgccctgaaatggcccatcggaataccggacatcgtcgttgtcgcagtcagtgtatgcataactcgcctaaggaatctacgatag

SEQ ID NO: 45440 - DNA, 613 bp, Arabidopsis thaliana columbia
cctttagtaatataattataatcttaaagttatttgttcacaactttttaaagagcttaatttaagtttatgatttgaatctaaaattgagaggtgggcaggacaaagtgagatgtcgagacaaaaatacagataagctaatttgtgcggtggattttacacaaactttgtcagtcacgagactctttcttattctaatggcaccaaaccctagttttgttcttttcttctttacttttttatttatcataaatattttatttggattctcatactctcatatgtctctttccctattgaccatatctttttatctcatctcttccctttcttgtgatataactttttactctattattatgacaagtcggggctagatatggttgtagtccaatgatcttattatttgctagactatagatttatatgtattggacacacacacttgataagaccatattttattgattctattaactagtaagcactaaatatagtctcgatatttttagtctttgttttttttgtcactgaaatttaattaataaaacttgttgtggaacaaggagagatcatatgccaacaagggaactaaactggcggacaaagaaag

SEQ ID NO: 45441 - DNA, 339 bp, Arabidopsis thaliana columbia
tctgacattcacaaaagaaatccacacatctgccagaatttgatcagaacagtaatagtgtagctttgaatatatgtatacacaatcgaataccaagtgtgactcagcccgggatcgtttcgtttagcacagtttccttaaagtatggaccaatacgacggagcacacctcgcagtattcggttcctcctcttacctcaaactcaatcacgagatacgcattatctaaatccaataactcttataggagtaacttgatctagaggcgagagggagatgacctgtttctatacggcttagccgagtctacagagtaagagtgtcgtatcgtagtacagta

SEQ ID NO: 45442 - DNA, 515 bp, Arabidopsis thaliana columbia
tgatatttagaggaaaaaaatcttggccacatgctattaatatcgatgtttcctcttttgtacataaaaatatatcttggtttgaggggtcaagtatacatattaataaatcaataactgtgatgttgacttttttttcttcttacaattctgaagccaatttacgtgaaacctagtaaacaatgcttattatatgacgtctcaattatcttatattttctaatatatataaaacagatagaaaaggcattacaataactttagaatggatagagtatttgatcactattgaattccattaaataacaaaagtgcatctgatatatgtaagtcaaggattttttttttgtttttgtctgattttaaaacgtgaaggaaatttctgaaggatagagagattagtgtttaagagaggttcttacgttttgaggtcgtcctgacgatggaagcgacggctttggtgacttcggagtagaacggatcggtgttaacgccgtcaaaattgacgtttgttg

SEQ ID NO: 45443 - DNA, 596 bp, Arabidopsis thaliana columbia
taatatgttcttgttaaatggccacaaacaattccgacaccataaatgtgaaacttttaacaaaactatattatcaataactagctaaattatgatcaagaccagtaaacatttcaacacttaacgtaaagaaatgaattggctattgacgatataatttttttccatagaaaactatgcatatgtttgtcacaatttttttctttctttgtattaaagttaagtgttgagtgagagaggtatcataatcatagtaccctcccacgatattgcccacggatcgaatccttagacccgcattttatttttaacttcatatcgcattagtatttaaaagcaaatatatatatcctatgaaataaaaatctcccgccttaaaggccaaaccttaggatctaggtaggtgggtccctctactcagcgaccacacaaactcacatttgtcaatttctcctctctcttaatttattaattattttatttactcatctctgtaacgccccctataaatacaacctctcatttactcattcagaaaccaaaaaatttcacaaaccaaaccaaaaccaaaaaaatagcttatctctctcttatca

SEQ ID NO: 45444 - DNA, 482 bp, Arabidopsis thaliana columbia
tttattttattttaagtttaagaatgatttaataaaatcagattaaaaaagaagaaggatatctcaaatttgaatactaaagtaaaaccaaagaataagtctacataagataagaatgcaaaagaatcactaatcgaagagaattataaaagagccaaaatgccaaatagcacaatgaggagagtcaacaatctctcaaacacatacttgagatttctgtaggtttgataaacgtcacttggaggtgttgttctaaagaaggtaatgtaacatagtgaaactaatccagtcattgaaaatgttatcaattacttccaagatctcaaaacagtctcactcattctacacaaaggtttaattttacatttttatatgtgtttctttatccaattaaaaatttaaaattgataaaaaaaaatccaattttttttttccaatttcttccgagtgttcttggtatgagaacttaggacactcgacac

SEQ ID NO: 45445 - DNA, 481 bp, Arabidopsis thaliana columbia
cacacaaacaaaaaggaacaacaagattcactattaactcacatcctgataagccttggcctcggcagtgtcatccatcagtttttgaacatcatcaaggttgacctcgctctgaatcgccttaattgcattgttaccttgctttaagctctcaaagactgctttttgcttgcttgtaagttcgatatctgccaactgagtcataaagacaggttcaaaatatattcgtttatgtttctttcaaaacataaaatcagctataaaagaaaagaaaagtactgtttatatagcactaaggttatgtgatggaaacaaggagatgataagaagaaggtcaagccaatttacttgttgttcgacattgatgagccactgatctacttgcttcaacaactcttcttgtgtccgttttttcttcaatgctaacaaagccctgtcctttcgcttctcacggattaagtctcttgcagcttgcttttct

SEQ ID NO: 45446 - DNA, 455 bp, Arabidopsis thaliana columbia
tagaggatacagtatcccaatatcctctttcacatatatgcaactattctctttcaaaaagatcaaaacatttattattggatattcttttggcaaaataaaaactagttaataccaccgactctctctttatatgctttctctggacaaacgcaaaaacttttgtagaaccctaaaaattcccaaaatccgtcggagaagaagatcgagaagaatcaacaactaatctgaagaattttccaaattccgtcttcgtatcgtctacgagatccttatctctcccctgaatctggtaaaatttggtttcgaaatgacgaaatcaatagattctactttctcctacatcgcaatttctcgaacttcctttcataatcttcactgatctgtagctaattgtttatatgtgaatctctttgtttaatttccgtttccaggaacctttgatgatacaaaac

SEQ ID NO: 45447 - DNA, 911 bp, Arabidopsis thaliana columbia
  unsure (1)..(911): unsure at all n locations
gcaaccatcatctgatgggtttagcgtcttttattatggccaacagttcttcccttaaatcgtgagtatggatatgacatgtttcatgggatgagaggagtattagttctggttgagatatttgcagaaatctttcgaggaaagatctgcatctagtgtctctcgagctttaggttttatcgcttgattccagtgttctgtttacacaggacaacaaggtgttgattcatcgaggacgtcaatccgtggccaaatagatccaaaatcaggaatggagaagcaaggcagtgatccaagagctcaaccacaacaccaagaaaatccaaaaaccggttatgataataaccgtggggtgcagacatttgaaggtcttgaacagaagttcatggatgatataacaagactagcaaaagatcaaatcgaagcagaggatgcagagatcgccagacatcgagaggttagcaacaaattggaaagttctgctactgaatcactctagtttgggttttaattagttaatctgaactctgtgtgcagaaaataaacactataaacgctagatacgaagaacagttagctacacttagagcacggcacacaggtaagagagaagagatcatgaggaaagaatcactagctaggcagcaacaattcaagcagcaaaccatggggatgatggaccaataccatccaaacgtggttggtcaggccaatctaatgccatctggtcatccccaaggctacattggcagtgctcaagatccagcggctgtggcggatgcaccaccaagatcatatggctcagatcggtttgaagcatacggagagagagctaggtttcagggaggaaacagagatcacgggttcgagcctaggggtccatanccctggtgggaatgtctatgacacca

SEQ ID NO: 45448 - DNA, 613 bp, Arabidopsis thaliana columbia
  unsure (1)..(613): unsure at all n locations
taatacccaagacttacacaatcccacctccattgatcggttaaattcgtgatgaaagccacaaactttagagcagacgacggcattgaattgtggaatctggcaaagcattgtgagtgagagaagagtaaagtaaattttccggttcttacatttccactataccgagtcctggtttagacaaatttctttcaccgaaaaccaatcaaccaaaccgtaaccgaatcctgtgtgaattaaatttattgtcttataaaaattttaaagtggatagaaaagattaacgactgactgttacgtgttccgtgtttatagcttagatttgactaaactacttctattaatttagaaataaattacatttttttgctttttatcaaacaacttcataatacttgcatatttcgcggatttaattacgtttgaaattttaaatttaaatattaaaattatgatttaatagataataaaattattttagttgaacttaattttcagtanaaatgaatttaacaagaatttcaatatattgaataatctgtttgtatattgttttctgtaataaaatatgcgcgagtaaattttatattagacttggtataattatttaatt

SEQ ID NO: 45449 - DNA, 784 bp, Arabidopsis thaliana columbia
ggttgctgatttcttcaaagctatttccccagacgaatcttgcaacgatttcacctctttcgactctttctccgtcttatttcaaaacaataccagagctctctccatcgcacgcggccgtgtctcgtgctccgtcaccgtcacgccaggcatatccgtaatcatcttcttctctctaattagatcaaatgggtttcgtaaagtttcgatccttgaattgtagaattgattggtttcgttgtgaaaacagaatttctttaaggggttacatggaggagcggtggcatcaattgcagagagagtagcgatggcttgtgtgaaaactgttgtgtctgaagacaaacatctgttcattggtgaattgagtatgtcttatctctcttctgctcctatttcggtaagccacctaacattcattctcgtctctcttaagactctctctgatcttcaaagcacagaagcttatattgtttgagatttattttgcagagtgaattgttggtggagggaacggtggtgaggactgggaggaatctgtcggtggtgactgttgagttcaagatcaaggagaccatgaaagtcacttacctatctcgtgctactttttaccattctcccatctctaagctttaaagctttttcacatgctcagtgatcttttgctgatctatttacattcttctgttcaataaaacaagattctgtatacagatattactgtctttaatcagtttatacaacactactacattatcatccacctacgaagaattttgcatcccca

SEQ ID NO: 45450 - DNA, 666 bp, Arabidopsis thaliana columbia
ccgtcttgcttttgggttttgtgaaagattggttttgatatgtggatttcctaaatgtctttttggggaaaagtatcgattttgatctgaatgttgtaactttttctgtatctttttgttactaactcatcatgtcgaatatgtctttctgttgaatatagtgaaagattaagatcggactggtttgcaattgcaatgtagttttctagcagcggcattgattttgatattcttgtgttgttgattgcagccaagattgatgttaatgtggacttcactcacaagctttgtacttctttaatgtttcctgctttcaggtttgctctcatcatccatactttgacgtcacttacattttagctaatactcatgaaactgtaccgcctttagctttctcgacgtattaaagctcagtttgttactttttgaacagggacactagcagtcctctttctctagtgattggcaggcaagtttcgagacttaatgctacagcttacagaaatattgttggtgtcatgtaatctgcagaactaaattttcatatctttcttttcgattcaagtgttcatttggatctgtttgttgcagcctctgtatcaaacatccaaatttgtttggaggaagcgagaagcttgatgtatcatgggataaaggattgtatga

SEQ ID NO: 45451 - DNA, 522 bp, Arabidopsis thaliana columbia
ggaatgtatgagaattgtaaatcagtattttggaaatattttttattttcttaatttttgaagtagtagctataaatatataatttagttaaaagaaatacagattatgttaatggatatacatgattactttttcgttaatggaaatatagcttcagttttcgttatttgtctctaaattcttaaccatcttttacttggtatattgcttatttctcaaatactaacatccgtctaaaacttttaacaaacaaactaaagtttttcagtgactaatattacgtaatacaaacttttaggtttttctccatgcaaaataatgtctggctcaaattttgaaacgcagatatggaatatctgtaccaaattatttcaaagatagttattcgttctacgtacagattttgaagacataaacaagtaatcgaaattgcttctatagttctattcctaaatcggtttgtgattagatcgagttacgtatgattcagttcaagcgaatgacatatctcgatagaaaaa

SEQ ID NO: 45452 - DNA, 499 bp, Arabidopsis thaliana columbia
tagagaactcatctttgacaaaatcgggaactagtctcttccttttacttcctctcacttcccaaaccgtctctttcacagcatctccattactatccgaattttgatctttagctatggcggaccagctgataatcggaaatggaagaagcaagacaagcccaataaaagaaagcagaggtatctcaaatcgaaagaagaatcatcagagttatcgccgccgccgtctcctccgccaccgccgccatttccgttatcattattaccgttacttccacccaagtctgcactaaacactgaagccaagcaatttctcgtcgcgagtgattgtttactgaaatgatcatttacattagcgactaatcggacgcatcgggaaaacgaagaacccgatggctgccggagtgattgccgtgggagaaataaacgctgccgggaagaaacatcactcgcaccgccgtgaagcgacgacggaagcgtcaccagaaagtagataaga

SEQ ID NO: 45453 - DNA, 511 bp, Arabidopsis thaliana columbia
cactcttcaaacatctctatcgactcttttctcgagtcaatggctcctcaccaattgtattgttacctctctaatttatctatataaacaaatacgtattattgagggttatttatttattagcattattaagggttaattaaacttgtatatttctcttttgtcagctttgctagttcaatgaattgttataccaaatatattccctttctctacaaatgtttcaactgtactaatcttctatatacaagtatacaacagtatttaagttcatagagaatgaatatattgacttactagcttacattatttgattataatatattttagaaattttcagaataagtgaataacaatgttatatgacgcatatctagcttttgcaaaccagaaaggaagataccgcatgatttatcttcgatagcaaaatttcaccaagttttcaataattaacttttgcgatcaaatcactaatggggtcatggagatattagaatgtaagcttttgact

SEQ ID NO: 45454 - DNA, 272 bp, Arabidopsis thaliana columbia
ttctgcgattcctacaaagaaagatcttgctgcaattctaaagatgatcttcaattacagaatcgcttcaactccatgaacatctctgactctaattgttcttctcttctcaaatccattctctgttctgtaagtcttaagaataagaatcaatctttcacttatgcatttgctctgtttgaagctaatctgaactgaatcactgagtcctttgtttgtttccctcagaaatgtgatgaattctcaggacaattgtctggtgatgatgacag

SEQ ID NO: 45455 - DNA, 515 bp, Arabidopsis thaliana columbia
ctgacgatcaacgggtcttgaagaccatccatttgtgtagtgaccaaaccgccagtcgcggtcaacaaacggtctccattgaggcttgtcgagaccatcttttaaacaaacaaaacaaagccttggaagtaagattatataaagtaaaagttggaaaaacaaaaaaaaaatacgcaaggttggaagttgtaaaccaacctgcgtacataagattatgattatcaacgcctcggtagaatggccgtagttttcctgctttggcagctttttggagttcgttccatgcaagagaccgatctttccgagtgacttttccacttttaactatctggaaagagcaaggaaaacacaaaagccatatgagacgaacagcgatctggtgatctcaactctcaagcgtagtaaaaaccacaaggggttataataaaccttggaaaagagatggtatgattgccgaagagttcgggcaagatcatgggatcggtcaaccgcaacaagtccaaattttggaccat

SEQ ID NO: 45456 - DNA, 330 bp, Arabidopsis thaliana columbia
atgggtggtgggtgtgaccactttgcttgcttcttttgacaccagagtaagacttttgcttttctacatgtcttctacaatatagaaaaaaacaaaaagtctacatattgcacgatcgatattgagtgtattttttttttttgtcataaggagattctattaggtagtgaaactcacggtacagagttggattcaaatgcacaaagggcatgtttagctagcaaatcagcctcacagttggctgaactaggaataaaagaaaaacctacaaagtggaaacaagcacaaagagctcgaatatccattaaggtagcataaatctcaatgtga

SEQ ID NO: 45457 - DNA, 584 bp, Arabidopsis thaliana columbia
catgtattacttggttcaagtttgtaacacttttagctttttcaattctattcgaaaccaaaatattgggctatatatcttcatacaaccttcaagataaattggaccaattttagaagagcaaattgaacccggccgttagcgttagcaaaccccaactccttttcagtacaattaaatcaagaatttctaataaatcgtgaatttctagacatacatatcataatttcgtcaaagcgagcctacacctagttttgagctacataactcttttttttttttttttttatgattaggaggtttcaaaacccttggacccataatttcttataattagttttgtaatactaaattcaccattgagagcgacctctcgtcactagtaattcgaagatctcatattcatgacctatattaaccatcttccagtcaagtaatttcaatcgaaattcatcaaaatcatatatttaacttagtaatcacatatgatatggctaatatacgtaatataacgataaagatttcttcacgctttgatatccataaagcaatggaaatatggaatggaagaaaacatttgaatt

SEQ ID NO: 45458 - DNA, 407 bp, Arabidopsis thaliana columbia
atagtagctctagcttttagtttgtttattttagttacagttaatttatagtaattcacactcggttcgcgtttagcaaggtgttgccggcaaattgtactaacaagtcaatattccaaggaccgactttaatcggaacaacgtttgtatttatcggaaagtgtagtgaaaaacatagtacatgtccggatactctgcgtttcgtcgaccagtggattgtcgtgtggacggtccacgttatccaatacagagagcaaaagcactgtttgccttgtttggccgttattagacccctacgtttgtcactcttactggtaactgacgtgtcttgattgggtcgaatcagcagatggggttacgtacacattaaacgggcagtattgggttaaccttggtggttttggttg

SEQ ID NO: 45459 - DNA, 617 bp, Arabidopsis thaliana columbia
gtttatttttggttgatgtaatatgttcattgatgttctgtataatgagataacaaatcaagattctttgtaccgcgaaagtcctagaacgtgtttttactgattatgcgttttgggctcaaaatctgtgattttctgcggttgtgttgttgaaagttgaaaccttgctcatgttttagcccaattgtgaaaaaaacctgcgtttgcgtttccgaaacgtgtgtccacgttttcagtctagaagagaaggcacacggagatacagtgctccgcgatgtagccaatctcttccgccttaaacccttccgattgaacagtcgaatcagcacagacaaaaatccttcgatggaatttgagatcaatgaaagttagggtttttctttgagatttcttcacccagataaaaaatgtcgctcgtgagaagatttcaaagagttcgttctttattgaaaacagctggatcaagagaatcttcgtctcttccgtaagcaaatttcctaactttgattgcgttttaggaaaatacgtgaaattgaactctgaatcgtttctgttaccaaaagattcaatttttagctttcttcacattggttcttcagatttaggaatggaatgag

SEQ ID NO: 45460 - DNA, 562 bp, Arabidopsis thaliana columbia
gtcaagaacagaagattgtgcactgaaagaagtgatgaggcaaacaatcaaacaagcaggccactagatccgaggataaaaagcagcacagcttctgaaatttgcttatagaattgcaaaagaaacctacctgtattcacctctattgtataggtgtgcatgcaaatcatctagaattttgaagaaaagggctccccgcaacttagttagctcagatctgacatcttgaagagcaccaacctaggttaacgtaccaaaatatctatgagttcaacatacaagtgaacagtagatcccttggacagagatatttctaaagtcccagcagaacttcgatgatcccagatcctcttcaatggatttattacaaaacaatcctagagatcaaattgataaatgaatgggaagaccacaatattcccatgacaatgcatttgttaaaattggcagtaagtaaattaccgtttgaagccctcacgctccagcattagagacgactggagatcacttgaatagcagcgtaaaactgcttatcagcaatgagcttctcaatacgagatgg

SEQ ID NO: 45461 - DNA, 564 bp, Arabidopsis thaliana columbia
gagcacaacacacagaaaacacacagaaagactcagttagataatacctaagtaaactagttcatgagcttcttgtcacgaaccaaccatgtagaaagcgaaagaaataacgactgtgatgtgcaccatagattttcaagatgtgtcagagaagatctcttacccacatttgtaggggctgatgaaggtgaatctcagcaatatattccatctcagggtccagctttaatccaagccaagggagattcaatgctacagagaaagattcaatctctcagagtctcagttctctttcttgtgttgttgcaaggtatgtaaacagaccaggaatgccagaaatagtgtaccacagaaacccacctcgttttattttctaacggtgctatagcatcaacattgtcttcagccccatcaggtttccctcccttctttggtttttgatagcgtttagcagcaagtttagaatgacatggtaattccagtagcgtgcatctatctccagccatagcgaactttggatgatcagacattccatcgagttcataaacccttatactcataata

SEQ ID NO: 45462 - DNA, 610 bp, Arabidopsis thaliana columbia
tcatttacacacacatttctacgttatcccatgaactagtcaacaaggttcacatagaccagtgaaactataacacacaatcttgaaggtaatgctttcggtactaccttggttacaggaagcaaagtagctgcatgtgagaaagaaacgtcagttagagaagaaggtagaggattggaagctacatcagcaggaaatgtccgcctatgaacttctcttaacgcatgcagtgaaagttgccacaagagctccacaaatctgcaatcaaaacaggaagtaccacatatacatatcagatcacctaatgctgcgcaatcaccccaagagcttaatactaagcctaaagcgcccaacgaatacgaagtggagatgactaaactagttgctcgttatcaatcactagaaaaaaaaacctaatgaacatacatacataagaaccacatcagcgtacgctcaaccaaccttggtccacagcaagtggctagtgatgaaccctcgaattactccttggtaatgcccttgtgatcaagctcgcttataatcgcttgaacaaccttcagattcataattctagtgttaagtacactatgaattcaataagaaagaaaat

SEQ ID NO: 45463 - DNA, 860 bp, Arabidopsis thaliana columbia
ctaatactttaaaaagaaaaaatttaaaattacatctatttaaacagagggagtaagatattaaacctataaataaatagttccgggtcggttttcaattaagggaatcggatcaataatcgggtcaggtattggaacacggtttctttctcgtgggaatatcaataggttttctaaaaatccataaatttatatatgtgtggccagagagttttttgtcgcaatccctcgcgagaagggtgaaattcgttgcgaccctaaacctagaaactccgcacgacaatttgggggaaaaaagttcttcacttcgccggagaatctattcgtcctgtatcgccggagatcgacttcaccgacgggacccagttcgcatcgatcaatcgggtgttcaaaggccgagactttctgctgtacgctcgattccgttcgttgtattaccagtcaattggattagggtttaagggttgttcccgagaagagcctcccgactcgtttggctacttttgtatgaaatttttctgttatttttgttgctttgctttaaatttcgcaaaaaggcctttgatttgtattctgtatgatcaacattttctccatagtaattttctttgagttttcggtttttagttttacattattggaaatattcaggcaaataatcgttgagaaaaagaaaaaaaaaagatcaattatttttatactcgtagaatctgattgaaatattaagaaaaaagagaaaaaagagaggaaaagagcaaagtaagtaggatagatggctagtgtccaaccgttgcccattttgctggacaatatatgatcaaatctgttttcttattatttccccttctacaatatatgta

SEQ ID NO: 45464 - DNA, 496 bp, Arabidopsis thaliana columbia
tcaggtggatgcatatgaggcgaaaaatcaagaactgatggcagagaacactgatctgagagcgttactacgatcaacgcaggttagtttgcttattcttgtctgagaaaacttttgtgaaagaatcttttatgatctttgtattgaagactatgctacgttttgacagggtgacatgcgttctttcttgaatgcttctggtggattaaccaaccaatctttggtagctaatggaagacacggtgcagacccttctcagtctcctttgggcgggaagacggtacataaatctcattataagctaattcaattttcaatcgattcctgttgtatatacacagccaaaacaccagtacatatcaacaagaatgaatatcggtattgacaggacgtttttgacctaccttttcgtatggcacgaggtcaaatagaagatagtttacgctctaagatggttccatcaaggtaagaacagtctacccgagtttcacctttt

SEQ ID NO: 45465 - DNA, 356 bp, Arabidopsis thaliana columbia
tgcaggtcacctcagagcaagaggatccccgctgctatgtataatgtttacttgagtctcaaggtaagtagaaatatcataccctagaggcagaaactctggaagtgtgcaattgagcagcttggcggatagtagtaagaagggcaagtagtgcagtaaggatcattgcacatccctaattgtccagatctcaagagatctgcgtatctgacgacgcaatcatcttcaggtggcacatcaacggtagaagaggaatcatgagattcttgacgagaaggagagaagacaggttctgttctgcgagtagagtgaataggaccactcaattgcactaaaggaggtcttattctctgggt

SEQ ID NO: 45466 - DNA, 560 bp, Arabidopsis thaliana columbia
taggaccctaaaattttaaacacgaatactctataaatagttaaataccacataatttagagtaactaaaatccacataagtcacgagctaaaagaaaagctatcgcctaaatatactttttttttgtcaaacgtctatttgagtgaacaatacccaacaacaagattgacgacatatctcaatatattcacaaactcctagcaaaaggaaagcaaggacaatggtatatctctcttagttcttcaaagctgaggtgtttgcattgaagtataggtgcagaaccaatgagtccaccatcttcttcagcctacaggttggaagctagtacagctacagcagctagaaccacagcagtaataatggctgtacctttgaggcaggcattttcagggaagaatctacccgacatcactttgcaggacttgtcagcttctttgtaacgagaaccaatggttcctccttcagtgatggctttttcgttctaacagaatcataggataggtcagagatgaaattactactgaaaggagggggtaataagttcttagaagagtaagag

SEQ ID NO: 45467 - DNA, 330 bp, Arabidopsis thaliana columbia
aaccaaacaaaagttttagacaataaatcctagactacacattttgaaactgaatgaaaatacacgattacagaaaagaaaaaaaaaaaaaaaaaaaaaaccttgggggaggtaccccagatatggcaaccccaatttttttttaaaaggtggaccccttggggtacccccttaccatcggaaccattcccaaaattccatttaaaacccggaaaggcatccattggtggaaaaaccccccaatccccggccctttcaaagcggggcaaatggggagatttcattgggataaacgtgggaaaacctttgggcatggtaagaccttttggc

SEQ ID NO: 45468 - DNA, 660 bp, Arabidopsis thaliana columbia
  unsure (1)..(660): unsure at all n locations
ttgattttctgcttcaattgtggcttgggcacagtgaatatgatttgggaaaaaaaaggaagaatggattctttttgtatttagggtttcgcaaattaggtgggtgccatgagaattaggttgttctcggcttcgattggtagagaactaacaaaaactgttcctttgtgttgcttgctgtgtttgtgaattggcatgctgaggaagttattcttgtgtttcaaataacattagctttggattaacttatacttcaagagtgttgtgtttttttgtttttgtttttagccctatacatatatagagatatagatatggtggtcttatgatctattgtctacccttatcaactgcagcctttccaagtgaatcgcagctaggaaggccgcagctttacggtgaatctcggggcaaagagctgctgctattaagaaaacctcaagacttttcctaaggatgttgtttgagcggtttaccgaggaaacaatgaaagctataatgctggccaaagaggaacccgcaggtttggccacgtatatgtaacgactgatcacatacttgtgggtctactacttggccccgaaatattgctgcaaaggttcttgattaatcataggaatcaatgccacagatgtgcgtgtggnagcaataaaaatagat

SEQ ID NO: 45469 - DNA, 509 bp, Arabidopsis thaliana columbia
ttattagaaaagagttcgtttgccaggacgatcagcgacctttaaggtcttatcgatgagatctctagtcttcttacgacggatggcgactctgacgctggagcttttgtccattttgatgtaagttttcttcttcttccttagcaaactcacctttgactttatcgtctccatcaaactctccaactgtaatcccatcttctccttctccttcttgcttctctaaagaaccctaaataactaagaaagacgattcaatttttgtagttgcagctcctctgacatatttatgcgttagtttttatctttttactctaaaacgtaacgctttcgagttctttggttttatggaatagtttgtgagttataggctttgaaattgagaaattttcgatattgccactagttgtccttctttgactttaacagtatttaatttagtagtcaactgctgtagatgtcatcagtaatcacatttgcttttgtcacaaacacatttacacacataa

SEQ ID NO: 45470 - DNA, 524 bp, Arabidopsis thaliana columbia
ggacagagaaacagactgggtgggccacttctcatttgggcctaaaactaagagcaaacacaaaactagccgaacactttgcccataacctaaagatgctagctttcatctttgggtcaaaacgatctattaaaggcttgaatctttccggttcccaccatgtcaaaaactaaaacttggaaggattcctaaatgtaagagacaaagcacaatagctgctgatgtacaaaggctttgttgttgcaatttttgtgtgtttgacttttgagtattaaatataaagattcctgcatgagattcggatatacgaccttgtacacatatgacatatgcatctttgattgtatatgcgtaaacagttgccaatacacaaagagcaaaggacgttgacccatcaatagtttcaaattcttgaccacaacaactatatgtatatatctgcaaagttggatgatgcacatttataatcaaatattgtgtactttacgcaatttagtttagtataagttgacacatacgtgggt

SEQ ID NO: 45471 - DNA, 417 bp, Arabidopsis thaliana columbia
  unsure (1)..(417): unsure at all n locations
tatgaaaatctaaaatattaaaaaaaactgtaaaaataaacaataaaaaacttctcgataataattataaacattcatagttaaaaaaaaaaaataaatataaaaaaaaaaaaagagttgactaaagaatgagaacaccatgttcgcattaacgacataacaaaaatgttttctgaaattagtgacgttctcatattcaatacatggactatanatagaaataatcattcttttcataattatggaacatttcgacaatagaaacctgcggacactctgtcttctattatttggtggagcctatatttctgtgactaccattctccccttttgtttgagtaggttaattagccaatgcttcattttgccaattagtattgttaccgttacgtactgcaagcctcagaccattgtttt

SEQ ID NO: 45472 - DNA, 506 bp, Arabidopsis thaliana columbia
acgatatatatacgtatgacatctatatatcatgaaataaatgcagacaacactttgcacaaatttctttcggtcaactcgaacctcataaagcatattcgtttctatttactcaatgtctgggtggataagcaattgagccacaagtgttcgtttttttacgttacatagttgttaatttgttatatacataaaacatcaacgaatagcattaactatccatatatacgtgttgttcgtaatagttacatacctctttggaatctgtcctcgtccactagcaaaattgtcaaaaacaaaaaggaaaaaacccttatcaaaagataaatttttggattcgattgatgacatattgtatatagaacggtaaagatttttaaaaacgattaaactctgaatctcttaaactttatatacgtgtgtgtgtagtgtgtagtgtgtaggtagtgtgtccacttaaaactttaaaaattgtatcactcatttatttatttttctgatggcag

SEQ ID NO: 45473 - DNA, 561 bp, Arabidopsis thaliana columbia
tgtacattaagtaaataactggaatatcatttttcttagaagcatgtacattgatttatagatgtttcgtatgaacttcttcttatattttggaactggatttggcagatatcatcattgaatttgctaagagtgatatcagagcaagaaggatgttcaatagaagagttgaatgctggcaaaatatgtgattggttccttaaggacaagctgaagagagagcataacattgaatctgctgttcttcaatgggatgatcccgattttcctttttaaatatccttattttttacattcaagccacacaaaagtatgatcattaacaaggtgaatatgtatcgtaagtcttaattagtctattgtggtctgactaggaaaatataaaccttttgttaagtcctacaataaaacgtattcaacaattccaaatattatccatgactgaaatacataaagaaaaggtttaaattttatctagaaaccaggaaaaaagacaacagtaaacaaacaattaaaaaagaaaagactttgaaagaaaatccaaaagttgtagaagaaaag

SEQ ID NO: 45474 - DNA, 280 bp, Arabidopsis thaliana columbia
tagcatcgactccccagtgaacctgtaaacaaatatttagtgtttcttttgaaaattatgtttttgtttatataataatccaatagtataagtttctttctagtttctacagcctaaaatttgattaatttataatcaaattaaccacttttaaagttttgatttttttggatggtaacattagaaacgatgacatattaacgaaacttgtagctacacataaactgctgaccgatcccaaaggttgagagattctttggcgctaaaaaatccccagttc

SEQ ID NO: 45475 - DNA, 570 bp, Arabidopsis thaliana columbia
ccccttgatcacctgcaaaaacagatgatagaactcataagaacgataataacaaaacaacgatctgttcagcttgctcgtctttatttttcatccggttttacctttgacaggagagtcaagaagaaaagggatcaaaacgagacgaatagcatccagttccaaaaccgagtgctttgaggcttcaactacagtcaccgtgatgcaaacgttatcatccttcattgcctgatcgtctgaagagcagtggtttctaatccacaacacataaatgtataacaaatcagtttctaatagacataaaagcgaaacaaaacatgtctgctacaaattcaagaatgttcttacgtgttttgtatatctaagtcaactatatcaagcttcagttctctgttcctgctcttgtactgctcgtttaaagatgaaacaacggattctgcgctcagttgtttccgcttcagtactttctgtgaaattaaagaagaggttcattagaatctgtacacatatatatatatgtttgtggctttatatgggtatgagtttatacatcagagatatgaaaatggc

SEQ ID NO: 45476 - DNA, 343 bp, Arabidopsis thaliana columbia
tagtgttatcgataaaaagtgatttttagatttcattgttacaaaaaaaaaagatttcattgttacaaaattcttaaggaaacctaattatatccaaatatatcttgactaatagtgatctacattggaagtgaagttatcattcttgattaattggctgagaatctcatgagaactaatcagctcagagagcttccgagagattgccattacaatgattcagttcctagtatgtccacgtcttgtgtccctccagtatgataaacctattatttaatctgtgaagatgtttgactacttaagggttagtacgtaaggtggtattttgcatatgttagatttt

SEQ ID NO: 45477 - DNA, 620 bp, Arabidopsis thaliana columbia
cctcgattttatttatttttgttcgattttggatgggtttggctcagttttgaactgttggattttaagaaaatcggtgcagtttggtttctgttatttgtgcgttctctttttcgcaaaccttaacgagtagctttctttgttttgctttgatctacagaacgaaaaaacaacagcatggcatcaaggacaacaagccaactcgcgagtggttccaggaagcggatattacagctaccctggtcatcagaatcagcagcctcccggtttccgtcaagcccaacaactgcaacatcagcagcagtcgtctcaacaacaacaacaacaacaacattatggaggacatgggtatgtgagtccttaccattcacaagctgtaatgtcactagaacatcttcatcaccaataccaacaacagcaaaacgctagagacgcgtcgaaacagtcccaacaatagttatggcccaacaactactgatgaaaagcaatccattcaaatccttctttccccttattttcattctcattcagagcagcgatgggatgattccgttgtttgaaatggcgttgtgttgtgtgtgtgtttaaggtcagggtagggtctatgagagggtttgtga

SEQ ID NO: 45478 - DNA, 551 bp, Arabidopsis thaliana columbia
ccttttaacggcaaatcgattttattatatagttaaagtttacatgatacataagaaacattcaaaagcaacctgagaaaataatacacttattctatcaaaactagtagtgatttttttttttgttatattaacgagtttaattttcaaatcattagattattttttaagtcactacatcatagtatatatatttatcatcttatatggatagcatgaaatttcaaaacttgataaacatgatccgattaagttgagaccttccagtttgagtgtgtcgataaacataaaatttttgttttaaacagtagattaaacttttaaaaagaccgtacaacaaaaagaaaaaacaaaacgcaaaaacgttacaaaaagaaagactaaagaaacaaaacaaaataaaaagcataatgagtagtattaatgagttatacattttcccattaacattttcacatttccccattaacgagttaatgagtcaaatctacttcttacgagtaagacgtctcttcttcttagatgatgtttctccccatgaccaagaacag

SEQ ID NO: 45479 - DNA, 120 bp, Arabidopsis thaliana columbia
gtcaaattaagaaccatgtaactcactaaaaccatttcattctaatttggtccggttcgattgagattgggttagctaattttaaccccggtttagattcacgcgccgactcatggccgg

SEQ ID NO: 45480 - DNA, 491 bp, Arabidopsis thaliana columbia
ctctgacacatctttgtatcaccacatgttatcgtctccctatacttatttagctaatctgctttatctataaagcaatcttgtaattgtcaagtttgatattttgctctaacatgcttcttttcaagagatacgtataatcgaatcataacttaaaacaatttaagtacttatcggattcctaatctcttcttccaccttaatactacagctcgaaactttatacaaaacacgaaacacggtgtaacacatcatgtatgactatcgattagattaatgattctgttatgcgattgaactacaataacagattcaatatagcagacttttccaaaaattgatgacaaataaacgatcatgactcaaaagaaattgctcaaactgttatgattaagaacacatggattcatcagttacatgacatggattgacatcagtaaatctctttaatctgataaaaccctaattttcacaaacctctttggatgtgg

SEQ ID NO: 45481 - DNA, 615 bp, Arabidopsis thaliana columbia
  unsure (1)..(615): unsure at all n locations
ctgtagcttgaatgaggacagattctacagttgttctagaaatgatgaatggaatgctttcttttcttattgtcagaaattgatggatctggaggcacggcttgtgagtttagactcaggagatgcggatgtagtccaatccacaattgaagagttctccgagaaagtcaaccttgacaaagacagcatccttaacaagtaacacaattttatttatattgcatttcttcatgcttgagatgctgattaatcttttttcccctctggtgtatatacacacgaagacggtattaactttggggctatggctgatctgcaggcagtcggtaatcaatgagtgtttctcaaaagaaagtgtgaagcagatcatacaagcatttgtaagtcatccgattttcctagaacagaattcattcccgcctctattcatcggtatgaaatataccttttcctcttacaggaagctgaagcaagcaaagacgggaatgaatggataactccagtcatcaaaggtctaaagcgatcgtcaccacagggttgaagatagtactcaatcggtaattgttatttgttagatgagtntcatgttacgatttacttcttggaagagaaaat

SEQ ID NO: 45482 - DNA, 1249 bp, Arabidopsis thaliana columbia
  unsure (1)..(1249): unsure at all n locations
gatcttctttctttttttgcttattgaccttgatccacttcctttacatcggttggtagactatgaccactcatatccttcaaaataagaatgttggagacaaagataagtaatgattaaagccttaaacaaaaagaaagccagaaaatgtaagtaatgatttgcgttgaatgagactaattatgccttgggtgggattagtagattttactttttactagattaggccactttgtttagtttggcaaagtgatttgattattttcatgtcacatcaatatgtgaatccaaagtccaaactgaaaaaaaaaaaactaagtacgaagtcatcatcaattcttaaacatatggtttttggatcagcgactcctaacaatggtctatagccggaatctttctttcaacaattttcatcatattttatacactattagtatcacactactgtctagattcgaataatcttaagttcttaacaaaagaagtatttatgtccctaaattccaaaagtaaaatcaaatcaaagcatcgcaaaagaaacttttggagttgtccaatagacacaatcattttagtaatcttaaagctagtaatattctttctccaacgttagcaaactatacgaccttttcttagtgtcattatcaacaacaatgactattactaattttgaaggacaaacttgccaaaactaaaattcaaagttttaaaaaacaaaaattcagaaagaaacaaccaatatgcagcaggctgcgcagggcacgagatccactgccaccgcacacgtggacaaccaaacattttactcactgcaaagatactctctcacgtcactaaaaattatttaacttgtaattatagtttagtaggtaaatcgcaaaaaaaacattttaataaatcaaattacaaataaaatgcatacaaaaagcaaacaacctccgtgcaaatcatatcatatgcatggcttaaagggtttaggcttcaccttcccgatcgctagagttactgtgctagtctctatcttcccatcacagtcacatctcgtccgtacacgtggacccacatcctctttaagctcactagctgattgatatcgtcttatacctttggccgtttcgtctctctctctctcgtttaattacttgtacctatcaactcagtgatactctcgcttctgagagagaagagagaaagcgacgtcngtttcgtatcgtcttctttctcttcatccgacgctggattcataagg

SEQ ID NO: 45483 - DNA, 567 bp, Arabidopsis thaliana columbia
caaacccgattccagagagagccaagggacgcaggagcagtattgagagagacgtcgttgttgctgagcttttggggcagaggaggaggagctgcgtctgaggtggcttctctcacccagtacctatacgatgagccctctttcgtcttctcctcctctctctccatgtctttgctctatcgctcgctctggctttctctcccgtctcactctcctcttctcattcaatttagggttcctccgatgtctccggaagtttcctgcctcagatccaaattattttattattttctttcgagtctttgtttgtggcttaaagatgttgttgtctttaaagggcccactgttgacccaaacacaggttcactgttgacccaaacacagcttctttcattcttgtcttattttaatctcttcaagtactgtactaacttttgctaaattctacagttgcaatttgcagtaacgaatcaggtttagattacaacaattcttgttcaagtaaagatacagaagagtgatgaactttactgtctcagaaagtgacaaaaaaatttgtatggggga

SEQ ID NO: 45484 - DNA, 552 bp, Arabidopsis thaliana columbia
cctttcaaaatctaggtgctacttaagatatgaactgattaaatctaggtgctaattgattaactcttttcaacaaaggatgttctgatgcaaaatgatgaatcaaggtgtaattacctggttaagtaggagtagctaagcaggatgattgtaattacatggtgagacatcatgacagcaaaatcctttcttcttgtctcccatgcaagcaacgcagccacaccatacacataaaaaccgcactggcacatatagtaaagctttattgaaagcctacaaaaaaaaagaaaacaacattctaatgtatcacatgtcctgggtactatgccatgaaaatgaactctacgggcataattctaaaccaagaaactcaaggcagctagcaaaagtgaatactcacttcaactcttgattaggccaaccgtggaagtagagtttgatatctctagcccacggctgcgtgataaatgacttgtagaacgaaaaagtcacaagcagcataatacaacaatttccacaaggactctttgcatttgacgatttttgccgagt

SEQ ID NO: 45485 - DNA, 446 bp, Arabidopsis thaliana columbia
ttatggcgctaacctctgctgtttaacatttctcattcacagctccattttctaatctatgggactaatatatttagtatgctattctgaacaggttacagcggttggtcacgctgccatgctggctggaattcagagatatgtaccaggcctggtacgcattccttctctgtatatagattcgtcagaattcaaaaacttctcattgaatcagttttgatgatattcttcattcagattccttccacatacgggtccgaaaggttgaacctattgagacagcttgagaaaatcaaggaactgcaaacaaatgaaaccgagagcgaagaaggcgtagaggaaatagcattatgagtagaaggaagcaatatagacttgtacctctattcactttgttcggtaattcattgccaaaagctgcgcatagagaatctcgttccatgtgt

SEQ ID NO: 45486 - DNA, 549 bp, Arabidopsis thaliana columbia
ttttccaagcataaattaattacaacgattacattaccatgcatgtataaaacgaaaaacaaaaaaatggttttatcatgcactagatcgatttacgattatacagattatatctattttctaatatgagttgcctacgacattttttttttctttttctgattttttttttttgtaaataacttgcctaggacttgtggagatccttttggatttctccaagtacgtgtgaccgtataacctccaagagtccttgttcgataaatatataaatctcttaggccgtctatttgttttccatgctttcctctcttgtcattttcctttgatgtctccaactctttaccatttgatgatgctttggaccattaccatttttgtcttctctattccattacttccttgaactgccacttgatcaccatttttggtccacatgtccaatagactattggcaatagtattactcttttgaaatcgtgtggcctcataaatatgtgcttagccttatgaccaccttgtttgacatgtcccaagaataacataagt

SEQ ID NO: 45487 - DNA, 626 bp, Arabidopsis thaliana columbia
atttaagaataaatacaattttttttttttattaattgtcattgacaattagagttgtttggattcgtaattataagttaatatacaaaaacagtataacaattaatgaaaattgtattttgtttttcagaaacatgtaattagttctttttatcaacttcaaaatatccttcgtttaatatacaagattattataattaaaaaaaaattataattctgccggattatagtgatggaaagaacaagagaaaaaaaaattagattaacaagaggatgacgtggcaacgatatcatcaaggatgtggcattcatttcaccagcgttatcaaggacatgacattcatgtcagcagtcatgtatgattttacaatgttgggtaagatcatgtatgcaatttgaattatctaatacattaggtatatattagcaccaaaaaactgtaaagtataacttgaacacttatactttggttggatatgaaaaaactgatttttcggtgaaagatgacaattgacaagcttcatgcgaaaattagatgattaacaagaccatgatctaactatcatctagtttttgacaaaattgactgacttgtcacacttgtgtccatgaactttaggcctgag

SEQ ID NO: 45488 - DNA, 598 bp, Arabidopsis thaliana columbia
gtttaactatagttttactattggcctctccaagatggattccgagatgggcatttaaatttggaaaaggacatcttgaaactaaacaacacagattcgagcacgaatcttgacatcaattgttttgagaaatgtgagtaatggatgacatttcaatagatgcatgtatgtattcatttcatggggaaatggccaattaatacacgaattctagcattttgttacgatagcatattgcgaaatttttagtttttacatcacatttaaacatttggccaattcatttacacaaactgacatcatttggaagttggtgtatgaatctacacatctctatagttcatctacttatagtagtgactaaaaccatagttcgtgtattaattggctgtctgccctcatttcataataacctgtattgcttttgaactggaaattatttttttgagaatgatgaatttaaaaccaaaagtaggagaacaaatgtaacacacaataaaataagaggcaaaagaagaattatcaactgacaatactaacgaaagaagaaaagatcaaataacccaacaaaccacgaaactcagaaacaatagaagat

SEQ ID NO: 45489 - DNA, 469 bp, Arabidopsis thaliana
ttcctcctcctaatactccaccgacttctcctcctgcgtgcaccaccactatccccgccaagaactccaccaaattctcctccaagaactccaccaacttctcctccacgagcaccaccagttcctcctccaagaatttcaccgacagctcctccacgtgccccaccactatccccgccaagaactccaccaacttctcctccacgtacaccaccgctatctccccctataactccaccaacttctcctccgcgtgcaccacctctatccccgccaagaactccaccaacttctcctccgcgtgcaccaccaatatctcccccaagaactccaccgagttctcctcctcgtgcaccaccaatgcccccaccaagaactccaccaacttctcccccgctttcacctctatctcctccgccaagaagtccaccaatgcctcctacacgtacacccctgtgtcccaccaact

SEQ ID NO: 45490 - DNA, 577 bp, Arabidopsis thaliana columbia
taatgtttggtatatattaagactttttggaaatatgatggtccacacaaagaggtatattcgactattcgtagatttgcgagaggatcaaacttttcgtcgtaaaatgtttaccaccgttttatttgtctgaaactgaaaacaacgaacagtgtctatttaattaaccaaaacggcagacacaaatctctgggtggagccgatttctacggaagtcaacaaaacgcaccgtcgctgcagatcactacctcctctttcttccttaacgaaaacgaaaacattgaacagagagcaagaacaaaaaggcacgaaagcaaaagaattctcaaactcctgagaaaaattcgagctccgtgtgattaattaggtaacgtattgctcgatcttcagatgaatttggagttttgctttcttcaagcttattctattttgcgagattttcggagaaatgataaattaattgatgtttttgagtttcttcctgatctcgatgtgttcgaatgtaattagatttgagttgcgatattgagagatctctgttgtttgaattttgaatttggatcttcctgatgtggtt

SEQ ID NO: 45491 - DNA, 549 bp, Arabidopsis thaliana columbia
gcttaggtgtatgtataccatcttcagttacagttcatcttgtgttttctctgcggcgagagtaacgagttctgtcattgtatctcggtctatcttgggctctctgcggctgtggctcaacccgcctctgcctctctggtgatcgttggactatctctccattaacaaacagctcagctgcaagtcaacgacaacgattaagaataaatcagaattcgatcacagtaaatgttcttctgtatagttgagatttaatttgagaaatgtaaagctggtgtatctctcgtaattgagtccatgcttcctcaatataaagagcacagcacaagaaagagcgaatctggatgtgagtccattaacattcaaaactagaaatggcagaaagctactagctttgccaagaaggacttctggtccatggttctttactaaaacctccaatcatctctataccgggttattatggttacatatatactttttctcaaccaggaaattaatcatgttgctattcaaaatccacacatacaccaagtgaagaaactgata

SEQ ID NO: 45492 - DNA, 408 bp, Arabidopsis thaliana columbia
attgcaaacagcctgaagcctatttatcagggttgtatctctcgcaatcaagttgcgttcttaaagggcgttcctaggtaaaaaaggtcttactggcatctgaacttgttaggggctataattctgcatgttgttccaagagctctctgttgagaggggggataagggcagcatttgattcactttgtgtgtgacttccgactcgagctcctagaggcttaagagtttcctcctctctttcggacttgggtgaaggacttaggttaaggtcaatccgctcccagacgtagcggaccgaccttcagacagaagtgggcccaatgaacatgagagaggacgtgggtgttgactagtaaggcagtcgtggtgtgacaattaatttttgactaccatcaaagtcacctaatc

SEQ ID NO: 45493 - DNA, 547 bp, Arabidopsis thaliana columbia
ttacctcttaaggacaatgaccatggcggaaactggagatcgttagtacaaaaggagaagacacatactgtgggaattgaaactgaacagcgaaggatgagccgcttgaagaagaacgggacatgggtcgactctcatgggccagtccgattcagagattccgattcttggcttaagttacgccaggttctcttcggctctaatgtttctgaacaattcttagcttgagtataagatagatagattttatttttcagatgaagaaattagggcaacactccaaccaagattaagttatctccattagagtagcattgatgatttacccaagctcctgactaaacaaatgtcgcctgtgtttactcctatcttgctttgtagctgaatggaagaagaagcgttttggcttgctcatggtatgaaaatcgttatctttcgtctttaggtaaacactaatttccgttgtcttttgatttcatactctgtatctggctttatgagtgtgtttcggttggtcagttgagcttcagattgtgacttgatgaag

SEQ ID NO: 45494 - DNA, 430 bp, Arabidopsis thaliana columbia
ccgaaacaaatgcagccaagaatgtgaaatgataatataataaacgagtgacaatattcgaaatgccaatggatgtatataatgaatatgttcatgcctaacttttttaggaacgttgtaattggtaaaggatatggcagtgtctttaacgtacccccattaggttaatcttcttgttcgtcacattgtatttttgtaaaaaaaaaaaaaagaacaaaaaaaaagaaaaaaaaaaaaaaagggggaaaattttttgtttcccggtggtccactagtttgaaaggtaccctttgaaaaattaatttgaaacccctttttaagtaagaaagtggtcctttttgttgccccccggttttaaatttaccaaggggttttttttgggttctcggtagggaaatccggttttgggttgaaattttgttaaaggttt

SEQ ID NO: 45495 - DNA, 457 bp, Arabidopsis thaliana columbia
cttgttaacttgtttgtactctgttaggaacatagattgattggttagctgaataattaggaaatggtaactcttaacttggttaacgccattgtcactttaaatcactgtaacacagagtaatttactacaatcctagcaacattcaagatatggttcaatctccttgaattgtcaatgattcatttgcttccatcgaacttttcgatagtgttgtggggtttgtcgggtctggcatatagaaaacagtctacaatgtcggttttgcggtgcaccgaaggataaaatgttcattctaaaatgggtaacacttattgttatcaaattgtctgctgcgcttaagtcactgaaatacacttactaggatcttagaaacatacactaccccattttgatggtagtcgggttttcccgctctatcgagcagtctgtaatggttattttgcagtgcgataga

SEQ ID NO: 45496 - DNA, 664 bp, Arabidopsis thaliana columbia
cgagatcgaaggaggaagcgtcgtggacatattcgcggtggtgattgtcgaggaagtggaagaattggagagctttagggccgtggttccagagtcgcttgagaacagagttcacgagatttggggtccatggggttgttttggtggagagtagaaattgatcgtcttggtgagttgtgttcggagaagagaggataagcttagctatggcggcggaatctgccggcggtggtttgagattggctccggcggccgaagtacatagcgatttgctaaaaagacgtttcatcgattggtttgttttattttgttttgaaaaaagtctttttaagtgacttcttgggtaatttggtgtagttgtatcacatttgtttaccgctaaataatgttttaaccgttttatggaacgtttctttctttttcagattgtacagagttagttggtttatgggtctaattgggcattctttggaaatggtctcacaagacattgtggagttcaaagaagagttcgacgattctcacaaaccaaacagcagagtcgattgctaaccaggcctttccatctaaaacatattggttataattgatgcattgcggtaggagtatagcgtatccgttgtaattgattatgaaaataataccaaagcgattaaaaagatac

SEQ ID NO: 45497 - DNA, 580 bp, Arabidopsis thaliana columbia
atatagcaatcatttcccactattagagctaaaatacttccttttattatatttggaattctatgattaaatagacaattttcattactagtagttcaaatgaaaattatcttaaagtttcctttgcataaaacttatttctggagtcctttgtctgattctctcttcttatcttggtcatgatgtcatcttatttctcgatgcaggttgttaagttgatatatacaaattctggaggtgctatattggcattagcagaaaatgctgcacataaactatggaaatggcaaaagagtgagcggaatcttttgggaaaggtataccataaccgttaataccacatataatggtgtttttgaaactcaatagttatagcttcttgtatggtttttgtttgtttaggcaaacagcaatgtcccaccacagctttggcagccatctagtggagtattaatgacaaatgatacacgtgagggaaacaaagaggatgtagttccatgctttgcactctcaaaaaatgattcttatgtcatgtcagcctctggaggaaaaatttcgttattcaacatgatgactttta

SEQ ID NO: 45498 - DNA, 593 bp, Arabidopsis thaliana columbia
ctttaatctattatcaaaggaaacaactttctttttgttttaaattttgtaattatccttttcgatgatgaatatatttatattttaacataaaatttgttgtagcacactggctaaattcgtcttcattgctgaacttatcgggttcaaagccctacaacggaagactttatgattttgaatttttcaattattctttttgattttgtatttcattgcttaataaaatatgtgttcaaagcctaataatggtaaaatatgtttcatagttggcgaaagtaagtaactttatggaaaaagactctttaacctattatcaaaggaaacaacttttttttgttttcaattttgtaattatccctttcgataatgtatatataaataaatatttaaatataacaaaacaaatccgttgtagcacactggctaaattcgtcttcattgccgaacttaccgagttcaaagcccggcaacagaagacttttttattttgagttttgtaattgttctttttggttttgtatttcattgcttaatagaaggtgtgtcaaagccgtataatgtgaaatatgtccatacttggtggaagtagt

SEQ ID NO: 45499 - DNA, 513 bp, Arabidopsis thaliana columbia
gtagttagcattgctgcagctgcagggtccatagctggagtacttcttgatctaaagtcctacaagccatttcgaagcgaatactgatcaacttgaatagtagccaattcaaagcgatgactaagtcagttttaaacacaatggatttatcaagaacagtcaagagaaccaagaaccatgaatttgggaattttgatcagcttttttttatatagatagaagcaataatgctgttagttcttctctataatcttctctgtaccctgaaggcaagaattgtagtcctaatgagtaaatcttcgattaatgacagagtcatgtgctgcaacagaatcatgaactagcaccataatagtatattaccattgtggtaaaatttcaataacaagttcttgtacttgctcttctttccatgatctgatatttgccgtatgaacattcactaaggcacacaagtatggattatttaagcgaaacaatcaccagagcagtgcagtaacaaagatcagactt

SEQ ID NO: 45500 - DNA, 412 bp, Arabidopsis thaliana columbia
caatcacgtctttaaaaacacgtcgtcgtcttttgtttattgcggaaaaacaaaccttataaatcatgaacctgaaaggacagggtagtagtatacagtacattatacaatagtacaaaatatctctcttgtcagaaataaataaaaatccatcactcgttccacatgtatatatcacccagaatccttaaagagaaggtttcgtaagatcaggagttttggtaatggagtaaaacattagtcttttggcctcataaaactagtataagagtaattaagtattaccaaaataaaacaagaaagtatttagaaatgtacgtattgtcttatgtatcgtttttcatcaattgagttcataaataaccttaaatataaatcgaatatgaggataagtctcattttacaacgagat

SEQ ID NO: 45501 - DNA, 538 bp, Arabidopsis thaliana columbia
gtaacccgagttatgcttaggtattaaaaatcaagacaaaaatttcattctacaaattgatttccacaagttttgaggttccagcttcgtaaatcattaggtattaatgcggtagttttatcatttcacaaaaaaacatttgaaataacattatacattaatacatccataaataattcaaacatcatgatctccttaattatatcaattaatctagttttttttttttttgctactcgatagttttaaagccaaaacattgtaaacaacggattctagtttaattggtgggcacaaagagtcattttcataataatatagaacatgtacatcacatgtaattaatacatacattctctttctgccaatcaatcataatcaaagcaatatttttttaaaaactaatatagagcaaatctaacaataaaaaagagagagtggtatcatcatcataaacaataagaaggcccaaaaaacagaaagttaaaaactaaaataaaagaaaatctaatttggatctaaatgaacttctgaaaaa

SEQ ID NO: 45502 - DNA, 454 bp, Arabidopsis thaliana columbia
aaatttcaccggcgattgagcattcgtcgtctctgccgcaatcagaaaccgaaatgtctccatctccgacgatgtctaatgattacgattatccgtcatcgtctcaacttacggaatccaatgatctcaactacactgatagtaccagaccgggaggcgaagaagcatccgtaggtggtgaaaatggcggaggaggaggaaagaaaaccggaatcgctgttgttggatcgattgcagccgcgagtatggttggattcggtggttatgtgttgaagaaacggcgagagaacattcgtcgatcccggtatggttacgcttccactgaattcttctgaagatactcgaaattgccattcatttctcaaaaggtttggtacatatttgttggttcgttctgataatcttctaaagatttctatctctagtttccagagaatgtatatttgtgatatag

SEQ ID NO: 45503 - DNA, 454 bp, Arabidopsis thaliana columbia
caaataagtacttttttgtactatattcaaagatgaacaactttatatttttcttgaacaaaaatgaaattgaatagagagaaactagctaccctaactagtcactcgaaaccttataaataacaccttctgtagtttgttttcctatgaagaatatttttcaactttatctattatattatcctttgttaaactttccctgaaaattgttagaaaataaactaattaaaataattctaagcatgacgtttttgtagttattaattcatgttacattagacgcacgaatttaattataatacacacccccggtaattaagtacattaaagaccctaaagtatatatattaaccattgataaaacaatttagccctaattagtgtccgtcacacacataatctttcctttagcttatatatacgctggtgtgtgtttttaagaagcttcatacac

SEQ ID NO: 45504 - DNA, 554 bp, Arabidopsis thaliana columbia
tttatttttggtttaaataaactcttgttttgttctacgaataacgtttttgaagttgagtgtttacttactggtcccaaaatataatgtgccctaaaactaggtcaaagtgatcaagtgtaaaatgcaggaccacaaatctcttttctgaatgtaatcactaattacagctttaattatgcattaattataaggcaaatcaatctatgattactcgtacattgatccgttccttggtctgtctttgtctttatttcattgaaagctttaaatgtgaagaaaatttcagtctagctaggttcatgtggtatcttaggttagattagcattaatagcaaacgatactgacaattgtcttcaaatgttacatgcatttgtacactactttgatcaatattcgaggagtttatttatcattgttcaatgcagtcacatttgaataagaaaatgatagtattaggctattagctagtctgtggagtactaataaaaaaaagttgatatacccgaattctaaaaactaacaatattaaatgttggggaaaaagaccaag

SEQ ID NO: 45505 - DNA, 566 bp, Arabidopsis thaliana columbia
tttcttagcttaaatgtgaaatagcagtcatgaagatgttatatcactgttttctatcttacacctctttctctcttgctctttgtcttacgctttcaaactttgcagaaacaatttaggcaaccaaacacgagaccaaaatcagggcctaaaagagatcagggtagctcctccgaaggacttgcctctggaaatgtatctgctgatgaagctctggtgagcgagatgtgtgttatgccggtagctgagcaaactgaatccaaaccggaaaaggaaaggaaatctgttcatgagaggatcagggtacctgtttcatatgatgaccttttcagagatgcacctttggatgattcactagcacatcatccttctgcttaagctcatttatacaccgtttaccttggactttttttaactaggtaaacaatatatctaagctactggatgacttctcttgtggaaagcaattgttttgtcgagaaatggaaagcattgattttgtcgagaaatgcattaacaaaactatatatacgacgtaccaaagatttcttaaatacacaaacttg

SEQ ID NO: 45506 - DNA, 514 bp, Arabidopsis thaliana columbia
cctgacaatgctagtttctacagaggaaggtcagagatctcacaacaaaactgaatgaaccaatcatcttaagaacaaaccgcataaaaagctgcaaattttgaaaagggctaattatcgaagctaagaaatcctccgcttatgaattgagctcagcacaagaatccgaataccagagatatacatcacagaaactaatctaggaatgatagaaattctgattccattaagagcaaacaaaacggagcttggttaaacactaaccagaaaagaagcagcagattctagtgaccgataatgaagtcgcttctaatcagagagggcgtgcgagcccctgaaattagggtttctaggtgaaaacgatcgacaattgtaaatcctcactcgtaccttcgctctcgctcctcctaatttggaccagtgtcgctataaatttctgcagaactaactagaatgctatgcctagtgagtgttcaatttgttttgtcagcgaaaaacccctggtctttgtttt

SEQ ID NO: 45507 - DNA, 471 bp, Arabidopsis thaliana columbia
aatttggtgttttgcatacaatagccgaaacaaaccggatagggaatggctaatatggcatcaaattatacaagcttgatataagagtaaaagtcaaacagttttctggtttcttacatgcgtgcaatgcgaagcacatcttcactatcttcatcttcttctatattcttctgatcatcattgtcgcggttgtaggtacttgatgatcccaacaagaaaggttgatcactttagaattgaaacttgatccattggaatagcatttctcttatagttccaaaccaacatcgatgtgtaatcctgaggcgaaacgagccctttctatctaataaatcacttttgctcttctaaggtattcggttcatcgagtgttaagtacacgatcagaaacttctcgtgctcgggccatccaattacacgggaaaggcgagtaatcagtttctggtactagagacattcttgtataaacaa

SEQ ID NO: 45508 - DNA, 278 bp, Arabidopsis thaliana columbia
cggatttggaagttaggagctgctaaggccagaatgagcaaagatctacttaaaggcgtcttttagtgtaagtactgcttcaataaatttcctaatggctgaagaaatacttgatctcaggaacagaaaccattgtatctgccatagtagcttctactttgagggtttttcgcatatcatttcgtgaaaatatcatcaggcagtagggaagtttcatactatgcaactaaactatgtcttattccacatatatatgctttacaaaagtgacgtacttc

SEQ ID NO: 45509 - DNA, 596 bp, Arabidopsis thaliana columbia
tagaggatccccgtaacatgaagatattctcgattgacatactttatgcaggaaatactcaggtgttaagaagtggactcttggtctaactggcggccgagaccaaatagctattattagagcagggggaagcatttctcgggttaagggtccattaagcactcctggttcagctatcatagcagaacaactaattgagaagatccgcagtgttagaggtaggtctgtttattacgttttcatctactagtgtgctgttgtgttcgtcaatagcagctcagaactttatttcctctttcttttgaagagtccaaaaaatataaggctgccatcatccgaattgacagtccaggaggtgatgctctcgcttctgatttgtaagtagttatattgattgtcagtgctgtatgattttacctacaatatactcgtatgatttaacatttcttgaattgtttggttcacttctaacatgatacactcagacccattacttttatatatttttcgtcaatggaggttagaagttgaagcgctatcttttaaatcaagagaatgggttaagaatgctatattgagcatctagtaacttgcaa

SEQ ID NO: 45510 - DNA, 303 bp, Arabidopsis thaliana columbia
tatcaagttaagaaaaataaagctagacgaaaaaggtaggatatatatgcgttattgtattgatttctataactacgagggtagattatgtgttataatattagtaatgatgctaagttttttaaaatggagtagcaaataacaaaaacatgtttatacgggctctttcgcgagaggatctaaaaagtctacaaggaagtgattacaaggcatgggaagctgcactgaggataattgcagaagtcacttgtaaggtccgaaagtggaagtgtcatggaaaacacgttgatgagctttgcactt

SEQ ID NO: 45511 - DNA, 457 bp, Arabidopsis thaliana columbia
cttattagattccgagtatgatttgtttctctccttcattatattcgcggttgcttccacgatttcgttgcttgatttagttttttttttgaatttgatagggatggcgctaaagcgagggctatctggagttaaccggattagaggaagtggtggtggatctcgatctgtgcttgtgcttctcatatttttctgtgtctttgcacctctttgcatcgttgttggccgaggagtgtatatcgattcctcaaatggtatgcatatattgcttatctttctatatactaatttgcagattcatgtatagagattcagaaattctattaatgattgagaacattagcatagttttaccactctttagtgttcagctttacgactcaattttaagttactttagcttgatgtgacactgatgatatcagacaattgctatttttctagactggcaaaattg

SEQ ID NO: 45512 - DNA, 466 bp, Arabidopsis thaliana columbia
gtgatgaaactcaaaagttacaaaattggttttcatttttactagctcatttcatattacttgggatattccacggtgttaatgttagctaaccatttatctattagcatttgctatttagatatcatatatttcgagtgaatatgttgcaaaatgaaaataaacaagactaaaattcattagttttgttgccaaacaagtggtttttactaaatatggatattattattttgtaattgatttctatattcttttggttgttcgtagatattatcttaataatggcgtcatataaagtacaataggaaattatagaggattttggaaaaatatcgatttgaaatttagtgactaatacgtctagatcctcatagagttatagtaatcgataatatcaatatttcctagttatcagattttgtaatcttctttgctcattgttaacttctggggtatatatatatat

SEQ ID NO: 45513 - DNA, 605 bp, Arabidopsis thaliana columbia
tgcatggttgttatcttggaaatattattatgtttggactaggaccccttttggacttatgctacttcattagataatattcattctattattgctctgagattgtcagaattgtttggttacagtggggagagtgcttctgatggttcaagtgaaggaagtgatgggaactctcaaaatgtaagtttcggatagctatcatcagccttttcatttgaattatatctttgttggtatgcattcattctggcaaccatgttgtgatgaggcgctgtttcatggggaacacctagtttgtttgctaagaatctagcatgaatctgaatttggattgacctattcagatctgtcagtcccttggaatttctcatttaaattttatgagtgttgctaacacttggaatctgcacactggaacacataacctttgcgttccatatgtcgcctcatcaaacgtttttgttggatctttgggctcgaaaagtcttaatgttatttccgtctttctatgggagtgaggagtcttacagtaattatgactgattctgatttgcttgcaattcatgtatgattcgggatctggactagatggaaaggaaggttgg

SEQ ID NO: 45514 - DNA, 527 bp, Arabidopsis thaliana columbia
gggttaattcgtttttttggttcaagtagtagcttgcaatgaaatggaactttgtcttcggccaagctaatccaatatcgttgactgagttatactggtaatgttgtggctgagttaatcatacgctatggctgagttaatatctgttgtgtcttctgaaatataggttacggctgagttattataatgttgtggctgagttaatcatacggtatggctgagttaatatatgttgtgtcttctgaaatataggttacggctgagttattataatgttttggatgagttaattatacgctatgactgagttaatcatacgctatgactgagttatgataaaatttaacaagtaacctcaagcgataaacactgactttactgagaaggcgatcgtagataatattagatataaagccatcataaaacatattgagttcataggaatgagataaagggacgataagtaagagacacaaaagcattcaagacatgaaaccgacatcatccgggccaaattcagtaaacat

SEQ ID NO: 45515 - DNA, 622 bp, Arabidopsis thaliana columbia
ctgccaggtgagcggctggatgatctggctgatgagctgctagataatatgtctggcgagttgcaagatgaactgccatatgagcagctggatgatctgtctggtgagttgcaaaaaggactgccagatgagcggctagaagatctggctgacgcgctgcagatattctgccatatgagcagctggatcatctgtctagcgatctgcgagatagccgggcagttgaactgcaaaacataagttgcgatgagctgcaaacatgccagtatcatttggtttagtaagatacgtgagcttttcagcttattttaaggtgcgaggaactctcggcttatcctgttttaaagatttaatgcaagacgaggtctcagtttttacaaaacatttattcacataaaagcaagcgttgaactcggctcaatttataggtgtaattgcgagcgttgactcggcttaactgcgagaattattctcatcttttgaatgtagctcgatgctaggtaaactaggctttttgaatctggactcaatttagagtttaactcaacaatcaacaaatgtgaagattaaatgatacagtgtaagcatgaatacttatcttgatgggagcagaaatggtgag

SEQ ID NO: 45516 - DNA, 498 bp, Arabidopsis thaliana columbia
tcaaaacaaaaagacaaaaacaggaaaatagaaaaaagaaagaaaaattaaaaaaagctaaaatcaacggtgagaagattctgtatataataagaaaatatcacccaaataaaaaaaaaaggtggagtccacagataccgtccatcaacgtatcactgggctctctttctccgtgccgttcctcctacgtgctcgaataacgatgtgccacgtggtggaatcgaaggataaagtgtcgttttttacttcgattacacgtgagtgtatgtatgtgtgagtgagtgaagaagaacaaagagcgaagaaaccccccagcactcacttcatccataagatcattcaaattctgggatcttctctctttctctcattgtattcagtttcttcgtctcggttcgatcatcaggtatctttttcaattgaattttacttcaatttcgattgctttcggtgtttttgttatttgattcaaattgcaaattttcttttgatagatat

SEQ ID NO: 45517 - DNA, 553 bp, Arabidopsis thaliana columbia
ttcttctcagatgctcaacgagcaagtaaagaagaagaaagagactttaactaaatttatcgaccgtcccgtacgcgttaagatagtcaaaggcaccttcaccgtcattaccaattacttaacttggaaatatttggatctcattaacatatgggcctaaaagcccattaatatctgggcctcaaggcattttcgtgatctccacaatattttgcaagtctcttgataaaactcatcaatttatgggtaaaccatttttatgtaatataaggaaaatatatctgtttttagagatgtagaattttaagaacacaaacatagttggcataacagaaaaataaaactatatcaaagacttttttttgtttagtgtataagtgtacgaacgaaattgtttgtttagttacattgtcatagataggacaattgaaaaatattacatggtcagggaaccacaagattctctacgataaagaaagcttttaaagctctaaatttcagcgaaactgccccaagtaaatccagcatagaatatagtaatcgttcaatgtaa

SEQ ID NO: 45518 - DNA, 281 bp, Arabidopsis thaliana columbia
gagtttttatttattaaaaataaatgattggatgggtatgtttgtcttgtattatttaagtttgatatatatatttgggtagtgagctgttcttgggtcagaaagaagatgagagataaatagcaattctcaggtgttgtaaatacaacctcttctccatctctatctcttcctaccaactctctccgcttatcttgtataatagtcagcctctaattatcttggaatttcccagaaaaaatcaagttagattccatctgtgctctctctgtgatgacaga

SEQ ID NO: 45519 - DNA, 519 bp, Arabidopsis thaliana columbia
ccatctttatctctgtcattgtaatcctcactaacaccatcaaatctaacttttggtttattaagttgattgttttgaaactccaacgtaaccttattgtctttactcttatgtaacaatcctggtttagtactgtcaattgaagcaggtttaaactcatctgcaagcaaaattcaacataaaccaaacaaaaacatttccagaaatttttcgaatttctcatttgaatctcgaaaaccaaccaattaccattaagagaattgttacttacatcgtaaagtgcagaatttgggagagtatgagtgattgttgttgagtagtgttggtcctaacgtaatgttgtaccaacgattaggttctggtgcgatttctggttcttcattgtgattgtccatttcttcttcatcaaattttcaaaatggaaacaagaacgaaattagtgaatcgtggtgctcaaatcgaaaaatccccaaatgttaggagtcgtgtttgtgttcgattctttgacgtgggcttagt

SEQ ID NO: 45520 - DNA, 473 bp, Arabidopsis thaliana columbia
cagatcagccacctttgtgaccgattttacgtccatcgtcgtttccaggacgattccaccaacatgcccatcttaggcttcacgtcttcacctcgccaccgatggtcttcaatttacgaaagcttcacatcatcgccacacttcatcaccacggaccatgtgtcatggaggcatggaacgcaacatatatcttaatcactaagaacgcaacaaaaaaggtcgttgtttagatttaacaaaatcaactgtaacccaagtcaaaagcccaaaataagtttcaatccctcgatgaatgccctacacgcgtagtgctataaatacagaatatcatgtcatgtcaaaaggggggaatgccgtctcacaaagctcgtcaactcgtccgtctcaagtagcacgtcagctcgtccgtgtcaagtagctcgcccttctcgagtagctcgcgtctcttcgtcaagcttctcaactcgttctct

SEQ ID NO: 45521 - DNA, 524 bp, Arabidopsis thaliana columbia
caccatattaggatacttagctttcgtactacttaattctacttacattgagatcttgagttagttttagatttttatgagataactattttaccaatgtgcatgcattcttaaatccattaaggcaaatctttaaatttttgtttatccaactactagtcgcgaagggacaatcgttcccaccgaaaaccctctcttctctctcgtcaactcagatcgtagatctactttttttctcttctttctttttcaattaaagatcttcatcgtcgcttgatgggttggagggtgaaacggtggtgagcttctttcttctccgatggtgtgaggtgtggtttggtccaggctcattgcttgacggtggctctccttcacggtggcctgaaaattggttcctttgttctgctagttattgacgacagcggattggttcttgttattagggtttggcgatttgtgattgtacacacgcgagtacggaagttgagttttaggataggtgggttcaccagtttgtgaagagg

SEQ ID NO: 45522 - DNA, 572 bp, Arabidopsis thaliana columbia
atttcatactgcatagtctttcttgccatatcttaaatgtactagtaaacttgtttaaatttttactgtaatatttgacgcgattaaattcattttatgcaatataatccggagaatagcataaacagttcttctaatatatattacatctcggattttatacaaagatatcaatatcatttttattcatagtctctatatagtatccattactttggatatactttgaaacttattaagtttctatgaaactatctacaatagttacttagactacatacaatggtcatttttctaagcagttgaatgaaatacaatgatttattttttaaaaaataaagcttatgtggaggcaacaaagctgaaacattacaacatctttgaactctttgaagtgagcttcatattgccacatgtcatgcatttattgatttgttttttagttatataataaagattagataaagatatgtgtttgatatctattggacgttaagattttggaaatttgttatccaaccgatatttgaaattgattatatcgtagaatataaaatattgttttaatattt

SEQ ID NO: 45523 - DNA, 518 bp, Arabidopsis thaliana columbia
aatacaaaaagattggagggatgagccaaaaatcaataacaacatgttgcgatctattatgtgtttcaatgagaaaaatacttagattccatgagagttatatcaatctcactagtagaaaagacaagctatataaaataaaaacaaggaaggattcatgcatagatagaatcagcatataacaagttaaggccggcaccactactatgctagaggacagcaccggaccactcaatgttcgctgaaacctcccccatccctcgggtctatggcgtctggtcagagaaagctcggcataccaaagctccaaaatgtgatcaggccgccgggcttcccagaagatggtcaacctctgagcagagaaggcgcaaagtttaatgatattaaaagaagcacgtcaccaccagagttagagtgtcgctgctgcaaatcttccaaacccttgacttccttccaatcagtttcctctggaaaacgccacagtattttccggacataccacatcagaatataataat

SEQ ID NO: 45524 - DNA, 563 bp, Arabidopsis thaliana columbia
cacacaaaacgaaaattcaatcaagccaccgatcatattctcaaatttcatgatgattttaaaacaacccttttccaagggtttgtcatgcaattctcaaagaaaacaaaaagaagaagagaaattaggaaagtagaatgatagtgtatattaccgactgatagcgagatcggctgcttcctctatagattcggtacgatgatctgagagactctgaacttgacttgatgattactttacttgtgatatcgatataatttaagattatatttttagtggagcaatatttattatcaaaaaaattcggaaaagcaaatgtttaaagcgaaagtttaggtgaatatcggattttgaaatatcactagaatttttttaagatcttttccagcattttaactataggtccaacgtgctctaatgggtcaccggtatcggcccataacaaaccaacaacaacaacttctgatttattttcaagactcgtttttttttcttttcttttcagttaagctagacttttatcaacatcaactttatattagaagtgttagcatcagttttta

SEQ ID NO: 45525 - DNA, 483 bp, Arabidopsis thaliana columbia
cttctcagctctttgtctatcctctaggctgcaaaacaaaaaaaaacccggcttctattagcctttgcattactttgggattagtagtcttagggaagctaaccaaaagactatgagtagttagtaacctgctcttttcgaatccagatttggacatatcacccatctccagcgcgtatctatcaggacgtagacgtgaatcagatgacagtagctttttaggggcagtgtcaaaactattgatcttgtgagcaaaatgtgtgtattggtatttatcgttctttggagcttcagcaaccttccacacctgtggaagtaacataattagaaaggtgactagatatagtatgcagagggtttgcttagaggagagaaattgataaaacctccttcagttcggtgcctggaagaggttcgccttccgcatcacatggctgataactcaaggactcgttccattttccggtcattagcagcttgggc

SEQ ID NO: 45526 - DNA, 461 bp, Arabidopsis thaliana columbia
cgtcaatctcttttctttaatccattaaaaacccaatttttaaatatattccacaatttaacttttatacttaaaactgatgacgtggctgctagctttgtatggataacttggcaaaggtcagaaatctgaagaaaagctttgagcagaaacatgtccatggagctcaccgttctcggacccctcgccggtcggagtttcgcaatcgccggaaaacctaaacttctgcttcttcgaccaacaaacctccctcttctccgtctctcactcccgctttctcttcccaatttctcttcgtcctctcgttttaattcgcccagtaagttcttctctccctctcgctccaacttcaattttagatttcaaatttgtgtaaccaatttcttccgaatttcgtttcagtagtattcgctgcacaggagagtaacttgagtgtatccacgaaaacgaaaccagtgagt

SEQ ID NO: 45527 - DNA, 348 bp, Arabidopsis thaliana columbia
tcacgtttctacgaaacacctatcagttgcgtttaatgttttccgataacacatctagctaaattttgtaattgcttttaatttctttcaaacttcgacttttttatacaaaagagaaatatctgtaagtttctagaatagtatctgatggtaacttaacagacttacgataatttcacagacttttaaaacttaatgatgtggaaaaatcatcgatgtggggctgtccgctggagagcaaagctcctgcaaatcaatgagaaaaatgtagaaatttgtaccattggcgtgatactatccatcaagctagcatatgctaaagccgataaccttaaacacaagccttgg

SEQ ID NO: 45528 - DNA, 557 bp, Arabidopsis thaliana columbia
caacgtagatcatctcagttttactactgagcaacaaggacctgataaattgacaaagaaagagaagcaacaagcacctggtgaattgacaaagagggagcagcaacaagaacctcgtaaaaaaacaatattatgtggttttggatcgcttatgaggaaaggacggaaagttaaggccacttcagagtttcttgatcatgaatggatgatgcagagggatcaaccaagagcctgataaccaacaagctcttgaattttctacaaggacacggcaggcacttcagttcttgccagagtttcatggtcaggaatcggtgaagaaagcacagggaaaatctcaacccacatccaagttccatggatttacttcagtagacatcagcaggttcaggtacagcagtgatggtgcaagtttcctctgttttagcctttcgatgttcccctgcgtgaaagagttaattctaatcaacctaaacattaaagtgatcccagatgacgtgtgcggcttgaaattcctagagaaactggactggagtggcaatgattttgagacttta

SEQ ID NO: 45529 - DNA, 431 bp, Arabidopsis thaliana columbia
tgcttgaggaacatctgtagaaggaaaagcaagtcagtgggggagcgaagtcgctaagtgtttaatcagatgctagtattcctgcacaagtggctattgagaaggcgatggaatcagtttgtcttattacggtcaatgagggtgtttgggcgttctgagtattgttcgtgacggaacgtggtctcatactaacaaatgctcagctgcttgagccgtgtaggtatggaaaaggtggtgtatatggtggaggatttaaaccctatgtcttaggagccgaggaattttcttccacgggaagtaaattttgggaacagaagagtcaaacattgccacggaaagctccacgagatcattattcgtctgttggagagaacatcaggggaatacagacacaatttccttcagactgggcatagagacctacgtgtgcg

SEQ ID NO: 45530 - DNA, 478 bp, Arabidopsis thaliana columbia
gtaactgatcatttaaccatagataattcagatggtagctttgtgggttagattaaaagacacttgtcatcaacttgttcggctatcaacgcatgctattagaaagaagaatgaaatcattgaatgaaaattatgtaaattgcttgaaattttactttatgtaagttgttaccatcccattgacttttaattacacaaacaaatataaaagtctatgattaaaagaaaggtgatccactagaaatggtggaaatttcctattcgggcaactaaccaattcttctcattgattcttatgtcgtcttcaccactttaacggtggaactttcctatttggatgagtgattattatttcttttgatttttgtatcatcgtcacaagtcacaacaataacaagcaaacacatcaattaaaggctaatcaatcaatcttttgttttgtcttttcctagtggacacacagaaaacagttgcaaga

SEQ ID NO: 45531 - DNA, 528 bp, Arabidopsis thaliana columbia
ataaatattggtaaaaccaatttcggattatgctaaacgtttgttaagaagctatagaatagaattgtgtctaatatgtctaaccatgtacgttagggtttagactaagtaagtagtcaagattcttaaacaaatattttgattaccaagtactaaccactgtccaaatgtgaactttagaacttgttttctaccaaaacatagatttaggatgttatttatatattgaattttttgttatttttttaatattaaaaatgtcaaggattatccttaaagaagatggtttggaaaatccatgcatgtgctgtcggtagactgtgtagtacggatctctttggagggacatgtgggggaagtcgtggtagaattatatcaataatttggacaaaaatgtagacaaataaattgaaatttagaaaagcgggaagtgcgtgaagagtgcacatttgcttaagttgtatatcactaacagcttatgggggccttctgttacaggcacatgcatgcgattgccaaagttttttt

SEQ ID NO: 45532 - DNA, 579 bp, Arabidopsis thaliana columbia
catgaggaggaggaacgacggcgattggtttgtttgacgttagccatggctgacgaatagttcgtttgatttgcttgcgtgcggcggtgacttaagagagagtgtgtgtgagagtgtcttgatgatagtgtaagtgttgtttgtagggtcaattatggaaatttcacttaaaccctttcttcaattttctatttgttcagtatttttctcttgtattaatttttataaatagtacaattttaagttttcttcacaaaagtaatattcaaaattattttggacataaataatacctaaacaattattttattttaaattattaacattagaaaattataaaactcacaaattcatcgccaaatatttccagacaatattttttcgaaaaacaaatttttgtccacaaaatatttgagtgctattgttgtcatttttcctttatttttctaggtcacatcattcttttgggtatttttgtcaaagatctaatgtaaattatccataacactctatagttagtaaaaagttcgtaaaacatattatttacaaaaataatcttatatgaatactcaaaattat

SEQ ID NO: 45533 - DNA, 572 bp, Arabidopsis thaliana columbia
tgaattatgatacatttattatgaatttttgcatgctcgatctgatttccttcgctgtatgggagtgcataggcctattctagcatggggtttctcggggtaaggcttgtgcttttccttccatataagactagctatgtgctccctcggtacgcctgtattcctttcgtggattggaacctacgtactgttgtactgaagcgtgatgtccgccacctgcaggttggcttaattctcgtcaagttcgctcgtccaatgttacgattggtaagcctaattttcccgtttggctacatttctggatcggagcacttgatttcacattttgattttgttctttgaatgttagggttagggtttggttacatggaaactggataagattatcgttagtggaactctaaagattgatttaagcagaatctagcttgtgtttcttgtttggttcacattttgaatttgttcgtcgaatgttagggtttagggtttgatttgatggaactggattagaatctcgttagtggaactggattaattgattgatgtaatagaactagagaaactaagagtgt

SEQ ID NO: 45534 - DNA, 506 bp, Arabidopsis thaliana columbia
tgtattcatctcttcttgacaatgtctcttagtattcatggattcttgttctatataagtttatgtattccagttatattctctgaaaccctaacgttagaactgtttttgtctcctcaccgcagccgatattcacagcggtcgaacttatttgtcctccttaacgcagctggatttgatgaccattaggaattcagttgttctctatcgaagagctatcgtttgcagtgttgcgatgcgtctgcgattataaatgcgatagtactcggaaggtattgattaagaggagattttgattcacttcgtttgttgtcggtgacaatgaatcgagggtatgtttcttctatgtgtgcttacttaattctatgaactgttcttagggtttctttaacaccctttcgtttcttgaattaggggcttttctctttacagcaaaagttgtggtcaaagtttgagtaatgaggacaggatcagtgagctgcctgaagctttgcttctgcagatat

SEQ ID NO: 45535 - DNA, 452 bp, Arabidopsis thaliana columbia
tgtgctctaaagtagcactatcgatgtctgctggaatcatgtgaaacaaaaaatgttaaaagaatccattgaaatttaaaggttacgcatcagaatactaaccagagaaaggtggttaaacagttcttcttttgatggcaatgaaaagtatatttctatcctctctaagttgtctggtaacccatgattcttgtctgtaaatatgcatgtgatacagatgccatcagcagattaattaaggtgaactgcaaatgacataaaaataatgtttttagcatggacgaaaagtaccattggcagtcaataccacaggcccttttgctttcacagcaatctgctggatagcagaaacgagaccacgatcttcagcaaagcaaatatctacatcttcgaaaagaattataggcttcaagttagctccatcattctggatatgtaatactgggcatcac

SEQ ID NO: 45536 - DNA, 578 bp, Arabidopsis thaliana columbia
taatggattttaataagttttgatagaatcatatttagtaaatatctgttttcatacataacgtatgtacattggacaatcatgaactatatgttccttgtcatacataggtgatttattaggaaaccagtttatgatcaagtttattaataacaatgttgtaatatcatattttggatttattcaatgtttagatgttgataatagctgaaaatattgagaattattttatcattttgttaatcctaaaatacagatacatatatcagttgtctcagttgaacttaaaaaaatacattaaacttgcaaataattcaataaacttgcaaagaattcaataaacttgcaaagaattcaataaacttgcaaagaattcaatacaaatacgaaaacataaaacatagtacatcacacttacaaataatataatgcacatacgaatgaacttagttgtattggttgacccttcctcaggctgcagcaagcctccaagtttatccaggttgcgatttcacctctttcgcgcttcacagctgatggaaccgcttctcttgatttcgtcatggtccttttggtgt

SEQ ID NO: 45537 - DNA, 411 bp, Arabidopsis thaliana columbia
cgccagtgtgctctaaaggttgctgtagatgcattatttcttattgatttgagatctgccatcaacactctataaagcaaaaactgcatcgagaacatcgaaggctgatgaacaaaggtctccaatccaagcgagttatagttaaaactggttcggtaaaattatttcaactaatgcatccaatcacacccaaatatatctcttatgtttccccgaagacactataattatggagtatatgtagagcagtcaagctgatcatactcgtcccgcgaacgatattttataaagcttttgtctaggaggtttagaaaaagtttataagtgcttcttggtcccggttttggtttaatgcatctaatttttttgcaggaagctagatatgtattggatgtcgattatgctaaatga

SEQ ID NO: 45538 - DNA, 425 bp, Arabidopsis thaliana columbia
ggaagatggggagctcgcattcgtaagcgagggaaaattaccgccaaaacacattcaaaaatcatcttgctttaccttggatgaatacgtatctatacttgtatccatggtaacaaatccacattcaagatataatgaccaacaatatttctcaatttttgaggatccatgacatgacaaacaatactatataccacatgaattacaacaaatgtctagaaatgattaaaatagtaaaatgatacatcgaaaacatttgaaccaggaagatggggaaatctaattcggatgagagggaaaattgccgccaaaacacaacaaatatcaactttttttttgggaaacaaatatccacgcagattgtaattctttttttattactacactgattaaaaaaattaaatatattttatacaaaacaatca

SEQ ID NO: 45539 - DNA, 537 bp, Arabidopsis thaliana columbia
tgctcgatcttggggatcgagtaaagagggtgctgcaaagtctgcgcctttgccttcatgctccgagtgatcaattggccgagtagatgcttcgtcctctcctcttcttatgctcagatgtctggttgagtggcgaatgaggaggatccaaagacgctttgaacgatcaacaagtcttgtagaatgggttgcccttgatcgagtacttggtcgagtagaggatcgagttgatgtgctctgtaaattgaattgctctgctgttttcctcctggtttgatagagtagagggtcgagtggatgtgctctgtaaactccttttgcacctgaaaacaccaaaacatgcaatatgtatgcaagatgatcctaaatgcctaagtgtgcaaaataagctaaatgtgatgcaaaatgatatgaaacaatgagtgatcagtaagctaaatgatgataaaaacatgcctagaatgagtaaaatgcagtgtcatcaactcccccaacttatcttttgcttgcctcaagcaaacaaaaaactttaagttg

SEQ ID NO: 45540 - DNA, 483 bp, Arabidopsis thaliana
  unsure (1)..(483): unsure at all n locations
ctctctacattaactacacgattggttaataaaataaaactttcaaaatatttaatatcatttaattactacaaaattatcattattgatattgtttttctgcatgactattacaattcaattataatcatcaaaccgcagagatatttgatagcatttaattactacaaaattacaaaatatttagacaatgattcataaacatatgataaataagatcaacattaataaaataaatgaatttattttacgggacgggttagcgggacgggttagcgggacgggtttggcaggttgttacttaataacaattctaaactataaaataaaaatattttataaatagttacatagatagttacaaattgtaaacttttatatatactacctttaaaatataaattgtctccgcggtataccgcggntaaaaatctagtaacgcctattatggtttgaaatatgattcatcacatattatatata

SEQ ID NO: 45541 - DNA, 510 bp, Arabidopsis thaliana columbia
gtaaaattggaaatattaagatgaatataaatattattgtaatgtggtagacaaaaaaaattgagtacgatacaaactctataccatataacctctaaaaataaaataaacaaaataaaattgagtacaatgtaacctacatatcatataacctctaacaataacattatacaatcaaactcttaccattactatatgacacaataattgtcttaagctcatgcaaaataaataaaaataatgtagatttacagatttgaaaatatggtgaaggacgatagtagaatgtatatataaagatgagaagtggtaaaactcttataattaataaacaagagttacaaactattattgattggtagaagtctcaattgagtttaaatgtagagtttaatttatagcggaggagttacaaatgaatttacatgtggagttcacatgagtcactccccctttttttgtaatccgcaattacttaggactaaacgagccactcctgaggcatgttgt

SEQ ID NO: 45542 - DNA, 466 bp, Arabidopsis thaliana columbia
aatctaattcaccaatgtggtactgatagcgtagagaatagtaggctagaaacaacctagcagattctgactattatagagcccaaaagatggttctcacctacccttgcttcatacttatctggttagaactaggcgatatatatatattatgctattgtattggcctttattttactatgcccttccggattttccttctaatacaggtctaaatgattcatggatatgtattacagaaaaacttattttccatacgagaaaacccaagaaaacctaacaatggagtgatacaaaatgttataatgaaagggaaacaaaaaaatggcttgctcgtgagaaaaaaaaaatctctactgaaaacatcagacccttggtctttacggcggcgaatcatggtgaagttatgatctaccccatgaagtccttgaacttgtttaaccaaagctacactcaatccatgaat

SEQ ID NO: 45543 - DNA, 519 bp, Arabidopsis thaliana
cgatccccggtccaccataacctcctccgcagtcctccaccagcacctcctcctacaccaccaccggcacctcctcctgcaccaccaccaatacctcctcctccaccggcgcctcctcctaaaccaccaccggcacctcctcctgcaccaccaccaaaacctcccccggcaccaattcctcgcccaaaacctttcccaccaccaaagcgaccgccaagtccaccaccaccaccacctcctaacgtctccttctcaaatctcctacactccacaaccccaatcaccaccactacaagcatcaaacccaaaaacccaaacgatactttccccatatcttttagtacgtgttggagtatcgtgttattcactatacaattgttatagctcaattgactaagccaataacactatatatagccagtacaacgaacatttatgagatatggctgagagagcttcaagctctttttcacaccgcgtttctccgcatgttctcatgtcaatctctcatgctcaaat

SEQ ID NO: 45544 - DNA, 515 bp, Arabidopsis thaliana columbia
caatctaactatcattttttacaacaactcatgtacacttgactgctgttatccaagacacaacactcatgaatctcagtcgatttcaccctcttctacttcattgccgggatctggaaacgcaagcatgtcggattcatcttcatcctcctcatgtttcataaatagccccagctgctctagaggattacttcctccaaacccaaatacagccaacccatcagactcagagccaacatctcttagatttcgtaactggtccgtgttaactgttttgagcagttctaggtccttgagaaaccttgtgttctcatttatttcaaccgacttctccatctggtgtaccattcagtcatggcaatgatcaatatacatgtattgcagtttataaaaccaaactggtacaaggcagcaattttgatttactcaagcaatgcctgccgggctgcttctctttcaagtccagtttcctcgtagcctcttgtgcctcagcttttctacgagcttcttcagct

SEQ ID NO: 45545 - DNA, 610 bp, Arabidopsis thaliana columbia
gatatgatatcattatttgatcaccctcacgagcgcgtggattttaccgtctggtcgctgcttttttaatcctctcaatcagtcaacggtcaacgagcgagaaagccgctttcgtaatgaaagccacattacaaaaagccaattatgcttgtttgtgtgtttttgaaaaagagcttcttttacattttctttactttgaaactcgggtacacaaaatctctactcaattatattgtcaactactaatctttagtatcttttaaagtagaaactcagcttttatctatatttagtaaaacctcacatgaatggatttgggtgaatgagtttatcatatgtataagaatctaatataatatttgaaaaacgctcataggttattttgtaattaagaatagtgacaacttacaatataccaaacggaaaatgatagagaaagaacaagagacttggacttttttttttcttataataaatcaattaaccatggttgaaaagggatgtgaggtgaaagtaataactcctggttttaattttacccatggttaagttaaaataaagagagaaggaagcaggtttttatgcagtatatatcacattgaggtacaga

SEQ ID NO: 45546 - DNA, 305 bp, Arabidopsis thaliana columbia
  unsure (1)..(305): unsure at all n locations
cccctccgtgaccctactaaggcctcggggaagcgcataacaccctcagactcggaagcaaagaataagaagaaaaacaggaaggaacgtgagactgctgagaagctagtagagtctatattcgaggataagacggtatcgagtaatgttattggggattggnatgggttttgcagtagacgttgacgctttgctggagtangagttgtatgtaaatgaggcatngaactttttaagggtatgtctaaaatttttatgtaggaggaagagtttgtagaaggctattatgtgtttgttatatttgt

SEQ ID NO: 45547 - DNA, 567 bp, Arabidopsis thaliana columbia
cttgcaatttcggagctaaaggcgtgaacgcgatgctcgaacattgtaagcttctggaggaattgtcggtgaagcgacttcgaggaattcatgaagcagctgagttgattcacctacctgatgatgcttcatcttcttcgctcaggtctatttgcttgaaggagctcgttaatggccaggtatttgaaccgttgcttgctactacaagaacactgaaaacactgaaaatcattcgttgtttgggtgattgggataaagttcttcagatgattgcaaatggtaagagttctttaagtgaaattcacttagagaggctccaagttagtgacattgggctatctgcgatatctaaatgctcaaatgttgagacattgcatatagtgaaaactccagaatgttcaaactttggtctgatttatgtagctgagagatgtaagctgctgaggaagcttcatattgatggttggaggactaataggataggtgatgaaggtttactttctgtagccaaacactggttaaacttgcaagaacttgtgctgattggtgtaatgcacacatatgagt

SEQ ID NO: 45548 - DNA, 476 bp, Arabidopsis thaliana columbia
caaaggacgaaatctttataggttaatgaccttgaggcaggtgggttttcttttctattttttcatattcagtcatgagtcttgccggtttgcatatgcttatcagttggttgctccatttcttattccagcgatggccaaatgaagaagacagagtcaaagttcttaacgaaaagcataaccgtggtgccgcagcaagaaaggttatgagagaaaggaaaattaagtcaggctatgtactaaaaggtgagagatgatttagttttctttgttatagaggtgtgtttatatatatatgagaggtttcttttagtgatctttctgtttctgttaccagatggaagacttcaaaagcctggtcatgtgaagaagccttgtcaagtaaagacaagaaaatacgagaaagatgagaatctaacccagaggcttagacaaaacactcccgctaatcattcacttgttgcttttcaaaccaa

SEQ ID NO: 45549 - DNA, 403 bp, Arabidopsis thaliana columbia
aaaaaaaaaaaaaaggagagaaaatccaatgctacgaggaaacgagtattggtaatttccgtcgcggcgaattagggttttccgacagagttaggggtttaccggcgaattgaggagagaatcgcggtaaacgggtcaacaataaatctctagagttgagattttgattggatttttttttcgttgttgcaaacttttcaatgaattgagggaatttaaggacagatcgttgtgttgtgtattaacgagggtgtgatcacctacggatgagcgtatcattaagtttttgggccttttgtgttgatccgttttaacttgtctgggcttaacaccttagttgatatatttatctcaataactacttcttcacaatagattatatctcacacgtttatatctcaaa

SEQ ID NO: 45550 - DNA, 595 bp, Arabidopsis thaliana columbia
tgtccacctccatcggcatatggttatgggcctttggttttggaggagttgcaatgtgttgcgacgattggcctgactttatcgatggagcaaccatctctggcttgggaggaagatgactaccgtgttggttcacttgatatggagctctagccacagccctgaaatcaaaacaattaatcaacatttaagacaaagtagatattgaagttttgatttacaaagaactcttagttagtgttttttaactagaaatttctcgacattttactaataattttcctagatcaaggacacatagatgatggactcatatctcttatatactactctaggtcccatctcgaatttcattgtaacttgtaagattttttacatgttctttataaatgatgacacttgagtcacatctcgaaatcttactctaggaatcataattcataaacatactaggaccaccctatgttcaatttcatgaatgttcacttaaacttgattggtaatacgcttctaatccgatgtgggattctagaatactcgaataagcttaatatggtaatattagctattttacatatactttttaagaactttg

SEQ ID NO: 45551 - DNA, 488 bp, Arabidopsis thaliana columbia
ggctgcggcgtagagagtgtcaacattttctcaagagacatattataactaaaaagaaatgaacaaaacacttgacattagtgtgttgaaaactaaaaaaaaaagaagaagaagaagacttatgaggattgttagacgaagatgtagcctctagaggatctttattttgtactcaacttggcaccttggtgtgtcaatttcgacacaacagttctatcctccaataaattgaaatcacaccgaacattcacacacacaaacatacacacactttattctcaatttattacgatggtttaaatgtttactagagagcagaaaaatattttaaattcaaaaagagaagaacaataaaaaaaggttaggcgagcaaaaggaagatgatattcctaagataccttttcttttcatggcttttccgtcactcattctgttcccaaaaccatggacaacattctcatatttttggatatttagagagaaaatta

SEQ ID NO: 45552 - DNA, 608 bp, Arabidopsis thaliana columbia
ggaattatctgtaaaaaaaaaattacacaaatatgtctaatttatgacattagtgcgtttttcacattttctttcgaaatccgcaaattataaagtcaccattcactgccttaggtggtgaatggtaatttgtaaaaagaagttttcgaaaattactatcaaaccgcagtagtgttaccgattactatttttgtttaatccaatttgtgtttttttctaaaaaaatagtttacggttttgtccaacggattataccgtggaccccatttcaaaacaaagcagtctttgggtccgaatggtaacagcgtaatttattgtttgggaaaagcggttttgtaattcggtacggttcaactgcgctacgtgcgagaaaaatgtatttgcgggacaagtgcggttagtacacaataagcggtagaaaataaaatttgattggtgaaaatactatttacggtatacaataaaatgtttgaattatatgaataatgattttttgggtaataaagaaaattttcgtatatttatagattttaaatatacaaattgatataaattaacaatttctatctttttttgtcgaaaataggattatattaatgaatttaaaa

SEQ ID NO: 45553 - DNA, 543 bp, Arabidopsis thaliana columbia
gagacagcagatttactagagaaagttgtgtaccctagaagaaatcactcactgtgcagctggagtaaaatggtttaagtatctatgtgaacggtccaaggatcctgaattcaccatcagcagcaaagaatcagatgatagcaatgaagagataatcaacaagtttcattcggttgtaagggagcatttcagaggaccgttgaaaccgccttttaatgctgaagcaagaaaagctgctggctttggtcctcaatggtatgaacctcttgctgtcaaagagagcaatgcctagcaaaatccaacaagtctactgcttttcttcttatcttttcacatacttgatgtttcaacactgttgttaccaacttaccacggttttgtgaaaggagcactcatgcttgaattcagtatctcatgtaactttaaccttgtaatacatttgtttgacttatacaaaggattcaagaagcagtctttcagttttgtgtcaactggtcttttcaaggatgcgtgaaatagcaaaaacatatgaagaatggagtt

SEQ ID NO: 45554 - DNA, 532 bp, Arabidopsis thaliana columbia
taaacttctctctaaaagtctcccgaatactagcgagtaatgtcttgacaacgcaaccatccctctcaagcgaatggtgctattctatcacaaccactcctataggggaaggtgcttcggtttcaacaatcctagctattcggttaacaacctcaacaaactcaaccacaacaaccacaaaactaagagaagggagaatcgagaacatgcaagaaggaaaatcaaacatgcaaaacaaaaaccggaactcactctctcggactatcctaaggctcgacgatctctagcttggactctctctctctctctcgggttaagggttcggacgatctctctctctcttgggtggttttaaggttcagacgatctttctttctctctcaggtttgggcagagttttggtgcgaaacgttctaaggtttaactaagggggttaaggtcctatttataggctcaaggttcggacatatggagtgggatgagacttggtcactaagtcggctttgggatgaaacttgctcaccaagttggc

SEQ ID NO: 45555 - DNA, 1181 bp, Arabidopsis thaliana
aggtacgtaaaatccatagagagtgtttgagttaataatttttttccctttctctttgtttttttttgttcacatctctattgtgacaacgttaagtgtgatgtaatctgatgtctaatcaataagaagattattcaaacactaaacaaattctgataacactaatagtaaacgaactacattcaaaacattgacttgactcgaagctcacacatgtttgctacctagaaaacttagactgaaaatagattagatcaatcaatccagacgttgtgtccacaattcctccattgacttatacagctggagagaagtttgtaacctaagaaaattataaataattttttctttccacagatgtataaacaagagaagaacatgcttcaaaaatcacgttgagcccttagacaagagaagtaagaagaggcaagagttaaaaaaaaaagtttcatttctgaagttgcattgatgaaatcagagttgcatgttccctaagttaacagaggagacaaaagatgatgataagttacattttagaacacgaccatatttcctcttcagactcgccacacaaacctctataagcgagagaaagaagctgaaaaacccactctcttctttatttagtaagagttttgccagagctgctgctgagattgattcgacggttgaccagcctgagacccagcaccatccctagggttttgctgctggcgctcgagtgacatttcggtctgagactgataataatttgggtatccatgagatccataatgctgttgttgctgagcttggcgataccctcccgctgcttgctgagcctgctgttgttgttgctggtgttgtagttgcagttgttgttgtgcttggaggttgtaatacgtgttagtcgggacacctgacatggttctggaaccatgaccctgatgccacatcgccgagttttcgttctgtatatttaagtcaaaaagaggaagaacgtcaccaaaatggttcatgcctgaaaccaaacgaaagtggcaaggaagtgaccaaaaagagaaagtacctgttgttgatgttgctgttgttgctgctgctgctgaagtgccacagatgattctctttgtattgagaactaagaacatcgtcataaccaagcgttgtaccggtagtagcagactgttggttaagagggaagt

SEQ ID NO: 45556 - DNA, 575 bp, Arabidopsis thaliana columbia
gcggttatccggacggttacttgggcggttatggtcgaatggctgcttgcccaaagggtggagaagggcgagcagttaagggcgaagagatacaactcttcggaaaggtgcaactcttcggaaaggtgcaaggaacggatgtgttgattcggaaagcatctatttgtccccctatataaggaacgactcccatgaccatttgggacaccacaagacacagaaaaacaccggaaactcaccattaaactctggccctctcgggagaataaatagtcggaggattcggtagctggactaccgaatcagatcgatcgaacaacgtgaaggaaggttagggaatcctagacctcgagtctaaggattctaggatgcgttatagatgagtcgggattccttgaaaggaacgactagtgggttgggtagaatcaggtcatgtgcatcctacacaagactcggtccaggcaagggatcggctgaggcggggaccggctcagcggaggaccggcgggtcttaactaacctgccgagaatggccggactgatgcgcgtgcttggttctaggactaggtattggg

SEQ ID NO: 45557 - DNA, 595 bp, Arabidopsis thaliana columbia
  unsure (1)..(595): unsure at all n locations
tcatcatttagcttagtgatcactcattgtttcatatcattttgcaccacatttagcttattttgcacacttaggcatttaggatcactttgcatacatattacatgttttggtgtgttttcaggtgcacaaggagtttacaaaggcaatcactcgatcctctactctatcaaaccaagagggaagcagcagcgcaaaccactcgaccaaacactttatcaaggcagctatggaggaagcagcagacaaccactcgacccttttactcgatcctctactcgaccaaatactcgatcaagggcaacccattttacaagacttgttgatcgtgcaaagcgccttcggatcgtcctcatttcccactcaaccagacagctgaacataagaagaggagaggaagaagcaactactcgaccaattgatcactcggagcatggaagcaaaggcgtagactttgtagcaccctctttactcgatccccaagatcttcaagtctcttgtcttctagtgaatctagggttttcgagattttagtataaataggttctttggggtttgccaaagaacaagcttttatctgtagtnttctttgtgt

SEQ ID NO: 45558 - DNA, 508 bp, Arabidopsis thaliana columbia
ttaatgcgttgatctcgaagcagcagagtaaaatgtaaaagttggtgagttgaaatcacacaaagaagagaaaataagaaagataataaaaggacgaggcaaacacgaagagctcacaacgagattcatgctttcagatttcaactggtaagtctaatctgtataaaccttaattattgcaaatcgtccttgttcttatggaatctacaattctttttggtatctttttttatgtgtcactttgttgccgagaaattttactaaaactagtaaagctaagctctttcggtcgtttttcatgttcttcttcatctattggatgccatggaagtagaaatcttcaggaatcttctttggctttgattctgagatttttgcaatttgaaagtttactgtgatttttgagttgtagtgcaatttaagggtcaaaggcttttgtgattttcttggatatttttcttgtgattttgagttgtggtgtttctcttttcccgttgttgggatgttg

SEQ ID NO: 45559 - DNA, 481 bp, Arabidopsis thaliana columbia
tttgctctgaccttaagtcattggtcattttagtcactttgctggtatctttgagtagcactgaaagattttgctaacattacactattcacgataaatcactttttcagatttaagatatttttcgccggaatttagaaggtaggatatcctttaaaatgcttttgtgaagatggattatattatacaattggactatttggtgtagataaaatcttatgtgggaaacaaatattttaggaacactaaaccaaaaataccattgttacattttttaatgataaaaaagttcacttgcaaatgtaacaagatacaacctcgttgggttgatatgttaagaaaactagctgatggattggtttatcattgggtctattgggccaatgtcatgggcctgatgacttgtattcagtttcttacatttatattccagtttaatataacatactctttagtgtgtaagcatttctaccacgcgact

SEQ ID NO: 45560 - DNA, 286 bp, Arabidopsis thaliana columbia
caactcattaccccgatagtatttagaaagcgatgttgtttaaacatgaattaattgattcaacatcaaaattctggtaaatattggttggtaaattgttcaaaatcgtgggtagaaaattaacaacatttcttcgtttataaactaaattgcacgtttttattagtatgtgttttattttacataatatagtttgtcatacttgtattatatacactatacattataaccgtaattccatacgaagaaaacacatattataaccgtaaacccaaattacatatct

SEQ ID NO: 45561 - DNA, 149 bp, Arabidopsis thaliana columbia
tctatatcaagcatgagatgcagcaggccgcggaagagaccgatgaagacgaggacgaaggcaactaatgttcctgcccgtcaccgagactggccgcgtcccagtgttgccacagggccagccggtctttctgactgagccggcggggg

SEQ ID NO: 45562 - DNA, 606 bp, Arabidopsis thaliana columbia
  unsure (1)..(606): unsure at all n locations
cttctcgacttttcttaaggataaggtgtactgagttatagatataattgattctgctttcatgcagccaacattagctgctgctggaaagcaggctccacgggtggggaatgttggtcatatctcaagaatctcaaacaagcttgttcagctgtcaactaacagtaaccagataaagactttacttgaggttcgtttttcagtaacagtaaccttttattgtaacaatgattgcagatttactgttatctgcagtataccatctttctacataaattgatttgagttgtgattattggtgtttgtcaatatctactctattgtatcactctgttatgtactcgttggagtaaaaacagtgtaaattagtttgtattctctttacagaacccatcaagatgtgtccataatgaaatatcctatgtctaactaattttctttctaatatttaggcatggttttacgtcaaatgttgtgtacgtgtatagctgcattttgtttggtacatcaacattctgatacgttctgtntttctttgttaggaaaataacgattggggtgagtgggaagctaatacgtgcatgatcgaaatgcgagtgagaatgt

SEQ ID NO: 45563 - DNA, 959 bp, Arabidopsis thaliana columbia
tcgaatcacctcttttccggcggcataatgtagccgtttgttgcgctcacagtggccggctttatacactgaacgctcaagcgccagagtcagcttggtcagaggtgaaatcggaaatttacactactgcgaaatcgttcaatataatttcttgaatgtaaaggatcggaaaacaaattgtaaaaacccaaaaagaaacaagatactacaaagcaaagcttattttttcttcatattgatagggtctctttgtttttcttaattaattcacactattgagttgattacgatgattaaggtcaaaaatacgaagtgacaataaaaagagaaaagtttcgagcataatcatgtcttcttgatcgtgccgctcgctatataaacactgcaccaagcaattactataatttttgatcaattaaatattaaattttgagaatatgtttctatattaatgaaaataatttaaagtaatcataagtttgtatctttgaacaaacgaaactagaaaacgcctatctctgctcattggcttctccatctccgatcaaatccgcggtcgtagtcagagagagagacaaatggctatgccaagggcaacctctggtcccgcttacccggagaggttctacgctgctgcatcttatgtcggtctcgacggatctgattcgtcggcgaaaaacgtcatctcgaaattccccgatgatactgcactacttctctatgcgctataccagcaggtcagcaacttccatttctgatctcttccattgttgatctcacgattgtggattttgcttttgaatttcacgagatctggtcgtttgggtgttgatttctttgttttagtcaccgattcatattcctctcgccgaattcttatcggattttagaaatgacgcactttacttgtctgattagctgtgcttgatcgttattttcgatcctggttagtatattcg

SEQ ID NO: 45564 - DNA, 531 bp, Arabidopsis thaliana columbia
tttatgaaaatttgatgagattttgttcgacaaaattcctagctattgtggacgcgcatatatattacttatgaatattcttagttgattaaaccctttttttttcttgtcttctcgaatatacgaaaatatataaagatgatttcaattttggtctttttttctacttcaagactttttaaaaaattattcttagttgataaaaaccttttttcttgtcttctccaagggcttatgtataatgtttttcttacaggattaattttctctttggttagatttttacaccgccatggaattatcacttcaaaaataaaaaagtttaaagttactatgactttaatctgagttatttatccattttctttttgcagctttgttgaaaaactataattaatctgcaattcttgtcaaagtagtcacaatttttatctattttcttttgtctccgaccaatgtttcaaactcgaatcctttcgttaaaagttgtttctgctttattataaacctgaaactaattagtacaaatta

SEQ ID NO: 45565 - DNA, 599 bp, Arabidopsis thaliana columbia
tcaaatacatcagttaccttatcaacttctattcctactcaaacttccatagaaagcatggggagtttgtctcccgtggctgccaaggaagaagacgcaacaaccttgccttctcgtaaaccaccctcatctgttgcggatactccattgaggggcattggtagagttggtatccccaaccaaccccaaccaagccagcctccgtctcctattccagctaacgggtctcgcattagtgcaacttcagctgctgaagttgcaaagagaaatataatgggagttgagagcaacgtccaacctcttacttctccactgagcaaaatggtgttgccaccaactgcaaagggtaatgatggaactgcctctgatagcaaccctggtgatgttgcggctagtattggtagagctttttcaccatctattgtatctggttcgcagtggaggcctggtagtccctttcagagtcagaatgaaacggtgtgtgttttgaattcgattataagtttaaggatcctgggacatttgcattatactatggtagtttgagcaatatcatggctttacttgttagtctgagcaatatcatgacttgttagttt

SEQ ID NO: 45566 - DNA, 448 bp, Arabidopsis thaliana columbia
atcatatactcttaattaagagattcatctaatatttaaataatatatattttttgtcttttttattaagaaccatgtttaataatatttttataattgattttgaaacttttgaagttaagagtttggataagagtttcagtttttggtagactcttaagttggtgttctaaaaagaaagattaatttaaaatgagaaatataaacattttaattttagaaaacttaataattagtgaaattcataatatttgaaatatacatgatataaaagtttaaacatacatgacataaacatatttgaaacgcatcgaatcgctgacttcgtttaatatttctcttctacctatgaaatactgacacgtgtacgaatcttagattatattttggcttttatataaaagtcatctcttagcaatattaaatattaaataatagttttcatatt

SEQ ID NO: 45567 - DNA, 441 bp, Arabidopsis thaliana columbia
gtacagttaaaagctatcagtttaagtattcaaaacactgaatttgatatgatttataagatcttgtaaatttataaactctcttgggtaactttctctatatattctgttaactcttctgctaaaactaacctgcagaaaccggttttggagggcttgtcaaggcttgtttcttgtctgatggaaacagctctttcttcctgccttttgattgacgttcatcacttttgatatcaataccacctgctatatgagctgaccgagagcgcgaatggcgataaggaaacatgactgatgattgtgccacattgtgggatttggaagcatagctctcgtcttctctcggcatggaattgccatcagtcatgaagtttcctggcttatcaatctggttttgagaatcatcagatatagtagaatagacatcatcatcgtcctttt

SEQ ID NO: 45568 - DNA, 482 bp, Arabidopsis thaliana columbia
  unsure (1)..(482): unsure at all n locations
cgactcgatcccgtggtccagaacaaagcataataggaacgccgcttaagaaccctgctttataagtgatataccaaaaacatccaacagaaacctcccagagaaaatacaacatatatatatatatatatatattacatgacagccatacgcactatctaagtcagaatctgagaaacaaaaaggaaatgagacaaagaggcgttgttacacattctaagagataactcacccatatttttctaacacctctgaggatccgtgctgtatgctgtaccatctcccgcncncgactgtancactttttaagaaagcgaagaatagctgctctgacattctcttttgcagacactgagaaactactgcggggctcttccttatcaattttcacaaatgtatcatcggtattttctcactggtagagctttctgcatgattgcaaaagaggcagtgtcagtacctgcaaacgtccaagatattga

SEQ ID NO: 45569 - DNA, 520 bp, Arabidopsis thaliana columbia
tacatcgtcctattatacggaacctgtcttttttttttccacacggaaccctgaatgattgtactttttggtaggtttgttctttattcgagagttgtaaaaaaacattatttacttttaagatgactacgaaagtgtaatttactaaattacttttcattatttactcccaagtataatttactacaaaaagctacgcagtaaaattttgctagggtttattactgcgacataatgaaatgtaaatcgaaaattggtatcgcaatccaaaatacttttttgttgctctctactagcctgcctttctgggaacgcgaaaagaaagacaaaattttcttgcaattgaaggtacctcaaatcttgtgcttatctctttggtttcttcttcgtcaaaccatctgcccaacttgtgtttttgttcttcaggtgaggtttggtgaaagggaaattgagaaaaccctagaacaagtacggtctctaatttgctttaatgggtcgcgaatctgtggctgttgtgact

SEQ ID NO: 45570 - DNA, 446 bp, Arabidopsis thaliana columbia
cagattgtattgggtgggctgggttccattttggtggcccgtatgagcaataattatattacaatgtattatttttttttatacttgtctgttgttatcaactaaaatactttgcatttgatccatcgtgttactttcaaatatgggtccatatcaaaagctggttctccatgacacagtgcagtgaacaatcttgtacactcttattctacaaccaaactcatgaatttttttttctattttcagggtaaggtcctcgatttttaaagaatggccacggaattgatcctattacgatcatctttgattataatctgattgtcaccaagaatccgatcgtcaccactatagttgtgcatacgatattaacacttgatgaaagtgaatttctcattaattataaaagaaacataccagatgtatttatagttacatgagagtagtga

SEQ ID NO: 45571 - DNA, 507 bp, Arabidopsis thaliana columbia
tttagtcaattatcctaaaacacatatcatgtcattgtagtattttaggtgtcaatccaaatgagtgtgatgcaaaaagatgagatgtgatcagaagtcaacccaaggaataacagttttgggggttctaatagtcttaagtgaaaatgcagaaaacagaaacaataacagaattactaaaatcactcgaccacaacaggctgatgccagaagtgggatgtggtcgagtaacaggtaggatatgaaacagatatactcaactgcacagtctgttgccagacactgggtgtggtcgagtatactggtcgagtaacagacaggaaatgagacaattgtactcgactgcacagtctgttaccagacactgggtgtggtcgagtgattgtaaaaactaagaaacaggcaatgagaacgattaagcgataatcgaataaagtggtatcctagcctattcgaatggttaacaagcgcaatcaagctatccctagacaacaggttcaataacag

SEQ ID NO: 45572 - DNA, 478 bp, Arabidopsis thaliana columbia
ggatcccctgaagtggttaaaagaggatactttcgatagactgttgactgctattgagcttagcgagcttatcaatcaggatctgatcactgaacacactactcatcccaccaaaactcacaaaaccctagaaagcagagattttggagaatgtaaaagatgctcaaatcccacaagtggtttacgaattagagtgaaaagcagccggatttgcttaaagccggtgatctgggagacagaagaatgcggcggagtggacaactcgtgcggcggagggtgaacggagaaagaaccctagaaggcagaagcagctgagtagtagtaagtaggagatggtcgaaaacgacgacgtttgacgccgaaatcgatccctagagctaaaatcgcagagaagagaggaatcaggaaacttgtgtttttttcttttgtgctttcaaactttaagatgggctttcactttctttcttctccatatttt

SEQ ID NO: 45573 - DNA, 531 bp, Arabidopsis thaliana columbia
cagagctcttaagaatggggtaattggttctagtggactcctcaatctatttagctaactaacaaactcaatcaagctatccctagacaatagattcaaaacaagatcaatccactctcatgacaatgatcctcataactttaccacttcctaatctcaactttcattgatgaaaaataagttttctaaacatccaatgtcttgggctagaatctacaaatctctgaaattagttggttcagacatttcatcaaacacttattaggttgagaaagtctgaaatcaatttccaattgatcagaaaggaaatagcattaagaactcctaacacagaaggaaatcatgcaattataaacttagctagctaaaagaacagaggtatctacctaaacctaacccatattcaagaactttgaagaacactactcacgaacaataaagaacatcatagaacaaaacccagaaaaatcataaaacccagaaatcattataaacttagcaagtgatagacccaacaagataacaactttg

SEQ ID NO: 45574 - DNA, 491 bp, Arabidopsis thaliana columbia
ttaccacatacctaacataagctgaaatctcacttgcttcctgttatttcttgttttgggtttagatgttaagaaagatggtgaatctggtgatgaatcagaggaggatgatgaagatggcctccctcctctagagaggaacatgaaccatatcaaattagaagacagtgaggaggaagatagcgagtgaaaagccattggagaaatcctatttgatctaaaaaagtttccatctttggcttacactacttgaaagcaatgtttttcaagttttcaccagattcttctggtgtattaataccatgtagtataatgtttatttagttttattaataaaaatatctactatacattcttagattttttaaatttaaagtttttgttttttccatgtaaatattaaatcttttttttaggtgaacaaaatgataaaataattgaagtggacaaaatatggagaagaaagaaagtgaaagcccacttaaagtttg

SEQ ID NO: 45575 - DNA, 521 bp, Arabidopsis thaliana columbia
gtggctgagttatgttagaagatttccattttttgaactacataagagaaaaccaaatgttattatgagatttgaatacaagcattactgttggttcgatcgatgtcatcaaatcagtcagaatattgctgtgttttgcttttgctgtgtttatcgagaaacaattattgtgttattctcgagattaaaaaaaatgagttaatagggaaacgcgaataatgattggtttcatagatgcacaaacacgtcaatattcaaaattattccttaactaaaccctccaataatctaattttctgtttcgacgtggaatcaaataacgttacggctgaattattcaataagatttcgtattttggcagagttatgggataccatatgttattaaaaatattctccgctacgccagatacgacgtcggtttgttacagagtctcttttattgaccagatacgtcgtcgttgtgacaataaccaaatgacacactaataaatcacctaaacagaatcctaagttttaaa

SEQ ID NO: 45576 - DNA, 667 bp, Arabidopsis thaliana columbia
ctaggtacaccacgaaactccatctccagcaaaaccttctctacttcaggttgaagcttaaaaggatctttcttcctacaaagcttacaaacacaatcaagcatcatgttatacgctttggttcctatctcaaatcctcctctagacatttcaccagctaacctagttgcttcatcgagtttctcagcaatacaccatccactaatcaacaaatcacatatattctcatcaggaaatatttcattagcagtgttcttcaccatcttctctgcgatactcgcgtgtcctttctcacaaagcttcttcacaaccaaggtaagtgattctttatcacgtttcaaaccataatcattctccattttctcgaagaaatcagtgacctgcttaggtctaccagctctaacaagcctatcaatcgccgattctagtgttttacctccggcgatacctttgtatttcgagatgatctctagcattcctttgaaatctttccgacggccaaagtaatcgacgaaaaacgaaactgtttcatcggtgtgagagaagttagagttcgaatctaaccactcagttaaaacctagagccgcgcgaccagcttccggtgagagattaagagtttggagaatcaaatcgggattaggcgtgatgtgggagaagctgagattg

SEQ ID NO: 45577 - DNA, 625 bp, Arabidopsis thaliana columbia
cagactcaacgattaagggaatgagcataaaagcaaaaacgagagaaggaaagaggaagatggaaagagtgatgtaaagaggagattaaaagggagagaggttttggtgtgttgtcaatgagggcgcaaaagtagcgttcggttatggtggaacatgtggaagacataggaaagagctgttactttgaaacggtcattaactaaactaaaaaaaagttgcctccctttggtgtgggtttgttgctttcttcttttggttcttctactttctctactctatacattatgttgttggcttcggttacttgcgcttaggatcctttggataaaaggccaaaattaaggtcaacgtcttttaagatagttttcgtttgttgagagcgtttaaatcctccaacattaacattcataaaaataaaaaaaaatattacattcaacaatgaagaggcgaagtggttgtaatgtgcacaaaaacgcccaaagcaagtaagcaacaataatacgttgacctttgaccaaaactgtatgatggccaaagggcacaagtaaccgaaaccaacagagtggagagagtagaccacaagaagaaagaaaacagaggaggcacttttttagtttaggtaat

SEQ ID NO: 45578 - DNA, 513 bp, Arabidopsis thaliana columbia
caatagccttaattagattcttaatcatcctcttaatttaactatacatagttgatagtttaacaatctcccaaagctcctcatgactttgaaacttaactaggtattcgcagtagttggattaacaaaacagaggatttagatggctaattaaatcccttagattaggctttatgagtcttttgatgttcttggctcttcgggatggagaatctttagccgttacttgatatttctatttaaggaaagttgggtttttgcgagatggtgacttgaatttaattttatatgtaaagatggtcgctttagtatcttgttttggaaagtgatttgatctataacagagacccaaacagagaattttgaaagaaataatctaaactccagtgcactaaaagctggaatttctaccaaaactgataacattcaagtaatgttttttgcatttattgcagattttatgtagacaatgttccgatcagagaagtcaacgtacggcgtcgatgggcggtg

SEQ ID NO: 45579 - DNA, 533 bp, Arabidopsis thaliana columbia
tagagacatgaatccagaagcttgtgccaaatatttgagaaaaaccaacaatccaaaagcttgtggtgtcataccaataactcaacaataacaaaaccataactgatccaacatgccttaaagactttgttggcgcaaatttgtttgggcagtggcgggagaatatgttttcatgtttcaagttttgcctcctataatgtttttcataatgattaatgtattattattatcacatttagtttatgtaaaataaaaatttagatataaagatataaaatatataaatgcgtactggtcattacagtgcacgatagcaagaagtagtactattagcaaattagcatcgtatttttatttatcgttaattttctcctaaattttcgatttccgatctccgggcaaaatctcgagtttttcgccggcaaattcattcgtgatgtgtgcatcacagagtgttgaatcagctttcacttcatcagaaaccctaattttagtgtagtaacttgctagatccataatttctcgagtgtttt

SEQ ID NO: 45580 - DNA, 520 bp, Arabidopsis thaliana columbia
tagagttgccttcttcatgacatgaccttgatatgataaattccctaatgtaatgaatcaataaaacgaacttatagaacggtagaaattacgtacgtgaggatttatatcatctattaattaattaattgacaacaaaaacagaaggggtagtgttcacgtgcatgtcacgcgggtaatggtgtggacacacgagcctcgtacggtgtaaagaaggagaacagagagagtcgcacgagccgcacgtgggatgttgacttgtcgattagcttaaggggtatgtccatatactaatgattaagtacagtcgaatgaaaacatgccacgagcccctagatctacatgtttattgtggttttttttttactcagtcacatccacatgattaatattggtccctgatattcatcttatatatttcacaagtataacaatcacccaaacattagtttttcttaaattgttttacggtgaaatgtttcactgtttcctctatgaataattaactagtggagtggaa

SEQ ID NO: 45581 - DNA, 524 bp, Arabidopsis thaliana columbia
caaactcatgtctttttataaatctaatcggatcattaatcaatttaatcttggtagctaaaccaaaaaggtaattatagaatcattgagcatttacaacagaagcatgaccaaaaaacattctgatggctcagatttatcaacttcgagccttatctagctggaacggaaaaatgttaatatctggagactactgcttattctggttgccggaagtttcacctatgtgtctttaccaacaaacaaatacacagaacagattacatttcaacaagcgatactattttatacaattaaaccatttcccccaaaatatacctctgctgcggatggcgattccagatactctcaggtagacaaccagtgattgttgttgttgaaagatttctgtttaacaattcggcattgtcctgctccagaagagagaatacctttttatgcttgaatataaatggctataggaaaatcgacaagagagatgtgttttagttaccgttggttctgcaaatcttgtgttggatctt

SEQ ID NO: 45582 - DNA, 507 bp, Arabidopsis thaliana columbia
gaaatacatcaaaagtaaacaacaaaaactaaaaaattcatgcaaatttcgaaactttgaaaaaacctagacgagcagagaggtgcaattccagaaactaggaacagaattagcataagagagctcttaccattcgcggcaaaatttcatagtactcatcttagctgaatctcttgagagagaattaggttccaaaaccaaaactgaatcactgtctcagagaaatctggcgggctcgttttgtttattaggagaaaaataatgcgatcgtcgttctaaataacagagtcgcgtgatcgatcttcggatcggacgtagtttcacgggttttctcgggcttttgaaaatgttattgggcttttataaagcttattgggcttaacaccatagttgactacatatacatcgaacatgacatttaagtttttatttgaccacatatgaagaacacaaaacatgttacggaaatgtaataaacttggtacgcagtatatatcgagtgaaaga

SEQ ID NO: 45583 - DNA, 580 bp, Arabidopsis thaliana columbia
cgaagatgaatatgtatcatcagctattgagaaattccttctttgttaaacagatcagcctcaaaccattcaagagctgcccaaaatgcttttcagagatatgatcatgcttctgccaagcagcattcagataaagcaagagaggactggttagcagctgagaagctaaatgctgaagcggccaagaagatcataggtataacaaataaggataatgacatatggaagttggacctgcatggtctccatgccacagaagctgttcaagccttacaagaacgtttgcaaatgattgaaggtcactttactgtgaaccgttcagtatcaccaaatagaggtaggtcaaagaatgcagctctgcgatctgcatcacaagagccttttggtagattagatgaggaaggcatgcactgtcaaagaacttcttctagagaactgagaaactcattgcaggttataacaggtatgtcgattttctgtttatgaagcatcaagtgaactgatgtttccatggttttaagtataataggaggttccacataaatctgtgacggtgatgtctatgccattgtaggtattg

SEQ ID NO: 45584 - DNA, 571 bp, Arabidopsis thaliana columbia
gatcctaactaggcaatccttcgtaaggatgcagctataccacttaataaaattaaagtttgcattctcaatacggaattcgctttaagatctgtaataaatcaactctcggcaccctggccaggtgttcgatgcgcgtctcacatggatgcagtggtgaaataatccacgccctattagaaacttaatttttctaatagggatagccgagaccagttttctcgcacttaagctctggttcggacagaaatataagccgaaccctgtatttcgcgatctgccgaacagatgctctacggggagtaagccgagcccagcatctcgctccacaactaatatgctgagtccgcctctttaaattatacataggcctactgggcataagccgagagacgtctctcgcccagtacacgccgaatacttttatttataaagccgagctcagtctcgcacttaacatctaacccgaacttagacagaaaaaatcggtcgaaagccgagctcaaagcttgcagatggcttataatttagtcgatttaaacctaatctcaagattgggaatccgatatgg

SEQ ID NO: 45585 - DNA, 472 bp, Arabidopsis thaliana columbia
tcgtcctcggatgaagaagaaatagaagacgaagatgtataattaattatttgaataaattttgtaatatacgatgtatttgaataagtatttgaataagtatttgaataattattaaaaaattattaaataattttaaaaggcataaggtgacgaaattacgactattatgcgactaactcaggtggtgattaatatacgactacacagcgactatcttgtaagctgttgggcttcgaaatcacaaagcccaaacccaacttaagtggtgacaattatacgactacacagcgacacttgtgtatgtcgttgggcttcgaaattactaagcccataacctaatttacgtggtgacgattcggcgactatggggcgacaactttgtaagttattgggcttttaatcgtcgaagcccaaacccaattgatttagtgactattatgcgactgatatacgactactccagtgttgt

SEQ ID NO: 45586 - DNA, 1774 bp, Arabidopsis thaliana
cggttcaggttctctagcaatctgacaaagattatgcaacacacaacaagccacaatagtctgaggagcatggttcacaccaacattcaaactctgaagaatcttccatctagccttgagcaatccaatagcttccaccaccactgaccttcctttcatcaacattccatcgaatagattctccggtggcgtaccagagccatttggtgaaaatggagtcatcaggaatgagagaagaggataacaccaatctccaacaatgtatggtctcacatggtgacctctaatattgataactttctcccaaacaatgtctcctgaagtaagcctcttatatagaagactatctctgaaatgagaagagtcgtcttctccacctggagctttcacacaaacgtcccaaaagatcttcttgtgatcagcaacaacctgaagcaaaacggcgtcgtatccgtacttgcaaccgtaaatgtttctagggtttagtttcgtgcggcgtctgagcttcaccggagtactatcaatggcgccgcaaatgttggggagagaggtgagttcttcgaatccctgagtcgtttcgatcaatctccgttttccgacggggattttgatgaattctggatatagcttggtggctaagagacgtgtgaccatgtttgtgatcttggagatgaggtatggatctagtgagtagcgagaagctagggttttagctgagcagccatgagcgagacgagagaggaccatagcgacggcgtaatcggcggggagagagagatttgaagcggtgatgaatggtttgagcttgtcgacgacggtgatgaagactgggtaggaaagaccgtacaatgagcgccaacgagcgtcgcggagaggcgcatcgagtgaccagatgtggtctgtggttagggcacggaaggcagcgacggagtaatcgccgtcggcaagaggcggaggaggggaaggggaaggtgattctgaggaagatgaggattcggttgaagatctgttgacggcgaggaaggagaggagagatgcgagagtgaagaagagtaaaggcgcggcggaggaagtggagaggagggaggaaggtgtggttgaagactgtgaagatgtggatgcggaagagaagagagtgcttgtaggatctaatgagttttggagatggagaagatgtgagagcatcgccatgaaagcttcttccatcttcactctccgatttttttctctccggagaggttgagagtagaagaaaaactgaagaagtgagagagaaagggctaatagctaaaaatttaaaattaatgtgagttaataaatataattttaaagttttggggttgtttgtttaatttcagaaagttttgggcttataagcaattcgtagaaggtaagcggaattttgatccaacaagttgcaaccatttatattagtctgagacaaaccagtaaccaaaatttttgaatctcctccaaacaacaagtctatcaaaatcaaatccatctaacaaaattcttctttcgactacaggttttagctttgatatgtgaaaccatgatgaagatgatcacttgatgagtctcttcaattctccccatgatagttgttggagtcgtggtggttagcatatcctcctccattgttgtaaccatgtcctcgtgagtatcctccattccactgctgccctgagtctcctctccactgccacaagttgaacacattatgagaactaaaaagaaatctattgccagcagaaccaatttggttaagtcc

SEQ ID NO: 45587 - DNA, 592 bp, Arabidopsis thaliana columbia
accagtacactgttccgattcagttgaagattttttgtttcacgttgacgcgattcggttccgttacaagtgagattattttcattattccgaagtgacatcaacatttaatgccccaaaaaagtttagatgtgactattgtcacaattaatgcaaaatcatcattacatcaaataatattaaaaaaattattgataataattaataaaaaattaagaacgtacattgctgttgaagaagtgttgatcttgtttttgtaccaagtttggagccaaaacaagcattgctcgtgtaagtaatgaagttcttttaagaagttttttgttatgtcatattaggatcttgattgtgttttaactccatttttttatcagaaaatttgcaaaatctatatttgtttgtttaaaatagtcaaatgataattggtatttaggtttataaatgtgtagtatcgacattccatttgttttttatatgtatagtatttttcagttgcatttaatgtgtgtccctgaatttatgatgcaggtgggttatggatattcccgtatttactatggtcggtgagtggaaatcaaagaagggagaatgg

SEQ ID NO: 45588 - DNA, 600 bp, Arabidopsis thaliana columbia
  unsure (1)..(600): unsure at all n locations
attttctccaataatttcttgttagtattaaactagtgatataaaagttcccaaagaatctaaattttgttttggattggagttggcttcacgacctttttttttttttttaagttttagtattcattttatatgaatggaatggggcaatggaaagaaaaatagtccaagtgggtctcaaaaataaacgaatttagctctgtcaatcgcacttgtctcttcatgtcatatcgccggtttgctccttccacgacggcggacgatctgcttttcgacattactgtcttttaattttcttttagttgcctatttttcgttgttgttgtccattacgccattattacttttactaaacaaataatattcaaaaatataacaactaaaaaggccaattgtttttaatgacccctaaatttgagaaattaggaaactggccatttgaactttgaagcgcctagaaataatgagcctcctgggaggcagagctacattacacagtgcggctgggcatctttttctgaggttaatgggccaagtggtccggccgtataggccttaacanaaaaaagaagaagaaagaatcgacatggaagttgaggt

SEQ ID NO: 45589 - DNA, 640 bp, Arabidopsis thaliana columbia
ctctccttctccgaacacgagaagcgatctctctctaaaagctttttaacgaattctaaatctccagctgaagcggctgtgtacagcagccagccaccgtagccagctctgatgagggaattgtctccgtttccgatttcgcactcttccaatagccttctcgcgacgcgggagcggtttagagccacatggaagttatttccgtctccgtcgtcccagacggtttcgaggcggcggatacggcggagggaggtgagttttacgagaaggtttgtatcttgatgaagcagctcgatgacgacgtcgtataaaccatttgcggcggcgcaatcgattggtgaagcgtaccaccactggtctccggtactttcccaccggagaggaaatatcggcggtggcatttccggtctagaaaattatccgggtcttcttcggttttagtgaaccaaaccaatgaatctcaaaggaaacagagctaacgagaaaacagaggaagtggattataaagatgaatttgagtggtttgaaatcaaagaagtttttttgaacgacgaacacaaagtgatgaagcagaagactacaaaaaggagaaacctttgaagattgtgttgttgtggcgaagacggaacttgtgtgtgtg

SEQ ID NO: 45590 - DNA, 542 bp, Arabidopsis thaliana columbia
ttagatgtttagactgcttattgactttggtagattgttgcttaaaccctgctctgctatgtttcatcaacgagagttgagattcgaaagtggtagagttatgggggtctctgtcacgaaagtggattgacccggtttttgaatctatcgtttacggtacctgcctttcgccttttagccacctgatgaaccttagagttgcccttatcaatgaatccatccttaggacttctattcttcttagatttatttgtattcatcccctgattgcacttttatttacctgttattttattcacctgttgattgcattttagttcttaaatttgtcacatgttggttctactcgacccaatgatcttgacctaggattgttactagaaaccaaccatcattataatctggcttgacttagttgcttctgtacacatcttgattgctagcaataacagtggactggattgacacccctataactgcatcgacatgttaatgtttaagggaaattgaactgaacacaccacacttcaacacataagtag

SEQ ID NO: 45591 - DNA, 323 bp, Arabidopsis thaliana columbia
tagaaattgtactaagggttccttcaaagaacggatctttgtgagattctcaaagaacattaggacggtgttcttggttatattattgaaataatgaggatttgatcgtacaagtgtttagaaatatggaaaataagtgttttgccttcaaaatcagagcggttttgttagcctgaggttgagagcgtttttgtgcgtgtcccctttgtttgtcctcagaggtgctttatatagggctttggcagatcgcttctcgcgatattctcggaagatttctctttatcttagagttggcgaaggagattgtcttcatcttttgaaga

SEQ ID NO: 45592 - DNA, 517 bp, Arabidopsis thaliana columbia
tgtataaatagatgtcttagggttctgtccggagacatctagtcgacattgagtttttgcttcagttttattttctgttttactctggctacgcacttttgcttctacaaacctgtaattcgagatttttgcaagttattcagattctgcatttgatttcatctttcatcttgtttctctactctttatctctttacttatgcaatattatcattcacctgcgtttatgtctttgagcagtatagagttcttaaggatgggatagagtagttgtggaatccgtagtctgtagaatggttaagttttagaattgattgaatcccttcaggactagttgcgtttactgcttatttctttctgatcaactggaatttgatccactagttcctgagatattcgtctctatcccaagggattggccgtttagagcgtttattgactttatcagtgtgttcttattgcctacatagttagatttcgttaatgggaattagtctgggctaactttgcttgagga

SEQ ID NO: 45593 - DNA, 984 bp, Arabidopsis thaliana columbia
agtgattagaaaaaaagggtgacagaagaagagtgtttagaaaataaaataaaaaatacctttccccaagtgctgagcaacgactcctcgttcatctctgtatctaagattcatgagagcgtttccgggggtgggtttgtcaacccaaatagagaatctccaaatgagaaactcaaggaaagcatcaagctctggttcgtattgaaagagcattcctggctaataaaatgccaaagaaagtaaatggcttaataaaatgccaaggaaagcatcaagttagctctctgctcaccttcatcagagtgaaaaccttaacgagctgttccttcaacatggctgacatttccacatctagtcgtgctgcgtcgaactgattcactctagagattgcaaccggtataactgactgccatcaaagaccacatataataagcaaacaagccacgacacaaacaagcatccctgagacagaacctacccggcgggaagcgagaagagactgcgattcaggaagcaagcgctggtaagagcggatccaagcatcgtctgcaggcgtagacggcgtcattggcggtgtagcagggctagggtttgtaattccggcgatagacaacaaggcaaagttgtttattgatgaagcccgacgagggtcttaccgtcttttccaatctacagctacgttgtttgttttctctctttgtctcacactcacacccacagagattcatccatgtctcctcctttcttcttcttctttcaaaattgtttagtcttcttgattcaccacttttatcagattattattttgtcttaaaaggctcatatggtattaaagacccatatcaccaaaaataggcccatagcaataaaaaggcccatatatgttacaaactctagggcccggttctattagtactaacgacataaaattatccttattgatgatctcttaacattactcttagttaagagatatgtcttata

SEQ ID NO: 45594 - DNA, 494 bp, Arabidopsis thaliana columbia
atagatggatgtcgtgacataaaaaggttgcacgtctatgatatagttgagagagatgcgcacacttgtgtgtggcgtcgccccaccaaatacagatgatgatctgttagtggtattcctttggaatctgcagtcgttagagaagacgatgatgcaccggtgctgctaggtggtagtcaagacatgcgtggcttgatactgtttctaaagtccatatagaaaaagtgataggcataattatgctgtaaaatcatatgcaattgtatttgcgatcttattctagtggagttgtttctggattaggtcccggggatgtaggttgttaacagaaccccgttaacaaatctttgtgtctcatttattttatgcacacatctgactcataccctctcacatcataaaaagatatagatctagcctaggaagttaacactttgagaaactttaatctttccctcttatgtaatcaaatctaaagttaggtgttttggtga

SEQ ID NO: 45595 - DNA, 470 bp, Arabidopsis thaliana columbia
tgatccacgtgtaaatgaaactttcaaaataataggccgtcgccagttaaaatatttcaaaataaaaagatttagaaatcaaattccaagaaaatttgaagtagaaaaatcgaagttcaaatttaaaccgaaacgagagtttaaaattgaagtgggagtatggatatacggaccccacacccccccctttttgctcggtagacgagtgtttttgcaagtttacgcaaaaaatatagcagagaatgcatatatatgattaagctgtacttgttagattataatagataacacttatcttattggtttggacatagagatgatgatatctacggcatggacgatctgaatctctgagattgtaaacgtcgttgtatgaaaatctacatttaagatgttgttcgttagaggcgatctcatctttgcgtagaaagagagaagcaaggatgaatgcttgtgatataagtgagaat

SEQ ID NO: 45596 - DNA, 615 bp, Arabidopsis thaliana
gaagagttgcatcgtctagggtttattaagacgattcacacttgtgtgtggcgtcgtcccacctaatacagatgatgatcttttggtggtattcctttggaatctgcagccgttagagaagacggtgatgcaccggctgccgggtggtagtcaagacatgtgtggcttgatactgtttccaaagtccatctagaaaagagtggtaggcaatagttatgctgtaatatcatatgcaattgtatttgcaatcttgttctaatggaattgtttctggactaggtcccggagatgtaggttgttaccgaaccccgttaacaaatctctgcgtgtctttactttatgcttcttacactcattacacgctaatatcgtacaaacacatagacctagcacacacatagtaactatacctccatccgccaatccttttccgccacgtcctccgatggtgaaggtgaaactccaccaccttcacccaccactcctctaccagcttcacccaacactcctccaccagcttcacccaccactcctcagccacagcctgagcctcttgttccttccctgaagttcaccagagccccaaccaatgaagaaacgaacgtacttctgtga

SEQ ID NO: 45597 - DNA, 566 bp, Arabidopsis thaliana columbia
tagaaggctgccgacgagctgttagctgggcgaactacgagtcagagcaactgcagacgaactgtgagctagaaaggctgcagacgagctgttagctaggcgaagtgcagacgagctgcaagctagacgaagttcgagctaggtaagctacagacgaactgggagctaggaaggctgcagacgagctctcagctaggcgaagtgccgacgagctgctagctagacgaacttcgagctaggaaagctacagaggaactgaggtggttggctcgagtcaaagctgggttcagtatactttgttccgagctgatcgtctcggtaccaggttatttctaagcacagaccaaagcagataagaaactgtatttagccgaagcaaaagctcggcaccagtgtttatgataactgggttttagtttccgaggcggttgactcggtaccagtgtgtttagagtaactggatttcagtagacttgaatacccacggttgcgacccgatttgatcaatctttaccagcgtttagaaacgagctggggcacggtgttacgtataccgggttcagaag

SEQ ID NO: 45598 - DNA, 375 bp, Arabidopsis thaliana columbia
ctcgctttaagctgcgtagtatagatcatgccatgtctctctagctagattctctgtgtttcaattcctctcgaagagtttaattcagcatccagaagaacatatttgaatccttttacatttgattgaaacggcgctttttgttctactgtttggatcgatttgaatctaaattggagctgaagaagctgctctggcttcgaatttgaatccaagatcgacgatcaaagtgatgtgatgtggagtggatttcgtgattgcacgaggtctattgatttgagcttgacgactagtgtgaattttttttgaggttttctcggctcaaggggtttgctactgaggaattttgtttatgtcgaggaacggacgaatgac

SEQ ID NO: 45599 - DNA, 606 bp, Arabidopsis thaliana columbia
aagtgttaatgcttagaaatcatctcacgtgttgtgtcctgccaaaacccatcagcagcccaacccccaaatgcagctattaaggaactaaacatataatattttctgtctataaaaaatattaaaattcaatagtttgtgtgttttgatatccaacttgaaaacgatttcataacgaccatgcatttttttggtttgttttttgctgcaagttacagataacataaattacataattacgggttggtgcttcatgtcgcatttcaagatttgagtaaaccatgaacatcattgatagcaagccaatacagtggagttaataaaaagggtaaacgaaacatagatttgcagagaaaacagtcgaactcaagataaatctctctactacaattctctcttcttttcagagattgttcagacgatagttctgttgaaggagagaagttccaatggactaaactctgtaatgcaccacactatagagatgctccctaacgtaccggtcaagtgcagtgttggacaaactccgaccttgaagaccaaatggatgatagctcatggtgagactcgatgctctatgatattataatcagaaatatcgtcaag

SEQ ID NO: 45600 - DNA, 516 bp, Arabidopsis thaliana columbia
gtactcctttcttctttctttttgttttctactttgttagatattatcttcgttcgtgcaattattgagaaattaattgcagtactttttacatttacacccatatttgcatatacactggacataacatggtttttacaaatatatcttgggtagtaatttttgatacaattgaaaggcggatatttatagttggtttgtagtccatttgatagttttttcctgtttttaccattgagatcatataatatattgttttgtcgtgttccacaaattttctatgatatatactatgataatgtagagaacagctagtttaaaactggaaatttcatccaagtgttagtatagtcaatccgttttttaaaatgatgttttatctctcttggattggagttcagagttcagaccatgttgaagaatggtaatttatacaatgtaaaatttcagaccaaaagaatagtaacggtcttaagtactaaaatgttaggtcttctacaactagtgaaaaaggta

SEQ ID NO: 45601 - DNA, 2616 bp, Arabidopsis thaliana columbia
ggtcctgactaaaagtaatagaactaaaaaggccacacagttccgtccttctgaaactagcaaaagtaaccatcatcaagcaagaccaagaagcaagtaaagagagctacagacctgcacgttttggaagaggctagactccataaggattctagtggtggaagggtcagagtcggaatgtgtagatgcacatatcagaaacttgtgtaaagtgcggaatgctagttcagtttctgagctccatggaggcaaccatttgaaatccgaaaccgataccaagcagtcctgcaacaaatccccagcagatttactgttatcacctccactcaaagcgttggaactcacagagcattgtaccagcagatcaagcttcaacgctttcaaagcgagtggatcaaaaacgacaggatgaaacttctgacccatctcaagaacagatgtcctcttctcaagctccccactcaacatatgcttattcaacaaacccattaaccagtgcagcgcaagcaaacggaaaacaagatagatctgagtctcctttgaaaagagcataagacgtctcatgatctctttctcttgtccctcaaacgcatcagggaaccgagaatacataagcaagacaacatgacaaagcattggatcaaacgaataaatcatccccaagaactgaactttcaacatagaagcctgtaactccaacgccgatgcaagtggcacaaccatacccataaattccatcatagcacaagaagtaaacaaatacggagattccaacataaaagccaatgttcgtctcagttccttctgatctggccccaacccttgaccttgactcataatcgaactctcatcacgcatccaattaggagcattaaaaggcaccaaaggtacagaggtactaagaagtgaaaccttaagcttctgattaaccacattgtagacaattgtggtgaacaagagaagataagcttgcacggcgtgagttctctccgcttgacacaacgaccaaagatgaccagcgacatcagataacaaaccaggaaaagctttctcaagctgacgtaaacactcacaggcgatcacgagcttgtcgatcaaatccgtggttaggacgattaacgagcgcaagaagcaaatcaacaactgcttcaacgtgacctacagagaaagaatcaatcgatacaagcacagacgtgaaagagaccatagcttgctctttcaatcctgacgatccatcagttggagattgcacgatcgtccggagaacatcgatgaagcgatcaaaggtatcgctaccacaattatcaaacaaaatcggggaaaattcatcgagaaagactaggattgagagcttcactggtgtagggaagtcttttttgaggagagacgagagagcgaagtccaccagagaatcaatctggaaaacggaagtgaaccagtcgcgaggagcgccggcgtcgcggaagtcgtcgatgagaacgtcccaatcttggatagagagaggtctcgccggagtcttctccggcgtcgtcgtggtcattctccgattgaatctaggatttgaatctgaagaggaaaatgaatcaaagtcattagagaggagaagataagactatcctcgtcgccggcagtaatactccgagatacagaacaattcaccgaagctgctgactcatttatctaattatttatttatgttccatattttatttcaattctgtctctatctacaatataattagtgtcttgtaacttaatttttcttgctacaccaaaactctttattccttcgaaacctggcagcctcaggcaccatcctgtaaaaatcttggatagtataaccagaggttggagttggttgtttgtgatctgcgctagagaattgctctagctcatcgaaatgtaaacttcttcttatgttgccttgtgaatcgataatgggttgtggaatggatgggcaagacttttacatcttatggtcgtcctgtgaaacagaaacgataggtcaaatgtcttttggtttttagtttgttttgtctttctcttccgtatttcctctctttcttttgctcttcatggcgttcgaactctcaaagacctagttaacttccatgacatactaaatactatgcacaaaggatattgggtatgccctatgttttgtctttaacaattattttatatacatgcagactattatctagcggtctatgagatgagtgggaaccgtgtcgcagtcatatttgacaatacaggtatacaacatcagaggaaagcgaaaccaacagagcactcccacaaactacatatgcgatggatagagggtatatttacttcatactgttctctatggttgatgtgtagtcgctgtatattcggagaaattttcctgtatctagacagttgacatcatacgaacacgtagctaacgtttagcaccagcttaaattgaacttgaacttaactacagtaaaacctttacaaattaataatgttgggattctaaaattttattaatttataaagaaatttttcatagtaattttttactataagatttctttcattataaaaaatattttttttataactaattataagtaaaaaataattctc

SEQ ID NO: 45602 - DNA, 341 bp, Arabidopsis thaliana columbia
ccctcaggaaggcacagagtttcaccaccaaatccgctagactcttgaatcgtttaaaaatagaaccccttagaacttgaaccaaaaagagaaagaatgagaaaaagggtagagttacgacatctatgggactggatgtgtccgttggcttttacctttagcattctgctaaagctcaatcttttctctaagagtcccctgttactcgaccaaatcattagagggacatttatgtctcttagcctaagctcgaaaccaagtgagtttatacctttgtattgcttgatctactgttcgtgcttaatgaatgttaaagggaattggttgatctgaatgcctga

SEQ ID NO: 45603 - DNA, 530 bp, Arabidopsis thaliana columbia
ccccttaaactgaattcgtcctcgaattcggcgagtgatcttggttactccctaacttgggacacgggcgttacaagtctaccccccttaaactgaattcgtcctcgaattcagcgggtgtaagatcttctttactccttaatgttttcccatctttagcctctccgagactttagatatcatatttgatcaaatctctatttccgagtttgatcaagtttcccgatctttgtctcttacgacactcgatcaaattcctgatcctggtcctttcccggactcgattgatattttctgatctttgtctcttccgacattcgatcaaatttctgatcctagtcctttcccggaatcgatcatattctcgacataagtctctttccgactttgtcaatatttccgaccttggtccccaccggactcggtcaatattcccgatataggtctgttttcgaccttgttgttttttccttgatcttggtcaatctccaataagatcaaaactctagaaatagtcaaaacccgactaa

SEQ ID NO: 45604 - DNA, 625 bp, Arabidopsis thaliana columbia
gaatagacgaaaggcaaatacctcataactttaccacttcctaatctcaactctcgttaatgaaacatagcaaagcaggcattaagcaacaatctattaaagtcaataagcagtctaaacatccaatctcttgggctagaatatacaaatctctggaattagtagaacaagcattccattcatcttttggatgctggaataccttggagagaattctaattgatcagaaagaaataaggattaggcccaactaatccaaaagggatctaacctaaccttaaccacctgacaaacctcgaatttaccctaatctaatccaccctcaataaccgtaatcaccactctagcaacataatcaagaacacaaacctagaaattactctaaacatatcaaaatgtagatctaaacaagataaacaacttgagagtacgagtaattaaggttcaaagattctaaaacacaaagaaaaactagaggataaaagcttggtcctttgggcaaaccccaaagtgacctatttataataaaatcccgaaaaccctaaattcactagaagacaagagacttgaggcagtttggatgaatgctcgacccttggggattgagtgatagggtgcacaaaga

SEQ ID NO: 45605 - DNA, 935 bp, Arabidopsis thaliana columbia
gatgtatagaaaagtgctatcatcaaaacgattttaatggtgcgaaagatccacaattaaatagtttacctaattgtttcgatgtagagagtccaaaattttcgagaagtatcacagttcaaacaaaaattcaaagatgactaacaaatctcactttaaatttcaaatgtaaatgcctacaatgatgtagtttggtgtaaaacttactaaatcttttgataaacaaaaacatggatttgaacatgacacaatgacaacactaattcaaatcactagcctacatatctaagggtttagttccttgcgcttgcaaggtacatcaactgaagaacaagcccaataatatctaaaggcccataatctaacccaccagttaattttaacggtcctccgtcaaagtcgcctctcttctcctccaccacttaacgtcagtggtccgtttgacaaacagacctgtgactgtgagtgaagaagataatgcagactcaccttttggtgggacctatcccactcaaaggctaccgtcgattctcttcctcctccttctccggcgatctcctccctccgtcgtctaaccctatcggccgagacctattccctcaccgtcgaaggcaccgcgacggcaaatctcggagttaccgtaatcgctcgaaaacgacgattactagtgctgcgttttcttcaagttctaataccggcgggcagaatcattacgctgttttgggcatcgctcgaaacgccacacaaggtgacatcaagagagcttatcgtttgctagctcgaaaggtaaagaactaaggaaatgctcgtttagtaaatttctctagttttgcatcgtttggtttgattgattgttgcgttaaagatgtgaaatttgcaaccagtatcagaagtagttgagaacacgaccaatttcttctagcaacatgatttgg

SEQ ID NO: 45606 - DNA, 534 bp, Arabidopsis thaliana columbia
aatttaatgtttaagaaccttttagactcattcatgtactataccataacaaatcgaccattaattttctttatatttctggcattctttctctcgcccagacttattccttatagagagtaaacaaaggaaaactcgtatactagatatacactgtctgaaaatcctttcaatatctcatgtattattttattttattttatcaagggagaggaatacattcttttatcacattggtcgacttatcaagtatgaacaaggagtcaagtcccacgaacactaaccgttttgatgaggtaaaaggaagagcagtgagattagctccagcctttgtggattatgttgggaatggatgtcgttaagtttgttggttggctttctggattttccattagtcagattgatttgaatctaaaataaactccagagatagatcataatttcagacaaaaggtttgactcaataaaacaactatctaagttagaatgacacaactgactcataagaaaagaaaagatgaagttagtaactga

SEQ ID NO: 45607 - DNA, 523 bp, Arabidopsis thaliana columbia
  unsure (1)..(523): unsure at all n locations
cgccatgtagcagcttgtatctgcgttttaagagttcggagatgttgtgactcttgcagagatctgattataactcttcatagacaattccgtttaaggaaaagtccggctccttggaaagctgactcttggggcatcatgagcatatgttgaatgttatgatggtatccagaaatcagcgggaaaatgtcttgcaaagaggtagatagatatgcatcgtcaaatttgtcgttgccgagttttttggaaatatccaaaagtgaatctccttcctttgatgcaacaacttcgtgctctatatgttgaatgcctctaagtgattctcatatcaatgtttttagccgaactggtggtttggtggagttttgatttaattcccttaggtcatggtggactctctcatagtctgctttatgtgtcaaagggatatggtcttctccacctcgcttgagctcttcctcatctcggatgactccttgatcgagcttactagggatctcttgctgggattgacnccgattgt

SEQ ID NO: 45608 - DNA, 564 bp, Arabidopsis thaliana columbia
aggcttatacatacaacacaactcatgcaacaactatttagcccacctccggctagggtgatatctttggttgctagctcaaattatgatgttgttgcatatactgctggaagagctgcactaggagatgcatgtagctccagtagtaccgacaggagtgagggcttttcgcccccaaacaactcaaacccgtaagggtactttctgtttatctaagtgttggagcttttctagagtttgtggttctctattgacatgaagcgacccactcttgtgtaggttgtctgagagaacggaaaatgaaaaaatcagtgaccagtacatctccaaagctgctgaagatttcattagtagaacacggaaactggagactgactttgcagggtaaaaacctagctctctattataatcgattccagtttgaatggctactcatttgggctggttgatctcatgaacatctctggtcattcttgcaggctagaaaatggaactacaattccagacttgagagtcgaagtccaggatctagagaagtttgcagtgatcaatcgttttgcgaag

SEQ ID NO: 45609 - DNA, 543 bp, Arabidopsis thaliana
ttttaccttctctgcgtttacacctgaacctccaccactcacaaacacagcgtggtcaaagacaccactacatgtgcactgaacaactttatcctcactggtgcctaccttatcatttaaaccctcaaaactcacgtctttattattttttcccttgtaactttgcatctactccacccttagacatcaactcttcagcatttgagccaccataatcatccgacaagaaattaccccagaactctttttcatatccgccacagggcatagtgtcatcagaaatatctatcccgtcttcggtttcctctgttttgctgtccacacataagtcatccacgaagatgtcatcttcatcatcaacaattacatcttcgttagatttcagtccaccgcttcttgctattttttcttctacatcgtgtaatgcatccatgaattcgtcatctacaggggtcaccaggacattaggagatatatcccagaacatgtgtcagcatttctcgaaccactagctgtatcatacaaactttcaactttccgttt

SEQ ID NO: 45610 - DNA, 1021 bp, Arabidopsis thaliana columbia
gatcactgcaaacttctctagatcctggacttcgactctcaagtctggaattgtagttccattttctagcctgcaagaagaaccagagatgttcatgaatgaggtcaaaccagcacagatgagtggccatgccaaaatggaatcagttagctacggttaataccttgcaaagtcagtctctagtttccgtgttctactaatgaaatcttcagctgctttggagatgtattggtcactgattttttcagttttcgttctctcagacaacctacacaagagtgcgtctcttcgtgtcaatagagaaccacaaactctagaaaatctacaacacttcaaggataaactgaaaatatccttacgggtttgaaatgttggggggccaaaagccctcactcctgtcggtactactggagctacatgcatctcctagtgcacctcttgcggcagtatatgcaacaaactcataatttgagctagcaaccaaagatatcaccctagccggaggcgggctacatagttgttgcatgagttgtgttgtatatacaagccttctctttgatttaattggtgggctatcctcaagtaaagtctcaaattccacctgggagaacaaaagccatcaacgtattaacaagattgtacaaagagactcgtgagaaaacatgtaatgaggaaacttactttttcagcaaatcgattggttgctctggcccaatcaacttcggcctcactgaaaataatgtagaaagttaattacggtaaaggatattgaaagaaaaaaagggactattagtgctaatgccacatacccgagagtcttaagcctctggtgcccctgcatgacttctttattccaaggtataagttctgatgtggcggttttgcgcttctttggtttattaacttcagaagttgttcggttgcccatgaggcaatgactcagatgagggaatctctgctcctagtgtggagctgacatttgctgcattttaaagtgctgtgacgatttgacagagtgtgt

SEQ ID NO: 45611 - DNA, 554 bp, Arabidopsis thaliana columbia
acggtttactcaattgcaattgtagatgtcatgtaattttggttattatattacagcacttgataaacgctaagatagagttttaatgagcgggaacccaaaaaccttattccgccaaacacttagtcaatttttttagttttcgagcaaaaaaccaaaactcaaaacacaattaaactttctgtcgaaaaccctaagaaagaactctctcggtcctgcagcagttagtccgacgaactcactcttccgaccaccaattaaactctccgtcgccgtcgtgaaagctctccatgcaactggaacctcccgccagcacttaatccgctcaattcaagatcgaatcgaaggcaagtccttatctatgttgttgtttttctcctttgacactcaattcgttaccctagatctgtttctatcaatctcttagactcaataaccgatgtttatgtgattgtagtatggttttctttatcgattcttaaaattttgtctacttcgcatgcctttgttaacccgaattcatatgaatttcgtcttagtaatgtatttgtggg

SEQ ID NO: 45612 - DNA, 528 bp, Arabidopsis thaliana columbia
tagattattttttagagcatgaaataattttgttttccttccaagtcgcgcgcacatcaaatttatcattaggctaaatcctaacatctcatacactactgaatgaattatttatttatttacataaagttaaatttgcacttttggaaaacttatgtttacagatcaaaccataacatcgctggccaactgattatttggatcccatatgtactactatactatcaacaagttaattaacaccaacaaaaactattacgtcaaatagttctcacctaattgactagaagaaatcccacataaattcccatctatcgaaaagtttaattaatgtcatgcatggtgataagattttggatacacattcatttaacgcaaactcaaccaccatgctcgttctttgggacccattcagtaatgaagcaattgtaaaacttgtgactgtccttgtatcgttgaaatatctctatttacttatataataacacatcttcttcactatgtattcctcaagtgatctgtgctttt

SEQ ID NO: 45613 - DNA, 864 bp, Arabidopsis thaliana columbia
atattggtattttggctgggaccttatttacttggtcactcattgagtttccttgctggcatctttatttaatttcaggcttccactcaggaaggtgcttctaaagtttatgagttgctccggggtacatcatttcgcagtataggatggcccactttgtttgattgtataagaatttacgatgagaagttcaagcagtctcttcaaactgctggagccatgatgccagagttcctggagggcgatgcaaaagcacttgtcgcttatctgaatgtacttcagaaggttatataactctattccaaatatattctgtttcaactttcattccacgtttaatatttttatatggtgctttttatctaagacaatttcagcttgtattcctaggaactgaactttaacagcgatgtggctctagttgactgtagaaattttttatatggtcaacaagtttatttttcatatgctgcaggttgttgaaaatggtaatcccactgagaggaaaaactggtttcctgatatcgaaccattttttaagcttctgggttacgaaaacatccctccatatctgaaggtcagtggcgtactggagattcttccccttacactttggactcgcaaatgctatgtggaaagcatctggtatcggtatctatataacttgtgttcattgtaactctagctctctgcagagtgctcttagaaagaccattgctgccttcgttaatgtctttccagtaatgagggactctatctgggcttttcttgagcagtatgatctgcctgttgttgtgggatccaagttggaaagcgtgccaatcttctcaggtaattgcatgacttcgaggggatagttattag

SEQ ID NO: 45614 - DNA, 1029 bp, Arabidopsis thaliana
caagttaacgatcaggccaatgtggaagaagatgatgacgagctcgaggccgtcgctcgctctggggctctgacgaggaagatgttgcgcccgacgaagcacctgtctctgacgacgaggttgtccccgtagaagatgacgctgaagaggtatgtcttcgtttctgttttccactcttcgatttacattcgcatgtcggctgtgaattcggggattgctgtatttggaaatctgaatgtattctaagtaagattagggtttcctttgagcgtatattcgatatttgggtgtcttttggtttcgactctctttgtttgaaggtttatgcttagaagtgcttacaatgatgggtggtcgctcattatgatggtacattcatgtgactcgtgaggatatttggtcactcttttcataatttgatggttatatgtaggacgaagaagacgaggagaaagctgagatcagcaaacgtgagaaggctagactcaaagaaatgcagaagatgaagaagcagaaaattcagcaaatcttagactcccaaaatgcttccatagatgctgatatggtaagttagtaaataactgagctgcttgtctttagtatccagaggtattgaaataactcaatcattccatttattagaacaataaaggaaaggggaggataaagtatcttctgcagcaaactgagttatttgcacattttgctaaaagtgacccgtctccgtcccagaagaagggaaaaggaaggtgtgttgagtgcaacttatctcaaaataaattgtggttattcatattaagtttccagaaatataatttattgggtttcactttatcgtcaggggtcgccattcttccaaactaaccgaggaagaggaagatgaagagtgtttaaaagaagaagagggtggtatagttggatctggaggcacacggttgctcactcagcccgcttgtaagtacctttgtattgccctaatacattgatatagcgtatgtttgctcaagtcctattgcgagtcgaagttat

SEQ ID NO: 45615 - DNA, 714 bp, Arabidopsis thaliana columbia
ggagaagttggttctacttattaaatttatgtatctctcttaaggaataaagctatggttcacattcgagagactacgaatcaaaaaatcaataatttttatttattgaaaagaaattgaaaatggtcattaaataatcataataatagagagtttgataataaccctgaaaattcaaaatctaaagttgatcaccaaaaaaaagagaagaaaaagtgagccaaaatgtcatgataggaaaacaaaaaaaaagtatgaaaaaaaaataaaaaaatctgacttgcatgttatcagaaaagcatgaatccttcacttcactatacaattcttaatcaatatctctcaattttcaacagaaaataaattactcatcccaactatataatggccaaattgtctcacgcacatgcaaattccatttacaaatcaattcaattagacaagtactatatgaaactttgaataattgtatcaatggttcaaaatttcaaaatcaatgtgaagataaggtatctaataataacattcagaatcatgatgagagtattatttcataaacatttctctaagacaatgaaatcaacaagaactctcaactcgaaggcggttgaggcctacttcctctagctccggcatcgtctcctgagtcagcgattagcgcagctcgagcagagacaatctggctagacggtaaagcagcgtcgaaggtcgaaa

SEQ ID NO: 45616 - DNA, 597 bp, Arabidopsis thaliana columbia
  unsure (1)..(597): unsure at all n locations
tggtagaaagtgttaggttcgtaacgacagagatagtgtctcatgtagttctagttcgcatttttcggactggataggactaggttggtgcttatatcatggggtgggatgtgtttaaaataaaagggtgaattcattgttgataaggaaagggaaagaatctagtaaaggttttgggaatgttaaagaaaagaatgaggttcttgttagctaaagaagaagggttaaaagcctttggttttaatgattaaaaataggaaccttagttgttaaagaaatccaaatccgctagatgtatcagagtgttgagaaagcttctcctagagttaagagaaaagaaaagaatgatatgaaaaagagtttaaaagattcacgagtgcaaagggtagagttaagttcttgtattggcactggagttgggagtaccattagagcttcatttttatactctgggtagatgggatcttatctctgtatgcatagcttgggacttacctttagcattctactaaagctcaatcattttttgagagatccttgttactgaagcctattctgtaagggacgattaccttagcganatgangtcattgatga

SEQ ID NO: 45617 - DNA, 456 bp, Arabidopsis thaliana columbia
catttactcaaccaagggtgaccatctctataagacttgttgagctatcaaagcgtcttcggatcctcctcattccccactcggagcatagacacaaaggcgcagactttgcagcaccttcattactcgatccccgaggtcgagtattcgcccaaaccgcctcaagtctcttgtcttctagtgaatctagggtttcaacattttatataactcccccatttccgggtttgtccaagagatctagactttatctttcagtcttcccttatgtttatgaatcttgaaactttaattactcttaatctatttcgtttttgcatttgattgtttaagtaaagttgtttagcttgtttagatctacattttggtatgattttagtaatttctgggtttgtgttcttgagaatgttgcttgagtagtgattagggttcttgaggatggattagcttagggta

SEQ ID NO: 45618 - DNA, 484 bp, Arabidopsis thaliana columbia
tcgtatctattcttttttaaagactttatgatccatttgccttgggtcccaccagctatataggaataccctatcttgtttataagagctttgatacattgttttcattgtgcttcctcattcatccgagagctctctttaggctttccgaaaaggtatcacatgccaagtttggcctcacggtctaaaagttatagagtcatatatttttaacaaaaaaagagtaacaccgaaaaaaagagggatgcaacacgaggactttccgaaaggtcacccatcctagtactctcgcccaagcacacttaactgcagagttctgatgggatctggtgcattagtgctggtatgatcgcatccgttactacatcgattcaatcgtatttattcttttttgaagactttatgatccatttgccgtgggcgcaccagctatgtaggaatccctttcttgtttataagagctttgatacatacaaaatatttg

SEQ ID NO: 45619 - DNA, 791 bp, Arabidopsis thaliana columbia
cacggtttctcttattaaaagttggaaaaaataaatcagaatgattaatttttgagagagctgtctctcttgacagagattttggaaggtaagagagacgatgacgtatcacgtttttagacgagactatggcgatggagagtgaattttgcctttttggaattcccacgactctctgtatctttctttaggcgagactatggcgataaagattgaattttgcttcgacaattgagggtgaaattaacggcaaattcaaaatttcggtttctgacaagtcgttccgctggattcgtcagcttctcaccatcggcgaagcgaggttcacctaatcggagatttgcgactcccagttggagagtaatcgttgaggagaggcaacgagtgacacgagcatatcacttctctcgccattcttcgtacccatcgcaagctaggtctcgtcactaagctcatgagtgccgctcaggctgctatggaacaggttagtcaacctttaaacttcgtatttgtttgcattcaataagcctaatcattggatcaatatatagatttggatgatatgttcttcttagaagcgattcttactaaaagttgaagctttttatatcaacttttgggatcttattctgttattgaatagtggtaattgcttcttcttttgactggaaattgaagcaactaaagctctgtagattgtataaagaatttaagttttgtatccgattgttttatggtttggactgacggagacaattagtttctgatagttgtgatgggcttctagtgtg

SEQ ID NO: 45620 - DNA, 624 bp, Arabidopsis thaliana columbia
aagttactcaagtcatcaagattgcatgcaattcatttatgttgtgtcatgtcatagtcatagattaaacacaaacaaaataccagactatatattcaaagttgaggtatttatttaaatatatagtcaactggtgacttaacttatttcaaatactaaaagaaaaaatattcaaatatacttacatgttagattctagattagctaaataaccttgaaattttattatttagataaataacaacgcggaaatattctaattgaagagtatttatatgtttcaacgctttgactaaagtagtttttataatcatgatattttattagttacgacattgagagataaatgatagcacttacgtgcgtgccatttcattcgatgaataaactagtagtatgctcaaatgtttgaaactaataacgtgttattttcaaaaaaatcccatgcgtaatttattgttaccctcgcgaatatattcatttttccccaaacatgttaaattaatgtacgtatttttagtttaaaaaaactcagataaatatttatttcttagcttttttttagtaaaatattattttaattttatgagtcactgaaacattgtattattgcaggatatttga

SEQ ID NO: 45621 - DNA, 889 bp, Arabidopsis thaliana columbia
gtttttgaaatatattttatatattcatcaaatttgataatacacttcatcttattgttggcttgcaacagatgacaactaattaaacaaagaacagataagcttctttttttataaatttaaagaaaagaaattttcaattaatggtagtatatatttgtaattgaaagtttcttttaattttagttgtcatttaaatgtatctaggatttatgatttatgatttatgtttttttaaaactaagaatattttaatacctttttttttttttttggcaactaattagtagaagattaaactctaaaaaaaattctaacagaaaaattaaaacttacgaatcattatctatctatataagaattaaaaaaagagtttaacaaatcgtgcgtttggataatcagaagaatcattatctatctatataagaatcattatctatctatatataaagcagttatatacttttctttcttcaaccgttttatagactctattgatctcccggaactttctgttaccttcccatggataatcagaagtcgccgaagcaaccaacctcccaagacttcaccaaatccgccttcaagcttcttgcaaatcctcacattgaaccgacggtggaattcatcgccgccctcacaaagccaccggagaatccagaagataaagacatcaagttcttttgtttctgcgtcgccaattacccgggatgcttctccctcaagctcatgcgtgtctactcctcgaaagagccacgcgtcccatacgagatcagagagggtgcgatgagatgtctccacgttatcttcatcatagaagaagcctccttgaatttagcagtggttcacatactctcgcctatactcatatcatgccttgaagaacaag

SEQ ID NO: 45622 - DNA, 676 bp, Arabidopsis thaliana columbia
tagctctataacatgattttttgttgtaatttgtttccagctttgcacgatgatggagaaaccggttaacatcaagttaagagtaacattctatgcaatcacgaaaatttcacaacccgaacaaaactaagtacagttgacgactagatataaaacgagtcatatcagtcgtgaaaatggagaattcgcaagacttagaccaaataaagtgaaatgactctcattgcctaccttgtggctagtagtctcttaaaccggtgcgatacgtgtttggagctatgtgcgattcatgttaggaactttgtgcttcattcataacttttacatttgaaccaattgttctgttgatggatccaaaatctttggaccttccaagttatatataagaattttaatagttgtattcactagtatagtataatagatgagttatggcttagacttatttatagttagatcacttttggatctaggtagattttgactgtcttagactctatattttttgatagatacgaaacccacggaacaactttgattcgaatattttcattttccattgggcagaataagaattcaaacaaaaggttaaaccctaatttgggagttgaagacttgaagtgaagagattggtgatgatagttaatgatttttagaattttatatataagtatga

SEQ ID NO: 45623 - DNA, 1144 bp, Arabidopsis thaliana columbia
tgacgagctttagccttagtgtcatcaggaacttcagtagaagcattattctcctcactgctaatacattaaagcattaacataagttgcagcacataaagtcagcttactccagatagaaattgcctgaggggttttaccgaataagttgtcttttggtggcagcaagattcgagagtaaagaaacattgattaggctgctggattgcttcgcaccattttcctgtggtaaagacaaaaaaactaataaaaacgatgtttactaaactatattactttcacgaaatcaaaagaatcaacaatagagtcagagaggtcatgaaccttagagttttctttgccagagagcatccaaggcctagcctttttgacaggatacagttcatccatacgcatctcaatgtattttggattcttcgaaagctctgatttcttgaacccattttctctctcagcactactgccaagacaaatctagtaagaaaacataaaagttgaaaaacttgacagacatgatgctttataccttttgcaaggacgcaatgcatcaaaagcttctttagcttggtccacaaaagcagtccgtttcaattgttctccctgttgagtgagaagggtattcaaataaacaatcttcagagataacttccaataactcaacgaggaaaacattgcacaataaagagaaagaatcaaacttactctcagttcagaaggcgtcttcctcttagcaactactttcgtcatttccaaatgatactgttcgcttgatccccaaatttacctaaccccaataccaaatctgacgcacaatgttattattccattttaccagcaagatctttgtcaacataaaatatcaattcggttcaaaaatcctcacaatatgaaccctagaaactggtgaatagtaccagcgaagaacttacaagcgaaaaaaaacaaaatcacaaacataaatgagagataggacatactcaccacgctcgatggttaatctcttagcgatgtaaacatagaaacccagcggcgattacgagctcgtcgtggtgtaattctcatcacggcggggcaggctagggtttgtcattattctctctatgtgtaaatttaggggaacaacaaaaaatagtggagagtgaga

SEQ ID NO: 45624 - DNA, 456 bp, Arabidopsis thaliana columbia
cttcaaagtgagtgggattaccttcagaagtctgcttgtcaaacagctgcaggaagagctttgtggaaacatgttattcatgatccgcttgctcatttgtttgctggagagacacatttgagaaacctacacacaaagattcagactgaccgtctcaacaatgctcgagaggtttctggtgtgatcctagccgttcgaactctctggtttgacacaaggattcaagctgctctggagtctttccacggcgatgcagcacaggttgttctacttggtgcaggtttgtttcccctgtttagacattttaacttatgtgtgtatatatatatgtggagcatgagtttaagataagtagccaacatagaatgatgtaattgaatttcaggaatggatgcaagatcatacagactaaactgcttgaacaaaagtgacgtattcgaagtggattttcaagat

SEQ ID NO: 45625 - DNA, 1086 bp, Arabidopsis thaliana
acggatggggtcacggaggagatggaagaccgagagacgaagacggctatttgcgatagagtcgccgacgtcaagaggttcacgagtaatgcgctcgctctccttaatacctacgccaacaatggagcctaactaactaagctaggtcttgaaattcctaaagttataaaaacacttgtatatatatatgtgttaagttgtgtgcttagtttataatgtgtattcgaggctttgaaaccgagttagaactctgagtttgggtgttcaaattatacattaatctatgtttgattgtattaatattaatatatgtcatatgtgtttatatggtgtgtgctatatgagtaatgaagataattatacatggttttgatgagtaaatttgatacatgaacctggtttttttttttttttttttttctttgatgaatttggatatgatatggatgaattttggccatcatgtctaaggggaactgaaacccgtgagatgattagaacatctgactatgaccccaaagtttgtctattagtggcccactctaaaatctttacgaaaacaaggttttgtcctttttgttcacggggatgccaaaaagcttccatactctgttcacagtttctatttcaatccctattgataatgattacacacattcgcttcacagatttttctaattgaattccctttgaaattttcaactcccgcgctgattccacagtgattctttcttctgctaactgtagcataattaaattagtgacaataatgaatgtttagcattaccaattacatagttttcccctcattattaagtgtgaaaatgaaatcaaagcagcaataattgttcaacaagagaacaaagtttcacataacacaatgcagtaataataataatacacagtcgctaatgttatatcttatctcaggactaagcaacaacacacacacaaattctaaagtttacaatccaaatactgaaagaaatccaaataaatctaattaagctaaattaaagcactctcttactctctaagagattccatttttcagtaactaaagattccgaaattgcataagtaccg

SEQ ID NO: 45626 - DNA, 909 bp, Arabidopsis thaliana columbia
caattcaacgagtcaaattaaataagttataaacatgctcaacatgtccttattgtaaagaatcattattatcgaccaaaaacgatgaatataataagtcatattcttgatgtgattatgtgagtatataaaataaaagacctttagcagttttcaaatgacatttagtttacgataaactcttcaatattcaaatgtctgtccattaaagaatgtgcatgtggcatgctttatagccactctactaattgtataatatatatatatatgcaattatgttagtaaactaaattattatttctttggttagtgcaaatactaatcgatcagctaaagtttgttaagaataagatgcctgatttttaagaccaagttggcttattaatttatttgtggatgtcttatttgtgttgtcttcatgatcccttatatatatgaatggtcgtcttacccgtatagatgctaaatttgtaggtatatatgtttaataatattgtagagatcatagattcgaaacaacattattgaggatttatccaaaaaaacattattcagaaatatatcattttctttctctttcttgtaaacatattcatatcacctttatccgaaagcatctagagatgctacataaaaaatgaatataccatcaccaatcaagacaaaattgattgatgtttgcttacgtatgtacactctacactatatacatgtctcgctcttataagtcagagtggttatgcatgtaatcatcttgctaaattacgagtatagttattgggatgccgctatcagattttccaaattagccgacgcatacatattcgtcgactaagagccacatatgaatgttgttaccaagtttcacgaaataagcaaattgctgaaacacaaactacgtcgcgatgg

SEQ ID NO: 45627 - DNA, 1161 bp, Arabidopsis thaliana columbia
ggctttagcgaattgttaaaacacccaaatgcgacggaccaagagcgctagaagccttccgcagaggtccgagaccaagccgtcaacggttaacaactccaaaatgaatttttgatgtagaccatgagctatctcaaaaccggaacttcacacaccaaaaaatgcaaaaggtgcgagctccctcaataccaagttcattccccgaagtcagcagcgcagagctaaataaaaccaatcaccaccacaccaaaagccatcagccctactagttcctctaaagctaaatccaaacgcaagaaaaaagagaaaaacgcaaagcaaaactatcttcaaaacaaaggcaaacaaaagaagccacaacctagaacatgcctggagataaccaaagggatgatacaactaaagagctttcaaaagaagtgggggactagctaccaccgatagctaagccacaacctatcaaacaccaaagccgctacaaaaaggagacatagagcatccagaacaacgagagagcctaaacgccacaagacaccatgctcctaatagttctgctattgtccacatgtagaagatgccaacagagacgtagaacgccaaaatccagactcgacggtgaaagctagacgagattcaaagcaccaatagtaaccaatcactgagtacctaagcgaagaagggctagaaaagagaggccgaggcaacataagctacaacgagtcgatggagtacaccaaccaaggctaaaaaatcagccacagcaaatgaaaacctctcgattcggactccaacacacgatcgactcaaacggagaggacagaggcttcagacgtgaaggaggaagttgtcctcaaaacaaaccccgccacagagaagcccaaatctctggtagatacgcgcggacacgtagcggaaagaccaagataaacttggaaataatggaaccgataaggagagaagcaaccacacgcaaagtgaagggactcgaaactcataatcgggaccaccgggaagaaggcgatctacaacagatctacaaacaaaggctcgctccactgcttgagatgcgagatgctaaggccagaaaatagaacatccaccatggcacactgctgtctacaagcagtggagatagaagcactagaaacaaccacgagaaga

SEQ ID NO: 45628 - DNA, 550 bp, Arabidopsis thaliana columbia
aataagtgacatggtttcagactccattgtagctctgattctcaacatcagccgagaagtccccaagatcgttatggaagaagaagatgctgtgaaatccgaggaagagaacgggaagaaagttgagaaagtgatatacgcacttcttgtttcgcttttcggggatgtgaaactaggagaaaacgggaaactggtgattagggtcgatggcaatgtcgctcagctggataaagagagtggagaggtagagagtgagcattcaggtcttaaggaaagagtgagagtagcttttgagcggattcagagcgctgtgaaaccaatccctctctcagcttcttagtagctttttaaagtcatcgttgaggtatcttaaatcatcatagagttttatccatctgatgatgtttctgttcccatgtttagtaatagtgaatgatcaagtctaatggatgttatttaagaaggtgtttattgagaaactttgctactaccctactgtgataatgatcaagtcttatggatgttatcaactatgagttttaacttttta

SEQ ID NO: 45629 - DNA, 866 bp, Arabidopsis thaliana columbia
atctcaggctctgcaaggtatggatagattgagtgactttgagaggttgacggcagaaattaagtccctgaaggagtctttaaaggagaaaattgataaagttctttcaagaagcgtgaaagaagctagtgaaacctcagaagagaaaaaggaacaaagtgaaatcgcagaagagggaaacgaagatggtgataacgtattggtgtcttctctagaagacgagatcgatagtaaagaagaagaagtgcttgctgcgagttgcaggctgcttaacgtaagcttttactcttaatcttggattaattttactcaattctgtaagatatatatttatttagaattattctgttcatcagatgtttagggaacttgattgcaccttcgatggccctgaaagaagaatgggacgactaaaccttaatgaaattacagaagcatgttcacgccacatagtgacggcgatggaaacggagcaagaaactttaaaccgagcaatttcaataagcaatgcttggaaacaccaagtcagtgctttgtacaatgggggcatagagggggaacaaatcaaaaaggatctacaaagactcaaagcgagctccggtgatgaagtctattggctaatacgaaaggcgtttcgtgaagcgcgagtggctttgaggacgaatgtttatatgaaaccgtggaatcttgaagaaagaagagaagcaacactcatggaactactcggtccgcttccagagatagcccgacggcggcttcagggcaggccacgtcgtgacgactgctgctgagtagagctgggcattctacgtttaggatcgatttttttctattttccttggcttttagtttgttacggagaaatg

SEQ ID NO: 45630 - DNA, 491 bp, Arabidopsis thaliana columbia
ggatttcataatatatagttttttaaaaaagaaaaaaatgtcgtgacaagaaggtcaaccacgtatgaagaggaaggaacaaagtcaacagaagagatgttgggctttgtgttttgttgtaatgggctgcagatgaattaggctcaaatatgtttagttaatgagtgttgggttgttagtctaagatagagtctaaagatgttgtgtaagagtgaattaaggagttgggagttccaacatagctaagtaggtcatgtaagtcttaggacaatgatgcggtctagagtctaagtatgtgtagtgtagcaagtggagctaaaccactatatgtatgtgtgtctttgtgttgagtaagattatcaagtttattatcaatgaagacattaaagtgtttaaacgtgttcttgtattttctgttttaacacgaacaaaaacagaggttgcgagaaaaacagagagtttgtggtgagaattacaacaaactttataat

SEQ ID NO: 45631 - DNA, 445 bp, Arabidopsis thaliana columbia
cagttacattcaatgaggctaagctttagcttctctactccattgtccaatggataatcaactaaatgagtaacaaatcctccatcgatctcgtcattcagtgtcagcgagaaactatccaacttacggttacttctctgcctcaacacttgatcaacaaatctcacaaaatgctcctcctcctgattatcactaaaagaaaacttaagacttgaaagattcttcatctcacttctccaccatcctttcataaagagaagagaaacagtaaccgcggtcttggttggtaaccaagacaatatgtgaggtgcaagacacttgggcaaatcacaaagctccgttttcttcttcttattattcgatgtcatctcaacaaacctgaaattaaacaaacacaaaatctaaaatctgtataagagaaaataggaatctgagaactaaaagc

SEQ ID NO: 45632 - DNA, 799 bp, Arabidopsis thaliana columbia
gttttaattgtcttactagctacgatcataattatgcttatgttaattggatcggaagcgataattatgcgcaacatggtaacacataatagaaatatatcgtggccgacaaaaataattgcttgcaaaggcaactcattttctctccgtttgttcgtgatatctcagtgttttgaaattgtgacttttatataattaatagttatcatcataacccatgacacaaaatttcataattcaaactattgatcaattcaagagattcatatatccttattaagaaagtacatcgatcagctaatgatgaaaatgtactttttggccactaaataaagtaaatgctataggatttcattgttcagtttcacaactttcatcagtcgatatatataggttttttcttttatccaaaagatgatatacatacttgtgcatgtgcctctcgctggaaatatatttacgatgtcaataaaactactggaatttggtcattcgttatcaaaacagctagcaaattttagtaaagaccaaaagattccatcgatcgatcgcacatgtatatctctcgagtgggtcgacgtgtaaagttgataaacacattacataacactagataacactcgaaaaagctattcgaaattatggaacctttaatgaaacgtccaattattgatcatcttcgtgaacaagaacggaaacttcttcgccgcttggccacgtgatagccgtcgtggtggctgacgccatcgtttggttgtaacagaggagaagaacgctcgatctatctttgttgacgatg

SEQ ID NO: 45633 - DNA, 734 bp, Arabidopsis thaliana columbia
tcaagcatcttatgagacaaaatagataaatatgtacttggttttgcgattttgttgcagatgtgaagattgtcactgagatgccaagcaatatgttcaaaaggccaaagctgaacaaagagtctaatgctggtggatcatcatcaaatacaggaggtgagaataaagacagtaatgagatcttcaagccttctttctccagacgcagcatcaaaaagccggattttcgatccggtaagaggagttctgctacatatgttggccatatatcagcgtttagttcaagtaaagccgttgcgaatgttgtttattaaaggcctgaatggttttactaaaacaatattctcctatccttcaaatgtgttgcagatgaagtagtgacgaggaagaaggatatggaagagaggaatctagagtcagaaagagttactaagccagcttcgaaatgggacgcctacttaatcgatgacgaaggagaacaccaagcaccaccgcgatttggtgttaaaaaggccttgaaggatgacgaagtaggaggatgggacagagcagtaatggagataaatacggaatatcagatagtagacgacgaggtacatccagatttcatgtgatcagaatgtttaaccagaatgccgattattagataaaatgctaaatgtaaagtttctgaaacgaatttggagttcaaaagagttgcacattaaatagactcctacgaaactagagaaagt

SEQ ID NO: 45634 - DNA, 994 bp, Arabidopsis thaliana columbia
cctgcaaagtgttccatttccaacattgatgtgtttcttcatacaatattttttactcggaggaagacgaataggtcgatgacttggcaaacacgtttgagtaagaccttttagtatatgtaaaattctttgttggaagcaaaggtgaaacacaagaacctaaactcttcttcaagatctctccaaggtttattctttgcaatgtaatcacatcttcagttccttgccaaacgaatgcaagaagatcattagagcttacgaaaagggaaccaggttttgaaccggggtatcggaatccataaccgtcagcgataccctctcccgtgtaagaatgctcgaaatctcttccatctgtatcaaatggaaacggctcaagggaaggcgtgtcaatatttacaacaaacattgaggatccattaggatgctcagcaaaataactgagtattttcgtcccgaaaagaattctctcactaccctcttcagattctccataagtgagcattaataagagaagggactcatcttcaatatctttcccagggggccagccaaacgttcctccccacaaacccgcatacacgtcgtgatcgagaggtttcttcattggtagtttatgaagggaaaagttgtctgcgctcatgattggccacccttcatatgaagacatcaaagtgcatgaagctttaagactaaggcaaaatgtattaccagagctgagaaagctttggcgattcgaacgtcttgtctcactgctcgaaggcgaattgatctttgaagaactgaacttcccaagaatatgtttaatgccacttcttaaaaaccggcgaaagtcttcttccttggtgtaactctatctgatcctctatatcctccatgttgtcaatgtcatcaccaagattttccaacaattttcttatgtctatctctatatgattgtcacacaactgctcatcctcctccaagtttatgtgcttccacgtttccacaaatttga

SEQ ID NO: 45635 - DNA, 472 bp, Arabidopsis thaliana columbia
tacattagttaaatttaaatgcattgcaagctcacatgtatcaattatatataatgacatgtggtcaacatcacattaaaaacaaaaatattatgttttctgcgtagaaaaaaacaagctttgtggttaattttttttaatatcattttttatttcaataaatattttatggataaattaaaaatatgttaactccattagacttaacactaataacagctaaacacaaaaattgtaacatcttttgcaattcattgtaatgtttgcaattagtgggccttctttcgagccttcttatgtaccgaatatttgcctatttgggctttaaaacatattgggccgataaaaaagagctacaaaataaacagctaaacaatttttgatttccatagtattgtagttttacccgacccggaaacaaaatccgggttattcctccgaccccccaatagatctgactgaaatcaaaatt

SEQ ID NO: 45636 - DNA, 684 bp, Arabidopsis thaliana columbia
taaaatatataaatttaaatctaagaaatcacaagcatgagtttttccttccggtaatcgtaaaatcaaaaatcgctcgctcgagaaacgccggtgctagaagaggaaagtaccgtacataatcctgcgaacccaattctcgtcttcttcaaactcagttttccgaaaccccaaacaccgcgaggattgcatggcctgaagaaccacttaatcgagaattgtgctggaattctcaaattttccctcgcgtttttctttcacactctcggaatcggaaatttccaccaagctccgtcaagcgatagattctgacaattacacactttcgcgcaggtatgcttccttccctgttttaggttggtgttaatctatcggtgaatcgaaggttttgggcctcgggctttgcgttttaggtttttcagagaatcttatctacttggggatggatcttaggcgtttgttagatgtaactcattagttttgcatataggaattttgatttgaaagttaggtcgccggatttgtagacattttgtttgatggtcttcttcggtgctcacattctttgtttttaagtgcttgatttggttgctaaggtcctttccgttgcgtgctctcagtgaatatgaagaaagatgaaaagattggtttgacggggagaccatttacaccagatccctagca

SEQ ID NO: 45637 - DNA, 1007 bp, Arabidopsis thaliana columbia
tctaccattgagatacagagaagtgaggttttcccagtataatctgatgaaggaagatgctcgtatctgggagattcaagctgatggtttgaagaaatgtaagtatgaaacacaagagacaatcaggtaaagagtagaaagaatatgtaatagcagaggagaaccctgcatcaattacctccccaacatctactgcttcatctgttaatgtggcaactgtaaaaacaactccaagtaagccttcaattgccaacgttattgcatgagcttcactcgcaacgagaacagcagcactggatgcatcattatcaagaatccactcaattcctacagcaatagggaatatatttaatgacatctttcttagaatgaagtaacattaatcgaattctgaggtccttagaggtaatgaataatcatcatagcatcaaataattggttacctttagctttgctactaaacatcccagcaacagctgctagactttcctcactcgtctcctgaaactacttccaaggaaaccaactctagaattaagctatgttccaagttttactcctattatgcgatttcaattcttgagctataataaacaagccactatacagttcctgaaattcttccatagaatcttttcaggtacacataataagtaaaactaaatgcacatctaaaaccaactaataaacaaatcaaaattagcgactactagaactaatgcaaattgagactacaggaaacataacgggcgtcctgccctacacacccacctgtatgctagaaacaactcgagcaagtgctttgaccatgctctccacaacatttcgtgtttttggggtgccttgaaagacaaagttaatattagatcacacgagagacataattagggaaagaaaaaaaggacgaacagagaattctataacaccagacataacattacaatctttaccaaaagtccatagtaaaagttagtagaatcacaagaaaaaccaataagatttagaaa

SEQ ID NO: 45638 - DNA, 729 bp, Arabidopsis thaliana columbia
cactttatgatcttgctgtctctcaggaacttagctcacaacaagctcgttggatcattaccagatttgtcagacatgaagtccatgaactacgtgtaaatttctcaccaacagagaacgtctttatctacatttatgcgtttgtgttctctgattaaatgtgatgtctgttacagagatctcagcaataactcatttgatccatcagagtctcctctctggttctcaaccttaccttcactgaccacactgtaagtgctgctctgctacagtttacaaatcagaacattcacatatgggagctctctaaatatgttactattttcttgtatttagtgtgatggaatatggatctcttcaaggaccactacctaataagctctttgggttcccacagcttcaacaagtgtaagtttcagcttttagtctccactgaaatttggttacagctttagacatcatctaattgctgaattggatttgcacaggagactgaagaagaacgcattcaatggaacactgagcttgggagacacagtaggtccagagctccaacttgttgatctacaagacaacgacatatcctctgtaacactaagctctggatataccaatacattaatgtacatagcttctttcttcttaaatgttcaatcaaactgtctatatcaacctattaaagaagctctctcttgttgcagactcgaaggaaatcctgtatgcacaaca

SEQ ID NO: 45639 - DNA, 1198 bp, Arabidopsis thaliana columbia
ctcaaattctgcaattcatttgttaaattacaaaataagagaaacaagacgagaaaacaaacgtaccaccaccaacgctcatgaatcatcatcgcagtcggaatcaagccacccccgtgaatcgaaaaatatcatatcctctttgttaccttaagacataatccaaatcattgttatctcatgtaacgtattgcaaataagaagatactaatattaaaatggtaggttatgtatgtgaatgtagtatacttttagttgcacacacctaaatatacggttgtaaatttctagcgataaaatttttaagagcatatgcatttattaacattaagataaataagcaaatggaagtagcaacttgaagtgtggtccatcacacatctctcgcaaagatatatgccttgaagacattctaacctatatcgtacgccaccgttgtccaccatgtgctgctaaatgctactgtagcagatatatagaagacccggttgcacattcacccatgtttatttatgatgcatgaccatgatccatttcatatgtaagtcataacaacttttttaatcaaatcttgacttaatatataagtatacgattttgtaattcatcagtactaaatacctcatttgtgcctacatcttgattgggtctgaaaaagctaaccactttacatttgtcggcactaaagcttacagtcatcaacaactttaattactatataaatacttctaccattcgttaattagacctttaattattgtttctagagacaaaacaaaaataaatcatataaaataaaataaaggccgatatgaactaaactaaacgcaaagaatagttatcgtaataataaacctgaatcccaacgaccggaatcgatgggagggttgccgttgatggtggaggaagtgatcatgacgtcagtcttgaggggcggtgtggagtctggtttagagatgaaagaggcaagcttcacgacggaatcagaggcggatgagctcttgctttgagaagaggagacacacgaacccatatgatgatgatgatgatgtgaaagagagagaattcctgtggtttaggagaagaagtgaagatatgggtttagagaatctaaaaggcatagagagatggaagacgaagaagcaaagatgagaggaaagagagagagtagctttggaatgggagggcttggaagtga

SEQ ID NO: 45640 - DNA, 456 bp, Arabidopsis thaliana columbia
atgtacattttaatacgtatatggcaatatcattggtagatacactatttctaacttaaatataaaaatgtggtaaaaacataaaattgaaatactaagacatgttactttaacacttttatcctcaaatttggatttctggatgtttctataggtcgaaccaataattaaagaattgatagtaacaaaatgggttttaatattgattagaagaaaattaaattaggttaaagaaaaaggaaagaatagacgaaaagttaaataaatttcaatagggttttaatattgattgatataactctctgactcttctgtgactcttttcaacttctgactctttctctttcgctctctcattcttaacaagaaaaaaaactggcatcatctcatcatgaggaactattttcctccttcagacggtgggagatcgacgactgatcgtcgtcagcagtcgtt

SEQ ID NO: 45641 - DNA, 489 bp, Arabidopsis thaliana columbia
ggtaccggagaggatcccccgctgggtagtgaaaagattcaaaaattactgataacgaatatattaattaactatgtaataatcaatcttcatgaccacaaggattattaagataaggtttactttttttatactatacttattggggagtttcagatttgataagtttatgtctagcctttaattaatgatttagagttaatcaaaaataaaatctggaagactttgaactgaccaaaaagactctcatgctaagtaattgaaggacatttcagccgccagcttgacccaattaaaaagcccattttagtttttcttccctttgttttctcttattttaattttacctcagtttataatattttattctctgaaatctgaaaaatcatctcttctgaaaattttgttttccgttaattcgtcgagtctctcgatctccgttctcatcagatttcaaactctccgatctcggattccgacgagatatta

SEQ ID NO: 45642 - DNA, 783 bp, Arabidopsis thaliana columbia
ttcatagatttttcttactgaatatatatatatataccttgatggttagattttcaagctttggagaatgcttaagtacacatttgcgagcaattaccaaccatcttcattcataagacctaaagataacttaattagactgttgaacacagttagacaatcttcatagaaggaacaaatcaaacaaatcttctgaaaacaaaaacaaactttaagactgtcccaagatttctcaaaacgaaacaaggaaaattgccgagacgcaaagaacttacatcgaccgaaccaggagacaaatgaaggatctcaacattaatttcttatccccataatgagtttcattacatctgcatccgcaatgcctggtggatcaaaatccagcgtgtagcatgtcaggagtccatattaacttgtggatactgacacaaggagaaactagaatagttgaggtatacaagatttggcaggtcaaatgataggctgctattaataacacgacttcgataataaactgatagtctcttgagagacgggctcaatatggtgttgttaggtattgttggtttgcctctgataaggagtgtgttaaggaatattgttaacacctaaagcactcggcaaccaacaagaagcgtgcaaagcaaatcatcatgtttatcgataatcgtatctatgtagagaaacttaagagatggaagtgacacatatgaaggaaggtttctaagagggagctttagtgacagcttaacaagtgttttccttcaaagagctggtgaggcaaca

SEQ ID NO: 45643 - DNA, 495 bp, Arabidopsis thaliana columbia
gtttcggttaggagtttggtgagtgctggagcagattcaagccatggatctggtggttggtaagttactgcgattactgtgaagatgagaactgtgaaaacgaagactgagaaacagacattgcttattagcttgattagattttgtgcgattggttcggtggttagatctgattccttcatggatttgagaagatccagaagaatcgcagagatagaagagagagcaagatctgatgcgaaatcaatggaagctttttggtgtgaggaagaagaagaaaatggactctagtgaactttttttagtcttttttttttttggacaagtcttcttttttttcttactttgatttttaatttgggaaaaatgtgccaacttttaaatttgggaaaaaaaatgcatgagcttttaaaatgtaatttaaatcttaaagtttggtttgactttgtcaaaaaatagttaagtttctttagagcacactggcggttgttacta

SEQ ID NO: 45644 - DNA, 538 bp, Arabidopsis thaliana columbia
  unsure (1)..(538): unsure at all n locations
gtttcttacactaatttattttatgtttttaaaataaaactacaccgtcaaaagcctacctctgatttttgacggacggtttatattgattgaagaactagccgccaaatctatatctaacggtcaatgtgattttgtctgcgcggattttacgagttaattaacgtacgcgtcctacgtggcaatattttaacggtagaaaattaacttgtgacgtttaattggacagtaatcgttaacttgtttaattggtcatgtgagtttgcctatagattttaatattttattacactctagaatcttggttagttcactagctaaatgaaaaacgacatgaagtttgtagtcgatagcaaaacggcaagtatgatttgtttcctcatatgttgttcagttgaactgttattgattgtgttgggcaagagtgttatctatttctttttttactagaaactagatgggtaccacgctacgcgtgantttgttgtgaaaattgttaaagaaaaaattacattgattgttatttatgctaattata

SEQ ID NO: 45645 - DNA, 558 bp, Arabidopsis thaliana columbia
aagagagggctgctccgagttttcataatcaggcaaggcatctcccttcagggcatccctacttgattcaagcgaattgaatgtttgtttgttgtccagaggcttcatagttttatttacaggtgatttagtaagttgaatatcaacaggtcggtctgcaataggctccagttcacccttgaagcgggccagtctctttgccctggcttgctcttctctataagaaatccacaccgtttagaaaactttaagaactggtccacagattaatgcaaagagtcaatactgcgtgattaaatattgtacccttctgtacaatcttgagaagggaaagagtttcgcgggatatcctcttcaattggatatacaggtggagatctcgtcctttttgttgcaggtgaactgtttgtcttacgcgcattattgaaactatttacagaggagggctgtccaggaaattgagaatctgaacttcttgaaagtgtatatgactttgtgcctgacgtaggtggagatgtcgaaaacctatcacagaaacagcatgcttaactaggagga

SEQ ID NO: 45646 - DNA, 631 bp, Arabidopsis thaliana columbia
tttgtctcatttccaaatcatgactagctctctctgatcattacaattttaaaccgttaaaacattctttatttgtttgatgatacaaatttttagttagttttagtttgatcattaaacccattattgccctttaatacagagacaactaaaccatacagatcaaaatcaacaatattttcgagccgatcatttttctctgtgatcaactaaaccaaacccattcttgtatcaagacttcaagccgatcattttcgaagctctctctcaaagaagtttccgattagtatctaactatctatggatttaatcttctatcatatcgttttcaagctttattttaactggatctctttggtaaaaaattgcgtgtttctcttggttgttgtaattgtaaattaattttaatataaatatggttgcacagaacaaaaaaagaacaataataaagtggattcaaacctaaatgtatattatttgattttccaacgtgaaaagaatgcatgaccgtacaataatcaggaaccactaattttcctaccaaaactatatgtatatgttattactttactgatgggatgggatgggacataaataatcatattacatttatgatcacagcagagattga

SEQ ID NO: 45647 - DNA, 539 bp, Arabidopsis thaliana columbia
taaatttattaaataaattttaactaattaacccgtggtccaacccggttgacccgatgacgcagtgacccagaagatagtccggttcatcgtccgggtcgggtttcaaaacattggtttaaaccgaagttggcaaatatacttattacgttgtgtaaataagttaaataataggattggtgaaaaccctcaaaatcgtaaaatgattaggtcataattatgtcattgtatatatagagaattagagatgcatacgtagaatctagacataatccttaagaaaatagcttgcctaaacagctgagattgacaagcattattaacataactaattatgttttatttcttaagccaaaacctaaaaaaggttatttggtaacagaattgttatttgtacgtcaaaatgtatatgatttggtaatggtttagcgtgtgaattattgttgcgggtgtttttttgttatacaactacaatgacattaacgctttttaaaataaataagaaattcaaacattattcaaaatattattgtcacaca

SEQ ID NO: 45648 - DNA, 639 bp, Arabidopsis thaliana columbia
taacggccgccagtgtgctctaaagatcgatatcatactcggcccgccggtgattggatgcatcagactgggaaaaatagcagacttgggcagattgtacttggtcgagatctgcagtgcggcatccgggtcatagaccataacaagtgcaggaaacaccggccaggtatccatcaggaacatttcagtatcggcaaactccacggccagttcatgagtcggcaagagaacatgcgcatcggctggtaggcgatcagtatatttcttcaggctgaggagatggcctgtgagccagctccaatccttgggcatgggctgagtccattagctacatcgcaatgaatgtttgagatacgcacaatgcctcgtttccgcaactcgttgattttgcgacggtgttgaaagccgcagtataaaccgtatcctatgactgtcagcagcgggatgctgagcgtcacgacgagattagtgacggccatgatggctcaaccagtggcgagctaggtaaatggctgaagaagtcaatcagcttaacacaagaattattagcatgatggaccagctttaggcggccaatgacggtaatgggggccaggggacaggaattcgttgttgttagaccagctcacgggataatta

SEQ ID NO: 45649 - DNA, 953 bp, Arabidopsis thaliana columbia
caccttttgcgccttcaatttctgacttcaccatcaaattgttaacagactctcagtttatacttctttgtgggcacatagacttactccttgactcataccctatacaagtatcaaggtcaaaaaaatatgcgtagtatagcataaatgtctctttttaaaaattgaaacctgagaaacaaaataatccacctcctctttgttagcaatagacttttgagaaaactttctgcttgactgtaacgtaccaaccgatgagcttatcgaaacatcagccaattttgaccttagctcttccacatcactctgccgaaatccgaaacaatcatttcaacattacacaatacacaataagttctatagaatgattctatacatttatattaatgcgaattgatcaatttcacagttctctaagatatttttctgcaaattggaaactgaagcgacgaatatcattcataaattgagatcttaagcgagatattttcgagagattatcttccacaagtacgaaatcgaagcaaaagaagcgattctaaatttgataatcggagaaaaaattcaaaatgaaaaatggggggaaaccttgagagcttcgttcacggactccagatccagaatcttcttctcgtagagtttctcagcatcgtctccgagagatgaatcctttgatcggagatttggcttcttcgtcatcttcggcgaagagtttgtactttctcgatgcgagtgtgagagacaacaacgctccttcttctctctctctttcctaattgatgaaaaggtgcggagagaagtatttgaatttacaattagttttagtttcattatgggcctaaaataacgaaagcccatcttattttttcaacctaaggcccacaaccaaaataattttatcatttttaaacaaagacccaacaggaaagaaggtttaaggtgttgtcctttat

SEQ ID NO: 45650 - DNA, 489 bp, Arabidopsis thaliana columbia
atgacttgtctgccaatcatcatcatcttctcttaggcggcctcaccaccaaaacaaccatccctaaactctccttcacctctctcgccttcaaatctgatcctttctctagcttaagtccgttctcagccaccacgagataatacccgtcatcagcctccacaacattcctcaccctatcggccactaccagtaaaggctcctcctttccatcccaaggcagcacttttctatcatccctgaaagaaaccgccacaccgcctttcccaatggctgccactgggttccacgacggaagcactacccatctcttccatcctttctccgcctcaaccaccttaaaatcccctccggctatgatctccattggagcttcaagaatcttcttttccccttcctctgctttacaaaccggtaaaactaccaccgaggtcgcttctgctacttctccaaacttaagcctcaccactggaatccgaatagctttga

SEQ ID NO: 45651 - DNA, 769 bp, Arabidopsis thaliana columbia
tgagtgggaaagagaatgatgataagcttcaggagaatagataatggtgaagagagtggcagagagaaggataaacaagagaagcttcacgatctgaaacttggtgaaacaacaacaactactgtttttgtcttgtgtcgaaaaatttatgatattaaacggtttcaccatatccgatctgccacctcctttgctatttctccggaatctcctcttgcatattgcttctctgcttaaacacacacaaagccacaattagacgattttgttcagatttttttaatcattacttagagagtattatactatacacttacatggacgcggagaggcgtcgccgggagtcaccaccggttgtggtggtgggtgcaggagcagcgggagagtttgccatataaaactgatggattgggacagtagaattggacaaggaagaggagagagcaaatataggtgagacataacgtctcttttaatcttcttatatcacatttcctttgtttctatttttgtttttgttaggaaataagaaaattgtatttttcatacccacctttttaacaaagttaatttttgattttctctttttgaagttacgtgattttaataaaatgttttaaattgtggataatattgtagctctttagtttaaactccattctcagtttgtgactctcttatgattgacatatatatgtccaccaaactttgatcatttctttgtaaagagaaccataatttattttcaaaataatgagtttttttttca

SEQ ID NO: 45652 - DNA, 466 bp, Arabidopsis thaliana columbia
tggaaggtggtgttttcacggaaatgaacaaacggtacttcttggttcaaagtgtctttggaggtctcccaccccctttcactcgaagatgaaataatttgggctatgaagattatcattacaagaaggattgattgtgaggcgtttgaaactgactatgtagagttagtcttgatggtgcattaatagccactttctctaatctactagatgagtttggaatgctcaacctccagaaactggtagaaatatttctctaatatgacccaaactgcagcaatgcaattagcagctggtagacactacttacccaatcacagtagacggttctccattaaccatctcgtacatcacatagagcggcatagacaatcctcaacctccagacactctaagacgatgcgtcgcgtcgaactaccctctgatcgtatggttatcgctcacatccactagggtccagggactg

SEQ ID NO: 45653 - DNA, 540 bp, Arabidopsis thaliana columbia
aatgaatcttatagcagttttttttgtttttgtttttttgcaagtttctatcatatttttctcttacggggaaaaataaacaaatttgcgccagatggcaacatttcctattttcatcaacgcgtctttccttcttgattctgttatgacccagactgggacccaaacccagacccgtacccggattggatatagtaacaccgaatctgacgctaatactctttcgtcaccgtcacctttctccagtcgacccggttcattcctccaagccctttctgcgtgatttctgtttcttcacgctctccaaaaattccccatctttcttctcattgctttcgtgacaccttccatgctttaaacgcgccgctaacaaatacactaaccctctctcttcatgattaccaaaacgctaatcccatattttgggtttgcttaattacaacatcaaaatccaaactttgggaaaaaaaatccaaaccttttcgttgtaaaacagagcaatcatggaaatgggtttatctgggatgatgaatcatggag

SEQ ID NO: 45654 - DNA, 515 bp, Arabidopsis thaliana columbia
gtcttcttcttatttttaatgtgtttgtttaaaattcacgaaaatgtccttgtaaaattctttttgttttaaactattttgtgctgaatttcttatacaaatagaattttatctctgttaaatacactatttttgaaatagttatatagttaaatatagtatttggtaaattatattgaattttagaataaatcaaacatatattattattttgcgaaaatgttaaaatgatatattttttcgaccaaagtaaagtccaaggccataacctaccacatgaagttatgaatcaaaccatgcttagcgtcgctaccattgtttacttactaaaccaaaaccgaacgaagagtcgaactagatatcttatcaaaacttgaatgcaaatcggtgatttataattaaagacccaacactaaaattaatgtttcgcttgactctttaatcaaagcttgaaaactatggtttacaattaatttagccgttatttcatgtattgtctccatccggtgaacaaa

SEQ ID NO: 45655 - DNA, 403 bp, Arabidopsis thaliana columbia
  unsure (1)..(403): unsure at all n locations
gttgaaacaaacggtcagtacagggattatagcataagtaggagaagggttatgaagactcgaacgaaagtttgctaatggtacgatttgtggttttgggtttgactggaattgaaagctgttggatgaataatgctgagtagggtctggtttgattggtacttgagtgtggtaaaaagttagtngatggtgattgaacggtgttgggaaattgaangtgagcgatggtgtggttacagatgccgactacgatcgacaaagatcactggttttgtgagccgntgnggttgctggagacaggtttaggcatcagtggcgtgagagggagattacagctaggaattgatttgagatgatatagactgatgtcgaaattggtgactgcatttaganagcggaattt

SEQ ID NO: 45656 - DNA, 557 bp, Arabidopsis thaliana columbia
aatggagaatgttctaagatttttatgagcttctagctctttttcccatgctctatcagcaccaagatctgaccaagtacgttgacctatggtcgtagaatatcccgactcaaggatgttaactaagcgaggaacgatttcatccgatgagataattggccttccggtaattgattcataatacatggcataaggagcaccaccccactgtttactgatcttcgaagtacatcttagtacctctgccagaatttcatggtcgctgtgagacacgcccaagtctaagctcgtcaggttgctgtgttcggaggaagaacctatcaaaaggcaaacacagtattaagtcttaagcgattgaaaataaacaagaaatgttttggtcctagattataaatgatgatcatttacatacctccaaggctgtgctcagcgttctccaatctaaaaaacagtgatacagaattatttctaactaaaccaataacatctgactgaaccaacaacgtgcgaggttcattattactgcaccaatgatggagataggatgtacaaagttt

SEQ ID NO: 45657 - DNA, 543 bp, Arabidopsis thaliana columbia
tgtttcagaatgacaaataatatgatgggtttctcatctgtctaaatgaaattttcaatctgattttacacagtttttaagaaataatggctcttagattcatagcatagttttataggattgttgcagaactagtgtgtctattttcatgaaagcttgttcactgataatcaagcataactgttgcagaatgacataatttatttctcatctgataatggctcttagtacagtcctgtagtatatatagtctcataaggttagtggagaattattgcttatttttgtaccattatgaaaatacaataaatcacaaactctatttcttgtaatggttctgaacatacaattttgatgaagaaaaagaaaatgtaaaaagcctgaagacattcctcttgtttcaccagttacaaactgtgaacaatctacaaaactcataaagcatataaccaacacacaaaaagtattgtttcaatctcgcaaaccgaaagaaaagagaggttgcctcccagggaaaatacaggtagaagaaagacacgaatg

SEQ ID NO: 45658 - DNA, 330 bp, Arabidopsis thaliana columbia
agtagaggaggaagtggtgtggactgaggaacaaactccttcttcgtgtggacatgttgatattgcgtttcttttcctttctcccatgaagttgctcggttgtcttcgaagttgatcgaaatgaatgaatctatagatatataaaataaattaatagagccaccttgtaccgttgatctttatggacgttttaaatttggtaattattattgaaatatttactcttttagttagatttaatattttttcttaacctaagaatccgcaaataggtaaacaaaattataaagtgaaaatatttgaaaagttaaattaaaatattatttattt

SEQ ID NO: 45659 - DNA, 333 bp, Arabidopsis thaliana columbia
actaagctctccttctcctcctccatgactatctccttcttcctcgttgttctcatcttcttcgtcttcttcgtactcttcatcttcatccatggcgtatctcgatcctgttaatcccatttgtcgatctgtttcttccaacagatccatcagagacatcgtctgtttcggctcagaagctgaagatgatttcatctcctctgtttctcctgaatcatcctcttcgtcatcgtcgtcttcatcttcgcttcctccagccgccgccgcttcagcttccgccgcttcttgagcagcaaccgcttctctcgccgacatttgtctctcttccacgaa

SEQ ID NO: 45660 - DNA, 786 bp, Arabidopsis thaliana columbia
cgatttacaaaaaaatcaacattgtacttctctgacagtagtacaaaggcgagttttgtactagttggaacgtcaaagaggtactaggaagtgttccaaagatgccctcacgtgtttgtttattatttcacactactgtgatatttatttcacgaaccagttttctgtaaattttgaattctgttaaaaaaatagttaacgaaaagaataaaataataatttgctgggtaagaattggaccgggcttaaaatatcccagtgggaagtgttcgctttaagaaaaaatcagagagagaggcccacttcaccagctctactcattgattttacacactcaccagcacctctatttctttctcactctccaagtctcctctgtgaaagctgaaagctcatcttcttccacgtgatttgtcttcccgatcaccaaacctttccggtaattactctcccttgcgttcgacgccatcttccttggagttctcttcaatcaaccggtaaatcttccactgattttgaagaagattcttccatgttcgatctggttcgtctccagagatcgagagttgaattgcctcgaaacagctctagtttcaccagagacgcgcgaccgatagaaataaagagactcgaagctgcgtgtaccggagacgaatggcgggaaaattgacttgagcgcgattttatgtgtggatcaaaatgaagaagaaggtgtctcagcagaagttactgtacagatggaagaggaaggtatacgccacgttgatgttcgctttctgctttggg

SEQ ID NO: 45661 - DNA, 730 bp, Arabidopsis thaliana columbia
caatcaacagagaaatgatcaaaggtaaaagttccttaacatcaaaaaaaaaaagcaatccattcatgaataacgtcataacatactaagtaaaacccaatgttttaatttgattccaacaactactgacaggaatctttgtgaaagagtgatgaatgaaacatatcatttatgaggataccttgggcatcgctagcagcggacaaattctcctcgactcagaatttcacaactaaagattacagggaccatacgttcctccggttttaccatcttagtagcagccaaatcgttctctgctacttttggactagcggcacaccgctaataacgagtctttttgtaagaatactgcatgattttcgacagtaataagaagcagcctttatcaatcgttgtttctatcaagatttatttcttgttgttcagaaataccttggacagaaaataatgccaacaaagccttttatatgttcaccgaacaaattcagctgccagtgagcttgagaaccaaagtagagaccaagaagtggtgttaatggagttaatacagtcgctgcaacgcatatctccaaattgacagcattactggaacctgcaaaaaccaacagtgtcaagccaaattcaatccctaagtggtcaagtagagcgtaacatagatgagcaattcatatgttacctgaaaaacagctctgttctgaacacactcaaaaatagacgacagagatta

SEQ ID NO: 45662 - DNA, 435 bp, Arabidopsis thaliana columbia
ttttactataatatcttttcaattggaattcaaattattcacatataaaattctacaataaacaaacttaagtgaaattggaccaatcttataaaaccacacaactagaatcccttgttattcctttagttaagcatttgagataaatcttagcctaatataacgacctaacctaaatttcaattatttggctttaaatagcttggtaaattggacaaagcagaaatcgatttgatcgtctagctcaacgtgggtgctaccttggtttttaagattttagcttttaagataaaataatactattcatactggtgaaatgatttggattctgtctttggataaaagatactactgtattaatcgtttaccaaccacgagacactaaactttcacctaattgatcgacttgtatatacccaagataatgacaacgat

SEQ ID NO: 45663 - DNA, 466 bp, Arabidopsis thaliana columbia
ctagggtagattaaattttttgtaagaggagctttctctgttgttgttggtggggggtgaagaaggttagagagagtgtgtgttctttcttgtatctgatgaggtacagctttcctaatggacaaaggtgaacactctttagctccggaatggttgagaagttcagggcatgcttctggtggtgggagttcaaaccacctccttgtatcatcctcttctcattcaggtatgttcgagtcatcatggatcatttcattgatctgatctttgcctctttagtcagaatagcgtgattttaactgtttgctatcttgtttttgttttttttgttttgtatagattctgcatctttacaatataatagcaggaataggaactctaggagcaaaagtgacgttgattcaattcattctccttttctggatcgatcatcttctactaattcaaggaggggctctagtaatgg

SEQ ID NO: 45664 - DNA, 393 bp, Arabidopsis thaliana columbia
gtacaatgtttatttatttcaataatttcgtggagtagtaatactgaaaatctgaaagtcccttaatgtcgtctctttctaccttcccaagctctatatttccattaagaacaaacaaagctttgatacttatttatttttccaaccagagcaaaagctttgtaatagactacctcaaattgcttgcttatattcatctatatatttaaatataaaaaccattatatatagaaatggctcactgagtcagtaaggtggtcttgcgtggacccatgtatatggttcgtgccctagctgaccagccccatttggaatcagatgcggcggcatattgtagcctggcccggccatccctgatagatcaggcaggttactaccgattctgggcggtga

SEQ ID NO: 45665 - DNA, 551 bp, Arabidopsis thaliana columbia
ttatgggttctgataaaaaatatttcaatggcaaaacatggtatggaaagatagattttgaaatgatatggaaaaacaaaaaacaagtgaagttggtgattttgttgttctatcctgaaaaagtctatccatctcttgttctcatcctttctgaggaagtcaaattaaaaactgtatgaaggaagcgaaaccgtatggagcggtagtgctttgggatgtcatgcatatagaatttaatagagagagagagttaaagatacttcattcttgcctaatagacggacgtgtgtgtgtctctctctttgtcttagtttagctttttgaccagatttaacatttttgtggtcacaaagctcttgttgagaaaaatattatatcaagataacgaagtaacccaactcgtcgaagttcatactgtaattaccggcccaggcccataatattattgtaaaaagtaaaaacattggggttttaagttcaatatacttttgcctgcactcaatctcatagaaacataatactacgaggaccaaattgtaaatcagagaagg

SEQ ID NO: 45666 - DNA, 573 bp, Arabidopsis thaliana columbia
  unsure (1)..(573): unsure at all n locations
nnnnnnnnnnnnnnnnnnnnnnctaaagtattagaagatacaatggaggtcgtcatggacaatatcatcgatgtgtcaattcctgttgcagaagtggtggacaagcatccagaagtcttggaaattctagtggagttgggttttaaaccccttgccaatcccttaatgcgcaatacagttggtcgtaaagtatcacttaaacagggttctaagctagcaggaactcctatggacaagattgtacgcacactggaagcgaatggctacgaagtgattggattagactaatgacagatgaacggattcatatcctacgggatattttgttagaattgcacaatggcgcctctcctgagtcggttcaagatcgctttgatgcgacctttacgggcgtgtcagccatcgagatttcccttatggagcacgagctgatgaactcggattcgggcgtcacttttgaagatgttatggaactctgtgatgtccatgccaatctttttaaaaatgctatcaaaggtgtcgaagttttagataccgaacatcctgggcacccagttcgtgtctttaaggaag

SEQ ID NO: 45667 - DNA, 578 bp, Arabidopsis thaliana columbia
  unsure (1)..(578): unsure at all n locations
cttttttgtggcccttttttatttatggtttctcaaaacattttgtgtggcagagcaatttgggatgcgtcttgtgtgaatatatacacgtggcggaagaagattggaagatgacagctttgacggcatgacgccagggtggacggcgccgtaacttcaatccaccaataagagtaaaccaaaagcgcaaccaaatttaagaaaagaataacttaaaatattgacgccacgtggcggaaccacaagctaagtgcgggattagcgtgggtattattattaattaatctattgttagcaaaaattatagttaaaatgctggggggtttaccatgttctgaagtctactaattcttttaatgcctaacaacaaaactgaaactcgaaattaatttagaaagtattctaggtattagtattttttaatgtttatagttgctttcgtaaagttaaatggtgacaataacagtgtgaaaacactgagaatgtggagctttatttatgtgaaatgtctttaattggaatgcaagcttggggggttatgtcaagaagatctatagcanaagaggttttaaaagaag

SEQ ID NO: 45668 - DNA, 481 bp, Arabidopsis thaliana columbia
gtcgtgtttgttacgttttttgattattttttattctcagtggttttggtgtttaattacataattaagttgaaggttttaaaatggatgaggaaaaagtggagaggtattttcatcgaaatcccttgctaatttaataatctcgttgaagattagagaaagaaatactaaaagctggaagagaagaactttgcaggcacgtaactaaattaaattgcgaattagtataagaaactggtaaagggtaaatatgtaattaaacaccaaaaccattgagaaaagaaaaaatgaatcaaagccagaagtagaagaagaagaaccctttcgtcgtcaaggtctagctttctcaaatcctctctctctcgtttctccgagttcgatatcaccgtctcctccaccggaaaatccataacgcgattaggtttttagcctagttccttaatctctggttattgattctttcaatttctgatcgatgaca

SEQ ID NO: 45669 - DNA, 696 bp, Arabidopsis thaliana columbia
gatctattaattaataatttattttggttaaagaattttgtaattaattaatatcttaatataaataattaaagttatagcatgtatataggtgatatttatatagtattataagtaattttttagtattagttataatatttgtttatcatttgagattttttatgatacttctattaaatatgtttgtattggtgagatcgattaagtataaaaaaaaaattacaaaatcaaaaattaatatgttaaaacataaaattattaaagaaattttgtttatcttttttttattaaagcgaaaatactgaccaaccgtatgttgtcacgtcacctgatctaagtattaaagatatcagtccgttgatataaattaggaccaaattcatagtttgatcaattaaaatataatttttggactactaatacccaaaataaatcatcacccatgtgcatggttattagagcgagaagcatttttgtgattaattaccgagtaataacacgaagtacgacaattaaagaatagtgtcgtttggaaacgacaataacttataggtggaacgaagatttgatcttatctaccaaagatgttatgtggataaaggaaagaagaagaaggggtcgtcgacgtgcatttccacatcttgacacaacgtgtcgtctcggttccatgcaatgttgccacactaccacttg

SEQ ID NO: 45670 - DNA, 391 bp, Arabidopsis thaliana columbia
gatttgtttattaactatgtgtttttcaaaaataataaaaaaaaaaaaagaaaaaagtataaataacactaaattaaacacattcatttattgacagtataatcatcatgtacatttagctaattgtagccaaaaatatagctatctagcaattggaaccttgtgcccataatccaaccatctctatataaatattggggtgggtttcaaattatccttatagggcctaaaatcggcccaatattaaactgaaaccagacttttatccaatccgagtaatcggaacacaaccacatgatcgtgtgaaccaacggccaaaaaatggcggctctactcggtatcgtctctcctgtgactttcaccggaaagcacccggtaaattcccgatcgc

SEQ ID NO: 45671 - DNA, 618 bp, Arabidopsis thaliana columbia
tcgactctagtagccgataccatccctcaataagagatccgatcttgcctttgacgaggagattaatgctcggccgtgagagagagaaacagtagggagtagaaaaaaagaccttcgacgttgacatagcttcaccagatctgaatatacctcccccatcgacagagatcccgtgaaaccttcagaatttatggtcctaattctaactgtttgcctctctcagatctcacttagatttccgtcttccactccgcatcgctacatcgatggtggagctcttagcgtcggagtcgggcagacacttctccatccacaactcccttgattatggtcagattgctttgccggagagatgttacaagttacagatgaagaaccatgagcctttgggccctcatcatcgctggaatcgatggagaatccgaccaccggtgtaggaaattgtgatcagaagaagaacaaagttgagagaaaaatcaccgcgagtgagatccacgtacacgacttctctcaatacaattttactttcctacaccctcacccacatcacatttcaaacagggtacgaaaaaaaaacactaaaaagaaatataaataaatcttattatataaagtagg

SEQ ID NO: 45672 - DNA, 325 bp, Arabidopsis thaliana columbia
tatgtcctttcattctcaactttaaaaaaccttacatttttagtaattatcaaaattcttatattttcagtaatcgagagagttaaccattaaaacagctcgccattaatataaaacactaataaaaaagcataagaaattattatcttatgatattgtagataacttttcctcaatttatttaaatcaataaggactatcatttattttcacacattaaaaatatttcaaattcttcattagagtgctttagtattgtcattgtagttacattaaaaaatgaaatgatccactcgcctcgaagcctccacgtggtccactacaa

SEQ ID NO: 45673 - DNA, 475 bp, Arabidopsis thaliana columbia
cgatattaccttctatgatttttttgagatcagtcaagcctctgcaactctcatctgctgcaatagagactccgaatctgttctttgcagttcgagtcacgtgactgagaccctcccaattgtctctgtggacaggttgttcaaagagaaccggtgtaaccttcatttctgtgcaaaacaatcacaacaattcaggttttaaccgagaaaagaaacgccagctactatagtttgatcaggctagaagttttccaaacacctatccctttttaaaacctctagcgctcaatacctaactgagataattccaaaaatgattcagaaacctgtttaccatgcagcgtctcgagaactttaacagcttcctctgtttgataccctcattggcatccaaaatgaaggaacaagtagggtggactgcacgtatagcctggagaacttctatgtcagccttaagattcttcccaccttgagc

SEQ ID NO: 45674 - DNA, 476 bp, Arabidopsis thaliana columbia
cattctacatacgattgtctttcatcgtgcgcttggtcttatccgccctaaagatattgatttggagctttttgagatcacttatgtaagatttcaatttctttctcgaggttacaagtttaaccaaatggtgagtatgcttttattttgatactgttgggatttcctttttcccccatatgtcacaggtacaatgcggtgaaattgaagtggagaagaaaatcgatgaaaagattgagcagttcattaactggattgagaaacacccaaacaaaaagagtcaggtatatacagataacaaatgcttgatttccatttcattgacagtgaaccacatattccataccttgctcaagcaaggattgaacgtttctgcagcatatagggttgtataatgaagtaatgatctcatccttttcattgtctcatcctttgtggctgttaatgatctctttttctttttgccaagatttgtc

SEQ ID NO: 45675 - DNA, 540 bp, Arabidopsis thaliana columbia
agtgtgtggacaagacccgtcagaggcacaaacagccaaagacctcaactaacatgatttgacgtttcagattctgtttttcttttggacccttcattaaaaatgtcatctcttccctctcttcctctccctctcctactactatatttatacctatctcaattcaaaatcatatatccaaagcttttctactttcctgttttcttaaaatatttgtgcatggacgatggaaggtgtacgtaagtgtctctaagactgttgtcacacattggagacgaccccacttctctaacccttcgtcgggagtggtggatatacgatctctacgagatgcttatcattaaacatagccaccagctgcggagttagtgtccattttggacaaatagaaaatgaagttataattagtacgtaatactgaatagaaatttgatgttgacgtgaaaactatagtgattgctatttggtctaaatgcttgagtcattttttccaaagtggcattcttttagcaaaagttgaccacagctatacaacaaaat

SEQ ID NO: 45676 - DNA, 599 bp, Arabidopsis thaliana columbia
aataacacatgaaccgaaattggagattgaaaatgaagataactggatctaaaaaacagacataatacccaatgatagtatgaattttgtatatacgtattaaagaaaaaagaaacggacacgtacccaatgatccagataacagcaccaacgagggcgagaacgagagcaacaagagcaaatggtagtcctattaagaaacctagaggtctacaatctcccattttgtgaagacaaaagactaagtttttagttgggtttttttttttttggttcggtttcttagaaagaggaagagagaattaaaaggagaaaagtgagtttttttcaaatgaatgaatgaagttgagagagtcgtaaccgtcgaacacacgcggcgggtttttctgaaatacgagaatacccttccggtttctatttgtttagcatctattaactgaagtcaacggggttattttggggaaactacaagacgttttgagttgtcttggaaccttcctttttcaaagttgtcaacaaatgaatggcctcttgtggcttgtggaagagtctaagaccgaatttatcaaagagaagagtcaacttttaaaagggaagat

SEQ ID NO: 45677 - DNA, 755 bp, Arabidopsis thaliana columbia
ataatcatcccggtggttgaaacagtcgttaaggtgatatttttgttgctgatttcatgaacaaatcactagattaacgtcgacgaatgaattgattttggtctctccgtcggcaaacacgaagaaaagagagagaagaagaagaaaaattaaacgcgttttctatatttttttttttttgtcaacttgtttacccaatcaaaatttgccacgtcaggatttctattggatctcaaaaaccccatttttgggaacgatcctaaacggattgttgtgtttttctttcatttgggcccatttcatcttagaaatgctctatagaaatccattaaaaacccttgctggacttggtctcacagcctaagtcttgtgatacacgaatcgaagtattccgtcgttaatacctccatacatgaaaccatctttgtcttttgttttaaggtctcgtaatctttatggttttgtgctttacgttttccattggtttttgagtattctatctctaatccataatacttgtaaataaaataaataatattatgttagatgtattagaactttatggtctcgaatggtgcaagcggatcaagcggtgcgtatcaggcagatcacgcggttcatgcagatcaattgtggatcaagcgtattaggcggatcaagtataataagtgtggatcagactattcaaaatctatgttgaatggtgaaatgatagaaaagcggtttcagtagtaaaaataattacaaaatattga

SEQ ID NO: 45678 - DNA, 674 bp, Arabidopsis thaliana columbia
gctgctacatatctcttcgattccagcaccgatttgtttctcttgaaaatcacatgtctttgctccagcttacttgctttcataatcttttttttttgttctttctttcctcagattttccatggttaaaatgttttagttttcctatcatcagattattatcaagtaaaaaatgagattatgaacaccaccaatcaatattattgtatattttactgagtttgttgtatccacatttttactaagtcaccaacccagtgagactccacagtttaccaagttacctcaattactactctcttgtacatgacaactgacatcaatactttctaggttttcaatgtaatcctgctcatcagatccctttactaaaattttaatatgttttattgctatgtcacacgacagcttattgatatattcatatgttgtcttcgagttttaacatagcgtataaaacctaattacgtggacatgatctttgattcataagcgcatataggaggaacttaatcctaacaaccataagtagttagagcatcattattggtagttgcttagcttaattcttaggaaattttggttacaaatttagtgtttttaatcatatatttggtaagagagctcttatataagagacaattgaagtatcttagcttttgtttaaaaattta

SEQ ID NO: 45679 - DNA, 922 bp, Arabidopsis thaliana columbia
tttaatatgtctgaaattagtcggagttttcttgcgtatagaaaaacagtagtggaactttccaaaacacattaagacagaaaaaataatatgaaaagtgtgcattaaatacaatccaacccgcactatgataaaacttgtaagcattattcttctttgcggataagcaaacaaacagaagaattacaaaaacttatgtataatcccaaaacgttaaaaacatactacaatttcttattaaaaaattctgaaagacgtgcataaaattctcgtaaactgacattatcaaaaccaatgtttattatttcaagataatttccttttgaaagaaacgagaaattttttgacatttggttttgttggggtgaaatttgaattatttgtaaatacaggggtcttaatagaaaacgttgaaagaaagggacaaaatctgaaaaagggaataaaaagcacagaaaacaaataaaaagggccaaactccaaactccaaaggcacaccaccattgaattgaacttccctcacacgcaagtaccacaccttctctctctctctctctatcatctcttttctttttctctcatcgccttgaagctctgagaagtagagagaagctccgatctgataggaactgtgagtttccttgagtctccggagaaagaagtcgccgatttgctcctgataatcttagtctcgaaatcaaaacgatgttttgcgattgcttctactggaataaaggtttctccgagttggaatcggaatcgtccgagtcaaagcccttctcgcttccatctcctcttcgctcaatggccacaaggtacagtagtacatcatcttttcttggaaattgcaattatttacaaatcaacttgcagattcttttgttgtcaaacagttatctattttcatttctaattttggata

SEQ ID NO: 45680 - DNA, 513 bp, Arabidopsis thaliana columbia
tgaactcaccatggttgggatctaaagccggtaaggttttcgctttcgacttctgatggtcaagaagcatcatgtgaatattacttggacgacgtagagagaaacgaagcacttggaaaacacaaacgcgggtactggatcgaatatagggtttggagaattcatagtagatggatcagaaccatcgacagaaatccaatggtcgatgaaacagattgactgcacgcactcgaaaggagggttatgtgttgattcagtcttcataaacccaattggtgatgtgaaagaacacaaaaggaaagctgttttgaaagaagcttgaagaaagaaagaaagaaagaagatcacacaccaaaacaccaaaatcgttttgattctttcaaggtataatatcaatgactgatggtttaattttcatttcttattagtggttttgtcgtcaattttactggttcccaaaattagggtacatcgagtcaatttcattttatattgtgctttcatcgagttttt

SEQ ID NO: 45681 - DNA, 557 bp, Arabidopsis thaliana columbia
gattggtcattctttgtacaggtgaaaggagatgcaagcaggaaaaaaaagtagaatttcaccttatgtattgttttatcttttattaatgatgtattactttctttttagatttccttaatattaatatatgcacctaatttccaagaaaattcaacaaagcttttaattatccagcttgatttgcttctctgtttggcacttacacaatcagacgacaaagtgtcttcaatgttgctgtcttctatacttttaatttgattagacattattagttgagagaaatatcgaaatatcaaactaaacagtgcattaacagaaattgtaaaaagctgatcagattgttgtttgttctgctaatgaattttttaaggtaaaagtttcaatgaagatttttgaatcaaaccaattgtttatactttattacaaacacattctctacactaaaccaacaaaaatcccacaataacaaaagagacagaggaagaagagctaaacatttgctcaaagagacatctgcttgagtatctaaacaaatgcagaagacagagattatt

SEQ ID NO: 45682 - DNA, 539 bp, Arabidopsis thaliana columbia
tcaaaactaaatttatgttggttaatagttataccatgatggagtaaaatcagatattgtatacaatagctttagtattcaatctaactactataagtctacatcttcaatacatgtagtcacatgaaaactcagccacaaccgcaaataaaagggagatcaaattagttggctgtattaatggtaatggatccacctactttacactacaactatatcattggaaagccatttataatatacattccatatagctagagccatatccactacgtaaccgaatctaaaatttctaaacccttctctttctttctgcatgctgattaaaaccgacgctgcagaagttcgatcagttatatgagtgcattaaatagaatcgattttagaaaaagaagaagaaagaatcgatttaacttaaagtcaagcatgtttgcttaggctagaccggatctgatcttcatgtataggtctcaaggatcatgcgatcgatgtatataaatatgttttggggttgggccaaattaaagtagtatatagtg

SEQ ID NO: 45683 - DNA, 427 bp, Arabidopsis thaliana columbia
aatcttggaataaaaaagaaccagggttatgtatgcataccggtacaaagacaagcgattcgatcacgtgtacaaagatcaactgaaatgttggtaaccgatgctgggcatggtgttgaagctgcactgcaacaaagtgatatcgaaacaaagatgattgttgagaagcaaagattggaaaccataagctattggaatagaagaaattctaacctgtaaacttcaacatgcgagtttgtgtctctcgcaatgtgaatgatacagacattgtggttgtgaaaaacacaaaaagtgacatcattaggacaccacatttcgtcaccaagtaatctgcatacaccggcattaaaatattactcttaaagtaaatgcttacaccaaactacagataaaagttgcaagagctaataaagcagccaaggtaaga

SEQ ID NO: 45684 - DNA, 334 bp, Arabidopsis thaliana columbia
ccaacgagagctgaacggtaatgctccaaatgctgctcaactatccccacggaaatcgaaatcgaatctaattatttccgcgggagattcatcgaattttactaaacgacctgattgttcatcggcgcccgccggaatctggtgttggaattttcgcagattcgtctctgcgattagcgaagatttatgagctcacagattttcaaaattccggaaaaaataaaatcaaattttccacttcgacgaaaaacaagagaaaaagcaattcaactttgacagagaaaaaaaaagaaagaaatccaaagctaaattaatattttctataaaaaaataa

SEQ ID NO: 45685 - DNA, 492 bp, Arabidopsis thaliana columbia
tccatctcttagaaaacatcgttttcagcaactttaggtatgtcttctacatctctataatcgattgctttctattcatagtgcaatcgtgattattgttattcgatgttgattttgttatgtgataaatttcaaaagataacatgtatatcagctacacgaaatataagtcaacacaccagccacttaatacaccgccacacatgcacactttaaaaatgtcttcttaactacacgaagtattgacagaagttatgttgccaataccataaccatcctactttgatgttccgatcaccagaattcggtattgatcggcgttgaccgatgttgactggcgttgaccaattatttttcttattcttacaaataaacaaatatgcacaataatatattacatacttttaacataagacattaataacaaaatataccacaaattgttgatataatagaccacaaaaataatatgcaacaaaattttagtttata

SEQ ID NO: 45686 - DNA, 518 bp, Arabidopsis thaliana columbia
ataaattgctcgtggtaacaacgatcgaggaccccagttattcggtcatgtggcaaccacgtgaacttccgggattcgtgaactcgaaatcggtgtttccactctcgacttagccttgtttgcttagttatgtagtgtactttgatctacttctagaattttctgtaacttttgtcacaaactcaaaatgggtactcgccccgtgtccaactctactagttagaaacgagaatttcggttgattcgcacacgggcaagatcccttgacacgcccaatggaagcgccactactcggttgaatgttgatgtcgttgcatgaacggtataagtacatatcttgttttattaggctagttttggaaaggtagaacaaaccccaaaagtttgcaattattaaagttcttacgtagggcaggtcgatcctcttatagaaaacgtcacactatcatttgggttgttacatggatccaagttgcacattatgatactttatagtagcgtctaccaattttagaggc

SEQ ID NO: 45687 - DNA, 243 bp, Arabidopsis thaliana columbia
tgggttcattcgatgttaaattatctaaaccaactagaatcaaatttggtttggctcggttttgataaatttcggttggtttgatttatatatttttttaaaaatcaaattacatacaattttgaataaagttaaattatgttttagtgtatatttttaccaaagttgggttaatcgattcggttttcggttggtttatatagatgagaaggaattatccatattgataaaaaggtaaattat

SEQ ID NO: 45688 - DNA, 500 bp, Arabidopsis thaliana columbia
tacgattcattgaatctccaaccaacatcaaacttttacctcgtagcttcaccaagaagtctgtagcattaaacctatgattggaaagtcaataagaacgggatacatgcattctatgcacaaacagaaattacacatgatgtgttctgcgaactgtatcatctataaagtgtgacagtaaatacattgatcaaagactaaccgttgattacaactcttttgttttattgtaaagagaaagaagattcttttacctatactaacaattgttcaaatacccttcgcttcacagttcacaatcagctaataggaaaattcgactcatgttcaacattagttcacactctgtccctaacactagtttaatgctgatcaacatttctatggattgacaataatgctcaacattgtaccatcgccatagctgcaaatcaagtataacaatggcggtttgaaacagagaatagagataatactaaaagcacatcataccgtggaag

SEQ ID NO: 45689 - DNA, 568 bp, Arabidopsis thaliana columbia
ctgttaagttatacgaatcggaagcgtagacgtggaagagacatcgccggagtagacccgaacccggatccgaacgttcgggtacgacttctccaaatatgggttcgaatttctcgaaactcgccatgtcaagaaaaaagctcaagcattcgcgagtttttgacacaaaagtctttctgctcccgtaaaccggtctttaaaagccaattccatttatcaatttttaaccgtcccgatatcgtaccagatttcggttaagaaaaagattgtttcaatttcaatgttctcgtgtataattaaaaaccagattgtgattgttacagatgaatcatttactgacaaaccatctaaaacctatttttaagaactgaaactttgttattctcccaagaaagaatctgaaaaaaaaacctttctataacaaagaatcaacagagccaatccattgagctagctttgtgtgtgtgatgatgtcgaatacttcaaatctgagcaatgataagttcattccaagtatctgggaccctggtaagaccaatgcaagcaatcgttgatcgcaggagttgag

SEQ ID NO: 45690 - DNA, 517 bp, Arabidopsis thaliana columbia
gattcttatgtttgactctatattgggactcgacttttctgataacttgccccggcaggactaacggccccgccacattttctggttattgcatatagatgcaagaggttgctggtgaacgtggaggctatcttcatggacgaggcggtaccaatctctctctctctctttttttgtttttcgttcttcttttgtagttgtgtcatggccataattcttgagtttcttgtagctttagatagcgacgatttactttatctgaaagaacagatggaagcagaggaagatgcagaacgtcttctgagacgaactgagaaacgggcttttgctgcctttaaaatatcctttcttaaatgctcagatatcatgattttgagcactaagttatttgatatatacttgcctagatgtttttttgtaatctttcttgaccatatatcacaaagctgcaacccaagctgattcatctccagcatctattccgttgccacttcgtgtggagcgaaaccaaagagtg

SEQ ID NO: 45691 - DNA, 589 bp, Arabidopsis thaliana columbia
aaaagctttatgcttctattactctaagctagctctttgtatcagcaatattgatgaagctacaagaaatctgcataccagcacgagcataccgtctgatcaaaacgatgaacgtatctgcagaaaccaaattcgatccttcatcgcttctcactcgatcaaaaaccaacgaccaagcaatttcaaattcacgagctttacatagagaattgacaacagaatcgaaaagtgaaggagaaagtgtaaacccaggtttcatctccgcccatttgaacactgagtgaagcaacatcggcgatgaacttaaccgatcgaacaacgcgtgaaccaactcaacactcggttcgattccggtttcatctaaagctgactcgagactcgaaccgggaacaacatcagtgttctcgagaagattcgatatagtagagagatcggttttcgagacggtgttttgttgcggtggagtacatgtagaatcgggtacggcgggtgattgtatccgttggatgagaggctcgacgggaatgagcggggatgacggcgagatgatgatacaatctatgaagaagaagtgcggtgaggatagggt

SEQ ID NO: 45692 - DNA, 167 bp, Arabidopsis thaliana columbia
tatatctaatggtagtttagttaagacaaaaaaaaaaaaaaaaaaaaatggtagtttagttaatgggctgaggtaaaaaggccaacgagagcccatcataaaatggaacaaaccaagtcgctgattagaagagaggattctatagcggtataatcgtggtggtgatt

SEQ ID NO: 45693 - DNA, 508 bp, Arabidopsis thaliana columbia
gtctcttctcattcttttgcttcttcttagttagcttggccactgaaccgcacatcggtttgggttcaaagctaaaagctagtgaaccgaaccgggcatgggtttctgctaacggtacttttgcaatcgggtttactcggtttaagccaaccgaccgattcttactgagcatttggttcgcacaacttcctggtgatccaaccatcgtctggtctcccaacaggtacacataatcctttgatatttagttattgaagcaatctatattagtagtaaatatatacaaattttatgttaagctcaaataatttctttagtaccaacagtttgatttccctatgatcagaaattttccagattatttttactcaaaaatataaatatctaaaatatagaaactccccagtcacaaaagaagccgtgttggagctagaagccacgggaaacctcgtactctccgaccaaaacactgtcgtctggacctcagacacgtcaaaccatggtgttg

SEQ ID NO: 45694 - DNA, 503 bp, Arabidopsis thaliana columbia
tgggcaaaaacatacttgactccattaatccacataccaaatacaaagttcaaacaaacatccaacacatggttcgaagtcaattacgtccgagtcttatggagtctaagtagtggagttgtggaattgagtcagttcgtgtagtggagttatggagtctgttcctattttttagtcgttttgttgttccttttgagtctttgtaaggctatttaaagccatcttttcacgttaatgaagtatcacttttagccaaacaattcacaaactagcattctaacaagtgaatggtagagatagaatatacgataatttgacggaagatccaaacatcggagacaagaacttgaacgtagtttgcaacaagcgagagaatggcgagtcgaaaatcattccacaaaaacttggggagattgaagattagttacggtccaataaagacataataatgttgaaaagaggttctttaacttgaatatcaccggcttaatatcacatcatct

SEQ ID NO: 45695 - DNA, 283 bp, Arabidopsis thaliana columbia
tgattttgtcaataatatatttaagttttctaagtactataaaagtgttgataaaaaaataactgtgggtaaagaagagacaaccatgattttgaccaagtaccacggatcattcttctatcttcattggattgtgtatctaactaacttctacaaaaaaatattaatattattaagaacatgatcatgttctataagaagctaatcaaagtttctttatataaagtccataaaggtgcaaaagattacttgctaattatagtttgatatacacataatgatt

SEQ ID NO: 45696 - DNA, 420 bp, Arabidopsis thaliana columbia
ggcaatcggtcctcaatttgccaatcactttcaaattcttctcccaccaaaaataactttgaagtttagttttaaccccaaaatgttaacgtataagatattaagccgcggtacaccggaaatggatatattcattgaaaaattatacatattttttataagaattattatttatatacgaataatatatccttgacacataatttctatatttgtaaaatttgagtaattcatgttttatgttctatatttgttgtatattagtttattattaaaattaatattataaaaaatgtgatttgggtttttttagagttaataaagatttaaaacttgtattatctatagattgacccgcggtgtaccgcgttgatatttttgttagaaagttagaaattttttattttaattaatattatt

SEQ ID NO: 45697 - DNA, 603 bp, Arabidopsis thaliana columbia
ttacacagtagtgtatacacttacgtatgatggtgcaaaaatcttccatccgcatgtcatgtcgttttggtaggcagagcggccatcttttgcacatattaatctttgagtgcctttatcatgtttgacccttcggtatgtaaaagatcgctatttcaatatctcttcagtaatattgaaatcgattttttaccttggcatacaattttgaattttctacttaacaaattgttttgaattttttttaattgttttagacttttaggcatgtttattgttgtactttggtttaccaattgatttcaaataaagggttgtataaagttttttttattaatatcgatatctttttgtgtcaaatataattacattcctggtgccttgtggagaagttttatgatatttgattgatatagacaatatttggggacttgattattccaagacgttgacagtttgaggtagttaaaatgttgggacttagatgaagtttatgcagccacgtaaaaagacatgaatttgaacagaacattatggacctttttttagacaaggagacattcgaccaaaagtgatatgtacatactatttttaggaagaaat

SEQ ID NO: 45698 - DNA, 554 bp, Arabidopsis thaliana columbia
tgtggctaaccctagcttcttcctcctgtagctcttcaatctgctcttcatcgagccttcttccttccgatcagattaagtttccgatggaaatcttcgccggcgtaaacgatcagataagtttccgatgaaaatcttcgccggcgtaacgaacctcaatatcgggacgcctttcgtcgatccaatgaagcaccacaaatttctatttactttaaaatatattgttttatagtttaatgatcagatctcgttgaccagtttgtcattttcttcactggtcaacaaatacaaaaaaatgcgccgaatttatccttttttttggttgaagtttggttgcgtagagtggtttaagttttggttcgatggaacttgaacgtttttgtgatttgaattaggtgggcttcttttgagttgttttgcttcattcaggctgtcgataatgacttggaatcgatcttagaatgtaaggtggatatgtagtccacattgaattgtgtttatggttaaaaagtaaagaatgattatttattaattatatacagtcaaattagaga

SEQ ID NO: 45699 - DNA, 490 bp, Arabidopsis thaliana columbia
gttagtacaagctataataaagcaagtagataagaaagtaagaaataagggaacactcacaacgcaatttcttgccatcaaatgtgattattcacactttttgctataaaaaaaatcatgttaaagtatgttttatgtttcttgaagttgcgtttggacgttgtgtgttatgtgttttgtttgtgcatttgaatttcatttcgtgtgtgtgatttgttgtgtatgttcgagtgtggtttttcgtggatttatgttctgttttctgtttctttaagttgtgtgtattggacgttgtgtgctatgttttttatttgtgtgaatttcgttttgtgttttggtgactttaaaatagttatgtgtgtttgattttcattttgtgcgtttatgtgtaggttttagtggatttatgctctgtttttgatacagtgcaagagacatgataagtgggagggagagagagcgagctactgtaccatacctttgtggctac

SEQ ID NO: 45700 - DNA, 478 bp, Arabidopsis thaliana columbia
ctacccccaaaataatatcctatttcaataaatgcttattagtaatacaaaaacccttccatcaaattctatttgcccaaccagaactcgagacttattggagaccatgtgccactcagttgtcagattatcttacgcactacaaagcatttctctaagagaaataagtgccctataatttgacaaatttagcatcctaatcttgttcccatagcaaacacgaatgatgtatccagctattaaagttctatctagattgaatatcaatcattaatcccaaaaagtaattaccattcacagtcccaaaaacataagaacttgctgtgtgtttgttgtaactaagcacaagtgaagtaagagaagagtgacatggagcttcacagatgtaaggataaagagagatgcttagcagagtcccgataaatattagagacgactttaaagggaagaaccataccagcttctctggcgccacatg

SEQ ID NO: 45701 - DNA, 453 bp, Arabidopsis thaliana columbia
aatccaaataatccccaaaaccatatgtttgtgttcactcactagtcactacattctttaaccgaaccaaaattttcgcaggtttgtcagtcctataatgcatttctttttttaaaaaatactcttcatttgatcaaattctataaaagtttagcataacacatcattgtttagctatttaataagaaaactccaaattaatattcttaataacttctatcctaatgacccatgtgaaattatactctttaattatacgctctcataatctcattacatagcatatcaataatacataaatcactaaactatagtatgttgataagtgatagcaaaactgtcaaactttaattatagtctttgcgtgatgtaataaagaaaaaatcattaaatgtctgtcaaaaaattaagaaagtcattaaatgtatgaaaagtcattaactactgtgtgtg

SEQ ID NO: 45702 - DNA, 279 bp, Arabidopsis thaliana columbia
gtgaaccaagccaaaaagaagttgcaaagctctttttcatgattttattttccttgcaactaatttagttcgtgattatgtataggactaagtgttacgtgacacacggggttgatttgggtccatagttagtcggtagctaatgatatgtacatatcttatgattattaaaatactgaaatctctctctagttctgtctactgttatattcacaaaactaatcatttcatcttttatattcgattgcccccaaatggatacggcccatacttctatgc

SEQ ID NO: 45703 - DNA, 565 bp, Arabidopsis thaliana columbia
tcaactctgtagagagccacttttttttttttttgtaaatgttaaagagagagccactttttcccctgcaatccataaaccaaatcaatcaagctttacttcaggttttagatttcaaaaccaaaagaagaaatttatgttgtatagagaccaaatgagcttcattaggtagaaactaagaaaacaaacgatttacaagaacaaggtgtagattggtgtagattgcagtcacaaatgaattgttgtttcagatatcggctcgaattagaatcgtgggattcaagttgggcttacgttgcattgcaagcccatttcattggccatggcttcagagaggatggtctcagttttgaactctctctcgagagagacataagaaataaatccgaatcaatcaagaaaacggggactcggtttagacactgccaaagaatgtgaccaaatcacttgagaaaatgctacaaagtctactaaagaagacttctctagcagaacagaaaacaagattacttacagcagatgttggagaacgttagaggagtcggtctcatcgtgtcttctcaaa

SEQ ID NO: 45704 - DNA, 505 bp, Arabidopsis thaliana columbia
atgatcatggaaaaatgcagaggaggtttgtttgaaactccaagtcaccacacaccactttacaacaacctggatctgtctatttttgcccatatacttgtttgttctttcacggcacaatctcccatagctttcaatattttcgttatgaggcctcatatcaaatttgttctttatcttcccttctactgacatctttcctacaaagaacattgttgaagaaaatctgcacaactgtcaaacaaaataaggtacacctggactgtaaatgaacataccaatgctaaattcttcacccaatgatccaaaatcttataaacgtaaatgccattattcaacaattataaccaacgtaacgccatagatgaaccaacagttgtaaaataacttcggagtacaatgtgtggagaagtgtacaacttaccatctgaagactcacagaaaacattcataggaataaaatctttagacatatccaaagtgtacgcctcggcatgttccagag

SEQ ID NO: 45705 - DNA, 570 bp, Arabidopsis thaliana columbia
actctagactagaggatctgtcctttgcctacgatggtgttcctctgctagctatgctagacgagtacggtatgcttaggcaagaacgagaagaggagaaacggaggctgagggtaagttcatcatttctactcgattaatgataaggcgagaatgtcagtcactccctaaactcctctttgtcttaatgagcaggaacaaaagaaggttcaagaacagccacacgtagagcaagaatctgcctttagcaccaggccaagccctgcaagaccggtcagtgctaagaaaacggtggggccacgagctaacaacggaggagccaatggaacacataaccggcgtttatctttgaatgcaaaccagaatggaagcaggtctactgcaaaagaagcagggagaagggagactctcaacaggccggctgctcctacaaactacgttgccatttcgaaaagaggagctgcttcatctccagtttctggtgctgcagatcatcaagttccagcttcaccatgatgaataaaaaatgaaaagatgtgtaatttcagtgtttgagtgggttaggaagaa

SEQ ID NO: 45706 - DNA, 446 bp, Arabidopsis thaliana columbia
tcagggatagacatggcttctgaataagttcttggtatgttttcagctaaaaacaccatcaagaaatcatcaccgaaagatttctctttgcgagctcttttgctccgcctaggttgttcttcaggttcctttactgtttcttcaacagtaatagtacccaaactattttcctcagcctccgaggttgttgaatctcgttgttcacgagtttgttttttgagttctcctacaaggaaaaatatcttcaaagaacgatgcatttcttgattccataaatgtattttcatggatatctggaatattcgattttttaacaagaaatcgataagcactgctgttgtgcgcatatccgatgaagatacaatctacggtcttaggcccaattgtgacctctttgggaggtggtacatcacttttggctagacacccccacaactttaaggaat

SEQ ID NO: 45707 - DNA, 459 bp, Arabidopsis thaliana columbia
ataatatttgagccaactttcaagttttatggaattttcaaagacttattgtttcccaaataaagaaaacacataaagattaacaaaagggaatttgcattatacttgaagttctacgagaacgagtctgaattcaagacaaggttaatatagactctgtactacatgtcatgagtcttactagagaacctttctttcttctcccccaaaacgaggaacaaaaaacgatatagtacagtactttccgatgtgtcttgaattacttttggtatccgattaactttggctttgcagagaacttacatcatcagcttttgtgtacatctcacatatgagatctgcttaagctatgctcgatgttttggggaaaagctaattgagtttgattgataacgcatcattagaatattgttgaatcatgttattatgacacaggatatggatcctccggtgtgtgag

SEQ ID NO: 45708 - DNA, 516 bp, Arabidopsis thaliana columbia
atggattatatgtactaattagcttatattaattactttgctttcgtctcatataaagtaacatttatagtgctgatttaagactaaaactaatcattgagatggacttaacatctttcggatgtcaatttaatgtcattctctacaaggaaaaagattagattttgttgcgtaacaagaccagcgacataatgcaagtttgtgaagctttctaggaacatactttcacacctaaaaaacgaacaaaaaaagctaattaagcagttattttcttaataattcttattatcatgtgttatattcgtcgtcaaaataatcttgtaatagacatgtattaagactttaagaggtataattttccatttttgattcaaaactcaaaattgattagttagaaatagatatatttaaacaaattttgattttactggaacatcaagtttttaatgtacacggtaaaatcggacccaaaactacaacgaaatactattgtacgtccgtggcattagagttgag

SEQ ID NO: 45709 - DNA, 610 bp, Arabidopsis thaliana columbia
  unsure (1)..(610): unsure at all n locations
gtaacctctgatggataacaagtctctatcaaggcaataattttggaatccatagaacggttgattagtgatgagtatgtttttggacgtgccaaaggagaagatttgctactagacgaatgtgtcttacacaaatattccaatgaaaacattgtgaaatcctgaaacatccaattcaatcaaactctcaagagttgaagggttttcatcagaaagctacatcataggaagtatcaaccttcgaggctgagcgtggatgtcaaccatgcgcacaactcatccaactcctgtgggattgtgtggtgaccaagtgcactgtaaggattgaaggtcaccttcttaaacccatttgaaagcaaagcctgtgaagatttctcccaaacttgaacggtaccacatcatcagctgcaaaccaaagttacatgaatcaataatatgagaacatgaaagacgagaaaatctttaaaatgtaaccctttttacttgaattggtgttatggaacaatttgaataaccggttgctcgcgagaatatttttcttagagaatatgaaatgcatttacagcagggttcaaaccanaaagatgccatattcacatactgagaagtg

SEQ ID NO: 45710 - DNA, 590 bp, Arabidopsis thaliana columbia
ccagcctcgaatcgcaatcctccgatcggattaagctcagaactctctggattgaagcagaagaagacgaagaaaccgacaccgacgaagaaaccgaaaccgccgtgtggagcaattcgtggtctacatctccgccacgtggcgaatcgcaatcgaggcttgtgtcgattgacgacacggaggaagaacaggaagaagaagaagcgacggtggagataaggctgtttgtttctccggcgaggtccatttcaggagaaagaagaaaagatctgcttgagaaagagaaagagaaagagagagagagagacgtaggattaaggcgttggccaacggttacatagtacgtgtatatttatactacacacgagtggcaatatatgtacttatgtatttgtgactaaaaaatatattttatttaggaagtcttttttcatatgctttttggttataattgtatagagcaaattgtatgaaaacaatacaaatcaacaagagaatttgggttgaaagactttttaaggggatggcttcaatttctcttgtttttacttttagttgtaaaagatattttttttgagaaatgatgtaag

SEQ ID NO: 45711 - DNA, 474 bp, Arabidopsis thaliana columbia
tttttttagttctttgtttttcttaaaacgtttaactaggatttttatttgtatattatatcgacgttgtactataaaacataattcaggatcggagcaaacggattcagaggtgtacgagatcgattacaggggaccagagactcataactctagacctccaccggaaactatgcacggcaagccaccgtacatccaccataatacctccgccgctgggctcggtgctcatgtaggaggaaagagtaagttgccatctccacctttactaatatttatttatggcatgtacgtaaatatgagtctttggttttttaaggggaaaaaggtaaataacagtcattaaatgatatatttattattatcaaatattcaaattgtatattttattcttattcttcgaaattattatgatccaatcaaatgaagtaaatttccctttcttgcatataatggtgaccaaaacatgcagga

SEQ ID NO: 45712 - DNA, 615 bp, Arabidopsis thaliana columbia
ttttgtttacgggtttcgggctacaccgtcgtcacctgaggcggtctatatgtttgtgtcttcgaggctgtcatgatactaaaagattagaaatagaatcgaaaaattcactttgtagaaaagttatatattagctcgaaacaaaacagttagacaatagacgtacctcgaattaatacgtcatccttattagattctttttcttgtgtgtgcgaaaccttattaggttcttcacaccgtttttcacaaaggtaacgtaagagacgacaaatcaacacggcacagaacaccaacaaaaacacaatgcatcccaaaataatcttctccatatcgtgtctgcttcttcttcttgcatacaaattatatttaaacactagtatgtgtactgttaacgagtttacattttgaggtcagaaaatattccattttaggatcttatgactatgtaaagtttacatattttatcaatgtttctaatttgtgatcacattatggatattgtgatccataacgaaatgggaaaatgccaaaaaagaacatatccactttaaatttgccaaaatattcaaattttcattacggagcgaggactaggtaatgaaatatgatattcaa

SEQ ID NO: 45713 - DNA, 288 bp, Arabidopsis thaliana columbia
aatcagatcttggataatcgtacagtacgcatttgagcagcgtaggtacactcgcgtcgcagacgaccataagtcttcgatagagtcagagtatggaatcctcgccatgagagtgtgagttaataaacacagtagctccctacgtacgatatgcagtattgcatatctatagacgtctgaaacttgaatttcataataatctacatatatgtaaatatgtcgggtatcttgtggatctattaacctgaccgcagtgacgctgtcgtagactccacagcccaaggagtg

SEQ ID NO: 45714 - DNA, 380 bp, Arabidopsis thaliana columbia
aaatgcgtgtattttagtttatacgtcgcaataaaaaaaatacatcatcctacacattaagtttcaggtaaagcggaaaaaccgtattttacggttatggatctacgaagacttattcaaaaaactttcctttcaatgcaatatatgtagctcctattttactgatggaaattattgcacataaagaagatcttatcgtcgtaaatactatcatggtcaacccataataagggtggaggtcaagatagttcatgcaatgtaccagcgtaaaacttacaccataaaatcatactacgagacttgctaaagtatcgatagataaagatgatgtaccatccgaagttgtgcctgtatctccatcgagtcaattcgaatcatga

SEQ ID NO: 45715 - DNA, 323 bp, Arabidopsis thaliana columbia
aggagagaagaaattttacacgattacagaccatgacttgtaaacaacttcgaacatttcatcctcttcttcttaagcttcttctcttttcacttacgactcttcacgttatcactcaatctgattggtctctccagcttgtttctacgtcttcaatcctcttacacttaacttttcatccgtaggaacagccacatgagacgtgcacgaaattgctttcgtcaagtgatagagaacctacacagacaaagtataaagtttatcaccttgagccacattacaagctaagtagcgactccacccatgaattcgagatacatgtt

SEQ ID NO: 45716 - DNA, 581 bp, Arabidopsis thaliana columbia
ttttacaaaatcacagacaagtagatgatcactagggcactaaccttattaaaaaacagtagatgatcactaacaaataaataaacgacattataaaatgagatggtggggatttgatctcgtgtgagtgttaccgaataggttcaaaactttgtcccacttggccagcacacgtgtggtggcatagttgtcttcatcttcgaagttcaaacatgctaagcatgtaagctccgacaaaacatattcagataataaaataatttcaggcctttcttcgatagatcatattttcagattcaaaatcaaccatagataataatatctgcgtaacgaattacacgctaaaataccataatagtttgacactactgttttttttcgtattgtgaatttgtgattgataacccatcaaaacgtttcagtgataatgataaatgtaggctaaaggttaatgggacgtgtcatatttaatgtagattcttcgggtttggactatctgccaagcaagagaaatatggcagttttaatctaatccaacggtcatagaccttagtcttcatctaaccggtcatttatttaga

SEQ ID NO: 45717 - DNA, 567 bp, Arabidopsis thaliana columbia
aacatcattaaaaataaaaataaagttaaagaagtacaaaattgaagaccactcaaaaagaaagtgttgaaaccaaaggagttagcttcttcaactttctccactaattcattccattgtcgttacctttttgtttctcagactgttaccttacctgtaaagaagagagttaaagatctattgcaaaaaaactcaacctttaatctctctgcttcttctaattaagtaatttcaactacccttttggcgaaacctctcgatctattggtttggtactgaagaaaccgacttgagtctgatttgtttttggtgaaagccatggaagctataagaaagcaagctgcgaacgtcagagagcaagtcgcgaggcaacagcaagtgggtttctttctgcttgtaatagatttctgtgttcttagatttatatgtctggttactgagaagaatttgttgtatggatttctaataaaggtggaatctttgaagtggttgatggttaatttatagtcttgggggtagataggattgttgaggtatgaattggttatagttaggtgaaaagtatgg

SEQ ID NO: 45718 - DNA, 504 bp, Arabidopsis thaliana columbia
tacaataatgcgtgttcaataattaactaagggttttttggacatatttagtggtgggttatcatcacttagcatgtattttaacaaacaattaacttttcaatgaataaaccccttaatggccaccttaaactcaaagcccagatcagaaccaaccagattttgccacgtggctctggaatataacaatcaatttctaaatgtcttcttttgaacccaaagaaaggctttcacactcagtcagtactcacacaccacacactagttcattttattttccatatacatgctctatagacatagttccaaaaaagtagtatcacttggattatccattttatagtaccaaagtcattattatactatctttaaaaaaatattttacgatgtcttgttctgtttgtttgtgtcatatattgggttaaatattaaacattggtggaaccaattatgagcttcgtcgttcgaatataatacataaatgaataatgttttatattatgc

SEQ ID NO: 45719 - DNA, 333 bp, Arabidopsis thaliana columbia
tctaatctagaatccactataatttggctggatgttataaatcatgaaagaaaacaaaacaaaaattggaaaacgaataacactttagctcatgaaaccaaagtttgagaagattagtccacaaaataaaataaaaaatctatcttaaaaatctagatactttcaggtcagatgaattgttggttcctctttatcctattcgaacataatctcaaaccttagatttaactttctaaaatagaaaaactcccggattatataaaggttataaataaagattacgctgtctttctttaaccttaagcaactatatttagtattaacaggaaaaaa

SEQ ID NO: 45720 - DNA, 505 bp, Arabidopsis thaliana columbia
tggtatcccaatgattcttaagcatagtctctaggtgaacctagcgccagtgttttgtacaaaagattcccatatacggttcaatccaggtaatcgaaatcccaacatcttttgctcaacgcataaatccacaaatactttgtgtagttcaggttcccacatgactttctctctcgtcattgtaactccttcctatatgtatagataagtaaaaacaacgacaacaacaacaacaaaacatctgaatgcattgattctaactaattgattgcaaataactaaatcgtgttagcaagtttacttggacaataatcaatattcacaaacatttaatggcacaaaaaacacaaggtgaccataaaagacgaatcaacagataatctaaataaatataacaaatcgagtgcttgttcatgtgatgtaagaccaactagatctagtgctcgttgatgtgatgaacatatatgcaacataggattgagctctttacactagatcgagtgtt

SEQ ID NO: 45721 - DNA, 556 bp, Arabidopsis thaliana columbia
ttaagaagtctgaaattgttagatcgcagctatgtcgtactctgactccgattcgtcgtctcatggtggcgagtacaagaatttccgacagattacgcgtgaacgtgagtgttctctatctgtatcgattctcatctgttttgactctcgttgatttggattgacttgtcgattttctggattctcgtgatcgatttctgattccggtttttgcggaagccattttagttttgttgtttctgtttgattctgggtactacgttcgtgagaacgataatgtgtatttctctgcggtttattcgaaattgaatttgtgaggagttcaatggctaagacttgtcgcggaattgcattgggacagttgtttgatgtaatattggggaaatccgttgcttgttacactggtttggtttctaaggttggaataaagttttaagatgaggtttatgaataggtagtagagctaaaatgttgatatgttttacagatgttgccaggcacttaggaacagatactgatacatgtttgaaatgctcacaatgaaagcatgtactgt

SEQ ID NO: 45722 - DNA, 488 bp, Arabidopsis thaliana columbia
atcgacgccttaggtatgatctaaacactgatgaacagttgttttcttttactattctgtttctttgtttctaaaattttaatgttgaaaataaacaggggataaagtatcggaaatcaacaaaatcctcaagtaatcatcaagtctagaagggaagtgaagattaggaaatggaacatgaacttttgcaaatcttgttagtatctgccatctggaactcgttcaacaatcaagacaagtagtttctttagtaaatgatatatgatttacgtgtttgtgaaaatcgaaactctgtagtaaagctgatttctaaatagcctttggacgtgagattgtttaaagggatcagtttgattgtctaacgataagatgtgtgcttgtgggatgattggtaggtagtagaaaagtgaattgagaatccaaaaaaaataataattaaggtcagttttataggcctatcaaatttcaaacgtgacagtggtggcccc

SEQ ID NO: 45723 - DNA, 715 bp, Arabidopsis thaliana columbia
  unsure (1)..(715): unsure at all n locations
tttgtgtgaaaaatcaacgaaagtctggggctttatatcaattagggttcaaagcttacctcgccatgattcccaaaacagagagagggggagagagagagagagagagcgttgttgagcttgttcactaggctaagtaaaaatggagtgaacgcgtgaagacaaaaacaaaaccgagaagactatgtgagcgggaaactggagctaatccatagggtcgtacgttccgaccctaagcttcgaggaaagcttctctggaacacaattgacgaaccttagcttcggtgaacactcgtgtttattgaccttcgctgtgaaattggttcggaacaccgaagcacttgggagcttgggaaatcgggattagtggcaattttgttaataaatagattatgtggggcccgctaaccttgctccccaagccagatacagtagtttcgtctttaactaatgattaaaaaactatagttgagacaagaccacttaccgttggataatggagacttcacattatggaatcttttatcaaatctatttatgatctatacgttgtaaaacctttttcatttttatctttatcctttggcaaatgaagaaactcatgatctctagtatttgtcatactaaatctgcagtaaacgaaaaaagctctctatatgcattttgttattaaaaaacaaaaaaaacaagtgctatanagtgtaaataatgattt

SEQ ID NO: 45724 - DNA, 594 bp, Arabidopsis thaliana columbia
tgataatgacacaataacaatacaagttcaattaggctatttggcatgaccaatttcaaactagagttgagaacttgagatgtaatttaattcatattaactcatcacaaaaacgtgtataaagttttcattgtttcaagtgaaaaatatttatacatttgtaaatgatatatgtttttaaaagaactagaatgttgagaatttgtaatttatgcgaagatacaataaccggaaagtaaaagatttcaaacaaactcgttttcacatttgaatactccaccatgtagtgctcgcagctacgattccatcttgcccgaaatctggtcactccaatgaacgtcttcaccggaaaatccacaagttacaatggtcaaaaccattttgtcaaaaacaagttccaacaactatgactggaatcttatacattttaaaagaacacttgactttagcgtgaagagagtattttggcgttggtgcacagatctctcaactcctcagacatcgacctctgactatctatggtcttcttctacacaataatattacgtactaactactctgcaaaggatcttagtattgttaaatgcaagaagt

SEQ ID NO: 45725 - DNA, 453 bp, Arabidopsis thaliana columbia
aagttagtaacatgataataacatttatcaaataacttttgtttaaacataacctccacgcgccttaaagggaatgtaggattcgttttaatccttgtgtacccaacttccacttgacatttttttttttttttttttttttgttaaatgatacgttttctttagctcgtatataatggtatctgataaacaaattgaccaaatgtaatctcttcggttaatcttatctcatgctttcaaatataagaattccttctctaaatttcttttgtattatccgattggagccaaacaaaaactgggacgaacccctagttttcttgggtagatcttatgtaaggataaccacttacacacataaatttttttgtcggcatttgtgtatatgtaataaatagtattaatttacttaaaaaggaacatatgattcaaataatagttattatattaagg

SEQ ID NO: 45726 - DNA, 434 bp, Arabidopsis thaliana columbia
gacttatttagttcaattatgataaatagaatatagattcaaattcgagtataaaatgtaaaaattcgatttcaactcaaaatttcaggtttaaattagttaaataaaaactaattacgaaaaaaaatgtttgaaactatgtgacaattagagcgatcaaatgcagacatataagcttatgagagctacaaaagggcataaatgagggcacagattttataacgggatttacccggttgaccaggaccgtaaaaccggcaatacccggttaatccgcagtagtttctagcggagctgtcccacaacattccggctgcatactccctcaaggccttttctctgccccatcgctctcactgtcttccgtttccctggtcacgcttgtgacggcgttcactttggatttcatcgcggtattttgcattgcttttggt

SEQ ID NO: 45727 - DNA, 523 bp, Arabidopsis thaliana columbia
aatttgaacaaaaaatagaggaaacagctataatgattataataataataaagtttaattagaaagctaaacaacaaggattagaacatagatttttacaattgcaaaaacaacaagaacaaagtcgtaccttgggacaactaaaacaagatgaccatctgatcttgcagttgcagctgcagcatgagctcttctttttattcagacacgacggtcgagtgcaactgcaactgcggaaacagctgggaatgcagcaagacatgtccggacaagaacaccagcaacctcggaagcatgaacagctcgggcagcttagtctcgggcaacaacaaatgtttgagcagcatgacccgtcacagcatttggaccctatacagcatgcaagatgtacagttgcagcacttgggtttcctcagatggcacgaacatttggattggcagcaacagcagaaactcaccaggctcaaacatgggccactgcattgagttaattaattagtacactttatcagatagctcacat

SEQ ID NO: 45728 - DNA, 190 bp, Arabidopsis thaliana columbia
ggttaagaggatcccctatatgtgaatatataaattcactactaaactctaaccaatcaatgcgatgcattcaataaaaccccactaaattgttaaatttaaaatgtagcaatcatagcaaatttccttgagctggtatatattactgtatattatatcatcagatagtgtatatgtcaacttatccgaa

SEQ ID NO: 45729 - DNA, 488 bp, Arabidopsis thaliana columbia
ttttcttttgagaatacaaaaatattggaaagagttcgtccaagagtaaaaatcacaccattttaaacaaaattgcaaattgcaaagtgttttataaaataaaataaaatatagtttaaaagttttctattgtttatttgaaaatttaggtaacaaataaatgatagggatattatgggtctccatgatcatgatagtagtaatagtctagccttaaatcaaaaattatatttaatctcaactatctaccaaaaaaaaaagatgcttaaaccaaaagaaagccaaatctcaaatattttgccccattatattattattaagattattattattatatgtgagactaactattgttctctgtctctttttttctttttaattatcaaagaaagaaactctttcttaatggaaaccatttacagataaaaaaaacattaaaaggaaaggtttttaataaagcctttgagagagaagatgtttattatagg

SEQ ID NO: 45730 - DNA, 779 bp, Arabidopsis thaliana
  unsure (1)..(779): unsure at all n locations
attaaccatatacatatacatataaaatacatctcgatctaatataaatcaatagatcaaatccaaagcaggttccttttttctttgttttcagttacctttcttggcttttcttctggttgccatcttcgttcatcagttgtttgcattcggaggagaatactcacaaacaacctccgtgtcaacttccctccggtgaaaattccggtgacagccacaggcagcacacgtcaaagcatcatctccgccgcttgccataaactcccggcaaccgtcaacagcgtaccgccaatattagcggcatgattcttctgacactcaacgtaacggacgttgcttgaagaagaagtcatagtgtaagagctttttctctgttttatcaccacttgcctcttcttcatcttcttcgtaaactgatctcccgaaaaaccctaaaagaaaattccgattaccttgttttgtggggaaatgatcaaacactctttttggatactaagtaaaatggtacttgccaatgaaatgcccctttgtagcccttaatatataaatagggttgttgagtgttgactatatatctctacactatagacggatttgctgaagcatttgttaaattattatatgactaagtatttgaaaaagtcgcatcagaaaaagaagtcattgtgaaatgaaatatatctatatttggtaagacaaagacttcgacatgtaattaggtttataaggganaaatatgttacgtacatggaagaagtgcacacatgatgtagatatag

SEQ ID NO: 45731 - DNA, 519 bp, Arabidopsis thaliana columbia
cgctccgtgattgtatcgattcaagcagtaacgctgttaccggtcataacccacctcgtatatgagctgaagatgtcaaactccgagctcggccgcatcgccatatctacagccgccgtcagcgatttccttggatttctcactctagtatgcatctcctacgttggaacatacaggtatgtaagacgtcgattaatttaggaatctaattggtgcatttgcatacaaaactacttacctcattaaatatacttttgtagtaatcaaagtctacaaatccggagacctaaagcaatatatataatgctctaaaactggttaaaagtttgatcaacgaaaagttacagttttattgtctataaagcaatactaattgttatctacacaatagacggcaccggagtgtttgattagtaatgtatatctactatctaacgaacattatttgctataatagtttgaaacggtctgcaggtatgtatccccggaatagccaaccgcgacatagtggcattgatc

SEQ ID NO: 45732 - DNA, 532 bp, Arabidopsis thaliana columbia
gtctatgcacaaaatcaccctaaaactaaagcttggaaagccctcgataatcttaaacattattaaaatactggatgttaaagaaaaaaaaaatactgataaaatgactatcaaaataaagaaaaaattattaataacaaacaactaaaattgacgctgcaacatcctagttttacgtggcatcatactgtgtatacaactaatgcattgaaggaaagaccaataatagatatacaatcacacgcataaaactcattaaaatttcaacagaaataaggatatttcggtgcaagataaccaagacaggtcacttcagggttcactctgctccagtggcagacccagaaagatttttaaccagggtcaaatcttaactaaatatttttttttctgcaaaaaacttcataaaaatactgtaaaacgatccaaccacaattcctttataaacatatataacatcttatctaaatctggatttactattgtggagatgcataattttttgatccatgtggtcaattaagaggaagat

SEQ ID NO: 45733 - DNA, 535 bp, Arabidopsis thaliana columbia
gatcgagatactaatatttgacttactcgtaatgacgctcgtggaagtggtcgacgatctcataagggtcgggatgataagccataagggtatgtttacgagcttcattggccttgtttacccaatactcatcggtctcatcagcaacattggctcgtatggtcggaatcaaactggcaatacatatcacacacactaatttgaaaagcctagccgtctccattttatttgattacccctttcttttacggaaaacaaatatctattttattttttaaaaaggggtaatctttttatatattgaaatatatgtggagaactgctaagctttaaacatagctttaggtcgttatttctgtttgaccgaaagccttttttggtagatgaatcgtattgcgaagtttgacaaacatgaatgttggtgtttaaataatgataaaaaaaacctggtgaagaaagtgaactactatatttagaaaaatttcccgttatgtatggaaagccccataatttacttgtggacagctttctttgt

SEQ ID NO: 45734 - DNA, 296 bp, Arabidopsis thaliana columbia
gctttgaaccaacactataccccggttggtaaaatcctgtgggcttaacaccaagttctcggcatgttttcacaatgtcaacctataagcatgtacaactctttactttactagagaaatatgtggattatgtgatcattttcacagttttttacctgtatatcaggcgtaaggaagtctttaagaagcaccattccaggccttataactttgtgtttattactaacttcaacagtttctctgtttgtttcatccgccaaaatccaatcttttatacttgtatcatttctttcgag

SEQ ID NO: 45735 - DNA, 464 bp, Arabidopsis thaliana columbia
ggtttgttggctcttcagataagaaagagaaatcagtgttgtctacataccgctcttcgccaaacgggaaggaagtaattggaacttcctctaagatttgtatctctagctcctcttctgtgaaaagtggtgagaagcaaccgttttctcagatagccattgattcatcagagagcagcagaggtagtgaagacgaggtagagtcagaaatcttgcaagttcctcttggaagagataaaagaagaatgaacaataaacttatttatggaaaagttataacacctgaagcggaatgctcaaagttgccatcaagctcaagaatcaagagaggttttaggcagagatttgggttgagcaagcaagagtttcatcctggtccatctggccagtcaacatctgctaaccggggatgcagcccgttgttgtcaggtgtcattccaagtggttttggattggacaaaaga

SEQ ID NO: 45736 - DNA, 523 bp, Arabidopsis thaliana columbia
aagaataatcttgatttgaataatatttttaatagtttgacttttagatatttagattcaagacttgtaagacaagttatttcttgtaatatagaagcaatcaccaaattgtagaatattgctttgggatgtcttcaatataagtatataaccaatacggctcattaaaacagatattttaaatatatatataattttataacccaacacatttattcaaaaaacaagggaagtctcaatccaggaggaaatagttataacataaccataagatattttcaggagaaacagaaaatcaatacatgagagacttgtactaacattttcccctgtttttttaaattcaattactagcttttcccatcttaaattaagattaaaaactcatggataaaaaactaaagaaagtcaacccagataagattgaagtttttgtacacttggtgtttctccttgacccatttggggaatatttttctccaaaatcttgaacctgtttcctccatctctagcttttttcttg

SEQ ID NO: 45737 - DNA, 449 bp, Arabidopsis thaliana columbia
taagatttgtgcaatttaagaccagcatagccaccacatgcactcaattgttgacaatttcagacatatactcgatttaagatccacacaattagaaattgttcaaaccaaaattcttaatgctaccaaattgaacattactagcgaagtgtatagctaataaaacatgtgtgcttatcgtcgatccctcttctttaaacccaaaatttacctcaatcaaggtcaaacgatttataactgatatgacagagcataaacttctacgtaaacaacattagatcatctataacatcatacaaaaacatatgttttacggctcatcgaatagattgagcagaaacaacgcgactaagagagaagtgcccatgatggctaaagcgctgataaatatgagcaagaggcgccattaagacaagtatccaatcctaactgtgaccgacgactcaatt

SEQ ID NO: 45738 - DNA, 550 bp, Arabidopsis thaliana columbia
ggagaggaccacacgagaagccaaaggagacagaaatggtcacttacctcgtggagttatacaaaagtagacataaacagacctgaacaaatttggatggtccatgaacagtactcttccttttcaatttttattgtcatctttctcttctgtcatttcatcatgatgtacttactattttgagaaactgcttcgttttccattgtcttttcgatcccttaacttcttttagaaaatgttcatacttaaaatattaaaggattccttaacatgcactacaaaaaaaaaattattatggattgtggattaccaatggtatagtactcatttggtttacttagatatttggtcattcataaactgaaaatctagaaacccaaataaatctgaaccggaatcaaagcgaaatttaaattctacacacttaatgtatttgttggactattgaaggaggaagcagccaaaaagggtaagagtcatatatatagatagaggtatttagatggtggagtcccatcaactagctttaaagtgttttgtgagaagggtg

SEQ ID NO: 45739 - DNA, 528 bp, Arabidopsis thaliana columbia
cctcttgaaggggaaatttaagaaagaattttcagccgtcaaattcatattcctttgctatggaaatgaaaatctctttatgtactttgaaaaatagatgaactatttcatattttgatgaataatgactaatttaaagcttgtatttttttaattgttcgagttagagtaccacaagatatgaaaatcattatttttggttgagagatagaggtttgaaaaattaggaagtgaagctgactgatttgaaaaactaaagagactatgaaactttgaggtacatgtagtgtctgttatgtatttttcggagaaggaactattgttaggagaattctaccagctcatttatatatcttttggctatgttcgttgggggcttgggtaatgtgacaaatctgttattggagtaacaggtagttaattagtcgtgtaactgctggagcaaagtacttttataaatttctatgtatattaagcataacacaatgaaattaggcttaggcagattcatcataatcattgagattt

SEQ ID NO: 45740 - DNA, 449 bp, Arabidopsis thaliana columbia
ttcgttgttgatggtcccgtatgatcagtttaataaggtgctaacactgatccctaaaaaactcctagccactctaaacgcccttatctctccaaatcgtcaatttcagaggaaaactagctacaataatgacagacacaaaaattctaccaatagagaacatctactttttgatcaaaattctaataagcattaagtattagcagtacaaaaactcaccgccgagaacttttgatgtaaccaatggcccacactctctcgagaccataattccccgtgttttctagcctgacacgagacagagaatcgaagataacacatcacacgacacactagagacagcgaacctatggtgcccctgaatacaagacatacacgcatgtgaacacagtgtattcaagtgttacgccaccccaaaacatgtcagcattgttatgtcttttgacagg

SEQ ID NO: 45741 - DNA, 545 bp, Arabidopsis thaliana columbia
tataataaaactctttgcgaggtttcaaacatctgatccagctaaagtgggtcgactagttcacatcgactcttgtatggtttgggtttgttcaatcatatgtcgattgttcgctcttcactttagtacgggatggggtgtgcctataagttagggaaggctatttgaccagttgcttcggaagatagaggctttgtggaatacggattgaacaaaattattacctcttctccgatactagctctctgtacaccgatccaggacactgacgattacgagtcaagagtaatgatatgcggttcatgtaatatcacagtttatggatgagttgcacttagtacattggaaagcatcatttcatatattttgatacatcaattgctgcctaggtttaggtaccatgttgaaaagctgagtgtgtatattgttcttatagtgacttatcttatgctgcatgtcccggtacatcaccatctttaagtgtgtatgttgtgtttatggcgagtccccattttcacgagaatgataagcaataacttataact

SEQ ID NO: 45742 - DNA, 544 bp, Arabidopsis thaliana columbia
gaagaattccaccttatcgttatcgtccttatccagtctagtattcatgatgatgaccattggaggccagacaatttcataatccttttcatcctcacccaaacccttccactgcccataaatctcaccacaaggaatgacagatgcgcctctcatctgtagatccttttctaaaacttcagccaattctctatggagcttaactcgcctagctccttttgtcctcgcatgagctagtagagggtgcaggttataccaatcgatggcaccaggtccgttctgacaagctggacaatgccactgcctctgtggttcatttatctgctcgatcgacaagctatccaagctgccaaagaactttttgaaccacttattctgctttcgtgatccatggctcttttgactcacatccgagtcataatcatcacttgcaaggtcgtcatcagaatcatccaaagcatcggaatcattctcttcctcagaagcattatccacatcatcctccacgtcaggaaactcctgcacagctgtgtgctgagcagaa

SEQ ID NO: 45743 - DNA, 531 bp, Arabidopsis thaliana columbia
caaatattcaggtctgatgtaaactcatcttttcccaatcttagtcaatctttgttttgcttcgtgataccgattgagaaaggatatcaattaagacataagccgccatcgttaatagttaggtataaggattttttgagaaccatgccatcagttacaactaggaatatgattcacgaaatcattgcgtttgaaaccaaaagattgtaggaactcggtattatgataaagtctctactgaagcttccctaaccctttttattcggtgtccttgaaccaacacctacgaatggtggatcttccggaatttattttttaaagtgagctttttcttaagatatttggacaagatcatggatatttggcaaattaaaagtttgaagaagaacaacattatgatcccgtctccaaggagaggtggttacgaaacttctacaccttttttgtttgctaactcctccatggagccctttttcacaggcttttatgcgttattcatgcaagccgtctatgacactcgttggtcgagga

SEQ ID NO: 45744 - DNA, 492 bp, Arabidopsis thaliana columbia
actctgatcccccacgaacttcatctaactctttgccaagattctttttagcaccctggatattctttcggctcctagtcacactatgcttcaacagtttggaatcagaacgagcccatcttttatccactgcaactggtatcagttctcttttctgttctctaggcaagctagaaaattcccgtcttttacttgcaacgccaaagaattcatcttttcttctacgatagatatcaccccctccttcatcctcacgattatcatcccagtcgaaaatattgtttccaacagctccacttttgtaacttaccttctttgctaattcttgtggacctttaaaaatctgaacaaattttgatttatcttctgttttccttccatagtcagcttgaacttcaaaatcaaactctagacggcactcactaatgagcttatcaaccaagttaagagcactggcctgggattctcgctaggttcttgagagccaatata

SEQ ID NO: 45745 - DNA, 450 bp, Arabidopsis thaliana columbia
cctcatcacttcaccttcatgtgaaaaaatcttttacatatttatttcttatggtgcctctatccatcctcttatgattttgtctaaacagtacgtgtgctatcttccaaacttttcacattgctctatattttttttaaaaaaaatctcttactttccttgtaagtaaaatctttttccaagcttgtcgaaagataggttagttaagttaataaactctttgtttgaacttttaagaataaaatatttgttctgctcagttttgttttctattattctaataaaaagttttagcttctaaattggttcttaactctatcactttctcaaaaacaaaattgtgatatctaactactctctcagacccgaatatcgaggagcccttaccactttcttcttccggcgccggtgacgcctcctctcgccggcgtcgggatccaacccctgttt

SEQ ID NO: 45746 - DNA, 491 bp, Arabidopsis thaliana columbia
tgaagtgtcattctatgtataatgattttataatgttagtttgtactttggttgatgatgatttattaaggataaactcctaaaagagtaatctcctaacaatcaatgaaagattaatattgatagtgaagataagccatgtgtgaacatgtagtgtgagctttgattttagattgtaggagttcatgattcgtttagttgtaaaaggaaaattaatttgtaaccacaaaaaacaagagtctatttggagattaataggctgtcctcaattatattatcatcaaagtacacaagacatacactttcatctaagccatagactcaccaaacttctttttctaatgttcatttttatttcttaatttttataatatgacacttttgaaaatgaaatacacataaataatccaagttttttagatttttttaatgcttttagatagttgtgattttgttcagctcgtatttggattaagatattacttgggttt

SEQ ID NO: 45747 - DNA, 342 bp, Arabidopsis thaliana columbia
ttattattagacttgaaaaaagggatttagtttcttaacatttggtggatattctttcatatatatactaataatattatattttggctataagatatttctatatagaaaagaattatatagtaaatcagtccacggctgcatggaaaaacgaaatgtcccatttagtttagcgaccctagtattcattagagtctagtcgaattacttgagtattagtcaatgtgcgtaccaggtctggagaataactgcgctccaattgcctttgcattgcctacgaaacctttaggttctcgagcgtatcataattagcctgatacgggccccaatattcgacaaatc

SEQ ID NO: 45748 - DNA, 883 bp, Arabidopsis thaliana columbia
ttataaattcgcacattgatgtatctagaattttaatatcgagaaaagggttttgataataagcaatgggaaaatcactatctttcaaaatcacaactgtaccgaatggtatgttaattagtagttaaaaaaacaaacacacaattaagacactgattaatccggtggagaaaagaacaaacaaacaaacaaacaaacatttattgaatccctaaaataagattaattattttccctaattagaaactcataaggaaacagagaagaccataaaaccacaagcctattttttgtcttttcaacagtttctcactagccggatttcccgccaagccttagaaaacagagcaaccaaaataacgaactcttaatttgtcataaccgttataaataagccatctagacaattatgaaaattgcacactcccaaggaggctacgtaaccttcgacggaggagtccataaaactcacattctcatttttttctcaaaagaacaacgaacagctcttatatttttttacaataattcttcagagctgtttaagttcaacaacaatttgattaagagaaaaccacataaatattaattagtgtaacgaaaaacacaaaacaaatatgtcgtacggatacgacgatgaatccaagaggaagaggaggtacattgttatcaccatctccgctgttcttttgatctcgatggtggttgcggttaccgttggtgtcagcctcaataagcatgacggtgactctaaaggtaaagcagaggtaaatgcttccgtcaaggccgtcaaggatgtttgtgcaccaactgattacagaaagacttgtgaagacactctgattaagaacgggaagacacaaccgacccgatggagttggtt

SEQ ID NO: 45749 - DNA, 557 bp, Arabidopsis thaliana columbia
tatcccgcaaagttttatgttctgttgcgtaacttacctaagatattacatggtttggtcagttttattctgcttcacggtcagtactgatgtttctttcatatcttccagggatcaaaaggaaccaacgacgcaaggaattgcaggagtgagatcccacatcagcctaacaccgccaaaagacacaaggaaaatgcatcctctggtgatgagatacacgattcaaagagaggacgtacaaaactggagcgttgggcaagccacaaagagagagaagatgctgtctctgccaagtcatcatccatttcctcaaaactagaagaaaaggaaaacaacactaatggccgtcttagtgaatctgttcatggttctattggaaagagccgggatgtaactgaagagaaaattggccatgatcttgcagacacaaaagatggaagcgagaagggaccaggagaccggcacttggatacggttgagaaactcaagaaacgcagtgaaaggttcaagcttccaatgcccacggagaaagacccacgggagtaaagaccatggag

SEQ ID NO: 45750 - DNA, 529 bp, Arabidopsis thaliana columbia
gaggctcccttatttactataaaaaatatattttattacaattattatatttaaaaatctattttttataaatatttaacatcaaaacttacagcaataattctatagcaataaaactataaaagctactattatagcgaacatagctacagcaaaatctctatagaatttgttttacagttacagcccaaccaatcactcatttagttccttaactttaagtagtgtatttgtaagatagagagaaaaaacaccaattagtatatttgcaacatagcatgattggctttagtggtagaactgaagaactttaaaagtgaatgagtgatgaattctagttgtacaacttgtaacttgggtgaaaagataactcagataaaataccagtagaaaagctttgttcatgtttaatgaatcacttttgttaaggacatagaaaagcttgaaaaattgaaacataattatgatctcttctttagaaatctgctctacaagaagagatttgatcataaactttagaaagttgtgt

SEQ ID NO: 45751 - DNA, 478 bp, Arabidopsis thaliana columbia
ggtttgaggaaactgcgaaatacgcagactttgtagtccttaagatgaacacaaaccaagtggaaatgaagttcctaactgttttactggaaacaggagtcatatgctacgtggatgagcttttcctccgctgttccaaccacaagtcagactgcatcaacatgcttcaaactctgagagccagaggtgtgtttgttcatcaatggtgggaagactaaaccaatgtaaaactcaatctcgcttcgccttagtcttatctacgtcgattcgtgtctgtctttgtctcagttgtaatgccatcaccttctgtgtttgccatagttggtcctcggccaccacagctcctggccaagcacctataactaaataagaagctgcctatctgtttatcattgctatttaagaactcagtttccacttataatatattgaaccataacgttttacgtcttaattaagcatggcatatattacacaa

SEQ ID NO: 45752 - DNA, 526 bp, Arabidopsis thaliana columbia
tcgagtatcttattagaaaaccaacgagtatatattcattaaaaatagttaatagaatagtgatgattaacataagaagaaacaaaccttttagtaggggtgaatccgggtgatcagctgaaaaaaacaaagggtgagtttcaaataagtgttttataacttctggtaagattatttttttaggtagtttatatgctaaaagtaaagaaaattgtatttataaagaaattttcacacaaattttcttattcaaataattaccaatttttcttcttctttattatatgctataaattctatttatatatttatgtatactacttaaattctaatcatcaaataaaataatactgaacaactactataatattactaaattagtagattttcaatattttattgttgctatattcaataatttgttaactttctaaaatattacatagataatatgtttcaataattcaaaacattagacacagtattaaaaactaaggtaaatattttgatacaatttacttttgaa

SEQ ID NO: 45753 - DNA, 507 bp, Arabidopsis thaliana columbia
aaagatacgtgagatattacaatgtgaaatcacctacttgctaacacactaacacactaatactctgtatcacaccattgttctaatgagaaaacccaccccaaagctaaagctttctatgtgttcttctctcaccctctttctacatatatcgtgtgctgcttcaatctctctcacgtccccaactacttaagtacaaggagacatccttaaacctagtgaacaagataacaaaacacaaaggctcctctttgtggtctcaaaagtaacttaacccaatcttaacttgactagagtcaaaaccttagttacttttgatcttcatttgattgtaaacaagttctcatctttacagtacttcatcattattgggtgcaaaacataaaaccgaaaatgtattcctcttgatttcctaaaatgttatttactcttgattttgattgttatcaaatctctttagttttgtacaaatctttaaaacctacacaaaactcctctttagagttg

SEQ ID NO: 45754 - DNA, 347 bp, Arabidopsis thaliana columbia
ttgttgaagaagaaaacgatacaaaagaagattgggtaaacgacatgtgtcctcctaagaagttttatatagcaccacaactacacagatttgggatctcaccacaacgacactctcttcaatatggctatatgcaaatgaaaaaagagaaacctaaaagtgttgaccaaaaagactatttaatttttgcattcttttttctctttcatgtgaaaacttttaaaacaaatgaatagttagttatacatttgctatttaaattatgtcactccaatacttagccatgagcttatcatgatgtgattgtaatactagattaggagagaatgcatgtaataacaaattgt

SEQ ID NO: 45755 - DNA, 354 bp, Arabidopsis thaliana columbia
aaatatatctaacaaatgggaaaaaaaggagaatgcacatgatgcacaaacagtttcatgcacctccatcggcaacacaaaaggaactattatagacttaaataaactaataacataaagagtgtaccaatagcaactaacgacactgtaattaaattggtaatctagttactaataatctaatatagatagactcatgaatatctcttgtatgaagaaaaaatccacttcaacagtaacatagaaaatcctgaataattaggcacaaggatcacattgtttttgagccggtcctgcctagattataccttacatcggtgcacattgcgctataccgtctcatcttttcatgtt

SEQ ID NO: 45756 - DNA, 526 bp, Arabidopsis thaliana columbia
gagattccacagcaactatcatcggatcgttgatatcgctgaaatcatatatcgttaatctagtgaaaggtcatgaattgacttattttccatgagacaaaaagaggtaaaggataaatagaagactaacactcagcttataccataaagggacatatccataattacaagtaactatccataaagtattcacaccagtcaacaaaagacttaacatttttcattgataccacactgagataaagagaaagtatcataaatcttgttagtccacaatctaaatccacaagtaatatttgtccatagtaaagataagatccaagtgttgagtatctcttaagtcatcatcaacaagttgccgtagaaatacaaatcctaaacactacacacaaacacacacttcaccttaaaacatagtgaggaaaccagcaaacatctaaggacacaatactatgtagctcaggaagtttaagatttagagaagatgagaacttgcgggaaacgtacaaagcagaccgaaagagag

SEQ ID NO: 45757 - DNA, 680 bp, Arabidopsis thaliana columbia
tgaaaaatttataatctcactttgaatttggtatatgtattcagacgaatgataagataccaaattattttagtcgttttaatttatagatttattactaacttttttttttgtaaatttaaactttcagattaggcaacaccaaataaatgatatatttaatagaaaatgtatggtcgaaaaaaaatattgtaatgtctctacaccagaagcttttgttttgacttttgagtgtttgaatcatttgaagttttgaacagaataattccacaatcaaaaccaaataatattttatcaggcgagcgaaagacaagattttgacaggtatttgtacaagtactgagtcggtcaacaaaccccgtctggactctggacccgaagtaacccaacaaacgttgcgacaactacattagcaccaccaccaaggcaccaataatgcaacgtaagagggacgcagcaaaactgtcgcgatgtgagattcacgcgctctaatttaaacgttgactctttgtttcatcgttactctctcccatttatttacttcgcatactctcttcgttacaagtttccatttaattactcttaagtctctaactaatagctttagggattcgtcattaatttaaggcaacgtaaacttaaagagtttcgactaaaagccgtttcaggaaacatacatc

SEQ ID NO: 45758 - DNA, 566 bp, Arabidopsis thaliana columbia
ccggaattcacttgaatctgttccgtttaacaccttgagtgcaccaccgcgggatgtagactgtgaagaagactctggaggaagcgattctaattgctttgagctcaagaaacctgcagagtcttatggagacgaaactaagaaaccaaaccaacataacaaagacggttcgattgatgaaaagccgaaaagcccgtcgagtttccaagtgaactttgaggatcaaatggcgtgggcgttatcgagtaacggaaagaagaaaaccacccgagctattgaagacgaagaagaagaagaagatgtaaagcctgagaacagcaacaacaataagacaccagaaaatgagtgtgctactacgaacaagaacgatgtaatgggggacatgatacgaacacacagaaggttattgtccgaaactcgtgaaatcgatgaagcgtcttgcaatttcccatcttctcgaagacaagcaagtccagttcgacaatggatttcaagacacgtcgcacctgatcttctaggcccgtcggagattgcgatacgtcatggagtaaaggataatactttga

SEQ ID NO: 45759 - DNA, 551 bp, Arabidopsis thaliana columbia
tactctcatgtatgctccaaacgcaagagagagaaaaattcatgtaacgattccatatttaaacacgttatttatatagaattattcgaatttgtggtgagttaacgagttttaattgggcgtgagtggaaaactttagactttataaaaattaaaacaggaaaactaaagaaggatgcaatggcacgagttttgaaaatccgtataaatcttacgtcacacttttttttttttcccactacgtcatactgtttgaagtacacgattcatgtcaattgtaataaagtccctaccgcttatgtccgcttatgtgacatggactttcttcaaagttgaaccatatgtttagttaaccggtgccgtttcaaaataatttttgtttcttgcttcttatagtcaacggaaaattatgtacgacctagaaatatagtatgccatgaatccaataagtctaaatcgtaaatatagtatgccatgaaaacgatcgagatgaataatgtaactcaaattaactttcaaaatgtggggaaaagccccatatataaattgaa

SEQ ID NO: 45760 - DNA, 511 bp, Arabidopsis thaliana columbia
tatttatatctttgaatatatatatatatccctctatatatatatatacatcctttgacaacaaataaagaagatagatataaaactgcttacaacactacaggctcacgctgcacactcattatatagatttgatattattggatttccgtaatatttgaatatgcaaagataatgtttttaaaataaaattgtgtggatgggataaatgtgtgttttgttttctcgtttgccgacagtaggagaaagagattagcgtacatttaatgtgccaagccttgaactcatgttaaggatgcgactaacggagacggaacgccgaaacaacggcaaaagcgcctccgttaaaagcttggcaccgtagaaattggtcttgatgattgtctctggctctttgattagattctcgctgagcgcgttaaatgaaacggcggcattgttcacgtgagcatcacgtacgacgccgtagtaattccataagaacaagtcttgaattagaaatacatatttg

SEQ ID NO: 45761 - DNA, 538 bp, Arabidopsis thaliana columbia
aaatcagcgtagacagtagagacataacaaatgtctactctttctctcagtatttaccgctaatgagctctcaagatatctatcttccacgaatccgtcttctacatgagttctcagacttttgtactcagaagaacctgtttcacattttaacagtttagtctcattggcttgaagatgatttgttaaaagttatgtaatcttttacctgtacaattgttttcgagaaaccttagattagaattgtatggattcgggtcaaaaacctcgaagttcttgtccaaagaccacaacttgaagctctctctcttcttctctagcttctgtcttctttctttgagctttgtctgcaaactactcaatgcataaggaacttcataaaccggtgaagaatttaatctctcctgttgcctttccaccatgaatctccttggcaaaacatcgttctcgatacttagcttgaaaacatcggattcaacccgtttcttgcgcctaaacaccggtgactccgggcttctatgaccaactgtactggtag

SEQ ID NO: 45762 - DNA, 592 bp, Arabidopsis thaliana columbia
aaagacggaagcaactctgatattatgatccgtcgcataatccaggcatatgaggttactaaaccttgttctatactatgtgagcagttacagtagctcaatactattattctttgcagatgttaacaaactatagccggtcagagataattgaagggtatactcataatacttttttcagcaaaatctatctattaacacaataaagaaaatggttttggcatgtgcgccaaaacaaccaagtaatgtttttttttcctgtgaattgcataccagagaatgcttggatccttttgaccatccagagtgcgaggcacttgacgtgtttgtgaatgaagtcctatgtgttggaaaaagtaccaaacttgcttccttttctttgaagtttgctcttttagctgctccatttcttcttgaacatcgtttggagagaagttttagaacaattatgttgagatgtatacttgtctctctccaactgcaggatgttcatacccatgctttgaaacagcttctcatgtcttctcgtgtgattcatctgggacagctcgagcaatgtcccaaggtctggatggtttgattccccatattt

SEQ ID NO: 45763 - DNA, 546 bp, Arabidopsis thaliana columbia
cttataatccattgttgtatatgttcactttgtaaatcattgtgcaaattcactctttacatttgcaatatgatttgaagtgttatctcaatttggtttcatatgttattttgcttcagcttgaagtaatattgagcaagtagtactcatcaatatgttatatgtatgtcttgcaagatacctacccaccaaaaccttcaacctccccacctgttattaaaagcaagtctatagactctagtgacattcttggcttcgatctctattattacctttcaaaaaccaacaaaatattataagaacattaaaaagagaatgatttgttttgtgtaaatatagcctttgtttaaaaacaaagcaaatcctctcattgaagtaatgcatatatgctctctgctgatttgatgtacaaagtgaaaaaggtcatagcaaaggtaagaaatgttgggacatgctaggctactagcaagtgatgaagtttatatacgcatagataacatataacataatttttgaaagaaaaacaaactgacatataggggttac

SEQ ID NO: 45764 - DNA, 579 bp, Arabidopsis thaliana columbia
tcaagggaatgaggtttgtgaatccttttctggaaggacttgtgcgtatacttgctaggattacttttgttttcaacaaagaggctcgggccattaacttttgccgtgagcacgatgttgcgtcactcttccttcatctgctccaatccaacgggcaagataacatacagatggtgtccgccatggctttagagaatctttcactagagtctataaagctgacacggatgcctgatccgcctcctgtgaactactgtggctcgatcttttcgtgtgtgagaaaaccacacgttgtaaacgggctgtgcaagatccaccagggaatatgttcattaagagaaacattttgccttgtcgaaggaggagctgtggagaaattagtggctctattagaccatgaaaatgtgaaagtggttgaggccgcacttgcagctctatcgagcttactagaagacgggttagatgtagagaaaggggtcaagatactcgatgaagcggatgggatacggcatatactaaacgttctgagggagaacgaacagagaggctgacaaggagagcggtttggatggtggaaag

SEQ ID NO: 45765 - DNA, 566 bp, Arabidopsis thaliana columbia
gtgtgaatctcccttttgccaagaccagttttgagatagggtttatgtatatagagaaataaagtcttcttgcatttaatttactttatttttgtgtggaaagatccaatgtttggctatggagattgctcagagattactctgcttaatctataacaaaggttaaatgtatcatgaaactgattagagacaaagacaatgttagcgaccctcttgtcaagaatcattataagtcaagtacaagatgtgtcaaagtttgtcacacattttagtcattttacgttttgcgggatatctccatactcacacgtcttgtggttgttgagaaaaaaaggagacaagatatatccaaggttgggatatggaggttgtattacatgcatataaatttgagagctattattgtaatcttctccaaccatgcactcacagctcattgtactccataaaaaaactgatttagctcagacacataagagacaatgtcttaattgtcactcgtgcaaaaaataaaataaggaacttgatcttaatgaagtgttgagctgtgatgatggttagagaga

SEQ ID NO: 45766 - DNA, 582 bp, Arabidopsis thaliana columbia
gattgtgaagtccttgtttcactggacaaaaaggcaaaaactatatttggttatttacttgaggaaagctttttgttttgttgtactcactggcctatatatattcattcggatgacgacgatagttgtttcaaactgattaacttttaaatttaaacaaactgaaaattgaatcagagttttggagtcaacttcctagtaaatcatcgtcagaataatagtcgtcaaactcgatatcctgattcacatattttgatatagaaatttgcttcccaaattgaaaacgcggtcgtttaataaacaggccaaaagtaaagttccttaccaaactttttaatctaatgggcccgtgcgctaagatacagttaatgggcaacgcgaatcggcccataaataaaccacaccacaagtagcggtaacaaggtagttctatggggtagaaaacgcatctgaacaggtaattatttgtcctacaaggttcgatcgaatgttctcatctctttttttctctctggctttccgatcttctagatttccaagtcttgaatgatgaggaaggcgaaggctgtggcatgtgggtga

SEQ ID NO: 45767 - DNA, 517 bp, Arabidopsis thaliana columbia
tcctattctatttgtttttgtccgtatattttagtttggttttttatagccttgcaaaaaacgacactggtatatctatactttttatctagatgactagaccaggtccgaataatccaagttttgtactactatagtataatattaaaactatgagattcctgcgtatctgtaatttaatttttataaattcattctaacgttataattatcaaagagagaattattttcctattttttcatggaaagtgatgaagatagtgtgctgcaatagtcggacccaccggagacgaagaagtgacaacaacgagtattgtgtatttcctattttaccctttccttttcgtttcgcgcgtcttcaccggcttaccggctacacctgtcctcctatatatcggtttcatcatttcattataaaattaatagcacaaataatataaaacaagtcttattaaaatactaaaaattgttactgtatttaattagttgccgcgcgccgcgcgttacgattgcagca

SEQ ID NO: 45768 - DNA, 533 bp, Arabidopsis thaliana columbia
tgaatcgtttggtttgtgaataattttactaatcattttatatagttcgaatcaaaagttgaaaaactcaaaaaaaagaatctggatagtttgatcttgtgcggaatattaaactgtgatgaagaattggaatcgagtctagattcttgatgactctttaagtttaaaaccggtttagctaaaaatctgcaattttgttgaatgtcccttttgattaaacaatttttacaagaaagaaaaaaaagacagcctcgtataggatgtatataaaaaaatgatgtaaaaatggttagaaatccaaataaatgtaaatatccatgaattaaatcaatcttattttttaaaaggtaaaaaactattttatatgagcagctatcagaaaaatgggtcagatatcattcttagaaccaaaacggaaagtcccaacgatcccattttactccttttcaccacctctagtagcagagagagagagagagtatggcgattacggtgccgagacggaactcttcatcggcggtcaatggactgag

SEQ ID NO: 45769 - DNA, 568 bp, Arabidopsis thaliana columbia
tcgagattgtttttagaaacgcgtgactaaaagcatgcagctggacagttcattttcttaccatattaatcaactcaagaaatatacgcagagaataatttacatctttgttcaaagtttcaaacactctaagaattagcaatttaatacttgatttgaaaccctcggggagtaaaaaataaaacaaagtacattttactaattaccaccttactttcctcgtcatgtgtggtgaatttttttatataattcttgtaattcagaaaaatttacagcttaagaattatatccccatattctgccagatctttacattgccatgcgtcaaaatgttttgacctccattattaaataaataataaatacacaaaatatgtctttatgtacttatttttgtgtattgatatcatcatagtactcattatgttgtgggggaaaaacagtaatcatcacattttatagtgatctgatttatttattttttgttggcccaaagtttaactctatcattgatatacttattgtaatggttgaagaaaaattgttggtaatccaatgacataactgt

SEQ ID NO: 45770 - DNA, 294 bp, Arabidopsis thaliana columbia
aaaaaacacaataaaaaaagcatcgaaaacatgaaacaaactatagaagcttaaacatattaaaaaatacaggaagtaatatagttcaggattacgttacagctctctataaaaaatttctcctgttttgctgcaaatgatattccccgcccaaacctccctaccaaggttttcctccagcgaagacttgccacaccatggctctctttgtgcagttgactgtcaggcatccgtctgccgctggagagtgtttcattcgaacggcaacatgcttggccggttgatccttgctct

SEQ ID NO: 45771 - DNA, 529 bp, Arabidopsis thaliana columbia
aatataattatattatcttaaacactaaacaaattaaagaatattaattaaataaatataatttaaatttaaataatgtagttataaactagattttgacttaatgaactgtatgtattgtttctatagttttaaaaagtaaaaatcaaacatagtaattgtatactaaaaatctatagatataagagcagtacatttagaaaatacaaaaaaataaattatatatatttttaatctactaaacatattaaatttttattttttaaaaaataattatagtcccgcggtataccatagattataattaatatatatatatatacacatttatttatatagatatttacacaattcttttaaacaataacaaaaagaggttaaggaggaaaactagattaacatagaaaacacttattacctgaaactagtaaaaagaaagaaagtaatatcaattggcttaaaaaaatagtagaggatatggggcacaataaacaaatttatttccctgtttcgacaaattttatgtttg

SEQ ID NO: 45772 - DNA, 594 bp, Arabidopsis thaliana columbia
tcttgaagcgatgccgcagcaagataatgggagaacagatggattttgacactctcttaaagttcatcaatgagctgtctgggcatattgatctcgattcaacagtcagagatgccgaagcactttgcatagaagctggtgaaaatggtgctgctagcattcctccaggaacccctccttctctaccccttgatgacggtaccttatatcctcaggaagatgatgttttgtaagtaatacgacttttcttttttcttctggacatgttaccaaaatttggattgcttttactagaaatcccatacaatgattaaggcaaaggacataagctttttttctttttcccacttaataattactctggttcgcaaatcgctagggataagtattctgctgcattgtgctgcagttgcataaggtaagaatacgatcctcagcgaattaggacttgtcacaatttaggattaattcttgcgtaggctacgtaactcgatgtaaattgtataagtaaagcaataataacataatgactcgaaaagtctatgcaagaatttaccttcgagataaaccaggaaagtctaaagcagaggaaag

SEQ ID NO: 45773 - DNA, 548 bp, Arabidopsis thaliana columbia
tgagatccagcactagtatagacctattatactatgggcttttacatcattgttctatctaccgggccatacatgctattaaagatctattgaagcattatagtttcgaggataggttttttcaaaacctagatatatagaaactttttcttttggacaaaagatagaaactttattggtaagtatttatgaatgcttattggtgcaaactgacgatgggttagttttagtaattctatcaaagtagtttgcattttgattggtagttatagtcttacagagcccgtcttgagggcaagcaaataaagcatgtgtttgcctctgtagtataagtaagttctcggtccatttttcacaaaatatcctttaggtaagatagtgtacataattgtatacgtgaaagtactctagtgttggaatctcacatttacctcatttcttacttttgtcttttagtcgattttctttttttttttttaacgtctgaatttttaattagttgattatttcataggcccaatatgttttatttattgtagcccatatat

SEQ ID NO: 45774 - DNA, 219 bp, Arabidopsis thaliana columbia
aattatgtcaagactttttttttcgagtactactgacgaatgactagtaaatataattatcgtaatatatatagataattatcaccattcatcatccatatggcattagtatcatttgaatatcgtcaatataccacgacagttgctgatatgaacaggtatgctctggcatcctgtggatcccgacatcttagaggcttagttcgggaatagttccaa

SEQ ID NO: 45775 - DNA, 565 bp, Arabidopsis thaliana
gttaagcgtgaaagagcaatggcttatgctttctctcatcaggtcaatcaaaactgagacctcttaaacttacattggttggtttgtgttttagataacttgtggctcaagtaactttctgttttttggtattttgtagtggagggctaatgctacacagtatctaggtcaagcttcgtttaaccttggcaaagaaagctggggatggagttggaaagaacggtggattgcggctcgaccttgggagattagggctcaatgctacgtcgttaaaccgatcaaaccatctaagaaaccggagaaatcatcacccaataatgtgatcacaaaaacctctgctaaaccggatgaagttggtaactcgaaaaagcctggttccggataattttgatcaatcattagcaaaaaaaccggtttatgtttacaactgacatttgtctggtttggtttctttttgtatacaaactatatttgggcctactctattgggcttattgttcaaaaacggcatcgtattgtacggatacaaattctagaaaatatcattcaggtcttcttgtttttg

SEQ ID NO: 45776 - DNA, 464 bp, Arabidopsis thaliana columbia
tgttaatttagttgcagcgtaataaatttaaatatatagactcaagtgtgtaattttcaccctggggagtccctgttgaatcactcagatcgtcctgatgtgtagtgcctaatgtctctgtatgtagatacttgggaacagtagcttctagtaggacatttagtatatgcggtagggtttatcatagcaacctgatgatggctggggttgcattcgatccctgtgaaagtagcgaattcatgcgagtatataagagtactgactctagtaggacgtcttttaagtatcaatagtgtagaggtagacttgtgcttgaagcgtttggattggttcaccttgggtctccttggacaattgtgctcgatctgtctaggttgtgtagagaatagtgatgaagacattggagtctagagagcactctgtgaacagcagctttgcaagagcctgagtttctcagtgctcgc

SEQ ID NO: 45777 - DNA, 465 bp, Arabidopsis thaliana columbia
aggaagacatgtaacaattattattgcttcacacaaaaataataattattgctaaaaaaaaagaaaaaaaaacattgcataccaaaaattatgattggtgaacaaaaacctaaattatccataaaaagtttgtccgtctcgtctatatgggcatatttcaaggctacaaaagcccagcccattaacacatttaacataccaccttgacgaacaagtaacacggacggtcaagattgtatcgcagatcaagcaacctggtgctttacactagaaacggaggatctgtgattccgatgggagtgagattgacatttctggcggctctttcaaaggacaattgtagattgtattcaaatacgttgaggaagaaagaaggtgacacagaggaagacgaagaagaaagttgtagaaagtaatggtgttgtgggagttagctctaggaacagcttacttcttggggattag

SEQ ID NO: 45778 - DNA, 489 bp, Arabidopsis thaliana columbia
atctctgtttttgttgttggttagtttcttaattatagttttcttgttagtcaattttgcaaatttcccgacatataatcgtgtttcattcaatccattttgttcaacgacgaaacaatcccgttacctagaaaaatgtggtccttttacctggtgataggtgatagtgatacatcagctatcgcacatgggtcgttaaaattcatgaaaagaaaaccacagaaaaatgtaatattttcatgcactcgtgtgaaacaaaataaagagtacactctatactctatagtttctcgtttagtttagatatatacatacaaagacttgagacgacttctaatactccggcaacgatgattaataccgacgataacttattgatgatcgaagctctcttgacctccgatccgtcgccaccattacttccggcgaatctcagcctcgagactactctcccgaagcgtttacatgctgtgttgaatggaacccacg

SEQ ID NO: 45779 - DNA, 614 bp, Arabidopsis thaliana columbia
  unsure (1)..(614): unsure at all n locations
tgtataactgtgtaattgagcaactcgaacttttatcattttccttatatttgttacatttgtagatatctagcagatgtttaagtagcactagtgataactagagacagcttgtcaaagacatgtacctacacggccttggcatcttggaccaaaaccatatacacttctcttgaaggctcccaaccgagtgtacatcagtacagtttatggtttcttttcactttgaatcattgaacttacgcctatggatccagttaaatttggttggcccattatatgcctaaatttaggctttcacgtgttgaatggaaactgaagtggcagttacgttttcgtggttttgaaacgacgtgaatgtcgaaatgaaaacgttaaatggcatactgttaattaagacgaaaacaattaacgctcatgtcgctttggatattgaagagccagtgtggatgagttggcaaaacacatgcaagttatgggttgcactttgcatgcgttctcaattaattttgaatgatttgactnacaaataaacaactgtttgaacatccatgactgatgtactacagataaataaatcatatagtatagcttgtgcgtacccatagtgtttg

SEQ ID NO: 45780 - DNA, 582 bp, Arabidopsis thaliana columbia
aaatcgtcagaaaattcaaattcagactcaatttaattggactccaatctttttctaatatcaaactatggtttcacagattacgaatgggttgttgaatcaaacaatacagaggttttaaaactttaacatcacagagacaaaaccaaacaaagagattaacacgagtcaagaacagaataaaagtagaacaagaactgagaaaatgaaacgacagaaactaaaaaaatcacggaaatatgtcagagagagtagcatcatcacctttctgattagctcaaatcaaacaaacacagaagagttcttcctggacaaccctagattccggtgagagacagtgaggcgatggatagctgttgagtccgacatgaaacaaagaagaaatttaaaaaaacatgagattgtgaagaaagatatgtccgaaatgttgttctttaagagtttctgagagatttaaaaaaaagaaaaagagaaagaagtacaaaatttaaccagtcaaggaacaaaagtttttatgagcgcttctaaagtaagctgctagcgacctgtttcgtagtaccgtacgttttggatatgagtgga

SEQ ID NO: 45781 - DNA, 531 bp, Arabidopsis thaliana columbia
gcttacagagatgtgtcagacaatgatttgtctggaagtcttccgtcatgggtcagtttaccaaacttgaatctgtaagtaaagaaaacactatatcacgacttatattaacagtgttttacattcagaaatttccccacatgtatattcattagacttcttcatatccagcatgaagcttcctttttgtatgaaattattgatgataatcatgttagagagaataagattacactaaactgtatgttctttgtgcagcaacttagttgctaacaacttcacattggaaggtcttgacaacaggtgacttgttaattaatgttcttgttagggcttgaaatagcgttccctttgtatctctggtctcttttgtatctgttgcttgcaaatagtttaatcgatctgtgtaagttctgtctgtaaaaaggggtttatcgatggactgaactgcctgcagaagaacttcccatgcaatcgagggacaggaatatgtaagtgtacagcaatatccgcttcttgagcaaatgttgg

SEQ ID NO: 45782 - DNA, 937 bp, Arabidopsis thaliana columbia
ttgacatttgctctaatagtattaaagcattacaaacaaaatcgtaaatacaatcattcagaaagaagaagtcagtcaacgaagatggagaaagaaaatctctcaaacgtgtcaacatcttcaatattacaacgtcttcacttgtgaatggagcaactctcctttttcttgtcaactcatctatgaaatataattacttacggaaaaaacaacgtgtttacaaagtgttatgaattcacacatatactactaactcacgccccttccgcttctatcgatcaaagtacccacttgttctccgcacaaagcttttgtgatgtcccagcttccagaaagttaaataccacaactgtttttttttaatccagaggacaaggaatcaggtcatttacattcaacgttcgattctatcatcaggtgctaagcactcattgcgggacaagtataagggtattgatctattatccactgatggaaatcaggattctagaggtcccatctcgagtaaaccatttgtataattctgtctaggtcactaagtttaaccatttatctcacagccagatctaagtaatctaaaacggattagctaaacatgataagagagagaagaagaatctcgacctggaatgctgttctcttcacaaaagttaagggccattgtatccattgacgtaagacctctagaagccaaatcttgaaatgatatgtgctcaaatgtcacgttactatcttgtgaatgacagtcataaacaccatcaacgtttgttcctttcaccactgcctccgcattgactgataacaagagatcttaggttaccacttaggaccagttactaatggaaagagaacaacactaagaggaagtaagagagttgtactgtctatagctcgaagggctgcagatgcatcagatgataaaagtggattccaagcg

SEQ ID NO: 45783 - DNA, 479 bp, Arabidopsis thaliana columbia
gttgagaatggtggcttcaggttgatctttccattcggatttggggacaaagtcctcgtattgaaccccgaagcctgttcctttttgttgctgtctcgctgccattattaattacttatctttcctctttcttatgaactggttaaatttgagctttgatgatactattaggtgtttattgctctgcatataaataagatttgaatttctgcaatacttagccattttctctactgttatgcaatggatattcctagttttgcggctatgtcttgtgatcatcaaaatctcttcttttgtctcaggtcatcattcatatgttacttctcttacaaagaaagcataatgttctcttgctttcttcacaagtttattatgtcttgtaagtcatgtccccaaatgacgtcagttttcatcagttgagaagatgtatcattctccatgagacgttatgtgacttaattccaagacatggtgat

SEQ ID NO: 45784 - DNA, 598 bp, Arabidopsis thaliana columbia
tcaagacatataaaatttgggtaaaatggtttgtttataataagaaaacaaaacaaacaaacaaacaaagagagtgttggttccttatttgtttgttttcattgtgaactctagaaacccttcattctttattagtttttcattctttattaattctaaaacgcatattcaaagagacatatttgatcatcgtgtcttcataatttggttcaaagtacagccaaaaaccaggaggtacactaaaaatcaataaaattacattacaaattatttttagtacactgggaacataaataaatgaatcagagaagagaaacatggcaactaccgatcatgagcttctacatttgtctcagaaaaagaggaagatagaactattttttaaagtttttagaaaagagagaattaatattatccaagacaacacggcactgctaacaacaagttgaacctatcccattccattactccatacccattcaatgattaacacgtggttctacatcattggttaactctctcttccccttggataaggcatcttaaataataataaatccataaatacttctgatttttctccgactataataatgat

SEQ ID NO: 45785 - DNA, 486 bp, Arabidopsis thaliana columbia
attcgctggtgatcggtacgagaaacttagaatcacacgaggaagctgtgtttcgtttatcctcgtttaatcggaatcgaaatttgttctggagaagaaatttaacgaatcatagattcctgatacaaaaaaaaaactatcacagatcggaatcggaaacgtaaccattacataattcgaatctggttttcacttgggtataatgatgaggtttctcgtctacttcttctccgttcttcttctctctgtgttaattccatcttctctgagtttttctattttccactgatttggttttctgttgtcatctggatttctaattagtttctatggatctgagtttgattgtaaaaaaacttgagattgactctaatgtcaaaaacttttgatctcctccagatttcgtcttctttggattcaccagtttttaactaatctcaatttgatgcaataaccaaattgtttttcgccgtttgaacagaaaac

SEQ ID NO: 45786 - DNA, 398 bp, Arabidopsis thaliana columbia
gacatggttgactatttgatttgtgcaatggtgatgatatgtgaagattatggttgtcagtttagctatggttgactatatactctctttgtatgtgttgtgtaaaggaggagcagaactctgggggagagcctcatacgagggtagatcctgcccaaggagaagctggaaacggaacaatcttctggggatcaagggagtgaagccaagaaggatgcgaacgaagtcttgagaatcaagatggatcgaaggttcttccatttgagtttgttgctctggaagcctgtcttgaagctgcatcaagcagtttggaacatgaggtaaatacttatgttaaggctctgagacaaagcatatttcttctcttgtttggtatttgattcattcttctaatgtag

SEQ ID NO: 45787 - DNA, 447 bp, Arabidopsis thaliana columbia
ttcaaataattctaaacaattaattaagcacactattaatcagtaagttttttttctttctataacagtatattgctcaaactattattttaaaaagtgtaatttctaatccaatgtgcaacgttgacaatacaaaccaatgtgctctgcattgactttttctacactgcttattagcttcactggaatgatttgcccatttgcatgtgttatcaagtaagacgtgcatgttttctatactctctagtaagtacatatgtgcctagaagtgaaaatattactttaaattagacaaacatttggacttaaaacttgaaactagtattgtattattaatcacaagtagcacccaaattcatgtttttattaaaccaggtcgaatattctgcattaatcatgcaatattcaattacaatctgatgaatacagaacggaaacttcttaatg

SEQ ID NO: 45788 - DNA, 511 bp, Arabidopsis thaliana columbia
tatatctaatttaaaaataaaaattaaaataaagggaagatttgattgtgacatataatatacacttttgttccaaaataacattaatgtaaacaaatcagggtggctttgatttggtgatgaagtaaataatttttttctcatgattcggaggagtaacactttaattgtcaagtgctaaaactgttaaacccaacacttagtagtttgtgtgaagcaatatatatacacgttactaaaattttagttagactgatatttaactgcttacaaagaatgtaaattacaaaaattaaactaagagatacatacaaaataaagtggacgatcgttgttttggtggactcaagagataatctcttggatcaaaccggacaagataagtttctctaagtcagctacagcttcataagtttcatcaatctgaaactcacttctccaacccaaatcccaaactccacttgtcatctctgtcttcttaccctttaaatccttctccaacaccaagtga

SEQ ID NO: 45789 - DNA, 558 bp, Arabidopsis thaliana columbia
  unsure (1)..(558): unsure at all n locations
gcttctttggtttaatccttactagaataaaacaaaaagggatagcatacaatacttaactctccaaaaatttcgagtcaaattgacttttgttggaaacctaaaccaaaaacaaaattacttaaaagcctttttgtttcatggtgtcgtccaatagtcgaagaatttattactttataattaaaggattagggttcgagtgccattgtgactttgatcatggttggtcattaactcattatgaacaccttaaaataagaataccatcatttcataggttctagagattagtctaaattacaattcgggattttagttatcaaaagataaatagatttaattaaattttaagttgtattcgaaaattcaaaagcaacacacaataagatttatctacaacgtacatatatattttgaacattgtctaattacaaattaagaataatataaaaaacttcaaacgtattttccctctaaacctaacggcttttaaaaccaatccacaaactaaaattaactanagaagaataaactcaaaaaatatatgtagcggttttg

SEQ ID NO: 45790 - DNA, 478 bp, Arabidopsis thaliana columbia
gattaagaaacaaatctcatatacttttctatttttgttagacatgaatttcaaatatatatcttacatttataaaattaattttcaatcaaaaatcttgtagtattatacaaccgtgatgttcctaaaaaatacctgtcatacagctgttatgcttcttaaaataagataaaattatatttactgtattaagctagattgtcaaaaattaaacagcaagataataacgtaattaaccatcgttaatatcaaacgcgttaggtcggtttgaccggtctggtttggtgagcgctggtaataatttcaccatcccaatcaatcacagacaagattgaaaaccccaattaataatacataagatgaaaaacatgatgaattataaattaaaactctgttctgtctcaaaaaactcaaaaggagtctctctctcacctacaccacacctagacaagtcccctacgattcacacagagagaga

SEQ ID NO: 45791 - DNA, 182 bp, Arabidopsis thaliana columbia
tagatgatctcctacaaaagtgtttagaagatgaattataataaactctcataagaataatattacaatttatattctcttatatagagattatgatagacattgatgtacataatagatttagagataatgtgagatttcttaaactcccatattctcatttatcttctaaaataatatct

SEQ ID NO: 45792 - DNA, 518 bp, Arabidopsis thaliana columbia
tatagttttattaatttacacaagtaatgaaggggaaattaaataaatgcaaggttactaattttatttttatcaataagcctctctcccttttgttaattaaattcttctgccatctcctaaaaaggttttccgattttctttcttaattttgttgaaatttgtgagttggatcatttagtatcccgttgagtttttttttttttttaagttttcttgttcaaagaaaataaaataatattctccggaatgtgtaatcaatcatagagttgaatttcaacatgaccaaaacaaggaaatagagaacaaaattggctcaacaatttattaatacaaagtgatgcgaatgtataactatcttgtttcttgtgcttacatgaatatttcgcattttgcaatcacacttacagaaaaagaaagagacacagaagtgggactagcttcgatcgttgtagaatagagtgtcacaagtatctaatatcattcttcagtaacctagcatgtctttcacaggtttg

SEQ ID NO: 45793 - DNA, 353 bp, Arabidopsis thaliana columbia
aaatctctcttctccttgcgttgcttttgctggtttattcgaatttcacgacttgactcctttctcttttgattgttgattcaaatcccgattttgcgcttactagttgtcgtcgctctcttgagtgtctgggttcatctttctgacatctgctctgccaagatgtccgaagacaaggaatctgatgtggttggagaagaagaggagagccatgtgatcaaagaagataaagagttaaatgatgcctccaacgagactctgacagaaaatggtgatcagctactccaaatgattgctgaactgagattagaaaatgactttctcagatcccaatttgagggactcaaggatga

SEQ ID NO: 45794 - DNA, 533 bp, Arabidopsis thaliana columbia
gtctcacctttttttggtttagttgtttgtatctacacattgctcagattctaacagaaatgatcatttagtgtccaagaaacctgtgttcgagtaagaagttcgtctcttgtttctgtaacctttccctcttgttgttcctctgcctctacgagtcgagaacaccaatagcatcactaccaagaaccctactccagatatcaaccacagcgcaatcacccataatttcaacgtgctgaatctcccttcagactcggacgaaccacttgactcttttgtatcatcgcttccttgggtttgtattgtttcaatgttaccaacttttctcgaaaccgagatcttctcagtcgattctgatccaggttcagggcaatttcttctcttgtgatgcagaaatagagcttcgtttagcttctgtccacattcaatgctgagaaggtctctttgccgtagatcattgtctgtatgatggactgccgaacgactaggcgggtctggaaactttgcccagcatttgttgatcaaatcagtgt

SEQ ID NO: 45795 - DNA, 475 bp, Arabidopsis thaliana columbia
gataagtatcttgatatttttgatcggtgtatataccattttcgtaaaaatgtaactaaggtactttagtttggattcgaatctagcggaataaaactaccattttccagctgattagaaatttagaaaacgatcagctgtttggactttgggttagatttcttttttgagtttatttataatcaaattaaatagtgtggtgtgagctaatatataaaaaatggtatttgtattgttgacagcgcaaagcgagcaaattcttatagtaagtggtaactatagtcaaatgttctaaagcaaatgctacaatgaacgtggaaatttgatcaactgatgacacaagtcaaatgctctaacattcctttttcacacgtttatatcgttcaaatctatatccatacacaaaatgtgtgttccagaattagtaagattttgtcttattcgcagtgttaaatgatcgttcggattgattttg

SEQ ID NO: 45796 - DNA, 554 bp, Arabidopsis thaliana columbia
tgaggttttataaattgtgtaatgattttgtataaattaaagaaacatatctccaggcatctcataattacgaaatcacgtttaactttataaaatattattaataccacaagatttgaaagtatttttaacaaatcataatttgaatcatatgtgaaattttgcagccaagagcattcatatttgatctaccagaatgtcataatgatcaaatttcatatttgatccgccaagaccctgagcattcatttgatccaccaaattaaaaagtcctagtggattataacttagaattatttacttttattaaatcaactaatctatgaaccactcaaccacatactacattataagaaagaaaacgtaagtagccaaactaatactctatacatttattatataagacgaaacaagatatatccattctcgaccacgacattggattagcttaaagttatttttagtacctataaacagtaccgtaaacggagcaatcttgcaaatcatttgcttcaagttcaaaaacctatctagggttctctggtggagatgtg

SEQ ID NO: 45797 - DNA, 518 bp, Arabidopsis thaliana columbia
tgtgacttgagaagttcatctgagccagaaagttcactagggtgaaatcaagaatactagtaatctttgtccaacaggtaaaatacctgattgctggatatgtgagcacggtggcaacacttttggagaccgcacctaagacaaacgccataaaggcagagagcactaccggagaagaaccattctcggcttttgcatttttctgcttaagaaggtgctgtttcagctgatcaaacactgtatactgcaaagagtaaccaactatttcagccagtcatgttgtcaagtgacattgaagtgagctactcgagtcgatagctcatggctttacatgagaaatgtacctgaattgcaggatttgaagtcaataaaagagagatccctaggccatcaaatgcgtctgcccatgaaccctctgttaaggtcttccacaacccttttgattctccaaactcactagtttgcatccttgatgaagctgtatctagaggctacacaaagataagactcagtgcttt

SEQ ID NO: 45798 - DNA, 528 bp, Arabidopsis thaliana columbia
tgagacggatgtttccgagtttcaatggaagttaccaagcaataaggtaaatccgaagccgaatcatcgtcagaacatgagctccaagtacagaatcgaagagttgaacgagcctcctcctcgtcttcctggtatccgctctttgctccctttacctggaggtgacttgttaacaggtggtactgacttgaagattcggcgttgggattactccaggtcctaaatctaaattatttaacttgtgtttgacaatcaaacgtttcgtcacacctcttgacgcaattcatgttttttgtgttttgggactaccacagccctgagagaagttattgtatatgcggtccgagtttgaaaggagtcggaaatgatgatttctatgaactaaaaaccaacacgggcgtgcaatttgttcaggtctgttgatcaaatatatctctgatcttcgcataacgatatcttgcagtcgtgtaagcttataatgatatttatgatgaaattgtgtttgtatttccgcagagacaaagagac

SEQ ID NO: 45799 - DNA, 474 bp, Arabidopsis thaliana columbia
atcccggatttgtgtccacttgcattctggaggagattggtttactatttgggtctcatatttcggtaagcaagctcgtatcttatattgggcctctcatttctcgtcaaagtcgtcgctaaagcaagtttgtaattaaacacccaagttaaatgggcgtataacataaaagttaggcccataaccaggcccatcgtttatggtaattaaaacacctaaaattaaaatggacgccagaacgacgttgatgagatgggacagttgcctagtgtgagtatcaacggtgaggacaacactttgtcgttccgatgctcagcgattgtggtatcttctgaataaccaacttgttcatattcctatttccttgctatgtaccattcaagcttcgcgtacatttaccgcatcttgactcctagttcagacgaccattctgctagatttggcaaggatatacagttctttgggcactgaaaa

SEQ ID NO: 45800 - DNA, 538 bp, Arabidopsis thaliana columbia
tgagttactatagagaggaccagttactgtgaatatagaagtattagatgaattaagctatatacggggtgagtaaattacagatatagacatatacttttcaattactatacactatgattttcattaaaatatttcttataaccaaaacgacaggatgaagttcttagaggatatctaagaaatgatctagaagatcatttgattgagttgacgggttatgacactacttccgaagggattaactaatttaaatttaaaaattcatacggtcttcgctcgaggaaaatggatttggaaaaaataattcgaaagagtagccgaaagaaacacgagccatctttagtcaatgtttacatgtatcgagaggtatacatagtattttatttttttttacttggtctatgagtagtcaggtcacagttatactcatttttggttaatttttgtgtgcagcttctggacaaacgcaaaggcagagagagaggaagaagccattgatgagcgttacaaaatgagaataaacatattttaagtt

SEQ ID NO: 45801 - DNA, 538 bp, Arabidopsis thaliana columbia
tatcaacaaagacttctcttttggtctgtgacgttgattccaacgataagaacaaaacctaatctttgttttcttttgtcaacaatagtactatcacctttgttcttaactatttttttgggaacttaaaattgacaacaccggaattaaaatgtttaatactatcaaaattatatgaaactaagctgtcttttagctatagtttaattcatttctgacctctaaaataatattatccggagattattgtagtttcgtaacgtggttgatgaaactactaggtgttttcttaattagaccacgattttaacattacgttacactaatactctattgcatttttggtagttttcataacaatgattccatgcggcttagtcaaaccgaaatcatattatttgtaaattcaattctgatataatttttctattttgtaccaaacgtaaaccgaaacataaccgaaaccgaaccaaaacttcatttgcgtaatgtagttcctacgttgttgtactataaatagtttgtttgccagcaccat

SEQ ID NO: 45802 - DNA, 1905 bp, Arabidopsis thaliana columbia
attaaaattggttaagcatttgtgataatcgtgttaccaaaaaacgtttcttatctctaatgtatctaccattccatgattccactagtacatactagtcttctaatatattcattttcaaaagactattcaaatgtttccaattttaaggcataagagtgtaacctctttgtcctgcttcaccatattcactctgcgcatttgtgttggagttcttggtctagcgttgtggcgtgtatccataaagctgggcatgtatttgtcgattcttgatgatatgcaatgagatagacctcaatgggacagtaacatccaaaggtagaagcacttcttcaagctcagaccagtcaagatcttcagaatccccatcttcatattcaactctgtaccatccagattgtttatcgaactttgtcaccgtaccagaatagtagcgacccaagaaaaacttgcgaacttctctaccctcaagccattccccgcttcctacagtgccacttgatattggttcatctttggcaatcatacaatcagtttgaggttcatcaggcacaccattgataacaaccgcagctcccccggtatctcgaagatccctggaggatgagactgtgcttcttgcttaatgctcccagtgtcctccattttttgagctatcaactgtttagagaaagcttaaccacataagtaaagatttcaacaaaaggtaatgaagcattagctcaatcacagaatctcaaaaaccaagtgcatctttcatagttgtatagatttcataaacaaattgtgagcagatacgatactcggatccaaaattgaacgatttatgcgacaagaatccccaaaatacgatcctaaatcttatacgagaatggtaaaattgtcagcatttgagtagcagaaggaaccctaattcccaaacgtccacatcaaaataatcaaagtacgaaagaggagaaaaaactcaccaatatcgctcggcggatgagatggaagagatttggcaaaccgtcgttattcgtagtccgtcgagtgtaaagccagagagtttgtttggaaacgcgaataactctctattcgggattgactaaatctttttgccaaccagcccttattttattttgtctgatttttggacttttaaaatttaaaaagacaaatacacatactgtagttttggtttcattgaacaaccctttcctccgctagtcttgtctgccttcttccgcatctctcttgtcttgaatccgttaaaaacatgattgatccctcgcaggcccggcttagagggtgtgcccttggtgctagtgcacagggtcctttattttttcattcattttctttaagcaatcaaggtccattatacaaacagtagtgtataataaactaaaatctaaacatataaaacatatattagaaaaaaaaactaatgagcacagggtcccacgttttgttgagccggccctgagtgcatgcatttcacatctacgtacatgtgtatatatgctgcatgcatacgcgcgcaacaaacgtgtaggctcgagagtcaagactgctaagtaagcactcatcacatgcacgttttacataataacccgtcaaactatcacacaagatgaattaagcatatactaatagattgtgggggcttgaaatcgaattctgttaattggggtatatgtatattaattactacgaatatatggcgtcgtcttttttacgattagtctaaacttgatacctgaatggaacttgcttacatatctgtgtatctatccatatataattcaaaattttaatattttgggtgaaatttttttatgacccaaaaaaatacaaaacgcaagaagcgtgtaataaccaaattctcaaaaccacaagcccagccttagtatatagtcttct

SEQ ID NO: 45803 - DNA, 485 bp, Arabidopsis thaliana columbia
gcttaaactttgaaaaacaaggaaaactttcatcggcgagcttcttcacacttgtgaattccgattctgcagaaatgggaaatctgaaacttgctttgatcatcaagagccctagagacgacgttgagttcctactcgagaagcaaaaacagccggcgaaatttggagatgaagcttacgattcctttgtcgattccgatctctgggacttaccgtcaacagatttacaggctctggaagacggagtgaggtccggatttagtatttctatacttgactcatgctcggaggaggttgatttgatgaatttcgacttcgaatccacactgattctggtaatttatgagtttagcactgtcctctttttctcattgtttccgcgaattaatgtttccgagtaaatgcagctgctggagaatttagggattgatattagcgatgtaggagagtggagattcgtcaggtctgtagaagagcctgagttt

SEQ ID NO: 45804 - DNA, 334 bp, Arabidopsis thaliana columbia
atgactagtggctcaacaagagctaatcaaattcatcaaagattacagagacacaattctacatgacattatcaaactatctgagaaccaaatccagatatgagagcaaaacagagtataaacaatttcaaagaacttgaaaagtgaaaatttatctgcgaagaaagagaaactttacagagctcatgtactcgagaagagctgcgttacttcaccatctctagccggcgcgtcgatttgaacgcctaccgcttcgtcgctcacatctccagatcatagagaggaaaccaaaatcaataaaatccgagactttacacaaaatcaaaaccgatga

SEQ ID NO: 45805 - DNA, 494 bp, Arabidopsis thaliana columbia
ggaatctcccatctcttcttcactctcccttcactcttgttactttcatcagaagctcttctcttctccgacctcttatgattctctttctcttcatcctcaggcaacgaccttttcctaacatctttctctccagtctgcgttttacccatttgactgtacctactagccacaactcttcctggtttcaatggtttccttaaagaaacattcttttcatcttctttgaatagcctcttaggctggattgttaagagaactccttcttctttcttcacagctctctttgaccccaccgtcgtagctgcttgcttctgagctgccgtcattttcgctttgcgagatctcggactcagactcaaactcgttcttcctttacctcgtgtcgtcacttgaccttcttcgattccaggaagcttaaagaaacaagacttgcgtcgattctgagctgattgaagaggagcacagtttcagatttcttcgcggaattgaat

SEQ ID NO: 45806 - DNA, 381 bp, Arabidopsis thaliana columbia
ctctccttgttacagctggtgttatctctccttttatgctttgagagcttccaacctgtgattacaaaaaccgatgagttcattaccaaaggatgaatctaagaaacaagtcagtggttaagcatattcacaaatcacaacagatgcaacatcaatgcacttcacgatgattccagtcaacagataaaccacacaaacttgaagagaactgtttggttctaaccattttccggatcataatctaaatgtctgaaacgcaacttagatttataggttctttttttaagaatccaagaatctctgagtcatgtagcactagacatctctgaaagaaaggctagtgaggaatctaatattgttgcttaaagacaaaacaagaca

SEQ ID NO: 45807 - DNA, 479 bp, Arabidopsis thaliana columbia
actctagatatatggtttatatcaccccccacccccccctctaacaccccccgcaatccacatgattcacacatgccatacattctcttccaactatggatacaaatcccatccatggattgtcgttgtggaatattaaaccgtaaacacatatataattcactgttaatggcaaacatgattatagaaataggaccattgaaaagagacatattaatggattagggtaataagaaatgagaatgtgaaattgatgggtacgactaaaagataaagctgggcactattaatattggtaaatgcagataatcatataattatgttttctgtttgtgtctcaaaatatgatgtcgataaaattataagggttggaatagatgtggtagttaggaggaaccaatttatttaaaattcattttaggtttatagtagtttactttagtatttatgaatgataattagttgtggtgtaaaaaata

SEQ ID NO: 45808 - DNA, 379 bp, Arabidopsis thaliana columbia
ccaacaccaccgcatttttctccgaaccggtgtgctaaacgacaaaacttcagattactcttctacagaagcgccgctttacttcacctcctcgcctaacacagccacgtcatcgcctggttatcaagtggttgggtttccgatgatgaattcttctccttcccctgttacggtgagacgtggcttagccattgagctcaacgagcctccgccgctttggctttgaaaacaaacgataaagatggatatagcggcgccgttttgcctacttttctatacggcgccgtttgagaccactttcggtggaactactttagtttctggttttagcaaatagtatctttttgctagagttagtagacttgtccgtatcatataa

SEQ ID NO: 45809 - DNA, 641 bp, Arabidopsis thaliana columbia
  unsure (1)..(641): unsure at all n locations
tcccccaagatcaaaatttacctcggtcgcaagatagaacaaatatgaaactaagacaaaaaagactaaagaaagaaagtgggcgaaaagcgataagtaggttagggggaatgaagcctggtccgagaatcatctagggttttcttaatttgttcttccaaattaattcgagtgattctcttcttcatgacctcgagccagacaacaatcctctcaacactaaatcgcacaacaatgaattaatcaagactagaaccacgttatcaagaagagaaaagagacaaaaaagaaaagagaccaaagttaaagataatgtgaatgtgatgaaacttttcgtaagaagaagaagagaaagaaaggtatgtgtgagacaaaataaacctatgtcttgtatatatagaggcacaaatgaccacaacctcaagatttattcatttaaaatatatccttagccaaaataagagaagacaaagatgcatcttaattgttcagcatatacatccaagtgttagtaaactcatcatgtatgtatttatatattcaaagtgtaaatattgagttaatgtgagactatcaagtagtatgatacactatttgatacgacgaacatatatatattntcgtatgagtgatcataatta

SEQ ID NO: 45810 - DNA, 605 bp, Arabidopsis thaliana columbia
gtttcaggttagtagttttatgtatggttaatatcatggtttcaaattttatcttttaaaagctatttatatatcaactgtctaaacataaattagttatctattaaccataggttacttgtactgagatggacaagaatactctccgagtctaacatagaagctagaaccaataataaaacaaggttaaagcaacgaccgaaattgttgcaaacacaaacttgcaatagataagagacaattacaaaattaccgctattaacttgacgcaaataggtgaccgtcaatggtttcacaacttacttggcaaattagtgacccaccataagtgactaatacttgttatttagaacatacgataattcgacggaagatccaaatatcggagacaagaacttgatcgtagcttgccacaagcgagagattggtgagtcgaagcaattccacgaagattttgggagattgatgattggtcacgttccaataaaggcatagtgacgttgaaaggaaagccttaaccatagatattctcggattggtaccacgggcttctaaaagatggttaaggtcatagatgatttgcacaaagtggcggagcaagcaaa

SEQ ID NO: 45811 - DNA, 497 bp, Arabidopsis thaliana columbia
tgattcacctaatatagtttcttaacacttcacagcttcgtttgtcagtctcagatttctaatttcggacacaaacacaaaacgacattgaagcaatattatgccttgtattaatcatatccctacgaccctaccatatctatgtgactatgtcgtgcttcattttttcttccgtactcgtatatactcgtacgtaagtacggaaagtgttatttcggaaattaaatattatggaaaagttaattaagaagttttgaattagagtacttaaggaaatcttataatgacaaccgtgtgttgactcaatctaaagactactttcacacatagcagatcacttgccaaaatagcaaaattgattacaaatcttccaacatatcctatgattcactacttagagtaatcaacttaaaattaaacaatttaattacctaagatttttagtcatatatatatgtgttgacacttgacagagtaagtacagctctgcaattgag

SEQ ID NO: 45812 - DNA, 546 bp, Arabidopsis thaliana columbia
tgaaattgttttatgaactttcaataatgcgaacgtttcaagggagttgtaccacgaaagaaggttcaaaggaaaagtgagtcataacataacataacattaaagatacaacaaacgtttctttcgacaagatttcttgaccagttcatgcatctaccatccgtagctaaatttctgatccttttttaagtaatacaatatctttttgatgttgttgtcaatatatgattaaatagaattataaattatttgatgaaacgagttgtgttcaaaattagactctgatcgatatgcatcaccaaaaattagcttaaccagaattaaaatatggtaaaaatcttagagcatccccagcgtatatcttagcctaatcttagcaaacatcttagcattaaaagcaattataattaatcaaaccaactaagatatgtattttaactaagatgtttttcttaaggtaagaagggcacatgtgtcattggaatagtaatttgttaccaaaacaatgttttgcaataatttgatttttatcttcttaagaaggga

SEQ ID NO: 45813 - DNA, 633 bp, Arabidopsis thaliana columbia
aactatgcatcacatacctacgaatatatatgtaaatgataaggtgtaaacaaacaaacaaaaagaaaaaattggacaaacaacaaataaggaaaaatattagattttgtattgcgatgactttgctgaaatttgcaagaaattgttgtctatattgatgggattacagtaaatggttctagtgttcagtgttctctaatgatcttcgttttgtagaccatgaatgactaattaactagaataatacttccatgataattaaaatttgtattataaaagaaacatgtgttcgagaaataaagaccccatgcaaaaaaagaaactcaaatttgatttacaagtgatgatacaactgatacctcaatcgtacgtcatctccacaagtatacaaataaactcaaaactgccttatttgccccaaaagaaaaagtttaaatcctgcaattttctcaaaatcagttgtattattttgtatacaccacaactatacatcaataagatcaatggttcgcataccaatgaatgacacaagtacaattacaactacaaccagttgcttaaatttgaccaccaagatgtgagttgtccaaaatacaaaaattaatatgtctacgtatttactcgagaaaatga

SEQ ID NO: 45814 - DNA, 574 bp, Arabidopsis thaliana columbia
cttcgtcatgaaaaaacccatacaacaacatgcagcaactaacattcaacataactgttttcattagcatataatgtacgaaaacatgcaacttatctctataaactgttagatcatgtacttaaaaatgcatagattaaacgttttcaatttatcataacatgtaccacacaaaaaaagtagctagagcagctattcatcttatagaatatatagacgtatctcaccttcgcactgcagatcttatacaaatctttttaagaaaatgaaaaaaggggggctaatctcatatattcttcgaagtctttttgggttattaaatagctttaaccaccacatgtcataaataattgttgttagatacttgtctgattcatgcctttttttttgcgagtcaaagctttgtatacaacaaatgtgcttctttgctctttcgtctcactccatttagtcaaaaattccatttgtgatataaaaatgaatagatgaaaccttgaaatatgtaatgaaaccggtctcgagatgtggttaagcatatttgtaacaaaaatatataattaatgaagaaaacaag

SEQ ID NO: 45815 - DNA, 378 bp, Arabidopsis thaliana columbia
gcttaaggaaaaaactacgggttagtcctattgtaattaccatatagtggaaatatcccattttattttagacatatccacgcatactcaaatcatttgataatgtaacaggaagcttctgatgtcatcgatgggctaaggaagcaagtggataccttcaaaggaaaacgcattttgtaaacacagtttcaagatcagtactcttttctagtttgtttttttggttttaagttttaagggtttgtacataaacttctctccttaagcagaatgtaatgtatattatgtagacttagggacttttgtgaaagaccccaactcaaaatgtaagcaggcagtggttttttgctaatcaaggtcaagcatgcatatcttata

SEQ ID NO: 45816 - DNA, 581 bp, Arabidopsis thaliana columbia
ccatcctccaaattctggctggattctccaatttctgatacggattctcttcgattgttgaagaactcttcctgtgacgcccgtagagtttcgtatgctatacagacacatttcttcatattggaaatggtcttagctccacatttgcaatccacagacgcggaatcattcttctccttccttgaattcttcttcaccaccacgaacctcctctctctgatccgattccgtggtgagaaaaccgccggaacaggattaggcttccatttcggattcttctgcgcagaagatttactcgatttctcgagtggagtcgagtgtgagacgaagttagggttagaattctcggagaatcgtgaaacctcttgagccttggattgaaaactgatcggatccatcaccagagtctcgtgtttagcattcttcaaattcgtcgactccatcgaaagatgagagcagaaaaatgtgagaaattagggttttgtcttttcgagtgagtgaagggaagaagaagaagagagagggagaggagggaattgtctgaccgttgcgacttgtgaggaactctcgactttgtatgt

SEQ ID NO: 45817 - DNA, 544 bp, Arabidopsis thaliana columbia
ctgcgacatgagggcaagccatagagtttcttgaatgggtttggctacttcttctcatatggttggaccggggcatatatgagcttttacgtggtattcgtggacccatgaccatatgagcttcttcatgtggccttagagtgtggattcttccctcggatccacaccatccattgaagtgtgttataaaatttccccatgatccgtcatggcttttgtgcttaagttgtcatggtgggaattatcttgaggtgccacattcgtgcttaagtgggccgtaagtgcaattgcgttgtgctccaaaaggaacggtgccgtgggttcctcttgttcatcagaaatatattaattagccgtaaaacctgaaaattcacaagcatttggattgttttctaatttaatatccattatgtgactaaaagttctagtgatcgtacatactacatagaaaataataacacaaaatactagtttacatttcccaattaaaaaccattttgaatgaactctgtctgatttaattatacttttaaaatgtgggatg

SEQ ID NO: 45818 - DNA, 589 bp, Arabidopsis thaliana columbia
ttcctttttacaggaatcttaatatcaactttgatccctccacttctttcttaaatgaacatgagcaaaactaaactgattgtgtgttgaaaccattcttaccaagtaaaatcgttggctatcatcgaaagtattcgaaagcatctgagggcaaataaggcaatcagcaatccatcgcactgtcatcgcgaggtgagaagggctcactggtggtctctcctatgcaacattattcaatcagcaaagtaagatttatactctactcaacttgtatttggaaaacaaaaaacaatgcaccacaagtcagtcactcttagttacctttaactactctagtaatagaacaaatcacatccaaaaggcgacaaaatgtttcatcaactcgaacctgaaaagtttgcatcggatggctggtaactgtaccgcgtgcagccaaaattatgaacaaagaaagaagcaccactggacagcgacatcatgtagaatttgaaagaaaatggagctcgacgtttgtacctgaaaaagagaaattgactggtataatacaaatatatattcagcatgtgactgaggagactagtttattata

SEQ ID NO: 45819 - DNA, 492 bp, Arabidopsis thaliana columbia
tataggtttcagaagtgcaactattttttctcaaaatcagcattagataagatgacaattttatcattatctcaatcttaagtgcatgtgaatgatctatataggacggcgatttagagttgacttgtttctttaagcttatcatatgtagttaatttcaataatgatccaaaggcaaaatttgtcaagatacatatttcgacgacaaagatacaaatgctttaagttctatatatatatatataagtaacagtttactggtttgtcaactagctatataattgcttagacatgacatgactctttcataattaaaatgaaaaaaatgaaccaataaaattcatagaatcataatggtttatgatcaaatgatctttgaaagaatttgaaaaaatgttatgatttattatcaaatcattttagaaagaatttggacaaatgttattgtaacaactagcaatggtgtaaaatgatcttaatgtgcccactaga

SEQ ID NO: 45820 - DNA, 550 bp, Arabidopsis thaliana columbia
caacgtcttaaatctctatttatacaatttgggcttgaaaaagattgcgcattcatagccttctttattttcaataggaattccagagtatccttgagcttccatgtttctatcgaaaaaactatggtactcgtctacttcctgaaaatggattgattgatatatatattagaattcatattagcatacaaaatcctatttatgtgtggcacgagagaatgagagagctaaacaaacttgtagacagatgaaatcagcttcaaaattctttatattatcaagaatcgccttcgaacgtttctcccacctataccaaaaattaataacataaattgcggaggagcctacaggatagactctggaggagagacatacatgagagacgacgacgccatccgctacacaaacacaagacccttactattaagagcatgtccatcgatatgtcaaaacatatataaagtatacttgtataactaagagatttttgataatacgacaatgagggagtaagaataaactacatgagctagggtgttgtaagagacga

SEQ ID NO: 45821 - DNA, 590 bp, Arabidopsis thaliana columbia
gttgtggacgagctagatccatgtgttattctatttctacaccttttttggtcttatttatgattctttttaataaaagtttaattatatgatatccgacaagaagtctgataagattagaaaggtaattgaaagcttatataagaagtgatgcaatgcaatatctaaaaccttatccaaaactcttcgcaaacgttgtttaattaccattgttttcgatcgaagaataatgatttcttgctcacagaataactatagtcagcaaagttatatagtgttattacttccgatcagtcagtaagatcaatgatttcttggtcataaaaaagaagctaaactttctcaaaactatattttatatgtaaaatgtaaattaatgaatgacaattcgaaccaactagccttaaccatatccttatccatccgggaacaaattaaacaattagatgaaaacaattatttcaaaaccattctatttaatgattattgaaagttggtggtagctatgagttagacaaatgagtgggatagtggggagatgtggtcgaggggggagctagaccaattaactataatgaattctttgatac

SEQ ID NO: 45822 - DNA, 509 bp, Arabidopsis thaliana columbia
tagatcatgacccaaacctctttaatagaaattttcagcatctagagatcaagttggttatgtttgatatatcattgatgacatttaatatgaagaatataacaaaatcgattaatcatgatcaagattgacatattcgcatgtttttgtagatgatgatcgagattggactcccgttaatagatataagaggacttaatcggctaaaaattgatggaaacgaaccattcaactgcactacaaccacaaaaaacttggaacatctttgagtgtcgcactattcgttgccaacaccgtcactcctctggtttctcctccaactggtcgcttaaccgaaggataacttatgtacattttggttttagtgttctgatagtgatctttcagtggtatttacattagtcttcactcagatttctttagtttctttttacgtagatcttcattttgccgtcgtgtttcctgatatgagaaagacttctgctcgaaatgacgtttgcttgaagttt

SEQ ID NO: 45823 - DNA, 560 bp, Arabidopsis thaliana columbia
agtgtgctctaaagactcgtagtgtctcatgccgatgctctgtcccttagcgagccggggacatttcaagaagtgtcagcaagatttattgtggattgtaggtatggagccttacctgaacatgttgggcgactcgtgtagtgattggccctgcctggaagtcatacgcggatgctgtatgttccccttggatctgcttcacacaaatgagggactttggcgagacgaagggaactcaggaaacagaaatcttctaccaccactcactgagtacctgctctgagcatggaagcattgtcaaagtatgtcgcggcgatatatgtctccaattgacaccgttggccataccaatttatctatgaaaggcacgatcgactttcacagcctagtcaccttactaggctgaatatactgtatcagtatgcccgtcgactttttgtatcggcaggaggtttgtgtcactaatgttggccaagtgttaggtactcgtgcttgaaccaccgtaggaaggaagctggaggggccagaagtgcaccagctgtacaaaacgaggcgaggca

SEQ ID NO: 45824 - DNA, 1134 bp, Arabidopsis thaliana columbia
tcccccctataccatggagaaggaaaactttactaagttaatatgaactaaaaaccagaagttgataatcgataaccaagcagtcacagacaaatcataagtattcagagaaccaacaagaaagtggaagtttcaaaagaaagccaacagaagagctcggatacaagtttaattctgagactcacgcttatgcttgatacatagaggaggtccagacacttgctggtgttttttccctagtaatggtaagaatattgatgtttgctgtagaagataaaccatgacgtcatgaccgacctataaacaagggaacttgaatattagtgaccgcaaactcgaatattgaaagtaaatcatcaaaagggtttgagaacaaacccgcttgagaagaaactcccaagatgaacttgtcaatagctccaaaatagggctcgactgatcatactgtcaaaggagacgagaaatcattaggctaagaaaatcagcactctacattgagtttgagaaggaagaagaagaattcaccttatcatatctggcacatatcacattttggcaatcacatccagattgcatcatttcaataatcctttcaacaatctgataaactcaattgaagcaaaatgtttagaaatcagcaacatcatacaaaataagataacatagaggcattttataaggagtagccacgtcttgaaatatctcaaattaagcactcaaagcaatgtatagtacagtgggaagaagaatcttacctctctctgtgaccaccaagatgttggagagaaatccagaagcggaggggtttgttcgtgaagtacaacgaagcaacggtgaagaagtttacggtagtgaatgggatcatcggaacgcagcagaaacgccggtttatcgctgctgcaaccgagacaaccttgaccccggcatcggcattgctccggctggatattccggttaggaatcagatctactattgcgtcgtttaaattcctggctctgtttccgaataacctccatagaatctccggtacacgatgtctaggtttcgcggcattacaccttctcctcctttctctcgaatttggagagagagaagagtgacgagcttcgataatggagtctgatggtgtgaag

SEQ ID NO: 45825 - DNA, 175 bp, Arabidopsis thaliana columbia
tagtagtgccacctcacacagacgctatatacctcagtatgcaaagcaaaatctattctaaaacattgtaaaagctagtagatcaatggatcgaagcactgccaagttatcaccggttcctgaattcttagcatgttctattattgacactatacatgaacatatgtggtcagaa

SEQ ID NO: 45826 - DNA, 534 bp, Arabidopsis thaliana columbia
gaatgatcaaatgtctgaataccatttcctcaagtatatgaacgaaaaagcctctcacatcatcttcaaaatctctttattttctcttttctttctatgcctaatctctattacgtttatagaatctcatgtttaaatataaaatatattatctacttttattgtcaagaactctcaaattttctttcattgagcattttaagctcaaatattttattacaggcgccgtctaaaatagtcgtaattgatatttgcatacatagaatagatagatgttatgcatctgatgactatcttcaaaacatgttcaagggcataggcatttggatccacttttggagtttttcatattgcgatacgaaggacattcatctttgttttctcctaaaatcacacatggttagattttgtatgtgaatatagttaactaaaacttaaaaaacatgtatatatacacgacataactagtaaacaaatctttttttctaaatgtcttatataaattggacagtatatatagatcgataacaaaaa

SEQ ID NO: 45827 - DNA, 466 bp, Arabidopsis thaliana columbia
tattcctaaaaatgagtaaacaaatagtcttttcgattaaatatcttgagacacagagatacatcatgtctcgtgatgttatatttgatgaatttttctcatataattggccacctcctcagtcttaattgagcaagaagctcttcaaagatcgataggttagtgctaacaaagttctttattagttattgcatatttaaagtaaaaacagtacactcgaacacgtacgtggcacatacgaaaaccattcacttatgcgatataacttgtctttgaatgtctaaaatgcttataattaatcctatcttagaaccgacatacaatcttaaaagttgtatttgtaaacaaatgattttttcgattaaaagatcctgattcttctgacaaatctactatagctctgctaaaagttgacctttaactgctttcacacaaaaacaatgtgtaaacgacagattgttttttg

SEQ ID NO: 45828 - DNA, 500 bp, Arabidopsis thaliana columbia
tactatcaaaatacctatagaaaaaaacttacaggtacagcaaacatacttacagcaaacatagttacagcaaaacaactacagcaaaaattctatatctacagtccaaccaatcaccttgaaactgtagattttaaaaaaaacttaaagcttgattgacacattttaggattgtagaaaattttaatactgtaaatgctttttacagcacaaccatttatgcccaatataaggcttcatggagttttactgggaagtcgacaaagtatttaaaacacatttgacccggaaatagaagtataccggtttttaacttcagaaacgtatgaaaatatcaaaatatattctgaagtagttacatatttctcctctttatatggagttagccatgttcactatttaaaaggaagagatattttaaacttttatcaaaagttttagattaataagaaagaacaaaaactacactccacacgagggaggaaacgttaataagcaag

SEQ ID NO: 45829 - DNA, 576 bp, Arabidopsis thaliana columbia
taaaattttaatatggtagggaacactatttataaaagatattggagaacaaaaactttttataataattagcttagaaaaaaaatgatgagtaatcttctgaatttagtgggccaatccgacctaatagacaactcattgatttcatcttacgtcaggtacagttcatcaaatgcgaattatttcttaaattttaaaataatagctacttctttggttggttgcaaatgggcttcaggagtagcgcgggataaaatgggcctgtagaacatttgatgggccacaattctcaaaagcttttcttcctctttttttcttttgttcactgctctcaaaagtcaaaagctttccttttggtctcaaaagctcattatcattagggtagaaaaaagagtacatataagtggtaagttgtagtactagtaacatattaaatattaattctgtgaaaagttctttgatcacagtctttttttaataatcattacttgataaattatctacgtggaaaacaatacatcttaccccatttcatttggaggatgacaatgtgtcatgtgagctagcgttggatgg

SEQ ID NO: 45830 - DNA, 583 bp, Arabidopsis thaliana columbia
gtaacggcgccagtgtgctctccaggaagtggcaagctttaactcggcagttttattttttggggtggattgggattgggtccgttcaaggtgatccaatattgtcctagcaatctgactagaatgtgtaggcacagtcagggtaccaacttctgcctctttatgcttaccataagttgttatctgggacctagataggtaacttgattcccctgcttcagagctcttcatgatagcagaattttcaaaacgagatgcaccacgggaaggtcgtgaataaggagacaccatggacggcgtggcgctctgacgagttcttctactgggtccaaaaagtccaccatcccttcccttgctaagctgtgcacattagaaagtggtttatcaggtttcaactgaggaagatagacggaacccaggaaagattcaaaaggtagtatagtgatgactctaattaagaaccaagttttacaaaaggtaacaagacctagaggacgacattatgaatgcctagacgaaaataatttcagagaagtcaaggtaaaggtgccaaaattaagtcaccacacaattgcatacttga

SEQ ID NO: 45831 - DNA, 423 bp, Arabidopsis thaliana columbia
tcctaaacccaaatgttgttgtgcagttttagtcggtttgggtattagaatgccacttattgaaatcatcgactttactcgaacaaatcgtttaatttaatgatgtataacttacctatattgtctataatattctctctatgcggtagtcggtgaagaaattaatgaaacaatttcagcatgtggtgtctttatatacatatttgaattataggacactataaatattgcacaaattcgaaatgagataaaggataaatatatacatataattgacatacaatttaccgggttagtttatgtcgggtaaatttttctctccgtagagttttatgtcaaaccaattactaacaaaaaacaaatgttgaatcgggtaaattcagaagttttaaaactatgtagagagaagttctttctaaactc

SEQ ID NO: 45832 - DNA, 372 bp, Arabidopsis thaliana columbia
ttctataagcatatgtaacgagcgactatatcttcacaacattttatatagccaacagcagtagaagatttcgtaaaaataaaatctcctcattgcatctaaccggaaaattcaaccggaaatgacgatgggatttctccttcgattctggtatcatcttgcgtcactcggccattctccagtcgatgcgccagcgcagaggtaccaattcagaagtacagtgttcagataacttccggaactacaacattatacctggtcgaactaaaccggctctattgtaaacccatgatatgtaggtttgctgtattaacgtttgacatttagaacaggttcaagtgtcgaacataagccggatattcaatgctaaac

SEQ ID NO: 45833 - DNA, 422 bp, Arabidopsis thaliana columbia
tgttacgattctacatccattatagtgacttgtgagttatgcaagaggatatggataatggaccattatacctagggttgatgggaaacatagccaagataaaacctaaaaccaaagtcaatgtatgtgaatgttataatcaattttaacccgttttatttattatttctaactgaatctgatctatatcaaataaaactgaagttaggactaagaaaaggtattttgacgataggaccaaccctctctaaccaaaaactgtaagtatgaaactgaaagagatctctaagaattacgaagataggtagtaatttcccctattttggactttttgtgaatcgagtttcagcataccttattatcattgtacatatatatatatacaatgagtaatctcatgatcataataaaaaaaaaagagt

SEQ ID NO: 45834 - DNA, 558 bp, Arabidopsis thaliana columbia
catatctaattcgcggggatatcacagtactcacaaataaattaactcgctcagggaaaccaatagccaattctatagaaattggttttacatttatttgtaagaacataagattagatatcatcataaattttcatggttacaacttacaacttcacacatataaaataaatatttacaacaaaattatcatataagaataaatttatcatttccgtgaacccaattatatataacacatggtttatttatttatttacttttcatggaattcaattacttgcattaatttgtgatgttccttaacggtccatgcctgacgctacaaacgggggcgtgttgctgtttaatcctccattctcaatgttccaccctttgtttgtagtaaaatgattgcaacggtgacaaaaacaacaaaacttatcactaaaacgaccatcattaatatattatactaaaaagagaaaggacgaatagagactgtttcctagagagggacaagcctcgatgtttgagtcgcggtgtcttgagtagagccatggcagcagaacagtgaat

SEQ ID NO: 45835 - DNA, 325 bp, Arabidopsis thaliana columbia
  unsure (1)..(325): unsure at all n locations
cctccgacgctgcctcctgctgcttggtcggggcgtggctgtccgtccaccgcacgagcgacggtcgtgccgtgcgcaggtccaccacatccacggcttctcccgcgccgccgccgcaccagggggtcgtacaagacatcgtgcgccgcgggggcgcgccntgcgttcttggatggtcttgtcctcactccctcagtgaggacgggagcgaggacctcttcgcgcgtgctgaggcagccgccgcccaccggtgcataggtggccgctgtcatcggtgctgaggtggtcgccgccgctggtgaggctgcccgttgcagaggtggtt

SEQ ID NO: 45836 - DNA, 403 bp, Arabidopsis thaliana columbia
gactataacatttatagatttggtctaactttgttcagttctataatttatatgatcatcaactacaatctcaagattcggaaacaaatgaaaacttaacaaggatacaattagaaaaagaaccatgacagaaggtagttgcagcacttgatgtaaaaacagttttttatttttatggttttgaattaattttacattcaattaaaaaaaaaagaaagacagaaggtagatgtactaagacttaagaacacttttaagagaactatgacagataattactaatcatctttcacagattcattatcctttcatcgtcatcttctttaacatttgtgtcaagaactgaagaagaaaccattgtgtcaacaatgaaaaaccattgaggctggtgcagcatcaaagg

SEQ ID NO: 45837 - DNA, 544 bp, Arabidopsis thaliana columbia
agtcgactatccctttctccacttgccgggtgccggggttttgtgatatccggaagcaacgcgcacgacaagaccgagataaaagctctcgatcatgacgatatctctaattcggtttcatatcggatttttagatagagttttggtttggttaaccatatcgaattggtgttgattggaaagaccaaaccgaataaagggtctttcgagtggacccgagacaagagaaaaagagactctctaaattagcaaaacacctttgttttctcatgaaattacaccatttgccactgaactacaccggtaaaccaacaagtccggcgacagtgacggcatttggattttcaatttccctcccccaaaaaatatttagcagtttcgtctttcgtgaattcccaatgttgcacgagcttcttctagctctcttaggcttcaccggcgatctcatcgtcgacgagcgtgacgaacggaaaaccctagagctcgctatcaactacgattcacctcaattctgatgaatgtacattcaaactcgctcctgaca

SEQ ID NO: 45838 - DNA, 1088 bp, Arabidopsis thaliana columbia
cttagttctggtttcatgagaattttaaaaattgtatttttgtttgtattaaatcgaaaattcagaactagggtttgatctgttcttgaagaaacctgcactgttttgagatctaaagtttgaccatttttgttgcagattaaaacaatgcctgaagggaaattaagatcaggagtttatagatcattcataatgtgtgatgatccaagagatgttgttgaatgtggagctattaagaaacagagtaagagccgtagtagtagtactaaacagagatgtgaagaacatctttcgaaagtgaaagagcggtccgaaatggcggtggcgcctaggaagagtagtagtacagaggatgttcctccttcttcgttgcagcttttgagagtatccaaagggattcagaaattgaatgttgcaattgagtcattgtctaaaggttttagctttgaggcggtgtcaaggcctgaggatatagcgaaagatctgttgagaggagctcttgatttggaagagtctttagctatgttaagtagtattcaagaagatgatagtaagcggaaaccgatgattcggaacgatggaagaagcgatttgcggtttcaaagatcgatgtctgatagattcggagagcggattgagaaacggatgatggttcaagagaatgtagcgtctaaggattgttatgaagagttaaggaaagtgattagagagagttttcttaggcagaatcttgtttcacaaacaactactatagagactaagaaacgagttgttagaagtgattttgcttcctcttctggagctgtgtcgtcgtcaactagctcgagccaatcttcaatggtttctggctctactaagtcctctgcttcgtctgatgtccacagagagctccaagtttgattgctaggcttatgggtttggatgtatcaactcaagaaccgaggaaaagctcggtgaatcatatcgataagccggatattttaaagctgtcatcagaaagacaagagaaggtgaagaagaatagtaaggagagtcgtgaaattgtgagatgcactctacaagagaactgctttacagctttgctgaag

SEQ ID NO: 45839 - DNA, 523 bp, Arabidopsis thaliana columbia
gttaaataggaatcgatttggcacgatttggtatgtctttggttttggtaatttggtatggttagtaaaatctccggacactctgggagggtcagagggtctcagagatgggaacacattatataaaccgttggaggaacacagcctctcgcttagctaacaacaactcaacgagtgacatggacatcgccctcttctcaccggcgtcgctctttgctgcagacggtgactcctctggtcagtgaaatctctcttctttcaatttctaatttgatcgaagggagagagccataattagcgaagtaactgtcattctcattctcagatggagagacgacggagacgagccagaacttcgttgagagacatcatcagtttcctggaattgtaattccttcgctcccgaatttctcttctatcgtctgcttttagtaatatcaattccatatttagtttacgttctccgttgagagtgaaacctaagcttctgatttcagtgattttgagttcatatagtggatta

SEQ ID NO: 45840 - DNA, 203 bp, Arabidopsis thaliana columbia
  unsure (1)..(203): unsure at all n locations
tactcttctcactatgcaccttcgttcaacagataacagttacgatgataacacgacaaagcaaaaggataagactaagaaagccgagaaagagaggagagcaaaacaaatggagacttttcttttaagcggaagcaagaagcaaaccggttgatgatttntcttgattaagcaacaggaggacgaaggacatgatcctgaga

SEQ ID NO: 45841 - DNA, 400 bp, Arabidopsis thaliana columbia
aagtcaatctcagtcgtcggaaggagactaaaggagtcctaggtccatatctagggaatatggtaggtacgcattcatcgtcaagttctaaatacatcattaagcagctaatattgaatacttagtcttaaagcaaactttattactggctttaatcatgtatataataagatattttcatgtattgcaaggactagtttagtcatttagtcgaggtaaagacaaaccgctgatgtcgacatgagtgagaaagtgccataacgttacgctctgtttctcacttcagagagccaaaaagttagcacaaaaaggaagcacaagaagctggaaaatgaacttacagctcaagttcacttcacaagcttctctagtcgttcgtaaattttgagtctttgttgga

SEQ ID NO: 45842 - DNA, 569 bp, Arabidopsis thaliana columbia
cttctcttttataacattcagaggaaaaaataaaaaaagaattttaaaatctcactcgctataccatattgatacgcctcaatattggtacgtaaacttccaatcagtttcctattcctatgtatatctatacattataataattaaaaactatatgttatacagttttcttaaaaaaactgcggagaacataaggctgcagccgacattatccgtgtttatccgtgtctatataagactcatcatactttttcatttccaaacatatttcaaaactcacacacaaaacaatccataccaacgcagaaaaagaagttcaaaaggtattctatagctgacatgacaaagagcaaagacggttcgctactaaaccggttgagacaagcagtgaataaagtaaaattcgtgttaagtttcaagataaatagcctctggggtctcgtaccgatgcttggttcttcctcttcttcttcgtctcttcggttaagtttcacgatagacctggtttacagcggctttacagagaatgaccggactcaccggcggtcaaggggagcgtgtatagacta

SEQ ID NO: 45843 - DNA, 483 bp, Arabidopsis thaliana columbia
tatatcttttccagacttggcctgatactaacagttcatgcagctgttggagaagatggaagctggaaggttgtgaatccactgttggagcacacagacaagaaaggtaaacgaaagaaccaatgttgtaaaactatgcaatacaataagtctgagggatttgtttaaaagttcaaacctctctgatttttggaatcaaacagttgactactctgttgcggcgcacgatacaaccggtggaatggaaacgaagatatcagaagctgctatgattgcaaaacttggagtcgatgtctacattgtgaaggtagattatagacaacttttgcctttaaccaactaaatatcttagataaagatggagcttttaaccgccatcatgctctttttttcaatctcctcaaacaggctgcgacaactcattcacagagagcactaaacggtgatttgagagatagtgttcctgaagattggcttggtact

SEQ ID NO: 45844 - DNA, 580 bp, Arabidopsis thaliana columbia
tgaataagttcttagtcaattttaactcatgtcaaaggaatcaaaaaggtcaatgaagccaagagaacattatagatgaagtgaatgcacataaatcttaaaaattcatttacaaagtgatacaacttgctaaatagtgtctaagaactatgtcattttatacccaaatcgtttcctgtgtcatcgccattgctggttatgttggaccatccagacatcccttcatcaaaacatacattgaggaaatggtttcagagatcctttaattggtgtaaagctaatccatttctaaactctcaccaaggctttttattagtctataacaagctcgttaacaattccaaaaggcaaatgacaaagcaaagattggtatatgactgattgatcaaatctcaatcaagttcaaattttgtgagctcaggatatataattttgcagtttagagatggtgagaggagatggaatagaagatgtagaatcagagaatgcgatcagatgaggagaacgaagacttacaatagcagaaccagagagcgtcgaagcatttagtgcaggacacgcgccgtcgcacagatgaaga

SEQ ID NO: 45845 - DNA, 604 bp, Arabidopsis thaliana columbia
tgtcctagtattgttagaatattcaaaaggaacaaatggggaaaaataaaatgaaaatgaactgacacgtgatgctagatgtgggaggcttcagaggcactggatcatttcaaaacttcctgtctgagattatatgggcagctctctatttctctcatgcatgaggtcagctgaaatgttctagcttgcttacactgttttatgtaaaagctgtcaagatttgggaagacaggactctaatttagagatttctatggcttggatgtttggctcttccaaacctcatgttgaagtttgatccctaattttgaaggtggggcctaatggcaggtgtttaggccatgggggcaaatttctcatgaatagacaatacccttccttgggagtgaatgagctctcactctactagttcccacaagagcttcttgttaaaaagagcctaaaacctccccgtgtctctatctgtttcttctttcaccatgtgacctctgcataccttggcttgtctttgcctttgaccatgagtggaagcagcctgtggcctccccagatgcccaatcttccagccagcagaatcatgagccaaataaactctttttattaa

SEQ ID NO: 45846 - DNA, 542 bp, Arabidopsis thaliana columbia
gtagccatgcaaatgacacttggaaatctaattagctcgacagtccacaccccacaaggttatctctccctttagtaaattttaaaaattaatttgtgaaaatatcaatatatggtcacctttactaaagaaagtagcaaagtttaaatttaaaaagttatcaaatgaatttcaaatcaacccatagaaaagaaacaacgttgaaaaagttttcaaatgagattttcaacaaaagtttgacactaagtccttggaataaaaattaaagtttttttggtaatgtgtctaacgactaatggaataatttgaggacaaaagtaatattaacgaaaatcacttttgagaaagacacctaggtatgattatgtcttggcaccataatttgtctaagactagcacaaagacgttttatcttattaattggccacaagctacaagcatgtggacatatttgattgtcttttgtaatcacatgggaataagtccaaataattagttgggaactgaaaaaactcattgattcaaagtaaaataagaactat

SEQ ID NO: 45847 - DNA, 513 bp, Arabidopsis thaliana columbia
gtgtctcaagtaccaaccaacaagctctaaacggttttcgttcgctacacaatcgaaagacttagattaaggagaaaaatctcaacgctcagaccatatgcacattacaaaaatcctagacaaaagagttcccctttaaaccttcagctctcaactaaatagcctacggtctgttgttgagctggcaaagctacaattccttgttaaagtagtcctgcaaaccttaatggtctaattcgtggcggtgaaatattataaggcgggaacccctaaaacatcttatgacattctagagactatatgtatctttccattgtctaaacagcagattgaagaaaaatttgaatgtttcctcatcaaactcagttagttgattgaagaaactagtaggcagagaacttgtgattttggcatttggcaggcaaagaaaaagttggaaattaagtatttacctgccgaaagcagaagaacactaatcctttgacgcacatgaactttgtaagaggcttatga

SEQ ID NO: 45848 - DNA, 843 bp, Arabidopsis thaliana
taatttgttctatctacagaataacatggctgctgcccggcataaaagttaggtaatgaaccaactagcaagccttgggaaaaactgatacaaaaaggtttgaggagcttacggtcgaggaagatgaatctctgttaggagcaacgatctagctttgttaacgttagtgaaccaaaggcaaatatgatcctcaagatccttgagttgatgggtgagggggaggtggctcttgcgaacgagtttcagaatctcttgaattgaatgcacgtccctccccctctctaatccaagtcgaattaaaaacttgtcgtattcaattccagtgtgcaaacgggagacaagacggtcaatggtatcaagatctttgttgagcacaaaagtacccttggaagcagcattgagctgacaaatgttagttaactcctttctcttgaaactgtgagggaggtaaggactgcacaagggacctgcaacaacaagaaggatgggaagtgcatgagaggcaataacaactgcagaagcagcaaccgcaacaacagcagcaacaagacataaggaagaaccagctgtggcatggtggatgaggcggacccgtgacctagacttgcgaagccgtctgtccagattatgcttcagctgggagaagcataattgggtgtctcgaaagctgtaagattcaggagatgagaaagggttttcaaacgtgtcgagcttaagaaaaacgtcgaatgccaggtcacatagggactcgtcaatggcggggagtgaatcccgggaaagatgttgaagaggtctaaaaggggcgtgtagaggtggtggcgacactgtgtacgttttggtaag

SEQ ID NO: 45849 - DNA, 255 bp, Arabidopsis thaliana columbia
tattcagatattgggccggcctgacaactttatacttattacaaaagcctatattagccaacataactaacacttggctccttttccaaatattttgagacgtctacagtacaaattgtttagacttggggtcaaattgataattataattaaacttaagccggctctcacttagtcccaacgcacacagccgaaccctagctttcatagcattttcattcatcatcgaaccagcttcctgctaaaggcatcgcc

SEQ ID NO: 45850 - DNA, 386 bp, Arabidopsis thaliana columbia
ccggactcgaatggttataacattcgtaaagagtgtcgccgagaagagaggaaagtcgattgatgaatcgtcttacggtcttgatgttgatgttaatgccagcattggaagttctagtggaagtgatggctcctcttcatccgataatgagagttcctcaaacaccaaatcacaaggcacgtccagcagatccggaagtgaatcaacggctggaagcatcgagactaacaccggatctaaaactgatgctggtagcaaaagttcttcttcagccaagacaaaagaagtcagcggtggaagtactggtagcacttacaaagacactactggttcatcttcaggcgccagtccaagtggaagccccacgcccatcccttctacaccta

SEQ ID NO: 45851 - DNA, 566 bp, Arabidopsis thaliana columbia
cttagttcctaaactcctcaaatcggcgtagaaaacttcccctgaagtcacaccgaccttgaacaccgccgagagattatccgagacagtaacatcagagaaacaatcttgtgcctccttaatctcccaaaccatattccttgacctaacatcccaaaaccttatgtgaccattgacaccagaaggactagtatgagaaccagaaaccatcaacaaattacaactctgaatccatttcaacttagtcgatggaatcgcagaatcaatatcagcgccatagatctcacaatgatcaatctcagacacaggtaacaagctagaaaggtcatacaccataatcgaattcgagttccttctactagattcaaagctagtgaacaaaaactcatgagaagaacctatggcttgaaccgttgagctagacctagtaacgttttcccaattcagagtcgtacgaacgaatccgccgttatcgagatcgatgatttgcaaaccagggaaatcggtagctccggcagctaaaactcccggagatatctctagaagcgaatccacggcggagaaat

SEQ ID NO: 45852 - DNA, 499 bp, Arabidopsis thaliana columbia
gtcattgcaaatgagtaaactatcagttttactataaaaaatgtatgtatatttattttgaattgaaatgttaatgcaccaacaacattaatataaaccattatactattatgttgtaaacttgtgattattgtatctcacatctatggactcaaataattttaaattctggtggaaaaattagatagcgaactctttgttttttcatgccaactcatcctagatgaatacgtatgttgattatattaatcatacaaaaactaccaaataagattaaataaaacttttataatatcaactattttgttatattaacaagagaaatggagttttggttagtagttgaaagcgccagagaagtattagggtggaagagctgtaccatcactcaattttagtgggtttgttatttatttctctctttttgccacatttcttttatcaaaaagaagtttcgttttttcattcacttatacaaaacataatttagagttagata

SEQ ID NO: 45853 - DNA, 619 bp, Arabidopsis thaliana columbia
ccgagataaggaaaagtgaaggaagatttttctcacagcagaacaaagtggcgtcagtctccttggtgagtgcgaaggtgatccgagcgagaatactaacaagtccttcgagaaatgttctctcgaaccggattcctctgatttctccttggcgaataccaactatcttggagatgattttctcaaaagcaccttctcttaacaatctcattgtcagaaccaaatctctctcaggaagttcagctaaaagtccagcagctgcagcttgttcctcagtgattgtcggtgtattccctgacatgaccgacacaaggcttccgagctgtccaacagtgctacgcaacgcattggctagttcttcactcatgtgtggggaaatgttatgaagaagcttgatagaagctaaccgcaaatcatcgttctcatgtatctcaacaaactgaaccaagcttatgatggcagctgacttgttgatggcagaaacaacattaataaccgagtttggacagctagtgagtccaacaagaaccgcaacagctttccttggatttctggaccagtgttgcttgtctgttggagaaggtctccactatttctctgcacaagagtttggtgatga

SEQ ID NO: 45854 - DNA, 526 bp, Arabidopsis thaliana columbia
caaacaaaggttacacaagagtgatcagttttcaaacctatgcaacaaaaagaaaaacaaaaaatcttgaaacactataagaagaagacaataaaataaggaaatttgttcactaacattgacaaaacccagaaatttccacagagaagtccaaatttttgaaaaaaaagatgaagaaaaaaccaattttactgctcgtttctaacaaattcaaaagcattagtaacacaatgctatatcgaaatgttccaaatttcaaacatacatcacaataaaacccattacagacgttagtcatgaataattaaccttttattttgtcctcggaaaacatggaaagatagagttgggtaagacgaaatacctaaagatagtatttgattttacaccggagacgaaacgaatcaacgaaaaactagggttttgcaggtgaaattagggagaatttgagcgacgaagtgggagagaatgagagtgacactttcatttttagtactaaaaaatcaaccgaataagtcggttttgg

SEQ ID NO: 45855 - DNA, 556 bp, Arabidopsis thaliana columbia
cgttctttgaatttcagacttgaagtttaagttattctatactctatatctatactaacacttactttagtttaatcgatatgaccaaaatgattaacttgcattacagttgggaagtatcaagtaaacaacattttgtttttgtttgatatcgggaatctcaaaaccaaagtccacactagtttttggactatataatgataaaagtcagatatctactaatactagttgatcagtatattcgaaaacatgactttccaaatgtaagttatttactttttttttgctattataattaagatcaataaaaatgtctaagttttaaatctttatcattatatccaaacaatcataatcttattgttaatctctcatcaacacacagtttttaaaataaattaattaccctttgcatgataccgaagagaaacgaattcgttcaaataattttataacaggaaataaaatagataaccgaaataaagatagaatgatttcttagtactaactcttaacaacagttttatttaaatgacttttgtaaaaaaaacaaagt

SEQ ID NO: 45856 - DNA, 570 bp, Arabidopsis thaliana columbia
  unsure (1)..(570): unsure at all n locations
cgaagctagaagaatataccttgagaatccatggctaaagcttttacgttgccatgtgaagctagaaatagaaggtacaagtttatacaaagaagtacgacggcagccaagagcgggatgtttatccacgatagagagtattgtatacgcgatgaaggagatcggtgaagatcctgaaggtttagataatatgttgaatgtttttgaatccatggttgaagatcaacgaagatgtaaagatgagaactttaacaagattatctgaaagacaaaattactctgctgttgtaacttgtaagctgaatgaattagattcttcaattttgataattatgccgaaagttggagtcgtttttggcaatttattaaaacaattgaagatataaatgttggggtgtgaacaagaaaaattcatagttctgggccaatatgtaaattaggaaatataagttttgttgagtaagacttttgttaattttgaactcagagtgtgttttcgtttccgaatgctttcaattcgcagaagcttaactctagcaaaagagccaaagatttgtttttgtntttgtg

SEQ ID NO: 45857 - DNA, 567 bp, Arabidopsis thaliana columbia
tgtctaacagggttgtaacacgccttgaaatgtcatcagctgatgatgctgctgtacatgaatcaatttaatttgtttattttcgtcaatgaggattacttatattaaactatgactttactaaagacaaattgcacataatctatagaaatatatattccctcatcctctggtaatcctttcttggtctactataagatttattcaatactcaaactttaatgtcgaaactaaaactgtcatagagaacaaatatatagccacacaataataattatccgattttcaaatttctttggaaattttctcgttgaatctaccgtaaatcaaatatgaattagttattagttcaaggaataagattatgaaatttcaccacacacacaaaaagccctttttcaataacgagttatgattatatccataaatattaaaacaatgaaagtataataatctttaaaataagcttaaaaattgttttgataaatgatcttatattgttgtttaccctcatcattttgtcatgcatgatgatcaaaactccaaacacttctttagttttgtttg

SEQ ID NO: 45858 - DNA, 460 bp, Arabidopsis thaliana columbia
agcgtcagcatttcaatcgtccatatccctaagcacatgtcacatgtctagatagggttctcgacatttgtacagtgtttgtctgagtcgataatgacaatgtccatgtcacaacttggctttgctccatacattccttaatatgaatcacctcacagactaaagtgtggtgaataacgagcaataggacatcaatagagataatatgaaacacttcctagtgtctgctgacagagtttacgaaggagaaagaagtctttggagttgaatttttgaactcccaacagtttccgtaaagatcatgccaaatccgtaaaggcagcaatcaagttcacacactcttttgctcttctgactcaatatagaggctatatagcagcataaggaacctcgaagctcatgagactttaagagcgagaagcattgatctctgaatattgtgaacatgttgcaatcaagt

SEQ ID NO: 45859 - DNA, 494 bp, Arabidopsis thaliana columbia
ccatgattcgtagtatatgttttcacaaaaggataagtccatcatttacttaaacattatcctaccttctcttgtgcatttagttagggtagatattaagcctccccagaaggtgattggattggagttagagaagtctttagtttgcctgatggacttactgctgctgcttgctatctgaatcttattatgctgattgttcgaaacttttgagaagcaattgaagctctttcatgataatttcttgtatcctcgcattgcaggcatttgacatgaaaacatgtcttgtttctcgcacagtagagcacgaaaagcctagatcatccaaaggcatgtacgtttggttccaatttctgagacgtataccagcaaaaatccctctttcggcgtcacctctgtttttgttaattttcctccaaaggctctaggacagttcttatgtctctatattatttgtcccatgtttttgcaattaacagaaatgattttgtaga

SEQ ID NO: 45860 - DNA, 454 bp, Arabidopsis thaliana columbia
atggtttccattattttttggccaggtggattcgtggaggatgcttgatggtatgttgtcaatgggaaaagttttggttgatatcaagaagagcggttccaaggagataacttttgaacagagaagagatctgatcagctctatggtgaaatgggctagagctatcggcctattcgtgaaggcggcctctgagcgtaaaggaaaatctattgatctagcaccttttggaattgattatgaaaacaatgtcggaaatggaaaaggtaactttagaaccggccctgttctcatagacgacggcagcgagctctaatcttccaacgaaaaaggctcccatgtaaacaagaattatgtaacaatatatgagggagcccggtttgtttaacagcaacgtgccgtagaacatttttggttattgtaaaaactatattaatcatattactaaaataagatt

SEQ ID NO: 45861 - DNA, 463 bp, Arabidopsis thaliana columbia
tcagaatagttttcttcagtctccgactatatttatttcattttccgatcatcgtactatacactccccaacatcgagtaaacaagcttagttgtcaatttacgagttccaaaagaagaatccaacaaaacgcagtgtttcgttacttctagacccatctaatttctacgtgttgtatgcaacaatgacggctttaccctttcgctttctaatgtggtccatgttgttctggacttataggtccatatgggcctatgttgggttggataataattaaccaataagagaccacgtagagacccgctaaaccaaatagaggcgttgaagcatgagcacgaatagaagagcgttatgattgaatgtcatttatggacgagaggagaaatactaagaacatagaatccattagcaagctcaagcattacatcaaactcaatattgagagaacaaaggttctatcatg

SEQ ID NO: 45862 - DNA, 636 bp, Arabidopsis thaliana columbia
ttttagacaaccggttgcatactattttggtggctatgtgatatgacgttgatagtcttataggaatcagacaattcatgtgactttaatttgctctatctaccgagaaagcacgactaaaatgaaaaaaaaaaaaaatgtagtatgttgtaagataaaaatatatgtaaataagttggtttttcaacaaaaacgcatacattaaccaaaaaccatgcatttgtcttctcttttattgcgagaaagaaattgttaatatatgcttagatcttgtttgctattgcataaattgaaacttaacaacaagtcaacaacactgtatctcttaaatatttgcatttcatcgacgaaaggagcaaacctgttgagagtacgggtaagtatgagaacatcaccatgaaagtaaataagtaattaagtaaagttgagaaattcatacaaacaatgaagcaactcaagcaagtcaggtcatacataagttatcaaactcttttaaattcgtagaaatttgttttaagcattaaaaaaaaaaagatattaaaaaatcaaatatcctatatctatagtgtacaaaagaacactgtatattacacaaattagatttaattgtttgcttgaagaagaagtgagggaaat

SEQ ID NO: 45863 - DNA, 337 bp, Arabidopsis thaliana columbia
attagaatctactaaaaagggatcattgtcctataccgggttgctagatcgatccgtttaacggctatggaagcagaataggcgtaatagtgatgacgatacaactggcatgtgtatatgatgtaaccatgtgacatcgtctcaagtgcctcagagttcgatgggtatgggaacaaggaagcatacactcatatgtccatctggcgtaaaaaatgggactgaagaagaaggacaattgcaacactgggatagaggcagaacgacagacataactcagggaacagaagcttgaggagtgtaagctataactggcataaagcgttggactaggcgaaca

SEQ ID NO: 45864 - DNA, 531 bp, Arabidopsis thaliana columbia
catttcttctacccctaacccacacaagattgaagcatacatacatttcgacgtcgccgtgggttctatttacaaaactttgattccctgttaggtggtccttcttcaaagctaagagaatgtgtaaacacacaacacaaacacaagtttcttttggcaaatcaagtataattccttctcataacttggaagcctttaagtacacaaaggaaagcaaaggggatcgataactaatcctaaaaccaaagaacataattaacaaagtgggaatatggaaacgtggagcttgatctcctaaatctaaataacgcacttatcaattcttcttttctctttcaccatgtcttatgtggttcaatcatggttaagcacttatcattccccaaaaacatatgcttcatatatccacgttacctacaatgatcaaatgagtttgattccttgacaactccaaaaagatgcaaagaagataatgattgtgaatttctgatacactattggtacaagcaacttcaattgagataagaggga

SEQ ID NO: 45865 - DNA, 495 bp, Arabidopsis thaliana columbia
tggttaagcacttatcattcaccaaaaacatctgcttcatatatccacgttacctgcaatgataaaatgggtttgattccttgataactccaaaaagatgcaaagaagataatgattctgaatttttgatacaacactggtacaaagcaacttcaactgagataagagaccccgaaaagtgacaaaccccatctccgatttggttcacagtcctctccgattaagttcaccaaactagtcgacgttgagcaccgtcggttgagatgatgagcacgatggataagagacaaattccgtcgataatctcttccaatttgatgatataaacgcgtgatgatgatgatcaccaatcgctcaatcgccaccggagttaacaagagaagagaagagaggaaaatcgatttgaaaaacaaaacacggcaaaagaaaaaaaaaagttttgtcaaaaaaacacaaccaatgattagttgccacgtatgcgcaccttaacaactg

SEQ ID NO: 45866 - DNA, 587 bp, Arabidopsis thaliana columbia
aatttattttgcttgaattcccaattcacgaaactctaatttcaataacatctaccaacccaaattaaagatagaatcatacacaaacttaaagatagaatcatacctttatcatgagactggaccatggtttcaaacaagactccgatatgattcacaatcctctccgattaggttcaccaaactcgtcgacgttgagcaccgtcggttgagatgatgagcacagtggattagagacgacttccgggcgataatctcttccgatttgatcatataaaagcatgaagatcttccggcgataatcaatcgttcaattgcacagccgagttcaagagagagagagaaatcgataaatgaaaaaaaaaggcaaagaagaaaaaaacttgttttgtcaaaaaagctcaaccaatgaaaacatgccacgtatccgatccttaacatcatcaaaaatcctaaaattaggtgcgatcctaacatttaatcaaaatttttatttattttttctcaaaattactcaaagattttggttaaggatctgttaaggcctcccaatggacctgctctaaggatccattaatcctagggag

SEQ ID NO: 45867 - DNA, 511 bp, Arabidopsis thaliana columbia
gatgggccaaccatagaccgtgtgggctagcccattaaacccgtggacataattggtctttagaccatttaacccgttttctttacgggccgaccatggactgtccataatgttgtggactgggcttagccatggtcagatgcccaattgacggttctagttgttcccagtttttgtgtttcttttcttctaaaattagtatttggaaaccaagtttatgattatgtctttacctagatctacttttaaaattgtttttaccttactaattttagagaaaaaattgttctccaatgtaataaaagttatccctgaatataacaataagatcatggataagatctggatggaaaagagaattagaagatagggaacaagatccgcttcactttctctctccaacattacctttattttgacacaactctacaacgctcaacggagataacattatgcatatgactacgacaatccattataatgtggtacaaatgaaatgaattttgaaatg

SEQ ID NO: 45868 - DNA, 1136 bp, Arabidopsis thaliana columbia
ttgatcattcatgttataaaaacatactttcatattttatttgattaacgaacgacaatatcattgtatactgtataattatttctaatcttttgtttacttatttttgatttttattttctagaaattttcttttaattaatttaattcaaataaacatatatattataaattgattagctgcaagaagtttttaaagtttttccatgtgtttatgtcaattaaatgaaaaatatttaagaggaagctacatggcataagacaaattgcaatcacatcttctctcgattcttttcatttcaaccaaaacaatcatatgtcatccttcaatcctagcatatattaccacgtcataacgattctacacaaattgtcatgttagagcaggtccattggggattgaaaatttcttatcaagaatccttagcaaaataagacaaaatttaaatgaaacatgtgatataaacttacgaacgacctaagcttagagttttttttggtgttaaggttcgatgacgtgtccatttctcattggacgcgtgttttgacaaaacaatatttttttttcagttgcctgtggtttttctcatttctggatatctctattctcttctttggtgcgatggcgattgaacggtctctgatgatcatcagcctcacgcgttcatgttcatcaaatcggaagagaatatcaacgaaattcgtctcttatccactgtcctcatcatctcaaccgacggtggtcaacatggacgagtttggtgaaccaaatcggagagaaaacgtgcataaattggagatttgtgtcaagccatggtccaatcaaattctgaatatatagatctaacaatttaattgtgtatatcgggattaattagggttattgttagattttatcaaaattagggtttcctgaatagggaattttagaagataaattagggttaattgatggtaattgttgacatttctaagacgagaatagattgatactcattgagcttattagaagagaaattgaatagctcatgaaaagctttattgtgcaaagaatctaaagagagagagagaagctttaagattgtctagaagaaccataatgattttgattgtgatcatataaatgtttgagggtg

SEQ ID NO: 45869 - DNA, 572 bp, Arabidopsis thaliana columbia
catgataacctaattccaggaggctcatataacataccgttcatgatcttataataatgaacgatataactgaaaaaaagttttatgcatattacatgttttattaacattcgcaaatatatggttatccaagtcgtggatcatgccatgtgggtaaaggcttttagtttggaatggttagcacaattatttatgaatgtatgtatttgcagtaatcatgtataacatgttgatttttttttattattttttttgccatattataaaatgttgattatgcaaatagatacttcaaaatatagataaaatactctgtttatcacgtgattatatagattatctataatgttagatgcatgcttatattaactgataaataaatcgagatacatcaaaacataacttataagatatatataaaacaatttgtactgataaatataacaatcaagttttaaccatctacagtctgtccatttctttatacgtctaaactaagtataaaatttgaatatcattatgtgtgtagagaatctagagatcgatggattgctaatcttaatttgaagtta

SEQ ID NO: 45870 - DNA, 524 bp, Arabidopsis thaliana columbia
ggtttacgtgcataatcgtggatagctttaaaaatcggctggtttagatcaaaatccggctgcggcgggggaggaggaggatgttgtggtgatggcggagatggagaccatatagcggtggaagctggtggcggagggagttgttgactcgctgagtcatctttgttgactcggttgagatatgaaggagcactgagtcgactcgggaatgagacgaatggatcatggccgtagattgggaagtctggattggtttgtgacgcatctccaccgttgatcaaactctccatccactcgtcggagtcaaactcctcggaagcgacggctgcgttttgatgatgctccaggtgtggaaagtgaaaacctgggtcgttggttacttgaaacgggtcggagaaacccgaaccgggaagagtaaaccgaaggatggattgggccaggggttgggttcttgttcttgttcttcttgttgttgatgttgtgattgttgttgctgcttctgtttgatgagttgttgtgctata

SEQ ID NO: 45871 - DNA, 185 bp, Arabidopsis thaliana columbia
gctaaagcacttgatgaactcaaacaagctaaaaaagaagctgaacaagtgactctgaagcttgatgatgctttaaaagctcagaagcatgtggaggagaattctgagattgaaaaatttcaggctgttgaggcagggatcgaggcagttcagaacaatgaagaagaattgaggaaagaacttga

SEQ ID NO: 45872 - DNA, 502 bp, Arabidopsis thaliana columbia
aaattccattggtcacaagattgcttttaattacgacaattagatcacaatttagttatgacgcttagtattgccgtcttaaactatttagtatctgtacgtcctaaaattactgttgaaaaaaaaatctcaattcatatgcgtttttatttatttaaaattagaaaccatatgtatgcctatcagtctatgcatgcatgagaagcgcgtaggttgcaatacttgaatgtgaagatttgatcagaacaaaacaacactaaaatatgaagaattgatgagaacaacaaaaaaatagctgttgtttcttgtgtaaaaattcaccacatgtttcttttcgatcaaatacacatgtcacatgttttcatatttgacttttcgatcaacgtacaaatacttatgtacgtcagtacatgacgtgaatgaaaaactaaatgcattaacgcatcatgtcaccgataaactactaatggaaacgtttttttttggttcactgatatgattg

SEQ ID NO: 45873 - DNA, 643 bp, Arabidopsis thaliana columbia
tgactgctagactaggacttctccatgactaagttagatcttaaaaggaacggattcgtgctatagaggatgaaactgccattttcgacacacaaagcatttccttttgctataagtttaagtttgaactgagcataggataaaagagctgaggcgttaaaatgaaatcctttatatgttctgacatgaaaccctgtagttttttccaaacattggcttatggcttttaaagatcattctttttgctcttaatgtttatattacttccatttggttcaggtccaagctctacttgaggttttacccaaccgcttaactgccgatatattggaggaacttcgtattagcaaacaaagactggtaaactttatttagttgtttatgtatgtatattcttgttagttgttcgcttcagagaactcaatgttcggttttttgtattgaatttttctttatacactttttaaaggttgaattgggctcccgagctggagctcttagacaaatgctcctggatcttttagaggatcccatgaaatacgccgcatatgcatcatgggaagaaattgcacacttagaagaggagacgatgatttggagtgtacattacctcagataagctgattgctgagggtaagactgc

SEQ ID NO: 45874 - DNA, 594 bp, Arabidopsis thaliana columbia
  unsure (1)..(594): unsure at all n locations
gggtaccgcatgaatcatcagagcaacgggcagagccngttcgacctttatacaaagttcttaggagatcttaggaattaatggcaattattgctttaattatgcattaatttgtttgttttaattttgtctttattgttgcaacgttaggtttgactccctctttgggcaggggatggactggttctaggaaggtgatcgtccgagcccactggtacggtgacttttcttgtttagttcggctcacgaggaagcctaacgtccctgctttctttcagagacgtgatgtagatggccgttgacttttaatatctgccgtggatggttcttccggattgcggatctctggttccaaatctgacagtgaccaacaatgcgttttactgcatatggcctgaaatgcatattatttgcattttatactactttaaataaataaaagataccaatgtgtagtttagtgttctcattttgatcgaaatggatactcaagtcatatgcggcattttacaganaaagagaagcagaactatcatgtctatatatacaccanatatatcaaccaaccttaaacaattacaaacatatatgtac

SEQ ID NO: 45875 - DNA, 433 bp, Arabidopsis thaliana columbia
taggaatattaactaaaagcacaaaacagttagtaaaactctctggttggcgccgttaagtgagatccattgcatagggattgaataaagcattagattatttgctgttttcactctgcataggcatcagtcttacaacatgcttaggcaagacaaatccagacattcaccccaataacaatagttaacgattagatgagagcgagatgttcatcatatgtgtctgagcaattgatgttgcctttcgtccggtggtagtttacgggatcgtcacgtggcatagtgaagcccgagagaagtcaattgcagaaactcacagatttatgtgtaatagtactactactactgcttaggacttggagatttcagcgaagatccaccacttcttacactaggaaacctgtctgaacgcgcacaaacagtgggcaagtac

SEQ ID NO: 45876 - DNA, 570 bp, Arabidopsis thaliana columbia
taaccatgaactcatgtgacttctaatagtagtgaaatgttttcttgtactgaatttaaaaggtcagaggaaaaagagggaaaaacacttacttgctagctgatggctcatatttttgttatgctgatttgtcgcttgttgagttcttgacaagggaaacaacgcttgggagctcggtcgtcacgttgtcatatgataagaggactttcctctgcagcatcattacaatccgactagctgaggttagattaaatttgatcacgcaagcgcaaaaaaactcatttcaatgtaaggaaccaaagatcataaaagaagtgcctccaactcattggttgagagtgaaatagtttcagactctgagaaagttggtcatcacaaatcttttatcgcaaatttaacacttacagtggattctaaatcagggtttgataagttaactgtgaggtttctcatcaataacagaacctgtaaacaccatactatgtgattagtgaagaaatgctaagagcttgaacaccaattaatctgaaagcttgtaaactcttgactcacagtttcgaaatttatagg

SEQ ID NO: 45877 - DNA, 579 bp, Arabidopsis thaliana columbia
agaatccattccttgctatactgatatcacatacatgtgggatagagcagcttgaatctgtgatgaaggaactttaccgtgaaagtggtaataacaaatggcccctaattctattgcacaagagacgggtcaagacgcttttagaaaacccaactcaccggaatctggttgaagaatggattagtaacggtgtcctgtatgcaactccaccaggttccaatgatgattggtatgaacttttagcttctctcagcaccattatttcgacaaaaaacacaaacaatgtttggttactacactcatcttttgttttttttacctttccaggtattggctgtatgctgctgctaagctcaagtgtttgcttgtgacaaatgatgagatgagagaccacatttttgaactcttagggagtacttttttccaaaagtggaaagaaagacatcaggtaaagttatataaacttatatacaatatgtaactttttatactaaaagtgcaactttgagaagtctacaattagaacatttggtttatggttttggtacaggtctggtatacttttgtgaaaggtacctg

SEQ ID NO: 45878 - DNA, 528 bp, Arabidopsis thaliana columbia
aactgagatcaatagagatcgttgaaattagaaaccaaatcatataaatgaacttacttcagccccagcgatgacgcgcactactcttttgcccatctaactatctaaataggcctagtcgaggataaacctttggttcttttcgttagttaataggcctaggatttgtcttgtactaattaaatgttgtataataatgtatacatatatatatatatggttctttatagtttcacgctgagacatgaacattaactgagacaactttaaaccttgaatataattgagcttgttatacgtgtcagtttcttattacatcaactgaatttatttatcactgagacatttattgactccagtcataaatagtgcgtatatgtataattgtgtaaaaaaggtatgtaaaatgtatgttgagaaacaaaaaaggtaatatgtgtagaatgctaaaaatgaaaacaaagtaccacgaatcagaaatttcattggtgtggcatagtggtactggctcggatctactaggacgag

SEQ ID NO: 45879 - DNA, 579 bp, Arabidopsis thaliana columbia
ggagtctgtataaaattcagatcatttggatcgttatttttttcctaattcatgtatgaagtgtcacacttctcctacaatgaattatgaggttgtccgtttattccaagttagctctatgtactttgacgtaagctaatgcaacttgtaaaatgttgggaactcttctattactttttttcctttacaaaataagaaaatgcacgcatttaactcgctggatccaccaaagaatagaatgaacaaagtatatcactagctttagtgaattctagtagtttacgagtcactcatcatcggcccttggtcattaccattacagaaattttgtagtatagaaaatcaatttctgtaagatccttattatagtaacttaaagattctgtcaaatagaagggccaaatgattccaacaatcactagtcaaaccagagattctacaaggacaacaaaaccagttggatcttagtgttgtacttaaagctcatcacaaaaaaggtagaagagcctagaagatggaatcttgaaacaacctacgagagagatggatcgagagtattcaaagagggttttgtgagtc

SEQ ID NO: 45880 - DNA, 529 bp, Arabidopsis thaliana columbia
taaagggttatgttttatattcgggattttcgttatacaacatgtttcgtgaagattatagaacaagagatgaaaaatcagtcagcctctgtaagattcttaccatattttttcttggcattgattttgtagtgttttatatattatttgtatgttgtgtaaggatcctgttttgctctgcacataatgtttgctaacaaaattctttgaattctagagagtggatccttattctgaaaagaacaaaggtccttgccaagaacaaatgagagacgattttgcagcaacagcatatgagaagtcaggtaaagtaaagtttcctctattctcatgtgtatatgctcaattctcatgtattcttcctaaagtttcctctattctcatttgatgagcctaggtggcttggcttgttttggtcctcaaactatctagagacacacaacttcacgaattacgaatacatgcaatcacctaaattcaaaacacaccgagagacgacaaaattcaaacataaacacgtgaaactgaa

SEQ ID NO: 45881 - DNA, 773 bp, Arabidopsis thaliana columbia
tatatatttagaagctaaaaaacagaaataaagccagaaaaaaaagaagcaacaaacttactctgctctcaataagattaacttcatcgctcgcagccatttctgataaatcctttttttttgtttttgttattttactaatcaaaaacaaaaacccagatcgaattcagtaaaaaggacgagaatttgcaagtcgagaagtgaaagctcgaaactttgatttgggaaatttcttttctgggaaaaggaaaatctcctgcttttaaaaaactagagatcaaaatggggtttaatggttgagtgattaaaaacaaaaaaaaactgggataaacaacaaaaggcttaaaaagaaacaaaaagatatatattccgccaagaggtggaggataaggaatatctgcgtattttagcgtcggtaagagtctggggtaacgtgcgcgcataagtttggacgcgttgagggatgagtagggaggtgtgtgtgtgtgtgtgtgatcactgttgggtcatgggtgggcctcaaaacaaaaattatttaaaaaaaacaaattgttactttaatttttgtaaaaaccttttagtttatataaaaatgatattatttcaaagtgtcactaacaaaaaaagagagaatattttctattaagaaaatctaggaaaaagaaaagaattttgttaaaagatttagtatattcttgatcaatactatgcttattcgagttgaaaaatatagtaacaattattagatttcaacattttgtataaaaataata

SEQ ID NO: 45882 - DNA, 572 bp, Arabidopsis thaliana columbia
tgatgaatttcgccgacaaatatctcaggtggacactgaagttataaggcatttacgggagggagttaagggaggatttgatgaagaaaaattccggtcctgtattggttttgggtctttaagagatttcttagagtctgagctgcagaagagatacaaggaagctgcaccagcaacactagctttgcttgaagaacgctgctctgaggtaaccgatgatatgctgagaatggatatgaaaatccaagctacttctgatgttgctcatctcagaaaagcggcaatgctatacactgcttctattagcaatcatgtggtgagttgtttgtaacagacagttattgttgcaccatttttaagactaacaatgatacatactttgaaatgtttacattaacctgctgtatgttttgctcttgtttcaaaagggagctttgattgatggagctgcaaatccagcacctgaacaatgggggaaaacaactgaagaagaacgtggcgaaagtggcattggaagctggccaggtgtaagtgtggatacaagcccccaatgccgtcttaactctatggag

SEQ ID NO: 45883 - DNA, 546 bp, Arabidopsis thaliana columbia
aaaaaggtcctatgacaactacttagcttcgagaagcaggcactatatatttatcgcataacggtatttatttcattcaataatctttttgttgcataaatttacaaaaatttgagtgtgtgatgtgtacatatttctgacgaatactttttgttgcattatccaaatttttacatgttcccgagccgagagtctaagacgacgatttccaaattattgtcgttgctgttattataattgttaataatagtaagaattattattattatttaggacacgcaagattccacatgatactgcttaagcactacgtcgagctaaaatgaaatactcgatttaaatgaactaccccattagttacttgaagatgaaacgaaacaatttggttttggtcttttggatcatatagttaaacgttatgtatcttactcagtttattttaatgaagtttgttgtttggtatatcaattagccttagatgtcaaatcaaaacgaaacaaaaacatgaaaattcaatttggcgttaaatcaaaataataattaata

SEQ ID NO: 45884 - DNA, 806 bp, Arabidopsis thaliana columbia
aaaacctgtgttggctaatcctgcagcaggtattagaagagaactcgtttgcagtcttcgagctttgagtatgactactacaccagtgagacagagaaccactccaagtctccttaaatctaagaaagttgagcctccaagtccacgtgcgttgcaaattcgttcaagagttaagcaacaagcagcaaatgcaacaaaaattcaacaaggtgttatcttttgtttctcttttctttctgaaagccaaagatcctaaacttgttttgatcggatcgctaaaaaaactattgatttttcttggtttctctaggggcgatagtggaagttggggataaagctaaagatcatggttccaacgagatacgtcgatcagtctctgaggaagaattatcggaattacttcaatatctaccagctcagaatcctactttggaagtgagtttcttaacacttcataatcttttttgagctaaacatgtgttttgttagaagcgtcaatcagatcacgctatatgctaaattgttgccatcactctttcccagttttacaacttagggaatgttgtgtgactacctttttcatgtagctcttagccttatttgcatttttttcaaggaaatctagtggctcttacttgccagaatgtaaaacagtccctaatctctttcacagtttaggcatatgctacattgttgaaactggagatgtgcaaatatagaaacgtgctgggatttcgagagcatgaccataataagattcactgatgccaatattgcacttttctccttttttgattcctttgatc

SEQ ID NO: 45885 - DNA, 510 bp, Arabidopsis thaliana columbia
ttagtggtaaaaatgagatttgtatataatgagagtgttactgaaaacaccttaacgcattcaggcaactcgttatctgttgttctaacatggacctggagagaaagagaggttttgggattgtgaagattcttgtatattctcgatactaaaaggtattaaagtgttattgaagggactgatgatacctttatgactcgttggtatgcagagattttgttgtgttcgatgcaggcgagaaccacgagtgcagctgctacagttgagggccaaaaacagagttgagtttggtcggatagtgaggtaacagccaaggatttggctttcctttcaacttctggattggctcgagcagcttttaagtagaacctgacatgtataaatgatagtcatatgtatctttctgtgtggataatgtgtcttggaacatgaaaatatatagtcagagaggttttccacaagaagttgaagattgtgggtgtgaagcatttgaagttgaggacctcttga

SEQ ID NO: 45886 - DNA, 536 bp, Arabidopsis thaliana columbia
cccccataaacaatttgcctaatcttttcaagtggtgtatagtcttcttgatatgtaagtatatgtttaattataattcgttatcaagaatatttgtctggatatatcaagtgttgtggccttgcgggacaaggacaacaaatgctcgacaatattgtacatatataagtatttatctttttaaccaaaccaatgaaaaatggtattttaggcagtaaagctatgtgaaatgagttatggaggagatttaagtacctttcggcttgcgtgcctaaatattccaatgtatctgaactcagatgcattttacaaaggacgttctaattcaatgtaatagagagtacatgtaaagcccacggaaaagaaaacattcgatgcatggatatagtttaggattaatcatagaagcttcctctattaacaaccacgtgtgaagccccctatcacatatcacaaatgaccaatctttggggatattcgggtctgtatatataagtttgcatttataagatcaattctcgcaaccccataaacaa

SEQ ID NO: 45887 - DNA, 284 bp, Arabidopsis thaliana columbia
gtacaaaataaaaaagagagtaattgtttgaaaatttacagaattgttttggtcggaataagaataaccatttgtaagtatttttaaaagaaagtgatagagtacctttactttgtgtttctccaaactgtgtaggaaaacaaacagtcctaatgatcaatggcagatttctgaaaataacagaaaagaaaaaaactgagcaatggttaagaaaaagagatagatagaatgatagaaaaataagaaagtacttgtcgttgaagatgaagaattgaatgagagtt

SEQ ID NO: 45888 - DNA, 471 bp, Arabidopsis thaliana columbia
gttatttctaaaaagtatttctcaattaatatataggggatttagaatgttgttcaaagttcttaccagctatataataagctcgactttggtttttctgttcgaaatctcaaagcaccaatttatagtctaactaattagctcttaaaatcattcgatcaattatttaaactttatgtgatttgtgttattatattttgaactcgataaagcaagctacttatgaagatagctagtgaagaggtaaataaatttcaagattctggggtagagttagaggtttttctattcaatgacatcctttttctacaagttttgttaaatagcggtatgtataaaatgactcatggggaattgaaggtataaaccggccataattggaaaattagagtattgaatgacatatttcccgttttggttacggtaaaacgatgtcgtattgggaactaacggagactagttaacggctgt

SEQ ID NO: 45889 - DNA, 572 bp, Arabidopsis thaliana columbia
tagaaacaaattaagagcaaaaatgatagcagcggcaggtcttaggaggcaggcaaagactagccacgggcttcttcaacttctcacatgcagatttacattccgtaaaaatacattttccagatttgttaggaataacagtatggcattgttctcgtttcacttgttgcacatttcccattactcctgtttgtgtcatatttagaacatgtcttagtaaatgttaccatcacataattatgtatcgaaaagcaattgttacatagattttacataacatatatagactatagctgaattgatatttttaacaaaattgtatagttgacagaatgaccttttgaagaagtatcacaatactgtcaatatatatatatcacaatattcgttattatttacagttgaaatatatatttttaatatattaaggcgaatttcaaatgtaaatacaaacctaactcaagaaggatgaaaaacgttagaatgatgagtgaaagttgaaattggttcttcatcataggtgttatgaatgaattgatggtgttttgaaagtgataacaacttacatagtg

SEQ ID NO: 45890 - DNA, 539 bp, Arabidopsis thaliana columbia
cctcaatatataacgataaagcggcctctgtaaatgggtgttccaggaagtgagcggcctgaggctcaaattcgcgacatgggatgacgatcctgaagtcggtgtcttccaccgtggactctcgccatactcaatgtagttttcactcccaacaccacttgtaacccaactcaaattcagatacttgacaagcaacttcactacttcttccaacccacaagtaggtggaatctcctccacagcagaacggaaaggaggagccacaccaaaagatttagccgtaacaacaggaaatggtgagaagtcattctcaacaagccaataatgcacgaaaacattcaccaagaactcagctcttgtcatcactgacccatcatacccatttccgtaatgcaaaagagaactacgataaggctggtgagcgtttaagtcgaaaacaggaacaaatgctttcaaataagagtaaagaagccttatgtagagattacactccaatttctgatcagaatcacgcttgttactccctggaaaacctttga

SEQ ID NO: 45891 - DNA, 184 bp, Arabidopsis thaliana columbia
  unsure (1)..(184): unsure at all n locations
aaaaagagtcaagaaagttgaaaatttcagttacgttgctagaacatgtgattttcttaaatgatgcattaaactatattgaattttcctttataccttttaacttttacttataatataacacccggcctcccccccccccccccccccccctctggggggggagnacacccctgtgtgtcgt

SEQ ID NO: 45892 - DNA, 416 bp, Arabidopsis thaliana columbia
gtcgaaaggtaaaaaagacggtggctctgttagctttgccctgcttgctgatgaagataacagggaggaagcagaggataatgatatcacgttttcaggtaggaaaaaatcatctaaaaagaagagcagcagtgtcttggcctcaataggtgatgaagaaagtagtcaatctaaaacttctgattctaagagtgtggagcttgtagaatcggcaaggagtaagacacataagacgaagaacaagagtggaaggacacttcaggcagatgatgatttgcacaagcttctggcagaacttggagacactcctgctgctggcaagcctgcttccgaagaagagaaagatcaagctcagcctgagacagttcgtactgtagagaatacgggtgagaaggagaagaggagactgttgagac

SEQ ID NO: 45893 - DNA, 438 bp, Arabidopsis thaliana columbia
agctcgcaaatccctaagttccttctctgtaaccaataacttagcaccatgaaacaaacctacagtttcaggtgatacctttgcattcgatatacctctcaattcatcaacctcaagcaatccttgtctcttaatcgaaaccgaccgatcaaaactccttctccgacgagaatccgagtaatagttcttcgtatgaaccgtcccacctggactcttctccttctcctctacttcttcttcttcaacaccacatttagctttagcatcttccgtcacagtagacaatgtcgtaagcttgtgatatgatttttcaatcaagcaaccatcccatgaagacctaggtttctcaaacgagatcctacctccatcaaaagacaatctaggatccacatcagaagagtgacgaccattcacaattccggcgaatctggaatctga

SEQ ID NO: 45894 - DNA, 493 bp, Arabidopsis thaliana columbia
ctcatgcttaatgggctaatgccgtattttccctttcattaggtccagtggcccattgaccggtttgattgaccgtccatatgtttagacaaagcaacttcttcgcacaagtaaaaccataaatactcagtgtagttgccgggtacccccagtctgaatcgtcgcaccagcacccctagatctgtgtcggcagagcgtagttcaacagatgtccataagggtatagggacatcttagtctggttggacttggacacctcacactctcatcacactcacgtgttgtagttatcacaatgattttgacatatggtcagtaactaatatagctcaattgatctcgatagggttcagattaaaatgagtagttgcgggaaaacacgatgaagataaatatagacatgatactaaaatgcctgaatgcacatcatggaaagaaactccatgatacttttctacttgtttttttttggatgattataatattaatacaa

SEQ ID NO: 45895 - DNA, 415 bp, Arabidopsis thaliana columbia
tgagctcatgcttaatgggctaatgccgtattttccctttcattaggtccagtggcccattgaccggtttgattgtccgtccatatgtttacagagaaactatatacttttatgaatttatctaatatataagatctacttgtaaaatacacctataatgattagttgccagagaactcctggatctgtacaagcagattcacattcttcgtatagacacaatggttataggacttctttaacatggagaaacaataacctgctggaagtacacttagattctcctaggtcttgccattttcatatttacacgcatttagtttctttctaggtgtaatcatacagatagtgtttagttaaaatcgtgaagtcagcccttaccatattatatatatatatagatatatatgtatat

SEQ ID NO: 45896 - DNA, 728 bp, Arabidopsis thaliana columbia
gatgagaatggagtaagaaagttcaatccattgtggaaagaagaagattagtattgttttaacattgaacagagtcaatttagagtgtctaggtggttttgaggtagactttatcagatgttacagtctcccaaaggaaattctcgtttgttcttcttatctaccgagataactctgtttcttgtttgtgtgtcataattctgttttgatgtcccttacacatatttgcaaaactgcaattgatgatatatgagtcctttcaggagttttttaaagactatgaacgtatcagttcttctaggattgctttcagtgcccccttttattggtatacttgcatctctttgcgtgtttgttacacataatgtattttccataatttcttgctgagcatagaaccaatagcaaataagaaatttgtagataaaatactacagcatctaacacatctcttacctatactgatcatagtgaccgactaactttctgatatgacgtgtttaatggatgaagtgatcacattacttttcaaatgaatattctgagacaaatttgatatctcatgccaacttctttatattggttaaaggaaaaataattgaagttttgactctttggcaggtgcccaatcgcaggatcagcggtggagcaagtagagcaagtggtgggatatgtgagtttgggatacgatttggcctaatggctcgattctctttgggcgaaccaca

SEQ ID NO: 45897 - DNA, 510 bp, Arabidopsis thaliana columbia
ttagtgatagtgtcttatgaccatagatactcggtttagcttaggttccaattggttttctttttttggtcatattttttttcttttcctattgatgttaagtaatgtgaatgttcgagtttgtatcttgtacgatcttatcgctattgaatatcttgtgaagtagagttttcactcattcgtaggtcactgagattaactcacaaaaaaattggtgtagcagagatgttgatatgttttggaaagaatctaagtgcctagatccttgctaaataggattttatctcaaagcatatattctatgttttatggatgaattaaacttgcatatatacttgacacgaggtgattggctcatatcatggctattaaggttttgaagtagtgtgggaggacacactgagtttcaaagatgattaacagtgtcaagattagacttcaagcaaatgcacatgcttagtttggatatagaatatgggcttacgtatctatagatgggcttaagttggg

SEQ ID NO: 45898 - DNA, 1630 bp, Arabidopsis thaliana columbia
atacttattttgaatatagtaatagaacttgcgtatcggcgaaaaccaaggaggaaagcgctaccatgttcggtgacgaaccattattctagactctgcctttaaatttcttatacacaagaaaagaaaatcttttttttgtcttagctcatccgatccctttcggttacttgattcaattgtaggattttcgttctataaaaaaatatattaccgttttggtaatatgtagcctattgtatatatatatatatatctatacgcatgatttgtgttactatctaaattcaaatctggtagaaaaagtatatatacatatatatatatagttattgtgttaatactattttcatataagtatatttcttagtttttgttaaaatttatgaaaagtttttttcgtgatcaaaagtggcttagagtacatcccattttaacaatgaaaacatcaattaatcatttaaattaagagtgtccattgaatacgtttccaatagtaaaaatacctgatcattcacaaattatcagtggcggacaaataatctaaatatttagtttgaactttgatgtaagaggtctttatcaaagaaaaaactttaatgtacgtctgttataaaacaatgggaattcaaattggaaaaatattatccctaaaagttttgatgaatatatataagttacttttagaatatggatatggtaggatgtgatcatcgcatgatgtactgggagctgcaaaacgccatccaaaccagcactcatgggcatggccgcccacgtgccacgccgttcttcaactctgacgactctgaaacttctcaaaatcatggaactacacaaagttggtgtgataagggcattttagtcaacacaacgagttctcatcttggcccacacacattacctcagaagttttggaaaacataagaagggtagttacgtaagtttagaggtcattatggagggaaatggcatattcgcatataccgaaggattatacttaacgtgcagtggatattctatcaacttgtccgggcccatattggggcccatttggtgccacgttttttgtacggaaccgcccgacgtggtaataattgtggatgttgttctttaacaggatcgatcctttgatgacgaggcgaccaattgtcttgaattgattctagccttgggttcgaaccgacgtggtgttatttgattattatatttggtttcagtgtcatacactctacacgagcctccatttcaaatttaataacaaatctttgttaggtcatattgtctagctaatataacaatgcgactagcagaatgtatgtactacataatcagattttatatattcttgataatctcttacagattttttataacaactgattatatgtaatatatgagtttagtgtcaaagaaaattatgataatatttttagaatcttgaaaaattaataacaagttatttacgtatggctgtggctgcttcattagtcattacgttagtcttttgaaattttcatgaccacaagaaaatatttcttccggttttgagatttttcgtaacaaacaaaattgaataatcgatgtacatcactaacttctacgtggcttgtgaccaagacaaatgact

SEQ ID NO: 45899 - DNA, 549 bp, Arabidopsis thaliana columbia
tttattaatttataaaggtttaactgtaattcgataatataattttaaacttaatagttactctaccaaaatatgtatgtgaattggtaatgtctccagactttgatttaccaataagactttaccagtaatacctctcgaaatattttgtgtttgttcatatttgagtctttttccaaaacagttatattaaatatttagatactataagatattttatacagagaaaaaaaaaacaaagctacatttacaacaattaacctacagttgcatctctaaccaatctaaacatagtaaaagtaaaactacaaaaatatatgtttcagtgatgtgatgtgatacatctctagacatatattcataaaacgtctatatatacaatcacatatttattttgtatttttttctttctcaatttggtatattaagatcatttattctattttgtatttgttttcacgattctgacgttacacaataatagcaaccagtgccgatgagatatggtccatatggaagattgaatctggtgtctgatgtttgggaaag

SEQ ID NO: 45900 - DNA, 433 bp, Arabidopsis thaliana columbia
cggtacgagctcgaattagtaaaggcccattggggatgaggatatttgggccaatccttcttaccgtttttcgtttgttaacaattaccgaattaaaagcttgatcgccacgtctttttcttaatagaatatattgattttatttatcttttatttttagaccaagctcaggctatcatctctcgcgttaattagggttttcttctctatctcgatttcaataccattgttgatccgctgagctagggttgttcgatcccgataattgtgtcgcttagctctgatctctgttcatcgaatttggttaatttgttttgattggttacagatacattggaaagcgatgccaccgaagtctgtgaagaggggaggcgcgcgagaagaggtgggaggcttacgagatcggcgctcgaggcgcagaatcctcacgtgg

SEQ ID NO: 45901 - DNA, 290 bp, Arabidopsis thaliana columbia
gggtaccgagcaggttatacagatgcgcccgaattgttttgacaaagatgattacaacaaattcgatatggctatgaagttatttgaatcaatgaaccttccgaatgacactgattttcatagggcttagattcatgcatttaagtcagaaattcttaggcgtaggtacttcattggtagagctgacagaaccgccgcagataatctgagatctttgcacgctcatagtagagatacacgagatactgaatatgtgggaaaacggttagtctcttgacagagttttgggg

SEQ ID NO: 45902 - DNA, 152 bp, Arabidopsis thaliana columbia
tgtcgctttttgttcattctcttttgtaatttcctaaacgagaggtcactaatccataaatcgttagcaattaactagaagatcttccatggttaacaccacctatcaattatttatctccttcaatgacactttatgaacctctttccatt

SEQ ID NO: 45903 - DNA, 480 bp, Arabidopsis thaliana columbia
cgactctagaactagctggaacaagaaccccattcctgcttatgtttacattcccatagttgtccacaagcggcatgtctttgcagcatttacccgcttcttcttttgataaaaaatcctttgagattgagtgatgcagaaagtgtgcatatgcaacaacaagcctcttatctccattaagattctcacggagatgttttgcatagtcagagacactaagagtaatgactttaacgttctctttgagccaagtatgaattatctccttcttggagcacactttcaacgctgtccgggttgttggtggcatgaagacgaagttagacatacatctgaactcatcgttccaatcaagtagccatgcctggttcttctctgtggacaagcataaagtcctaggactgaaaccacccaaactgctgagagaactcactcccttttggacaacatacttgataaggggaacttccccatatttag

SEQ ID NO: 45904 - DNA, 536 bp, Arabidopsis thaliana columbia
gagataaaagaaaagaaactctcttgtattttgcaagattttattttcggtttaacggaaatcgcctgctccccaaaaaaaaaagagtttttttaactgaaataagtctttctaccaatcttgttagcagaaaaatgtgacaatagtagtagttcgatacgctcgtgacttgattcttgtctttttatggtttatggtgtagcaaaattaaataattgttagtttttctattttattatataaaacaatatagaatgatttaattattttatttcttagaatgttttataagtttcaactttcaatacatgactatttgtattttataattggttgaatcaaatatcaaataataaatttgtttactaaaacattattatatattttctatattatgaaacataggtaggtttgttagtcaaaataaatggtctataaaatgcaagatatcttagctaggtgtctataaaccactcactgcgtcttgctgcttggcgtagacggcttttcgttcccaataaaaatgacgattttta

SEQ ID NO: 45905 - DNA, 510 bp, Arabidopsis thaliana columbia
aggtttggtgttcagactgtggatggatcatcttctgatctgatgatgcatctgttttcactgccacaggatacacatgtgtctcacttacctcgaccaaatctgcctctgatagagaggagaaatcaaattcagttccacaagcctgcttgaatctctctgcccaacctttttggaaaactaagttgagtggatggggaaacagatcctcctttgtcacaataaagtcacagccttggcctttgatcagatcatattgtaacacatatcctgccactggcaagattagccttcccagttttctttgcggaccagtagtaaatgctttatctagacggttttggttgttaataaaaatgaagaactttttgagactttaaccaatcaaatagcataaacgagggatgatttgatacgaggagtgtgtgacatttgtcacttcatccctcgtgtctactatccgattggctatactctctaaaagtgctgctgctggtactgcaaaagttg

SEQ ID NO: 45906 - DNA, 629 bp, Arabidopsis thaliana columbia
atgtaaccagctatgtaggaataccctatcttgtttataagagctttgatacatgcaaaatatacgaaaacaatgtccgaacatataattttcgccccgtaatatagcaaagattaagaaaaggcccgaaaaagtacattaaggtcaaaatttggagtagaaaacaaaactatagaagaattccattttccttcctaattcatcggagagctctctttgggatttccgaaaaggtatcacatgccaagtttagcctcacggactaaaattgcagcaggctagagaggtggatggctggccggccatgggagagttcagagaaagaacaaaacaccaccaacaacgacaactcctcggttaagaactcgactaaccgtaattcccaaggaggagaaacagcaaaatcttcaaaccgcaacaaactcaatagctcgactaaacccaataccccatcagcatcatccacagccaccagaaacccgagaaagaagcggcccatcccatcgtccataaaatccaaaagcagtgatgatgaggccaagagctcggagaggaaccgtagcccagcattgctaggccatcggttagtgatgacgagaccctgagtagctcaactgctaggcgtagta

SEQ ID NO: 45907 - DNA, 521 bp, Arabidopsis thaliana columbia
tgttagttacttcttccatgcatttcagtttttatcgatgaaactttcggctgtgaatcctgtgctcgattttaacctcgaaagcctccttgcaaaagatgtaacatatgttgaaacccttctctttcttatcatttgacgagtaacttcattgatatgatgttgatgtcttctatatattcatgcaggctcttcaatcatctgcaccgacatttccccacaacatgtcgatgctttatcctcctgtatcgtatctctctcaaacaggattcatgcaaccgaacatttcctcaatgtcgctattgagtggaggattaaaacggcaggtacatatatttggttgcgcattgtactccaacaataaacatatctttgcagaatcatatcatttctcttgcattcatctaatattgttagtgagttttgaacaggaaacacatggatatgaaagtgatcacacaatcttgtccacatgaaccatgaaaccggcactgcacctgatcatgaagatacaacaggtg

SEQ ID NO: 45908 - DNA, 612 bp, Arabidopsis thaliana columbia
  unsure (1)..(612): unsure at all n locations
ctctctcaaataagagatcaattgcagtattttaggatcgaattcacggagttcttttgttcaaacaatgagttaaatgttgagattaagctagcagggtaatagtgaaaataaaagagaacaaagtaaaaagacagtagattgatttggttgtgaacgatttaataaagagctaggaacaaagtattctcagaaaactattggttagtagatctagtgaaagctaggttttaaacgaactattcttaaactcaaactctaattatggaataactggtgggcgtgcgcgaaactccctatatctgtagctaataataaccggagaagccgagaaactatcaacctaaatatgcattcttaacgagttcaattgttcatcttagtatataggccgattattattacacacctataaaccagactcatcaaataatagatccaactacatctagttaattactctagatctagcattaggcattattaaagatganaaattctacagataacctagcaaagggggcaatctactaaaccatatgaatcctaatgagaaccctattcctacaagcttattactcagcatattggatgaagcaacaaaatatttga

SEQ ID NO: 45909 - DNA, 587 bp, Arabidopsis thaliana columbia
ttttggtttagtttttgtaattagttttgtgatgtgaaatggagtaaatctgacaatgcaagaaagagaaccaaaacatttaagtttgtatcgtttcatgtttcaatatctattgattgtcaactctctcatgacacaaaagaagaggaaacttctgtttgactcttcctttcctacgacgtcttcatctcttttgatcgtgttctcttctcaagctgagttccattttaccaatttgaggattgaacaatgactagattccaacatccggatcccttaacattaaaggcatgactctgaatctcttgatgcgttaggttatttggttagtttgaagttggagaagaaaaaaacgtttaaaagcatgagaattgtattacagggcccaatcgaactagcaccacaggaaaatagttttttttttgtttttatggtatgaaccaaacgagaacagttgtacaccaacttgatgacgattattgatgggatacacaaccacccaatttatgtagatcataatataaataaagcttccgtctcacttggagatccatcaactaattacaaaccctttgatcatcatttgt

SEQ ID NO: 45910 - DNA, 562 bp, Arabidopsis thaliana columbia
gaagtaactatttagttgcggtccttctctgttttgaatcaacctctgcccatcctctgttttttctcgactctgttttaggatgaggcttgggactaataatatacacttgtagatatttatcccacataattctctagaggacttgaagacgctatatacaagattctagatactggattctagatactggatcgatttaattagtaattggtcaaataatgatacctgacccataataaaaaaaaaacttgtcaaaaatcaacttcatatttcagtacacttggagctcgtatgcatattaactcggcttcattgaattaattctcatttcatactccattgttttcagttttgtttttcattatgtttacattcatcaaacaaggacaggtcatccaataagagagacttggtcacaaaaattccaaaacgagatattacaagtgtgaagaagctaacaagtaacaagtcctcttcacatttgtcttctagtccatttttgtaaatatcccttatttccacgaaaacatgccaagaagaaaaatgtccctaatgtatg

SEQ ID NO: 45911 - DNA, 569 bp, Arabidopsis thaliana columbia
tacgaactactcaccatggccggcgaaaacattcctcgatcttggaacgcccacaatctgaagaagtatcattcctgaagaagaagttaccctacaaacctctgtttatccacctttgaataagacttatgtacaacaacataccatgtgaactacgatcggcttgatcccctctgaaggaggggtacgtaggcaacccactctcgggtgcagctgtcctttgtaaataaaaaaaaatggactccttacctcaaggagacaccgttcaaaacgggcgaacattttaaagccgggcccagaattcattttcgaatgatttcccgcaaaactttgctcgaatgatggaaaaagtttagccaatctcaggttgcataaacatcaattcaaagcaaaaaggggtaagccgggcaccagatggcaagataagccacccgcaccaaaagagagtccagtatgtccgtcgctccagtgcaacgcgttttagcgtcacccgcaataataagggtcggtagaagacgttctgcgacccattaagcgaaaaagactcaaagctgaaacacaaaaggttt

SEQ ID NO: 45912 - DNA, 405 bp, Arabidopsis thaliana columbia
atctcttgctctcatattatttttggcccttgcagcaaccaaggttgaagccacaagatacataagttatcgtggtatgaatcatggagatcatgctatacattgtgacaaagcccaccctaacacctgcaagaagcaagtagcaaatccttacaggagaggatgcggaacaatcgaacgttgccgtcgtgatacaggtagaaaatgaatcaaccaacccacccaagagcataaaatattgcatcaacacctttggttaagaatgtgttaacatgtttctcattggaataccttcgttatctgtatacacacttcacatcctcatattcatttgttaatgagattgttttggctttgtaattgattgtaattatattatgttatgatcaatcatatttgaatata

SEQ ID NO: 45913 - DNA, 537 bp, Arabidopsis thaliana columbia
gctcctattaaagattttcaatcacctgcatgcatttatcacattcaagattactgataataggtttttaatcaattatcctaaaacaccactcacgtcgttgtagtattttaggttatcaatccaaatgggtgtgatgctaataatcaagatgtgatcagaagtcactaagtcaagccaaacaataacaggttttggtgtgttctagcagtcctaagtgaacatgcagaaaatagaaattcaagcaataaaatactcgaccaacatagctctttgcagagcactgggtgaggtcgagtgacaggtcgagttacagacaggaattacaacacagatactcgactgcacaatctgttgccagacaactgggtggtcgagtatgaggtcgagtaacaagaaagaattgcagaaattaaacaacagatgacaagatgcagtaatcagataaagaattcccgagaatggggtaattgagtagcttcgtttcctcagtttacaggtaattgacatgctcaataaattaccctagacaacaag

SEQ ID NO: 45914 - DNA, 520 bp, Arabidopsis thaliana columbia
  unsure (1)..(520): unsure at all n locations
tagtcgatcccatccccgagttgacgcgtgaaatgtggtgaaaaaggttaagtaaggtttcaagcgatcgatcttttcttggggagaggtgttcttttttccttctcatttcagtaattaattttgtacatgtacattcacatgcttattcgcttacgcgttcacaacataagagtaaaaataaattatgtgtgatatacgtaatcaaaacatattaattttagacagcctctcgtactaataatgtagtaatgcatttgtaatatgttaccaggtgtgatagaactatctttggaatatggttgattttacatgtggtgatcatttgaattcattattataggttagcacttaccaatgctaactttcatgttatttttttattgataccatgttaatcagagtgttctatatatatcggtttttttaaaaaaacttcaaattataatgacaacatataacaaaaataganaataaagatgaggattctaactctttcgaccaaaggaaccatgcaaat

SEQ ID NO: 45915 - DNA, 593 bp, Arabidopsis thaliana columbia
cttctattggctttttttctattccaaattttgacctaaatgtacttttcaggccttttcgtgatctttgctatattacggggtggaaattatatgttcggacattgttttccaatattttgcatgtatcaaagctcttataaaaagatagggtattcctacatagttggtgggacccacggcaaatgcgatcataccagcactaatgcaccagatcccatcagaactccgcagttaagcgtgtttgggcgagactagtaataggatgggtgacctccaggaaagtcctcgtgttgcatccctctttttttttgtttttctcttttttttttgttaaaaatgaatgactctataacctttagaccgtgaggcaaacttggcatgtgatactttttcggaaagcccaaagagatctctccgatgaatgaggaaggaaaattgaatacttctattggtgttttttctactacaaattttgacctaaatgtacttttttgggctttttcgtgatctttgctttattacgggggaaaaattatatgttcggacattgttttcaatattttgcatgtacaaagctcttataaagaaga

SEQ ID NO: 45916 - DNA, 445 bp, Arabidopsis thaliana columbia
taattctcaagaaatatatgtgcgacaacgtttagtttcacaaggatgtggccattatcatacattactaggcccatttctatatccgttaacatctataccaatgtggcaatgttctaaaacttgctctagagactaggcggccataaactgtgacaattatctatcatgcatgagctctccaactaataaaaccgtaaatcactatcacaactatgattgcgacgggccagttgttattaaccggccaattacctggcccatttatatgtccaacaaagaggtctagaaccaaaatgattgtgtgttggtggatgcacccaaaaacctcagccgtaattattcaccactgaatctcatggctcagacgtcgccacgtaaatatccaataaaaccaccacacgtgtcgcaatctgagcaactctcaaaaccgaccttgcaaatc

SEQ ID NO: 45917 - DNA, 454 bp, Arabidopsis thaliana columbia
tatgaaataacgactaggctgagaatgtggttgattgatatatgtaataggtctccggcaactcaaattccatcgaggcaaacactgaatcagtatttcctaacatatcattcattgacacccgttattccaggtatttcccccttagaatttatgcttgaaaacaagtgtatatgtataggtttttgatgtcttgaactagttttttttttcttgtgatattcagaaacaattcctaaagggacagaagttgagcttcctgcttttggagttctgactaccaagctctctggcgaagtttggaacatgccagggacctcagatcaagagatcataaacaggcatgaggaggctgctgcctcctggctgggaaaactcatgttcagccacaatgatttcgacttgtttatggctgagaaacctaaggacctgccattttcaagtggccactatg

SEQ ID NO: 45918 - DNA, 1017 bp, Arabidopsis thaliana columbia
gatcccttctctttattatcattcctgcgtggatcgacaaattagacacgatgcaaacataacaaaaagaatcgactctctatgtaaagttttctcgattcaacaatagatcaaagattctaccagacattgggacacggctttaagaaaaagaaaataatgaaaggccatatcatatggagtaccttgattcttcagcaaaaatttctcaggacgaagcagagaatgtcaagaaaacccctgatctcgcttgatcgtgttcctgtttcttcaatatgtggcagtagttaagctgtctcataacaaaacaaaaacgatggataattttggtgttaatcattgcactttcattcgataaaaatgcataagggagagtagtgatgagaaccaaacctccatacggaataggcttgttggtaagacgattccagcaccaactgaagttctgaatgtctccaagaactttggagcagtgaagtttctaaactcattctctgataacttcgccatattccctgcacaggcaaacacatgaccgtggattcctctctctcttaaccatctcactggcaaatcaaatgagagatccgcaaatgcagtcactgccgcatctcctccaacaaaatcccgttcactatcacctttcctctttggctcactgggaccaactcctctggtcttgaatccccacagcgcagatggcccactcaaggagcacacaggcgatgaattgccacccaagaagaatctctctggtatagatgaaggacggttctggtatccgcttccccacggaaaggagacacccccagacacaccaaaatttatagcagcattgtaaaatccaaacggaacagcataccgaagatcaacttcctgaccaaacaaatgaaaatagatgctaaaactatcagatgtcttagattcttgttattccctctcacagtgagcataaatttcagacatactagggaagatatgtatgaaaacaagggactgaaaccacagaatttgctg

SEQ ID NO: 45919 - DNA, 377 bp, Arabidopsis thaliana columbia
taatcccctcccctaaataagaaggatatacggaatctcaatgcatccatttaatgcattggaggcagaaagattttcgagtgactgggatacctctggcacccttgatgaaacatcttcatctgatgccgcagatgttattctgtcacaattctggtcttctgacaaatgcacgttcaaggccgcaaattcctcttgacagtcagcaggaatcaaaatctcaggcacagtgatagaagcgtgctcattggactggctctttgtaagctgttcacgagacaaagctgagacatccattgtctcgtcatttcttacatccaccatttcatgaacttgttgagtgctgccacccgacatggctccgagaatgtgtttct

SEQ ID NO: 45920 - DNA, 949 bp, Arabidopsis thaliana columbia
tcatcgtcatcattaagattccaacactctccctcctggaagcagatatcgggtttgtaggtgttccttcgtaatgatcagtgtgaaagttgtcaacctcttccttaatgttttcaaggagcaatgcagtatttgttggactatgaatgttatgcccgtcatacagtaatctgttctcgctgacatttgaactcaacatttcctcatgtggcgatgtagagtgtctctttctgcaagcaatgttatttgacatagccgggcatcaaaacactatacccagattccatgaactaaaaccataacccctaataagattcagttcttagagaaaatccaacaattcaaatcgcattcaagtctcgctagaatcagctaatttagaccgtactaacaaacaaacgacaacccaggaaaaattcactttaaagtaagaagacccagaaaatcggaaaagggtagtcgaaaattttaccgatagcgacggaattgatccctaacactgagggcctcggggtcgaagtagctaggggaagtgtccatatccatatccatttcttcaccaacgaaagctaaccccaagtggtatgcagaaatatcaaatcttagaatagcagaagagcgcggcaatgctcaagttgagctcgattagggttttgtagtcgtcaaaaatctaaaacccttttaaaatcctccgctccagtagaagactccgctgagacaaagacagcgacgacgacacagaacagtcgccaccagagtttaagcaaaagcgccttaaacgctgcgtttcatcgttgaagcttagtgctaaaggggtttactgtaattacatagacatacaggggcagtcttgtacaagtttcatattcaacagaccagcggatacgagttgtaagcttcccaaagcgtttgttttacctctcagagagctttctttagtgatggcggc

SEQ ID NO: 45921 - DNA, 417 bp, Arabidopsis thaliana columbia
agtattggtaatccaatctgttactacatataattaaatttatgaaattttcatttccaaaattttggatatccttaatgcaacacatataataaccggtaaaaaatatgtaaaattaataaactgtctaataaacatttcgaatttttgatgcaatacttgaaaatgatcaaagatatgcaaaaatcatttaattattttcaaataatacaaaaaatcaagatgtaaaggctaataaagtaaaaaaactgaagtacggaatttgtttccaaaagaaatattgatttaaaaaggtagatgatttaaaccttggtattaaccataaagtttccgtaaaatataatttatgtatatagtttgtttgttgtccttatacttttctaatctacattaagatacatcaaaggtaaataatta

SEQ ID NO: 45922 - DNA, 475 bp, Arabidopsis thaliana
ggtaggttccataaaagatgtcacgtggctcccatgcgagatggaaaatcatgtggatcttcttctgtgcaactgcaactagttaagtagatcatcatggtaccagtaccaccaccacttcactatctacaactgtatctctctattaattcattcctctccctattataaagagagagagagagagagagagagagagagagagagagagagagagagagagagagagagagagagagtgtgtctcagagtgtgtgtggaagtgagagagagaggcacatgcgagcttatattgagagagatggagacactcatgtgcgcacatgtgctttccttctctcttttccttttatacagagcttttgtggctcccatctgctgtgctcacatgcatctgtcgcaggtgattcctctcctcccttcttctagcgtgcgagagagagagtgtatgtgggattcgctctttaatgtgtga

SEQ ID NO: 45923 - DNA, 1490 bp, Arabidopsis thaliana
caatatggccaaaccaagtcttctccatttctagtccttgtctctacaacgaagctattgcgctatttgttttgtttgtgcagtacgcttccttcttcttattgcctttcttcttaggcgtcatatgactctcttgcatcctcaaaaactatgctgattaatttatgccacaccaccatttctcattgaaagctaaatcgaaattcaaataaagtcccaaaaacatgcaaaagtttaattgaccaaaaagctgaaaagcttgatggcgtttcaaactaatgcactagttaattcaatttccataattacgtagtagtttttttggagattatatatttattattcacgaaaaatgtggataagacaaataaaagacaaagcatgctgcattgcttgttctactttttctttttctttttcagacattttagcccaactatatactactcttgattaatttgaataggattacatagtattccataacacgagacaaaataacaatatttggcaaatagaaatgttgtctagttgttttcctcgtagataaagatagtagtctcgactttaataattggtttgcatagaaaagagaagatagtgttttgtatagtactaggcaaaagtcaaaaagattcttttgaaagagaggacccaaatttacttgacgtaattattgcatttcatatacgttcttcttctctccctacttgatttttattcaaaaacactagcattaagtcactctttcgtcctcagatagtgcgcattgcagaacacaaaatctctacaagaaaaccccaaaaatggacggactttgctacgtcatcttcatcatcttctccctgctatcctgcgctttctctcccttatcatacgcctctccggccactttcagtcgccgtcaccttcttcaagctcctgtaactgatccttccacattctcaccgccgttcttcccactttacagctccacctctcctcctcctcctccttctccgccgcagcctcttccgcctcccgcccccacttttgcgacatttccggcgaacatctccgctctcgtcctccctcgctcccctaaaccgcaaactccttcccgtacactccttattcctgctatctccgccgtgctcgcagccgcaacattaatcgccttggcctttttcttctacggacggtggcgagggcaaaccagtcatttcaaagatgaatccaagagcttagcttcagacattagccaatcccaacaacaaactcttccatgtccccctccaagaaacaacaacactcaaaacaaactctctgtagctccttctacctccgatgttctctacctcggcaacgtcgtcacttcctccgggtcgggttttgttaaaccggagtcaccagatatctctcctctcccgccattacctgcccgtagcttcctcctgcaacatcactctgaagctaatcttgatgaagaagaagaagacgacgacttttac

SEQ ID NO: 45924 - DNA, 578 bp, Arabidopsis thaliana columbia
cttatacaacttgtgaacataactgatatggattgtcaaacactcaaacctatgactaataaagcaagcactattccttacgaaaatatttatttataagaaacatgcttattaaattgaatatgaagtggctacgtagaggaactatctataataaaatatgtgtatacatgtcttcttcatttcttaaaaagccttaatagttttctgatggccaatcttaatatcaaacagcttaagtttcagcagatttatacagagataacaaaaaaaaggaagctgctctcttctttctttgtttttcataaatctcagattcgtcgtagcgaacgcaacctcttctcaagctcatccacttcacttgattcagagctgcaagttaaactaaggttagaattctttctttcttcactgtgatttggatttgatttgaccaaagttgtatatatgacatgagcttacttcttgttagtagctgcagtggaagcgggaggagctgcggttttcgtagcaatccgaccttttggagctgaagataactgtttaaaacaaaatgaaagagaagaccatgtttagtg

SEQ ID NO: 45925 - DNA, 449 bp, Arabidopsis thaliana columbia
gaaactcatattgataaaactttgtttttgttataagcaatacatatttctagtggaagcttagatgataggtgaataaataacaaattaagaaacgctacaagggaacctatgtgcttgtgctgacaacatctttgcttttttttttttgcaatggatagagcaaaactgcaagttcagctggtccctcttctactcaggtaagcttatttcttagtttctcatgtttgtgcacatcacttggtcagttcagtattcctcgttgaagaactttctttctatctcacagcctacttctaccacgacatctaccatatcttcaaccacggtaattttcttacattgtttgggaattgtgcagtccacattttgtttccttggttcatttaacacaagtttctatcaatcaaccagcttgcagctccgtcgacaacccagtctattgctgt

SEQ ID NO: 45926 - DNA, 547 bp, Arabidopsis thaliana columbia
ccaactcgaccccaattgttttgtgaagagaaattgagcggaagtgagaggctgccgagtttaaaccgtccgtttgattcaagttaaagtcctgtagccgaaaactcagcccgaatcgttggaagcttttcgttggttactgagtgagttctggataatggtttaagtttcataatcatattctcatgcattcttgattgatttcgtgagttatacgtggtgcttgtggtaggaggcaaagaccataagcgtgccaagatcttgatatgtctggccttcgtagtgaaccgtgctatcgtggggtcttgtaacattgttacttgatcgccatgaggtgcgaagaactcggagagacgaggctagctaccgttggtgagtgtgtacacgacggtgtagcgtttggtattaatgctctcgttgcatacatttgtggttgtaacgcgggagatcacgggagtgtgcgtgtttgttgttgggtttgaaagcagcatatcagaccaaacttactaaaactggagtcttaatgcattgcatatttatgtagttg

SEQ ID NO: 45927 - DNA, 554 bp, Arabidopsis thaliana columbia
tcatgttttcattctattcaacgtttatgttttctcctatgatgtctgagtagtgaataggtttatgaggatgggttatagtagtttagaattctcagtatgctaggtggttgagtttgatttatagatcccttctggattagttgttcttaatgcctattgctttctgatcaactggaatttgaacccagacatttccgcgcccaaatggtgttcgatgaaatgtctaaactagtaccaaggtattggttacaaggagcgttttggctttaacttgttgattcgtaatgcctgttaggctagctctcgtcaatggtgattgagtctgggactagtttaacttgaggatctctattgcggtggcacttagatttggttaccgaacttattgtctagggataatttattgagcatgttgtttactgcatcttgtcacctgttgcttagtttctacaattctttcctgttactcgacccgatactcgaccacccagttgtctggcaacaaactctacagtcgagtatctttgtttgattgactacttgttactcga

SEQ ID NO: 45928 - DNA, 589 bp, Arabidopsis thaliana columbia
tagtcaccataagattgaatatcgatcggatcttatcaatccaaagatgtaaaagaagatagattatttggagttttgatttagttaacaaattttagtgcgaaaattatcatttataccgttaagaaaaattaaattatgaaacatgatcaacccccgataacctctagtaatacagttgtatccgtcggaagaaaaaaaagaattataagtggaaactggtagatcgtttgattactacttatacagttatacgtactttcttatctattaaactaatcaataccgacgatctcaattgatattaacaacacccagaacctataattatggtacgtactaacctcgtataatcgtagtttaatggtagatttgaattctctgtttaaatattagatatcataaagtatcatcagtctagaaataataacatgttcctgtatcaccaacattataaacagtatcacatgctttcgtatcctcaccatcttcttgacctatcctccaaatagatcatatattagaactataccctagtacctaagtagcccttactctttttacttctctcccaagaaacaattcttga

SEQ ID NO: 45929 - DNA, 618 bp, Arabidopsis thaliana columbia
  unsure (1)..(618): unsure at all n locations
tgcggattagataggaataggtgggcgcttatatcgtgggttgtaatgtgtttaaaagaaagaaaagagtgaattcattgttgatgaggaaagggaaaaaacattctaggggaagtaagctaaagaagttagaaaatagcctagtaaaggttttgggaaatgttaaagaaaagaatagggttcttgttagctatagaagaagggtaaaagcccttagtttaaaagattaaaacaggaaccatagttgttaaagatattcaaatccgctagaagtatcaaagtattgagaaaggttcttctagagttaagagaaaaaaacgaatgatatgaaaaagggtttaagagattcatgaatgcaaagggtagagttaaactcttattttaggattggagaatggatttccattagagcttcattggttatactttgtgtagatcagatcttatctctgtatgcataacttgggacttacctttatcattctactaaagctcaatcattctttaatggaccatctttgtctcctgaccttcaccttagccanatgagttcattgatgatgcattgcttgatttacgttccagaactaatgaatgttaaagggattgatagatttg

SEQ ID NO: 45930 - DNA, 361 bp, Arabidopsis thaliana columbia
ggatgatcccctcatagttcttaaaataaataatagtcaaaggagttaaaccatgttttattattaaggcgtcaatcctacattttttgttgttcatgattttgcatttctgcgatattatcaaatcgaactaacatatcacctgcaagaaagatttgattataaaaagtaatagaaaaaaacatccaaatttgcatgcgcttaaccacccatgaaactccttctcattacagaacaacacaagaatacagaacagaatcagacgcacactaactagatctctcacatacacagatacatacacgcatacatacaaaacaaaacacaaactctcatcatctttctcgttcattatgcctac

SEQ ID NO: 45931 - DNA, 531 bp, Arabidopsis thaliana columbia
tgatggagatatattagataaggaaatgctaataattaggaatattaattaaattataataattaatgccaatgggattccttgtaaataaattccaacttgaggatttattgtaaaatggctgtaaaaatgtatatgtagatattgaatcaacgtgattcagatgagattgtacataaaaaaaaaatgtcatgtggtgtactggtaattaataatcattataaatcataacctataaatgtcttataaaataatataatttgaaaactattatatataatacataattcccaccccttaccaattagtatttaacaaaaaaaattgtccccgatatactgtgggttaaaattttgtttaagtaatgcgatattagctaaaaaacaatcttgaaaaatatataaaatatatttggccagcttttcagtactttttaattaaatatcaattatatggatgaaactcgattctcgtaggggttgatatattaaacaaaggtctcaaaatataattgaaatgggaatatgttta

SEQ ID NO: 45932 - DNA, 494 bp, Arabidopsis thaliana columbia
gagacactttcttcttcgccatttgaacggaagtggcggctgagattttagggttttggttagggtttgggtttttgttgctacggcttttaacggtgaagcgagagagaagactaaacgaagagacgaagttttcgtgggaaattttgaaaatttcaaactttagggtctaattttgaattatttttgagagctttttgattcagtgaaggttatgatttggtttacactttcttatataacagttagagaccacagtgttgttatttctaattaatgcatgaactataattttgatacgtttcattttgaaatattacataaagacaaatgactataattacaattgctcaaattgtaacatatatctataattagttaaaattttgacagctgtttaaaactaatcattattttttaactaaaattaggtatatgatattttgccccccaaaaaagatatgattattagaaaagactaaaattagatatgt

SEQ ID NO: 45933 - DNA, 556 bp, Arabidopsis thaliana columbia
tttaactttatttacttacctaaaaaccttaatttttgacacctctagtgggttattataatgtcgttttcgatcgaaagtgaaacagagagacagtggacgcaagaaaaaaaccgtgggtggatgaaagaaagtaaacatgagatttttgtttttctttgttaatggtttccttaaataaattacaaacataattataattaagaagagagtttcaaataaaataaaatgaaatgccacgtcttacagttgcatctgactctgttttatgttaattgtgacacaagtttaatacagttgtactttcttactttttggtggtttcgtggaagattacgacaactttacaaactctacgacttaagcttctctgttcctacaccttttgttcttctatttaaagccctctgatttgttacttcacattcacaagttttgaaagcaaacacataaagaaaattctagttcaatcttttgtcactcaagagtcttcccgaccgtatccagtcaaataccatggatcgaggtggttacgaggaggtcgtggtgatggcgt

SEQ ID NO: 45934 - DNA, 484 bp, Arabidopsis thaliana columbia
ctgacgttaaaaatagtcttatcttacgtttgaataatatcggcattagccattactaggtcgttactatgggatacttaattttgctaaatctttcagaacctgtacgagataagcgaaaaagccatgaaccacggtcacgcgtgtctcgcacttcccaactttcaccatgcatgctctcactaaagcctgtctttttttttctttcttttacatattttaaaatcataataccataatttgcactaattcttatggtaaatccgttttatgagatactcaacttagttgtccattccttaagacacagattaaggaaagtattcaattctttttgaagttatggtaataactcaaattcttctttcctgccttgaatacttggtacaatatcacaaacatatctctaaattaattacatgatctgcagaatcatttacataaacactttcacatttttatccatttaaaaaaaaaaatatta

SEQ ID NO: 45935 - DNA, 540 bp, Arabidopsis thaliana columbia
ctaatgttgaatgatggaaaaacaaatacagtgcaatattttcagttatatatatatacacgcaaatagcttatggaattcccatattaattccttagtagacggagacgtacaggtggctataattggcttagatgccttcacgtctaagctcttaaggtttatggcccatttcaaaagctcctttaagaaaatcccaaaaaaaacgaaacataaattaaaactaattaataacaacatataaactttaaagtacatttaaaacaatgaaattaagaaaaataaagtactagttctcattttataaaagaaggctaataagaagattaaattataatatctttagcctcattgatgggattagatatagatgatatattgatatacatattgttggaaaatggttttgtgaaggaaatggaattggtgtgtcgttttcgccaataattagtttatagttgaaaactccatgcatgtcgcttccacgtattctcctctaccccgacgtacacgtgttgtcgtatcgattcaattttgtgg

SEQ ID NO: 45936 - DNA, 466 bp, Arabidopsis thaliana columbia
cattgatttttggtaatttatgttcatagtctgctttcaaaatgtatttataaattcctttttaattatttttttcgcattcctttccccaagtttttaagaggaatttctattcatagttgtgtataatcaagggtgtggcttttttcaatttttttgtattgttacaatttacaaatgtaaaatctccaagaccttatatttgataaacaataatatagatatttgactttttaatttttatgactagttctcttgtttagtggtttagttatcatcctttctatacaagaaccatatctagataagtttgttcaatataggctaattgcccagaggccaacatatactctgggtctctttagtgtaattgtgatcaggcgctcatgtaagcccattaatttagacaaaattacctcacaattgatataaatttcagttcgaagaattgatagcggtagactaa

SEQ ID NO: 45937 - DNA, 408 bp, Arabidopsis thaliana columbia
ctggtgattttgttttaggtcatccgacctcgctcatcgtctttaccgtgtttagttttcctatggatcttcctttattttctccgtgatgtgcctctcaaggtgttcaggtttcatatcgtcgatcgtgcggtcttgattggtctatcggtgattaccatcgttctacttctaattgtcaaaagcgacgtttaatattgttgcggcgttgatggccggagctgtagtaggttctgatccatgcggtgattagtaatacggatgatctgttcttggatgacgaagcggcgacgactgagacttcaggactgacgtcaacccttcgtcttataacgattgatctccatttttatgtatattcgactgtacgggatcatcttatgtgtaatgatagtctatggtgtaacg

SEQ ID NO: 45938 - DNA, 450 bp, Arabidopsis thaliana columbia
aggatcccctaattcacaatattttttggtataaatcttcttggtatatgtagaaattttctattgaaagtagaagaaatatgcaaagtatatagaccagagacattaacatgatcactaatcaaaaaagaatgttgtggtgacaatcaacacagtagtattaatttttaagggactacaaaattctgtgtgtttatgaattagagaggccttgaagaggactttcgtatcataagaataatgatgtgaagaaacagtaaaattatacgataatacaagaactatatctgtcaaaagtttttgagcagcttgtcatttgagactccatcagctacaagcattgcagttatctcctgcaacaatacaaatcgatgcaatgatacagatacacatcttctatagcatttaggttctcatagacataaacagtgcatacctcagccatttgtt

SEQ ID NO: 45939 - DNA, 532 bp, Arabidopsis thaliana columbia
acttagtaacaattacactttactagaatcgaactaataaggaaaatctcaataaatatattttaaggtttgttcggtttattgtaacttttataaataattttaatttaaatgtttatataattctaataaacaattgaaaaagtattatctttttcttctcatacttacttataaaaatatgtttaattaaaaactatttataagtgtttttaatttaaatgtgctattagaaaatttccctatttagaaggacatgtatacatatttaaattatttattgatgtcataagtttttgtgaattaaaaatcaaagctcgagcctcctccattacccaaaatattggcaaatagcatgacacaataatgtatatcatgtgtttaggcaacgcaaagttcacaaaatgccgttgtaaatcgcaaggagaattttacatcggaagggcaacgacttccatcacctacttactaaatcgccaagaaggaccttgactgacagatcagagagacatcgagattgccgaaaaagatg

SEQ ID NO: 45940 - DNA, 470 bp, Arabidopsis thaliana columbia
cttgtttatgcgcttatgtgagaatcttgagacattccagaaccttccaatacgtcacaacttcctccccaagttgacaagatacaaggcacacctcatttcccttatttggacatattctacaattaatgtccaatattttctttaatgttttggttctttttttgaagtcttagaacgttgtactcagctctatataagctgatttctcattcattgtaaagcaccattgatcattttaaaagtaaaagaaacgttttttacttgtcaaagtttgagccattgtcatttattctgtagttctttgtgagtgagtcactaagtacttcaggaatttgcggattaagtttgttgagtgatacaacatccttcattcgttcattgatcgagtgagtcgattaatccactgattgaacgagtcaatcacccttctatccgtcatttctccttgaattgatccacaccgagag

SEQ ID NO: 45941 - DNA, 423 bp, Arabidopsis thaliana
agttagttagcaccttcattgtgtacagttgaatggtgttctcttttcctttctgttttaagagaagaatttggagttgaatatgtaaaatcagaaatgttttgtccaattagtatgttatggatgattgactaagctggagtatttctattttggttttggttaagttaataagatcagaaatttcgtgtgtttcttacagacacagatgatcaaagcacgtgaacagcaattgcagcaatctcaacacccacaagtttcacagcagcagcagcaactacagcaacagcagattccaatgcaacaactcttgttgcaacgtgcacagcaacagcagcagcagcgaacaacaacaacatcatcatcatcagcaacagctacagcaacagcagcagcatcagcaacagctagcagtagcagcaa

SEQ ID NO: 45942 - DNA, 405 bp, Arabidopsis thaliana columbia
aaacaaactcagccgtcatataacacaaactcatccacggatgtaaggttaaactataactcaatcacaacatattacaaactcagaccccaatgacttgataaatcctaaattagtcgtcaaaccaacagttactcaggcatcaaatccaatagatctaacaaatcggccacgatatgtcaatcaaagacgacgttaaaaaccatctttaagcatcgtttaaaaccatcgttaagcatcaggaaatgatttcattgacgggaatcacttgcgattgaacttagctgtcggattcttgtcggaaaattcgaaataaagtttggaaacatacttaccggaacttagagaagttcagttcaaatgcgactgcgacagggatgtgactttacgataccagaaatgcga

SEQ ID NO: 45943 - DNA, 442 bp, Arabidopsis thaliana columbia
ctctagccaactgttaaatatttaattttatgataatctttccagcaaccctactacatatattttttttttattatatatttattttgcaacaaaacaaattcatccattgattttttttaaaaaaaatcgcctagaaaaactagtacaaactagaaaaaaataattcaaagaaaaaaaaaaaatcaaatttttaaaagtttgaattttcttacttaaaataccaaaggatgaccattcatctagaacgccaattagcttaattaaatctttacaattatgtctcaaaaatcacactagctaaagaggacaaaatatgacattttattgcccaaaagagatattcgaactatgtgtgtagggtgacatttatctgtggtagctctttaacccgaggagggcaatattctagcgagaaaggacaagccatccatcgcctctt

SEQ ID NO: 45944 - DNA, 548 bp, Arabidopsis thaliana columbia
tattcacttgaacaaaaacaatgaatattggtttgataaaaccaaaaatcaattggacttggactgtatcgaattgaaattcaaaccctatttacatttgctttaagattttacattttaggactctttttagcctttttcttattaattgtttcaacaactattgtagccttcttctattctatattttttttagaacaaagacttcatttcattaagttaaacggatatatataaaaatttctatagagagccaaacgagtgaacttttatggaaaaaaggatacattctatgtaaatatacaatatttttttttcaacaactattttaactttcttttattctttttattttttgttttacaacaaaaaatctattttattaaatccacggaaagccaaacagaaacagtaaactttcatgaagaaaaaaagtataggttttcgtctctctaaataaacatgcaacctagaaatcgttacaacgaaacacaagcttaatactataagatacaaaaaaggattaaaagatatttaaagtggcaaaa

SEQ ID NO: 45945 - DNA, 147 bp, Arabidopsis thaliana columbia
aatatattcatctattgttctatgcatcacttatatggtatcgaacctttttttgtatgagaagatgagggtttgtgtcagtcgtattgtagcaaacaagaataagaaacataaactagatggaaaaagaacaaagaagaataatta

SEQ ID NO: 45946 - DNA, 441 bp, Arabidopsis thaliana columbia
gcgactattctgatgattatatcgagactcagctagccccaatttctgttcaattagcatatgtccaacaggtacttttttatactgcttatcttttcttttacatcttgttaagatatcttccagttcctaataacagtttttttctttgtcaaggtccttggacaaactcaagaatcaaagagctcttatgtagatatcattaaacgaaatctggctgatgaatcacttgctcttgctgtgaacaaccttgttgccttgaaaggttccaaagatatttctgatggcttgaggaagtttgatctgctgaaagacaaagactcacaaaattttcagctttctcaagaacttgatgctaagctttcacataaacataaggaagctatatatgccaatcgcgtccttctacttctccatgcacatacgatggatcaggtcctt

SEQ ID NO: 45947 - DNA, 529 bp, Arabidopsis thaliana columbia
ctattgtcagcatagcatcactagactgcaattttgtttcgttggaaaagccattgcatgatgctcgtatgttgatgatgcattgtgagcgactgttagtaattccaaaattagtatagaacatgaagacatctagttaaacattattgaaaaaggctctaacttccatgtgaaagggcttctaattcagttgagttatcaaataaacaaagggcacaagggtgtgttagcaaaagttaaaatcaagttggtgtgctgagaaagattaaaagcttttgctgccaagtaccttgattggctgttggagtttgttgtagccgttgcacgtttcagcattgcctgtccaattaaagactctgcttcttccagattctggattggaacctacttaacacaaatgattgagaaaaataacgaagagttacaatcacaaactgagtgttgtggtccccaagaaacaccacacacaaaaaaaaatgcaaacctctttcaacccctgatggttgattgctgacagacaattcagagc

SEQ ID NO: 45948 - DNA, 540 bp, Arabidopsis thaliana columbia
gcttaaccagtctcccgacagttgcatcccctttcagatattcacttctgctcacgaggaggacgaagatagctgtctgaaagcaggagtttacaatgtggatggggatgaaacagtacccgtcctaagtgccgggtacatgtgtgcaaaagcgtggcgtggcaagacaagattcaacccttccggaatcaagacttatataagagaatacaatcactctccgccggctaacctgttggaagggcgcgggacgcagagtggtgcccatgttgatatcatgggaaactttgctttgatcgaagatatcatgagggttgccgccggaggtaacgggtctgatataggacatgaccaggtccactctggcatatttgaatggtcggagcgtattgacctgaagctgtgaatatcatgatctctttaagctgtcctgtcagcttatgtgaaccaatactttgaaagagagatcacatcaattcatcatcatcgtcatcatcatgatggcaactcacaaagaagcctgagaatgatactttggtg

SEQ ID NO: 45949 - DNA, 488 bp, Arabidopsis thaliana columbia
tatggtgtttgttttaaaaatcgtgttatacattgtagaaataaatattccttctatgcaacatgggcaaacggccaaacacacacatgtgcgcagtgaaggatttgatgtactatttgtttcgtattacaaatatagagacagacacagattaataaataaaacgattaattccaaattacgattgctgtactatcttctaaagaaagttgtccataaaatttggtttgacaggatagatctaaaaggacgtaatttctattgtcggaataatgacttaataattacattattttcgttgaaaaaatcataaaggcattttggcaccaagtggtagctgtttatcatacttgcatttttaaaacgtgtctaaaacagtggaactatagcttatatcatattcattggttgtcaaataacaactttcgcatttgtccttttctgtatagacgattttctctgatacaagataatagggaatttagata

SEQ ID NO: 45950 - DNA, 465 bp, Arabidopsis thaliana columbia
cgccagtgtgctctaaattagtacagtagcgtctgtagtagcacatgactaggttttaatttgggttatgattgttaggcatgaggttgcatttttatacttagtataattcatgcatttattgttgatagtcggatctacgattttacgtatgatcggcttggttgtttgattagatcttgcatttatgcttcatttaatttgggatgaagtattttgtgtgcttaggctagacattagtttaggcattatgttgtttgattgtggtaggatttattatcgtatttatttgcggtaattgttgtttgtgtgtttgtgtgttcggaatttttattacgaattaaattcttagcaagcatgttaggttgtttgattgttgactgattgattgttgttggttaatcttgtttcagcttgattaacatttgtgtgttagatgcctgctatcaggtgttattacgagta

SEQ ID NO: 45951 - DNA, 618 bp, Arabidopsis thaliana columbia
taaaggaggtcggtcgtagagatgtgttaggcgagatcgatgtgaagtgcgtaaatgtgagcacgaggtatttgagctcgaccacaattgttcgttgaggtcggtacaagttgcgttgaggttgcacgatatgcgttaaggtcaatgcatgttggatcgtgcacaaggtgagtcgaggtcgacacaaagcgtgtaagctcggcaagaatctttcgtcgacgtaggaaggtgaactcgttcttgcttgagctatgagttcgaataggtgagtgagttcggtgggactgagttagcgaatgaggtcggtaatgagttcagggagaatcgttgtgagatttgctggcgattttggtaactgctttagagctaggcgaactaggattttcgcaatgtcttatgatatattgcgaaattgcatggcttcctagctctaatctgctgcgaatttgcaaagctgcctacctccgatatgttgcaagtttgcgagacagcctaggtttgttcttctacaggtttgcgggaatccttagctctaatctggtgggagtttccgagctgtcacctttgtctgctaggagtttgactactatgtactctgatatctataaatctgtgaga

SEQ ID NO: 45952 - DNA, 460 bp, Arabidopsis thaliana columbia
ttactctacagagcaacaagggatcgagtatgtgagaaattcaagaatttgaaaaacttttgttgcacttagaagccatgaggtcgagtaagttggtcgagtattagtgatgattttaaaaaccaaaattttgaaattatacttatactcgaccaacagaagctacagagacttggagggagtttaacaagtttacagaggattacagaaggttctagtcaacagggaacaatgcttcaggacaaacagaccaagtgcgtcccaccttctctcctttttgtcccccccccccacgcccttttagtgataaggaaatcccaaggcttcatcacagccactcgatccaacctcatctcttcacaccgacgccatctctccctcacaactctcactcgaccaaatctcactcgccatctctctcaccgactctctttcactcgattgcgatgtctctccaatc

SEQ ID NO: 45953 - DNA, 524 bp, Arabidopsis thaliana columbia
tttcgacggcttcgtaatgatattccgacggatttctgacgacatgtttcccgtcaaaacaccgtcgaaactttcctatggattcaaaatggtcgacaattcgtcagtgatttccaacgaaactccgaccaaatatttcgacggatttccgaccaaaatatatccgttttgacacctctaatattcgtcagaatatgttgtacctttccgacaaaattccaacaaaatacactcggttaagtagccgtccggtcaaatagccgtgcgtatagttatttataaaaaaatcatcaaatctccaacgaaaatcagtcgaaaactcgtctgacatccgtcaaaaactcgtcggaaaaattgataattctcatctttattttttctaccctcattgacaaaatcgtccaagcaacaaaatagaaccagagagaaatggtttcttcgaatccgtttaattatttttgatcatggatggaccagcccatgcgtgatccggtgacgagttgctaacgccagaatatacagaa

SEQ ID NO: 45954 - DNA, 501 bp, Arabidopsis thaliana columbia
cacccagtgatcagaggagacaattctgagaccatatgaaacccctccatctcacggatagcaagaacaagcgaatcgaaagacaaaaaaaaattttgtgaatgatataactgtcggcacaagaaatgggtttagaatgaggattgtggataaaattaaggaagggaggagacttaaatagaggaaatctggaacggctacagttattaatgcggttccaactacacttgattcaaatttttggtaatagcctggtaaccgtcatatagggtaattataacgttgatttgacaataacagcaacagttacgtcatttccattaaataccaacacaaccacaatatacccaccatgtctccaactccgttcatttaagagggggaataagttagattttcaaaaaacttatttcgagttactcgctatattgagcaaccacgtcgtatgtacccttattacatgaactttaacactgtcacagtcacttacgtacatagtta

SEQ ID NO: 45955 - DNA, 666 bp, Arabidopsis thaliana columbia
tttgctcagtgtagtagtagtttcagtggagtgttgatttatcagggaatgctagtgttcttatcagctagagattagtgaatcgaatctaaagtttcagacaaatgctgttgttgctactgatctacttatgcattcttaatcttctgtcggtgttcctaattctctagggtttgctcatgattctctgagatcttactagattcatgcattttcctcattctctggtttggttgattctttgattaagttcgttgtggcagaagagaaacgcttttactcatgcaaagagactagtctcagtttagatcttatgatttaacaaaaaacactcactctcctaagtgtgtttgaggaggcaatggatttcttgaaagttagaaaatttcgaaagtctcggaagccaaaccttgaaaaggagaaagaagacaagatattggctcagcaagaacaggcaaggagtgagaacactgaagctggtgtgatagattcggggaaaggagatgagatcgaagatgacgatgatgatttcattacaatgaggttaagagaaggctcaaggagttgaggagaacagtttcatggtgttgatcctgaggaagaagagagaagaagagatcgtatctgatgagatgatgatgcggagagcaagtgtcagtgagtgag

SEQ ID NO: 45956 - DNA, 425 bp, Arabidopsis thaliana columbia
aagccacactcatgggttttgagttaccaagaatcagtataccatgaagcaattggcagaggtagccagaattctatcaacatgggaataaaatgttagataaaaatttagctaaagtagtccattctatttgattgttaaaccctaatgtataatgtggtttggacataataaatatagaaacctaagactagaaggacgcaacagaactgttctcgcgttgtaaaggcatgggtcataatatgacaatttgtacaaatccaatttgaacaagtgtttattgtatattttctctacaacgtgttttccaaaagcacatcataaatgatctaataaaatcttctattaccagaaacaaatctcacctaataaatcttttcatacattaaaaatcttgaatcttaaggtatgagactaaaaaaaaa

SEQ ID NO: 45957 - DNA, 889 bp, Arabidopsis thaliana columbia
atttccaaattcatcacaattcacacaccaagtccataagaaatgactgcttcgagggatataaaccacaaatgagaatgcaaaagaaaaaaataccacacacgagaatagtaaaaagagatctatccggtcatgcatcgacgatcccgaccactgcaagtatataaaatgtcccttcaaggcttcttcatctcttccatttttattcccaaattaataaatatctttttttcttttattttcttttactttaaaaaaaaacttaaaaattaataaattaataaagatgggttacatatctctagccctagttgcattacttgtattttttgcctcgccggtggttctcgccgacgatataaccccaattccggcagacagagcccaaatcccacaatggttcatggccaacgttaaacccttttcccagagacggggcacgctagaccccgaacttgaagctgcagaagcatcgcgacgtgtcatcatcgtaagtaaatcacaattttatcatacctataagattgattaatgtattgaatccagttttcgtttttgagacaaagaaacctgataaaaattgcacaaattaaaatactttaaaccgttgtacttaaatttcagtatagttgtatttgctgggataaaaaaaaaaaagtaaaaccataatcaatttattctcttaggattgattcttgtatcgttttctttggtacggttttattgttttaactccgttcatattactttatccgaattggacaccaagcaatgcatactattaattccaatgcaggtgaatcaaaatggaggcggcgattttaagacaataaacgcggcaatcaagagcattccattagcaaacaagaactgtgtgatcataaagttg

SEQ ID NO: 45958 - DNA, 600 bp, Arabidopsis thaliana columbia
  unsure (1)..(600): unsure at all n locations
cagttagtagttaaaaagaaaattaaaaaagaacttgatctaagcaagtctgaaatcttaaatgtaacaaacaaacacccaattggcaacggcgccaaattgatagtaggcttttaagtcaattatcctaaaacaccaatcatgtcgttgtagtattttaggttatcaatccaaatgggtgtgatgctaacaatcaagatgtgatcagaagtcactaagtcaagccaagcataacaggttttggtgtgttctagcagtcctaaatgaacatgcagaaaacagaaaatcaaacagaaacagtgaaacactcgaccaacacagctctttgtagagcactgggtgaggtcgagtgacaggtcgagtaacagacagaaaatgaaatagggatactcgactgcacagtctgttgccagacaactgggtggtcgagtacaaggtcgagtaacagtaaagaattgcagaaactaagcaacagatgacaggatgcagtaaacagcagtagagtanactataaaatcaatcagacaaagaattcctaaggatggggtaattgagtagtttcgtttcctcagtttacaggtgattgacatgctgaataaa

SEQ ID NO: 45959 - DNA, 570 bp, Arabidopsis thaliana columbia
tgaaaatttcaaaaatttctaaaacaacacctgtaatgtttgcttgaatatatttaaaaatacacaaaataactaaaatatccaaaaaaatcctaatattttctatatataagtataaatataattaacatatacttatatttgagatatgtttaggtacttattcgagttcggattcgggtttttcgggttttgaagtttagacccgttagactattttaaaagttcgggtctaggttcgcatcaggtttttcgggtcgggttcggatcggttcttcgggttccgacattatgcgggggcctgaccaaagtgattcttaactaatgattaggagttcataaatataagtttttgcaaaattaataaataaaaggtctcggtaggtataaagttaaatataaaaccacatagcaattgttctattttcttttacaaacatatatgtatgactaacttgtctatcttttgtcgttagagtttgtataacaaagctaaaacgacaagatagctactagtacttacagctatactatagtctgattcatatttactatgtatgtgtgaattat

SEQ ID NO: 45960 - DNA, 621 bp, Arabidopsis thaliana
tcaccggagcttgagtcaggctatgaagccggagttttggctgatgatgactttggagatggggaagatggggaagggcttggagttccggtggaatttttcttggccatggttggagcagctgtaggcggtgaggttggggcggaggccgtgggtgattttggggatgctgcggcggcgggagaaggagaggtagagttcttttcgccgttggctttcggtgcgtttgccggtgttggaggatcggcggccaagacggcggtgatggccaaggcagccacggcgagagataggagtttaagtgtcattgtcattttgtggtgaatgtgaattgcttttgtggtgattaattatgtatttttgtggtttatgattagtgctaaaaaagattaaaaagaagaaaagagttatttttgagagattaaggaagaggtaaaatttaatttatagggaattctacagatttgaccaaagttttggttgaccgggtccatcggaacttgtcttaaaattttattggtttgatcttttgttagtaaaaagagaacatgtggtaatgataatcccaactttcaagaaacaattgagaacacgtgactattgagattgattttgtggtac

SEQ ID NO: 45961 - DNA, 696 bp, Arabidopsis thaliana columbia
  unsure (1)..(696): unsure at all n locations
gataggactcatttgatcattgttgagttgtactaaaatgtgcgtaggccatgtgccatttactctcttacgcgtgttctggctcacacacacaaaacaagagcacatccatttatgactcgatctagaaaattttagatatgcacgaatattaaatcattccgtgcgtccaaagtagtaaattcataccatatttaacttagtatatgtcctcctacgatgcttatctattcatacatgtatgtccaaaaaggcttttgcataacctttcattattcatgtttgaattgtggtgagtggtgaccatacaaaaattattataaatcatcgatttaaaaactctgttttgattttttctaaggatttatgataagaaggcatatatatatatatatatatatactgtttttggtaattcccccaattcctattcttatatctctatgccaaccatttctaaaatatgtaatgactttacaactacgattattaacaactttataataatatgtgaaggaatgtataagagctagtataaacagacaaacactaacgatagaagaatagaattagtaacacgttttacttaacaagagtagngcccnctntncagcggttcgcgctcggttgagttcccccaccgagaatcttccctttggaggctttaaacctcttcaggttacggttaagtgcgtg

SEQ ID NO: 45962 - DNA, 507 bp, Arabidopsis thaliana columbia
  unsure (1)..(507): unsure at all n locations
ataaatcactgagggtgaagaatccgtaagagctccaacatcaaattcttaggtttctagaatctaacactacgctctgttaaattgatttaagacaaacgttgtttatgaattatgtgtatgatgcattgttgagaatgttgttagaaaaaaatatttttaatactaaaagtaattgcttattgcatgagtgaatgattagataaataaaaattatatttaaattaaacaatatgaaaaaatccaaaaaatccgcggcgtaccgagntgatcacctagtatatagtaaaagcgtaaaggaaaatgacctaaaagactcaactaaaaacaaaaagagaataaaaatctaagtcaacaaagaataaggctagaaaatattgaatagaggaaaaatcataaaaagagacgattaagtaaacattaatagaaaacactaaaaaacaacaaaacctatttagccaattaagagtaatgatttcaaaagatagatttctaaaaagaaacttg

SEQ ID NO: 45963 - DNA, 565 bp, Arabidopsis thaliana columbia
caattgaatatctaaaatatccaaaaatcgaatggatatccgaatctgaaacactcgaaataataacaatgaatccaaaattataataatttacccaccaatattagttatgtttacactcgaaataataaacatactttaaagaaccaagtagtgtccgggatcctcgatagggctgtactacagctcaatataagctcggccagctcgaggggaagcttggccagctcaaggtttgctcggccagctcgaggggaagttcggccagctcaaggttagctcggccagcttgaggggaagctcagccagctcgagggagtgtcagttagctctgccagctcgaccaagctaggaaaggagtgaggcgattgggccgacggttggccaggcggttggacggttgtgcggttggacggttgggcggttgggcggttttgcggtcgaaatgtttccctcttcttcgccaaaagtcgcccaagaacggttatgggccaaaaggtgccttttcgggtgagaacggttacgccgaatccttataaatagaagggtcttggatgcgatttgg

SEQ ID NO: 45964 - DNA, 390 bp, Arabidopsis thaliana columbia
tcctgaaatcttcaaaattcaagagagcaaagactcattcatttgtaagagaagattgagacatattttaatgctacctaatctgaacttgcaaaattcaagagcttacatcatcaatgctacctaaactaaaccatacgcaacagactaattaacatgcatttatcacaattcaataacatataacattcaatgatgtaatgctattacaattcatgttaccaaatcagagaaacaaatcatatatatgaaagttggtcaacgctctccatatgattgccacatcatcacacaagaaaattacatatgtcattctacattatttaacaaaaagtttagcataactaattgagggaaaatgaaaagtcttctattgtgttaaatcttcca

SEQ ID NO: 45965 - DNA, 504 bp, Arabidopsis thaliana columbia
gactctaccctgtcatccgattaattgaattattttaggaacgtcatgcgcaacgtgtcgtttatctagtggatgcttagtggttatcctatgttatatttatacgaaacacgttgtttttggaatttatttcaccccttcccccaatgcaatattggaacccgtatataacactgtcgccgcatttaatgcaatagatacgtatcaaatattttcctacggatagatttacattgtcaaatcgcaaaataagatttggcgaccatattatgtagcaagttgcatactaatgattactgatataacgaaacattgcaagtaatgtatgatctctataagttgatactttgaccagtctattgcccaatacacaatttccaactcacgcccattgttttcagacagcgtctgcatataggaattatatgtgttgtttttaaataacattctatgttacagttacgaatgacctttttatctgttagtaccattgaataactagtc

SEQ ID NO: 45966 - DNA, 296 bp, Arabidopsis thaliana columbia
ccttgggcccagcatactgccaaccttaccaaaaaggtgcaccacaacatcagcacaaactcccgcatacgtgtatacatgttctccacacgtatgctaccacacacacgtacgtgcacacccacaccacacgtacgtgcacacccacaccacacgtacgtacacaactgtgaacacccgagctatagccacaaaggcttataaccggaacatcactttaatgcatcgtcatgcattacccagcatacgctccgagtcttgtgccatcatgtaagtgaccactcaggatcaaaact

SEQ ID NO: 45967 - DNA, 620 bp, Arabidopsis thaliana columbia
tactcttgcattagttgaatgattttgtgaattatatgagtattgattaatggtgtgatggtactaagttgcatatgtgatcttatagattcttatgcgtaaaggtttattgttgggagtttgtgctgagtaaggatattgatgattctatgtgtttgcataaccatatgtctcataatatcttgaattgttgggtcttgctacgtggtgctcattgtaggaggcagagaccataagcgtatcaagatcgtagtatgtctgatcttcgtagtgaaccgtgctattgtggggtcttgttaacgttgttacttgatcgccacatagtgcgaagggctcggagagttggggctagctaccctggccgagttgtctacacgacggtgtagcattgggtagggatgctctcgtgacatgcctttgtggttgtaaagcgagagaacccgggagtgtgtgtttggtgtgggttgaaggcagcatatcgggccctattttaaaaaacttaataaaactggagtcttaattgcatgtgcatgttcttggtagatgcttcggtaagctcctttcgttgctatctctgttgcgtgtgattattggatggggaagtatatttgttgtaggta

SEQ ID NO: 45968 - DNA, 766 bp, Arabidopsis thaliana columbia
ccattgttacctcagtagtcactcaaaactactaaccagctgaaaataaatctccgctgtgccaaaagagaaacaaagaaaaacccaatttgagaaattttaaaaatcaaaaagtttcatatacgaagagctaaaatcaaaatcgaagaaaatgtaaagaactccacacacagctacaacaaataactttacgaagaacccaacttttcttcgagtattatcgaaatcgatcctcgatccagaactcaggaattgtttttttttctctatggaaactgaataaaaatatcaacgacggtctcaaaatatcatacctgaagaaaacttccggcgaaacgatgaacagagaaggctgcgtccgtcgcgtttaaaggagcgcgacgctacgatagcacaacagagcagaaatgagagaaacgacgacggcgacaacgaagatgacgacgttcagacttgaaagagtaaaagattatttgggctgaagatgaagacccaataacactataagcccattaccaaatttgagtcaaactatttatttttatttccttttgcttggaatttttcattaatgttcaagtattgaaagagcaaagtacgactgaatcttacttcacaaagccaatttaggtttgttgtcttctcgaaatggattacaaaagttaccattttttaaagggaatgagactttagttgttatgtcattgaatttttgtttggtaatacctaactgataactcataatatttatagtgaaaatgtttga

SEQ ID NO: 45969 - DNA, 626 bp, Arabidopsis thaliana columbia
  unsure (1)..(626): unsure at all n locations
tgtacggttaagttagacgatttagttaggtacactattccggtttggttaaagatattttggagaaacattgatttgtgcggttgtacagttaaaaggggggcttactaacattgaaaaacaatttgccatcaatatttaatgcccaaaaagtttagacgtgactcttgtcacaattaatgcaaaatcattattactttggattaatatttgagataataattgttgaattaaagatgaacccagaaacaaaatttattttacgaaggaatgtgatgctgaagaagggttgatcttgtttatttacgaagtttggagccaagacaagcattatcgtgtaactaatgaaggttttaagaagttttttgttataacacactatgatcttcattgtattcgaaatcaactttgttttttatagaaaaacccagaaatcttttatttcctattttgttggttgaaaatgctaaatgagtagatatttatgtttataagtgtgtatatcgaaattctatttgtttttgtagatataatcatgtnttcagttgcatttaatgggttctcatgaanttatgatgcagttgggtaatggatattccgtattactatggtcggtgagtggagat

SEQ ID NO: 45970 - DNA, 491 bp, Arabidopsis thaliana columbia
tcgatctagatgaagaggatccccgatcagtgcttgtgcgctagaattcggtggagatggacaagttatatgttcttttaagcagtcatcaaagtagtgcaacggaaggatacacgtcgttagaaaacaagtgttgattttttaaaaaacggtaaactgaaagttttaatgaagggtcttatgctagtataccgtaaatgtagatgtggtgtttgctagagctacaagtaagtgattttatatggaaataaatcaccgtcaaaaatttgaggatgaatttcatttaagtgggggagaattgtaacaccccaaacccaataacttgaacccaccctatttgttttgttaaaaacaaaagtccatagagcccattgaagcccaagtgaagcaagtcacaaaataataagggttttgttacatgtgtatgtatatatgcttatgtcgtcatcttcccgcagccttctcacgtcatcatctccagcaactcatta

SEQ ID NO: 45971 - DNA, 456 bp, Arabidopsis thaliana columbia
ttaagttaaaatcaattctgagtggttgtctgataatttatatgttataaaagattattttcgtatagagagtgtgttccattccatattagtcttgtgtaaacaaacaaaactcatgatcatggcaagggtaaaagcctaaaccgcgttcgtgagggatggttcatgtggatgatttgtctaagggtctaaattcttttgggatctaattgtgggtggctgtgagatccatcacggtacgtttccgggttgcccttggcttgtccggtcatagagtgattcaggggcgtcacagagccccttgtcgaagaagaaagttttggacctaatgagcatcctgaaccggaaccatgaatattccacgaagtagaccaaaattctggttaaagatttgggggctgattgtagggacctatagagcattacattttaacagggggagttccaaaaatctag

SEQ ID NO: 45972 - DNA, 630 bp, Arabidopsis thaliana columbia
cttcgcctattttcatttttatttgacttataagttgtccgaaaccgagaaaacttccccgaatcgatagaaaattgcccgtggtcgagagaactttgtcaactactggggaatcattgcatgtggtcgagggaactcgtccgtgggtaaagaattgtcgaccatgatcgagaagtcttgcctgcgactaagaaaccttaccgaatccgtgagtttgtgacgaattgtgtgtttgtttgcatgttttctatagctagtttttagatcatatgcatgcttactcacttagacttaactaattggaattcggctaaattgaacttgaaccttaaaatgatatgggcattttgacgaacttgatagttaataacgttaagggataaaatgaattggtgcatggctaggctaagtgaataaggacgtaattaagtttacttgatgattaatgatttgattcgagggcttacttgccttgttagattgttatacttatatgaaatatactatgaagttgtgaatgagtccttgatatattatgcatatatataaatacgtgaattggtacttgattgtgctatacttgtttgggtatggtaactacttatactaggtattggatgaggttattgt

SEQ ID NO: 45973 - DNA, 520 bp, Arabidopsis thaliana columbia
cgttatatgtattaactaaaatgtaatatactagattttaacccgcggtacacccgataccaattgtttttttaaattagtatatataaaagttcgtaaattatatctatctataaaatatatttatgttacagtttacaactgttattaagtaatgtcctttcaaacccgtcccgccaaacccgtcccgtaaaaaaaaactacagtacatcgttgatttaaatatataattaaaataaatatttaacgggattacaattgtactttagtttgtcaaacaatttttgttttaaatagttgccgaaatctagtttaaattttggagaaataagatttagtgaattgataaaaacatgtatttaagtgcgttttgctcattttaagggattgcaattgtattttggtttgccaacattttttggtataaatagttaccgacatttagttcaaattttgaagaaatctgcgtgatatatgagattgtaatactattgaacaagttttgagaacgatgattttg

SEQ ID NO: 45974 - DNA, 913 bp, Arabidopsis thaliana columbia
tgcttccataaagcaggaaataagtattgcagtttccaaatcatgcaaaatccttaacggaaaggcaatgactagacatacattttgggggaaaataacgtccttttcaaatgactactaaatctatcgctcccttattctaaaatgcgggctgaacaaattattaaactttgaaatagttctgtttcagttttcagaaggaagaagcacctctctcttttttttttgtcatagtttctcagtgcctaattcatgtgatttgtgtgctttcgaccgacagcttctgtatgaaacatgtctctgcatctggcttctgtcctattatgaacctgcaatagagtacttggcaacatcgaggacaatgcaaaggctcacggaagtggttaagcactcgactaaggaaaaggtgagctatgttctcttttatgacttggtcatcgctgtcctgcaattagttaaagatcatatgacatagtttggttgatcaatcagaatctctgtcccacaataccaagatttttgtttcttttattcgttttgaataattaatttggataaatgcggcgtgatgcacttgttatgtttatttgacgatatcttatcttacaggttgtcagggtggtcatattgacattcaggaaccttcttccaaaaggtacatttggtgcccagatggttgatcttggactcccacatattatccacagtctaaaaacacaagcatggagtgacgaggtaagacaacttaaatgcttgttagttgttatgtggaacctgaatttcttaattttctgctacatctggtgatataagtgatgccggtaacattagatgtgtttttgtattacggtgatagtgaaacccttaaatttctgacttgtaagacttgctggatcactgaaccactagaaga

SEQ ID NO: 45975 - DNA, 763 bp, Arabidopsis thaliana columbia
ataacaaagagttctcaaacttcttttgattaatagaaaatatgttcttacaaggtttcaccttaaacactattttctattctctcaaaatcttgttcttcaatcacacacgattgagaacaagaactccctctaaaactctaaacactctttaagtctttagctctttgtttctctcaagctaaaacttaattggaattctctcttctgtttgtgctaaactttctgtcaagcttcagtgctctatttatactaaatagacccaagccatacaacaagccaacttccaattctcaaactaattggaacgcacaatttcctttttctttataaattagaaaattgtcctttttcttcttgtttccttttcctctattgtaaaaggaaactctttagtcttctagaatcatctccaagattctagtatccatcgccaaccgccatacaccgacttgctaatttccgtttgttttgatccacgttgctctgtttatttgaactacatgatgtactttatctttatttaataactcctttagaggttaattaattaacatgtaattagcgacaacacattaagtagcgtagtagtcgctaaacccattaagacgaaaatttggtgactaaaacacgtagtcggtaaaccttgcgtcgctaaatttattagtcgccaaacctgtcgcacttagcgagtgctgaacgactacgtaatgttgtcgctatatagtcacctaacagtcgcctatttagtgattgttgggag

SEQ ID NO: 45976 - DNA, 564 bp, Arabidopsis thaliana columbia
tggcgtgttctgtcttttaggtctgccgccagtgtccacatttgttatatataacccgaggaccagagaatccatcactttacccaaaataaagacgaagaatcagaagattatgctgactacaatattgtgagaaacatgatcataagacttcagatccaaggaatggaagaaggttaacggtaagcgatgttatatctttctaaaccatgtagagaacattaagcttaagcattttagtacttaacaacttattagggttggaggcagtgagatgagcattctcttttggatttattactgttcagcaaaacatagttgccttttttttatctttgaaatttaaactatattttcctgatctcatatctgatttttattggaatatcaacttattgttaataatattaattctagacttatgtcggttagatcatcaaaagttttgttcaacaaaggacgagagagttttccatggggtactttattctggtaggctggaacgtttaggtagtgaaatattcattcacacattttgttagcaaggatggagtatgaatggag

SEQ ID NO: 45977 - DNA, 233 bp, Arabidopsis thaliana columbia
agaggttttatcccctcttctttaaatgatcattatgatatgcatccatgtgcgaaaactacggagtatacggaccgacatagctttccttctgttaggatagtgagttgttgtttactggttgttcatatgtgataatatttagccactatggttttgaggttgtacatttgttatattcatgggtatgtgatgctacattggttgagttttcctgatgcagatttttgtga

SEQ ID NO: 45978 - DNA, 504 bp, Arabidopsis thaliana columbia
tgcaaattcagttcaggttgtaatagataggaaatggcatcagataagcgagtttcgaatcaaagcagtatagtcaagttacaaattcaaagcagggtgcagtcttacttcagagaaacaatcggttatgcaacagagaactaacaacctgcgcattgaacttacttcattgaatcaaaacatgcttaacggtttgaaatcatcattatcccatatgcaaatgagcaatcctaaatgcaaacacactatatacaatcctaaaatgaaatgcaatctacatgacactctatttttgtgaaatcattttctgaaattttttcaaattttatggttttttctattccttagatgatgcaaaatttgaaataagaaaagagaacacaatgttaaaaatgccttgaaccctccgccaaacttaaattatacagtcccttgtgtaataaaaatctgaaagagaattcaagaccaaaacacaaaacacaagaaaaaataaaaatgatatgg

SEQ ID NO: 45979 - DNA, 591 bp, Arabidopsis thaliana columbia
tgttatctgcaaatgcatcccaaacatgtaaaacctgaaaatgactataaaagactcaacaaataacaagtagactccaaaactaatacttaaatcatacttaaaacgggtacatacagaggtatatcaactcgctagacttagcttttgcttgccctcaaccaaaacacaaaagtagaacccgtggaagaggtttgaaaggaattcccaacattctctagcctattgccatgatcattctaaccaaatccatatgcctagcaagtttaatcaaatctgaaccaacatgtaattctccgcaagcttacacaacactctagattccatacctaagtttcacaactatatccaacatgctttcattgatgggtttcacaagcaagctaatattcaagaaccttctagactcattcttgtactataccatgataactcgaccattatcttctgttttttattgtttctctccacatgcttaattcttttcagagataggacaaagaagtattcagagataggacaaagaagtactcgcttcatcgaatagatattgtaatgcccttgaccaagactaggacttggccgaggaat

SEQ ID NO: 45980 - DNA, 634 bp, Arabidopsis thaliana columbia
tgaaacaagtaagcccggacattgtgctcatttagtccttttgctgctaataccttattagagtatcaaattattaaatggattatctttcgtacaattttttttcttcttcttcttcgaccatctcttcaacaacttggattatatttgttctttcttacaatttttgaattttacttttgttgggattacacgaaacttttttttagttaactaacgcaagacaatatgtaatcaattatatctactctgttgatcagttctcccataataatttcatctttaagaaactcaataaataattaatagctttagcattgtaatgggtccatcgaagattcataaatgcaagcacgacttacataaatataattgaagtatataatactgctaattgttattctctttttggttgttaaagctttaataaatttatgatttccgaacgtaggagctggtgttaaaatattggcgagtgcattggttcttaagaacatcatctataagaaaaaaaataagtaaatggatgacaagcaaaaggttatcatttccaactctttaatgttttaatgtcttatggtacgtcataaatgatgtgagtaaaaaccaggaacactaaatatagtaatataga

SEQ ID NO: 45981 - DNA, 606 bp, Arabidopsis thaliana columbia
catttttacattcactttttataattataattttatagtaaattttattttttgcttttaattttatagtaaaataattttactctatggtcaaaaaacttaaaacattaaggggatgataagctgtgaaattagaagcttaggtcacaaatgagatactaaaagaagatgaaggaccatttttgtgaagagaaaaacttattacacgtggcaccaacagaatatttattaccgtcacagtccgtgacggagagaatatctgtgatttgcaaagggaagaagactttcctattcaaaattcaaagccgactttttttttacctaaacagcaataatatctttttttctctgctccagggggaaattaaaaaagtggaaccttttcatctcctggagcgatcaatttctttttcatcatatcgctgactctcgtcttcgtcgtctttgatcgtatcgaggaattgggtttagttcgattcgatcatcagctatctcaatttttctggggattgttctaaaggtttgatgatcggattgcttttgttctatttgttctttttgattctcgtatatgattgattagagaatataggattagggtttgtg

SEQ ID NO: 45982 - DNA, 598 bp, Arabidopsis thaliana columbia
tacatcaagcggatttggatttctttaacaactaaggttcctgtttttaatatttaaaacaaaaggcttttaacccttcttctttagctaacaagaacctcattcttttctttaacattcccaaaacctttactagattttttttttctaacttctttagcttacttcccctagaattctttccctttccttatcaacaatgaattcacccttttcttttaaacacatcccaacccatgatataagcgcccaccaatcctatcctgtccgaaaaacgcgaactagaactacatgagacactatctctctcgttacgaacctaacactttctaccaagctcaatggaaataagacctcacaaacactcacaagtgatatagggcttgaaagagagtttaggtttgggttcgggttaactgctctaataaggagagtcaactacttggattaacaagagtggttaaaatgagtaagaaaatccaagtattttagggtatcatgtgttcaaattcaatgccaagacatgataattctaaatcagattcaagttcaaattgatagggaatggtattagacctaacagtgtggtcgagtagag

SEQ ID NO: 45983 - DNA, 552 bp, Arabidopsis thaliana columbia
gttcaaccagaacaacctggccaactgcagaaagggttcaaccaatataactaagtttatttgtatttgcattatattatttgtaagtgtgatgtactatgttttatgttttcgtatttgtattgaattctttgcaagtttattgaattatttgcaagtttaatgtatttttttaagttcaactgagacaactgatatatgtatctgtattttaggattaacaaaatgataaaataattctcaatattttcagctattatcaacatctaaacattgaataaatccaaaatatgatattacaacattgttattaataaacttgatcataaactggtttcctaataaatcacctatgtatgacaaggaacatatagttcatgattgtccaatgtacatacgttatgtatgaaaacagatatttactaaatatgattctatcaaaacttattaaaatccattaatatgttaaaacttatgggaccgactaaaaaaatgagttggttttcagatcaacttcaaaacacaaaatttagaatagtcaactgtttgtga

SEQ ID NO: 45984 - DNA, 528 bp, Arabidopsis thaliana columbia
ccctaatttgattgttgaacttttaaaatctgtttcttttagagtcatgtacagaatatttgtatcagttctacttcttgtatactacgcgaaattgtagcgtgtaacacaagaaaaatgaaacagagtaaggaaaaaagggtaccttcttgaacacgcttccgttggaacagttaataaatatcatactatagttaggggtgtcaaaatgggtcaaaattcatgggtcaactcaactcaactcaacccatgaaccctaatgaattgaaaattttgacttaaatgagttgatgggtcaaatgagttgagtcaattggtttgatgagtaaaatgagttgggttgtaatgattaatggtttcaatggtttaccaattaacccatcaaattttgtaaaattgaataaaaccatctaaaatctctaaaccaatgccaatttaagtttaaccacacatctaaaccaatttaataaaattaatattttccaaatttcttaaatatacaagagatgaaattgagaaaaagtaaac

SEQ ID NO: 45985 - DNA, 1869 bp, Arabidopsis thaliana columbia
taaattttgtaatgcttatctttcattagaaaatatttaggaaaaatacaaattttgtaataattataaattagatttagtatctctacatatcattccatatatacaaattttattttaaaatgcaaactcacacgcgtcaaacatgcgcactagccacgacatatcaataaaatgaaaataaaaaactgatgaaacttggtaacaactttttctaaattaaaaggagttttttattttattatttcatgttttgttttcactcacacggatccgacaataatcacttctcctaaattcacccatcaaaagacataggtgtcaaaatcaattcttttaaacatttctacatgcatcaccatatttcatgaaactaaagtgttacaattcatccctctagcagatcgtatcgtcctggttgcgcatcaagaccgtcacaatcgactttgttaaccctcttaactccacattcgtctgggtttggctctgataccgtttgtaactccccgacctccatctttcttagtgaccccacgtcctctctcggctcacgggctcactcttacccgatagccgatccattacgtttacgaggctttaaaggcttgtttaccgatcctacatatcaccacattatattttctcgtgttttatcctcgctcatatacagttgcgacaatcacttcttggaaggtcattccctgtaatttttctaacttaagcacgcttaattatgaagttcttttcagatgtttgactgaaaataagtgcaatttgatgatataggtggtcaaatcaaatttttaaaacttctctgcatgaccaccatattttgtgaaaccagggtgttacaaaaggtcaaataaattgatgtggatatcgaattagaagattctcatgtgatgcacaagatgtgttggatggacccacatccaactagaagattcctcacccgatacaccagaggtgttggatggatctgtgattcgaccatgcaatcgaaaaccctaaaacaagttcagtgcaaatctagagaccctatttaactccatggaattttagctggagcaccaactttccgtactgagctgtttttcagccgaagacccatgaaaaatatctacattaatcaactcgacaacgaaacgttagaggatatattcaaaaatactttaccggcaacatcagttagcaatctacgacaaatgacatggcgatccgagaccaatggactaaggcttcaaaaatcatcgaaaattcatgcattgtaaagggaatagtctaaccgaaatcatgcattatcaaactcgttttggagatgaacaacatgagcattatgacaaccttacatgtagccgataacatgtcttttattgagttaaagtgcgtttcaagattttctttaatcctttacaggttttagattgatatggggaaaaaacattttgggatgcaaacacgcatttggagatgtgagatcatgtataagggtttggagtttcgcgtcatgtggaagattttccaccgttatatcttcctcatattgtgatacaagctaggtgatgatctttgcttttatttccaagtgatttgaagaaaatctaacagtgaaataagacgttatggccaatctacttaagacatgtcaatcagatgaaactggtgtggaaactgatccagacaatcagagaccgataggtctatatatacttgggaccgatcagtccaccttcatttttgagtcgaccctagtaggtcaaaggaagatataataataaggtccctatgcagccaatgtattgacctttttcgtatctagatcaataaagtccaactttcttctcaagctgtttgcgaaaaatagatcaa

SEQ ID NO: 45986 - DNA, 580 bp, Arabidopsis thaliana columbia
taaataaagttgttcttctataaaatcagaatcatgacgatacattcttaaagatcccaccaatctgttacgaaagaaaacaaatgtgtagtataagcaattattttctaatagatcaaattgtcactttctgcaactagtaatatcaatccaagaagaagatgatcacatcaacatgactaagttggtagtacattttttttttttttttttcacagattaagttgttaagtacatacatattttgagttccggacaagaaaaaagttgtgcgtgtttagtaatgggctttttaaaatattttggatatatatagctgggctttgtgataaacccaaaaactcaaaaagctatgtcattgcaaacaaatatctaggtttacaatcggtggttgataacgtaatggcagaggcagacgacggcggaaacggagacggtgccaccgccggtgactgctacgctcatcatcactacagagatgtcaaactagcaagagatgcaagtgaaaatatagactcaatcagctcgcttcctgatgtgatcctccaacaaatcctctcctctcttccgaccaatttag

SEQ ID NO: 45987 - DNA, 651 bp, Arabidopsis thaliana columbia
gaaccaaatattgtgcttctcagttctcatcattcaacaaggtatcagaaacttttctcaaaacgtaattttctctaagccgccatactaaaacttaattgctctccctttgttttttaattctacgtctctcaccctctgtttttttcctctaaattcttttcttcttccatcaacagtaacatccaccgtaaaacaatgtatcggtcactgtgaaccgtgtgttgctcactagaacagtgtggaagtgcatcattccacgcaaaaagtgtatcgtccacctgttttctttctgttgtatttgtttatattattttgatgtttgtttttaccacaaccactttgacccctttatgattttaatttagaggaaagactttttgtacatgtgaattgttatgcaattattttattttagtcgtcaatctgtccacccaagagcccaccacaacaaacatctttttcaattgtatttcaactcttttgatttttctcacgtgaaattatatccacttgcaaatcttcatgtgactcaatatccctctctctatagtctatatacatatatatatatatatatgactataggggacttgttgaataaactccgagtttttgcatggttggcaaattcttataacccaccctttg

SEQ ID NO: 45988 - DNA, 533 bp, Arabidopsis thaliana columbia
gcagatctttggctaacatcttgctcaacaagactctctctcgcacaatcagtaagatctttgctaagagaaacatttggctccaataaacaagttttcaaacctctactatcagaaccactatctacacaaggaatttctgcaggatgataagatttcaaaatcagctcctcatcagggacaagtctctcggtgcttacattttccatacacccctcagatggcactgccatagctaaatcagattcatcactatgcgaacagccaccagtcctctccacagacagcacatttgatgatccctttactccaacctttgtcagagatgaagaagtgtcgtttacacaagtctgtttaccttcttcactgtccatattgtcagccgtttctgcagcaacattaagaggcgtagtttccatgtatccttttccgctaacattctcaaccggtgcattgactgtgtttttgcagtgaggaagatttttactttccatctggaaaactacactcttatcaggtgacgtgaccatagg

SEQ ID NO: 45989 - DNA, 265 bp, Arabidopsis thaliana columbia
ttgatatgactcacattgcatcttccaagaaggtagggaagaatattaaagaatgataaatatagaaacaaattgataatatttaatagttcatcaacttacctgtagcaaactgtttgtcatgttcaccggcatcttgtaactcatttgggtacatgcagtcaatgaaggagcgagtagatctaggacttataggccacatttttgttggccaagtacactcgatcagaaagagacagtacgcgtacttgatagggcaagtgga

SEQ ID NO: 45990 - DNA, 515 bp, Arabidopsis thaliana columbia
gtatcacccagaagggattaaaccaattgttgtctatatagcaaatgagctcggaagcgacgtttttctttttttttttttaaccttgatgtatgcgcttagagctgagcgtatccgtcgtcgcggaaattcaggttcaggaaaccaacacaaggcttgtcacgcttagccatgttgatctgccaaagaggattagggacgttggtaagttgggtttagggactgggtgggttgtcttcatgctaggcgatgagttcagcgtgagatctaaatgaggtgaacacaccgaggatagtggagagatcgacacagggagaagcaagctcgtcatagaagaagtttgttttgcggattactttgatcaccgtgagctatcctttgcgacaattctgttaagtgtggagctcggcttagaggatgctcgacgagttggcgagattcgttggagaggcgagcttgaggagccagaagcggactctggcgaagatgatgtgcggtctagcgaggttgagaga

SEQ ID NO: 45991 - DNA, 487 bp, Arabidopsis thaliana columbia
ctgcggtatttttggacctttggtatctttcatttcagtttcgatgattccaaatatgttctgatcaagagtataatacagggggaggttgttaagctgttattatgtataacaccactaagaaagttagtgatcgtattcgtatgtcatttttcttgtcccataatttcgttagtattcattaattctttaatggctggtaagatttgtttcttattggaataaagcttcggttctgatttattttacttacttacaaaataatagttatcctataaatcttcgagttaaacaggggattaactctatttcattttcttagtattgttttcctatttttcatttaactttttagctaaaaagtaaggagataatagtgaaggtccatttggtttcagtagttaaccaaaaattaattaatgcttgtacatctaggttttgagttcaagtcctagaaaacaacgcatttttttttcaaattaatgat

SEQ ID NO: 45992 - DNA, 466 bp, Arabidopsis thaliana columbia
aaagtcttcaaaaaagaatatatataattgcattgcatgtagtaacgaatgcgatcctaccagcactaatgcacttgatcctatcagaacaccgcagttaagcgtgcttgggcgagagtagtactaggatgggtgacctccaggaaagtcttcgtgttgcatccctcttttttttggtttttctctattttgttttgttaaaaatgtatgactctataacttttagaccgtgaggccaaacttggcatgtgatacctttttggaaagcccaaagagagctctccgatgattgaggaaggaacatggaattctcctattgtttttttttcctactctaaatttttaccttaatgtactttttgtggccttttcgtgatcattgctatattactgagcgaaacttatacgttccaacattgttttcgaatattttggatgtatcaaagctcttatagacaagataggg

SEQ ID NO: 45993 - DNA, 594 bp, Arabidopsis thaliana columbia
tctttttacggtcgtgttttttttgtcgtaccttttctttaacatatttacggtttattttttggacggttatatttgttcaaataaagtcgtatcttttcggttctgtctttttattgtacatttcctttaaaatatatacggttatttcttcacagtaatatctttttatcgcatcttttcgttaaaatgacgcatcatttagtaaaatttatataataattcaattatttgaatatattatcactataatttaatacataaatactaggcatggatgttcggttcgaatttttcggttatagcctcttagaccatctccattaggggtttttcattagagtttttataattaaaacaaacgaaaaataatgaaaataaaggagagagtgtatagaaaatttctcatttctcttttcattattggttcaatcttttaactaaaataaaaatttaattacataatcaaattataataaaaatataaaaaataaaagttgaagaaactctgtgtctcattgatggagatgctcttaggattataaaggaacgaaagaagtttcggtttggtttagttcaattttggttattttt

SEQ ID NO: 45994 - DNA, 553 bp, Arabidopsis thaliana columbia
cggtacaacaagcaatagtgtgagcgaaaacgagagcaagaatgttcatgaagagattgaagcggagaagaagtgtacggcacaatccgagcaagaagaagagccttcttcctctgtcaatcttgaggatttcactcctgaagaggttggaaagttgcagaaagagttgatgaagctcttgtcaagaactaagaaaaggaagtctgatgtgaatagagagctcatgaaaaatcttcctttagatagattcttgaactgtccatcgagtttagaggtggataggcgaatcagcaatgcgcttagccgtgttgtggattcgtcagaggagaataaggaggaagatatggagcgaacgattaacgttattctaggtagatgcaaagagatatcaatagagagtaagaataacaagaagaagagagacataagcaagaactctgtctcatatcttttcaagaagatttttgtctgcgcagatgggatttctacagccccaagccctagcttgagagacacgcttcaagaatcaagaatggagaaggtaactaggaac

SEQ ID NO: 45995 - DNA, 993 bp, Arabidopsis thaliana columbia
gccagtgtgctctacaggggaacatgagttgcccaaaacatgatataaaccgactctcggaacttgcattcgattctctgttgtcagcttgtgttatccgctcttcttggaattctcgagatagctttccaatcagataacagaggaaggagaagactgagccgtagcaagcattggagatgatcgttgagagagtcccagaatatataaccaggagaagaacttcatgatggctctgactcgataactccggaatgccttcttgcttcaattgttcttcaacaacactgagacactgagatctgatctgtttgtagggtaacaaaagagaaatctttagtgcgagaaatgggtcggtcctggctaagatcccggtcaggctttctgcttcagtttcttcaattatcacctcttcaggcttctgaagagaaccatctattagttgtagtacattttcgggcatggacaatgcaatgtactttctgaaaatatccagccagcaagaatgtaaaggatgagctgagactacgcattctttttttactttctccacgggttctgattcctgcagtgtttcccatccatcattccaatcatcatcaccccagtcgtttccttggtcggttgcctcattagatggcaatagttcggcgttcttagcttcaaacagctcttcccatccttccaaaatagccaaaagagcttcagcttgtgaagctgtagtaacagcagcagagagtttagagaagcaagaaacagatgtctcaacagtagataaatcctccggggagatctctaggcctggagagatggctgctacagcgacctgagatgatttaagtgcaaccagagtgtttgtgagcctgctagagccatcagcctggtcaggcaacgcttggttaagcgcggcttcagtcttctgcatagatgatagtactcagccgaacgtccatggcatacgtttgattgtagtcagacgatgagccttgatat

SEQ ID NO: 45996 - DNA, 1115 bp, Arabidopsis thaliana columbia
cgggcaaaatttcctacctcaggagctgcaaacatgggaatctcaagagtattcccgggtatgcttcttgacctggtttcatctagatgaagatttctctcaacgggcgcagtagagttcgatgttccacccactagtgagctcccagtccaccgaaatggtggtagcatagtccttgaaccaggtggtatgctcacaggagtagaatttgggttacgagaaacgacaaaagactgtccaggtctcaagtccaatgaatgctgatctgctggtaagtgtcttgacaagttcaactgggatggagggacaggccgcctgacaacagttcccgcagcaaaggtagatgggtttacagtttcttgatgatctgagggattactcctgacgcatatatttctactggagctctctgcaatggcagaaacaggaaaatttggtgcagaaacaggaaaatttggtacagtaccggagaccattcctcttggtccattgtcaagggagccagatatgtttaaaccatttcctggcctaaaaaccgtagaacctggggtccacgaactgctttctccacgctggaaatcatgataacctcctgaagaagattgactaatactgccttcaagagcttttcttttgcaggatgcacgacgtccctctacagaagaacctgttccaacaccgttctcttcaaaagatctgccaggttgtgagaccctggtccctggtccattagcttctatgaagccagaccgacctctatatggattaatatcctcgtgaatttctatatactctgcattcagattgacattctgaacaggttgatttgtgcctgatggctgcgcaaacactgggtctaaatcaattatttcatttcctcgtccgtcaaagcatcttgtttccattcgttgctcattgtgactggaagcttcatccttcgtgccactagagctagcctcaccaaggctaaatctgcgtaaaccctgttgctcgtgataaactgagtttgcaagcgaagtatttgattcagaatttgcaatcatgtaatcctgcaagtcattatcaccaagactgtgaatattctcccaatgatctatcacaccattacttgaagg

SEQ ID NO: 45997 - DNA, 497 bp, Arabidopsis thaliana columbia
gaaagtatttgatgttgtttgcaaagatcagatgatgtggatgggtgtgggagattctagtggctcgccaaaaccgataagaatcgttgtggttggtgaaaagggcagtggaaaatcaagcttgattatggctgcagcaagaaatactttccatccaaacatcccttctctgttaccttacaccaatttaccttctgaattcttccctgaccgtattcccgctactgttatcgacacttcttcaaggtaaatgtttctcctgattctatacactatacattgacatcaaaaaggttatgcatagaattttctgataaggttttgtggataaggcaaagataattgaatttattgttattaatagtttaatattttgtcgataaccggggttaatcctaggccgaaaccggtctaatccccgaggttttatagaaaagccggatattttttccatttaaggtgtatacattattagccaagagggaagtacgacaatt

SEQ ID NO: 45998 - DNA, 289 bp, Arabidopsis thaliana columbia
ttgattcaaatggaaagatttaccatgtgggtctataccaaaaccgtgtcctttttcatatgtatgaatctctaatagttgcttcttttgactagaataatttgtaaagtaactcctaattcatagatattgaagattagtctgatttattattaatatggaaatctctgattaatgatgtatggattataataggcctactgatgtgtactgatcgtctcgtaataaacgttttagactacagatactatgatgaatgatgtgaatcgatctggatagatgtactgga

SEQ ID NO: 45999 - DNA, 803 bp, Arabidopsis thaliana columbia
gatcttctatgcgagcatgtcttcctccagttctgcttcaagggagaaaccactgacacagcattcacttgctaatcaatacgcttcatgttgctatatattcggtgactccatccattgtatccatgcacacaggatccaattttgtcgccccatcaattgctgagtgcggaaatgccattgacggttcgagctgacatgaaagcaatagaagacttgaggtcaagacaccataagacattgatgactagacataagatcaacaacaagaaggaccttcaaggactaggacaagaatatctcagtcaagagttatattgagaattacagcttttataaaaccgattacccaaaaaggtaagactgaccgaaaggactcatagaaccaacttgaactcacagattcattatttcaatctcatttaagtttttcctttctgcagccggggatattacgagaaaatttccgtgctcttcaacaataaacttcattcataaaaataatttttaccgggttaaaaatgaaaagaaatcataacacaaaaaagctgcattcagattatggtaactggtaaaagagctctaagtctttgaagagtaaatagacaacgggtgcacgatatccaaaaaaactgcaaaaagtatttcactcatctacttgtttagctaaaatcatatacactacgaagattgaaaagatcaacacaccttacacaagaatccattttttgtcgtagcaatagtactagggttctgccttatcttattgctctgaccaccagagggtttgtcactatggtgat

SEQ ID NO: 46000 - DNA, 491 bp, Arabidopsis thaliana columbia
caattctctaatgtaactttccttttgcagcttgagatgatcatgaaacacgtgcatcctcagatctctatcaatccaggttcttcatcttttataatattcattttttctttcaatttctaactctattattttattattttattttcaatcatgattatgtcttaatttccatatccttcaatctctctttctcataatccataattcatcccttcttcttcgtcttcttgatgtgatcacgattctttttttcttcgcttcaactgtatatatatacagatctatattaaacttatagtggttttgtttttgctcctttttcatacttttgtttgtttttctatgatatcaatcagcttggtgaaagaaggtcaagaattgaaagagaatcaaagaaaacgacgtcgtttcattcgtgtgtaacaactactaattatacatagatggctgcttactttcacggaacccaccggagatctctgccggat

SEQ ID NO: 46001 - DNA, 536 bp, Arabidopsis thaliana columbia
taatgtaatgtgaataagtgtgtgtggaaatgggtttcgtttctacgtattactctggatttcttacgacttcaacaaaccaatgaaattttgacatcaaaaataactccgacataaaaattggccaagtcggaaacattttacgataaataaaaaccccacactgaagcctggttaaaaaaaagtgggtagaaatgtgagtgtggttgattactctagcccggttaaagtcagccactttaaaacacaaacatcttcctctacaagattctcacactctctctctcactcacacaaaagaagaagaagaaaagattctggcaaaaagattcatcctccattcctcctcctctgacgatatcaccgatcaacagctcggagattccacttccgacggctgctacgtcatcaagaaggttgagagaactgtgtgcaagaagaaacagggctggcgtggtaaatccatcaagacatgccaaacatccattgagatccatatccattgtcaagccaagtaagcatttctgttctctcgg

SEQ ID NO: 46002 - DNA, 723 bp, Arabidopsis thaliana columbia
tattggattagactagtttcgtaatggctaaaaaaaagaataaaacatacgtacgagaacaagacgaagaaatagaaggcatccactacacaattgtacatgtcgacaacaaagtcaacgacataccgtttgagacaccgtggctttcgcttttctctcaaaaaaaaaaaatcaatcatgtttttttggtttttatgtttcgacagtatttggtaggttgttttaatattattaaaaacatacttattatttgtgtgaatatgtttaaaagcaaacttggttgtttggaattgtaatatcaaatgtcaagatccatcaactttcataaaaattcgttaatttgtacgtgaacaattaataaatctctcataccacacatattattgctctagtcaatttgtttcctttgttttcagtcattttcaggaatcaaatattagcaatgctttaactctactccactgcaaccaaattggttgtttagagttatcaaatgacaaaactcgttaaaaactcgttaatatctattaaccaataaatctctagtgaacttttttcctttgttttgttctgtcattttcaggaatctaaattattaagtcttcaactctactccaccacaaccaaaattaaacgagtcttgtctacatgacctaatttgcttaacaaccttatcatctcactaacaactccatctcccaaaatttaaactcctttaactat

SEQ ID NO: 46003 - DNA, 613 bp, Arabidopsis thaliana columbia
ccactgttatctaaactcaacaaaacaatttcattaaaaacatttaacattgattctgggagacttaggcaaaaaaatttagttgaaaataagcatgaaaaaatctcacctgtaggtgttattctgaacgatttgatttaaaaaaagattcacagaaaatctctgcgacatattctcattgtcctcctcccctcgtcttccatgaaaaaagctttcggtctctgttcttcaccggcaaaatcgagaatggatttggtctgtagaagaatgcaaattccaccaaatcttctaaaagattctggtttcaatacacccccctaaaattacttaatcacaacttggtcttcgtatttatgattcagctgatccgggaattatgttacacatgagctctaggaatgacttgtgttatcatttatcaagcaactgtttggtaatgaaaatacaagtctaaaactgataaatgtgagacatggttcctcaaggagaatatgcacattggaaacatcaaggcatcaagtaataatacataagagggaatgatggatcaacggtgttgatggtatcagtaagacatcggagaatgcaactgagaccagctctctcagtgagt

SEQ ID NO: 46004 - DNA, 1379 bp, Arabidopsis thaliana columbia
cccacatgtgtgctcttatgttccaagtttagtacaaatcaagaaagatgcacaagtgatgctgcaacaccataacgtctcagcagaaaagcatcatgagttttgtgcatctttgtgagttatttaagttatagatagagctcttctatggcagtacaataaactgtttccttttgctcatcttctattattaatttgtatgtttaccattgttctcaggtaactcaacatatatattcccgatggatgacgaacaaaaattacttgcgtcatgtggttggcctttctcaccatttctttccttttcttttttcttttttgaatatcaggaggttctgaaccgaaacccataatttcccaggcgcaaaaccacaacatgtaatattagtttcattccagcgcacccgaatcgacgatctttaatctctaggttctttaccaattgagcaaacgacacttgatccttctatcatttcttgatacagtaaaagggcatcttggaagcttcctttggcatttgctagttagctgagaaactaaaggagtattagaagatcatgttttcgtttcaagtatctgctttatccacaaataaattaaatgcaattagctatacatgccacatctaatcgtttcgggggagtgcatttgttgatatcaattatgatggaggcacatgttcctttgtcgtaatagattagactctggaattgtgacgagaaggctcttttaattatcacaattacaataaataaataggagccatttctattctaaatatatgacacagcacgtttcatggtacgtctttagcttttccaaagagaaatatgttattttcaaaacttgcatcacatcaagagggcatgtaagtaaatgattaatctaacgcaaaatcttttttgttctttcttttgcttagataaaatattaatatcaaatagtccacaaagtggatgatcggaaaagagttttacattgtctgaatcgttacaaaaccaaaggaaaaaattgacaagaaagattgcttggatcaatacaatataggttaaaattaagccggtttggtaaaaggtgttaccaatcaaacccaatatattatgcataacgctgtacatggtaaacaatgactaacaagtgggtcatagccttggtgagcccggaggatgagtgatgaccctttgatggtcttctcctcgaatcgctcggctgcatttgaacttttttttgaaatccaatttgtatcaacccatctttccctcttactgcaattcaaaaacaaatcactaataagaagagttttgctaacactttttagaactatctaaaaatttgattagtaaaagtttgattatggtcttttaaaaatggtttgttag

SEQ ID NO: 46005 - DNA, 630 bp, Arabidopsis thaliana columbia
gctctagagcctttggaaatctgtagagagaaatacacatgtcaggagcagaaaacgcctctcaagttcaagcatatgcaaatcacctaattgacaaacaaaatttgtttcttcaccaacttcataataaattacaaataacccaatttagtttgaggaaggagctcgacaccatatcctgcggttacgtacctcgttatccatctgtgtactcttctctctcattttctggaaggtagctcgcagtgacatctgctgattatttagttccaatatttttttattcagttgttcaatgttcgcttctagctcttggacaaaaggtaagtccctctcaacggcttcatcaaattctccaatctctgcattcaactgcatgtacagcttttagaaaaagataaatgacttatctatgggatacatatttttcttgcattacctgagcaacctttgcctcacactgctttcgctgctcatcaaggagacccaactcttctgcctttggtcttataagatccattttcgagtctctggtacgaaaaaaagattaaagaagatcaagtgggacaaataagaactctctattttaacttcttggtgcatcgaaataaagtctacagagaagaacta

SEQ ID NO: 46006 - DNA, 2064 bp, Arabidopsis thaliana columbia
catacttataaaatcgaacctgacgaatgtacaatcggaatccaagaacgggataaatgctaatattcatgacatgattattagtggtgaagagaataaaccaagggtttgagaggaaaataaatatcacgagacgtcgagacccaccaaacagagacgttcatgtaaatcccgtgatgcatgccgtgagcccctctctagacaaaattcaaattaagaccattgaagaacgatcgaacactttgatatataataaatctactacgatttaatgagatataatactttaaagattttagattttcagatttctaatgtaataatgtagaatttgatggtcaatcataagctcaaaaatattgatttgaacaaatccataccgtttatctaaatttcaagtgattccactaatcgattataccagcatatcgtaactaaataattaacaatttgtaacattttaactatcttagcaaaaaaaaatcaagagttcccatgagcgaggaacttgaaaatcgaagccgtcaaaagtcttgcaagaaataaactgacaagtcttacaaaaggtgaaatgccaaggacacaaacctaacattactttgttttatggccaagattaggacatacgaaaatatatctgaaaatttctagaaaaatgagaaaaaaatataaactatatattctacagcctgcgtgactcctgtggtttttgttttccctcttgttttctctttttacccctaaaaaaattatggaagttgcaacaatctgtacaaatagagagagacttgtcccatatattttcatgtcacaacaaataagccttgactttccacaagatttcattccagaaaatccttggctgagatagccaatggaaaatgcctcttcttcctctttcaaatatccaatactcatcttcacagctgtaatgccagatccggatgctgcgacgaggacgaaccagtctgctgattagagcccggggagtttggtgagactagcctagcgttaaggtctggcggaaaccggtggaattcttgtttggggtaaggaaacaatgagccttgttgttgcgagaccggtgtggcctcgttgcttacgtttggttgttgctgtctagcaattccgagcatctgatttgcattatggttgaatccgcggatgaggccgttgctgctctctgttttgattagcagtcctgcttggtgagaggaggaggatgggtgatcgatttctggattcaagacacgagcaggtggtggtgtggtctcttcgatggcttgagaggaagcatgtctgtttcctatgaaagcacttgaaactgaagcggttggagacaggattctgttagaatgatcatcagacgctaagtcattagaacacttttgttttcccgacgacattaatatgttttgtttctgagaatcatcctcttcaggtcctgctgggttctctccaacccaaccttgaccaaatttgattccagagggcaatacagtctcgattctcctcgatgcaattttccaggcaacaggaccaagatttgcagcatatcgtgctagactcttcgcgtaaccgtactccatgttcagcccaacctgataaataaggaaaacagaggtcagactcttgtttctctatacaaaggataatagagtttgcaacaacgtactggaatcaactgttttaactcgtcttcaagcgttgtcaaaaccgatggttcttgggtagaagtcgagaggtggttgtaggtatcgcgtctgttatcatcgacattgaaatgtttcatcccatacttgttaaccgccttcacaaccgaagctacagaaaaaataagaagatggttcatattggcaacaaaagaaagaatgtctgaaagaatgtaagaggaaaggcagagattattttacatggaaattcgctctcccagtctaccgaccaaccactctgggtttcactgttatgattgattctaactgatgattctgcttggcggaatttgtatgaaggaggagcctttcttaaattgtaagcacccagaaaacttgagagcccagcttg

SEQ ID NO: 46007 - DNA, 517 bp, Arabidopsis thaliana columbia
actcgcttctacagcgcgtgatggcttgtttctccacccatctctccttcgttgagaagcatgcaccaaaaaaaaaaaaaggcttcaaagagaataaatcccaaaaaatttcaatctttacgcaaaaggaataaacatttctgtgacggtttcaaggtttcatcggaaccctagatctaatactttttcccgatttgaatttgcgatttcagatctgagagaattagtcaaattctgaaatttcaaaattgatgtcgaaagcttggggtggaattggaattggagcttgggctgatgaagcagagcgtgccgatgaagaacaagcggcggaagtactgctgcgacggcggatacacagagttttcctagcctgagagaggctgctgctgcgactgcgactagtggtaagtctaggaagatgaagaagatgagtttatctgcgtctactacacgtgcatatgcaccacctgacggtagacatgctgttggattgactcagcaagagattcttcaatta

SEQ ID NO: 46008 - DNA, 537 bp, Arabidopsis thaliana columbia
tttttttttgttcagagtttattgctgcagatttatggatgagatatatttctctgtgtctggtcccaagaaagttgcaagtgatatcagatctgaagctataggtttcttacggaactcactgcatttggacatcacagatgagacagacccgtcaccatgtgaagcgaccagtgggcttcgtgttttgggtaccttggttaggaaaaatgttagggagagtcccactgtcaaagctgttcacaagttaaaggagaaggttaggctctttgcattgcagaaagaagaggcttggaccttaggtacagttagaattggaaagaaatggttaggacatggattgaagaaagtcaaagagtcagaaatcaaaggtttggcggatagtaactctaccttgagtcaaatatcttgccacagaaaggcaggcatggaaacagatcattggtataagatcttgcttagaatatggatggaggacgtgctaagaacctctgcagatagaagcgaggagtttgtcttgtccaagcatgttgtaga

SEQ ID NO: 46009 - DNA, 518 bp, Arabidopsis thaliana columbia
gaccggaagggacgtgactctgcattgaagtacatcaacaacaatatctctcgttcggatttgtgtatcacattgagcctgaacaaaaaacttgatgtttctgatttcgagaacttgctctctgtaatggaggaacaagtagaagacagcagtttaagcatcctactccgttccatgtttgaaaccccgggtgctcagtctcgagttcggatgattgcccaagggccatggtcttccacaataaggggtgttgtcccgagtatgaatgagcatatatcctgatcggtttgatcatgccttttatagaatctcaatgaggcatgaagcccatgagtcttgattcaaagactgacgatgatagcccagagctcaagacttcgttccaggtttaggaggcaagccggagaacaaggtttgataagtactacagagcaggacgttgcactcagagtttattgctgcagatttatggatgagatatatttctctgtggatgcgcccaagacagttgcaagtga

SEQ ID NO: 46010 - DNA, 588 bp, Arabidopsis thaliana columbia
agtatagtaacccacacaaaacaaatcagtttaacttaaacaagtgataaaaggtgagatatgaattcacaatgctaatgcacagaaaacttatgttaccatgctctggaggaacagcaagcgatatgatgtcaccgtgttgaaccctgacttcagggccattctttgttaacctttcccaattgagaaacgtaccatttgtgctgaatcaaagagagccgaagacattaacaactgcaaaaaaaagatgaaccacacaattgaaacaggagagagttcactaaccttgtgtctaccataaagacagttacatcatccccatcaccgcctgttaccggcttacggaataccttacagtgattcccgctaattgcatttgattctacctgataactagcgtgacatggcagccgtcctaagcaatgctcatcagaagtcaaaagtatatttatgccctattgatcacgaatccaaatcaaaatttgaacgagaatcgcataacagacctaaagtccaaaataccaaacactgagcataattaaagttggaattcgaaagaatatgggttttgtagagagaacaacctgc

SEQ ID NO: 46011 - DNA, 534 bp, Arabidopsis thaliana columbia
ctagcttcttcttctggtaatcaaatcaatcctccttgttactctctttcatgtttttcattgtatacattaatgattacatattgaaaacacacacagaaatgaaagtggggttggaggattacaattttccagtggatccaactccgacgacaaaagcttcgataaaaccaggtcctattgagcatggaactcctctcaatccttatattcctaagcctccttctccttcttcgtctcctcctccacagcaatcccaagacggtggataacaccaaatcttttctctgatttatttgccccgtgaatgtgatctacgcactgtttgtagttataattcccacgttttttttcttctttctttatctctcttttgtactaacattgtcttgtcgtcgctacgttaattaatttcctttatctgccagctcgtgtgttagtaatgtccattttgaggtatgggaatttcggctattaatatttttattttgtggattcaactcttagctctgtacatatgcatccaaaatacat

SEQ ID NO: 46012 - DNA, 705 bp, Arabidopsis thaliana
tccattatctagcatcttcatcattgccactcttttggcttttgagacctgcagatatagatttcgaagtttggatcagttaaacatgtcaggatataactcgcagccaataactgatcttactcttcttaaatacccaggtgtactagaacctagacaccatggcgaagcagctggtatgactcagtatttgatcagaactttgatgtataacacagcgaatcttacctttgtgacttctaaactgtcagtgattacttttttgttgtatggttccatcttttttccaacttcctcttctattttatggataagtttcacatcggtctgcaaaaggatatggaagggttagtaggctgtaagcccaaccataaccaacaacacttaaggtcgatgtctcatgtggttctatgatttactactttacctcagtgataatgcttacagccagtcctcctctaccagctctagctgtacgtccaacacgatgaacataatccctaggatctctgatgtgagccaaatgtagaattagaatatcagttaaacatgaaaagcacagtgaatcaaagaaaaaggacagcaaaaggtacctcggaatgtcataattgatgacaaggtcaacagtaggaatgtccaatccacggctggcaacatcagtcgcaagcaatatcggtactttcccagacttgaatttacttagtg

SEQ ID NO: 46013 - DNA, 1188 bp, Arabidopsis thaliana
tgagagctgagcgacagtgatgtctctctgatttgtcgtgaagaagacgaggtgagcatttcttctctgttttgattcgggcttgtgttgatgtgggctaggagctgttttcgggccggatttaactgagaagtggttgttgggcctgtttgagttgggcccaaattttctaagatttggttgtcttcttcatttcgcgaggaagacgaaggtgacgacgaggaagcagctcacgacggggtttcagcttacgacggtggcaatgtaaccggtgtgtggccaattggtatttcaggttgtataggtgagacgacaggtgctgatggagattcagaattgacggtttcttcttgcaccatgaggtgtagcgttggacagactggaaacattttttcatcgaattgaacatgtcgtgatgcatacatatatcttgttgcttgatcataacaaaagtatgcactttgagatgtcgagtaaccaaggaaaacacaccgttgagacagagcttggagctttttacttgtatacggttgtaatcaagggaaacagaggcagccaaacactctaagcttcccataatttggtgttgtcccaaatagcttctcaaatagtgattgcatagagaggactgatgtaggcatgcgattgatgaaatatatcgtagttgcaaaagcatagggccacaaggcgataagatcagaagccgttgacataagtgtaaggcatgtctcgacgatatgcatatgtttgcgtttagcgaggctgttgtgttccggggtgtgtggcagtgaggtaagatgtgagatgccttgagctgtgaggaagctacgaagtgcgatatattcacctccattgtcttagaacaaggtaccaattcggcattggaatcggttttcaacgaggtttttgaatacaataaaaacctctttgacatcagacttgcgttgcagaggatataaccaagagtaacgagtgaaatgatctatgaggacaaagtaattgtttggtgatgtccaaacatcggtacatatatattcaagaggtcgtgtggaggcaatgaaggttttagtaaaaggtaatttatggcttttattaatagagcattcggaacaagataaaagtttttgtgaagaagaagaaacgagtagagaaaactgagaaattattgaatgcaaaacagaagaagga

SEQ ID NO: 46014 - DNA, 762 bp, Arabidopsis thaliana
acataattatatacgagttcacaacaagaagatagtgattttacgcattgggaatagttgaatcatatgagcagcatggtgatgaaaatgatgggcatgttccatatgtgcctactggtgacagagtaatggagaatatacgagattccatcactacagagatggccaaaggaacaagactcccatattaacaggttccatctctctgtcttatgttattgattgtctctgtcttatgctattgtctgtttctgtcttggttttaaattttgtgactaatagtgacagctgaatggtcacgtcactacataagttggttgattacacacgttttaaattttgtgactagtagtgacagctgacaagtaattcgttgaacatagtgttcattagtttggattagacttgattcaattgaatagcttgacataatgacagctgaatggtctatgtttctggttttagctcattgttgaatagtctctctctcaatctagttgttgtattcttgagcagctgcaattctagtgtctcttgatgttgtttgctttagtgttgtggtttggtaatatgcataagaccatactttggtttctgattctagtttgtgtcacgattgaatcacttttgagaatgtgtcatggttgaatcgttaggtaagtactagccaatatgcatgcttgctcttattggagaattggtgatgattcaggttattgcttttattgctcttctttacaggttgagtaagtctgaaatgcg

SEQ ID NO: 46015 - DNA, 649 bp, Arabidopsis thaliana
ccaatgcctaaaatcactatcttcttgttgtgaatctcgtatataattatgtaaagccatcgttgatgtcacaatcttaatccacttcttcacttcatactttgggtgcttcctatcaagtattctccatttagctttccacacaccaaatgttctttcgattacagatctcaaactagaatgtctacgattaaacaattctctgctgtttgtcggaggacctcctctattaaacagttctaaatggtatctagtcctacggtgaggacctaagtagccacttctagtaggatatcctgaatctactaagtaatattttccagcaggtgggtgaggaaatgaagcttcgtgtgtagcacaataggttagtactttagtgtcatgcgctcttccgggtactcctacatatgcataagtgaatttcatactgaaattacacagagctagaatgttcattgtagcttcagatttcctacctctatatcgctccacatctcctgatggaggacgcacagacacatgtgtaccatcaagggcaccaatgcaatctataaaataaggcatatagcgtttatcatttactagaaagggacttatacctgtgaatcatctcttgtaggtttcactatgtctgctgcgagttcaaaag

SEQ ID NO: 46016 - DNA, 795 bp, Arabidopsis thaliana
ctctcccgaacggatttttcggagacttcctccgtcgattcgtcgcttgcaccaactctctattacctcgatctgagccagacaatctctcggggcgatcccaaactatttatcaaggtttgaggcgctctccacattggtactctcgaagaataagtactcgggggtcgtgccaatgagtttcaccaatctgatcaacattaccaatcttgatctctcccacaatcttctaactggtccattccctgtattgaaaagcattaacggcattgaatctctggatttgtcgtacaacaagtttcacctgaaaacgattccaaaatggatgatatcgtcaccatccatctactcattgaagttggcaaaatgtgggctgaagataagcttagatgattggaagctagcagggacctactactatgattccatcgatctgtctgaaaacgagatctcagggagtccggctaagttcctcagccagatgaagtatctgatggagttccgagcggcagggaacaaactccgattcgatttggggaagctgacgtttgtgaggactcttgaaaccttggatttgtcaaggaacttgatattcgggagagtgctggcaacatttgctggactgaagacaatgaacgtgagtcaaaaccatctttgcggaaaacttccggtgacaaagttcccggccagtgcgtttgcgggtaacgacggtctttgtggctcccactttctccttgtaaagtgtagtggcaagaaaactataattagtatctgtatctaatgtgtcgacagttg

SEQ ID NO: 46017 - DNA, 725 bp, Arabidopsis thaliana columbia
tacattaaaatttgggtcaaaatttttattttctttctaaaaaacatgagaaaaatggcccatttatttttctcacctcaggaacctcaaatttattgagctggagattaaaatcatactaaaaatgaaaaagcatgagagaaatttttgttttaagaactcataagtgaggcatcaagaggaaaaaagaaatgaagtcataggatggattatggttttgataaggtaagtgaataagcgcctatttgctggattaagtggcatagtcgttgggagttaattaaggacacccacgggccacggcaagtatgaaaattgtagtctatctatcttgaatgatcttttcgcttggattgactagagtctctcgtggtcccagactcttgccctaaaaaatctaaataaggaaagttccttatttaaccggtttaatgcccgtagtaaatattatcggtttgtgagatggtctgagccggtccggatcgggtcatagggggtctgggacgtaatcaagctggataactctcttgggttgggccgtaatccttcttgggtcgctatttggtcactatcgcaaaaattggctcatataaaaaggtttgttgaaacatgccttggtttttgttcttgcagagtttctgtttgggtcacttctcctcctcctcttggatggacatggatttaaggtccacagcgggttcaattgcatctccgataaactagat

SEQ ID NO: 46018 - DNA, 683 bp, Arabidopsis thaliana columbia
aaaacacatcaaggaacatccttcatagtgagctaaacaaagtctcaaaaccataacagtcaaagtaaccaaagtccgcatttttggatagcaaaattcgataatagcctctgcgttaaaatttgaaaccaacattttcaatttcaatagcttcagatatacacactccaaacaaatcaaaactctgcaatctatgatctaggatctttgccctcacaaattggagaaatgctctcaaagaaacactagataaatggaatgaaataaaagagaaaaccttctcccggagaacctcccggaggcggtggtaacggagaggcaggaggaggctgctccgtggcggtagataggcatttcctccactcttgaagaaacggaagcgagctacgactgatttccggatccaatttccggagacacaaactcgatctgatcgcgctacgagtgatactcatttctcaccggaaaatgtctagggtttttctctacagagagtctcagtggtgacgatgacgaacacggtgaagaagattcgaaattacacccacattcgctacataaacgacagcgtttcacattctaaaataattcaaaagcccacataataattaaaaaaggccatagcccataacgtcgaacatcaatacggtccatattacattagtcattagaaggagtaacgg

SEQ ID NO: 46019 - DNA, 513 bp, Arabidopsis thaliana columbia
gagatcagatctgcaccgtatatgcatctagttgtctaaacactacttcacacaaaccttgccattcattactggaaaccatttgttctgtctactgaatgtgtaattctgtgtagtgattgtgacacatagaaatatatcacactctggtaatagatgattcttaatgtagtttacattccattgaaaattttactttctcaaaaagaagtttgatgaagtcgtgaaatattacttaaaagtggcatatattctctctgtaatctgtatacactttgtgctacaggcaaaaaagaaagacataaaaaaacattgaggtatccttctatagctaaagacatgaactaagctcagatcaaaaatctcctatctaactaaatcacgaattttgatttgtgatggtttctgcctctcttggcatctagctgctttctcttaaaatgtttactcttccttcaggttccagaggagcaatcctgcaattgcgctcgctgttggtgttgtgccacttga

SEQ ID NO: 46020 - DNA, 1137 bp, Arabidopsis thaliana
  unsure (1)..(1137): unsure at all n locations
acaacaacaagattctctccactctaatgaagttcttggattaggtcaaaccggaatgcttaaccatactcccaattcaaaccaccaagtgagtaaataaccacaaatgcaaataccataatttcatttgaatatattttatctaaagaattgcatttttttttggtaaattagtttccgggcagcagcaacattggtagcggaggcggattctcactgtttccggcggctgagaaccaccggtttgatggtcgggcctcgacgaaccaagtgttgacaaatgctgcagcatcatcaggattctctcctcatcatcacaatcagatttttaattctacttctactcctcatcaaaattggctgcagacaaatggcttccaacctcctctcatgagaccttcttgaatcttttatatttttaaggtttattattatataagaaaaacaaaaatgaacctttgaaatcccacatgttcttggtcatttcattaatcatcggcttatattttgcttatttcccctaaatcctcttgttaacttaggcgaacaaaaaaaattaatggaaatctttttccctccatcggttacaaaaataatattatatataattgttggatatatgggaaattggataagtttgtgatttgagatgttctgactaaaaaggttgagaagagatttgtcaatgagttgtcttttgttgtttctcctcaatacatttattaagattttaaaacattacttctttatatgttacctgcacctatctacatatatgttcagtcctaacttgttttgttattcctctttcatatctattcaattaatgttttcctagccttagttcattttacatttttcttgaaaatctctcatgaaaaaaacacattcatgtgtgaaatatatttcaacacccattatagtttcgttaattcagatatataatttttatttattacatataataaaaattgacaggtgggtatacacatggtttccttgtgctaacattggtttgaatagcataaaccgaatcctaaaatactttaagttcacttcgtaaataaaatctgataaactgaacaaattagggtctctanagttgagatgggtaaatgtcagctactcatggagttg

SEQ ID NO: 46021 - DNA, 840 bp, Arabidopsis thaliana
taacatttaacctcatcagacatttgccacttctttactgcacctaccattgatggtgtggaggatccaccacttccaggttctccaaggaactaaataagacaacatcttgttagtacaccagatttcacagaagtcaaagaaataagaagttggtgaagttcacaacaggtttttctaggtaagaatttaggtctgattgtttgcttacaagattcatcagtggtggtaaagagaactcagttctcttattgtcccattttcccttcaaaattgtaccaataacttcatttaatggcagacctgttactgcaacctacaaaacttgggagtcagtaaaattcccttccttagtggagaatttatatacaacaaacttctcgttatgaacctgagcaaatgacaagacttctggagagaagcgaacataacgctgacttccatagacagcacagctgacatcaaacccacttccgaccttcccttgtgcaagacaatgagacgtttgtgctatcatatggataacatctagatcagaacagccaaactttccttctttacatggatcagataggtcaaccactccaagataatgtaacagagctgcaaccacagctgttgtcattgctgcagaagaacctaagccagtttttgctacttcaggcttggaattagcaccatttgactccgcagcattgaatgtgattgatgcaaacggtgcaagggtacccagcgattctggtgtcaatggaagcccagccgattctatctattagaatatacaagaacatcaacattttgtacaaacatctcaaaaggatttgaataatcaaagggggg

SEQ ID NO: 46022 - DNA, 595 bp, Arabidopsis thaliana
tgacatcctatggctagtgacataaagaaactataatcttgctggagagccaaaatttgaaattatgattgttttgttggcatactctagctgctttctctaaaagtggctactcttgcttcaggttctagaggagaaattctgatatctatgctctccgttgctgtcgctgccacttgatcagctgcatcgcagtcacttaagactttttggcatgtatcaaccagacagtgtctgcatttcggacaagtcatatgttgcgtaacgcatttgtcgatgcagcgaaggtggaatccatggttgcacttgggaagtacacgtagctgttctccagcaacaaaatcagacaagcagatgacacactcttcaccgacccctggcaggttaatttcaggtgagtaattcacaactggtaacatcttgagagctttcttcttgatccctttgtttactgatgaatctcttggtgtggatgggatagagatgggatcagagatcatgaaacttcgagaacgtataaatgcacaacgtattatgtaatgcaacccgagggagcagatgatacgcacaaaaggatagagagcacatgagacat

SEQ ID NO: 46023 - DNA, 615 bp, Arabidopsis thaliana
gctgatttctttctacttgcatatgaagaccaaacagaagaaatatttaagtaaatgagtatatgaataaccaatcttctttgaaaaattcttcatgctcctcttctcgattttgttgaatcacccaacccacatccagctttggagagggcaattcgaaagctcattgaggctttctcagtgtgttcccatcagatttttttagatgctttctccaaatgccatgtcagcaagctatttaataatttttaaaaatattaaacataaatgtttaaatccttcctctgtggattcggttacgtcatattccggtgaacttttacacagcggacacttttgaagaaattggtgagagtattgggcaagttgtcactgttgcttttgatccattgaagccacaaagtaagggttttgtaagagttaagattctgtttgagatcaataaacccttgtggaattcgaaggaggtggaactgcctactggtgagatggtgacgattggcgttgagtatgaacgtgtgcgaaaaaggtgttttcaatgtcagcgtcttactcatgataggacacggtgtccgctgaatcctcagaaccggcaacctaatgctacggggagga

SEQ ID NO: 46024 - DNA, 629 bp, Arabidopsis thaliana columbia
tcgactctacccttctcgaagcatatatatcaccactgaacacccaacctctctcatgaaatcaaagagtgatccatacgatcaatcggtggttatagtacatgggaaagatattacaatcataatgaataaattcttctaagttacgatgaacaagaagtggccactcaactaaactgatttgaaggatgcatttttcatggggaacttgatacaaaggtttgcatatacaaaaagctcatggtcatgtgctcatagattacatcaaaatggcaaagatcttactaatcttgttcggttaaaaagaagacaatttacagactcaaacaatctccatgactgtcaaacaagctaagttccgccatcagatcccaaggattcaagacagaattgttttctttatttacctcaacgacatcgttatttcagataacgtcaaacaaaatcttaagaattcgtttaaagaagatggagcaaaaatatcactcgaataagaaaagtaaagtcagtgaaaggaccacaaatagaaggaaaccaatgagccaatgacccaattaatagcttacaccatcataaatatttattatgattgactttgtattcgcgtggaaatgtactgtttatggatt

SEQ ID NO: 46025 - DNA, 572 bp, Arabidopsis thaliana columbia
cagggaatcccctatcaataaaacagatattgattatccattctgtctgtcaattgtaggcttgtagacatgcaggttaaactggatataaataatggtcctaaatttagaaggcgtcatgcttatgggagaacgggacgggacaaaatctgaggcaattattgttgtgtgcagagaaaggctcaacaacatatggtgacactgtttattcagattcagtagcatcttaggaatatataaacgtagatccttcattctggggccacagtccccttgtacgagatgatacaggatgagtgtgacttgagcattttggtactgctaagtattgtccaccctctggtagaaattgttatttactacatatctggtcgtttatcaggtcttgcagtcatactaaacaggtggtatacaaatgattgaagtcgcgccaacacaagaaaaccccaactaactttttaacttcggaaaattccagtttgaaaatcttcacacaaagttgggtaattaatgctaactctcactagcatgtcagtaacaataaattacactcttacacagatgcgtctaac

SEQ ID NO: 46026 - DNA, 1162 bp, Arabidopsis thaliana
catcagtgccagttgcaaaatctcgagttcctgtaaagaaaacaacagggaactccacttcgagagcagacctaatggtaactgctaattcagtagctgctgcagcctgtatgtctggcctggcaaccgctgtaacagtgcctaagattgaaccaggaaagaatgctgtttctgcgttggtgccgaagactgaacccgtaaaaaccgcttccacagtttctatgcctcgtccttcaggtatatcatcagcactgaatactgagcctgtaaaaaccgctgtggcagcctctttgcctcgttcatcaggtattatttcagcaccaaaggttgagcctgtaaaaaccgctgcttctgcagcctctttgcctcgtccatcaggaatgatatcagcaccaaaggttgagtctgtgaaaaccaccgcctctatgcctcgtccatcaggtattatatccgcaccaaaggctgagcttgtaaaatccgccgcttctgcagcctctttgccttgtacatcaggtattatatcttcaccaaaggctgagcttgtaaaatccgccgcttctgcagcctcttttcctcgcccatcaagtatgctatcagcaccaaaggctgacccagtaaagattgttcctgctgctgccactaacactaaatcggttggacctttgaatttaaggcatgcagtcaatggaagcccaaaccacacgataccttcatcaccctttactaagcctttacatatggctcctctctccaaaggatctacaatccagagtaattcagttcctcctagttttgcatcgtcaaggttggtccccacacagagagctcctgcggctactgtcgtcacgccacaaaagccaagtgtggtagcggcacgtactgttgtcacgccacaaaagccaagtgtgggagcagcagctactgttgtaacgccacaaaagccaagtgtgggagcagcagctaatgttgtaacgccacaaaagccaagtgtgggatcagcagctactgttgtaacgccacacaagccaagtgtgggagcagcagttaccgtcacttccacagcggttggtgtacagaaagagcaaactcagggaaacagagcaagccccttggttacagcaacacttccgccaaataaaaccatcccagcaaattcagtgat

SEQ ID NO: 46027 - DNA, 885 bp, Arabidopsis thaliana
catttgtgaattgaaatgtattgaggtggcaaacttctctgactgtgaaagactcacagaatttgatgatgcaagtatggtaagaagaatcttacgcaccattgatgatctgatagcactgtacgaggaggcttcatttcttcatgcaatatttgtactgtgcagaaaactcgtatcaatatgtgcaatggtttttaaatatccccaagctctctcttacttcttcaacagtccagaggctgatctcattttcgctaactgctccagtttggatcgagatgcggagacactcatcctagaatcaaatcacgggtgcgcggtcttaccaggtggaaaagtgcctaactgtttcatgaatcaagcttgtggaagttccgtatctattcctttacatgagagctattattctgaagaatttcttggctttaaggcttgcattgtgcttgaaactccgcctgacctgaattttaaacaatcgtggatttgggtacgctgctatttcagagacaaatgtgtcgagcatagtgtccagttttcctgggactcgaataagatggatcacctgcttatgatcaactttcggctccctacaaaagaaataattggatgtccatctcaattggacaccgatgacttgatgttttttttttaccaccatatgtattatgcttgtaattcctacgtaaatccttctccatgctcagtccaaaggataaaaggatgtggtataaaattttgggatgtctctcccagagttctatctcaaagtgagcttgatacttacttctcctggccaggtaacttctaacattttacaactgtaattttatcctaattcataatggactagaacatgactaagattagaccaagattagagtgata

SEQ ID NO: 46028 - DNA, 1475 bp, Arabidopsis thaliana
agaggatcgcgtgatctctatattttcctttatttatagatatgactctattttagaggctgctccaatggtcacatgtaaaatagaattttctttaaaatagaggagatatcatctctataaataaagatctctacatttagtctctatttttttcctatttttgaggaaactctattttaaaagtgaccattggagcatcgtgcctataaaatagggtcactaaatttttgtaattagtttaagctttaatgtcgttgacacaatattatatacaagtggtaagtggacatgtgtaagagatattttaagggtttcggagactgaaatcaggctcggagggtttaggaggtagcaaaggtaggttgtttgtacgcagattgcgaacggcgtttgaagcaaaccgcgacgcgtataacgttgcaaccaggctagacgaagacgccgcattgcgttcgcgttttgtgatcgcgtttcggaatcgatcttcttcttcggttaatgatctagctagtttcctccggcaatgtctccgccacgccgcttgtatgaaagacgcaccccaagttctccattgaaccgaataaaacctgacagttaaaccgaattaaaccaaacagaaccggagattggagaagcagagagatcagtcaaaagagaccaaacaaacctgaaagtatgttgaagctgtttgctatgtagtcgtctgaactgtgaagcaacaagcttgagatcatctgctgcaagagcaaaggcttctacttcggttaaagcttgaactgttctagtcgatatcggaaaatgagacgaagattgaggatctaatgcccatgtgagaagatcttcgccgcaaaagtcactaggttttaggtatacggcgttaaagaagccggtccggccaccgtttgtggtggcgctcatcagttttcctctcatgacaaacaacatctcttccactggatctccttctcgaattgcatagctgttctcggtgtagagcactggttttagcttgtcacacacggcatctagcaattgctcatccattatctcgaacagaggtacctatatatatttgattcgatcaatgattatttgaatgaaatgtcaaatttgaggatcaaagagataaggtggaactagaagcacttactttcttgagaagatcgaggcagaaatggcgtttgatgtctctcctgaggtctttagggagattacgcagaaggttttcttcttctactcctctagtttcctgccatttgtactgctcataccttctgatacgtttcctcaagtcatcgggtaacattcgatgagacatccattgctctgcatctctttttctcactctcatctcctcttccctcactgtagttgattccaagtatttctgttatggaaagtggaaacatcagtagtgttttatcttccttggggatcaagtaagtgatggaaaaaaggcagtgaaatgaata

SEQ ID NO: 46029 - DNA, 557 bp, Arabidopsis thaliana
tgctacaactgtccaaagaacaccattacaatgatttgaatttgagaactataaaaagtttgttatttatataaccacaactagtagtgcgcaatgtatcgatgtgagtaaatgtatgtgaccagaaaacagaaaacgatgaaataaacatttgttgaattgagaataggacctatttacattctccaaagatatgagtttacatcaataccaatcacatcaatgtatactttctattcaatccaaattcagactaccttctaaaattatctacaaatcacattctaccaaccaattagttaatgaccgtccaaaccacaacagattccacagtgtgcctattctctcttccaggcttaatatgagaaagtgcaacagcatccttggaaacaaaattctttcagctgttgttgcgttcaaacaatgcaagacaagacgacatatcagtccatcaaacaggacagctagagtctaagccatctggatagtagtcaatatccataaagaatgaagtcatctcatggaccttcttgtatatctttttagagagtctgtga

SEQ ID NO: 46030 - DNA, 544 bp, Arabidopsis thaliana
caatcgtgttcttgaatctccgttagaatcgaagagaaacgacaatcttgtggcttcttctttggttcagatatgggaggcgaggctaaaccgatccaacggtggatactcgccgagtagcagtcaatctacggcgagtagtagtagtcggagcgattcaggagttagtgttcaagattccggtctttcagaatcttcatcaatcgatggagattctgaaattgctgatcgaacggtggagattgaatctaggtcacatggtttggtttctgattccggagaaagtaaatggggacgagtcgctgacctaattcggaggcttagcaacgaagacaagaaacgaaccgctggagataatggcagcggcggtggcggtggactcgagattatcagaacgccgaggccttattgcacttcgtcgtcatcggagaaaagtaattttccggtggttagtttctctccgaagatacgaggacgacaagcgtttaccgattttcttatgcaaatggaacgtgatcgccacgtgaattggattcgctttttg

SEQ ID NO: 46031 - DNA, 925 bp, Arabidopsis thaliana columbia
taatcaagatcgatcatagacatataaatatactaccaacttcacagaaagatgatatcataaacaaacaattaatttcgagaaatcatcttactggatttcccgatggctggcggcaaagggaagaaactggacatggtttcgacgtagagatttcgttctgggattttattgtaccggtggctgatgagggactttgtgaatttagggattttattatagcggtggctggctgatgagcgactttgtgaatttagggtctgtctgtcaatttggcgggctgtccatgggccaagcgtctttcgcaggtttttgggcccaagcctactaagtgccaggtccagcccattaagatcctatatcaaagatagggcacaattgtagtaacaccctaatttcacaaagtctctcaataaccatgtgtgctccgcagccctccaacgagtttccgctgatttttcgcaagggtaagatctgtaatcggatctctatatatttaatcgcaataattgtttaatcattgtccgttgggtagatggtaagacatgtgtgttttgggatgtggaggattacccaatcccagctgatctccatcctcgttcgatccggcggagaatcgtaaaggatgtgaagaaatatggttgtgatgcggaggtgtcgattcatgcttatgctaatgataatacggtctcggtaacaatgaggcgtcaattttcggctgctggaatcaaattggaagtgttcacccaaggtgagaattccatttcgtctgaattaggctcttttctttctcttacagacgttgttgttgttgttgatataataattacctaactttgcagcaggggataaatatgcgagacattgttccttgtatggtgacattatgctgtggtcactggaaaatcctccacatcaaatatta

SEQ ID NO: 46032 - DNA, 964 bp, Arabidopsis thaliana
caaaatagtctttgttttaaacattaacaaaagagttttaaacaatatagtatttatgtataaaaagatgcatagattgataagcataccaatttggctttgttgagaagccggcgtgcatatttgtggtcgacatggcggaaaacgatggaggaagcggcgaatgcagcagcggcttccgccggactctcggttcctggaactttatcgcttatctccaacaccgtccttggtgtcttcatgttctcaggtctcgcccagcactggtggtccgcgtttggatcaccaacctatttgatcatattcataggcacaaccattttaagtaataaaacggtacgttcatgtttctagcataacgtaattgcaaacacacaaatttgattattcgtttgaaacctgaacatagaggcggttcttgcgagaagcacatttgaggaaataatccgtaccccaacggatagcagcacgagcgttttcgagctctcccgtggctcgaagttctttctcgtaggtaattgtggaccaagcaagcgttgtgatcgtgaacgccattggaagaccatacttcacattgtctcctgcgtcatagtaccctccagacaagtccacctatacatacataattatctcattatcttttgtaaccttaaaatctgatttatgaataaacattatttgtaatataacctaaacttacatttacgagtttgccatcgtcgagagcagagtcacctctccatggaaccctattattaggagggagtttgcctgatctttgagcctccaagaagatgagggatttggttaaagcatctttgtagtttatgaaagtaccattgacacacacaatgtttatgatgccatagagacccaataacatgctccgtatcataacatttcctcttcctttataattagccatgatttcaaaagttatgtttgtaataaaaatgcccaactc

SEQ ID NO: 46033 - DNA, 824 bp, Arabidopsis thaliana
acgttagctccgtcacagtacattaatatttaacatagaatcatagtaaagatattaatttatttggacaggtcatgttgaaactcaagaagctaggattcaaagtgatgatggcttatggatgctcggaggtgtatggactaggaacagcttgtttgtggatgcccgagtgggagactctacctgaagaggagagtttaaggctcaaggcaagagatggtctcaaccatttcgccaaggaagctgtcgatgtattggacccaaccaccatgaaatcggttccacacgacggaaagactatcagggtaattgctctccggggaaatacagtcatgagcggttacttcaaggacaaggaagccactgaagcggcttttcgaggtggatggtactggagtcgcgacatgggtgttatagatcctgatgggtaagtaaatgaatcatgcattactttgaatgtattactttgaatttatttatgcttatgatgtttccacatgcgaagctacatacaatttaaagataggtcacaagatgttataacatgcggaggagaaatcgtgggatcaaaggagatcgaagggattctctatagtcacccggcggtttatgacgcaggggtcgtgggtcgaccggacgaaactttaggagaatcgatgtgtgctttcgtgaagctcaaagaaggagctgaagcgagagaggaagagatcattgagttctgcaagagaaagcttgggaataagaacatgaagatgattccaaagacagtagtcttctcggatgttcctaagactcccactgggaagattcgaaagaatgttctg

SEQ ID NO: 46034 - DNA, 837 bp, Arabidopsis thaliana columbia
gaattattcaacgatcgaaaagaagaataaatgtaaaagaaaatgatcatataaagaagggggaaaaaatctaaaaataagagagcttaaaaaggagttgttgagtcgacaagtcccgatcgtgagttaaatagataggctgaaaataaatatgtaaggcatttatggcgcgtggatattacgtttcaatcagctacaatcacacttctttttttgtcataacatttcaaatccttgagcttttttttttgtttttcttacgatcttaccaaactacaaatctagacgatttcacggataccacagttttgtctttgttagtttttgcaatatctggataaaatttagattgaagttcactagttcagactaagctcaaaactatagaaactcgtattatttgtcttgcaatttaaaatatctattaaaatcgatgtatagttctttaacaacttttctttatcgatgtatagttctttaacaactttcattttttttttttttcaatgtatagttgtatcgacgagctaaatatgtattctatcaccagattattacaaatttactaacaaatactacagcatagttagtaaggggctaagggctggacagcaccgtgaaaactaatccaccaatgaagaatgatgcaattttaatacatagggcaacgaatgaagaatgacgtaattgctcataggtgtcaattaattagctaatggaaatttggatgtaatataaaaatatacatatatatatatatataaatatccgtctatgtataaccctttcatatacatttcttagtgagatacactgggtagcacattgttttccgct

SEQ ID NO: 46035 - DNA, 627 bp, Arabidopsis thaliana columbia
ccggtgaagagaaaagttgcaggggaagtatggctcgggtatgggatcgcggctcggtattcaggagccgggatctgaagtagtggagtccattgtggtggattaggaatggcacaaaaagctgcttgctctgaagtcgaataccttaagccgcaagttttctcgttgcagccacattgaccatggacgtcgttgaattgagtgtcgaagagcatttgaataacaaggagaagtaaacagagaaagaaagggattgtgatgagtcgtatgttgctccatatgttccgtttctgcatcaaagaacaaaaggaaacaaaacctcattgtaaactttttactctgtcttagccgttttagatattaaaagtgtattgaaacctggaaaactaaattcttcctcagtaaagcgtcggcttgagtcaagaaacttgcaggactagaatccgccatcgcagagaatatgagaaggtttgatggagttgaatagtttttaagaagtctctaaatgttgttttttagatgtgcacactaaaaataacaagaattaagagataacagtttaactatacacgttactgaagtggcatacaggtattggacaatagcactgtgattttttgtatgata

SEQ ID NO: 46036 - DNA, 613 bp, Arabidopsis thaliana
ccatacactcacgggggagattagttcggagagagccataaacgctcgaatgaacaacggatcgggtcgggtcaacgcttaatggatcgggttcgatatgatcggtgtatatccaggttcctccgacttgtttttgtctctcgaagacgaccaccgagtgaccttcccgtcgaagctctcgcgccgctactaatccggcggctccggcgccgataactgccacgtggtgtgatctgattggtgataaggaaggcgccattggtttttttaacgagattcgttaacgatggtgaatatactacggcctttttataaatatgtggcccaaaaactcatgatccacacacaccacgacacaatgttaaaaaaacaaaaacaaattcctgagaaattatctaaacgctgcgttttatctagagggtaagtggaagtccaaaacagttttatggcccgcttcaaaattcaatcgttagtaacctggtttggtaatcagttctaaaccagaatcccaccggtttgcatatctctctctcccgtgtagggtttgcgatttgcagagaggagtgagagtaagagtgagattgagaatcagctgaaccgaaacgagaagatg

SEQ ID NO: 46037 - DNA, 1273 bp, Arabidopsis thaliana columbia
tgaccaaaatctctcaatttgttaattgttatttaccatagagtgaagccatagattgtttgacccgggaagttttgagtatgtcttagatggattcgatctagacgcgatatggacttctttagccactcccgttatgtccctgctgatatcagctccactcgcaaaatttcctatcactaccaccaccttccataaatttttcagaccaacaatgtcagataactgaatctatctaatatttctatagatttcaaactcaacaaaataacatacttgaattactcataccatccaatatacctaaacacccatcccatacagaataaagtactaatatagaatgataactagtgaaataaaagatctcctcgtgagtacagaatgaaaatgaaaaaataagcactttttcatagttggcgaataagaaaaagcaactttttgtttccatcgtcaaaaacgcacattttaagtatcagtaaaagggtatggacaaaagatacagattaaaaaactaaaatttagtaaactgttcacatattctgcaagaacgtacctggtctttgaattgatcaggaacacggtaattgtggctatgaatctgcttccctggccatgaatctatacctaacataacaagttttctcatcaatcagaacatattcacttcaaaatcattcaatctaaaaaaacatctgaaattgaagtaccaggaacatgagcaactctaggttctgtataatgtccattacaaacaacaacagcatcaaagatctcatctgttggagatcccatctgaatttttggattgaaccctccatttcttatcttcaggctcgacaagaactacttcggtcttaaatcgaaccatctccacaagtttgaaatctctagcgaagtcttcaaggtaagcaagaacttctctgtgactagggtaccttctcgagtctcttgattcgtcatcttcaggtcgaggcacgaaggggaagtctctgtaacccatgcactctcgtgggagattggttcggagagaatcatagacgcttgaatggacgatggttcggtttggatcgaggctaagcgggtctggttcgctgttaggtgtgtatacccagagacctcgacttttgagtcacgttcgaaaacgacgacggtgtgattccgcggcggacgtctcttgcagctacgagtccggcggcatcggctccgatcactgccacgttgagtgagttgactcgggttcgtgctggtgcatcttttttgtgtgatgatg

SEQ ID NO: 46038 - DNA, 615 bp, Arabidopsis thaliana
tgagagaaaagaaatctcacagtttgatgattgctcatattgattgatgtttcactgtctcggtggagaagaaatacaatgacacaagttatataataaaagcatttctctctatcaaccaaaacgtggcaatctacgtctgtaataacagattcgtgtaagtttctaacacaccaaattgattattaaaaacattgtaatcataaattgtaacaagtgtgtgtgattgtgattcatagattctaatcaaagaacacacaaatggcacctgcattatcaccaaccagatcacaccacgtggcggttatcggtgctggacccgccggactagtagcggcacgagagcttcgacgagaaggtcactcagtggtcgttttcgagaaacaaaaacaagtgggaggaacctggatttacaccgatgaagtcgaatcggatccgttaagtgttgacccgacccgatccgttgttcattcaagcgtctatagatctctacgaatcaacggtacacgagagtgtaccggatacagagatttcccgttcgtggttcgttccggtgtgtctagagatcggaggaggtttccgagtcatggcgaagttttggcgtatttgaaagat

SEQ ID NO: 46039 - DNA, 853 bp, Arabidopsis thaliana
gatagatatgtaaaccggtagaattctggtttagaactgattaccaaaccggtttactaacgattgaatttcgaagcgggccaaaactgttttgggacttccactaccctctagataaaacgcagcgtttaaacaatttctcaggaatttgtttttgtttttttaacattgtgtcgtggtgtgtgtggttcatgagtttttgggccacatatttataaagaggccgtagtatattcaccatcgttaacgaatctcgtaaaaaaacccaatggcgccttccttatcaccaatcagatcacaccacgtggcagttatcggcgccggagccgccggattagtcgcggcgcgagagcttcgtcgggaaggtcactcggtggtcgtcttcgagagacaaaaacaagtcggaggaacctggatttacaccgatcatattgaacccgatccattaagcgttgacccgacccgatccgttgttcattcgagcgtctatggatctctccgaactaatctcccccgtgagtgtatgggatacagggacttcccgttcgtgattcgttccgatgtatcggaatctagagatccgaggaggtttccgagtcatggtgaagttttggcgtatttgcaagatttcgctaaggagtttgcgattgaggagatgattcggtttgatacggcggttgtgaaggttgctccggcggcggaagaaggaagcgggaaatggagaattgaatctacggagaaagagaagaaagttcttcgtgatgagatttatgatgctgttgttgtttgtaatggacattacattgaacctcgttacgctgaaattcctggtaatctccgttgattcatcgag

SEQ ID NO: 46040 - DNA, 1408 bp, Arabidopsis thaliana columbia
gaatgtcttgaacgatttttcaacatagctattctcatcgctgctgtcatcatcttcgtcatcaatgccgaatagatcagtgagccaccttgaccagtttcctatctgtttgaaattagaaatgcatgagctttacagagaccacagtataataagcattgccaagctattgagttgagtacactgaccgagtttttcagctgggcaccagaaccaaaacttgatgttctagaaggaattggcaagactctcaagtctgcaatgggatcagatacagggtctgttgggaaattgtcatcagaatcacgaaggatagcattgaacatagcaacatctagccgagccacacactgttccattatctgcgttacaaatcgtggacattcgtttgtgaaatcaagagtaaggtccaaaagtgacaaactcaacaggagaaatgtttaccagacgcgcaggtatgggcaagcagccacattcatgcccactacctcgcagagggcataaacgttcgtgtgcctccctgaaagcctttttccaaagctctaatgagaagtcacctagttcttggttcgtactactcggagtcctaccaaaagttttctttgatgcagagcatttcctttatcaaactctctagttgatgctgccgaagactgcatacgtggtgtcaaagtctgcaaccaaagaaaaagaacatgtgaattataattggttcagagaatgaaaagatgaaacagggagaacagagcaacattacctgccaccaaattgattctacgacgcgtgagaagatccaagcttcgaccttttcaagcgctgttatgaaagttacagggtcatcccaggcaccaaaactcttaatgtcctttttgctcaaaggggaatctttccacttcaaggacgatcgtttctcggtttctctttcagccttctgttttcttggtccaggaccagcagaaacaggcagttcctcttctgcactagtatcactaatgattgtcctcagaacgatagtgtttgacaaccaaaatgtcaatctgcaattcacagacaaaatttaactctgagaaagttcactcagaatagtaattatgcaaagaaagatattaccatacctggggacatcgtttccacacgctttggcaacaagaactaacccggagacagcactttcagctgcattggctcttcttgagagatgggtttctctacaagcatgaagatacagcctcaaaagacgtctagcaggcgcatggactttacttgatgaacttccatgctctgcaaccacggagtagagagctgcttcaatggctgcagctcgcataactcacctcaagcttctttactctactttccaagttcttgattttgctctccaaagttgtgtcgtgtgtagaatttggat

SEQ ID NO: 46041 - DNA, 615 bp, Arabidopsis thaliana
tgtgtagagcttgacacggcagttagataggttcttgatgtgggttaacaccacgtggaagtatcccttaaagtcagttggatcactgtagatgacaacctcgttcttactcttctcgtatgaccccctctccgagcacacaatctttgctttcgctcctacgtacatgaaattaatcaaccaaattttctaattagtaaattcgtaatttccggtatttcctagtccatttaggatggatgatttaggccatgccatattgtattattaaccgcgttgtcccgagtatacggtcctcgacctcgaatttcaaggttatgaaaccaaaaatgttgtaataattaaagatattaaatcatgaagtctgtatattattatgttttttataccttgaatagggtaggtttcgtagccgtttttgcataagatgatgcctccaacggctttaatgatctctgggacgtatggtttggtgggtggagtgtaggttggttttggtgcaaatggaggtggaggagaatagcttggagactttttgtagaccggaggagggagagttggcttagtgtaaaccggaggagagagtgttggcttgtaaaccggaggcgagagact

SEQ ID NO: 46042 - DNA, 1248 bp, Arabidopsis thaliana
caagaagtgatttctaagttcctttttgctttttgataaccggcaagatttcttgactctttgtagcgcaaatactatagaccaactataaccaatattaattaagagtgtaataccaatttttgacatcatcaaaaatagtccaaagtttattcaaaaatagtccaaatttattcaaaaatagatggtgaaaaagcaaaatcaaatgacagaattcgtgatttgccgtttattggaaaaaaataaacagagaactaatatgcgttatgcaacaatagtttcgttaacggaatcgaattaaacatttgcttccaatagtaaatctcacaaattaagtaaataatcaataatcatcagaagaaaggaaaaaacttaccgagagaaaatataagaaataaacttgaaattattcatcatcatgcataggtgcagatgtggcggcaactccgagtttctgaaggttgagtttgacgacagtgtccacaaacattttagtgtcttcctctgtgtttccctcgggaatatcaacggtgtaagattcaagaaccaccgtgtaaaccttgccggaatcttgattcaagaactcattgaccgacgtcactgatttgtagttcttgagtcggtgctctccgccgacgaccctgaagcttagaacacggtggtcgtcatcgacgaactcaagccgctcggtactggttgaggctgggaggccggagattacggtcacttctctgacgcttccgacgtcaccatcaccggagatgagacggcacctttttacaaagtgtttgtagcgttcggggttgtcgaagcggcggataagaggccaaaccacggaggccggagcgtggatgcgttgggttatgagagaagtgcacgtggttgggtctggttcgaactggtggtacgttttgataaccggttcgagggttttctgctcttcatcggttaggcctttcacggccggggatgagctcatggtgatgaatcagtcacacgtgtgagggttttatgaaagagaggtcttcttgttggaggttggggggtttgtgaaagagatgagaataaaagacagttctttttttgggagctatgagtgtttttttatatattactacaaatctatgggtgttgttctttggacggatttatcctttctgtttgtttattgccatatattaaccttgttctacttatatcttcccgtacatttaagtgatgtttacaaaacaaaaagttcattttagt

SEQ ID NO: 46043 - DNA, 669 bp, Arabidopsis thaliana
tcccagaaatgtcactcttccaacagggaacttacgttaaactacagccccacacaacagacttcctggatatatccaacccgaaagccatgtgagtccgacttatttctaccctcttgtatttgagccctcatatactttcccacatcatgttgtttattgcttagagaatgtattattatatctaagttcttcccgttttctggctcgtagttgtttgatgtcactctttttatcttgttcccaatattctttactgataattgagtgaacgttgcagcttggagactgctttgagaaattattcatgcctaactagtggggatagcattatggttccatacaacaataagaagtacttcatagatatagttgaaacaaagcctgctaacgcaatcagcatcatagaaacagactgtgaggttgatttcgcacctcccctcgattacaaggagcctgaacgtcccacagcaccttctgcagctaagggtccggcaaaaggtatctatccatggacatgaaatcatcagatggacttactatcagcttcaagttgttagattctcatgtgttcttttcgttccaaatttcacagctgaggaggttgtggatgaacctgaaccaaagttcaaccctttcaccggatctggaagacggttagatgggaga

SEQ ID NO: 46044 - DNA, 824 bp, Arabidopsis thaliana
ttggatcccctgaaattatatcttatctctagaggagatggaatgtcaggattggctgccggcaagttcagcagtgtcatttgtaggtgcgggggaaccacaggcggttctttagagtagtcctcagctccgagaagcaagttgctgtaactattctctggagattgcggaggctcaaacccagatatgctttgaatgtcttcaggaacatagtcctgcataacatcaaagtatctctgctgttttcacacggcaaaatcgaaaaaggaactacaaagcctggttttttaacttgctaatcaacatagatgtctttcccattccctataaccctgatttagcagttccagtagtctctcattaaccgtttcatttctccaccaaccaactaaccaattcgaaagagaatggagttacctgaagatccaaaatgttgaaagtgttcccagcatcatctctagctaaagggagctcaggggcatgcctccactgtccatccacaatgaacctgtactcatagactcctgaaggtaacactttcatgatagtgaagtccttcccagatctctgcagccgacttctgatcaaaccccccaaaacaacaaacaacaaagatgagctcagatttgaaatgatgaaagaagccattaaatcaaaacaaacattcagctaaaaaccttgtcttccaattatcccatgatccctccacagcaatctccttgcctccatgacaccaagtgatcatcgtagggattccttgttcgttagaagcttcttcatacaacgaagatggcgattgcaccacgaaggattagggatatgaa

SEQ ID NO: 46045 - DNA, 629 bp, Arabidopsis thaliana columbia
ggctatggctaaaattatatcaaatggtgatagtatttcgatatactctagagctagcagtttacaagggtttctttcggatggaaagcggagtgatcctcaacgagttgcaggtaggctgtagttttgttttgctgtttggtatgcattctatcgagcatatcaagcatctatacatttcataatgttcaaccatgtggaagtttttctatgtttatttgtgctcctaagttaatagatgcaattctttttttaggtgctgcccaatgcttgggggagctgtatcgtcattttgggaaaaaaattacttctggcttgttcgaaacaacatctattgtaacaaaattagtgaagtttaacgaggtatcacagttcacgttacatttaagttctttctgtcatgtggaacagtaaatttgattggtttaatcgacctcagtagatcatgtctttttatcatttgccctgttgggctatttagaaagaactatacactgtgaaaatatcaaataggtatggggcattgaagctctgcaaccattgttactgtgtcctaatatctatggttgatatagtttggtataaccaatttacttttcctagtctctgaatctgctgtttaagtggtt

SEQ ID NO: 46046 - DNA, 917 bp, Arabidopsis thaliana
cgctaacgatctcgccacttcttcggtcagtcatggtttcacaacgtacaatactgtaaataatttattgacagatcaaaggcgattatatctaagcaaactttttcagactaaataaacaaagtcaaccaacatatcggggactcacacatgtgtttcaaagttatgctcaaagcggtcctataaatatagttattttaacaggaggaattagcgagaggcgacactatgaaatccgtacaatgtcacatgcatgaaactggagcttcggaggcagagtcacgcgcgtacattcaaggaattatcggtgtggcttgggatgacttaaacatggagaaaaagagttgtaggctacatcaaggtttcctagaagctgcggctaatcttggacgtgtggctcagtgcgtttatcagtacggtgatggccatggctgtcctgacaaggctaagaccgtcaatcatgtccggtccttgctcgtccaccctcttccactcaattaattaattagtttctaataataagtcttaaatcacacaagtattggattagacgctcaaagagttgagagatgcatatgtattctctactcaaattatataatgcatgtaaacatttgttagtttttatcaacatcaagagcttgtaaaatcaagttagatgaatattttgtatatgagcaaataatattcacttgatcagtatatactagtgcttatataagaaaagaaaattcctatatacagttttaacatttcgagcaaaggaatcagcataaatgtaagctatgtgagataaagataatttgaaaagacgaaaactgattttggaggagtagacacaaaatttgatcggaaaatggagataaacagagcattgtctacaaacaaaactaattaatagcttagcgtggaaggcc

SEQ ID NO: 46047 - DNA, 599 bp, Arabidopsis thaliana
gctcagctctatgttaaaggatgtttcttcattacggggagaaatgaatgagagctcttgtttattgatcttcccatgattctagttctaaacgagccttctgttatctgaatttgaagtgttttaagcttttttattctaataagccgtcttcttctctgacgctatgttttgctcactgcagagctcaggtcactatctgacgggatccgtgacaatagtggttactggagtcaaaagcagctccttgaatcttgagtgttaagtagataggtaaggtaaccgttcatggcctcgaagtatggttctggagttctcccagaaaataagaaggaaaagggcgataaggaaaccccggaaacatcttattccagtcaaagtgtctcagtaaacactttggcagatcaagtatcttcaactttgtcttttgctccaagcagcgacagtaaaactggaggtgaagttaaatttaatgaaaagtctgatcagagcgggaagagtaacacatgtagaccaagcacaagcagtgatatcagtgatgagagcacatgtagcagctttagtggtacaacaagcctcacaaggcgaatgacgtgaga

SEQ ID NO: 46048 - DNA, 596 bp, Arabidopsis thaliana columbia
caactatatcaactaaaactatttgatcgtgttgcttttaattttaatgaaaatgacaatatgtaatgtacctcttcttatatgtaataaattattatttaaactgaaatcaagctttctcgtctatactaaacatatataagatgggttagttcttatttaaaatgaccttgattccaagcaatttgacaatgattctacagaatatgtatgttagcattgcgccgtatgaattcttctttcgactgatggtcttctgagctatttcaagatgttccaatgggtcatcgcgtaatgcgatagaaaacggaaatactacatagccgaaccaatttccccacctacatttagaccctttctccatcatatctgctagatcctgttttaaaacaaaaataaatttaaatttcactgatgattaagtacacttaacttgtaatcaaataagtcattaactttatgtgaatttacctggattccagttgttggtcgtaagtttacaagcagagctgatcttagccttattctcttaggcagctttttttgcttcctatttttagttcttcttctcctattagtttatcatgaaattattg

SEQ ID NO: 46049 - DNA, 587 bp, Arabidopsis thaliana
caaactgaaaccaaatctgatatatattgatgaactgagtttacgtttagtatagcattagtgcgagagtactgagtttacgattatcttttctatttagattgagattcttaacattctctttttgcaggaattaacgttctatgtggagtagctttacttacaatgccttacgcagttaaagaaggaggatggttagggcttttcatactcttctcctttggcattatcactttctacaccggcattctcctcaagagatgtctcgagaactcccctggaatccacacttacccggacatcggtcaagctgcattcggaaccactggacgcatcctcgtctctgtaagattatttttcaaataatcaatcttaactttgtttgtgtgtgaattgtgatcctaacttaacttgggtttggaattacatttcagatacttctctacgtagagttatacgtaagtaccaaactctctttcatgtttcatatcatgattgaagaaattgaggtcctaactttgaatttttttctgtaggcatcttgtgtggaatacataatcatgatgagtgataatttgtcaagaatg

SEQ ID NO: 46050 - DNA, 761 bp, Arabidopsis thaliana columbia
  unsure (1)..(761): unsure at all n locations
aataacaagttgtgggcgtatgtacgcgtgtttctatagtggaaagatgagagctcaatacaatattaaaggagatggttgtactgattgccttaaacatttttgctgtaacctctgtgctttgacccaacaataccgtgaactcaagcaccgcggtttcgatatgagccttggtaatttatttcttcatgatacatcttacctttttttcatttttctgattgatttgttagtgtaatcgaaaaattaattaacacttgttacaaattaattttcgtattttaggatgggcagggaacgcagagaaacaacaaaatcaaggtggagtggcgatgggtgctccagccttccaaggcggcatgacccgctaagattgatttctctatgtgatcatcatttgtcttatgtgtaataaaaacgaggtttaatcctctgtcgtgtgtgtatgtgttgtgtaatcttctgtttgtttttgaaagtttgaacatgagtatttctttaatgtatatcccaatgtaatggatcacaattgttacgagtgttaaattacaacgtcgataaagttacaccaaaacaatacttacgtcctttttatggatgttaggttatttggtcgttctattcgtcattcaacgaacattaatcggaagactagtctataaacctaaaacaagaaaagaagatcttgaggttgcagctacgtggaaatacaaaataatgtctttgttttagacataacaaaaaaatgatttntaaaaata

SEQ ID NO: 46051 - DNA, 649 bp, Arabidopsis thaliana columbia
gataaaattgtctggctcacatgtatatatcttaatcagttaagacttaattatgataaaattaagtaaaaagtacttattatttatcttgcgaaaattaatgaacaggttgtatcacattctggtgtccatgtatcacctttggccaagtcgccgagattgtagatcgaggatccacatgtaagtttcttataatacacgatgtcataaaaatgcctttgtcaaatttggcggcatagtgataaattattgctggttcaaaacatttcagcgtgtggtactgctggagctctatacgcgttgatagccgtagtaactggttgtgcatgtatatactcatgtttctatcgtggaaagatgagagctcaatataatattaaaggagatgattgtactgattgccttaaacatttctgctgtgagctttgttctttgacccaacaataccgtgaactcaagcaccgcggttacgatatgagtcttggtaatttatttcttcgttatactgttttttttttgtttcattttgttaataattgattgttaagtgtaatctcaaaacattgacattcgttaaaaattaatgtggtattttaggatgggcggggaacgtggagagacaacagaatcaaggaggtgtgccatgggt

SEQ ID NO: 46052 - DNA, 864 bp, Arabidopsis thaliana columbia
tcactctctcatcaattacttacatatatatttgcacgtgtactagctgaaaaagtagttttgtgctatactatattatctatcttgtaaaaatgattggacaggttgtatcacatggttgtgtccatgtattacatttggccaagttgctgatattgtagaccgaggaaacacctgtaagtgcctttattataatacacggtatcataaataagcttgtaaataattgctgattcaaatttttgtcagcgtgtggtactgctggagcactatatgtgttgctagccgcaataactggttgtggatgtctctactcgtgtatctatcgtggaaagatcagagctcaatacaatattagaggtgatggttgtactgattgccttaaacatttctgctgtgagctttgtgctttgacacaagaataccgtgaactcaagcaccgcggtttcgatatgagtcttggtaagttatttcgatgtcattttgtttatgattgattaagttttgtaatcgcaaaacaattaacactcgtataaaaattgatgtggtattttaggatgggcggggaacgtggagaagcaacagaaccaaggaggtgtggcgatgggtgctccagccttccaaggcggcatgagccgtaagatttgcttctttatgtaattgatcatatgtcatatatgcggtaataaaaatgaggtctaatcctttgtttgtgttgtatagtatgtatgctattatgcttgttgtgaaagtttgaatatgagtgtttctcaatgtatattcactgtacagtacaagaatgtaattcaatgccaagaaagtgcaccaaacaaattaaccaagttttagtttccaatttaaata

SEQ ID NO: 46053 - DNA, 571 bp, Arabidopsis thaliana
aagtgtaaaatatgcttaagcaggggttttgttttcaccattgataggtctcaaagtcatttgctgaagggaagaaatctctggaggaatacatcaacgcggttaagaaactagtgggtcttcggtgtcttgtagaggctgtagcaatcggtaaagataaggaagatctgacagtccttacaacaaaacccgtagatgtagaacaatggtttagagtttcttctgcggtacctgctggtttaggggaatacaattcactcacagttgaaggtataatcgaaaaattgtctggtggttcccgtgtgagcaaagctcgttgcaatgatatcttctgggatgctgtatggccgcgtttgctacataggggttggcgttctgagctgccaaaggaccaaggttacatcaagtctaaagaacacattgtcttcctcgtccctggggtaaagaagttttcaagaaagaaacttgtgaaacgtgatcattactttgattctatcagtgacattctcaaaaaggttgtttcagagcctgagcttcttgaggagacagcagaagaagaaagagaagagac

SEQ ID NO: 46054 - DNA, 1038 bp, Arabidopsis thaliana columbia
cggtataatacctgtatacgtgactaatcaacgaattaaatttgagcattgtggtggcgagatcttggatcatcttcgcttggccgcttgggcgtggtcgtcggcatcgtcactaattaattattgtgattaagaaaaaatgctaaattgagtttcgtcgtcttctgcttctgcttaagcttcttcatcatttagctccagaggcggactttcttctctctctgtggacgaccatggcggcggacgacggcgaccccactaaattcgctgcaatctacgactcatcctctccgtcacaccctcttctctctaaaccctccacgtccgctctcgattctccgcgtcgaagtgatcccgaatccgacccaactcagtttcttcagatctcctacaattttggcccaagaactttcaaggacatccctttcctacttctcttcgatcttctcgtactctccacctttggttttggaatcttctccatttttcatagaaataacgattacgggaactcctcttccttcacctacgatttcacctctagctcctgcgtcaaaaattctacctttacgaaaatttcggatgggtactactgggcttcttcgagtgtcatgtacggcatggtttcttcgtctgatccagtctttgagaaggatttgatctggacacttgttgtaacgcttattttaagcgtgcccttctgttttagcgtcctgcttttgctcaaacactacactaagcagattgtttatgcttgtttacctctctttgtcctttttcccatctttttcaatgtctattggtttgtcgcctgtactcttagctcttcttgtagcgatgccctccctctagcttacagaatacttgtcctagtctttgttttcttgatcatcgggatcattgtctggatcatagtagctaattggcacagaattgatcttactatccaaatcatcagtgttgcatctgatgccttgtccaaaaatttgaaactttttgttgtgtgccgctgctgactctcgggttagtggtgtacta

SEQ ID NO: 46055 - DNA, 783 bp, Arabidopsis thaliana columbia
cagcgccgcgaagtttcaatcgaatcctctagatttcatgaaatcgaagctcgttttgttagtatcccacgagctatcactctcaggttctgctgatttgatttctaatttgatctgggttctcgaaaaaatcatacttttttgaggtgatgattgattttgtgtgacaaaaggtggacctttgctattgatggaattggcgtttttgttaagaggagttggtgctgacgttgtttggatcactaatcaaaagccacttgaagatgatgaagttgtctatagtcttgaacacaagatgttggatcgaggagttcaggttctctcgtagttcctaccaatagacttcagagtttgttggaaagatgttgtcttgagctctgttaattgacaagttcttatttttggtatctgacttcaggttatctctgcaaagggtcagaaagctgtagatacatctctcaaggctgatttgattgttcttaatactgctgtggctgggaaatggcttgatgctgttctaaaagaaaatgttgttaaagttctacctaagatcctatggtggattcatgagatgagaggacactatttcaatgctgatttggtcaaacacctcccctttgttgcaggggccatgattgattcgcatgcaacagctggatactggaaaaacagaacacaagctcgcctagggtatgtttcctctttgcacctcctgcttcatgtgaatgatatacagaaaactaagatatttgtgtatagtcttgcctcatttcagctggattc

SEQ ID NO: 46056 - DNA, 1063 bp, Arabidopsis thaliana columbia
catttcctcctgaagatttcttttttctgttgtctggggaaaacgaagcagacgaaggaagtcaaacaccaccgtttttaaggtgacttcgtagtcttgtgatctcgcttctgttctttacttttccgattgaaattttgcttctttcttagcaataaatgtcattgatttctgggtttctcctcttttctcttctgttattctgcttttcgttgatatcgagcttggaactcggctgttatcagtttttgtgagagttaattttgagattgaacgtattcataatgtttgtttgactgtatgttctaattgttgactttaatttggtcaatattcttaagatttgaatgtgaatcagaggtgaagagagattctaacagaggctcaatttcactgcacatattttttgagcaactggttagaatgcatttcgagaatggggatggtctatttcagcttagacaatagacattgttgtatattcttgttatagccattttggtattattggtgtgtgaaaggatgatactttgtggagaagctgagagaaaactggaaagcccaatttttattctgttaaatgggttttactctgacaattatacaagatatggggtgactttgaataagtaatgtacaaagtttctcaattctttgtgtagaacttcgtggacaagagagctagatggctaataaaatgtaatttttctttgtaattcatggcttggttacacgaccaagtgttgaaaccttaattactgcgtttggtggctccgttgtcataattctggtgagaggcttcaggtagtgttataggttactaagatagttttggggaacagttttttttagttcttgatattatctttatgtgttttctctaagcgtgtgattctgttttcttgcagacgatgattcgtgcaaagcacattagtaatctttctagctcagcaagatcattttttcttagtggatcgagaccgagtgctgctgatggaaattcttgtacatgtgctgaggatgaaagtggcgtctcgaaacgccagcaaattaggactgaagt

SEQ ID NO: 46057 - DNA, 862 bp, Arabidopsis thaliana
  unsure (1)..(862): unsure at all n locations
gtatgagtagtgaccattgagtccccgatttcatcaagtaattcgatgatcccaaaagcacttccggttttgttttagagacaataaaaaaagggaattgaaaacatatatgtagacaagtaataagatgatgaattaaattacctcaactggagaaagctggtagagacccaacttcatgaagtcagggctaaaaaacatactcagtccggaattgtctgaaccataaggttcgaattcggtgcccatccatgcttcttgaggcatgttgcttccaaacttttacataatttacaaaatttcaaacagagatttattttccaagtttattacaattaaatatacaagaaaatcaagaaccgtacggtggtaaaacacctaacaaccatgaaaatgatacatgttcaaaaaactagtagatttaattttgaaccccacgtgtacattatattgtcaaatgtcaatacatgatctatagttatctcatatatgccacaaaaagaactcatatatatagtagattccaaaaactccagaaacgaaatcttacatgcgctaattcattaatatcaggaatgaaagtattacatgcatactaattctagtcagcatgaggcctagacctatttaatactaaagaagactttgtggatacattcatatttatgatggtctatgctcatatcatcaagagtaaaataccaaaagaaaaaaggagataccttgtccaagacgaaggatggtgagtgttcggtgtccggcatgaaagcagtcaagaatacagcgacagagattttttcgggaaacttttccatggctatggctaagttcaagcaccanagctgtgaccacgagcacaact

SEQ ID NO: 46058 - DNA, 635 bp, Arabidopsis thaliana columbia
gagaagcttctgattcgtttccaactctctgctcaaattggatacctcttccatagcaccatttagcttggactccatttcactcagtttattggacttttccatcagctcatttctaagttccaagataatatcaccactgtctttggcatctaaacctctgccagttgccacattatcatccaaagatttttgtgggctctcagctgtcgaactgttacttagaaacacacccatttccccagcctcactatcttttccacctttctcgttgttttgctggctttccagcatcgatgagtcaagcggttgactgagcacctgagaggaatccaccatattctcatccataccttcccgagctttacatggctgcttgctagtaagatttgaaacacaagagacctcatccattggttctgaaccagatacatgagttttgttgccttccacgtcacttgaagcttctgctttgtattcactaactttttcatgcataaggtttaagccagatacatccttattattatgtctctgtccctgtagatactcatcagagagacgttgtccagttcacggatgcgcttctcatatgaatcacagtgcatttgtttttccttgagcataagtagaag

SEQ ID NO: 46059 - DNA, 945 bp, Arabidopsis thaliana
tgcagaatgaagtttgagagagcaaggccattcatagccattgttttcatacaatgtttgtacgctttgatgtctatagtagcaaaattagctttgaacaagggaatgagccctcacgtcttagttgcttaccgaatggcagttgcttccgctctcattacgcctttcgctctcatcctcgagaggtttcttttcttcttccggtccatgcaaggcctgtaacacaaaaacatacactttgaggttaaaataatggttccttttgctccaaatgcaggaacacaagaccaaagttgaccttcaagattttgttacaaatagccatccttagtttatttgagtaagagtttgtttaaatcatttctgatgcacaatgatagtctgttgtaacttgatttaaatgattaaacacaggcctgtggtcgaacaaaacctgtactactcagggatgaaacttaccactgccacattcacatcagctttgtgcaatgctcttcctgctatgacattcataatggcctgcgttttcaagtaactctctcactctctagaccgatattatttgctgatgcacacatcattgcagtactgaaacaatttgactcggtttctgtttcttgaaaggctcgagaaggtgacaatcgaaagacgccacagccaggcaaagctggtgggaaccatggtggctattgggggagcaatgctcatgacattcgtgaaagggaatgtcattgagctgccttggacaagcaactcaaggggtcttaatgggcacacacacgctatgaggattccaaagcaggcggatatagcaagaggatcaattatgcttgtagcaagctgcttcagttggtcatgttacatcattttacaggtatgatccattcccgcttccatgttcatgaatcttggtagctaacctaaagccagaagtttccaccagtt

SEQ ID NO: 46060 - DNA, 501 bp, Arabidopsis thaliana columbia
tgaatggtctaagaatatgtttacctttgaagaatgtgactctcgtttcgatttccttttgcattaattcacacattaattgatatgtccaaggatttttaggatcattgatagactaagaggatttaaggttttcttttattttattttatttttaatgattttctaatagagattttatatttactatatattttgtcacagatatcaaaaactgattgtaaaaatttatttattgttttggataaatctaaattaattattttcttgaagtttataattcaccatcaatagtcagtaactaataaaaatgcattaaaacaacaagtctattaattctaggttttcttcgtaaattagtttgaaggtataaaaccctaattcgaaaacctccccaaatcaggaaataatgacgacgaaaaagaggaagaaataatcaaagtctcctccgacgacgtttctttctttaccagacgatatatatcgctttcaattgtttgg

SEQ ID NO: 46061 - DNA, 878 bp, Arabidopsis thaliana columbia
caaaatgcttggatgaattagaaaaactaggtggagaatacagtaaaaaaattcaaaaagtgcatattgtttggacaacattaatatgtacaaatagtttacatttaaatgtattattttactaattaagtacatataaagttgctaaactaaactaatataatttttgcataagtaaatttatcgttaaaagttttctttctagccactaaacaacaatacaaaatcgcccaagtcacccattaattaatttagaagtgaaaaacaaaatcttaattatatggacgatcttgtctaccatatttcaagggctacaggcctacagccgccgaataaatcttaccagccttaaaccagaacaacggcaaataagttcatgtggcggctggtgatgattcacaatttccccgacagttctatgataatgaaactatataattattgtacgtacatacatgcatgcgacgaacaacacttcaatttaattgttagtattaaattacatttatagtgaagtatgttgggacgattagacggatacaatgcacttatgttctccggaaaatgaatcatttgtgttcagagcatgactccaagagtcaaaaaagttattaaatttatttgaatttaaaacttaaaaatagtgtaatttttaaccacccgctgccgcaaacgttggcggaagaatacgcggtgttaaacaatttttgtgatcgttgtcaaacatttgtaaccgcaatctctactgcacaatctgttacgtttacaatttacaagttagtatagaagaacgttcgtacctgaagaccaaccgacctttagttattgaataaatgattatttagttaagagtaacacaatcaatggttcaaatttgt

SEQ ID NO: 46062 - DNA, 625 bp, Arabidopsis thaliana
tgggtatcaaaagtgccaagttccctggagtgccatacacattcttctcgcagagacaaggctgcaaagtttctctgtaccaagatgctcatattccagacaactttgtccctagaattcctctcgctggagggaagaactatgagcctcaaagatgttgggaggatatttttgatgctattagcaatgcaaaacacttgatctacattactggttggtctgtttacgctgagattgctttagtgagggactcgaggaggcctaagcctggaggtgatgtgaccattggtgagctactcaagaagaaggctagtgaaggtgtcagggttcttttgcttgtttgggatgacagaacttctgttgatgtgctgaagaaagatgggctcatggctactcatgatgaagagaccgagaatttcttcaggggaagtgatgtccattgtattctgtgccctcgtaacccggatgacggtggtagcatagtccaaagtttgcagatctctactatgttcacgcatcatcagaaaatcgttgttgtggacagcgagatgccaagcagaggaggatcagaaatgaggagaatcgtgagttttgttggcggtattgatcattgtgatggaagata

SEQ ID NO: 46063 - DNA, 582 bp, Arabidopsis thaliana
atcatattatgtacatagattcatagaaagcttctaatcaagatccatacaaaattacaaagggagacacaaacctcccatataccttgccggttttattatattgacatatatatagactatataatgctataacataacataacaacatactatacgaacatataatatatatgtgcaaattaacatgttaatttgaacaagtcgcggcacacttggtcgtacagtcaaatgaacatcctccactgcggctggtgcttttataaccatccttgttaacgttggttgatttgtagcactcctcgggacatgtcagcttcttaccgctacaagctccttgcgccgagcatgtatgtgcacctccagcattcatcatatctccgaatgatcctccagcacctccagcacctccagaggaccccgaaaacccggaaaatccatgatgaaacccggatttggaaccaaacatctcgctgattccactatcccagagttgacgactagcttgagatgctgagacgaagatgattaccagaaggatcgctcaaaggattgattttgtggacctgttgttgttgtttg

SEQ ID NO: 46064 - DNA, 490 bp, Arabidopsis thaliana
tgaaatccttagcacgtctgattgcatgaatgtaagcatcttggatactcctatcaatgatgttatctttcccacttacaagcccggcttccgcagcagcttcaggcgactcgggaaacccagcagcagctcctccatcaatggacctaaacaattggacattccacacatcgtggtcctcttggaacataacaggagaaggggtgataataatatcactaagatctctcaacttaaccagaatgtctttaccaccctgcttgctccatctctgctcgaagttgtacatgacatcccaagcaattggaccttcaagacgggagtgaatgtcatgccaaggctcccttggaccacctttagtgatagcagcaccagtgaagttaggttgatggaagtcatcatggtggactgtgtcaatgtcctgaacaaggagtggaacggagtgccgtatcttccatcacaaagatcaataccgccaacaaaactcaca

SEQ ID NO: 46065 - DNA, 863 bp, Arabidopsis thaliana columbia
cgtaaaataatcctaatctcacgctaaaataagaagtacacaatgtggtttgcaatcaatttacttttgttgtctttttaatccatttttaacaattcttttattggttttgtcgaagaaaagaaaaggtgtaaagtcaaatagtttggtcaattgttttaaggtaagtaatagtaatatcgaggaaaatagtagataaaactaattttggttttagatcagagttttgttttgtctattttttttccttcgtttgttgtttcacatttgtctggacttaggggtacgtcaattggagagcaggagaagagagttagtattacactaaactaattaagtccacccatgatctatctatcaaaacactaagcagaaccaatcgaaatacataacagcacaagaaaggtcgtacgtccttaattatatattgtagttttccattaggtactctacatactatataacccacgtcgccaggatggtgatggattcttctaaggaagattgactgatgctaatctatctcttgtcaaccaaaattctgccgcctgaatccgattctttgacaatagagtcgctgctaaagagctatctatagtgtaaaatccaaaccatctatatgaataagagatattacttgacagtactcttcaaggctatctatagaatcatatcgttcaaactgttgtttcttaaagagcatctcgtgtgttttatctttattaatctacattccatatatgttgcaagctgagtgagtatgcatgagtaaaacaaatagttccacttaaaccttttccaaaaaaccaaaaaggaatccaattatttgaccttaaaatatagggagaggtttatatagtatt

SEQ ID NO: 46066 - DNA, 700 bp, Arabidopsis thaliana columbia
tcttatcctacaccgtgtcccaccagatcactcatcgtcacactaacacactcaccaaaaaaaaaactcaaaagcacaaagctcgaggaggtccataaatggcgcatttaattagaacccccaaaatctcttcacaactgtaaaaccccaatcacctctttacatgtgacttccttattactctcttcttcttattttcctcctcttcttcttcgctctagtttcccccaacaatcgccatggcagcttcgtctctcaatctcctcctcattctctctcttctcactttcatttctctccagagatctgaatctctttccgataatccatctctcactcttctacccgacggattcgactggccgatctctcactccgatgaattcgatatcatcgacggtgaagaaagcttcgaagttacggaggaagacgacggcgtaacagatcgacggtcattgtactggcggaggacgaagtattacatatcgtacggtgcattgtcggcgaatagagtgccatgtcctcccagatctggaagatcgtactacactcataactgcttcagagctagaggtcccgttcatccgtatagccgaggctgctcgtcgatcactcgatgccggagatagatgaagaaagcttaaaactccatgggcattttcgtaattttgccaaccatggtttattattatgatgtttg

SEQ ID NO: 46067 - DNA, 906 bp, Arabidopsis thaliana
tgttgatatctatcacacttggggtctctgcgcttccggtagaacatcattattggagtcatagttgtgcttgggctaggaacagctctaaggctgactttggagttctgttatgagtggagcttgagaagagcggttcacagggcggtgcagacggcggaacgaacaacttcagtaatattgcgtacccacctgccttgtaggggggaaactatgtcaagttaaaaactcgtgtgtgtgtcaaagttgtgtgagacgtgtagaactacaatgctggatttgttgggaaagagccacaaaagagcaaaaaagattattacgagttttttcaatgcatagttaaaagaagtaacttcgaaacaaaattgctatgaataaatgaatttatattaaaatcatcagtgagacaccatttatcacacacgtataacccaacaaacaaactcaatgggggagagaaaaaggaagcttcggtgtgtgtatacctcaacaaactcaacaagcctttgatatctgtaaaccatcttcacaaaaactatggaccgacgaaatcagaacaaacaaaaatatgaaacgggttcactttactgggactaaccaaacttacatatgttacagacgaacaaacatgtccacaatctgattttaagatttccacggcttgctacacctttgacttccccgagtattcaaacatgagattttccttgccgtgagtttccgccattctgtatcagtgaggtttgattcttttctctcattcccacccgagcttcagcatctgatccaccacctttaagcttaactgcagtgattaacaaacttcctttgtcaaaaactatgtacaatgagagaaaatttgcgtctttgataaggatactgatttgtatggagacttggtagtaa

SEQ ID NO: 46068 - DNA, 489 bp, Arabidopsis thaliana columbia
gtcaaacaaaacccaacattattttattttttggttttagtgttaaccaaaaaaaaaaaaaccaacatttataaattgattaatttcatgatcatttttttttgtatgtaatgggaaatattatacctggctagttgagtgatatatatatagttcaatggaatatgaacgaatcaaaacatctgtcttaatcataagagatactttttcatttttcatatcttgacaaaaagagttatattataaatgttaagaaatcttttataaaaccttgaactattgaatcattttgggacagtgatttcttattttgataaaaaaaacactggtttgcatatatatataaaaaaagtattattttgaaaatgcatactcttgtattaatagatgaagaaacataatggaatgattttagaagaaaaaaaaatatatgaagaaacatagtacgtttactaaaccagagaaattgcttttaaataataataattt

SEQ ID NO: 46069 - DNA, 662 bp, Arabidopsis thaliana
accgagctcgaattcgtgtcgaaaagggtcagtggttgtatgcaaacggttctactcgcccctttccagagttttccatggaagattggatccctgaagaagacttgtacggtttaagctatccggaaatggtaaaagctcactactttgtgcaacgatatgctttcttttcgtgtacatgagaactgtgcttttatcatataacctccttatgagagatcgcttatcctgacatttttacggggtttgcagcaatatcgggtccattggtgcccgtttggtgaactctctcaagcagcagcttctttcgagtaagcctacaacacctttaccatggtttttgctattatctctcttttctaaggcttttgatccttcaaacgcgaaacgtagaattgacttttgctctgtgtttcagggaactggaacctgcaaccactacatgtaagttagacgctgattgttctgtatataatcatttcattttgtctagcaatccgtttataatgtcaaaacccatatttcttccttagatcatactgagttccatggacatcacgccgctgctgtgaatcattcgtatcttgcatatgttggacctggcccagccgctaccccgagaactagcgacaataacagcacagatgatcatccctggaaca

SEQ ID NO: 46070 - DNA, 581 bp, Arabidopsis thaliana columbia
catcgttatccaaagagacagacaagtcagtcactccataatgcttttatttatttatctattgtggttgtcattattgaggtaggtcctataattcatcttacgagcaaactgaaatgttatattcgtcgggccaattgtgcgaggaacaagaggcccacaacgagatcagctcttgggctatttggcccatttatgtaacttggctttgaatgaaatcggagcgtggctgcttaatccaacggtccaaatctgacgacgctccttaatggagtaatgagtaacgtctccttcatttccaacggtcaaataatcctcaagaaatactcgcttcttccttcttcctcctcaagtgtccaattctttctccaaaccctaaatttctcgtagaagaagatcaaatcgctctgaatatgacatcaattgaggcaacagaaacgcttaacgctcctccaaagcttcagatctggaacaacgctgccttcgacgatggagattctcaaatcacttccgccatcgaagcttcttcttggtctcactcaacgaatcattcgattccgattgtagcaaggagaatcagt

SEQ ID NO: 46071 - DNA, 539 bp, Arabidopsis thaliana
caaggctaagctccaatgtggtcaccagttccatttgggtatttcattcccttcctccatctcttaccattttgcgttccctccatcacagtttgatgatccgatggctttttgcttgtacaagcttttgtgcaattatctgatggtagatttggacgataattgaatgaatttgagaatatagatggattcctaatcccttgctttgtttacaagcttagattgccacgactctgcagttggttgatcctagaaatgatcgagttctgacaaatgtgtgtcgtaacttgtgaatcggtttcttctcttgtgtagatatagaatgaggcttgctagttctattatctggctgctgaatttgttgctattttcggctttccctttagcagcttgttttttggtttcttgcagattgcattggatcagcatttaacatgaaaggagccatgcaatgccctaactgtcgcaatgtcgaaaagggtcagtggttgtatcaaacggttctactcgccctttccagagtttccatggaagattgg

SEQ ID NO: 46072 - DNA, 860 bp, Arabidopsis thaliana
caaatcatactcagcatcgtcataccgagactgataaccgtgactggcatagtcgttctcagattccaacctctggtaaagaatggttaaggacgaccctcgtgaagccaaaagtacatggcaagggtaagtctttcgtcacttgttatgtgttggcatatcattactagtcttctcttcttgctaacatgatcatcttgtgaaacagtctggtcctacccctgtgctgattaaagcggaggttccgtggtcagctaaaagaggagctctttcagataaagatcgagtcgttaagagcgtgaaagggtattgtcaacaactaatactattcttttcagcttttgtgtttgaaggttgatgtgatgtatattctgactgattctttacaattttatgcagtattctaaacaagcttactccggagaagtacgagcttcttaaaggtcaattgattgacgctggcatcacttccgcagatatcctaaaggtttgtttcaattcctgatctctattgttgtagttctctctttcatggtattgatttgctcttacctttgattgcaggaagtgatacagctaatttttgagaatgctatactgcagcccacattctgcgagatgtatgctcttctgtgttttgatattaacggacagctaccttcgtttccctctgaggaacccggtgggaaagaaataacctttaaaagagtgcttttgaataattgccaagaggcatttgaaggtgctggcaaattgaaggaagagttcatacagatgactaatccagaccaagaaatggaaagaatggataaggagataatggcaaagctccggatacttggatatatccgtctgattgg

SEQ ID NO: 46073 - DNA, 653 bp, Arabidopsis thaliana
caacttgtaacaagggtgatgtgtcttcaatatatggtcaactttgaccatggaagcatccgtggaaagaatggcgaccccatgggtatgtgagaaagaagtcaacatcttttaccatctcaacaacttcagtcgatgccttaacaaggtgtgtacgagagagcaagataccatcaactatgacaataagagcgagccgaaatttgcgcagctcgccatatcaggctcacactttaaccatctaactagttccttcatagtaacaaaaccaggtttcccaccaattagagtataccaataaggggcaaagccttcagcatgagttgttgcagaagcaagttcgatctcagaagttaacgccgagcagtccaaaccagtgacttcatgaaattctgtaagtgaaaacctcaagggctgaccaccaaaaacaaaccacagctcatcattgttagtggtatgcagctgcctacatagcatctgatggactaactaccctgatatggaacactgacggacatgcagagagaaaagagaaccaagaggcgatgacaacaaagtatccaactcaggcataccatgtaggacattgaaaatgtcaagaagatactttggttttgagtatgagttatgcggactgcatgaccaggatagtg

SEQ ID NO: 46074 - DNA, 852 bp, Arabidopsis thaliana
  unsure (1)..(852): unsure at all n locations
atgtcaacactctcctagaggctgagacgaaagcgttactggtgcgatgcaacaaatttggtacaaagatacaagaaagtacaattccaaagagatcgcgaagtcctcattaaaaccatcaatggcaagtctaatagaagtaaaattgctaatttacttctagatttagagtattggtcttcagattttcatctattgtatttactttcacaaaacgtctttgtaatagtatagctcaccatttagttttcctaattttacgatttttgtgttttaagcggactattttgcttccccaatttttacgatttctgtgttcaaagcagactttaggaacgagccaatttggttcaaaaaccttctctgtaatgatctacattcatagattaaaacatagtttgcagtaagaaaaaacaataaaaataatataaaagttattttttttaatttgtgaaaaatccaaaatatcattgttttaggatcagagggaatagtaaatttataatcagtgtagtgaaaaatgtgtaaataaataatgtaaaaccaattgaaactgcaaatgttaaattatgaattaaattaattactataaaaagaaataatataatgctaagtatttatttataaaattataatcgttttaaatgtgtaaaaaataataaagagtaatggataattaaacccagcccattaagtttcataagcccattttactctactgtcttctttctcttttttttgacaatctttactttcttcttctaagctctataagagagaccatcctcctctagcttgaagcaaacgaaaagcttttngaagacagaggaacaagagaagaaagatggtcag

SEQ ID NO: 46075 - DNA, 503 bp, Arabidopsis thaliana columbia
gaagagcttgttaaaaaggtttcgagataatctcctagaggctaaaagtgactgatatgactaaccaatgtcaacacgttacttacagataaaattatggggggaaagtaaaaagtttttgaaagcttaccatgattatagctgccacagcaataccaaaagcagttgtcccaggcaagatactgtttggtacaagagggacaaatgttgaccacatgatctgcaattttcaaattcgaagtgtcgaattaattaaaacaagtgtctagtctaatgcctttggaatacatgtcaatggaatccactgagcaaacccaaaacttaaaaagggaaaagagtagtaaagagagattacttgaggaagaacggagagtccaccaatagtgataacgtcttcccacagttgccacacagttttgctaagcttaccgaaatagtacaaacagttcacaatgagaccgatggtgacaacagctgaagtagcacaaaatactgaataggca

SEQ ID NO: 46076 - DNA, 562 bp, Arabidopsis thaliana columbia
tgtggcatgtttgatgtgtctctatttgttaccttgagttctgtctcattaccgttactcgatgcacacataggttaatggtacaacggagaggccaaggctatgtgttttccgatcaaacaagcatctttatgttcaagtgattgatgataccaagatgcacaccttagcttcagcttccactaagcagaaaccaatctctgaagagttcgactacacctctggaccaaccattgtaagttcatctttgtaatcaactttggtaacacacttagcacgagtcacttggcactcaatttgatgatatgcttcggtttggtattgtgtaggaggtagcgaagaaagttggggaagtgatagcaaaatcttgcttggagaaaggtatcacaaaggtagcctttgaccgtggtggttaccttaccatggacgtattgaggctcttgctgctgcagcacgtgaacacggtcttcagttttaacagtcgttttctttccttgtttctttccgatgaacagcagtgtatgaatgtagagaacaattttcccaattgaaatgttgagat

SEQ ID NO: 46077 - DNA, 585 bp, Arabidopsis thaliana
ccagcagtattatggtaaacaagaattctacagagagcatctaagaattgtgctttctacagagttaaagattctcactagacgtgtcgttgaggcatcaagcaacgcagtaactagatatttcacaaactctatgcaaatcaagcagagagtacagatagttagttaccttggatgtgaactccttggttcctgtttgaacaacactagcagctgactgaagctgcagatgcagcaaccagagacagtcttccaaaacccttagcaatttttaaacacgaatcaacacacaaaacgtaattcaccgaattcaaaaaggaattgcaaaacattcattcaattcacctgagaaacaacggagaaaacatcatcctgttgattatttctcggtggtggagccgagcttgatccgaatcctacatacttgccaccttgcgaaggaggaagaccttcaggcttagactcattctccgccattctcctcgcgaagaaactctctttcccagcggcagaagcctcaagctgcgatcgcgtgtagatatcctccgacgactttgacttcacatgtgcaccttctctatttcc

SEQ ID NO: 46078 - DNA, 576 bp, Arabidopsis thaliana columbia
tccaagattgctgaagacgcattacttaatgctatacaaacacgaaaacacggagatgccttatatttttgggttcgcatggacaaagatcccagaaatcctctgcagaaacccttttggtcgttctgtgatgccataaatgctgggaattgcaggtagaaacactagagattttaaatcataattttataataatgtttgagactttggtcatttacctgactctttgcaatttatgggcttggatcaaggtttgcttacaacgaaactttgaagaaaatgtacagtatcaagaacttggactcattgccaccaatgcccgaggatggggatacatggtctgtgatgcagagctgggcattgccaacaagatccttcttagagtttgtcatgttctcaaggtacttgtttaccacattacccattgattgtctcagtcttagcctctttggagaaagaagagtgcttaagagtgtgttttccatctgtttgtaggatgtttgtggattcctagatgcacagatatatgaagagcatcatcgacaaaccgttgctatctgagtttaccaaagtaag

SEQ ID NO: 46079 - DNA, 344 bp, Arabidopsis thaliana columbia
gaggatcccgaatgaacaagatatcaatgggaatacaccgttacacctagccactaaacacagatacccgatagttgtgaatatgcttacatggaacgatgggattaacctcagagcactcaacaatgaaggctttacagctttagatattgctgagacgatgaaggacaataacgcttacgtactttacaaggtatgtcacatttgaagagtcatgtagttactgatacagtctcatgtaactttttttattggtttacagagattgatttggatggctttggtatctgctggagcaccacatggcccaaacctgattcccttgactgtgtcacagagtagca

SEQ ID NO: 46080 - DNA, 463 bp, Arabidopsis thaliana columbia
caaatactgtatagaaattttagtgtaaattctacaatatttagatatatacaaaattatgaatttttgaatggtagatccgaatgataacttatatttcccgatcagctactaaaggatcaattaagtgatctctctacaaattgaatcattgaaagtaaggtttttcatgattacccgtgaatcgaatttaaaagccacgggcaaaaagaacacataacctaaccaattaaagccaaacttcatgcataagacatgactctttagtctttaatgcaaagtaatgtacaccaacattctagacaaaggaaggtatatgtttttctaaagattatatagatcaatatattattataacatttatgaactcagactcgaactatgcataagcttgcacgatataatcagaacatgattattgagtctactatcaactatgcatatatagattatagataagtgc

SEQ ID NO: 46081 - DNA, 596 bp, Arabidopsis thaliana columbia
cctgaaaatttgtattaaataaccaaaaaccatcgaaaataaaatttggattgtgaatgaaacttgtaaagatgcttgattggttgtgctaaatgtcttttacagccataatatatttgttaaagactaaattgttgccaattatgttatagtttttttctttaacttagagccccaaaaaaaatctttttgttttgactgtaaatctttaattttctacatcctattttgtgttgtagatttttttttttttgtagattttttttttttttttctctcctctaactttttgtcacgattattttcaactaataatctaaaatgtagttatatgaataacagataaagtattttatacatttagacaaataatttataaatttatatagattccatttacctagatgtgcagaattctttttgtgtttttattataaaattgttattaaataatttatatatatcccatctacctagatgtgcataattcaatttgtgtttttattttataattgctattaaataattttagtaattatgatatacaattttctcattttgaaaaaaggtaatttataaatataaaattcaaatat

SEQ ID NO: 46082 - DNA, 571 bp, Arabidopsis thaliana columbia
ttgttaaggttgtcataatagtttcttgcgctgttgctctaattattctcatccttgtggctatcctccttttctgcatctgcaaatcaagaaggcgcgaagaacgtagtattactggtaaagaaactaataggcgggctcaaactatcccctcaggcagcggaggtggtatggttgtctctgctgaggatctggttgcttcaagaaaaggctcatcatccgaaatcctcagtccagatgaaaaactagctgttgcaaccggcttctctccttctaagaccagcaatttgtcttggtcacctggctcaggagattcattcccagctgatcagcaactagcacggcttgatgtgaggtcccagatagacttgtgggagagctgcattttctggatgattcaattaagttgactccagaggaattatcaagggcaccagctgaagttctgggaagaagtagccacggcacttcttacagggcaacgctggataatggagtgtttctacagtgaaatggctaagagaaggagtggcaaacagagaaaggagtttgctaaagaggtgaagaaatt

SEQ ID NO: 46083 - DNA, 691 bp, Arabidopsis thaliana
tactaccttgtccctcatttgcctttgatgaggataaacatgaattagtctctccttctcaagtattttaaatttcaagcttaaccttattgatctgaatgtcacagattcacaaactagtaagagggtagacttaaaggttacgacacagtaaatagaaagaaatgtaataaacgagatagagatctcagccttgttgatccctactactaagaaaaagatctcgagatctccatggcgactaaccactgttattcatcaacttccatagattgttgattgttggcattagcagcactgccagaggtgaattgtcctgcttcatccgagttactgaggaggatggtagtgcatttgtggaaggtcttggcgcagatgagaccgttgttccacagtttaatcctaaacattctccaccacctgctcacgaagcacgcaagcatcaaggcaaagtcaaatataaagtgattatccctccaacaagtttcgtatcacatgatgagtatgagttagatattagtttgatgtctatgaaagactattaccaatcgaaagatgaagaattcttcatctcttccttatgaagttttgcaaactcttcacatgcccaaggaacatgtccatccgcgatcaccctgcccccaaagaaccacatttttaacaaagctagctaaaacccgtccaacaattt

SEQ ID NO: 46084 - DNA, 479 bp, Arabidopsis thaliana columbia
ttagcatatgtttatcaatcttacaagagaagatggtttaggaggaaagacagactcataatccaaactaaactagtccaagatagtttgtggtggaatatgataaggggccgggtatgtatgactagaactaaagagggaggactcatccagtccgaaagtggcggattcatcgaaatcaaaaagatcgacgatgttagggcacatgccaggaatggagttagcagggacacaaaacggttcagactttgacaggaaaatgcagagatgaccgatgtcttcagtgtagactgcgtttccttcttcgtctagcttgaagaccatcgcagcttttgttttcattttcacgacgccactggatgtggccttcctgtaccacctaaccaagaaagtctcatctgtagttgttgactcaaccaagtgttggcttgtgcacacgaatgcaaaagctccgttttggtcttggtgagctcgggaag

SEQ ID NO: 46085 - DNA, 535 bp, Arabidopsis thaliana columbia
tgcagattgctgaaaaacaatatgttatctggatctgtccctgattccctttggaagaatatctcttttccgaagaaagctagacttctactgtaaagtcattgtatccctacttcacttacattcacttgcagtttatcaacttctctaattttcctgttttctctcaattcctacagtgatcttaggaataattctctgtcacgtgttcaaggagatctaactcctccacaaaatgtcactttaaggtatgtgtaccttggctagctttttcattgtttctgtcttgaatgcttattacagaaagtttaattaatctccaggcttgatggcaatctgatctgcactaatggaagcatatcaaacgcaaacctattctgtgagtccaaaggcaaagagtggatatcactaccaaacaattcaaccaattctgcactggactgtcctcctcttgcctgtcgcactcctgacttctacgaatacagtccagcatccccattacgatgcttttgtgcagcgcctcttagaattggat

SEQ ID NO: 46086 - DNA, 457 bp, Arabidopsis thaliana columbia
ttttaataaataagaaatgatgattttgaccccccaataattgaggccagccctaaccaagtaaaaaagaacgagaaaaaaggaacgatttttatttttgttcttggaaaaccttttttggcccagacaaataattcacaacatgtactaataagagacacattaaatgcacaaaacatttgtgattggaaaaacaatcaatgaataatcattgaaccaaaaccaacaatgggagtaatgattagtcacccattaattattagataccaatttaatttgaatttgcaaattcaacccactaaccctaaacaacggtattatataacatgatcactctaatctggttaggaaaaaaaaaacaaaaaatggtgacaaagagagataaaaatgtaccttgacgctgatggaatagaggacggatcgtctcgagttgtgacgtttagatggagaagagtga

SEQ ID NO: 46087 - DNA, 471 bp, Arabidopsis thaliana columbia
taaggagtatgtgatcggggactttgagtttctgccgtggacggccatcctcggacctccagtgaatggcttctagagctaaaagtctagcgcaattcagcattttcaagttgcagtcacctttctttttcaacaaacttatctcgagataactcacaatcgtagtaaaaaaaaaaaaaaatatgtagtctagaatatattagggctgacactgatacttgatagttgatacccgtattcgatcttttacccgtttcacaaaaagggtaactgtaaccttcagttcggtaatgtgtgataaatctattactcgtggataaggatcgtgtatcggatattaatttctgtttaattatctgtcatgttacccgctttactacgagatcactcatagttacccgttttattagtgttttacaatattactaaaatttgataaatacgttctaaaatgaaagttaaaatgtatgt

SEQ ID NO: 46088 - DNA, 642 bp, Arabidopsis thaliana
cgctcataggttcacctcaaacatcactagcctcgttggtggaccacactggacaccagtccctcgtcacgtggacgagaagatgttcataaccatggggcttggcttagacccatgtccagcgggcaccaagtgtattggaccgttaggtcaaaggtatgctggttctctcaacaaccgcacttttatgatcccggagagaatctctatgcaagaggcttatttttacaacattagtggcatctacaccgacgattttcccaaccaaccaccgcttaaatttgattacacaaaattcgaacaacgtaccaataatgacatgaagatgatgtttccggaaagaaagactagcgtcaagaaaattagatttaattctacagtcgagatcgttttgcagaacacggctataatctccccggagagccaccccatgcacctccacggtttcaacttctatgtgttaggttatggatttggtaactatgatcctattcgtgatgcaagaaagcttaatctatttaacccgcaaatgcataataccgttggtgtaccaccaggcggatgggttgtctcagatttatcgctaataatcctggttagtaacatgttttttttataaagtatatatatatatatatatat

SEQ ID NO: 46089 - DNA, 720 bp, Arabidopsis thaliana
ccctggctgttccattgtcacatggatgcacatttaccatacgggattatgagtgctttcatagttcaaaacgggccaactccggaaacgagcttgccatctccaccgtcgaatcttccgcaatgcactcgggatcctacgatctatgactctcggacgactaacattgatttgtcttactaaaagtaatttaggttcgttttccatttttaaataaaaaaaatacatttacaattttcacatttttggaaatcattgtttcttaaaatttcagtatttttcttgagttgatttatgaaaaattctggtcaccagtgcactacaatgcttgaactgatttgtacgagagacaattattttatctatataaaaatgttatttttgaacatttttgtttatgtatttcttcaactctaagcaaatcaatatatgtgtagagttgatagtgtaactttaatagtagtgtatactcttatgatttaagtctttttggacacaacacaagagcatacaacgttaggaatttataagaaagataacgatcattagatactctctatctgtgtcctgagtttagactctaccaacgggagatagcggcggacgataggagaagaagattttccggtggtctttgccttggaagcacatgttagtaccgtcacacacacaaaaaacgcttgtaacggtgaaacaaacgaaccaaactccaccctatag

SEQ ID NO: 46090 - DNA, 1114 bp, Arabidopsis thaliana
gctaaggattataaacgcagcactcaacactcacctcttcttcaaaatagccaatcacaacgttacagttgttgctgtagatgctgtctacacgacgccgtacctcaccgatgtgatgatcttaacaccgggacaaacaattgacgcaattctcaccgctgaccagcccattggaacgtactacatggccatcatcccttactttagtgccatcggggtaccggcatcccccgacaccaaacccaccagaggcttaatcgtctacgagggtgctacgtcatcatcatcgccaacaaagccgtggatgcctccggcgaatgacatacccaccgctcataggttctcctcgaacatcactagcctcgtgggtggacctcactggacgccggtgcctcgtcacgtggacgagaagatgttcataacgatggggcttggcttagacccatgtccttcgaacgccaagtgtgttggaccgttagatcaaaggttagctggatctctaaacaaccgcacttttatgattccggagagaatctctatgcaagaggcttatttttacaacattactggagtctacactgacgattttcccgaccaaccaccgcttaaatttgatttcacaaaatttgaacagcatcccaccaattctgacatggagatgatgtttccggaaagaaagactagcgtcaagacaattagatttaattctacagtggagatcgttttgcagaacacgggaatactaaccccggagagccaccccatgcaccttcacggtttcaacttctatgtgttaggttatggatttggtaactatgatcctattcgtgatgcaagaaagcttaatctatttaacccgcaaatgcacaataccgttggtgtaccaccaggtggatgggttgtcctcagatttatcgctaataatcctggttagtaacatttctatatgtttagtatttacaccaattagatattaatcgatggattaataagaatatgaaattgtttttttgcaggtatatggctgttccattgtcacatggatgcacatttaccattaggaattatgatggctttcatagttcaaaatgggccaacccgggaaacgagtttg

SEQ ID NO: 46091 - DNA, 372 bp, Arabidopsis thaliana columbia
ctggtcttgacatgcgatgaacatgaagatgatgtggatgacgattaagatggtgatggtcgtcatgagaaatcgcatgaatcaagcgttccaattgtagtcactgtgaccaataagagtggacttagcctagagattagctgcactgctttccccgatgagattgccattgatggattgtctgcggaccgtccaggtgattcttctgaagaacagttgacttatgatgggccagatattcactaagcaacatacgtgtatgtcccctctgatttgaccatgtggtaaccccaagataaaactcgtatgttgtttcgtagctgagcacagcagggagttggatgggactgtgcgcaagtcgttccacaagtt

SEQ ID NO: 46092 - DNA, 503 bp, Arabidopsis thaliana columbia
aacaaagattgagagatgattcaaaaacgcaaattgaggaagttgcaataagatctgaactttgtttgttctgctgaaagattgagaaatgattgaaatcacaaaccgtgcggccatcgatgatgtgtttatccatgatcactctctctgagacacaggggtctgcaaagacaatgaagccgaagccacgtgcacgacctgtggcacgatctctcatgatcacagcttcaacaacatcaccatagttgctaaagtagtctcttaacctttcttcgtctgtatcccacgaaatcccaccaatgaagagcttccccagatccgattccatcttttttttttctgctccaattcagagaaacccaaaaaaaaaaaaatcgagtaaggagatgaaattgaaaaaaatcaaaagacttagaaacaacatacttttcttgtctgaaaatcaaagacggaatcagataaataaagttgttgttgttgcctaatcaaattgcgaatttggg

SEQ ID NO: 46093 - DNA, 381 bp, Arabidopsis thaliana columbia
cttaagtcttggaaaatgaagtaaatcaaaagtcattttgactgccgcccatggggtttactttcctctctatatccctcaccatcgttttccccctcccactcaagtcatcttataacggcaatggtgtttaatgaacaatggcaagtcgatatacggctcaaggaaggttgcaacaaaaagggtgcgcaatgttaaaccctgttcatttctcaatttgacagatccattcaactgatgcattcaacatgtctatctggatgattgattcgactcttgttcgttttactttcagtcggttcatttgactggactatacgaatgagatgttgttcgtttgcctatctgtatctttaatcaaatgatttgtaataatacaaa

SEQ ID NO: 46094 - DNA, 215 bp, Arabidopsis thaliana columbia
acttttatgcagttagatctgtgtgtattggtgatgcttacctagtggtttgtcttagtttcagtgctctgattttgtgtgttggtgtttgtgtagccggtttactcgagttacacgcgacgatttcagagttccacatttgcagctagagcctctttgttgctatttgtcagtattgcgcatgctcgcttattggactgtgtagtctgcgcgga

SEQ ID NO: 46095 - DNA, 420 bp, Arabidopsis thaliana columbia
tatctaaagccacaacttgaccaattccttcaacttcacgagcatacctcaaagcccgtagccctgaagctgacagggcctataaaataaataacacaagattaagttatcaactagacacgcataatacgcaacgagatacgaggactatagtacagctattacagtcataaaggaacgagtataggtagacctcaagcactctatagtgatctgagttcccatcgtgcagattcatatgcggtcttagcagcatccttaggtccatcctgagtagttactgcgtgttcaccactggtttttccattatcgtcaccgctgacagtaggagtgtcgaccaaggaagtttcagagacatccgtctcaaccacgtacccagatgctctagctcttgcagataacatagcctcatgctcgtgc

SEQ ID NO: 46096 - DNA, 533 bp, Arabidopsis thaliana
gcctcaataatttccaccactctgttttcttggcatcactcttcagctgatgcttttgtttttttgagtgttttctgtgtctcaccaacccttccactagcgcatgaaagtggccaccttgatgttgctgcttatgtgtagtaagacctttggattctgacatcggtcttttcctctcttttgatttctcttggtgcttatggtgaaatttactctgcaacttattccaagctgatggcttttccttgtcgtggtgatgatgatggtggtggtggtggtgatgatggtgaaatatttgtcctatcttattctttatccttttaaaccgccccattacatttcttctctgttttccaggttctcttgatgtgtccctgtctgtatgcggaggagaagtgctgacttcagagacagagtcatcattctgtggtggatatgatgattctgacttagactcggtgtcattctctgcttgagttcccactccgagccagagcttgaccctgtttccccagagtattcttgactagttg

SEQ ID NO: 46097 - DNA, 580 bp, Arabidopsis thaliana columbia
tatgaagaatgcatagagagtattctgaataaaaagaaaggtcagacttgtttacttttagtggacacagttttaacgactatactaatctacttggccttttatagagtggctgggtctttttgtctgtttttctctcaatgtggtaaatttgttcttccaatattttgcagcggacaagtttgactatgaaggtttatgtaaagcactagagcagctttcagattttgagaaagaggcaaataatcgagtgattgagtctggtgtactcaaaggcctgaatcttgaagacattaagcgcgctggggaaaggttaatccttcaagatggatgcatcaatgtcttccagaaaattttaaagactgagaatctgaatgcagaacttcatgtgctttcctattgttggtgtggtgacctcatcagggcagccttttctgcaggtatgtgccaaaatccttaactttgtgatttttcagacaattcagtccctagaattaagaaactgtgctaaacacaatctcctctttacaggcggagtagatgcagtggaagtacatgcaaatgaattcacatttgagga

SEQ ID NO: 46098 - DNA, 513 bp, Arabidopsis thaliana columbia
acacgagtccgtcatgctctagctgcaggagatgtgaggtatgtaacagagctcctcggcagaccacacagggtcatctctcggacaagaacacaagatttaacgagcaaaagagggaggatctcgcttcagacatcttcgctactaaatttaccaccagggaatggagtttacaaagcatgctcgcttatagttggtgataagcatccaatttcgtgtaaggttattgtcgatacatcgaatctctatatagaaacagaggaagaacgtttccacaactcagatgagtctcaagagtttcaactcttagggattgagttcggttaattcacacattgataatcaaaagaataacatttccatttcaagataacgattaacaaagatgttaactttgactccattttggcaattacgttagcggtaatggatatttatgaaagttttggtttattattgaaaatagtgttaatatgactgaaaatgaaagccacacggtgatgagaaggtgga

SEQ ID NO: 46099 - DNA, 515 bp, Arabidopsis thaliana columbia
acccaaaaaagcttctccacaatgtccacagtctcccacacctgttcattcaaatggccctccttcagcagaagcagcagtgacgtcatcaccattgccaccactgaagccactgaggattttgtctcgtccgcctccacccccacccccacctcccatatcctctctgcgctccactccttcaccaagttccaccagcaattccatagcaacacaagggcctcctccacctccacctccgcctcctctacaatctcaccgttctgcactttcatcttctcctctgccaccacctttacctccaaagaaattgttagctacaactaatcctccacctccaccaccaccacctttgcattctaattctcgaatgggagccccacaagttctttggtgttgaaatctctcctgttcctcctccacctgcccctgcaccattgtctcgttctcataatggaaatattcctccagtccctggaccaccattgggtttaaaggggcgtgggattttacag

SEQ ID NO: 46100 - DNA, 488 bp, Arabidopsis thaliana columbia
tgcaaacaaatattttgcaacaaaacataataacacaaatcaagtttggttctcttcttcttcttcatagaagtacgatcttaggatatctctatatacacacattttgcagaaaaaaagtttcatcatgctctatttgcctaagaaactcttcttgttcttcttctcgtgcattgtggtgattgtcaactacaacaatagtgacttcgtaaacgcagcaaatagcattggcttcgtaaacgcagcaaatagcattggcttgaactacggtctcctcggagataacctcccatctccgtcaaaagttataaccctttacaagtccatagacatcactaaaatccgaatcttcgacccaaacactgaggttcttaacgctttacgtggccatcgtgatattgcggtcacagtaggagttagggaccaggacttggctgctctttcagctagcgaagaagctgttaagggctggtttgcgacaacatcga

SEQ ID NO: 46101 - DNA, 496 bp, Arabidopsis thaliana columbia
  unsure (1)..(496): unsure at all n locations
agacaaggaacgaggttaaagtctaaaaactcgtcttcttgaaagttctcactaggttcaacggagtaatacgttcgaagtgatcccaagtcccactccgttatgctctccatctgcaatttatcgtgttagataatcgagttaaccaagagaaatctcagaaaccaaacaaaatgatcaagccaaggaaccttgaccttggaaaggaggccttgaagcctagacgcaagcttcctggccgatactttggatctttctgattttgattgtcgagagagattatgacggaacaaaggtggccgttgttgtctctggtgggaggagatgtgttcttttgggcgatgaagagagagttgatccgtaacgttggcaatgcgagagaagaaaacgttcataagggacacgataatagtcaagnattaaccattttttgggggcatataaatcgaatacataacatacatctgcatttacattgaatcataatgtagagtat

SEQ ID NO: 46102 - DNA, 544 bp, Arabidopsis thaliana columbia
gacgctctatattttttttttttataaaattataaatcttgaatattatgattttcatttgaattatatctgactacgacatgagtctatcaaataagtccgaaacgtaagttagaaaaaatccaaaaaccgataatattttcctttagacatcaaatgcaaaaccaatatataaatttatatgggtactaccaaacttttattttgtaatgtttttgataaattacttagtgtgtatatatgctgtactgatatccacgatacttccatagttaatatgatgatgggcaagctagctataaccagtgaatataagagaatactttttaacatatggtttatatatcaagtatatttatttctttcaacaaaagcaaaggtgtgtggagaatatcttaatattgacatgatttaaaatgaataaaaggtggtgtctgatgaggcaagagctatgtacaatggtggcgtgccggtctgacatattggagccgaatgtgaatacttgagggcccgcggtgggccgaggcaagaactcccggagaag

SEQ ID NO: 46103 - DNA, 796 bp, Arabidopsis thaliana
ttctctaaaggggtcgagtagatcacctaaatgacatagaggggttatttataaattaagtaaaataaaaggtacaaatgctgacctagtcgtgtttaattaaatatataaagtccaaaatcgaaaaacactctccatcgactctcgtgtttaaccctaatttcaaaaacgtcgtctgccgctatgagttctgaagtcgaaccaccgcagaaaaagaagcagccgtggcttccagattatatcgttgagaactgtttagcacacatatcgagatcttactacccgaaactctccctagtctcaagtcctttcgctctctcgtcgtatccaaagagctcaacaaagcgcgatatcgcctcaacaaccgaagaatacttcttccacgtctgcttacagcttcctaagagtcctcttccaacctggtacacgctctggataaaacctgatcagatcgagaagaagaagaagattaatacgtttactggaaatactcggttggtacaaataccatcttcctatcattatccttttgaccaagtgttcatctttaatctttatggtgctatgcgttcatccaaggcaatggtccgtcccccttcatatgggttggtaagcatgttttgaatagaactcgtcgtcgttgtttgattgagattggtactacggtgggaaactattaatcttatggaataagtttgtgcacctggcaatttggagataacatatttggtgtgaggtgattgtcttgaaagacgtaacggaatggcgatgattatgaaattgggggaacgtgagt

SEQ ID NO: 46104 - DNA, 899 bp, Arabidopsis thaliana
  unsure (1)..(899): unsure at all n locations
caagaacgagcacgggagagcctccagcttcagagagcacgccattgctctcatctgctgcatcgtctttcacttcttcctctctgcactcttcagtcagatcatctgcactattgattggtccttccttgggctcattaccaacttcaatctctttctctcccgcatacgcaagctcatcctatattagacaatcattccagtcttcctctaaccgtcgatcacctccaataagcgtaagtcgaagctcagtggatctcagacaacaagcagcttctccatctccatcaccatcacagagatcatacatttcccatatggcttctccacagtcactaggttacccaactatctcccctttcaacacgaggtacatgtcaccgtatagacctagcccgagcaatgcatcacctgcaatggctggatcatcgaattatccgttgaatccactgcgttacagtgaatcagctggaactttctctccatacgcctctgcaaactcgcttccagactgttagaaagtctacagaaccaaccactcttggttcaggtcatataagattatttcttttgcatttgagttttactacgaaacgtacttctggcgtttgtgtgtggtgtgtgtgtgtgtaacgatgcttttatagtcttttggttgagatgaaacatcatcggatttaggttagagagattttaacacttcgacaattacacaaactcggttcctttgtacaaagaaatatgagcttatgtatatacacgtctctttccttgttattactatctgatcactcttatctctatccgtttgcattgatacgatcctatctagtaaataggcccagtaggcctaattaaggtcccagtacataaactgatttgggctanagtgaatgaag

SEQ ID NO: 46105 - DNA, 436 bp, Arabidopsis thaliana columbia
acgccaccgttagctagaggatcccgctagtataggggataaattgatcaacagaatagattaattcataatttgaaaaggccaaaaaaaaaagagagaggcaaaaacagaggctctgctttggactccgcaaagcgcacaaggccgcctctttcactatccccaaagctccaccacgcacccatcaaccaccatttttatttcgtttttattacattcaaaaaaacttctttttgtcgtatttcaatcaaaattacatcacacacactattacgttggaatgtttaacaaaacacataaatatgttgagctattccaattttacatttaatgtttttttacgcctacacgtaaactacttttggatacaatatctagagactaaccagataatcgttaacgtgaataatagaatcagcaaacagttttagcttca

SEQ ID NO: 46106 - DNA, 567 bp, Arabidopsis thaliana columbia
gtaacgtccgccagtgtgctctaaagggcagtacagcttgatacggtctagcaatcgctcaaatctagcgacacggtgtgggctcaagcggacacccacagatgtttctggagtcgaggcactgaaactttcggtcatctgtctatgaatctctgggtcgaaggtgtgtccaaacggcgtcctttggtggttttcgcgtgcttcgtcctggagcaaccgctgtctttggaggagacgggtcatgataagctcatagctttgatacaaccgcttgagaactgcgagctgccgtcccagccagtgcagttcgtctatcaagtcgacctctggtttgtttagcatgtggcgcctctgtcaataggtcagcattcattgattttatgtgaaaaggttgtcagtaccagacggtcgaggtccacactgtacccatgctcacgctttgcgactagtgagtagctcgagacccaatcgtcaaagatatagtaaaagaggagacttggaccgtcttcctgtttaatgctggcagtgctcgtgtcgggatcatgtaagggccggactctgattgtg

SEQ ID NO: 46107 - DNA, 543 bp, Arabidopsis thaliana columbia
cccttgagaaaaagatagcgtttggtttcgagtctgaggtcttttggaagactacgaagaagagcttcctcttcggtgcctttggttcttctccatttgtaatcttcaaatctcctaatgcgttccttcaaatactctggtatctcccgataggacatccatttttctgtgtctctctttttctcttccatttcatctactctagtcgtagatgattgcaagtacttctgcgatcaccaaaaacaaacatctattaagaatcagctttatgagatcaaactctagttctaaggtatgaacattacctgaacgtttccaatgagcacagcaaacaagagtaaaccagagacacatatgatgatagcaaagaaaatctcccctgcagagttgcttgtctccaggttttggcccaaagcactgtagagcggattaatctatcaagtggattgatatatgtctcacggcagagagtttagcataatacaatttagtacctaatattacggagaccccaccaaaagcaatagacgaatttcctgggaa

SEQ ID NO: 46108 - DNA, 617 bp, Arabidopsis thaliana
caagactaaaatttggtactttattgcagagacaaggaaccaaacttactcatatcggagggatgattccactgtgtagaatggtcgacttcaagatcattgtcttcttcgttccctgtaggatgttcaagaacactaagcgcattcctctgcaacttcacttcaattccattagtcaaaacctgaaaatttaaagcaaaaaggacaaagattaaaaattgaactccacaaacaaagtaaagtttgggactttttgagatcattttgcgattgtgaaacgttagagagacgcggagtttcgtgatacagcgccagacaaatggcgtccagcagggtggttttccccgcacctgttgggccggtaatagcaaacagcccgttgctggcgaacggctcgcgggtgaaatcaatcttccattcgccttttaatgagttcaggtttttcaggcgcaggctgagaattttcatgcttcgtgttctccggcgagggtatgcaacgtcgtggtgaaaagatgctgcagacgttgctgctgcgattcatccagttcttccagtgccagacggcgattgaacacctcttcgacgctgagttcgctgagggttcacgctgttggctg

SEQ ID NO: 46109 - DNA, 470 bp, Arabidopsis thaliana columbia
tgggatcactttttattatattcaacgaaacctagttctttttcttaaacgtcaaaaacaatgagttcttttactaattgactgtttgagtttagaatctagttttgaacccaaaaaatgatacttatataacttcatggaaaactttgattctaaatattgtatgtagaagtatcctcaatatacaaagtagatttgcattgttcgacttcaatgaaatgacatatacttctaattgagtgagatagaaatatctaaatgttttattttcatcggttgaccagatattacgacgttcttacaagagttttgaacccaaagatgggttagggtgggtgacatggatagatattgacctgtgggctctggccaatcaactccgacaagatagaaatatctaagttattattatttggtacaaaattgtatattaccacacaagagtagcaataatttgtgtctacaaaatg

SEQ ID NO: 46110 - DNA, 395 bp, Arabidopsis thaliana columbia
ggtattcatatgcacatgacgccatcaagaattctccatgaatcagagttgaactcatagatttcaaacttagcgatagaataagttcggatggtgagaaaaaatcaaattcaagattttgtagctattgcaagatttgttgttaacgtatcctagaacatagctgttcaagatcatatgattattggattttatccacctggtttgacctgtgcaagggttccaaaccatggctccactattatcaacggtagtgcacagtaataaaccatcacagtgagagataatatgatctataatgttctggatcattaactctaagtttaacttggcccccaatggatggatcaaagctgttttggactccacggagattgatactatgaattagagta

SEQ ID NO: 46111 - DNA, 496 bp, Arabidopsis thaliana columbia
gcaagacatactatttggcagaaaatgtaaactgaaaagaaagctgatggtgggcgacaattgtttctagcatcatgtatgagaaaatacagctacaatactgtttactcagaatagaaacttactgtttgaaattctttctcaagccaacctgcttttattaaaatgctagattccagcttcatgggtggtagagacactgtgtaggatgcgacttgggagtaactgagcatagcaaccatggagcctaatctgcagttgtgtacaatttaagatatatgattaaagctaatgagtcactaagttcccaaaattttcatgaattttacgttgtagcactagaaccaagatgggacattaaaaaaaaactacgcctaaccactattctcttagaataagtgaatgtcactatctcgaaaggccatattatagagttactaaaactatagttaattacttagttagaacatgtgaagcaatatgcagagcaaaatag

SEQ ID NO: 46112 - DNA, 507 bp, Arabidopsis thaliana columbia
cgaatgaacccaaaaaaaaattttatgttgaagtttttaatggtgagatgtaattacgatgaaataagtggttatataatatggggatagaaggcgagactaattggaaggagtcgtaagaaaaataaaaatcgaggacaaacgtaaatcattcaatttgtaattaatatacttgaggttggagtttcacatctgactttttccgaccgaagatggttaaacaatctagattatatgtattagccaccttgaatttttcccaactttaattttgttttaatctaatttgtaatgatggctgtttcatatgttactctctttttgttttttgggcaaggtggccatttattatcaacagaatgtttcaaataatataatcatctttatcaatatgcaaagatcactctgactcaattatatatgtcatgagtcgaatatacataattaattgtttctgaatccaagatattattttgaaatgtcattgtaatttagccatccatgagc

SEQ ID NO: 46113 - DNA, 993 bp, Arabidopsis thaliana
atcttcattttatctacagtctttataatgaatattccatatagtacggcgaattctgcttcctttcaagcttgtatataattaactctttcattttttgcatctcaggctgttttccagcgttatcttcgcccagagaaagattacttatccttttctctcttatacaacggaataaagaagtctcttgacttggttagtcatcgtgaaactgatatatttggacaataatttcaacaacacttgacaataactccaggcataacagttcacttcttaatagatttgtaaggacaaggttgaggctgagatttggattggaggcctgaaaacatttatatccactgggcaaggcgggcgctcaaaaatcgatggctggagtggcggaggcctttcagttgatgtaagtactctggaaaggactcctttttgccaaatatatgttggtttatcaaatgggatactgacgacgtcgtggtctgttgaactcatcggttgatcctgttgatattccattttggtgtttaatgcgtttgtttgttttctatatatttcaggccagcagagaattgacatcaagcagtccaagtagcagttctgccagtgcttcacggggtcacagctctcctgggactccctttaacatcgatccaattacttctcctaagagtgctgagcctgaggttcctccaactgattcagagaaatcacatgttgctttggacaacaaaaatatgcaaacaaaggtatctggttcagatggttttcgagttagtgtctctagtgcccaaagtagttctagtcatggttctgcagcagatgactcagatgctctaggtgatgtttacatctggggtgaggttatatgtgacaatgttgttaaggttgggattgataagaatgcaagttatctgactacaagaacggatgtccttgtgccaaaggcattggagtcgaatattgtcttggatgtcatcaaattgcatgtggtgc

SEQ ID NO: 46114 - DNA, 397 bp, Arabidopsis thaliana columbia
ctgtgaatgagattgactaatttacccctgtaatttagctccatcaacacatcttttcttcttctatcgacttcacgatccttccgccaccaacaatccctccgccaacaacgactgtctgatgaacccaataaacaattaattggtttttgatgtaagacaactacaccctcaaaagatactgcataaggaacccaaatgtttcaactctagagaataaccaaattgtgaagatgagttattgatggtgatgatgagattctgaacatcggatcatgcaaatccactcaaacccaatcttcacctactatatgtgtagatatgtgcgtatatacacaagtatatgtacagcggtgctaccggctcaccatcgccaccgaagtccatcatgtcgtca

SEQ ID NO: 46115 - DNA, 523 bp, Arabidopsis thaliana columbia
ctcactctcttatcaaacctgtttccagaaaaaagaagccagagtcacattaggaaaatcctgcactcacttcaatgatgctcatgtatttgcagtttcagactactacttacttgcgagccttcttcttctccttgtaacgcataactgcgttattacgggttactgaatgtgagcaggcattgttatcctgtaatgttggaggataccatggtggctcccccgagagctgtatggaagatgatgcaccacattcttggaaatctccagcactactttctccagtgactccagagaaggagatgttcgaatgtgctggcttcgatgcgacgaaattattggctcagttttcgaactcatgaacgaatcattactgcctgctggctgcaccgatattcctccctggattgagcaataacaagagagcattattagaatcacacagagatgcatccaatttgataaatctaagaagaaagggtaatggatagaacctctggagctgtttggtgcttatggaaaa

SEQ ID NO: 46116 - DNA, 496 bp, Arabidopsis thaliana columbia
attaccaaaacgaataaagtacttatatcagaaaccacattcatgagaaaccatacttaaacctaatgttaaacgagaaaataattaaccaccttcaatttttgttagtggataaatagagtaccaaacaaaataagtggacaaattttaaatagatcaaaatctatggacactcaagttgtaatttattttctccgtatccattttgattttagtccctttgttcccatttctctcctctctctctctttctcgctctcttcctgatttgatcaccggaaaatcttagccgtccgatcaaccaccgtgtactccgagaagatctcttcgattacttcaacgttcttctgattttcacagctcagatctccgacaacattccggtatcatttctcgcttgtttttccccaaatccttatccgccagattacgaaaatgaggagcttgatccgagagaggcatagtgaaagcttatctgtgaattcttaggatttga

SEQ ID NO: 46117 - DNA, 1627 bp, Arabidopsis thaliana
tctacccttaccgctgctggcagtaccgatccaaacaatggatccgtctcagacatcatacgggtttagccagaacaccggtcagctaggatctccgggtaacaacactgggtcacctggaagaaggtcagatctatcacagtatgaaggacagagcccagatgactggttattcagaatggagaagagttttctgcagaaccagaccttggaacatcaaaagttggaggtagctataacgtgtttagtttcggtaacagctttaaattggttgagaggtgtgctaatgagaggattgttcaaagattgtaatgattttaagaaaaaagttcgaaaatgatttggacacagtcgttgcgggtctgttgtgtggcagttgttgaacatcagacagaaaggctcagtggaggaatttagagaacggtttgaagaattaatagttgaggtgccacacattactaacgatcttttggaaggaattttcttaaagggaatgaggaaaaatataagagaccaagtgatgcgtacacgtccctctagcatatatgagattgtggagacagcatgcctcatagaagagcaagagcaggagaagacgtctttccactcaaattacaactcgaaatccgttagtagaacaaattcagctccggtgcttcatcgaagcaacaacaatagccctatcaagacacaggatatcattcaagctaggaggtcatttgatggggtaagagataacaggaaaccggatcagaggaacaacgcatgctacacgtgtggagaccgctattttccaggacaccgctgtaaaaatcagaagctcaaatgtttggagttggtcgcaacaagcgaggcgggacagttactggaggaggaagacgaatctgagagtgaagaagaaccggaacctaaggtggaaggacagacaatgatgcatctttcgttgagttcaatggctggccttactaatgaaaagtctatgaggatgaaaggatggatagcaggtcaggaagtgatcgtgttgattgattcaggagcaactagtaacttcatttctgaagaagttgctcagcggtgctcactaacagtcacaccaacaagtgattttggagtagcagttggtaatggtcagattatttcaggacaaggcaaagttaaggatgtgcagctacacattcaaggggtggatattaaggaggagttttttctgtttgctttgggaaccacagatatagtgctggggtactcgtggttagctaccttgggagatacaaggatcaattgggggcgccacactctgaaattcaaggtcaacgaagaatgggtgacactagtgggagacccagccctcttgagacaacagatatctcttcatgcattggaaaaaacagtgagaaaaggtgacacatgaggcggaaggaaacaacagtttgggggttcagaaacttatcaaggattacaagaaggttttccagttaccacaaaggttacctccatcaaggaatagagagcattccatcaccttacaactaggaagctcaccgatcaaggctagaccatatcggtattcattcgcacaaaagaatgaaatggagaagttgatcagagagatgctagcagctgagat

SEQ ID NO: 46118 - DNA, 495 bp, Arabidopsis thaliana columbia
tatccttctccaataaaaacggaacagaaaacaacaaaagaaaactgaactaaaggaagaatcactaacatagacattgctaggttccatgcttcgccggcgcctttgatcggaaaataccaccggaaacggtacactccttagccgcggggacgaagaatcggcaaagaagcgagtggagaaatcggcggctggaaaacggagattggcgacggaggtaggtgaaagtcggggtttggagagtagacgaggagggttggtgagacgagcattagttgaagaagctgccattgagaggcgacaaacaacaacgaccctttgcggcttttttcacaacttttattggatttctaaattttggtatttttaacgtttttatacgctaaaaaatggtaggtgaagtttcgattaggcgcaaaaaaaaattatttatatctccttttcattttctgatattgacaattatatatgtttgtttaaatcatcaagagaaaa

SEQ ID NO: 46119 - DNA, 711 bp, Arabidopsis thaliana columbia
ttctgcgttggctggaggatgtctttcaagtttcaccagtcgggctgttaccaaccaccgatcaaaatggaatagctgagtatttagcatccaacgttttttattttcattactcttatcggtacaataataaacttttttttacataattgaaaattttaataagcttcagtagtatctgaaaagaaaatatgtgcattggtaactcaaacataacactataaaataaataaattcctaaattacacactacttctgtctctatattaaaaacgacaaacaaacaaaaaaattactagcatgtgtaagaatgtaaccaggtaacattgacacttatacaccatgaagacactattgccatacgcgtttcaatttctgtcagtacgtggtgtttaaatgtcgaaagagtctagacgataaggacgagacactagcaatcctggttatgtgagattctgaggttcaaagttgcaaaatccggaagtaatatattaaatcaatatataggaaaagcaaaccccaaatcttttttcgcttcaccaatgtttgtaagattatagcagccttaaactccccaagtctttaaccttttcgtcggctaattgaacatcgggcccccaaactaattaaatactaaactttatctattcatattttatttgcatggtattagattgtccacataatatcttccttctttttttttgttga

SEQ ID NO: 46120 - DNA, 1779 bp, Arabidopsis thaliana
cctatttccgtattacataccatttcctttagttactaaaaaaaaaacattgctttgtataaccattcaaatagatcttctcttttcaaggctcgggaaactcattggtgatggttccacaactcctgtttggagaacacttgtgctatcgctctcttcccctgtcgctccaatggggccatctaacaaaaattctcatctcctgatggtctctgatctgctcctacctaattctaatgtttggaacttagaactcattagagttatcctgccagaatacgagaaatgcattctcagtcttcacccaagctatctaggtgccatcgatcactgggcttggctccctacaagttctggagactaaacctctaaatctggctactacgaagcccttaaacttgaggaagacttggatccctttggtccccgggttgctcctgatcctttcaactggaaaactcacatttggaacctaaaaacttcgccaaagactaagctcctcttatggaaagcaggtcagtatgcacttccagttggcctcaacctcacccaccgacatatcactgagtcagcaaaatgtcctttttgtgacgatgatgaatctgttcttcatcttctcttcaagtgtcctttttgcccaaaagatatggagtttggcccctttcaagtcccctctgatctgcgcttcaattctttcagtcactgaagggatcgcctcttcgagtaaggctatttgcctccctccatcaggattaggtggtggtcgactctcgccttggcttttttggacaatctggtcttcccgaaaccaactgatcttcaataagaagcaaactctggcggaagatgcttacctccttgcgattactcgagcaaaggaatggcaatcagccaatcagactcaatccttacccgctagaattcctgatccactggtgatacctcgatcccattctatcgatcctgtttgttgtacggatgctgcttggaagaccgaagttccgcgtgctttggctggatctgcaaagattcacgaaatcaaaccattttctagggatcttccgcatcgttgtcgcctgttgtctctcccttagtagccgaagctctagcaactctcctggcaattggagttgcaattgaatcgggaattaagcggatctcctttgcttcggactcgttaacacttgtcaaagctatcaaccggaagtttctcacaaaagagcttcaccggattctccatgatatccactctctctcaatttcttttgatgcttgtagtttcttctttatttcacgaaagcacaatagcgaagctgatgccttggcaaaagatgccctcctatcctgtattaactcccttatctaagtgaataaatgctaaggtttgtaaaaaaaaaaaaaaaaaaaaaaccattcaaatataccatctcagtaattttctttggcctactttttacatctcaaaagtacaaaccatttagtaaattaatgaagaaaaagttgacaggaaaaatttggagacgccaagctttgcccaaggaatttgtcattgcaactaaagataaataagagtacttcaagttattaactcatattaggttgtaatcggttacttaatcaaatgttaactatataacaactattaatattgtaatatgtggtccattgactttattctgttaagagaatcattaccattattattgcaaaacctcatgattaaggagcattgcatttcttcttttgctattctacctttcggctcggccacattgtttc

SEQ ID NO: 46121 - DNA, 649 bp, Arabidopsis thaliana columbia
gaagatgattttgctaaacttacaggagctcatgattttgtctgataaagaagcaagaaaacatttcaggcttcagcagagatgggaaggtggacgactatttattataactgagatcatgttttgtcttttggttgattctaaacatattggtcagaaagaatttaacaaaaggattctcaaatttaaaaagctctggagtggttttgtttttggtgagaacaagggttggaaaagttctgtaattagaaacgaaagctcaagacacatgtctaaagctattttcaatcctggtgaacataccagccggatttcagagtagagaatatatagccactgttgagagtcacaaaatacctcaacgctctttaagagatgtcaatctaaaatcgccccattatttttccagcttagctttcggcccattatatatttatttgaaaaaaatacccgctcttttattttaaaattttcataatctttcatgatcatgatccactgatccaggattaaaacatggcataaccagcaagtgatccgactaattctagaggtgaaactacctgataacataagaaactattaatcatgtaattgcagatggattctatatacatgagtgacatcatgttgtacttgagaatgcatt

SEQ ID NO: 46122 - DNA, 460 bp, Arabidopsis thaliana columbia
acccataacagtaatccaacaaaacaaaacaaaaaacattgaaagaacaaataagcttcagtgtgtgtaacaaattcagttcattgattcaaaaacctcactgaaatccgctaagataattgtttttatcatcatcagctttataacccaaaacaagtacatacaaacatcaatcaaacctattaacaataatccaactaaacaaaagccaaacattaaaaaaaaaaaaaagcctcagtgtgtgtaacaaattcagatcattgattgaaaaacctcactgaaatccgctaagataattgttttctatcatcataagcttataagtggaaaaacatcaaccaacaaaaaaaaacaataacagagaaatttgtcttcaaaccaatcaaaagataagattttgggtgaaaggggaattaatactcagacagccaagggttaatcttcaacttctgggagaaga

SEQ ID NO: 46123 - DNA, 421 bp, Arabidopsis thaliana columbia
gttgaaatgatgtaaaagccaatagatacccgtaagtatatcacgattccacatcatcttagtgaatgatgggtcttctatctctggaatgtaaggaggcttgttagtttctataatgtttttgtactttgcatcactgtttggccaaaatcaaatgatcacatgctgcacagtactcgggtagacagctacacaagcttgcttgaaagtgtggacctgatgtgcattatcataataagcattgatacaaccacagactttgaccttatgtgccacataaaccatatgctaaaccaatctaaaacgcacaaatcatcatcgatagctatacacatttaccggtagaccatcaggaggagcttgagagttgagtttacagtcaccggaaccattacagcaccatccatgatacacacattgc

SEQ ID NO: 46124 - DNA, 825 bp, Arabidopsis thaliana
taatattaggttatgatttagaaacatatagtgatatcatataatatagtttgtcatcggataaattagtacatgatatttgtttaaaaagacgcgtaaaatctggttgattttttattatgaaatttatttaagattttgcaatcagtattctttgcaaattaaagaccatatattgttcatttatgctataactaaaactaatcatatattgttgattataatcaatgaattctcttagagatatacaactccgatccatttattattaaaaattttagcacataacttctcttggagattgaagtaaaccattatttaacacaaaattatcaactgcccatgccagaacaactaaggaacatatatacccaatagattcattggatatgatcccaaatttcaacttttaataacttaatagtatactccttcccacacaacaatacaatcaattcaaacactcaccaatcaccaaactaagcaagaaccggaatcccttgctgagaccggaaaaaattagtccggtcgaaccgggctttaatcttaaccaatctcaaataattccctttgaaataactatccccataaaccttagctccttcatacgtcgcattataccccggcgtagtaattccgatatcgacatctctataattaaagaaagcttctctcggattcttggaaacaaacggagccatagcttctttaaaacttcttgcaatcgccaagaacttctcttcaagctcatctccaggtctataccaattcatgaaatgctcaatcatgagaacattaccacctctatgcacaaacgccgtcgca

SEQ ID NO: 46125 - DNA, 443 bp, Arabidopsis thaliana columbia
cgagatagatctatgttaaccttggagatatcgaagagattggtttggtcgcaaaacgcaggccaagtgccattgttgaactgaggccagagtccatggatgataaaatccgacgctgtgttgcctttcgttggagggcaacatcctttttggctatcgcatattgctcctggccactgcatcatataacgaggtataaaaatacggtaagatgtgtgtatatatacatatatgtatgtaagtgttgttggaaacattacgtagttgacccagtagaagaaattgaagtctggttctgtctgagacgaagacacgacaaggctctgtaaaattaacaagcttacgatgatgattcctctcatgtgttttgctctctgtgtctcttgattattcaacgtttccttgcatttatttctcaatctatatgtaaaaagggaaaggta

SEQ ID NO: 46126 - DNA, 531 bp, Arabidopsis thaliana columbia
cgtctatacagatttctttgaatgagaactagattcatccttactcatagaatctttaacaagacatcatcatagagtccaagaccttttaatagacaaaactgcaaaaccatctttttttttcaaattcgtattatctgtatatgcctatgaattctaaccaaaccaaaggcagcaaattttggaagttctccaaatttcgaaacagatgagaaacattataaaattatataacagacatcaacaatggtcttcttaaagaacaaaaagtgaaaacagagcacatgtaacatcgatcaaaaaacataacaaacttacatataggaagaggataagacacaagattacaatgcgttttaatgaagaaatatggagagattaaaaaattacaaagcgtctggctatgagtaatgaattatatgcttctggcaagatatagcacaaaatatataaccatttttgtatttgaaaactattttctgacgacaacgctgcctgcacgtattgcaaaatggccgagacaaagtattg

SEQ ID NO: 46127 - DNA, 600 bp, Arabidopsis thaliana columbia
caagatagaaataagactaagattaagatacagaaatgaatgacttgaaggacactttgtgatcgcaaactgaccattttgggctcaagtatccagttacccacacttgcagattttctcaggggggtcgcctggaattatgtataatttatcaggtaactaacaaaggtgaagaaccagtctacagtaataagcagagacaagaaaccaacctgtggagatcgacgagggactatacttaatggaacatcctagagtagattgtattgttagttaccgtcaaagaaataggaaaattaatagcagtaaattaaataccaaccttcgcaagatctacatttcctgatgttactgaaaatcgtcctttctgaaccagattagcctttgacttatcatccagagaatcacggaatcctattcgaaatggacaaaacctttaactcaactgcaagagaagcaataaaaccactaagctggacgaagactgcctatatcacttgctcacctcctgagtatttgatgggagcagacaaactgtttgaagaagcacgggttgaaagattcaaaggaccactaaagctgggtgctcttcggactgtt

SEQ ID NO: 46128 - DNA, 442 bp, Arabidopsis thaliana columbia
tcccgctgaagttgttctaacgaattttagtgtaagagaacgtgtaggaagtagtagtacattcacagcacctattgaggttgatcatgatctggattgctcgttacggtttcggctttgccatgtgactaattttgttgatcggattaagcttggtcactggccggtcttgtcttcgagtgatataactttggaattggttgataataaggtgtctgatgatgaggttgggtcagtgatttggtctgcaagttttgatggtccaggtgaaggggtctcgggtcttgctcatttggcaagtataaagtttttgactttaaggctcatgcctggtaatgagggactgttgtctcctagagttagagatgagatgcctcagcatgcttttgatgcatgtgattctcttcttgagaatacaaggcagatttggagaaagagtatg

SEQ ID NO: 46129 - DNA, 579 bp, Arabidopsis thaliana columbia
ccaagtaaccttagttatgaaccgcttgttgaaatcatttttcaaggaacgccaaagtgagatatcagggcccgcttctcgttcttgttgttgtaaccgttggatttctgcgtttattctattgtagatggcagcccgatgttgacggtgttgatgggttcgcaagacagtttccagatttgtttcgagtggtattcccaagtctatgacccgacgagtacccgttatgtccaagagccggcccagatgtgaccagtgatcgtaccagaaagaagtggagcttccgttcctcacttccaccttatgcattgatttagccagctctctgtattttagtaactttttccacatccaagaacccaaactggatctttcatttgcagaccaaaacgttcctttccgaataataaaagtccaaatccaagtcacccatagtgatggctgcgtagagagaagtctcatatcagctttaaacaactgaccttgtttgcttcacaagtgatttaattccagcccaccctctttcttcggttgacagattgatgaccatgctatcttagctgtcttggggttgagaca

SEQ ID NO: 46130 - DNA, 185 bp, Arabidopsis thaliana columbia
  unsure (1)..(185): unsure at all n locations
ttcctcaacagaattctggggtggagtataagggcaagaaaactaatgtgtaattccagattggtcaagaatatcagtaaaagccagttccggtgcattagcagttctgattcttgtttaattggctcntttttgagtactatcanatgtaagaaaaacaggaaaacattttgaaacatcacttt

SEQ ID NO: 46131 - DNA, 744 bp, Arabidopsis thaliana
tgatttgtcgtcgatgcttggtacagattgagacatgagccctagcatttcccgcgcattttcactgtaaccgatgattgtgaaagtggattcttcgacggcgatcaagcagccaaaaggctgggtatagccaccgcgttggatccgggagagataagctgtgatctgctgctctggtacggaggaatcgtacggcgccgttttaagagactgtgagtaatcaaacgacttacctgactctccggattgttcgaagacggcgtggagtctcgcgtcgacagtgtactgttgaatagctttgtttgtggactctgttccgccaccgtggttttgtggctgctgattctgtgaccttagggctttgtttgctgacgactgagcttgttctgcagcgctggtgtgacgacttcggcgatggcctgaggaagctgcctctccaccgctggttttgctaccacctccggagaccatttttctcagttaatggttttggaatttcaaagaattagtgcgagagacgaagaaaatcttcttcaatcattggattcgaaaccacactttcacaaatcttcactgtaagagctcaaaaatgatactcataaggatttttgggaagcttgaattatcaccgtcgctagcttaacggcgaagtttgtaaaatgataaaacagaaaccaatttgaatttttcttaaggctctcaaaaaccaattaaaatgaaggagaagaggtggtgactcaagga

SEQ ID NO: 46132 - DNA, 583 bp, Arabidopsis thaliana columbia
cttggaatttgagatggagagagacttacgagagcgacacgatctcttgccgcaagtgaaagaatgtcggcgcaagagacgataccgggacattgttcttctaatgccttctttgcattgtcaatcacataaaatgcatggagtgagatgttaggaggtccatctttctctgctttgttcttccccttagagtctaagagaactgagccatcacatccctttaatgatcaaaagtatcaccaacaacattatttagagtataaagacataaaaagaccgaaagatgacaacaatgttgtgtgtaagaagttgttactctgacgaaacagttgtggaaatgcatcctcaaaagcgcacgagggacagtttggtcgtttgacatggctttcttgactgcattggttacaatgtggtcggcttgtggacaagtatggtcgtagtagtgaggactgagtgcttggacatcgaaagaaactacgaaaatgactatgacaaggagattgagcatgtgtgcattcattttaacaaacttttcgaaattttaatttcttgagtgaaaagaaatgtatttagaatgaatttg

SEQ ID NO: 46133 - DNA, 466 bp, Arabidopsis thaliana
cttcctctttctctgtcatcagccaaaactctccatcactgcttctcctccattgttccatacccaaacaaccaaacccatctctgtaaaacggaaaatcataactctagcagctccagagacactcaccgctgaaacagtcaccggaattgatacttccgacaacactccacaacaaacaataaaggtaaaaacaacatattcttcttcatcttcttgtctcttgtgttacaaaacccacaaatctttgttgttctgtgttaggtggtgaagccagatgagaaatcaagagtggtactcaagtttgtgtggatggagaagaacataggattaggattggaccaacatgtacctggacatggcacaatcccacttagtccttacttcttctggcctaggaaagatgcttgggacgagctcaagtctactcatgtagctagaccatggatctctcagaagaagatga

SEQ ID NO: 46134 - DNA, 816 bp, Arabidopsis thaliana columbia
tattgttctgaatactttccaaatggaagcttaggaagttacatcagtagaggtaaggaagttaagtttattcatctccttttcgtcattatatcttgtgagtagactcaaagcaagaagaatcttgctcgagcaagacccaaaggtaagagctcttaataagagctttaaaactagatctaaaaattgagatagctcattagagctttatttagtggaagtgaggaaaatatactaattgaagaacaccaagctaaatgattcctagataatttaatatcatagagagggaataaagagagttgctcaaattgatttctggagctctcacgagtttacgatcttaaccttagatccaatagtaattcatcttccttttggatttaatggtttatataatatcatagatagtcgtccaaagtcattgccgtgggagacacgacttaagatatccataggagcggctcagtgtcttgccttcttgcactctaggaagcaagccggtctataccgcagatatctcactgcttcgaaaatcctgctcgactcggtttgtattcaccttgccttttttgttttttttcttgaatacttgctccttacctttaaagtgacatttatgggatatgcaggacttcaacgcaagagtttcctattttggaaagccaaaagtttctctcgatgaattggtatacaccatcgggttttcaaatgtagcacctagatatcaatacccacctcccgaatacatactctcaggcaacaatcttctgcttcttccttatatcttaaagttaaaagtgaccattaaattca

SEQ ID NO: 46135 - DNA, 521 bp, Arabidopsis thaliana columbia
tccaaccccttgcatgcatcttgaatccagtaagaatatcttctgtcacagaaccgtagatccacccgatctaaaagtccaaaatatgaaaagattatcaaatagaaaacaaaagaatggcattgttgtttggacagtctactaaaacctctgacctctttgccccaatcagtcttggcctcataaccacagcttatgacatgaatcgcctccttgagaagagtcaaggggttggttgttgatggaagacctccttgttccatgaaggtagctgcaataaacactggcgactggccaaaacgcttttctagccttttctgggatactagaagagacatctcatcctcatagcctgcaagaacaagaacattcagtgaaattttctttacatgcgcaataatgtgatcacatagaggatgtgacagccagaccttcaacgtcctcgtcaatgtcttccatattgaaaagtggacgttggagtcactctcttaatgcttctggtatcttcatagttaggtatt

SEQ ID NO: 46136 - DNA, 657 bp, Arabidopsis thaliana
gccagtgtgctctaaagggttcattttccagcgagagaacacatcgacggcttcctgggcggcactggcttctatgtaacgggtgattaactccccttcgcgatgcttcttaaccagatacttccatttccaaccgctttcaagattttcaagttgttgatatttcatagcgatctcaatgttaccgtgtaactctttacagaatatcagctttttaggccagtgaagaaaagaatctccatcctgtgagctttaacgcccatgccaggagtattgtcggtgctttctacgtgtgctgtagtgccggttacggtataatcgcggctttgacaacagactaaaaaacatcaactttgaccattacgaaacttgcatggcgtgacctggttcctgataccgatagctatcaggaaatatttgctcagccacatttgattgacgaaaacgatcctttattcagtgatactcaaccgcggctgcaatttgcgctggagcagttgctgcatacgcgagcatcctcctcttttatgctggcgaaggccccggaagagtctgagtatctgaatcttattgccaatgccgcggtacgctacaaagcgatgcaggccaactggtgggcggtcactatgaggtttccggccactccctttagagcac

SEQ ID NO: 46137 - DNA, 394 bp, Arabidopsis thaliana columbia
tgatttagaatataaattctaaaagaaagatattaattctaaaagagagaaaacgttttctactagttttagaaactatagaaatttgtaaaatacaatttcacacataacttagaaaatgaagaaaatcttagaatatatgttctacaatttttagatattggatatcctattttctaagtttgttaaaataaaaaatagtctaaatatcgtagaatatatacaaaaaattagaatagaaattctaaaaataagtagatcactagaaataattttctaaaaaatttggacaaaacgttttctataaaaaatcaactttttcaactaaataaccattttcttacaaatcaactatatttttgtagatctacatgttaccaaggttaaacttttt

SEQ ID NO: 46138 - DNA, 606 bp, Arabidopsis thaliana columbia
cacgctttcctttatttattcaacacggtctcgttgtatatataaacaaaaccttcttcgtcattctaaataagaacacacaaagatctttctaaagttctaaaacatctctctctctctttctctagaaatttcaaagtctcttcttttcttttctatttgatcatgaattctatgttcagtgccttcgacgctctcttcgcagaggtcatgggaaagaaccttatggcttcttcgtttactgctactaccgcaacaaccaaacctgccgccgcgccgcaaacacaaacgcaggagaaggcaaacgcaagtagcaagaagataggtttggtgcagaagattccgaggtttgctttggagcttgatggtcttcactgcttcgaaacaatagtccgttcttgatttgattcgttcttggttcttggcttcaagatcagaaacttagaatctgagtttcttatatttttatttattttattaattcattataacatgtgattgtgaatacgttttggaattttgatattgatcgatttgatctaattatatatttcttggattccgcgattttgtgtcatattcgccggttctggctagatgcaaggg

SEQ ID NO: 46139 - DNA, 242 bp, Arabidopsis thaliana columbia
aatcgaagaaactctcatcatcctgaccagtcgcttcgccgttcaagctcctctcttccgccatctccagcaacagcgagaaaaaggatcagaaaatggaatcgaaggaggaaagtgataaaccccaaggaaagtttcgatttttctttttattggaaaaaggtttcgacttttctctgattctcgtaaaaaattgggtgagagataaacaaaaaaaagataagctttaactttccgcgatt

SEQ ID NO: 46140 - DNA, 549 bp, Arabidopsis thaliana columbia
  unsure (1)..(549): unsure at all n locations
nnnnnnnnnnnnnnnnnnnnctaaagtgagcagtgcgtgcgctaccgcttccggcgtggtgccgatatcgataaacagcgtcgaccattggggatttgctccgccactttgcgggcgatgcgctctttttcttcggtctgggtggccttgcgatcgtgccacggcgtgttaaccgaactggaaggcagcgcgcaccgccatgatggcgcaggatcaggttttgctccgtcagctcattgaggtcgcggcgaatagtctgcgggctgacggagaaatgctctaccagctcttcggtactgacataaccctgctgtttaaccagttcgataataccgttgtgacgttgtgtttgtttgatttataaatccctggaattattttggttttcgcgcattgagcgaatcaacaaaagccatcgctaaacccacggctaatccggcgatgtgtgctccgttcgccatcgacatcccaaacaaatcaaaccatccggcgacaatgcagatcagcgcaaagataattacccacgttgcaggtaaatgcactttgcgg

SEQ ID NO: 46141 - DNA, 406 bp, Arabidopsis thaliana columbia
tgactaacttgagaatcatgctgattgtaacgactaaactgtggagcaaatctagccaattttgtcttaaatgcgcgtggtgcaactgagttccttcctgatgaccataatttcttcaacaaatcaccaaacgcgatagatagctcaccctggaaaattaagagttagaattatattcaaaatgcatgtgagtaccatcacatgagtaaatagaagatttaagtagcaagcacttacacacattcccaaaggattatctctatttatgtcgtcactgtaatcttgcaagaagtattcaacaattggaggtgtgtgggccaaacactgaagagcgctattcataaagcaggtatttcccacattactcaatcctgctaatcatcccttttctccttttccaagaata

SEQ ID NO: 46142 - DNA, 909 bp, Arabidopsis thaliana
gattccattatatgtaaaccaataatagacatcgatatttcacgtttatgtctgaaatgtttggattgttacgtaccgtaagaggccaaggcaggtttgcatgagtccggcgaagaaagtggcggtgaaagctaagtgaaggtaaagctttggattcacctactgcgtttacctctttccccaacatcgcagccgtcaacagcgaggccaccgccactgttcccaccgctaaatctcttgaacttcccatgatcgcgtataccaacggcggcaccaagctcgagtctatacatttatttcccatataaatataatatatatagttagttaaagctatataagttagttatagtttatatgaaattacatatatatttaggaccaaactaaatgacagagaaaaatggaagaaactttagatttgagtttggtgggttttttactcaaaaccaacactgaaatgtttcgtcaagagttatttttctatggtaaaatcattcacatatagcgaaagagagagttgcaattgtgaaaatttattagaagaggaaaggagcctacaaagaccaaggattggagggagattagcgagctgagcatagctaatcccttgaggaatagcaagacttgcaattgttatccctgagataacatctgatttcaaatactccaaactgtaaccacgagcccattccaagatagggaacacgtgtctcaaccctaactcgatctttttcgacgttttcgattcgttcctgattctacggaactgatcgtcggcgaaaaggatctcattgagagtgttctttagtgatttcaagaaaggttgtggtggagggatttctacttggtgatattgtgatgcccttttgctgctcatcttctagtttaactatttaatttggatta

SEQ ID NO: 46143 - DNA, 317 bp, Arabidopsis thaliana columbia
tgcttaccagaataactcgcgtgcgcggctctggccaaaccgtggacagcgtcaacaaaccagcccgagaacttggaacctgaccatgcacccgggctacgatcagatcgcatgtgaggaacaaccagaccggccgaggcatcacgaaaggcatttagacctcacaggagtcaaaccactcctccaaggcctcgggggctacacgcggcgggtgcgctcgcggcacctaccgggacaaaatgtaaccgagaaaggccggtccccttgcaaaaaagtgcgagagagcctcgatgcgagtagcgacactccctttgagg

SEQ ID NO: 46144 - DNA, 283 bp, Arabidopsis thaliana columbia
  unsure (1)..(283): unsure at all n locations
taaaggttctttcagaaaatcaagatagtatacagagccttaggtatgagtagctagagggcacagtgacantagactaattagcaaaattaggagtgaagatggacacatagcaaagtctgagtaggtccaaaagaatcagcagatcctacaacgaaatgcaatactcaaaacaactgcagaacctactgtgagattgacantttcctaaacgtataccangtaccggaattaggtcacgatcacgttaacgatctagacaatctcgtatcggctgaagaaa

SEQ ID NO: 46145 - DNA, 531 bp, Arabidopsis thaliana columbia
caataaaaacaaacaaatacaagctttttattaatatcacttatagaagagtttgaatgataaaaatatttgcctaccagaatatggaacacgtaatgaacaagtctagtcttatgaggtgcaaattttcatctaagacgtgggaattttgcaataatctttactctatacaaagaaaaagaaaaaaaagccgtgaaagttttaaataggacaaaaagaaaagaaaacgggtagtagtttagaagaaggacgaggaatgcaggcagcttccaccgccggtaggggtaggtggacattaaatggagagggaggggacaaacgcaacaataattggggcgtgacttaatatattactcataccatataaccaagttttcttctatatttcctatgattcaaatcattgcttgttcacacttcactcataatccctttgtgtactggctttcaaccaagtatgaacacgtaagccgacgacttacatctaatctgtttcgtccttgatgccgcactcctatgaaatccggagat

SEQ ID NO: 46146 - DNA, 552 bp, Arabidopsis thaliana columbia
  unsure (1)..(552): unsure at all n locations
gaaagtttccccttcaattctcagcttcttgcgtgtggttggtctaagaatctatgagagaagaacataagtttaggcaagggatatgcaacgatcatagatccgagaacaaagactaagaaaaccgaaaaattgaagttagcttaggtagattttttacttggatgaaagtctgggaaatgacacggacaacaggagggaggcgaatgatgaataggcagccaagacggttagggaagtgatcttgaagaatggaagaacaagatctcatcatctgcatgggaatcctcagaggagataatccttcacaatcgactaacactgtaagttctgaattctcaggggtcagaagatgcaaaacgccgtgctctacctgagatactgaaacaataacaatagtggaaaattaaaatgataccgtagcaaataaaatactggaaaatgtagtaaagccactaaggagtaaggacgtactgattgcctgagcgaaacgaggtctctcatgagatggcaactttagaaaagctagccccaaanncgacaatgaggcaa

SEQ ID NO: 46147 - DNA, 425 bp, Arabidopsis thaliana columbia
agaaaatgtggaatgtaacaaggaaaacaaacccttccatcctgaaatttagctttataaacacgtccaatggttccttcaccaagaaggcgattcggcgagaaacaagacgcggtattctgcaaatccgctagtgaaaacgctttcacaccgcgtgtatcaggagagtcttgggaggtggacgaacggtcaggggtagcagccacttgggtagaaggtatgagatgaaaagtaggagagttcttgaaactgacagaagaagttcttttaacagaaggctttgtttcaagtgaagtattagaatcaactgtcttctgggttttgaattcttccatattatcgaattgaagcatctgagaggattgtggtgtgaagagtggcttgcttcggttggttcctttctcgtcgtcgaaaaagtgagaaga

SEQ ID NO: 46148 - DNA, 601 bp, Arabidopsis thaliana
aacctttttacttcctaatcacagaatcatttctgataatccaaagatgattatacacaaaaatttaagatacggacctcatgtaatctaacaatgtggggatgtttcaacattttcagagtccggatctctctttttatctgcacagattcataagaattggatctgtcaaattacaaatttagtaaaagaagagaaaagaaaaaaattagaaatgatgatagagagatgggaacctgtaaggagaagttgagatcggcgatacgagacttgtcgatgattttaacggcgaaggaatgaccggagacggtatctttagcgaatttaactttaccgaaattaccctcgccgagcgtcctccctagctcgtatttccccagacgcattcccttctccgccttcttctcctcctcttgccttctcaccatccaatcaatctcctatttcaatttatttcccaacaaattaacagacaaccaaatcgatttctcgcttgaatcttccgattagattactattaattccgttattgaaagaggggaagtagattattgtagctgtgcaggtatgtgtgtgagggaaggagatatatatatatata

SEQ ID NO: 46149 - DNA, 1025 bp, Arabidopsis thaliana columbia
acatgttaccaagatatctagcgagacaaggttttttgggttcctagaattatttttcttgaggacactttaaagctttaaagcttttacgatatctcatctttatctttttgttgtttccttctttcgtcggagaatcggagagccatgcatgagaaaaagagaggcaagagtcacgagtcgtcgcagcacacaagaatcacatgttcgatcgtgagagtgaagtgacgtgttttcttcaatctcgagattttcagatttaagcgccgctcccattcaccattatcccatgcttcttccatcctctcttaccatcacatttaacatcaccacattgttcccataatcccatttattttaatagtatatgacattgtacataattctacacaaatcccaaaaaataaagaaaaagtaataactgaacccattttcttctgtttcactaaagcaaaaacacaaactgattatatttctatttcgtttttattgattgtttaatccaaaaaaaggagtgctaagcctaataaatttatctctgtattgacacatttgtcaccagatactaagcttttgctttagccattaaacaattgttcttcatcctaaatcaaaaagcaagctctacctctactgtcttttttttttgttgctaatagtagctagagattccataaccagttaccaaaacatatttggtctttacattttacatgatatttagaatccctgtgaaaactaatccttcattcgctaccacatatctaacataccgattggcacgtgagagaacaaaccaaaagtcccaattatcgcaatgaataaatgggcttagctcattcacaactatgctaaagcccaaaggcccatacaatcccaatcttgttgcgtcgtattaaaccttctccttctccgacgaaacaatcacacactccggcggcaataaacgcttcttcatggaaccaatcccaaatgatctcattctcgagatcttctcgagattgccggcgaagtcagtcattgga

SEQ ID NO: 46150 - DNA, 1471 bp, Arabidopsis thaliana
caccataagctcccgccaatgcttcttgtgcctcctagaagagatgatgttgcgcagtcacggtcgatctgacgaatgaccacagaacaagagactcgaagagagttgtggaggacattgtttcgctgcctccaaaggctgtacaccacgagattagctaccactttccgaagcagagtaggagctgctgaagaagaaagccttgtccaagagagaagctcctaccatgagcagaacagccgctgacgagggcagaccctgaggaaaaccagcatccaaacctgagaagagaaatcacaaagcagcagaagatggttccttgtctcggtgtcaacagagcaaaggcaacattcagcagagttgataaggccccaagaaagcagcctgtgaagggtagggagacggttaaggttagctatccacatggtaaaagcgtgtttaggaacagcgcctttgaacgtgatagactttgtccaacccttcaaagaactcctacgcctgaaaccctcccaggttgcggcgactgagaagccctgactagcgtctccattcatactccaaaagtaacagtcactgtccagatgaggcagaggagcagggagcgaagagagaagagcgaagatagagtcagctgtgattgaccgtggcagaggatgcctccatcccgaagcgtcaaaagcatctgctacctttgcgtttaaaggaattctcagcggtctcaattcaacattacccaagagcttaatcaaggggcccttataagtccaattatcaaaccagaacgaagcctttaagacatttcccactttagctttgacgaaccgctccgccaggggccgttagatttagcaacattttccagctccaagggtcactaatgttagcctccacccgccagaaagaagactccctaagacgatgatggcactaccactgaacccacagagaatctgaacggttaaacaggaaccaaataagccttagaagaagcgctttgttccactcactaaaccgcttaaaacccaaactgccttcactctttgggaggcaggaatgcacccaagagactttagcgcctttacccacatcaatattacccgaccagaggaatttggaacaaagaccttccagctttttaatgcagcccttgggcagaaggaaagtagacatccagaaattgattaagccaaatataatcgaagagataactgcgcccgacctgcgaaagacaaggacttggagacccaagatcagaatctagaagagagcttctccagcaaaggaccatattcagcaattcgcagcttgcggcacatcaaagggagacctaagtaccggatagggaaggctccttctgggaaaccataggcaacagaggcgctcctctcagttaaatccagacccgcttggaacagctgacttttgtccttattaactctaaggccagatcaatccgcaaagtcgactcttc

SEQ ID NO: 46151 - DNA, 587 bp, Arabidopsis thaliana
cctatttttttccaactcactaatcaaaatctcagtttacatatatttctccgttggatgaccatgatgatggtaagtatacatgatggacatgcacataggaggaactggattgtgttagaattctgatagtgtagtgatgtatcattgtcattgaaagccatattgaaaatatgttagaaaccagatagagaactccttcctacttgaaaccttgcattgttcaagatgtattttgattttccaaattaaaaatctgtttaatctcaattttaattccaaaataaacaggattgaagccatcacagacaataacgttagtgaagaaggtgaaatacggagattacgccgtggaagctgcgtggccactaggaagcgccatagaagcagtatcctcaccatgaggaaggcaattttgggtatttgcactaaacctcttattcttttagtttctccaaaatcacccaagctttttttgccttactcaaattttttttatcgcaacatcttcctactacaatttttgtgacaataatcactagagaaaagagttcaattcttaatatagtataattttattttcttgt

SEQ ID NO: 46152 - DNA, 509 bp, Arabidopsis thaliana columbia
  unsure (1)..(509): unsure at all n locations
tagtaacggccgccagtgtctctaaagttccggtatagttgccgttaacggtcagtacattccccggtttccccccttcgctattcatttgaaccgtgccgccattctccaggttgccgccgatagtggttttagcgacacgcagtgccccccccaggcataacgttcatatcacctgcagtggtgacatttcccgacatcacaccgctgttatggatattaatgtgttgacttgccatattaatggcagagtcggaaccgaaagcaatttccccccccacgatatccgtcgtaccctgatacgccgcggaatcgttgttaagagtcaggatcccggtacccagttttgtcacatcaccgctaccgctgatactgtgcgtcatcgcccagctacgctcagtggagatggtgagcaggccattattgataacggaagcatcacccanggtttttctgctcgttgacgctgagcgcgctgcctgtatcaatgttgaattgcccacaaagcg

SEQ ID NO: 46153 - DNA, 519 bp, Arabidopsis thaliana columbia
tttcttcgaatccatatccatttgtcagtgtcactaaaatgataagaggttgacacagttttgtaaagatctaacctgatgcttgacatgttcatatctgtgtcgatccattttttttcccgtaaaattttggatgttaaaacgcatgggtatttaaactcttaagtttccagtattggttaagaaaaacaaatctttcttattaaactttgatagacacacgcgcatgtagtaaattaggcttgaatcatgaattggttccgtaacttctgaagattatctctgcacgattttacggataactggactttatggttttcgccatgagcctagcttcttcttgtttggtttaatttacttcatatcaacgatctgctcattttcacatcttcttattttgagactttttgttgtgcctaaagtcgttcctcaattttgatggttaaaccttcggtttccacacaagggattgcagtcttcaaattaattattgtttaaaattcgatgtgcaacaataat

SEQ ID NO: 46154 - DNA, 523 bp, Arabidopsis thaliana columbia
ggtggtcctgaaacattcttgcttgtagctaagttttgttacggtgtaagaattgaggtcacacctgaaaacgctgtgagtctcagatgtgcagcagagtatctccaaatgagtgaaaactatggagatgcaaatctcatctatctcactgagagtttcctcaacgatcacgtattcgtaaactgggaagattccatcaaggccctggagaaatcatgcgaaccaaaagtgttgcctctcgctgaagagcttcacattgtttctaggtgcattggttctttagccatgaaggcttgtgcagaggacaacacaagttttttcaactggccaatctcactacctgaaggaaccactactactactatatattggaacggaatacaaacaaaggccacgagcgaaaactggtggttcaacgatgtatcatcgttcctagatttaccaatgtacaaaaggttcatcaaaactgttgaatccagaggcgtaaatgcgggtatcatagcagcatctgtcacacattacg

SEQ ID NO: 46155 - DNA, 493 bp, Arabidopsis thaliana columbia
  unsure (1)..(493): unsure at all n locations
ctnnnnnnnnnnnnnnnnnnnnnnnctaaagatagaggctaccgctttcctgcaaacgcgccatttcagtaaagatatgacggtgtgggcgggtgtaaaaatcgtctgctaccacacgctcggctacatcatcccagcgttcgttatctagcattaaaccgcccaacaccgactgctccgcttcgatcgagtgcggaggactttcagcccggcaacttgtggatcgcgttcgcggggttcagcctgctgtttgttgaagggtttatttcctgccatagtgaatggagttaccgagataaagaatgggtcgaaactttatcatatgaagcagaccctgacgatacgttctggaggacacatggcaacacgaattgaatttcacaagcacggtggcccggaagtacttcaagccgtagagttcactcctgccgatccggcggagaatgaaatccaggtcgaaaataaagccatcgcgatcaattttatcgacaca

SEQ ID NO: 46156 - DNA, 546 bp, Arabidopsis thaliana
ctctctttctctcaatttctcactcactacttgtctttcttacattaccgagaatatggatcttgttgttatcacagagactactattccgacgaaaatcactcacgtgaacaagaaatcctccgacgaattgctccgtaagttcgccgatcctgacgacgtcgacgagtcgtcaaagtcaacgaaacgccggaagaaatcagctaagagttcttctcgagagaagggcgttgacatcgaaagtaacactagtggcttagtggagaggaaacggctcttgcttgccccggcgagtaaacggagatctctgtttatccggcagcttgcttctggaaaatcacatctcaggaacaagtctctcgtcagaaccatcggcaaggtataataattactgaatccaatttccattaattgatttgtaaatttctttatttttaaaatcatactctgctctaattggtcagacatggcgtaaaacaatggaaggagcttcaagagttttcatcgagaagcattataacagacacaggcgtctcaccaacgacg

SEQ ID NO: 46157 - DNA, 566 bp, Arabidopsis thaliana columbia
gcatgcctgcacgagaggatccccggtccagctcagtcaagcttcataccgggcagattgagtaccgacaatattctaggtggttcaagaagcagtccattcaatgcggaggaaaaaagggcgaaaaggttggatgctcctaaaactggatttagagaaagcctatgatcgtatacgctgggattttttacatgatactttagtgtctgtgggactgccagattgttggagagagtggatcatgaagtgtgttgcaggaccatctatgactttgttgtggaatggggagaaggcagatccgtttaaaccggctagagggttgagacaaggtgacccgctgtcaccatatctctttgttctttgtatggagcggttgtgccatcagatagagatttcagtagcttcgaaggagtggaaacagattaatctctctcagggagggccgaagttatcacatatttgtttcgcggattatcttattctttttgccgaagcatcggtggcacaaattcgggttatcagacaagttctagaacgattctgcgtacgtcaggggcagaaggtta

SEQ ID NO: 46158 - DNA, 509 bp, Arabidopsis thaliana columbia
aacagcaactgagaatacacgtggcaaaaccaaagacgtcacagaaaaatggaaagtcttacccgaaccatctgactagccgttgagtttttaccaccgaaccttaagaaaataatgttagaataactaaaaccatcttaatttcattattacttttaaagattagtttaaatattagaattttaaaaacgtcgaaaactgcgattaagcatattgttcttagttgatctgtaaattttgatattcgaagctcagcatgattttatgtaatatggatttaatactttaattcattttaaaaacagaatagtaaattctcaataaaattaaacacgacgcaaagaaaccttcacaataagatatcaaccccactattttggtctggtcttatattgggccgatatagcctgctaggtattacattaattcgagagttggattgattaaaatggttatacaaaatgtttgtattgcctctcggagtcaaatatgacagattggctgattga

SEQ ID NO: 46159 - DNA, 220 bp, Arabidopsis thaliana columbia
gcgtgtgtttgtttaggtctccaagatcaagaacaagcgccatgtgaagtagaactatttttaccaagcgaattaaagcatttccaactggcaacaggtctagtttcaaagagtcttgttaaggggcgttttactttaaaagcagagagttacgatcagctaatcgatagtccatttgagttagccgagcaaagccgttttagctttgatgcaaatggta

SEQ ID NO: 46160 - DNA, 426 bp, Arabidopsis thaliana columbia
tgcaataaatcaaatacgtacgggattgttgcggtgcatacgtgaagacaaagtatatatattgtatgacaaattgaactggtctggttacctatagtagagctcattttttaggattttctgttaagaagagctcatttaaagagtttgttatatagaagctctgaatatttataatttagttatataatctggttcattcatatccgatactgcatgcagaccagttaaccaatggaatgaaggtgcaaatatgcgctttaatgttttgacctatacatagtcaagctatgacatgactgattttaaaaggattttttgtaactcggttttatacaagtatggcttgtttggtccaactatgcatagtatttgactaaggattaaaagttaaattacagctaatatcacttaaggaattataaa

SEQ ID NO: 46161 - DNA, 565 bp, Arabidopsis thaliana columbia
catggaagaagcttgggttcaagaagctgtcaaggaagactgcatcgacaatggcagtgagcttggacgggaaatatattgctttgtgagtctttcttcatcccgggctgcttatcactatcaggcttgtgtgattgtacataaaacctcatactttgcacctatttttgtaggggtgggaaagatggagatgtatctgttgctgaagttaagacaatggaaatctaccactacagtaagaggctgcatcttggtcaatccattgcttcacttgagttctgccccagtgaaaggtatggggaagcaattgaaaggataatgataaatcaaaacccttatgtctccgcattgtttctaatgttgatctttatctaattggttctttctagggttatgctgacaacttctagcgaatggggagagatggtgacaaactcactgtaccaaaggagtggaaaggtttgttgctaatctctttctctgaaaatatgaatggcacatatttggggtttaacatttgttcccactattatctatttggttgatgtgcagagtggcagatata

SEQ ID NO: 46162 - DNA, 516 bp, Arabidopsis thaliana columbia
taatagactccaaccaatttattagtatcattttatacagtttctaacatttttgccactgcttagatttatgggctttccctttctgtctgcatgggcctcctctcttatattaataatctgacttaatgaaaacttttaaatcttttgtagtttattttcctctagatgctaattttagcaaaatgaaaagatgtgtgatggaaacgtaaagttaaagcaaaagaagatggtgaattggtgatgcaatattttagtcatgtgtcattgtttacatttatgatatattttactttaaaatacttttcttcattttcaatttttataaatcttcgtagaacacatattcacaaatgatgctactttggtgatcagttactaaaaaataccgaaattgattttagaagatagagacgtgaatatgtttgccaatattaattgggctcaacttaagcgcaaattatataaggaaagactacctagtaacgaacaagtagcaggtcaactgtccgagcg

SEQ ID NO: 46163 - DNA, 401 bp, Arabidopsis thaliana columbia
tcgactcatccctcttcactaaacaatgacttaattttggacacctttaccttgactacttactccaatcatatatgataccaatcaagaatcactacataagtagaaaactttgcaatgagtccattaattaaaattaagaataaacttaaaattttatggtattttaagattccctttggattgacatgacaagaaatcagcaaattagtcgtaactcgtaagactaaacaagatcaattttcactttctttacaaagattccgttgtaattctagaatttgttttttgtcactgtttttctatagattaatttacctgcatcaaaccgattaagaagtgtacacatgggcatctatatatatctaacaggtaaaaagtgtatgtacatgcataaggtt

SEQ ID NO: 46164 - DNA, 544 bp, Arabidopsis thaliana columbia
ccatgttttggaagtgtgtcttcaaaatagaggaggggggctgaggatgctaaagccccgagcgctatgtatgggtattttagcttgaaccaagctgccaacactttgtgtaccgcaccatgaaattgaaaataaaataaaattatttttgaagcataacattttatcatactaaattaaatatccatatagtgaaagaggaatggaacattagggaaagtgagaagagcaaatttcgttccaacattattttagatgtatgtcaattatttttagcaagactagtaaaagaatatataactatatattttcaatatatatatagcatgtttaaaagatatgatacttatgatcacactcaccatataacattgttctgacttctgatttttttgtttataattatttagaaaacatatatattggaatacaaacggtttgttaatatattaacatttatgatattttaaagttaattaatttagttttaatattttaaatttttagtgtacatgcaaaaatcatgtgatgtttatttgacatt

SEQ ID NO: 46165 - DNA, 807 bp, Arabidopsis thaliana
cgacatgatccaaaataaaaccgatccaaattacaacattctttgttttttttttttttttaaatttcatcgagtcaatacccgaaccatcacaaaaacggattcatcacaaaatgaggttcgttcttgactcaatctcctccatcgtctgatctcgatgatcaggtgctatcacaatgaagagcagctttaatcttctgaacggtgcacgatatcaaattattaaccgtctccacagattccaccgttagcttagccgtacgagagctattcaccagtatctgaaacgccaccgttagtaacgaccctccttcctccatgcacccaccgttaccaatactgttacgttcctctgcggcgcagcgttgcgtaccagcctgaccgttagggagaatggcgaatcctgaaggaaggagtgccacgtaagcagaatctccaccgttcatcacagcttgcattgctgggatatcaacaggcgcgtacacgacaaccgctcctgcagcgtctatgcttgtctcttgtaataccagcatactactctgattcgcatttatcgcctgcatgaaacaatcaaaacaaaattaaataaatggaaactttggtggtagaagagaaaattataaatcccaaaaggggcaacactaaattaaacgatgatgaacgaggagacttttacagtgtcaccgtcacaagccagaaaaagctaaaggggtacaacggagaaaagacaccaataatgcagaaataaagagagaaccaaacagagattttccaaaactcgggccaaaaaggaagaaaaggcaaagg

SEQ ID NO: 46166 - DNA, 590 bp, Arabidopsis thaliana columbia
aagaagtaatgttctcatatcaatacatagattgtcaaaatgaatattatagacaataaaaccaaacgatctagaaagaacagagagccaaaaaaaatcgaaagtattatcaacaaaaaatagaaacaataataagataagaaaagagacaaagagtgtttgcctgaaagagttgcaaataaagaacaccaaaagtggtatctctctcttgttttataaaagaaacagataaggaagtcttgatgaatccccacaacttcagagatggagaataagaagaaaagtctgttaaagatcacatgggaagaaagaaagagacattaattactgtgtggtggtttctgggtttgtagagtttgaagatgaaagagagagagagagagagagagacaagaggaagaagcagatgctttggtggggggatttaaaagatttaataacgtcgcaccgtttcagttttttctcacttttttccaaaatatataatacataaatgagcattgattgacatttttaggatcaaaatgaatgcaatattcagtcatagtcggtccggtcacaacacaagatgcggtaatgcagtgtttggg

SEQ ID NO: 46167 - DNA, 381 bp, Arabidopsis thaliana columbia
ttttaggcttaatatttgttgtaggctatttagacttccttggaattttttgggaactcactgcataactcagagaaaatgccacctctagttgaattagtctcttatataacacttttatgttggcggcagaaaagtgcaagataggaacaacatttttgaattttcacacgtgtataacgaccatccaatgtagaagaacaacaaacaagactcgagtcaaaataaatagaaacaaaaaaaaaacacgagatacacaatgtcataaacaaaacataagtatgataatcatatcaaattaagaaaaatagattttaatttctatgattaacataataatctaaatcaaatatctaaaaaaaactaaaaagatagagttga

SEQ ID NO: 46168 - DNA, 556 bp, Arabidopsis thaliana columbia
cccttcgttttaggctcggaaactatgaatgggaagaccatcggcctaaaacaggaatgtggaaaggtacgagtggcggtgaagtcttctccttcacaggctgcgatgatgaccagacctcggctgacactccggtacattcccaactattggccatataaataatctctctagatttcaaacaacttttgatagtatttagcaagtccagtcaaaccatccacattttatagtttcaccgagatgttatagtcttatagtaattaccccataccttcattctaaaagtactcctcacaaagaaacgtgtgtgcactacagcaattgtcagggagcgcatggacgggggcaatgacttatgcattcattcaggccatagaacgtggccacgggatgacttatgggagcttgctgaatgcaatgagatcaccggttcatgagatcttcgacaaaaacaaaggtagagagcttgtggaagtgggaggtgctgattttctctctactcttcttggtttgctcatcttaggcgcttctcctcctgatgaggaagaggaag

SEQ ID NO: 46169 - DNA, 620 bp, Arabidopsis thaliana columbia
cattacgcggcgtcaacgagacaacgacgtcggcgaaatcgggagctttacctgagtaaaccgggacagaagcgaatcgggtcgagaagcttcgtaatccacctagtccgacgtattcatcctcctcgtcgtcgtcatcgaagttcaaagagtaactcaaaggatcgtattgaaacttctcgcttgcgtcccaatcgcggccgcgtcgtggatcgcgattgaatcgacgaatgaaagtcttccaccgtggaccagcaacgatttctgaccactctcggatcttcaaggatgctcggatccaccaacgtggctcgtcgccgtggtcgccgctgtgattactgtcatcgacggttcgaattcgtccccaggaggagtaaccaacggcggtggagcttcttgatcggcggaagtcggggaaacaacagcaacgttgatcgtaccgggtatcaggatctcgggttgggtcgactgcgaaagttccatgggccgaaactcagagaagttttttcttgggtcaaaagactcgtgatgataatataacttgattcaagttttagctgtaaaggattatgattggtcctatttattatatgcacacttgacacttgtaatataaatta

SEQ ID NO: 46170 - DNA, 592 bp, Arabidopsis thaliana columbia
  unsure (1)..(592): unsure at all n locations
aatcgagaataggataaaggagggccaaatattcccgagctggatgcttttgagaacattactcctcgcaaactttaaatgccgagcactagcaggatcagagagagcattcacattgtttaaaaagcacggatacaaacccgacatggtgattttcaactcaatgctctccattttcacgaggaacaacatgtacgatcaagcagaggggattctcgagtctatccgcgaggatgggctaagccggatcttgtaacctacaacagcctgatggacatgtacgtaagaagaggagagtgttggaaagccgaagaaatcctcaagactctagaaaaatcgcagttaaaaccggacctggtctcttacaacacggtgatcaaaggtttctgcagaagagggttgatgcaagaagcggttaggatgctgtctgagatgacagagcggggaatcagaccgtgcattttcacttacaacacgtttgtttcgggttaccggcgatgggaatgtttgcagagatagaagatgtgattgagtgcatggcgaagaatgattgcagaccannatgagctgacttttaaatggtagtagatgg

SEQ ID NO: 46171 - DNA, 581 bp, Arabidopsis thaliana columbia
gcctgtgaagttttctactggagcttctcgttttccttccacaggtatgtacataacattgccttcacgtaaatgattgtacttctcgtgtattgatgcctgtaccttcctattggggttgtaggaggttctgtgggtgtgatatcgacctcacgggacgattggaatgattctactgactcttcagtcagggtagaggaagaggaacctgcagtttttgttcgtgtgaagggaaagcaagatgaagaagatactcttagttctgacaagtcatctcaagctgattggattcggcagtatatgatgagacaggaagaggtactcatatagaatgctttaatgattaatcactttgtgaaagcttcatacattttggttctagccacaacgtcttaagcagagttagaaaaatgatccggaagcgcaattcaaagcaaaatttagttcatggatgaattttctcattgaattaaatttgcaggaagaattggaatgttgggaagatgaagtagatggtattgaccccagaaataaggtaattcagcttgtttcgattatcgaaacaaaatggaatatggggg

SEQ ID NO: 46172 - DNA, 549 bp, Arabidopsis thaliana columbia
caagagttcttcctcagggatcatcttaatgtgacaatcagaagttggatacgaagcacatagaagcgtgtaccacgttcaaccacatcatcacttagcatcccaccactttgatccaccgttccggtcacgagtttcgctggacaagtcatacaaacaccgagattgcagtcgtagggaacgtcaaggccagagtcaagagccttagatagaatcgtctcgtctggttcgacttccaattcagtcgtctttccgtcgtgctctaccaccactttatatgcccgagctatgatccttccggtggtgagaaagttccggcggtttgttgttgttgagagtgttgcgttacggagtgggaaggagaaggaattggagagataaggtttagggagagagattgtagaagtttgagtcgggagaggaagagtcgccatgagagacagagagacggagacaaaagagtttttgtgtcaagtgagagtgatgactgtttgtggtgaatacggagataaggttgatcatcggttgtagatagtggtgggacataaa

SEQ ID NO: 46173 - DNA, 545 bp, Arabidopsis thaliana columbia
tcgagcttaccaatccgaaatccgcaattcttgcgcacatttcaccgtctaacaagatgttggacgttttcacatctctgtgaattatcggaggatctacttcgttgtgtaagtaatcaagtcctcttgcagcctgcaacatgatcttcagtctcatgctccagtccagttgtgaaagatctccatggagatgatcatgaagcgtaccgtgcggcatgtactcataaaccaaaagcctttcccccatctctgagcagtatcctaacaaattcacaatattgttgtgtctgattttgcaaagaatctctagctcggactcgaaacctcggttattagagtgaatgatcgttgcagcattcgctcttttgaccgcaacatgtatcccatcagataaaacagctttatagacaaacccgaagctacctctcccgagctcgttgaattctttgaacccgtgagtcgcgtctttaagttctgatagacggaagatcttggtttccccgagagatacagcggttggtagaagaccgactgatgagggacag

SEQ ID NO: 46174 - DNA, 1605 bp, Arabidopsis thaliana columbia
cgacctttaaaatcaaaggtattctcacagatcttcaagaggaggaagtatttcaacaccaaatcatgttttatcacatgagtcccttttttattcattgcaaagtttcacacaccttatgatggttcaacttaaaacgacacagcaaaacagagacaagtttgagacaagcatagaatatagaggaaataaaagtaaagcaacccaagagagagagagatagctgcaagaggacggacagctacacagtcatacgcaagaagaaaagaaaacagcaaacaactgcttcagatatcgagagtgagccacatgctacgtatgttcctttcttattcataaggtttaacatctccacctcaagtagcacgagaaaggcactttactcctatcaattccacagaaccattcattcttgttaccacatatctcttcaccaacatgagctgtgtcctgaatctatcatcaataaacattggtgatttgtatgagtgcctacgcatgtgtaaacaaggaactgcaatactagcttaaagaaaacgatgaaaaggaccaacccgtcaggtaggaagtgccccacaagaagccaaggccacaaagactccaactagagacttcagcagaacaaggatcagttggagttaggtagcaatatacgttgcgtaacactcacctgcatcattcccaattacctagatcaacactaataacaataagatagtttacaaagtatttgataatgcaaaggagctttatgtttgctcttaccgtgttactcttccattctgatctcacacaaagtgacgactcgaccaagtcgactgtccttgatattgctcggggagttgagttgactgatggtttttgtccacaaagttatctttctgagggttctggaaataaggaaaatctgcttggacctgtgaagttggaacttgttttccaggaaacggaaagttggcaggcccgttcagtccattgccagtactacccaagtgttctggtttcccagaggtggcgtaattcaaagaactgttcagcccaacgcctcgagaagattgagcttggtatccatccaaccagctgtaatcatcaaccggtaggtggttgttgccagacaattccgaaccaggtgctggctccttttgcagcttagctgggacagagttaaacccaggcggagggccaagatgcctgaaggctctactgattggatttttctttgctaatgaagattggacgcccaggccatcagcaacaactccggatgataaaacaggatcaattttgggtggaatacagcttcaggtgttcttgactgagaatatggcataccacccataccattgccattgtaagactggtggacgggtaatgagtgtgcagggtaataggaaactccatgatttccttgcatctcattcctcattacatgaccattacccagctgagcaaacccagataggctactagcaagagaagcagcttcttcgggtgaccacttgctaccaccaccaaaggaagtagattgcgagtgggccggtgaaacatgtgaaacctgagcttgagtttgttgaaagtgcacaacccgtgatggcagtggttgtg

SEQ ID NO: 46175 - DNA, 1310 bp, Arabidopsis thaliana columbia
catactctttcaaaacccaaacatcaacatggctatactcgtcgtaacacatcaaacaaacgcagccatctaacacaccaatatccatgttatcttcaatgtaaagctcctgtgggaaactgaggactccaatgtcatcagaggcaagatcatatttgattatcgcgttaaaggcaatgactccctgccttcgaggcaaaatccagtgaagatggttgttaacaaccacaccatagccacgacgaggcaagagatggtaatagtacgaaatccaaagaatctgaaactcgaacataagacacactctcttccacgaattcttcttcaagctgaaaactttgacttcaacagggcaaggaaatttctttttaccttctttaagcttacactgaacaatcctcacaactttaaagtcatcgcccacagaatcataacccaaaccgtaaaacacatactcacgagtgatgtcacgttctgggaaatcaattggctcaattggtaaacggtgaatcttcctagtcgaaggattaaagatcgctagatcaacaggagagttacataaccctatgacaccgttaaatgaaccaaaaacctctgtaaaacctccggcttgtaaaggatgagggatgtcggagcgttctcaggcgagtctagctccaccgtgcgtagaaaacgaggtcctcggagtaagatcatgagatgttctcccgtttcgagtctgcgacggagatgagatgagacgaactcgggactgtcgatcaaagagaagcaaggctttgagaggacgcgacactttacgagcgtagttgctctgagacggagaaacatttcgttgatgagatccgtcggacattccgccatttctgttttccggaagaaaattgacgttagagaggaattagggtttcagaggatttgagagatgaattttcgagtccagctctcgagtgttgagacatgagaagtctttagctgtaaatgtttccgggtttttgttggttcgggttgataaaattgatccgaaccgaaattaattcggtttatttctatcgaattctgattcttcggtttaagttcggttcttttggtccaatttggttgtgtctcgatttgatattggattgaggtaagagaccgttaaaagagacttatcaatggcgggagatctggtgctttacacggcgatctgagactgggttttgatcctctctccgtcgtgtggttcttataggattctccgagacttcgtttctaagctcatgcgatcttctccgactactttttatctttcaactctcacatcttatttc

SEQ ID NO: 46176 - DNA, 1436 bp, Arabidopsis thaliana columbia
caccaaatccccagcctgtggacccccatatgcttttggacaaagccccctcttcaccctgttgcagcattcatggatgactcatatgcagcatcgtctgttcctcctaaaaaggtaagatttttttttttctgaaggagttctgtatctaccatgaattctggctgataatgtgatttccaggctcctgtacctaactggctcaaggaagaattattgaagaaaaaagcagatcttggaaggccttcttcagggagatttgaggagagagaatctatggatgatgatgtactttataaacctcctacgaaagctgatcagcctgacaaaaaaagcttcagcccctctaattcctctgacgaagaagaagaggttccttgaacttttaacacttgttttgttttgacgattcaagcgctcttggtacttaaatttgatccagtaacatcactaaaatgcatggtttgcttcatataggatgagatggatgcagctagaaccacagaaattaatatggagataaagcgtatcttgacagaagtccttcttaaggtatgtggcctggtagaacttgagtggctggtctataaacatgtttctgctacagttgacatatgtcttttgaacaggttaccagatgaattatttgatgaaattgcaaccaaagtcattaacgaagatgaagcaatacctaaaggtttgttgtggtctccaagatttagttttatgtctttaatatgtggaataactcctgaatgttaccttcttctgtactgttatgctgtgctattcatggttcagatgatagtgtacagcataatcataaattgtcatcatcccttctctccacagctgatccactccacaaggcttcggcaaagattttggtctcggtagaaggtgcaaatacaaaagctagttctggctctccagcagatgtgctaggtcttgctagctatgcctctgatgatgatgatgctgatactgatgctgcttctgacgcgaatgctgatgaaaatggagtggagagtcttggtgtggggtcaagacacaatgttagtcagcagccaagcactgagaaacttcctgaccctgaagcaatggccagtgcgaaattggatccagcagttggagtcaatgctaattctggcaagaatagtaagtcaggcttggaggattattctcagatgccaggctccacgagaaaagatgatgaggcgggtagtaccaaaatatctgatgtaagcgccagctctggacttggtggatgatacttcaggaagcagaaaagagcatcctgacagaactgatagtgataaagatgccatactagatgaacctcacgtgaagaattctggcgtgaaatcagattgcaaccttcgtcaggatagtaataaaccttatgggaaagatttgagtgacgaagtgagtacaga

SEQ ID NO: 46177 - DNA, 478 bp, Arabidopsis thaliana columbia
tgtttttcacccatccattcggaaacctgaagggcttttgagaactgtttggaatcacggagattcttgatgaggcatttgagatcagacggtttcatttgatctccccattgctccagaagcggagtgacgggtttattcattcttctgtccttaatggttttactgttcatgagtttctcagccttctctgtcattcctctgtctcgataaccagaggccaacattgtcgggattcgatgatcaaactcaagtggcaaagattcccacactttgtagatctcttctgctccaacgatatcatctactttcaaaagcgaacgaatcactgttcggtaaccattgttatcacgttctcctatcttactcttgtaaagtttccatacacgtaaaacctcttctctgtttccagcttcaccatacagcttcataagatggtcgtagctgattttacgacttctgatccacaattgctctg

SEQ ID NO: 46178 - DNA, 263 bp, Arabidopsis thaliana columbia
aagctgtttagaagcttatgaagatgacaaactatctatggggagaagttgttcgtcatgccacttatctcataaacagagtggtgacaagggttctaacaaatcaaactccgtatgaagcatacaaagggagaaaacccaatgtagaacacatacgtgtgtttggttgtgttggatacgcaagaatagactctccttacttgaagaagttagatgacagatctcatgctcttttccatttgggaactgaaccagactcaaag

SEQ ID NO: 46179 - DNA, 360 bp, Arabidopsis thaliana columbia
tttctcaggaattaaagaatgaaatattagttttatctttcaaaccaaagatcaaatattttttctctaaaataccttcaaaatataaaatatgtatgagtagattatggtatgtgtttgttgacaatatgatcatttgtttatttgttttaaaaaaatttggcctctcacataatcgattaaatgtttatttgtatatcttgaaacataataaacaacattactgaccctataacttacgtcataaatatcatttacaatataatttgttgaatgataaaaccatgaattactcataataggcttcagttatggtgataggttaatattctagcgaatgactcatgtgatatcccgttc

SEQ ID NO: 46180 - DNA, 1142 bp, Arabidopsis thaliana
tactgggaccaggccctgctgatttacgtttctctgaagcaatttgatgccttttattttaggaagatgtactgctttggtgatgtagtgaaagttgtttatcagtgccacagatgagctaaaacgagcgtctcggtttgttataatatcaaaccacatttttcatgtgttttaacaaacattttcaacaatgttcaacaacactttactccacgattcgtaaatgaaataagcaacagatttaaatcttgcagaagtggtagctggattttggtacctagccgaccactcttcctctgaagagcaaaatgttccatcctgggacaattcgcttcaatcagaatcagagtcatgccttctttttttctccttcttctctttcttgtgcttctttctatcatctgaatcacgagcgcttcgcttctcatgcctttcgcgtttttcacgcctatcatgtctttcttccttctctctctttgcaggtttcctttcctcacgcctatccttcttttggtccctctcaacatcatccggtccatcttcaacagttttgacccctgatgtatctgctggtaagcgtgctgaatctgcatcttctttctgagaggatgcaagggtgctcggatcttcccaaggtcgtggtgctctgtacagagttggagaaagacatgtgagacaagggacaaaggtaaactaccaataaaccataaagccaccaaaaacattaacatagttaaaaattagagttttttacgaaagaaaaagaacttacttagcatatccaagaccgtgaacccacacagcatcagcattccctgcacctaagtcctctgctgtcgaacccctcttcacaagttcagtaaactcttgcttatcaaggcgatttccttgtggccttgtagaggactttggtgccaagccaagagcctccctcatggcctgctcctcttgttccttaactctttgaatctcttctttcatagcatccatctcggaacccttttgctttttatctctagcataccaatgaagatctttacctattcagttggtgtacatggcaaatgaatgtcagtcaaaactcactaaactgaagattaatgtacaaaaatctaaggcagtggatttatgaaaggagtact

SEQ ID NO: 46181 - DNA, 99 bp, Arabidopsis thaliana columbia
aaatttcaacgtaatttctattttccagtcgaacccattttaattaattaattaaattacttagaattagatatgtatgtagggagaatccattcggaa

SEQ ID NO: 46182 - DNA, 455 bp, Arabidopsis thaliana columbia
tcttatggtctcagatgccccttcgcttctagctttgagtgttgccgggtctgcacatagcttgagaatgaaacagtcttctccatcgatctttttttctcctatgcaccttgcatttgcaaacatatacgctgtggtcctcgggtcaagtccctgacagttgacaacagtaacaattcagttatgcaagcaaagaaaagtgtatgagaaggcttccttgggacaagaggcctaacctgcagagcacgtcgtaatggtctaaccggtccttttgcagcatgaggtccaagccatggtgtgtgtctccacacaagcttcccgtcacaacctgcaagaaccttgctcccaccaagaacaagctccatgtaccacatatcaggattcatatgccacaacacaaatcctccagactcaacagcttttgacgaattattcttgctctttgaacctgttga

SEQ ID NO: 46183 - DNA, 816 bp, Arabidopsis thaliana columbia
gtaattctattcaaaatctaacaagtctactttcaccagctagaagctcaacgacaaacaagtgtttacaaactttgactatttctttcataacatcttgaatctaacctaaatatgtttttaccaaagtaaatcagtattgatcaatcaaattaatccgtcaatttcacaaaacaaatcatgaaccaatatgtaaaaaaagatcacactttaattcgctcttctaatccaaatttcacgttcttattatcttatatatgcttaaaagagagaaaatcatgtctagttttagacgtaaaaaaacatttgtgtagccgaagtcacacgtgtcgagcctgtgagaagacactgcaagaaacagaagagagacacgtgcaggacacgtgtcgtccgcagccgaacggattctttgtctctgatcatgggcctggacctggacctgtctaagttagcattccattggtcgaaagataactttagacaaaagatgttgaccttcacgcctctcttcttagaccccacgcgccacactctcacggtgagaacataaatatcaatctctcttttaccgcctcctacccatttatctctctctttctcaaaacctttcagtcaaaattctccggcggcttttaaactatgtgaaggaggagaacctccataacaagaagcggattctctcagttttccggcggcggaggaacacaaagccaccggtttttagacacacagatttcattttcaggttaacacttttcttgttttataatttttcaagatcttggattagaagactgttaaataaatctatctctt

SEQ ID NO: 46184 - DNA, 452 bp, Arabidopsis thaliana columbia
  unsure (1)..(452): unsure at all n locations
nnnnnnnnnnnnnnnnnnnnnnnnnnnctaaagatgggcgcgtgttggcacccatcaatgatttcatcaacacactgaacgctttctttagtgctggtggtaaaggtgcgaatgtgacggtgccttttaaagaagaggcttttgccagagcggatgagcttactgaacgggcagcgttggctggtgctgttaataccctcatgcggttagaagatggacgcctgctgggtgacaataccgatggtgtaggcttgttaagcgatctggaacgtctgtcttttatccgccctggtttacgtattctgcttatcggcgctggtggagcatctcgcggcgtactactgccactcctttccctggactgtgcggtgacaataactaatcggacggtatccgcgcggaagagtcggcctaattgtttgcgcacactggcagtattcaggcgttgagta

SEQ ID NO: 46185 - DNA, 524 bp, Arabidopsis thaliana columbia
agtgtgctctaaagtcaatatgctctggcgtaccctgccgaagcgcgaggaagagaaaacggttgctgaagcgcgccgctatccgtccgaaccacaagaaaacctgctctattttatggagaaaaatgcgccactgctggaatcatggcagcgtgaaatcctgcgtattgtgcgtaaggtgagccagtatttttatccgcaaaaacagactcaggtgatgaacgaaggctgggcgaccttctggcactacaccatccttaaccatctgtatgatgaagggaaagtaacggaacgttttatgctggagtttttgcacagccacaccaatgtggtcttccagcccccctataacagcccgtggtacagcggcatcaacccgtatgccctcgggttcgccatgttccaggatattaaacggatttgtcagtcgccaacggaagaagacaaatactggttcccggatatcgccggtttcgacatggctggaacgctgcatttcgcgatgcgtgatttcaaagatgaga

SEQ ID NO: 46186 - DNA, 558 bp, Arabidopsis thaliana columbia
atatcggattgtcaggtgtggggatgatgttctcatcaatggcgtctggaaatgacgctggcggacttcaatctccggcgtgcggcgttgtttgcgacccgtatatttgtgtgaactcagatggcatttccccagagttaacaaggaaatatctcggcgaaaaagccgctgaaaacttacaatcattacaaggctacgatcccagcgaatttacattcgctaacggtgtattttgcgatgttaaagaaaaattatgtcgtgatgatcgttattttggtgtggatggtaagcggagtggaaaaatcaatcaaaccaccacaaagatgttatttatgtgtcgtgagtgatgtcttgtttacattatgttctattcgtcattaacctcttgagcgacagagaggagtggggcattaacgtttatgacggggagagtcccgtcggttgacatttacttaatttgaatatcgacgttatattttttagttttgtttttacgggcgtcgtttcgggtttgcacactcgcagctcatatttgccagaagcagggagtgagtattg

SEQ ID NO: 46187 - DNA, 485 bp, Arabidopsis thaliana columbia
taagtcatctaataaattatcgaatcaatggtttaattaaagattttcgaaaataaatcaaatctaaatgattacaatctctccttaagatcacatttgaatagtgtttcatattaaatcaatcaacaaacgatgtatagaaaactagttattgttcttaaaattaattacattccttaaagtgacgtgcaaaatttccttattctaaaactgaaattaatgatttgcttaatttaacgagaatattattattaaatacttttaatatatttcattacaaaacacaaaaaaaaacttagtgcccatattcgattctcgccacgtcagcaaacaacacctcaacaacggcaccgatttttctgtcctcttcgttcaagtcattccaatattaataaaaaaccgaaattagtaaattaaaatttttaaacgaaaaacaaaaaaactttggcctctccggtgactcttccttcttctgctaccgaact

SEQ ID NO: 46188 - DNA, 542 bp, Arabidopsis thaliana columbia
  unsure (1)..(542): unsure at all n locations
tgaagaaagaatctagaagaagaaacaaacaacataaacgtacgtaggtaggaccacgtagcagccgcgtccgacatcacacgctctcttctataaatattctcacatcactttttctctcattctcaattccttctttttcacatctacccaaaattccaaaacaccatcgattttttgctctcttgaaatgtgtctttttatgtccaattcttctcttccaactaaaccgaaccggaaaaccaggttcggagatcggtgtttactgatggccaaacagcaacgaacccgactttacatacttcgacgatgtgtctccatgctgctttgctggcacgaccactctatttctgattagtttgcggtttcggtcagattcatgaaccggacggaccaagaagtagaaatcagaagaatgtgatgtcatttagagtttttcttgttatcttttagaactcttcaaggaatcttttgtaattgaagaagactctaaggattgggccttttgggcatttgtacatattgtgtanatacatatgaac

SEQ ID NO: 46189 - DNA, 527 bp, Arabidopsis thaliana columbia
ctcaatcctttggttccttttatcttcttctttaagcgtttctttcttgaaaaatccaaaattttcctccctaagggtcttcttctttgtgggtcctctatgcgacagaagagtgaatcgatactctaccagctctgcccccaatcatccctcggacgtagctgtgtcttggaacccgccaaaagaagattcgcaatactccaccaccgttttctcctaaattccagagcagtccttcaccaacacatcaattggctctcgatttgtaatagcaccgacaacacctttagtcccttctcactggatttcgttgatggcaggaaaatctcttggaccatcagtggtgctttttccggtaagaacatcgacgacacacgacgagctcctttgctggcaggtggttccccttgtgcttcacgtcgaccatcactcagagttacacgacgacattgatctttcttccttctccaaaccgcagcaattctagggtttggtgggatgggcctactccttttggcggccaacaa

SEQ ID NO: 46190 - DNA, 684 bp, Arabidopsis thaliana
ggctctgccaacaatctgcacagaaattgtggttaactttaactcagactgaagcagttgagaaatataagagaataaacaaaaaagttcaagaaacatggtattcaacaacactaaacctgcaattagtttgctgagtggaccatcaggaatctccaaacgtgacccttcatgtgcaacagcaaagacaacctaagaagcaaatttcattaagtgtaatcacaagactaaagatatcacatctctagagaaatcatggcacagcatattataccttctcaggtggaactccttcccatggtttacgtaaagttgaaagttcccacattatgaccccaagactaaagatatcacatttctctgtaaaaggcctgttgcgaatgagctctggagccatccactctggtgtcccagcagatgaagtgtccttcatgttttcatcagtcattattcttgacagcccaaaatcacagatcttgactgtccaatgtttgtccactagacagttggcactctttaggtcgcggtggactatcttcatccggtgtatgcacatcaaaccgcttatgcatcccataagaaatacaaaacagcatgagataagcatatgtagcttaaaacatataatcaagggagctatgcagggtagcttaaatacctgcagatgtctctaagcatcctgag

SEQ ID NO: 46191 - DNA, 590 bp, Arabidopsis thaliana columbia
catctctcaaacctgcaaaaggaaactagggttacagcgaacgggcctgatcctctgttgtggcccattagcaatgcttaggcctaatttcattttgagtggagttgcagttgggcttactgaaaccctaacctctctaaagatgatatttaatgggcttggcccatattctcatcaacaaaacttaggccctgctgtttatccagagaaagctctctcttacgcttgtggtcgatcaatctctccagcttcgcaaaggtctgaatttttctctaaatgtactcaattatttgactggatttctcgattcattgtgctgcttgacttgggacatcaatctagccttgaattgttaattctagttacatattgtgttcaattgtctcgaatcctatttgcaagctcatctcggctttggtccgaagaactctttaatacgaaggatagcaattcaactgctctagtctcttctcatgtgggatgggacattactatcggacgaaatatactaatcgcgacatgccggcttctaccttctatgatccaaggtaacactacctttagtcccatctttacaacgtcaagaggat

SEQ ID NO: 46192 - DNA, 556 bp, Arabidopsis thaliana columbia
aagaattgatacacaaatttcaacaatgccatagtgcaaactatggcggcaacaaggaataaaacccaaaaactatcaaagccaagttgccggaaggatactgaaggatttggatcggggttggtgagtggatctgggcagctttcatcgattggcttgaaccatgcattctcgagttggtttgccttgttcgactcttccacttttagaatggcccttgaaatatcagccactagaggggatccaatgggaaagacctgcagaagaaacttatggttttagcattaggtgcaagatgactacaagagtgagttcaatgcaaagttatggacttacaaagcctaatccatcgaccttgaacggagtttgaaccattttgtacttgttacagtattgtcccagaaaaattctcacgtaaggtacttccattaaaaccgcagaaacaccaccttctgcttgtcctttgctcagtagcgcatcacagtgttctggtgaccataggatacaagactagcctctgagaaacctgagtccctgagtctttccaaaatgaaag

SEQ ID NO: 46193 - DNA, 553 bp, Arabidopsis thaliana columbia
gttgggattgttggtggagaaaaagaccatcttgaccacccattgtaggtctttcgttccttggaccagagttcaaggcagctaacttgtcagagatgttgaaagctacttcaggctcttgattatgagatcctggaaaagacatgtattttgatgggtttgcatgaccgccaactgcaagtaagttaccatcttctggaagggctagtacccctccggggggaccgtcaggtctgatttggtttctttggctcagttcaccaattgacctttctgatcgaagcgggacccctggagcatcagaaaccatagctcttccagagacaggttctccaatcgactgcagttcgttcatgaaggcactcccaaataaattctcaagagtcaaagacttccctggatctgcttctccagctgtagttgatttcacagatggtggtggtgtagttgttttcatagatggtggtggtggtccctctctgtagctgaaagtagctgcgtatcttgactttttgggtctgaacttctctgtaataaagaaagaaggtgctgc

SEQ ID NO: 46194 - DNA, 545 bp, Arabidopsis thaliana columbia
  unsure (1)..(545): unsure at all n locations
cgggtatctnnnnnnnnnnnnnnnnnnnnnnnctaaagtttcgatttcacaggcgttgcagccgccgcaatcgacgcgataaacgtaagccgagcgacggatatcctgtagcaaatgccgcttcatcttttgcgtttgctcgtccagcgtgatgggctggctgacatgttgtgtaagcactggactcatagctgctccttagccaccagcagtacatctgtatcgtcgttgatcagcgtcgcgcgttgtttgcattccgggcagacgctcgcttgcgcccacaacatttcgcggttttgtggcgcattttgttgctgtgctaacaattcagcagccagtgcgatggttttttgcggggcaaacgggcgttcgcaacggctgcaacgttgtagatggaacgtcgcgcgggtatagagatcggctttattggtgacggtcagttcaaagttattggtaagctggatggctctggtcgggacacttcttcacaacgtccgcagtaaatacaacgccccagatagagctgccaggtgcgcgaattttgc

SEQ ID NO: 46195 - DNA, 427 bp, Arabidopsis thaliana columbia
gtgatttcagataagcaaaaaggattgctcaatgcagttaaagacatgtttcctcaagctcaagttgtgaggatgttagcaacaacttatgtgagagtttcaacagaacaatcagagaagcgaggaagaaacctgtgataaatatgcttgaagatgtaagaagacaagcaataaagcgtctttccaagagacgggataagactgctacatgcaagacaaagtttccacctcatataatggagatactagaagcaaactgcaagtcagccaaattcggttatgtcctcaaaagtagtgagcacgtttatgaggtgttggaaggtattggaagctttagagttaacatcctccacatgacttgtgcttgcaacaaatggaatctcacatgaataccttgtccacatgcaatctttgtcatcaatgaaca

SEQ ID NO: 46196 - DNA, 581 bp, Arabidopsis thaliana columbia
tgatagtaataatgtgtgtaattttttgttgcagaattatagtggtaatagcaaaattatatgggaattcaatagacagagcactaataactaataactattgtacttgagtttttcatttttcaagcgagaagatgttttatttttcatttatatattgcaaaatacaaaaaaaaaaacaataaatattttctaaaaactattgaaagtctctcgaaaattcatgaacttcatctgctgtaaaagctttttgatatgaccgaagcctatcaagagagtaatagcacgacgaagaagagaaaagaaataaaaagaagatagaagaagaagttagatcgagatcggagaaataagagagaggcaaggaaataggaaacattacttaatttcttagttagatcaaccctaaaatagagttcaccttatatagttgttccattgaaaactacaagctctctcataacacaaagctcaaatgacacaaagttgatataaaaactacaaacattcttattactttgataataatatcaaagactctatatgctacagagtattactccaccttcctcataagtttg

SEQ ID NO: 46197 - DNA, 734 bp, Arabidopsis thaliana
gctgcagtagggctaacatgtacatgagtacgaaattgagaatcgaacctacaacgagcgtggagaagacgaaatctagctcgtttaatccgaaattaggtcgtgaagccatgtcaccgagaacacaagcgctaagtcctacgatctcttccattagtaccttaaaagggaactgaggatcagctgcaactcttgatctccatccttggatgaataaccctattggtccccatggagatgattcttcacttgcttcaccccctgaacctccaaaaccaccacctcctcctccgcttccgcttccgccgccgttattaccggtgcttccaccaccaccacctccggcgcaaggtttcgcgagatgtggagaagagaaattggtgtggagggaacaaactgatccatttcgcggaaacgagactctagtcgttggatcgcgggagaggttgatcactctcggtaatcgcacactgctttgatcagatttcgccgataactgaagcttcgccgccatagccgccatctttatcgacacgtatggcagtgaagggacgaaagatgtgtgatcttctctgaaaatcgaaaacggtttccctttacaatctttaggatggaagacacagtgtttggtttttggtgaaatcgaaacctgatctttgctttaaaaccctagtttttacaaacaatcggaatcaatcggcccatttcccacgtgcgaaacttaagctgttttt

SEQ ID NO: 46198 - DNA, 629 bp, Arabidopsis thaliana columbia
gattagtaggttctctcttcttccaatctattcccaacttctcacttttccgtctaatcgttgtcttcatcaccatctctccgagttcccttcgagaccatcttatcttcaatggtttaggtattgcccgattttagatagttttgttctctcgtatagttatgacaatggcagatttttgtacgctctgcacatgcttaatcttgaggaatgggctaataatacgtaccatgcattaatgaattttagatttgaattttggaacttttgatgatatgcatgttaatgaccaagaatgctccgaatttgtctgattcgttattcgaattctacttctttgattgtttgtttccaattttccatgcatctgacttgtgaattttgaacaaaattttcagaaatgttttatcttagcgagctagaacattcactaagagtgcctccgcatctacttaatctccctctcgaagatgccattaagtcagtgcttcaaaatgtgttcttggacaaggtttgctcattgcccgtgttctttcacttttatggtatccattgtttgcttatttatatcacacctggctaattttatcaaagtggattttgctatgaaaggtttagctgatttgggg

SEQ ID NO: 46199 - DNA, 430 bp, Arabidopsis thaliana columbia
tcattcgcagatcatcatagcaaagatcacttatactataagtaacaacaccactaaccaagttgtgttaacttaataatgtcatcttctgactgaatctaaattagtaaatataatatttgctttttccactacatataatcctcaactaccacaaatatcaaccgacgaagataaataaaattttgtgattagtttggaattcagagatctagttaccccttttggaaagagatcaacttgtgatcacgttgtttaatcccaataaatccaaattcaagaagagtcagacggagttatacatgcatcatgtatcacataatataacttggaaataatttagataaactaaccaataacgataagtttcaaaagagaaaatcaagacattaattcgaagcatgagaaaaggagaatcaacacaaagcag

SEQ ID NO: 46200 - DNA, 453 bp, Arabidopsis thaliana columbia
tccatcattttcttttatttggtttgtcatttaacttttactctgatctaagtgaactatgtttcgaaatttctctaccccttttttttccgtactagcttacatgtattcacgtgatttaaggagtatggtattattatttgtgtagctttttgtaatttctactgtggataactttactgagaatctgagagtatatatcttagaagtatataaatccagatgttatatgataagctattttttaccagtgtcctgcctctgccatctaaacccccgaaaaggaaaaggtttagggaattaaataggggatatgattcttatcatgacttgtaaaaagttctcgagagagaaatgaattcacataaggtaggcttaagtaattttaaccattcaattagtgtaatattagtgacgtaattccatgtcgcccatctttcatgactcagattg

SEQ ID NO: 46201 - DNA, 642 bp, Arabidopsis thaliana columbia
cttggatttggctatgatgtcattcacgcttgcaagaacgactgtatcctttaccagaaagagtatgaggacatggtaagctatccaagatgtaaaacttcaagatgggaaaaggataagtatagtaacgatgttaaacaagggattccagctaaggtacttaggtattttcccataaaggacaaattaaagaggatgtttagatcaaaaaagactgctgagaatttacgttgacacttcagtaatcgtagtgatgatggtacgattcgacatcccgttgacccactcaccttggctcaagtgaatgaaaattggccagaatttgctcttgaaccaagaaaccttaggctaggtctttcaatagatggcatgaacccattctctattcaaaacatcagttacagtatttggcctgttttgctagttaactataacatgtcacctactatgtgtatgaaagagaaaaacatcatgttgtctttattaatcccagggcctactgcaccgagtaataacattgacgtttatttagctccattgatagacgatttaaaggatttgtggagtgacggtattgagatttatgactcatttatgaaggagaattcacattgcggggcgatgtgtatagctattagtgct

SEQ ID NO: 46202 - DNA, 601 bp, Arabidopsis thaliana
acttaccatacgactagagactaatttcgtgtcatctttatcgttcctagctcggttttcgagcatttggatgcgacgtgactggacttgtgtttggactcggactaaaagctgcatatacttcatagcattcatcgtttgacgcttcacgctgtgtcctcttaccactccttgaagcctgactagacctttcaaagctctgaaactcctccttgcctgcaaacaaatttccatctcctaaattatgaattttactgcttgattaatagtgacaaaacagaatcaagaatgttttacattattaccatgtaacctctaaaagctgcttgaatcttaattgcataagcatttttgaccaatagacttggctctggtctatgcacaaactcacgtcgctgcacaatcctaggcgaaaccgctcttggagaaggcggctttggagaagggggcttcggataatggacttgagggtaacaactcttggggaaatgggttttggagaagagacatatctttgagaaggcactttaggagaagcaggcgtaacaagaggagatgcacagaggttgatgatgaatttgctcgatcagtgggagttggt

SEQ ID NO: 46203 - DNA, 616 bp, Arabidopsis thaliana columbia
cttatttaattatctatttcttttgggctattcctgatattttataacatgggggattggtgagatttgagaagaaagaaacccacaaaataatcagaattcagacacgaacaaacgagttgacctcaggtcttaacttctttgatactgtatgttatcataacagagacatagaaagaagcaaaaacaagcaacaaacatgcttcttcatctaaatttatatcaatttctgactcaaattctgaaactaatactgtattatcgctaatgtttagaactcgagacaaattggatataccaaacggttttttatatttttaggatttggatgagtgatagcttatcatatggctctatttttaggagtttagttgagtgataagtgataactcttattattacactgacacgatcaacacttctaacatcgaccgagctatagccgatttatttgcttccatgtaactgattgtgtgtcttcataccataagtttatcaccaaatcaaaataataggatctcgcgtaaccaatttctctaatttaagtaaatcataaatttcataaacaaacttgaaaataataaaaattatgtacaggttcgaattttgaaactta

SEQ ID NO: 46204 - DNA, 575 bp, Arabidopsis thaliana columbia
tgacaaataactccaaatagcatatcctagtgcgagtttgagcatatgagaaatttcaaaacttttaatggtccaagaaacttacagtcttcaaaaccggagccatcttctgcctctgctccatagtcggaaacatatgtggatgagtttgattgctgaataggggcaagaggcgcacgagctgagagggaaggagtccgcattggttgatcccactcattaatatcttgagagctcttgttatatgatggttgtgtagcagctacaggtacagttgctgcttcctttgcaacttttaactgagaaaaagagaatcagcacatctccaattaaaaagataattttctatatctcaaatgagacaatactaaagttaggtacaaatgacaagaccggatcatggttattcgtcatggtacgagatagtaatcccaattcacagcattatcttttcaaaggaagtatacagtcaactattgactgactaccatgacacacatatatatgaagtatgaactatgaacactgtaagatatgtgcttccaggtcgtttttttcaatagatatgttgtttt

SEQ ID NO: 46205 - DNA, 502 bp, Arabidopsis thaliana columbia
tatacttactacaatccaaacatgaaaaggtattaacagaatcaatctcacctatcagaaagaaaaacaaagcggtgattaaatgaatctctaagtgcatgtctaagcaatacacgttctgcttcaatcatggttgattcaccccaatctacctgtaattagcaaataaatcatacgacttataaaaaacaatgctgctaatatctaaattgatacattctcatagcagcaacctgtatactgtcattaagttgccgatccaaaaagtacttggatcgcgttgtagcctcgttgagaacaaatccaggtctagaatgaacatatattgagaactttccatcctcaccctgcagaagcacatgtcattatggaccaagctcaaatacgagagtcagtgtttctgatcccaattagaggaggagcaggaagagaagagtatataccttaaagaaagcatcccagacaaactcgagagggagtcgattcagggcaatgaagagga

SEQ ID NO: 46206 - DNA, 546 bp, Arabidopsis thaliana columbia
tctagtaaccgccgccagtgtagctgtaaagtctggtcagataaacagactgaggcttataaacttctgttcaatttcgtgaataaccagactggcaacatcaacgcctcagaatactttactggggctatcaacgagaatgagagagaaaagtttatcaatagcctggaattattcaataaacttaaaacatgcgcaaaaaatccggatgagttggtcgcaaagggcaatatgcgctgggtcgcccagaccttcggggatatcgagttaagtgtcacttttttcattgaaaagaataagatatgtactcagacgttgcagctgcataagggccaaggtaacttgggcgttgatcttagaaaggcttaccttcccggcgttgacatgagggattgttaccttggtaaaaaaacaatgaaaggtagcaatgatatcctttatgagagacctgggtggaatgctaacctgggcgtggtacccggacggtgctacccggacggtgctaaccggacggtgctacctggacggtgctaccgtgaaccttta

SEQ ID NO: 46207 - DNA, 605 bp, Arabidopsis thaliana columbia
tattaaagtattgcgtaatgcgctaaaaaaaacttaattctggtgttttgaaaaataaatagattaaggaaacctaggaaatagggattggaattttacgtaatcttctttggaagtgggaataatcacctgatgatgcttttaccttttctcacgtagggctatattattcattattcatttaataactggtttaactttagtactattctctagaactgatagtttcgaaagcttgtttgattcgattatataaatttttaaagaaaattgtattttcaatttaggaagaagattataaagaaatatatgatagaatgagatgccgatcgagttcagggaagagttcttcggtattgaataccgatcgagaagattgctagctcggttgtggaaaacggtcttgattggaagcttcgcaaagatttgcgaggcaaaagagaaagggttttcggttattaactgagacacagttgaagtccaaggtaagggatggagtaacggtccttatatatagagagaccagagtagacgagaacatagagaatggtctgacgccagtaagcaattatacattattaaataaattcatatggaaatcaaag

SEQ ID NO: 46208 - DNA, 287 bp, Arabidopsis thaliana columbia
tcttactaagtagatatatgtagccataggactagcaactcaaatggtgtaggtgatcgtgcctctgtactaatgaccatctcattcagatgttattgttggtactagcgaccactgcgagtaatcagtctagccaccccaccatggtctcgtagtccacttgtagccatcactaccgcgggtctttgctcatagtcacgaataagcttctcctaagtcctctcagcaattcaaagatgagactgactgacttctattacgtactcggataagactgatgcactcac

SEQ ID NO: 46209 - DNA, 587 bp, Arabidopsis thaliana columbia
atacagcatgaatgctcctgtcatggttgagctagagggtgagactgatccacttgaggtgtgcttacctaccttcttgttgttggtttttgaagttatgtctcagtaaacttatatgaacatttgagctaatttattatgatttggattcagattgcgatgaaggagcttaggcagcggaagataccattcactattagacgctatctacctgatgggaggtgagagattgcattgagcttatattattctcttcactcacttgatctcttcttttcttgtgacttacttatgattcctgaaacagtttcgaggaatggggagttgatgaactgatcgtggaagactcatggaaacgtcaagttggtggtgattgataatctgaccagagacaaatcgacaaatacgtatgtaacttgcaagctttcctctcttatggatgataaattttctgatgttgtaatggaactaaaaatcagtgaaacttatggataatactagactcatattccgaaattctgcaaaactagaagccccaagtaccataatccaccattattatcatattagaacagacatgacagatg

SEQ ID NO: 46210 - DNA, 554 bp, Arabidopsis thaliana columbia
catcttaaaaaacatttgtacctcgtgttcttattagtgtctagaaatagaagctccaagaccactaagtgtcctctcttcctttggtgcttgtgcttcctcttcccttcttatacgagcgcaatcgatagaatgcttttcataagcctcacctccactggcatcactggtaccacgtaccaccgcactatagattagttccacgtcttcagctggcacatagacacaagtagaaccttagtggagatttatgttagctacttgtggtaagttattgagattaaccctggggagaccataatgtagacgcagtccaaaccattgtatgatccagcaactcaagatattcctctccctttatgaagagaacaaaattctgtgtagtgcaacttgcgagcaagtcttgacctcttctaagcctctcgacttgcctccacactcaaacaccattatctccttctcttcatctccatactctcttttcttctggaaattacatgattctatcattaatcttcacgctttagatgatcaactttgaattttacagggta

SEQ ID NO: 46211 - DNA, 520 bp, Arabidopsis thaliana columbia
aatccaacttaccacaaacagagctcatatccaactaacagtacaaggtaatcacagtagtagtagtaactgcacaaacaaatttaaagttatcatcagtaaatatgatctttagagcacacaacgaaaacaaagactcatgctcaaattttattcactctactcgcatgatattatagaagcccatgaattaaaacatagactatgtgtttagatcccaaattgaacagaattaaatttgcagaagtcaaagaaacaaaaaaaaaatcacctttttgtgctgcaaatcaaacaccgccagaagttaaagcaccaaagatcaaatcgagctaagaaaatctcaagaagtaaacgagggcgagagaagaaagggtaaaaaggagagaagaaggaaaggaaatgttaactaagattaccacgccaatcacacttttcaagaggtttcaaacgattagaactcaaaccagaatgataaggagtcaacgaaggaatcaaagacaggagaggaagaagcttagag

SEQ ID NO: 46212 - DNA, 1295 bp, Arabidopsis thaliana columbia
ccttaagacttaacccgccaaattggttgtttactgcttctgcaacaactgttgccgaactatcaccggattcaaatggagcatccatcttcggttttacttgccacttctgctcagcgtgatctctctttttctgccaacaaaaacaaaaaatagtcaagtcctgtatacacccaaaagcaacaagaaactctcacaaaccaagacttcaagatataaagtttcaattttttaagatgcaaaattcaaattcgtttccagataatcaaaagtccaaagtcataacactgcaccacaaactaacacattgtgaacaaagcaatcaaaacccagaaagtgcagatcttcgagagagtcatataacagaggatttaaaattcgataaatttggcaatcgctatattaacccagattaaggaaaactcgatgaaagttccaaacctgcttctttggcatatctgaggataaaaatctgatagaggagttaaaacagagagagcgagctaaggtaaagtaaggagaagatgatcggagaagagaggaggttcgagaagtagcagaaagatgaatgttgatagagaaagcgaagtgagttgtgtgaggaattaacgacatcaacacgtggcttaattttgtgcgaaccacgtaaaaataaagagagatggcggcgaccaagttcggtcgacgtcttgctgagtcactaacaagctgtgaaaccggcgggacgacgacggagttagtggaagtgttatggtgcgggaaagaccaccgtaacaaacaaaaatctataaactaaatttacgaaaataccctacggtatatctagggctgttaatctgggctattttaactagcccaattccagataatcataaacttgtccaccaaaaacccagcccacaaaaaaatccgaaatcaaaatagaaacccattggcataaataagtaaagtttgaaaaactactttagatgcaagatcaaaagattcaaaaccatcaaattccacaagcataaactatcaaaaaccgatttagattgagatcatctactactttgaaaaacttgaatcagttgctgcaatcagtgagtgtagacaacattactcttaactagaagattcagaacctgtgaatcaattacgatttgtttcgtaagaaaagtaccttgcagaaaaacgaactcgtttttccgaatcaatccccgagtttccctgtcgtctagggtgagaagatgatttattgatccactgatatcggagaagatgagacagttcagatttagggttcttaggaagaa

SEQ ID NO: 46213 - DNA, 1044 bp, Arabidopsis thaliana columbia
cggtttcttttatatcttataattgaaaatctaaaacatatctcaaaacacttcaaaaacactttcctttgcaacttctatcaaaacaaacaattgcagaatctaatccatggggaatgccccgctgcagtacctgaagaaattggcaacatcatttcattttttttgtttggaaaccctaattcatgggttagtactttagtagtagtagtaactaaaaagttttacctgttgctgaatctttggacagagtctgtagcatcaagaagagtttcacttgctttctctaaagccatgtaaagctctttacctctgtttagacgcgcgatgacccatgtgttgttcttcgctcgaatgcatatttccatgtctttctcttgcttcgagcggtttttttctgtatccacttcttcccttagcttgtttagtgcaagcaaagactcctacgaaatcagagacaattttgttacactcttgcttatgctactcacgagatcgcagtatatgaatatgattgatggaagttctctctcacctttgctagtgttgctacctttcctggtggagaagctctggaaacttccatgtcattatcaactagtaagtaacggtaaccgcttacatggtaagcattctcaccgccccaccctttcgatagcttctcttcgactttcaagattttggtcgatgcctgcaaaaatgcatagagatgataagggatggagtctgaaaagattttacaatgaagcaagacaggtttacagagatgagctaacgttttcaataacttgctgcttcacgaatgagatgtctagctctccattaacaattgcagcgataggcacgagaagaaccaaggtgagactcttgtactgataagtcataaggtaaaaactttcctgtgtcttctgtatcaaaattgtcggggtggcatctaaaccccaaatatcagttacaagaaacccatctttccccttcgaccacttatcgtgctgcaaaggtctaataacacgacctgtgctactaccatttcccgaaggcaat

SEQ ID NO: 46214 - DNA, 550 bp, Arabidopsis thaliana columbia
gtctctcctttaactgattagagcatcatgcaaaaacaaacgtattcaagtaaagttatctgacaaaacgcagtataataacagctataaagaccgaaaatcaaacaccagactagaaactcagatttcgaagaaaccctaatttcaaagtaagctactaggacaaaattgaaatacatcatcaacggaaacaccaatttctttctgtaaactaagagacatgggtttgcgaaaaccctaaaatcgggtgaaatctcaaaattacctggggaatagaaatcaaccaaatcaggatcgtcatatccatcagcttcgtcttcctttggcaaggccttgcaaagacgacgtcgtccagcaagcttaatcatggacttcttcgtctcttcatcttctccatctgaagtccccaaatataataaataaaactcaaaatcaaagacagatacgaatccgaaaccatagagaaacgatagaagagaacaatcgtacgagaagaagagggaggctgtctaggaggcgcagaaagatcctggaggatactgtagtgacg

SEQ ID NO: 46215 - DNA, 485 bp, Arabidopsis thaliana columbia
ggatcccctcagacagaacataccatcacaatccaactcatattaagcaacaaaaacagtttcatatcgcagacactgcactgttccttgattaagataaaatcaatcaagcacttgagagaggatcaggttcttgaagttacgaggacaagaaaaaaagttggaatgatcaaatcaaactctgatatgattagctcaccaagcaaattttttaaaaaaagatgattacaaactctacaaagacattattcttgtctacagactaatcagcaattactctccctaacttcaatcagccaagctttatgaacaatcaaatcatcaatcaacatgaaacgaaaaaacaagaatcgtcgttcggaaaatatatgattcttcttacatacaggttaaaaacgtatcctgcgcagtctcttatggccttgtaaagacgccccaaatcttactccgggaaagattctcgccagtttcttagctccttcggt

SEQ ID NO: 46216 - DNA, 543 bp, Arabidopsis thaliana columbia
cctccgattgaagcgagctcacgatcaagctcttcaatttttccggctgaagctcagagatgggtgctacatggctccccggaatcaccaaaccggattgatcctgaagactctcctgaagctcctcactcaacaaatcgtcagcatccacatctaggtcgtcggcaagatggtaagcagcctcgtcttcttcagtccaatccaaatttagagcttccgagagcggattgagagactcattccactcatcctccggagcagcaggagatggaagaacagagagagatggagagacgacagatggacttgcgaaagagaccacctgcgagaatttggctgcaagtattgtatccggaccggactcaagacttctcgcagtagcttcatcttcttctacagtcatatcataccaactctttcgtttttccagttgtggctccagcgacttgcttgttacagagatgggcgtatcaaggttcttcggagccggttcagagggttcaaagttaagagatttcttagccgagctccaacaacagagga

SEQ ID NO: 46217 - DNA, 634 bp, Arabidopsis thaliana columbia
ggacatgcgaattagctcaaacaacaaaaccagtgtatgctaaccatcacagtgttgcgtcaatgaatttcctggccctgacccatgtaaaagctacatcaagaaagttttcgctgtttatcagtcatgttaacaaatggatcaagaatgagatatagaaaggtgattacctctaacacacagggttcaccgtttgaatctttcttttgattttctcgcagaaactcatcaaagagatcccgcaactggaacaaggcatcatgactgagatcattgatgtcaatctctatctcatcatctccagatctctcttccttggagctgtgatctctcaggaaatttattatctgtacagggaattctgtcaaggaccccaaatctctgccaagctttactctatcctcatctgtcataacccgcttagcaggctctaagaggctgttacgtttcacagcattcatctttctcttcttagccacaggctcaggtatcgcaatatctttgtgagcaagagtagccaagttacttggttcagatttggtccggatgacttcttctcgatagttttccatctcacttcaaaaaacttgctgagagtatcagcgacgcgtacacattattatctgacgggtta

SEQ ID NO: 46218 - DNA, 1159 bp, Arabidopsis thaliana
tctagccggttcggtgatcggcttgctagtctccatacccctcttcctcctcttcagtccggtgatagtcccggcggctctcactattgggcttgctgtgacgggaatcttggcttctggtttgtttgggttgacgggtctgagctcggtctcgtgggtcctcaactacctccgtgggacgagtgatacagtgccagagcaattggactacgctaaacggcgtatggctgatgcggtaggctatgctggtatgaagggaaaagagatgggtcagtatgtgcaagataaggctcatgaggctcgtgagactgagttcatgactgagacccatgagccgggtaaggccaggagaggctcataagctaatataaattgcgggagtcagttggaaacgcgataaatgtagttttacttttatgtcccagtttctttcctcttttaagaatatctttgtctatatatgtgttcgttcgttttgtcttgccaaataaaaatccttgttagtgaaataagaaatgaaataaatatgtctcttttttgagataccagaaatctcatactattttctattgtaacgagttttcttgtattaaatttagaagaatatacaaaactaaataattaaatcgaatcaaaataaatcacaatcttagactcctagtacggacttgaattaataattttgattctctgagttcttgaattaataattttgggtcggttcggtttctctattatcttattgggccaaatcggacggcccattatctagctccggcttatcggacttcctcttccccggcgctgtaaattccaagtccctccgttcacgtctccaaactagccgttgccttctctctctccagccaaagcgatggcctcatacgctacgttactggagaaaactcgcgtacctcaaccttctatacaaagattcgcagtaatctccgtcttctccaagttacgatctgctccagaacaatttggatcagaagccgaagccggaagagaagctatctccttctgcctcacttctgaatctatcactgtcgttgatcaatccgttcatgagctatgtcgattagtatcagactcagttttagacctctctcgtggtttgctagaacttcaatcagctctcgaaggatgcgattcgaaa

SEQ ID NO: 46219 - DNA, 712 bp, Arabidopsis thaliana
cgtccatgtcaccttcctttagcaacaaatatatgtactttatgggcttaaaccaaatctaatcagtgatcacctttttcttttgtgggtaaagtgaatcgtcatttccattgtctggagaagctaaaccgtccctcttctatacatcaacagagcaagttacgttagtatatgtccgaagataaataaaacgaaaaaaaaacaactttccaaactatcatcattttcactacattggcgatgagggagctctcggagcttaacagagacagagacggtgatgaagaagtgtgggtcaaacactattcatccaagcaccagatacttctcgtaggcgaaggagatttctccttctcttgcagcttagccacttgcttcggctctgcttccaatatctatgcttcctctctcgattcatacggtaacacttggtttacttacattgtaagagttattaaggttttgatttcgttatcacttccatttctgtgatcacttactaagtttttgaacttccggtgaatgatttgattattcaagatttacactgttttactctctgtttatagattataaacctgttaacaaaggttgcagctttaagctcgatttcctcagttgttgcatgtcttttatggtaattaaccagatgatgtggttagaaaatacaagaatgcaagacaaaatcttgaaacattgaagagacttggag

SEQ ID NO: 46220 - DNA, 1124 bp, Arabidopsis thaliana
acagtagtaccccagtccccaccactcttgaaaacgtggcctaagctgtctaatagactgttaaattcaacttcttcttctgtcatattctctttgcgaatagggttcttgatgatcggatctttgattaccaaaggtgcactttggttatctttggcatttgttgcttcatcgccagcagaagatacatctgggacaaaaagagtctctttaggaccggccatttgattagagatcacaggaggtcctttatagtcaagtccacgataaaccaccattacacttccggccctccatatcaccattccaccagttcgacgctgcccattagagtaattcaatcagtttttttttaaacctaaagttaagacatgcatctcctgcacagtcttgttactcaaagaattctaacagcatgctcagctccatccactctagttaatcaacacctcaaattcaccttattcacaactatataatcgttcccaagaaagatctaacgtttttcacaaatttcctactgttattataaaagctttataaccattctatttcagagcttaggtacttcagagtctcttactatcctataaagatcatgtcacttccgcaaagcttatccccaatagataatgaaaaccgctctctcttggaataatctcgcacctcaaatttcgctaacctactgttctaatcaatgaagtattcaagagaactaacgaacctcaacaatctcatgggccgtcttcatgtcacgagcaagcacttcgtggaactttagcctcacaagctcttctttcctccaagtatcataaatcttctccatcactgcctgcgttacccagcttttggtatattgatcctaaccctcagatacattccatccctccttaaccgccgtaactcagaatcctcaacggtgagctccgccagtgatggagctctagctctcctcttctggatcaacgtcactcctccttatgctattactctctccgccgaatgatcttacgcagtttctgccatggcaataatactcaatctcgtcctcaatctcttctccctcagcaagcatcatatcaggtctccccactctctcttcaacaaatccccaatctctcttc

SEQ ID NO: 46221 - DNA, 537 bp, Arabidopsis thaliana columbia
ggtttatattagctgcaacatatttttctctcttggttttgcacccataaaatctaagtaggcatttgtagtatagctagagttagctcacattaactcagttagagtcctcatgcaatatttgttatgttaaactatttctcataattattaaccaatagtagttcatcaaattttaaaattctcaattaatgattcttgaaattcataattttataacatttattataaaaaagtatacagaaaatcaatctttttgatagaaaaaaccccttagaaaatcaatctttttaatacgtagggaatatatatttacttcatttataaataagtaatttaaaataacatcacttagttttagtttaattcaactctttttttttatagttatgttatgacttatgtttcataaaagagaaaaaaaacttgtatgtggttactataaattaagctgattttgtagctttgaaatttgaatgtagccttatgatttgagtattgattcttggatatcaagttatgaaacttcaaaaaact

SEQ ID NO: 46222 - DNA, 473 bp, Arabidopsis thaliana columbia
tgcagagaagctctcgacacattactggctgcaaatactcaactactttggttgtaatgagaggataattctccttttcctcttcttcttcttgtagctttctttgattcaccatttttgtttcagatctttttgtttttttgcttttttctgagtttcgtgtttctttttaaaattttgcgtcaaaggatgatgatgaagaaagacgaccgttggcgtcggatttagaacacgtgtcatgtaattattggattgtgaatctacttcatgtccgaaaagttaccgttggaagaagactttagattgccatcggggcaggattagattggacattgtacagtgccgcacggccgaatcttgacattttattactattcaagtcttaaccgttacactattcagattcaatctaaatggactaaggagtatggacgtttagttttaatcataacgagttaattaattgatttgaa

SEQ ID NO: 46223 - DNA, 442 bp, Arabidopsis thaliana columbia
tccattagcatctttcaagataacaattttgccttgtgcaagagctcttccattgatccaagctttatggtctttgtatctctttccttatggattcctaattcttaatatatgtagctgcagaaagttttggtttacgttctgtccctatcttggtgatgtgtagacttaagagtttagacaatagagctttcgaataagacatcgtccaatgttttgctacaacatgaaataacgaaaaaagttcagtcaccgatttggcaatatatatttcaatatcactagattcacagcatcatacatggaaatttaaccagattcgtttcagatatagtagtattacatctatagcatcaattgatgagcgtcacagcgaagagaatgttacaagtccctccggattatccccagtagaattcagaattacgtttgtaggttttgg

SEQ ID NO: 46224 - DNA, 460 bp, Arabidopsis thaliana columbia
aaatacaaataataattcttataaaaaaaaactataaaaaaaaaaaaaaaatatatacccgagagtacagtatctagttaccaaacaaaaaggatggattacatcacataaatagtaacaaaagtataactaatataagtatgaattatttataagcaaatgacacaaaataaataatataacaacaattttaataagtgatgtggtaattaacttggttagcgtcagttcaatctaattgatacaaatttgtattagtttgcatcattttaagctattgatacaactacaagaaaagcgatttgcaagagaattttacgatggaaaatatcctcgcaaattgtcacagacttgcgagaatcttgcgagggacaaatgacacgtcatgattccgtcgcaaaatttgcaggggaaaagtcctcgcaatattgcgatcgagttgcgagaaaattgcgtggaa

SEQ ID NO: 46225 - DNA, 413 bp, Arabidopsis thaliana columbia
atgcttaacgctattgttcttggtttcatgtctcttggtgttgaatggattggtcggaaattgggaggagctaaaaggctttggggtattgttaacttcatcctcgccatttgcttggccatgacggttgtggttacgaaacaagctgagaatcaccgacgagatcacggcggcgctaaaacaggtcccctggtaacgtcacagctggtgctttaactctcttcgccatcctcggtatcccccaagccgtaagtatctctctctctgtataaaaaaaaattaacccattggctaataaaaaaagtactaaaacgaaattgtcgtttaaaataaggaaggaagtaaatcaataccctaattagatgaattaaaaaacattttaataacctgcagattccgtttagcatcccttt

SEQ ID NO: 46226 - DNA, 543 bp, Arabidopsis thaliana columbia
tgaatggttttgtggggaggttcttactcagttgataaagcttgatgtaagaaagcaaagcactggggaaagaaatgggtttgtgagcaggaaagagctagagaagactttgagaagtagtttacagagtccaattccagggatgacctcaaaggtacttgagcactttgatgcgtgtgaccttgtgaagatgatgaagaaagtagaactttgctatgagcaagacccttccagtccagactcttcattgttagtcccatcgattctcgaagaaggcagaggaaagacacagaaatggcagataaacacacatgactgtgtttattcaggccgtcatcttcagtgcgatgattcaagtcacatgtttctcacagctggattcttccctcgtttacaggcaagggctcaaaatcacttttctgtttctttcatctctttaactcaaaccttaccaatttttcatgttgcatgcacaggtgcatcttcacaacagaatcatggaactgaagaacaacacggggcgacttatagtcttgagaagta

SEQ ID NO: 46227 - DNA, 546 bp, Arabidopsis thaliana columbia
tgcttaaaatgcccttcatcaaattttgtaggaatgttaatgtaacaagaagctataggatgcttaacgtcagccacttcaacatatttttactatgactactgtatttgttaagtgttctaatatgcggtttaagcgttttgatttgagcaaaaaaaaacgttttaccaatagctaaagaagaacagaggaaacaatggtttgaaaaaccccatgtcacttcatacccctttaaggctaaaccaatgtgaaaacaattaaacttcttcatttttgtttcattagagcaaaaatataatattacagctctagacaattgtcatcaacaaaggttacttaaaaccaaattataattatgagatttctccatatatcactaagacaagttgttaccgacaaaatttatttaaagatagaacaaaaagcagtttaaaccacttttggaaagaaatactggtatatgattattgtttgtttttctcattatatgcaagataaagttaaaggtaagtagcaatagagattaagagtttgattcgaataaaa

SEQ ID NO: 46228 - DNA, 521 bp, Arabidopsis thaliana columbia
tttttattttcattaaatatttcttcttttggttttgctttggttttaaaggaaaataacaaacgacatattaacttccctagctatcatccaccaaaacgtttttatcgacaagaattaagtctgcaagattgttcatactaaaatgaatgtatgtttgacgtgtgtatatatatagaatgatttatacgttcaacaccacaacattctcacttatcttctccccaaaaacaaaatacaaaagctccaaaagaatatgacaggcttatactcatcaatgagcttttttcttcgtaccattgttcttcttttctccacttcaagtttttgcaacacttttgcttctcttacacaagactcatgccatcccgaccaaagagatgcgcttctcgagttcaagaatgaattcaagatttggtatccaatggttttcttgatattgatggtgttctaatggatgttacctcttatccgaagacgaaatcatggacaaaaaacagtgattgttgctattgggacgg

SEQ ID NO: 46229 - DNA, 394 bp, Arabidopsis thaliana columbia
cagtgcttagcagccatagtaagctctctctaatcatttgttgattaagcaaacaaatgatttatgttctctgttttagccaaatttgagcaacgtaagtaaagagataacatacgcagacgatgtaactgttgatacccaagggaatgcttatgtatctgatgcaagaggaggtagcatatggattgttgatgttaatggcaagcttgtgtacactattagaagccctctcttcacttcacctggttggtataataactttgtctctcttaacggcattggttatcatccggacagataccgtagcgtcatccacactttctccggaatcttagtagtaaagtcactatcattgacgtttctggtggcaattcgaggtttggcgatgggcttg

SEQ ID NO: 46230 - DNA, 1068 bp, Arabidopsis thaliana columbia
atctcttctctgatcttgtcaaggcagaaaattagccaacaagaacgtggcctctccttaacattaccaaaaagagattttttttttttttgctggttgtttaaaagaaagcgttgactaaataaataacaaaacggggtcaaacggagagaacggtgtcgtttgatagctcagtgtgatcgatttgattcttgggatcaagagccatctcacggagccgaagaagacttccggtagccaaaatcgccttcggatttatatcatgcagagatcggagatacaaactctgacaagctttattcgccgcctcagataactccctatcttccattttgagcccaaggagacaatgccctaagatcctcaaaatcggttggagaagctcccatggcaatggaatccttccactatctctctcagatcttcctccaatagcaacattctcttcctctctccacgaatcatcgctcaaagtcggaatcacagcccgtgaagattgctccgtttctccgttttgccccgcccatttctcacacgattcacagaaattaagcttagattcgcgtggcattttcgagattttgctatagtaaagctccaacgcgactccgacgatcctcgcgcggcgcgtggatctaaccgtcccgtgtggatctaacgtggaggagatcacagcgatgttgaggcacgttgagttgttgttccttgtgagacctttggattcatggtaaatgcttggatatgagagatctggaatgttgacggttattgcttgaccggcacgtgaggttgtttcgtgcgcgtagagagcgagtaaaacggcttcgaatccggcttgtggttgacggagagggacacgagagaggtagagaccagcgattaaaagaacgaatcggaggacgagaaactgaagccatggttccccggattggaatgtgttgtaaagccaacggaagaggttgtcatcatcggggcctggatcgggacgttagaggagagaggagatctccgttgagacgggtttatcgtcgaggaggatggttattgttggagggatgtttgtatttg

SEQ ID NO: 46231 - DNA, 362 bp, Arabidopsis thaliana columbia
gctgcagacaagaactatgcccgggctaaggatttggggatacgtgtaacagtaaattgctttggtagttctcaagaagtttccttctatcatgagtagagagatggtgttgattgggtaaccactaatctcgtctagcataaattattgtcgagctatgacacacgccattgctttacattttgtgttgtttatgtacactgtctttaggtttttgttgatcacaaatcctaccatagacctgggaatccctacggagatagtaaaggagcctttggtgacaatcaggtagtactgttgacattgtctgtaagacagagattggaagatgattatcagttgctgtcattgagtaagtgtta

SEQ ID NO: 46232 - DNA, 983 bp, Arabidopsis thaliana
  unsure (1)..(983): unsure at all n locations
atccccccaggaagctggttatcttcaaaaccatcccaaacattttcataagatggaatgaaatccgaggcggcctcaggagtgattccactttggtttatgaaaagaccagccgggggatccggtttaggattcactgaattggtattgaagctattgactaccggttctggtttaggattcagtanattggtcttgaagctactgatgtttggtatggctttgggggttatgatttgaagcattttatggatcaattggagtttaagaatatcttccaaagcggtgttattgttgaggaggttattgttaccaaattggccattgttgattgctgccgcgagcatttgagaaacatcgaggatagggctaagatcgttggttcttggctcgtgcgtcactggatcaatccccatttgcaataacttcttcctcatatgagtgtccaatagtttttaatttcattatctgttcttcctggaagatgaccgcaattttcgaccatctgtatggtaaaaattcgactcaaacgttagtaaaatgaaccaacgaaaacttaaccttttgtatggttagagaattataaactaaagtttagactatagtcttgaggatgtgaattctataatagcaataataaactatgcaatggtatccatacgtaaatttgtttttgcactttatattaattttaaaagaactgaaaatggtttatatttccccattatgacacacacatgtaaacaggaacacataattacgtctgaaacaagcgagacctaaatcatttagtgctaacaaaatagcataaaagctttaacgaaaaaaaaatagtcttacttgttgccaaggagggcatggagtctaacgatagtactctcttctccatcggaaaatttgcctctccggatatcaggccggagataattcatccaccggagccgacagctcttgccacagcggttaagtccagcgagcttagg

SEQ ID NO: 46233 - DNA, 429 bp, Arabidopsis thaliana columbia
cctaaaacctaaatgtatcttactaatcctttcctattctaagctttttctttaacctggacaacaaataatagaaaacaaaaggcttaattatggatgttttttttttttttttttttgacgattaaaaataaaccagctctatatataatttaataaactttttggtttgttttataaaaaaaccaccaaatatatttatttattttaaaagaaaaaccaccaaatcatttttttttgataaaaggttaaattttacaccattttcgatttttgacggatattacaaagaatactagaaacggaataaagcaacctacataacttaaaaacaccgattccgagtccgcaaagctcagaaatttgcgtggttgcccagaaccgaagaactggaatcctcatcctagttaccacgggcatatctatttg

SEQ ID NO: 46234 - DNA, 1045 bp, Arabidopsis thaliana columbia
gttgacagagttctttaaactttttaataattttcttagttaattaagacccatttgattaagataatgagagagtctctcgaccttcccccaacggcacaatggctataaaattcgtttccaactttaaaatagaatcatatttttagggtattgcttgtgttaatccatgctccatgctatgtgttcagtagcaatcgaaaccagattttatacccaacaaaaatccatgctaagtgccattcaaaatttatctatttatgtttcatacaaaaatgtttttgtgtttattgcttgcttaaaggagtaagatagtaatgttcgtgcaaacatttttcaactttcatattggttgcgtcttagtaatacgatggttatatgctcacgtgaaaaaaccgtaaaaaaaaaaacagatagctagaccacaactagtgttagatcaagcatgtaaaagtccttaacattttagcaagaccgcaaacgaactctcgcataatctttgcgtatgattcgtctatgatctattctctggatgcaagtattcatatatttgctgacttttctccctaatataaattcaatagttcattgtcattttatgcatccttctttctttatctagtttagtttattttagttacgtttgtaatgcttagttctttataaaaacacaaacaaaaaacttactcatttcgttttagctgtttctaacaaattaagcggccaacatctccatcttttgtagatttgaatcgtactgagatattacaaccctccatttgtagattacaaagatattgcatttgcgcacatgcgaccaccaactaacattaacgcatggattgcaaatggaattctagagtttatggtttccattgacgcaaacagggcagcaccgacatcctaccatatgctggtggatagtcagggttaaagacttgattcatcacaggcttgttacatagtagagagcatgatctcaaaacttattagaccgtttatatagtagatctatctagtaattttttgtggagaaattgtgata

SEQ ID NO: 46235 - DNA, 579 bp, Arabidopsis thaliana columbia
ctaaccaatgagcatccaacataatctcactgccaccaataccttccaagtaatccttggcaacatcatcatcaatctcggaataacttccaaacatatcttccgagctgtcactctcagataattcagaagatccactgcttccttcatctccagattcatcatcatcatcatcattcatctcttcttctccatcactctcttcaccagatacatcttcagtgtacaacttcatccctcctatagaaatgaaacctgaattcctccttttcggtgttttcacaacatcaggcatcagttcatcgtcatttccaccagattcgtcaacagcatcaccctcctcctcatgggaaaatgaaccaccttgatctcccaaagcctttggaatagaaaggctaccacttggtgtagcatcagaatcatcacaaaatcccaatcctttatgagaatcatcacccaaaacgtaactcggttcgtattcgtaatcataacttaccttaatccctttcgatgacgaaggcgtttgatccagaaatgcaacaatttgagtcgcctctgacttccccaacaccagtggac

SEQ ID NO: 46236 - DNA, 589 bp, Arabidopsis thaliana columbia
taaaggattaccaatgaatctgccatccagactccatagaacacaagtaatagatgttgttatttcttcagtcaatagcaaaaatccacttagttgaaagcagagattaagggcaaaaataacaagtcataaatagatgttgttatttcttcagtcacaccttgtatatctccttctagaagactctgatctctttaggtgaaacgcaccgtcttggaccatcacgtgcactcatgtgacataagacttgagacttgagaccctctgcttccaatagaggcttcttcttaagtttctttcaagttggctcacactcgataaatctccaccttgagacaatccttgaaagactctttatgacttgtgagatgtccataagagagggacagatgatccttaagctctggtgaaagtttagacatctcccatggcatgaatgacttcgaagccacttctttaaggacgagaaagtctcgcaatgtgactacaatgcttgcagaatcgactgatggaatatagatcatcacaggatctcatgaccacgttatgttaagagcaactgagcctaggattttgtaagttgtgaagt

SEQ ID NO: 46237 - DNA, 559 bp, Arabidopsis thaliana columbia
acatttgacaaagagccctctcttccaacagcaagatttggtctcatacatggagaaactgatctctccagcattatctggtgatgtcacgaactcaccggctgatatatctatccaccgtttccctatatgctctttcaagcacatgcttcgctcttgtggccttttctttacggtcgggcaaggtcaacttcagattcactggtatgttccatccagaagctgtatcttctaacttcacgacatacacaacctcataggttgtctctagtgtcagttctctcgtgtcaaattttccatttacatctagccaacaaactgcttctagcacagcagcatcaacgagtttttcgcttgaaaataaaacacaatagaaaatttaatgttaggaacagcagtcgcagaagcttaatgctcatactaaataatatctagaagtatagttaaattacaactttccctcaaatattactttcggtttctcgcttttcatttctgttttattttaatctaaaataaatatacttattttgctcaaaattagaaataaatatattta

SEQ ID NO: 46238 - DNA, 513 bp, Arabidopsis thaliana columbia
tacaacaattataagtaaattaaactgttacgtttaacgtaatctttgttcacacgtaatcagattaatcatgcatgaatactaatttacaccttaggctataaaattttattttcctccaaaatacacctttttcatgttagacggtatattaatttgagctgaatacggttaatatgtaacatgactttatctaacacggccaaattccaatttgtttggtttgtcaagctaaccacaaagaatacttcccaagctgggtttcaagacatgagagacgattactcgtatcagcctctttagcgaaatcgagtccccacctagtggtggcacaagacaggtccggccatttccggtcgatccaagctgccataaacttcgcagcgagaaggagattcaagtcaagatttgtgatatatgtgaagaaaggtgtttactgagagaacattgatgtcggcaatgataaccacaacatcatgctcgtcggagatggcgagagaaaaacaatcatca

SEQ ID NO: 46239 - DNA, 616 bp, Arabidopsis thaliana columbia
tcgacacttgtgtcaggaaaagttccacaaaataaatcaccatcgttgccacatttaattaacgcggaaaaaagcttaaaagccattgatcgactgtattaaccactaaattagactgcacgccgttttcatagaagatcacaggacttggtgtcgttctcacgatccttcacgatcatcttctcttagtcaataaggatccatcaaggaaaccaaaaatcgaagaaaattagaaaaatcggaagagcgatcgaagaggattttgaaccgccatggcttcttcttcgctctctaatctgatgctcgccattcatgagaagaagacgagctccgttgatctctaccgtcctctccgcaactacgttactttcacctactctgagcgcgaggctcagcttatagacgacgatctcgagaccttgaagcagctccgatccgatatagaacgcgtttccgatccttctccagctgctcggcgagaccttctcatctcctattacaaagttctttgtcttgtggagacgcgatttccaatttcccctgacaaggatcatgtcaacgccgtctctttcgtatggtacgatgctttcaagcaaaagcataaagctactcagca

SEQ ID NO: 46240 - DNA, 485 bp, Arabidopsis thaliana columbia
attggcagtgatgacttatgttagtgtcatcgtctgttgcacattccggataacgaaccagagcctgactcaaaggcacatttccgaaatcgttggtatagtttcatagaaaggagaagctgtagtagttacgggcccgactcatcattggcgtagaattgggaagatttgagaaagaataggttaacagctagtaatttcgcgcgtgctatcggattttcgcctggacggtagacgaaatctttggttagagaaaatcggggcagcgaaaccgtttgctggaaaccgagctacgttttgggacattgagaatgaggtcgaagcactcgagaggtacaacgagttaacgggaaatgaaatcctcatacctgagtttgttgtttataagaatggtgaaagccctgaagaaaactggttaggagcttctcctgatggagtgatcaatgtagttaaggacggtgttacttcgtgtggtgtgttagaag

SEQ ID NO: 46241 - DNA, 542 bp, Arabidopsis thaliana columbia
caaatgttaagaaaactaaccaaccatacgaagattctttttattggtaaccttaacaagagctttagacacatgaagcatacgatgatgataatgaaaatacgtagtaattacataatcttacttaaatatagtatatttcactaacatcccagattggtcaaatcaaaaatactttagatgaatatagcaaaaaagtatatttgaacagtaaaaatatcggaggctatttctagctacaacgcaaatatcataatcttatggtggcaaatgaagaaaaatacttaccggcgaaaaggccttatcacaagttgagccgttttaataatcaatttggactttattcgtcgaagtttggccaacaacacttaaaacggagacacttgttttaaagaagaagatgatggggaaataactcaagaacttgaatttgtattctcctccataaagtaagatctaatgctctctatataacaaagattatttgtaaattttaggcactcaaaattgttacattaacttacttatttataaatacattt

SEQ ID NO: 46242 - DNA, 550 bp, Arabidopsis thaliana columbia
cttgaattgcatgcaactgcgatgctctgtttgccttctggtgaatgtctgcgcccagatgccactgtttgtgctgcactaatgagtgcactttactcttctgtcagtgaggaagttgttttagatcgccagttaatggtactcctttcatccaatgttcttggtccatatgttacttttacctgtatccttgctttcacccatggttatatacaacggttatgcaacaaatttggatattttctatggtgtgacaccatctcgaaaggcagtctactacattaatgtttgtgttgatcttcgcgttcaggtaaatgtatcgatttcgtcaagggacagctactgcatcgaggttgtgctccggtgtttagcaattaagggcgatggacttgggccacataatgcaaatgacggtggtattctaagcgcagtggctgcagctggttttaaaggttcggatatctatggaacatatctctcattcacctatgatttactccgttctccatagaaatttggggatgttcaccagcattaataaacaagatgt

SEQ ID NO: 46243 - DNA, 466 bp, Arabidopsis thaliana columbia
cttatagatttgtgtaaaaccagagttttacaatcgttacaagaacaagaacaacataacttctgattagtgatgtttcgcaccaacgcctctgtacgttgtattgttttctctgttttcatcttttaccaaatgatcaaatatcatcttttacaacatccacatattttgacatcttttctatagactttctgaaaagcttttactgtcttctgtggatgggcagattattgtgttcttatctccgagtcaagccttgtcaatttggacgactaaaaagaccaagttgattcataaaaaagtaattatgtaatgaaattgtggtggtaggtacaagtcgtcattgattgaaaaaaaaaaaatgaaggacaaagttattctatcattaattatggaaagccgaacctcactgtttggcagtaaaaagtggacttttaattttgtgttttttttaatactactatta

SEQ ID NO: 46244 - DNA, 526 bp, Arabidopsis thaliana columbia
gatatacttagttgatttacaggccttggtgctctaatgacctcacgaggaagtccagctgatgcaaaccctgacagaatcctccctcctccattattaataccagtgttaatcaaaacacgagaatcgttatatgcaccaatctcgccctctttatcctctatcttctttaccattcctctgactacgttaagctgatcttcaagcttcttcctgatctcctctttctgttgcttcgttgtggaggctacatgtatcctaatacgtccatctgcgtcctcctccattggcatgcttccagcagcagtagcatgagcagaatcagaggtaagcccagcgcgtgatttgggcatcagtggtatctctttccacaaagttttcaggatgagcttcttttattagattatctgcatctatcaggtggacatcttcctcagaagacacttcaatgggattcttgtcaacaacgagagtatcaccatcttccagggatagggtttgagaaggtgcttcgatagggttcttg

SEQ ID NO: 46245 - DNA, 417 bp, Arabidopsis thaliana columbia
gcaatttcataataaaactacgatcaaacgaaactccaaagtataataatgtaaacagcaaaatacaaaagattgatctttggagaaataagtaatttattttcaccaaaattatgtttacaactttcttctccaatttacatacacaattgacttcacacgttggttatgatcttagtgttgtcacaatgaaaatgttgatgacgaagaggacgaagacgatggtgaccaagaagtcatatccatcggataactccccaaaacccgtaaaaacgacgtaaactcttgaacctcagaaagcgcattctgagcacgtgactcggccatggaagcctcgaagtcgatataaaacatatactcaaaatgcttagccgtgccacattagcctcatcgactagcctaataggaacattatgg

SEQ ID NO: 46246 - DNA, 393 bp, Arabidopsis thaliana
cttttagaatgggtgaagccttatgtatcagactcgaagaagttccatctgattgtcgatccacggctcgaaggccagtactactgtatgaagtctgttcaaagagtagctgctttagcaaacaaatgtctaatgaagcaaccgaaatctcggcctaaaatgagcgaagtcgtatcactacttggacgcatcatcgatgaagaagcggaaaacgttcctccgccagttgctgatgaaacagaagagataatcaaagctgagctcaatggagagagtgagcctgagctaaagaagcaaggtagtagttatcgtaagaaggttcttgatcttagggataagatgaacttaaacaagtcgctttcgaagctagactggcgaaactggacaccagga

SEQ ID NO: 46247 - DNA, 540 bp, Arabidopsis thaliana columbia
tctctaattttggatccagaatggattttatttcattgtagagttctctgtaggctatatctgctagccaagtgtagagtgtgcccgagtctagtatgacccctgttcttggtcctcttcttttgaataccactggttcgatattgagttgtgtatccccaacactaatcccttctagattcatatagtagatactattctctgtctcaaattcaatgggtgttggatcgccgagaatatccgcgtcctctcccagaaccagctgattgtaaccgtagtttttgttagctaaatcaccaatgcagtaagagaatttagacccaagctgtacggcaagtgatgtgggtttggctcctaaccccaaaataccagtgaaatgactttccaactgctctccattctcgtagccacacccaaaagcaataggttgggtcacaacagtgttaccgttagtgttgtgaaggttaacgttctttagctagacgccttttgcccagtgcgcttatatacacttgttcgtaacacacttgtttgatgagc

SEQ ID NO: 46248 - DNA, 602 bp, Arabidopsis thaliana columbia
  unsure (1)..(602): unsure at all n locations
taccggggcaaggannnnnnnnnnnnnnnnnnnnnnctaaagtttgaatttgtaacagggcgatatcgctctggtcatcgctaccaatcagttttgcatcaaactcgcgcccatcattgagctgaatactgattttctgtgcctgattaatcacatggttgttggtcagcacatagcctttactggcgttgatgatgacaccggagcctaaaccttcgaagggttgtgcaggttgatccggtaaatcatcaccaaaaaactttttgaattcttccgggattttctgtccctgactggccgttccttcccgtagtacgctcaccactgccggaagcactttttccagcattggagccagactggggagaggggcctgatcggcaacctggcctggaatcgacgcgacggcctgaaatgacgccgagagagttaaccgacacttaacgctaatgcactcaacagctgggtttgttttttcattattcctgctctcgtacctgaatgataagaaaagagattcaaaacagtttgatgttattgaattttcagacggctaacaatgagacaccagattaaatgatagtcggggagggagagaagag

SEQ ID NO: 46249 - DNA, 551 bp, Arabidopsis thaliana columbia
gtatttgagcataactagagcaatgatcctatattcttgacaacagggcaaaatttagaactatcataagctaatatatatcaaagctgaaagatgcaacaattaacaaggcaagtacttctcagaagtctaccacaacaataaacaacatttagcaactgagtgcatacctctaaatcttttccgaatcttaaatcaggaaattgctctagcatcttttctatcataaccagtgagtagtatgcttccttccagaacggaagactggcttcctcaacagtatcttgcaactgtaagctggaagcactaattgcagactccaaaatagttctagcatcctccactgtattgtagatatgcttccgaaatgttttcttcatggcgctgataaaaaatcccaatacctgcacagcatccaacaaatgaataccagtaagaagcaataaacatactacagaaggtgcctacaagcactatgaacgcaatcaggctttatgaagatggtataagccatacattcataataaaacccttcaggtacaccacttgtt

SEQ ID NO: 46250 - DNA, 423 bp, Arabidopsis thaliana columbia
tagtaacggtcgccagtgtgctctaaagcggatattgagtccgtggtggcccgtattgcacgcattccagagaagagtgtttctcagagtgatcgtgataccctgaaaaacctcggcgatcgcttgaaaatgctggtcttcggtcaggataaagccattgaggcgctgactggagccattaagatggcgcgtgcaggtataggtcacgaacatgaacaggttggttcgttcctgtttgccggccctaccggggtcgggaaaacagaggtgacggtacagctttcgaaagctttgggcattgagcttctgcgctctgaatagcccgagtataaggaacgccataccgtcagccgtcgtattggtgcgcctccgggatacgttggttttgatcagggcggtatgctgactgatgcggtcatcaag

SEQ ID NO: 46251 - DNA, 563 bp, Arabidopsis thaliana columbia
tgccaaatctaaaagtacagcttctctgtattacgagaaactttgatcgtaacaatgtggaatggtgatggaactgtggaggtcaatggctttcgagttttctactcagaggtaagcaaaattttaaaatctaattctcatcatattaagtttggtttgtagtttttacaacaatcttgttctcaggtggattgtgtgaggagaatctttgaaaaacacccagaaaccgcaacgaatattcgtccaaagaaccaaatggtgaagaatgcttacatgaacaacctcctcgacctcattgacataatttgcttagctcctcaggagctcacagaggaggaaataagaaatgcagagaacacgcttttggaactggtagaggtaggtttcaagttggattggctgaagaacaggctggaggagctttgcgtgaagaagaagaaaatggaagcacgtggggctaggatgagagaactcgatggaatgatcgtggaacagaggcgtgttttgtgggctcttgaaaccgaactgaagaatgaagaaaccgaaggtgtttccgacagtgc

SEQ ID NO: 46252 - DNA, 575 bp, Arabidopsis thaliana columbia
cttgactgattatgttgctgactgttagagttactccataagttgaggttaccacgatgggatccttgatttatgggagatcctatgactacaataagaaaatacaaatgagcaaacgttattccgatgccgttattgtaagaatgacaagttctacacccagggggacaagtaaaccaactatctaaaggtaatacctaaatttgcatcctctgtcacctttcgtaatccactactattggttaggatcaatataaatatccttaattagagattgtactcatggattatattctaaaatctacagtaaactattcttcttaaattcacaatcattggttacgcatcatcactaaccttaggcaagtgtatcaaggtagaatagtaataagaagaacatgtacttaccacctccattaaatccatctactcccactccacgaacattgctcatcataaagccctcatttgctttttggccatcgcttaccatttcagagaatgtcgtagaggatttatatggactacagcttgcaaagttgtcaaggtaatcaggaaaatgaggatggagattt

SEQ ID NO: 46253 - DNA, 530 bp, Arabidopsis thaliana columbia
tacaagttttaaaacctaagaaaggtcagagagggccttctcgatatcctctgcgtggttccgaagagtgttccactgcattaaggaaaagctgtgtaataagcaaataacaagaaaacagaaacacttctaggagacataaaacagtggagagagatagaaagagatgtgagtacctgatccacgcttagagagatacctgcaacgtataacaaacatagagataatcttgtcaacatgattagttatgtagagataaactaatatagctgtctctagagaaagacatgaaggagcaatagcaccaaaataaacaaaacgttgttgtacaaaagcaaacactctgcaccatctccgctcatacttacaagtccataaacagtctcaataagcagaattgcctattataaaaccctaagatatgcaattctataaacctgactaaatgcagaaacttaacaaagcaaaacagtaacgaaatataacactaagagatgaggaacacattactagaaataatgaattatgag

SEQ ID NO: 46254 - DNA, 348 bp, Arabidopsis thaliana columbia
tctctggaatcatttgaaaatattcaccaggaaggtcaaaaatatcggtaaacctgagattgataaagaactctgccacagagtctcctccagcttgaagggaatcttgtgaattgagtgagcataagctgttgtttatcagattcatagggaaggatcttcgtctcagttggtcacgagacatgcacgtttgttgccctttgtgcctcaattctatctagataagctccatctaaagttataaatcattacacaaatagttcaaaaaagaaaagacagctcgacttctgactgaaacttgactaaacaaggaagagaggctgaccgagtggagaaggatatcagaca

SEQ ID NO: 46255 - DNA, 839 bp, Arabidopsis thaliana columbia
gtttccactccgctcgaagtgagctatgtttcttatgcagcaaaacagttcactccaatgaaaatttcaggtaaaaatttgactgtagtttgtcatgatagagtttaaagctttaatctttaggaagcaagagttttgtggtttgctcaatttttaatgaatggaatcctgaattagcaaaccccaataaagatcaaagcaagatttgtgttctaattgtgtgaactgaagtagcttactgatattgcagaagagccaactttacttctgccgacatgagagagtctgatttcagcggttcgaccttcaatggcgcatatcttgagaaagcagttgcatacaaagctaacttctcaggttagtctctctcaactgtgttatcactttgcaatgattatggatttatggtataagaattatgaaagtgaacaacttccacaaatcataatcgattcttcacatgtaccctttaactaacttccttgaatcttaatcctttgcctccattttgacatagttttaaatgcagtaacagttgctctacatgttgcatccttagttccatttggagtagatctttcatcttttatatgtcagcaatgttttgagcattcaggagttaggaccctggagatgtgtatcctcaattctttaaaacgttctccaagaacttcacaatgttcatagtgatacctccattagattcaactcccgagctttcaaatctacaagtgttagccttagaaatctgagaatttagtacttgagccagtttgttgttctgtaaactacttaagccaagaaatcttctcttgcaagaattcatattttgtggggaa

SEQ ID NO: 46256 - DNA, 763 bp, Arabidopsis thaliana
cacacaatccatcccatcaacggctatgatctccttcacatttttcataccttcctctgattcaatctgcacaaaatatatcaattgcataaaaattctaacttccatttttttcacaagtaggcattttagaattcaatttaacaatttcgtccaataaaattgaaaatcaaaggggatttgaggatcgaacctggcacataatgaagagcttatcagcgtaattacccaaatacccttcgttaaatccgaagctggagtctctcacaacggagtaagcacagccgcgaacaccgtcaggacgatacaggcaaaacgagaccgcctcggatgcagatcttccggtttcgaccattgggaacataatgccgtcgggtccgagatctaacgctttcttagctcaagcctgactaatgtcgggtacacggaggacagtggagcaaccagcggcttcgattgctcgaatgcagtgaagcgcttcacgaatcccgcctgcaccgtgctcaaggtagacgacaatgaagtcaaatccagctcttgcagcgatctctgcaagctccggagaaaaggagagaagaaagtggccgagaagcttttctccatcttggagacgtgatttcagagattttttggtcgccattgtgactgagagaagtggaggagggtgatgaagaaggagaagaagaagaagcgttaatagagaagaagaagaagaagattcattcctttcattgcatgcgatttatttcctttttgttgttgt

SEQ ID NO: 46257 - DNA, 615 bp, Arabidopsis thaliana columbia
cttttcatgtcaatgtgggtttagaaatgtgaagcaaaatgatttagtaatgaatcgttaccatttcatcctagtttggtactacgcattttcttatgatgtgttgttaaacatacagagcctttatggaatcagaattgcctgctctaaaggagaaaaacccgcagctcgaagtaattaccgagctttcacggggacaacatccttatttgaagggcatttacagtatgtatatttctcctctattgaatacaatcctgattcaacggttgttgatattagcaatttcacttgcacaattcatagggaatagaaatgaaagggtagtgtgtgtgaagaacatggatcctgaagaagtgcttttgaatgcaacgaggctgaggaactcgcttggacggaaagtggttaaactgaggaccagacatgtcaccaaatcaccccagtgttcaaggcacctggacaactgctgtcaaattctgagactttcctgctaaattgtttgcaggttttcatcttctagctgttaaatcgaatgttgcaagtatcaggattggtcgtttatctgtattgcaaccccaagttgtttgtcccgctgtgacttgggacaaagatgta

SEQ ID NO: 46258 - DNA, 628 bp, Arabidopsis thaliana columbia
ggatccccgattattctttgtcactaatctaaatcatcttttttatgatggtctgaaaattaactaataccaatttttactagaacaattctttagaaatagtgatactttttcacaataatatagtaatgtctctctctatcatttcaattgacatttaaggtttttatatacaagttaagaaaacaccaaatttaaattaaattaaattgtttcaaccaattataaaatatgctggaaaaaaatgttgcattaaaagttgcaaacatcacttaaactgaaacaattttttttctctaaaacattgtctaaaatgatacagaaaagtagaaccttaaaatatttatatgaaacaataaagttggtaaagtatatatatatgtagaatcttcttgcctaatgatggacatataactaagattagaacttatttcattttcaaaaataaaataaaattagttaggaaaatgaatacgagactaatcataagatcattggaaagaaaataaaagactagtataataaggtgagccaattaaaaggtagacataaactttcatgacatagttttggtaggtgaactgtgacatattatcaacattcctataatgattatgttgttgttgag

SEQ ID NO: 46259 - DNA, 844 bp, Arabidopsis thaliana columbia
tagagaattgaatgaaggaaataaattactagtgtttttatttaattttgagagtgattgttcactacttcttaattactttgttcatcgcatcattaatgattcaactactttattgtcgatcaaagatatttaattgctttctttacctaatcaagtacatgctagacattctccttccttttgaattttgtagtggatcatgttttctttattaaatttataagcaattttgcgagctgaagctacgacaaatattgaaaatcacgtcatataattattttttgataagagtattttattgaaattgcatgaagagaatgaataaagaatagagcctgaggtacataagcccttttgccttgggtatgaactaaaccaattaatgagaaaccaaaaaatgacggaaaagagagagtccaactgatgatgaggagctcgagtcagcgaagtagtcatcgaagtagtactcgaagtagtacaagaagtagtacaagaagtgattcaagaagatgagatgcaaaactgatgatgaggaggtcaagtacttggatttaggagcgtgtgttaagtcaaaaaagaagaaaattatctttatttgaagacaaaaagaatcatataagcaaaatggaagtttgcttaaagagaaaagaaaattggtaaaaaggaaaatcttttttttttttatggaatttggaaatatgtcttatgtgtgattggagaaagttgacgtgcaagggtctgtttgttatataagggggtcgtgaccttataagaatggggatttgttatagtaacaagcccaaagagattttgtaacgcgccgattgtccttaccagtggg

SEQ ID NO: 46260 - DNA, 577 bp, Arabidopsis thaliana
taatcttcttggtgttagtgtgttcgccggagatgattcttccagtgatgtctctttgcttgttcatgcttggggtatggaactacaggctccgtccaagacaacctccacacatggacacaagactatcatttgcagacaatatccacccggaagagcttaacgaagagttcgataccttccctttttcgtctcaagacccggggattgtaaaaatgcggtacgagcggttaaggagtatcgctagtagagctcaaacggttgtgggagatatagcaggtcaaggagaacgagttcaggctctgttaagctggagagatccaagagcaacttcgatcttcatggtgctttgtttggtttctactgtcgttttgtatgttgtgccgtttaaggtttttgttcttctcgccggactatacatcatgagacctccaagattcaggggtaagacacctcctggacctattaatttcttccgacgacttcctgctaaaacagattgtatgctgtagaatgctaaaacgtataagaaacaagcaattttttttccattcataacaagtcaagagaccaaatc

SEQ ID NO: 46261 - DNA, 577 bp, Arabidopsis thaliana columbia
caattattagagtcatctcaactatttagaattagaagtatagttgatgttttgttttgttttgtcgagccgagttaatttcatctattatctgtggccatgcaatatgagtgtgattccccttataagtattgtgcatactttagttccacaattattgacttgtttgatatttctattatagtacagtagcagattagtccatgacattataaagaaactaatcgtgttttagaaaagccttttttgcatgcaaagtcaaatgttaggaaaatgcaaagtctgaccgactcgtgagcatctagaataacggaaacaaaagtcaaagtgtctctctctctctctctctcggctagcgggttccgttgggacggactacaaaagactgtaccggcgcgtcaattcacaccaactagtacgaagaagggaaacactgattacacgtgtcgagtgttcattcgttgatgtacaagtagcggaactaaagcaaacggagtagggaatgagtcaaagcaagtatggtggtgcaactgctattgactgatgcagggaaatattgtcttgttaagagattttt

SEQ ID NO: 46262 - DNA, 441 bp, Arabidopsis thaliana columbia
gggttaaatgcagcctatgtagtggcggatgtagaaatgttttctgtcgcactaccaaaatcaagggatctaaagttatttttcaagtttgatatatttctatttttactgttttacctatgatttagatacatccttatttttactttttttttttctagaatttgtttagagtctttttacagttttttcaagtatttaatggattaggacaaaaatggagataaggagacattttggagtaaaacctgaagaattaagctaaagaacgaattcaattccacatcaagtcgagagtgtcgattgacacactcttagtgtctatcgacaccagttgtggcccaacaaagtctatgacagtttagagtttgaagaattgaaaattctgccccaaaacatttccctattcactttacgagtccatgtacattttagaatata

SEQ ID NO: 46263 - DNA, 543 bp, Arabidopsis thaliana columbia
tactttcatatcaatagctctattcatagtcacccaattatgcttcgtttcttgcgtgctaagtcaacaaaacgaaaccaaatttctctaccacggatttttcgaagccaatctactcaagtatggatcctccaagatcctccctagtggcatcttggagctaacaaacagctcacgaagacaaaatgggtcaagccttctatggcttccccatagccttcaaaaacagtactaactcatcaaactcgttttctttctccacaagtttcgttttctcaatcgacgcaccaggtcatggcctaaccttcctcatctcgccgtccatggatttcacgcaagccatgccgagccagtatctcggtctcttcaacactacaaacaatggaaactccactaaccgaattctcgcggtagaatttgacacagtaaagtccaacgagtttcttgacatcgacgataaccatgtaggcatcgatgtgaacggtttggtctccgttgaatctgcaccagctgcattttttccaacaagcaaagcaagaatat

SEQ ID NO: 46264 - DNA, 501 bp, Arabidopsis thaliana columbia
tcttctatctcagagtcccgctcttcttccatgccgtcactggatgtgcttgctcggtttgcaatgtcatccgttgtttcatctttcatctcagagtcctgctctgccccaccgccaaaaccactgctctccgcacccacattgtttgtgctacttgttgcatttataacagaggtagtagtagttcctggatttgctactgatgcagatagtagcctttggattgtatcttctcggctgccaccagcttccaaagcagaggtagctgcagtgcaaaccagagatcatcaattctctaccgtggacttttacaatatatgcaattgcagaaactatccagatgggaaatttaccttttcctcgttcaaagcccatagacacaagttcagcaactgatatgcctaccagttgttcttgccgttttcttttcctcgattcaatgtaagcctgtatcgttgaattaacttttgggtctgtgagtatatcaagcgccttctgaat

SEQ ID NO: 46265 - DNA, 513 bp, Arabidopsis thaliana columbia
cgagacacaaatgagaaagacgaatgacgcagaccaaaagttatcacaccatgatacaaaattcaacagatatctatctcaaacaaaagcagaaatgaaacgtcacatccatgcatcttatttatacatttgccaagacatctaccgaaacaaaatcagaggggcagctaacacaaagcaaatacaacaacttcaagaattaaacactaaaaggcaaaccttctctgcaaggctgctttcaaattctccgttgtgaaaaaagtttaacccagaggtggaagaattctttcggatgctcaaataagcttgtatcccaactaacactctttcaatctcatcaggaacttgctgcaaaccaaagggaaattcagcggccatacaagttaagataatagatatgaaagcagactaacaaagttggttgcagatccaacaaggatgacatcattataaaattggaaacgcatatccagtattctaatagccttcaatgtaaataatttctagaatgta

SEQ ID NO: 46266 - DNA, 509 bp, Arabidopsis thaliana columbia
atgtgcatgatcctcgtctccttgcaattgctgaagctgaacgtcggtatttagagtctgaatatgtggaatatacagcttcaagtgcaagcggggccgcattctgtcgctcagctgctctaatagtaagccttaaagcttcttgacagatttctattttaagtctcaacacaatccctcgcttgtgataaccgcaaaacacacttttctttttcacagttaatggctcttcttctcttacgacacgcactgaccataacagatgatactgatggcgaagaagacgacccatcttcgatactatctgtaagctcattgaagcttcttccttttttctttttcttttattttttgtctcagttgcatttaagttgtaacaccaaaccacaaaattgtctgattcttattttagcttgtcctgctccgagctgctggatttcttcttccatgctatatcatggcttgggcatcagtattctacagcgccgaagacagagacaggttagtag

SEQ ID NO: 46267 - DNA, 538 bp, Arabidopsis thaliana columbia
gccagtgtgctctaaagtatagtcaatcttcctaatcctgtacatctccatgttaacctacatcttcatgcacaaatcaaaccacaacgaagccagaaaaaaagtgaagctatggatactttgtttgcttaagctcaatttcaaagactctaattagtaccataagccactccatgttttcgttgtatgtatgtaccaacatcatactaaacctttcaccatcgtttcagcttctattctatagagtgattattgaattcccaaatttttcaatattgatacgattaatgatttcatccaatttcagagaaacgattatagaaattaacaattctgataaaccctaaatggttaaaaccctgaattccgaaaccctaaaacctaattcacaaaatctctcgttcctacgatgcaataacgaaggcaaccacaacaccaacaaaagtgtaaaacgattctttaattcatttttgcagcatcttaacaagagggcgagacgaagtaactcagaaacaaaataataacctttaaatggatt

SEQ ID NO: 46268 - DNA, 486 bp, Arabidopsis thaliana columbia
atcacgatcatatgaaaattgaaaaccatacacaagttggatcttttacccatagccaataaattggggttttaaattacgaatatgcgttcgacatattatactaagaaaacggtatattcttagtcttgcacacacacacacaaaaaaaaacatctacaagactgcaactattctttcactatgtaaaaaacttataatcacacaaatttaactaatagagttttcttaacagaaaataattacatcatcaacaaagtttactagttacatgtgaggataatccttttttatacatcgaccgattaagttatctaataagcttttatttaccaaggttatttatctaaggaaaactgtaaaccccataattaaattatctaaaaaaacgttttttattttcttctttaagaattgattgatttatttaataaaatttttagttttgaacatgtcctataataatattatgtatgtgcggttggt

SEQ ID NO: 46269 - DNA, 864 bp, Arabidopsis thaliana columbia
tttcatgcagtcttttagagtgtgaggataaccttacattgtaatgtatctccattttatatcacaagttcgagtttctttcaaagtgatctgattgacagctttcattctatgatggtagacaagttgacgcctgctgccttcgagaagcattctgagagagaaacctctagaaactggaggaacaatgtttgggtgttcattgaaggagacaaggttccgctttcaaagacagtgttgctcagatactacaacaaagcattgaagaactctaacgtatcgaaagtcattcatcgggatgagtttgttgggtgcagcacatgcgggaaggagaggaggttcagattgaggagcagaggggaatgccggatgcaccatgatgcaattgctgagcctaattggaagtgttgcgattacccatacgacaagataacatgcgaggaggaggaagaaagagggagcaggaaagtgttcagaggttgcactcgctcaccgtcctgcaaaggctgcacttcttgcgtctgcttcggctgcaagctctgccgtttctctgattgtaactgccagacttgcctcgatttcaccaccaatgccaaacccatttgacttcatttctctaacttatttaattcttctgcaaaaacttgtaatgtatgctctgcattttctttaatcagtagcttgttacacctgttatgcgagtggagagaccaagtagggatcacatactggaaaaaaaccgacttggggcttggaaaactaacttagcaccactacgaggacatgaatctaatctaaattcaaccatataacctcggcaaatacacacaaggcaggagatcgataacaagaagcaagcagtga

SEQ ID NO: 46270 - DNA, 508 bp, Arabidopsis thaliana columbia
tcaccatatttatgtgacaacttggtttagtaaaccaatgaaaaaatgttgatagatcaatatatacattttggagtgtccggtaagacttatattaatgtcattatatatattagtattcattcctagctagttttctatttaagcttatatattatgcatatatggaagaaacaaaatgagtttaaatcttcaaaaatatatatatggctatattattcaattcgtaaatttaattatacgcatttaaaacttctacgtaaatccgatattttttactatttataacgttaattaaatctccaagtttttcttaaaaagggtgtgttataaaaatataattataaaaagacttaaattaatgttcaatggttatttttagataaaatatttttgctttctgatattctactatttttgtgacatatatacgggttaaattcctagcaagaaatagaaaatatgaatatgagagactcaaaaacattcaagagatgagtataatatg

SEQ ID NO: 46271 - DNA, 541 bp, Arabidopsis thaliana columbia
tgcaatacttattctctgcatttcagaaataagtacatacttaagctcttgcacaatctatggttggcagcatgtcatgttcacattttcacaactattacttcatgtaagaggcacttacggtaatagggttgggttcgagaatacgcttgatgactctcttggcaccttgcgagaaccatggtgggcagctaaactcagccttgcatatctaaagtatatattaaacaccaaagatgagactagaaaagtactgcagaagatcaagaagcagagggagagataatttacacgtacacgtttgtataatgtcatgagattcggctcatcaaaaggcaagtaaccagccataagcacaaagagaatgacaccacaagaccagacatctgctgctgcaccgtcatagcctttgtccgacaaaacctgccagcaaatccaacacaatgcagtagacaacattaaaggcatatctcttatatacatcataaatcaagaagattctgcaaatgaagtctatatatacgtatagcatttgttagat

SEQ ID NO: 46272 - DNA, 362 bp, Arabidopsis thaliana
tagaaacatgataattgatatatacctcgagatgatcgcctacgttgacaacaaaagagccagggatgggatcaacggtgacccactcgtcacgatacagaatttgaagaccttcgacttcgtcttgaagtagaagcgtcaagaagccgtagtctgagtgcggtggcatccctagcgtcactactggctccggacacggtggataacagttcaccaccaccacctgacttccctcttccaactccttagccgcctcatcactgccatcaatttcaagactttctaagatggctttgaccatcatttcgaacatctctttcgtctctttagcgtatgtagccgccgaactcctagggtggggg

SEQ ID NO: 46273 - DNA, 798 bp, Arabidopsis thaliana columbia
tgatgtggctttggtgtcttagaagagatgaccaataagagagaaaagtgtcatgtgagcttgaggggtttatggtaagaatataaatagaacgttgtcgcgaaaggaaaatattgcacgtctagagtttatcgagagaggtacacatgtgtgtgtgacgttgcccaccaacgagatttgaagatctgttggtggttttgttttgaagctacactcgtcggaaaaacaaggattccctgaattttacaacctaaactatttcaaaactcatcgttcccccctatactttttttctctgaaaaaacaaccatcaattctaaattttctgaataaaacgtcatatactttcggattcatccgagaaaatacgcctccaattgaaccagtcattaaaccgggtttaaccacaaaatcgcgtttactgttccgcgattacaattacccacataagtaatcacgacccgtcttaaaacgacgtcgtttcacttttttttgattttccaaaaatcacacacgaacgacatcgtttcacctttgttttatttcccaaaaaaaacaaaaccgatgccgtttagccatctgcacctttagatcattgacatcctcttcaactctcttacaattctcctcgaccatcctaatttcgtctaagagagcttcatcaacccatttgaacaagtgatcttcattttctctctacacacataaacccggataaaatacgccttcaattgcattctcttaaatcaacaatctaacaaaatagaacaatgtacctgcaatgcaattgcacatcga

SEQ ID NO: 46274 - DNA, 566 bp, Arabidopsis thaliana columbia
ggaattttatattttaatgtgaacataattgtgcgttttgcaaatacttttaagtggagttttggctgattaagaacaattaatgtcgacaattagcatgttgacatatatttagttcacaagtcgacatttattttcttgatttaaaatgtgaacttaatttaccaaaacggaacggtttttacacatttgcttggcgtactagaagttgatatgtacgtcacttcaatacattcattaactttgaacggttcattgaaaagcaagactttgaatgtctttggaaagatttaatttgttcggatcaaaacatttttttttagcataaataggattgtaatttttaaaatatgtaaactgagtaattctgatcattagactggtttgtcttctgatttaatgatcgtttacgtctcttttatattttggccttttgggagacaacgaggcaccgcaatggttatcgttttcatcacgtaaacgaaattccgttccaaaccaaaaaacgatgataaaccataatatatagtctagatcgaaatgggtaaaagtcaacatgattgatg

SEQ ID NO: 46275 - DNA, 589 bp, Arabidopsis thaliana columbia
  unsure (1)..(589): unsure at all n locations
tgaagaagacaaggtgcatcaatttctttgtggacttgatgatcagtttcggacagttcgttcaacccttgttgctcgtgttcatgtgcagccattagaggaagtctacaacattttgcgacaagaagaggatcttcgcataaatgttgaggagaagcctacagatgtgacatccttttcagttcaaacctgacctcgtttcaaacttgacgacaaggaaaaaggagttatgtgcaacttttttaatcgcattggccatagcccagacaagtgttatgcggtgtttggctatccaaaatggtggggtgataggccaaaaggcagaactttgcaaggacgaggtcatggcggtactaacggaggagctagaagaggttgtgggagcacctcctacaccaatgcagtccaagtcaatccactgacaagctatgagcaagctaactacgttgtgacagaaaaggacagtgacgaagtaacgggatttatcgatttgcagtggaaagcaattaagaatcttctcaacaatgggaagactaacganactgaaaaaactgacgggtaagtgctctttgcctttaaggatagtgga

SEQ ID NO: 46276 - DNA, 1506 bp, Arabidopsis thaliana
ctttttccccttttctctcaagaaccctaatttttcaatcggtcgaacaatgatgcccgaccaaacgacatcggtttggttttttttggaaataaaacaaaggtgaaacgacgtcgtttcaagacaggtcgtgattacttatgtgggtaatctcaagacgggtcgtgattacttatgtgggtaatcgtaatcgcggaatagtaaatgcaattttgtggttaaacccggtttaatgactggttcaattggaggcgtattttcttggatgaatcctaaaataaatgatgttttttcagaaatattaaaaagatggttgttacaatgagcttgttaatagtttaggttggaaaattcccgcaactcacttttatacgaataaaaaatgaaaacaggagttcggcggctacatacgctaagagatgttcgaaatgatggtcaaagccatcttcgaaagtcttgaaattgatggcggtgatgaggcggcggaggagttggaaaagggaagtcaagtagtggtggtgaactgttatccaccgtgtccggagccagagctgacgccctcaaactacggcttcttgactcttctccttcaagacgacgtcgaaggccttcagattctataccgtgacgagtgggtcaccgttgatcccattcctggctcttttgtcgtcaagcgatcatctcgaggtatattaatttttataggttttaaacattttcttctatcttttcttgtttataaaattattttaattactttatttaataaattaatcactttcatgaagtgtttttttttatttgagggatagaaatagataatgaaatattccaattttgttaaatccgtaagtaaaaacacttacaaagcaaatcatttctcataaaaaacaaatatctaaaagacttacgctagcaagtagcaattcaccacaaaatagttaattttaggttgtttagagattgacattgataagtgattagcatgtcaaaatagttttaaatatagtgtttcagatttttctctcacacttgtagagttgtcaaaatagtattagaattatagaatttagtttaacccgtattacgctccaatttagtattgtaattattaatttagatgagtcaaaggtcattcacaattccattttactcattctctatcaaataaatactaattttaacccgcttttgcaggtcgatttttttataaaaaaaatgacccagaaatcttccatcagatcattccttaaattttagcaaaacccaaaaacgaaattattccataattctaaattttttttttacaatatgttattagatattgaccaaatttttaataattttgtaaaataatttttgaagatttatttccatatttattatttcttataatataaaaaacaattgtcatgtaaatttgttgacatatatattttaagtatatatatcaacaaaacaaaactcaaaaaaacacatgaaaaattgatggattaaaaaatcaaa

SEQ ID NO: 46277 - DNA, 546 bp, Arabidopsis thaliana columbia
cctgatctacttactccacagtcccccaaaattagggtttctactcaatgcaatgattccattggttccgattacctaacatcacaataaatttcgattcctaaacctaattatcaatctctttgcttaactctgatctatctactttgagattgacaaaaatcttcgataccgagcaaaattaaacttacgattagagacgaaaacacaggaggaagatcgaagaagcttgcttgaaatacagaggaagcaaagaacgcttcgaatatgtggtgaccgagtggactcagtgagacatttgtgagtttggtgcgccgagtcgcgcggcgatgaaagtgaatcagatgatttgtacgcgaagatttggtaaacaggtattgggctagaggaaatggaatgggtctagatacggcccaataaaggcgcgagatagagacaactgaagtcttgtttcctgttatttcttttgattttgttttactaatctaaatatactaaatcagcagtcaattttcaataactgatgcattcagtgattgacacatc

SEQ ID NO: 46278 - DNA, 466 bp, Arabidopsis thaliana columbia
tagctaagtcttcactagtaacagcatcggtttgactgccacatacattcatgttcgagtctttctcacacgtctctttcacagtatcatctttagaaggttccacatcaatatctccggcattggtttcaccctgagattctttgacatctaaattctcagaatcacaatcataactaatcttatcctcagaagaagaagcttcattagtatcactagtcctagtactctctttgaccaagtcgtcaacaactaaacacaacctcttggaaaacttaacaccggagccttcacgagcagcaaggctcttaccagaatcatctccagatttaagtagcaaatctcccaaaatcgctgaaagcctctcttgcttggaaggttagtcatatcacacaatgcgacacgtgtttccttggacactactaggctgcaccaatctccagtcatcttcaaatatcaccaaaac

SEQ ID NO: 46279 - DNA, 1575 bp, Arabidopsis thaliana
aaagaagaatcttgattaggtacctgagaattttaggcatgataaagggcagtgccttttaatgaaattgaattttgggaagaacccaggaagaagaagaagagagaagataagaggaattagattttgaaaacccgattatttcggatccgggtcacggatttagctttccctttgtctctctctctgctttctctgtaaaggaagagagaaagagagaggaaacgagagtcaggggagagaagattatctttgggttttattaattgcaaaattaccaaaacgatttttttttaaaaaagcgtaatttattatttgataattatatgagtaaattaataattgcctaattacagtcatagcagtaagttcggtaaaactggacgaaaaaaaaaaatgtaaaactgatgtatataaggttttttgaattttccaacctaaattatttataaactgatgtatattcttcgtgaaatacaatcatcaactttaatatttctgaaacaaatattgtatatttttggattcatccgagaaaatatgcctccaattaaactagttattaaagcgggtttaaccacaaaatcgcgtttactgttccacaattacgattacccacataagtaatcatgattcttcttgaaacgacgtcgtttcacctttgttttgttttcccaaaaaaaaccaaacccaatcgattgttcgatcgattgaaaaattagggttctagagagaaagggggatttttgagatttatgggttttctttgaaattatgtcattctggtatggggcttcgtcgagttatgaacacgaggaagatttagtgtatcagagcgatccagatgatcctgattttgagggtccggagagtggaatgaggtcgaaacggcggacagtgaaagtgaaagcggcgatgagggagacggcgatagtgacaatgatggaggagacgactccgacaatgaaagtaagggtgagaaagatggagatgaaagccgaaggaacaggaaacgacatgaaggcgagaaggacgatgttgattctgaagtaaggcaaagagagaagaaatcggggagaaaagagacgaaagatctgtgtgaagaagacataatggagaggttcgagttcgagatagaggaagccgtggcaaattggtttgatgagtttcagattcggcgtgatgaaataccagagagttgtgatgcagattaggatcccgtggtcactaaagataggaaaattaggttggcatcaggtgataagttagttataggtaaaacatttttcactgggtttgagttcaaagaggttatgttacattatgctatgaagaataggctaaacattaagcaaaataggtgggagaaggataaaataagttttaggtgtgctcaaaagaagggttgtgactggtatgtctactgatcatataattcggatctgcagatgtgggttttgaagaccatatgtcttgatcatagttgtattcctaatggacaatgtagtctactaaagagccgagtgagcctttgtaatgtaagctacaaggttatttcaaaagtattaagttgct

SEQ ID NO: 46280 - DNA, 609 bp, Arabidopsis thaliana columbia
gttttaactgtattggaggtgtcatgcttcagtagccaagcaaactttgctttgttggagaatctgtcgaggtagttaagctgttccttccatatatttgtggtgagatcaagtactccgatatccaccactatgacaaacacagggttcttgatttctactatatttgaaagctctgctctcagtggatcagatatattgtgctgtgaatcaaagctgttgtcacggcttcccgtctccaagaggtctctaatgatctgagtcagctcgttccagtctgatgcttcaacagttgcaatgccgtgttttcgcaaccactttgatgtgatcattcttgctgtacttccatacatggaaagcataacctgtagcattcaaaaccattaacactttcacaaacacataagctttaatttatgatgcattcgtcattatttctttcccaaatttacttaccacgagaccgtatttggagaaatctggctggatgttttgatctacagtgtcaggagtatcaaaatcaagtacagtctcataagagccctaagccattcttctgcactacttttgattctccacccattttgttacctgtaaagttcaaagtag

SEQ ID NO: 46281 - DNA, 321 bp, Arabidopsis thaliana columbia
tgttatggtagataattaggaatagttatttgatttaaatgttatggaatattagaaggaagataaggaatgtagttaggaggacttatatttggctttgctcattttacgggatcgcatataggagagtataatttttggtttaattcattgccaaaattaggaggttatattcttgttgtgattaagactgatttagtatatattcttcaatcaaatcgggtaattgaatctcttttatgttaactacattgattatctgaataatctaaccgagatttgtgcgcttgtttgcaggaccggcaaaatttgaaagttttg

SEQ ID NO: 46282 - DNA, 530 bp, Arabidopsis thaliana columbia
atccctccaaacaacctatgaagcttctgcaacactctcttcctcatatcttgccatgtctcttcctctgcccccatgttgttaaaattataagacctaacaacttttgattcctcttcctcattaggctctcgacaacacccatctccccaacctaagacttgttgtccggatctagacatggtttgttgccagaaaatagcgtagttccagctgaaattctccgagtttggccaatcaacgagactagagagcttcttattcagagtatcatcagttcccataacaagaaagagattctgattcgaattagagtttgctcgaagaaaatcagaagctaaatgccctaaaacagcactaaccaccgatttatcttcatcatcccaacctaaatcactcatattcatctttctttatctcccagattacaccaaatcctaccaaacccaaaaccacttaaacggagaagaaaaccaaacctttcttctacacaactcaatgattgactcaacgatgcttgaaaccatata

SEQ ID NO: 46283 - DNA, 568 bp, Arabidopsis thaliana columbia
cattttgataccaaatatagtttgttttttttgcatggagaatttcatttctttgtttacacatgtcttttcagtttaattttataagaaattaaatagatgagtaatgtatggaaaggtatagatagatagatggatgaaagaagagcagtggtcctagtggacgagttgcatctaagaaaaggaggatatgaagcagagaaagtgagaggtaaatggtcccttcaacaaaagccaatttaatctgtgaagcacatatatgactatgactttaatggcaaagcaaaggtgtttgtaaccaagtgtttgctgttagggtttctgagactttgtgggcttttaaggccttgtggggttcaactccattcacggggaccacctttgtgtgatttgtttggtttgtacatttatatgtatttttttcgtcggtttgtctaaaatgtgtcattcctatagtatttgtaacttataaaaatgttggactttttctccatctgaattttgattcagatcttggatgaagtataaacggacggatatagcaaacaatctccaaagataaatgatg

SEQ ID NO: 46284 - DNA, 801 bp, Arabidopsis thaliana
atctccaaattcatcatcaccaaagcattgtgatggctgccaaatttaccccaaaatcaaaacagattcatatcttcaaccttaatgcagtaaaatcatattcaacaagactgtaacattacataccagccattgtttagcttttccatcccaaacctctcctggtattccgggtaaacaacgattgctttcttcgtcagctgaaaacataaagtgacatagaaagtaagacttttgatgtttctttgccatacaatccaacaaagtttcaactactacttgccttggcgaatttgcgaatcagattttcgatgaattgaggaggtgcgcagttaataccaacggcgtaaatattgttgcttttgttaagaggttcaagacattcctcaaagctctctcctgatggagctttctcaccatctacagatgtgaagcagatccatgctgggatttgcactttctcttcctccaaaagctcaacgcaagcctgagcttcgagtttattcggtatggtttcaaaagcaagaagatcaggaccagcttccactaagacttgaagtcttctcctgtgaaagtcctttagtttactccaaacttacattctcaccatagtgaccactgcaagaagaacatcgaacaactataagtccctcatcgacagaatcttgaaaatctatctcaaaaccatatacaatgtgtattgagaattcatgtatgcctaaaagggcacctgtactcagagccatcagctaagataagcaccatagctgtgaatagatgcagctacaagagctctgttat

SEQ ID NO: 46285 - DNA, 791 bp, Arabidopsis thaliana
tgatgttgcagatggctacatataagcctaagaacatcctcatcactggggctgctggattcatagcctctcatgttgctaacagactagttcgcagctaccctgactacaaaattgttgtgcttgacaagcttgattactgttctaatctgaagaaccttaatccttctaaatcctctcccaacttcaagtttgtgaaaggagatatcgccagtgctgatctcgtcaactaccttctcatcactgaagaaatcgacaccattatgcactttgctgctcaaacccatgttgacaattctttcggtaatagctttgagtttaccaagaacaatatttatggtacccatgtccttttggaagcttgtaaagtcactggccagatcaggaggttcatccatgtgagtactgatgaggtctatggagagactgatgaggatgcttcagtgggtaatcacgaggcttctcagttgctcccaactaatccatactccgccactaaagctggagctgagatgcttgtcatggcatatggtagatcatatgggttgccggttataacaactcgcgggaacaatgtttatggtcctaaccagtttcctgaaaagttgattcctaagttcatcctcttggccatgaatgggaagcctctcccaatccacggagatggatctaatgtgagaagttatctctactgcgaagatgttgctgaggcatttgaggttgttctcacaaaggggaagttaacatgtctacaatatagggacaacgagagaaaggagagtgatccatgt

SEQ ID NO: 46286 - DNA, 594 bp, Arabidopsis thaliana columbia
  unsure (1)..(594): unsure at all n locations
ctcttaagtcttaagtaaaaatcctttgggtagggtttaatcagggaaagcggtatagtgaagctgaggatgcaaggagcttgtagtggttgtccgagctcatctgttactttgaaatcgggaatcgaaaacatgctgatgcattatgtatccgaggtaacagagatcctcctaacatttcttttactacatatggataattctagacctatctgtctgtgttcaagttttggtgttaactgttaagcaaccattggagaatcaagaacttgttaccgtcacattcttctaatgaaagttttttttgtgtaggtgaaaggtgtagaacaagagtttgatggggaagatgaagagggaacgttgtctggagagatgagagtagagtaggagacctcctctttgctctttagtgtacagaaaaataaatcccacttttttcttcaatccttggtgttgtttctgggcttttgaatcacactcaaggatctgtttactgagagatctgagttgttgtttttttgtagcttttgttgacttacacttgttttgattatttgaggttaagcaacganagatgtccagaatatttgaaat

SEQ ID NO: 46287 - DNA, 319 bp, Arabidopsis thaliana columbia
catggatcattctcaatggttgctccaaaagaggcacgtcgaggaattggagcaaatgggttctcatccaaagataagagattgatgtttttgtccaaactaactgagctactagatccaagcctaggaagacgcagtgttatccatataatgcggcaacggacaggattcttgaaagcaaattttatatgcctaggtgctctaccagacttttctgaaccagaaagctcaggcgaagatctaataaaggactgtacatcccactttcccatcaaagtccgtgcttccttgtttatgtcgctgctcgcccaaatttgga

SEQ ID NO: 46288 - DNA, 428 bp, Arabidopsis thaliana columbia
atctcatccaaacaaattgtggaagacgaagacgaagaagaaaaaaacagagagaaagtgccaagatttggacaagtcatagtttcactgggaaatattataacatcaaatcaaaatgctgaaactcttttcccaaacaaacaaagaaaaaaaaaagtttttgtttttgggaattttgatgatcatcaattataagctgtgtgtgaagaaagaaacaaaaacaggactgtggaaaaagagagagacaaagactgagattgatctgacagtttctaatctaggatgattttttactgtcagataatctcagatagaaaagtgagagttttggtttggagaggagagaatcagaggaggaagaagaatcgattggaggaacattagatgcgccgtcatggcggagaaggtgacaagacaccaaatgcggg

SEQ ID NO: 46289 - DNA, 511 bp, Arabidopsis thaliana columbia
  unsure (1)..(511): unsure at all n locations
atgtagccaatcacagtgctatagatgacattaatgagactgtgggtaataagtaataacatttcaaatgctaggagtaattgtactttttcatcgccagaaattcagactaagacaggtaaagagtcttacaaaagattatagcaaaataagcatgcccaacaagtgtttagattaagcaaacttctgacttcagaacatacaatgtcagatataggtcatattcgtttgcagttgctagcgactagagactgcgacacgnaccagaaacatagagacatacaaggctaaactacctggaagatgagaggtaggagactcgcttgtagcagggcttggagaaatgttagaacttttattttgggatattggtgaagtaggtgcaggagattctggtgccgccagcctcctccatatatcagaacagttggtcttcagaaacccgagcttatcattctcacgatcataggtgacaagagtattgcgaacaacaattcctgattttacaaat

SEQ ID NO: 46290 - DNA, 567 bp, Arabidopsis thaliana columbia
tcgtgtctgtattcagtgttttggagttttgactacgacttgtgatggcatctagacaaggatcaaaatcgagaaaagcagggttaaagggtgctgattctactgcatcttcgacaacctcgtcttcgaagctttatcaagagacttctatagatggccatagctcccctgcttcttcatctgctcaaagcaagcagcagttcttctcaccagatcccttaccacaaactgctcagcggtctaaagaaaacgtcacagtgacagttcgctttcgcccactcaggttcttggtgatatgtttacatacgcttgcaaaaattaggttgatgtttgttctgcgaatttgacataccttatcctcgatgtagtccaagggaaattcgccaaggggaggaggttgcatggtatgcagatggggaaactatcgtgcgaaatgagcataatccgacaatagcttatgcctatggttagtcttgacagtttgattagtgtcatggatttttcagaatcatcataaataattgcatgtgggcattactcactcaagaatacaaatgaacaattata

SEQ ID NO: 46291 - DNA, 549 bp, Arabidopsis thaliana columbia
  unsure (1)..(549): unsure at all n locations
nnnnnnnnnnnnnnnnnnnnnnctaaaggctgctgcatattcaccggatattcgccttctcctaccggcgcttgccatgtacgtgtcctccaatattgaccagtggactaagctggtagacgtccctaagccgatttacttccttttccttccgttctcggactatatgtcaaccatgaaaactggccgcgtcgtatgctgtatgtcactcagatcaaactcatatcgaaagcacaccaaatatgcagattttaagaatgcgcgacaatactgatcacattatttctttattaaggattactagcaccgtcactacaaaatattgctgaataagtcaggaaatatgtagtttgcaatgcctcaagcgaaaggctaaatataaagagaaaaatagcgaatagaaagacaaaatttagagtaaatcataaaggtctatgtgttggcatgaatatggacatcacaaacacgaggattttggggtagcagaaaactaagaacaaataacacaaacggggaagaaggcaaagggaaacaatgtctaggaccagg

SEQ ID NO: 46292 - DNA, 527 bp, Arabidopsis thaliana columbia
tacttagattgctatagcgattttgtaatatgattgtagtctttatataatttgttttcttctgtttggttatatcaaaaaatttgttctgtcgaattttctgccatgatagtgcgagatctttagatagttttttttaagggaatgtattttcttaaatcagattcaaatttgacaagggttaaataataattgtgttgtaatggaactgaaagaatgtatggtataaccgaccggtctatcccgtggcttcagctagcagttatacaattgtgggcctaagcttcggttacaagcacgattggttctatatctccacagagattactagataacgacaacagacaaactatcaaagcacattgtttatagatattttgcagctaatcttgctgcggtttacgggctataggtcggtgaaacaatcttctgcgttttgctcccaagatacaacaaacagtttggttcttcctctttgtcccagataaccttgacagtttcagaacacaattgcactttactcagga

SEQ ID NO: 46293 - DNA, 600 bp, Arabidopsis thaliana columbia
  unsure (1)..(600): unsure at all n locations
tnnnnnnnnnnnnnnnnnnnnnnnctaaagatgcctctcgcccggtctcaccagcacacatgcaacaaaccctatacagcgccagtcctaaccgcttgatctcctctactccaacccagatacaggtaatatcctcaacgcccacataccgctgcagcatacgaggataatggaagatgttgttttcaagacatgttttgaccacggacgagaggagggaatggtcagacgggctcatacggaaagttaagctgagttcgaatgaggcatggtctgtgccgtacagaaccagcgagaagatcaggtagattaggatgccttgatacgttgcgatcggccactgggaggtagggttgccgtcccccgtttcgagttcacacccttctccagcttcgtctcgtgaggggtatgttcgggcccagttgctctgtatatatcgtcagtcagtccgttgcaaacgagttcaagtcaagtatgtcgcttcaccctctgctcgagaatagagagtccagtttattgtgaagctccgttgcagctcgccttcccgcaacgttccgctaacccagagtccaaccattactacagtctgaactaagaagg

SEQ ID NO: 46294 - DNA, 630 bp, Arabidopsis thaliana columbia
tgattctattgctttgtaaatatattttctttaatcatcgcattcattttatgcacttattgataaatgaaataacattatttcgatacacttaaacaatttttcgggttcatccctagaaggctagtgttgtcaattgaaatctgctgtatatgtatatcactgtattgacacagtattattatgaacaatatagtccaacgacaaaggtagaatccaacgaaaaatgagaaatcattggagacaattttagtttaatatatcgaagcatatatgtatacgtcgcatataaacagtataaaacactccaacgaactcagtgtgtatagtttgttgaaaagtagaaagaacataacttcttgtcattttaataaatatagtgtagggatacacagacatagatgtcaatcttaatataagtagacaatgactacgtacaacggtacaagtagttatagtttgattaagagatgatcatatgtggttttttttttttgttttttggaatctgaattggacagtgcaattgatatcgttttttaacaatcttaccgtaaactctatatcccttacaagttgattggatttgtttgcattcagatattcattcgtactacaaaacaggaattt

SEQ ID NO: 46295 - DNA, 483 bp, Arabidopsis thaliana columbia
atgtctgcgttaatatttatacttttttcaagacatcttttttcttctttttttttgctatttagaaagttcagacccattatcttaatattgtgatgcgtcaactgtatttggtaactagcaagtggcactagaagcgtttaagaaacccatcgctattagacttgaatccaaaatcatattcatagtagactcacagtcactattatcaaaaggatgataatagcagactgatatgctcatgagcatctatatgactgaagatgattgatgaataccaaaaactatgattcaaagggatgataatagaagaccaatgtgcatgagaatcatagctccaaaaagagggtcctacagacagagagacaggcgtcacggactgtcctatcgtcttcatcgggaaatgccaaaagatcctctctctctctctcacattacacaaataacatgcgacatgctatgtttggtcaacttgtaattatg

SEQ ID NO: 46296 - DNA, 560 bp, Arabidopsis thaliana columbia
  unsure (1)..(560): unsure at all n locations
nnnnnnnnnnnnnnnnnnnnnnctaaagggcggacggaacgcgagagacggattgtgatgtaactgatgtggttgatctcccggttcctggttgttctgagggtcgcgttcgggttcactgaagaaaccagaaccgaacgcggataagcgcttcacttctggcaatgagagggccggggggtcgttcgatgctgccgggggggtactcgctttcttgacactggcttgttctgcttcgtaaataggctctggggcttgagcggcaggagggactgtgttctcggaagactcaagaactgtaacacctcctgaagcgcgttcgtctgtcgatggcgcacggggcgatggtcggcggtcctgctgctcctctcgcatccgcttatagatgtcagccggccggactatgggtgccgttggactactggaggcggctgggctctctgttggcattgtctgagctcgctccatcgagcgcgacgaccacgtacttggtagtggtggatggggtgtcccagtgaaagggtgctcgagacatccggagtgctctgattcgcacttgt

SEQ ID NO: 46297 - DNA, 489 bp, Arabidopsis thaliana columbia
tgcaaatatatctgctagttcctgcggctagaatataccctccatcagcggaatagcacaatgttgtaaaacactttccagaacttgaattagctgcagaccgacggtcagtcatgacccgacctccagcgatatctctccgcccctctatggtgtacattaacacaccttcaatggtgtcccagaaattgatctgcccatctagcgtactcgaggctaattgcttcccatcaggacggaaagcaactgttagaacatcgtggttgtgtcgaaacgtttccacggtgcctttgctagcaaacacatcccacaaccgaactgtatagtcccatgaggatgaagctaaaagttgctgcagagaaagaaatatatgaactagatacaggcatggaagttataacaccataaggcagaagttcacataattgttcagaggcacgaagcaaattgtattttgactaaatagagtatgagactatgacagtttct

SEQ ID NO: 46298 - DNA, 565 bp, Arabidopsis thaliana columbia
tagtaacagtgtgctctaaagagcgcgatagtccccggcacggtaatgtcacgattgttgggacacgcggtgaaggataggggtgttcaacggcggtgactcgaatcagggagaatggtcgacggacttaggaggtttgagaaatgaagaatcaatgaattaagaagatataaagttgacgatgcgaactgttttggatagaaagtctgcaacggatcgacgaaggagggcgaaaaaagaactcggtacgggggagggcagtagcaccgaccgcgaggagaaagggacgaaccaaacgagtggaaagaaccggatcgaggctcggcaggataccggacgagcagatggtttgatcagctcgtcgtaatcggcgttgagaagcggacgagacgatggacgatgggagagagaagggggtcgtcggttgaatgtttgacacctggagggtgaggtaaaacccaccacagccgcagtccagccaaaccataataccactccgtactagcctccgtcccgagagtcgatcgccagttgctttttataggccaagtcttccaaaaggagg

SEQ ID NO: 46299 - DNA, 777 bp, Arabidopsis thaliana columbia
gtcagaagcaagtgagaggtgattactcttgaagttagctggatccttagaagcaaaatgcttagaggttatgacaagcaccaatgggtgtccggatttggtcggaccctgaagacagacctttctgaattccaattcatcctgcacttctgactcagggatgaatccagttggaggaaccatggaggctctccatttttgccaatctacaaacatctttgctgccttgactgggtccattgatcttgccaccaggaacctcatcaatgttggtttgtcatatcccttttcagaggaaacaacaacaacaaaaaccattgatgagattttctgattatggattcacttttactaaactgtctctactgttagggtttctgatgggaggctcaaacctaatcagacaaaccactatgacgagaatggagacagagttttaacagtgtagcccatataaaacccatcaaaatcaaatgacagatatatcacatcatctaacgagagattgttagtgaaactcatgagacggccactagatgcaagctttgtaaactgtaatgagactaaagagtcgaattagattatctcagtagaagaagagagtttctcgaccgatttatctcaactgggtcaaggcaaattcttggcctgcctccatgatctatggctcatctcagatcctaaaaatatctcacagagaaataaagagagagccttttgtggtccgtacagacgcacgataaagtaagttgaagaagtagagagctttgatgttga

SEQ ID NO: 46300 - DNA, 560 bp, Arabidopsis thaliana
tccagatctttccatgcctactaatcttgagatacttaaacttggtttttgtaagagtttggtggagcttccttcctctataagaaatctcaataaactattgaaattggacatggaattctgccatagtctggaaattctcccaaccggcttcaacctcaaatctctcgaccacctcaacttccgatattgctcggagttgaggacttttcccgaattctcaaccaacatctccgttctcatgctttttggaacaaacattgaagaattccctaacctcgagaatcttgttgagcttagcttatcaaaagaagagagtgatgggaaacaatgggatggagtgaaggtatgtaccttctaaacttaacgttttctccaacctctttaactaacacttttatatatataaattattgtcgattcgtacatgaaatgatgtatattcttctatatagtactagatccggccataacacgaaaataaaatcaatgttgtttacatttcacaaattatgtttgacacttagattaaatattatgttgttacattaattttcaaa

SEQ ID NO: 46301 - DNA, 616 bp, Arabidopsis thaliana columbia
tgtgactcttgtttctgatgcttatcgccgtttgttgttgattcataggcaccgaagaagggagttaaagtggcttcaaagaagaagccggtatgctctcttagcttttcctttaagcattgtttgtttttctctgagtattattattagtcttggtggagtttctcattagatttgttgttgtgtgtattttaggagaaagttaccaacccattgtttgagagacgcccaaagcaattcggtattggtggcgctttgcctcctaagaaggatctttctcgttacatcaaatggcctaagtcaatccgtcttcaaaggcagaagcgtatccttaagcagaggttgaaggttcctccagctcttaaccagttcaccaagacccttgataagaatctcggttagtctctttttcttatggttattcagaaatctatatgtttgtatgatcagttgcttaatgtgtgtcatgtaattgcagccaccagcctcttcaagattcttctgaagtataggccagaggacaaagccgcaaagaaggaacgccttttgaacaaggctcaagctgaggcagaaggaaagcatgctgaatccaagaagccgcattgttgttaagtat

SEQ ID NO: 46302 - DNA, 486 bp, Arabidopsis thaliana columbia
ttttagcctcctggagagcataaacaaaacaaattaagcgcatattgtcatcatcgatggagctgaaagattaatatctagatagaaaaaaatatacttcacctggtaatagggatctacatgttcttgaaacttgacaatatgtggtgtaaccgcactcttggaagcatggtaagcctctttcgctttggtagatagtgtttgaacgtgtggctcaacatgcgttttaacagtctcttttatggctggaatatatttctggaaatagaatttcgtaagcataaccataagagcctcctgagtaataacacacattgcctgtaagttacttacagttttaacattagccatgtgcggtttagcccatttttcagcttgattttttgctaacgtcacctaaaagatgatcaaacttagttaggcataagtttgctctcagagtcatgtaatcaacatacaatttggatttaacaataccttttgagt

SEQ ID NO: 46303 - DNA, 781 bp, Arabidopsis thaliana
ttttagaaaatatgtgtgatgagtatcatgacaaacactgaccaaaaagcaacccaaagtaagacaaaatattaatctcagaagatgccaatcccatggcatacttttacacattcccatatcatatcttcttcagagtctcatctttttaattatatatagtcaccttcatatgtcgtacgaacatcctaatcactttaattaatctctctcatctctttctctctcgttttctaacgcatacactttgaatggcgcccatgagtttgcctccaggattcaggtttcatcccactgatgaagaactggtggcttactatcttgataggaaggtcaacggccaagccattgagctcgagatcatcccagaagttgatctttataaatgcgagccatgggacttgcctggtacgatccaactctttatatctctctctatatatggttcagcttgtttatgtcaatctgacgttatagattacatatattggtcatgatgcattcatacatatgatattggaggttttatgagttatttatttggataatacgcggaacagaaaagtcatttttgcggggaaacgacatggaatggtacttttacagcacaagggataagaagtatccaaatggctctaggacgaaccgtgcgacccgagcgggttactggaaggccacggggaaagatcgtacagtagaatcaaagaagatgaagatgggaatgaagaagacactggtttattatagaggaagggctcgttgttgttattaaatgagaccg

SEQ ID NO: 46304 - DNA, 149 bp, Arabidopsis thaliana columbia
tagtaacggcagtgtgctctaaaggttgctagatgttctgggccgcacgcgcgctacactgatggtgagagaagatgcaagtataattgtgtcaggcgagtacgctgaaatggtaagttgtcatatcagcgcatatgtgttagtcgcat

SEQ ID NO: 46305 - DNA, 498 bp, Arabidopsis thaliana columbia
gataaattcccaaactaactcacaaacaaaacaatgtttgtgaaacttttgatttttttttttaatattaaattatttataccaaaaagcttatttgggacacatagggaaactaagttttccaccgaagataacattggcgttatcgcaaagagctccgaccaaaccgcctgatgacgacttcttctctcctcctgtcttgcctacatagtccaagttcacgtcaacaacgtttactccttggcacggcaccgatttgctacacataatctgaacaacatcttttgtaattgttgttcctctaatgttcttgaacaaaatatcacttatagcaacttgtgaatcctacaaaacatgccaaaaaaaaggaattgttaacgcatatattcaaaagaatagttggtttgagacattttcagtgatgtatatacttactccgcctcttgaaccgtagttttgatcaatgatgattgggttcttgacactctgcatgatgat

SEQ ID NO: 46306 - DNA, 562 bp, Arabidopsis thaliana columbia
  unsure (1)..(562): unsure at all n locations
ccgaattggatcatcattacctgaactccatgctgtgngttgtgcaacagctatggcaatcaaacagctcggacatctcacaattttaccaaagggaacctaaaatcaatagcaatcatgcttacaaactaattacatgaatcttaagtaagttcaaacgaatttcaaggtatcatagcaaagtgttacctcctcagcaggggagataccaacacggcaaatatctctgataatcccttaagaatcagaaacccttaaggaagcagcaagaccattaaccaacatcgtgtacacttcaacatcaggccttgaccaactccatcgatcattgtcacttccacctgtgaaaacaaacaatcaatcctaaatttgcttaatcaatcacagaaactcctactctgggttaatagtaaagttgagatgagagtacctaaatcgaaactcgctcgcatggtgtagaatatcgacaacgcaaggtccacattgccgcgactgacagcagcggagataatcgaacggcaatcttcaagttcaacgattccaccgcgatttgacccgaacc

SEQ ID NO: 46307 - DNA, 608 bp, Arabidopsis thaliana columbia
ccctcgcgaagagacgtcgttaacttagtgaaattgatgtcttttgagttaacaaaggttgcaatagacgaggagcttatgattttctcaagttgtattgtattactaacgaaaagaccttttttttttggtttggttacaatgtttcttgtagttcggaagcctagggaacaaattgcagacgcagaggcacttctggatatagcaaacactttaatgtcatcggtgaagtctcagtctgctcatggggtttcaccggctgagtttgttaatgctttgatcagtgggtttggtcaaggttctttggggattgatactgatgaaactgctcaagtatctttaaagtggaaggatcttgggtttgctgtttgttctagtgttttagtatcatgtggttgttctacaatgtgagttctcataataactattttatattgatttgctttgctgtaattgagtatattctgtttaaacaaaggtttgtttacctgttttgttcccaggttgggacatatggatactgaactgaagcaaaggaaaagggcacccaacagaaaacgtacaaagcctggtgaaggtgttcgtcagatgaggtaaaaatgttttca

SEQ ID NO: 46308 - DNA, 543 bp, Arabidopsis thaliana
ttccatgcggctacaaagaatagacaggctatgaacaatatctctattatagaatcagtaaacggtacccctgtttttgaagaagatgatataatcaaggctgtttcaagttattatcagactatttttacctctcaagaaggggacaggtgctctactgttttggaagctctctctccacgtattacccttgaaatgaatgctaccctaatttcaatgcctgatgctgtggagatcaaaaaagcctgcttttccatccatcctgataaggccccaggacctgatggcttttcagccagtttctttcagtctaactggacctctgtgggggataaggttatctcagaaatacaagctttctttatttctggtgacctgccattaaagataaatcacacacatgtcagactaatccccaagatcccgagtccacaaaaagtttcagactacagacccatagctctctgttcagtctattataagatcatctctaagttattagcaaaacgtctacaacctcttctacaattctgcatttctgag

SEQ ID NO: 46309 - DNA, 1496 bp, Arabidopsis thaliana
attgcagaatcgatcccaaataatttatttattataaaaggtacaatgttgcatggattagcatataagtgaccgtaaaaccaagtgctacacaaactttttcaagtgcttcaaatcatcaataaacttaaacagtagctggaactttggattccactgatttgagaacctcctcacccatttccttgcatcccaccagtttctgcattttcaaaacacaaaagacttttttaagtattttgttacgaacttgtacaaaacaaatgataagaatcatcatgcacatacatttccaggggagtagatgtctccggttctgaaccctttgttcagagcatccacgacagcgtcttcaatcctctttgcagccttttcttctccaagtccatacttcagaagcatcgccgcgctgagaatggtggccaatgggtttgccttgtcttgtccagctatatctggtgctgaaccatgtataggttcaaagagtccaggtccctgatttcatcacaagtttaacatttcgcattagtttataaacaggaggagccttgaaagatgttagttaattttgtttaccgattcaccgagactagcagatggaagcattccaatgcttccagtgatcattgaagcttcatcagacaatatatcaccaaaaatgttattggtaacgattgtgtcaaactgcattgttttaaaaacaccgtgagtactagttccacttctgagttagcttaatcaacgactaagtttgatatatgtgcgagaagcacctgtttcgggtcacgaataagctgcattgcacgattatcgacatacatatgtgatagttcaacatctggatattcagaggctaaagctgttactcttttcctccacaatattgatgcctacatgaaacaaagaaatttgcatttcgtaaacacacaaaagtggaaaaacaattcagtgaactaacagaacgtacatccaacacattggctttgtcaacagaacaaagtttgccacgccttttcctagcagtctcgaatgctacacgagcaattctgtcaatctgaagaacataaatcaatgcattaatatccatacattgccaatattgtcacagagcacagtgtgaagggttattacctcgtgagcagcgtagatctctgtactaacgccgacttcttcgccattttcattgatcgtaatgcctcttggctctccaaagtaaatacctcctgtgagctccctaacaatcatcatatcaacaccttctgctacttctttcttcagtgtggaagcatcaactagctgaacaagcaaaacagaaacatttgagtttatttacaactagaagcaaaattcaagtgctaagcaaatcaaaaccgaagatacctgtggcaaaactgtagcaggtctcaaattagcaaagactttgagatctcttctaaggtaaaacagagccatctcaggtctcagatgtttctcattcttgtcccatttgtacctga

SEQ ID NO: 46310 - DNA, 421 bp, Arabidopsis thaliana columbia
  unsure (1)..(421): unsure at all n locations
nnnnnnnnnnnnnnnnnnnnnnctaaagtggaaggacgaatcatttaggaggaaagcaaatgatacgaatagtctgtgaacttatttttatcgcaacgacctggtatatctttttatggtcccttaatctgaccagctgggaatttctcttcttcctctgtgggcatttgttagttgtggtaatatcatctggctttggcttggggataaatcttgtcaaaacggttcatgtgcgccacggtaaggcggaagtgccttaaatcttgagggtttcacaatcaatcggttagggaaaattctgttagcttcgattggaggaattcgtctctaggtagctttagtttccttggtaacgtcgagtatgtgtcaggctagaaagtatgccaatgtagtcacggttacggattaagactttactgaa

SEQ ID NO: 46311 - DNA, 637 bp, Arabidopsis thaliana columbia
tgtgcttttaaaataagatggattacatcaatcttaatttaatcaaataaatattattacaatcacacttgcaagaaactgaatatgacgaaactgtacgtaaatacatattcagaaaaaaaaagtcaccaggccaatcatattttcaacatgtaatcacatagacgatgctattgttcctctccgttaattatgtacggaatgtccaataccggggctatgaccaggttccgtaggtctgaaggtatcaaccccgtggctcggcggcgactcaagtggctcagtcggaggtgacgacgacaatacagagccaccagctctgatttcctcagacgtcgttacggtgaatttggtgagttttcggccttcaattgaaccaacactaatagtcaaaagaaagataaatgcaaaaacgtaaacattaatcgtcgccattactagaaaaaccgagacgagaattagaaaaaaaaagaagctaaattataatatttagtcgaaggcgaaaatgtattatgtattgatgcatgaacctcttggccatctgatgtatttatagggatgaaattttacattacatgggcgcacacttgaggagataaataaatattagggggtatattggttatgatttaaagac

SEQ ID NO: 46312 - DNA, 1111 bp, Arabidopsis thaliana
tggtggccaatgggtttgcctagtcttgtccagctatatctggtgctgaaccatgtatacgttcaaagagtccaggtccctagttttcatcacaagttaacaatcaatatatgataataataaacagaggaaccttgaaatattagatttagtcttacttaccgattcaccaagacttgcagatggaagcatcccaatgctaccagtgatcattgaagcttcatcagacaatatatcaccaaaaatgttattggtgacgattgtgtcaaactgcaataatgtttttaaaaatgccgtgagtactacaagttccacttctgtgttagcttaatcaacggctaagctttatatatgcgcgaagatcacctgtttcgggtcacggacaagctgcatcgcagcattatcgacatacatatgtgatagttcaacatctggatattcagaggctaaagctgttactcttttcctccacaatattgatgcctatacgaaacaaaacaaaaaaataattgtataacgaaaaacacacaagagtggagtggaaaaacaattcaaaacatacatccaagacattggctttgtcaacagaacacagcttgccacgccttttcctagcagtctcgaatgcaacacgagcaattctgtcaatctgaagaagataaagcaatgcattaatacacatacattgtcacagagcagcagattgtgaagagtaagtagtacctcgtgagcagcgtagatctctgtattaaaaccgacttcttcgccattttcgttgatcgtaatgcctcttggctctccaaagtaaatacctccagtgagctcccttacaatcatcatatcaacaccttgtgctacttctttcttcagtgtggaagcatcaactagctgaacaagcaaaaacacaaaaatttgagtatatttacaactagaaagcaaagtgataagcaaatcaatacctgtggtaaaactgtagcaggtctcaaattagcaaagacattgagatctcttcgaatgttaagcagacccatctcaggtctcagatgtttctcattcttgtcccatttgtacctgaacaaaaaatcatcataaagagaataaatttgctgaa

SEQ ID NO: 46313 - DNA, 441 bp, Arabidopsis thaliana columbia
taacaagaaacaaaaaaaatcattcagggatagtcatgggattttctcccaagtgagcttgtttaaagtctctagcgtgactcaggcttattaggaagaaaatgagtaacatgagaggatcattatactcggcatcctcccttgagagatgtgcagcagaatactcaattcttttttcctcgaagtaagcctcttcctcttctagtggatagtttatttcttcagaccattctgaagtgaactttttctagagatagtgtcaatgtcgcgttgaggtagagctttcccttgcatctgattcagttgactcttcaattcctcaacagtgtgggctagcttctctatggtttcttcttgcacataagacatttttttgagttcttgcaaatcaggcgcaaagagtgtacttgattaagtggtttaatctgaaggttgaggttg

SEQ ID NO: 46314 - DNA, 423 bp, Arabidopsis thaliana columbia
tgccgtttttgggttccagcaacagctttatcatcctcatcatatcacgacagattcttcttcttcttctcttcccaaaacattccgtgaagaagatctttttaaagatcctaattttctagatcaagaacccggttcaagatcacctaaaccgggatccgaagctcctgatcaagatccgggttcgacccggtcaagaacacaaaatatgataccgccgatgtgggcactagcgccaacgccagcctccacaaacggaggtagtgctttttggatgttaccagtcggaggaggaggaggtccggctaacgttcaggatccatcacagcacatgtgggcgtttaatccgggtcattaccgggtcgaatcgggtcggttcagctagggtctatgttagtgggaggtaacagttagggttaggtg

SEQ ID NO: 46315 - DNA, 573 bp, Arabidopsis thaliana columbia
cctaccagcatatccgccttgtccacctccggtgagaaggaagagatcgctactaggctttgggaagaagagggaaccaccgaagaagggatattttcagccgccggatctagacttgttcttctcggtggtagcagcctcccaagcggcaacctagttgcgcttagattgtgactcctctttgacttaatattgtcccgttggtgtgtgtgtattagattgtgactcctctgtgacttatattgtcccgttggtgtgtgtgtatatatatttagtgtttcggcttctttttttggatgtagtcatgtaggatacgcagaacaatgtttgtatgaactttatgttgaactagtttggttttgaacttttgatgttaattattccttttttgttttgtttgttttctgtcaggttgggaaaaatataagtgtttttctatatttaatatagaaatggtctttgtattatttgtagtcatggacgcgttttaagttttcataaccgctacactagttatttccctccaagaataaattgaaagctatgtgggttaatatggcataacgagggatg

SEQ ID NO: 46316 - DNA, 568 bp, Arabidopsis thaliana columbia
ggtaagttgcccaggatgcaaaagctgaaaatacaggtgcagtgaagacacagacagtctctactgacagaggaatgtttaatgaatttaatcccctgtggcacatagatataaataattaaaactcaaaactgacccatacgtgtgtatcaaataattgctgataacagtgaaactacactcaccaccagatggttccagcagtcaaagttaacccagggtaaacagttcctccaatcacacggccaagaggatacctaatatcaaataaaatgggggaaacaaaataagtacaatgctattgaagacagtaatagaccaaaatttctgatcctcaaattaccaggtcctatcatcaaaccaattccagaactcgtatattccattcttcgataagaactgaaataaacaacaaattaaataggaccgcaatctcagaaattaaaaggagaactcgcccaaagctaagattaacatcctggaaataagaaaagagagtgaacctgagtgactctataattgaagtaaggatcaactcatgaacacactttcatactttataacctga

SEQ ID NO: 46317 - DNA, 275 bp, Arabidopsis thaliana columbia
caagggcatctaatttcgactatgataatttaaataaacaagagcaagtaaataaaaaaaaagaaataattctgatgactaatgaacatttgaaaacacaattaataagtctaaagaacaaagttctttatcagttgacaagaaatttgggatcttccgctgtaaaaacagtgctcttcatcttctgtattaatccatcttcagggcttttagttcctgagcgcaaaactacagtagtagagcgagggatgaaaaaagacaacgacaggaccaca

SEQ ID NO: 46318 - DNA, 506 bp, Arabidopsis thaliana columbia
ccagtaaaagaggttgatttcaacccggattttctcaggtacatgtttgccaaaatcgattggaaggctctagtggatggtgcacgttctatggaatacaccgaacttcccgataacgcaccagacacgacgacgctggaatctgacgaaacattcctaaggaaattccaccacgcgttgctcgagcttcaccttgaggaaggctcactcgtctgcccagaaaccggtaggaagttttcggttagcaaaggaattcccaatatgcttctccacgaagatgaagtttaaattaagcattgtgttttagattgattcatcacgcaatgcattgtgtaatggatgagtcattaagctctagtactcttccaatatcataatcttgttattctactttaagtactatcttcatacactcgtagacaaagtaacttattgaagccgaaagattacctggagatgtgaacagaacatatcgagcttttggaaacagtagataacaagttgag

SEQ ID NO: 46319 - DNA, 569 bp, Arabidopsis thaliana columbia
ctttatcaaggatcatcaaagccacagggtctcctgtctctgtgtcaacagcactccgcagtttcccaaaattacattcaccgatcaatcttccaacctcatatttgccaacccaacgcctgacctttggctcactcatcactcagagttcacctcttgatcttcttcacaagctgtttcatgaaaatgtaatgtcaatgttagaattctatctccaaagaacccaacagtgcaggcaacagagtgtttcttttctcaattcacagaaactaatgcaaaagggacaaagaaactgtaaaatacgagaatacacacaaatagtactatggcgtcaaatgtgataaagacaaggcaaaaacagctgaaatccacaatgcgatggcaaagcttttcagcaacagcataaattgttgggtatgtttctcattgggccctttaattccaacataaatttctagaatcatgacgtcgatagttcatgctacaaattcatcatcgtcctcctacacatttgattatgtacaggtcatgaacaagtgaccaaattatccaatttaccgaatgattga

SEQ ID NO: 46320 - DNA, 558 bp, Arabidopsis thaliana columbia
agcttaccagtttagggaaagatagaagtgaaccctggtatcttactgagaattcaattatatcatagattcttctgaaaaacaaggaggacctgcaagatatgaaggaacttttgtggacattagatcatttatggcggaatgtgatttgtatgatttaagacattcagggaatttcttatcttggcgtggaaagagacatgatcatgttgtgcattgcaggcttgatcgtgcattgtccaatggagcgtgggctgaagattatcctgctagtagatgcatttacctttgctttgaagggtcagaccacagaccacttcttacccactttgacctgtcaaagaaaaagaaaaaaggagtgtttcgttacgataggcgtctaaaaaacaacgatgaagtcacagcccttgttcaagaggcctggaatctttatgatacagacattgtggaggaaaaaattagcagatgtcgtttggaaattgttaagtggtctagggctaagcagcaaagtagtccaaaacttattgaggaaaatcgcaaaaacttgaagaggcaatg

SEQ ID NO: 46321 - DNA, 320 bp, Arabidopsis thaliana columbia
taattgtcgttgatggaagatgtcaaattggtgacttataccgtaagctaaaacccttaaaaagataagaatgtaaggtggattgtcacccaatactattaattttaggtaagtaacaaatcatttttaaaacgaagcttccttgttggcttagggtatacgccaccaattcgatatttcatagacattgggcctttgccgaactggactcgaaaagaagtaaatgagcttatactgggccggactcgagtacgaagcccaatactaaagctgctcatcgaattatttgtgcatcgcatttgctccgacccacgatttca

SEQ ID NO: 46322 - DNA, 526 bp, Arabidopsis thaliana columbia
aataccatctctaactaacagctaaaaaacttgtacaatttttaagttaccaatcagaccgacataaaaactttgtaagtaacatacatatttataaatataagtattctttcagctaaaattgcatttataaattttaataaagtttgctttttgttggcagaaaattaaacgaataaaagtgtcaattaattcagatttcaaaaaataaaataaacaccacctcgatttcatctgaaatctaccagttccttttttttagttctccgaacgttctctcctctctgtctatcatcgaacgccgtcgctctagccgttgacttctaccagtgaccccaacgccttcaatttccgcctcgtcggataatgtaactgcttcaatttaagctcgtctcttctcacgttatctctttaatagtattatagtttcggttttggctcgaattcagtgttaagatacattatgaacattgcttctacttttggattttgaatagttcatcggagaagacaatggtgatggaag

SEQ ID NO: 46323 - DNA, 255 bp, Arabidopsis thaliana columbia
tcaggtgttctctaaggcaataatacactagttctcaaaacatagatcaatgatcctatataactgaaataatcaacgacagatgcgtagaattcatgaatcactgagattcaagtaaagacagccaatggtaatgaaactcaaacgaacacaattgcacacacaaatcagtagagaatagagctaatcaacacacattggcactaagcatagagcttcattggagatgaacccagttccccccctgagacactc

SEQ ID NO: 46324 - DNA, 513 bp, Arabidopsis thaliana columbia
  unsure (1)..(513): unsure at all n locations
gtaattagtatataaagttatatttaaaaatagtgtattaatcataaaaacaaaatactaaaaaaaaaaatcaaattcaacagaaataaatagcacattaataataaaatcagaataattttattaaatcaaattcaacagcaatatgtcaccccaaaaactatatacttattaatttcaatcagtttcattgtcatttacctaattagtttaaaatatatagaaaataataaacgtgtaatgtcaagactgattcctcaaaaaaaaaaacccttactgaatctattacacatcaattattctgtaacagaaagaaaaaaaaatcattaactaattaccataaactccattagaaactgatatctttgaaattagttgactcgtaaaaagggcaagctgcattattaagaaaccanaaacataattctctttctctgttccctcgagtccataattccttttttgattttacttttctaagccaaatttattgctctgacgactttgtttgtg

SEQ ID NO: 46325 - DNA, 1017 bp, Arabidopsis thaliana
tgaggccaatggagaaggaggaaatgatggatgtaatgacaatcatagctggaactgtggttttgaaggtacaattaaaagagtctcgcttcacaatattcaagcattgatcgtttctctgtataatattcttattacagcattcaagtttaataatctgtttattgacaggggaaactggtgatgctcacatcaaatctttacgtactcggcaaatgaagaactttcatttagctttgatgatttctcaggtgcgtatttgccaacatacactcgtttaaatactgtctaaaattctaaatgcatatgaaaccgatggtgatcaatgatcagggaacaccaatgatgctaatgggagacgaatatggacatacacggtatggtaacaacaatagctacggacatgatacctcccttaacaatttccagtggaaagaggcaagtcttacgcctcgcgttttgtcttccctgtttactacggattcctccatgaactgaaatcattttttcttattaaatccagctcgacgcaaagaagcagaaccatttcaggtttttctcggaggtgatcaagttccgacattcacaccatgtactcaagcatgaaaatttcctcacccaagtaactaacttcctcttggtttcatctattccttggatttttgagtgctactctaattttcaatgattgtctaaagggtgagattacatggcatgaagataattgggacaacagtgagagcaagttcctagctttcacgtaagacacaaaagtcccaaagtttcttacctaactgtgttatagtactctacagagttatcagatttcagattaataagtgactcttcttgcagtctccatgacggtataggtggccgtgacatctatgtggcattcaacgcccacgactactttgtcaaggctctgattccacagccaccaccgggaaaacaatggttccgtgtggtcagtctttctttcttttgtcttctttggttctctaattctatgactga

SEQ ID NO: 46326 - DNA, 594 bp, Arabidopsis thaliana columbia
aatgcttaattttatctaggttatcaataataaattaattattaaatattaaccaatcgttggacgaaacaaaagcgcaattaaagattgtatgaataatatataattatctaaaaagcaaaataaaagaatagcaaatagaagattctcagattgatttctaattaatttttttttcggccaatcgaaacaaacatcccacaataaaagcgtgcttagttactagaagcattctctaaagaatcttccttctatatatccttaaaacgctctctcacttgccttacgtgaaccctaatttctatttatttagctaaataaaagactttagagttttttagttttgtattctgtctttagaactccctaagccaacaaaataaaatactattagcaattgttctccttctcgattcaacttcaacaaatacttccttaattagtggaagagcaaatatttgatttcctttcgattgattcagctttaatccttagttatctgagagtaaagcgtttatagatcgatcattgttggggatggataatcaagaggtttctatggatgttgaaaccgcgacgcgaagaccacgatga

SEQ ID NO: 46327 - DNA, 627 bp, Arabidopsis thaliana columbia
  unsure (1)..(627): unsure at all n locations
nnnnnnnnnnnnnnnnnnnnnnctaaagcttcagctccagctccagcccacatggctacacactactactacgaaacacttcaatatctttcgcagacacttctttatccctcttatgcggactcccgcgagctcctagcgacgtccactatgatcagcacgtacgagatgtttgacgccgacgctgacagcgactcgacgtcgagcggggactgggagcgacacctgcgcggctctttctggatccagcgatctcaggacaatgatggcgagtctgttgatggactgaggcgggctgtatggtgggcatggctgcggcaggatctctgggcggctttccgggcgggacggccaacccttactatatggcgtgcgaagaagaagctcgaggagcttgactcggatgaactggcaacaagaataatttacatctgcgccaagtgcgtagaatatgccgcctcggggaaagcgccaaaccaggatcaggatccaagagcaaggattgagcagggcgaccgactgctaagtgcgctcgaagactggcatcgtgtcctcccgcctcattccagccggtcgcggtcgctgccatggatccgcaagtggaaacgtcgagcatcgagcatgatc

SEQ ID NO: 46328 - DNA, 564 bp, Arabidopsis thaliana columbia
acgacagaacttccacctgaataaccttgctttccatctgatgtgatctttgcaattggttcataaacaccatcatgggaacttgacgcagcatactaggagcaagaggactgctaggggaagcagattcaccagtgtttgtggtgagattattatcaaaaagcggaacaactgcccaagcaaaagactctcggtaaggcataatgcgagaccagacctgcaacttttgcttttccctctcagttaagtgcacctgattcacataaatagggtaattactaattgttatatcaagatccagctatcaccatgactactctaaaatatatatcaaaacaaagagtaaagacagatgatatatgccattataagtcacaggctatctccaagttactccaaataaatgttgaaagacacaatctctaagaccaaggcattcacatgagcaagagactctagagacagtaagggaaaattcaggattttggaaattacaggctctttacgggaatagacagatgatgtacgcctccttcctcagttgctgttttttctaattgaata

SEQ ID NO: 46329 - DNA, 562 bp, Arabidopsis thaliana columbia
  unsure (1)..(562): unsure at all n locations
nnnnnnnnnnnnnnnnnnnnnnnctaaagacgataggcataatatctagcagctcccgaccagtctactgtagtctcgaagggccttttccccttcctgttcttaacattggagaaccggtccgttgtgggcctgacggctaagggtcattaatgtgtcatatcctccaaagggaaaaattgatcaatcatagcggcgcagagttctcaggggttggagttggacatgacaagatctgcataccaggtgctctgcaaatggaaaaaagaaataatgctcgcctcagtatatggaggctacggtacatataccgattgtgcctggtaacttgcacacgtttgagcaaacagcccttctacttcatcctcctcccgcctgtttctttgtgtttttgtaactgacagatttcccaactgactccagagacggcttaaagacgagtatcaggtgaaggtctcagaatgcggttccactctggggtttagggctcgcttccctggcagccggtgtctcggcgcagacaatgccgcagtgtgccgtatgattagagccagagagagag

SEQ ID NO: 46330 - DNA, 933 bp, Arabidopsis thaliana columbia
gttcataccttgatctaatattaaacattcgattttctaattttcttttgttaaccttcattcacaaaatatattatcgtgatttaataataatttatattacaccttaattaatatataagtaactcgactttgatctcaatttatttttttcatattcagaggaaaggtaattacaataaacatctgcaatattttcacacgtataatgtaaaatctaattcacaatatatataaaaaataaaataaaaaattggacatcaatatcaaaaaagactccacaatattttttccgataccgtcggagacattagcaaatcttctttcactctctcgtctttgttttactgtttataatcttcttttaataatggtggttagagatatactcttgaaactttttatagtctcttctcagtcggtccccctttcaactggataccgatgaatcttgctccaccttaagattggcaaaatcactcaactccaaacccggtttaacacttcaatctgagtttaatctctcacatgcacctagatccatgaaggctagttgcttcgaaccaacgacctcaccaaaattcagctttgcttgaattagtggttaaaatgacaacgaaaggattaacataatccatcatgcatcctctatcactaatcccttagtcactcttcccaagaggaaccgcatctcgtcgagcttgattgctatgatgccacaacctctaatgataccccaatcaattttgatcattagatcaccgccacccagccgccacagcctaaacatcattttccgagccaacaaagagaaactagggtttgtgctattgtgcgtttccaatttagatccattttggttcatttcttggcccaacttcaaaagtgacggcccatacttttcatcaaataggccaaatattaatctgtata

SEQ ID NO: 46331 - DNA, 589 bp, Arabidopsis thaliana columbia
aagcaagctcttgacatgtgaacatgaatgcagtcaatgttgtgttcatgtgaaagttacttgatttcagcttggatatgcaggcaacaattaaatggagaggaaagatctgcgaggtgatgagtttatccaaaaagacagaggatatcttggtcacatgtgttcaaggaatcttggaattcatttaacaaagtttttatatggaggaagctttagcaagtcgctcttgaggctgaaaaggaaacgccataaagttcttaagagaaagtattatgaattggtggacaaaggatgtcttcaaagatttcagatttgggtcgaatctttctaacccagaagggctgatgcagcgtatctcaaagacgaacgtgttgttcgtcccgtttgggctggctcgttgtttgggttttgtttctcatgggcttcatgtttatttagccttttagtacttgtattcgtttgcttctcttttatgttagtttttttttttatctttctcttatttgaaaagacgtaatttagtattgtaattagttttgattattgattaaagagttttaaagagtgttttgtgtaaacctataaaaaa

SEQ ID NO: 46332 - DNA, 589 bp, Arabidopsis thaliana
  unsure (1)..(589): unsure at all n locations
aggtttctagttgtgagcccgcagttccaccagcccgcgaagaacccgcagacgcgaccatacttcccagcagtaatagaagcccagtgatagactagataagcaaatcagccaaagcgaaagaacgcagcggagangtgaatcataccaccaccagcagacggcattcctgacgccagttcagcaattgatgcagccaccatccagtagcagaccgagacggcgataaattcgtaaataactccagacgggcctccattagaaagagcagtcgctatacttcctccctgggcaatccatgtgtttccagtcgtgatggcaagagcacagatactcagcagaccgtaattgcgttggagctcttgacggtggccggacgcattcacaggcacttccaccgaagaaccttgttcctccttggctgagtcgaccgcgggcatcttttctgctgcctcagccattattgggagggtgagaaacgaacgaaatcgaacggaataagatcagaaacgaacgtggttcgggacctgataagagtcggttcccggtggcgtaaggtatgattcaatgaattctgtaggggatggga

SEQ ID NO: 46333 - DNA, 477 bp, Arabidopsis thaliana columbia
tgatacggtctagactgcaaatgcaggtttgtgcggaatggggtggcttttcaaaacttagaacaatcgagtcttccaccatggagctgcaacacgcacacactcacctcggctttagctatgaaatcagtgttgatcgcagcgactagaatggaattgacctccatcaacgttttctccgactctcaagtctttatatctctgctaaatacaaagacctctacgaacaatctacaagggattctccacgatattgcctttcttagtcgttttttttttcatatcaagttctcttttgtttcctgcaagtctaatcggttagctaacgttttggctaaaactgcactctctacttgtctgctacttcaagtttgttcttctatcaatataactagtttgcccaaaaagaacagcaataccataacagttcttatgttatgtaattgttgtatgcaattttcatttccaaaattttgg

SEQ ID NO: 46334 - DNA, 565 bp, Arabidopsis thaliana columbia
  unsure (1)..(565): unsure at all n locations
nnnnnnnnnnnnnnnnnnnnnnctaaagttgtactggattgtcgatgccagcgacgagtcagaatcggcaaagactgtgcttgagtacatatccagaatacggctggtcatcccttccctaaaagtattgttcactagcagggagtctgtcatcttcccggccgaccagaaaattgcgactttctccgcgtcacagagggcaaaggatctgttggcgataattctttggacattagaatctatcttgagcggatgatgcatgaaatgggtggtaaacaagagttgaaagacactgtgatgcaggcaattctgcgccgggcacaagggaattttctttgggtccggttggttgtaaaagaaatcctcagttgccatacagaggaagggatcgagacggccttgcaaagcatgcccaaagatatgaatcaattgtacgaacgcatggagtgggtggttttatcagcaccccgtgctgaagacaaggagatcgctcagatgatccttcgatgggttgtttgctcagtttcccatgactacgaagttttgaacaggcttgaacaagaaa

SEQ ID NO: 46335 - DNA, 507 bp, Arabidopsis thaliana columbia
tatatatatatattgtttaaatggttggtctatattatagtgttccgaccgtcttattcagtagacatctacgtcttctccaaggcctatgaactctatccctgtctcacggctgaccgccatgtttaggaggttttaaatatttttttatcgatcctataaattatcacatatttttttttgtgttttgttttcgctcacacggttttgacgattacttcctggaaggtcatctatcttgatatttttccagcttaaacacgtttaattgtggaattatctcaggacatttgactaaaaagataagtacactttgatgacatagatggctaagtcaattattttaaagactctctccatacacgaccatattctaaaaccagggtattatagttcacctctactaactaatcgcaatgtcttcgttgcgtaccaagaccgttactcttgacagtgagagtcttcttgattctacattcgtctcgatttggctctgatatcacttgt

SEQ ID NO: 46336 - DNA, 497 bp, Arabidopsis thaliana columbia
tagtagccgccagtgtgctctaaagattaatggattatctccaaagtttctcactcgtgacaaaatgggagaatcacatctgtgtggctttctgcagattaccctttcaggacaggagaacgataatatgtaaagccccttcgtaatctccaatggcattcctcaaacataacatactgatggtgtggctgttcgtcccagacaactcattacttaacacttcagtaaagggctacaatcaagcctgatactgctggatggggtacatatccgcatttctcaaacgcgccggccattatctgtttgaacagcgagttgtcgagcttcattaaaacaggctcattgcgatggtactgaacgacgtttgcaccggctttcagaccccgctggaataaagacggcgaacgtggatcgacagcctcatctaaggcattagacgagcctaactcgttcaacgaagccttcgggaaattggatcaacacatgcaggacttaag

SEQ ID NO: 46337 - DNA, 445 bp, Arabidopsis thaliana columbia
tcgacgataattaatgtttaaatctgtctcatgtgttcaatgagaacttctttccatctgtaatgtatcgattataagtggcgtatcactctcacgtgcgctgtttgtgaaacgtggcagacaattgaagaaatagagagtacaaaggagaaaaaaggagtacttaaaaggagaccttgaccactctttcatgcatccatccttcttctttcttgtcttatcagtttcttttgcttttgttagagattagtcaaactactgatattattaacattaaccatttttatggctttattttgtgaacaaacgacccacctatcccataatcactaattagacattacaactagtgtactgtcttttccattttattttttctctgtgtattatatttacattttttcttcttcttcgattagcactgggtatccgtcaagagtttcaa

SEQ ID NO: 46338 - DNA, 502 bp, Arabidopsis thaliana columbia
caatgtgactatgaagttaaatatgctgatcaaggttcatcaatagggtgcacttgttaccgatcagtttcctttaaaactcgtaaatggctcgttcatgcaacctcctgtagcattcgggtgagctaggaaatagacatgtgaatcctgagatgatgaaaatgttaaatttcttgaaagaaattttttgtgtgttgtcaggtgtggttatgatcagagttaccctagtgcacatcctccgcccgcgactgctggagttttgggacttggaagagggaaaatcggtctcttgacacagcttgtctccgcgggactaacaagaaatgtggttggacattgcttaagttctaaaggtggaggctttttgttctttggagacaatcttgttccttccattggtgtggcatggacaccattattatcacaagagtatagtttcttctttcatatttgcctcgacccgctttagagagattatattgatgtcttatagtactgatga

SEQ ID NO: 46339 - DNA, 1664 bp, Arabidopsis thaliana
ggatccccctgcgagttgttgggttccttacataggtttttcttttcttttttgttgcccagagtttggaccttaatatttatagccctaatgcttcatcgacaagtactaaagttccttgtaatagcacattatgtacaagaggtgatcgatgcgcttcccctgaaagtgattgcccataccagatccggtatctttctaatggtacctcttctactggagtcttggtggaggatgtacttcacttagtttcaaatgacaaaagttccaaagctattcccgctcgtgttacttttgggtaagtaaattcttccttacagacttccgaatatatgaaataatagaactgttttatgtttctcgaaccatctattatgttggcaagcctaaacatttgtgactttgtgttttcatcttaacaatctttctgtgctggagcagatgtggtcaagttcagaccggtgtattccatgatggtgcagctccaaatggtcttttcgggcttggcttagaagacatatcggtgcctagtgtactagcaaaagaaggaattgcagcaaactcattctcaatgtgttttgggaacgatggagctggtaggatcagttttggagataaaggtagcgtagaccaacgggaaacaccattgaacataagacaaccacagtaagcaagccgttgaatcatatcttctttatgtttaaccgaacttgtgtatctccttgaatatacttccatcttctaactactatgttgttttcctgttgaccagtcctacttacaatatcaccgtcactaaaataagcgttggaggaaataccggcgatcttgaatttgatgctgtttttgactctggaacctcgttcacttatctgactgatgcagcttacacccttatttcagaaagcgtaagcttcatctatattgtaatatgaacttggattggtattacatggcttaataaccaaacatgattttgcagtttaattctctagctctggacaaacgttatcaaacaactgattctgagttgccttttgagtactgttatgcattaaggttgcctctttactctggtcaccatcagtctgattctctctaaaaccttactaacttttttggatctatctatatgcagcccaaacaaagacagcttccagtatccagctgtgaatctgacaatgaaaggcgggactcgtatcccgtttatcacccgttagtagtaatccccatgaaggttagttaggcctctgttatattacagcgcacctctgtacagtctctgctattacttaagctctctcgtattgataatttcaggacacagatgtctactgtttagccattatgaagatagaagacattagcatcattggacgtaagtatcagttttggaaaactcaaccaaaaaatgttgtctcactacacttcaaatgcaagatttttatcggaattcttccttgttacaatttgcagagaacttcatgactggctatcgcgttgtctttgatcgtgagaaactgattctggggtggaaagaatctgattgtgagttccttatcacctgttcttccctgtagagcatagtttgatcaagaacactacgatcctaatcttctttctaatctgactttatattcatggctaaaggttacccggtgaga

SEQ ID NO: 46340 - DNA, 574 bp, Arabidopsis thaliana columbia
ccaacataaactgtctccggaagataggctgagagatctatagccctagaaaacactaagttcctctgttcaaacacatccaagtttcttgagacataaaccgatagattcttaccatcataccgcacatgtgcgtgtaagtcaagtccggaatcgatcttgatccctcgaccgctcaaggattcttgaacaaccgaattgatgttgttcacatttagagccacatggtttccatcaagatcatccgaatgactcttccttgtgtcgaactcaaccgaaacgatcctcgactcattattcctatttgttctttcgttgaccataccgagccacatacctgagctgttctgaggagcagtctcctcgggtgtgagaacgaaagctaagccttcgcctccgggatcggttttgttagagatgttaataacgaaagtggtgttgaaagtagcactcttgtgtttgctccatagcctgaaagcgtttttgtagagtgctctgcctgcttggtttgcgatagtgcaccaggtccacagtaacatcaggagtccttggattgcccaaagcaatgtatgag

SEQ ID NO: 46341 - DNA, 802 bp, Arabidopsis thaliana columbia
ccgccctcagcctcatcctatcagtgtttacattggaaatttcagccacaatttcactgatatcttagtctagttgtattaagaagaactgaagctgaattaggcctaataagttgcattggttcctgcaattaacctaaaaccctaaattcaagcgagaagaactccagaaaccattcgtattccaaggtgtaattgaagaacagtggcagtgaaaaatacgaaaactgaaacaatcaatagtgacgaaacgaaggagataaagatggagagagttacggaagcgtagttaggctgacgacgattgcattcatgttcggattcgatctcttcttcctcggaattatctccgaacagattaagcatcatctcggatctcttttctcctttaaccatcttcgcctcacttactcaaaagtcactgcctcttagctggtgacggcggctcgtgatctgagctccgacgaagggttcactgttatcggcctttgttgaagaagctatttttttttcatctctacctcgcgattttatggcatcagaattattattattaaaaacaattgttacaacttacaaagaaaaggaaattttcatcgatatatcttttttaacgcattaccggattattaaaaatcattttttttacgtgtaacgacgactagagagggaaaaaagatgggattttatgggcttttttgagattggaattcaatatttttggccccaaattttgggttatggatccagtttctttgtgatagtgagcttgtgtttgcattggccctatgtatatgaatga

SEQ ID NO: 46342 - DNA, 1257 bp, Arabidopsis thaliana columbia
gccgcttctcccgccggcgttatctccaccgtcttcttctttcatctccaattccaaaagccgtcgtttatctcctctcactccccattccttttctacaaccccatcgaagctcaagccaccacgaacaccgtcgtcgctttctggattttactctccgggaccttctttccgatcatcgccgcgtgctttctcggaacggtggcagctccaccgccctaaccggattcgacccgaatccgaaccagaaccaagttccgatttttctgttgccgggttcgggtgtttcccgtcgcctaagtttaggttgaggaaagttaagagcggtggtagtcggagaaaatccgggtcgagatcggagaatgattattattgctccgacatggagacgatgtcgccgtggactgtttcaagccgtagatcggtttctccgagatgggaatcacccaagtcgtcgttttcttctctccgattctcgccacgattcgccaacgaagctgaatgggttgggtttggactcttttgagcacattttcaatgaaatggctcgcgatcggttctttagccatccgaaccaacggaagcctcttgaatcgcgcaaatcaaattaaagcaaatgttgggctaaaatgggatttttcaaaagtttagggtcctatatctaatgtgctttagagttttcacatctgtgtaatataaatttgtggatctgtggatgtctaaagacaattcacattttgaattttgaagttttgagtgtggggaaaaaagattgtaagatatgaaaagtaaaattagtaaatgaatttagaaatcacactaaaaagttaacatttttttgctacatacaacttcttaaactatggaaaaagggtcccaataataaaatacaaaactactatcaatctaattaaatattcaattttccaattaagtatatggccgaatcagtcaatttaaaagtatagggctcaatggaaatttaaaaaacagtttggggttcctgggtaaaactttaaaaagcgatcctgagttgacgtcactgttaaagctttcagctttgtaatgaaaactcaaagtaggaggacaccatgaaaccgtcgcaaccgctatgtaaccgcattgttgatcagcttattactgccatgattcagaaccgtccattcgacgccgttctcgcttcttcaacggtggcgaaaccatggactcagcagctcgtctccgatgtcctccattctatccccagattcttcttta

SEQ ID NO: 46343 - DNA, 586 bp, Arabidopsis thaliana columbia
taaaatagttaatattttaataactatcattacaataccacacatcaataatgcaatgaaatcttacatgcatatatatgattctatatatttaggtgacaaaaagaatagatagtggatatgattggaagagatggaaatggagaacgtccaaagacgtttttaagaacggagcttacttcgtgccttctggctacggaaccgtcacgccgttgtacggaagagcagagcgctttccggtgtctcacggctctctcgtccctttgcttacttcatccgccggtcctctccattgctattccggcagaatttgctaactaattaattattattcacgtatatatacatatgtgattatatataatgtttcataaaatgtaacgttttgataattttgtttctttccttggaaacgacgaggcggaattcctgttcctgaggtgtgttttgtgaattattcagtacccgggacggaattcaagttatcttggaggatttatatacttttcgttttactttcaagatttgttttgtataaagatttgaagttgaccaatgtgaagagtatagtaatttggagaagttt

SEQ ID NO: 46344 - DNA, 567 bp, Arabidopsis thaliana columbia
taatggaatatattagttgggaaaaaactgaatatgttctttgtacatgtgcatgtgtgtgcattgtatccaaacagtaactttgacaggtaatttccccagaactagaatcttcagacttttacttgttcggtatttggtttcaccataataccatatagtcgttgatatttggtaacaattgtcttcaaagctctagatatcatttcacaagagaaatttccgagttacctcttctgcttaacagtattaaaggcatccgctacttgcttctcctctttcctggccgcttcaaactcctggctaacttgtttttctttctcttgtatagcctcatactggtcaagcgctctcaaatttggagccgttctttcaatctcggatgttttagattctattttctgcctaaattctgcctccactttttcacgagcagatggtctccgttcttggagataagctctacccagctcactaaagtcaaactgtggcccatctgaatcatcttcctccatagcatctgataagacaggaagggtaatatgttcgagctcacacttctcagtt

SEQ ID NO: 46345 - DNA, 535 bp, Arabidopsis thaliana
ccgcagttttcttcctgtatctcttgaatttggagattattagagttcctcagattccgtgatggcgtagagtttatctcctgagtaactgacattactgcagcatcaaacgagaggacatctttaccatcatacataggactgctgtaactctttgccaccggttttggtgattgccttttgctggtagaccaaaacggtggcaatggagaggcgattttatggtggttcaagtgacccgcactgtcagacccgagcggactttgacccaaatcgatccaaaacgaattatcggatgactcatcttcactgaaagctggacttttcatcaattctccaaccgaaacacttgcattttcttcaaatatggtactactagtcccatctctatcagaggcattatcttctaagagatctgtctcaaacacatccctcacttgagctgaagtgtatgcaccatagaataccggcatctgagcggctctacgagcagcatctgtcgtagccggtttatcacatttgtacaatgtcatga

SEQ ID NO: 46346 - DNA, 533 bp, Arabidopsis thaliana columbia
tagttactcaagattgatgtaattgtggctccacttagaatctcatattgaactctctggtttgtgctctactgtatgggtctaattttttgaaagccccaattttcattgcctaacctgcatatttggtggaaaataattatatataaaactggacaagtttgacataaatcacatatcaacggaaactatggaagtgttttgtttatttttataagtgatggatctgggaaacagtatcagattttttctctgaaatactaaaagctgatattaaaaataaataaaaaatagtatatgaaaagatggtaaaacatgcaaaagctaatcaaaggaccaaaaagaagacatgtgaccaccatatcccccttttacatatttctatggtagaaagataaatactaatctatgctatataataatacatatatatcctctcaaacttgaacaagcatatatggaagattataaacagtggtttctactagggaattattgttgtatacttgtatcagaattccaaagtgtattgt

SEQ ID NO: 46347 - DNA, 562 bp, Arabidopsis thaliana columbia
gaagagatattcagaattctttgccatgttttcaggaaaatattggcgtgggttctgcagaaagatcatattcatctcgtagcatgttgcaatacaatttactggcaaagaaccttttggcactagaggaaacgtttgttgccttggattctgtaagaatggaaagagatattatgttgcaaatggggaagttgggggctgctgagttatttaaaacctgtctatctaggtatcgtggttcctcaatcacgtcgtgcttatctgacacaactgagttggtggatactacgccgaatcaacaagtctttgtatcctcgaggagaaaagtaaaaaagaaagcaaggaggtcgagtgtgacagctgagaatggtgatcagagttctctgccaatcggtttaagaactacatggaacaatattgatgtccctagagtgagaagaccaccaaaatatagaaagaaaagagagaggatctctagaaacgagactgagatgtcacaggagtcaaggttcagtgtgaaatcttcctgtaacttttttcctttcctttgttcacttttgtt

SEQ ID NO: 46348 - DNA, 346 bp, Arabidopsis thaliana columbia
tactaagaacaatgattaagggagggtatcatcattaaaagagtcattacttggtaaacttcgtgagggaagaagtactcttatcgtcgtaactattggtgaagaagcaagtgtgagtgaatcatttataactgtcatacttaaagctgggacatctgttatcggtataaactgtgcacatgggtatcgaagtctttggtgtgagatcgtccaaagagtgagaagagcttctcagatgatagagatgcaatgtcgcgttcatatggacttagcaggacgcgaactcattactggtaccttaaaacctggtccgtgtgtgatgcagatttcaccacaggaagatgct

SEQ ID NO: 46349 - DNA, 359 bp, Arabidopsis thaliana columbia
ttgtggtgttggccacaacaaaacctcctaccctaatgctatataaaccatcaactaatgctatggggtgttaaacggtgttatgaggaaactttctggtttgggcataataatggatgttcccgcatatgttgcggaaccgggtttgatgacatctactaatgcaggctacactacattattcgatatagtttggtatgtccgactttggtgtataaccaactataaggattgttatgtactccccgtcatccgtgtatatttgtgttggtatctacaatcccgatgtaattacgtatgccttgtaacaccgtcgtgtgaaatttagacatatgaaacctcgcagttagtgtgagtac

SEQ ID NO: 46350 - DNA, 513 bp, Arabidopsis thaliana columbia
tattgtctgcaaaaccaatagttgcaatgaaaattttgcgttcggaataatttaacatttttaaactcaccacgaccgagaaacttctaaatacatttgattggaccatgattgcatttgaacgcaaatgttatactaccctaaatcctagggtcactagtaaatatagctagatcttatctctttattttttaagtgaaatcgtgatatgtaaacattagttgcaatatgtgagcacataaagatgggaaagttgttcttccaaagatcacggcgcaagtaatgtaaactatagcatcaccataataggagtcaacttgcaatttgctctcatttttcagttagacataactaactccgaaacttttctttataaatacccttctctccatcttcacttcttcatcacaacacaacacaaacaaaccatttacataaaacaaaaacaatttaatacttcttagtgtgtaaatgtgtgattctttcatcaataacaaaatgacatcgatatta

SEQ ID NO: 46351 - DNA, 434 bp, Arabidopsis thaliana columbia
gtttctatcgtttgcctccagtttaaggatcgtagacattataccaaatccccaatctggatcgtcgaacatggctaaaaactgattaaatgtcactgtcactgaggattcagcttcttcttctccgtgaacttctaacatttcactcattccatgtgatggaatgtaaatagctctcaacagtttaatgtatttgactgcatccgtttttgtaatctgagagcttccttcgtttacaggtctccaaagaagcgcatcaatagcaactcttttccttttgtcggaatgtccaccgcataaaggagcaatcacagcgtaaaacatacccagatcaactcttcccgaccctgaatcatcgagaagcgcgaggattttctcgtttatagccttgatggttccttgaaaagtgtcaggtttcaaggagatgagcagac

SEQ ID NO: 46352 - DNA, 506 bp, Arabidopsis thaliana columbia
gatttcaagttctggtctagtgtgaagtctttgtacatccgtgtcttcaggaatcatatgctttctgagttgacaagttggcatttctctaaacctgaatgttttgaatcaacgcagggacaaatatcgggagaaacaaagacagcaaaacttacaagtaaggaaagagaaacggcaagaagagaaaaaagagaaaggcaagagaaaaagggttgatgcttctgctagtaatgatcctaagaaagcgtcgagaaagttaacggggaaactaagactaactattccaactgctgaagaatgaggaagtgatggatcgaagatataaagttgatgataaaagtaaagaaagggttaattaaagaagatgaatatgaaagacttacaggagatgatgatttattctgatgagaagaacaaaacctgcatgctgagattggctaagcttagtgtcttctactctcatatcatatgtgattctgttaattatttattttttttttgggtga

SEQ ID NO: 46353 - DNA, 572 bp, Arabidopsis thaliana columbia
gactactaaacttgagcatgaccaagaagattataggccataatcatcaaagatggaattttgaacatacccattgaattaaattagtaatcaatcattactagaagacacaaaagtttcaatttcatcaagaacagagctaaacattggcctatctttaggacgaacatacaaaacgccatcgttttcaccaaattcacacatcccacatttacctttcttctcccacaatctctcaccaaatccaaagtgagcaaaataagcctcagccaagacgacaccgtttgattcttcttcttcatcatcttcctcaataacttctattggtaatctctcgtagtgattaactttgataccttccaattcatcaagacgtacaagcccacgttttgaaaccgaataaagctcgcctcggatcttttgacccgacccggatttgttgattaagtaagggatccatagagacctgtaacgagcgggtattgtaccgggtcgtgcgttgtcctatgtaaacggcgtcgtttgttgagatcagatcttctaggaggaaatggtttcgatggtttcttttt

SEQ ID NO: 46354 - DNA, 368 bp, Arabidopsis thaliana columbia
taaattttaaataattcaatgaactatataccacgagtgagattctaaattattggaattagaacaataataatttattttcttggattttataacactaatcatttagctaacgagataatatagacagatttatatggcatgacgagttttagacaattcttattaaacaaacgtatatcacagatgaaatcataagattaacaatcaaaatacaatcatacaaccttaaacacaaaaacatacaatattaacaaaacacatataacttaaaattttaaaaaatacctataaaaaatcgacatgccgtatactgcggataaaatattcaaaattttaaaatctaccatacattgttacttaaaaaa

SEQ ID NO: 46355 - DNA, 562 bp, Arabidopsis thaliana columbia
tccattgaaaatatcctcaaattttatttttctattgaaaataaattgggtatacaaataaaagagaaatcaaaacaaaggccatgtgaaagataaaaatgatagacatttaaaccatccttttaggctgtttaataagtgccaactagacttaaaacaactgcttatactttggaatccaataattagacacacgtaaatagaatttagctttgcatgtgaaactaaaaaaaataacactatgttgtcccgacatactaaaagtcaaagtcagcgttacgaaaactctagatgagaaagagagtttcttcgacgtgtatttcacgagttaaaattaaacacgtgtcataagctctcttgttccattgtacgttgttgagttcttcttcttcgtcttccatctctctaccaactccacgatcaacgaaaccaaagatctctcttcaaagcttccaccatgtatctccgatcactcaatctctgtacaatactactcttcctagcgatttcacacaagtttctcaatacatcacttcgaattgaatctggtcgacaaaatgta

SEQ ID NO: 46356 - DNA, 421 bp, Arabidopsis thaliana columbia
tgactctcactaatttttgatgtttttaaatacactagatgataaattattttgggttaataaattggtagaacaaaaaaaatattcaatcaacttggtacaaataaaattgtctatgttttaaatttggatggtgacacaacaacatactaatacaaaccattactgtacatatgttcgtaaggtctaggtggaaatcaagcaataaacctaattcgaatatagtatagtcttagcagtttgtactcgagctgtaattttggttaaaccaaaaacatgaatccttatcaattggacagtaagaattcttgaagttaaaagagagattttagtgttttcttttctttttagtttttaggataaatgaacatgaaatgtgggaaaagagcaatccagtatgattggctacacatgttggtct

SEQ ID NO: 46357 - DNA, 520 bp, Arabidopsis thaliana columbia
gggtaccgagctatgattcagatatgatattaatggttattattttgttaaaaataatataatcaatactaaaataaaaataaaatattattgttatagttttaaagtgtaagatatcgtgcaacctcttttcacaaatagaatgtataatttcaagtaacacataaatagaatgaaacaaaattggttcatgcatggagtctagttctattttccaccacctccaagtaattttgaatttgaaaattttgtttttattttgtttttaactagaaaaatttgttttaaactagtagctgaatcattgagaaaaaaatgctaaaaccctattgaggtaggttctctatcttctctctcttcaatttttcagatgcgaggccgactaacttattttcgtctgaattttttccgattatcaaatcctatttagggggctctcttccaacatgcactagatcgtttgtagtatttcgttgacttttatctgatatcaatgtgaccttcaaagtcaagatgactg

SEQ ID NO: 46358 - DNA, 493 bp, Arabidopsis thaliana columbia
aacggccgccagtgtgctcttcacccaaaataccaagatcaatatcagtagttgttttgtcaattgctccaaggcgctgggatatggtcattgatctagaagagatgcgtttttttctccgttttactctcctctttttgtcagaatgacccatatcatcttttccttcattgtcagcaagaccagttaaattgtcactctcaaattttctacttctaccaaggccacctgataatcttgatgaattgtcagaatcttgattgtccgtcatatgagtcaatgaagacacctgtttgctattatgggctacgctcacatcgtgcgacccacatatcgtcccagacacattcttgctcacctcatttgaatcaagactactctgcaaaagactatttttctccaactccatgctggcaacaatagaatcagaagacacagctacgtgtcctgctgcactagatgtcctgcttccccaatttttcaagaaaatagt

SEQ ID NO: 46359 - DNA, 398 bp, Arabidopsis thaliana columbia
tactcgtaatgactttacttgtagtcatatgcaattataaaagtaagtactaaagaaaaaaaaatgctaactcgtgaagatggaacaataaaattaaactattcctcccaagtattggtcagcacttacttgtgacatcttaggcaacaatttcacggcaagatggggagtcacttcttcccttactctccgcctcagctactccaagtcttcacttgttcgtgttgcgatatgtgtttcagcttacaacctacagtaattggtgagagaggaatggacgaaggcacaaagatacttcaacaccagcctccaaactcacccgccactccgccagcctctaaactcacccgcttgattgacaaaagtgttagaaattggctgaatattttagctctgtc

SEQ ID NO: 46360 - DNA, 477 bp, Arabidopsis thaliana columbia
cgcaatcgcccgcgtttgaccattaaaatgtccccacactctttctatgacgctacatgcattagaacttaatcaatcttttaaatattgatgataagaaactacactacccatagtccatagacataaagaagctacacgcgacccattaattcaaatcacacatcctaataccagatcaattaagcagtcttcacacagaaactgaggcagccaaagtggtccagaggcatagctcaagtgtgcataatttatcctcttattaataaactcacaaagacatagtaacaattactaaccttcatggatcttacatttcagcttatcatctaaagattctatactagttttagacatgtttcttcgagtcatcatgggtgtaacagtttcagtactaaaacgctatgaggcattgaaacactctgatcaagcaaacttatttagatgaaaatgtacatgcttttcattgaacatgcc

SEQ ID NO: 46361 - DNA, 547 bp, Arabidopsis thaliana columbia
tgcttatagagttctctttgatgatgtaagttaagcttatttttattttattttgggcaagataagttaagcttatatgtttgattatttttaacgtttgtcaatgttaatgtgtgaatatagaaacatcatcatatgttttgtgtttttaggactcaaatccaagactttcatgcttcggtctgatgaaaaatagtagagacggaaagagttatagcaccaacctggcgttcactcctccagagtatctcagaacaggtatatacttgaactcttgcatattagtttttattatttggattgtagctagttttcttctgacatattagtttgtgtgtttgtttctacaggtcgtgtgacaccagaaagtgtgatgtacagttatggaactctgttgcttgatcttcttagtggaaaacacattcctccaagtcatgtaagcttatgattaagatactatatctatcaatcttcaccggatcattgctgagtatatatcaaatctctttctggctaaaactttacttgttatgtgtattatttgtta

SEQ ID NO: 46362 - DNA, 478 bp, Arabidopsis thaliana columbia
ttaaaactgtttttattttgaaatatgttttagacataagtgttaatttaaagatgtaaaaataaaactgatttagcatcatgtccttttagtctgtaagttttgtgttattagttcaacattttttcatgtattgtaaatctcacatttcgttagcttttaatgtttttcacaaataattttcgaagaaaattgttataatttaaacgaaattaaatttaagtgttacattcaaaaatacgttataaacaaactgaacttaggatcccgtccttcgaatttcttttggtccattagctactgttattagttgaagaactttagaaaatctcctcatattcttaatgacttgagtcatcaatcttctctccatgatgtgatgtgacaatgcttgagaaaattgcggaaagaagacaatgaaacatatttttcactctgattgtcacacacaaaatcaatatacaaacaacattacaag

SEQ ID NO: 46363 - DNA, 460 bp, Arabidopsis thaliana columbia
tctgattccatcgcattctaacaaacccgtaaccctatcagcatcccttaacgctgttatatccggagttgttaccagaactgcttcattcgccggagtaatggcggttatgaatccggcatcgattcctgcaggacaatcgatgatgatgaaatccggtgaaccttccggtctagttttcaacgcatccacaagccattccaatgctttaccaccaaatcccatcggaagtttcgatctaggtttagatatacatagcaattcgaaattcgaccaacgcttatcacgtaccagagcttgatcgagacgacaatctccgtttataacctcgacgcaagtgtaattgactcgattctctaaccctaggaggagatcgaggttacggagaccaaggtcggcgtcaatggcgacaactgagaaaccgtaacgagcgagagagagaccgacatttgcggtggtt

SEQ ID NO: 46364 - DNA, 509 bp, Arabidopsis thaliana columbia
ctaatgaacttgaatattagtgcaacggaactctatttgctttatttttcttgggtttttaacttgttattcaagggacgcttctctgctaaaatctaacatggctgagtgaagaagagagacacaagacaaatgttaatgatgcattagctcccgaggatactcacattactcaggtaattatactagacttccacttatttatgaaactcaaaaatgtaatgttgatcttgtgttgaaccttgaggaaataatcaagaaactgtgtgtgttagtaggttagatgttggatcccgaactaatacctaaagtatcatgctccctagaagctgaagccatgttcataggactacactaagttttggaaatataggctacaagcatgtgattgtattcctcgaatctgattccaaagagatggttagagcagccctacgaatggcttcagcattcagcttaaaattgtgtcacattcagttggttgtacaagactctagtaatcatggcag

SEQ ID NO: 46365 - DNA, 503 bp, Arabidopsis thaliana columbia
ccctaataggtgaatatccgttaagggatacaggcaaagtctacagatctttccagggaagaagcttacgtgtcagtgtgtgccgtgagtagtgatttcacacagtgttgtgcagagcggcgggcgtgatcaacatgttcaactcgagtcatcctatcatatatctggtcatcagacaataagatgatgagtttgcacttcacgagataattgatggcttaacatatattatctagcagcaaagtaccttcaaagggaaggctgcgacatctccaatagcaaaaattccaggggtacttgtcctgaacaagccatcgacctgtggttgaagatgagctcttatcaaacttttaattgtatcaacatactgatgtagtttcttgtgaagttctaactctgaaaaccgattatcttggaaaataaatccggatgttttgtaataataatacctgaattcctccaattgatttgttcatggccaaagttcaaaggggccaatagca

SEQ ID NO: 46366 - DNA, 549 bp, Arabidopsis thaliana columbia
tcaaagagatgatcgaaaagattgctttcccccttgtgttcaagagaatatgtttgcgctacattcttcacacgtatgtcaagagctgaaaatatcacctacatccacagatttgcaactgtcaacaattcttcctcataacatagcaatacaaatatgttgcaatagattccctatctacaacgcactcatagaatcaataggatgatcagcaagagactaattgagacttacaattcgtttaagataaaatcaagtcagatttacacaaatttgcagctatatgtattgagttcaaaatccaagtagagatggttccaaattctaattcagcagttttcagaacatgatgagatcaaatttaaaagaagaggaccaggttttcgcattacctcgtcttcggcattgcagtgatgcttatagatggatctcaagaaccggtaccgttcacgaagcagccggagatcgacatggtgaccagtagcaaactcaagagccaatctatgaagagcttcaagctcactacatactgccttatgaaagaacaag

SEQ ID NO: 46367 - DNA, 460 bp, Arabidopsis thaliana columbia
tgtctaacactattaatttagaacagtagttctttttcggtctctatttctgagaactaacactagattttagttgagatagctactcagtgattcttctgatctcaggtctcttatgacgaagattctgttgacttcgtgtgacaagaccttcagatctttcaggcacatgactccagttcttatatgcgcactatcataacgctatcattatcgcaccgagcttacctagaagccatgcatgcgaggttaagatctagagttttttccataactctttttgtctatgtcacctaatgtgcgcaggtcagaagcggtttcgggcacgaatttcaattgttgcctggactacctctcggtctattaacgacatgagtcttttataccagatttcatatagtcacactgattatgagatcttgtgagttaagatcatgtttgtcactattaagtttcataa

SEQ ID NO: 46368 - DNA, 579 bp, Arabidopsis thaliana
  unsure (1)..(579): unsure at all n locations
nnnnnnnnnnnnnnnnnnnnnnntaaagatggatgttgataagccaggcaaagatagctatgagctgcgcaaggctggcgcggcacaaaccatcgttgccagccagcaacgatgggccttgatgacggaaacaccagacgaagaagagctggatctacagtttctcgcaagtcgaatggatacctcaaagctggatttgattctggtcgaagggtttaagcatgaagagatcgcaaagattgtgctgtttcgcgatggagccggacatcgacctgaagaattagtgatagacaggcatgttattgctgtagccagtgatgtgccgcttaatcttgatgtcgcattactggatattaatgatgttgaggggctggctgattttgtggtggagtggatgcaaaagcagaacggataagcaagagtaggctggataagacgcgccagtgctcatccgggcatttttttctgcgccaatgcaaaaaggccatccgtcaggacgtntcatgcttaatttgatgcctggcagtttatggcgggcgtcctgcccgaccctccgggccgttgcttcgcacgttcaaa

SEQ ID NO: 46369 - DNA, 572 bp, Arabidopsis thaliana columbia
  unsure (1)..(572): unsure at all n locations
aatgtacaaagaatggaaaaagaaaagagaagcaccaaacacatggaagatagacactagacagtatgaagaagaaacgacaaagagcaagaggatataaataaagtatccagcaccaatagaacatgataaaaaaaaaaggtttattcgaaagaacaatctgaacggacacaaatgcaaaccaatgcagagtatagtagcacaaagaatcagaatcttggccaaagtccctaacgtaagcaaacaaatcatagttttttaatcacttgtaatggactaagaaacaaaaatggaaacccaagtccaatgtttttcctagtgagcaagcagagagcatctccaccaaattaccagaaattccccactaacatgaacagtgatccaaatcgaaattgaagcaacgagaaaccgaacaagtgggacaaaatgtcaatgttatgaatcaattccaattccaaactcagtttcaaaatggcacaatccaatttcatgaaaaatcctttaggtcttaaaaatatgaaatcagaaaaccctaattctcaaatcgacnacaaaaatgaggtgaactgtga

SEQ ID NO: 46370 - DNA, 558 bp, Arabidopsis thaliana columbia
gtccgtgtcagcatgcttagccgcgacgatgactttgacgtctctctccaaagactcgctaccatcaaggatctcaaatgcgtgcgagcttgattttttttatttgctattttcgttatgtttttaaagcattattcagtagtatgtgaaataatatgttttaatatatcatataagagatttaatgtttgttcgaatcgttaattatacacaaagtacttgaaattctatgggagaatgagtaatgtaatcccaaacagtattcattcttccaaacaaagggaagacataaacaaatgaacacaacctgggcttttccaataacaatgcaaagttaagattcggatcctgtcttaggtttttttgcatgatttcaaggtggttctctcaaactaatatctcagcttctaagaattcatttttaactagataaattttccacataaaataaattctaaagcggctgagaacttgcatgaaataacctattggattggcagtttaatttaatttcgtttggcttctaagcttttctatcttttgtcttttaaatgtgag

SEQ ID NO: 46371 - DNA, 507 bp, Arabidopsis thaliana
ggctccaatactcccaaaaattaaaatatacataccaaagctttatctgccatcatttttctcatggaatacgcaagactgccagtaagaagtagaaaagatcagtgacaaaaagactattcaattttacagcagatccatcattttctttaaagtttgactctgaccatgtaataacctaaattctttccaactctaaaggccaaagcaattgctattaaaatatgtatatagaagacaatagacttacgtcaaggtaacagctaaaggaagcccttcaggcactgccactacaacaattgtaacctattcgacaagttgagcagaacagccagagatgtaaataagaagatgacaaccgtattagccatgctaatttcttctaaagaaacacttactgcaacagtgaagatttcaacaagatcatctagcacgtgctcaaattttgtctccctccaataaactgtgggcctccctgttcattcttcgtgtgaccggtaaagtact

SEQ ID NO: 46372 - DNA, 501 bp, Arabidopsis thaliana
ctctgtattcgttaacagattttatctcggatgaacaattctcactaggacatcgtgcgtttttggctaccattacaaaatcggttgagcctaagcatttcaaggaagctgttcaaataaaagtttggaatgatgctatgatcaaggaagttgatgctcttgaaattaacaagacgtgggatttggttgagcttcctcgcggaaaaattgcacttggaagtcagtggatttacaagacgaaatacaactcggatggtacgatagaacggtataaagctcgtctagtagtcctgggtaataatcagatcgagggagaggattacaaagaaacttccgcccctgtcgtgaaaatgactacggtttgtgctcttcttcgactcgttgctgctaatcaatgggaggtataccaaatggatgtcataatgcattctccacggagacttggaagaagaggtatacatgaaactcctccaggcttcgtcattccacccgataaagttt

SEQ ID NO: 46373 - DNA, 1104 bp, Arabidopsis thaliana
cattagcttcttcatcatattagtgaggtttccaggattactatcaggctttatgggcttcgttgttttggttaagtaggaagatttggatctgacaatggctttcgatgaaattggcttgttcgatttgaattctgcggaggatgatagatctgagtgaatcgaggaggttacggatgatctagaatcgtaggaattgtagcgagacgccattattgatggaaggttcaaaaaagattaggatctgtgaatttgaaaatgaggaagaagatgaagcagagggaatttggttttttctgtttccaatgtcccactctcttcttttcaaatttcgtattctctctgttctaaaacggacttttcatctgtattgggcctaactatgggctttaaaagtttaacggcacttttgtgtttatttgaattttgttattctgtttattcaaataactaaatactaatgagataattaatgatttgctctagaaaattagaaccagcacatatctacacttttagctttctttcatttttgtgcatttttttcctttctaatttggacttttgttacttcttcttttttcttaactgtaaaatgacatatacaaagtgaagagactttcatgttccttttttggggggtttatggacgagcattttgtatttttgtggacagtaaataatagcgaagaagttggcgttgattgaggcaggcataaaggaaaagatggaatgaataatgaagttggctttggtccatattgtagaacccaaagcctaataaccgtacactaagcccttacatacatgaaacgctgaattgtcattggtagaaaaggaaatggaagagtagtagtaaggaattatatcagttaataagagttgtaatgtgaatagaacacgtaactggactagtatgcatgtgtatgagaagttcaaatctttaactctcacaatatcgtcgaagcagattgtttaggataagatagaaactaaatgagcatttaaaatttaaagaaaaaagggaactgtagagttgctttgcaggaggggaaacattatcatgaagaatctggtctacaagaatgggaaatggacagatgt

SEQ ID NO: 46374 - DNA, 493 bp, Arabidopsis thaliana columbia
gtggtacatatatagcattaatgaatgctatactcaaggagaaagtatattaacgggacaatcattaaatttaccagaacgacaagatcccaataaaatgaaataaaaccaaaaaccaactcagatgagtaaacaaagtatcattcatcggtctcgtcttttggtcgcacgtctgaatccatcatcatcatcaaagacctctctttgttcccgtgacagatccttcttaaccaaacctcaccgacccttgtctttatttccccaattctactcctgggtttcgtaattacgttcccaggttcgagctttcttctccggagaatctgaaatcgaacaatttagtgtctttttctcagacattgtttacttctgagaaagcttaggtctttagactctcattacatgtcggaagtttcagctccggcttctttttcaggtaagatcccgaggtttttctgtctcctagttttctgtgtttattgaacttttgtgt

SEQ ID NO: 46375 - DNA, 312 bp, Arabidopsis thaliana columbia
agattttgaggcttgaatcgatgcgagacaacagcttccaatcttactgatcaatagagcctaaagcttccagaatctaaccaaggtcgaatttccatcagaatttccaaaattgatgaatgaggacaaaaaccctaaaggggaagttgtgtaagtgtcacactagtggcaaatatgagatgcattctgaagcccatgaagatcgaatcacacctaaagctagtaatatcttgctctaaaccaacttgcacaagggagttaaagagaaagggaacgcgtaccaagcacgacgaagaagcatagcaaggtcag

SEQ ID NO: 46376 - DNA, 470 bp, Arabidopsis thaliana columbia
tcccaaatacgaaagggccaaataccaaatagattatgagatggctgagggtcgtcaatgatatttttacgggcatcgttattaatcgtgtgatgggatcaatgatatatagtttttgttgtaaactatatgaaacttatttcctgagatctcaatcttgtactattatgcattctactaaactgcttttttttttttaatcatacaattaacaaaattagaattttaaaatagtgtttatgtgaattattcaaacgtgtgagtaatatactagctaggaccatgaagcgcatatattaaaaccagctacaagatctcattgttggtcggctagtcacaattttttgtccaataaattaaacttggtttttttcagctagataaactaataggatccattcacacatccaaccttaaaaaaatgaacatttttttatttgttaaagtggctgagcgactgtgtggcttcc

SEQ ID NO: 46377 - DNA, 547 bp, Arabidopsis thaliana columbia
tattccgggaacattcttcacgcaatggttacaccataccataactccttcactcaaaaagctcctaccttagcttctaatatcgatccgaaactcagattcgaggcttgaatcgattcgaaacaacagcttccaatcttactgctcaatagaaagaagatcagactatttatagcgaaagtaactgttttcacacaatcgtgcgaggaagtggaaagaatcagggtttgatgagattatctagttcactgtaattgtatctatataacaataccggagttggccgtgacggcgacgacggtgttgaaggcgaacgtgagagacgtgacgagagatttctccgatatgtgagactgccttgattcgaactctgtccctttagggattgcaaagtaattgtgacgttcgctttggttttgttcttcggttcaccgcaattcaaagttaccaattttaaccgatcaattagatcgggtccgtattagctgttgctaaaccgaaatcgtatagaacacttgttgaattgaaaaagcattgaagctgaata

SEQ ID NO: 46378 - DNA, 1068 bp, Arabidopsis thaliana
ctgataaagatgtgaattgacttcagcacaagtttgatgcaaagtctcaagaggtgcaccactaagctcgaactgacccccaggttcaagtgaaatgctttgctttccctggtcaacaaaaggacagaacgagttatctacagcaaaaaaaaaaaaaagactgaaaccttataatataccgatcattgtgttgtatatgaagctaacatgttctacaggctgaaaatgtatataaataataaacggctcaaaagatgaaacacaggagaatgttaacctgcttcagaccaatgatcttgtcaccttccattactttttcccattcaaatctttcagcgataccattaagaagctcggctatttgatcatacttcatagggcgcaaagtattgacctcaaaaccaaatttctcatgttctgtacctattctgaaaactcacaatgttaagttagcaaaacagaatatttctccaatagacaaacaatctggatgaattcaaacaataccaacaccgtaaaagagcacaaacaaagaaatatgtcacaattacaaacactaagtagcattttaacagaacatataagcatcaaactgtacctatatttgtcctttgttttgcatccagaggcaagataggcaatgagatcctctctcgtcaacggctcagttgcaactacagcctcttccgttggaggacttgccgcaacaatcaattgatgccctctcttactcctcttaacagaatggagaagcattgatttggtagatagactcctagagtaggagctaccaaaagcttctttcatcctcaaaacatccaaattcctcacgccacccgaatcaacagctttagttccagcctgtgaacaaactctggaaggaacgacagtgtatgatcctcctgcttgagacaagagcgccatggtatatatagctcctgcaattataacaattcatcataagctatgagaaatcacaaataactgcatttttctcaattctaataacatatatcacataattagaatcagcagctaccgctccagcaacctttagagcacactggc

SEQ ID NO: 46379 - DNA, 412 bp, Arabidopsis thaliana columbia
gaggactagaggatccccggtgtagcagtagccacctaggcaatttaattgaaaattaacggaaaaaaagaaagaaaaacaacaataaataaaaagaaagttcactttaaaagatgctctttccctcttctcacttctctcagtccctccctagaagtaagtaaaccacagagagaaaatatatacacagacagatacatacacacaattacatacatagagaaagacatggatttgcatgaatcagaatcaagaacacatgttctgtccaccgatggtgatgatggttacatagacatggaagtcaatctctcttcttcttcttcttcttctacttcgtcctcaagcttcttcagcttccccgtcacttcctccccgccgcaaagcagagagttcgagtttcaaatgtgtt

SEQ ID NO: 46380 - DNA, 506 bp, Arabidopsis thaliana
tcaaggatagaactccgtatgaagtactctgagaaaagaaaccaaacatcagttatcttcagatctttgggtgtagcggatatgcaaagacagaaaagctacatttgaggaagcttgatgatagatcacatatgcgtgtacacttaggaacatagtcggggtcgaaagcttaccggatgctcgatccaccaacccaaaaggtcgtggtaagtagagacgttttttttgacaaaacaaaaggttgaatgacactaactcaaaaaaatacaagaggaagagttttaatttcatatttggagagtttggaaatcgtggtattcaaagtactagaaaaagtgtcgaagtggaacagatcgatgaagaatattctgaaaatattgaagatacaagcttagatgccgataaagaacaagatgataatattccggtagtgacacagagaatgataagtcgataaagaacaagaggaaaatattccggtagtgacacatggaggtgaacagaga

SEQ ID NO: 46381 - DNA, 770 bp, Arabidopsis thaliana columbia
gaggatgggtagcatcttcaacctaaaagtaagtaaataattgatatttagagcttaatttgtttggttttattgtgttgtcttttacttacattaacatgtggaacaatagatagattagatagatgtgtacaataacaaaacgaaaggacaatgagaagtgaatgcaggtgagcaaccgcaccggtctgtgagagatccgatgccaagtggttggggttgtgtttttagagttttagttgtgtactttttggtcaatatctcaactgcttccatgtggatgtgggtctctattactttccacgtgtcaactaaagattgttgacattcgtcaacgcatatgagtgctaaaacccaaagcctcttaacaatacatagtaccctataatgagctgcttttacttttccagatcatgtgacccaacaatcatattgcaataatactaatttttgtatccatacacttatgctccagtttgacacaagacaattactaaaagacacactgcttggtggtgacttaacttttaaatgtaacaataatgttgctgctaccctgaatttctatctttctaatggcaaaagatttttcttttcaataggccgattcatagttgaaaacatttgtaggtgatgggcctctagactctaaatgggcttatttagctaaaagtttacagggcgggttaataccaatcttggtcgggtaaccaacttgggtcgggtggatgttccaatatgaagaagaagactcgcgcaatcctaaaaca

SEQ ID NO: 46382 - DNA, 340 bp, Arabidopsis thaliana columbia
catcatcggtttgtctgaaaaaattgagaagaaaacctagaaacaaatacggtcttttttttttctttttatgggtcgcgaatctctggctgttgtgtcctcgccgccatcgcgactgcgcccagtactgctgtgtcggctacctcgcttgctcctggctttcgatttcatccgactgatgaggaactcgtgagctattacttgaagaggaaggttctgggtaaacctgtacgcttcgatgcgattggagaggtagatatctacaagcatgagccctgggatttagcaggttcgttaggtgtcttcttcttcagttctgcttatctctatgatttggggg

SEQ ID NO: 46383 - DNA, 581 bp, Arabidopsis thaliana
tacggtcttatgtccaatggataagaggagcagaaaaacgcagtctttactcgattagcatgtaaaagagtcactttttctttcagcctttgtgttacattcaatgctcattctcatcgcttaatgcgtgtttctattaggtcacgaactgctgttgcacctctggaaaggatgaagatattacttcaggttttttcctttgttgatagcttttgttaaggaacatataaatgactggagagttaacctgttcgttgtcaatctctaggtccaaaatccgcataatataaagtacagtgggacagtccaaggattgaagcatatttggagaaccgagggacttcgtggactgttcaaaggaaatggcaccaactgtgctcgtattgttcctaattcggctgttaaatttttcagctatgagcaagcttcaaagtaagacatctatatcttctctgtactctgttatcttgatcttaataaaggcatcatacttgatactatagatctttttctaatctatgctttttctcttttttctccatagtggcatactgtacatgtatcgcagcggaccggaaatg

SEQ ID NO: 46384 - DNA, 959 bp, Arabidopsis thaliana
  unsure (1)..(959): unsure at all n locations
atcgaatcaactgataagctgtgcctctcatcggttttctcggtctttcggaatcaaatcacgacgagcattgatttccaaagcaagactctgcaatgtcttagccttttcgataactttactcagatcaatgntctccggaaaattgagcaacttcttaagagaagaagtcgcgttttcagttgctagcagcgatgatctaagataaagtatcatcgaaaccgccattcccgcgaccagagctccccgaggagagctaaggatcctgaattcacaccctagatcagcctcaacgcctctctctacttcagaattgtcagcggaaaatatctcatcccacacgatcaatagattactcagtggaaattctcgcccaaacagaacccgtaaccaacgaagcgcaaagtactgcggttcaacaccgagttcaacgagatggctgtgaagagaagcatcaactaaagaaagtagatgatacaatgccccagaagcttcaattacaggaggcagtcccgtgatggaatcgttgggagcagaatagatgaagaaattggctacagaaaccgaaccaagggaggatccaccgtacataagagcgtcaaacatagtgtaagcgtcgtgttccataaatttatcagagaggacgattcctaattcgccttctcctccatacgcatcactcaacaacacagcggtctgcgtctcggtatcgagttcatcgaaactctttggtagtttcttctttgtgcttccagagggtggaccatcttcttcttcatcttccatggaatcatccaaaaccttttttatatcgaaatcataagctccagaatcgcgttcttgaaacgctaattcgtcaaacaaatcaacaaactgatcttcatagtttgacctcacttccgtaagatattgcacatcaacttgaagaacataaagcaaaggagccaatagttcatgca

SEQ ID NO: 46385 - DNA, 569 bp, Arabidopsis thaliana columbia
gagcatgttgtgatcatgatgagtcttattcctacattgtcactataacgagactttcatatatgaacaataaattggagtttcctggaaaaatcaagacaagaaagaaaggacagataaagaagttgacgcatttatatttttctaacgtctagtagtctgaatctttacttttcttcacatttgattattcaacaatgtcaaatcaggggttacttttcaagctataagaagcgaataagcgatgagagaaaactcaaagagaaacaagtttagagagaaagaaagagaaaggtagaagatgaagttccaggagggtgtgttcttggtggttattttcttccttgcatatactcagcttgtgaaggggcaacatcaacctcgcgaagattgtaaacttaaatgtggaaacgtcacaatagagtacccttttggtatttctacaggttgttactatcccggagatgataatttcaatctcacctgtgtcgtggaagagaagctactactctttggcatcattcaagtgaccaatatttctcacagtggccatgtaagtgtactgtttg

SEQ ID NO: 46386 - DNA, 518 bp, Arabidopsis thaliana columbia
ggtggcaatgcgactccccgatgccagctccggtacatcgactgtcctgaagagtgccctaccgaaatgttccccaactctcagaacaaaatttgttgggttgattgctttaaacccctttgcgaggccgtgtgtcggggtaattatttaaccaccaatttctttttgtaattgatgatataccaatgcagtttaaaattagaattaatagaatttcatcattttgattaattttagattttgaaaatatgttttaagatttggatatgatcttttgtagcggtaaaacccaactgcgaatcctatggatcaatttgtctagatccgaggttcataggtggtgatggaattgtgttctacttccatggaaagagcaatgaacattttagcattgtctcggaccctgactttcagatcaatgctagggtcactggtcatagcctgctggccgcactagagactttacatggatcaagctctcggcttcctctttaactccacaaattctcccttgagac

SEQ ID NO: 46387 - DNA, 429 bp, Arabidopsis thaliana columbia
tctatatgatatttgcaatttagcaaaaaaaaaaaaactataagtcactttatcgtaaaagtataacaaaaatatccatattaataaaaattaagatatataactttgagttcacaaaaaaaaaaaaaaaaactttgagttcaagatcccacatggtaagtttggcttttgttaagatgtttttgaagacatattcacttctgtgattagtcggacgttttggcaaaacccggatacccgatgttaaatcaaaataaattttaaatttttgtatatgaaaactgcaaattgtagatgatttttgtcaatgtggctatcctaggaacatacttttttcaatggcatcaattaaggaaaagagaacaccaactaaggtataaccatttaaatgcttaaagcaattttatttttattttcctttttttttgg

SEQ ID NO: 46388 - DNA, 542 bp, Arabidopsis thaliana columbia
gatcccggtgagattcccggctactcctatatcaactccggtgaaattccgcataacaatgtgtgtcacgactgggagtgcgtcccggtcgaatttatcatccgggtgtgacccggtgtgtccgttggctactatggctgtgtcaacgcttgtgagatcgacgtcggagattgtgatattacggatgtatcctcctctgcctctggtggttctgaaggctacacctatgagtgagctgtgtatgttaagacgctcaacggtcacatccgagactccgcctgacatctcgctcccgaaggagattccagcaccggtgggagactttaatctgagattccgaatatgaacagcggtggttggacggccgtagtgtataccgtattggtcccaaccactcttgagagaaacgcgtcgtggccaacgttgattgttgagtctcgatacaaacattgtccgaagaatcttgaaaaaaaccggttcaagaaattagctttcaaacggtaacattttgtagtgatggaaaagaatgaggaaatggtata

SEQ ID NO: 46389 - DNA, 450 bp, Arabidopsis thaliana
actcttttgacaacaaccatcaaagacttggtttggctctttatgctgccatgtgctccaattcttgaccggtgtcttcaagccctcaaggtacatatatatacacgtaacatatacatcttttttatgtacctatatatttacatatgcctcacccttgttacgattctattggattcattgtagagggagcaaaaggaggttaagatggttcttattgcattggatacttggaacaatagtgtcaatagttggcatagtaaacatatacacaggcatacaagcttatcaaaagaagacatcattaagtagagactcaagtctttggacaatcttgttcacagttcaagtcacttgtcttgtcttcttctatctatatcaagacaaatgggaacattttcaaaagcaaagagttgttcttgacgaattggatcatcaaaataataacac

SEQ ID NO: 46390 - DNA, 569 bp, Arabidopsis thaliana columbia
tggttacacaatctgtttcttcttgctctgttttaactctgtttcacgtgccttctctgcttctctttgcttattcacgagcctcaacgaatccttttgagctaccacacgtgcctcctagcttatcaatactcttgccctcgaataatgtagcttgttctcaggcgcaaaagaaaaacattttgctgttgcatcactgttactaaatccaatgtgacttctactcccaataatctgctcaagcactgattgaatctttttatatgtttcaactccttgagacacattctgcttcatgtcagattcgattttctcaagcttagtgacttcatgttgcgcacatttcttccttggttctttggtgattcgtatttatcactttggttgtctttgtttctaggaagagctaaaaagttattctcaaatacaaaaagagcgagtggagaccacgagctgttggccagtgttaaattttttatgtagaggtgctgggttcgaggtatattgagagagactcttatccaaagaagatgtatttaacctggtgtgggtccactccaaaagagatg

SEQ ID NO: 46391 - DNA, 376 bp, Arabidopsis thaliana columbia
tcacccgtaagtaatagtcgttacaaagcattgacattagtttggtcatttacatacatacatgcgatgctgatgctttgtcttggaatatattggatgacatagacggtgatgaaatcaacaaggagacagctggagagagagctgatgctggaagacataatgcatcttgaggacttaccctcctacgctcttctcaatcaatagcccttatgatgatattacatagtcagaagagtttctaacctcaggataacacaaggttgctctactctctctctctcttcacatttcatcttcaacgctttcggttctacctcttcgttgaccttttcttgtgtttggtggttctaagacacaacttcaacaccgagtt

SEQ ID NO: 46392 - DNA, 554 bp, Arabidopsis thaliana
tggcatgtatcaaagaatcaaacatgatcggaatgggagcaaccggaatcgtgtacaaagcagaaatgtcacgatcaagcacagttctcgccgtgaagaagctctggagatctgccgcggatattgaagatggaaccaccggagatttcgtaggcgaagttaacctcctcgggaaattgagacacagaaacatagtgaggctcctagggttcttatacaacgacaaaaacatgatgatcgtatatgaattcatgctcaacggaaaccttggtgatgcgattcacggcaaaaacgccgccgggagacttctcgttgattgggtttcgcgttacaacatcgcgttaggtgtagctcacggcctcgcttacctccaccatgattgtcatcctccggtgattcacagagacatcaaatccaacaatatcttgctcgacgcgaatctcgacgccagaatcgccgattttggcctcgccaggatgatggccgaggaagaaagaaaccgtttcaatggtcgccggttcttacggttacattgctcccggtaaggtttaaat

SEQ ID NO: 46393 - DNA, 617 bp, Arabidopsis thaliana columbia
gtgagagaaagaggccaatactcgctgaacatagatggagatgatgtttaacgataagatctgtctgaatcttaatcctgccatcatctaatccaacatttgagtctccaagatcctagattcgggattgtaaatcatctctcaaaaagaaattcatgtcgaaaacgaatcgacgatgtagatgagagtccattacaatcaaagaacaaagagactcacttaaatagatattcagcggaaaggcatcgacacaccaccgaaaaactcgccggattgtggtcggattgatactcatcccaaaggagaggaagattatgaagatttgaacaaagagagccaaagaatttgtggaaaacattggccaaattattaatggtttataactagaacaggggaattgaaactagaaagcagaagagaaacaaccggccgacgtcaaggaaacgatgtcggccggaaacagtagaaaacagaaacggttggtcggaaaagaaagattttgggaacgtcgtcttattcaggtcttatttttttttgaaaattttaaatgtaagcagaaccagtttattcacaactataatgatactatttgattgataccgactttttgttatagt

SEQ ID NO: 46394 - DNA, 626 bp, Arabidopsis thaliana columbia
aaccgcaagaacttactgtaagcccaattctgttaatgataatgttaaatcggctataaaatgagccccgtcatcagccgctaaagtgaaacgcatcgtttagtatcgtcgtcttctggggaaaatatctttttttttaaacactatcaattcgactggaaaaaggatatttccagattaggtagagagagagcaaaagtactttcattcagacttcagtttaagctatggcggcgaacgattcttcaaatgctattgacatcgacgggaatctcgactccgattcgaatcttaacactgacggtgacgaagcgaccgataatgattcctcgaaggcattggttactatccctgctccagccgtttgtcttttccggttcgccggagatgctgctggtggcgccgttatgggctctatcttcggatatggtgctcttcttctttctattttgtttcttctattgcttggttttatctgctattgctttactctctgatagtgaattgagaattactggcaaacaattgagtttgtactcttttcttcatttaagttgatttcaaaacatgtttcgtggataagggtttgagaaatcatagttgtgttagcagactagccttttgag

SEQ ID NO: 46395 - DNA, 481 bp, Arabidopsis thaliana columbia
ccaatctcaacacctccacttccatctctactctccgcaattgatatctttcctctctgatcaatcgacaccaacaacgacttaaaaggttttccccacccgaaatccaacccgtatataccaaaccgggttgacccggcaaccgacacaaattgtgagtccacaggagctttctcatacgtttccaaaagctccggtatcttccaagccacatttgaatccaattcctcaaccgaatcactaatcaatctcgcagcaaccacgaaaccttgttcaccaagaaacatccccgcatctagcgggattttcacagcagagtaaacacagtttccgaaataagtcaacgggatcggtggatcatcgataagccttcgacaatccaccgcgaatctatacccgaccggtctattcggatcatcgcctccggatcctattaagcacgtgaaaacgtacgaaaacgtaatcacaaacgttgacaatc

SEQ ID NO: 46396 - DNA, 556 bp, Arabidopsis thaliana columbia
gctaaagtgggtttctcaaaccatcaggctgtgtgaaccaagggagatttccgacatagaccttgtgttggctttcgtacatcagaatcttctttggagttgagttcaagacttcagggtttcttcttgttcctggattcatgtcaacagagtacctaacccgcatttcccgaccacctacttccttcatatatagcaacaaaaccaaagcactcaactttacactcaaccagaagaaagatagacttgttttttggtttcccgggctcttactgttccatcaagagaagcaatggcgattttggcagagtttatagaacccattgtcacgtacccgcttccacggctctctcccgtctgaggatttcgcgatacctgcaacatcatttccaagcaatgcacacctctcactatacttgtcaatcatccatatactcaaaagagtaaccagtacgtttgattcgtcttgatggaactcaaagctaagtatttcaaattacattgtggatgatctttgaattttcaaagctaagttgaaagagtaaaactttgaatt

SEQ ID NO: 46397 - DNA, 863 bp, Arabidopsis thaliana
tctattcttggtcgtgtgtatattacctggcatgccaattcccttgttggtgagaggatgactgcaaaagggtaaaccgccacgtgaaccacggggtctttctacatgctgatctttcatgattccactaattattggaaagcaaaaagcagcagtcttcccagacccagtctgggcacaggccatcaaatctctctctgcaagcagtattggaatagcatgacgctgtaccggtgttggcctcacatacttgcacctccggatgttcagatttaatgcatccccaagatctatgtcagcaaatgtgttaacaggagggggcacgtctcccccactggtctcaactggaatatcttcataggcatcaaaattaatgccagtattctcctgctctgtaaagaccggttctaactcagcatcatctccaaatgggtttacttcacgttccctacggtcccaccctccacttctgttgttccagccaccaccaccaccacctcctcctccagcaccataaccatagccagtgcgccctccatcattcctatagccaccgccgctggcaccaccacccccactgctaggaggagcccaacgagacccagctggttgaccaccataccctgcatgatcattttgtggcaaaggagcagcaacaggctctgatggcctgttccgtaggtgtgggggaacataaggaggctttgactgagaaacggccttctctgaatcagccacatctgcccatgatgcactcatgattgaaatttgtaacgtcctaaatctagaaaaagttgcaacttcccagcagaaaacttatcaataaacaataactttatcttcttatccacgaaaaatagaga

SEQ ID NO: 46398 - DNA, 1267 bp, Arabidopsis thaliana
tccatcataaaggagccgaatgaaaccaaagtttcatgttcggttttgaattagagacgttaaaaatataaaaatgatcaatcgacgtcgactaaaacccttagccttccaagctaacgatgcgggttcgattcccgctacccgctctaaattcacaattgccctttttttttattagagaaaatttgttatattagaattgtctaatagcaattgtgtattgaattcacttcaatacacaattgctaaaaagattttgcacattctttttttttaacaataggaaagtaaaaaaaagcgaaaagcgtccattgtctaatggataggacataggtcttctaaacctttggtataggttcaaatcctattggacgcaatataaatatatctatattgatatttatctattatttccatttctatatattatatataatatctatttcgaaaaaagataagaaataaatagaataagaaagaaattctgaatgctttaagatttaatattaaacagatattagttagatacttctttctattatatatacttgacttatagacttctatttctagaatttcttaaaaaattaattaaaattaaagagtaaaattgactaaagaatcaaaaattaagaataatccgtttcgttttttatactttctcctgaagtaggaaacgttctagttgctcttgaataccttctttcaaaaagctttctgcttcagcggttaatgtcttggtagaggctatgatttcttgaaactgaggtttattcgtttttaagtaagtgcgtaattgaacgagaaattttcttacttgtccaatttctaatccatccagataaccatttgttccggtataaatggtcattatctgttcttccactgtgaggggggctgattgggattgtttcagtaactcacgcaatcgttgacctcttgccaattgattctgagtagctttatcgagatcagaagaaaattgggaaaaggcttctaattcagcgaattgagccaattccaattttaattttccagctacctgtttcatagctttaatttgagcggcggatcctactctcgagacagaaatccctacattaatagcaggtctgattccagcattaaaaagatcggcggataagaatatttgtccatctgtaatggaaattacattagtaggaatataagctgaaacatctcctgactgggtctcgacgattggtaaggcagtcatactcccttcacctaattgagagcttaattt

SEQ ID NO: 46399 - DNA, 509 bp, Arabidopsis thaliana
taagaagagaccagaactaaaacgggctttggatgaatgtagtcgaagatacaaaacgatcttaaacgctgatgttcccgaagccattgaagctatctctaaaggagtccccaaattcggcgaagaggctgtgatcgacgccggtgtcgaagcttctgtttgtcaaggagggtttaaatgggagttctccgttgactagtttgactaaatcaatgcaaaaaatctctaatgtgactagagccattgtgagaatgttgctttgatttaatcgtatgtttttatacaagcatgtgtttatcgatgtttaatgggattttaccattcataaaaatttataaaatttgaagataaagcatagatctgttagtttatttctcattcataaaaatgtgattttccctttttaaatttgtaaacaattgtttattttgggcaaattataaattagaatatttgtttcccaaaagtcctattttattttattttattttatggttttagttttatag

SEQ ID NO: 46400 - DNA, 447 bp, Arabidopsis thaliana
tgttgaatcagcttgagggtataacaccgttgaagagaagtaaacgcttggttaaaggaatgaaatgtgcttctttgtcgattatcttcttcttcgcttcaacggaatcgattctcgtttggattagtaccttagccgcctatgctcagctcaacgataacgagaatggtgggaagtcgtggacagatgctttctttgtggtacagattgtgatcacgtcagcgtttctaacgctgttgacgttgtataatcttgcggcgactactgtgatgtatatgtattgtaaagctgttcatggtgagcttgtttgggagatagccgaagagtttgctagagaatatgttagcttgccttttgatgatggtaaagttcctcacttggtctctgtagcttacaacaacatctgatgaaatgatgatgatgatgatgatgatgatgatgatgatg

SEQ ID NO: 46401 - DNA, 944 bp, Arabidopsis thaliana
tcatcatcatcatcatcatcatcatcatcatcatcatcattatcatcatcatcatcagcagcagcataatcataatcgtaagttgactcccacaacctgagactcaggctgacttcaacaagagaatccaaatgagtaaactgataatcttcggagacataactagaatagtcaaggtacacaagatttggtgtttcaaaataaataagatcgtgatcctcttgaaaatctggaagattggtaaaaaccacaagtcgcttgatggatgcactttgcacgtccaaaccgcaatgatcactatcacgtttgtataattcttcaagcacagagcagccattgatgagccgactgtaagttaagagagaatttgagagtttctgtaaaatgattttattcacactgatttacattagggttttacatttcctttatatagacaaatttggaacaatctagaataagctagtgtagctggctatggtgagtcatcatcaaaggatcgacgctcctcctctgtacgtttgatgctctgtttttgagctggaggatcttttgtctacttctgttgactcttctgttgactggactttgttgggcctgattccttattttttattgggcctgtttggtgtttgttccttacaccgtccctcaaacttggtgtgagtgaaccagacacaccgagtttggttctgagatcaataaaagctcgtcgtggaagtggctttgtgaagatatcggcgagctgtgttgtcgctgagatgtggtttgtctcgataagtcctagagcaacctgttctctgatgtagtgatagtcggtgtcgaagtgtttcgagcgattgtgtagtgctggattggaagagaggtaactgcagagaggttgcatagaagcttgtgtaggcggtctgcgaacccaaggcgcgaagtaaagagatatcaagtga

SEQ ID NO: 46402 - DNA, 326 bp, Arabidopsis thaliana columbia
gttttgaaacttacaattgagaataatttaatcctcataccaaacatatttatgacatgttagatttctacaaatattaccaaataaatgttaaatatcaacctctccaacagaatcttgacgaacacatctctaaagatccatctgtacaataaactacagataactgtatagcgctatctgtacagtactgtcgtacagctaatataatccatatgtacatcaaacgtagaatgcactctgctcaagtacgtacagtagaaataagaactgtacaagtataacttgaattgtcgactgtgctacattttgagcagagatgacaa

SEQ ID NO: 46403 - DNA, 2213 bp, Arabidopsis thaliana
tacattcttcaagacagaggagggtaagaggttaatgatgtagttggcagtaaagaaggattcaacccagaacttctgtggtgtatgactgtgaaagagcatacaaagtccaagttccacaagatgtcgatgttttcgttctgccaagccattctgttgaggagtgtatgggcatgagatccgatgatgaattccatgcttactgaagtgagcttttagactgttgcttacaaattctccacctccatcactctgaaacactttaatcttagtgttgagctgattctctaccatcttttgaaaagaaataaacactgattcaaaatctgatttgttgcgcaagggataaaaccaagagtatcttgagtagtcatcaacaaaaatggcataatatttgaatccttggtttgatacaactggtgaaggaccccatagatcacaatgaatccgatctagagggtgtaaacacgggaatcagaagctaaaaaaggtaatcttgaacttttcccatctggcaaggttcacaaactggagaggttctgctcttattaaattgaatcgccttgctgtgttgaagttgttgaagaacctttgaatttgtgtgtccaagtcggtgatgccaaatttcctctgttgctgcacactgacgatttgagtaaagagccacaaattcttgattctccaacacatagagcccatttctacgaggacccgttgttaccactttctgtgtttgtaaatcgattatgcaaaccttgttagcatcaaaatacacaccgcatgggtagtcatcacacaactttgagaccgagagaagagatttctgtatattaggacagactaaaacttcttttaaaggaattttaccttttgaggagttgatagtggtagagccaacgtgagttattgggagataggttccatcaccaaccagaactgcatcatccctgtcataatctgttgctgactgaagagcatttggtgaagctgtcacgtgagcagtcgccgctgaatcagggttccattcttttctgttttcatcagagactcgaagcgcagaaaaggcttgaacttcagcttgataattgttatcaaagcgattgtaacatttgagagttgtgtgacctgtgcggccacagatctgacaaaccgatcgaggtcctgaagcctgtggagaggattggtgttgagaaaatcctcgtccacgagatgagtagcctcctctgcctttgttctgacctgaacgcccttgtcctttctgatttgggttgtattgaggagctccagacgtagatctttcagtgttgaaggcaaggtgaggggtaacggacgttgtttcttcatatgactgcaacttagtgtcaaagccttaaacttccgagacaacgtcattgaaggttggggacggaagtttgttgagggagctttgaatgacggtggtgatggggtcatagtcacgaccaagaccgttgagaaaaccaaagatcttcatctgttcatcaactggttttccaatggagctcagagcatcgcagatggtcttgaactctcggcagtagacagaaaaaggtttctcctttttggagagaagctggagactccgacgaagtgagaactcccgtgcaacgctgctcttgttgaaattttcagctagagacacccagatctgacgagaggtgctcagattgtggacatgaccaaggacttcttcagacaacgtgccaaagagccatgaccgaattagctgatcggtacagaaccaagcttcatacagaggatttggttcttcacaggtgacttcaccgttgacgacaaggcgagtcggagacggagcattgacgacgccgttcacaaaaccaatgagtttctgactggacaacagagactcaaactgtgttttccacaagagatagttactgtctgtcagcttgagagtgacagagctagtaacataaacattatccgggaaaggataggaggttgccattgtttcacctgttaaggtttaatggctctgataccatgtaagttaagagagaatttgagagtttctgtaaaatgattttattcacactgatttacattagggttttacatttcctttatatagacaaatttggaacaatctagaataagctagtgtagctggtgagtcacatcaaaggatcgacgctcctcctctgtacgtttgatgctctgtttttgagctggag

SEQ ID NO: 46404 - DNA, 502 bp, Arabidopsis thaliana columbia
atttcatctggtgggaataattttcgaagacgatccatctatccacgtgttgttgttccaaaatcaatcaatgaattgacataaacaagcgggtctctctctgaagtaagtcccttcggagggcgtgctggggaatctggtatccaaggatcagtccagatgcaagttccaaaacccgatcctatagtcttacgtattccaagtttaagcacctccttggcggcaaacatgtctacttgtttatgtacaaaaaagatgaatttaaccttatgtaggtcccgcctctaggagatataggttcttcaaacttgaactttcatatattcaaaataacaaaatatgaagtaggtatgagtactagagactatatgattcactattgtgcccatggactagccacgcatcgaccaatttttaaaagtagttaagaagcatgtgaaaagcatatcagagcttgacacaatttgtaatgctctgaccgtttctactgatgagcattaat

SEQ ID NO: 46405 - DNA, 613 bp, Arabidopsis thaliana
tcgatgtgtgccctgctatacaaaaatctcttctatctgtgtccaaactttgcgatgattatccatgcggtgtttattttgatgctaataaggtttgcataattgatttaaccactcagaaagtggtgtccaagggtccacgaaataatgggctctacatgctggagaattcagagtttgtagcactctattcaaatcgtcaatgtgcagctagcatggaaacatggcatcatcgacttggccactcaaactcaaagattcttcagcaacttttaacgcgcaaggaaatccaagtgaataaaagcagaacttctcccgtttgtgagccttgccaaatgggaaagagcactagattacagtttttctcttctgattttcgagctttaaaacctttagatcgagttcattgtgatctttggggaccatcaccggttgtatcaaaccaagtattcaaatactatgcagtttttgttgatgatttctcaagattctcttggtttttttcctttgcgcatgaagtcagagtttatttcagtgtttattgcatatcagaaattggttgagaatcaacttggtacaaaaatcaaagagtttcaaagcgatggagggggag

SEQ ID NO: 46406 - DNA, 540 bp, Arabidopsis thaliana columbia
gaattctcagatctgcgaaaaaccgaatgtaaaaatgtatatgtatagttttccgataaatcgaatgggaaatgggtatttacatagaaggatatcactggctatgatcaaatcccaatctggttccgaaattggaaattcatcaccccatgtatctgtcataatagataagagaatgtaagaaaagcaaaaacaatcaaattcatacgacgccatttgtgagtaataaggaaactcacgcttgatatgaggcagagaagggataatcttgtttgcaatacagttatgaacaatattgtcttcaatctcttgatcattgtaatctgaagtagttatgtcgagattaaactctttcttaagaaatatagctagtgcccctgtgccactgcccatttgattttaagacaaccaaaataaataaaaactgataagtggactgacactggcatataagcaacttgtaaccaagacacaaatcaatcatctttcaggattccttgaacaaaataagcataaagaatagacaaaagacaaggaagt

SEQ ID NO: 46407 - DNA, 359 bp, Arabidopsis thaliana columbia
cgaatcaacttgcgctcgcattttttttaatctttgttctccctaacttgtcttacaaatttgaatttgactccctaatgtttttaaatatcgatttaaccctaacaattaaattttttttttttttatcagtgtgggcctgtttcgtgggaatttgattttggtcgcataaaaccgtcgaaatcatttggtagggaggtgaggagatcaaaagatgaagggaggagagacaatgtcagtacggaggagcgggtacaaggcggtggttgacggagttggtggacggcggcgaagagaggacgacatggttgaaaatcgcaaagctaagagagaagagagcttgcttaaaaagcgtcgcg

SEQ ID NO: 46408 - DNA, 3013 bp, Arabidopsis thaliana
tctcattgaagccatgttattgccacaataaaacccactggaacaccgccggcatcacgtggtatggcgaccgagaaggtcctggcaccacaggtattaatcaaacctttaattgttccaatacacttataaaactcgaaaacattttcccatatttacctatatatgcacggttcgtaaaatatgtacacaggaggagcttgtccaagtcggtgatgccatacttcctctgttgctgcacactgacggtttgaataaagagccacaaactcttgattctccaacacatagagcccatttctacgaggacccgtggttaccactttctgtgtttgtaaatcgattatgcaaaccttattagcatcaaagtaaacaccgcaaggatagtcatcacacaactttgacacagagagaagagatttttgtatatttggaacaaccaagacttcatttaaaggaatcttaccatttgaggatttgatagtggtagatccagtgtgagtaatcgggagataagtgccatcgccaaccaagacagcatcatccccttcgtactctgttgcagactgaagtccattggtcgatgatgttacgtgagccgtcgcagctgagtcgggatgccattccttgcctgtatcatctgagacccggagagtagaaaaagcttgtatttcagcctggtaattgttatcaaaccgattgtaacacttgagagcagtgtgaccagtgcgaccacatatctgacacaccggtcttggacctgaaacttgtggggaggattgatgttgggaaaaccctcgtccacgagttgagtagcctcctctgcctttattttgaccagaacgtcctcttcctttttgattggggttgtattgaggagatccagactcagatctttcaatgttgaaggcaaggtgaggagtaacagatgccgcttcttcatatgattgtagcttactgtcaaagccttgaacttctgagacaacatcattgaaagttggagtcggaagcttgctgagagagctttgaatcaccgtggtgatggggtcatagtcacgaccaagaccgttaagaaaaccaaaaattttcattgattcatcgactggcttgccaatggagctgagagcgtcgcagatggtcttgaactctcggcagtagacagagaaaggcttttcctttttggagagaagctggagattccgacgaagtgagaactcacgagcaacactgcttttgttgaagttttcagctagagacacccaaatttgacgagaggtgcttagattgtgaacatgaccaaggacttcttcagacaacgtgccaaagagccatgaccgaactaactgatcggtacagaaccaagattcatacagaggattgggttcctcggaggtgacttcgccattgacgacaaggcgagactgagatggtgcattgacggcgccattaacaaaacctatgagtttttgactcgataggagagactcgaattgagttttccacaagaggtagttactgtctgtgagtttgagagtaacagaacttgtaacatgaacattatctggaaaagggtatgaggtcgccatttgaaatacctgttaaggctacaaaggctctgataccatgaaacgattagagaaagtttcaagcttttggtaaaaaatcgtttctttctcaataattacattagggttttacactactcttttatagacattgtagaaggaggtagatatggaacagtctagaatatggcagatgctgtgtagctggctatggtgagtcatcaggcaaaacgcccctcctctgtacgatcgttgctctgttttgagctggagtctattttgtcttcttctatttgactgggctgagatgggccttttgttgttgttgggccggttacttgtttgttgcttacactccccctcaaacttggagtgggtgaaccagacacaccaagtttgctcctgagatcaacaaatgctcggcgtggaagtgactttgtaaacacgtcagctaattgaaaggtagctgaaatgtgttgtgtttcgatcagaccgagtgcgacctgctccctgatgtagtgataatcggtatcaaaatgttttgaacgattgtggagagccggatttgcagataggtacactgcggagaggttatcacagtaaacttgtgtaggaagatattggggaatgccgagatctcgcagtaagaaagagatccaagtaatttctcgtgctgcataggttagagctctgtattctgcttcggtagaggaattagacactgtaggttgtcgttttgtcgaccaagagatcaagttggagcctaacaagatgcagaatccagtagtagaccttctagtattcttgcagcccgcatgatcgctatcactgtaggcagaaagagtaagagtagagttcctttttattggcaaacccattccaattgtccctttgatgtaccgtagtatccgtttgagcagtccgaagtcagaggttgtaggggagtgcattctctgacaaataaaattgacagcaaactgaatgtctggacgtgtgatggtgagatactgcagttttcccgcaaggcttcgaaaataggttggttctgcaaatagctcagaattgaggttgtccaattgttgtggtagaggagttggcatggggttgcaatcactcattcctgcctgttgtaaaatgtctgtcgcataagccgtctgatgtagaaagagaccattagcataatcttcaatttgaatacccaagaaatagcgaggtggaccaagatccttcatagaaaaccgattcttgagagcttgtagaagatcttctaagagagattgatcactgccagtcaacaaaatgtcgtcaacatataacagtaaatagagtatttttccatcttgatgacacacaaataatgaggggtccgatttactgcagacaaatccataatcaagaagaaagttgctgaaagtatcaaaccatgcccgtggcgcttgtttcaaacc

SEQ ID NO: 46409 - DNA, 533 bp, Arabidopsis thaliana columbia
cctgatgttcgaaattggaacctgcgaatttcataacaaattcagtttcaaaaaaaatccaaattcttctcaagtttcggcacacggatgaagagagagaacaaaacagaacccgaccttcaaaagacggtcttgaccagaacgggcggctaatttggagccagagacagagagaccgctctgaggctcagttccagctgtggcttggcaaagtatctgtaacttccgattagagtgacggcggaatccagagacggaaatggaggagagacgacggagagatggggaagatgtagaagttccggataagaaaaacgttggaggagaagataagtccatagcagaagccatggccatggcactgtctaagctctctacacctctctctactgttttgagagaaattcaaagtatcctgagccacagactatgtaactgggccactgtatccaattgggcctgtccatcggattctaaccacccgacccgattcgatcaaatctgtttcttaaaatacgaatttgttttgtgtg

SEQ ID NO: 46410 - DNA, 468 bp, Arabidopsis thaliana columbia
gaggatacaggatcccctgcatcaccaaaactctattcatcaatcattattgtggggaatattggtatttggtagctatttatagagactttacatatagtttactgtttttttttttataaaactttaaattcgtctaacagaaatatattttgtatccatataaaatcaaggcaaagttatcatttgtcatttaataacttaagaaatttaaacccaacacaaaatggaatgataatattcgaaataatctcatcggaaaagaaaagaaaatatccaataaaaagaggccacgtacgtaaatagctccagtagcattcccgcctaaatgataaataagatattagaaagatttaaacattgaaaatcgtcttattaagttctccataaatcgcagaccctaaatcctctctccccgtaccgtacgtcttcctcaaaccagcagcaacgttgcttggataacgatga

SEQ ID NO: 46411 - DNA, 1600 bp, Arabidopsis thaliana columbia
gtacatataataattaggtaatattccctccgtccaacgaaaatagatttttcaaattttatatcaagtccgatcggaattaaatgttaagaaagacgtattttttgttgctttacggaattgctggttttagtggttttcgttagaaaagaaatttggtgactctgaaaatatgtatgtactgtgaccggtggtcccactttctgacttcaaacaacatatgtgagtaacggctcaactatcgatgcaatcaattgtggaacacattccaagccatttattatcccaactatgtgagaaaccatctccgttcgacggttctagaagcccacaaactatcttcggccgtgggtataatacaaggtaaaatttatgtattgagtgttcatcttagatcgtgggttgttcaggtatacaacatcaagtactcggattcactctaggagattttcaatattgctttcgacgagaggctagaaaaaacatacggtctttctttgtatatacaaggtatgcacaaaatcttcacttatcaagaaaactttgtgtaaacatttctttgttctattggaaatatatatattcaatccatgtgtcattattttgtcgcaggtggatctcgatcttattaaacggaatccgatctgccgagttggaatatgagtgatattttgatttatctttttgattcaagatactttatttgattatctcttggtatttacaattctacctttggttattggacttgacaattccatcttaaacatgtgtatactcttaattgcaatctggcttgtcaaatttaattttcacttagcatttggttttgtatggtataaagtttgtgaggtggtatttacgatgtaaggaataagaacttagatcaaataaataagtaactgggccaagaggccattaagtgcaaagatgcaacgtggttagataacagcagcccatttattagcctcattcacacatcattacagaaacttttcgttttttatataattgccccaaagtataaaacatttcgattcccaccccatacaaaacgaattgctagtttgctacccgagaatatcaaaactcaaaagactggtctggtttgatcatcgaaaaatattataaattaacgggaattttttatcaacaagagatcaaatcataaccacacataaaaaataattaaaaattgacgtcaaaaaataaatattgatcgtgtgtgtgtgtgtctttctttctatacatctttcatactccgtcgactcgacgcgccacggctacttcactctcgctgacgatccagtcgctaaaccctccgcctgagacagaaggctacttgttcccgctgcgacaggatcagacacgctctgtctccaactaccaaatattcgaccgctactcgaagatcctctcgaagatccagtcgtactgaatctctcagatccgctgctgtcttctctcacaactctcagtggattctccaaggcttgtactatatgtctcataagcggccgtctcgttggttttgggttaagacaagatctagcgacgattgccattgcccagacttcttctaagaggtcttcgtcgacca

SEQ ID NO: 46412 - DNA, 624 bp, Arabidopsis thaliana columbia
agtacggtgagaagaagaggacacaaacaagattacagaagtcttagtcattcatatgaaaaatctcacgcttacgctttccatcagtttcttagttgtacatcaaatctcaaaaaaagagatgttgacactggaacgtaagccccgttcagtttggtcagaagaaagacccaagtgaataactgttttgtaacgaacggccatattatcattcgtcggagagaaggctccaaacacgtgtctcagccatattatatcattcgtccgagagaaggctccacacacgtgtctcagccatatgtctatccgacgtaaagattctctcgttgccgaggttccgcatctctacggaaaagtgacccgcggacttatctgggcctgaactttgacaagtttatagtccaatcacttcgtacagtgacgagttgaacttaccaaagttcagatgtatatataaatacactagatatcctcataatcgtcgatgtgggatgaagttacgtttgcaagctagaatctcaccatatcggtattccttgggccttgacggtgcaataagaagaatcgattcttaaaaattgggactctgaaattggcgggttgagcgaacccgtgcaatagtgc

SEQ ID NO: 46413 - DNA, 528 bp, Arabidopsis thaliana columbia
caatgttaggctttgcgaagttgtgaaacaaatgaacatttcagacaatgtcaaaagaaatgcgtaacgacataaagatatacatatgtttgtttttcgatagcaaaagaaagacacacgacaaattacatccagagaaggccttattcaaaaagtaagcaaaagacaaggatcatgattcaagttccacagaaacacttgttttcacaacgtgtgtaagcttcagtcgactcaatattacaagtgctctttagaccactcgactctatgtaagcttcacttacgacccatggtttgttctatgggtggcatcacaacaacggtggactgagcattgaaacctgggtgaagaaccttcctgcggagtcacgcccttcttggcaaagggcacatgtatggcaaaggacatgtgtcacaaagtcacaagtcgtctccaagtgttccctttgcatctcgtcctctatgcagccaccgcagcaaccacaagacctgttcatagctcaaagcttcctgtttttcccaaaagag

SEQ ID NO: 46414 - DNA, 520 bp, Arabidopsis thaliana columbia
cgtaaccgccataacaatgttggacattgctgtctcacatcctgccgcaaaattcacggccgtccgagagaatgaacctaaattacaaaaagaaatatactttttaggttgtcacttcataacatatatagtttacataaatacatttacgtttacctatcttatatataattaaaaatgtacataaaacatattttgagtcatatgtcataaccactaattaaaaacagtaatcaaattgaattcatcaaccaaaaatgacttttatacgtaggacttcacactccacccaaaaaagtggtccataagttaatttatagtccgatggtgacatatattcttcgtaaataaatgattagttaatcagctagctaattaccagtagcagcgtaacaagatgtgaaggaaccgagaacattcataaatccaatggccaccatttctttgtttccatcgagtctgtaccttttattccggcgacgacctcccaccgcaatcgcctcctaagaaagaaaaaaca

SEQ ID NO: 46415 - DNA, 586 bp, Arabidopsis thaliana columbia
cgacaagtctgtctcacaacagtaccaatttcattttataggacgatgaactggatgataactaaccaattgtccaactgatgtgtggtccaattctcaacgatgggtcgccctatattctcgggggttgacgtaaatcagttccatattacacaatcttaccatttgaaaatcaccaatacgtaaatcattttatttaagaacaacaacaaagacagaaggttttggttggacatttgggtcaataagtcatgctttatattgtagaataagaatagtaagtaaattgctcatgtttctgcgatccatatttaacaaattattctagtcatttatttattttaagttatatctttaggagtacgaaatttgtttacacattttaaaaaggtaatagtattttagattttgaatcatagatatagaaaatgatacaaaattttgttttacactggatcaccatttttaaatggacggccaccatattagacatcaaatgcccatttatctaagagccatattggttgtcttggcccaaaaacctagatttctaaataataatggattctatagatccaaagcaagt

SEQ ID NO: 46416 - DNA, 525 bp, Arabidopsis thaliana columbia
  unsure (1)..(525): unsure at all n locations
ttttagtgtgaagctaaatatatgtgattattagcatatctagaatctgcaagatatacttactttctagaggtatcgaaaacattgtatacagccaagacatcataggcagatcctaccatcatgacaaatcaatatatgataagcatatcaaaatcatatatcgatcgaaccttgaagcttgcaattctctttcggtttataaatcagagaccatcttgagctagtgtcaccataacaagtacatgtgttccatcaaatgcatcaacaaatccattaaaaataccaaaatttcgtatcgccttgcaaacagttggagatagtatttgaactgttcttgggagtgtatactctacagctaatcgttccactattatgatgagtgaccataatggcccagtaaacataagtgattttctgacatagcccatcacgcatttttatgttgagtgattttgttggttgtgaactgtatanataaatgttgtaaatgaacattatgagaaaacaaaccataatattttg

SEQ ID NO: 46417 - DNA, 551 bp, Arabidopsis thaliana columbia
  unsure (1)..(551): unsure at all n locations
aaccctagatttcattttttcacatttattttttctaagccatttttatttctccgtctgacgttattgccagataagcttggagtctctgtttggaacacggcagttacagcaacgagagtattctccagttctcatacggaatctactgagaagattctccgtcggcggacancacaataccgaggcggagatggagaagccacgacggagaacggcgatttcggcgatagatctccaccgccgccgctagatcgtggtgacatctgcttaggaggcgacaaaatcgcacggatcttgcctccgtaaacacgatcatattcttcaacgatattcaccagatcttcgtccgatttgacggagattagtgtctcgagatctccatttggtaattgacacttcaattcaacggagtatccacaaaattcctcccacttcatcgtcaattctgaaggagaagtagaaaatcaatttcgatgaattggaaagttagatgaaattggaatgggggaaaaagattgaacggacctgtgaaagagatagagtgatga

SEQ ID NO: 46418 - DNA, 1662 bp, Arabidopsis thaliana
  unsure (1)..(1662): unsure at all n locations
taatgcgtttatggattcgttgactgcagtttgtttctgcattaaatcaatttgttgccacgtattttttacttcttttttttgccgtggtaacaaaagcttgggtttacttgttgtataactcttttcattaatatgatatttacagtttgacaaataaaaacaaaaaaaatcagaatcattggaaatccaatcatattatcacagttttcatttaccaaaaaagagtataatgtcatgactcacgtaataatattactatagtaataacgaaacctctacaaggacaaaactggaaacaaaaaaaggagataactgcgcacgaagaacgggtctcaagctttccgacaagacatgcgcaccacaaatttatttagtctccgtatataaatcctccatttccaaaaccttcccaatcttcttcttcttcttctttctccttcaaacaaatcatgagacctgcgcaagataatcaaggctcgttccttggccggattagtatccgtcgcaaccaattcgtcgacgtcaacaacgaacaagaaccagaagatctcgagcttttccaaaaacacatcgccgatcgtttcaccgagcttctttctcctcctcaaccaccaccgtcagatgaaattaacacggtagcttccgtagccgcgacggagcagattatgtccgtgacttggcttcgtaagctgatggatgttttcctctgttgcgaagctgaattcaaagcgattttgttaatgggtcgtgacccgacccagatttctaagccgccttttgaccggttagttcctgaaatgttagaccggtcgattaaagcgcttgacatttgtaccgccgttgttaacggtatcgattccgttagacattaccagcgtttagctgagattgctgtgacggctttggagcaacgtccgttaggtgacggtaacgtgaggagagctaaacgcgcgttggcgaatctcgtcgtcgcgttgagtctcgaggataaagagaatgttagcggcggaggtggtggcggcggcggagggaataagacgacggagagatcgtggtcgtttggtcgtcgaagcggtggatcatcggcggcgagtaaaggaggagcaacgattggtcagctcaaatcgtcgtcgtgggcggttgggagaaattggtcggcggcgaacgagatccacgcaatgacagcgaatcttacgccgccacgtggtaacgaagcggcgggattgcctcaaccaatgtttataatgagtacggtgatggttttcgtaatgtgggtgctaacggcggcggttccgtgtcaggagagatcaggattagcgaatcatttaccagtgccgccgaaacatttgaattgggctcagagtttgatcggaatccatgagaaaatcggagatgagtggaagaagaaagagaagaaaggatctgctggattgatggaggagatgacgaggatggagaagctaggtcactcgttgatggaattcgcagatggatttcattatccggcggagaaagatgctgctgaatctgcggcggtgcaagtggcggagatggcggagatatgcaggagaatggaggaggagcttgtgccgttacagcnacagatcagagaagttttcataggatcgtgaggagtcgtgcggagattctcgaggtgtt

SEQ ID NO: 46419 - DNA, 560 bp, Arabidopsis thaliana columbia
cttctgcttcttctgtttttctttgatttccacattatccaactctctcttagcttttgttacccaatagaaaaaaaagcagattcaagatattttaaaatcgttcttcacaaacaaataatacaaaaaaaaaaagccaaatgcatacctttctgcaaaggatccgtgaccttactaacatcatgaactgattcaacctaaaaatccgaaacaataacaaagttactagagagtaaagaagaagaacgaatacaaaaaccataataagaagaagaagaattacatcggtggatgtcgagcatttcttgagcctccggtccatggtgaagttgagtagatagagctcagcggctgctaggttttcgattgcaagagaagcgagacaccgaaaagaaaaagaaaaagaaaaaccattttattcaggtctgagctgggctgggctgttgttggctgggcttgacttttgtgtattatattgtgggccaccatcttctagaatttctctactttttctttcttaatatcaataccgatttaatgtgtctaaccaaaacaaaaga

SEQ ID NO: 46420 - DNA, 505 bp, Arabidopsis thaliana columbia
gaacggtcagccgaatgaggcttttaaggtttttagcgaaatgtgtgcgaagaatgtcaaacctgatgagtttataatggtgggtttgatgtcagcttgttctcagatgggttgttttgagttatgtgaaaaggttgattcttatctgcaccaaaggatgaataagttttctagtcattatgttgtacctgctttgatagacatgaatgccaagtgtggccacatggacagagcagctaagttgtttgaagagatgcctcagcgagatcttgtttcatattgttcgatgatggaaggaatggcgatccacgggtgtggaagtgaagctattcgactgtttgagaaaatggtagacgaaggtattgttcctgatgaagttgccttcacagtaatattgaaagtttgtggccaatccaggcttgttgaggagggattgaggtatttcgagttaatgcgaaagaaatattctattttggcatctcctgatcattattcatgcattgtg

SEQ ID NO: 46421 - DNA, 608 bp, Arabidopsis thaliana columbia
tacaacaaattaacccaattaattttataaataaaaaaataagtctattaaactaagttaatctcattattattgtttaacacagtataaattactttagatttaatgtttactttactagaacagtttttttctttctcatatatatatttttttttgaaattatcatttatgaggatattatcatttttcttaattttttttttttggtatttggcttacaaaaagagtgacccctgtatctaattattctgcctccgccactgcctaccggttactataaacaagcaaagcaaacactaaaaaatgtgttatcttgcaatttttgttcctacaaatgtcgtcaataaacagttacgtataccaataaagtttcgcattgtgctcttctactttcttactcgtcttcaaacctttcgttcccacacatatagactttcacacggtaacacatatcttactgaatttttaaaagaagaaggtaatagtaattccaagaatcaaattaaatcgatcaaaaaaatccaatgtgttatagatgtttgccaaatttgtatgttgccaaagttctttacgacgaggccatggttgcatacttgcatgtgttg

SEQ ID NO: 46422 - DNA, 419 bp, Arabidopsis thaliana columbia
ccgacatcatacattgtcatgactggcaaacagcttttgttgtacggcttgatcttattttgaagcagtaacgtaattcattttgtttaggatacatcttgaagctttcttttttttttttttttataacaggcgccgctgtattgggatctgtatgctccaaagggattagattctgcaagaatatgctttacatgtcataattttgagtatcaaggtaccgcgtctgcttcagaattgggatcttgcgggcttgatgttaaccagttaaatagaccagacagaatgcaggatcactcgtctggagatagagtcaatcctgttaaggtaaataatgatcacaaagcctttatgaaccgtgagagaaataaattcgacattttagctcttgttcatctctctttctccttttggtccag

SEQ ID NO: 46423 - DNA, 542 bp, Arabidopsis thaliana columbia
cgtgattaaagctaaaaccgctgtagaatctcaatgtcccggagttgtgtcatgtgccgatatactagctctcgccgctagagacgtcgtcgtgctcgtaagtccactttctgaagtcaccgacgtttcatttgatttctccaagtataaatcatttactttgtgatgataacaggttggagggccagagtttaaggtggagctagggagacgagacgggctcgtgtcgaaagcgtctagagtgaccggcaagttacctgaaccagggcttgacgtgagaggtctagtccagatcttcgctagtaacgggctttcattgaccgacatgatcgctctttcaggcgcacatacaattggatcctctcactgcaaccgtttcgccaaccgtctccacaatttctcgacgttcatgccagtggaccctacgatggacccggtctacgctcagcagctgatacaagcctgctctgaccccaacccagatgctgtagtagacattgacctaacgtccagagataccttcgacaatagctactaccaga

SEQ ID NO: 46424 - DNA, 565 bp, Arabidopsis thaliana columbia
gctattctaaatttctacaatctcaggttattctatatgaactctatagaatattggtatctcagaacctagagaagtttctaaatcccatattatgtttgttttgtcatgaatacagatgcagaaacttgaactttgcgagacgcgagtcctgctacaaatgcaagaggcatcgttatgcaccggctaatagtcctccactgcctcgccttcttcctcctcccatgaatcattccccaagaagagactttaatggctacagatctcctccgcgtggctggcccagagactacccgccgccaaggcatgaccatcccacatggagagacagagaacgagaccgtccgcattactcagaccatgagtaccctcctagcagaaggatagcatctgactgggcccatacagagccgctcccaaaacctcattatgacagacgaccacctctcagtccacctcgtggtggcagatggggacgagttttgagagagaggagcagatccccgccgattgagagatgttccaccacgccattgagagatggtccacaccgtcattgagagga

SEQ ID NO: 46425 - DNA, 536 bp, Arabidopsis thaliana
cagagagcgggtgttttatcaaaaaaaaaacatagaggttttattatgagtagtcaaagtaaaagatcgagagttgtcctctcacatagtcttggacgaaacttcggtcacattagcttttttgaacataaccaagaacggcttatcgcttaaagccaaacgacgaacgccaagttcatctatgaatatcccgacatcgctgcattttggattgccagagtcgcaagtccgaggacagaacacaaacttgtaagcatcctctccagatttctcgatcttgaagaaactcttcaacgaatcttgtccgaacccttctggctttggaccagcaaccacgaagtactgcttcctctcgtggtcaaactcaccgacccgccagtaggttgactggatgcagatcgtggctccgacgtctgtttcgatgttgaggttctgtgattcgggaacgaacgcaaccttaagcctccagtttgagaattttacgggaatgccctcatcaacttctgaagattcctgcacgatatcgtaaggacatg

SEQ ID NO: 46426 - DNA, 533 bp, Arabidopsis thaliana columbia
ctcatgcttgatgaagaagatgactaaatgatgatgaaggtggggatcattctttacatattaatgttctgtggtgtgctgtccatgtgtattcaccatgttttgtttacaaattgtaaaaaaagatgaatgcaaaacaaaacaaacaaagaaaaaaagaaaaaagaagttattttgtcaatggtaaaaaaatcattgagaattgaaatttcatatctcttatatacgaaattcaaagtaaattgttcatataccctcaataactaattcactgtttatctattttatcttggcgcgagtttatcatttctgttaattatgattatttcgttactaacaataaccaaatactgtaaatcgaataaattcgttcgccttctttcttgaaacatgatcatcactcgatcaggatagcgtttaaaaaggaaccaaaaataataattagagcctgaaaatggcgaatctgttcactgctacggctcctttcctctcactctcgaagccattcaccaaaacggcatcgtccaccagtg

SEQ ID NO: 46427 - DNA, 483 bp, Arabidopsis thaliana columbia
tccctgaaaattttaaacgattaaagacacaaaattcgagattttgactcaagtcaagagtcaacaagcaaacccagtaaatgaaaaatctagatcttcaaaactaaaacccaaaaatgggatttttaagctcgaacacatacacgaagaagcagatgactgaaattgcgacggcgacgttattggctgggacaaccaccatgtagagcacatccactcgccatttctattgtagcatatcagctctctcttctccactcgctttctgggtttttgagattttatttggtttcaaagcttgttgctttaatgtcaaggtaaagtgtgcaaatttctataaattcaataaaagagacttcatttatcgatgttgaaacaaaaagctttaaaagattcacactttcgcataagagaagagacgtctctgtctcttcattgttcacgtttctctcttcttctctgacttttttgaccagaagacac

SEQ ID NO: 46428 - DNA, 567 bp, Arabidopsis thaliana columbia
ccaagctaaatagcaactccaaattaacaaagacagagttgataaacgccacttcatcttcttctcattcttagccaatcttcatattcatcattatgatgctagttcttttccctcatgttgattatgtgtttcatccaaggataaattgaagctaggaaacacacaatcaacacagaccaaaggtgcttattaacccaagcaaaaactccacgctcctcaactgagatcaatctcaatcatcacctcttttaaccaagcaggcattcttctaaacagagaagacaaaacacaatctatttctcgtcaaccacttgagaaacagcctcttctcttcttttgaacatgaatttcaaaccagatcaagcttcaagagtagacaacaaaaacaacaacttcctctcttatcgagaaaaccaaaattataagaaatgctttgtatctagccagagcttcttgcagaaagacgtcatcattatctacatgagctcttgaaacctgcaacaaagacacacaaacaaattcgattcaacaatgtggtttgggacaagaagctgaccatgattt

SEQ ID NO: 46429 - DNA, 463 bp, Arabidopsis thaliana
aacaccctttgtgggagaataaactagatcaatatcgaattctcatttccgcaacttcaaagtcctttgccaagtattcttgttattgttctttgcacttttctctcattgtacaatatcaaaagcggcgactgatatccgccggacaaaacggtgtaccgaagctaagccgggtggctagggatgttgaaatgcctaagtcttccttgctgctctttcatgtaccctccacacaagaacgccaccgagaactcgtcctccaccggccggttaatatcgtgaacgaaaacatcagtctccccaccgtcataacggttacgagccagtaaacccgcagtgtaaatagcgctcatcctccctggagcttcatcgtggtaaccagtgggagcatcgaccattatcacatcccattgcgtctcgtacacgtcagctggcaaacccttgagagacagagcacatttgg

SEQ ID NO: 46430 - DNA, 620 bp, Arabidopsis thaliana
  unsure (1)..(620): unsure at all n locations
accggtccctgtgctgtagccatcggtagagagttggctccacctccgtaacgggtgtagtaagagctttggaaggctttgacaaaaccaactccacaaatcgcacccaaacactgagcgattatgtacaatagggccctaggtaacgacactttacgtgccaagaatagcccaaatgtcaccgctgggttaatgtgaccacctaaggaaacaaaaagagttgacaatgttaccagtacttgagaattaaggtacaacaagcaattaattaaccggtttcaattctggttaagacagggttagtcagttgcttaaaataattactaggcttagattagatatatatcattcggataagaaccgatttgatcatgacccttattaaatgttttataaacaaatcattttcgtcttttaaacctaagattttaaaccgattaaatagtaatgtcaaccaagcaatatttttccttgcaaaataattaatttcgaataaacaaaccaaaaccataccatataatttttacttgtctaaattttgagtttgcaagttgtacttacataagtanaacttattcagcttattcggtttaattgtaatctaatcgcaaaaagtgtat

SEQ ID NO: 46431 - DNA, 1010 bp, Arabidopsis thaliana
tgtatttttcatctacgaccttgtatgtaccagcaatgatatccataataagactggcgagttgagacatcaagactattgggtcagctccaaggtccaacaactctctagctcgcttaacagtctctgctgtgtcagaagacaatgctaattccaagagttccaacaatttttcatctgaaacaacaccaacctgaacaaacacataatgccacatttttaactttaataaattttactttttttcagtgcacagttacagaaagaactagaaaaacttactagctcgtttactaaagctgtggtgatgcgttttcccagcaaactcagctgctccaacatagtttcagcatctcgaagtgagccatccgcgttcatagcaatcaggtccaacgcatgcaagtctacatcaagattttcgtctgaagcaattttctttagtctcactactatgtcagaatctttgagtttgtcaaagagaaacttctggcaccttgactgaatggtccggggaacattttcaaggtcagtagttataaatatgaagacaactttctgcagagggttttcaagaaacttaagaaaagacagccacgtcttcgatggcagcaaatgacactcgtctatcacaaaaaccttgtacattgaggaatttcgtggaagtatcgtcggtaggttttttaaaaggtacctaaccttatcagctcccttcttattagctccatcaagttcccaaaaatccttacttttcccagacatgaaatcattgcactctttacagtacccacaaggcttcatttcttcagtggccacacaattcagggcggctgaaaaaatccttgcggttgatgttttaccagttcctctaggaccctggaaaagataaacaggagcgatcctactccttttaacagcgttcattaacgattgaaccactatactttgtccaatcaattcctcaaaaaacattggtctgtacttttggctgaagcttcggattgtttccggtg

SEQ ID NO: 46432 - DNA, 560 bp, Arabidopsis thaliana columbia
ttttagctataaaaacatgaatctgataattccaagagtatgaatattttagattatattttataaatcttaaaactaataaaatcaaactttaacaaacaaaaaaaaatgaaaatgttgattaaataacaaaagattttacataatattagaagtcactaaaactctatttaaatcacaaaccaataacatcatcaaaataaacaaaagaaaaatatacgtcatcaacggcgtttactattctgaacgaaattgtataaatctcatcatcactaacctaaaaccagcataaaccctaaaattttctcaaaaccccataaacggtaaaccataaagcttcaaaatttacagagtttccatcagaatctgttgatatctaaattcatttacccgttaaacattaataaataataactgataaagaattcgaaaacaatatctatatagctcaaaaaccctagatcctaacatttcaaaaacaaaaacattattcttaaagcttcgaaactaaaccaaagacttaaaaagtaaggaaaaagacaacaaattatcttgattta

SEQ ID NO: 46433 - DNA, 742 bp, Arabidopsis thaliana
tggatatcattgctggtacatacaaggtcgtagatgaaaaatacagcaacgccttctttgacggaagaaactgtgagttcccagcaaagtatttacatattggtcatatgtgctaaaaaagtagtttagtgaggcgttatgatctggtagcttgttgagatcattgcccgtttcatattttctaacacccttaagctaatatatcctgtaagagcaattttactccctacgatgagtcataaaccacttggtttgattttcgaaaattcttgcttcgtttttgtagtgactgaagcagatatggagggattaaagcatgctttgaaacttctttctgaggctgagaagcagctgagagtttctaatgaccgttcaacatggttcacagcgactttgcttcagcttgggtcaatgccttctcctggcaccacacatacaggcagtagtagaaggcaaagctctagagcaactgacgatgacccagcaagcgtttcaagggaagtgatggcttacaaacagagaataggaggacttcactttagtaagtcggcatctccagcttcggttataaaaaggaacgggaatcattcccatgaagcgaaaccattctccagggttatcgataataactgctataaatcctcctcatctagccaaatgatagagagcgaaggttccattgcctcacatgaaaatagcatcgcaagcaccatgatgcttaatcaaagggggatcattcccc

SEQ ID NO: 46434 - DNA, 569 bp, Arabidopsis thaliana
gtataattgcaagacaaccaaaaaacaaaaaacatctgttctaaactgtgcttgtgtttacagttcaacaatctgggcagctcttgcgcatggtttactcaagacgaggtacacaacagattggcctactattctagattatctttcgactcatcgtttcagccgggtggaagaatttctcacaaaatacatagtccaagctacagtctatgcgatttggagagaaagaaataatcgaagacatggagagaatccccaaaccgcgcaacgcattattggatgggtggataaacaaatacggaacagaatttcagcgattcgacttgcaggagataggcggtacgatgacgccttccaattttggctccaagccaagatttagcttatgccattgttttgaaacttattttttttcagctttttctcaaatattcgatgcactagttgtaaaaatgtatattttttcttttgaatataatttaacattagattcaaaaaaaaaaaaaaaaaaaaaattggaaatattgttcttaacagaaaatgttgaaagacttataaagcacaatgtt

SEQ ID NO: 46435 - DNA, 539 bp, Arabidopsis thaliana columbia
atcgagaaatggtccaaattttttttgaaaattttcccggttagttaatcggtatgggtagtaaaccgacgtgtcggatctttgtcatactcattagtcattaccgaatctagttggtcagagggtttctggataataccttgtaagaacctgaagaagaggttttttgataggcatcattcttatgactatccgagaaggaatcattttgatgaagaagatgacgatgacaaggcatgagcagtgatattggagtagaaaactttcttcttctcctggtagtaagagtgatgaagcaaaaagtgttgtgaaatcatgttaagagagtagaaaaaccatcaatgttttgatatttttgtatattcgaaaattgttgcaattacacaagaacacactgtttctgtttggtatcttattctcatttgcttcagagaagcgaatttagcatacaaaactgtgcgcgttcccttctttattttctcaactgttgttcgagtctctcaatggctgcaccacaccactcgtgacctcaccgtggt

SEQ ID NO: 46436 - DNA, 1043 bp, Arabidopsis thaliana
caaagcagaggaaataaaacagaggatttgaagaaaacccaaagcagaggaaataaaaacagaggatttgataaaaaaaaccaaagcagaggagataaaacagaggatttgaagaaaacccaaatcctgaatctatatgaacaattcaggaacagagaagaatcgttattcggagacttgattcatataaggcaatttgttctctatcgatttcaaggagaaatggaacctgatcggcgacgttgagaacgatgtaaggatcgctgctacgatggtcgcgaatggcgagattaatccctctcttgacgtggatcgtgagcaatccaagaggcttttgatccatttgagaagaaagactttttgactaggtccggtgctggagatggtaaaggaggaagaagaaaattttaagaagaatttggagatgatgctgaagatgaattggtgcttgtaatctcgtccccaactattcaacacgttctcgttcccaattgctcttaatttttcttttataaaaaagtttagcgaattatagtatcattttttcaaatgattgggtaacttgttgttcttaaaatttatttattcacactaatcaaaaatgattaggagtttaggacacgagactaatctaataatcgactcgagagataaaacaatagtcatggactgaacaaaagaaatatctcgtcacaatgggctcgacgactccctttatagataggagactaatctaatatgggtctacttttgaacgtcagtgaagtattactaccaacttgtaataaaatcacaataatgggcttgagtacttgattaacaggcccatttaaaagattttacgtttaagaatctttcaaatttaacaaacaaagagattattgcatggagagacggttttggtgcttgtaattttttttcttttttttaataaaatgttaaattatactcaaaagaaaaaatgtcggttgtcaacgagtgcatcatggtgtttaagagactaagcgtagagctaaactttacaagttaactactagatttta

SEQ ID NO: 46437 - DNA, 591 bp, Arabidopsis thaliana columbia
  unsure (1)..(591): unsure at all n locations
acaaatcttaagttgcattcactttgcaaattaatattgaattatagactattagtgtatggcgtgatggcaaacaaaaaaatcagtgtgtgatattgtggactagccaaaaaaattttctgatgatttttttgcctaaataatttgaattgttgagaccgaaactcttactaatatactaacaatgtaacgcgacaaataaaacattgttgagaataaaatctgaaccatcataactatagtctatagtaaccgtccgaattcaaccacatatgtatgatctttgccatttttgatcatattttccgttgcgttttctttgaattttctcaatatatttttagtgttttgatttgtacttttatctaatttatataattgtttttcaaatgtttcgcaattgtgcgtttaagtattcgactcgaagtaaacccagtttcttagaatgggctaactgccattgaccaaatctttatccgcgaagaaagatctttagcagctaggcttatttcatatcaacaaaagtatatatttatctctaactaaattcctacaattatttcagaaacataganattanaatttgaaatg

SEQ ID NO: 46438 - DNA, 320 bp, Arabidopsis thaliana
catttgccagttgcctaatttggtgaacttgacttattcttacaattacttcagtggacaaggaggttcttgtgttccaggtggtagtcgcaaggagattgcgttggatgacacacgcaattgcttggcttctcgacctgagcaacgatccgcccaagaatgtgcggttgtgatcaacctgccggttgattgtagcaaggacaagtgcgctggtggctcttctactccatcgagaccatcaccggttcacaaaccaacgccagttccaactacgccggttcacaaaggaacaccagttccaagtacgccggttcaaaaac

SEQ ID NO: 46439 - DNA, 280 bp, Arabidopsis thaliana columbia
atggtatagtgtgtactatatagcgatatgccgatatggattacgattaacgattcgaggctctaccacataagtctatggcatgacgcatcgcgactcgatctgccatgtcccatgtgtattgagtatttcgtaattcacgcattgcgcaatgtaggcccaggtgcaatgatgatggacttaacctttaagtcgagtcatgatactcttagagaattggggattagtgttctggtttctcgtatgcttgatgatttgttgcttggtgggttactggtaa

SEQ ID NO: 46440 - DNA, 634 bp, Arabidopsis thaliana
atgcgaccaatggtgagaaagcgtctgagagttgttatatatttgattttgaacgcaaacatgtacgttgacggatcagattatgcttctatataagtttgacaaaaaaaaaaaaatcaaatcaaacctgcttaagaagtgcgctcataagatcttcttgattactatactgctcgtgaaacgccattgttgctgtatccgtagccactctctctgatttcaccctcactgaaccaccgtttccgtctgcataaacctgatggtgctgtaccattcccgatggtggctgctggtggtttcggccatgctcggtggctgcaactgtcgtgttgtgtcttgacatggacgaagaagagtaggcttctgaagcggaaaacgcagcggattctgagtcctgatgtgagtcaaaggctattccaatattcctcagatcccaatcattctgtctggtggtgaacatgtcgtagctcggcgtagtgaaaccgcttcggagctgtaacctcttcctggtaagaagtggcttccgaaccggtactgataccctggtgcacttgccagcgggaaactgttcacgggaagtctggttggaagttgttataagcatcgacttgatgagtgttgtgtgtgagatagt

SEQ ID NO: 46441 - DNA, 442 bp, Arabidopsis thaliana columbia
tccgccactcattagtcagccaccttcgtaaggaacttgatcgcaaattcatcaatacattcaacgacaacaggatcgaaagaagccgcaaaataaccccagagctgttattggctatagaaaactcaaggatctcacttgtcgtcttctctaaaaactatgcttcttccacgtggtgcttagatgaattggtgaagatccaagagtgctatgagaaattggatcaaatggtgattcctattttctacaaagtagatccttctcatgttagaaaacagaccggagagtttggcatggtctttggggagaccagtcaaggcagaacagagaatgagaagcgaaaatggatgcgagctctagcagaggcagcacatctagccggagaagatcttcggaactggtatgttgttgtttctctagtttatatatatatctatatata

SEQ ID NO: 46442 - DNA, 518 bp, Arabidopsis thaliana columbia
aatacaataaaacaatattgatttttttttataacaacacttaatagcaacatattttacaattctcattacgactactactcaaatcgaaataatatatgtaagacccataaaatagagaagtcaactctgtttaatcatcaacgtaagtgagcctataatattcttttcatacattattgttatttatttattttgattgattgactaatgactactattcaatattcacaacgaaattgaagtctaaaacaaaattgattcaactattgaagagaagcaaaatttggtatgagttccctttcctcctaaaaacaacaacttttcttttgattgaccattcatttatattacaacaacaatactttttttaaggacccaaatattcacttttttaatctcattgacttcatatgtccacacaactcacaagtcttaccttttctccagacaaaacacagaggaataggagagagagagagaggtagagaaaaagatgaattcacacttcatacaag

SEQ ID NO: 46443 - DNA, 1096 bp, Arabidopsis thaliana columbia
cttagtgggctatgtagtgaaatgattggcccattttcggttggtccattgggattattttttcaaaaaaaattttgaactaatgaaactcataaaatcattatggaaatttccaattgagtcacaaaaataaataaaaacgaaagtgctaatgacaattgaaatatatttaaaacattagtttacagtacaccaccatctcaaaattacatatttactccttttgttacaaatccacggtaggtgtgtataagagacctatttaaacctcaacaaaaaaaaaaaacatctagaagaaaaagatagactattgtaacgatttctccatcgtgcctaatgatcattgttgatatccgacggtggtaaaaagctctccaaacacaatccacaaatattgaaatccacctcctcgatacgccatttctcctctattcttctccggtgattaacagctccaccgtagcggtagagtgtggtcacggtttgaccaccatgagcaatgttgactgcgtcaacgaatatgtaatcgtcgatgatggactccatacttgtctcccaaaaaacgccgtcgtttttgcctcttccggatttgactctcacgagttttgtgtcaccgaactttacgagaagtccggttcgttggctgaagtaaccccataccgtgtggtggatcacctccgtgtttggtgagcattgtgctttgagaatatctgacggtgtttctacttttaagacgaaacagtcttcaccgttaacgggttgttcaccgatgcaaacggcgtctaagaacaaactcgctgtgcatctcgggtctagtccctgccacgtcattcaacagatgaaaaatgtcaaaaggtcaatctttagtcatggtaagtttatatttttttaaggcaaaaattgctaataatatgagataggatttattagcaatcgagattttgtaacaatgttaatcaaaatttgctaataacaattttgtaacaattaaaatttgctaacaatcaaaattttgtatttcttggtgtatatcattgctaggatttatttttttaatggtgttatgaacattttgactggttcctctctggcttag

SEQ ID NO: 46444 - DNA, 623 bp, Arabidopsis thaliana columbia
aaaagagaaatctaagaacagcaaaaacagaagaagattttataaaatatgtctttgcacaacgattcatgaatccaacaatcaaaattgcaacacgaaggttctgctttcataaatttataatataccaacataaacaaactactttgaataaataaacaaaataaaaacagactctaaggtttgttagctcaaattagctgtgattgagagagtataaaaccatttatgtatatgaagagttaaacattacaaaggcattctatgtaaatggtacaatcaaaccaacttggatcgatcaatcatcctctttcattcttctgcgtccaaaaaattggtagtaacgggcagagagcttctgatgataaaaacaacgagcatgcccgagaagatgctataagtataatgggaacgacgaggaacatgtttttactcagaccgttccctattccggccattcttctggttgttgtcagcggaagaagccagcgagccccgtgtttcctctttccataacaccgccaatatagcacacaaagtgcaattatgcagactataggaatcgcccatcgtatttacgaaaacactaacaaatttaggtgagcaagagattgagagaagtt

SEQ ID NO: 46445 - DNA, 569 bp, Arabidopsis thaliana columbia
cgatgatgaagtgttctttgaggtggactagttttggcgagtgagcatgacgcgcttcagtttcgattctctcatcttatgaattttaaaagagggatcctaaataaaaagtaacaaataatgtaaaccacaaaagcaaaacaggccaatttagacacaagttacatcaaatgactaaaaatggaaaagcatgcaccatgtgacttctaacacaacaacgaatatcattttcttgtagctgcgattgggaccatacctatatacaatccccacaacatttttctataatttattttcttatattccaaaaggatcttttacggtttccaaacgataccactattcgaaaaaaccttaattattatgcatgatgatgatgtgtgtatgtaaaactgctgaaagatatatgcaataaattaatgaaagtaaccttatgttgtggacgtctcgtaggctatgtcttcctctacgtggcacatgagaagttgctcatgtgccccctcaaatacttgagctgtagactgtagttttaactcagtgaaacaatacatagctgaaaacatatttgt

SEQ ID NO: 46446 - DNA, 605 bp, Arabidopsis thaliana columbia
  unsure (1)..(605): unsure at all n locations
gtgctgtgttgttttcgatttctcggatccaacgaagaacgttaaggaaaaggatattaagcggcagacattgcttgagcttgtggattatgtagcttctcctaatggaaagtttagtgaaactgtgattcaagaagtggttagaatggtttctgttaacatattcagaaccttgaatcctcaaccgcgcgagaataaagttattgatgcgttagacttggaggaagaagagccttctatggatcctacttggcctcacttgcagcttgtctatgaaattctcctgcggcttattgcttcaccagagacagacaccaagctggctaagaaatacattgaccaatcttttgtctcaaggttacttgatttatttgattcagaggatcctagagaaagagattgtcttaagaccgttctacatcgcatctacggtaaatttatggttcatcgtcctttcataaggaaatccattaataacattttctatcggtttgttttcgagactgagaaacacaatgggattgctgagtttctagagattttgggaagtatcacaatggatttgctctgcagcttaaagacgagcatanagtgtttttggttag

SEQ ID NO: 46447 - DNA, 355 bp, Arabidopsis thaliana columbia
tgtaatatttacgtttatttacgtttatcaatttttcatttccatcttatgaataatcactctctcattttccactatattcatgtatatatatatatatatctcatgttgttatatcggtaaaacacaattttatataataaaaagatagaggtaagttgattctttcgaagaaccggaagcgaacgactatgctgaggtgggagaacgggaaaagaaaagtcctaaaagtaaattggggttctctttgcccaatgagatgagccaaccccgagatgttttacgcccaacccacaaggttctgagatagagattaacttgagtcttggttaagaatgttatgatctacgatttc

SEQ ID NO: 46448 - DNA, 489 bp, Arabidopsis thaliana columbia
tgcgtatacaaataaaacatgtctattgtttaatttttgcttgctcaagtcatattcaagatgttagcttaacttgtcgaaaggtttttttacaaaagtaactgaaactaaaccaatgaagtcactgaaactttgttaactcgagtctcattcaacgacccttttagttgataagaaacagctttgaaaaaccttgacctgtgcagcttgaaagcagaagataataacctaattctttttacttttctgacatcaatcttgttacctttataatactgttagttaaaatgacaaaagacagaaaagttgcaggcgacatgcaggtgacgagtagcagaagacatttgtcgacgtgtcacattcaccatttcagccaaagccattgatctgattctagacggtggagatgaggtcacacgcttcggtacgtaactgccgatacatgacgtcatcgtgtcttgtgggtcggataagtgagatatcgtttta

SEQ ID NO: 46449 - DNA, 590 bp, Arabidopsis thaliana
aataccattaaattagtcgttcattgcttcatgtagtggtatcctgaatagacgagaagcatcaatcacataacagttttttctcttagaaagaaaatacaaagtttttatttcgtttgagtttcttgttttaggttttgacaatttaggggaaaggaaaatggggtcaaagtttcatgcttttctttatccatggtttggttttggtcatatgattccgtatcttcatctagctaacaaattagctgaaaaaggtcatagggttactttcttggctcccaagaaagctcagaaacaactcgaacctctcaacttgttcccaaacagcattcacttcgagaatgttactcttcctcatgttgatggtctccctgttggcgcagagacaaccgcggatctcccgaactcatctaagagagtcctcgctgatgccatggatcttctacgcgaacagattgaagttaagattcgttctttgaaacctgacctaattttcttcgattttgttgattggatccacaaatggcaaaagaattaggaatcaaaagtgtaagttccagatcatatcggcagcttttatagctatgttt

SEQ ID NO: 46450 - DNA, 504 bp, Arabidopsis thaliana columbia
gagattggttatcaagcaacagtaactataagtggtcatatcttcaaaggctttcttcattactatggtgttgatcataacaaagcttttccatgtctttctcaaaaatgatggaaactacttcataggattctgtgtataaagtttctctgttttcatctcaaagtttttgtctttttttaactaagtggattttatatatattcgacattaagggacaaaacattaatgggccattccattcttaaagcttgtctatttttacttttatatatgtatacagagaaatagatgtttttgttagcaagtgaggttgtttccaggatcaacgccaagttgacgacaataatccgtgtagtaacgaactctagcttgaacggtggctgtgttggcccgtcacactccaaagcaccgttaatggcacggattgttgcccaaaaccttgagagataacaggctgaccctattggtcagtacacaaggcggttttgaaggatatgctgg

SEQ ID NO: 46451 - DNA, 550 bp, Arabidopsis thaliana
tctattgtaactctttgagaacaacatcatcactattttttgtctccatgaggaatagtaagtctcagaatatctttttcctgatatcccttattctgtgaactgttctgggattccccaacccacaacaattccagctcagtattcttaaggaagaggatttaatggattctgaaaatccactcctcctttctttaatgcaggcacaatctttgtccaaggtcccgcctgtgagttggccctggatgttcctgccctttttacggttttggtttcttgagtagcttgcttcagttggagactggtatgggtgttctctttggatctctctgttaccagaaccattttctccgctaggggtgatgcttttccccgaagtagttcgcttctttggtgagttttagactatcaccatatttcttttacttgattaggcccctgtaagctttgaaatattttttgcaatggccttatttagaggtggacgtcctcttttttctttccaccaagggcacaataatgggagtttcacgttgtgtacatatttgtt

SEQ ID NO: 46452 - DNA, 573 bp, Arabidopsis thaliana
tctagaatcaactggttttccgtttctggttgccattaagcctccttcgggtgtatcaaccgtcgaggaagccttaccggaaggattcaaagagagggttcaaggacgtggcgttgtgtttggaggttggattcagcaaccgttggtgttgaaccatccttcagtgggttgttttgttagccattgcgggtttgggtcgatgtgggagtcgttgatgagtgattgtcagatcgttttggttccgcagcacggagaacagattttgaacgcaaggctgatgacggaggagatggaggtggcggttgaagtggagagggaaaagaaagggtggttctcgcggcaaagcttggagaatgctgtgaagagtgtgatggaggaaggtagtgagatcggtgagaaagtgaggaagaatcatgacaagtggagatgtgttttgactgactctggtttttcagatggttatattgataagtttgaacaaaatttaattgaacttgtgaagtcatgagttcattttaataatttcaatgtgtaataaacatttatgaaatgagatgtaccgattatttatga

SEQ ID NO: 46453 - DNA, 616 bp, Arabidopsis thaliana columbia
attaaatcaaatttgaagcgcataaacaacagaatgaggaagactttgagttgtcaactttgttgcatgatgatgagatttcaaaaaaataattttttttgaaagaggttatactaaatactctaattcttatcatgttcaacaacaattttgttatctaggattggtataacttccatccctgtattttacccctggaaattacacagcttatagtagacacttgataattgattgatttgttaatctagctaagctgggaactaaaaagggcagataataacaattaggttccaatttcttccagattaacatcaaatcaactcaaaatagaaaaggaaaaaatagtcactatggtaagtactcattgtaaaatgaagacatgcttaacccaaccgcttaacccatgcaagaaggtcgtgaaaatgcagatgattaaaaaaagtgatgcaatgatggatattaattcctagccaagaaagaagatgaaaaggcaaatgattttatttttattttgctgaatattgttaatgtgcaattaatattaaaaaaaaatcaaagtttcatttcataaactcataacaatcaaagtttcatttcataaattcatgacgtg

SEQ ID NO: 46454 - DNA, 399 bp, Arabidopsis thaliana columbia
ccagaaagtcgaagtgaaatattaatagatgttccgttcgatatttgaagacatctcctatgcggttccagacctcaacgggatagccctcatcttgagctatgatgcgacgccacaatagtgagggaggaatggttttatcacttttttggttacgggaaaccacaacgcaaaatacaaagctggtgtaagggttaccgtctggacgaatggtcaatgaatatcctttggctctgtgatcgaacactgcaggcacttctcttcctggtaacacagcctttcccatgaaaaacgattgttggataattgctcttcgtgcttctcggtccaatttgaagcagttggcgaaactgaagcttgcttttaaagtgttcacagggcaaaacaccgtctccagtg

SEQ ID NO: 46455 - DNA, 761 bp, Arabidopsis thaliana
ttgttgttgcaacttgcaagctttatacattcaacacatggtggcacatgcaatcaagcaattagcacctaaacacagcttaaataatcccacttaatatttaagacacattcttttaatatcaactacacaaagaaaagcaaccattcttctataacttgagtaaagaaaaaaaaagggtcaacaatttggctctcttgaagaaatgggatcaaaatttcatgcttttatgtatccatggtttggttttggtcatatgattccatatcttcatttagccaacaaactagctgagaaaggtcatagggtcactttcttcctccccaagaaagctcataagcagctccaacctctcaatctgttcccagacagcattgtctttgagcctcttactctccctcctgtcgatggtctcccttttggcgccgagacagcctcggatctcccaaactcaactaagaaacccatattcgttgccatggatctcttacgcgatcagatcgaagcaaaggtccgtgctttgaaaccagatctaatctttttcgattttgttcaatggggttccagaaatggcagaagagtttggaataaagagtgtcaattaccagatcatatcggcagcttgtgtagctatggttcttgcacctagggctgaattagggtttcctccgccggattatcctttatccaaagtggcgttacgtggacatgaagctaatgtccgttctctctttgcgaattcgcatgagcttttcggtctg

SEQ ID NO: 46456 - DNA, 502 bp, Arabidopsis thaliana columbia
catcagtagtattgagtaacaagatttttctgtttttcaggattcatcgtgcagctgcgtagtttggatgatcattctcctcttccgggtataaccgttggtgatatcggaatgaagtttggaaacggggcatataactcaatggacaatggttttcttatgtttgatcattttcgcattcctagagatcaaatgctcatgaggtcctctctctttggccctttctatgaataaaagcattttatcatttaatatccctaagagaaacagatttatggttgtgcatttttcttcttatagactgtcaaaagttacaagagaaggaaaatatgtagcatcagatgttccaaggcaattggtgtatggtactatggtgtatgtgagacagtctattgtgtcaaatgcttccaccgcgctggctcgggcagtttgcattgctactaggtacagtgctgttcgaaggcagtttggctcacatgatggtggcattgagacacaggta

SEQ ID NO: 46457 - DNA, 1149 bp, Arabidopsis thaliana
agagccagtcaaaacacatctccactagtcatgattctttctcactttctaaccgacctcactaccttcctccatcacactctttactgcgatctccaagctccaccgcgagaaccacccattctcttgcctctccacttcaatcgccacctccatctcctccgtcatcagcctcgcgttcaatatttgcaaaccgtactgtgaaaccaaaacaatctaacaatcactcatcaaagactcccacattgacctaaacccgcattggctaacaaaatatctcactgaaggatgctttaacaccaacggtttgctgaatcctatctccatatacaacgcttcctcgacggttgatacactcgaaggagacgtaattgcaaccagaaacggaaaaccggttgattctagccctaaacagagttcttgaactatcttgtctacaacgggttggctaccgaaagcgcagaacacaacctaaccgtggttgaatttggctagccactccacccattgaggctctaaggagggctgattaggttgggatccagggagaaccggtccgggtccggttaggtaacccggtttgctgtattggctactgatgtcacagaattttcattctcattgcggtaactttcccgtcaaggaaagaaccaatcccctccgcgcacgcaagacgactttcgagacgtcttagctaactcctcccctctctctctcggcgctttagcaatttccgttatccaatgggcagagtcgtagaaaaccaagtccggtgttgattgtacggaaaattgtctcaacctctgcccgggtttgtggcctttttcagctagtttgttagtcagatgcaaaaatgcagtcatgtgaccaaaaccaaaccatggaacataaaagcatgaaactttgacaccatatctgttcttttgttcttctgctttgtcttctgaacttcttcttagagtttatatgtttctgtttatgagagtactggtatgaattgaatgattcaattgtattacgaatatgtcaaatctttagttttgattactttactatctatatttaagttgtttataatctgtagtttccttttgttatttaatttccagaaattactccctaaaatctatggtatatgtctcaaaatta

SEQ ID NO: 46458 - DNA, 300 bp, Arabidopsis thaliana columbia
tgtttataagataaattataataaactctcataagaatagtattacaatttattgtcggttatgtagagattattataagcataaatgtaaataatatattgagagataatgttaaggttcttaaactctaatattaacatttatcttcctggataatatcgtcttgccagatctcgatcttttcatctcaaccgttgatctcggtctagcttcggttcttcatatcatagtgtcattataatcagaatccgagtatcattcgagaaaccagatgttttcagaatccgaataacgattag

SEQ ID NO: 46459 - DNA, 502 bp, Arabidopsis thaliana columbia
aaataaccacttggttcttgtctaatcagcttggcttaaataacctaagcttagaccaaatattagcatagactaagtcatgctatatatcaatcccaatcatgtttcacctactttacataaactatgtcttcacacataaacttgatgagttaattccaatttatgtggtatatgtagtggtctgtggtctaacccatatgtctttttttaaacgacttatctacgtagttaccttatctctcatcaagcttaaccaaatcatctttcttaaacatagagcgtcctaatgttttctattaacatatattatgttttctgaacatatataactgtttaacgagtcatcttacatttaaaccccaacgttatatagtttagtttcactggtatagctcttgttttgatgatatatatataacacaagagcatttctaaccaaattcgaatggattttaattgcttttatttctgatgagaaaactatgagtgtacacccgga

SEQ ID NO: 46460 - DNA, 524 bp, Arabidopsis thaliana columbia
ccatcatattcaactacatcttttacaacactaaaattattatacgtatgtgctatactacttgtattcttttctaatgatgatcaaataattaacaacaacataagaccaggtgacaataaccaaactactgataaatagtaagatatttcaataatgatatttctggtgcattataacgttagtcgccgaatcacaaatttagagttaaattttggggtttaatgatttctttatttacagttccatttatataatatagcctaataaactcgttattataaacagtactaatatattttgataaaataatattattatttaaatttataaaacaatctatgctttatgcgtaatctttgctgatatattcattgcttccccgctagttcatcaccagcacatgcatgcaacgatcgccagtctgaaaacttaaatgctataatattgaataggcaggcattaaaaataagtttcttaatatatcaaatcggcgtcaactttttagtatgcattttatgtaa

SEQ ID NO: 46461 - DNA, 522 bp, Arabidopsis thaliana columbia
cctcgtgataagcttgtgtgtatccttaactgttgcaaagtgattaataacttactgctaaatgcttcaattgcttcaaacgagaatgcacctggagcagacgaatttcttcctgttttgatatatgtaacaataaaggtattgggaacgattgaacaacttatgcatactggtatctgaagtcgtatttttgttgtacatgattatgtttcgaatgtgcaagaacatctactagtgctaattctgttctttctttttgcaggctaaccctccacaacttcactcaaacttgttgtatatacaaaggtataggcgtgaatctaaacttgttggtgaagctgcgtacttcttcacaaacatactctctgcagagtctttcatctcaaatattgatgcaaaatctatttcactggatgaagctgagtttgaaaagaacatggaatctgcacgggcacgaatttctggtttggacagccagacttatcaaactggtcatggctctgcaccaacccctcgtgatga

SEQ ID NO: 46462 - DNA, 457 bp, Arabidopsis thaliana columbia
  unsure (1)..(457): unsure at all n locations
tctggcggcgggcgtggcgtggatggcgagcaggcggtggatgcactggtcgacctgcgccactgcgctcgctgcagcagctcggcaatgatgcgatccgtccgctgctggctgcgctgaagcgtggcgcgctgcagcggctggtgctggatttcgaggatggcctgcagtttcagctggatcgtggccagcgctggcagttctggaaaaagccgcggcagcttcacgattgagcgggatcggatccgttttccatcggaaaacggctctgacccccgatgtttgccggggttgcctggcagccgcnctcaccagcaggagccgggcgcaatcccgccagcctctcccacgcgcggtatcatccctctgtcatttcgtaaccggcgatgcgatgtcccttgcctgcgatgcctgtcagccctcctctgatacgccgacgatccgcctgcgcgatgcg

SEQ ID NO: 46463 - DNA, 505 bp, Arabidopsis thaliana columbia
cgttacgtatcgtggtccaactatggtggctaatacacttcacgctgcagcgattttgcttcgtgaaggtggtgattgggattggttcatcaatctcagtgcctctgattatcctctcgtaacacaagatggtaacgaaatttagatcttataatctcagactctgtttattgttttaattgaatcatttgaggtttattatgtcgattcgattttcagatctgttgcatacgttttcgtatcttcctcgagatctcaatttcatcgatcatacaagcaacattggctggaaagagtgagtttagctagctacattacaatctacaacagtttgttttaggcaactttctctgataattttggtaaaaacttgtataggtctcatagagcaaagcctataattattgatcctggtttgtatatgtcaaagaaagctgatgttttctgggtttccagaagagtagtatgcctacagctttcgaactcttcacaggtgctttcattt

SEQ ID NO: 46464 - DNA, 251 bp, Arabidopsis thaliana columbia
aacattgctagacacatcgattctctggtttgagggagaagcagcaagaacaagctttccaaataaattagaactttattagagtttttacacgtcaaaacacacaattattgaatattgatacaaacaagtgaaaaaagaagataacattattgatgatacattgcaagagcttcgattgtcgacagagtaatcagaatctcattattttgaatcccctagagcgtatctgaggttagagtacttggttt

SEQ ID NO: 46465 - DNA, 521 bp, Arabidopsis thaliana columbia
taatacatgatcttccaccttgtgcgaatccttctacgatcgaatgatcaacctaataataaacatttaaattaataacaacggaaagatattaaattattttacgaaaactaatgaataaggttattaatgtaataccaagattctcattgtcaatttctctccttttaagaccggtacgaagcttccatagattggtttcaccacatcgtttgccaaagtcgacctataaaaaatgattttgattaattaataattacttgatttgtataatagaagaatctattaatatatgggtatagattgataaccttgaggtgtcagtgcagaagacagtattgagttttgaatgttttcccttagtcacatagaagtaaaccggagtttgttctgacaagccctcgtcagcgagaaccgagaatccaaaaggccctaaagcaccacgcgctgtggagcctccgtttgtttcgcagctgaatttattgtcggcctcacagagtcatcacaaagaataacttgag

SEQ ID NO: 46466 - DNA, 546 bp, Arabidopsis thaliana columbia
gttccatgctagctttaggtttttcaaaggtttagattatatgtctgcaatggtgaacgtaaactatgaatgcatatgcattataagatagtttttcaacgttttttggccttttgggaaagaaacttcagtcgtctaaacggttcctctagtacagcttgacgctttggcaggtgatcgagtccgcccaaaaatagagaacttgacattttcactaacaaatttatttgatactataaatctgtgattggtcgttgctctcatcttaatttcttctatattatctttacttggactcttccgccaatcttttataaatctcacacttttaattaatatgatgtctagtttattacgaagattgataaacttttcaattaattataagtaggcaaactaggaggaggtccaatttcatattaatattttggttacatgattagaaagacatttgatgcccttgtgtcggctgattatgatataaacaattttacgtaaaaaaagaagaagacaaatcttccggaactcacatgctgtaacagtaga

SEQ ID NO: 46467 - DNA, 527 bp, Arabidopsis thaliana columbia
cttgagaacgtctgtctcaagaaccaaaaaagatctcaaatcaatcctgatcatatactagatataacaaaactgttaccttagatgatccattattctccatgtattcatagctctgatcaaagtcggttagcccgaaaatctcctctatttgccactgaggaatgcttccagtagttgatccgctacttacgagaggaagctttgtcgatgtctgatcattgactttagttcccggtataactccttcctgctgttcctgctgctgctggtgatgatgatgatcgaaggccatcttttgaggctcaggtatagattgaacaaaaggtttggtctccatggttttatcatcattggtaggtgaggatttagtagaaggaccagtgtctatagattcaagaccaactttgattccagtgagaagaaatctctggtgagctgaaacatgaggattcacagtgtggattgcaacatcacatttcctacatagcaaagctctatcttgcagacaaaagaagaatccagat

SEQ ID NO: 46468 - DNA, 505 bp, Arabidopsis thaliana columbia
gaaagcaatgaaacaacacaaacatacatcttcgtctccttcttctgttgagttgcatcagaacatagagccatgctgcatttgtcaggtatttgattaagtatgaactagaagttttttactcgtgtgatacttacctactaattgataagcataacataaagaaaagttggtattgctgagcttgcttccattattgataagcataagataaagccccaacacatgaactgatgtttaaaagctattgctgctgtttttgacaggaagagtatgtagaaggtgataatctaggaaccttgaaatgtggacatgaattccacaaggactgtatcaagcaatgggtcatgatcaagaatctctgccccatttgtaagaccgaagcattaaagacgccgtagtacgtctcatcttcgccgtgccttcgggctccattcatcatcattgcggacccgaaaagaaaaaaatacaaatagtgaccttaaagttctggtatatccgtata

SEQ ID NO: 46469 - DNA, 544 bp, Arabidopsis thaliana columbia
cgaaatcaaaccgtaaataaattttataccatatttttagtattcggataaaatttgcccatcccgagaaagtcagaaaacgatcattttctaggaaaacgaacgaacagaggacaaatatattagataaacagagggaaacaagaacaaaaacgtttgcttcattctctgaaagactctaatggcagccaccacgagacggttgctttactatgtgtccaaaagattctctaccgccggagtgcgcggagctatggcggtctgccacaatcgaattccaaatctcctccgtcttcttctcaacgattgatggaattggaatctgaattcagtgcccacaagtaaagtctctttctttcctctttttgggttctgggttttgcacgttccatcaaaagttttgatatttgggatttgtttggttcgatcggacttgtatgtatatatgtacatgccatagctgtatagagctcatgattctgaaacttgagaatatataactggagtggtgacttttattttagttttgattagatcatgatga

SEQ ID NO: 46470 - DNA, 568 bp, Arabidopsis thaliana columbia
ctaataactaatgtctagatgcaagagtatgtaaccagattagaattgtaatcaggatgatgtagaggctgagatgaggaggcttaaactggagctgaaacaaacgatggaaatgtacagtacagcctgtaaggaagctctcacagcaaaacataaggtatgactctcgcaaaaatgattagtgttgcttcattattgtttctcactagttcctactaagcgaattgttgaacctgcaggcaacagagcttcaacgttggaagttagcagaagaacggaaattcgaagaagcaaagcttgcagaggaagctgcattagccattgcggagaaggagaaagcaaagtccaaagcagcaatggaagcagctgaggcagctcaaaggattgctgatatcgagtcccgaaagagagtcgatgcagaaacgaaagctctgaaggaatcagaggcgagaacaaaagccgtgaatgctttagcaaaggatgtcagatacaggaagtactccattgaggagattgaggatgcacagagttctttgatgataaaacaagatcggagaaggcagctatg

SEQ ID NO: 46471 - DNA, 492 bp, Arabidopsis thaliana columbia
agatgataagcatgaacgttgccttttatattgtaatcaaatttgatgtaatataaactaatatagaagaaccgggcggcaacaaatggtacacaattttattaagtttacatcactaagagaggtagatcttatacttaattaagaataaaatggaatttaatgggaagatcttatacctaattaagaataagatggaatttaatgggatgatcatatactacattatgaatttgatggaatataagtttggataacatgtcatatgcatcaaatacatttattattagttcatcatggatttattgatagaaagaaagaaatatatcattggctttttatttctggatgaatacaaaattgtggatgattggatatgaccgtagatcttagaatttagaaggcagatttaacttgtttatgtgacttaaccagatacggactaatcaggccattagtccgataattagtccatcgaccacaattaactaa

SEQ ID NO: 46472 - DNA, 450 bp, Arabidopsis thaliana columbia
tatcacatgttttctttgcccagaccgaacttgaagaacaaccggtttggctggtttgatcctaacacaaatttcatcttgtgactgaagccgttaaggctggtcccactacaaattatatgattggactcgtgagcccggcgtggtccagccactgtcaagtcagccgttgccaacgaaccaccgatctttccggtctaatgagtgggccttgagggacccgttatcattcccttggggagccaaagtaattggctacacgtgaagctcgtgcgtgagtgtgtgtattaatttacctatctctatattacaaccaatccatatttcattggacacatgacacatgtatgtatgtatggtgatgagaatttgtatttgctgctaatatattagattgaaattattggttatgattagtcttggaagtttagtttgtggcatggccaagaa

SEQ ID NO: 46473 - DNA, 513 bp, Arabidopsis thaliana columbia
atttcaagactacaaaaaacaacagaagaaaacacccaaacaaaagacagagacaacaaaagagctctcttcttcttgtaaagttcatagatagagagagacaacaaaagagctcttcttctagtaaaggatcaaaagagtaagtcaaatcctagtttaagcaaaacaacaacacattccttgcgtgaggggttacatcatctaaaactcacttcttccagagattcttggagaatatcctcttgcaatatggagtcatcttcagattttcatatcttctaaccttctccaccaagctcgctcgaacaaagccctgttcaatccaatcagttccgttactatgttttcgagtctgttaccgatcacatgactaaactaactaaccttggttttcgatagagcacactggatcacgtaattagcataagggtcttgaagaagatatccgaagtttagaacagagacgagttcattcacaatctgagatctgctctctggataatacctgagaca

SEQ ID NO: 46474 - DNA, 487 bp, Arabidopsis thaliana columbia
tctcttcagaacttgcatagtttcacaaatatgacaaagaaatcgggatactaccaaaggaagttgcttgatcaatgccactaatacataccaatacccataatgaagctttatgaggaaatcatttcatgaattcagaaacacaaggacttctagactcgatatgtctctatttgtgaagttgctaatggtttgaatgaaaatagggtgtagaagtatcaaacctgtacccgagaagaagccagagaaacacagaagcttgagcaacagctccaccagaaactatgaaggtgatcgatgacaaaccagaggtaaaccttccagcagtcattgaacactagaatgattttacagcaggaaaaataaggattaaccacataaaaaaaacacgagagtaaaaaaggatgattttttacgtttccttttaacttacaactgcatcaagagctccgtagactgccatcgccccaccaacacctgagacacc

SEQ ID NO: 46475 - DNA, 550 bp, Arabidopsis thaliana columbia
gttccgataaacataagttttggttggatgtttctaacaggtcattatgtcctacgggcttcttcacgatgattatgaatacggagccataactgagagttgccgaaaggatgtgctgctcttattgagggagttatttccgaggaaaatatatttgtgggaaaattaattccatcaacaagtcagtctaattaacaaaggactagaaattgtaagtttctttcggtgctaaacacatgggccaaaccttagagccaacatccgtgtttatactttgactccttattaaggtgcctcagacaacaacttttgagtttggctgatataagaaatgttaatttcaaagaatttgattgattttctttgtttttgtgaatcttggtctcttgttcattcggatgaagaaaaaacttgaagacgatattacaaagaaacttctccactagcaaaaataataacattagctttgggcactccactgtcttgtccctgggcttcgatcttgcgcactacttccatgccagacaataccttccaaacacaacgtgat

SEQ ID NO: 46476 - DNA, 561 bp, Arabidopsis thaliana columbia
gttttgttagctacaattcctaatttcctatgatttgtacaataatttaaagattaacacagcttgtgggatgcacatggaatttgtctaatagaatttagttccatcatatttgcatacaaacaattgtcacctattaatactttcattattactttcgatgaaacattgttattgggtatataaattaaggcccggccctaaagcgcatttattagccacgtgcagtaacttattatttttttcacttatcaatagtaaaaaaaaaagatcaaaatgatcactcttttgagtgtgagtgaacacacttcgtcgtctctctttcactacttttgagaagctctcttcttcgagcttccatggatgcaatcaaatgcagttccagtttcctccatcacaccaagctcaacactctcttctctaatcgcacgtttcctaaaatctccgctcccaatttcaagcgctcttccgtccgatttcgatttccgcaaaggacagaagaagcaacgaagctgaaaatatcgcggtagtagagaaacgtcttaaatcagatagattttt

SEQ ID NO: 46477 - DNA, 501 bp, Arabidopsis thaliana columbia
gatgctatgtggtgggcgctgagattgcggctcagctctggctgtggatacaacagctgctgaaccatcacttttagcattaaagccaagttctttctcaataagctgaagtgtttgcggatgaaagactcctttccaggttccaaaaagatgccgcatgttagaatgcataggagggtcaacttgcctgtaagccttaacaaaaaccttcagagaagtaaaaagagggtgatcagagatgaatttgctaggaaaaaaacattctataaccatgactatcaacaaagcaccaaacctcaggcagcctggcaccaaagtacttaatgtaatccttccgatgttcttcacaatgctgtctaacaggtacagtgttggcagcttctgatcacttggtacctgcatgatattcttcaaatcagataacccagaagaaaaaaggccaatgttgatctcatagagagtaacatcgagatttcacatgagcctctaaggtaatgaaag

SEQ ID NO: 46478 - DNA, 394 bp, Arabidopsis thaliana columbia
ggcagtgcttactattttaactttgattgatagttgaagtctctgtgactttgcttttcttcacttaggattgtggaggtccatctcactgcggaacgtcatgtagtgcacttgtgtcagaaagtgtaataggtattaaaatcacactctgacagcatgttatcttaatggaaaattaggagctcagtagagaatgataaggttgcagattgcacaatgcttttgtgctaatgaagagttaaaccaccttaaaaatctaatggtttgcagggtatgttgtatgcacttctctagggcatgcctcaagcacaaaagttgatattattggtaaggtttaggataggtgaaaattgaggctattttccccggggtcctaagtgttgaaaaagctaaa

SEQ ID NO: 46479 - DNA, 136 bp, Arabidopsis thaliana
caatattttccaagtaaaaataccaacctggttcctgctcataatgcgtctttctagttcttcttctggacaatcaaagaatagaacaaaagcaggctcgattctagcctgtcaagatccagacagtattaaacca

SEQ ID NO: 46480 - DNA, 440 bp, Arabidopsis thaliana columbia
ttttattgatcttcagctttttttattacacatcactatcttgttcatatacgagagactgattttgctgtgcaatctttccagaatggcgggaagcaccacatcacacgtgtcgatttcctcgtgctggggtgaagttctcctttctcacgggctacaaaactaacacatttttggcttatttcggttcattaaaacatttctgaaatactcgataaccgaaccgaaatctcttgtagagaagcaccggtatttccacatcagagacttaacgagtatcaacatatgacaatgtaaacaatttcgtaactgaggatcgagaacagcgaatcaatctcgaccttagcgtgtgagtaaagccatcgtaacgtgttgacctccttgggccagccccgtccacaacgtaacgtgtgcacattcagtctttgagacgactttgg

SEQ ID NO: 46481 - DNA, 521 bp, Arabidopsis thaliana columbia
agaaaagaaaaaagtgtttggcatttaataaaacgtctcattcattgcgaagagattagatagtagagaggtcaaattcaatgtcgcagccgacaatagataagaagagataaggtcttcgttatatttttttgtttgttttttaactgtcacgtgaaactgatatccacaaagagcgaatgagagacgtagaagagtcaaagattaaaaacccaacgaactttgactcatcctttgaaggtgttcgttaattatccattttttggtctgactcgtggcatgtggcaactaccgaccttagataagcctggtcctactctcgtattcgatcaccacgtgtcgatcggcttatccgacacctcgagtgggagttgtatgttagtaactagataacggtcataggtacgattatgacattgacatgaaatcatattccaactatcaacgttagtgtccttgtttttatccctgtaattcagtcaattaagcgatcgtaccaggtgagtctttgatattgttgt

SEQ ID NO: 46482 - DNA, 573 bp, Arabidopsis thaliana
ttgtagatgtactaaggttagcatatctcttggaagtctttatttgtatctttacccttggaagtgaatgtgtttacctctttgttgaaagttcactatatgtctctcaacttgatgaacaggaaatatggtgtagactttgttcttttagctggatatttgaaacttataccggtcgagctggtccaagcttttcctaaacggattctaaatattcatcctgctcttcttccggctttcggaggcaaaggtctttatggtataaaagtgcataaagctgttctagaatcgggagctaggtaaagtttcaagctcatataatgttatggatgtgtagtgtagtttcttttttcccttttcttgtgcaagaaaacattcaacggtttttctttccgtagatattcgggtccgacaattcacttcgtcaatgaggagtacgatacaggtcggatacttgctcaaagtgcagtccgtgtgattgctaatgatacaccagaagaattggccaaaagggttcttcatgaggtactactaaagaatatctttgaacattacatttcactgttcagaaga

SEQ ID NO: 46483 - DNA, 439 bp, Arabidopsis thaliana columbia
cagagcaatatttacgaatttcgatttttgatcatgagaagatgattacgcaagtgtttaattaggttttggattagctgattgattacatgtagatttcatttagttgtaagtaagtaagctttgaacacagctttgattgtctaattgtcaaattttaactaagttgtttgcttgcaacctatgaattctgtgagactgtgagcttattagaacacttgatggaagaaagcaaaagtatattgcgtaaaattgaataatccaagtattagatcttttgccaccgtttatggctatgtgagggagagtgtacgtacatgcagcgacttttgaattgtttgcttccaacttttgccaccggttatggctatgtgagggagagagctcgttaagactgtccctggaagtgtaattagaacaattgtgtatagaagaaggc

SEQ ID NO: 46484 - DNA, 515 bp, Arabidopsis thaliana columbia
cctaaaatgatgagtctagctagtaatagaaaaaacaaacataaatgtacatgaacatgaacatgattaaaaaaaagtcgatagattaaaaaaattggatggataatatatatcataacacaaagcatcaaatatatagttgaaagatcatatgaagtttttagttttgaactacgttcatattaataaatctgatcttatcgtcaatatactgaattcaaaatcatgtttcagttaattgaaaatttattcatgcataagaaaaaaaaaagtttagtataaggtgttgggaaaaatatttgttcactcccaaaaatgaaaaatgagaagccagaaactagatataggtatttgtttgagtaaaaatataaatgcttatagagttctagtccttgttgaaaagaaaagaaaaacatcttaagcttcaaagaaatggtgaacttaaatatctcatttgataacatttgccaatacattgataaagaagataaaattagaattgcgaaaaaaacaat

SEQ ID NO: 46485 - DNA, 1097 bp, Arabidopsis thaliana
tatctaaaaccggagacagagagatcactagtgctctcttcacctgttgcaacgtcgcttgtcttggcgttgctcctagtgccaatgccgtctccacctacggttcacgacaaaatcaaataaactggaaaatctaattaaaccgggaatttggtttggttatagttttttttaccaggttgagttgcattttgatgtcatctcgaagctgtttcatggtaactccggtgacggtcatggcatttccgaccaacattccggcgattgggatcatatacctcggagtgaaaggaaagacgttgaggaggacgagcaagaacattgtaattgaagtcccggcaaggatcgataatccggccacgtactttccacgtggcacgtgcctcgcacgttgtccggcagtgtaaccggcgacagagacctgttcggaaaccaaatcatttcaaataaaaagaataattaaaaaaaacagagcagcagatcctgagtttgattgaaactaaccatgaagagatacgcaaggatgatccagcctgagttctcttggttaaagatgaactgaagaacaaatccgataacagagagttgaagaaacgatcgggaaacagagtatatcatttctccttccaaagataggttctgcgagtatgaaagaatcaccgccaaaagcaccaccacgagcgccgccgctggcttcaccatacctttcagaaacacgatcagccattcgtaatcgttgaaaaaatcatcccatttcagatccatgtctctgtttctctctgtctctcgcaacttttttgttttgtcgtcgtcttctgagtgcggtattagtggagaagggtatataagagaggaccagttggacactttcctatattcgattccttaattatgaatcttgtgtagtaaattttgaattaatcgtgcaaacttgtaccttaaaattttaattattaaccaaagaaaattttgatggcgtgtgtttctcaacttcacattacgtcatagagaaactcttggtgcattttaccgcattatacagctacattcatttcattacctggttaattattaaattagtgtgtttatattactca

SEQ ID NO: 46486 - DNA, 548 bp, Arabidopsis thaliana
gttagtcgtttgatggaaggactcgaaactagcgcattccaaaccgggggaatttcaatttcatcattacgtagtaagaattcctcaagcaaagggcagccagagatgaaaagttcatacatatcagaatctacaaacgtcattagaacgagagagagtgttttaagctttgggaaaaacacgccaccaggaggaagaagaccatcaggagaaaacccaccggttatagtgagctcaacaagtgtgttgctcgtgaagaactcagtgtctatagtatacaaactttgagcgttcaagtaaagttgcaagcagccgcgctcgaggaaactgcgaatccaagtgttcacttgagactcgccatactgaaatgtattattcagagaggttctcttaatggtggtagaatttgttaagagggcaagtgttttatctatgaattcagggaagcctccaggaccaccaattgcgtcattgatatcaagcttgtctacaagagcaggcagattgtccaccttttagacagaacagctgtggaagcagcacgtttt

SEQ ID NO: 46487 - DNA, 511 bp, Arabidopsis thaliana columbia
cctattgcattttgctttatgtatactattatgatgtataataacatagttaaatatgctatttataatgaaaacacaaccttatcgtgtgttttagcaaaacaaatcacaaattgtctgtacacaaaaaatgtttttttttcaaaacattcagagttaaaattacagtatgtgataaaacacttgaaagttatgtgcgtataaaacaatcaatgtatgatatatatggattttacagccctatgtataagaaagataaaccctatatatattaggtagcaaactagcaataataaatgaagtgagaaagacaaaaagtagcaagataataagaagatctaatttttgggcaaccaaggatatagtcccacatggtgtgagttttgcgatattagttttgttaggtgacatgcgataaatatgtgaactgtatatggttcccacattgattaaatcgaaaattgttttatgtatgtatgaaaatttgttatgtttcactccatatgtatga

SEQ ID NO: 46488 - DNA, 586 bp, Arabidopsis thaliana
gaccttgggctttagattcactagaaccagatggttgtcagttccaccagaaacaagttcatatcctctctccattagagtctgcacgaaacaacaatgtagagatataatcaaagtagatactacgccatatgtgtttttctttccttcacgggattagtacctgagcaaactttgcactgttactcaggacttgttcttggtatgctttgtactctgaagtagttgcctgcattttcaaaccatttgaaggttacagaaaccgcaaatccaataagcaacgttagttccattccgtgcctcaccgtacctgtttcaaagcaacagctagtcctgtgatagtgtggttgtgtggaccaccttgaagaccagggaagacagcttggttgatcttgtcttcaaaatcatacaaaacctttcaagacaacaaatgaatgacgtgaaagattatacataaatctaaaacattttggttcaaattttgcttctttttcttttttacctcttcccttgcttgttaattccttaacccctttctgaagacaacatggctcccggggtcacgaagtgcttgtgagttgtggtg

SEQ ID NO: 46489 - DNA, 1901 bp, Arabidopsis thaliana
tagacaaagccaccgagagtcaacatttgacaactaatcttctcaactaatacaacaagacaccgccatcaaataccaaccatttcctacataatattgtactaagaatttcttttaagttttaactaacgatagaatcatactggaaattagtcaccagagatattacgaaaattgaaatctttgtaaaaaaaaatttactccaatattttaatatcttctcgtccgtacgtgatttcagagggaaaattaatataaaaaagaaagaagaacatattaaaaaaaaaaaattaaccgaaaacagtaacttcttatttccctcgaaaaagaatattttcacttaatccaagcgtaaaccagtaatgagaatccaagaccattgccggaaccggaaccagaacaacctcctccgccgtactccgcctcatcagcactactagcccattccataaccgacgagctacacgcccgaagaagccgacgacatcgaaatcgaagacgacgaagaacttctcttactcttaacaaatctcttcctcatcttcctccactcaacaatccctttaatcccaaaactatttccacattgcttcttcggcttccataaaacgataccgtttcgatttttctcatcttcttcttctttcctcttcgtttcacaaacctcctctgcttctggatcactctcgaatctaaacataaacacggcgtgtcctcctcctcctccgccgtcaccggaacttttactctgaaacaaccaattgtatacatcccaagagatctgaacatgaactccatcgatttcaactttctcatttcctctaaatttccatctaagtctcttgatctgcagaacctgtttcgaatcaacgctaaaacagagcttagcgtcttcatcaacacgacaatcaatagaaatctctctgttcttccctccaaatctcgctttcgttgtgaaaacctagctccaaacacgtgctctttcctcaacagaagagcttgcggattcgtcggaggtttcgccgatttagcacgagcgtaagcttctttgactgaatctccgactaatagtcccatctctccgtcaacaactacagcgatgtagaatccggatctaggttcggatccagagtcgaatttggctttgcttaagtcccagaagacttggattttgggagaaacgaatctggatccacgttttttccagaaagctaatgtgtttaagttgagatggaaagagacggcggaggaaagagagagatcagcggaggagaaagagagtggcgaagagtggttgtagtaatcttgtgaatggaggaagagattcacagagtggcctcctaagaaagttcgggaccatgttagatagaagacgccgtgatctgtttggtagagacatgttgtgagattcggatcaccggaagatagaggggacggtgattgcgacggcggttgcggtggaggatgattgtgatcggcggttggcggagccaagacggagacattttcgtgtttacttttttttttcaagttggggaagaagaagaagaaagaaagaataaaagagagagattttcgggagttttgtatttgggaggtttttattatttggttaaagagggatttgtatatttatataaaaagattgttaaattttcagaaaatggaaaggttataataatgattggctcgaatcatacgtaaaacaagaatgtggatgaggattgatagcgatatgagattataattatgcgaaaattttgatcttgtgggcttgcaacttgtaaacttgggcataaaatctgactttttcaacttgactttcttcttatatatggaggatggatttaaacaagaactattcacattaggttgaatattacgagatattcagggttaac

SEQ ID NO: 46490 - DNA, 546 bp, Arabidopsis thaliana columbia
aattaataggagaaaatatcaaatgctagaagaggtggaaggacaatggattaaacttttatcatttcaaatcaaatcatccaccaaatacaaaataattaagcatgcaaacaaaattctttggagccaattgagccccacctagtcaaatatataaatataatgatatataattagttagttacttagatatttaaaaatcatgtgatattacatcaaataatgatatcttaacacccttactaatttaattaaaattatggccgggcagatataagtttaaaatttgttatctttgaaacgaaaattatatagggaaaaagaaaacaatatgtgaatatagaagattgatttacaacatttttccacactaaaacccgagttaccagacacaacaaaaccaaattatacataggaaccttttaatagaaattcacacgaatgaatatcaaagcacatagaaatttaatcaagaggatcaatccaagttttcaggttgttctcttgagagcaaatgcagataggatgacgaggaacatgagaaga

SEQ ID NO: 46491 - DNA, 765 bp, Arabidopsis thaliana
catcctcttctattgagctcactctaacgcaccggaatatcgccggtgagttaacctccggtggtaagtgttgactcacctccaaccctaatttttttattaatgattataagatcaccaaaatataaacatgagatttgtttttagccccttttagtataacatgttgttgattataaagcgtactcccatttcatatctacaaaaacgaatctttattgcattgtttttacatgaaatcgatcttggttagatccttttatgtcgtcaggtttactaaggaacagtaacttgtataaataaagcagcaatatccggcggacatcctcattcacacgcaaatgatgttgtacttctccacaaacattcataattaaaactttgacactttttcatgaaaatttaatcaatcttgaaagctaattcaatatcatcaagaattttacctgaattagaattagcattcaccacacgggtattagcaagagccgatccaccaccaccactatggtctttatcatcattattatcaccaccactagcttctcgaaggcgtttggcgttttgcgtttcacggctggaggctgagtggtgctgcaaggaagcgagttgggctaaacgctcacgacgtttagcagcaggaacccaagtgctcttaacgtgagtttgacaatgaaagcctcggcttttacaacaagttctacatctcatatgaggacaatctttcttagcttgatttcccaatcttgacaattcatactcctt

SEQ ID NO: 46492 - DNA, 583 bp, Arabidopsis thaliana columbia
caagagtaggagttaaatcttgatagaattaaaatactatcctagtcaattccgaatgggaatgttattaccccattgaattgatcaagttcatacatggaccatgcataggttatcacgaagagataaataaacatttacttgccgaatgcaaaatatcaacattaaataaacgaaaacaaaaaatgggtcattctcaaataatattgaagtgtgaaatttataatgtgtacacacctgtcatcataagtaagcgatcgactgtccttttctaactaacttcaacatttcacttcaatacttcaactctctttctctctctctctagtctttatataaaccctacgtacgtactctcttcacactcactgagtcaaactcacgtgtcaatgaccgagtcatccattatctccgtcaaacaatcgtctccggtgccggaggaggaggatcatcatcatcaccaacaagactcccaccgaaccaacaccaagaaacgtgtaagatccgacccgggttaccgaggcgtccggatgcgaacgtggggcaaatgggtctccgagatccgagacctcgcaagaagagc

SEQ ID NO: 46493 - DNA, 643 bp, Arabidopsis thaliana columbia
  unsure (1)..(643): unsure at all n locations
ttctcaaacattgccttattgtacactcaaacgattcaaattcccaagaaaaatcacagaatcgagaatttacgaaactaacctgagatgaagatcttcaccggtagagaatgtgaatggtttttcgatgaacaacgctttcacgagctccgccgataagaaccacgagcttgataagaaatcaacctgaagaatccgatctaaggtgatgtcataagctggatcaggcaagtaaaggccagcttccttagatctaaacttcctatagctcggaaacgtgaaatccttttgccggaaaggtaaaatccttccgatacttcccaaaacagagttttcgtatttctcagttccggcgacgtgtgagagcatctgaagcattttcttcccaggaatcatatcatcgtcgaggatataaaccagatctgcttctgtttgaagcgcgatctggaatcttccatagtatttgaaatcgtagtttgagctgatgaagctgattcgagaatcgttgtaacttccggcgattcgcganngagaagcttcgttaggactcccgaaggccaaaacccagacatggtgaaacggtagcgtctggtggagaagagaacaagctgacacaaagtgttttatcttgaagtgattagta

SEQ ID NO: 46494 - DNA, 469 bp, Arabidopsis thaliana columbia
gactctagcctctcagtgtcacctggcacctcggcggtgcacccgcgagtgataccgtccatcgccatatacacggccactagcccaaccaccgtacaagtttcagcagaaggagccagtgggaagatttttccacctacgccaactcctcctaagaactttacgatgggagatttgcaactaggatgcatgagcatgataatgtaaactaacttgtgttgcacggtgttttgtgtttttctttttcattcttttatgtcatatagtacttatagatttggattgacaagcacatctatctatttaggaggcactcttccaactccatttagctaaacccgaataatggccaaaccggaacaatcttaatctaaaagatcttttgaagttgagatatctcggattctgaatcgaactaaaatttagatttgtactttgatcctaattgtctaattgacattcctagaaa

SEQ ID NO: 46495 - DNA, 821 bp, Arabidopsis thaliana
aacttgacaatagcaaaaaatgttatattacctataattttagattttataaaattattatgtacatattttagaagtaaaagataaaattataaaaattagcgatattgagttttgttttgcacaaaacccattaaaaaaagtataaattatgaaagaaatttttcacatgtaaagtttgcctcaattagccttattctagattttgtagctatagttgtcgaattagacttaaagttacatcatacagacgttaagactatggatgcatatcaatcggataccttaaaattttaaagtacaagatttggatccggatatttaaatgcatgagggtatacaaaaccaaatccgcccaaaaagctaaaaatatttttaaaaaaatcaaatcataaaagaaaaattaattgaacatttttttttttgaaattgactttagcatatctttttgtgcaacggtaattcatttctgattaaaattgggcgaggccacttacagaaaaatttaatgttttctttgccatagagtctgctaaattgttttgcgatcgagggatgataagaactttaaacactgtaaaagatgaagatagatcaaggatatcgaagtgaatcccgtggagttccttgaattgaagcttcgagttgatagctttgacgagttgagaagagtcagaagcaaaagtaacatggctgaaatcgagttggcggatttgattcagagcaaggagaacagccagggcttccgcttgcagaggagaattgacatgttctactaaaccggtgccggaatggagcctttcccggtttggtctttgagt

SEQ ID NO: 46496 - DNA, 473 bp, Arabidopsis thaliana columbia
gtcgagaaatagacaaaagcccaacaatccaacatggcccattcaatctgggtaaatattgttctgtaatctctattgcttcttcttcttctccatgtcgatgaagaaatgtttgagatttacacactctgtttctcactgtaactcgggtatgttttgtttttctctcttatgtctctatctgtgtctcttattagatctctttccttctctaaatctttaaaaaataaaaattgattctttgcttaatgctatctgattcttttggtttgttgttcttctttgactgctattttgggttctttctgattttctagggttgttttgatacactctttactactaattgggttttttgtttgctctatcaaccttatatgagatctacattgtgtatgaatcaaaagatcattacttttgcatgtgtagtttgtgttttggaagcttaatttgaatccttttgaagcttttat

SEQ ID NO: 46497 - DNA, 511 bp, Arabidopsis thaliana columbia
aaagacgaagaattcgaactcttaccagggagaaaagtaaggatcccaagaacaagtaacgcataaccttgagagctatctccttccatgtgaccaatgaagataaaaaacgacaaaagaagaagcaagcaaccaagaaacaaaagaaacacagctaatgctatagatttccatggaactctatcaaatgctttcggtgaataatcgaaccgaggatcgaaatctctcctttcaccaacaccatttccatagccttcatcatcttcatctcctggaagctgtgcataccgtacacttctccttgacgccatttactaatcagcaaaaccacaacacaacacatagatggatcataaacaccataagttcgaatctgtatctaaaactagaatcaatcaggaacgaaaattcccacgcaaaaccaaaccgattccaaattaattactaatcagaacgacgactaataatctgatacaactatgagtaataagagagagagggcttgcggagg

SEQ ID NO: 46498 - DNA, 502 bp, Arabidopsis thaliana columbia
tatttggccaaagggaaatatttgtgtatcaattttttttgttcttttaatataccggatttagaaaactattggtctggttctcactaacatcgagtgataatgatccataaataagcgaacataactcgttcgtaaatcttaaatatttttacctaatacaaattaatgctttacaaaaaattcaagcaacattgacttgtgtgagtatgggagctagagttggtacttcttcttttcagacaatattaagatagatctcaactgccgaaaaataaaacgaataaacggctccacaaatcttttaggtagaatataaagtaagattattaattaaaaacttttgatttggttatgaatagacccacaaacaatacaagcaaaggttgattatctacattcgttagatttgtcaaggtactagggatatagcaaacgtgacttgcagttggaactaactaattaggacggtgggtttaagagatagtgaacgataagcgac

SEQ ID NO: 46499 - DNA, 503 bp, Arabidopsis thaliana columbia
agaaaacgagttttaaaagagcgtaaattgactctcttctttacaaaaccgcgtttccttttttgtcttggtcttcttcgtcgacctttctctttttctttctcttgtccataaattccagaaactttttttctagacactttagaaacaccaaaccttaaaaagagctctgctttgagatcttagccattaagttctcttgatgatgtctggttcaagattagcctctagactaataataatcttctcaataatctccacatctttcttcaccgttgaatcgattcgactattccctgattcattcgacgatgcatcttcagatttaatggaagctccagcatatcaaaacggtcttgattgctctgttttagccaaaaacagactcttgttagcttgtgatccatcagctgttcatatagctatgactctagatccagcttacttgcgtggcacggtatctgcagtacattccatcctcaaacacacttcttgccctgaaa

SEQ ID NO: 46500 - DNA, 514 bp, Arabidopsis thaliana columbia
tgttattaatatatggcaataagtaataccttctaacctttgtatacaagcaaactagttcatccttatcatatctagtagtttaataaagaatttgtgatcaatcttacccgaaggttcccataacgcgagttgatacatgagtttgtgttgaatcattgagtttggcaagtccaaagtcagcaacctacacaccaaaataaacagaaaactaagaacaaataaactctcattaactaaatctacagagccaaaaaaaactccaaaaaagagcaaatgttcaaagaaaaaaaggattgcctgagcttcaaactcatcgtccagcaagatgttagcggactttatgtccctgtgaatgatttttgggtgacctgcaaaacaaaacaaaaacatacataaacaaattaagttgctttgattcagcttccgtttgaactttgaaatgcataaacattgcaaaagtacttacagtcttcgtgtaaatacgccaaacctttggcagaacctatagcaa

SEQ ID NO: 46501 - DNA, 541 bp, Arabidopsis thaliana columbia
taaatctgttttctatagcatcacacaacactagaagatttacgaatgtcatttacagaataaaggtgttatgcactttctttttagtatcttaacacttcacatcgtaagagctgcgtagagaagttggttccatgtatcaggcaaccctgggaggcaccaatggctgcaatctgttcctccatcgccaccataagaagaaggatgagcatcttttctcaactgagacaaagttgtgatatcgagcaaggtcactggctttttcatcgaactcaacactttcgacactactcctgaggatggaggctgaccacttgggtaacttgatccacccaacggctgcatttgcccactacaagtcttcctcggctcgttccattcccttcccctgttacccgaaaggaagacattagtcgatataggtttgtgtttgaatgacgtaattagttctcaattgtttgtctgtgtttgaacaatcgaaacggaaatggacttactcgtaatgagtgggagaaatgccttggaagaaactcgagttttg

SEQ ID NO: 46502 - DNA, 540 bp, Arabidopsis thaliana columbia
agaggatcccctacctttcttctgtacaccaaattaggggctttgcaagatatcctgcatatgaatgatgttcttgctagagtttctctggctaggttgtgccactcaatatctagagctcgggcattagatggtaagtactatcaacctctttctgctgcccgttctcgctctgtttttttttcttcttatctggctatatgggagagatcttttgagaacttacatgttgctagtttcctttcaatcttcctacagagaggcctgatattaggtctcagttcaactcaattctctatcagctactcctagatccaagcgaaagggtatgctatgaggcgattttgtgcattctgggaaaacacgataacactgagaggcatgagttctatgactttgatttctcttagttcattctttgtaaggtattgaataaccaaaatgtactgcatcatttaggatggatgagcgtgctgctgggtggtacgcttgacgagagagatctgaagctgccagaagcccatccttgtcctcaaggat

SEQ ID NO: 46503 - DNA, 577 bp, Arabidopsis thaliana columbia
ttgcctttacgagagacgtagttcccagtttgaagcactgaaactcgattcaaggatttgccgggaaaatgatagatggattcagcattatccagattccgacaagaaatgcgtagagagacacacactgcagatggaacagctgcaagaatcccatccatgttcaaaactccggcgataaatcctaagtgtccgaactttagaagaagaaccactccactctgcaaattatacagttgtggctttgggttgaattcatgaagaaacctgtcgtttgtaattttcgcgactcaactacttacagttttgacattgatatggaaaaaacactttaaaaggttaaaccttggtgtcgtttagggtttcgaataaccaactgcttgtcgttttaactctagactggaccgagttcgctaccttcgtctcgccttcggcctttttctggttcttcacttcttctgacgagattcgcttttaccagagagagagagagatgagaatgacatttttgagttatctgaagcaatggcgtggaacagcgaaagaagcattcgagaatgtatcaatcgtcgccaag

SEQ ID NO: 46504 - DNA, 536 bp, Arabidopsis thaliana columbia
ccagtgtgctctaaagattattagttagggtactagtcctagccccctttaatctagaaaagaaaatatatatatagctagacttatctagatattatattaaaaataagctatcttaactagtagaagatagtaaatagagactagtagttttttatttttaaagaaatacttatctgtaaagattaactatcttatttataataaaaagttactagctattatttaatatctagaataatagcaaagtatattatagagtataaagaattttactatcttaagtaactataaaaatctagaatactttataaaaaagtaataatttatagaaaaataaatataataagctcttgaacttttatagttctaatttaagataatttattaacctagaaaaaaggctatagtgcctggtattctattttaaaaagactaagatttattagagactttaaataataaatatctttaaggatactcctaccagctgctattaaaaagaaatagagtcttatttttaaatagtatagcta

SEQ ID NO: 46505 - DNA, 1039 bp, Arabidopsis thaliana
caatgtcattttacaaagctccgttcttggggacatagatgctgttcaaggcaagcgtgtgttgaagctggatgagatctctggtaatgccaatgcttggcatgacgctgatctcctcatcttcaacactggtcactggtggagccacaccggatctatgcaagggtaagttaccacacttccaatgacttgattttctagtgtgaaagtttctttatatatcttcttgtgaacacagatgggacttgattcaatcaggcaattcttattaccaagacatggaccgttttgtggcaatggagaaagcacttcgtacttgggcgtattgggtcgaaactcacgttgatagatcccgaacacaagtcttgttcctctccatttctccaacacacgacaagtaactcagcctctcttgttatattggatcatattttctgatgtttttgaaatgaatgtcctgacaccatttgtatacattttgggattgatcagcccgagtgactgggcggcatcatcgtcttcaggatccaagaactgctacggagaaacagaaccgatcacaggaacagcttatccagtgagctcctacacagatcagctaagatcagtgattgttgaagtgcttcacgggatgcacaatccggcgtttcttctcgacataacactcctctcttccctaagaaaagacggtcatccgtcagtatacagcggcctcattagcggttcacaaaggtctagaccagaccagtctgcagattgtagccattggtgtttgcctggtttacctgatacatggaaccagttgttgtatacgcttctcatctattagcttctttttaaatctctttccatcaaattattcggttagtaatattttaacacattcgaagagagaatcttaagattaatcacggaatcagtcaattgtataaactttttgaggaaattttctttcaaatgaattataatttttattccatgcaaacaaagcatagtaacaagaaatttaacaatggcaagcccaaaacaaacagtattg

SEQ ID NO: 46506 - DNA, 585 bp, Arabidopsis thaliana columbia
ctgtcttcatggagagactccatcttggtcctgaagagctgtgaaaagctctcaccttgggctgagaatcttcagattgtgagaaggtgtagtgaatctatcgcttggaaagcttgtagtaatccaaaaggtattagatgggcttacacagggaaagctccatctccatcaacaacaaatttcgcgggttctagtccgagatggaacgaatcaaaagattcaagtttctattgtagtccgagtaggaacactaatagccagcctgttcctccagattggtggttcgaagatgtctccatcttaagaatcgatcatttcgttcgtgtaatcactgcaatcaaggtactactacacataggttatttttctctcaagcattttcacaaacacttggtgtacatatctcaatcctctatccattgaaacaggtgaaaggtatgagatttgaactactcggagctgtaataatgcattacgccggaaaatggcttccgggtttgatcaaagaaggaggagttgcaatagctccagcaatgtcctccgccattggaggaggattaggtctatgaggagacgaaatgagta

SEQ ID NO: 46507 - DNA, 575 bp, Arabidopsis thaliana columbia
ttctcacggccgatagattattctcggatccagaagcaccaggttgtgtgtaaccatcggatctttggaccatgggttgatcattaccattgatggatcttagcatattattatcattttcggcttcagtactcttttctggtccatggatagtatttagggttggctgtgtcatcgacgatgaagaagagacgataatgttgtgaagcccctcaaagtttgttccaacgtccacgtgtccaaaaccattactcgttctcaagctcgagggtttcggttgatccgttaaagagttgttgagaaaagggtttgagatatttggcgtgttcatattaaggagaagattctgatgctgatgatgatgatggtactctgaagaaggaggaaggtaatgatgattcaacgtcgatggagagatgagtttgtgaggaaagggtttcatgggtcgtgaggatgaagaagaagaagaaccgaagagatcaaatcgtgatcttggaaaagatgaagataatccggtgaaaggagttgaaggattacccgtgaattcttgatccatggctcctgaagttggatgt

SEQ ID NO: 46508 - DNA, 544 bp, Arabidopsis thaliana columbia
tgtaatgtctcttcctctcttaaacccaccagtttcagttttcatacaaccttttgagttttctgaatgatgtagcctttcttttgtttgcagattaatatctcctttaacatctgaaacgaaattgccggcagttgtgtctcctttagctgatgcagagctttgtgatgtggttgcactagctcagaaggctttatcagcttcaaaacaagctgcattgttagttgatgacactgaagcaaatccatctgacaacatcaaggattctctctccactaggttgctttttttaaccttgtttgtgtatcttatcaatctgctacttgtgggctgtaatgtgaaaagatttgtatttctggatgtttggttttagctcttctatgtccttaccggaaaagggaaacatagtaagatcgaagcggcacgtagagagacgagcaaagatcagacgggctccaaaatctaacgatgtggacgatgagggttatgtcctcagaaaactagtgcgaagaaaaagtataaacaaggggctgataatgatgat

SEQ ID NO: 46509 - DNA, 726 bp, Arabidopsis thaliana columbia
tgtttggatcttttgtcatcgatgccaactaagcaatatcgttttgtgacaggttgcatggtgtctgtaaagagaatcctttggctgcagtaattggtagattaggattacctctttatcgtactagcggtgacaattcggttttgtatgatcacgatcttgagaggtgtgtacaaccgttgtggatattctaaatgtgtatattaagtaatcttctctctttgttggaaactcatggcgcaattatgttttctgcagttatgctctgttcgacaaggctggtaaccaagtttctcaagagttggtgacaaaagttggcgaaaattttgagcacattctggaagaggtgtgtacttggtgtccactttctcttttattatgttttatggatgttgcgcctctttgatttactaaacagttgtttcacaaatgcagatctgtaaagtcagggatgagcaggacgaagacatgtcaatagctcaagccttttctattgtatttaagaggaaccctgaattgaggtatggaaacatattgtctcaactcattccgttgatttgttacttatccgcttgtatatttgttgcatgcttaattagattttcacttataggttggagggacttgcccataatgtgcttcagtggtacttgtgccgcatggaaggatggtttgctgctgatgctgaaaccatctcggcaaagtgttgggatcaggttagttact

SEQ ID NO: 46510 - DNA, 579 bp, Arabidopsis thaliana columbia
acgaatgttatcactgcaactatatcaccactaataaaatctgatttaaaagtctagtgaactccgctacaaaaaaatattaattccttttataaaaaaaattattattaaaattacgaatatgtcatgagaagttacagaaagtatattgtctaaggaaatatttacaaaattagttcctctttttttaaccggaggagaaaacagtctacgttttttattataagaaaaaaaggacaaaaaacgtaacgaatccaagttaaaagaattgctgattttgtaaagtccctactaagatattcttgcttgcagggttgggaatgtctcgttataaacatataatataagactattttttggattaaaacttttgtttgtactgtctctaacaaaatgtaaatcaaagttacagcacaaagatagaatatttatattcttatttccttcttcttcaagggtcggtagtaaatcttctttaagagcctgtacgtggccgtggcattggcggtggacgcgggcatggacttaaacgtggttgtggtccccaagtctttggcctcgcatgttagagatggaggg

SEQ ID NO: 46511 - DNA, 271 bp, Arabidopsis thaliana columbia
atggcggagaaacacggcggcggaaaaagagaacaccttgctatcatcatcgtcggtgaggtagaaaaaaaaagtttcaatctttaaagtgtggataaaacaatggaagaagggtaaaatggtaattctggtgtaacggtcagataaagattaaacgacgtagttttttggttgagagttgtttctgcttgttcttcttcttccaatgaggatcccgattctcaagcggcttaatcgtaagaccggtttatgcgcagagtctgttaaccgc

SEQ ID NO: 46512 - DNA, 590 bp, Arabidopsis thaliana columbia
agatcattatcatcattttcttcacactcttcattatagtcatactcattgccaagatcactactatcatggtcttcatactcttcactgtaatcagtttcatttccaagatcactagtatcgcggtcttcatagtcttcactgtaatcaatttcatttccaagatcactatcatcgctatcttcacactcatcactataatcagtttcactgcttaggtcatcatcatcgtcactgctttcatcatcctcagagagtcgtataccgcatccttttattttgtggtgattgtagttatcatcaagatgaaattctatatccacatgatcatagtcgagttcagctagaggagcattgtctttgttaagagggaaacaacaatcaaatacatacacataattgtccgtctgagatggtgagaagcaatgtggctgatcagcataatcaaagtagttcccatatatgcctttgaatcgacaagaaacctggatgtgtacgtgataacgacgagctgggaacacaaacttgggatcaccacaacacaagccttaaatgtgaagtattgttgagaaagtaatatgtgaagtaga

SEQ ID NO: 46513 - DNA, 420 bp, Arabidopsis thaliana columbia
cttcttagccagcagaagcatgtgcagttagctctaacgatccgcctttacccagagacaccattcagttactgagttcatcattgaacaacctcatattagttcaactcgctggtgaagtttatcagtcttgtgtggttttcacattgtgttactgtacattggttttggttcacggtggtggttttatctccagacaattggtttagtgttctttatttatttattacctcttttgttgtttaaatctttttacttttgggtttctttgatctgttttggtttctcttgacttgttgtataagtttgtaagacaaagcaagagttctctgtatgtttcaagttagtacacttttggaagaaaactttggttgggttttgggattaaaccaatgtgctttgtattatgtacacattttg

SEQ ID NO: 46514 - DNA, 998 bp, Arabidopsis thaliana
caaaaagtagccatcacatgtctaaatacctttgcggttcttcttcgcacattaataactatatgaccagaggttctctctatgagcaagaaaccatatgcagctgctgcatagaccaatgcttgttcatcagggactccccttgataatctaccagtttcacattgggatcagatgtattgctaacaattggcacaattgtattgcaagctgccagtgagaggaaaaactcatttgcacgttttgcttcttctgttgccttgccagttttcgttaactgaagaagcacaggatcaactctcaccctcatctttggcttcaaaataattccatcaactgtatcatgaaaatttttaggcatcatcaaaaatcagtaaacagaaaaacatactactcttaataacagaaacattattaagaaactagttttctttaccttcaatggagtatccaggatgctcgctatcagcaggttccctgtcagagtaatctacgccttcgatgcaggcacattgaaactccatcttgttgtccgtgagtgtacccgtcttatcagagaataaatacttaatctgccctaaatcttcatttatatttaaagccctgcattgaaaacttgaatctgaagactcgtcatacatctgatcatcattggtcatgaagtatgcttgaccaatacggacgagctccatcgatatgtagagagaaatgggtatcatgatctggtacacaatgactgccataaagaaggtgaagaatatctcccacccccaaccatagtatttatagttcttccctcctggcctctcagagtagtcctttcttctataaaagagaatagtgtccaagtcatccctgtgcgttctcaaccacacagcagcggtcgcgggctgcgattgtacacaagacgatcagaaacaaagagagtagaatgatctccaaattcattcgagtctctagcctactcctctttgatggtgctccagagttgttgagca

SEQ ID NO: 46515 - DNA, 511 bp, Arabidopsis thaliana columbia
gagagatcgatataatcgcagcggctaaaccagaggaagaccctgacaaacctgtcgttcttgccagacatgactctttctcttctgcctcaccgccccaagaaatccctttgcttctcccacaagaaaccgatgcagatttcgccggcagaggagatctgaagttagacagcggtgcaagacaagatcctggggaaacttcagaggaaagcgatctggacgaggctgtgaacgactggtggtggcagattgggaagcagagtgattgccggtgtcaaataatcagaagtgttagccaatggtctgctgggacgagccagcctgaagatagcattcatagagcttattgttcgcttatccagaacgctgaacattttatctacatagaggtataaattaatcattcaaacatttttatacaaaatctctacacctcgagattggttctatattctaatctcttaatcttgttgtttacagaaccaatcgtcatctctgggctgaaaaagag

SEQ ID NO: 46516 - DNA, 846 bp, Arabidopsis thaliana
ataagggtctcgagtttacgctttgaaagtagtaatgtaactgttgttttaccttagctttggcaatggcgtcatctacttcttttctaatttccttctccatatccttaagctctttctcggttgctaggtcatgagatagtaccagcttctttattctctcaattggatcccgttcctgagtcatatagagtagcacataaatgttttgacttttgagatttcatcaatagctgagtcctcgaccaagaaatgatttttcaggtaaagagactaacgaacctgcctcacaccagatatctcatctcgggtacggtatgtgctcccaggatcagacatggagtgaccgtggtacctgtatgtgtccatctcaagaatctgtatagaagaaacgatgtattaatgcttctgtaatccatatgataggaaagaataaacacaggaaaataaattggaaaccaaagctactacttatatgaacaacagcgatatcaaaaacacacttctttgatatacactgatacagcgtaatttctattgcaactgcacagaaagaaccagccaccccatcaatattcagctactggaatgcagtgtccaaaaagaggaactgaagggaagtaaatatcaactaaaaaatgcaaaaggaaagattaatacttcacgtcctacaggacagctagatattgctcatagcaaatttacaaaatgcgccagatgagtaaggaccaaaggggaaaaaaacaaaacgtctgataatactaaaatacaaacttactattggccccttctccaacgcatgctgcttagcaaatttgcaagcttgtttgacagcaaatgcatcca

SEQ ID NO: 46517 - DNA, 160 bp, Arabidopsis thaliana columbia
gttatatgtttagaagaggagatgactctttcgtgatatttgttttgttctgtttctcgctttgagtcagaacaatgtgttttgcttagtttctctcttgtggtgttattaaggcctgttttgtttgtgacttggaaaccaggttttgatgacgtggata

SEQ ID NO: 46518 - DNA, 427 bp, Arabidopsis thaliana columbia
catctgtcttttgttgaatcatagttgatctggtctatctgatgaatgcgacaggttgatatttctgctgttggtgtaaccagttttgaaggacctgaaggaaaatttgatgttgaagtttttgatcccgcagatgactacgttaaattaatgaagtgagtggtccctcaatttaaaagcatgattctggaatctgctccctctatggtctatgtgcaatttttatgatctttctaaagaaaaattctcgctccttcaaggtcaatcttcgattttgaagccatccggaaattgctatcatctccaaagtttacattctggtatgtaactaacattggttcccaaaccttttccatttgagttaagttttgtaatatatgttccatcactgtaatgttatattttactttgttttatgaagctatga

SEQ ID NO: 46519 - DNA, 574 bp, Arabidopsis thaliana columbia
atgagattgtatgcctaatgccttatccttgctcctctgcaggttcttgaagatgttgatattccagaggaaataatcgacatgtttatttcaattccagcagatatattccggatggatatatcctctacagagataagaaaaaaacaagggggtggtacgaactaatgacttctcaacccgcttgaaagtcttggctcgcaagacaatttatttagtgcagttactttttgatttgatatgtattgtgttgcattctgttcttattatggaatccggatcaatggtatgagcatttgcacatgacatcgaaagagcattgcagagttgcatgggaaacgtttaaagagtgcgaatatttgtgaattgtgacagagaagccttgttaaatatttatgaatgtgagctgattagaatctgtaatcatattaccagggctctacctataagtagggttagtgaaaatcttgtaatagtagtaccgaatgatcaaattgtgctggttattcacaggtctctgcaaatataacagtttaagcttcatgtacgaaaatgctatcagcgctaatgaata

SEQ ID NO: 46520 - DNA, 563 bp, Arabidopsis thaliana columbia
tccctgagaattgtcctaatttttttctggagatttaattgatcatatagtgttctatcaaaaattaatcatgtattcaaaattttacacacctataaattttgattcctacataaaagtaacatgttacaagaaaattatcctcctgtaacaacttaatgagaggtaacattatatccgattgcatttaaaaattagacaagcaatcattttttctttctatttgctactcttaatttcttgtgagtttattgtcatccaacctaactacacttatagacataaattgattgtgtctaggaattaagaaatgtcaacggacaactaggactgaaagacggtggtcgaacatgaattgttttgaatgagtaaaaattataacttttagatgtcaaaagagaaacgggtattgggatagtccactgcagtcaacggtatcagtgaaaacataatgtttaaatattgcaacactacattcagtgttagaatcgtatttgaccacaaaaggtatcacgagaccacgagctaagtttgattgatattacgataaatgttaaggtaga

SEQ ID NO: 46521 - DNA, 436 bp, Arabidopsis thaliana columbia
tgatttgatgaagtgcacatttaaaatactataaattgtttgtaaattagaaaaaataaccaacatggtgatatattatgtgattaacatgattgccaatcaatataacaacacatgaatcaattttcttttatattgatttatttctaaattatatattaaagaccagaatcgtagttttggggcttctttatatagaacaagtaagtacagaacaactgagactagttgctgacttcagtctcaagcttccctataaaatgatcggattacaattatactagctataaattctcaatttcccataactcataggaattatgggaccctataactaattcgttaagtaattagtcggataaagctcataaagacattagaattagagacttagttaattacctgatgttggacggttaagaaggctcatttgttg

SEQ ID NO: 46522 - DNA, 340 bp, Arabidopsis thaliana columbia
tttaattgtgatcgagtgatttgatgactcatcttggagatgaggaattatgattcaagttattcaactatgatttagtttaaagttggaccttaatccttaactccttatagaagtttaaaacatcaatattcggcactccaaaaatgcgaaagattagtattttgcgaaattcctgaaatcaaagaaaataaaaatactaaagcgagtgtattgatacgagacgaataaattaggttaaaaacaataagccacttaaaaaagtctgggaaggataagccaaacaaaatgtgtaaatgcatacatctatgtacgaaaatgttataattcaaacgaaagt

SEQ ID NO: 46523 - DNA, 484 bp, Arabidopsis thaliana
taagctttcttttatgtcagaaggtaaaggagcgttcaaaacagggcattttaggtttgttgctgattcggatcgaacgaggctaacgttttatagtgcgttttatcatacaaagcttcatgacttcggccatctttgtgggcctgttcttgatagcgttgttgttaccctggcccgttaacaatttgtggcttttaattcttattagactgaatattcgaaacactatactctattcgtaacgaatttgtggttgcactacattttgttgtttcttgtcattagtcttgtcactcataccagtgatgcagaaaatatttataatatgtatggaaactttgtggaaattaaactaaaattaaaaagaatggtgagatagatttcaatttaataataatttacatctttcatccatataatgtatattgctaaaatatgatgtattcacagtgaattctgaatctctgatataagaacatagaaa

SEQ ID NO: 46524 - DNA, 540 bp, Arabidopsis thaliana
ccaagttacccctataatgcctgaaaaacaaagaatcacagactaacctgtggctaggaggaactcaagcgggtggaagtctagcgaacggataggtccttcatgaaacttaaattcatgcaaaagctttccagcagtcaaatcccatacctattggatacaacatatatagcagtatcgttctaagatcataagtttgaaaaatatgatgcacaagcttcatttgttgaaaatgctgttcttacctttacaacattgtcaagtcctccggagactacccaacgaccatcgggagtaaacctgatagtgctgatgccacgagaatgacccttgtacgtctgtatgcatcccttcttcctgatgtcccaaatctttagattcgcgtcactagatcccgatgccaaaaattcaccaaagggatgaaattcaacagcagaacaattggatctatgtccagtaaaagctcgaaccactacacttcaagagcaagagtgaaaatgttagacctcataattctaaactaaaagtctggtacactgc

SEQ ID NO: 46525 - DNA, 483 bp, Arabidopsis thaliana
cctttaggacaatgctataggtatattttatacattaaaaaaaaagaaaaaaaaagaaaaataagatatgcattttgtttaataatttttaaattttaaattagagagtactaaacaaataatatctacacagagccttttgttaaacttaaacgaaggttctctcaagtatgctttgtggcagggcagccattgggatatcacggttcttggcctactttcgcgctatcacactgcttaccattcctttattcacacaaacccttcgatgacttatcggctgccttgcttgaggaatagttgatctgattccattcaattggcttagattcaatagcagttgattttgggcagtaatctgcaggtactttttctaagtaagagattttgcattttttgagtcaggatcaaccatcactctcttcacagccaccctattcatctctgcttcaacatacaacgaacgcccccgatcagtgcaat

SEQ ID NO: 46526 - DNA, 525 bp, Arabidopsis thaliana
ttatcccttgttttacattttttttaatcaaatgtttcgttttagcttagttgagagcatttttaacttgaaatggtttgattttgttttcttttattgtttgtaggattcgaagtgacggatagagggtgttgtggagtagggagaaatagaggagaaataacgtgtctgccattagcggtaccatgcgctttcagagaccgacatgtgttctgggatgcatttcatccaacacaagcttttaatctcataattgctctcagagcctttaatggttccaaatccgattgttaccccattaatctttctcaactttctcgtctctaaaccctcaacaaatccttctctttttgtttatgtatttttgttactttaattttgtagacttgtagtagtactattgcatatttcttcgcattatctttttggttgtgatttggtccaatttgaatgtggcctctaatgattacattatcgttaactgcaaacatatacgtagaaaatgagtcgatcgagaaattgtag

SEQ ID NO: 46527 - DNA, 443 bp, Arabidopsis thaliana columbia
tgagtagtgactccataaagatgagctccagcctagagtgacgccttggagtggctcaaatgtctggaatacatattgttactagctccgcatgttgtgtctgtactggatagtgacgctcgacactcgacgtgtgtcactcgttagtgccaggcgatgatcgagcctttatgtgcctatctgacaccggctcgtcagctgatccgtcccagatcgcagtgccttgtctcaagcgacactaatgagcgtcggtccgcagcaactccgcggcagcgagctcctactcggccgtagcattccagaccctccagctatcctccacaggactgagcacgatcgccgtgacagccctaccttgtacgagtatcaggggatatcaaggagtaatcctcttgtctcagcgatcaactgcacagtttgagccactggatcatccagtgtct

SEQ ID NO: 46528 - DNA, 435 bp, Arabidopsis thaliana columbia
gttgtaatagttttccaaatctattaatgtcattaaatttaatcaacagtccaagtaacaactaactgtcagaaataataacacctcgacctggtcagtgcaatgaaggccgttttaacagtttttctttattacatgaagaaaaactgaatcatatgtttaggaaatcaaagccacacacgtcgagtcacaattatcgcgaccagacatgtgaatataatgacttaatgatgaggaacgcattatggcgaggccactaatactctgctccgctattcgcccaagcctggctgaggacgagttacgcggcttcaacatatatgcggattctggccgcttaaaaatactagatgtaaaattacaatatgcgatagatataatagatatatatctaaattcaaatcataacgtaggtcactccactctatttcgaca

SEQ ID NO: 46529 - DNA, 536 bp, Arabidopsis thaliana
cctaatagaagaggttatactatagatcttattgcttacctgctttgagtaaatcagtattttgtcaaactcccttctttctgcaaaagctgctacaacttttggagtcgcccgagctttgatgtatattttcagagcgagatcattatccacagtctggaacagaaaggtttatcgtcacaacacaccataggagacatatcacacattttgaataaaatcgtccatttcaagattaccttcacaaggtctccaagttcttcactgcattctagtttatcctctgccaaccagttttccaggaggttcttcttgttttggttcacaaccagccgagatagttccagtgactcatatgaattgagttccctctagtcaaaagagtccaaaatactgtaacaatggaggagtttgtccagcttgtacaggaacactctgcaaaattatagagttgaaaaattggtgttaccaacatttcatcataaatagacatgttacacatagttgcttggatatgaaatagacacctggaattt

SEQ ID NO: 46530 - DNA, 569 bp, Arabidopsis thaliana columbia
ttccgatctatccaattgtttttttttcaatcaatccaacttagaagagactctactctccactagttgtaattaaaaaaacaaaaacaattaataaaatgaagaaataaaactttgtatatctctcataaagtcgactatttagacttttagaggtaaggacaatatcttctttgcttacataccccactcttgttataaaagacagtaacctttcttgagatcactctttcttatttgtgtgttagtgcattgagagagagagagagagatagaaagagaaagaaatcgtcatggctcatgtaagtgaaacttctctaatcctctatccttgtttcttcctgtcgtctttaacatatagatcgtcaaaacctgcctaataatgtcttatcctcacataagagctttcatcttatctccatctctctgttacttagaaccctccattcatatatacactaggtgccaaatttggtcacgtgtatggccttcacgttcttgactcttagctagatccttgtttcttgtggattcttgaatcttaaatcttgaatccctgagttttgttg

SEQ ID NO: 46531 - DNA, 328 bp, Arabidopsis thaliana columbia
tcaattaccggtcagttttctcaccgtcaccttgtgaagctgattggttatagcctagaggatgagcaccgtcttcatgtgtacgagttcatgccacggggtagcttggagaatcatctttccaggagtatgtcgtgcttactcataagtctgatccctggctgaggtcagactttaagctttggtatgacgtatgtgaatatatcaggtttgtatctcgtgggatataggaagtttgtacttccaacggtaatcttggaaacttcggttgaaaggtggccatcaaactctccgagtgctggatcgtataccccgagctaggtttgat

SEQ ID NO: 46532 - DNA, 385 bp, Arabidopsis thaliana
tgtgtttggctcagaaacacttaacaagcttcccttttttccaatgctctagatttcttggtggtgacttactcagatggagcctattcattcagatgacatggaggaagcttttgtcgatgaatcctctatgctattgaattccccttatcttaatggtattcacggagaccctgatgtacttcctcgcgttggagatcagtaccaggctgatctagctgtgctactcactgagtctgatcgtctaaagctcattacttgcttgcattcagagcctcccctgcagaaactccttacttttggcttgcctatccctcttatgtggacaagaagtgagaaattcagaggtttccgtgaagccgatattgataaagccagtccacca

SEQ ID NO: 46533 - DNA, 545 bp, Arabidopsis thaliana columbia
aacacaacataataaatgtataagtactgttcacttataggcttctagctgttagcttgggcgtacatagattattattacattcaaatgtcagtgttttgaagtcatgaacaaaatgtttcagttttcaagaatatttctcttcatccacatgctctctatatctaaaaactaaagggggtgattctggatttaacagaataaatcaaaagtccaataataggattgttactaggtatataggtttctcatacaggttaatttttcacgttgtaataacatcgattatgataagaactttgaaccaactatcttctgaaagagtgtacctgtctattgtgaagttgtcggtcaatatagatttgcccctctgtaatgtatcctgtcagatctggtgtgggatgcgtgatatctggacagataaagggggcaaaaaaaaaaagacatttcgaacaaaattatccacctgaccaacaaacctgttatataggccaacaaatatcctctgtaagaagctttatgatcagattaactgcataggtgtc

SEQ ID NO: 46534 - DNA, 560 bp, Arabidopsis thaliana
ctaaagcaggcgcatgtcgtcatcgaccaccagaatcttgtagttctcttgcattgtttgtactcccaaaggttcgcaacaatttgtaagcgtgtattcttaaaaaagctcacgttcgtcaccagctaaatctggtatgaatttcagcctaaattgttacaaagcatattaaacagcagcttaagtatacaatttattcggcgaaacattattgattctgttgatatgatcacgttatacccaatgtgcgcattatcaaacagacaaagggaatcaacgagatgaaaacgcccctggttacccgggaagggtatgaaaaactcaaacaagagcttaattatctctggcgtgaagaacgcccggaggtcacaaaaaaggtgacctgggccgcaagtctgggcgaccgcagcgaaaatgctgactatcagtataataaaaagcgtctgcgtgaaatcgaccgtcgcgtgcgctatctcactaaatgcctggaaaatctcaaaatcgtcgattacttcctcagcaggaaggcaagtcttttttggcgcgtgggtggagattga

SEQ ID NO: 46535 - DNA, 521 bp, Arabidopsis thaliana columbia
gggatgctcctacaattccctttcctccttccaccaactccacaggggccttcttctccaaaacccacatcgaattatcactactaattgcaatcatgagttttcccatacccaatccgcaaggttcagcgtcgagatgacaagcacccaacactagggcgtctctgagtataattgtagtgatctcacatcagcaaaacatcatcaaaaaaaaaaaaaaagaacaaagtgtgattggggagagaagagaatagtatcttacaaacagaggtttccggagggagaacactgaaggccggctcagaagcagaggagacatgagtgttcttagcgaagagctagtcaaagaaaccctaattgaagaaaatggtagcactaacagttacagtcttcttcaccctttaaatatagaggctgggcatagacttgtccagcaagttttccatctttcaattttggggaaagccaacatttttacctattacaggcccccaaattttgaagaaaaaagaagatgagaa

SEQ ID NO: 46536 - DNA, 594 bp, Arabidopsis thaliana columbia
ccaagtatcttaatctggataataatttcactgaacgttctgtttaatatacattagttttatactggttgatcgtttgatactaatatctatgaacttaaatataatttaattgtatttgcgaattgctttagatgaacaacaacttttacgagatccaaaaattgttattccgtttttttgatggaaaggtagtatatatgttgtgtagacagattagtttagtaactatgttgaataagctatattttaattgtccggactgtactttatatctgtaaaataaatagttgaaagaaaatcatattgactagtattttttgttatggtttacttaagggatgaagaaaagtggagatggagactcaaatcatttttttttctcatcacacatgttgtaagaattaaataagtgtgtttgggaatattctgatctggcaaagcaccaaaaaattgggatattcttgtcgtctgatgcttgcatggcatatacttcgtacatcagcaactcctgcatcagcaaaatacaaaattatcccccatagtccatactaacagaaccggaaattcctgcgaatgttcggtacatgacat

SEQ ID NO: 46537 - DNA, 528 bp, Arabidopsis thaliana columbia
  unsure (1)..(528): unsure at all n locations
tggaatccagcagctggattcattcccatgcccaagcaaatcgacgttatgagtgccatcaccccaactgtaaagatcaccagattgtgtaatagcgcatgtatggaaatctccgcaggctaaagatttgaaacccaatcctctgacactactaatgaactttggtttttgggcgtctgtttctaagccatgtcctagctttccaccttttccctcaccccagctgaagatctctccttgtttagtaactaaaaccgcatgacatttaccacatgcaatgttttgggcatcaagtactattgttgattctaatgcttttggtaaaagggcatcctctgtcgtggagttcaatgaatttccagtaccgctaagtacaccatcacttatagattcccccagacaaaaacatcacctaaggcatcaaagtcttcgtgatatgaaccatggctagaggtgncacagcgctagatagactgagccgaaatgggtcattggtcgagaatcgtaaatttgaattttctacgtttg

SEQ ID NO: 46538 - DNA, 1498 bp, Arabidopsis thaliana columbia
ataactactttatagggatgggaaaaggcatattcataagcttttatggattgtatattgagtaagtgttctatgaatcttgaaatccaacttagaaaaattcctttaaatgcaagtcttctataaatcttgaattggctattgtctatagctattatggtaatgaatgtgacaaaaagaaaatggcggtataatgtggttatgtatgtcaccaaatttatgtgttagtaatttttactttatctattaattttttgatgtttgtttttataccgcttattaagagtgtcagacgggcgagttcgcgctcaaacaggcgctccgtgacggacctcgcttctcttcattccgcgacggtctggtccgccaaagactgcggagagaaggaggtttccgtcatccgctctgtaatgctcattgatctaacggaccggccggcatatctaacggaatagaccctcagactggaagtccgattgacatctctaccacttattaattatgtttgttttaatagtatattttgcattcgctacatacattgttttttgtttggtctatttaattcacttgatttgcaattttgaaaaccataggagttttttaagataaaagggttcattttataaacatcttgttggcttttacttgaatgtcaaatttcatcgtaaatgatttatagtttatcatttaaataaatatagtttgaccgaccgtttggtggtttgatcaaatctttcccacaaaaatatatttttcatgctaagaatttaaagtcgacataattttttgtatgttgcctcaagtagaaaactcgaatgtaagactagaaaactagggaaataaaccgagtaaatgttttgaggcgaatgaacataatagtaaaaattaatggtaaaagcaaaggtagatttggtcaaagatgacgctagtccatgaaaagtgacgtcagtgactcagagtaaccatcatcactggtttctctgttagatgtgattacgctgcaacactggcatgtcattgtgccaatgtgccattgtcccagaatccaatttaaagcatggtgcgtgaaaaaattaggttttacacgtttacgtttgtgactaatcatttatttatacaaacacaaattgtattaacccataaataaactgatccgtactaaatataaaacttgacaaaggaaaatacacttgtaaatatgtgaaatactaggtcgattgctttcggatcggtttcatttagatttggtttctcggttataggtttagacttcattcatgtactttaataattgtcttacctaaatatatctaaaataattcaaattataaaaaatactcaaagtatcaaaaaaatatatatataacttttatttttcttgataaaaaatttctattttcaaaacgatcggatatctaattcggttcttgatttgattcgagttcggtattgaatcattcagatatactagtaatttgggttccgtttgtatatt

SEQ ID NO: 46539 - DNA, 311 bp, Arabidopsis thaliana columbia
aggtttttgataccccgaagatcttcttcgtgagtttttggctcgactttgctcttattattagccatgctaccggcaccgggtgagagatggcgatcataagtcattagttgtgaaaggtacaagaagatagttttatagaaaatgcatgtgacactagtgggactttaagaagtgattgcacagtgatgatacatgctattttgtagaataaaatatgcctttgtcattagtataagttgatacagttggagtgggatcaaattcgaactatcacctatctcgcggggggggagaagggatatagtccg

SEQ ID NO: 46540 - DNA, 780 bp, Arabidopsis thaliana
ctgtccatatggttccacaatgtcttcaaacgagtatagtattcagataaagtcatagaaccctgacgaagatcctgaatctcctgagtaaggttgtaggtgcgaggtaagttagtaagatgaaatcgaccgcagagatcacaccagatatcagaagcatcatccattcacaagatgctacgatagatctgtggagaaactgcatttaacaaccatgatttcaccatagagttgcatctcgaccatgctctaaacatcgggtctatagacaatggtctaggcaaggatccatcaacaaaacctattttgttcttagcatcaagagaaatacgcatcgcatagctccaatcatcataattcgtttcttcaagacgaagagagatgatgtttaaacctggatggtctgcactgtgcataaacagaggtgactgagttggatcagagagatctggcgatggaacacctcttggaagtccggaaacttgagatatagctgctggatgatcgattagaggagaaacgttaccatcggaggtagatcgagtagatcggcgaacaatggagctcgcaacggagctcgcaacggacttggatcgagttgatttgagagtgactcgagctgccttcaccattttgaacgaaaaagagctcaaaagatggaggaaaccagcaagagaagaacaaaatcagatcggagagaagaagattagaaccgtgattgctctgataccataatagtaaagacgaagaagagggttttagagagaaagattgtaaaag

SEQ ID NO: 46541 - DNA, 611 bp, Arabidopsis thaliana columbia
ccgaacaatcaaaccggaaaactccatgctccaaaatcggctcgaaaatcatatcagttgaagtcatctctacagtttccgagctatccccacttaaagtcatcctaagtaaagatttgtctccattccttctgcatgcaaggtggttgtactagtatgacaattttccaaacaagtaagacccataaagaagcaattagtctccacctaatgttaaaatgctataacacaagttatcaatcaaacaatcaaagcaaggttgaactataaacattcacacctaaacctgaacaaaatagcaaaaccagagaagagaataagcaattaaattggaaaagcttggatttttttccactcatttcctctgtagtggactaaaattagacaattaagttacataaatcgttgacacagagtcaaactaagaatcaaattaatatgaaatttgtaaatggatcaggaaccaacccgagagtgctcttgacgacgagagcgaaggatctacttgtggggaggaacagaaacggagagatcgggttcagagaaggaagagagcgaccattggagaagaaggaagagctcgagctttgctagtgagtgatgacgcgatg

SEQ ID NO: 46542 - DNA, 836 bp, Arabidopsis thaliana columbia
cgacttctctggcaaacctgtcattcgagtcaacgtcatggtcaaaatttgatcatacattttcataaccaacacactattttatgtaaccaatagctcaatcaaaacatcacattaaatgcagatatatgctatgatcttgtatgaaatagataaaactatataaagactcaaggtatcactaatcggctaccgatacaacgacttgttgttcgaataaacttcgactcatttgaatattagtcatgtccttgttgtcttcaacatgaagtgaataatttattatcttggtgataatatgggatgatagaatttcttttaatttctattttacaaggattatgttaggatgttttttacttgatattgggaggcattgtatgattttgtaattgttagctggttaagttcggtttagtcaggtttagttggtagagtttacttgtatatatactcacaatgtacaggattttatcaataagagaaaatagaaacttcttcttctacaatctttctctctaaaaccctcttcttcgtcttcactattacttgatattcatgtgtgtttgtacgatgaactaatagcgtgtaaatcatttgttgttaataccaatgtaagatactcaaatataagatccgaattcgtttaaaatcaaaacattagcttctttttgttgggagctcaaaactttttatttgcttcgttaatgtttcatcactgttcaatatatactaaaaataataataataataataatatttgatgataactttgggatatatatggctatattcctgataactagtataaggttacactggcggacgttaatcct

SEQ ID NO: 46543 - DNA, 596 bp, Arabidopsis thaliana columbia
ttcttcggaatctttagaggaagaaagaaaaaatggcaacaatgaaaataccaatgacggtaccttctcctcgagtcgatgctgaccaactctttaaggccttcaaaggtacgtacgcattcgcttcttatgtagtttataacaacttgttttgttacattttagtttatattttcgcaatttgcaggaagaggctgcgatacttcggtgatcatcaacatcttagctcatcgcaatgcaacacaacgagctctcatcgaacaagaatacgaaaccaaattctcggatgacctccgaaaacgtctccactctgagcttcatggtcatctcaaggtaaataaatcttagccttacaaaaaaacttttattcatgattttagcagacaacattttgaaaacgtttttgatttcagaaagccgttcttttgtggatgcctgaagcagtggagcgagacgcttcaatactgaaacgctccttaagaggagccgtgactgatcataaagcgattgctgagattatatgacacgatctggctctcagcttcgtcagatcaaacaggtctactcaaacactttccggtgtgaaacttgaagag

SEQ ID NO: 46544 - DNA, 853 bp, Arabidopsis thaliana
atcctccgctcataacctgtacggtccatggaaacgacatcttgaccgagtctcttgcattagcaatcatgttgagaaccggagcgagccactaaagttagttaccttgtgcttcacgatactatcaaatataacttcgtcgttgacttccctgagacagacgatgactcctccaaaagccgtaactgtccaaatatagcaccacccgctacaatgatacataggaactgtacatagataaaccggcattggtttcatctcattcataacaccaacagcagttgcgttcagataggcaccgcgatgactatagacgacacatttgggagtcgatgtggttccagatgtgaagttgagggcgattggatcacattcgtcaactggtcgtattggtttgaaattagggtttccagtggagagaaaatcctcgtattgttcatattttgattgctctgttggattttctgtgattgtgatgatgagaggtttttcttcaatgtttgagaggagactgagagattcttcagcgacagagaggaactcagagtcaacgaagaatacttttggcttcgttttctccagcgccatcgcaagcatctgagaatcgaatgtcgtgttcaacacgcaaagtactgctccagccatcggagctccaaaataaagctcgcataacgcaggaacatttggcgctaaagcagccacctgataaaagaaatagtttaaacaaaagaaaaaagtatgaccaatatataaaagtcgtttaacacttacaacgtcatggcgagagagaccagggcagagagagcagatctaggcggaccgaacggcacgtgtttggtgcacgtgtactgat

SEQ ID NO: 46545 - DNA, 550 bp, Arabidopsis thaliana columbia
  unsure (1)..(550): unsure at all n locations
caaaggagagagaagtggataacgaagaagaagaagaataatggtagccacactttttttatatgggcctctatttagccaacacgcctcacttcttcagatattttgtttggaaactagccccaatgggccttgtaaacagttgggccaatgtgggccttaggagaaaggctcataaattcagtaaccgacaagcaaatttggcatggagttgtcttcactcttcatcttcagagtctcgtactcttgttgcgttttttcgcgcgcattcttccgctttgctttgttgttccaatatctctctcttacctctgtttcgttattctcaatcatataggttctgctatgtatatactctcagctcttagggttcaaatgtgtatatagtatggttcagcaatcagcacaccnnacgtgttcgatgatatgcttcaatgaagttttctcaacttgtagtcttattctgctttgatctcaagtagagaagcatattttttgttgtggagctcgaatatggcgcgttgggcatggtgttgttgacagagtatat

SEQ ID NO: 46546 - DNA, 431 bp, Arabidopsis thaliana columbia
tttaacttttgttttgggaaaaaaaagagaaataattattaaaaaccaataatcattgcatcattctacttataagttataagttgctatcaaggtgtttcgtttttctctcccaaacgactaataataatcgaaggccatatacattcgaagattactaatttaatttagtaagttcacttcacacccatagacacacaaccttttcttacatgaaacatatatatatatatatatatataaattgaggcacgaaaaataaaatacataaattaatctttaatgtgaatatgttatgaaaatacttgtgctactttacaactgagacagaaaaacactagttgtgaaaaaagcacgctaaacacaacggaactttcattcgtatggttggaggttttgcccagaaaaaagacgaagttgctccccggtga

SEQ ID NO: 46547 - DNA, 618 bp, Arabidopsis thaliana
taacgagcccttttcatatccgggagatagttccacgtatggtttctgcagtcgatgacaatcacagtcgatacatgatgattcaagccgatggtacctcccattacatacatcttgtatccgattgtgaccacagctgctccaagtaacactgtaggaagtgaacggattctgtgtaattctaatgggaagttgctccaacgaagaaagaaccagcttaggggagtctgtgtggatccgattaaggcataaagaaccggttcgttgaagccgaggagcgagcgcgttcggaatagtttatccgaagtgattacttgacgaaagtctctggagacgagagatatatacgggtaataacatcttgggatgtgtgcgatgagtctttcgatgagttcttctggaagttctagaagattccgaagattctctacttcttcttgaggattctcgttttgattatcttctccttcttgaggattattgtttggatcgtcgccgttaggccatcgagaatttcatggagtacaaccatcgccgccgtgtgacgttagcagcaacgaattaactgaaagagagactaattcggtatttgtgaaaaaagtgttgttgtgtatttat

SEQ ID NO: 46548 - DNA, 581 bp, Arabidopsis thaliana
aaacacttcaacccaatcagcatcttgtttcttgcagcctccgatcacataaatccttccgtcaattattccggtggctgcacggcaacgagcccttttcatatccgggagatacttccaagtatggaatctgcagtcgatgacaattacattcgatgatgcaggatgattatagccgatgcaaccacccattacatacatcttgtagtctattgtgaccacagctgcaccagataacattggaggaagtgaacggattctgtgtaattgtaatgggaagttgctccgacgaagaaagaaccagcttgggcgagtatacgcttggaatccgattaaggcataaagaaccggttcggtgaagccgaggttcgagcgtgctacgtagagctcctgcgaagtgattaagtgacgaaaggctctggagacgagggatagcgatgggtaatgacatcttgggatgagtgcgacgatgcttgcgatgagttcttctggaagttgtagaagaatcggaagattctctacttcttcttgaggattctcgttttgattacttcattaggatcgccgggaatttcagagag

SEQ ID NO: 46549 - DNA, 577 bp, Arabidopsis thaliana
caaaatcctgccctgcatcaccgcatatgtaacaaacaatccattctcactagcctcgttagggcattgagtaggcacagtttcccagctctcagttgtcacatcaaacacttcaacccaatcagcatcttgtttcttgcgtcctccgatcacataaatccttccgtcaattactccgggggttgcatggtaacgagctctttgcatatcctggagatagtgccacgtatggaatctgcagtcgatgataatcacagtagatacgggttgataattgtaaccacccattacgtagatcttgtatccgattgtgacaacagctgctccaggaaacatatgaggaagtgaattgagtctgcgtaattgtaatgggatgttgctccgacgaagaatgaaccaccttggggtagtatacggtgtgcatccgatgaaggcataaagaaccggttccttaaaaccgaggcccgagcgagttacgaagagttgctgcgaagtgattacgtgacgaaaggctctggagaggagagatagcgacgggtaatacatcttgggatgggtgcacaatgctttcgatgag

SEQ ID NO: 46550 - DNA, 1554 bp, Arabidopsis thaliana
taatcataatctcatcatttcttggtttggtttggtttacttgaactccgtatgatttggtttgatattttatcatcattttaattcatatgaaatccttttatatataaattgtttatatatgttttcttaattggctaaaataatacttttctaaaatttctttgctgataaaaaaaataaaaaataaatcatatgcaagttttagagtgaatttctttgaccaactattattggagaaattatatgtataatattcccctaaaatagaaattctattgaaaaaaacattgaaaataaaagcaagtacgtaaagattcctaacaataacccaccaaaaaaaaaaaaagatccctaacaatacttccttttatgatattatcccttctgtaatttcgaatgagtcacattgtgattattcaataaaacattgtgattgtaatttggaattatattttttaatgaaacctttttttgaaacgaagtttctgaacgcgatgcttgcaatgacgtaccaaagacattttggtttccctataaatacacaaaacaacttttgttttcttttttacaaatatcgaatttcaggctctctttaatctttcagttaattcgttgctcctactaacgtcacacggcggcgatggttgaactctctgaaattcccggcgaccctaatggtgccgatccaaacaacaatcctcaagaagaagacgaagaagtaaagaatcttccgattcatcaagaagaacaaaagatacataacgagaatcttccggttcatcaagaaggaaaagatacataacgagaatcctcaagaacaaaagatacataacgagaaccctcaagaacaaaagatacataacgagaatcttccggttcatcaagaagaagaaaagatacataacgagaatcctcaagaacaaaagatacataacgagaatcttccgattcttctacaacttccagaagaactcatcgaaagaatcatcgcacacttcccacaatgttattccccgtcgccaattctcgtctgcgaaacctttcgtcaagtaatcaattcggatcatttctactacgtaacgcgctcgctcctcagcttcaccaaaccggttctttatgccttaatcgcattccaagcgtatactcgcccaagctggttctttcttcgtcagagcaacatcgctttacaattacacagaatccgttcttacgaaccagtacaaggtttatgggagtcatggggtgaggaaagtgagttgatgagattttggcactcggtgtcgtcttgtgtggttggagatttgttgtatgcacttgatcttacgtgtgctcttgaacatccaatagtggtatattatccgaatgaattcgtttggagacctgtgatgggtgtagatactgctcatttgcctattctcactgaatatacgtctacgttggcgaattttgatgggaagttggtgattttgggcgggggcgactgttctgagtcttcttccgaaatttggtgcgtagagattgcgttggcaacacgtcaaggagatcagattt

SEQ ID NO: 46551 - DNA, 594 bp, Arabidopsis thaliana columbia
taaacttgtaactgatggcacaagtgatgtttttcttggtgtcttctttgttgtttttcaggcagataactcttctacgcatggctgctaaggctttaaaagatttgaagaatcttcctgtctctgagaggaatattgactgtaaaaaaaatccttgtgctggcaaaatgaatggaaaagctgaagatagaccaccacaaaactctgtccccttggatcacaatcatcctacaggcgatgagatagagaaacctgaggcagaaagagttatcgtagaacttgagtatatcaaatccaaagacttgaacaatgtagctgaagttgatgcagttctcaaggtatcaattgttctttcctggtattatactatgctttactgtgacttctcatttgtaatgctgccttgcaaatttgcagttatattcatctgtttggagtttggacattacctaataccattttggaaattctttgtttaatattccagtcacttgaccgttcgtcgtctttccatttccacaaggaagaaatgctgcatttgctgtaagtcgttttctctgtgctcgtgagaatgaccagttaaagtagattgag

SEQ ID NO: 46552 - DNA, 540 bp, Arabidopsis thaliana columbia
accaaacctcgtataacgaactctcccagtatcgggacttgtgtgactcgagttagagcgaatgatgagctggcaaaacaaaaagtcagtttcaggcagccacgtttcatttagttccgcgtcgatgttcatgccacgtcagatgatgctttagtatttttccataaccaagtgtaataacatgagaaaataaaataactaacccttttgccggagttatttaaatatttaatttgaggacctaccataaattccgtgaaaagaccttaccatgaatttcgtttcaaggtattcaatttattagttgtaaacttgaatcgtgacatgctgagtatttcgggacttgtaattccaccggaaaacttattaaatttgttttttgtagtcaagcctattattattaatataatcataagtcgttgaaagcacaaatataaaatagtattcttaagagagtataactataatactcgcaagttaaaactgtatttttttggtcaattgctgtcaagatttatgtgctagtatcagcaagatttg

SEQ ID NO: 46553 - DNA, 719 bp, Arabidopsis thaliana columbia
aggatccccgaaaacagtttgataggatcatttgttccgtttggtggattcttctcaacaactccttctgaactgaaactacccttctccggtttcaaaacggaaatcaccggacccgtttcttcaatatccgatcagacacaatctaccttgccaccttggttacaaatgaccacaagaactgatttaaaccaaaaatcaagtgccaaggtcggtttactttctcttctcctaatttcttaatctcccataatcctacgagtatgtttcttgtactacaagtttcattatgttatgttaattgcaacgtgtatttacatctcctcagtgcagaccaaagaagggttggaatcagtttgtggaaataagttcacgagcagtgcttctgcatcgacctgttcagctaaatcggtcaccactgatctgaatcttagggtaagttcagtcaccacaggatccggtctcaagaagcatttggatagcaaagatttttctcagccacaatctgtgtcctcctattcctttgataacccaagggacctcaacgcagagagtttcaagattatttacagaagattaaccgatatggtttcaggacaagatgaggctgctagagttatcagctgtgcactgtcacaaccgcctaagagtgtcactcgaagagatgtttggcttaatttggttggtcctgatactgtaggaaagagaagaatgtcgct

SEQ ID NO: 46554 - DNA, 548 bp, Arabidopsis thaliana columbia
ttacaatgaaaattaaataataacaatattgtttcaagcgtacatgatagtgtctcaatacaaaccaaaaatagagaaattctaaagtatatattttttttctttcttcctgtaaaatcattcaccaaactcataaatgttattaatgtgcagaaattttcatacaaatagaaaacaatgataacaataataaggaaatgggcttcaatagacaaataactcaaacacatatatttcaaactaatgaaacctataataagccttattaaaaaattctagctttttaagttctccaatttttggtggctttaagcgaatgcctttatcccacaacggtaagtactacactatttcctcatgtaaaattcctgacactagagatataataatatggtgaagataacattgtttcaaaaaattagtgatactaaaaatatagtaatatggaaaagacaaaattgcttcatgtgaattatcaacctgaaaaactaaaatttatataatacaatgaaatacaacacagaacaaatatatgtttattgaattat

SEQ ID NO: 46555 - DNA, 452 bp, Arabidopsis thaliana columbia
ctttgttgtcgaataataatgataaacaatcatttcacaacaagagccaagtgcactgaaaccatctaaccaaaaggtaacaagaagacatgaaacgcgcaaaacaatgtcatttgactatatagccaagtgcactgaagaaaaccccccagcatgaaagaacatagcatttggcataggttgctcagcacatgactacctaagatcatgtaaaaggatcgcaaccaccaacgatgatacaaaagagggggaaagattatcaataccaaaggcgaagcagacgacacttgattccggaaatgacataactgatcaagagagagtcgtaggcaccttgagtcaggaaatggaatctcatccgtcccgttcttagcaccaaacccatgtaagggtacagattcaagtaatccaaggacagtagcgaactatcaggattgatgcactgatcttga

SEQ ID NO: 46556 - DNA, 506 bp, Arabidopsis thaliana columbia
tgactgcatcatgttgcctgatgcataacctacccaaaccttttatctcttcttcagtttgaaagcagaacaaaagctttggagctggacgaatgagtgagtgtaaaatgagtcatgtccttcatctctctctttccacataagaaaatgaaaatctctttaaaactttttttccactgggtgtgaatttgaaaactgtatcattgtgtgtaagcgtaattgtaatcagacggtcaaaatccttattttgaaatgtacaataagacttcaaaagttaatgttgcttttgatttttgtgtgtggtaaagccacactcgctctacacaccaatctattatactaatgtaaaggtttgaagacaaatccaattccatatacaaacatgtctatgtatacaatatatgtcatattgtatacctctctatcagctcttcattcaaatgcaaaacaggaaaaaaaatgaaagaaaaagacttccaaaaacaagaacaagaaaatgcagaaga

SEQ ID NO: 46557 - DNA, 564 bp, Arabidopsis thaliana columbia
aataagcaagtaccaacttctcaaatgcataacctgcataagagactccctctttcccaatcatcttcttgaaacactctgaagcttcttcgagatctttagcatcacagtgcccttcaactaaagatgccattgctttatcatctaaatggtttccagaagcttccataaagttcacaagttcgtttgcttcatctttcttgcccttacgactaagtcctgatgcaatcacactctgcaaatcaccgctaggaacatatccaccttcgttcatcgctttcaacacctcgttgctctgtccaaacctatcaacgcttctcaaagacttgaggacatgttgcagcataacatccggcacaacgttgccattcccagtataagctttcaaagttcttgtaaataagtccatgtccaatttctttgcagtgacaattttcttgagcagtaaactgcagcagtgtggggtgggtgtgttgctaatgctacctgccattgcaaactcaaacaactcaacagcttctttaatcattttagtctgacagaaccttgctgaaaccctaacat

SEQ ID NO: 46558 - DNA, 517 bp, Arabidopsis thaliana columbia
tgttacaaattaatattttactttaaattttatttttctcttaaaacatttagaaacacaattaaataaattgtttttaccatgcattccaattttatgcccatactaaaactcattaacacatttcaaatgtgaagtatgataatttttaattttgtttatgtttaaaagttaaattatattattattactaataaactaataataatatcacttcttctaaaatttcatttctttgatttaattttcttttgtttcactaaaatttctatagattataactaacactaatataaataaatatgaattaaataaacattgtaattagactttaatgtaaaaaacaaaaaaaaatattgactaatgacttgactttgtttaattggatgtgtacacgatgatgtggatccttaacaagagagaaaactttctgattttataccgtggttagtcttggtttttacgtaactttttttttggttcggttattcaatttttgcggctatataaagaaaac

SEQ ID NO: 46559 - DNA, 724 bp, Arabidopsis thaliana columbia
tatacataatgagtgtgtcgaagtagcatggacaaaaagtggtctttaatacaactcggattatccctttttgctaatcaaaaccataatacaaattaaagaaaaaacaaatcaaaacttcaaggtaaggtaaccttatgatgcatgaaacaataagcaggatttatataataaagtcgataacatatagttaacaacaacaatcaaacgaccatcgaataacgtaaatactaataatattattgcatatataaaaaacatatataaaaaaaaaagttctaaaagactgagtagaagcctgtagtgtctgcaacgacatctccaaaagcagcgatagaagaagaagataaatcttgcggctccatcatcccgtaatcttccattgacattgaagcggcagagcaccatagttcgtgatcatggcagagagatcacacgaaccaaactcatgatgattcatcatcatcatctcaccatcttcgaagtagctattactaaaccctccatatggttcagaggctttgcttgctaccggagttgtgaaactagctccggcttgattttgggtggtggtggctccggaggtggtttaaggcagtggtttgggacaatgcaatccaagtaaccgagttgttactggacttattatgttcttcgcttgttaaagagaagagagttgtttcttcgctagtgaagagatacgaccggtagaagatgagtttga

SEQ ID NO: 46560 - DNA, 547 bp, Arabidopsis thaliana columbia
tgatacataaagtcaagaaaaatgtgatttttttgtatacaatagacatatattactcaattaataaaaaaaagtgtgtaatcaacgtctcatatcggctaaactgtttaaaaatatattcaaaattatattatataagatcaaaatgaatccaaattcgaataagcatgaagcttaacttaacaaacatctaaataacaaacatttaaatttaaaagtttgtatacgagttaattcggtttttaattaaacaatttaattttaccataaaccacatatggctctaccgatgtattgtcccatgcctagcaaccatacacactgggtttgaacctttccctgccagatccgaccatcactaagaacctggagcaagaagaccatcaattcggtttgatggaagcttaaactttcagtgtttccgaggagtcatgaagctcaaccacatctccgagaaacaatctccacgagcaccatctaagtacccgagagtactatagttaaccacgtgacttgcaacgaaacccacaatccctcaccatctttt

SEQ ID NO: 46561 - DNA, 566 bp, Arabidopsis thaliana columbia
  unsure (1)..(566): unsure at all n locations
tcccgnnnnnnnnnnnnnnnnnnnnnnnnnnnnnnnnnnnnnnnnnntaaaggcaacccccactttttaaattgcagtaaacggccaagatgagtatccggcagctcgccaccttccagaacaccaacgccatagcagaaaaaagtgagcggtcgcttcgctgtaatacgcggatcaagctgacgcagtgaaccagctgccgcattacgtgggttagcaaacactttcccgcccgtgcgtcgcgcatcttcgttaatcttttcgaaccccgcctgcggcaggaacacttcaccacgcacttccagacgcgccgggatattctctccgtgcagcttcagcggaatggcgcgaatagtacgcacattagacgtgatatcttccccggtggtgccatcgccacgggtcgcggcactgactaaaacgccattttcatacagaatactgacggcaagaccatccagcttcagctcacagcaccaggtgactttctcgatgtttttcagacggtcctgcacacgtatgtcgaaagcaagaaagctttcttcatcaaaaacgttatccagtga

SEQ ID NO: 46562 - DNA, 607 bp, Arabidopsis thaliana
tgatccaacatctcttttgggtttcgactaaaagggaagaggaacatgaaaaaacctcatctcgcttgaaagtagtctaacaaaacttcctagtgagataaaacaagttccatcccataaaattaagaagaccaagatttgtcctaaaaaccaaatgtacaatgaaaactgaagcccaaaagtgtataaacgtatccaacttcttcctctcagtcctcaattgtctgaatctctcccatcatgatccggttactaaccacattaaatcccagaaccgatgcgctcaagctaaccttcttccctttcttcgcctttttctttcctccaactttcgagaacccgtcatttgcagctgtagtgttatagtaatagtcttcacctgtgttgtttcgggtcccgactcccgagccctttgattgaaatgcaatctcaactacttctgatggtaacaggtctttgtagttgagaaatttgtcgatgaacttgtggtcagggtcacgagaccccagattttctatcagaagagtttcagcttctgatcgggatagcttcagacaaaattccaagacacttgtatctggcaaaatagatacacatgatagatatc

SEQ ID NO: 46563 - DNA, 349 bp, Arabidopsis thaliana columbia
aatgcctattgcagcccgatcatctgaaaatatgaaagttttacctgcaacccacaacaaaaacacaacgttaagcttaactagagcaagactaaattcaataacagcaaccacgaaccataatccaaaacccttatgagataaaggatcgttttttactcccagcaatacaatctagatcataaacaagacggaagagcaaagcttttttgagacatccactctatataccaatcagcacattcataacaagttcaagtcaacataaattataaaccatcaagcatccatagatctttcagacaataataccttacaattagcttccaaatccatgtcttcaacacca

SEQ ID NO: 46564 - DNA, 445 bp, Arabidopsis thaliana
tatcgtagttgacaacatcatatattttaacagcatgatcatttgagattgtacagcaaagcaaaccatcaatgctaacctgcattgctgaaacgagtcattggttgataatagaactagacacaaacaaaaaaattgcggaaaccataacatgtctaactataatttccccgccaggtcaactatcttcattcaataaacaaataaaaagctaatctttcaaaacatggagcatatgcctggatttgaggtgacagtatcttaaaaaccactcgcgatacttaccgctagaccttcaattggaccgagatgggagcggaaatgcttagcaaactcgataccaacaccctttttcttccaaaatttccagtgacctagattatgcaaaatatacatatgttatgctttgccattacaaaaccagaatgacatcattggtatcaca

SEQ ID NO: 46565 - DNA, 596 bp, Arabidopsis thaliana
  unsure (1)..(596): unsure at all n locations
ctnnnnnnnnnnnnnnnnnnnnnnnctaaagttccagcgcatcacatctttgatgttcacgccgtggcgtttagcaatgcttgaaagcgaatcgcctttgcgcacacgatacgtaatgctatcgctgttgtttgccagtcgctgtggctactgcctgcaccaatcgtcaaactttggcctggcttcagcttagatccgcgcagtttgttccactgctgcaaatctttggtgcttacgccgagacgtgaagcgatacttgaaagcgtgtcgccagagcgtacggtgtaaacacggctgttaagcggcgtattgtcggcaaccagcgtcgactgtacagcagcaatttcgcctgaagccagagattcacgcagttgatctgcatgcttctttggcaccatcacgtactgcgggccacttgcgcccagcgtggagccttttacgccagcgttgaatgtcgttcagcttgctgacggaaatccccgcatatctgctaccttcgccatttcaaccgggctgctcaggtgcacacgcgccagagcacggctttcatcggtcgttggcagacgtacgccataacgcttgctgtttttgagaat

SEQ ID NO: 46566 - DNA, 530 bp, Arabidopsis thaliana
tacaattaatattggaagcaatgattatctcaacaactatttcatgccggctccctacactaccaatgaaaatttcagtttcgatgaatatgctgattttctcattcaaagttatcgctcttatttgaaggtacaactatatatatgcttatgatcttattagaaatgtaatataggaattatagatcttaaaatttgattatcatatagagttttactttatgtatatagcttttctcacgccaaattctttaatattttagtgattaagtattattcaagaataattttaaagtattgtattatatttataaacatcttcaaattaattttggatagcatttctaaaatataatcattactcattacactagctacgtacatatcaactagtgattctctttaaagttaattttagaaaataaaagaaaaagtatttaatatcataggttaaaggtggaaattgaataagtgatagactatgtaaatatttggatatttttgtctaacatatatcctcctaattatgt

SEQ ID NO: 46567 - DNA, 520 bp, Arabidopsis thaliana columbia
tcatctgatttaataaaaaggtggttagtggaagaataaagctggatacaaagacatattacagtatgtcaaaaaccaaggtaaggtaagagattcaccagaagcaatggcagatgcagcgttcttgaactgggtaagaaggtctttgttttcagatggatctccatagttttcggaccaagatgagataataacggccataccaatagcaaggaagcaagcagcagcatcgaaaggagcaacaggaccgagggagagagaatcgacaaggtaattgccaaagaggccagcaatgatggcgactaatccattaccgaggaaaatagccttggagaaagtgacagaaagccactgctgctcgaagcctctcttgttgtgctcagcgacgagccaggattcgaaggcagagaaaaggagagaagtagcgatcctccaagaacacgaccggccatcaaaactttgtactggggagaatgtttggtgatacagctgagaatgtaggtgatcagtaggtgataga

SEQ ID NO: 46568 - DNA, 340 bp, Arabidopsis thaliana
  unsure (1)..(340): unsure at all n locations
actgtcgcaccccgccccccccaggtcacattcgccccacctgtcgtttcactcccctgatgttgatgactcaggttgacaccatacttcacctgatcccgactccctactgtccctgataatcccgtattatctgacgcaaacccctgcaccatcaaacgtcgttcagttagacatatatatctcccgangaggcgtcgaaacgtcatcaccccaatcaaagggaatcgatataaaactattaaaacgcttctcttcatgatgattatcgtcataagcctggcttgccgcgagggtatagcttatgagtagcaggttgttggaataactcaactgataa

SEQ ID NO: 46569 - DNA, 528 bp, Arabidopsis thaliana columbia
  unsure (1)..(528): unsure at all n locations
cgtcgaccaggtccgagacttcatcgaccgggtccgaggaatcgtcgaccaggacgatgaatggtcgatgaaaatctatcgggttcgaggaatggtcgaccaggggttgaaatcgtcgaccaggtccgagacttcatcgaccgtgtccgaggagtggtcgagggtttgtcgaccaggacgaggaatcgtcgaccgggttcgaggaatggtcgaccaggggttgaaatcgtcgaccaggtccgagacttcatcgaccgtgtccgaggagtggtcgagggtttgtcgaccaggacgaggaatcgtcgaccgggtccgaggagttgtcgaccataggctaccatcgtcagtatcaccctacattcataatatatataacttcttttacgtcgaccaggacgatgaaatggcgatgtcgatccataaccttctagtaagaagtgtaaaggcaggcgtaaaaaaagattcgaccttaaaaagtaattaatttcaagtcacatgaataataattancatgatgtaatacaaaat

SEQ ID NO: 46570 - DNA, 430 bp, Arabidopsis thaliana
  unsure (1)..(430): unsure at all n locations
nnnnnnnnnnnnnnnnnnnnnnctaaagttgagctgttcgctggaaatcgcctcatccgtcaccgcgaaggtcgcctgttccggctggctgaccagcggcgcgttggtatgaaaacgcaggctctggttgacgatatcgttatttaatggggtagaaagccacaccggcgtgtcgttatcggccagcgtcacgagcacgctggtggtggcgatattcagcggttgccagccgcgtttgagctgatgcagggcgacaatcacgcccggctcgctcatggcctttaacaggcgacgaaaactgtgctgggcatcctgcacgggaagcataaaagcggtttccagggtcatgcgttgtctccgcgaaccatcgtaaagaagtcgacccggctggcgttcacttcggcctggcgtgcggcaatgcgtgccatac

SEQ ID NO: 46571 - DNA, 473 bp, Arabidopsis thaliana columbia
tcaaatcatttattgtggcttattaaagatatactataatgtaaggatcggagaactaatggtgatcatgtaatgaaagacaaaacattgtcacatatattgtaattatttttggttttcgttattaattaattgttagtatcttccggattttgattcataaaccaaccaaaaacgcgtctcaggtggttttagcgtacccgacgttgcaactggcttatctttttcctacacgtgtcttcctctggttggtattatatcatacgtgtaaaatggacttttaccttaattaaccgcatcttatggtcatcaattcatttcttaagctacttttttaatttatttgtatgacttttcttatcgttacttatttgattaaacctttcttacgccatttttttttctcgacaagtatgttgcatgaattcatattggagaaaaattaaagatcaaataggattgaaattgtttgg

SEQ ID NO: 46572 - DNA, 588 bp, Arabidopsis thaliana columbia
ttattaggattctttgtcaaaatagtttcatagtttagattcattagaaaatatgataagtgttactactcgacgactacacacatcttaaatatatgtaggatgattaaaacttgaagcataccgtaccgaacagtaaagaaaagtcttaacttttggtttgttcgttttcttcttctttggttttcctacacataaaaatctgatatcttgccgataattatatattagttagattttggttattcactcaagttaatgaaaatttatcatatatgggaaatattcaaagtcaagcggataaaaacaattacgaataattgtctagtatttcatagtttacttttgtcaccaagtccatagaccatagtataaattcgttgaactaatagtaataatttttgacgttcatgcatgtatagtacacaaaaacttttgggcttctagaagaaaaataacgcgattgaggcccaatatagtgcgtgaaatgggcccaccatatatcttcaagtcaatgaacaaccacttcttgtcatgggagagaactatgtcactatgaaattatttattgtagtacttagttgcttt

SEQ ID NO: 46573 - DNA, 643 bp, Arabidopsis thaliana
cccgtttaaagtagaccaataatctaatgagtaattacctcaacttgtcgttgcaatgattggacatagtttataatttcatccaacatcagtgcttttccagtaacctttaaaaagtaaatttgttattgctctaatcacaactatattagtacaactaaaaacgagttaattagttgtttaatcaaactctcaccttgttgcatccagggacaagatcttgaagcagcttcattctttcgcttattttctctcttcgaacctttttaatatcgaaatcacaacaacacattgaatacaaagcatgattaattcaactaatcaggacgtaattaaacattaagattaaaatcaataaatttggtaagaaaataggaaattgactgactcgttcggcgagactgtgactatcggtggcttggcctcgtcgagctctaacatgaatgtaatctttgtaaggatcaattgatttagttttgtctccattttcttctgattttttgcatctctttggatcagaatcttccttctcttcaatctcctgataatcaaactaaaattagtatttgtttaaacaaacaaaaaatgggtttattcgaatgtgagcttcatatgacctttgatgatgaactgcagaaggaga

SEQ ID NO: 46574 - DNA, 528 bp, Arabidopsis thaliana columbia
catgctgatattctgatggtgcaggaaaaagctgcagaagaacatgacatgatagcctctggagaccatgaagaatttccagtcaatcctgataacaaacactctgaagaaaatcagtcaccacatcatcatgctaataatgtgatggagcaggaccaagctgcagaagaacgtgagatcatatccccaggagaacataaggaaattccagccaatcctgatactaaagttgttgaggagaacaatgacaggatagatgagggtgaggctaacaatttgaatttggctggcgatggaagtggagcagtcgatcatgattacttgaccaaaacggagctggacaaagtgctagaggtgcctggttctgagaccatatcaaaactggaggataggccatctgagcatctctcagaaacctcaatgaacgtggaaaaagaactagaaatgcctgccgttgaaattttgccagacaatgacaaaacctctgatgtgttggcagttggagtttctggagacagtgacaatgtg

SEQ ID NO: 46575 - DNA, 547 bp, Arabidopsis thaliana columbia
tgatccttcacctacattgagaaactttccactaatatatagctatgacatcgcaaaatgtggcagaaaaaaaaaaggagaaataagatcctaatcgaatgcagcaatcgtagagaaacaaaacccctagaaatgtacacatttgaaaaaaattggggagaaattcaccggcggcgacgagacgatcgcaggaattcttaatcgtctggaactgagccaagtagttcgccatctgagtcaccgatctatacgaatcatacgaataactcgatcgaattatacaaagagatcagaatttgagtgaggtttcgtcttctagctgccagaaaaggaagtggaggaaatcaccgacgccggagatctagtgaatcgtcttcttcaaaactatggcgctcagatttgatcctgaccgttggatcactccttctattaactacatctatattagaatgcttgtcgtctttgtatataaataacggcatgcagtctaatgttctattaaaaagacaaaaacaacgcttctttcttctccgttaagagaaacgtc

SEQ ID NO: 46576 - DNA, 964 bp, Arabidopsis thaliana
acattcaccaagtttgtcgacttccgccgcggagacattctacacgccgctctcaagcccaagattcctctactccgccaccgcggtgaagaagaccattccgatggcgagaaacccgatgctcgaaattcgatttcacggccatcgacgtggctgagactagccaccagaaaaggctcacatcgcagggtagaagaggaggagcaacaaacgccggacccattcgctataccaattgggtataaatggacaagcatgagtagtagtaatagtaagtcaggtaatagtagtaaaatgaagaaatcaaagtctactaagagaactaagtagtatcttctttgaggtattaaagatacgaatcaagtcctcttttagtgtagataatctgatattagtaaaatacagagaagctggttgtagtatttctttactatacatttatattttttcatatgattaaaatgctgtcgtttttactcttttcgtcggtcatggtctaaaagagttcaataataaaagctttcagatagaagcaccaactaaagtaaaaataaaattgcataaaaagaaaaataactatttgttcatgctttcctttatttatggatcaacattggtggttgtattaacttttctagatacaataatactttttttttatagcaattttttacttttttttgttgctttaatattcgttatagtattctgtactaaacttcgaactaatgacttttgataaagcaatcactgagtgttctgctttaggttacataagacacattttagacgttttggattacattccattccaagctggctttgtatatccgatttaaataacttgacaaagctacaaaacctatgaattacctaatgagagtccttaagagactagaagttgaagttaataatatatagtacatacataatagaacccttagaattgcataagatttatgtg

SEQ ID NO: 46577 - DNA, 896 bp, Arabidopsis thaliana
tatttgtagtagtaaatcacatgtaatgtacacagaaacctcctcctcgtatgtaacctaaagatcaatgtaaggtcttttcttttagagagtactaaagagttctgcgtcctgacatgtacagccccttgccaaattttaataggcaatagtaaataaataacgacaagaagcaaatggccatcaaagtgatacaaagcagtgaggcgtgaaaagattactaacagactagacttggtgtttctcttctctgtctacactggcattgcccgtctcccaaaaggaccccatttacaaatggcgttgtcgattagttcgcagtgggaggcttgaagtctatcatctctcttatgttcaacttgatggaaggccccattgacgagcatatgtgagcgcttttccagtacactcctttagctccctttggcttgtttgtctccaccgatttctgcatttcatcatttacttttccctcttcatttttttttgtattttaaaccacagaaatacgtaataagaatggagaattagcctaccactgctgcaaggaagtttatgagaaggtcttcctctgtaaaattaactttcccaaatggaatgtgaacaatcccagttttgtctgctctgaattcaactttccccttcttgaactcttcaatagcctgagagatttatgcatctttaagccatgactaccagaatcaggaaaagatgttgcagagtaggcttacctggggaatgttcgctgtgactgtaccagccttgggatttggcatgagcccccgtggtccaagaatctttcccaggccagcaacctaagcgccaagttcaagaatgttagaaaatagatcacgagttacaagtatctcatgccaccttatttgccaagcatgacg

SEQ ID NO: 46578 - DNA, 543 bp, Arabidopsis thaliana columbia
ataaagacattgtcttagggatttttatatgtaaaaggtgaaatttctctcagacttgacaagttctgacttatgaatacttgaaatcacaagaatagctaatagtagaagttggccttgtctgctttgattggcttgatatctttttcatgttgacatctatgcttaattcaagtgcatttatatctagttgggattgtataacattcattggctccaagagattgtttgttcatattgaacctaaagatgaggaacacacatgtttttatgctgcatgcattttctggtacgcaaaatgtctctaattaacacaaggaggaagcttggagagttaatgtccagatacagggaattgaccttgaacatggctgtctttgtggcaccatggaagctctaaacgttcccatggcagacactcctgtaagaccttaaactcttacttatttttcttcatgttgttccctttgaatttctaatacgggaaacgattcttgattctgtgagtgtcaggtcataacatttacccttatatatttatgg

SEQ ID NO: 46579 - DNA, 1007 bp, Arabidopsis thaliana
gatctcctgtcttcaaatatattggccatggtggcatgcaactcctccttatacgcatagtttcttcccaaaacgttacgaatgagtatttgaaccaccaatgcaacaacacacaagggacatacacgcggggtagtacgtttgagaagaatctcaaccaagtcatccgtaacatctctcacctccatcttcgctacggttacacctacaactccaatgttgaggcttacgaagttagtaaagatcccaacattgtcttcgttttgctccagtgtcgtggtgactcttacgggtccaagtgccactcctgcctccacacagccttctctggggtaacttcacttcaatataagtcacatatttccatatatgaacatatacacacgtctaatcatagttaagtttgagagataactatattaatttgacttcattgatacaactgatatacatcttaacgcaagtagaaaagacagctatatgttatatgtagattattccatgcatgatcggtgtgtatataattgtatatatatatgactagcttcgtgagagatgtcgggaaacaaaggagcaataatatggtacgaccaatgtgttttggagatttcttccgtgaataccaaggggaggattcgttacgatagttttttcaatatgaccaacgtgaagaatgtgagcagcaatgcggagcagtttaaaaataaaaggaaggatctcttccacaagctattgttgggagccaccaaggatgtaagcgacagcaatgatgcgtacgcagtgggggagacgaggataggaagaaataagatgtatgcaatgatgcagtgtgcactagacttaacgacgaatggatgctatgtgtgtctagaatggattataggcaggtatgatagcttctactttgaccgtagacaaggaacgagagttttgagtaggagttgtagcttaagatatgagctttacccttttcttaggaggtaaaagacttttagatgcatgagagc

SEQ ID NO: 46580 - DNA, 339 bp, Arabidopsis thaliana columbia
taaaatcatgtatacaaaataataaatttcttacttcgaatactattttttcaatgttagtagtttgtatattccctctatttctgattatatatagttttaaaaaaaaaattataaaataagtgttgttttcacttatctattcaaaacttaaatgtatttaataatttttggttaattatattttacaatatattttttttattggtagaattagatgtagttaatgatgttttacagataatagataaattacatgagattcttatgtcttttttatgtgtgagacaaaggaaatattaattaagcagtccgattcaatatgtaatgtccacatat

SEQ ID NO: 46581 - DNA, 611 bp, Arabidopsis thaliana columbia
caaccgcaccgtgatgacaatgccaccgtattaacgaattccatgtcctaatattaggcctcgaatcactcgatctctgtagtttctctaacacctgtaactcttcatccaactctccatacttaccaaacgtatcaataacactattgtatatctccacatccataggcaaaccaatctccctaatctcttctacaatccctaaagctttcttccacataccattatctctataaatacgaataatcttcccataaacaaacgaattcaaacgaaacttcctcttcttcatttcgttaaccacacgccacgatacctcttatctaccagcactaacgtaatagttcaacagaatttcacaagtttcctgatccttatcaatatttccccttttcatatgattcaaaaccctaagagctaactctaattgaccttttctcaaatatcgactaaccaaagcattgtacaatctcaccgaatagcttccataaatcatgaatctaactacttcatgaaacaaagcatcagcttcgagagtccttctgagactagcgagtggttcaataagctaacgtaggaaagaggatcaggacgtgaacctagagaatgga

SEQ ID NO: 46582 - DNA, 603 bp, Arabidopsis thaliana columbia
cttgctgtatgaatatgttatgaatatttacgctcaactcagctcctacatcaaatttaaaaccgacatccatcttctctagcctttctatggtatccgctttgtagcacagcgttggttcatacgaaagaggtctgctgcctataagatcgtcaaacgcatccacaaatttgtagtacaaatttgtggacaaatgagacagcgtcgagcccgtgtcaacaaatacttggactgggtcgtccaaggttatttcctcgccaacaataatggattccaattgaaagatagtgtgaccttccgtaatatttattaccgtcggatgtccttgtacgtttgcaccatcgccaaggattaggttgtgagaagctttgggttcgcttatctcaccaagacaaaaggaaaacttggagccaaactcgcctattatggagtactttccaaccccgaggcccaatatgcctgttcctgtaaaataagaaccatcgcttaacgtgttgcaccaaaatacacacgtgcaccttttgaaccacatcatgtgtactactgtaatcatcttgcgctagtgttctttgatgttggtttcgctaagtatgctgctggtag

SEQ ID NO: 46583 - DNA, 643 bp, Arabidopsis thaliana columbia
  unsure (1)..(643): unsure at all n locations
tcaataatattaatttattttctaagtattgattttatttattgataattgataatgatatattttcgaatatagagaaaaaaatacaaactaataaaaaaatcaaataaaatctggtggctcacgctcaaaacgatagagagaaactcttatcaaagcttttgatttctctctcgagggtttcttactctgctgcttcttcttcttcttcagtagagcgagattctctcgcgctctctatcgctacatataaccatgggtttatcaacgaatctccatagcctcgacctccgttcaactttcttcaccggtctacgtacatctccaatcccttccaatttcatcaaaatctcttccatttccaaccctagacgcgatatctccaccatcagagcccaagtctccaccatcagcctcgagacctccgttaaacagcgtcaagacgaaatcgaatctcttttctcgaagcaaccctctcagcaagactccgatcggaaacgaaacgggaagagttccaaaaacggagcttctgggatatcttcaggtgtgaactagagacataaggacaagtacaaaggcgtgactgtgcttanagatgtgacatgggaagtgaagagaggtgagaagtagggttagttggtgt

SEQ ID NO: 46584 - DNA, 645 bp, Arabidopsis thaliana columbia
tgaaccatgtgcttcataactgtaagaatcaaagtatattaagactcatgcgatatgctagtccttggatcatatggactctatggaaaaatagaaataaaagtctttttgaaagtgatgtgtctatctctaatagcatagtacagaaagcatttgaggattggaatcattggttatctgctcaagatccaaagactcagtctgaagacacaaagaaagaaatgaaatggattcctccgccttggaatgaattgaaatgcaacattggtgtggcgtggtcaagtaaaactcaattagctggtgtttcatgggtagttagaaatgatacaggagaggtgcttatacacagtaggcgatcttattctcaggtacattctaactttgaagctaaactgaaaagctgggaatgggctttagagagtatggataaactacatgttgatagagttacttttggagcttcttctcatgatattatcaaagcaatgaataaaccaggagagtggccagctttgagaggacatttggatgcattgctagatctcactttggataactgcattggtatatggcaatggaattaagacagtgtaacacgggagctaatgagatagcaaaagcgtgatacaggattgagatgcagag

SEQ ID NO: 46585 - DNA, 561 bp, Arabidopsis thaliana columbia
cttctacaattgttcattcatccagagaataaattatcgtttttaaaaataaagacaattcatgaacaaggaactaggtgatatattagctcgtgtcatgggaagaaatgattatcaagttcagttacatttctatgaacagagaaaagcagtggctcctaatggctctgcactttgagatttgaatcacttccatatctcattgtgcaaatgcaacaataagtgctttcgagactccatttcacacgcggatttgcagcagctagccttctattgcccaaaaatcttcccgagtttggtttgcttaagctgcttcgtgtattgtccgtgtgcgttcaccatgatgcccttcagaatccacattgtcctattaaagttaaatcccaagtttagttctattcacagatcttgttggtaaggaccacaacaatgtttcaccctataacacttacaatgaatcttaaccgatcagaagggacgaaggtaaatgtacctgcaagtatacattcttttatagcatccagccagacttcagtccaactcagtgaagactttcatggt

SEQ ID NO: 46586 - DNA, 573 bp, Arabidopsis thaliana
gataatccgactcctccgacggaggcaaagctctccggaaccactttatcgcagtgaaacctaataaagctattgaaatcgctgataaacctacggagactcgaaccagcactgctcttagtgttgaagctcaaggaagctagggtttttcccatccttcgggagggtaaagtccggaaaccattgaagtacaaggcattggacgatgagagagcatacccatctgaattcgaacacggggatcgatttctagaggttaaacctctgagccgtgggaagaaatcaaagaccggtgcggctgattcctgggttaccgttgaagggttttgcatatttgatagagagagagaagagagattcaaatagccatgaatgatgaagcgcgtcgtgggagagattgcaaaccacaaagataggatttttaagaggagagtggatgatggatggattcaggacgagggaggacgattggagttttgttgtttttgtgtaagaagacgacactgcttttggctaaaccgaaatacttatccgaatattctgtgggcaatttctaccaaaattcaggtaacc

SEQ ID NO: 46587 - DNA, 520 bp, Arabidopsis thaliana columbia
catagcgattactccacatgacttgaaatgattagtcaaggcctccttcatctcatcctcaggaagcgaagtgtcgaatccttcaacgtcgatataccaactataataataataataattattcaatcaacacatgatgaagaaaatatctttacatctacaaatctccaaaaacaaaaaaaaatcaaagcatcttctcgaaaaaggctttcatctcaggattatcagcaaacaggttcagcacctaaaaagtacaaaagcgatctaatcagatgtttttcttaaatacgtagaaaattgataaacagagagagagccataaggataaggagaggaagattactttgtgttctttgcagacctgaggtctgttaaaaccgaaaaagtccatggagaggttgacaaaagagtcgataaccctagctacgatcaatatatttccctcctattttagggatttcagaggtcgatcacgacgacgaagctatttattatcttttttttctttgcttttaggagg

SEQ ID NO: 46588 - DNA, 1236 bp, Arabidopsis thaliana
gattactcaagaaggagcattgattctcttcactttcccggaatatgcttccaagatcaaaaagttaactccggagaaaatgtttcggtttctggatatgtatgaagctcttgcgaatctctatgttgagattgaatcaatcttctacttcgaatcagctgctgcggttagatctcaggtgataaactcgttagctagactcggcgatgcgacgaggttgatgatgacggatttcgaatcggcgattcagaaagaaacctcgaagactccgatcatcggtggtggtgttcatcctctgactcgttacgttatgaattacctctccttcctcgctgattacagtgattccatcgctgcgatattcgaaaactggaagctgagtgtgccgacgccgttgccggattctttatacataagcggcggcgatgaagcgaatccggaggatctgtattcgtctccggtctctgtacgtatcgcttgggtgattttactgacgctttgtaaaatcgacggtaaagctcagccgtataaagacgttgctttgtcttatctcttcctcgctaacaatctccaatacgtcgtcgttaaagtccgatcgtcgactctgaaggttcttctcggagacgattgggtgtttaggcatgaagagaaggtgaagctgtatgctgataagtttgagaagcttgcgtgggggaaagtgctggatttactaccggagattccgacggatgagatttcgccggaggaagctaaggttttggtggcgagattcaacgatgagtttgagacgtcgtaccggaaacagacttcgtgggttatacccgacccgaaacttagggaccagattaaaatcacgttgagtcagaaacttatgctggtttgtaccgagttttaccggatgaaccggtttgcatatggtatggttggagataatgaggctatttccagatatacccctgaagatattgggaattaccactcggatctttactttgggtctagaggctcagggagtgtttcgacagctggtgggtctggatccggatccggatccggaactggttcgtcgagtacgggtaaagctcgtggcggacgtagtagtcattgaatgagaatctcgtgatattagttttatttttttcatttctttaatttgtgtggttataatgctacctatagtgattgatgtgtcgaatatcttattcaattatgtgtgtacagatatatgttgaatta

SEQ ID NO: 46589 - DNA, 503 bp, Arabidopsis thaliana columbia
tttaagatgaccattgagatcagcacgcacaacgacaagctgaagaaaggaaggtaatgtgacccaaaaaaataaatccagaagattgaagtttaaaatgttgtcaagtgaaaacctgccaaagatgactggctgctattgctcgaacagaatcaacagtgcactcaaatgatctcttgtgaaactcagatgattcctgcacacaaacgtataaatctaagtttacaatctgagctctaatgtgatcctaggagaaaggcatatactatctctacgcatgatctctatgcatgagcagtaggatcgcgtgctgcataaccgaaaatcaactcagttatttagattgttatactttttaccaaagatatactgtccagtgagaaagtacctttaaatctttgagcatagcttcaatcttatctgcctcagattgtggaagcaactctccccctgtaagatctgcatctaactcagtttctgtttcagggaaatcactatgcata

SEQ ID NO: 46590 - DNA, 1786 bp, Arabidopsis thaliana
ataatcatttccatgaattacccccctcaaaggtttgccacttcttaaagccctttttatcaaatggatgtctttatatcggaagagtatatcaaccgccggagattggagaaaaaagctgccaccgttgccggaaaaagcatgaggtttggctcagcttcaagcaagacaccagagaagagaaatagttaccctcggatatcggaatctccgccagataatgagttccgggtcactggcgggggtgtttatgatagctttgcctttgtgttccactgcttctcgccgtaaaaaaaacaaagcgtttgtgtttagcgatcaaaatgcatgcgcaatagtatatgcatgggaactttattagttgtagctctcgtttttctaacatttacttgaaaaaataattcttcttaacactgtttttctgaatgatggatagaatttcatgtttaccaaataagtggataggcccaatagcaaacaaacgaataaataaaaattattatcggcccaaatccaataagaacgtgagcaacatgattttagtgacacgtgaatttacttaaatgaaaagaaaagcctggcacttaaaatatatttatattttccaataatctcaaaaaaaaactctctgattcgaaaagtgaaatttgattttgacaaaaaaaaaatgagctacgacagagtcccaccggaatcgtatcctcctccaggttcgttcgtaatcacttctccttcttatgattctcttctcttcgattctaaattctgattctcttattttgatctattctaaaagtactaagatcctgtttttgatcggacgaattaggataccaatctcactatccacctccgggttatccatcagcaccgccaccgccgggatatccttctcctccgtcgcatcacgaaggatatcctccacctcagccttacggaggatatccaccaccgtcttcacgtccttacgaaggcggttatcaaggctacttcgccggaggaggttatcctcatcagcatcacggaccaccacctcctcctccgccgcaaaattacgaccactgccatcatgatcatcaccattaccaagattctgactctggttgcttctctttcatccgtggctggttcgtttctttctctaccacttgccgccttttaattttcgtttactttcattgttgtgagtgcactgattcgattctctgtgttttttttggtcaatcttgttagcttttatgttggatcactgattaatgctcagggttcattgaactagtgttttggtttatggaatttgggaatactatgatcctgatcagaaccagattcctttgagttgatttatggataagccataatgtgaaactcaagagttccgttgtgaaccctgacttgacttctttatcattttgtttggtggccaattatcgaaattttagagcaagagattcgtattaatccttagatttagttctctgagtgctttgctgatcttctaaggaaggttcttgtctttttatgatgagtttagagctatccatgtatagacacatttttatgtttatctgttggacaggatcttttacttttcaatggatctagtgactctcttaagaactacctaatggcttttattttacattcttaaccccataatatttagtataaagtttgtagataaaatgttatatcatctgcagcttttcttttagtaagagatttgtgattgactcaagtagctaatcatgttgcttcaaatgcgatacggaacctttttttgtgg

SEQ ID NO: 46591 - DNA, 651 bp, Arabidopsis thaliana columbia
tctagtaactaacgtccgccagtgtgctctaaagttagttagtgagacgagacctcgtagaacgcgaggacacttacggtgcaggagctgcaagagcaggagttgcagtcgccggagcagcagttgcagttgcagggagacattttgaagttgagttttggctggtgggctggttggattggtttggcttggttgtagctggctgagtagactttggttctgccgttggtgggagaaagaagctcgagaacaggttttagcagggctatttatgcctttctcgatgtcgttcctgaggccgaaagtgtgggatgcaagacgctatcccactcgtcttccctgaatgcgggccaataccacgccacgaaaccggtcggatgattcaatccatatcgacaagagatctggccgatgatacctccgtgaggactgagtggggggactggattcaaggcatgatgatggtgctcgaaaaacctttggcgagtcagccgcgattaaatccaccttggctgaagaccgatgttcacgcactgggatgcccggccagtgggtagtatggattcggctgagaggccaagcggtgcaaaatcggacagacggcgtcgtatagcgttttcatgagtggggagtttgactaatggcccaaat

SEQ ID NO: 46592 - DNA, 531 bp, Arabidopsis thaliana columbia
ctatcctggcaacaacaagcttaactacctatttttttctttggtgtgattataggttgcttctcgtatggtgtctgccttttcgaggtggaagcggtacgatgaaacccgtcaaggtctagccaaggtaaatagcccgacaaatgcaaacaagtcttgaattttcccttattccatttcctggttcttttgcttcattgagcctctgtgttcaatatttccgcagatcggaatctgtagccatgattcgtaatcattagattaagctgttgtgtttgtgtgttgtgtttgcaggcacaattggaaatgataatgtctgctaatgggctgtctgagaatgtctttgagattgcctccaagagtttggctgcttgagagacacgttaagaatccttttaaagacactttactctgaactatttacctactgaaattagtagtgggatatgttaaaatgatcacagattgttttgcctctgcttatgagctttactattacaataaacgtttgcactatatattacggcaatg

SEQ ID NO: 46593 - DNA, 530 bp, Arabidopsis thaliana
ttcgggatttactcgaaccattcacaactcaaagtatctcaaagctgctcaagagcgtcttgatgaaactgttaatgttaagaaagctctaaagcagtttcagccagagggagataagattaatgaagtgaaagagaagaatcttcagacgaatactgctgaaatccctcaagcagagaggcaagaattgcagagcaagttgtcgaaacttttatcgatattagacgaggtaatccgccttacaacatatcttctacacttgttaatgattctcgtggtaacataaatgttgtttgtttctttgttgtttgaaggtggatagaaattacaagcagtattaccatcagatgcagatagtcgtgtcgtctttcgatgtaatagccggatgtggagcagccaaaccatacacagcccttgcgcttcagaccatctcgaggcatttccgttgcttaagggatgcgatatccggacaaatcttggtgataaggaaaagtctaggaggggaacaggatggatcagatgggagagga

SEQ ID NO: 46594 - DNA, 583 bp, Arabidopsis thaliana columbia
  unsure (1)..(583): unsure at all n locations
tnnnnnnnnnnnnnnnnnnnnnnnctaaagcgttacgcgcgccgcccggacgttcttcgatggtattcactttaaccacgggcaccggcgcttccggcgagatacgactggtggggccgtaccagtaacgatccagcatcacatcaccaaccaccatcactcctgcacgttcaaactctggcagcgttactttcattcctgtctcctgagagattcaaaatttgcgcgcgataataccatacttcattcttccaccagccacttctgccagcttgcccgcaccagttcacgctctgcggtgaagcaatcctccgacacatggcccggcaattcctgtaatgccagatgatgaagttcatcgcgaagtangctgtaagcacgggtcagcgccatcgcttcctgctcttccataatgtcgttttgcgccagtagttccagaatacgcacgttgtctgaccagcgcgttaacttcggtttttcatgagcgtcgcnaacaccagatattgggtaagtaattcgatatcggtaattccccgtcatcagctttgatatcgaaccgatcgcgatgtttattgctgagatg

SEQ ID NO: 46595 - DNA, 940 bp, Arabidopsis thaliana
agtgtgctctaaagtacttcctatatgacgctggcgtactggtaaggccctgaaagatgaggttattgctcgtatcgcagctaaacacaatgcgactccggcacaagtgattctggcgtgggctatgggggaaggttactcagtaattccttcttctactaaacgtaaaaacctggaaagtaatcttaaggcacaaaatttacagcttgatgccgaagataaaaaagcgatcgccgcactggattgcaacgaccgcctggttagcccggaaggtctggctcctgaatgggattaagcctctctgacagctcctccgggagctgtttttacatgctcgctaaggaaatcgataaaagcccggatgcgcgtacttaccgcacggtcgctgtaatagacggcactgaatggcatttccactggcaacactttatctgccattaactccaccaattctccgcgagcgatttctttgtcgatcatgtagtcggacaaacacgcaatcccgttgccactcaggcaaagctgtttcagtgtttccccactattggatgacaaaccgtacttcacctcaatgtaattgtccatcgctacgggctatcggccaggtattgagggaagcgggttcagtgaatcccaggcaaatatgttgctttaaatcgtcgatcgtttctggcttcccgtagcgggaaatataatcgggggaggcgataatttttcgataactgttaaataacggcctggcacgtaagctggaatccgttaacgtaccagcgcgtatcggacatccacttttctttcgatcaaattaataatcgtttcggaggagactagctgacaaagtgacttccggatagcgttcacggaaaggcttaattaacggcatcagaaagtgcagcaccactggagttgcggcatcgatccgtaacagtcacgcggtgta

SEQ ID NO: 46596 - DNA, 549 bp, Arabidopsis thaliana columbia
cttgcgacatattttaggaagaagtgtacacgcttgacgaaaatgcttttaagtgggcagtaacatcatcaagaaaatgaaaaggattccaaagatatgctgaaacgtgtcaagttgttatgtgtataatgtcgtctctcctaaatcaagtttacctatcaacagttaattatcaaataatctattgtaagactttttagattttcttgttagacatggctttatgttttctagtcattttatatggatgttctttagtaaatttctatctcttaaaacaaaattgaaattctatgttgcaactatatgtaggattgattataaatttttatattctttcattgattcttactcgtaaactatattgcaatgagtaaacttaaaagtgaagtatcttggacttcatccatgttgttacgggttggattcaacgtcaaagtttcgttgaaagtttgttgctatagttttctatatatatatcacatgcattgtaattaggttgctatagtgtacaatacatgtaacactatcaaaactatagcaacaaag

SEQ ID NO: 46597 - DNA, 309 bp, Arabidopsis thaliana
gtggtttcagatcttataagtagtcatcgtatgacgacatggtatggagccttcttctactatccactcttccaaatcataaatttagctcatacaattgaggaaacccaccttttgaacacaccatcttcttcccagtgaaagcaccatatgataattcaaccaatttcaagtggagcaacttctctagaatcggcattggatcatcttccatgcaacaataccgaagacatatgttcgtaaggtttggagggaatcgatgttgatcaggcaacctaggcatatgcatgcccaccgttaaatattgga

SEQ ID NO: 46598 - DNA, 625 bp, Arabidopsis thaliana columbia
  unsure (1)..(625): unsure at all n locations
tgtttatctcttagagagcttaagacttgaagcttctgtagcttagggaatcaaaatctatgtttccatgttcttaagaggaatctatgatctgtgtcgggcttggtttatcatatgattgaagtataggaagccataacttagctggattttcttattacccttagaaaccaccaaaatcttgatatcctgcaataccctaacaactaccagcctataacccatggctacatatagttaccaaaaagtgtaaagcttagttactttgttttagttaagtagaggtgaagtttctgagcctctacatgcgtcagttttagtagtttcttatggtgttacattctctgtagttggggcactttaattaggtttcagaatgacttattggattgcttatgtttcatttagttttctttttctaattgcagccaaggtatatacagaatttgatgaaacaggcagaacgtagagagaaagaacatgagatagtttatgagagaaagcttgcgaaagagagggagaaagacgaacatcttttttcggatagagagaagtttgttactggcgcttatcaaaggaaacttgaggagcaanagaaatggctggcagaagaaagattgcgtga

SEQ ID NO: 46599 - DNA, 470 bp, Arabidopsis thaliana columbia
gtaggctgtgtctcctgcgtcgtcgtggcctctaccaccgcatcatcgttcttactcgccgacgaagacgcaccagttttacggcctcctcgcgaacctcctctcgaacctcctctcttcttcgttcccttcctcattctcgagtgtaactagaccaaaaaaaaatccaaaaaacacaaagttatcagcgagaggaggagaatgtgaatcttcagctttggctagaagaagagagaaacagagggaaaaagcaacctggggtattaatggcggttaggatctgagaatttcgaaaatcaaagaagacgaagaggtttttttggactgtacctctctctcttttcagtcgtcctttcttgcgtgattttaacgtcccatccatcagtagatgtaaataagaatttgttagtttttgttttctttttttcctttcttttatttccctcaaaaaataaattaagcgcggggac

SEQ ID NO: 46600 - DNA, 477 bp, Arabidopsis thaliana columbia
tgatggccggaatagcctctatgaacgccagtggaatagattccgtttccgcggtgagtatagcttctacggtgttgctggcttctgctacaggtttggctgccttgatgaacaagattcagccttcacagcttgtggaggagcagaggaacgcaacgaggctgttcaagcagctaagaaacagaatcgagatggttctgagggagaaaagtgaagatggaatcagtgaagaagacgtgaaagaagcgataaagagagtgctctgtttggacaaagcttacccacttcctctagttggcaccatgctcgagaagttccctcaagaattcaagccagcgacttggtggcctgaaacaaaacccgaacccactcattccagaacggaagctaacgggtggaactcggagctagagatggagatgagagaggtggttgaggtaatcaagagtagagatgcagaggagtacgagaagttag

SEQ ID NO: 46601 - DNA, 557 bp, Arabidopsis thaliana columbia
agaaattgtagccgaacgccgccagcagatcggacgaaccagatttactggagacgctacggttgccgtgtttcgccactttcagcccacaggccgcggcgacaaacgcactggcggtagaaatattgatactgttgctgccgtcaccgccagtaccgacgatatcagcaaacagataatccgggcgcgggaacggcgctgcgttttccagtagcgcggttgctgccccggcgatctcgttcgggtgctcaccgcgaattttcatgctcaccagcgccgccgccagttgttccggcttcagctcgccacgcaccaccgctgaaaacagctggtggctttcttgttggctaagcgtctgcgcctgatacagtttttccagaatcggttgcagcgtgttggctggctctagtttctgctgcgcccaggccagcgtttgttccagcaggcgagcggcctgggtggtgagaatggattccggatggaactggaatccacaaacgcgatccgcatcgtgacgtacgtgcatcaccatgccattaaaatgggcgttgatggtt

SEQ ID NO: 46602 - DNA, 502 bp, Arabidopsis thaliana columbia
tcttttggtgagtcaacaacaacaggagattcgagtgtcactactgcttcagaaacttcccaacttctcaagccctaggtggacatcaaaacgctcacaaacgtgaacgtcaacacgccaaacgcggttccatgacatcataccttcatcatcatcagcctcatgaccctcaccacatctacggcttcctcaacaaccaccaccaccgtcactatccgtcttggacgacggaagctagatcatactacggcggagggggacatcaaacgccgtcgtactactcaaggaatactcttgctcctccttcttctaacccaccgacaatcatcggaagtcctttaggtttgtggcgtgtacgccttccacgtcaacaaatactattcaaggcgtttactcatcttcaccagcttcagcgtttaggtcgcatgagcaagagactaataaggagcctaataactggccgtacagattgtttataagttatgtgcaagatcatgtgagt

SEQ ID NO: 46603 - DNA, 499 bp, Arabidopsis thaliana columbia
ccctacgtggtgaacttctcgtgctttaaacccgatgagtcacgaaaatgcactaaaaagatctttatggatcgttctaaactcactggctctttcacagaggagaatcttgagttccagcgtaagattctacaacgttcggggctcggggaatcgacttacttacccgaggctgtacttaatgttccgcctaacccgtgtatgaaagaagctcgaaaagaggccgagactgttatgtttggagctattgatgagcttcttgcgaagacgaatgtgaacccgaaggatattgggatcttgattgttaactgtagtttgtttaacccgacaccttcgttatctgctatggttgttaatcactataagctccgcgggaatatacttagttacaacttgggaggaatgggttgcagtgctggtttgatttctattgatcttgctaaacatcgtcttcactctattcccaacacttatgcaatggtgattagtatggagaaca

SEQ ID NO: 46604 - DNA, 561 bp, Arabidopsis thaliana columbia
aaagtcaatgctgaaaaagctgtggtacaagtgtgagagattacctgtgataaagaggaaaaggattgtgaaatctggaccgttggatcgaaaccatggaatacaagagaaaatgacgttagtaagcaaccgaagcatgaacctatctggaccgttggatagaagtgtccaagaaagactcattttagcttatagaagccctattgtgtcgggacagttagatggaaacttaaacgaacgattgagattatcagggccgttgaaaggaagaccaccaagcccaagtgtgtatgtggagtacaataaaagggatgatgacacacgatgggatgctatgtttcataacttgaagcctacgtagatcttgagtataaattgttttcgtttcgttttgcgaaaatggatgtagctacttatatatgtgtgggtaatcaaaaataaaaacactattaccttctctaattttgtagtttaaatggtactcttatctctaaatttattctgtttgtcatgggagaatattcatttacacccacaccacatctccactcaaagaacttg

SEQ ID NO: 46605 - DNA, 404 bp, Arabidopsis thaliana columbia
ttttttgaaagagaaagagaaaaaacaaagaacatgtgaattgcagtgcaagtgctcaaacatacatagtgggagacttaggagtcttttcttttcttttttgtctaccaatagatatggcttagggtttaggccacttaatcttagagccaataagcatattcttggtccctaggtttcgtttgagagagtgtttaagatgaacctttttgaaggtagtattcttaatagcaaatcccaagtattaaacatgaccatactaaaagaaatgttttagcataagtaatgataacagagtaatatatggtttattaactttaaatcccaatcagaattgcatttcagattgcactcctgaaacgggacttaaagaagttttgatggtttgaggaatttcctcatgc

SEQ ID NO: 46606 - DNA, 564 bp, Arabidopsis thaliana
tcccattatttatgaaaaatcaattcaaaataatatatataaaaaacaaatagttttttcccccataaaatatcacgattgtatacaaatttgttgggcaaaaacaatactatgaaaattttcataattagataatttatttatgcaagtttttttttgttattgacttttttatttatttagaagaatatatccttatgaaaatcataacaaagaaagagagtttagttttgcctaaattaggatcaaataaaaaaacaaaattcctgacccataccactctacgacctccctcaaaaaaaaacaaaaaagaaaaaaaaacaataaaaaaatcgactttttagcatctgcttgagcgcgagaggttcatgattccaggaatctcgtgcccaattatatagctttccatttctgtggctttgtaatctgatcggaaatcgaaaacaaacaattttattttcttaaaaaaacaagatggtggaggagagatggatgatcggcacgaaggagaccatcatgatatagaggttgaaggaggagctttacatggtttcgagaggaaga

SEQ ID NO: 46607 - DNA, 1181 bp, Arabidopsis thaliana
ttgtatatgaaggaatttggaaatgtcgccactgcgattggacctacaagagagggatctttgttatgcaaaggtcagtccagtgttaggcttacatggaccaacgaactttgtagctgcaaaattcattagattagttgtcttgtcgtactggaaatgtgttgtctagttaaccattggtgcttttttggttggagctgtcatcatatgtagttgagtttctggttaagtcttgtttgatgttcatctgttaggttctgagtcagctggtgccatacctgatgctcatgaggagtctcaaactgctgacttgaatggggagcaaacgcagttagaacctgaaaacggttcaacttctgaggataacgaaagatctcgtgaaattgaagaagtactagatggtgatgtctctaaagacttggatgctgttgatccactcgctggtgaggtgatagaggaggaggtggacttcgaagatgttgaatatcatgatgtggagaatatgatggataagcaagagacacatgatttgtactgtccaaactgcgattcttgcatcaccaaaaaggttatcctcaaaagaaggaaacggaagatccgtcgtcatgagctgggagattcaaagcggcctcatttgactgagcctctttttcattcggaagacaatttgccatctctagatggcggtgaaaactctgcaaatgagtcatttgtcttcaagtgcttgtcatgctttaccatatttattcccaaaggtacactagaccgtaaaagttaccttgatatatcaaaacttatttcagatgccatccctttttgtatccaaagcatgctttctttttctggaaaacaaaatcaggggtgagttcaaagccgattcctccccgtcaaggagttgaggggttaaagattcagccaaaccctcaagtggaagctacaggcgattccaattggttcagttcaatatttggcctcaacaaaaaggaatcagctattcagcaaggtattgtttcgttccttttccagtatcatcaatccatttatgatttaggcattccctgcctttagtactgcaaaacggtgattccgtctgctaaacttcagtggctacttcggtgtctaggagaattaaatttgcaatgaatctccttttgtagtcactatgatgctgaaggaggttt

SEQ ID NO: 46608 - DNA, 588 bp, Arabidopsis thaliana
ctagtgtgctctaaagagtcctggcctgaatcgacagcgttattttgtacggcggtcagtgcattcatcagaagcgatcctcttatgagatgtagggtgacatggcgatgctcatttcgtagccataatctaaaaatatctacatttctgaaaaatgcgcacaaaagcgacatattgttttcttattgtgatcaaaagcaacaaattagtaacatttaacgtagggtattaaggcaaagtgagacaggaaatgaataactaaagcaacaggttagggggagttaacattagagaacagattatctggtcgataaaaaacagtaaatggcttcactgcaaaatgaccgttagtaaactaaacatattatctgccccgttttatcggggcagatataacattaaattataaatagagatagttcggcggttctcctgttttccctaaaagaagagcgctacgcccaggaatattgatatttagagttccgcctctaagcgtaaatactttaccaggggggataatttttcgggtattattaataataatgttaacgctattactcccatgtttttgtatatccaggttgc

SEQ ID NO: 46609 - DNA, 531 bp, Arabidopsis thaliana
gaatcttgagccacgacatggaaacagtgatcacattctggtatgcaccgtacggtctctttgctagcatattctgataaacaaatgggaaagatgataccattagtacccggtagccttctactttctcccaactctaatttcttgtatgattctattgtagaccggtcaagacctgtagtgaccactgaccacaacccctcgtggtcgttacgttatgattcgagaatcacctcaaagtttttcctttaaatcatatatgccaaatcacaaactatttttctatttcttaaacaaaaattataacaattccaccaaatattctaaaaattcacttaaatcacctaaaaatataaaattcctttaggattcattttctaggattgttattattaagagacttttctattttagttttgactgtttatataattttaatataattttcttatttcataaaaataaatataattcactcatttatgctattcataattttctaattatttatactagttgatttggtatgta

SEQ ID NO: 46610 - DNA, 746 bp, Arabidopsis thaliana
tgctcttcgatagttaagcttttaatgtcattatatttgtttctgtaaaaattacaatatggactatcttaagtgaattgaaaagaaaccaaataaatctaaggcattgatcacgatttggtttattatatcattcacataaagcccggattatatgtcggaagctatttaataattgtatttcttaaactcacatatgttttataaacttgcagccatcgatggaaattggttcatggcccaggatctttggatacagaacacggctggaccagcaaagggacaggctgttgctcttcgagtgagcggtgatgctgtagtcatctatcggtgtcgcattgatgcttatcaggataccctctatgcccattcatacagacaattttaccgtgactgcttcatcacgggcaccgtagacttcattttcggtcatgcctcagcaatttttcaaaactgtcgaattgaggcccggaagccaatggaaggacagagcaatgttataactgctcaacaaagtgacaagccgggtacatcggggttttcaattcagaattgcagtataacggcaagttcagatcttgttccagtaaaaagaatggtgaagacgttcttgggaagacagtggggtgatttctcaacagtagtgtttatggagtcttatctggatgatatgatagatccaatgggatggactccgtggaatagcagcacccacaggacgtttgtcacactatactatggagagt

SEQ ID NO: 46611 - DNA, 560 bp, Arabidopsis thaliana columbia
cactttccaaaaacctcaaagtcaaacgagtgttttacagaacgtactcatatgaagagagtaaaaagaaatgacatacacagaagtagcagaaacaaatcgttggtccccctcaaaacaattcacaaaagatgtcaccgccgaaggaacttgcccagaccaaaaccactcattggcttcaggatgactggaagatagtttatcccgcatcatactatcaagaggagcagcttggcgtgataaactgcatgatgtgattatttaaacatgataaagaaccatgaagcagcaacagacgattataattagacagcagctgagttttaaaaagattcaaacgttggtgaaaggaaactctttggaagaataataatcaaaccaataccgcataaatccgaaaactaatactttgttgcattctatttcaaacaaaataacaaaaatttctactagatcaagaacacaagaaaatgttgacaatccagtaacgctgcatgccatagttcttaggccttaagtaagtcgtgcagtacctcctttgtacaaagacattaagatca

SEQ ID NO: 46612 - DNA, 540 bp, Arabidopsis thaliana columbia
ctttattaaaaaggtccaaaagtgacattagtttctatttccgtggctattggagtggaataattgtagtcctttggtcatggatcctctctggtagtacagaattaaatgctactttggtcggagattccaattcatattttgttttgttacgcaagtgcaatataatacgttgacttttcatttattgttattgtctttgtctttgatagtttaatgtgaaaaaataacaaaaatatcattttgctatcgacttcgttaattatgacgtaaatgttgttttaggtattcaaaagcaagagatgacataaatcggtaatgccgactcataattttatcaaagtttcatgcctatatatgcaaatctgccgtatgcttcactgatgtttatcttaattttcataaactttgataaaattatgatcaacaagttgagtgtagagtgcccaagagttctacaagttgactaaaatttgatagtcggtgagcacataatctccttgatgcagtaaaatgcgcttgagacagagtgccatagtt

SEQ ID NO: 46613 - DNA, 572 bp, Arabidopsis thaliana
caatctgaaatccaaacgaaagccattgttgaagatgagagattggaaactgaaattgaagacgaaggagatgaatcatctcacgattcttgtgtaaacgaagatgattgcccagttattgttgaagataacagaggatatatagaggtagagatagatccagctgaaaaagaaagattttgggcttgatgctagtgtagatgcaactagtattgactctgacagcaacggggatgatatttgggacgacaagaagataccagatccattatcattatcagatgatgaagaagagaaagtagaaagaccattcacttttagagagagttgtgatgatctattagcattgcataagacattcaacaatgcagatgaaatcaagaatgcactattgaggtattcacttaaaactcaatacgatatcaaaatgtacaagtcatcgtcaaataggcttggggcaaagtgcacacaacacatcaaagaaaaatgtcaatggagagtgtattgctcatttgagaagaggaaaaataagttaatgatatggatctttcagaatgagcatatttgtgtaa

SEQ ID NO: 46614 - DNA, 568 bp, Arabidopsis thaliana columbia
ccaagggaggccatactggctcagaacgtctgcagaagtccaaaattctcaagaaactgctcagggaacaacatgaatctgggcgaatatatggagctaccaactcttcatctaccgttttgcataaacatggtttactcaaggtaaggtgaagacaactattgttcttttctttgtcatatacatggacagacgccataaacaattggaatcctattttaggagaagagaacgactgtgtatccttcagagtcagacgagcctatgaatcaacaaatgatcgaaggagccgaagttgttatagatggaaacgtgattacaagtttggggctcgcaactgttaccaaattttccctgagctattgttagcaagctgttcggacatgctagagcaaggagtgtttcagaagggcttgtgcatgagtatccaaggcagtaaccgtttgaaagcatcttgttcaagaaacacagttagaagatgtccattactgatcttaaaccgaagtataacggtccgatggtatcaaccacctcaactccagagacttttcccaagtatcatctgttc

SEQ ID NO: 46615 - DNA, 492 bp, Arabidopsis thaliana columbia
tgggaataatttaaaactgcttcctgaaaacaaaaattgaaatcggaactctctaatatttgcaaacattatatcaatactggttctcacattatcatgttcatccttgtgataaacccagtacagtgacaataatcatcttgtgaacaaggaacacaatttgtttatcccaatttaaaaccagttttaccagatcaatacaacccgtagacccatacacgatcatcccaagttatgaaaagataaatgctaatcctacattgatgcgctgtttcaacgagatgtaaaaaaatacaaacagattcctctaaaattccagataatgaatatagacaaacaagagctaaaatttacccatgagtaaatgcatccatttggtggaagagatagacacgcaccgcatgggagaggaggcggaagacgattacaacgacggtgggagcggagcaggacacggcgacgatgatttagggttcaggtttaattttatat

SEQ ID NO: 46616 - DNA, 618 bp, Arabidopsis thaliana
gactctagccattccagcttatactgatattgaacaaacctaataacaacctctccaacatcaacccaaatcaagaattctctaaccctagattcaaaatcagatgacgagtcgccgctaaaattccttaggacgacgtgaccgttaacggtaacgtgaaatagagcgtcattgagatcgattctagaggaatagagacgattgaaatggagacgtaccatatgagtccctttctcgttgacattgaacttgtatttcgcttgttgtgcgaatatcctagcggttctgtagatttggggaacgttctgaggtagattttctcctttgagagcgattgatccttcagaggagaagaattggacgtttgatgacgatgcgtcgcgacgaagcggcggttatcgacggtggagtcaacgtcggagccgcagttgacgaggtactcgtcgacaggagagaaagaggcaaatgcagaagaagatacaaggaagacgaagagaaggaatccgattcttgtgtagaggatgccattgtcgtggaaagattacacaaatttttgcagtcgtcgaatttgatcagccaagaaaatgtaatgagaatgacatgttgagagagagccaa

SEQ ID NO: 46617 - DNA, 536 bp, Arabidopsis thaliana
gaaacagagcaaaccaagtaaccagcaaggagttccccaaattatttggattagttcttctcgaaagaggatcaagacgagattgaatcaagagttggatttctttaatgatttgagtgtcacaccgagcattggaggtatgaatccgagcgttgcgctccctccaaagtaaaaagatggaagcatgacaaataagcttaattataagggataaattcctggacgaggaggcagatttcacctagaggagagtatccataaaggatgaaggaggatagagacccgccctccttgtaaagaaggtccagacagcttcactaaacgggcatctgaaaaacaggtgatccctagactcgttccccacgttacacaacacacacagagctggaacagaaaaaccccaactccttaatctatctcttgtgtgtaatctgttccaagctgcaacccaggctatgaaggcgttttttggaacccgatcgcttaaccaaatagacttgtgccactgaacttgagcaccaggaggatgcaaagct

SEQ ID NO: 46618 - DNA, 342 bp, Arabidopsis thaliana
gaaaacaatacaaaccattaaaagactaaaaccaaaacatttgcaaagtataaacaaatcaatttgattagctgaagattcataaaagaaccaacctgagaatcagatcggataaacctaattcctcttcctgggtaaatcttctgtccactgaaacgacaaagctccgtcctgtatttcatagataataaacaaatgagacattgcaactagaaatgacaaccaaatgatctttgacactgaaaaatctcagtctacatgatagacatgaatcatcgatataccaaatacagactaatcacagatattaacgaagtatcatacttttattacttagaacca

SEQ ID NO: 46619 - DNA, 879 bp, Arabidopsis thaliana
ctgtagtgaggtttttctgcataacagctgctacagcaagattaatgaatttgtccattggcacaagaaatggagtggacggctcaaaagtcagaactaagcgacccatgttctggattatctttgcattcaagtgtaagtggctctttcagaaatcgccggttgcgaccacccaactttcccacaatttgtaatgctttaccaccccaaggatatggcaccggcttcaagtgagaccataatgctaagatcacttcagacattacagttgccatacttggctccaaaaaatcaggatttagactatccacccagaattcaagggtgcgtagccccaagctcacaagttcatcacttcctctcaaacaggatacaagaggcctcatgagacggggaaggtaaggcaataaggagcttaagcgtgcagggagtgtcaaagaaagttccaacagaagatctctcatgtcttccccggctggaccctcgagcattgtcagaagaatattaagacaaggtagcagcatagggactaaatccctaagaagcagctcgaatttacatccagcaagtcctctgaaaacagttcggagcaattgcatataaccaagaggcttttcaacttcagtagcattcttcatgcagacttccataataagaggcacttgaggttgcaatatccgttcaaaatcagatggtgcttttgacacagccccaaagaggcaccggaacagatgcagaattaatttagttgcagctgaatctggattcttcagaacatcgagcttgctgcttaccaagaaattaatcagaacatctgcaaatgggttgtatactttgggagcttgcagaagagtgggaaatatgtgaaccagttgagta

SEQ ID NO: 46620 - DNA, 779 bp, Arabidopsis thaliana
aatatggttcacttccttgctgaattggggatgatgcattacgacaccttgacgttctgtccctccatgcttgctgcttcagctgtttacacggcaagatgctcattgaacaagtcccctgcttggactgatacattgcagttccacaccggctacacagagtctgagattatgtaagtagagaaacaaagacctccaagttagcatcatttgttttgttttttggactcttgattgcagaggctgatatggttttcttgtgctgtgttatagggactgctcaaagcttttagcttttcttcactcgagatgcggtgagagcaggctacgtgcagtgtacaagaagtactcgaaggcagagaatggaggtgttgctatggtttctccggccaagtctctcttgagtgctgctgctgattggaagaagcctgtttcttcttagatgttttttttcatcagatctctctctgattcaaaattctagatttctcatcagatactcttttgtttttttgagttcaaacgtattaatgaattcttctcatcagtgtttttcttaatctctgattacttggatattagatttctactatatctttaacagatagatgatgtttgactgtaataaatcagatgcgtgcaattagtttccgacttattgtaaattgaatgatgataaatgaaatgcataaaatagttaatgttatatcgtgaatcccaattatttatgttttatgatttatttattttttaaactagagatgaaggttttaatgaaa

SEQ ID NO: 46621 - DNA, 691 bp, Arabidopsis thaliana
tgcaacccagttccttgaatcagccgtccttccgctacagaaaaattaaataaacactaaataattcagtctccgtaagtttcttagtgttggcaatgagtaatcctaaacaaggaagggaaacaaatatgaaaaacatagaagacgaatcaatcaaatgaaatggtaaaagacaactcttaccatcaaaacaaacaacagctaactggcttttgacaagatccctgatatccaaatccttaggaactttgaacgatttgtaattcctaatatgtggaaacttctcaattacctgaaatcaagccttcaactttgaaacttcttcctaaactccctaaaaaatatgtactcttatgaagcaaacacatggcagagagtgcacaacttacatctgcaggaagtgaaccggattcagcttcaagcttgattcttaaatcataacctgaaagccaatgaacttggtttaaaataaataaatcaaaccatcacagagacttagagataagattaagcaccatcgattccatcttcgctgaatgataaaccagcacttttgctcgcgtaaaagtaacaagacccttcaccaacatccacattccatgcaatcacgccttgggtaaccgaatacgctcttgaatagatcaaacaatcgaagaactgaccaaaattttgacagaaaacgttaaaaaga

SEQ ID NO: 46622 - DNA, 553 bp, Arabidopsis thaliana columbia
aatctcctctcagcatatcaatgtaaattcttacattaaccaactcttgtgatacaggttcgagggttacctacattattcttcatcagtcctgacccaagcaaagatgcaatcaggacagaagggctaattccgttacagatgatgcacgatatcattgacaacgagatgtgaagtttttactgagaaaacacttttgtactctttatgatttgattagaatcgccgtaatttaggattggtaccgtgttgtttgcatttgagatgtggtaagaatgtcttctagtttcatagatgaagaatgtagtcttaagacatttgtttgtatgcagtgttcgtttcaatacctaagtgaaaaggttagagctgttgatctggtcggatccaagttatgtggcacatcaaattcacgatccggtccatgtaataacagtgtagcgtaaacttggaagagagagatatgacgtcattaaagagttttccccatttcttggttgacattaaaccgggacgaaagtattattaaacaccattattaggaaaaacacgacgc

SEQ ID NO: 46623 - DNA, 503 bp, Arabidopsis thaliana columbia
gtatccaagagttggttaatgtaagaatttacattgatatgctgagaggagattcatgaaatttaaaaacataagctgcaagttacagtatacctgcatgtcgcgtgcaaactcgtactcatcatctgtatcaactttcacgattattgcattgctctcatactctactgcaagctgtttcacaatgagcaaaaactatttaacacgagtgtcatgagtgagaaagcaagtagataaggccaatcaataagaagatgcttagattctcctatctcacacatttcgtttgaatttgtagacatgccaactacgcgacaaggtatctttgtcataaagtatgggagaaacagtcgtaagattggaactgtttaactcctttatctaattcaccaaaagaactaaaccatagaagagacttgattaatgagagcggtctttcaactctagtcaattgccataccaagacccatgacaaatccagagtgccccaatacattttcata

SEQ ID NO: 46624 - DNA, 534 bp, Arabidopsis thaliana columbia
ccagtaagcgttttgaactctcactcacttgtcaatttctttttttttggctagagctgatcacgtatggttctaacccattgcaggtactctcatttatcaacccatgatttctctgattcgatgccaactctcccaccagacaatttgcagaactttgtggctgatccaagaatggtgggaggagagcaaatggctgaaggtggcgggagaggtcaacaccaagcaccaccaccacgtccacgtgatttggcaaatcggagtccattagctgtgttgattgagtcaatacttccatgggctaattttggagatggagaggatgagattgcacatgatgctcaccaccaaccagacaacaatggctaatcaatggctctaactgaagaaagaagaaaactgctttaaagtttacaaaatgtggccttccttttgttgtacagtgccattttgatggtttagtctatggatcatttgttacttgggtaaatcggacttggtcattttcgattcatgttctggtggaataattga

SEQ ID NO: 46625 - DNA, 2239 bp, Arabidopsis thaliana
attttaaacatccaaaccggactaattaaaccgggaatattggtaatgtggagtcgtctagctactataaggaaagaggaactaacctaatgctcgtacccctttagagatcaagataggattagactgaaaaccaagaaagtcgttgactccgttgccggagacattgaccggtgctcggatatcgtaacggtagacagcagtttttctagaaggataccaagttatgtctccgaattcgtattttttcccatgctccatgaaaatgtcttcaagtgctacgtcagatgtgaagttgtacgtcacacttctcttaaatgctttctctatcgagagcttaacctacagataatatggttaacggcgttacgtcaaatatatagttatatacaattgaatcaataaaataaaaagcactgtaagactgttaacggcgttaagttattgtacctttgaaatgactcctaaaacacccaacgacactttaacggcgttaagaagcgtatcatctctcccttcttcgagtctaacaaccttcgcgaaaccttctgattggttcgccggaaccacaaggctgattccgacaacatggtcatgaaccgaaccacctcgtccagaccacgaactcccgtgggagccagtactaatcagcccaccgatactcactccttcccagtacggtgacgttccgatgctaaacccagctccttcaactttctcgatcagctctctcaacgaaactccagaatcagccgtgaccgttaacagttccggttcaatctcgataaccgaattatatttcgacgtactaattagcaatgcgtctgaacctgaaggacaagcgagtttcggtatggtgtgagagaatttggtgacggttttgactttgagattgtgctcagccgcgtaagcaacggctttacgaaggtcttcctccgtcgttgggtatgtgacgttagccgcgtgacaggttttgcggtcaggccacgtgccgtacgcgttggagacggtgcagccggtttggtcgcatcgaaccggtggctgtggtggtaccgattggacggtccatattgtgacgatgaaagatagaattgagaactgctggagagtatgagagtaacgcatcattatttggagagattatgtttatccgatcttttggatctgtgatatttatgttttggaggttatgttaactatgtataaatgagtttgaagattgaaaatattgcttagaaggaaatcaacattgccggatctttttatatttaagacaccaagtgttatcttacacaagctcggattgaaaccttgttatgcaaacttgactcataaaatggtagaggtaaactgagaaaagaagaaaaaagttgctaaaatcgattgtttacaagtcctcagcagtcagcaacatgattatttggttataggagttttaaatgtctttcgcataaaacacaagtggcgtcttctacaagctcggatcaaaccttattatgcaaacaagactcacaaagtggtaaaggtaaactgagaaaagaaaaagaagttactgaagccattgcttacaagttctcggcaacattggttatagtacattcacgataaggtttaatttctacctcagctttgtacatgatcaagctctttgcaaggtactacaagtttccaaagaacaaatttaattggaacctttcaattatgatcatatagaataaatgtaaaaatgttctaagaacttcatttttatgcaatatatacagaaaaaagtaaggagattaataacacaaagaagaggcgattaatatagtgaatatatacaatgagtatatacattagagctaagctattaacgttgaaatggaagatgttggggaagaagagtatgcacaatgttcgatagatagggtcttacttaagaaaacagaatggtaacatatacgaaaatcacgtcgtcttgttcctcattgctgtttattggtagaagtaggtttatccttaggcttcttgatgatcagaacggaggaatgtgcttaatgagctaaatagttacgcacacttgacgctccacaaaaacatcctcttgacgtcagctccataaccatggctaccaaggacaagaactcatgcatgatgtctctccacggcttccaacattatgtttctcggatctccttcaatcacctccaaagacgagatctcaacggacttagccgagcacacttcggcgcacttcttc

SEQ ID NO: 46626 - DNA, 614 bp, Arabidopsis thaliana columbia
tcacttgtgtccttttaaacggataattcaatctgagaaacaaggataccatcagtatctgcataaagccattcgccatcgcatatccgagtgcctgcaatgttcaaagagactctttgttcaccaagtcctttcttactagcctttattggatgagaagctaaagctctcactccaatgtcgcaaccattgatctcatcaacgtctctgatgcatccattcactatgatccctgcccatccgttgttctgcgcttgtacgaccgggtttcctcctagtatcgcacagcgtaaactccctccagcatccaccacaagaactctaccattgcctgttttagcatttaaaacattattgagcttttgatgtgaatgctacagagaacagattggtttattgactcgggtttttgaaagacctatctcgtctctagtattcaagaacttgattagcacaagtgactgaagaagtatataaacactgagcagtagttctaaatcatagagagatgatcttaagacttcttcaaacatagtttcaagcacagaacaattgaaactaattgaccagtaagtaacacaagaattgaatctaaaatgtaaccataccaataa

SEQ ID NO: 46627 - DNA, 483 bp, Arabidopsis thaliana columbia
ataattttaacattcccttcaatacaaaatcattgcagaaaaagaaaaaacaacgtaaagtttctgccataaatcatgagaccaatattagacctcgaaattgaagcttcatcgggcagtagtagcagccaagtggcctcaaacttgtctccggttggggaagattacgaaccaatctcgctgaatcttagcctcagtttcaacaacaacaacaacaataatctggatcttgaatcatcgtctttgacgctgccactttcgagcacgagtgagagtagtaacccggagcagcagcagcaacaacaaccatctgtatcaaagagagtcttctcttgtaactactgccaaaggaagttctatagctctcaagcgctaggtggtcaccaaaacgctcacaaacgtgagagaacactcgccaaacgcgctatgcgtatgggtcttgctggggtctccccggtagaggatcaagtagcaattatgcgg

SEQ ID NO: 46628 - DNA, 536 bp, Arabidopsis thaliana columbia
ctccattttcaagctattgttccttaaagaccattggcagtaatttttaaaaggtaataaaagtcatttgccagtgggaaaaagggctagaccgtaaattaccacactcggtctcaaatcagaccgtcaattttataatcgaacggttagtaaagaacccaaagagatgccctaaaggcatataaaccacctttacctcccattttacagagtcggtagatagagagaaagacgcttctggtcagttttcgttaaacccgccggagaaactagcgactacggtggtcgaacccgtctgacgtcgtagaattcatcgtaatcttcacttcctttcttccccgacaaaatcatcgatctgtgtttgccaatcagattcaccggaacttctaggtaacttgagaacaatttgcagagatcacgcttccttgtctaatttctcttcacatcaatttgaatcaatctctcttttgattttcagttccgtacattgaaaataatcttcacttttggataaatttttcagttaggacgattgt

SEQ ID NO: 46629 - DNA, 533 bp, Arabidopsis thaliana columbia
ggttccttttatttcaggagtagatatcacattgtcctggcaaagaaaagtgttggttaaaaaatcattatgtaagagaatcagtatcttgatatgtttgtaagaatgcccccaaaaaaacatggtgccagagtctcaatctcatcatctcctacgtcttatgaagagagacatcttatagactctacaaggcatcatcagattccgagagattgatttttatttaccttcacgatgaaaatattgcaagacgagacctcctcaagatatcttttgtaaatgcaatcaaggtacaaaacatcggaatatcctttagctttcgcaattgactgtgccttcagtacctaaataaataacttgtatgtgtgagttacgaaagctggtccaataaaatcaataagtgaaataagcttttacttactgcagcataattgcctatggttttacacctccggtaccaccaggagttgcacggtgaaattcattctccacaatcaaattgataggtgcacaccttcctgacatcatcatat

SEQ ID NO: 46630 - DNA, 472 bp, Arabidopsis thaliana columbia
caatccctattgagttactttacttcgtgagttgttccaatgttccattcaaatgggttctctttgagtttatcgccttcattgttctttgtggtatgactcatcttcttcatggttggacttactctgctcatccatttagattaatgatggcgtttactgttttcaagatgttgactgctttagtctcttgtgctactgcgattacgcttattactttgattcctctgcttttgaaagttaaagttagagagtttatgcttaagaagaaagctcatgagcttggtcgtgaagttggtttgattttgattaagaaagagactggctttcatgttcgtatgcttactcaagagattcgtaagtctttggatcgtcatacgattctttatactactttggttgagctttcgaagactttagggttgcagaattgtgcggtttggatgcgaatgacggtggacggagatggatt

SEQ ID NO: 46631 - DNA, 179 bp, Arabidopsis thaliana columbia
ctctcttctgatccttcagcaatgggactcaaagtctgtgtctctgctgctccaacgtcttctccatctgctgcgtataggattctttttatggaaccaacaagctgcaagacaaaataagagtgacgatgagaatttaaaacttttatggagtttgtggaattgagacagaggagaga

SEQ ID NO: 46632 - DNA, 581 bp, Arabidopsis thaliana columbia
acagattgatgcccatgtcggtgctgtgaacgacttggctttcgccaatccaaacagacaactatgtgtaattacttgcggagatgataaattaatcaaggtgagataaagagtcacaaagtttcactgttagatatcaatgcagctggctaacttgatcaatgtggaacaggtatgggatgtttctggtcggaagcattttacttttgaaggccacgacgctccagtttattccatttgccctcattacaaagagaacattcaggtgcggcaaggattgaatcaaactatattttacatcaattattatactgttttaccaatccgtttgaagaacaataaagtagacgacacatttcatatagtattatcttgcctatgaatttctgttctttaccaaaatacatctcgttcttatttggatttcagttcatattttcaaccgccatagatgggaaaataaaagcctggctttatgataatctgggttccagagttgactatgatgctcccggtaaatggtgtacgaggatgctttacagtgctgatggtactaggtaagatcttaaactcataaacat

SEQ ID NO: 46633 - DNA, 527 bp, Arabidopsis thaliana columbia
gaatattaaaatgcttatctcaatcttttttcattaatcaaaaaggtgtacatgtagatttcttatttaaagaaacaatattagattactatgttaagtcctacataaagcgccaatttttttttttttttgatattactattgtcaatatatatttgtaattcgctttttgtcttgaaaaaactcaatgtaaaccacaccgctaatttaattacttggacaggttgtccaaataggttgaaaaagttttacagaggtctctaaacctaattttacatctaagaccacctccaatggtgtttctaatggggctcttagcctaaaaatcttttaaaaaagccaaaaattaaatcaaaactcaaaataaagttaaggaatgtttcttaattaagaggttttagagttgctaagaggtgctgacgtatcacatctgattggttcgacattttgtagtaacatttttggattccattaagcctaaaagaattgctttctgcagacgggaaaggggttaccagtatcgaaca

SEQ ID NO: 46634 - DNA, 487 bp, Arabidopsis thaliana columbia
aggatatcccctgagacctgggtttgttcaggtgatgcaggtgatgcagttgatggtagttcagcattagttggaggtgtgtacggaattggtggtggcctcggaactattgtcttcgctaagcccgtctgcttcctttatagacgggtgcagaagtggacagggaccagcagaagcaattagacaaaaaaaaaaaaaatagagcagaaagacggtagttctgtaatgctgagaacttatggaagtacccgagtaagcggagttcgatggctgcttgatactgaaagggaatctccattagagcagctagagcaaaagcagtttctttggcagactctggtgagtttctcgtcataatctctgtgaaattcacaaactatgcatagaccagagatcaagaagatgctcaaagcagagaatatagatggaaaatagcacagaaactgggaagaatcctgaaagttgtcgaattcacgcttagggatct

SEQ ID NO: 46635 - DNA, 503 bp, Arabidopsis thaliana
taaatgtccgtgtcctttcgataattctgcttttctgcttcggagcaatcttttacatgggggcaagtacttctcccatcatcgtgttcgtcttcacagtatgcatcatcagcttccttttgtcaatatatctaaccaagtgggttttagcgaaagatgaaggacctccagagatggttgaggtaagctcactcagattatgtggtgttagtcatgatgttgacatttttccttctttgttctcatcaaaaatttgtaattctaatttgtgaggtaattctcttacttatagatatcagatgctatacgtgatggagctgaaggttttttcagaacgcagtatagcactatatccaagatggccattttgctagcttttgtgattctttgcatatatctattccgtagcttaactccccagcaagaggctgctggtttaggaaggtgctgatacatgattacattcacaagatttatttgatcttttgaattgttgtgaatga

SEQ ID NO: 46636 - DNA, 785 bp, Arabidopsis thaliana
  unsure (1)..(785): unsure at all n locations
tcttcgttcttctttttcttccttgcgactgtacgatctcctgatctccttcaccgcctactctcttaaatcttaacccttcgtccgtaactgcttctcttgtcagtttctatagcaacattatctcaaatagttctattgataaattttatatcaaaaaccttaaaaaagtttcattgggtttacaaattttacctttttttcgtttgtgtgttgcgtgtgttactaaatcactgaagagggtaaagagaaaaacaaaacaaaaagttcttagctttggatgaatctggaagtgatccaaaacactggcttattccactcctcttctctagggtttctctctaattctgaacttgctttctctgaatctcattatttcggtggagtaaatttggggttagctcacattttatggtctgagttgttttatgtctctgtaaaagattcgaacttgtttttggaatttagattgtgtggggttttgttcctaaagttttcacctttatggattttttcatgttctgtatataattagcaggggtttcacttagattccaacttgaatcacttcaaagatcacaaagcttcaatttttaacaaaatttggttgcttctttgtgtgattaacaggttgaattgttagttaatagatggcgacacttcaggatattggtgtatcagctgggataaacattctcagtgcctttgttttctcataatctttgcggttttgaggcttcagcgtttcaatgatagagtntctcgcaaaatggtactcaaggggt

SEQ ID NO: 46637 - DNA, 515 bp, Arabidopsis thaliana
tccctaaaagaaatggatggaaaggttagaaaagactatactgatgtcttaatgtcttctctattagtacctggatttgggtattgatcatgatctagtatcctactggtgattgttcagtctaaaagtcttagtctcttattagttttctgggtatgatcaggagctgaattcatagcattgattgttctgtctaaaagtccgtctcttactagtatttttgggtttgagtatgatcaggagctgaatggtaggcaaatccgtgtgaatcttgcaaccgaaagatcgagtgccccgagatcatcatttggtggtggtggcggttacggtggtggcggtggtggtggctactaaagcaaacaagccagaggatttgagagagagaggagcctcagaactttcagtagttagttagtttgtttgttcctctttgtttaactgcaaataaccttaactggttttgtaaacttatttagcctgttttttggttgtgtctgaataccgtagtattgttg

SEQ ID NO: 46638 - DNA, 507 bp, Arabidopsis thaliana columbia
ggattgacagaaactaaaactacgtcgtttagttaagatcaattatttctaaaatgacatttccaaggtttcgaatacgaattagaaatgcaagcccaacaccattatgctacgacaacttttatgaccttcacatacgtaaatatatatagatatatataaatttgtcgtcttcttcttccgattttgttatcctagtcagctacattttaacactttaactaacgcgtggaatacgcagttttccctcaaaaatttcctctttcgttaacttgtgtgtcataaaatctattaattatatagttataaagaagagtgttggtccagtccatctcaaagttagagctccgtggaccgctcgtcgggcctgataggtggtggtatccacgcagctgtgcacatcatcaacaaatacccttccacagcaataaaatctcaggtttacactgtgggtctttctcgtcccgtctatgttcttgctttcaattcaatctttccaatcgggtc

SEQ ID NO: 46639 - DNA, 772 bp, Arabidopsis thaliana
tgttttgtgtgtttggatttgaggaagtaacgaaacagaacaaatttatccattgttctgagggtatagttgtcatttggcaccatctacggtgacgtggaatagttcaaaccatattcaaccgaaataaccaaatcgataaccgaatcaaattttagtaaatagagagatgtctctcatataccacatcacccattacattttctgattaagtaaagtgcaatgaaaacagagagaagatttgaattcttaacgagacaaaagtaaacaaaacctttcaaagattcagacaagaacaacccttaaatcttaatccatcccagactcaataaaatagtaaaaatgtgccagcaattaaggtcaaatggaacacaaaattcaacaagatatcgtcatcatcttactccattagtacccaaaattgatcatcataatgcagaacttgaatatctgctatctaccgtacccaacctccttcaatgttgtggattcctccaacgagaccatcatcgataaaatctcctcctcgcttcaccttatcctctgtaggcttcaccggatagtcccccgtgaagcatgcatagcagaagcttctagcatcttcccccaaatgtttctttcacgtctcacacgacaaacacgcaagggaatcacatccgatgtaatccctgatttcatcaacactcatcctattcgatatcaactcatttgagctaggcgtgtcactccgtagtaacaagatgcaataataggaggatcgcgatctcatgtg

SEQ ID NO: 46640 - DNA, 586 bp, Arabidopsis thaliana columbia
atccccagcttcccgttttaatggtctaaacaagaattaggtttggtaaccgaccgattagcataaaaatcccacataagttttaccaatcattacggaaacatgatttttgtttaatcattcgtcatttcttttatcctggactatatgatcataatttgtaagagcttatacacctttatagctattagtgcatttgtttttaatcttctaatgtcaagttatggtccgagttatatctagtaatgaagaattataacacaatgtgtgtaaaatgtctgatacaaaagaaactccataaattagatttgtgaaaacttaatctacaatgatgagaaaacaattagatttgtgaaatctctaacgaacaaatgactatgtcaaatggcatatttaaaatccgtttacttttcacatcgtttaataaatttagtatcaaaataagtcaacaaaagatgaaataacattaaaatcaatcaaagagatatttttgtacaaaaatctatttttggtgaatataattttaattccctaagaggattgctgctatgtaaatgtagatgaatccaaatggtactgaagtttg

SEQ ID NO: 46641 - DNA, 625 bp, Arabidopsis thaliana
ttgtcgttatatgtttgaatgaagtgttgaactaaaaactattggcaagaataaaagagaatctatattgtgactatgtatgtcattaatcccgagtcccgttttcttatactctttgcttatcaatgtgacatcgtcctttggctcactttattccaaggcatgtccactcatagttctggacatttctgattcgcaggtacgaagatgcttttaacagctttattaatgaaataaactctaccgcagcatatgattggtgggaagggtctgtgcacagcattctttcagttcttgcaaatccttgtgcctggtcgtggaaacaatggcgtcgcaggagaaaaattcatcgccttcaagaatatgtcaaatctcaatatgaccattcttgcctccgctcatgcagatctagagctctctacaaagggatgaaggtttggattcttattaactaatataatcatgtagctctaagttctcattttgactgtctgtgtccacgtcgaagtaggttggaccactccggatctgatggttgcatacatagatttctccttggcggtgcgagaacgtgtagatatggctctattatcagaaagattccaatggcatatttttgagagat

SEQ ID NO: 46642 - DNA, 354 bp, Arabidopsis thaliana columbia
acaaaaaccccaccctagttgataaaagacttaaagtctgcattataacataaacagaaccaagaaaatgtagagagaaatgtcaaattatccagtagcccactcaaaatgtagaagctgaatcaatggaggtgatagaaaacttatctagagaaaaccagaattgcaaaggctcaattcgaagatgtctctgttgatgatcccatctttaatctcatatatatcacaagtttaatagtatagaagatcgatttataacatgtcagtatagagatctgatatactaggaaaagccgatcagataagtattgagtcacactcattacaacaagtacacaaactgatattggatgg

SEQ ID NO: 46643 - DNA, 464 bp, Arabidopsis thaliana columbia
tgtgagcatgcctgtcgggacccgaaagatggcgcaatcccacgcaacgtagtaagagcgttgttcctcaaaacaagttttacaagatgacaggatacctgcactgtccaaaaacatccatatattggtcccaaggatgaaaccagaataaaagcttcagcacagatacatgtttttcacaatagaactatcatcttattcaaactagggagggaagctagacaattcaaatgactataagaataccaacttcaaggccaaaagcgggtactacaatatcaaatgtaagctatgcatggatatggtgaagtctgaactctgaagtctcccacctggctcaagtaagacgacgttctaagatgattgaatcccagatcaaggtgcgtcaatttggtgcatctccgaagattgtccactttgacgaacttgtttcgactgagatcaagagactcagcagctggaag

SEQ ID NO: 46644 - DNA, 479 bp, Arabidopsis thaliana columbia
gatcgtgtgatatactaattacaacccaattatctgagttcacaaataaagataagagtctgaaaaagacagacaaacaaacaaaaaaatgcaccaggaacaagagaattatgatcatttacgtacaaataaacggagaagaaattattaaataaacaaagttggtctcttattatcttcgtctgggtcgggcattaatgggagaaccagatgattgtgagcctctgtagtttctgcttggagaatccattgatcctctaaaggaagagtaggtagctttgggtaatggaggcgttgactctaatggggctgactctgcaaagcatgctgtgttcacacgagttctctccaactcttgttgtagcaattcgtttgaacactgtttcgttagagcctgttcacgaaataaaacaaaatgatcaaaattgaggttttgatatttgatcacatctgttgaaaagagaaaggaaatgtatgtg

SEQ ID NO: 46645 - DNA, 539 bp, Arabidopsis thaliana
gcatctttccagaggcagagattccattccacaaatgcgattcatcttcagtgttctgcccgctcgttgcgttctttcctcctcccacgggccaattgaaaaggcttggatcagcgcacgctttgacagctaacgaatcaacacacctggagataatgtgaagatcttcagcgtaatcaatcacttcctcacatgtctgaagagctttgatcgagtcagtccagttcccaaacacctcgttgaggaaagtctcagtcataccaacaagattcccttctccatagttatcagtcatctcaaggtactcagctgcacatctaaggctaacaacattgaaagcagtaagctcaattttcacaccgtagcagaatttggtaacaagctcaaacgttttgccgcctcccggtatctcatctaagctcaacacacagcctgatccatcatcagttgaagactcttcgattaacctctcaagaagcccacttctagatagtaacggaaactacacacaaatcaagaacacacattacacagttaga

SEQ ID NO: 46646 - DNA, 1480 bp, Arabidopsis thaliana
gacggcgtgaggccaaccggagtgtgagataatgatacgaattatcgcctaaaaagcgccctcagatctgctcatgagcaaaagatcgttgatgaactttgcttgtttttgaaaaatgttggttttgtgattgagtgtttctgtatagtgctatcaaaatgtttgatgattttggtattattttgagttatatagtaagagataaatcgtttgtactaaacacgttatgtttgatcgtttataataatttcggcatatattaaacttgttaaagtgtatgtttaatctctgtaatttatgtttcttttggtgaaattatctttcccttgcgcgggtaaaaaactcatagctgtattaaataaaacaaactctagttgtattaaataaagcgactaggtgacgtgtcgaggcctgcgcgactgcgtttgccacgtctccgccgcctcctccgattcttttaccctaactaaatttgccgatgttgtcactcatcaccgaagaatggccgccgaaactagcatcaggaagctcccatctctctccggcctccgtcaccgacgtaatccactggaagataatccctacttccacccctccaatggcttctacatcactccttctgacgtcatcctcgcccaggtcgcctacgaccactccgcccactcccaatcacgcgtggcctaccacagggctgggcctcgccgtgagatcatgtacgagccatcagctgtcaaggcggcgatcgttacgtgcggtgggctgtgcctggcatgaacacagtcataagagaactcgtggtgggtctttgggagctgtacggtgtgagagagatatatgggataccagctggttacagaggcttttattccatgaaagccgtcaagttagatcccaaggcggttcatgattggcacaagaagggtggcactgtcctcgccacttctcgaggtggcttccatctccaaaagatcgtcgatgccattcatctcaacggttataaccaggtctcttccctgattcatttttacttgttctgtaacattatcatagggaagttcaaagttgatgtttcctcttttgccctcgtcaggtgtatataataggaggagacggcacaatgcgtggggctgttgagatcttcaaggaaatcagcctcaggaaactggaggtgggaatcacggttattcccaaaaccgtagacaacgatgtcggcatcattgatagatcatttggctttcaaacggctgtagagatggctcaggaggctatatctgctgctcacgtggaggccgagagtgcagtcaatggcattggacttgtgaagcttatgggcagaagtactggtcacattgctctacatgccactcttagcagccgtgatgtggactgttgtttgatcctgagatggacttctaccttggacgcataagtgggctcggcgagttcttggagaagagactaaaagaacgtgggcatgctg

SEQ ID NO: 46647 - DNA, 608 bp, Arabidopsis thaliana
ctaaagacctggatctgttgcaaaccaaagagttaccgaaaggcgtcgatcggctggtgacggcaatgaacaactcttccagcctgttgttgaaaattatcagcgatattctcgatttctcgaagattgaatcggaacagttgaagatcgaaccgcgtgagttttcaccgcgtgaagtgatgaaccacatcaccgccaactatttaccgctggtggtacgcaagcagttaggcttgtactgctttattgaaccggatgtgccagtggccttaaatggcgacccgatgcgtttacagcaggtcatctccaacctgttgagtaacgccataaaattcaccgataccggctgtatagttttgcatgttcgcgcggatggcgattatctctctatccgtgttcgcgataccggcgtggggataccggcgaaagaagtggtgcgcttgtttgatcccttcttccaggtcggaacgggcgtacagcgtaatttccaggggaccggtctgggtctggcgatttgtgaaaaactgatcagcatgatggacggcgatttctcccgtagattcagaaccgggaatgggcagccagtttaccgtgcgtattcccttttg

SEQ ID NO: 46648 - DNA, 503 bp, Arabidopsis thaliana
gggactctcaggtttgtcttctaccgcgccattgctctcgagaaaagtatcgatttgatccctaatatacgcttttttatctgtcaagtccacaccgaaatccgcctccaactgacgacggacgcttgccggagtcgccgtgttcaggtcggagctaccgagaatctcacggagtcgggtcacgaggtccaagtcggaaaccattttttccgttactgaagaaaacaaaaatacgaagcggctgatgaaagccaaaaacgattctttgaggttgaaaatgagagagggcatttatggaatttacaaatcgtaacctcgtcgttttgctacttcaacctttttccttaattagtactacgccttagatgtgttcgattacgaccatagttagaaacttatgtaattatgattacttcaacctttttcctcgaattaggtgtgcaccagaaaaataacacatgcctaggtgtccattacaagttacgacatagttagaatatatt

SEQ ID NO: 46649 - DNA, 446 bp, Arabidopsis thaliana
gcacgaggtgtatctacagatccacgcaatgtctaaataattcaagattggccagttccaaattgtgttaaagaactctggagttttcttggtatggtcggttattatagaaagtttgtgcagcattttggcatcatcagtacaccccttactaatcttttgaggaaggacacagtgtttgtctcggaccactaaaactccaaaggtcttttggatattctaaagcaagctttggctcaagctccggttctagctattcctaattttcagaaaacttttttaattgagactgatgctagtggaggcggtattggggttgtgttgcagcaggaaggacatccaattgcatatattagcaaggcacttggaccaagaaatttgggtttatagatctatgagaaggaatgtctcgccattttatttgcggtcgaccactggcgttcgta

SEQ ID NO: 46650 - DNA, 765 bp, Arabidopsis thaliana
cataagcccaattcgaaataatgaagaagctattattagtgaaaatcaaaacgacgttgcagttgaaacttcacgtcacgttcctcttcgtaacttgccatcatcttcttcctcagagattccacgatcgacgacgtcacgacctccaccattaacatcaccgcaagtacaaacaaagaaatcgtttcctactgaacaattgggtcgaggaaagaggcagagaacacattcagtaaaattgaaggaattcgtgattgagactggaaatccaaaaacaaagaagaacaagtccacatctgagtatctgattgccaattacgttgactgtgagcgtttctctgagtcacataaagcatacatggttgcaattactcagggcgtagaggcaaaatcgtttaaaaaggcaatggaagacgatagattgaaaggggcaatgggttcataaattgattctcaggaaagaaatcattcgttgaccatagaggatttgcctaaagggaaaaaggcaataggatgtaaatgggtttacaagatcaaatacaagtctgatggcaccttggagagacataaagccaaactggttgctcttggaaacaaacaagttgaaggagtagactatggataaacttttgcgccggtagctaaaatgggaacagtgagattgttcttagatacggcagttaagaacaagtgggatgttcccagaaggacgtctacaatgtgtttcttcacggcgaccttgaagaagaaatttatatgaagcta

SEQ ID NO: 46651 - DNA, 598 bp, Arabidopsis thaliana
tagtacggccgccagtgtgctctaaagttattgccccaaacgaacgtctgctgaaactttggacgacgactttggagtatatttcgcggtaccgggtggggcttatggctggtctggcagcctcaaaccaaaatgaatcggttctaaaagctcactggcagcgcgaaatgacgaggctttttccaaatggaatgaaagcaggagacacagagacgctcgatttcgcagccgttgaaagcgtttgtcaaagtctgcacattaactgttcccagaatatgttacgcgctcatttcttgaaggctgatactggcaagcacgggaagctcaatttcgatgaattcaaagacttcgtcacacgtctaagagagcgaagggatgtccgagagatcttcaggagccacgccgacgatcatcgtgagggcttgacattggaggagtttctaatcttccttcgcgacgtacagaaggaggatatagattctgaccgcgcgtattggatatctgtctttgataaacttgtcagaaagtcgaaatcgcgcacacaaagccctactggtacgagctctgaggaccagtcttctcgcatgagtctcgatgc

SEQ ID NO: 46652 - DNA, 397 bp, Arabidopsis thaliana
tattaaaacagttacaacatggataatatctaacagtcttccaccaagcaagtgcaataacaacattgttcttgcagaaatgctctaaatcttttctccaagtccactgcaatttctccataagcctcgcataccaatgtatcattgctgtaaatcagtcaaaatatgagattatatactcaccttactacaaaaatgtataaacatgatatgtttgaaaaagaactgtaaattgatgttgaagaaatgtactttgaatccatgatcatgagcaacagtttgaaatcgaccatatcattccagtcaatcgcgaaattagtcggaatcccaacattaacgagtgcaccaataacatctatgaaagacatgtcggagagatatttttcactgaggaaat

SEQ ID NO: 46653 - DNA, 486 bp, Arabidopsis thaliana columbia
gctagcatgctgtaaccgatttggtgtaaacgatactccgagccgtcgctcattgtataaagaaagagtataaaatggacttttatttatgccgaagtgaaaacttacaggataaataaaaatgggagtatggatataggacccactccccctttttaatgagggggtagttgaactcgtccaaagacgagctgcctacggtacccttttcagggatcaaaccacttcgtagttcaagtttgtgcctctcagatttagttgtagtatttcctgaggtgcatggcattccaggaattgtggaatgattttgcctcttaaatcggcgagttcatagacgccgggtcggacaactttcgagactaagtatggtcctttcctgtttgccccgagcttcccagcgtttcgctcagcagtgttctgaaatactttgcggagacccgatctcattcgtgaaatctttgttgccgaacgttcgagttgtagtac

SEQ ID NO: 46654 - DNA, 547 bp, Arabidopsis thaliana columbia
  unsure (1)..(547): unsure at all n locations
ggttatgctntccctattgagcgctaagcacggttaattgaacttctgtacaactatgttctgacactgcaatttttaaaattgatttggagttgttttcaaatctgcaatagggacctagataattcataactggagttgacttcaatttaatgagtttactgaaacaaccatgaatctgagaacgtgcaaattgtgcacttgtcgatcgccatgggcaactctgtaccgtagaatacgtccagctcatcgagccatcagctacacagtcatgtcatcatagtacctctagcactgtatcagcgtccacagagagtaggatggtcagcatatgatccgacctggcccgagtaattccagcacctctcacacttagacccctcggctcgtgacaccccaatccacactttgttctctccctccacatactctcctgtgtgttgacactgcttatcatctccttctccattgaagacaatacttcaacctgtaatatgcatccacatcagtttcatggctatagtctcatagaattacactcagcatg

SEQ ID NO: 46655 - DNA, 564 bp, Arabidopsis thaliana columbia
  unsure (1)..(564): unsure at all n locations
atccccaatggaattcttctatagtttttttttctactccaaattttgaccttaatgtactttttcgggccttttcttaatctttgctatattacggggcgaaaattatatgttcggacattgttttcgtatattttgcatgtatcaaagctcttataaacaagatagggtattcctacatagctggtgtgacccacagcaaattgatcataaagtcttgaaaaaagaatagatacgattgtattgcatgtagttacggatgcgatcataccagcactaatgcaccagatcccatcagaactccgcagttaagcgtgcttgggcgagagtagtactagcatgggtgaccttcagaaaagtcctcgtgtgtcatccctcttttttttgggtttttctcttttttttgttaaaaatgtatgactctataactttaagaccgtgagccaaacttgacatgtgatccttttcggaaagccaaagagagatctcgatgaatgaggaaggaaaatggattcttgtattgttgtattttcctantccaaatttttattttaatgtactttt

SEQ ID NO: 46656 - DNA, 607 bp, Arabidopsis thaliana columbia
atcccaaaaccgttcagcgtgttccctaagtagtgaattccaagtcactggtcctagataagtttcctgtttttcacttccattggtgtaagccactctgaggaaggaagacgtggaaggtgtgtaatcattctgatgccagagttgctgcatgaacctaaatacgacagagcccaccctgctgagtggtgaatctcccttacttgtgtggacctcaatctttggtgcatttgacactgttaccaagaaattttctacgatggaaagaaccttacttgctgctactttgattgatttagaaggagaagacatcagtgcggtgatagggaacaataatagagactccacacttgaaccagccgcatccttaaccgacaagttttctacaataggattccaaagaatcgattctcagtcaacagaaaaatacacacatagcaagagggtaatgaataaaaagatggagacacaaatataccactttcagttttccatttgagcagaaaaagcagaaactttagaatacagagttgttcatgctcgacagtagatttggcaagcatgaaaactagcgagagaaccacaaggataaattatgtgaatatgc

SEQ ID NO: 46657 - DNA, 621 bp, Arabidopsis thaliana columbia
aaatcagtgtggcaagcaagcgtgatggttttctctaaggtctggtgctgaattctactccctaactgaactacactaacatcctttctatcgatccgagcattcaagtcttgaaagtcattgtacagaccatcaattctttgattcgttatcacctggctcttgagaatctgttctagcatgtattccatcctactcgtagaagtgggtggacggtgggcttggtgagtagaatagctggaatgattagcatagaatagatcaggcttgttgtagtcagcaagttgaatataacgttcatctgcaatagctgcagctctgtatcctacttggtgtcgagcgacaccctggtggtgtcgatcgtcaccctcaacaatatcaggtatcatgtttccctactcatcgattttttgaccatcctcgttgtatgcctgaccagctgtcccttaacactcctgcaacatcagatataattatcaacatcttggtgttgcaattaaattcttgaagctcctgaaacacaagaaaaagaaaaaataaaaacaagtgagaaaaaaagaacaaaataagtctagtctaaattctacacgtataaaataacaagagaaaagagtttagaat

SEQ ID NO: 46658 - DNA, 595 bp, Arabidopsis thaliana columbia
tgagccaggaatttgaggtttcgatgagtaagactgtgagggaagagttcatgactgctttcaaggaagagatggagattactgagaagcttgagaaagttcagaaggctattgagggatctgttgatgatttggatcttatgggaaggttattagatgaatttgatttgttgcagagacgagctcaggctgtgaatttagattccgttgatgctaagattagtaagttgatgccggaattagggtttgctcctgaggatgctgataggcttgtggcttcgtttagtggtggatggcaaatgagaatgtcacttggaaagattttgcttcaggtatatgaatgattgtttacttaaagttttatcctttcaatgagtttgaactcaaagctaatgtgaatgaattgtgtgtttctttgcgagtaggatccagatttgctgctacttgatgagccgacaaatcatttggatcttgatactattgagtggcttgaaggttatttgcaaaagcaagatgtgcctatggttattatttcacatgccagagcatttcttgatcagttatgtactaaaattgtggaactgagatgggtgtg

SEQ ID NO: 46659 - DNA, 628 bp, Arabidopsis thaliana columbia
gtagatgggagaatcgcctcactaagtatttatgataatacttacgcatctcattgtattgttgatgcaggtaaagataaagtgtgatcgtaaaatcatggcaaggaagagaggatgatctaggaactcgtttggtttacttttatgttttggttattggaaccggttagggttgtgttaggatttttagtcattcttggttttgttggttgaattatttgtttattcataaaatagtatttttgacttgcagtttaattgttgctttattggttggtttaattagatatttatgggaatatttaattatgtttaaaaaaaatgggtcgggatgtttcacattcaacctccaaaggggaaaaagatacaaagtttttgagcaaagatttacaacattgataagaaagataacataaacaaagggctttaaggatatatccgtagaaactcggagacagaagctagctagcaacaaaccacaaacgagatcatggtgtgtcgagaacacttccgcgaattgttcgggaattttagaaatagtcattatcatcagatcttgtgactttggaaaaggatacttagccttaccgacaccgacacggacatcagtggacaactaaggatattg

SEQ ID NO: 46660 - DNA, 570 bp, Arabidopsis thaliana columbia
tccccgtactctgcaaggttgttccgtatctctcaccaaaccatctctttctctctttctcaaaatcttgtttatttttttaataaaacaaagaaattaaaaagatgatggttacattagtactaaagtacgtcctcgtgatagtcatgaccttgatattaagagtcctatacgactccatttgttgctacttcctcacaccaagacgaatcaagaagtttatggaacgtcaaggcatcacggggcctaaaccccgtctcctcaccggaaacatcattgatatctccaaaatgctctctcactccgcttctaacgactgctcttccatccaccacaacatcgtcccacgccttcttcctcattacgtctcttggtccaaacaatatggtatgtacccatgaccagttcaacgttttcggatgtccatttaatttttttcttaaacgtctcttcttatgctacataaaatatgtttccccaaatattaacgtaaaatatgaagcggataattatagtttcttcctttgcttatgctttggaccggacatgctacaatgcatttctatttta

SEQ ID NO: 46661 - DNA, 576 bp, Arabidopsis thaliana columbia
ggctcggagacgccacaatggaaataaattcccatagagtagccgaggttcaaaaacacattctgatccttagcccactcaaggttactcatttccccatttgagatcagcttaggcttgccgaccctcacttcacccaaatgttgtgtcgactcggacaaagtcttatcagtttgaaacccgtataatttaaaataaataccgatttcaatatcatagagttacgaaaatacaaggaaaaatcacaacataaacatcgtttttatggccaaggcatgaggcccaaaagtacacgatacgaaaatacatactttaaaagttttacaaaaggacactgaaaaactattgcgggttccctagtgttcacactccctctaatcccctctaaggttatctgcaaaacaagtagagtcatgagtaatctagcattactcaatgagctcgggttcccaaggaaacattagtctaatctccaccataatccacatgcataacataaataatcagagtacatagagaaggtagcaagcaacacacaacacaccaagaaaataacgtttcttaaagttttaatta

SEQ ID NO: 46662 - DNA, 967 bp, Arabidopsis thaliana columbia
catgcgtcttttacatagtttgggaccttatattatatggttggtatcaccattattgaccattaatcttctttaatatgtctgttttgattctcaaacttaatgttccaatgttcaaatttgaactactttgacctcttcttgggatttgatttccggcccatcatgagctcctgagctgctaccccttttcgacgtcttcacttcgcgtaactcaaaacctctagctcaactcgaaattaagggtcgagttgtttgtgcttatgaggcaatctttggttgactctccttcaaatcgtctttctgtctatgaggcaatcttcggttggactcgaacgttaagttcacgttaggtttggggttcgataccaacaattagtcccccaaatctttcgagctgtcatgccagctcgaatgacgaattccttattcgacgaagattgcgcgacatgatctctgattttccgccattgatttatcacttccttaattttggaaatatccataatcatttacatgacacctttaacattatgaccgcatttcatttattcactattcaaatggggaaacctttccactttctccacgactcccgaggcggttttgctaatcaccacaatttcgcgtgagggataaattttcttcttctatcttgttttatttttactttactctcttgtctttttgattaaaggaatcttaaatacctttcatcctcatcttctgaaaccatgaatccttcatctccttccgaaagacccaattccccctccgatgacgagggtcgttcatgggtcgacttatgcactcacccgaacgatattgcgagtctccactataggaccacttgtaccctccagtctcttaattggctagggatctatgtcgcattctagctgaagttatggtagagtcaatgaccccatttcccattgaatcgtcgaagaatcatcgtccgcgatgg

SEQ ID NO: 46663 - DNA, 631 bp, Arabidopsis thaliana columbia
ggttgtgtgctcacttaagagtgaatatatgaaaactactcaaggtattaaggagtggaaaaacttgacttttgattcatcttgattttgaacggttttagagaatatatgaaacagatagattttggcttcaatatccggtatagttgtacctgagcattaggttggaccagccatagtaaccggcttggatgaggttgtcgacggtggcagacctgagatattctttccgggaagagatcaagaagatcttaatgcctctttctctgatgtcgtggtacaatttcttcatgtgtggcactgctggtgctttcttcttctgtatccaatcctcgaatttcgttgagttcaatttctctcctctgtttttaatccattagcatgagaaaaataagattaatccaaattgaaccgaaatctaaaattcacatctctaatcagagatccggtccggttcagtcagatccaaagtgcattcacttaagtaaaaagctaaaaagtaacaatatgtacagttacgtatacacaacacccatcaattcaagttggtttatcttaaaccgggtaagatagagaatttcataaattacccgaagaagccatttttcttgtggtaagggatggtagagag

SEQ ID NO: 46664 - DNA, 598 bp, Arabidopsis thaliana
ctagagtatcgaggatcaccctcttagacaatcctactttggaaacgattaactcatccaaaacaagttatatcgcatcctcagattcatgctttggaaagcaaccttaaggtattctttttcacctcaattatctatattgtgtctataatattctctttctataaatccagtcttatatactattactatccttctatttttgaacagctgccagtggatccgcttatagttggagaccttaatgctgaccaaagttgggcagagtgggacgatgaggtgaaagataagaaagttgcacacatgtataatttgatatggtcatctcatcaattccaaaaaaccgattggccaggaggtgatgccacattgcctccaatctcagtcccaaagaagaagaattctggtgttcataaaaagcacattgtggaccgtaagaagaaattaggtgtaaagtctgtggctcccaaatccaagcgaaggtattcaactcgtagtaaaccggaactcaatctctctgatgatgagaagtctaggctcatcagtgaactacaaactaaggttgaagagctatcgaaccgtgtaatgaagcttgaaa

SEQ ID NO: 46665 - DNA, 610 bp, Arabidopsis thaliana columbia
tgaatacaatcacgaccaccagcctccattacttcctcttcttcacactcttcccaataaccggataacgtctctcttcccttcctctctcgctcttccttcttcacgaagtaatacacttccttgttcttctctcctacaacaaaagtgtacgtacaacattcactaaaccacatttttcaatacatttgacgtgatatggtatagtaattattagagagaagagtttgtagcaaacctagcaagtcccatggatcaacattgcaagaacggagctcagggagatcgaagtccattggacggtggaggaccttcttggcgagatactcgaacacaagatcttcatcatcgggatcgaaccgaaacccgggaggcagtctcatgcttcttccgttcatggcaaatctctgcgcagaaatgtccattgctttcttatgagtatcgtttgtgtttggtttaggttgtttatatatacttatgagtgtgcacctttagtctgcaaaagcggattctgctttcctttagatactttttacgtctactattaatttcaagagataaatagataacaaaaaattgataactgcaaattcagagatcgtagattggt

SEQ ID NO: 46666 - DNA, 551 bp, Arabidopsis thaliana columbia
tgattatagagtaaccggtggcgttcccgaaactctcaatacttaaagctaagataacccgagaagccgagaaatcctatgctaaagtatgcattgttaatgagcttgattagtttacctagtatctaaaccagagcccttctatgagcctacatgttctttcttaaatgcctatgctcatctatgatagttcaaataacaagtacctatggcgagcatacctattatctaatatcaagttctaggtgatcaatctaaaactagcaaaaagaataatcaagatgaagaactctaagaataatcctaaggggttttcgatctactaatccatctaaatccctaatgagactccctaaacccaacaaggtgattactcagacatgataacagaaacacaaatcataatctaaatagttttcagtgatgaattaagaatagaagtaaaggagttcagaatcctctctaaagggattagattcttctctcaaatgtgtaacaaactctaaaaaacaaaaactaggtctaacaatgaccgtgcagggactactttg

SEQ ID NO: 46667 - DNA, 474 bp, Arabidopsis thaliana columbia
tctgtagctaaaaccgcacctctctgagtttcaagcttctgtctccaatcaacaccagagtacttaggatcaaactcgttaagagcattcaaagtaagaaacgacctttggttgttgagatcagcaacactctgtaactcacacctcgcaacaagatgcatattatcatcaagcttccaccttctatacctataagcaacagaagcaatctcttcaccttcattagcaaatggattggcttcatcaaaagtttccttctttccatctctaaccaaaacctgctgcgaaaagttctgattgatgtaagcagcttccacacctagagaatgagcagaattgatatcatctttagactcaggcaatggctcttgagatgtctcatgcacagacaacaaatcaagctgtgatccatctctcttgtcaaagaacagtttgttccaacacgttgaataacaatatcccaagagtaaacag

SEQ ID NO: 46668 - DNA, 573 bp, Arabidopsis thaliana columbia
taacaaaaatacatagatacatatgtatgagtagagattttgatactattacagcactgttgcggtgcggttttgggtgcggttttggtcaccattcacagcctaagaatcattaaaatcattaaaatagtgtaagagattttgataatcgtggtctggtcggcttcaacttgcataaactccatatttgtaccagcgacacatatgttcgtatcgttttcttgctatcatgttggtacatacactcttgatttctttaatgcaacccaaaaaaaaaaatctgactttatatcgttgcaattttttttcatatgaaaacaatgtttaaaaatgaggcccatttctaagcccatttatacagaatgaggcccattaggtgatttaataatcttctccgccgtgttcttccactgcggtggactatcgtcgctatcacacggtgcaggaaaaacaaacggagaaaggtcgatcatctcttgatcatcgtccatggcgcagatcccagcttggagaatgccctctcaatctgaaatccattaggtgactctattttcattacttagagattgattg

SEQ ID NO: 46669 - DNA, 538 bp, Arabidopsis thaliana columbia
cccacgagcttgtaaaatctacacatgcttccagagctactcggttggctacggcacccggtgcatttccccaagggtggcctaaagttcctccaccgaattgtagtacagaatcatctccaaagatctcggtcaaagcaggcatatgccaaacgtgaataccccctgaagccacaggcagaacaccaggtagtgagacccaatcttgagtgaaaaagataccgcggcttcgatctttttcaacataatcatcgcgcagtaaatcaacaaagcccaaagttgactccctgtctccttcaagtttacctactactgtacccgcgtgaatatgatctccaccagatagacgtaaagctttagctagtacacggaagtgcataccatgattcttctgtctatcaataacagcgtgcattgcacggtggatgtgaagaagtaggccattatctcggcaataatgagacaaactagtatttgcggtgaaccccctgttaagtagtcatgcattacgataggaactccaattctctggcaaata

SEQ ID NO: 46670 - DNA, 520 bp, Arabidopsis thaliana columbia
ttagaacttagggtccgaatggtgattgcgttttgcggtgcgggagaagtgcggtgcagttcaaataataacaaaaatacgtaaatacatatgtatatgtaaagattttaatactgttacagcactattgcggtgcagttttgggtgcggtgtatatcaccattcatgatcttagaatttatgtaaatatgagaatattattgtcaataatattttaatcaattgaatatcaaatactcattcataatctggtcgatagacgttttctcttgaacaacttccgaaccaattattataattttgtgaccagataattttatgtgatcgcccttttaagttatcacgaaagaatcgggttcaacttcattatgtattttttagaagatattgccttgattttctcttaagcttaacaagatatactcttgattcccattttcccttattagttggcgaaagagtattattttaattgacctgacgtatagttattagaacttcctatacgaaaccctaaagt

SEQ ID NO: 46671 - DNA, 604 bp, Arabidopsis thaliana columbia
tgatcaggttgagtttggaaaatgtcaagcagaagaaggattggataaattacttgagttttgcaaaccagtagagaagtttctcgagttagctgcacatgttgatggcgagccaagtagtgttgatgactctgaaaatgggtccaaagattgttgtggacaagaaggcgattctgtcccagactctgtacatcagtatctagtaccagttagtttgatagagagatggggaaacgcaatggacattgtttaccctgattcaaagagatgttgttgtttcacaaagagttattatcgatacgtgaagggcacaggttccctattggcaactgtccaggtacgttcttccatggagtatacaatattactttcctctgtatttgcaaagtgaaaagaaatgcttatcgtgaatctgtgatcacgcagccaaaaatcaagggtaaggaatcttgtttgaaggagcaacggcttagatacttccccctagagaggttaacactgtcctttactttactactaatgcccactgaaaaagtcagcttattcattgaagatgatgtcggttctatttgttaggtactacttcactcatcctgaagattga

SEQ ID NO: 46672 - DNA, 562 bp, Arabidopsis thaliana columbia
tcgatataaagaaatcaaaacaacgataacctactgaaactcaaatcgattcatagaattaagaacaaacctctgacttgttcaggtatgtttgccctcgtcgccatgatcgctcaaaacgcacaaaacagttttcaaagttttgaattagcaaaagtgattatgagatagagagacaaaactgaaccacgaaacgtttataattgcatcggctgtggcacatgatgatagttgaaacaaacagagacaaatcatctcaaatagttgtgattttcataatcaaagaaacaacgatcaaatcaaaacacatgtaactgatgttattcaaaaccataaaacgttgatcatatatctatttaatctttcaaaaactagcaataaacaagattaacagagatgatacgaagatcatcatcacactgattcttctagatcgctaagaatagggtttatacctgagagatttgtgcgtttgtgttcacgatcgaagcaacagacccagattcaatcacacgcttctgttctggaataatcggaagagaattttgaagtgaatgaaatg

SEQ ID NO: 46673 - DNA, 489 bp, Arabidopsis thaliana columbia
tgaggaaagtgactcggtgttataacggattcgaaagaggaagaacatacaactgcaagaagcaaatgggtggattggggttgggaattggaatttttttcaggacccattcctatgtttatagtgttagaaaaagaatgctaagttccgacaaagaaagagagtatccagaaaaatccgacaggcctggagagttgtataataagatgataatccacagtcgtgttcttccaaatcatggaagacagatattaagaacatccctttctcttttcatttggctgtctccattttttccaggaaaaagattcagattccattcacaatgtgccacaaagcaaatcataaaaacccattcctaagtcacaaaacttacagtaacagagagctattaatatttcaaattcggaaaaacttgcttctcaagattccataatccatatcaatagaagtcatacatttcattctcaaaaggtgttacagaacaaa

SEQ ID NO: 46674 - DNA, 636 bp, Arabidopsis thaliana columbia
tgatttcattgttcttgttcattaccacattatgttttaaatttttagcaagtactaaagaaaatacgacaagggttcttgacgactttgcttgaaaattgctcaatcagggtttccaactacgaaaaaataactcaagaactgaatagatggaaaatatcaagtgaaatgtcgacataggaaagttccagaaaaccaactactttttatttatttgtttcatagaccagagataaatactgtgaccaaggtaataggtttccctgaaccgagaagattatgatctattaattaattacagcatcaacaagattgtttagtatagataataatattcggatgctgcggaatgctccttgtaactagatggtgaaccggaagtcgtgcacgttccagtcatcattaaatctcgccctgtacctctcaaagaacctcacttgcatggtgcgtctcacaaccaatgctgtcgtacatcttgttccatagtgttcgttttcaatctgaatcaaaaaggtaaaaaagaagaagagagattataataatataacgcaggctaggtgatgatcataaaaaaggtggctcaattataatgttttgagtttcttccaaagtgtcgcgacaaagatagactcagtg

SEQ ID NO: 46675 - DNA, 542 bp, Arabidopsis thaliana columbia
aattatggtggaaaagaattgtaatcaaaatgaaatgaatgaatttaggagtaagagacaagtcaaaagaaatagactttgaccaaatcacaattttgcaaaggtcttttgtcaactccacgacgtttcatggagtcacaccataacacaacttgataataatttaaccaatttggaatttttagttgacaaatagtatttgtgaaaactcaacttgggattttctttcttacttaaattaatggtcaataatatttttactcatctgcaaactgtaataccatttttaaattaaaattatgaatttaatcgcatatggaatatatgatcttgacttgaccaattgatgtataaagataatgggaattggcaaatataaccaacaaaaatactttaattggtaaactaacacttcaaacaatagaaagagatattatgtataatatatgtaatattgacaatactatcctctgtttgtatatcacgctctcgttcttcttttttcttcaaaagacatcctattgaataaattttcttgtctt

SEQ ID NO: 46676 - DNA, 173 bp, Arabidopsis thaliana columbia
ttcgaggtagaaaaagccgatttcacgggcaatgcgcgccaggcggcgtgtgggccgcgggtgtgctgttcgccatcgcccagctcttccaggttgatgacgggcagggcgtccagggcgggcgcggggccgagggcggaggcaagggtgctcataaagactcctgaagggat

SEQ ID NO: 46677 - DNA, 624 bp, Arabidopsis thaliana columbia
tcaaaccacactgcacacaccatcggcactattcatatcctcttaagtacactctttcgttgaatctgtaacggcttgatgaatatatgtttggcacaaaatagtgacttctcgtctagatgatgcattttcacaagcgtttctttgatattgtcacatctcgaatttttttaaatgcagtatctaatattggatttcgaaggcgatatcagatatagtctttgaaaattcgttgcatacacaaatgtttagctaaatattgaaacgattgcatgtattggttttacatttgaaagttaattaacatcactagatattttgaaaatctttttccatcattaaaataagataagtttttacaaaacaacctcaatgtttttttatagaactgctgttattagtttttccttgcaatgtcccctctagatattcgattcctttttcggtcgggtccggaggattcatgtggtctaattagtaggagtattagttattaagaggaataattagctgacgctatatatatatgaattacaaataataaagtcatgttttagttaagaagtccatcttatcatcaaaagtaacatctttattattgagttatcatagctagtgaagaca

SEQ ID NO: 46678 - DNA, 816 bp, Arabidopsis thaliana
ccgacatttctactccataacctctgtcctcgaagccaaccttcaagagaaatcaaaactatacaaagatgtctctctacaacacatttttctcctcaacaacatacactacatgacccggaaagtgctaaagtccgagctgagacacatcttcggcgacaaatggaaccgaaaacatacatggaagtttcagcagcaagcaacagagtacgaacgcgcaacctggctccctgtcctatcgttcctcaaggacgatggttcaggttctggtcccggttctggctcaggttctggttcaaagaatctacgcccgagggagcggttccaaggattcaacactgcgttcgaggaagtgtacaaagcgcaaaccggatggctaatttcggacgaggggctaagagaagatgtaaggacaaaggcgtccatgtgggtgattcaagcgtattggacattttacagtagacacaagaacagtgtcagtgaaaggtatataaagtacactactgatgatattgagagactcttgttggatctctttgctggttcttctaaatccttgaacaattcttatagaagatgatgataaattgtgttatgatgataattttttactgttacaagtatagaaatatatgtaatttgttttgtttgtattgaatttatttgaccttgtgtaatctttatattcatcatttcatgaatatctatagtgaaataaaagtttgagaagtctttgttgatttggttggctaaagaattacaattatggttggaaagaattgtaacaaaatgaaatgaatgaatttaggagtaaga

SEQ ID NO: 46679 - DNA, 597 bp, Arabidopsis thaliana
ccaaacgacaatgccaaagaaacattggattcaagtcattagacttaaatttcttggtatgaatgttatagattggcatgcttggtttagaccatagagtccattctctaatggagcgctaccataaaacatatcatctcaatcaaatgaacaacatttgttcttgatcgaaaagtgaaaaccttccatgtccaaacatgaaacagagatgattttcttgtttatagcaggaacatagtagcagttcttaagctccaaaaccatgcatgaaggcaaagacaacgaatatgttcccacggccaatgcagagacttttgctccattagccacacgtaagtccacttgtccttcctccaaagttctactgttgtttaggccatgcacatatacacaaatgtgagcaccaaaaccggtatccaatacccaaggagtagaaccagaagtagtaacatttacgtctataacatagatacccgaagaagaaatcttgaatgttttctgctttttccagatcttccaagtattcaggagggtttgatgcattcaatttgtcctcttaaggacatctcgactgaataggaactttgaggggttaca

SEQ ID NO: 46680 - DNA, 659 bp, Arabidopsis thaliana
ttcattatcatttctcatcaaaatacatcattacacaacaatggctagagcagaacagagctcaacccatgttacatggggtctttagtttttctcaaacaatgaaacatgagtcgatcccatgtagttggggcttaacccttaatcgaggcccattattttgagtaacctaagaaaaacatcaaaaggccttactgtgtacgaaacgtcattactcattattatcattcattcattcattatgaatttttctcaaccataaattcagatctccaagaaaatatctttgggtctgtggctcataatcagaggtggctaagacattcagacaggggtttcaaaggacaaagttaaacaattcacgtaaaagtatctttggccaccctcacgactagtcttccacctcttggccttaaatatgtgaccttcattgaagaaaatagtatccagaaatggctaaagcagaagaaaacttgagagacaaatgtagatggagccttggaggcatgaccgctctcgttaccggtggctccaaaggcctcgggtcagtcccctactaatcaatattgaatcattaatatgcatattcatattggacgtgcaatatgtatcaactgtgttatgaatagggaactgtggtggagccctagcatgttagg

SEQ ID NO: 46681 - DNA, 563 bp, Arabidopsis thaliana columbia
  unsure (1)..(563): unsure at all n locations
tggacattacatcggttaaggatttctacggctaactccaagattatgcattcggaatttagcatcaaactgtatctatctgcaagttcttgagcctcttttgcttggaactctaagtgttctgtctctgcgactagttttgctactgcttctgcctgaggatcacgttgtggcgttgtggaatcttctctagtagcaggaacacgttggggcatcatcatcatgtagcggtttcctacctgcatttgcaagtttttttttactgagctgaccaaacaaaattctataacgctatctcgcaacttgcatttggtattaggcaatgtatggagttaccttctctatttttctttcagcaactagtttttcaacctcgcctctcaatcgctccctagaattatccggtatcacgtaccgggcctgaaatttatattaaccacaagaacaactttcaaactagtatccaaacaagctatacatgtcatcatcatcatcatcatcatctaagatcaaacctgaaaacggatacttataggtagagggnaagagatctactaacattg

SEQ ID NO: 46682 - DNA, 695 bp, Arabidopsis thaliana columbia
cccctgtttatagacatcaaagtgaaattgaacccattaaatttttggttccttctgatccggttcaaaggttaaaccaaattgcccaaagagagaagtggcatgttgcaaaggaatatccaattagttgattcatcatcttcaattagattcaagttacagccaattccttcctgaactatataccaaatgcctcaatttagacccgacccggcccaatcttacccagtaagagtcgtcgatacgttctctgaagcgcaagtcatttctggattctcatttaattggccgttcggggccaaataactctttaattttctgcagtctcatttgttattcgaccaaaaataatttatatccctttcctcaagaaatcttcagaaccgacttattagagcttcgagtctcctcaaatcttcttctacgattttttcttctaggtttagagcttttgattctccgatcaatttcgcgatttgttgaactaggatctgaaattagaatgggtggtgaagcagattcgaggcagccgctgactgctgaaggcgtacgtgttgccgtgaacgtcagatgctccaatggcacgaaatttagtgtgacgacgagcctcgattccacggtggagtctttcaaagagttaattgcgcagaacagcgatgtgccggcaaatcagcagcgtttgatttacaagggac

SEQ ID NO: 46683 - DNA, 627 bp, Arabidopsis thaliana columbia
agtaccctttttggctgatcattaacaacagcataagcttctccgcaagatttctccatatcaatgaattgatctgttgactcgtctaactgggaatttcgagccttaaggtgcttgaccagttcttgtaattgatgaaggttctcatgtagttgcattggtagtgaattatcagaaccattctctagttgactgttttctctcgtcatgactatatctccactcctcagctcactacatccatattgaacaagggtcttcgcagctgcaacaccccttgttctcaaagccgtggatctagtagcttgctccttaaaccaacaatagggacagtaaaaggttgcaggatcttcacaatcaagctcaacacacttcctgtgaacagcgagagggcattcattcccagaacaaggtactacaccatcgtctgcaatatcgcatacaatacatgcgtgttcgttcaacggctcaaagcttctgaaagtgtcacttgtcccaaggtagtggcgcttcttaagaggcacattatcataagtgaaaatgtttggagcagagttgacgtcctcatcaccaccatcatcacactgaacaatacaatgagcaatgcgcttttctctcacaaagcca

SEQ ID NO: 46684 - DNA, 409 bp, Arabidopsis thaliana
caagtgactctagactactaagatcgctattgattccaacgcgtggcttctgtttagaaatgtccgacttggaactcgactcttgtctcgccactcctgcataaaaaaacagtgctttgatataaggatttgaaggatccaatagtaaagaagaaaattgacatagtttgttgtttctacaatgctttcatcaatgagttaacttgaaactgtgttatacttttctgatacttgtgagtcatataaccaagacgctcagtgaaaaggttgacatatgaaaccttaccatcattaggatccactaaaagagattctgagaaaagctttttgacaactggagttgagttactgctgtttgtcatgtcttctgcagagctcaaactcaaaagcttttcgctggagcaaggtg

SEQ ID NO: 46685 - DNA, 573 bp, Arabidopsis thaliana columbia
cttgaccgtcatctttacgccagcagcattctcatccttttcttgcactgcaggagcagattttcccatcgtttgctctttctctgccgtatctggttttggaggtgtacatgccacagaaataatcttaaggcaaggaagaattatgtgctctgatatagcaggatgtttagcacccaatttaatggatgaaaatagtagctgaaaaacaaggcgcagtcttgactcccagaattcatcagtgagagagcaaacttctgaaagcaacaacatttcctcacgagtggcgagcgcaatatccatggaacgatggtgttcaaggcagtacattattttcttctgtaccagattgtttaactcattcactgcactcagatcaccctcgcgagaaagtagaaagagctgctctagcttgagcacgggctgttttcggaccttggtgaatattgttttcaaacaactcagacaaaatactagctgcaacaagttgttttctagatcttggatgcttcgacagcacttgaagaactcaagacattgagtgacaaatgtagttcacaaccataacaattg

SEQ ID NO: 46686 - DNA, 490 bp, Arabidopsis thaliana columbia
gtaatagtaatggggaacgcataaacattagttgatttgtgctgatttatgttgatttatgcgacactatattatcttacgtaccatgaacacacatttcacaaattatagatcatatattggtgtgaaaaataaagttaattgttacatcttcgactatagctggagttttcatcctattaaatattaataaaaaaatacaaaaaggcacaaaacaggtgccgccatatccaatatatccaacatcgtcaattattcagagccgaccatttacaaaaacgaagaccttttgtgaaaatctagttcaaccataaaaacacgtgccacaatctcattcttcagagttctcccaccgaaccatctctctaaatgcgttcaaattatataagtgagtgatatataaagattactaaaccacatggtataccgattttttagcctcattctcttttgttacaagattctactatgtcttcatttcatttttatt

SEQ ID NO: 46687 - DNA, 1061 bp, Arabidopsis thaliana columbia
tgatgcctcgaagaccaacgcgccgcctctattcttcccttgaagactccactccgacatgacgcataacatcactgttgtctaagtacaaaacaacaacaacaaaagacaccacaagctccaacttcgagcaaaaacgatgaagaatcgaggaggctttacgaagagcagaaaaaacaaaactaaggcgatgcaccacctgatttctagatcggagaagaatcccgtcgctaggaggtccaacgaacccaaacgtctcatcaagagccacaaccaccgcagaaaggagaaacccaccacgcaccaccaactagagacgatgggcaatcgaaatctgaaacaaaacgatggagcacgagaggaggagaaacatcaaagacaacaaagagggaggaggaggagcctccccgttcgccggcaaggagtgcgcaaacggagaggcggaggaggcagatcgccgacattatgatttaaacttaatttgtaacaagaaattactctaaaatgatatcggcatagatattgtattagacttcatttttaacaaatatggttgtacaacaaccaacctaaaccatgattagtgaagaagaagcaataaaagtagagtaaataaagcccaaagaattaatgaacaaaaataacaaagaggatgttgacgaaaagtcaactccactaagctggcgacgacaaaaacttctgcgatttaagttaaatttgttgggtcctacttcgaaaccagatcatacggctgacgacgaaagtttgactcgatcctctctcttctttttcgtccgttatgactcttatcatcacacctatcttgatttgtctctccataaaaataaaaaataaaacattttctttttcattcatcttaacaacatgtattttatcaagtttaattacaatagtgtcgacgaaaagaacaagaaaaatgccgacaaaaaaaaaaatactagaacaagaaaaattagaataatgtcgaaaagcgattaagtaagtggtttaccgtttgtgcatcttctagcgtaatagtttggacatctctttctttagtg

SEQ ID NO: 46688 - DNA, 524 bp, Arabidopsis thaliana columbia
aggatcccctgtagattaagagaaagtgtctcaaaataaagattctatgttgccaagaaacagagtctctctttatgcatatgaatgattgatgtgcttctgatttcttaatgttttatgtggctgaatttggaaactgctattacataaacaaattttgtcaatagtaatataaaaattaaaaaactaaagctaaagaatactttttttctcttgaattatataaaagaaaaataattggaaaaatgtctagtaggtttaaaggatttgatatttaaaaaaaaattgaggaccctatttttttcttttttcatttggtttattttagcagttagcaccatcttaagatagagaacttgaagttttattctgctattgaaaaacgaaaataataactaaaagaaattttatcttactactttttcaaaacatatatgttatttggaatttcaatgcaaagagtacaaataaccaaaacataaattctgctctctcttttgttttttttgaaaatatctaaataa

SEQ ID NO: 46689 - DNA, 593 bp, Arabidopsis thaliana columbia
tttgtgaagggtataatacaaagaggagagtatggtaacatttcatatacaagtaggaccagaacccatgtgaagattgatcaaagagaaaaaaagatcttaacgggttataatcttatccatcatgtgtccattgtgggtttgagtgtgtggtgggggctgaaaatgttacatcaatcttcacatattggccgcttaacttctcccattttctaaattgacccctttttcttccctagacaaatcaagattcaagatgggacaatgacactggttagtttacatcaatcttcacatattggccgcttaaattctcccattttctaaattaacccctagacaaatcaagattcaagatgggataatgacactggttagtagttactatatgcaagaatatctacattaggaaaatttaatattttctaattaccattgtttttctatcgtcatatatattgttttggtaaaatatacgatgttggtctactgatagtacaagtaggaatgtttacattaacacaaattgttttgtttccctctcccttaaatatcattgattctagaaaaaaaaggattgttgaggtaagtca

SEQ ID NO: 46690 - DNA, 551 bp, Arabidopsis thaliana columbia
cgccagtgtgctctaaagaaagatgcttgcaacatgaaaaggccatacaagcttcgcagccaagagcgccgatcgctggatacgacgagcctcattccgaagctggcaatgtgaatggcgataagagcaggaataggaccgcggggagacaggttaggaatgcgtcttcaaaagcgagggtgaagtcgaaggtgcggcactgtggtgctgactctggggccgaatgagctgtcttcgacgcaggagaaagacatgtcgcctgtttcttggatccctatacaggcaaagacggctatgaggggttggttacattttatctacctggaccttctcttatcagtttctcgagctgcgaatagcaggcgtctcgcgcacgcacagcagtcaaaaatgaatcgcagaggaaggggtctccaggattggggtcgagccactatctagagggcaaagatcattcggacagagcgctcaacataagactttgatacattgctagtctccagaatattgtgattggttgcgccaaagcagcgctatactagggcatggtt

SEQ ID NO: 46691 - DNA, 575 bp, Arabidopsis thaliana
gtctcgtatattttgcagcatttcagttatctccatctgtttcatcaccgtggcgtgtaaaagctgcaaccaatgaaaaaacgcttttgagtccatactgaatctttaagtttgaaggttttaaaactaacaggaaaggtatcgtaccctctttgttttgtcgagatcaaactcaactgacttgattctatctaaagaatccatcaacattctctccttctctacaggtattgcaacgggtttgttccgaatatcctcataacttttctccagtttctgaatacgttccaaacatggaagaatccggtctttcattgtgggctctctaggaggtggtgagatgaggctgcaccgactgtcatcttctgttagacttgaagggctgactgtagtctggcttctcagaagctcaagcggagtataacgaaaaactgcagctagtttcagcattaacgaaagtagtcttttcgctaggttctcacattttatcttgtcaatcattacccttaaatcatgaagccaacggatgatgggagccctaggagatccagagagaagatgaaatcaaaaggtga

SEQ ID NO: 46692 - DNA, 1246 bp, Arabidopsis thaliana columbia
gagcattatcttctttctcgatcaatatacaagtttctcgattaatgttccatactttgactgtgaaatcatggttgatgcaaagatcgcaacattctctctacggatcagctctaatgtgagccttgcttgtcctcccaactttgattttagtgggcagaatggtacgactaactcttctcgttagtggaagattacaaatgattattttgtcaaggatagttcaagtgaccttgagagtgaaatcatgtttagggttataaatgaagactttgggcaacacttaacagcaaaatcaagtgataatattttttggttttcaggcaatttcttaaaaagtttaggcaattaataaatgaaaagttttgtatttgtttaagctaactaaaaaagttaggtattttgagtgcgacacaagagataggttcaaaaaacttacttgtccgtatctaaaacgtcttgcatcctagacaagaacagctttgtgtctcctccgtccaagtggcatctggattttgctttgatggcgctcgacttcaaggtcccctccgctgagcatatcaggaatcaatgaatctatgaatctacgctaagatcttggacaaatacaaacatcaattataagaatatactaattttgaaatatttttcatgtgaagttattgtgagcgcgacacatgagattttttttcaaaaaacttaatcatctgtatttataacgccttgcatcccaagctagaacagcattgtgtctcctccacagacatggcatctgcattttgctcactttgtcccactcccacctccttattctcttcccacgcgcttatacccactctacagtggcgttcgagttcgagttcgaggtctcctccgctacatatttcccgcgttttatcagttgaaactgttcctttaagcccatcattcacctggaacgatgtttttgagaacagtcgaaaagaatacgtgcctcagaactcctccgatctcaccggatttctcgagaaagtcgaccgctgtaatcgtggattagtaagtccactgaattgaatgtttgatacttgtatagtttctaggaaagtgaaaaaaaaataaaaagtccttttatttttatagtttttatgaagttcaaaaactttttttgccatacgtttttcaggagaagttaggtgagttcattccatttgttatagaggaacaaatcgttggttatattcacaaggggtaactattcttgctcaac

SEQ ID NO: 46693 - DNA, 1028 bp, Arabidopsis thaliana
ctgttgaataggtatgttgcagtagggaatgagccgtttctgactggttacggtggtcagtttcagaactatgtagtcccaactatggttaacctgcaacaatctttggttagagcaaatctagctagctatgtgaagttggtggttccttgcaacgcagatgcgtatcagtctaatgttccctctcaggggatgttccggcctgagcttacacagattatgactcaattggtttcgtttctcaactccaatggctctccttttgtggttaatatctatcctttccttagtctctatgggaactcggattttccacaagactatgccttttttgaggggagtagtcatccggttccggatgggcctaacacttactataatgcatttgatgggaactttgacactcttgttgctgctctcaccaagcttggatatggtcaaatgcctatagttattggtgagattggttggcctacagatggagcagttggtgctaatctcacagcagcccgggtttttaatcaagggctcattagccatgtgttgagcaacaaaggaacaccgctcaggcctggatctcctcctgcggatgtatatcttttcggtttgcttgacgaaggagcgaaaagcacactgcctggtaactttgagaggcattggggaatcttctctttcgatggacaggccaagtatcgtctcaacttaggactaggcaacagaggactcaagaatgcaaaaaatgtgcagtaccttccttcaaggtggtgtgtggctcacccatcaagagacatgacccaagttggtgaccacctcaggcttgcttgcagtgaagcagattgcacaacgctcaacgacgggggctcgtgcagccagcttggtgaaaaagataatatctcatacgctttcaacagttactatcagatgcagatgcaacatgaaaagagctgtgactttgatggacttggcatggtcacttcctagatccttcagttggtgactgtcgatttcttgtgggtgttactgatata

SEQ ID NO: 46694 - DNA, 534 bp, Arabidopsis thaliana columbia
tatttcgggcgagttcgtggttcgggtttatttatatattgatgtaatttaatatttcgggcgagttcgtggttcgggtttatttatatattgatctatcaaaattttgtatgtaaatctattaaattatttgaaaattttaaaaaattctaaaataacacgagttgttttacttgaatatttaaaaatacataaaattaactaaaatatccaaaaaaattctaatattttctatatataagtataaatataactaatatatacttatatttgagatatgtttggatatctattcgggttcggatttttcaggttttgaagtttagacccgttcgggtattttaaaagtttgggttcggatcggatcgggtttttcgggtcgggttcggatttgttcttcgggttcgggtattatgcccaggcctacttaatttttgctcaggaagggcaaaccttctgaatcatttagtagttttgctttactcttttagattcgccacctaagcttaaaattactctttttggcattttgat

SEQ ID NO: 46695 - DNA, 973 bp, Arabidopsis thaliana columbia
gtagtttttcttttatgatatacgaaaaggtatgttttaaatttgggattattgttaaaataggaacaattttatcaaaatctttgattttaaggcttttacgattatatccttgcatacccctgcaacatcagcttttctttctccttctttcttccttcttccttcattttcacagcttctcctcaatcctcgtttcttataaaatggaaaatctaacatcccaaaaatctttattatacaatcttccattgattcaagaacactaaaccctaagatgatactatatagacaacccaataaaaaaaaattaaacaaattttttgagatttagatgtatacatagtgaaccggcttctttcatcttcgactgcgtttacaaaaactaaaccctaagaaaactagtacataatgaacccaaaaggaaaattaaaggaattgtgaagattcattttcttcctcctttatttccatcaaattgtgaatctcgtgtcgtcttcatgtaacatttgagcattaacaaatctgaagcaaacttgaagatgtcgtagcaattcatagcttccagatcgatgagaaattcatgaaaactgtagatgttatggcttggagaagccacatcaattgaagaagaagaaatcatatttgtctactcaatcggagaagataatataatatggaccaattaacactaacccaacacaaaagcttgaaaacccttttgattactttgtaatagtttaacaattcgaaattgagaaggttaaaatctgtattttttcttccaaagacttttagaattggagattttgataaagtatatggaagtagtttctgtgtatcaaatctctaccagatttgcaagacaaaagtatgaaaaaatatgagaaaaatctaaaattatctttatatttagccaccactcggtcacccacgattctcacaccgtctaaaaacagtcatagacgcatag

SEQ ID NO: 46696 - DNA, 601 bp, Arabidopsis thaliana columbia
cgttcttgacagcttttaagattcataaacacaaagaaaactaaaggataaaagctagatcctttggacaaatcccaaagtgatctatttatagtgaaatgttgaaaaccctagattcactataagacaagagacttgaggcggtttgggcgaatgtcgatcttggggatcgagtagagagggtgctgcaaagtctgcgcctttgtgtctatgctccgagtgatcaatcggtcgagtagatgcttcttcctctcctatccgtatgctcagatgtatggttgagtggggaatgaggaggatccgaaaacgctttgatagatcaacaagtcttgtagagttggttacccttggtcgagtaaatgggtcgagtaggaggggcgagtagatcaatctgcagcttcatctgaggttgccttgatcgagtaagagggtcgagtgaactgctgcctcctctgtggctgcctggatcgagtgaatggatcgagtagaatgctcatctgctatccctcctggttggatagagtagagggtcaagtagagttcttttaagctccttatgcacctgaaaacacacaaaaacatgcaatatgtatgcaagatg

SEQ ID NO: 46697 - DNA, 1054 bp, Arabidopsis thaliana columbia
agcctggaaagtcattagaagttttgtaaagatatatacaagatgttaaattatacccattgtggaatgtgtttagcataccttgtaccaaagaatctctctttgcatctgaagtgctgctcctgatacaacttgtaacctatttggaggtggtaaacgtgccacaagatgcaacaagttgtcgttggattctttctctttatacatagctatcaaatctttgatggccccgagttcatagattctattaaagattttttcatgacgatttatagcagcaatgtggaacaagctttggttcttatgatccaccgtccatatcagatctggataagaacgaatgagaataagtaaaagctcaagatttccagattgtgcagcatcaaagagtagcattggagatgatcccacaaattgcgaaatttcctccactggcaattttataacaaaactccatagctcctctaccaccatatgagctaaagtccgcattttggcttcacgaaatacccctttaaaaactaaatggaaagagttcttgtcaggtgtgatgttcaaacaaaggtttagactataggttatataattctcaaactttggtcacttctgagcacttgttcctactacttatatatatatattttgatatgaaaagaatgagttaactaagaggtgtacttgtgagaaactcgttaccaaacgacctgttcaccccaaggttaatttgatattatacctgtgagtttttggtctaaattcacaaagtatgagaaagactctattcagtataaagggttctaagttcaaatgaaaagcaaggaagagataagagtttttgggtcgcttagagggttcactttatgcgccaagtttgagaaacaaaaggagatctcttaagctctctctcatgacatcacattgtcgatttcgtacaagcaacaagagcagacaaccagaatggtttcttcaatcaagccgcctaagagattgcagcaattcaggcccgtaattgcagctggagcacctgacttgtgtaagattcaagcatgagcgt

SEQ ID NO: 46698 - DNA, 496 bp, Arabidopsis thaliana columbia
  unsure (1)..(496): unsure at all n locations
nnnnnnnnnnnnnnnnnnnnnnnctaaaggcgttcggcgtgctgtttatcacgcccctgcacccagctgtagccgagcgtgccgtcagtcaggcgcacggcggcgcggcgtcagcgtggcgtcgccggcaaaaaaacgttcgccggtgccgcccatccgcgcctgaatctgtaccaggccagtttcagcggcgcggatcacctcatagtcggcggtgatgtttagcgcgttcatgcgtgctgccagttcagccggttggctgtgcgccacaggtagcatccagtgctggcgggtcgcggtatctgcgtgcattcagtgctccatagtgaattcaatcatgtcggcgcgcgtcaggctgacggagtactccgccgggctgctttcaccgtcacggtggttaagggtgcgcaccaagcagctgcgacatattcgggattcaagacgctggcactctttggcctgggcgcggcgggccgtgatccgcgtctggctgcgg

SEQ ID NO: 46699 - DNA, 548 bp, Arabidopsis thaliana columbia
ttccaacaatcttccacttgtactggaatcatctattctcatattccctttgtctctatatcccgatctcagcataaggcaagaaattgtcatccttattctgctagatcatgtttatcgaactctgatttatactgataaaacaaacgactgacattcacctcgtttgagcgcggccacacatttctcattatcaaatccttgataggccccaaagatatttctctgcctttatatgggagggacaaatcccatcttgttccatctttgttccttaaacaattcataacgcgtccaatcactgtctttataattaccttttacggctgacaattgagagagtcaacgcgaactaatccatgaataagaaatcatgaagaactcatgtcaaaggactatactctatagttgtgatgagaaactcttatgacactcatataacaatcttgtagagttctcataacgggtcagtccaatactgtgttttctaaaatatatctaggtgattgactttaatccacatattaatgactccaggaaatttagtg

SEQ ID NO: 46700 - DNA, 1042 bp, Arabidopsis thaliana columbia
acatcacattgtcgagttcgtccaagcaacaagagcagacaaccagaatggtttattcaatcaagccgcctaagagattgcagcaattcaggcccgtaattgcagctggagcacctgacttgtgtaagattcaagcacgagcgtgtcgggcaactctagatccttctttttgtctctttaaaggagttggttgtgttgtgttgctttgtaaggtgtgagagaagtttgtaacagagagagaaagttgtagaaccctaaaggctcaagataagagcaagttcttagtggatttccgagaagatctcggcgagacgtagggattcaagtttgaatcctgaactcgttaattcatgtgtgttcttactttcaagttccgctttttacaaatgagtgaacaacagagtgagttgagaggtctgagattagacaaagtacaactcgagaacgttctaagcctcacattatattaattaaacatatgtgtttatctcttcaaaatgtatagtaacctttaaaccgaaaaagtctacactcttgccattgcgaataaaagaggttactaatcataccccatttcttgattttttgaggcaaaaagtcaaaaacaagtaaacatatgtaaaattcaaaaggttatacaaacatctaactcatctcagattagaggagcaaaccaaggaagacaaaaatctaacccatctcaagaggagcaaaccaaggaagacaaaaatctaacccatctcagatacggtaggacgttggccagtgtggtccgacaattttgagtaccctaggcaaaaaatttaaagaattaattgtaagaaaaggactaaaaaactagaatcttataagatccagcactttcgcaagtgtttacagaaacaggcacttttcctcttgtaaaatgacgatgttacccttgttaataatttgttaatgagacatgatttttttagtgccaaagacagtgacgatgatgagcttcggtcggcgactatgcgtctatgactgtttttagacggtggtgagaatcgtgggtgac

SEQ ID NO: 46701 - DNA, 545 bp, Arabidopsis thaliana columbia
cagagaagaagaagcagcaatggctcgaacggtagtgattctgatcccaaacccgaatccagtcctctctgcatcagatgaatcagtagaatctcctccatcatcgccaccggaagctgagccttttgaaacagagccgcctttctcaggggccggagcaggagccacgcttgatccaaacatggctaatggcagcaaaacttgatcaacctgataaacggccagctgcttatcgctgtagacagagttagccacggtggcgctgacaactccagtggtgatgttaacttggttaccggagctagtgatgttaagagggaatttacggttttggccatctccagcttgcgtgcgtaaagggttactaacggtttgaaactgaggcatggttatgagtgtaggtaagacatggaactgaacaagctgaactttttgttggtcagacaatgagtttaaggttccggatttgaggctgttgaaggcgttatcagtcggggcaaacacggttaagccattactcgaggaagaattgagctgagtgttga

SEQ ID NO: 46702 - DNA, 588 bp, Arabidopsis thaliana
tggaaacattccggtcatcgcggcctcttctttcatttctctgcttgtaagtccaagactctttctgttgcatcaattctcttttgtggtctgataagctcaccagtatatgaaaacgtttgtttagggaatcgttctcttgacgcttattgcatctttggactacttgagacctcggccgtgtgaagcagggtcagtcctatgcacgccgccgtcaaaactccacctcgggatcttgtacacagccttagctttagtgaccactggagcaggtgggacacggttcaccatggcatccgcgggtgcaaaccaatatgagaaacctaaagaacaaggaagcttcttcaactggtacttcctcacactatacgctggagctattactggtgcaacagcaattgtatatatacaagacaatgctagctggaaactagggtttggtctctgcgcggctgctaatttgatcagtttcatagtttttgtctctgggaagagatactacaagcatgacaaaccaatgggaagtccttcacgagtctaatcgcgttgtagtcctgctacagtaaaaggaggctgtatacatgcacg

SEQ ID NO: 46703 - DNA, 1869 bp, Arabidopsis thaliana
cttgttcttgtcggtcctttccccctggtttctgatctgcctctgtcttgaacaaacaacccatctgagttattcttgagaagcttaccactagctcccaactccaagatcttagaccttatggcacttgtgatttcttcgagatgaagtgtagtcttgcagtacttcaatgtctccttcagttgaccaaactgtcttggtaaagacatgagcaagactatggcttgatcttcatctgggactacaacctttacgttttccaagtccgatattaacttgaagaaatcattaacattctcctccatcgtcatattctcactcatcttgtagccatacagcctctgcttcaagtaaatgcgatttggaagagattttgccataaataactgatccaggacctttatcatacctgctgctgtcttttgtttgatgacctttctcagaacattgtttcccaggctcaagatgatggtagatctggcttttcctcttttttctttgaggatcttgtcttccagtttagaagttgcagtttctgggtcttggtttcctccatcactaatctcagtggtagaatcttcaaccactgcttcctcttcttccccgagaccctccaaaagtcccaacatctccatatgagccagtaacttttctttccacaggatgtaatccccatctccgtcgaacttctccacctctgctctgcccgaagacatcttgagcagatcttctcgctcctaggtagtaacctggaagctctgataccaaactgtgaggattagaacgttctcgagttgtactttgtctaatctcagacctctcaactcactttgttgttcactcgtttgtaaaaagcggaacttgaaagtaagaacacacaggaattaacgagttcaggattcaaacttgaatccctacgtctcgccgagatattctcggaaatccactaagaacttgctcttatcttgagcctttagggttctacaactttctctctctgttacaaacttctctcacaccttacaaagcaacacaacacaaccaactcctttaaagagacaaagagaaggatctagagctacccgacacgctcgtgcttgaaccttacacaagtcaggtgctccagctgcaattacgggcctgaattgctgcaatctcttaggcggcttgattgaagaaaccattcttgttgtctgctcttgttgcttgtacgaactcgacaaagtgatgtcatgagagagagctgaagagatctccttttgtttctcaaacttggcgcataaagtgaaccctctaagcgacccagaaactcttatctcttccttgcttttcatttgaacttcgaaccctctataccgaatagagtctttctcatacttggtgaatttagaccaaaaactcacaaaactcctccttggtataaagttcactgaactcatcttcttagtgttacttgacttccaatctcggatctgtagtctccctagttacttgagaccctgagtagcttcagcgcttcttgaagcttactcactggaactgtttttgtgaagatgtctgcaggattccatgttgttgaaatcttaacaacgtgaatctctccgtctgctatcttctcccttatgaagtgatacctcacgtctatatgctttgtcgtctcatggtggactgagttcttggacaaagcaatggcactctgtgaatcacacataacttctactgcatcttgttcaaaccccatctctgcagctaaccctcttagccaaatggcttctttaactgcctctgcaagggccatatattcagcttctgttgttgacagagccaccactctctgtaaacccgacttccagcttattgtattcccac

SEQ ID NO: 46704 - DNA, 469 bp, Arabidopsis thaliana columbia
ttcctaagaaaaatcagtttgagaccattgttcttcacttcttttgttctagtgtttattattaaaaacaaaaatctattttaatattaaagtttagatctatgattactgttgtcagactatgattgcgatttagattcgataggaatatttcatatttaattcggtttggtttccgaatcttaaattgagcaaatcatacttctaccctattccagttccgtgagactcaagtataatatctatgtaatgcaaaatgaattacgagtttaatattttaacatccatgaatttttgtaatgcttggttacagtatctgatacgttttttatatctatttcttttgatatttgaaaggcttgcaacgaggcaatgtttccatgtcgaacacctccaaattggtggacagaggaactctgtatcttagacgtcgacttcttctccgatgtcgtatcttcaatgaagcaga

SEQ ID NO: 46705 - DNA, 605 bp, Arabidopsis thaliana columbia
cttctctaagttccgataagtatgtttcaaaactttatttcgaatttttcgacaagaatccgacatctaagtcaatcgcaaatgatgccagtcactgaaatcgttttccgatgcttaacaatggtttttaacgatgcttaaagatagtttttatcgccgccgtagattgacatatggtggccgatttgttagatctatttgatttgatggctgagttaacgtctgttttgccgactgatttatgatttatcaattcatctgtgtcaatgtttgttatatgttgtgattgagttatggtttaaccttacatcggtggctgagtttctgttacgatatggctgagtttttttatgttattgctgagtttctgtttgctatggctgagttttgtttatgttttgactgagattttgttatgttatggtttgactgagtttctgttacgatatggctgagttagatttatgttatggctgagttatgttatatgtggctgagattggtttatgttatgactgagttatgttatctatggttaagttaggtttatgttttgcctaagttatggtatttgtggctgagtttgttttatgttatggctgagt

SEQ ID NO: 46706 - DNA, 422 bp, Arabidopsis thaliana columbia
cgtttttaattggaccattggaccttcatctaagctaaacaatcgtctaatcaataaatatggcccattagcacttcttgttttgtctttttgggcccaattcggtttatatagtaatcttctgaggtttcagtttttgagaacaaaactagtcgagtgagagatggaaaaagggacgacaacagaaccacatattttcttgtggagtcagaggactgagaacataagaatcataaacttatgcttaatgcataacacttacactttcttgaagtatatgaacttaagacatcccctacaatttcctacatatgtctccttcagtttctcttcagagaatccactgattatttcaataaactcttcatctctgtgttcttcctgaactatcagaacaacttgatcttttggtggaaattttc

SEQ ID NO: 46707 - DNA, 618 bp, Arabidopsis thaliana columbia
gtagtttaatttctgcatattacgtaaattttaaccttaaatctacatataaatttttgcagccattttgtgaaataaatcatatagttgagacttatttacaatggctgccactgaattttaatgtttgtttttgataattagaaagagagtcggctatggcctatgggcaagactggccaagcatgggattgtagtggttatggctcatagtgggaaggtgtttgagtaaccatgtttacatatttttttaacttgtaaacatactattactgaaccatatattattttgggcttgtggtcttcattttgttagggccatttctgcttataaacaatttactgagtataatttcaatattatttcgcggtcaaaaaaaaaaattcaatattatttctgtgtcaagtttacattttatgaattgatttccaataaagcatagcataagcaaaacaaaatacttgggacttgaatgtttcattgcattttaatttttggaatatcagtgtcataaagcatagtgtgtttgcagtaacccactggaaaaaaaatcatatgtaaagagtgcttttactaggcccagcgggaaaaaaatattttgcccaaaagttacaaaa

SEQ ID NO: 46708 - DNA, 278 bp, Arabidopsis thaliana columbia
caacgagggatcgttgaaaaacaatggagaaggtgtggagtgtggcggaggcagagaccacgtgctctctcttcacttcttcgccttcatcttcttccgctcttcatcatctcccattattaactcttctgaccccactatccttctcctctgctaactccaacctacactctgctctcttccctctctgaaaacccttactcgctccctcgtactcaaacaggctctcctctcggtcattcgttagctaaagacgcacaagtatggcctactgggat

SEQ ID NO: 46709 - DNA, 617 bp, Arabidopsis thaliana columbia
cgggaaaatcacgagtttacgtttttggcggaaaaatcacaggttttgttttttgatgggaaaattacggatttacgttttttgcggaaaaatcacggttttacgtttttggcgggaaaatcacgggtttacgttgttggcgagaaaatcacgggtttatgttttttggtggaaaaattacgagtttactttttctcaatttcatcgcttgtatatttaagaaatttggaaaaatattgattttattaaattgttttagatgtgttggttaagcttaaattgacattggtttagagattttagttggtttaattcaattttataaaatttgatgggttaattgagtaaaccattgaaaccattaaccattacaacccaactcatttgactcatcaaaccaattgacccaataactcatttgacccattaactcatttgagtcaaaaaaatttaactcattagggttcatgggttgagttgagttgagttgcccataaattttgacctattttaaccccctatacgagatataaagatttatatcaatttaaactactttccaaaaaattataattagtaattacataggtaaaacaaattaacaaaaaaaagtttac

SEQ ID NO: 46710 - DNA, 564 bp, Arabidopsis thaliana columbia
tcctatagtctgtgataagattttgtcccagttgattcttctctacagactttgaaccatacttttctctatagaaaggagaccttgcagtcttcattgctcctgttatggcaaagccaaaaaacaaaaacaaaagtgcgaatcaacaacacagtaattatctacaaattctctgtttttgaaagcacgacttaatcctgtttctttttcccaggccattacatcgtctgtgataacagttccttccattggtttcttcttgtgagaaaattaaaccagcaaataggactttatatagttaccggggtgagagatgatataacttttatgtcaaaaaaatgaaccttcttggtgttatcttatctacgtatgtatgatgagactcttatgtctgatttgttgtgtaggaaatcacatggcaacaacttgattatcttcggacaacaagtgatgcagatatatgtctaaaatcgtacatggtttgcacttttgtgttgtgagtaatattttttatatatcatccacatataattgggcaatttcgattatttgtgcatacaatat

SEQ ID NO: 46711 - DNA, 522 bp, Arabidopsis thaliana columbia
cagttactttgtctagcttaatattaatcatcataggtttattgtgtgagcaaggatagcttattgaaattcgacacttaagtgctcacgacgatctcttatttgagggattaagcttaaggataatttgagctatatcaagtttgatacatgaaaatatgctaaaacaatgtctaaacaaatcaatttggtctcataatatatcatggagttggaaaaaaaaaatggtactttgaccgattgtcctgcttcggtggtcggagggctctctttgggatttccgaaaaggtatcacatgccaagtttggcctcacggtctaaactttatggcgtcatatggttcaaacccaaaaaaaaaaagacggatgcagaacgaggacttcccgggaggtcactcatcctagttttactctcgcccgaacgcgtttaactacggaattatgatgggatacagtgtattagtgctggtatgatcgcgtacgttagtacatgcaatgttattgtatttatcctttttgcgga

SEQ ID NO: 46712 - DNA, 499 bp, Arabidopsis thaliana columbia
aagaagattgcaaggggtaggacactgtcttacccgcgagtatagaatggtgtgtcatgtgatgaagggagatttaagcaaagacttggtggaggttttgacagcttttctgattgtatcttcaacctgaaattttactttgtagacaagacaataattaaaaaatcatgttttacttatgcaggggtgcagagccatattgatagacaaagataggaatccaaaggtttaacaaatctctccatttagtatttgttgttatgtcatattgttgaaattatatatgttgtattgttggaattatagtgggagccaaggcgattggaggacatgaaggatagcatggtagatcagttctttgagagagtggaagaagaggagcgatgggaggatcttaagctttcaccaaggaacaacttgcatgctttaagaattgcagcaaagttgtgaagtagaaaaatgtgattggtcagacattagaccaatgacctaaccaaga

SEQ ID NO: 46713 - DNA, 469 bp, Arabidopsis thaliana
cgtataaccaaatacttaggaatgcgttatattggtgtttattcacaggaggtaccaggcaatgatggggatggcgaagtttcagcaaaacataccgtctctgactatgatatggacaatatatatttgggtggagcatcttcaactgaacaggtaactcacttgtgtaatagtcatgttacaatttttgccttattgtacgtacataaagaaatattactgaccaattgtatggttttgatttcgaaggaggaaggagggaactcggaggttgaagaagattcttcaaagttacaccaaaatgtctgtgactctgtaatggaagacaatgtcgatcgtgttccatcaccatctcaccaggtaacttgtgttcttattattttattattgtatgtacaaaatattttatgttcttaatgttcttactttcgacacaacagcccgaacatggcattcctgatggtggtac

SEQ ID NO: 46714 - DNA, 562 bp, Arabidopsis thaliana columbia
ccacgaaaaagtccaacgtttttacccaatctagtttctcccatagcaacattgtcattttcatgttcttgtcaatgataggaatatatactcttgcatcaatcgaatggtcaatctgactttaagaacccgacatttaacccaatcaatcacgcattgattgacctaatctgtgaaagatacatcaatgtttaattaatcagacatttcttagacaataatgaagtagtgatgagtgatgactcgtctaaaataagcacctctaaacaattttcaccagttggacccaacgaaatgaatccttagcttgaaacactgtgtcagcctcagaatcagtaacttgtaagcctaaagcgcaactttaaagcttttcttaaagaaccatgggtaatacaccaactaaatggtttcttaaagaacgaaaaaaaaacgcaataaaagaatggatcagttctgaagatttcaacattcataaaaaaaaatgataataaaattgaagttacaacatcagtagtacaatttccatcacggtggtttcttaacgccaaggatcatagattgt

SEQ ID NO: 46715 - DNA, 563 bp, Arabidopsis thaliana columbia
ccgaatgagtttaaatcatactgtaaatgattgtctttgcgaaatatgataataagtatcaaaattttcttttattcttatctccaaattgttaagtacaaaaggaggtaaagcaagcgacgatctggcgtttggtcattgagcagggacctgctcgataccgaagaaaggttaaactgtcaagtgagcaagctgatcttcgttgatgggggatgcgatatctatttcccttattgaagtttcgcctttcagatggaagggttgaggtggtaattgcgtttgcggaggtgactgcctgcatacctggttaagggattaagcccttttgtgatttgattgaattggtggttctgctcttgggggagctgcctacgtatcctgccaagggatcaagctttatcgtagtttgattgtttttgagtacctattcgtggtatttcttgagatgcatggcattccaaggccgtaactcacgtactccgttgataacttttacgagcttatagacgccgcaacgtaccacctcggtgattcgatagggaccttcctagttagttccagtt

SEQ ID NO: 46716 - DNA, 545 bp, Arabidopsis thaliana columbia
tgactccgcagtaataggaaatcaaaattttaatagacaggaacaaatggaatcttcaaaaggagactttcatccgtcagcttctgaccatcaaagtatattggtttccttatcaacaagatgcgtatggaaaggatctgtgtgtgagcgggctcatctactccgtatcaaatactatgggagctttgacaagcctttaggacggtttttaagggataatctctttgatcaggtaccattcattttaagtgtgtttttttatctcttaatctgtagcacaccattctccttttagccaatggtgaggaaactgaactcctgatggaaccaggtggaccaactaatccaattaaaattttatggttacgcactttttcccatttttttgacatgaataattgtggaagtaattaaataggtatttagagtcataaaagcaatccatgaaatagtcggagggtaagtttaagaaagagaacgactggaaggaaaagcagaaaaatggcattaatatggtttaaagattccaggataattaagtttgt

SEQ ID NO: 46717 - DNA, 295 bp, Arabidopsis thaliana columbia
tgaatagaataggaagtaggtaagacaacttatgctagatttagtaatagtttaaggactagtggtgcgtgaactagcaagctctatcaggtcaggcgacaaggtctaagttgatcgtccacccatctacaacgtcgcatgatgtctattaactgcttaagaaatcatccggtgtaatttcgagtgtaaccgttgacaagggtcgcgagtcagttgtcgagatcatctccaatgtcatagaacgcatttgacctgtgggacgtttggactggcatacatccggaggctcgaattc

SEQ ID NO: 46718 - DNA, 1303 bp, Arabidopsis thaliana
agactctataaattagtaacatttcactataaattaacaaaaaaaattggtctcaacattattaatttgtagagattttaatgaataatgtatttcatttttggctacattaatcttgtgttcacacatttcacaacgttacactatatacataaacatccacaataactaaattggactttagcttttacatttcggaccatataacaccagtaacagacacatgcttatcaattcccccccccccccactcaccaaattcctcccgaaaatcgagtttgttccaaccacaaaatagtagaaacgcacaaaacgcgttttctgggccgttagatctacatagaatcaaaaaacaaacaaactgtacttttgaaccgttggatctctaaaccaatactaaaccggaacaaacggtggaacaaacgtcgatgactcgtaataaaacggcgccgcgggatgttgccatttcttgaaaaccggcgttttctcaaccgccaccgccgtcgactgatttttctcaaccggtggttggtctaccggtgatgattcgggagaaagagctaacggcgagaggagaggtatagccgtattccagttattcgccgccggagtcgccggaacgatttttaacgccgggggtcgttttagtagacgactgggctgccgccgtagatcaccggaatctgagctgcagccctgtctcttcatcgtcgtcgacataaacgcgaaagaaatcgagttcttgaagaagactaaataagcaaaaagatttggaatcggaaaaagctaaaaatgagatttgtggtgttccgagaaaaaaggttaaagtttagatttttagagatgtttttagaatctgtgaagcttaaagattcgtgttcgtgtgtgttgtgtatttatattaagtcacaaagacgtgtgtgttgagcatgtaaagagattttttgtggtcaaaagtcttaagtctgaagatacattgaaagataggaattagctgtttttttaattttctgtggctttgctggatttccctatctttcggtttctttattttaatttttattttgttttccaaagagaggaatattctctgtttctttcacttgtttttctgtatttttaatttacttcgatttaataagacttatctagattttatatcatcatgaacttattagtgatactttcatttacgataggtattcaaatcaatactggtaaaggagttttttgggtatgttttaactgataaaaaaagaagaaacataaattttaaatatattttgagtatgtttttgttaat

SEQ ID NO: 46719 - DNA, 635 bp, Arabidopsis thaliana columbia
agaggatctcggaatcatataagtgcaaggacctaaagtttaaatctgatcaagcattgaagctgatggaaagtggatatcgtgtaaaggtagtaattttcttagtcactggacctcttcatactgctttctcatagactttcgtgggaaactcctgaaaaaagtgattattttgcgattatagctgttctgaatgctttggtgtaaaacaaagccccagacatatcgacgcaatgctctcttttttaatacttgatttgaggtgaattccatggtgagcaactttttaattgtctcgctctttcttttctttgtgtaacagtgccttgcagtgcctgacaaggacaagcataaggaacttgaaccagaaaagctgcttgagttactatttcgcttcacttgttttgtaagtcttatgacttcttctattcgcaattgtttcctagttttatcgtccttgctttggttcataattatatttgtacagattggggatgcacttgtggaatcttggcctgaggcggatagaaaaggcgcagttgttatagttagacacgccaagtttggtccaccaagaaaggaggggtgaaataatgaaggatattgacataaaatctgcaagagtgaaagaagaa

SEQ ID NO: 46720 - DNA, 475 bp, Arabidopsis thaliana
agatcaattctgtaaaactaaaatgaaagccaaaacattatttgctcgtttggcagcggttacatggctccagagtatgcaatgagtggcgaattctcggtaaaaaccgatgtatttagcttcggtgtactagtccttgagattattaaaggtaagaaaaacaattggtctccagaaggagacaggctcattatcctccttaagctatgtaagtgaataaaactcttgctttgttttttttgactctagactttgagtttggggttgtaattgaggactcatatattgtcttgatttcaagtcatatattgtcttttatacgtataggtatggaagagctggagagaaggggaagtgttaaacattgtggatccaagtttggttgacacaataggtgtcagtcatgaaatcatgacatgcattcacattggtttgtcgtgtgttcaggagactgcagagagtagacaacaatggc

SEQ ID NO: 46721 - DNA, 544 bp, Arabidopsis thaliana
cggcgatgaggcatgtatactcaagttccgatatgagaagctccgcaatttttgctcaaactgtggaatgattactcatgaagcgaccgaatgtcccctcggagccaaccttcctccgcctccaccatctgatgatgaggacgacgaaccagacgtccacccaggatgaatgacggacaatcttaatgcagaccaagaacaacaacttaaccatctcacagatagtggtgcagaagaagaaaatcaatcttcctctaagaagagaaagatggagcctactccttcagcagaacacatctctgtgttcccacttgtgtgttgtgagatgaaacaaggttatggtacaaaggaaacagaacataaggttgtcaaaagacagaggagggaatcggaggcacttgaactacgtaactggtttctgatgcaaacgactacaccaacacaatcatcatccacagcagggagattcctcagaccccccccaacaaccaaccgagaaggcacggtgggccagaagcaccggagcgccatgaatacacctttt

SEQ ID NO: 46722 - DNA, 152 bp, Arabidopsis thaliana columbia
ctgaaatagctttaggtttctactaaaaagacaattatagacttctagttgtttttttttttttttaagacttatagttatcctagatttgaggaaataaaaaactttaaaaagcttattggaaactatgattgtttttctttttcttttta

SEQ ID NO: 46723 - DNA, 237 bp, Arabidopsis thaliana
ccatacaagtatggtaaccccatgaaagtatcccgtaactaaatccagagagtccctacacatttacatacatacatatattttgattaaatatataaacaaaattactttacagacaaacattcaatgctataactagcagcactatatcaggcggtgtctcgaagtaaatgcttcattcgcagggcaagaagacggaggcaaccggaactctggaggtataggattgctgccaga

SEQ ID NO: 46724 - DNA, 541 bp, Arabidopsis thaliana
ggatgaagtactcttctttcttcatatgttttttttccaagccacaccaaaacgcgaaatgtcaaaagccaaacgcgacagattaaggaactctaaaacttttcctgaagccaaacagggagccaagaagtgccatcaataaaatcaatggacaagaaagactcaacttcttgtttggtaagatctttggcccagtcagatctcttttgcctctcagctcctggtccatgacatttatactccccatggtatagattcctgattgatcaaacctcaagagcattagtttatctattaataagtcgtctaaattaggttcaaaaagttaatctaatagaggactaactgggtcgagccatggtaactccagtttgtccaaccatcaggcacaacggtcttggacaagtaagtcttggcaaagatgactcgagaataaggtcctttggctcggccacagtaaacctcatcaattccgtacactttgcctcttatgaacacgtaacccgttttttctctgcgctttcctatggtgtgctgtgat

SEQ ID NO: 46725 - DNA, 464 bp, Arabidopsis thaliana
  unsure (1)..(464): unsure at all n locations
ccttaagtgccgtgacactaggtccctgagaagggtaatttcttctgagggaataattcacgaagatgctccattttctactgcatcgtcccaaagtcgatcaaagtattgacgtagaccaatgggtctctttgcatagtaagtccctttggagggcgaaccggagaatctggaatccaaggattagtccaaatgcacgttccaaatccagagccaatagtctttcggattccatatttaagaatatttttggcggccaacatgcttctccagccatacgacgtgcgattagacagtaatctctaatggactacaatagcggaagtaacggtctntaaggacccgactaaggagagattgtggaaatcttagtaatcgtcataattactttgccaacaatgcgagattaaaatcttctaaattcctaaatcctaggccgacgtctgaaaatgactacagatttg

SEQ ID NO: 46726 - DNA, 524 bp, Arabidopsis thaliana
ccagcagcttcttggttgccttatcatttatacgaacactatcagcatcaaactcaacagagcaagggtagtcacttgtgagtttagaaacagatagcaaagatttaacaatatctgggcaaacaagcacttcttttaaaggaatcttacctgaagaagaagcaatactacctgaaccagtgtgagtaatgggcaagaagttaccatctgcaaccatgatagagtcagaaccgtggtaaggctgagactgttgcaggacatgacggttgttggtaacgtgagcagaagcagctgagtctggaatccattcatgtccatggtggtctgtgacatccgtgatgcgcattgtagcaagagccataggtaagtcttcatgttgatagctgttatcgaacctatgccaacacttcaacgcatggtgaccagcttttccacagatttgacacactaaccctgagtttccagcttgagacccagaagtaggggagatttgttgatgaaaacacgacctctggtggagaaag

SEQ ID NO: 46727 - DNA, 724 bp, Arabidopsis thaliana
tttcattgagttattatttattaattttgaaaccataaaaaaatgatgttgaaacttgaaacatttatatttgttgcataaacaattaaacatgtcaagggtggtccaccaatacgtaacatgaacagtccgtcttaagagattccaacttccaatcccaaaatattcatcaattctgtaattgtttagtcagatttgaaataattgcgaatagagatatcttaaaaacttcattcaatagcaaacatgaattgtataacaaatgtctatttcatctatctgtcaatgtttaattattgccacactggtgatgcatatataacaaaagcgacctatatagattaaagtccttttataacaggttcatatacacccagtaaccaccaatacacatacacgtacatatatatattattgccgtttgagagtcaaactcatacacgactcactgaaggttgatacaaaatatcagcatataataactaaatatatggtcgaaaactacttatagagtttggtaggtcgtattttcaacattttaaactcaatttttatgttgacaataacaaaacaagaaaatcatatcatatatctcaacatatagagtctaacttttttcgccaaaccaaaagacagaagaaaccaagaaacaagaaaaatgggtgttcttgatcacgtctctgaatatttcgattgttctcatggaagctccaagagacacaaa

SEQ ID NO: 46728 - DNA, 522 bp, Arabidopsis thaliana
aactacagaaatggtaccaagtgggaaactattgttaagacttcctacatgcacagagatcatatccgatattccgaagtaagcatctctcattttcacatatacagtgctttaagcaagaatcagctagccatctttggtatttacttacttcaattttgtgcaggaactggttgctcatacatctcatcaatccaaaacttgagaccttgatgcttctcgagttctgacctccccgagatcatcaggtttatacctacgtttcagctcaatcattagttatttggtagtcatttcatccactggtgaaaagaaaatatgtgcttgttttatgaacctcatttacatgtgcagcttcaatattaactctaattaatgaggcaaatactagtaagacttaggatgaagaaaacagtgaactaaaggaaggcagagtaagaatttccattaagctcgtctcttgttttacatatatatacaaactatatatgagcaatccccaaaaaactggctctgtgacag

SEQ ID NO: 46729 - DNA, 512 bp, Arabidopsis thaliana columbia
cgacctgtgagaatggaaaccaaattccagataaaatagctatatgtggttttttattttcctactacagtacttaagtacttgtttcattattaatgtcaagaaaacttgattcgtataaatcgtgttcttggggtttaagttacaaatctatctgccttatatattgactacaactcaagtatagagcttaacttaggagtaaatacttaactaataatccataactaataattcttaatatatatatagagagatcaatattcaggctgcgaaaatataattggaaattctaggttactcatgaattttgtgtaagtggagtataacttgtgaatatattaatgtaatttccactaaacggcaagtagttttatttgtgtgaaatggaacggcaagtagtttcgttggtgttgaaaccgtaatattctattgggctttttcacacggaagcccatctacatattttttctagtggtctgttgttgcacgcaagagcactaagtttgaaa

SEQ ID NO: 46730 - DNA, 610 bp, Arabidopsis thaliana
caatcagatctctctttaggattcggtagctcccacgctttacctctacctcatcctcctagaatcccaatcgctgatgactcaatcacgcttcagattgattccagcttccgtccttcgtctaatcctatgcctcctgttcctcttcagttacttgagcagagattcgatgtcaccggatcctgtagccgagttgttgaggaggacgatgaggttgttggtgataatgatgatgatgatcaaagagaagaggagcaatttattctcttgggtcatcctatgaagttgaaacgaggtagaggtgggaattcgtattcattggcatcatcaagtccttgtaagagatttgtagttgattcagggattgaaagtaggcgagctgttgttagagcttggggtaatcagtcgattgaagaagctgatcctgagattcatgagtttatggaaaaggagaagcagagacaatttagaggtattgagcttatagcttctgagaatttcgtgtgtagagctgtgatggaagctttaggaagtcatttgactaataagtactctgaaggaatgcctggagctagatactatacggggaatcagtatattgatcagattg

SEQ ID NO: 46731 - DNA, 519 bp, Arabidopsis thaliana columbia
gataatagccaaaataagacaaggttcgtttttgtaactattcttacatttcttccaggagaatatgcaaaagattttgcacagggaggtgaacgaaggccaacctctcgtggacattcttgagctatatcggattcacagacaacttctttttcagtcatacatgtgggatcaccgcttaattaatgcatctactttacataagcttgagaatagtgatgacacaaagagagaagagaacgagaaacctcccttggctaagagccagacgctcccggagatgaatgctgggaccaactctcttcttactggctctgaggttaatctgaatcctgatggtgattctactggtgacactggctccttaaataatgttcagaaagaagcggatacgaattcagatttgtatcaggaaaaggatgatgggggagaagtttctccagcaagaccttaccagatacatcttatcctctggaaaataaagtcgatgttcgtagacacagtctgatggccagatag

SEQ ID NO: 46732 - DNA, 923 bp, Arabidopsis thaliana columbia
acaatatgttccggatgcaaagcattcacagtacctgacaagatagtgcagaaatccacaattaacaacaaaaattggtaaacttaaaaaatcagacttttgagtttcttagacatgcagcagaagaaaaggaaaagatatgaacatgcaatcatacaaacaagtcaccaggaaactaaataaactacaacataacaaaatttgatgagtgtcaatttctaacacaagaatgggaagacttacaatttcaagcagcgtgagtgtttacagttacactgcttcttcttttgaggggttccatctctaccttccacattaggccttggacctctagcttttggagattccggtatcctgtataaaaagagagaagaaaattttgaaattttcatcatccattttaaattagtttcaccaattagtctaaaaggattaaactttaaaccaatttcatcatccccaatcaaatttgtacaaactcaattgagttaagataacacaaaaagtttgaatttttcaatcgatagataaaaacttacggatgcctaattggcgcgttaacgatttgtgactgtgacggcggatttgacatcgtcgtcgccattggtaacgtcggtcgtacctgagtaacctgaccgattgctatggtcatacccggccgtatcgtcgaagggacagagctactaatgatggtttcaccgacgtagctacgacggtaggagccgctggtttagacagtgaatgttcatcggagccaccagtgaagtcgagctgccttgctggcttcttcgtcggaaaaccctcttcaacaccgtccttttttggcgggaattcgcctcctccgccgtcttcacccatctctcaaagattttccaatctccaaaaccaaaaaaacccagaaattttccttttttccacagttg

SEQ ID NO: 46733 - DNA, 399 bp, Arabidopsis thaliana columbia
gtaattgatcataggcagctattggtggctggcattgtttagttgtcgatgatcaaggccgagcatatgcttggggtatgcattttctctctcagcttctttctaatgattgtgacctcaatgatcttaatgatcttaagttgttcacctttttgttatataatctacttaggtggaaatgaatatggacagtgtggtgaagagccttccaaggatgagacaggtaggcctgtgcggagggatattgtaatacctaagcgttgtgcccagcaacttacagtccgacaggttacttatgctgctaacctctcttcatttacctcaatttttagttccgtttttttcctgtctaaaccatctgttctcgggtttgtatgattaaaataacaggtagctgca

SEQ ID NO: 46734 - DNA, 582 bp, Arabidopsis thaliana
  unsure (1)..(582): unsure at all n locations
ttcgaaatgagaagaggtatgttctagctgggaggttgaagactagatttacaaagagagcacattttgagatagaaaagatggttgaagggtcacagttttgcatcagatggatggccaggaacaacaaacatgagataagcttgaataatgtaatttactcagttgatatgaatgacaatacatgtggttgtaggaaatggcaaatgacaggtataccatgtgttcatgcggcatctgtcattataggaaagaaacaaaaagtagaagactatgttgttgactggtacacgacacaacggtggcagcaaacatacaaagatggtattgcacctgtacaagggaagattctatggcctagagtgaataggtttggagttttaccaccaccatggagaagaggaaacccagggagaccaaacaactatgctaggaggaaaggaagaaatgaagctgcctcgtcttctatcaccacgttgtcacgcttacaccgagtgatgacgtgttcaaactgcaagcaagaaggccacaacaagaaaggttgtaagaaccagtgggttgagggtcaacanaaagacaagg

SEQ ID NO: 46735 - DNA, 556 bp, Arabidopsis thaliana
gagtgataacgaatgctcctactatttgaaaacggggcaatgcaaatttggtataacctgtaaatttcatcatcctcagcctgctggtactactgtcccaccaccaccagcatctgcacctcagttttatccatcggtgcagtcacttatgcctgaccagtatggaggtccatcttctagcttgagagttgcaagaactcttcttcctggttcttatatgcaaggcgcctatggtccaatgctattaacccccggggtcgttcctattccaggctggagtccttactcggtgacctttttttttattgatgtatcatcaatacatttgttattcaccacagtctcttactgtctcacttttgcttttgcttcaggcacctgtgagccctgctctatctcctggtgcgcacagcctgtgtggggcaacttctttatatggagttacacagctcacttccatcactccttcgcatcccggggtttatccatctctgtcctctcgtacaggtgttatacagacagaacaggcctttccagagagacctggtgaacagag

SEQ ID NO: 46736 - DNA, 553 bp, Arabidopsis thaliana
gaactcaaaagaaccaatcccgagggatattgtttacatatgtgacatgatgtgattcggtacgaatttttcgtgccaatttatccgtgtttacatttgcactacgagaaattaaagataaagaaaaatttgtgaattcttccctgttgttctgcaactcctctaaatacactgaaaatgtcggccattcggttggggaagacaccatcttcaccaagtctgaacagtctgtaaaaaaagctacgtcctggttatctgctccatttatacacttcatcgcccaaagaagagcttccacttcggtatgtaggggggaaagacttctacgaacgttagtggctcccattgttggcgactctccaagagatgatagacagaaccatcctgttcctgagaactgatcacttgctttccaagatctatcaataaaacaccaaaatccagaaaaaggtgaatcttgtgataaatccctaacccgaattggagtttctaaattcaaagaaccatgactttcagtatgaaactcaacttgagcctcctgccacaattggac

SEQ ID NO: 46737 - DNA, 607 bp, Arabidopsis thaliana
cgagggatgtagagaaggacattctaagttatctttggcatctaggatgatgactattaaagctgataataacttaagtgaaaactctatggattcatggacagaattaattaaggaatatgttgtgtctttgtgtttttggcctgattcagttgtgttgttggtctgaataatatcattgtattttcggcctaagagttttgcattatgtctatatgtatcgactttgctttgatcatgtttgcatgtattggttatgagtatgtgacaggttgctcctaagaagaaaggcaggatttatggggctggttcattgcagcatgaggcgtcttcggcgcatgccggaccggtgcttcctcgagatgatccggttgtgctttcccagaagctggctgctgttgaagcctcattgcaaaccaggctgagaagatcccagttttgacgcatactttgattaccttgccaagaaggatccagagtttgctgccttgtttcgagtcagatcctcttcaagaactgaaccagtcagctccaatccacctgatgcgcctaatgccacaactgctgggatcggacctgaagctgtcgaacctgaggctgttgtagc

SEQ ID NO: 46738 - DNA, 548 bp, Arabidopsis thaliana columbia
ccttctcataacgaaaactaacacttccttcttaacacaagctttgctataacggcttagaagaactttccagcacaacttctactgaactcttacatcacaatattgcctctacttttttttttttcttcgatccttgataacgttaacattgctactcgtctcttaagtataatgtcagagatcctcaatgtgaactagagaataaactaatgttaatcgataagaacttcttgagaggtttgagccaaaagctatgaattggtatatgattttgactattaactaaactaatgttctaaattgacggtatttaattaaattaatgttctgttaggtgatatttcgtgttgtggcaaacaattataaagttatttaatttttattttacttaaattaataatatatatgacgagggggtggtcactaggttagatgagtttttggtataatagcaatatgtagataaaacaattaaaaagatttgctatttcagaaaatctttgctagtaatataagaataaagatataagatttgattttgatat

SEQ ID NO: 46739 - DNA, 605 bp, Arabidopsis thaliana
gcacctggagaccttgcactcgagtatattggttgagtatgagtgatgtttaaaaccccaaaaaaaaaaaatcatcattttactcgaccaacagaagatacagcgccttatatggagttcatcaagtttatagaggatttcgggattacctgaggtttttacagtcaacagagagtacaaaataaagacaaatccaaaaaatggagatggtggtactcggcttggtggtagagtgatccactgaaggtgatgtggtggaggtgatgatactcgaccatagggtcgagtaatgagatcgagtggttgtcttggtggtactcgaccacggggtccgagtggtgatgtgaagtgatgagtccatctactcgaccagggggtcgtgtggtttgctgaagtcgtggaacatctactcgaccaaggggtcgagtgttttgcagtgatcaggtctgcttcttccaattagctcgccaacgactccaaatcacctgaaaacaacacaaatatgcaacatgcatgcaaaactatcccaaacatgcaaagtgatgacaaatgatgagaaataatattaaacagtggtgatatgatgcaatagtgatacaaatgga

SEQ ID NO: 46740 - DNA, 585 bp, Arabidopsis thaliana columbia
ttttttctatattttaaccaaatcttggctatggattatcaacatctaaaatatttgttatttaaggagtcactgtctccatataagacttgagcataaaaatatcttcataaaaaaaatgattgtttgccatattataatcttcgccatgaggaacccaaatcgaatagttaaccatcaatccttatttatataagtgattcatcaagttcttcaaagaaaatatttttctattttcacatttaacacaaagacaaagagtttgctttctcataaaataaattttgaatctttccaaatcttatttaattttctaattcttgacaatattcgttttaaatatcaatagttgtatgatcgattctttcgtaaatataacggcttgctgctagaatgttgttgtctaacaacatcaagttaaaactatcggtatcaaagatatataatctaaatatgcatctataatacctatgcattcaaaatttaaacttctcaagtaatctttgaccatcttcgaccacaaaagtaggtaatgaaagattatcctcattgaaaactcaaatcacataaaccatcgagaagata

SEQ ID NO: 46741 - DNA, 552 bp, Arabidopsis thaliana
ctagaagacagtgtgtgtgactgagatggagtctaggagaaaattaaaagttttattatgcgataaactttagaaatgcacaagtatatgataatgttccaatatttaaaaccgttttgaaatcttgaatacctcaggggattgatattggataggcacctccattgtcttcttgcgctttgatctagaagaacgtgcaacaaaactggaggagagttttgtggaccgcttgaatctgacagcttttcttgtattttcaagcttcattacacggtttgatagctctttcaccttagtttgtagttcaatgaggagcatggacttctcatcatcagagagcttgagttctggtttattacgagttgaatacctttgcttggatttgggagcctcagacttcacccctaatttcttcttacgatccacaatgtgctttttgtgaaaccagatagcttcttctttgggattgaaattggaggcaatgtgtcaccagctcctggccaatcgctttttttgaattgatgagatgcgagtatcaaatcatacatgtat

SEQ ID NO: 46742 - DNA, 558 bp, Arabidopsis thaliana columbia
tgtaaatctattaaattacttgaaaatttcaaaaatttccaaaacaacacgagtagttttgcttgaatatatttaaaaatatacaaaattaactaaaatatccaaaaaatcttaatattttctatatagaagtataaatataactaatatatacttatatctcacatatgtttgggtacctattcgggtttgggtttttcgggttttgaagtttagacccgttcgggtattttaaaagttcgggttcgggttcggatcgggttgttcgggtcgggttcgggttggttcttcgggttcgggtattatgcccaggccttagatatatcaaaaagtttaatatacgacgttttcctctaatatggatatatgcaaatgtaaagagagaaacctaaaagtgttgactcaaaagactatgtaatttatgctttctatgttctctttcgatgtgaaaacttataaagcaaatgagtagtttatatatttgtaattcagattatgtgaatccaatatttaacgatgcgcctatcatgatgtgattggaatactagattaggagag

SEQ ID NO: 46743 - DNA, 895 bp, Arabidopsis thaliana
aactctgattacgattccgaatcctctcctcggatctcctccgccgcttctcatgactctgaagaactctacggtggtggtcgccgccgtcgatacccattccctgttcctcggtttccaatgggagcttcgaagttcgacgtttggacctctgaacctgcttctgtctctgagaggcgttccaagcttttaaacgaaatgggtcttagccgtgacccggttctctcccggttaaaacccgtttcagattcttccagctccaaagataccggagccgccggcttcgagatttctcgatcgatctcgtgtaatcaattggctcggcgagatcatggagagtgttctgaaagtgtcggcggttgtgcttcttgtatcgtgagatcgaaatccgacattaccactagccaatgtggtgatcgtgaccgtcgatatacgtctcctggtaatccttgttcttgttccgtctctaaactctctgttcatcattcttcacattcagagatcagtagaaccagctcgccatttgtgaattgcagtgtaggatcagttagtgctgattcattgcggttaaatggagattctgattgtgtactgagagagagtgtagtgaatgaggaagtggaagtgtgtactattaagaatcttgataatgggaaagagtttgtggtgaatgagattcaagaagatggtacatggaagaaggtgaaggaagtgggaactggaacacagatgacgatggaggagtttgagatgtgtgttggacattctcccattgttcaggagcttatgagaagacagaacgttgaggattctgataagaacacgtctaaggaaaacgaagacagtgggaatagtaataaggataatgcatccaagtctaagaagtcctctagag

SEQ ID NO: 46744 - DNA, 423 bp, Arabidopsis thaliana
atcgggttcgaagatatcttagtgtctgtgacacttttaaccaggtttgtccctgtaactgtaatctcatcgagggaagcagctgaagaagttcttagaactcatgacctaaagtgttgcaccaggcctaaacttgtcgggtcgaggctaatctctcggggttttaaagatatcagttttactccatacggtgaagagtggagagagcggcgtaagttcttggtgcgcgagttagtctgtttcaaaaaggttcagtattttgggtatatcgtagaagaagaatgtaacttgctggtcaagaaactgacggaatcagccgtaggtcggcctccggttgatttgagtaaatcccttttctggctagctgcgagtatcctgtcttagaagtgctgttggacagagtttccactacaacgagtttat

SEQ ID NO: 46745 - DNA, 544 bp, Arabidopsis thaliana
cacctgtaatcctagcactttggggaggccaaggcaggcggatcacctgaggtcaggggttcgagaccagcctggccaacatggtgaaaccccatctgtactaaaaatacaaaaattaccttggcgtggtggtgggcgcctgtaatcccagctacttaggaggctgaggcaggagaatcgcttgaacctgggaggttgcagtgagcccggatcgcttcattgcactccagcctgggcaacaagagcaagactctgtctcaaaaaaaaaaaaaaaaaaagccatctagtatggctgataggagagctctatgagttcaaattagtctttttttaccctgtctcaaaaaataaatgaaaaataaaaataaactccccttaaatgttaaatgagcatgaacagaaactgtcccttcctgaattcagccattattcacctgttcgccttagatgaagaatcaaggaacagcagctctagggggttgggaggagttagggtccggccctgcccagacctctcagtgccaatttctctgtgtcactgtgt

SEQ ID NO: 46746 - DNA, 346 bp, Arabidopsis thaliana
tcatcctcctctcttataccattgttgccaaattcttcaaaactaagactgaacattcctggaacattattaatttcatcttcactattattccacttccaccttttttcttcatcaaatacaacatctctgctaactatcacctttctccttgttggatctaataaacgatagccttttgatccaggctctgttcctaggtgtactagcattcgtgagcgatcgtctaactttctcaaatgtacagcctctgctttagcgtaaccaatgcaaccaaagacccgtaaatgctccacatttggcttcttactctttaagactttgtatggggtttgatctaccaaag

SEQ ID NO: 46747 - DNA, 381 bp, Arabidopsis thaliana
cactggataacatcccggaaaaccttctccgacctcacacagctacaatcactcgacctctcaagcaactcgctacacggcgacatcaaagtcctcggttcactcacaagcctagcttcactaaacatctcctgcaacaacttctcaggtccaatcccatcaacaccattcttcaaaacaatctccacaacatcatacctccaaaacacaaacctctgccattcactagacggcatcacttgctcatcacacaccggacaaaacaacggagtaaaatccccaaagatcgtagctttaaccgcagtaatcctcgcatcaatcacaatcgcaatcctcgcagcctggcttctcatcttacgaaacaaccacctctacaaaaca

SEQ ID NO: 46748 - DNA, 463 bp, Arabidopsis thaliana columbia
  unsure (1)..(463): unsure at all n locations
ttttattccctaaggtacctcaacacatagaccagcagctcgcgcgcagagtggatgatatgccacgcgacaagaattgtttgaacactgaaatgtagtcattttaaaattatatatatcagctcttgaacaatgcataagaatgattcagttttctcttaacatagaacgaaatcttacttggatacaagctccataagataccccgcagatggtgcacattaatttccaacgatcctagttttaagagtagagaaaaagaggaagagggataagagttttgaaaaggccacagtaccaaggtaaaggaatccgaacaagaaaataagtacgtaccttgctgactttattcccccatcaataggttccatcttcttgacatcagataaacatgtntctgaataaaataacaagtgttaatttgtaaataggaaagtaatagtgtaatacggctcctattagt

SEQ ID NO: 46749 - DNA, 356 bp, Arabidopsis thaliana columbia
ctgggaggccatagtttctttttttttttttccggcacttgactttctcttatcagtatgctttcctgtgattctaaagtgtggaactcgtggcggttctaattttcccccctccactcgttgccgctggccgggcattaggaaaaaattatgaaaggcacacgtgattccacggccgtttggtgtcggcacaagaatagctcatgagttaggctcctcggaatgcacctacgaagcctgagtgcgggagaagtcaaaatccagacctccaaagcccactgtgcacccatgtgagaaattcgggttggcaacacactgggcgggttccggaatctgaccccgggggcccagctaac

SEQ ID NO: 46750 - DNA, 727 bp, Arabidopsis thaliana columbia
ggtcgactcccctctaataaaaattattcacaaaaaatatgtattaaagcaaagtgctatgcttattccatgcaatcttttttgaaaaaaaaaatattttctaaccgattagtatatcttctagaggattcatagaaaaagaggatacaattacaatatgtagagtatcttataggtgacgtaaccatgaaatatagaattctttggaatctgaaactgaattattcagttgataaatgataaaacaaatactcatatctcatcctttggcatgtttaggagccatctctcagctggacggagacaacacagacacttgtgccagagagggaacacaatcttcccaagtcttcgaaagggtaatctcagaccaaaccgttgactttgttctcattaattgtttatgctaaaccacaagatatttggatcaaaagtattaccataaatcactatataaagacataaatgtgcaccccacttttcttatcaatcataaaagtcagcaaaacacaaggcatattcctcttctcttcctcagccttatttttctgatattcagtttcaaggatatatccatggcgatccagaagatcctctttgcttcacttctcatatgctcactgatccaatccatccacggggcggaaaaagtaagactcttcaaagagctggacaaaggtgcacttgatgtcacactataccagccgagaaggccaggtgttggtat

SEQ ID NO: 46751 - DNA, 585 bp, Arabidopsis thaliana
gtgttatcatcttctgagagtactaatgctaaaatgtgtggtatcatagtcaaagcaccagtatccttggagaaatcaagttgtacaagcttcagttgctgaataagatacgacacgatttttggccgatcttcccctttgtttcggttacatagtgtcacaaacaaatccattaacgggaaagccatagaatcatcactctgaaataactttaccgatgcagcaatgacttcatcaacaggtggttcttttggctctgcttcttcctgcggaacatctactggcttttctgtatcctcaagttttggagtttcagatgaatttccaagagatagtgcaagtgcttgagccaattcgtcatcttcctgcaccggctgctcaggattggtaaacaaccagtccatagccatttcaacactgtttgtcccactcttcgtaacgcgatttcagcccttgaccttgaaaaacccatttcaacaatcataccaacaatggattcgtcaagctgtagaggcaaggctctttggtttatacccgggtaacacacttcgattttccttgcatcacaacacagagttatatgtg

SEQ ID NO: 46752 - DNA, 507 bp, Arabidopsis thaliana
gaaagatgattttattttcttcccggggaacgtagataccaggtccatagggactgcagtcatagaaacaacactgggcagggtgccagcattataacccagattagccggagtaggtgtaaaaggcacaagaggtgaggcagctaattctgtctgctttaacgaattcaaaatgtttggaccagactccacagagactggcatcttcttccgtttccttgattttacccttgtagaatgttgagcaggtgctacaactgtactagtaggctcaagtgttggtgtcactttggaaacattgctagaagttccactctgaacatgttttgcgccagaaagagtcatggatgattctttcatgggagtcaattttacagggtcagtgattggatagtcggggaaacgggaaccaacatcaaatccactggtttgctgagaagcaagccaagcgttacggaaagggagaggcgacatccaaggggtattatgtcaacaatattctgagtt

SEQ ID NO: 46753 - DNA, 665 bp, Arabidopsis thaliana columbia
gtttaggcaatgagagagatgtgaagttactgatgggtgaaaaaagtaaaaaaaaaacttggagatagtagagtggcaattgatgtaaataatagggatttatatggggcttttaccgattcggtgaggcttaggattccacaaaggaaaaaggctcgactggggactagtttgatccaacttgacggcccacaaatgtgtaatgtttctcaacggagagaaaaataaatggttaccaatatttttacaccggttatgtgttgataccatttgcacaaaacggtttaagttctgaattgaataacttaacacccaaaatttggtaaaaagcttaatacaaaaagttcaaaggcattttcgcttactgcgacactcggagttgcagagtactctacgtaacagactctgttcatagagtttgcggcaccggtggtgggacattcttgcggacacagtatgtacttttggaagcatcgttcctaagggttgctgcagtaaactccttgtgacttggctcgcaagaaacataacatggccgcaagaaaaaacagcattaacgaagaggtgtttgagatcttcatgtctagtttattcttcctgttttattatgtgtcgactggtgtcaaaagaaacgtgttgattgtgaatttgtagacgccactctg

SEQ ID NO: 46754 - DNA, 482 bp, Arabidopsis thaliana columbia
ggtttaggataacacacaacatggactctggagttctgatttggcttctatagattttttctcttgcacagcaccaaccaacaacttataccacattcgctctgagtatgtgagaagatcacctgtgccattcactagcttaccacttatatatgatgctaaaagtaggagaaatctcccactcatctgtctcatctttccacagatatctagatacatgatcaccatggcctatgaggccagcaagtgatagacagaatatttcagacaaggataagtctgcaatgcttctaaagctattctttccagccaggagtatgccacagccagaattcccaaaaccatttggcccatggaacggaacctttccacaatttcctgaggacgtggagggaatatgctgcatcagctgcagtgactttccagcagaaacaatcgacttacatatgtcttttatgaacagtgggcatacacccgattgt

SEQ ID NO: 46755 - DNA, 458 bp, Arabidopsis thaliana
aactgaacaagtaatcatttgaccacttgtaaaacatggcgtcaatctaactcgtggactccacacttcccagatccgtcccaagcgattaaaagcatagtttgatatgaaagaccattccggaaagactgatcctacaattctttctgctttgttgtcttgtaccctcgtctccaaaatacacccaaactgcaaatcttcttgagaaacccattttcttactatggaatgtttagacattttcttgaaaccacgaacattccagaaaaagctcgacataaattagtgttgggggggccttttactctgatcccgcgagatttgagtagaaagggtcgaaactaatttgtgagcagtcttagagtcccgagggatgtactaccgcaatggcagacccaccgttgtgtgcccgagaattctttggcaagccagtttttccttggaaagactcttgtttg

SEQ ID NO: 46756 - DNA, 555 bp, Arabidopsis thaliana columbia
tgaaggaattgtcgagatcttctcagacggcagttcataacaaaactcctaattaagaatttggtagttggatcccaggtacttttttatatgcacacgattctattatacaatggactctggctgatcgaattgtccggtgtacacgcaggtttgcataccgatccggggatggatttcttccattcaagagagaagagacatggcaaaagagcaggtcagttctacttattgttatatgatgatgatgacaaatagaagacctatttaggttagatggtggctaaactgaactggtgtctacaggattgtttggtcacaaaagtgcgagcaagagcaacccgtcgagccctcctcatcttgctgagggtcggtctcagccgacaactcatttcggcatgaaaagatcggaatcagagtacgcgtttcccatctccgatgaacaaaccactcactggaaaccacaacagcaagcctctgaacgcatcccaaattccaccaacggcctccagtctacagatatagcacggtactctcaactcgttgtgatgagat

SEQ ID NO: 46757 - DNA, 501 bp, Arabidopsis thaliana columbia
  unsure (1)..(501): unsure at all n locations
nnnnnnnnnnnnnnnnnnnnnnctaaagggcggtgacaaccaagaacatccaccgcatgctccgtcccgacggcttcctcatcatgctggagatgactgaggcggtgccgtgggtggattccgtcttcggtctggtggaggggtggtggctcttcaatgacggtcgttcgcatgcccttcgcccagccagatgtctgggacaagaccttgcgtgcaaatgaatacggccatgtcgactggaccgatggccacctgcctgagaattccatccaacgcataatcatcgcgttggcgtcttctcagggccaggatagggtagctataatccccccagctccttcgaagatgtccacggctgacattgcttctcgtcaagctataatcgacactctcgtcgagaaacacacaagccacttttccgctcccacatgcctcccgcccaaccaggtcatcgatggctccctcactgcgtgctggttacaggtgcacgggcagtctagg

SEQ ID NO: 46758 - DNA, 1529 bp, Arabidopsis thaliana
taatctactttgaaaactagtgtgctgcataaaagtatacttaggaggtatgacaaaattaacgacagtgtttaattattattcatattattatgattattttcaactagtcatgtcttagcattttaaattatgattacgaaacaaaggacaagtataatagtacgtaatgttcaaggtatagtatactagttcaaagaaaaacgtagatccgtatccttttttattccctaaatacgtttcaaaccggctatatatttataccttctttttttataagagaaaggtgaattataaaaaaacaaaaatcgcttgtcgaagatattagaaaagtcgagatgactttatttatgcatttgtttttctaagatataataatatctcttacttatcatcgtcattcaactaagacacgaatgctcgatcacttgaagatcatactagacatttttttcaattgggtttaaaataaaatctaattccacgcatagggtgtgtaaagaccacaaagtctactagaccaatcatgggtttggggacactagtatagttttatcaatttaagagactaggctatattttaagaaaataaaaccaaaaactttgtcggtaaatgcttcatttaaaaggttaatggtggagggttaaagaagttttttagtttcttcctataaatcaattattttatttggctaatatttttttctgtcttgaatcacctgatgtctggccgttctgggtaacacctatagctagttagccatttaataatatggttaaaaaagttgaattttagtgcctttcgtacatgtctacgtatgactcttaatttccctttctaaagatatcaatatcatgaaatactatataaatataaaatcgttgagtagtctattatacatacgtaccgacatgaattttaaattaatcaactaagttgttaattaataaaaatatcacgactcatgtacgaggatctcgttgtgtttttgaaggaagtgggatggggaatggtgagcatggtggcggctgagcgacggctactggcaaatgctctgcttgacgccggacaccaccgcttcgtcctcctctcggaatcggacattcctctctttaacttctccaccatttactcttacctcataaactcgcaacactcctacgtcgacgtctacgaccttcccggaccagcaggtcgcggccgctacaaccgccgtatgtcaccagtcatcagccgcaccaactggcgaaaaggctctcagtggttcgagatagaccgtgagtagctttagccgtagtatcggacacaacttactttcctgtgttcgagaaatattgcctttggaattgttatgccgacgagcattacttgtcaacatttgtccacgccatgtttccggggaagaatgcgaaccggtcactaacgtggacggattggtcacggagaggtccacatccgaggaagtacacaaggcggtcggtgacaggggagtttctgcggagggtgaggaatagagaacaagggtgtg

SEQ ID NO: 46759 - DNA, 571 bp, Arabidopsis thaliana
cgtataaaatttattgtattaatggttgttgtgtctctgttttaatgttgctatcacagttcaagcttcaattgctgctaacacatgggttgtgagtggtacaccacagacgaaaagtaagtgtttgtatcctcattgttgatccaatactattctcggtttatgcatagtctaatctcggaatgtgaattatcctgcagaattgcaagacattcttcctcagattatcagccaacttggtatgcagcattaagtgttacactctgatgtcctttcccaaaccagtggtcccttaagttaacattttgttttcttgctttgataatcgcaggaccagataacttggacaacctgaagaagctagcagagcaattccagaaacaagctccaggtgcaggtgatgtcccagcaacaatccaagaagaggacgatgatgatgatgtccagatcttgtagtgggagagactttcgagacccctgctactgaagaggctccaaagctgctgcttcttagaggaggaggaagaagaaggagaagagctcacctgcaaaacccatcataaaaatgttt

SEQ ID NO: 46760 - DNA, 542 bp, Arabidopsis thaliana columbia
gactattatcatgatttcaaaatagtgagtagggatagattagaagtcggtgtttttatttctttttaaaagactaatagatgtggcttcaatggtgttttgttttatatttggaggatcattgtggaataatggttgaattttccatggtcgctacaatgctttttctactctgttctgaatctaaatcacaaaaccactcactatgttcaacaactacctgggcttatatcgtttttgggttgagctttctgttgcatgtcccacatacaaagattttggtttggtttgatgcagacaaaacacattatgcattgtgatctatttgtaatccgaagaatgaattttcttgaagaaaaccacattctctttattatgtgaatcaagattggtttattgataacaattattggtcttaagtagctaaacagttgctgaatcaaaatatgagaaactaatgctccattgtcacaatctcttcaatagatttcctatactccacaatcaaatccctgaccagaagacatttaacaacaaaagag

SEQ ID NO: 46761 - DNA, 1475 bp, Arabidopsis thaliana columbia
gacaaacatggaattaaagtttgagtgatgttgaagaagcaacaagtgcgtgatctcatcagatccaatccaaatcccaatataaaggaagagtgagaattgttgagctcaccttttgtagacttcaccaaaagttccaccccacaaacgttttctaaataaaccatcagcgcattgtttgccttcccaaagctcgagcccaccggtgacaatcccaggaatgaagacaacaggatgtttcgccttaagaccttcttttttgagcttaacaccgggcgggtcaggcaaaggacccgtgattcgctccgttacatactgagggaagctcgcaggcattgcgttgtaaaggaagagaagaaaccaccaggttacacacacacacccaatgaaccaacaacaagaatcgatgcacgaccacttccctcctccgttcgatttcttatggtgggatttggaagattcgtgtggtttcttttgcgaatcctcatcgtgcaccacctcttcagatggcggcgtcgatggtttctccgtcggctttttccgatgaataaggggcatatctgtcacttgaaattaaaccaggttaagctatacggactttgtcaaatctcgtccaggaatttagaacacagattagggattgttagatcagtcgagagagacaaagagctgtttctctgcgaatttctggaaccaatcaaatcaaatttgtctcttttgtttattgtcgacttttctgtttttttctgttctggtattattcctccaagggactcggaccggatggcaaaacttgaccactttgctcctggttcaggttgcggttcatggtcaaccttagacccgacctatccgtttcgttgatttcattaattagtctgcgttttcttgggtggagtgcagacagattttcttctgcagtaggcgttaatccgataggctcttgttgggcctcaaatagttcagtaaacttttcgtggggcttttagtatagcccatgtattaataacaatattacacttgggaaatgacaaaaaaaaaaaagagaatgaagcggtactcttatatcaaaaaaacatattgtatatcttcgaatatgatgcaactcatgcaacaacaatactagtaggctacatgtattgctccatttaattacatataacttaatattctaattcataaactttcttttaattatatattttatgtaagttttaaatattgagaaaaaaaaaagttttaaatattgaaacatgataagtttttacatccatttattataaaaaaaatagtgatgatgatgatcaaaattttgagtacattttagagtgttttaacttttacatttgttgttacaattgttatgagtctgatatttcaaatttggttttcaaagaaaaatcctgagtttaccttaaaagattaaagccagtttttaagaaatacgtagacaaatatcaaaccagacctagctg

SEQ ID NO: 46762 - DNA, 623 bp, Arabidopsis thaliana columbia
atataccactttgattattacgaatcataaaaatgttcctaaaaacacttttaaaagtgatatttcaactttcgtgcactgatatctcatattgttattttgtaccgcctttttttactaattttatatcattaattattttcaattaaaaacgttgtacccttttagattatgtacaatggtttactctttcaacatcctactttacattccatgtcatattctctttactttacctaataatttaatattcatttagtttttaccgtatacagtggttttatttaaaaaaattcaacactattatactatttttaactttttattctttatttttgaagattgttgatctatatgctaagtctcagaaacactctaagagaatcagaaggtttcagaagtctgttttaggcgagctaaggagattgcgacacgtggagcaatctggcccgtccatctctaacggaattatcttatccgagaactcgtcttcttctgtttcattaagtactcacctgtaatctcagttttcattatcgattcagaagtgtattgaatcgagagagagtaagagagagaacagacaatttgtgagagaagacacgagtttgagtaagtgttta

SEQ ID NO: 46763 - DNA, 1623 bp, Arabidopsis thaliana
tgtctaggcaaaacaaaatctgtttaagcagcaacttcttgatccttggatgaaagttggttctgaatatgttgaggaacaacgtcgaacttagccagttgcattgtgtaagaagctcgaccttttgtcatccctctcaatgtactcacgtactgaaacatctctgccaatggaaccagagagtcgaccacctaacaataataagaacaacaatgtcaaaatcagatttcatcatctaacaatttaggggttttttcgatcattttgaataaaacataccttgagaccaccgggtttgtctccgaagctgttaatttgacctcttcgtgagttaagatcaccaatgacatcaccaagatgttcttctggtgtaacaacttcaactctcatgataggttcaagcattctcggacccgctttcctcatcccttcacggaaagctcctcttgcagcaagctggaaagctagcacgcttgagtctacgtcatggtaagatccgtcaactagacaagcacggacatcaacaaccgggaaaccagcaagcacaccggtgctcatacactcctcaagtcctttcatgacaccaggaatatactctcttggcacagctcctcctttgatctcactcttgaattcgtatcctgaccctgcttccaatggctcaaaccggactgtaatatcagcaaactgaccttgtccacctgattgcttcttgtgtgtgtatttcacttcagctattttggagatagtctcacggtagttgacttgcggtgcaccaacgttagcctccacctgaaagatggaaaggagtgagaggcttggaagcgggaagtagagagtgagagttataggttatgttttaccttgaactctcttttaagtctgtcaacgataatctcgagatgaagttctcccattccttcaatgacggtttggttcatctcttcatcacgagaaaaatggaaagacgggtcttcttgagcgagcttgatcaaccctgtcgccattttgtcgatgtctgcttttgtttttggctcaatcgctaccttgatgacgggatcagggaagtccattcgttcaagaacaacggggttttctggatcactcaaggtttcaccagtgattgtatctttgagacccgcaagagcgataatgtcacctgtcaaagccactttaacatcttctctgctgtttgcgtgcatttccaagagtcttccgattctctccttctttcctttgttagcattcaacacgtaagaaccagctgagattttccctgagtaaaccctcacaaatgtaagagaacccacaaaaggatcactcatgatcttgaatgctagcccagcaaatggctcgtcatcatctggtttccgtataatggtaatttccgggttctcaggatctgttccattcatcggcgggacttcaacgggcgaaggcagataatcgaccacagcgtcgagcaatggctgcactcctttgttcttaaaggctgaaccacatagaattggcacaaacttgcccgtgatggttccttttctaaccaatctctttaccgtggcctcgtcaggctcaactccttctaaatagttctccatgacctcatcatccaaatcaacaatc

SEQ ID NO: 46764 - DNA, 555 bp, Arabidopsis thaliana columbia
taatgaaaaatgaaataagcaacaataacgcaaatatcctatgtgctgttccctaggaagtaaaccataaagccatctttcaacattcaaccatccacatgcacgttgtgacaccatcattataagctattcaaaaatccaaaaactaattaataacatagattatcagctttagttatctgttttcattccttttcagttttcagttttcagaaaaattagtttgcatgtatgcaacgtatatggacgtaggtgtgaacagatacaaactcagatatattactgtatacagtctactgcttactagcttttttatctttctaattactacgtactagtttttcttgctttagcaaaatatcacgtgcaaagtatatgattataggtttaggtcgaatattacatgcatggatgagatttaattttaatatttatcaacatgaaccactttcattattccttacaagaacttttttccgtcctctacaaataactagttaggctctgttcgtttcatcagtcaaatggatcatctggatggagatgagttttgat

SEQ ID NO: 46765 - DNA, 510 bp, Arabidopsis thaliana
ctttcaaaaagtcttttctgttcctacgggatggatgaccatgaagaaaaaatctacggtgacaatcaaaccagcatgtcttccgtccattgggaagataaaaagactttgtactttccatgcaaactggacaagacaatttatcatgagtagtccatcctgataacatgctatacgccggaaagtcgctaatcgtccacagtagtacaacttttagattaaaattctaacttaatgaaaaactgtaagcatcaactccagtagacaacaactcttttaactcctcaataagaggttggaggaacacatcaagactagctcgagaatgatttggtccagaattcagaatggtaagaaataagtactctatattcatgcacataccagggggtaaattatatggattcaggatcacaggccacaacgaatgattacgagacatgccaaatggattgaacccatcagtacacaacccgagataaacgttacggggttcttcggcaaaccggg

SEQ ID NO: 46766 - DNA, 471 bp, Arabidopsis thaliana columbia
attgcagcgcttagggatcgaataacaaagttctcggatcacgcaatagactaacggcaaatcgaattatgctaagtaaaatagtaaataaaataaagagaaacaaaagtatgcaatagcaatcgattggatggttgtgaaacaagataagaaaagcgtcaggcttaggctattctcaggaaatagatgatagtagatctagaaatagctaggttattatcgcaccgttctcgaactcaaactatgattttagagtaacctgtggtgttccgcgaaactctctatacttagagctaagataaccgaagaagccgagaaatcttatactaaaccatgcatttttatcaagaatgattagttcacctagtatctaagctagagcccttctatgagcctatctgttctttcttaaatgcctaggcccatctatgatggatcaaatagcaagtacctatggtggacatacctatt

SEQ ID NO: 46767 - DNA, 543 bp, Arabidopsis thaliana
  unsure (1)..(543): unsure at all n locations
gatggctgccatcaacttggtagtcgtcgggatcgtcgcacatgctaaaaatattagcacctttcaggacatccagacggtatacaatatctccgccacgtgtgtctgaccgtagtagtggctgaaggtcccaccagcatttgtcagtcattttcttagctatctttgcgagtaaatcgtcgggaatagtcggattcaccatgttaggaatgagataggccaatatggtcaaatcattgtccttttaataaccaaggaaagagagtcggttggggagattacagttgcattgaatgttatttaagttggatgtcaaatcagaggataagtgattatttgagaagactaacatttatctactatatcaataaatgtacgtataaagtaacagtctacgtacatatttaattctcatatttttggtgcaaccgatgctactttatcttaaataattgataaatgtacgtctaataaggcgttacacgtgtacgtatatttacaataagcatagagngtctagaaattatgacaagtggaagtgta

SEQ ID NO: 46768 - DNA, 622 bp, Arabidopsis thaliana
cgagaaagttgaattttcagtaggggggggggatgggggtattctttcgattacatgttaggaaaccatctcacacacgatgaatcattttaatggttcagtcaccaacaacgagaagtacatatggccggttccgggtttctgtcttcagatggaggttagttaaaacttatattaataggtgattgttatcaatactcgtaatattgtgaaatactatttgttattaaaatttgttttattattctgtagcttcttgcattcgaggcaatcccacagttgagcaaacaaaatattgaggacattgcaggagcatatgagggatgtcctaggatgtgcaaggtgaagttcaagaagaaccatttgaaaggctttactcttgataccatttatgcagaattgggtacaactcaggttagttgtcctagatatactgttatatgaaacgtttgctattctatttagttataataatccattcatacgtgtttatctttacaggtcattgattgtatcgcacacctagaattgaggacacgaactcatgaaaacaacgcctgaagaagaagcgacgatgacgtggctgatgtggtggttgaagttggttgaacgtcataaagat

SEQ ID NO: 46769 - DNA, 435 bp, Arabidopsis thaliana columbia
tacaccattttcttgttctataaatcgatagtttcgagagtatatcgtagatctagttcgcttgtgtctaatacttgtgtgcttgggtattagttcgtgatcagttgtatcctgggattcaaaaattatgatgtccgaaaagcacttatgggcgatttattgaagtaaggaaaaagatatcatatcttgcctccgtgatttactttttgtccttaattactgttattgtaattttattgttatcgttatcttaatagaatttgtacttgtttctcaattcggtttttgggctattacaatcttaattcaataaatctgcttttagcttatcgctctagaaggattgagaatttttcgaattttttaaaacgattttaaaatcttctaaaaattgtttctgctatcatctttgggtgcttacgcggaaggtttata

SEQ ID NO: 46770 - DNA, 589 bp, Arabidopsis thaliana
  unsure (1)..(589): unsure at all n locations
tttcttaaaacatatgcatgtgcgctttggtagtctttctctgaaagtcattctacgtgcttttcaccacttggacggccgacgtgcataaatatgttaggtactccagagacatgatatacaggaacttctccttcatcgaatcttgttaatctgatccatgtaattgattttaattctgaagtatagattgcgaatcgtaaaataaataattatatttatcttgattttgtttgtatatgatcggcaaagtagtgctctgaaaaataagcaatctcgtcattgatatatgactcaacaattgatcctgccgcatatcttttgttctttgcttttcctttcaattttttgaaaaatctctcaaatgggtacatccaccgatattggacagggccacccaattcagcttcgtatgggagatggataggtaggtgttcataacatcaaaaaatgatggtggaaagatcttttccaagttacagattattaaaactatgttctgtttgagaatttgaacgtcacttttctgtaaagttctcgaacataagtcccggaaaaatgcccaatccctanaatatatatatatata

SEQ ID NO: 46771 - DNA, 566 bp, Arabidopsis thaliana columbia
gtttcaaaacaaaatttcaccttagccttctatctcagtttttcttttagaaagtggcaaagtgggctgggcaatcaggttttagccatttgggcttaagtggacgaatataccctccaataagaaatgaaacgaggcggttttctttgtttttctgtttatgaaaataatatttaaactttaaaataaatcaaaaacaagttaataattttaaaactaccaaaaaaaaataaaagagaatcaaaaactcttttcgaagacgcagaacaattctgacgaaacttaaacccatattgaaagtgaaatttcgattgaggctctcttcgagttcaagtcgttgcttaagtggaggaaattttgatcgagttcgtgttaaagtgtctaacaataagaggatttttgggtttctcaattcactgtttatagaagaactcaaatggcagagatgaagaagagtagtcggcgacgaggagtttccgaatttagtgtcgaagcgcaaaatcaaaaactgttttgaagacgcagaacaattccgacgaaacttaaacccagatcgaaagtgaaat

SEQ ID NO: 46772 - DNA, 563 bp, Arabidopsis thaliana columbia
ttttaattttgggtgtttgaggtattacaaatatatatatatatataactaatataataaactttacatttgtattcgggtaccacggatattagattcggttcgggttcggttcgggttttttcgggtagtgaagtggagaacccattcggataattctaaaagtcgggttcgggttcggtttggttattttttcgggttttcagttcgggtattcggttccgggtattatgcccaggcctatcttaaacatatttgtacttctttgtggcgtacgttctagactgtaaatcagctttgttgttgaaagctatcaactcctaagagtatgagaggcagataagtgctttgatcgtaatgatcaagctgctaaccaaaactgatgaagagcacaagccaaagaagtgtcatttttgccactgattgtataattcaatattcgttttctttatctaacttaaacactctaagaaacgaacaaatgtcaagagaatgcggaagagaagtgtgagaaaaacagatcaaattgcttaaaattaaacaattatggacacagctgttta

SEQ ID NO: 46773 - DNA, 1138 bp, Arabidopsis thaliana columbia
acatctcatcttctacttcaactgatgataaggctacccatgtacatgtttgtttctgggattctcttgaatgtttccctctaattggcgttttgtgtggatttacaagatgatagcttatcacaatacaatgttagcttgtggtgagatgaatctgtacatttgctaatgcagttgcttatcagccgatttaattgttaaacattagatattgaaactgtcaagcaaaagtgaaataattggatattcccagcactccaaaaagtactgtgttgaaaattaagaaggccagtataaaagttctttgattttgtatttggaagtagttgtttcatcacttgtctattcaatctagtgctgattgttcgaaattctagatttgtcatgctccacttcatatcctaactgtaactacctttttcccgtaactatttgtagaacaaccgtgttgatgggatatcagcttccaatcttgcgacacatgggttccttcaagctggtcagatgacccctctgcattcatttgtcatgcatcaacaagagatttctcagcttgttcagcctcaggtcccttcacaacatattgaacaatcagtgttgctacagcaaaaggtgtgagcttaagaatgcagcttgtgtttcattttttatagttaatgaccattgtctttcattctctttttgtaggctcaggctgtaccagatagttcacagatgcctatgcagaatcatgtgcatccatctcaaggtgttcatggcttggtacaatcctttggtcaagggtacggagatattcaaactagccaagtagcacaatacggaactacgacaacaccatcctctgtgaatgaacaggtaggaggtgttcttattacttaatggggatatacgtggtctatacgataccttcttagaaaatacttcttaacaggcagtggaatctggcaatggagattataatggatctaatcagtcagagaataactttcaagacatttcttcacagttccgtgatgccctaaggcttgattctcattcccagaatcagaaacctgaggtatgcagtgccatattactagcaattttcttggcttgtagagcttagttaagtggatatgagaactgtctgaatgtgtgt

SEQ ID NO: 46774 - DNA, 1047 bp, Arabidopsis thaliana columbia
gtctatttccaggcttcttcatatcccagacacaaattaaaaatgtttttctgagagatatttgaaagaaaaattgacacttttttcttacttttaagggtaaagtttagttatattttggaaaaggtggatgcacgaatgtgtatgtgtccacttgactatgtgcctatgttagatggtattgctgccttggattctcgtttgggcacactgtggattatatgatttggccgcaatatttgaaacttatgttttttttcgtttaattgtttgaaacttttattcaatttaagttacttcatttttgtttctttgttgtttatatagaccaacttgcctattttgaacaatgaaagtttgaatttcctgcatgcaagttatatagaacaacttgccaaataaatcagattagaagatgttcaataaattcatggtcaagctttgaaaaactccggcccccacaagagtataaacaaaatgctggaaataaaagttttacgaggagcatttcacgaatgttggttaatcacaaaagtcttaattacttacttcaaaaattcttgttgacgaacaacaatgaaaagaaaaaagatacaagattttttgtcaccatgcataggcccgaataatatacagaaacgcaagatggatacaaatgccaaggacaccgggtaagtcggagaagtgctggtcgagaggacctacaaacataggcggagaagagctaagggtagaattaacttcattaaaacaattaccaccaaaataagaaacattggatgagaatctaactcctacactaggtgctcgacatttggatacgcatgtcggatttggtttttttaagtaaagaaatttaggatccaataagatatatataaaaaacgggtttggtatcgattcggatttgggtcgaatttaagatttcataacctataaactcggtacttttcagttcaaatgtttttctatctgattgtacctgattactcgaagttttacttgattaactgatattatatccgattatccgaaatttttacctag

SEQ ID NO: 46775 - DNA, 820 bp, Arabidopsis thaliana
aactgtatcaagaacacaacaatatcaacaagccaatcgaggctgtaattcatacaaacgcttcaatcaaatcctaaatacagttagagaaagaagtactaactagagcatcatcattaatgttgatattcaataaagatagctttgtttcaggatttcttgtgatcgtaagtataaacttgtgatcagtaaaagctggaaaatacttcacatacgatttgaaaatcgtctggtgaaaaccacattcatttgttttggcagatgtgcagaaaaagaaagtcagacgtttagtcctaagcttctaactagagagttatcgaaaacttacatcttcaaggatcggtgtgttgtaaagctcaacgaatttctctctaagtattctgttcattgtgtcaacgtcacatgcatgggtccagtatgagtcatgcacacctgcagaacccaagcattcaataagaagataatacttctttttttgttggtaggccattagtcgaattgacagaactaacctgcaaagtttaggccggcctctcgacatgcaacagcagtcatcatcatgtgagtgccgtccagcgagtgcacaaagttgggaggaaatgcagtactttgtttcctaacatcgacctgcgaattgatagtctttaagcaaagacccacatgatagtcttgctcagtgaaaacgaagaaacaaacaaatcggctttaccgtgttacctctcgctgcagagcaaaacctgaagagatgttctatctgtaatccagtggccatatttgattcaaagtcaaaattattgggcgcagagagatgatttttaaa

SEQ ID NO: 46776 - DNA, 588 bp, Arabidopsis thaliana columbia
tgttagaggttgacacgtgtccatggttagtgtcggatgggtcaaaccgggtctgttgggtaaaccgggcctaccggaggatgatgggagctcccgacgtggatgttatcagggtgtggctggtggtggccatggaccttatggaggagatagcatgcatggtggagttatacggtgcggtgacgtgcagggttagggttaggtacgagccgtccacgtggaggaagatgacggtgccgtgtgatgtatggaggataagatcaggtgggtttgcttggagattggatgttgaatcagctctaaggcttggcatgtgattgaaaccggaaagacaaaaagaaattggaataatattgacgatggtaagcgacgttacattttgaaagcaacatatatacatatattgatatatataatctatttacatatatatgaacataaacgtgtggagtcctacttaaagctaacttatacttgtgattaatttggattagagttgttttcgactccggctgtagtactctttgtctgagtacttatatcttttggaatgaggaggtatataatataccatagcccataggtttt

SEQ ID NO: 46777 - DNA, 576 bp, Arabidopsis thaliana columbia
taataaaataatgggcatcagaagcgtaacagttgcaagcagactaggaagaaatttacaacaattatgaaccgacacaggattaagtagtggctcggaggagaagaagataaaaaaaaaaaaaaacctgggagcattctttggatcaactacaatgttaaaactatcatcaatgctcaaatcagaagatccacttcggggaagagtagcaactggagaagagtgaccactatgagtaggagttacaatagcggcacagcagcggcaccgagatgaaaagcagcagctttgatttttggtgtccgtatcttatccttagagccttgaataccaggagcaacacttaaattacgccatttatcctagacaatatgatacatcggatgattaagaatcttgttttgtaggtaaccaataatggagacagtgctaattttcaaacccaaaaggtgaaataaacgacgatactaatatttcttcagggaactaatacctatcaatacagccactaaagttaaagtctatgagaaagatcatagaacacagaagtagtcaattttcgaaaagtagaagtac

SEQ ID NO: 46778 - DNA, 594 bp, Arabidopsis thaliana columbia
tattatcatgaacttgatcatgacaggttagctgctaagacaataagaacggatactgaacctaatagagctatgttatctcttaaagataatcatagtggacttctatgcaataactacgatcaatctataacagcaaagaatagttgaatagtataaaactttacattgggagctctaactgatatgaatagagattactcaagtataaaaatagagattactcaagcaatttcaatcttttgataagcaaaagtatctaaaaccaaaggttcattctcatctttaaatggtacaatgattaggtagtttgttcagaatcaaaggtgtttatcaggctcatttagttcgactatgcgttcaacattactgaataagcagcttgcggagtggataagtatttcagtgatgaccaatgtcaggataaagagcactgaaaaatatgtctaacctcaatgaagttgaaaattgcgctgacatcagatccattagcatccgtcaagtttgaaagagcttcaaatatcattccatcataccttaataaaataatggcacatcagaagcgtaacagttgcaagcagactaggaagaaat

SEQ ID NO: 46779 - DNA, 561 bp, Arabidopsis thaliana
aaagacaatgttttcataatgtgttatccatcattatctgtctatctacatgtttatctttttctaaaacttgatttttttgtatttatgcttctgctagtctgactttttaatgtgatattctcgtttgctatttaatcttcatttcaatatttgctaaggcttatccatcttattttgttgttggtgtttaatgagttcagtctatgtatgtattacctagatgagtccccgttgggttgcatgttacaagacatctacgtccctatccacgtctatatattatacaccataaggatatatatctttggacaacataatttggacacacatgatttattttggacatgagaaaatttattccctagtctaactatttttttgtaggaccactacatatgtcgccactaacccatctcaccacgacaccccactctcttcaatgtgacagagaattaggattccattctatcacgatctcaaagttatggattaaatctacatttatctgggttgcttaaattttcatttttagattgttatttgtacaccttcagtact

SEQ ID NO: 46780 - DNA, 514 bp, Arabidopsis thaliana columbia
aatctgcaatttttaaaacacaacaaactaagaaagcattagttttagaaacgattacatgacagttattctcttcacattctcactgttagaattctctgggtatttaatttggggaagaaaaggaaaagaagaccatgagaatcgatataaactaattttggcttttaattttaacgacacacgtttactatttaacggtgataacaatgaagtctaattttggtaagtcaaaatgaaatagagggtttattatgtgtctgaggtaattggagaattaatctgtgcattttgaatactttaggaattaattaagcattttcccgccaggaaagtgtattaactgcggaaaaattgacactttcaaagcccttgaagaagttatccggcaaagattctcgatggttattacaacgtgtttgttgagatgtatactgggctgatgaagttttggtgaggctcaatggtcaggaacacctccgtcggaaatcaaagatgattggtcttcagaatg

SEQ ID NO: 46781 - DNA, 575 bp, Arabidopsis thaliana columbia
acgataactgctgttaggccatgttttgtaacggctgttagaagtgctgttaaggagtgttaacggtgagtcgatttggccgggtcaacgataaattataggttaaattagaagtcaacgataaattataggttaaattagaaatcaactttttgttgaggtataaaacgaccatttcaagagttcacggttaatttgaccattttttgaaagttcaggtattaaataacattttcccgtttagattttacaattaaatgaaattatatgtcggtttaggtttataaaagagcggttagagtttagattttacagttaaatgaaattatataatctatttcttgcctaatttgatcaaatgcttattctaaaacaagaaattaactgtgagttttagtatttcgtgttgaattataattttaattgcaccaaatgaattttgtgcatgttccgaagaaaaaacctatacattaatgatatatgtatactcggttttatagataaacatgcgcacatgtcacaaaaaataccaactcctagtaaaacaaaagaggatcaacatttctgagacttta

SEQ ID NO: 46782 - DNA, 558 bp, Arabidopsis thaliana columbia
ttctcgagtctttttagagtcttttcatgtatctatgaggagggatgacaatagagatgaggagacatttcggagcgagactgaaggaaacaaaagctaaggacgatttcagttccaaattcagtgagagtgtctatcaacacattcctgtgtcgatcgacaccagttttggcccagtaaagttcatgacgctttcaagtttacagaagtgaaaatttgccccagaagacttccctatttgaattattagtccctggacgtttattagggcatatatatagttgtagtggtcattgtttagacctatcatgttttattcaagcttttcatcaagttttcaaagaaacataagctattcatcccttgtttttcagagattcattcaattctcaatacagtgaagagatcctttcatactctaatcttatttgctgtgtttatgctttctatatcaaatatgttacttgtttcaatcaatatgtctgagtagtttgcttgttaagaatacggtttctcattagggattcatatggtttagtagatcgccactttgctagg

SEQ ID NO: 46783 - DNA, 539 bp, Arabidopsis thaliana
cgagcctcctcgatctttagctgctataactgctcggaaattgatttctcttccgctcggccaagcttggcttcttatgattcgtgtcggctgtcgattcagtgacggggttcctaagcttgtgtgctgccatgaagcagaagcgagcatttttctgatttccccacatggttttcacgccgtcgcttgtgggaaatttcaggcagagatgatacgtcgaggcgatactcagaattgatttaaccatggggtgctgataatcgcgttgtacacggtcggctggtcggtaacaaagaaatcgacgatttttgttacccctttggctcggactggcaatttgatggtcccgagagtcatagtggtttctcccgagaatccgagcacaggtcgtggagttggcatgatttgcgtcatgtcgatcttcatttctcgcagagttgtaaggaaaacgatgtcaagtgtgcttcccgtgtcgactaggacttgttcgacgttgaaatcaccgatggtcagtgtaatgactaatggatcgttgtgcg

SEQ ID NO: 46784 - DNA, 932 bp, Arabidopsis thaliana columbia
gtcataatgtcaaataacagaaacgtaatgaaactaaaatgcaaaacggcagtaataggcaaactaataacaaagcaggtaagataataggcaatcaaatggataagagattcgtaaggatggggtaatcgaatagcgtggtctccttaatctattccaatggtaggcaaaacttcatagaagctatccctagacaacaagttcaattaccaattaatccactatcgtgatagaaatcctcaagcagagctagatacacacctattcaccattagcgatctctagctaagcatgcaatatcgaatcaacttgttaaagctaatacccgttctaaacggccaataccttgagatatagacgaatatcacatgaattagtagatccaacattccatcgaacaccttttgagcgtgggaatgtttggattcatattccagttgatcataaaggaacatgctttaaccacctagagcgactaagggtaccacaactactctatctcttcctttaaaatacagttcattactcatacatattcaaagacaatcgcaatgaaatgaatgaaaacctgataacataagtgataaagtataaacgaaatgaaacaagaaaaaaatttcaaatacttaaaggtgaatacaaagtcgaaggagacacgatgcgtctacgaaacacgtctaatactaaaaacaagtctctgtaaaattcaatgataagtgatgatgccctagggaaaaccacttagaggctatttataaaagcgatacaaatcaaataaggaaagtcggatgggcccaactgggctcccgtgtgatcgagtgtctgttggatcaaacttggcttcaaggactccaccttgcgatcgagtggtctggagtgaagacaagatgcaacggtccaaggaccatgcgatcaagtatgtgatcgagtgg

SEQ ID NO: 46785 - DNA, 457 bp, Arabidopsis thaliana columbia
ccgaaccatcctaaaactaagaacaatttcaggaagaacctacgtactggtatggcaaccgccagcacacaaatccgactaaagatcacccaaggccaggcccgaccatagaagaccgctcctcgcgaccacgagacttaaaggctttgcaacccataccgcgaccgcgagttgggattagtccggactagactactgagaggatacacaagatctttaagaaaaaccaatttcttattcatatagaatgtattaaaatacattaccaaatacaagtataggattttggtacaaaagccaaaacttaattcagtcgtacataaaatacaaaaataccatctaccaaggcaacacaaaactaaaccatgcttaaactaaggtttacaacaaaggttacctgcaaaagagagtgggggatgagcgctactcgcccagtaactcctagctccctctaaca

SEQ ID NO: 46786 - DNA, 871 bp, Arabidopsis thaliana
ctaaactataaaattcatcccaactatacaaaaagcttgtcaattataatttaaaacattttaaacggtttcgcgtaatggcaaatctgtgaattaccaatagatgagagggtttttaaaatagttagttacaccacaattattacgcctcccgttccgttaagtcaccgtttataaccgacacgtgtcaataaaacaaaccatcggcataagtaactccataacatccaaataacggcgcctccagtttccccgttaaagattccccgtcactgtaacgggaccactaaaacacgccatttctctatcacacacagcacaaaactcaatcctgaccgttcaaaaccaaattcatcatctttctttcttcttcttcctcatcctctcaatcatatctctctctctcacagagattgtgacttcacgcacacgtaacctaaatcgaagatggtgagaaaatatagaaaagctaaaggaattgtagaagctggagtttcgtcaacgtatatgcagctacggagccggagaattgtttatgttagatcggaaaaatcaagctctgtctccgtcgtcggtgataatggagtttcgtcgtcttgtagtggaagcaatgaatataagaagaaagaattaatacatctggaggttatttaatgttgttgattctagattcttgtaactgtatatgtatcatttaatgttaatgtatttttttttgaaattttgaaatttttgtaggaggaagataaagatggtgacactgaaacgtcgacgtatcgacggtgagtgttaaaaaaaaaactgaaaatgatttgaattttgaaggttttattattttcccggttatttatttgactctctcttcaataaa

SEQ ID NO: 46787 - DNA, 559 bp, Arabidopsis thaliana columbia
gatgggaattaaatttcgtaacttactgaagttttgaagatttccaaattcgccccagaacttctccttattttcaaagaaatccatgcacgttttaaggaacatatatatagatttttaaggttattgtttagacctaacttttgataactttttttattctttatttttactttgttcttgagagcaaaacactgtggagacttgaaacaacccaacccgtttttttttcctaaaatcataattaaatattctcataaatacttaattaaaccaaccaataaagcaacattgaaaccgcaaatcaaaaatactattttatgaataaataaataattcgaccaacataaccaagaatgactaacaatcctaacagggttccaataaccaaaacacaaaaacaaaccaaacaaatgaagagtttatctttacctgccatgattccacgatcacactttatctttacctgcaccataaagaaaaaaatgcgtaagttttatcataaatacttagtgaggcgatcctccatctacgagctataccacaaacaaatgaagag

SEQ ID NO: 46788 - DNA, 588 bp, Arabidopsis thaliana columbia
ctctaacacgttatacattcgttagccatgctaaacctgcaattgttttatggtccctttgaagggtcgtcggtggttggtctatccagcccaaaatccagcaatccgctatgtaaaaaggtaatctcttatttaagtgaacagtttatattatacgtacgactatgttcctacgtattaaattctaaagaatgaaagcgtagaaactgtaaaatgcgaataaaaacccgttgcctgttgggatatatatgcctttgtttgcctaacccatcggggcaaaagtcgtcatgatcattagtaaccaagaagtggtatatactccggttctacttttccccattattacgtgtcttttgataatatgtacttacattcgagggggggtgaattatgttattcatattaacaatataaataacttaagcttctcttcgaatattcggagcccaactcctctctcttcacgcatttctcgttgtcaaagacaaagttctctccttttataaacacccatctccacctcctctctcttattcaaacttctttgagaaaattcgagctaagtgtttttataatagggatgagtcg

SEQ ID NO: 46789 - DNA, 648 bp, Arabidopsis thaliana columbia
catgcaaaagtttagtaatcgagtagtcaaatttagtgattaatgtcttgagagagaattagtctaaacttgtgttcatgttcgagaacggtttattctgaattccttgtttattatttccattaatcattgttctctaaaataccctattagccaatgctttttatcatctaaatctaatcgtttactttcttgcattttaatttacaatctgaaaaccaagcaaacaacttcttcgctttagctaagaacgagtctcgaaaatccttagagtatctttggtccttgtggatcaacctcgaatattctacttaacggttagatatttcgggtaattactcgagcaatcaagttggcgccgttgccggggaccaattgcgttacctaaggatttaggattagtttctagtctaaagcatttttatttactgttactgatattcatttccgtgttttctttggcgttttcaggtgtatgaccgtagcaaaggctcatcacatctagtaaactaccacgaggatatcagaaggtttgaaagagagaacaagagaatatacagttagcggttcagagagaagttgagatggctaatgttgttgatgatgatggaatctaatttgaaggagacatcatggagtgttcaggac

SEQ ID NO: 46790 - DNA, 495 bp, Arabidopsis thaliana columbia
tagatgatataggtttgggaaccatctgttgtaggtagtacgatttgtatcctgagctagttagacaattcatggtttctgttagggtctactatgtgaatgacaggaaacgcaatgctcaggaaggagctcttatctacttcattcgcggtgtcagatagagtctaccaccaagagatttgtgtgacatctatggttttgacaatgatctcactggagtttccctgcttgaacagtttaaggatgctcaggttatctagtgcaggtttggtaatggaatttatgattccaaggacgaagttcactcagagattcgtcacccggtttctgcgatatttggttaggctgattactagcacactgttgtgcaagatgaagcctggcaagatgagactttctatgttgttgttgctctatcatgctgttcatgatttctttcctgacagctttggagttgaggaggttgccgcgatgcaactttggcgttgtgtttgc

SEQ ID NO: 46791 - DNA, 525 bp, Arabidopsis thaliana
ctcctttctccagccgatttgatgtcgaaattaatcatcttgactgcccaagctgctttgtgctcttattccactggaagatgacaagctttaccatatataaaatgaaaaggtgtggtaccaagcagagttttgaaagctgtcatgtaagcccacagtgcatcatctaacttgtaggaccactcctttttcgccttacccactgttttctcaagaatttctttgatttgcctgttggaaacttcaacttggctgctcgtttgtggatggtagggagtagcaacccgatgcttaactccataatgtagaagcaatttcgcaagaatcttgttaatgaaatgcttacctccgtcactaataattatgcgtggcactccaaaacaagggaagatgatagacttgaagagtttcatgacaaccgctgaatcgttcttcggactagctatagcttctacccatttggagacataatccacagctactaggatgtagagatttttgttggaagacgggaatggcccatga

SEQ ID NO: 46792 - DNA, 554 bp, Arabidopsis thaliana
ggtcactcttgtaaaacggagtaaaccttacattctccctccacactacccaaagacgacctcttctattaaactcatagttagttagcatggaccaatccttgaacaacttagaacccaaccactgtgaattttcctccttaactctcgtctcaatgagacaaccaaactgaaaattctgctcgtccacccatttctgaattacggaatgtttatttgatttgttgaggccgcgaacattccaaaagaaacccgacattaatgatgttttggagggagccctttactctgatctttaggattattcctagtagaagggtttgataatactttatgtgctgactttgatcccctaggcaaagaatgacgcaaaatcatctccttctttgctagtcgattctgattttctaccttttcctgaggcgggtcttgagttgagttttgtgttcctccgcttgtttacaacactatccgctgttatgatgtcatcccactttcatccttaccattcagagcagagtactatttgatagaatagagacctcccaaattgt

SEQ ID NO: 46793 - DNA, 861 bp, Arabidopsis thaliana
aaggtggatatgacaaggaagatagagcagctagagcctatgacttggcagctttaaaatactaggggttctactgctactacaaattttccggtttatattttttcctttttgctctgttttgctaactttgttttgattcttggtatgctctttacttaccttgtcatcgttctatggattataggtctcgagttattcaaaagaacttgaggaaatgaatcacatgaccaagcaagagtttattgcatctcttaggaggtgagaatcaaattaagatttacatatatgttcttgatttcaaaattggaatatttccaacttttggttaatgtaaatgtttcaggaaaagtagcggtttttcgagaggagcttcaatatatagaggtgtcacaaggcatcatcaacaaggtcgctggcaagcaagaatcggccgtgtcgcaggaaacaaagatctttacctcggaacctttggtaaaacgttatcttagtagacaaatgtcctattcttcaccctgaaaaatccagtcattgattcgtatatatgtgtatagcaaccgaagaggaagcagcagaggcttatgacattgcagccataaagttcagaggaatcaacgcagtaactaactttgagatgaacaggtatgacattgaagctgtcatgaatagttctttacctgtaggaggagcagctgcgaaacgccacaaactcaaactcgctcttgaatctccttcttcatcatcctctgaccataacctccaacaacaacagttgcttccgtcctcttctccctcggatcaaaaccctaactcaatcccatgtggcattccatttgagccttcagttctctattacaccag

SEQ ID NO: 46794 - DNA, 504 bp, Arabidopsis thaliana
ctaaagaggagttgagaagttggggttcggtgtagggcatcaagatgccgatgaagaacattgttcctgtagccttaattagtctcgtatgaatatcagagatggggagaacctaccgatgtagaagacgagtatgcgccagaagacctggcggattgcgatggggacggccttttggggattgctggattctccggccgtgatgccgaccctgatagctaacatcagtatctccaaagaaagtctcgaaggtggcgacgtacatttcagtccccgcatacaatgtccccgcaacgacaaacgttctggcaacgcgtatgatcgagtccgcaaacgctccgggattatgccagtacttgaacccgatgacgtcgccaccaatgccgccagtgctgatgcagatggccaagatgaagaacacaatgagcgcgaggactttgattctgcgcggatcagccagtgcacttttgacgagacgcacacagggagagacgtcaatgacag

SEQ ID NO: 46795 - DNA, 607 bp, Arabidopsis thaliana columbia
cagctttaaagttaggcctgagcataatacctgaacccgaagaaccgatccgaacccgacccgaaaaacccaaaccgaactcgaacccgaacttttaaaatattcaaacgggtctaaacttcaaaacccgaaaaccccgaataagtacccaaacatatctccaatataagtatatattaattatatttatacttatatatagaccagattaagattttttggatattttagttatttttgtatatttttaaatatattcaaaattactcatgttgttttggaaattttgaaattttcaaataatttaatagatttacatacaaaattttgatatttcaatatataaataaattcgaacccaaacccgaagccgaaccgatcccaacccgaaatcttaaattacccgaatgggttttaaatttctaaacccgaaaaacccgaacccgaatacccgaacgcccatgcctattcaaagttatatagtgtagtctcgtgttttctaatacagcaatgtaaaaaggtttcatgaagaacattgcaaaattgtattgcttgcaaaatagttttgtcagcaaaacacaacacaacagttgagtaatattgtaga

SEQ ID NO: 46796 - DNA, 443 bp, Arabidopsis thaliana columbia
ggggttggtgtcgaggagtgatgagcgatggctcacaacgtgacaacaacaatgaacgagtgctgctgacttacaagtgacacaacaaggaacgattgttgttgcttctctcaggttttgatatggatacatggaggtgacggcataacgaagaaggagatataagcacatatatatatacatacgtatgcacacacactttcacgattaggtttttgatattagagaagttgggctgttattggacctcattagagagccgggtctcacaacattttaagaggttgaaggcaacatagatatacctaatttatacatagatatacctaatttatacatagatataccttttagtttctaaaatttctaagttatattcaaacatagatatacctagtttatacatatataccttttagttgtgaaaatttttaagttacatt

SEQ ID NO: 46797 - DNA, 554 bp, Arabidopsis thaliana
tcacaatctttactggtttatattcccctaaaacttaatataatataacaaaaacaaaaaacacttagatgttactaaccaacaaaaacacaaacccatagatcttcttattcatgaggtccaccttaagtgagacactttttgcacctatgcccaactttcttgcacctatggcacgtacgcctcaccattcttcctggctggaaaggaggatgcataatgcaccttttctcgttattcatgtcaatgaacacgggtttgtcgtgagtaacattccatcggcatctcatctgatagtacccggttgttgactcatacgccagtcctttgttcttctctacaaactttgcatacggattatttgcaccaagacatttttggaagaaactgtagtacttagaatgaggcattgaccaccacataaaatgattgtccatgtcaatgcaaacagaggctagggtttttgtggacataagaacatcctttccctctctcccagctagcaaccagttctttaaagctcaacaccatcttcagcaagtttactaacgatg

SEQ ID NO: 46798 - DNA, 426 bp, Arabidopsis thaliana columbia
gagctgtcccttgttcgtaagctccgtgtcctagctgttgatgaggccggttcttcgaattggcaggacgtgaccgagccgttttatcccgaagttaaaatcgaagagcatctatttttcgggcctgatgagacggagaaccttgtacgagcgttcgagcaaaccgcttttgagaaagccgagagaaagaagaggaagaaaaacaaaaaggtggttcggtcgaaccctccaggctcaactttatccatcgagcagtcgttgtctgacttaagggctggttcggttttggcaacgtcacccttcgcgttcctagcccaaatgaacgagccgacgatcctcccgagggctttctttctctatatgaaggatttttctacatttgttttctctggttgcatgttcagaggttgactttggactacgtga

SEQ ID NO: 46799 - DNA, 585 bp, Arabidopsis thaliana columbia
tgacgcgcttgctactcactgccgtagacgacatcagcttgacatgttgaccattattgtaacgcctcgactgtccctactagtgggccccacgtcctctctcgggctcatggcccactcttgtccgacggttagtatgctacgtctgggagagtttaaagacttgttaccgaccctacaaatcaccacatgattatttctcatgctttgttctcacccgtatggtttcgacaatcacttcctggaaggtcaccaatcctgaaactactccagcccaagcacgcttaactacgaaattctctcaggacgtttgaccaaaaatataagtgcattttggtgacataggtggccaaatgaattcttttaaacctctcagcatgcaccaccatattcctttaacctggatgttacaattatcaaagatgagcttgacactatccgtaataggatccttcaaactagtcgagatatctcaatgtggaaaaggaaaaatggctcctacaagttcaagttctcgtcccaacataccttggaacttgaatcgggaagcaaatccaaaatgtgattggtaataagggagtttgg

SEQ ID NO: 46800 - DNA, 412 bp, Arabidopsis thaliana columbia
tgcacataactcctcacgtttattaacctgaggaaaaaatagaaaaagaagaagtgagtaaagaatactaagtgaggagaatcaactctacccacagaaacataaaaacactttctaaagctatacaacccatccacacaacatataaacttaaacacaatcaatcaacctaacatgctttaacttctaataatacattcataacaatcatcttatatatataaatataaacatatatatcgtatcgttaggtccagtcatcatcgtgacgactagaacctcatgagtggaggctggccctcgtggctcagacactctcattccgggctcgtcagccattcttgaccagctgttaaccagtcgatccatcattgtccacatcactagggaaacacggccaatagctcgattc

SEQ ID NO: 46801 - DNA, 542 bp, Arabidopsis thaliana columbia
tatcggttttctcatactcgaagatgtttttctgtaatcttaactcaaataatgagtgtatagttgtcatgaattatttaatagtttgaatagtttgcagatttttatctatataataaatcaccgagggtaaagagtatgtaagaagtttaatcatcaaattcttaattaggtttcgagaatcccagcattaccctctatttaattggtttaagacgaacattgtttaggaaatgtgtatatgatgcattgttgaaaatgttgtttgaaaaaaatattttaataataaaaataattatttatagcatgagtgaatgaatagataattaaaattatatttaaataaaacgataacaaaatctgaaaatataccgcagcgtagtgcagatgattatcgacacatcaaccgacaatatcttttttgtaaactcgttattttcgacgggggtgtatatgttacttttggtaattattcatctccacgccgttagaattcctcgaattttgaggtggagcatttttcccattttgttttctgatag

SEQ ID NO: 46802 - DNA, 588 bp, Arabidopsis thaliana columbia
tagcgaagatgaacagacggatgggaagatgaacggacaaaatgaaacaaggtgatgaaatgatgaatggaatgcaacgaaatgatgaagtgatgaaggatagagtactcaacttcagagtgtgctctgataccacttaatatgacttccctaagatcggcaatcttgaggttaagtagaggatagactttgcatttaagagatcatgagatcacgaaaaccaaaggatgtggagcaaatggtcacacaaaggatgcggatggcgtttgatttacctttgatgtagcttaaaagactttgagagtaaaaagatagatgagtttacaatgaggaaatacaagagtttaaatagagaagaagagaaggggaagagttagtcttagaacaaactataagacaactcggaaaaggagaaatcataaatgaaagtttgaacaaaaatagacccttggccttttaaattcgtggttgtcttagtgggcctgggccggattgataatgggggatttggaagtgttctcaagcgtcattaaaacctactaaggaaaccgattgggcaaaatcttatagggaaaagagtcctaagta

SEQ ID NO: 46803 - DNA, 558 bp, Arabidopsis thaliana columbia
gacatataatttaccgaacctttcgtctttcctgaagcatataactcagccgtaacatataatttacactcatctttcatttgcccttgaacatataactcagccgtgacatgtaaatttatagatgtcttcccttaaacatataattcagccgtaatgtaattttacagaacctttcgtcttccctgtaacatataactcagccgtgacatgtaaattgactgaacgtttcgttctcccttaaacatataactcaaccgtaatgtaattttatcgaacttttcgtctttcctggaacgtataactcagtcgtgacatgtaaatttttagcttcctaaaaaaccagacaagaatctcgtaaccatttatttttcgaggccgagagagattataggctaaaggtttagaacttccttataatttcaaccaaaaacgaaaaatatataaaaaacggataaccatataagaaaaacacaagtaaggaaattgaaattgaacttgtaactctgcttcttctctttgacctcaggaaccaggccagacttggaaaataggtca

SEQ ID NO: 46804 - DNA, 534 bp, Arabidopsis thaliana columbia
catatatagatggttagatgacgtaactcatttcttgatttgtttaacagggaaatatatgagtggactaacaatggtggtagatggaggactgtgtcttagcaaacctcgccatttggccaaagagtggagaagaggtctagggccaggcgaatgattattactatgttttggtgcatattgtacaaagaatgtagtattaaaaccaaaaaagtctttggtgctttggtgcatattaattatacaagaaaattctcacaacgtctacgaggaagcaaaaacgtctaagcctaaccaagatgaagtttcagaccagtctctagctctgaatacgtaattatggtcaaaactcaaacgtatggccgagctagaagaaaagtacaagtcccttgactcaaaatcagcagaagatgttgggaatgtcctgaaatcagttgtactttactctagttaaagttgtaatgtcgaggtttgacatttgtataatattaggtggttataatgtgttgctagagaccgcttataatctatgag

SEQ ID NO: 46805 - DNA, 510 bp, Arabidopsis thaliana columbia
ttttaaaactttgggttcagatcggatatttcgggttcagattcgtgtttacccgaagtatccaaagataaaaaattttgtatccgattctatgcaaacatttgaaaataccctaaaaagtacaaaactcgagtattttttacccgaatacaaaagtagctaaagtactcaaaaatttattcacattgaatattttattcacttagattattacaataaacattataagttacttatctaggtaactgggttcgaactctctggttgtgaagtttagaacacgttagaatattataaatttttgggtttcggttcaggttgagttttgcaggtcgggttcggtttagttcttccgattcaggtattaccccatgcctaaccggaaccaaaatgaataccaactgcccactactactttcgagtattttcaagcagatggatagtttttactggtgttttgggatattttagatacttttcagtagtatgggttgtattttaccaattttt

SEQ ID NO: 46806 - DNA, 734 bp, Arabidopsis thaliana columbia
  unsure (1)..(734): unsure at all n locations
ctctggtgttgcagcagctgtggcatctgtaataacagtcacattgggataatccagcgccactgcatcaaacaccgtttgccggatacagttcggcgtttgcacacctgaaaaaaaggttacagaaacagctcccttaatcttagagaaccgtagatatagaaagtttcactgaataagatagtcttaagactcttaacataactcaccagcaatcactaacttggtaacccctgaagtttgcaagaaggaatgaagattggtactaaagaaagcactgaaacgagttttcacaatcttatagtcatcttcttcgttgatcatcaatccatcaaccaattctgctcctacggtgcctttaataactggcccgactttctcagaactgtagttatggcgcctgaataattcaacatctcttccttgacgatcatgttctcgaacaacctaataccatgaaaaacactttgtctaagaagactcccacacactgaatcgaaactagtgttatctcatatgactcatcagtatctaacccatttgcccatacaatccttaaccttgagtcatcaagccagacatccgtctctggataagacaagctctcaagagtagtaacacttgacttggaaactaaagatctcacattaagattctggaaacagaacatgcaagncaaattcagacaccatttcactcgattttccgtttactaaagatttttgatatcaagt

SEQ ID NO: 46807 - DNA, 937 bp, Arabidopsis thaliana columbia
acaaacttttcgaatccataactaagcggtttaatataacttttcctagttttaactgtgggaagccgctaattttggaccccacagtggtcaacgtagcaaaggaagctgctgtgcgtcgggcagccatgaattatctacccatgctgtcccatcagcagctgctatatctcttgactatgtcctttgtttcaaggcaggttaccatggtctctttgtcatataacctgtacgttttgatggaccatgtcaatgctcatattcttgtaattattacattttccagagtgccacgatcattgctaccaggtggtcgtagctcccgactaagagatcggcagagagaagaaagagagttccttgtgaaaagagcttttgtagaagatatattgaacgaaaacaagaatttatctgttcttcttcgagaaccaggctctcgtttggtgatgtgggaccctgatttacttccgcgtcatagcgcactggctcttgcagctgctggagttgctggtgcttctgctgtttcacctccagcagtggcaaaaaaagaacttgaggagggtcattctgaattgcagaataaagaaaagacttctcttttagaggaattgagcttgttcatggagaagctgaatgatgtatactacgacgatgatgatggtctgcttaacgatttccaagttgatactggaaccttgccatgtgtggcttgtggcgttcttggcttcccctttatgtctgtggtacagccttctgaaaaagcattaaaagatctctcagagagacaaggagagacaggtaacagatcagtttttatccaagctatgaactgcatcatatgccttttaaagtctatcaattctgtatctattaactctacagatgctcaggaaattatgacactgtcatcagaaaagtctgactgcgaatggaaaac

SEQ ID NO: 46808 - DNA, 613 bp, Arabidopsis thaliana columbia
cagcaaaggtaacaaaagctgttgaatctcagaagcgcacttgggataatcgtggtgcgggaccagggcagaatggtcagcagtgtgccacatgtggtaagaggcacagcggggcttgttggagtaatactgggatatgctacaattgtagacaaaatggtcatacatggtcgaattgtccagggagagacaataattgcaagagatgtgaaaagcctggccattatgcaagggagtgcactacgtttctagttgaagggaatcagtagaacgaaaatgagggggacaaccactccctaagatacaagctttaagatctcgtgtgtacgctataggagaccaaaggattgatgttgagaaagataaagtttgaaattcaaattccaaggtcgtacaagttcatgttggagtaggcggtctaatcgttttaagtgacaatttcttttaggaattcattctattttttttatattagagtttcagttgttggcttatgcttaaacatttttattcatttttttaatggtcaattgaattgtgttaaatttgtgttgggaattacaaagttttctaaatgcatgagtggagaatatagtcgaataagagtattgaa

SEQ ID NO: 46809 - DNA, 472 bp, Arabidopsis thaliana
aaatcgtaaactcgaatttggaaaaaatagattacaaactaagttatgttataaacagatagaggaaatgagtgtgttattccattgagataaatagttctttatataggagtacaaggaaagggtaaaaccctagaaacatttagatgatgggcttagatgataagccttataatgagcatccatctttattcataacactccccctgatgaccattatagtaccataactcgtaaagtatttgaaatgctgcctcattaaaaaccttaccaggaaaacccaatggaaaaaaccatggttaagggaaaaagagtgcaacatacaattactcccccttatgagtatattcgtcgagatctttgagacggcgtaatccgatacgatagactaacttcttgaaagtagcagtaggtagcgccttggtgaataagtcagccagattattattcgaacggatctgtagaactcgta

SEQ ID NO: 46810 - DNA, 593 bp, Arabidopsis thaliana columbia
cgtgattagtatctcgagagagagttagtctagaattatgtttatgtgtgagaatggttccttataattgaattccctgttttgtttattttgctagtctttgtcttttgaaataccctaacgcccaatgtctttactccataagtttaatcgtttcatttatttgtatttttatttataactgagaaaatcaaacaataacctctttagttttagctaagaacgagtctcggaaatctttagagtatctttggtccttgatgatcgatgtggaaatatactacctatcggttaagtgtatcgagcaattactcgagcaattactcgagcaatcaatacctagaattggtaaaaattgagctagcctctagagatctagaagtaccacgagtagaaaaacaaagagaagaaatacatggtgatatacctagatttttaccgattctaggtatgatttaggtatggttttcagagtcttttaattattcctagagtcttttctagtccttttcaggtttttacactttaagaatgcatttggagatcatggagcattttggagctaaatcaaggaaatcaagatggaaggatga

SEQ ID NO: 46811 - DNA, 537 bp, Arabidopsis thaliana
actcgacctcaaaatttcactcgacctcctacagccaaccactcgacctttggtgctagcaatcaacagagccactcaacttcagagactttactcgaccactggtttctactctactcaatccaattcgtgatagagtaactcgggagcacttcagtttactcgagtattatactgtactcgaccaaattggtcaatttcattgccttttgataacaattttcgtttcattgttatctttgagactaacctactgacatttgagttttgagttccaaatcttctgcaggagaatcataagtaattacagtggtagttcttctgttgaccctgactataacatggatgagacagagtcgtcgtcttcaaggccataaagagaacagagagaatatgataccttcagaagaaaagaagagatagctcgagggaaaagagcaatgacaaagaggtatgagcttatagatgaggatctagaaggcgagtacatcccgagcatattcgcagagccaccaacttctgcacaacctgatgtgt

SEQ ID NO: 46812 - DNA, 1073 bp, Arabidopsis thaliana columbia
ggagtattgagcaacaaagaacaccaagtttgataatttggtggagtattgagcagattcgatattccaaagtcaaacaagaaaaagccttgacgattcaataagcgatggactcagagaaaatcctaaacggatcaatcgcaaacaaccaagaacgtaatcagaatcataaacgcgcggtacgggaaaagaggatatcaaatgacaaacccagagggatcaactttgcccgtagatttcgggaggctaaacgcaatcaggtcccggccgatcaaccgatgggaacgaagtcgggtcgggttgacttggcgacagaaacgggtcgtttgcttgaggattaacacaacaagacgccaaggagaataaatttagtttggcataaagtttccctaaaccaactttcttaactgctataaattagttagagtttggaccttattgggcttttacttaaatattgtgccggcccaccattttaacttcgacccaagctctcagtcagatcgattgcttcccggaagaatcagtcagaaacagtcaaacttgtaaattacacgaattacaacattagaaagacttggggtttatcttcatgttacaagacccaaatatatattaatcagagtgcaagggataagttaccggcataacccacaacaaagtctgaaaccaaaaggccaaatgaggcctcatttacatggcacagacgtgatagtcgtcctatttccgaatggcataagctggcaatttcgataagtcgggtataacacaagcaagttcggaagagcctgtcacaaacatgggacttcctggaccccatttaatgactgggggctcatccctaaacccatccaactatgtacctacacatacaataatccaatcaacactcaaaactatacaaaagcaaagtttccagtgacaaactatgtacaccaaactatggctgtattgctagtccaacctgttttccgctccttacaccccatgcatgagtactaccatcacctgaacctaccaaaccatgaccaaaacagaacaagttatttcacatgaaggaagtgtgtgagtgt

SEQ ID NO: 46813 - DNA, 468 bp, Arabidopsis thaliana
tgagttcaaagcttcaaacttgacattcagatcgttgtatgaacaatcgatcttgttgtgtaattcagctatcttcttgtcaaaagccatagcgccagtagcttacccttggatgatctgttgaatgagttgcttaatttcaggatcttgagctgctggggcctgttgtggttgttgagtgaaccctggtgttggattctgctattggtagcatccattgaactgttgtttagggacataacctgggttgtactgaacaaaaggcttggactgattatgttgtggtggatacagttgatcttgggggttagctacattagtgcttttgtaggagaggtttgggttgggcttggagttgttgtagcccttgttgaacccaccttggttctgaatgtagcacagctcttcagtttgatcattcccccttcttgcatttggaagtgccttcatcagtgatgtagtgtatct

SEQ ID NO: 46814 - DNA, 560 bp, Arabidopsis thaliana
tttttggtataactaaacggtttagtttcccgacgtcacttggcgttaccgttttctcaaacagtaactccgccgttttaaaccccgtcataaccaccatcgaagccaaagcaaacgccgtcgtctcttttccgttaccgtcacggttacgtttcctttggtctaactcttctttgtaagtgtgttttctcaacatatctacgatctctgatttcgaatgcgcgtttaagaactcaacctcttcttcgaacgtcgtgtctttgaaattagtaacggcatcgcggccacggaaacggtgagccgcgacgtcgtaagcacgagctgcttcgtcttcctcgttgaaagtaccaagccacacgcgttgatgtttctcgtaaatctgagctccccatcttccatttggttgaggaacaacacctttgaatcttgaagaaggaagctttcttgattcggcttcgacttcgacttcgacaccgttctctgaatcaagtaccacgcttgatccgctttccattctatatagtaaactcgccggagacgatgactttctcgccggaatg

SEQ ID NO: 46815 - DNA, 382 bp, Arabidopsis thaliana columbia
gaagcttattttctgcagactgtttaaacaagaaatcctggataacatgaaaggttttagatgcaagaaaacatgggcttatgttttcaagatggattcttctgacagtgtctatgtattccgagtagaacgctagcaagtagtcaagtagctatcacttatgtcggtcgctttgtgaagttagaggtgttttgtggtctttcacatatttttaagctccatcaaggggagatactgattgatactggtttaatatgagtgagatgtagaactcagttcacaagcatccaagcagggataagaatgtgatgcaatggtgcaggggtagtgtttttaccgtgttgttgcatatatagacgtttcgattgatggagcttggatg

SEQ ID NO: 46816 - DNA, 544 bp, Arabidopsis thaliana
agtaacgcccgacagccgccagtgtgctctaaagagaccagcgatgaacctgatggtacattcgtacgatttggctatgcggaacaatatggaggcgggtaacaaattagtctgaggcggagtctccgattcaggtcgccgagcgggagaaaaatgaagagctctccgaagctgctacggcaaatctggagagggaggaggctgagcacgcggcctttataaacaaagagaatgccatcaagatggccgagtagaatctcaaggcggattctgagatcgtccgtctcaaacagatgttggccgagacgagaggacttcgtgatagagaggtggcttgggccattcaaacgacaaggcgagaggtttcggaaatctttaccggtaagttgaaagctgtcgagcacaaagtgtcactccttgatgaggtcaatgaccagttcatgtacctatcccaggcgcaacatatgcgcactaaatcaaggcgcttgaagagggcggggttctggagagagagaaagatcaagtcgatgagtggttgaaggat

SEQ ID NO: 46817 - DNA, 556 bp, Arabidopsis thaliana columbia
tccgtgatggatattcctggatgcattgcagagatttctcaatctattttcactggaaagttcggtaatttaggtccggcttgttgcaaagatttttggacaccgataattgcaaaccgaaaattccattcattccattttttcctccgatgctaaaggaacaatgttcaagagttgccggtgcaactcctcccataccaaaatagtgttttatcttatttttaaaatagataactttttcaacttattttttaaaaattttagcttacgttacatgttataataataattaaaaaagaaaaagatatagtaataacatttgagaagttgcatttgggttccatgtttatacatttttcattctaatgaataacaccttgaaacatcaagtccataattgaatttagtcttacaatgttacaaaccttcaaattgtttccataaatctttgaaatatgtcataaccctacaagaaaaccgtcgttttgcgagggaagaattactcgctaatccctcgcaaacagccatacgcgagggacttgcgacgaaatcaagt

SEQ ID NO: 46818 - DNA, 532 bp, Arabidopsis thaliana
acaggtttaaacattaggtcgacgttgagctcgtgctctacgattttgacgcttactccaggcaagttttccgaggaccaggcgaaggtgttgacgttttccctgaggaaagaagttagctcggtcgtcacctcttcgcccaaatctccgccaatttccacgcatcgttcgaggttctcctcatcaagacaaacatatattactgggtcagaaactggtctcgttgattcccggatctttagttgctataactgctcggagattgctttttcttcggctcgtcccaacttagccttcttgtgatttgcgtcggctgttgattcggtgacggggtttctaagtttgtgtgctgccatgaagcgaattcgggcacttttctgatttctccagatggtcttcacgacgttgcttgtgggaaagttcaggcagagatgataagttgaggcgacggctcgaatttgatttagccatggcgttctgataattgcgttataaacggttggctggtcagtaacggagaaatcgacgattt

SEQ ID NO: 46819 - DNA, 496 bp, Arabidopsis thaliana columbia
caatttatactaatagaacaaacgactgacattcacctcatttgagcgcggccaccatttctcagtatcaaatcttcgataggcccaaagactcccgttatatgggagggacaaatcccatcttgttccatccatgttccttaaacaattcataacgctgccaatcactgtcttgataatcacattttacggctgacgtttgacagagtcaaagcgaactaatccatgagtaagaaatcatgacgaactcagttcaaaggactatactctatagttgtgatgagaaactcttatgacactcatataacaatcttgtagagttctcataacgggtcagtccaatactatgttctctaatacatgtctttgtgattgactttaataccacatattaatgactccatgaaacttagtcatcagtcacctcacatactagtcattcttagttatcaatgtcccaatttaataaccttgactagggacttcaataagttat

SEQ ID NO: 46820 - DNA, 586 bp, Arabidopsis thaliana
ttttcgtaatacgtacattttagtatttcgactttgcaaaagaaactcattctattcatcaattacggccaccacaagctatctcatccttattttcgtatcatcattatttcatataatcatatttcaattttttgtggtcactataacactaagataagacaaacataaatgaaaagtcaacgaatgatgaaagcacttgtagcatatacattaatacatatatacctgcgagacgagagaggcggcttataaggcgacgtacttcgtcggtacggacataaagaaagcagttaaggcggtgtgttgaaaagatctcgatagtgcagaggcgacggaggttacgccagtgatcaccgtaagtgcagcgatcatgtttgtattgttataaccaacatgttttccgatgatcacctgtggccggttagctagaacgacgtcgttcttgccaaagcactcctctgccgcaaccttatgtgacgacaccacgtagactagacgggatcaagtcggagggacatcacgccgcaccatcgttgtggtcgagggtccggagaaggagcggagggtgcggtggatggggtgc

SEQ ID NO: 46821 - DNA, 554 bp, Arabidopsis thaliana columbia
cagatccacgctcttgaataatacgtcaaagtggtatggcgttcataacactttttggttcaaggcatactctatggatgcaattactgtttttttaacgtttattatgtaactttttgggtatgcaacatggctaaccttgttggtttctgatgccatggttgttagtttacttgctttcttgtgtatgtctttaagttgtaagtggctgccactgatgtacttttcgaaatcgtgaacctaatgaaaagaaaacaacacttagtaaaaaaaaagaaaacatctttagtttatgcaactctcagactgtttagcttgattttcgagattattatttttcaaattatttatgtaaactaatttttctagaaattaagtaacggttgtggagttgagtttttaattagtgtgtggttgcttaaaaaaaatatgattcactttttaaaaggaacggtttacgacaaaaaaaaaaaacaaaggaacggtttagtataatttgtaccgaacgcagaccgcaactgcaaaaaagaagcgtctgggtgcgattgcggtat

SEQ ID NO: 46822 - DNA, 566 bp, Arabidopsis thaliana
tccaagtcggagggacatcacgccgccaccatcgttgtggtcgagggtctcggagaagaagcggagggtgcggtggatgggtggcttcagaaggcggagatggcctattattggcaaccatcccggcggagacggtggaagattctgtttctttggttttaagaacttgaaagagattatcaagaagatgagagagaaaatggagtagagaacaactctaatgttggtttcttccatttgactgtttgcttcttcttttttttcttgtcctctttagtaaagttgtttatatgatgaagtttagaaaaatcaaaaatcaaaaagttggttatattattcgaatttcgacacgtttggtaattaggatttaataattaaaaataaggatcgtgacgggatgagactaaataagatgtatgaactttttttttttttcactaagtgttgtcttcttttagatcataattgtacaatagtagatctccacttacagcttgaagacatacacataaaacaagtaaactaacaaccatggcatcagaacgcacaaggttaacatgttgtat

SEQ ID NO: 46823 - DNA, 975 bp, Arabidopsis thaliana columbia
tatcatatatctcaggagtgacttcctacaaaccacacaaaaaccacttgtcaagaaagctgagctatttctaaatgttgcagatagaaatcattctatagcaaaatgtaaaagtgacctgaaaacatatgagatgaggagaatgaagctgaataagatgaccaatcgctctcatccttagattcaactcaaggtcttcacgaaaccaaacattgtagctcaagatcttcaagcaagttaaaggtgttcctgaatcagaagctacccctacaaaaaccaaacaatgacaaaaaaagtaaagacttctgcattgaggaacaatggaaatcaaactcacacaatttagcagtaatcaaaaaccaataacaagctttagatgaaacaggaatcatacagtaataagtctcgtctttcaaactgatatctaaggtatgagccacaatgagtataccaaaattcacaaagacctaaaaccctagggagtagaaaaaaaccgacctttcgtttcaatctctttgttcttcttcatgacaccttgcgattcagagcaaacaacagaagcaccatcgacctcgacgacgtcatcatccatagctttacgcttgatacaccgccgcagaggaaagaaaacagacccgacggaggaatcagcgtcgttactctcgagacccgaatcagtcaaatcctgaaatcccaagagagaagacgttggcgatcgtgttccacagacgtcacagattgagttcttgtacgtgttcaaaaaagtacaggccttgcaagcccatttagcttcatcgttcgcggaaattgagagagaaggtggaggaggagacaaagaagggagagatacaggagccaagcagatcatgcaattgagtttctgagacgcagaattgaggaaagtacatttgttgcaggaccaagacgacgacattgctcgacttgtgacaattctcagaaatcggattgttgttg

SEQ ID NO: 46824 - DNA, 576 bp, Arabidopsis thaliana
gttattttgaattaagcatatccaaaaagaccctaggcgaacgtgagagatcgcaagttcgagtgacacttggaacgaaactaatattacatgatgtggtttcgggcctaaaggaattacgggcttcggccagaacctcctgatattcaaaaaaaaaaaaaaaaaagatgtttataataatgatctttgaaattaaacctctacatttatcataatattcctaaatagtacgtaaataaaaaacatgcaacccatgcatatccagtcttaagtttatacatatagataaatctcaaaccatacaaataccattgttcttgtgattttttacttccatttcctttttcctccaacggtgtcatataaagctaacaaataactcgtgattaaacggacatttccaatatgggcttttgggcccatagtgatatgggtctccttccgatatctttgactgcgcgtgctccaaagttgctgtagagaacagaaagaggccttcgatcctggctttgtcagacaaaagctgcctcatctacctggaacttcggtcgaggtagtggtgaaggggggatatgt

SEQ ID NO: 46825 - DNA, 379 bp, Arabidopsis thaliana columbia
cctttcgtcttctcaaaacccaatcggaagagaaattcaaagatccgaaaacggggaaagatgcgatgacgaccaggaatcggagggttacaaaaggccgcagctgctggggtttgatcctaaactcaatttcatagttttctctcgaatcttatttgattgaatatgcggttttacctctgtatgcatcaaaaacaggatcaataccgattactaggagaaaatgtagccaagttacggactaatatgatgaaagaatagctctccacgttcctttcccagcttgaagagttcgctcgtaaacacgaggtcgttgtttgttaaatctttatatatatatatatatatatatatatatatatatatatatatatatata

SEQ ID NO: 46826 - DNA, 616 bp, Arabidopsis thaliana columbia
cgtttgatattctccttgaactagtgactcgtttagtgttgtttgttggtaggaaacggtgacaaccgaatcaagctcgaagaagagtgttaataaccaagccatcatcgatgctatcactttacgattggagaatataatagatgtcaagcttaagccaatcaacgatcaacttaaagcaaaagggaaagcacccgatgaacaagttgtaatctcggaaggagagcaatctcaaagggagatgaaaagtcaaaccaacgacccaaagaaagacctagttgacccaagagctcaagaatattacagcagccacggtcactcatctcaccggagtaaccggagaccaagacatgcgagagaagaaagatatcttatggttttgaatcttggtggctatcagatgaagcttccacctttccatgggaagaatgatctggatgcctatttggaattggaaaagaaaatggaactcgtattcaattgtcaaaactatgccgacgttaaccgcatgaaggttgctgccactgaattctacgactatgctattagttggtgggataaatcgcactacaagaaggcgtaatggagagtacgtattgagaaatgcaagggttga

SEQ ID NO: 46827 - DNA, 515 bp, Arabidopsis thaliana columbia
cgagcatcgaaggttgaaagccatgactgcaagaaagaagagggttagatgaaagttaaagaagattaggagggacaatttatagaaggactcatagctttgagaaacgcgatcccattcaaggtcggagtgattcgcggaacattcacgccgtccggactgccctgcatttaaaacgtatctccgaaacgaatattttcgaaatcaggaagaataggaaagcttccttaaataaaaatgggtcggggccataataagtccaaacaaaataaaaagagagagaaagtattcgagttcgggggacacttaagaatgtggctcaggaacaggctccttcatcgccggttcagggttcgaagtggatgcctcgttcttgacatccgcctcgaagtcattcttcacgcgctgctaggggttgctgtcttcttcctcgttgtcatcctcttcgctgttggagaggatacttcgaccggagcattcacaggaccaggaacttggccttgagcatggttgtg

SEQ ID NO: 46828 - DNA, 593 bp, Arabidopsis thaliana
ggcatcctgatattcctcgacacgacatctgtaaatgatggacatatcaccattcacacggagggtaacaactggtcctttcaccggccatgtcgtgtttcggaagcacatgtctactctgatgaatccatcaccattagaagcttcgaacatatttttagtatgatgtctttaagaatgttatagtttggtataaagaagagaaaactataaactatttaagaagagaaaattataaactattaaaaaagagaacacaaattcttaccaaaagttgcggtgttgaacgttcttttactattgctagagcttaaattgaatgtgatgatggttgaatcttgaccatcagcgataagagttaaattggatttcatattcccaatgacaacgatttcaacatagatgcttgtcttaatataaatgacgaatctcttttggctgtgttgaggtgccgctgcaatggccacattcactatattgtaatttccggtcacatccttcgcgtccagaatatcggtaattttctttagagtctgatttataagaacataagacatctatgcgcattagaaagaaaaaaaaggggggattgt

SEQ ID NO: 46829 - DNA, 500 bp, Arabidopsis thaliana columbia
ttcccttaccttccttcacgttgttcggtcgatccgacgcttcttcttccttgccggccacagtccggctaccgaacctccgactatttattctcccgagaggccgagagtttattggtgagtttccggtgtttttttgtgtgttgtggtatcccaaatgatcttgggcgcccttccttaaataggggacgaatagatgctttccgaatcaacaaatctgttccttgcaccttttcgaagagttgcacctttccgaagagttgcatcttttcgcccgtaactgctcgcccttatccaccctttgggcaagcaaccgttcgaccataaccgcctaaataaccgtccggataaccgcccagttggtcggacagtcgaccagctacctcgagctcaattgtcacatcgccagctgccacgagctcaactgtcagtcgtccagcatgccgagctagactgtcactcgaccttagtaaccgtcactccttcagctgagcttgagc

SEQ ID NO: 46830 - DNA, 499 bp, Arabidopsis thaliana
tccggtgcttcctcgagatgatccggttgtgctttcccagaagatggctgctgctgaagccctcattgcaaaccaagctgagaagatcacctgttttgacgcatactttgattaccttgccgagaaggatccggagttcgctgccttgtttcgagccagatcctctacaagaactgaaccagtcagctccaatccacctgatgcgcctaatgccacagctgctgggatcggacctgaggctgtcgaacctgaggctgttgtagctaacccaaacactgggtcatctccatctgaggccttctaaatttctgtattcagtttctgttttcactcatcaaaacttgaatcttttgtggtctctattcagttggcttgttttctgtacttgagacctaaaatttcagcttttaaatatgagtttaaggtttctaaattagtattcaaattaaaagtttagtataaagatccaattaagagaatcattaaatattgttaagta

SEQ ID NO: 46831 - DNA, 344 bp, Arabidopsis thaliana columbia
cttcaaagcaaaacgatgaaaggtttcaagaagaatatgaaaaccatgaagaagtcgttgacgggtatggctgctcaaatcaaagacttccagagcaagccgaggctcccatctcacccccgaagtaagaagaagcggttccacaagttcagctgcaaggagggccgacaggatcgctcaaccccgagcttcatcattcgagcctcgtgaagtgatcttcgagttgagagagccaaggagtaggcagagaagagcatccataaggtcgaccaactagtcaacaggacaggacgagcaaaatcatcccgcctcaacatcagttcctacttatactcaagagagta

SEQ ID NO: 46832 - DNA, 604 bp, Arabidopsis thaliana
  unsure (1)..(604): unsure at all n locations
nnnnnnnnnnnnnnnnnnnnnnctaaagtagaaagtaaagatgcgtgacattggttgaacaattcatatttattccttggaagaggaccataatagaattgagacatatgatatctcacaacgcggtttcgtgataatctataaggagtcagaaatccttgtttgtttggatagccaaaatcaacgagataaaatttttcggaaagaggcaaaggaaactcagaatcactttgttgtgccatttgcaaacagctgtatcgtggcacgatatcggtgctccattccaaatatatgtaaataacatattcaaatcgcatattgccataatgtttaatgatgcattatcatgtcgattccaatacattccttgtattgatgcatgcccaattaaagcatgccaaaaacagttctttaagtgcattaatgcatgcccaattaaatcttgtgtgtttggaaaggtctagcgcaacaaatatcgcttctgcctttttaaattcattgtaatcatcttggtcaaaagcatcgggacgaagttgttgaaaactttgtcgttgaaattctctataaccagcaatagtgtcttgtatagttgtatcaaaagatt

SEQ ID NO: 46833 - DNA, 484 bp, Arabidopsis thaliana columbia
acttgttggctagggataatttattgagcatgtcaattacctgtaaactgaggaaacgaaactactcaattaccccatcctcgggaattctttatctgattgatttctttgtttactctactgttgtttactgcatcttattacctgttgtttagtttttgcatgtctctcctgttactcgacctgatactcgaccacttagttgtctgactgtgcagtcgagtatctctgttacattttctatctgttactcgatttgtcattcgatcacacccagtgcttggcaacaagctgtgttggtcgagtgtttctactgttctgcttaaatttctgtctcctgcatcttcacttaggactgctagaacacaccaaaacctgttattgcttggcttgaccctctgtgaactttgattgcatcttaattgctagcatcacactcatttcgattgacaaccttcagtactacgacgagatcattggtgtt

SEQ ID NO: 46834 - DNA, 820 bp, Arabidopsis thaliana
ggtggtgagaatggtaacgagagtagaggaagtggtggtggagagatctgtggaaccagtagtataagaactcgacgggaacagcatgaagtagaaaagaagcacatgatggtggcttgggagggatacgcgagcagcctgggagtttgttgttgacgagatacatgaagagcgtgttgaagatgatttggtcgtcccaagattgctctcggtccacttgctcgaactcaatgggcttgtccactgttaaggtttttaaaacactacatccacgatcttcttccttcccttggccgtcttgtgacgcgacacactgatccatatctggctgtgaatattctccacagcatcatcgccactatcattagtctccataggtccttctcctcctcctcagctgtcacgtatgaatgtatgcttgcaatcgccaacggggcaaccaagaacttgaagccaccaaggggactccatggccattccgtcagaactcccggcctcgacgccatccaaaggtattgaattttagctaagacgcgaagaagaggcaaagtgggctgggccaaccaagttttgaagctagaatgcaacatgatatatataaagaaaatttcaccgtgaccacctctgtgagtttttcttttaggaagaggcaaagtgggctgggccaaccaagttttaaccattcggcccaaaattgacgaatttgccctggaacgagaaactgacggagccggttcagtttcgtgaaccgttttctggttacggaaataattttaaatatttaaaattatttaaaaaaacgtaagtaaataattttaaa

SEQ ID NO: 46835 - DNA, 565 bp, Arabidopsis thaliana columbia
aaagtataatcaccttcaaagtataattttaatattaaaatattatataagcggaccattttatggtttagttgattaaaatattatataaattaaataaaaagtataattatggttttatttatacaaatccactagtgacaaatccatgaatattgaagtagtccatgaatacaaatccacataaacatacataacacaaaccgtagaaaatgatgtaatgttttaatatagagaacaattaccgaatacctaaataattattttgatagtaattatggttgattcgattggtatgatggagataaatacttagacgcagagttttaataaagagaacaattaccggatactatttccttaaattcccttattcgaaatctatggaaacctatccacttgtgacaaatccattcataaaaagtaaaattatgatttcaagtatacaaatccattagtgacaaatccatgaatattgaactagtccaaagatacaaatccacaaaatcatacataatacaaactgtagaaaatgatgttctacattttagttcgttattgatta

SEQ ID NO: 46836 - DNA, 560 bp, Arabidopsis thaliana columbia
acaaaatgttttaccaccgctgatttaataatgtggatagttttccatggatttcgaataagggaaattaaggaaataatattcggtaattgtcctctatattaaaacactgcgtctaagtatttatctccatcataccaatcgaatcaaccctaaatactctcaagataattatttagggctccaacaggacaacaactataccaggggtacaagattttgaactctctcccagattgtcatttactacatattgggagtttggatgtttgccccgagtgctttttcctcactaatttttttaagatccgtactttgtgatagattaatttttcagtttgttggaaattcgctttgtgtcaagctctgaatcaataacgacaaaaaatgtgagaccatcattttctacggtttgtattatgtatgtttttgtggatttgtattcatggactacttcaatattcatggatttgtcctagtggatttgtcctagtggatttgtcctagtagatttgtaacttgaaccataattatatttttatttaatttctacatatttt

SEQ ID NO: 46837 - DNA, 458 bp, Arabidopsis thaliana
aggatcccctgtcggctctatagctgattagctggtgggcgattggtaaagtggtgcgacgagttcttgaaacagatctatagaatactgacccctgaattcattgacaatttggtatgtgataggagccattttctctgcatttccatcagttgcagaaatttggatgagcttcattgtgaccggtccacagtccccagacctctcgttgacatagatccctttcattcttgagcaactgaaaggagctaacccatgaacgtgagacaaacgaggcggtcagaacttgttaattaaatacgggatttggaccacaataggtgccatgagctcatcaactttacgatcatcgtttagatggtagtttggatcaagtacgtagacacaccaggttctctaagttgattgccagccctatctaatggtagtttcccaaatcattggcatcaggatgagat

SEQ ID NO: 46838 - DNA, 604 bp, Arabidopsis thaliana columbia
taaccagtcacatctcgatatcgcaaataatttgcctctaaaatttgtaatctttagcggaaactgaaagactgaactgctgaccaacaaattaaccgaaaccagcgatacaaaggtcttcaaattaaataacattccactttgaatcaaaagattcatatatatatacattgcaacatatttgccttaggtaaattaaatctcagtatatttttgataagcgattgaatattacaaaattctgatatatagctcaactggttgacatacttcgaccaaatgctattttccctcttttacctatgtcacactatgtgaaaagtgaaatggaagaaaatttctaccaaattccgataggttaactggttagcatattttcaccaattacatttgtactctttcagactttcacctatgtgaaaaattaaagaaagggaacgacggcgtatgagtcccgacaaagatttaaccgacaagacataaaatgcttacacgacgacgagaacacacaccccgtggatcaaaggcggtgcactcatcataaactttggaaagaagaaatatccaaaccaacctctatcttcatatatatatacatacatag

SEQ ID NO: 46839 - DNA, 545 bp, Arabidopsis thaliana
cgaaagtgtgctctaaagaacagctgtcaaattcgatttaataaatgatatttctttggcagacagaaactctgctctggtgaagtgcgaacgtaaagataacaattatcgaagtttgaatttctaatctgacattcgcgaaaattactatgaccaagttgactctgcgagaagtcaactgtatcaagaatatttttgctgaaatcgacacattcaccactcgctttgataaaaatcacattgtgtaaacgtcgacatctaaatatgacattatcaactattgcagtagtaaaattgcaatccccaatttctttacattcgaatgttacatgttgtagatttgatgataaaaaagacaccttcgatataacgtcacctttaaaatgacaacttgttaaatccaaatcagacaggtcgatatacccctgcgcatctttatccatcagaaaattgcaagcgcattcaatttttttcatttctgtagaattttacacttatagtatcattactgattgagacttcacgaaacatatttattgcatgat

SEQ ID NO: 46840 - DNA, 1760 bp, Arabidopsis thaliana
acagagcgaatttccaacaaactgaaaattgatctaacacaaaacacggatcttaaacaaataagtgaggacaaagcactcggggcaaacatccaaactctcaaaatgtagtaaatgacaatctgggatagagtttaaaatcctgtacccctggtataattgctgtcctgttggagccatgtcttgtatctgagtcatgacctgctcgacgcaattaacagcttcctgaaaattattaaacatctccaaatacttttttagtattattctaccatcctctggattaccgcaaagaacataaaaaaataccaaaagcaaaataagaatgtaagtaatgtactgcggcttggccaagcatattcagagcttgaacagaggggccaactagagcagctagtcgtaagccttcgatgtatttggccgtgttgttgccagactgtaaacacaccaatttcctaagttgattgtcagcccgacccaatgctggtttttccaaatcattggcatcacgatgaggtcaatttcttcaaccaaactgatggagaaccaggaatggtccgcttgaactggttattccattggacgcgcaacttattttttgcagattgaaaggaacggtattttccttgtagataattgcccaaccaaggtttgataatgactgcgcgttctttagagagtgtcaatttgtgccattcattaaggaaacttcctagtacctccatgtgctgcaagttgtttagcatgaatcatgtaagtagcatattgatccgcatgaactaaaatgagttaatagaagtttgttttaccatggtatcaacccaattggtcggctgtgcaagctggagcaaaaatctgtgggatatcacaatatcaccacgagtgatgtgttccctgaaattattaagtaattttagtttttcgataaagcatcaacagatagagaaaagttaaaagggtaatcaaattacttatgaggctccttctaaagggtgtcaatgaaatctttgaaatttgtttgtccaaagtaggaacaaatcaatctgatccgtggggggagcatttgggttttttttttgcaaaaacaaaacaagttgggcttctttttaagtgaaagcggttgacaactgttccgttgcaggtgatgaatcactgacttcaacataagctccactattggcgggaacatcctaagatgttataaatgaaatttaatattttgagaatgccataaataaaccaccattccaaatgagcagcagaaaattctacctcttcatcatcgttttcaatttcatcatcttctttatgatcatcgtctttttgatcatttgggttttttttgcaaaacaaaacaagttgggcttctttttaagtgaaagcggttgacaactgttcccttgcaggtgatgaatcactgacttcaacataagctccactattggcgggaacatcctaagatgttataaatgaaatttaatattttgagaatgccataaataaaccaccattccaaatgagcagcagaaaattctacctcttcatcatcgttttcaatttcattatcttctttatgatcattgtctgtgtgatcatcttcttgtttatcatcctacaagggaaagagggtataaagtgagttatccacgacgttaattgtatccacaattaagaatccctatcaaatacgtagtccacgtggataatggatgctaatgttacctgtggattgatgggtggttccattatataaattcaag

SEQ ID NO: 46841 - DNA, 1013 bp, Arabidopsis thaliana
gtctctttctttctccaacctcctaaccaccctgtcttctctgctttcttgttgcctcaacatgatcttcctgatgatgaacaatgaaaccattctcaccattgacatttgggaagtctggtaaatccagcttaagagcatcctctagttgcttttgctcttcatctgttaaaacatcgcagatatcatcatcgcctccttctacagccaatgaaccaggaacctttcttgacttaacactaacaacaacattgttcatctcatagaccttagctttccaaggaccaaccatctcactcttctcctgcctcctccaattagtctgcggagataaaaccgcttgtgtcacatcaatcccgggtctaaagatattgctcttacacattgcagccacttctttcctaacttcttcttctgatggaactccacaagcaccatccaacgcattcatcacttctttatccttatgattcaccatgtaaagcgatccacgagcaacttcaccatcctctgacccatcaccaagaaacaatatactttgatcagaccgttgaatcttaaacccatcaaaaccagccatagtcatatccgctctcaaattcgatcccactttccaaaccttataagtatcagacggtgcaaccttagatacaaaaggaacaacagagctctcaaaatgaaaactcatctccaagtaaaaatctttcatcttactcattgtagctatcaaacgaggtagtctcctacaccatttagcccaagctaaaggctgatagtgccgaactataatcatcgctatcgcctcttgtctactgcaaacagcttcctgcaacgcgttccaaccgtcttcgttttgcaaagtccagtcagctccagcaaccattagcatttctactgatgttgaatcacagagcttcaccgctagatgtagcggcgtgtcgggcttgggacgtctcttctatcaatcacagctgaaatggtatcggattttgcttcctcggataatgaagctg

SEQ ID NO: 46842 - DNA, 983 bp, Arabidopsis thaliana
ttgccgaagagacatgcaaagatgtagacacttggatccctgaaaagcgttttcagaagtttaaaaccataaccaacgccacagaaactatgtaggagtgttgagtcgcatcaaaagacatcccataccttcataacctttcgataaccattaggcctcccaatagcttttgtcctaacctccagtaacgagatatctgatattgaagctaaggcctctccacgaaatccaaaagtttcactagctgtctccacgttggtgaagtcgtgaaactttgaagtagctgcttttacacattgctcatgattagtttctcatcagatcgaaaatcataatgagagaacaaaaaagagccagaacttaccatatctttctcccaacaaaaccaaatcatctcttgaaacgcctgatcctgaaaccaaagtcaatgaaatatttccaaattaggattcaatgattagtacaaaggtaaaagtaatgattttgaagctatatactcaccatcatccacaactttcacagagcatgaaacaacacccacgaagatagacacctgaatatagagatatcgataagcagaattgttccaaacccagaagaaatcgaagaaggaggaactgatatatgtggaaccttggtcgccccagcatcgagactgttgaagacgagttcttccacgaccctcgccatgtcgaacatgataattccagaacgcatggagtgacgaactccttccggcaagggcttgatcgtcttcatctcaggattatcggactgagacaccgagaaacaaaaaccctagacccaaatttgtaagaagaaaatcccgcgggtatcaattactggagactgcaaagctgattatcgccattagacatgaaattgagaaaaaggcatcgcctttcgcaacataatctcacgctcgctcttaacgggaaagttcagcactgtgtggactggagggaaaacgcaatttgggggta

SEQ ID NO: 46843 - DNA, 1707 bp, Arabidopsis thaliana columbia
actctatgttaatgtaaaactacttatacacctcagtttttgtttcctataattatgttctggtagaaagtttgaatccggattcttattggattactttttatcagtagagccaaaacaaaacgtacttatgagttctgacaatgtatattaccacgtttaatgtaatttaataatatggtcaattgctttcgtgagagggtatttcttatttattgagattttcttattgcaaacttgttatctaacatgactttagaatctaaatctaaatgtaagtttaaggaattatacatatttaaataaatggactcaactctacattacttctcaaaatatctacgttgttgcttatataagttacatgttaattttgctttccaaatcaattcatgattaatgagaaaatggagacggatacaaacgcccatagttgttgatgcatgcaacgtataacatagcgtaaaactaccgctgttaattatgcttggtgaatttcgcatctcctgttggtcgcttctcgtgtaggttaggtcgattaggctggaatattattatcaaggtttcttattatttatttttaaaaatttcatttttgataaagggtcttcaaattaaaatgcaaatgtcaagttacaggaccacaacctttttgggtccatgcagtttagatgatagtttagagattaattagtgttacacgtacctaaccgagaaatagaataacaacataaggatgatatatgaagtaaagattatccataacaattactgaagagggacttgtataaatctaagtgtttgcaagttatttctaagatgatcagatgatccacaacttgtatgcttgtaaaagaggaattttggaggtaaaaagtcattcatctgaaacaactcgttttttcttcttcttgtttacggtttttagttttctctctttgtttttgcccgaattcacaacaacaacatttcgtaatggcggatgatggtaactaatttaaaaataaatagttagataaatgattttactgagacctcataaattgatataatttgatttgttttattgttatatcttaaccaaagaattccatgaataaatccagacaaatttctcaagatccataaattttttgtgaaggttcgaactccgcaacaataaaagaaaaaaaaatcagagtagtgaatctttcaaccattaaatcaccaccagttgattatagttttatttattttggtcattacaaaatgatagaatattaaatgtgattacgtcaaaattttgattagtaaaattttgtggaatcaaaaaaattacgcaaatagttagaacgaaaacgtagatttctattgatgacgtagttgttaccctcaaattcggatcaagtaaccaaatagctagaacaaaaacgtttagtaagaatatagatcatggttttctataaaattatgatttgtaaactttcacaaaaaaaaattttaaaacattttcgtaattttgcagcatattaatcggagccaagataacttatgtcgtgtgttggtacgacaataattaatctgaaaatcagactaactgaccagattactaaaataaacaatactcgatgatcatcatggtcagttccataattttttgttctctaattagcctagatatatataagataggaattgaagccatagatacacacgtgcatggagtat

SEQ ID NO: 46844 - DNA, 342 bp, Arabidopsis thaliana
cctgtagttagtgttggtgcaagtgacagtgccagtcgcgtctcttgtgcatagctgtaatagtcagggcatctctgcttaaagaatcttgagtactcagtatcgctacatgatccctgaccgttcgtacaacagtattggttcgtctgaaatacagtacacgggttgttgcatccacctggggctctcaacacgtttggacattgtccgtttatgtctgcggtacatagtatccgatggcagttcgaactagttgggctggagatagcacgccaaaataagaaagacaaatcattatcgagtcgtgtaagaacctaaaacgtttagaagtatgaaatataa

SEQ ID NO: 46845 - DNA, 494 bp, Arabidopsis thaliana
tccccaaaaatgagaaaaattatatttttcaatgtgaaaatgttatttgggagaaagaatattttaattttctaaataatatatagcatatttatttcaagcatatagtaaaaaatacaagaatgatcttcattgtatcgaagcgaaattgttatttttacattaattgatcggaaagagaaaaataagttcgaacttatacgtgaggtcgactaacgtaattattattggatgccttattataatccattaagtgtttatggtaacgtatatatgatcacgtcacacgtacgcatatctacgtacaccctcacacacacacacatacagtagatacgagtctattaattctcctcggtgaccatcttgatcgggagctggtgggatccagtagcaccgagcctagaccttggacaaaacacgaccctgtagttagtgttggtgcaagtgacagtgctagtcgggtcatcttgtggatagctgtaagcgtcagg

SEQ ID NO: 46846 - DNA, 567 bp, Arabidopsis thaliana
ccccttctcccattggcactggatcttctccggctgctgcttcatccgccggatttcgtattccgtctaaaccagctgcttctcctcttccccgattctccttctccaggtctgcttcatatgtttagtgtttaattccatgtatctgcttcactttggccatttctttgatctcattttgatgaatttgtgtgattacattataggtgtccgtcggagcttggttgtgttcagtctctgttaccgctacacagcacggtggcggctgcgcggttgacgtcatgcttaagcacaacttccagaagcagccgagctctcactcagggtactctctgctgcacctctcccgacctctaattctcttttctgctttctttcttgtgagtcgctttattttgctttccttctttgagtctttataatttgcaattctatgttgcacaagtcttttatggtttgcactcgtttttgttagttagacttagaaaactgaaccatttcccaaagtgttttgcatgtgaggacactatattgatgtaaggataaattattcgattgattatatga

SEQ ID NO: 46847 - DNA, 611 bp, Arabidopsis thaliana columbia
tattgatgtaaggataaattattcgattgattatatgaagtcttgaaagctctatgtttgatttgtgactttgcttcttcctgctttatgttaatttcttgcttgccgaatcaggtttaatgtttgactcataacaagtaggatgattggccctagtgaaactaatataggctgaggaattagttttcagagttgtgaaagagttttgagcttcagtgccattgtgtctgtctaattatgagtacttggttcatgcaggcacataatttcaccgttaccatgtgggatccttgcatctttatcaagtacgaaccttttatgaattctagttatccaaatgaaataatgaaaacaaatttgtaggaaaaaaccctggaagttaaaccaaatgttagccttgtcagattgtcattgtgtttcttgtttttcttcttttttctttctatgtatggcagtctagcgaatttagttcatgatccgtgtataagagtagtaacaatactgtagtaatttgtcaaagtgctctttgtccagatggaatcgatgacacgtgagacgtatttgccgttggatttaaaggtgggctctgtcaacaatgcttgggtgataat

SEQ ID NO: 46848 - DNA, 602 bp, Arabidopsis thaliana columbia
tgaaactgacgacgaataaaatgaaagttttttttttctcttgcaggtgaggagatttatataagtaaaaaaaaatgcgtgtgggtttcttataaaggaaatgtttccacatacttcgaattttgattgtttctttgggttaagaaacgtcaaccaaatctatatgttttaagggcttgattggttctccttctgccacctgcaaacgcagcgtttgcagatggtagcggttattagcggttggcaccaatcatagaaaccgctagataccgttcgaaattgccagatttcaaaagctccttcccgcaagtatttgcggttgcggacggtagcggttaggttaaaaaaaaaaattaattaattaaaataattatatcttccacccaaaccctatacttattcttatcagaaaaccctaatcaatgaaaccctattctctcaattatggcatcccccaaactgacaaaaatcaaagtcaaaatcaagaatcaaacgtaagtatgatctatcctttcatccattcattagctagtgtaattctcggaatatttcatggcattgttgtttattttttgcttgtgtttttttgagttttctgattg

SEQ ID NO: 46849 - DNA, 564 bp, Arabidopsis thaliana columbia
tagaggatcgcccaaaattataaatttgttataataatttaagcattagtatgttagtaacaaatatacaatgttcaacaattaacaaggtaagtaatagaaaaaaaaaaaatccagacgtaattattagttatcccacaagtcacatgtacaaataacgagtaacagagcaagtaaaaggacaagcatcaaaatgatgcaagtaacgaggcaagtaacgggataagtatcaaaacgaggtaagtaacgagtcaagtatcaaaaaaaattatgatacttgatacttggcttgctcttgcaagtaataaaataaaccgacttgttacttgacttgcctatgacaagtacttgaattttcaagacgagtacgaaccgagtagcgagtaattgccgagtagcgagtacttgtgcccagggctaagattgtttgtaataatgaggattactaaatatggtccttcgagatgggacaaaatatttgcatcggctcttccacactagagatgcatcacaactgcatatagaatcttctaacacaatgcgagtcacaaattgttgtggaag

SEQ ID NO: 46850 - DNA, 486 bp, Arabidopsis thaliana
cagaatctatcatctccatgtctgtgttagacactgtgcttgtagattccctggagtacagaacattcgctacagagcgttgatagtagcggatcacagggcttcaaatttggttgctcttggacctcgcagagtttgagggccatatcgttcccaatagttaaccacaaatccttcaactcttccatctcgaatttgggtttagttccttttccactagggaaaccaaacagtccttccaggctcctgatagataacttgtagcgctgctcgctcagtgaaaaagtctagaaccccaacccttcactctccaactcatctgctgtaagccctgatatatctccacttgtagagtggagagaaactctattgtatccttcttgtaggcgacgtagtggtaagagattagtgtctccagatgacacttttcaaataagtgttgtacgtctccagtagcccagctgggctaaagtctgataacatgga

SEQ ID NO: 46851 - DNA, 907 bp, Arabidopsis thaliana columbia
ctgcgacggagatacagacatttgagacaagaccagccacatgagattaaaaaggtcagaagatcaaatggtgggaagaagatccgagtggaagtgtctcctagtaacaagagtgaggcggaaactaagcatgtttcgcttcctgacttaaaccacgcggagaaggctcacgatgagaccgagaccagtcctaagagaagagttcctttgtgtgatctaaatcagagatctgtaagcacatttttcactcttaatcagattgtgcagagacttaggaaccagacatgtctttactcatgaattgatttatatagggagaagaggagcaaggaacagaggcagtggacaataatcaagagaacacgagagttgaagaaagtaattcatgtaagagattaatgatcagtagcattgagatgcagcagaaagatgtgaagccatcttcttgcaggaatggcggaaacggatcaaataagaggaaaatttcatggcaagatcctgtcgcagctctcagagtctaaaataagaagacggaaccttttgttcctcctcatagatcttgttgtaacatagcttcacatcaaagttagcttgcttatttacttatcttgattgaacaacatatccaattgtgacttgaaaacttaaaaaccttatccaatggtggcttattgcaaacgtgacatttctataccgaaacatgtgtcagcaaacgacatttatggaagtgatccaaaagtcaaggaacaaaattaacggtcagatgcattgacacgtgtctaaagagacacgtttcgtgtaactttaaactacattattaccgaacacaaagaaccgatctttgaaaacaaaacaagaatctttatggaagaagatgggtctgattggggcggattggctccagaga

SEQ ID NO: 46852 - DNA, 597 bp, Arabidopsis thaliana
gaacccgaacccaaactgaacccgacccgaaatcttaaattacccgaacgggacctaaacttctaaacccgaaaacccgaacccgaaatatccgatccgaatacccaaacgcctaggcttaaaaattaatagaaaaaatagaaatccacaaaaatatttagaaaccaaacattgttggaaaatatattttctatatatgccgtaatctcgtaagctaattttacatcatgcaaattaatattaaataagttaaaattaataaatgaaaataattgaaaagttaaatcttataagctaagttatttttctcaaaatgttctattttcacttataattacatgagttaaacacagatttgttaattttgtttttgttgaataaatgtttataaatatatagacatataaattagtatatgtaaatttgtttactttttaagattttctacttttttagagaataaaaaagttaaattttgaatgacacatgtaaacatctgatcgtttgacttgacacgtgacacgtacctatgagttagcaactttgaaaccatactttatataataagattattatgagatcatcaagaaatagttt

SEQ ID NO: 46853 - DNA, 357 bp, Arabidopsis thaliana
gaatggaaaagatagagtttgcatcgacttcactgacctcaacaaagcatgcccaaaggatagtttcccacttctgcatataaatcgtctcgtggaatccactgctgggaatgagttactaactttcatggacgctttctcgggatataatcaaataatgatgaatcccgaaaaccaagagaaggcgtcctttatcaaagatagaggtatttactgttacaaggtaatgccttttggtttaaaaaatgcatgagctactcatcagcgattggtcaataaaatattccacgagcatcgtggaaagacaatggaagtttacatagataatatgttggtcaagtcgctgaagaaagaaga

SEQ ID NO: 46854 - DNA, 542 bp, Arabidopsis thaliana columbia
gattttttcagatttctaaaaactgaaaattgagatgattttatttagtttaattatttttgtttgggttccttatatagtaccatccttagggtttagttttcttaaatcaataggtgtttgtaattagaatggattgagataaaaaaaaaacttaattttctggaaaaatgttttggattgaggagaagagaagaagcaacgaagaagatgttgaaggttaaaaggtctttttttttctccaacaccatttatattaagttatcggaaagagactctcttctatagagagccattcaggaaccgatgcgcttacatggaaaaaaagactattacgagcccgagcttttttagctaaacaatcagctcgagtattagaactacgaggaagaaatctaatatgaaagaaagggaaggaaagaactaaggaacgataggaggtcaactccgcagcaaaagtcggccactcatcttggttctcgaggatagagatcaagtttgcacaatcagaagcgaaacgaccagacgtattgccaatagat

SEQ ID NO: 46855 - DNA, 533 bp, Arabidopsis thaliana columbia
aaatgtagatttccatacaacgacatttacaatctcgaagatttagatcgttcatgtcatagatgtcatcatctctatctccacacagctaagataagtgttatcgattgtaatctaacaagcacaactcaatcatatatatgcattctctgttatattttttgcataaacttgcaaaaagactcgtctatcgagtaaaaagactcgtctaccgagcaaaaagtctcctctaccgagcaaaaaaaaaaaaaaaagaaactcttccatcgagtaaaaaaagtgctccggcctcttgatcataacttgaactacgggttggtttgatcctgaaaagggtacgtaagcagcttgtatccagacgagttcagctagcccacacaaaattataaaaaaaaagaggggaggagtggggtccgtatatccatactcccacttcaattttaaactctcgcttcgggttaaatttgaacttcatttttctacttcgattttttttggaattcgatttctaaatttttttactttgaaatatt

SEQ ID NO: 46856 - DNA, 582 bp, Arabidopsis thaliana
ggcttcatactgtaccgaagcagacagtacagttatacgtacatatggatttgaaaatatttaggaatgtacttacatgccatacctgttcatcaatgaatccttgcatatcttccttattggaattagatagctcagtactgtcaacaacaaaagaaacactcttcttcggctttgaagaatttcttcttctgccgacagcaatggtaggtactccagggacatccaaatcttcctctttggaattaccaccaacagaatgcgcaggagtgtccacatcatgagaaacacgattcagccttgaagactttctcgttccagtgcttccttttgtagacatccttctcgatgccttcttcgcagtaaccggtgccttatccatagatgtaggtgctttccgtgaatcatgggaaggtatggtttgttctggctttttgcgttttggatcaagggcagcacatatctcctggcggataaaatgtttcatatcttcttgcatttgatacatttgggcatcctgcttgttgaaacacctcctcatttcaactaaaaacctctcaagcagcggctctccaagacaat

SEQ ID NO: 46857 - DNA, 645 bp, Arabidopsis thaliana
  unsure (1)..(645): unsure at all n locations
actcctttccagcgcctcttgaacctcctccaagagtggcagctccttctttgaatcctcatgaattggtggctgcttattttcctcaaggaagagcagtgtctttaccaaatataggaacactgaatctaatcttaatccatcatttagcagacaagcggtttcaaggaattttcacattcaaccgtttttcggtcctgttattgctacaaatgttcctcgtgtggttgaagtaggtgagtgttctagacaaggagagtttggagaaccagtaaacaagatggataagggagactcaacaaaaaggaagaatatgggaagtgctagaagtgatgaagaagaaagaactcatggagttgttgggcataaggatggaggtattctgaaacctccaaagaagcgctaaacactctgaaaattttgtcatatttctcgttttctatgctgcttaggatccatgatcgcagcttcaaggtttatataatacgcgctgcattgggttcaagtatgcaggtccaaggtttgaataaggtgaagagtgggtatggccgttggaacactttttggttaaggctactctttgtgtgcagtttgttgtncagtttacctacactttttgatttacaacatgggtaacatgatgtt

SEQ ID NO: 46858 - DNA, 501 bp, Arabidopsis thaliana columbia
  unsure (1)..(501): unsure at all n locations
ttttttatttttttgtacgaatagtcttcagatctttttcagttgatgtcaatccaaactttaatcatgagtctatcacaatattgttgaagtacataaaacaaggaattgatttatttataatcgagttaggaaaattttaaactacaaacataacatagttacacagaattgtatcaaaatatcattattgttgttatatgtattcatttagtgaaaaaatattaaaatcttataaataattagctttatagacaaaatatataaattgatatttcaaatcacaaatgaatctaaccataaaaattatcactacatattatggatctaattttattaataatacaaaaataaacaaataataaatataaattagcataaagaacaatcaatgtaatttttttttaacaatttttaaaacaaacccacgcgtagtganngntcatctaatacaaatataattttacgtgatttcataatcgcatattgctgactttggac

SEQ ID NO: 46859 - DNA, 620 bp, Arabidopsis thaliana
ttgcgttcgcttccgatgattaaaccgttggagatcgttgtttcgaggcctataccgacggagatttgaacaaggaagagtgtaagccacgcgatgctgacatgtggataaaaggcaatcgaatgctttggatctgtagctgtgatctttgtggttaagccaagaactagagtgtaaacgcttattgacgaaacgacagcgtatacgatcgccggattcgcgcgaagaaacagagagaagacgaagaatgatgactctgtttgcggctgagatttggttaaggagaagaggaaagaagctgaagagagacgactaaggaggaggaaagagagaggaaggagaaggctgaggagagttgttgtcaccagccggaaaggcttaaccaccagctgctccgcctctttccgccactttccgccggcgaaactcatcttaatctaaggtggaggaattgttgtgaagttaagaaacataaaagaaagttatttatatgttttattataagagaaaatgaaggtttatgtttgaaggaaagatgaaggagtgggtgcatgtctatagtttcaagttaggtttgatgaaaaagaatcattcatgtaaacagaattaaatacattttg

SEQ ID NO: 46860 - DNA, 506 bp, Arabidopsis thaliana
accatctggtggtgtcccttgaactcctgtcttgaatccaagattcattttgctgtgaggacacttaccattctcacaagtgtaacctgctgatctgtccattaccataacattcatatcattgttctgcttcctctttctcgtgaactctaagtttaccgtggtggcgacctcctcctttatgggaaaatgttgcattttagcaaccccaaagcttgctagaggatgcatcatcactatctctggtttccgctcttccacatcgaaaccatgttgttccttctcgaaaccttcaacgtcatactcgctacaatcattaatgagaagcgacccgcttcctaatgatgaagaagaagaaagaggagggcatgactcgggataaagctcccgagccacaacctcttcttggttaataatggcaagccaagtagcactctctttcgccgtcatcttatcctgcaagcattttgattgcctcacaagcttacggatcttcgcaatatccg

SEQ ID NO: 46861 - DNA, 1246 bp, Arabidopsis thaliana
aaactcacatggaaacacatttcacaccccgatacccgcaataattctccgaatacgaatggtagtgtgtatgcctgcattttgtctcgacatcactatgcctttgtagatagatagcctacgtttgttctcaggaacttcctgccaagccaaacaccatatcccaccaataatcaaaaacatcgattcaatccataacttaagaggcttcaaaaatatcaacaacttaccaatttgatttctacaatatctcctgtcctgatttctggaacaggtctcactttctctgctacctcaattgctttctggttcagtatctacaacaatcaacagataataacattcaatctccctcaacattgcctataagataactatagaaaaagcaagtccctcaacacaaatgtgtacacagagacttactgattcctaattgctaaacactcataatttggattactgataaacaaagaagttcactaacccccatgacatctccgagcttgatcctaggttttcttgtaggtttagcttcgaccacttcctctacatttccttccgtatcagcgatttcagcaacaaattcttcagattcagcttctgtgttaccttcttctgctctaacgataaactcatttctcaccctagtatcgagtgagaacccaaatttcgagccgggatgattcagagaaagcctagaaactgatatacgagaatccatcgatggtgcacacgatagaaacgaagaaaaccctaaattcttcgatgattgcgtagggtttctgggtatcatatgcaatgcctaaaaatcccatagaaacaaataatcaacaataatgaattaagtgaaaatagagatttcataagctttcgtatatttaaacctgaggaagacgatgaaagctcatcgccatagctgcagcaaactctcagttaatccggagaaaatggacggaagacagtggaaaagagccttatctgcttttcgcttcctattttggcacacgtatgccatcgcacgtgtgaattttctttatgggccgtttgttattgtgggcctttagtatatcaatattaatataaatagatagtactatgatttataaaaatatcaataaaagagtcggctaatgacacagtcttattatgattacataaacctataatttgggcccaccaccacgtcggtcgtgtgggccgtcgcttcatgcgtaccacagtggtcaccgtggcatgacaactgttg

SEQ ID NO: 46862 - DNA, 688 bp, Arabidopsis thaliana columbia
aatgaaaatgatacttttagcctcgaatcttgcaatgaaatgatgtccaaacacataatatattcttttctttttttttcttccttttaagtatgatgataagaattaagaagcaaggagcagaaaatgagcacatacaggttttattttcaatctgggaatcgattcttctctctcaaacccaagacacttggagatgaaaagagaacttggaccagctctgtaaaagaaagaatttggagaaatacacaaaaagggtaaagaggaagagagtgattggtagttgaactgaggttaaattagtaatcatatataagtatatggtatatagaaagaattacatgtcaactgaaacaaggaaatttttgctcatgaagttttcccatttttttcctttctatattgtgattctcataaccggaaaatagaaaaaattaggctggtgtggaagtgacaaaagccgtaccaaaaatttctcctacattttgagcatgtgtgaatcagcgagcgatgaactaagatcttctcgagattgcgatcttcggctttggagacgcatttgactcctgcgaggggaggaccagaaggaaccagtactgtcatattgtatacccctaagctatcagaagaacaactatgcataacgcagctactcgatgagtacaatgaagattccatgagctggatg

SEQ ID NO: 46863 - DNA, 992 bp, Arabidopsis thaliana
tctcacctggcaaaacatttactgaccctgtgcagacgccataaacgcaacatactgaaaattccatatccttgaatagtgttatgcaataagctgccaaaaagttcataaggaactgtagataccacatcaaaaatcagccaagtcgaagtatatctccaagctattctcttgggatcatcgactaggagataagttgccttgtccaagaaggcaacaaagaatgtcagaacaatgtcgacagcgaaaaatccattcaccacgttatcaagaatactgagaggtgctcttggtgtttgtaggaacccgaactcaaaaggagatgcccacgctgtgtatagcaccaaaatcactagaaaccaatcccaagctctgaaaaaaaaatcaacataatgcaactcatcatcagtgatactatcatagacagaattacatacaatgtaactgatggacttagtgataatgtaactgatgtatgaggagaaagagagaaagaacacaaaagctctttgcagaatttacactaaagtttaatgcataaggaaacctacacggttcaattgaatagctaaactaagagatcacagaattagtgtctcttccacacaggcattacatcgaccagtttacattcatggaaatatcggaacagtttcacagatttggagagaattgatatcactattaacttcaatgataaatctctcgagaaatctcagaagaagagaagcgaaatcagttccacacgacatgcatcaacgatttatgaatcagaaaatctcaatttacacagaggaaccaaaacagagaatcagttaacggaaaaatcatcgtacctgtagcgaggatcgaaaggagagacgatgaagcagcggacgttaatgtgacggctagagcgagcggtggctccgactccaagcggcggaagaagacctttgctaaaactgtaatgactcattgtaccttctctcgatatatgttccgcgccacat

SEQ ID NO: 46864 - DNA, 757 bp, Arabidopsis thaliana
aagatcacctggtggagcttctaaagcaattggtctttgtttcaaataggcctaatccctcacgagggatcggtgatggaaataaaatgattggagctggggttccaacacttttaggcactggctcgttctcccttttgagctgtaggtgatttctagaatttgttattttattggcacgtttaactcactcacatgcacatacatagactcatacatacatatgcttgcatatgtctataataacatattaatactactaaggtctcttataaattatttggggattctttagcatttactaaattctctttgaaaatcttgatttgctattaagctacttcgtttggtttttcagctgacaaggaaatagttggaagtgatctcaaaccaccacctattggcatgcgttggcctcatatgcatgctgatcaggttcgtggtattagtttgagggaaattggtggtggttttgccagacatcatcgtgccccatcaattcgagcagcatgttacgtcattgcaaaaccatcgtcaatggtacaaaagatgcagaacatcaagaggctacgtggacacagaaatgctgtgtactgtggtatgatatttaattgtttagggatgaaatttttagtgtcaagttccattactaaataatagactaatcatttagatgaactggatacctgaagctatctttaaatgctgcagctatattagatcgctcaggaaggtatgtaatcactggttcagatga

SEQ ID NO: 46865 - DNA, 516 bp, Arabidopsis thaliana
gtgtcgcaacgataacccggtatccctatatcgaaattagaaggcatattgaactcctcagggccatcaggagagcttccaactgtcatgtgaaaagcagagacgtgattggcgtggtcctgagacatggaagtcaagacgcctccacggcaacaattggcaacttgaacgttgagagaagcaccgggaagaaggtcgactatggttggtcgctcgagacagcagtgaggaaggttaccgctggaggcaaaggcagagcaattaccttgctccgtcgtctcagctcctttcatgtcccatatcacttcttggttgagccaatgccagctaagcttccaccctggcttttccacgtgtcgatactcttgcatgttctctaacgttacttgtacctgcaacattacattttcaacattccaagcattataagctttagtttttactttttcgtttcaaaattaatgtaggagtactttcaattttaggtaaaatcagtaaacctaaacttaccaatat

SEQ ID NO: 46866 - DNA, 871 bp, Arabidopsis thaliana columbia
ctttgttgttggtgtgaagttgtttttaaaactgcagatgcatatgtgtgtatatatataaagaaatcaagtaagtcaagcttcataaggatacaaatttaaaactgcccataaaaatagatacggtcaagtcttcatctacaatgacgatgactttaatttcatttaagtaaagagaaataagaacatatctttaggaggggtgtaacggactaaattgaaggagtttgaatgaattttttcttattcaaataagaattttaatgtcgttagaaattttatgttactgaaaaagacttacttttgagttcaaaatatagatgaaactgatcgaccactagaagtgggattttaagtaaagataatcgttaaacatgagaaattacataaataatagtttcatcgatcgagaaccatctttcttttcttttgtttgttgttcttcactctcaaaaaattaatagatatatttttgttattctcctctctcttttctactcaatgaaatcttcaatatcactatttgttgttttaataaaaaactcctaacggctttggttcagtcggatacgtctctttctccccaatttggatgaatcctctcattctaattcattgctactaactagctaaaaatctaattaacgggatgaagccgcaacaagtagaaatggccttgttgcggcttctctggtcatctttgacactcccatgccgtcgggtgcggttaggtctctttagcaatcttgttttggcgttagttttcggagaagctgtatgcagtctttcttgaggtttgtggactgcttcggaaattttaatgctcgtggcaacaaggatgaggattagagctccttcgagctgcgacaat

SEQ ID NO: 46867 - DNA, 527 bp, Arabidopsis thaliana
ccatctcaaatcgtcgacgtctacgtccgagtcaccggaggtgaggtcggagcagcgtcttcactcgctccaaagatcggtccactcggtctggcaccaaagaagatcggagaagacatcgccaaagagacagcgaaagaatggaaaggtcttcgagtcaccgtgaagcttacggtacagaatcgtcaagctaaggtcacagtggttccatccgcagcggctctagtcatcaaagccctcaaggagccagagagagataggaagaaagtgaagaacatcaaacataatggcaacatttcgtttgatgatgtgattgagattgctaagataatgcgtcctagatctatcgctaaggaattgagtggaacagtgaaggagattttaggaacttgtgtctctgttggttgcactgttgatggtaaagaccctaaggatcttcaggaagaaattaacagtggtgacattgatattcctaacgagtgataaaggtttttacttttgagttctctatcgttttattttttgta

SEQ ID NO: 46868 - DNA, 574 bp, Arabidopsis thaliana columbia
ccagaaaaataagaatcgttagcgcaaaattttgtttgtcaaggacgcattgtataggcgaggtgttagtgacccttacttaatatgcatctttgggcccgaagtggaaattgtcatgaacaaagtacacgaagtatgggagtcattcatcaggaatcaccactgtagtgaccctcgataaggggtaagcggctaagtgggaaacatcgaggaacgaacaagaaagaaccgggagagaaagaaatagttcagggacgaaagccaaagagatgggcaaggaaaaaatgaacatgccaagtctagttcgaaatgggttcatcctgacgaagccgaaacgagagaaagttgtcccgaatacacggccaattgaccgtatttgcccaaaaggtgttaaatcatcaaagggaaaaataaatacctatttggacaagaatgggcaagtttgtacaacatgggcgtgtcgcgggcgaagtttgccccgcaagcgttgaccgtttgacaacgccatggacacgtgggctgacttacttggacccaagcaaagttgcttagagctaaatttatgaggattgga

SEQ ID NO: 46869 - DNA, 529 bp, Arabidopsis thaliana
aagggattggattggtgacttacccattcagtgactttggcactggacgttccaaaaacgggtactatcggatcgggtgaattagagaatagacagaggtccgttggcatttcagcttctcttctcctttcagggcctgcctatccgaaagagaatccaggacctcttggtcctgaatatcagaataggacgaacgaaccggcctccgcggatatctttgcttcggaacaaaacaattagcattaggctcggtcaactggaatgtgtattatccatatgggagatcttccaatcgagaagatccatcgatctgagacgaagagaaagggcccattttctttacttattcagtggattcgttatggaaacagatagcaacaaccatttcatcagacatgcgtatttctcattatccggtggatttacacagtttcattaatgcaaattgtttgatgtagttagtactcaggttattcgacgctcaagaattcttatttaggcagttcatatcatcccatacatagtgttt

SEQ ID NO: 46870 - DNA, 546 bp, Arabidopsis thaliana
tcaaaacatgtattcaatcaaaaaacttaaaaaacaacaaaataaaaaaaaacgatgccatgaaatattccgagaattacactagctaatgaatggatgaaaggatagatcatacttacgtttgattcttgattttgactttgatttttgtcagtttgggtggatgccataattgagagaatagggtttcattgattagggttttctgataagaataagtatagggtttgggtggaagacataattattttaattaattaattattattattttccccctaaccgctaccgcccgcaaccgcaaacgcttgcgggaaggagcttttgaaatctggcgatttcgagcggtacaaagcgatatctagcggtttctatgattagtgccaaccgctaataaccgctaccacctgcaaacgcagcgtttgcgggtgacagagggagaccaatcaaacctaagtactttttgctcaacggatcttctaatttagattcgaagagaacaaatttaattgagagatatgggcatcagatgcatctattgatatg

SEQ ID NO: 46871 - DNA, 525 bp, Arabidopsis thaliana columbia
taagggtgtcaaaatggatcaaaattcatggatcaagtcaactcaactcaatccgtaaactctaatgagttcaaaattttgactcaaatgagttgatgagtcaaatgagttgatgagtcaattggtttgatgagtaaaatgagttgatgagtcaattggtttgatgagtaaaatgagttgatgagtcaattggtttgatgagtaaaatgagttgggttgtaatggttaatggtttcaatggtttacccaattaacccatcaagttttgtaaaattgaattaaaccaactaaaatctctaaaccaatgccaatttaagtttaaccaacacaactaaaccgatttaataaaattaatatttttctaaatttcttaaatatacaagcgatgaaattgagaaaaaagtaaactcgtaattttccaccaaaaaacataaacccgtgattttcctgccaaaaatttaaacccgtgattttcccccaaaaacggtacctgagatttttctgcaaaaatataaacgcgtgatt

SEQ ID NO: 46872 - DNA, 534 bp, Arabidopsis thaliana columbia
tacataagggcatctccaaccacaacactaaaatagtgttagaataacactatatttggtgtgattttcacactaaattctttttcatctccaaccacaacaccaaaagtcacatcaaaaatactattctctattattatattattaacctaaaatattgatactttaaaaatacttaataatattggaaacaaatgttagacaacaaattattacattaaacaaatttaatacaaaataaagaaacacaacatattattttattaaacacaacatattattttattcttcattaattaatataatattacaatcgataaaccaaacataataaaaataatttcaatcgtactaattttcagaattagtatattgcgaccacaaatgttcaattaaagcatttctaagttcaatatgagcttctcggtctttaatttgtcagtgtcgagccaaaaattcttgaaatcgagtatcatcatcacccgtcatctcaacttcttcaattggaacttcgacccgttcttcaattggtgc

SEQ ID NO: 46873 - DNA, 627 bp, Arabidopsis thaliana columbia
agaaaattgtaataaaaatttgtgttatcgatggtaaaacacaagttagttttgttaatgtttatttttcaaaattttaatggtatgtatgaactaagaatttgtgttaccatgttaaaatatttaaataccgatgcattttttgtatatgtgttgtgggcagtgttttcacgccagacccggaccgcccggtcgaccggttgaaccgtgacccaaacacttttctggtttgggtttagtgctaaaacccgacaaattcaaacccgaaaaaactcacaaaaactcatcaataacccatgacccgttgaactggccgggtgtgggtcgtgaaaatattctctttattttggaatataatataggattttagactttattcaatcatttttataaaaaattcagttcctaaactcatttgatgttttacattttgatgaatacttcacaatgccgccttaaaaaatgaatcgaatggtgagtgagaacccgatattagttgtgtaaattccgatgttttattagtttatttccgcattggtgatccctactatatttgttatggtattagacgtttagttggatttaataaatttaatcactttattatttttatttgattatatatat

SEQ ID NO: 46874 - DNA, 536 bp, Arabidopsis thaliana columbia
ccgattgtcaaacctcgacaatacaagttaaactagagtaagtacaaatgatttcaggatattcccaacaatgtcccacttgtattggaatcatctattccaataatcctttcatctctatatctcgatcttagcataaggtaagaaacagtgtcaaccttattaaactaaatcatatttatcaaactctgacttatactgataaacaaacgattgactgtcaatccattttagcacggtcatgcatttctcaatatcaaattgtcgataggcccaaagatatttatctcctattatataggagggaaaaatcccatcttgttccatccatgttccttatacaattcataatacgcccaattactgtctttataatcacctgttacagctgacgtttgacagagtcaaaacaaaccaatccatgtataagaaaacatgacgaactgaggtcaaaggactacactctatagttgtgatgagaaactgtgggttctgaaatcccactagagatttgtaattgagattatgagaaagga

SEQ ID NO: 46875 - DNA, 598 bp, Arabidopsis thaliana columbia
gattatcaaaatctatgattaaacatcgctatggcaggtcgataccaaacaggcagagattcctaatcgacttctatgtcatctttcccatcccagtggcggttaagtcgctgcataaacattgttcccaagccgtggttaaggcagaggctattcaattgaaaaatatcgtttcaagagatttttgggatgggagagagagcgttgaacaggaatatcaaccaattcaaggatcatacctgactcggagattccgaatcgacttttcaaaataattccttggtcagaagaattaactgccatcaacatcgatattgtgagataatttcagtcggcgaaggtagctccctttctcatctgtaaatatcaactgtcgttttattagaaaccaaatcaaaacaaaactatgctaactggttaagcaattgatggtttagattgaaaaggatataattgtctatttattctccacgaaacaagaaaaagtgtctcatccctcagaagtgcctcaaaaggaataaaagtgcatagaaatgcctaaacgtgtcacattccctatattatattttggaacgtgattttgtggaagatgggtttg

SEQ ID NO: 46876 - DNA, 482 bp, Arabidopsis thaliana columbia
tcctctagtatgattagttcacctagtatctaaaccagagcccttctatgagcctacctgttttttcttaaatgcctaggctcatctatgatggatctaataacaagtacctatggcgggcatacctattatctaatatcaagttctagttagctactctagaactagcattaagaacaatcaagatgaagaatcctacagataacctagcaaggggcaatctactaaatcatctaaatccctaatgaaaaaccctaaatctaacaggaaaactactcaagcatgatgaataaagcaaacaacatgattagaatagaaatcaatgaataaaacaagagaagaatagagttaagaagaatcttctctaaagggagtctccacagggttttgctccaaagtacaaaagagatagaaaatagcctctccaagcttagtctaaaacaatgaccctaataccatatatatatgtctcaaaacgtgtt

SEQ ID NO: 46877 - DNA, 574 bp, Arabidopsis thaliana
cgttcaggtcagaaattgggaatctcttcgtccatcgagatctaaagttttcaagctctttggatcttgggacataagtctttacacccaataccccttgcattgtttcaatttccgtctcgttcatgatacttagaacatcggtaattgtgttggtgaggatccagacatatccttgtttcatcaaaccaatttccgtagctttcgcaaaaaatcttgaggcaagcaattcaacaaggtggacaacaaatactctagtgggtagagtcatcatccggagaagttccacagatatttcatcatccgtggcattgggagagatcacggtcctataaggtatacgaacgttaatctcttgtaacacatctgtaagacgaggcattataccttcgccaaatgtgtcgtcaacatatacaggtgcaacctctctccaaccaaaaagtttgatgatttctttaatggcgtgcacttgagatgaatcatcatacgtagcccgaaagaagtattgactacggatggaagcgagggacaggacttgttgcagaatacgtaacaatcggcacctgagattttt

SEQ ID NO: 46878 - DNA, 590 bp, Arabidopsis thaliana columbia
ctagcatttcactttgatattataaaagtgaaaaacccttgtcggtggtaggcttgactcggaatcattgaatccacatccataaaattttgaatatacttcttttgagaaaaaaaggaaatagtacatcaaaactattagatataatatttattttccataaggctagaaatataaagaagatgcatgaaaaacgaaagataaagcgagttcgtcgctgtgtccaaacagacttttgatcagtagatttgtcgttaaagcagcgcctgagagagtgtgccaatgcttcatccttgattgatgcaatggaaaaaaagtaaccccgactattcaattaatttgtgagccaagcattttaaccagtttgacataaacatataaaataagtttaatgctgagatatagatttgaaaaagcttaaaaccaaactttgatgaaaagatttgattgatacaaaaatcaaagacaaacaacaaagccgaatattaaaatagtgaagaaataaatactccatatgacttaaacttaaaaatggtcaagaagagagagatatgttcgtagctgggagagagaggagagaacacaactaa

SEQ ID NO: 46879 - DNA, 586 bp, Arabidopsis thaliana
tgaaggtccaatagcaattaacgaagcccgcaaagaaaggaatagtcccaagatttcctagtgggcagaagggggacgatgtcgacatcgaagtaatgttagaagaagacaaaccagatcggaaagtttgaattggagccactctaactggcgaaaaaaagaaactttagttgaacttttaaagaaaataaaagcatcgtttgcatggtcagcaacagacatgcctggcatagaaccaagcattatctgccatgagctaaacgtggatccaaccttcaaacctttaaaacaaaaaaagaaggaaactcgaagtggaacgagcaaaaccggtaaacgacgaagtggataagcttttaaatataggatctataagggaggtgcaatacccagattgggtggcaagaaccgtcgtggtcaaaaagaagaatggaaaagacagggtatgcatcgatttcatggacctcaacaaagcttgcatgaaggacagtttccgcttccacatatagatcgtcttgtggaatcaaccgttggaaatgagttactaaatttgatggacgatttttcgggttataatcaaataatgatg

SEQ ID NO: 46880 - DNA, 566 bp, Arabidopsis thaliana columbia
tttgattcgcatgcgaaatttcctcaatttcgtttgttggtgctttcaatttcacttcttcgctagcattttctctcactgtgttcgccgccgatagctgcccaagttgtgtctgttcttcttccccggtgaattttcagtggataaagctttttctccggtaaagcattttacttctcttaattggattcgttaactctcgctctcgagtttgctttgttgctttctactgctttaaattgaacccgaaacgtctattcttagtgaccggaacaaaattgatctttcattaagttcaattcttcgttttttagtcacttttgggtttagtataaaattgattctgatgttttattctctcttatttgttcttaggtgcctaagagaagactttcgagggaaagatattggcttttgttttgtgttctgagagggatacgtgttgtgttggttttcactcaagagatggtctacatgttatgttgggtgaagttgtacaaagtttttgaatatgacaatggagttggggaaggtggaagtcacaaagagaatacatggtaagagaa

SEQ ID NO: 46881 - DNA, 1348 bp, Arabidopsis thaliana
ataacatttttctaatgacattacagggaatggcattactgacactatcagtatcgctacctggacttaaaccaccgaaatgttcgacggctaatgttgaaaactatgaaaaagcttcggttatacagttagcggtattctttggagcgttatacacattagcaatcggtacacgcggtacaaaaccgaacatttctacaataggtgctgatcaattcgatgaatttgacccaaaggacaagattcataaacattcattcttcaattggtggatgtttagtatcttctttggtactttctttgctacaactgttcttgtctatgttcaagataatgttggttgggccataggttatgggctttcaactttgggacttgctttctccattttcatattcttgttgggaactcggttataccgacataaactcccaatgggaagcccattcaccaagatggctagagtcatcgtggcttcacttcgcaaagcccgcgagccgatgtcgagtgattcgacgcgcttctatgagcttccacctatggaatatgctagcaaaagggctttcccaatccattctacttcaagtctaaggtaagtgaacgttcgatttggttcggttcagtttaaatattttagatacttgctgcattttgttaaaataccatatgtacctaagatttaactgtgttacagattcttaaatcgagcttcactcaaaaccggatcaacccataaatggaggctctgtactatcacagaagtggaagaaacaaaacagatgctaaaaatgttacctgtcctcttcgtaacattcgtcccaagcatgatgcttgctcaaataatgactctgttcatcaaacaaggaacgaccctcgaccgtcgtctcacaaacaacttcagcatcccacccgcaagtctcctaggcttcacaacattctcaatgctcgtctctatagtcatatacgaccgtgtctttgttaagttcatgagaaaactaaccggaaatccaagaggtatcacattgcttcagcgaatgggaatcggtatgatccttcacatcctaatcatgatcatcgcgtccataaccgaacggtataggctcaaggtcgctgctgaacacgggctaacccaccagaccgctgtaccaattcctttgagcattttcacattgcttccacagtatgtactaatgggtttggcagatgctttcatagaaatagcaaagctggagtctgtctacgatcaagcaccagagagtatgacaggcctcgggacatgatatgcgagcactagtatggcagtcgggtatttcatgagcagcagtttgctttcgtcagtgtctcagat

SEQ ID NO: 46882 - DNA, 575 bp, Arabidopsis thaliana
atcaaagcattgtacaaacactaagctgacttgactgaggattttcttcgaacactttacgtgcatctgcaaccaaaccgcatttacaatacattgagatcagagccgttagtacaaacggctcagtctcgcaaccgcctttggtcacgtggcaatgtagctgttggccggagacagggagcgaaagggaagcacaagacttgagaatgaaagggaaagagaacgcgtcgggagaagaaccagaacggagcattgaccggtaaagagatatagattcagaaaacaatgactgatatgcgagctctctcaaacgtacgttccatggcgtcgaagccaccgcagcgacggcggagttccgtacaaagcttgtaacgacgatcatggtctcccgcgctgattatgacttgtttgggttaaaacgcatagttctaatttttatgagaataaggcccaaatagtatgggcctgtagcccaaagtaatccgaaaatttgggggaatagagttatacgtaaaaccaaacgggtattaatctgtgatagaccatttcttcttctcagatactttcctccatct

SEQ ID NO: 46883 - DNA, 696 bp, Arabidopsis thaliana
ctaaagatgacataacccgcattctctttcacgcgggcaaaaccgaaaatttcccgctggccggctttatcggtaatttctgcggcgcactctttttcaaagcccggacggcacagcaatacaaccttattcatgacttacgcccttgcgctttaaacggatagcaccaactaacattaacgcccagcccgcgaggaagctcacgccgccaaccggagtgacaaacgcccacaaacgcagatgggacagcgccaggcaataaaggctgccgctgaacaacaccgtgcctaacgcgaggaaaacgctactccagtaaaaccagatactgatgcgacgctgcattgccaccgccagacctaagatcgccagcgtatgaaacgcctggtattcgaggccggtctggatccagcccatctcaacggcccccatggttttacttaacacatgcgcgccaaaagcgcccagagccacaaaaatgaagccgctaatggcggcgaaaatcagcataaaacggctggtcatggtcgtaccctacgtaaattattgttcataacgaaagcggaatttttcttgttcagcagacgtttcgccaggatccattggcgaaaggcggctattttacccagttctgcctgactgtcatgacaaaccagataaaaagcatttttactgaccagaacatcattaaacctttag

SEQ ID NO: 46884 - DNA, 519 bp, Arabidopsis thaliana
gttttgattgctgcagatgtcgtctacttgttcttcgtacgcatttgggccgtacaaaatcgatccccgtgaagtgttctacgcaacgcctctctcttatgccatggttaatctccgtccgcttcttcctggtatgcctcattcctctctaattattcatcgaacctcttcaactttcttctgaccttctttttcatctattttttgcaggtcatatccttcttttttttgtgtgttcttcatttttcggttttgttttgtaaattgagttctattggatgactttaaccagacgagcacatgttcttgtctgcccgagacgccttgtgccacgatttactgatcttacagctgatgagaccagtgacctgtggcttactgctcagaaggttggctctaagcttgagaccttccataatgcgtcttctctcacattagccatccaagtaaactaaacatctcctttctttcgtcattgtgtcttgcgtctaaacttaatggattggaattgaaacgatc

SEQ ID NO: 46885 - DNA, 725 bp, Arabidopsis thaliana
  unsure (1)..(725): unsure at all n locations
tatagaggcaaagataagtttccattcacgtgcatacaaaggcaatgtttggtgctataggtagaaattggtagctgatataaaggtttctgtcaaaacttatttaatttgatttgcatgtggacgggtgtttcaggactaaagcagagccacggatatactatgcaccagtgaagcctttggaagaagatacaagtgaggtagaacaacagaaagagcgggtaaggtgttgtagtttgtaaatgaagaaagttttgacatgcatgctatgggatatttgatgtgactggttttgtgttgatgcagacattcttagaatggaaggcagcaaggagacaagaagtgagtgagtatcaaaaggagatagaagagcagtgtctgggtaatgttgagaaagagctggagaggtggcaaaacgcaaggaaggcaaggaaagcaaacaacgagggtatgaatttgcaggaaacgatggacaaggaattagagactcataggatggagcatgggccaaagaagagaaagatacctggaggaggagtaggagatgaagatgaagaagatgaagtagaggatatcaatggtggagaggatgaaatgataatggatgatttactggaggagggaggagatggaacatcaaggaggaagtggcaactgatacagttaagcagaaggagtggaggaagatattaacatgaggttttntaagtcatatagtttgtttg

SEQ ID NO: 46886 - DNA, 888 bp, Arabidopsis thaliana
ttttcacatccacaagtatggcgactcaaatcagcaagaagagaaaggtgaatcgtgatttcatcttttgttttcactggacttctctacgctgtctcatattggaactgatctggttactctgtttgtagttttgtagccggatgcgtgtatctctacgcatgacattgacatcgaggttctcacaagagagctagcagaggatggttactctggtgttgaggttagggttactccaatgaggactgagattatcatcagagctactcgtactcagaatgttcttggtatgtttgtttgatcatttcttctctctttcgattttgaatgtgtttcgagatctgatatcgaaaatgttgggttttaggtgagaaggggaggagaattagggaattgacatctcttgtccagaagagattcaagtttccagttgacagtgttgagctctatgctgagaaggttaacaacagaggtctctgtgccattgctcaggctgagtctctacgttacaagcttctcggtggtcttgctgttcgcaggtacgacatttctctagtatgtttttgtgtattctctctcaattgctgttgttattgtttagcttacttggtcctaatagtgaaatgtataggatacaactgtaattatatttctcagtggggtttctgtaaatgcgcactctttatagattttgtgtaatagttatgtttctatctactgaacacactgatgatacataatgtgtcgacaaggctattgcatctcttttttcacttgaacttctcatccttaatattgcaatggtatatttgatatacagggcctgttatggtgttttgagatttgttatggagagtggagctagggatgtgaggtcatcgtgagtgg

SEQ ID NO: 46887 - DNA, 512 bp, Arabidopsis thaliana columbia
aatgatttcctaaattcctaatagttcagaaccgttgatttagaaaaaattaagaacatgtacggccttaaataggacggtctattacaaatttataccgtatatgtgaattttcccttttctaaaattatgttaatgttaaattttactttcttttttttttccgtttttttctcttacgtcctatatgaacattgaacgggtagtgcctgaataaaaaactttaaagagcacattcaaatttgataagtcgtcattctatatttttctctgtaatttctcgtataaaaaaatatgactagcgcagataatgagattttgaggttgaggcacgaaaggttgatgaagatgtcggagaaattgttgtacatgatggattatgctgactcacaagtggaaaggttcaagtcgatattgacatcgcgtgacgatccactggcttcgttttgtgcggtggtcgtttgtcttgtcgtttgcttggttccattacagatttggttttaagttttgaa

SEQ ID NO: 46888 - DNA, 923 bp, Arabidopsis thaliana columbia
ctccacgcatcttcttcatcaggaaatgaaaatgggacaaatgaaagtgctcattacaatgaacttcgagcaatggaagcagaagaatgtgtcaaacccagatacagatactaatctttactcgatgacaccaaagataacgcctttgtaaccttttcgtggcggattcaggtgaaccttcatatgttgaagattattccttcagatcaataaaactatctcctatctcatcaattcagatgcttagcaatgttgttcgactattacgtggatgacccatctccagattccaaaagaggaacagccacaactgtggttgatgtcggtttgtgcaagcctgttgacggtaagcttcttgtgagatcattcagaggcagagatcaccggaaaatgatctcatggaagggcagaggatgtgcatcgggttatccatgctagagattacatcgccactcacttctctatattatctttctctggtggtacaagcaaaagtttttgcatgtaacatttttttatcgtataaaccgttattgaaacagcctacttgttgggtgaggacctggtctgttttaaacctggcaatgtttcaagtccaatccgttttagcctgctctgttttggtctcgatttaagcattaaagcctagcgggtagcttggaaactagaaaagtgaaaaagggctcgtcacaggttttggagaaaaaaaaaggaatcaactcgtagacaaccgttattacaggttgctactgcaatcattgacaaatgttgtcctgcaattggaggtagtgaagaaaacaaaccaaatcaaattggatattagtttataactttccagtgattatatagtttgatttactttaccttttaggttttttgtcatcttatttaagtcaattaccaaggaaatatgcaagtttgaa

SEQ ID NO: 46889 - DNA, 1126 bp, Arabidopsis thaliana
tcgaagttgtgcctttttttccattgcaatttaacttccatttgttatgtaatgtatatagacaattattagacgtgtatgtcgaatgtataccgttggagataacggagttgtaaatctcaacggagttggagttctcaatgtggataccgtcggtgttgggactagccggcggagatatgattcgaagggagttgatgtgaactacgtgacatccatctaatttgaggtgaacctgagggctgttttttatacttaggcctttcacaattacattcgagctcatgaagaaccttaaagcctaacctcaccaaaaccattgaacattattcaacattaaatatgaataataagggtaagaaacatataatcttttaaatgtttggttttacttacggcggggctttcacatggaccagcaagtttagttttgttgacattctgcttgaacatattatcataatattacatagtaaatattttgatttcaaatagtcatatgacttatataaaccacacattacattatcgaatctttcactttttagattatgattaatttgaaaatgtgtactagctagtgagtatttaattacctgatgaggtttgcagggaagatcccaccaattttgtccacgaccgtcgataactccggcgccttgtagagccattccgttgattctataaaaggcgagccattgtcttttgtttaaactgcttggccacgactttggtccatcccgtggcacgatggtcccatcaacctttattgtttttaaaaaaaaatcaatagcaaataaaccattagacccaattatccaaaagtttgatattcatgtagaaattaaataagtttattagtaactggtacttggaagtattggtaagagcgacaaggaccagtgaaaatagtggaacggatcatgaaagtgaaaccgtaaggcacatgcaagacggaggcagtattgtttttgttgttgctacaagctgaatcccaagctgtcttgaacgacacagtgtcatctgcgacaccattaccgaccgcaccgtatttcctcacgtcgtaaactacttcgtggtcgagatcttgggaccgagatggagatttcgacgggtcgttagggtt

SEQ ID NO: 46890 - DNA, 1103 bp, Arabidopsis thaliana
cagaaaacaacaacaacatgcgaggtcaaaatctcatacaaacaacgacctcaaaacaatcagcgaacgttcaattcttgacccgtaacaagacagcattaaaaaaagatgaaataaaattttccaatcgggagagaaaacaggcaaagagtgatcactttgggtaagcgggaggaggaggataagccccaggagggtattgagaataagctgagggaggagggttttgaggatagccagaaggtggataaccttgtggagggtgttgaggataaccagaaggtggataaccttgttgtggaggataaccgactgcgggtggggtggcttgatcaaaccgtgacatttgctgagccggacgactgccattggctgtggcccgaacttaccgtccctcttgtccatttccatcttgtgttgtgtctacaaaagtattatagatattaccgtaagtgtaggatttaagtaaggagagattggaatgggttgatatgatatcatcactgctcgtacctgcatacatgcgcaaaccctgcagaccaagcaaagtacgatatatcaggacaataggttaaaattgggttttgatcgaaacttataagaatggcactttggatgggggttcttacgtgcagtacaccatgtcagagcaacatgtgagtatctgagaagcttctgaaagctcatccataccgacaatacatgcaactatggagaatatgcaagccacttggctgaggcaaaccatgaaaccctacacagccaaaaagccagcacagattacgaaacttgtttatcgtgtttgtaattgcttgtgagtgtcagtaacaggcatggtctgggcaatgaggatacttacaatgatgcagttgtcacattttgtcgtttgaatttggaactcatcttgcagaagaaagcgagttgaggccacagagtttgcaaagcagcagaagacctgcgattgatctgctatttagaagaccagaaatttgctaaaatttcgcgaggttgcctcacaagtcacacctaggtatgactgagattgtatgcatatgctacaggaagcattcagatgctgaaatcgaaatttctagactagctgt

SEQ ID NO: 46891 - DNA, 861 bp, Arabidopsis thaliana
acaaggaaatgcaacaaaggaagccattttataaaaaaagaaaagcctctctatattaacagtaacaaaccataacaccaaattttcatctggaggaaaagtttctctttctccctctctctctccgaaaatttatagatcaataatcatcacacctctctctctctctctctctctactatactatctatcaagtttttctgaaattagtagcacttattttctttgtttatgtcgacaaattaagtagaaatcgacatgaattaccatcgatcagcctgcagctactgctttagctcgaggcttcgtatcgagcagttgatgcaatttgcttgtagagttagaatcattgtctccttggttcttgttcttatctccagctcctgagttcttaactctagacaacatatttgcggggactctcttttcgggttccgagcatttcagtttgtcctgcaacccaaaaagaaccggccatgttcaagaaaatgacacgccttcataaagataatttgttggttaatgatagcttacttaccaacaaggttgcatttgctcctcttagtttatcagatttctcattaagttggtttagttcagatcttaatgccatgttttcggctgtcaaggcttccactttcctagcaagttcttctgtctcggccttcaaaacaaggaaagacagtttgttagtttattaaatgttttggtgagagttacacactaagagaaagaatttctaaagagcttcagtgtattctttcagtaaccaaacctgtttccttaatcttgaccttctagcagattctctattagactgtttccttcgctcccgtttcagttctctctcgttctgaagac

SEQ ID NO: 46892 - DNA, 1093 bp, Arabidopsis thaliana
ctctagagcatcccgttctcatactgtccctccgagcttgttctccttaaagctaagatccgttctttaacgtactccgtcactttatctctgagctccataccgatcattagcgtatcggggaaaagcgtcgcaagggagattagtaggccaccaaacccgcatccgatatccgcaaactcggccttcttgatgaatttgctgtcagcttcaacgaatttggggaagtgaagtgaatagtcgacatgagctggagatatggggattgggaagtgagaatcgctaagtgggttactatgagctcttgctctgtagagtctcttcctaggaagccctgttgatttgctgaaggtggttgctttcgtctcattgtccattatcactaaaccacacaaaggtaacaataacagtgagtgacataatcaaaacagagtcttacgaataacaaatacgtatttgattcatctgagatctaataatctagcttaaactttgtgaaagaaacgaactttgaataaactaagaccacttctgcaaaacccagtaaatgcctaaaccgtaaaccctaattctctaaagtctctgttcactgagaagatagagagcaagtatggctatgagaaaaactaaaggcatgaattcatagttatatgatacaatacgaacacaagaaatagactaagtgagatttcgagaggatttacctgattcaatctccacttgaaaatcaataatctcgagctcgtcgttcttcgaaaactaaccctcagagaagaagcagagagaagaacttgcctaagaagaattagggttcctatgttctaaatggacccaaacccataacttattcttaatgggcttctttccagcccattacattcactgactaacctctttttgcaagaccaagaacccaagtcttttgttatttgctaccccaaatggtatttttacaaactgactgaatctattggtaagttgcataatgttttagaaattttggagtatgaattttttaagtcaatgtaatttagactgagagaatcagagatccttgtgcacaagaatgaagaacacagaaataaaaataaga

SEQ ID NO: 46893 - DNA, 594 bp, Arabidopsis thaliana
tggtatacaatgttaattccattataaatttcggataagtaaaagtcaaaagagtgatggcatacagatactgtaaatgttcaagcttcccaagctcaggcgcaagatgtccagagaggtttgaatttcccaaatccctgccaatatatgtagaattagatatgcaatcaacaataccaatattgatattgtagaagaagaagacaataatgcacagatgaacaagagacaagcattaactttttatactcgattagctgttctcttgatacatcaaacagttattagagataatgtgaaatcaagtacaaagaatccacaattcttctaaaaaagtaagaactcacaaagtagggaccaaaaagtaagctagatcagtaacaaagcattgagaaaatcataaggtacaagtaaaaattgaactgcttaatagatggaataactattagggattctttcaaggaatccaatgactagaaaagtctacacagtgcaaaacataggagctttagagtttagattccccttttcatactagaaagtgtttcttttttcctttaacttgttgtactctacatttgaagcttcgaaaag

SEQ ID NO: 46894 - DNA, 853 bp, Arabidopsis thaliana columbia
aacagagttcatagtccaagaatttaagagtactagtaagataagagatggtaagacataccttcaaagctactccaaatgtttgaagtacttctacaatgcagtcacaagtttcttggcctgcccatgaataaaccgaggttaaaacttaaaatacaaaactgaaggaagtcatgagcacatgctaacgtgttgaagaggttagccggatgcttacttggaatattaataagaaagtggacttcttcaatgcttagaccttggtcaccagccttgtgaagggcattggaaaccgcttcgaaaacctcgggactgattaaactctgttgctcctctgcagaaccggacataatacaactagcaacactagccattgcttgccaaggagaatcaactaaactacctggtatcacagtagcatccttagagtccaaaagttctttcatatcatcagaaccacagccattatttgtttctcccgacatgaaatgaagttcaccggaccaagagtcatcatccttaaacaactctattgcgttacgtattggtatagttacacgatgaacagatactgctaaaccagggaaacccttttcctttcggacgttgatttcaccttcacctagtaacttaaatttcttagcactatcaagttcagattcttctacatcctcagctctacgttttaaacctcttcgatgttcaggctccccaacaccttcttcaggcaaagatacagataaagagagttcaccagaagcaaccaatgaaaagaaattcaaaacatcaccacattgcaaatctgaagtaagagtgactcctcatccataagttctctttcgtgttcgacaag

SEQ ID NO: 46895 - DNA, 1761 bp, Arabidopsis thaliana
gaggactctagaggcttttttatgaataagacaaataaaagaatgcataacaattaacaaccaatagttatcgctcccttcatgcatgttatagacctgacgtggaattcaacataaacagctaactgcaagttcccaagactactttgttttgtttcatttgagatagtatgtcatagcaaaaaaaattgcatattacaaaatgtagtgcagatttcttgaaattatgaaaagcattacagtttaataacgtttcatcttggtcgaatcaaatcaaagaaagaaaatggtaaaacaaatcccaaattggttaaatattaacctgaaaagggaaatgttgacaaaataactgaaaagtaaagaaaaatatacggaaagtatattcttccttcatatgaaaaaaaaaactaaacaaaacaaataaaatcagatggggtaattaaaaaatgtttttaaaaattaagaggtaaatcaataaataagaaaatgtgggtctctccttgctcgtaaaaggcctatataatgacctaatgcgactcttctttcttccatcattctcggtttaactgtgaaacacataaataaaacaaagagaaagagagagaatatgggtgggtgggcaatcgcagtacacggtggtgccggtatcgaccctaatcttccggcggagagacaagaagaggctaaacagcttttaactcgttgtctcaacctcggcataatagctttgcgttccaatgtctccgccattgacgtcgttgagctcgtcgtacgttctctttccccacaatgatttcttacggtgttcttgttgaattatatactaaacgattgattaacacagattagagaattggagacggatcctctgtttaattcaggccgtggatctgctttgacggaaaaaggaacggttgagatggaagctagcattatggacggtacgaagagacgatgcggtgccgtttcggggataaccaccgtgaaaaatcctatatctcttgctcgtctcgtcatggacaaatctccccactcttaccttgctttctcaggtgcagaggatttcgcccgcaaacaggtgtttatttactattttacccttccactttttattctaaaccacttggttagataaatcttctgaccgaagccggtttaatgagaagggagttgaaattgtggacaacgagtactttgtcacggacgacaacgtaggaatgctcaagttggccaaggaagctaactccatcttggtacgtttttgacttaaatctccaccgtccatttattcatcgtacgtttttctttattttgtatcctcaactttttctttttttttgctttctcaccagtttgattaccggattccgccgatgggatgtgccggtgcagctgcgaccgacagtccaatccaaatgaacggtcttccgatcagcatttacgcaccggagacagtcgggtgcgttgtggttgacgggaaaggacattgtgccgccgggacatccacgggtggtttaatgaacaagatgatgggaaggattggtgactcgccgctgataggagccgggacgtatgcgtcggagttttgtggtgtgtcgtgtaccggagaaggagaagccattataagagcaaccctagctcgtgatgtgtcagctgttatggagtataaaggacttaacctccaagaagcggttgattacgtcatcaagcatcgacttgacgaagggttcgctggactcattgctgtctcgaataaaggag

SEQ ID NO: 46896 - DNA, 941 bp, Arabidopsis thaliana columbia
agtatctcatgtagttccaatccgcgtttttagacttggtaggactagtggaaacttatttgcggattgagattgagtgtgaaaagaaatagaaagaaaaaaaatgggtaatagtctttaggagaaggaagctgaaagtcacattaaggtctagtgaatgtttgagcggcatggatctgttggggtatcctcttttataccgttaggaacttctcctgcatagtaagtatgagctccatcgtaatatccatacttgaaatcttcctattaacaaaagcgctaaccaatcagaaacaactttcagcagaattatgaatttaaaatcaattgaatctttaccatttcaatgctattagtctcgaattgaccaatcgggtcttcgttgatgtctggttcgatctgtgacaatccagccgctgagaccagcttcgctaacttcaatctccggccggatttgccgcattttacgacattgacgatctgatcagaaaccctagctccgaatttggaatcagtgacctttggaatcgatttgggtgagagaatcgtgaccgttgccattttttcactcactttatctttttcttgctctgtctcagagttttggagccatagaaagaaaaaacggttctttttttttttgtgtgttcgttagcgaaagagattagtagtttactggttactgtctgtcatattaccaaagtgactgacaagttcgtaagcgtcacgtggaacgtattcatttgattgtcttctctagttggttagtgaacgcttacatcgcgtgaagactattgaaacggcccaactttgtctttgctgaaatcaacaatatatattaagcccaatttgatttacgtgacaattgcttaattattaaattcaacccaatattttcctatatccagttaaatgtaaaattcagttcaggttaaacatca

SEQ ID NO: 46897 - DNA, 357 bp, Arabidopsis thaliana columbia
atatgaaagtacaaacctggtccatctggttgtttccattggcttgtggtagagcctctaccctgaccctaacgtctattcctggaatcagagctcctccaccatcagcccattcttcttccatgaatggcgcatatctgttcccacttggtggcccaatgttattcttgtgaaacactctgcacaacacatatgcatcctgctgcacccagacaaagaagtaagataagataggattcttacaaaatgagataaccccaattcaaaagtaactcttttggacaacataataccagcaggcttccgttagtttcagtttcatattccacaaggcgatactcgtgcatgacccaatta

SEQ ID NO: 46898 - DNA, 597 bp, Arabidopsis thaliana columbia
attgggttatgcatgagtatcgccttgtggaatatgaaaccgagaaaaacggaaacctggtggtactgtattgtccaaattactttcgaatttggtttatctgataatttccaaaagatctcaattctttgtttgggtgcagcaagatgcatatgtgttgtgtagagtcttccacaagaataacattgggccaccaagtgggaacagatatgctccgttcatggaagaggaatgggctgatgatgaaggagctctgattccaggaatagacgttaagctcaggctagagccgccgccagtagccaatggaaacgaccagatggaccaggtttgtgatttcttcttactctggcttcattacccaaaccttattagtttcattcaatatttcttgtatgcaaaaaactctgttgaaatactctctttcttagttttccattgggctgagtgagtttatttaactgcattagtctatttatgaaccaatctactatttcaacgttatttagtgcaaatgtacaaatttatctgatgcatcatttctcttgtttcacaagatattatatttattatctgcaaaactctgtgttgaagtga

SEQ ID NO: 46899 - DNA, 606 bp, Arabidopsis thaliana
ttcccctcatagattctctgtaaggacgattcaatctctgtgtgtttgcaggggcttagtaacttcaacaaagctgcaaaagatcttcttcagagtattcagaaaatcgacaacgataactaccctgaggtttagttatgtttttggacgttcttctttgagtttctataatggttctgacgcagcaacatgacctctgtgtttgtgtttcgttgtagacgctgaaccgtatgttcatcatcaatgctggttgtgggtttaggcttttatggaacacagtgaaatctttccttgacccaaagactacagcaaagattcacgtaaagcttcccttctcatttcagacatcccaacttttctctgtttcatattggcctcacttaaaaccactctttatgttcattaatggcaggttcttggcaacaaataccaaaccaaacttctagaaatcattgacgccaagtaagaacttgataactcttgaccttgaaactgtagctttatcttcaaatatgttattcaaaactctctcttcgcattgtttgtttagtgaactgcatgagatacttgggtggtagtgcacctgcgcagacaaaggtggatgta

SEQ ID NO: 46900 - DNA, 528 bp, Arabidopsis thaliana
tgatacaaagaaaaatgagaagtctgtcattcgagaaatactaatcttttgagtgttcatgcagaaactttttgcagagctcacctagcatcaattatttcaagcaacttgctttggtacttgttgccaagaacctgaatatcaaattagctaagtagtaagaatatctctcatttatatcagtcaagagtgataaaaagggtttgtatacttgcatggatctttgctgtagtctttgggtcaaggaaagacttaaccgtgttccacaacatcctgaatcctgagccagcattgatgataaacatcctgttcaaggtctgagccaatgacagataaatgaaaaaaaaaagttgagagagcaagaatcattcataaaagataaagcaatgatgataataatataaagtgcacctctggatagttgtcaccatcgaccttttgaagacgcgtaatcaaatcccttgctgccttgttgaagtttttcagcccttttatcatatatacaccatttttggtcattattggcta

SEQ ID NO: 46901 - DNA, 648 bp, Arabidopsis thaliana
accatgtacaaatccgcaaactcgtcgtatagcacatagggagaaatagatttcacagttgagttataagcagagataattcatgatcatatacaataaaacaagtcccctaccaaagctggttcaaggatctggtttgccagcaattgcaacatcatcatcatcatcatcctcattatctgagccgtattcctcttcacttagttcttcatcgctagacttatcttctgaaccttcccctggctttgcatacttctcacagtattctgaaaccgcaaacccaacaaagccgagcaaaataaccatcacacttcctcaaaatatccccaaaaaccgtaatatccccataacattatcaagaccttgtaaatgcctaagtctttaaaatgatcagaaacttttatcttcatcatgagattctaatgaataaatcacttgcagatcattacattagctccaagatttacgaaagttcagttcacacataaaccaaacaaaagctctaattcattaaaacgaaaaatgactgagaggaactcttagtgttaagaatggtaatctcgaacgcacacattaagaacaggtccaagcaaatatgtgtactcacatcaagcaaataaaagaaaaagagaaagaaactaacagatt

SEQ ID NO: 46902 - DNA, 810 bp, Arabidopsis thaliana columbia
cctctaaacgacacacaacgacgccgtttaagagattccacagaatgtttccctcttccttcgagttcaatgatttgattgatccaatccctaatcgctctctatatactcttcctctttgaaaaaccttccctttacgatttctccatagcagacacagattcatactctgcgaattgctcaaggtagaagaagcagattcacgatcccaattcccctattaacggccattgaagatggtcgggagcaacaacaacgccaagtcatcgacgaacaagcctccagcaacttccatccccaccgctgcagcttcatcttcacagaaccataaacctcgtgtgaattcaactaacaacgatggtggaatcagtaacaacaacaacaacaacaagaaagaaagcaagccgatgatgataggtgtccagaaaaccgccgataagaaaccactgaagcctaatccatctcctaagctagctccgatcccgaaacaatctaatccgaatcatcaaaatcaaacgggtccatcatcttcacgaccaatggctccgtttcctttccctgattcatctcccgcgctaggtcctcctcctcaaccgacttatggattccatatgttagagcgtcgcacaattgttctcgctgatggtagtgtccgttcctacttcgctcttcctcctaattacatggattttcctcctcagagtcgattagctggaccggtatttgggagattccctcctttttacccggaagagtttcgagatcagcggatgacagcgagtggatcttaaaaatgggtgattgatagga

SEQ ID NO: 46903 - DNA, 755 bp, Arabidopsis thaliana columbia
taaaaggaattaattattcaacggtattgaataagttgcctaactagtagatttaaaaatcggacgtatgtggaaatctctcattggtctatctctttcactagattgattctctttacgtcatacatatctgtctcactctcttacccaaaatcgtattttttaactctctcctctccattcgtttatctacacgttttctaatttctaatctcacgcatacctattcaacaaaaacatatttttccataatgctaacaacactcacgttagctaaactgatattttaaaaaactaatcaagtcaataaagcctctatagcccaaatatttgactataaaagccgattctaatcttatttttcaagtcacactccacaattacgtattttgtcataatcagaagatatctttaaaaaacatctagctacgacgacacataacctattttaataaaattaattagaaaaatatttaccatcattatccgaccaactacaaacattataaaatatcaggtatataacaaaaacttttacgtaatacgttatagaaaaacacagaatattatttttcttctatgcccttcatactttaagctgtataatctaaaaattttaaaaacagaaaatgatcactaatctaaactgttttttcataatgattgtccctcgcgccattttctgtctccgtcacattcttaaaacatgtcccacttgccagtcttgctgcccccaaggaatcatgtccccacca

SEQ ID NO: 46904 - DNA, 932 bp, Arabidopsis thaliana
ccaacgcaacattaacattggacctgaatccccatcaagttcctctgtaacttcctctgtttcatcttcttcttgttcatacacgtcgtataccggttcatctttagccataaggccacgacgagctggattaggacaagctgattgcctatgtccttggtctccacatttaaagcacttgaaattagctgatctctgctgtcccattgttgtggtattctctggaatttcagaaattcgcacttgatccaatggttggctagttcctgtgtccgttgctgacgaaagacgattgcgagatggattcgaagacgtgttctgatttctagcactttgttcaattaacaatgcacgttgatgagcttcagagagagttatggggttgaactgcagcaaggtgttttgaatctgagttcgcaaaccaccaatgaatctcgacaccaattgttcttcagtttatgtcaaagaattccttgccactaaggaaaaaaattcagacgcatactcatccacacttttagtgccctgtctcaagttttgaagacgagtatacattgtacgctcataattgtatggaagaaaagctctacgcatgaactttttcatattttcccacgaggtgatgctatctttacctgcccgaaaacgtgttgctttggtctgttgccaccaagctgaagctcttccacgtaaacgagtagcaactaagggcacacacatcgcatccggtactgatttaaacgccaatagctcctctgtcatacttaaccaatccaaaaaatcttcaggtcgtaatccactagaaaattcaggtaactccaacttaaattcagactcccatcgattagcatcattatgcccagctggcacaatctctcgatgttgatcattaacacgttgttgctgcatcccaaacgtgcaaacgggttgag

SEQ ID NO: 46905 - DNA, 541 bp, Arabidopsis thaliana
  unsure (1)..(541): unsure at all n locations
gagttggtttctaatggattgagttggaaacgagcagttgtgtggaacccctgggacaaaaaggcaaagaccatagctgatatgggagatgaagattacaaaacaatgctttgtgtagattctggagtaatcgaacctctggtattgttaaagcctcgtgaagagtggaaaggcagacaagaactatccatcgtctcatcaagttactgcagcggacagcttgatccacgcaaggttctttacggagatatctgatccttttgggggtttatcttacttagtaaaaaaacagtaataagccatgatctcattatcactaccacccagaaacaactctctaagagtcttgtcttgaacttggagattttatccttttgacttgtgttttgagtgagttctgattgttgttgttacacagagaggtcacggtaatattttgtaacgttgactctgtgtttgaccgtcaaacagtgtatcggtttctatgttcggaaatttagtagaatatatcatcaatttangtagaaattttgtgaagtat

SEQ ID NO: 46906 - DNA, 845 bp, Arabidopsis thaliana
tccccgattctatgacgagtgcaagaagagatatagcgttcgagtgtggaagatatttactgactgctttaattgtctacctgttgctgctcttattgatgaaaagatcctctgtatgcatggtgggctatcgcctgagttgaagcacttggatgagatcaggaacattcctcgtcctgctgacattcctgatcatggactactgtgtgatctgttgtggtctgatcctgacaaagacattgaaggatggggagagaatgacaggggtgtctcgtacacttttggggctgataaagtcgaggagtttcttcaaacgcatgaccttgacttaatttgtagagctcatcaggtaatattttgctttagacatgtatctgtggtacgtctcttttgtttacttgtcatcataggacctacaaataatggacgaatacttatgatttatctcttttaacctcattgaagttgattgttttgccctttaggttgtggaagacgggtatgaattctttgcaaatagacagctagtaacgatattctcggccccaaactactgcggagagtttgataacgcaggagcaatgatgagtgtggatgattccttgacgtgctcatttcagatccttaaagcatctgagaagaaaggaaacttcgggtttggcaaaaatgcaggaaggcgaggaacccgcctcgcaaggtgagaatctttaaagcatcgaatgatacagttacatactgagttctattagggcaggccttcttagtcatctcattgttttgttttctcttttagggtggtggaaaggctgaagacaaatccataaactctgtgttgtgtagccatg

SEQ ID NO: 46907 - DNA, 367 bp, Arabidopsis thaliana
cagctatggtcttaacatttaaatcccaggggttccacacaactactcgtatccaactcaatccattagaaaccaactctcaaaaggattcattcataaaaaaaaatacgaagaacaaatagtatcctttacctgcattgagcatgccttcctttcgcaactcgatgatcctctttcgctcatgatctatgaccgcaatcattgttggtgtgttcaagtacactctatcgacctgcacagcacactgactctatatcaatctttggatttaattctcttctttgaatctattcaggggaaaactatggctgacatatctcacctccccgtcaaaggtaatcgcgtctgcttgctcagtgaatctttc

SEQ ID NO: 46908 - DNA, 963 bp, Arabidopsis thaliana columbia
tattaactggctgaagcagacctaagactctaaaagaggaagaggtttctataacaaaaacgagtaaatgctgatataccttcaaaatcttaaagattcgagcttaatccacagcgaatgaagtctactttctcagtttctctagtactcctcaagttgtggtctgtaacatgaagctaagtcaactgaaaccgccaaagctacatgagagctaatgaagaagtgttggaataagagagagatagataaactatttgtcttaattgttcttatttaagcttaataggaaacagagcgtgttctgttttttgtatgtctacattttctgcaaaaaaaatccttgtttctcattcaaacaagtgattaagcaacgtagttaaatggaaagcttccatttaaagattgaacttttcgtggtccaaaacctaatgaattggtatcaagctcctacattacagaagggagctagatccagtcagaacttagaacagagtctcaacatgtcttcaagaaagaaaaataatatcttggctcgccgaacacatagaggagacagagcgagccctatataccatttaatccctttgtaaatgcaggcatctttttgacacagaccaattctccagacgcggtaaaagcaaaaataataggatttgagatttgatataatcattcactcaaagagaagagtgacagagtgtatacatacatataggtatatccgaatattaacagaatgcataatcttggtatatgcttcatctcatttttacacaaagatataatcctaggctaagcccctaagaggtactacttgttgttggaacagaagacgcctctggctgagcctcactagccatagtttccggcagtgaggtttcttgctgagccaccgatggagtttctggcagtgaagtttctagctcggccaccggtggggcttctgtgacggagggggtagaa

SEQ ID NO: 46909 - DNA, 947 bp, Arabidopsis thaliana columbia
tataaagtctcttctatttaattagaatattctacatgtttgaaatgaaccgtccaaatatattataccatgttaaatgtcagcggaataaaataaccttaaattattttatcagggaaaattaggtctagtttaagatttggtaatactaatactacagtgtcagatcctagtcatgtatttgtatataaaacacatgataaaagaaggagtcagctaaataaatgttgagctcgtccatgtttatattcttataatgaaatgatgatagtcatgtaatggtttcgttttcatgaaattattatcttcgtccaagttgaaacatttattgttttgaaacaaccattcatcaacccacggaactgctacgagccggagtcgcaccatacccctttatgcgatgggcaatgtaccatttcaaagaccgacaaagattaggtaagattgtgataggtaataataggttatggtaatatctttttgtttcatttgttggattatgttgtgtaaaacgtcacattgcctcttcgcgacaaattaacgatttaaccatagagtatacgaaaagtatgattaaacaaatgaaaaagcggtaatttaataacgaaattattagtcgctgactcagcctcaaaaaataatagagctcttttgatagatacttggtcacgaatctctcaagttgctggcacgctcacgctgacctcttcatatagttcatgaggcactttctcttttacgattgctaatatgacaaattaggggaaattattaacaagtacaacaatcatgcctataacagctccatcactaaaagtaaaaactaatttatttctgtgtccgtgaaataaataactatcgaatatgtctaaacacgtcaacaaattgattgtgttttgattttaaaacgtgtatgttcacgtggtctattaacaactgacatttta

SEQ ID NO: 46910 - DNA, 1255 bp, Arabidopsis thaliana
aaaaagccgcgctggcagtcgtcacgtcggcacgaaaactgcgaccatacttccaatcacatacaatagccgtcctgaccgatcaacctctaagagtcgcactacacagccctagtcaagtcaggacggatgacaaagtgggctatggagttaagcgaatacgacatcgattttcgaccacgcaccgcaatgaaatcacaggtcctggctgacttcctcatcgaactaccgttacagtcagcagaacgtgcggtcagtggaaaccgcggtgaagagtggagtctgtacgtggacggttcatcttcagctcgcggatcggggataggaattcgcctcgtctccccaaccgccgaggtgctagaacagtcctttcgtctccgattcgtcgcaacaaacaacgtggccgagtacgaggtcctaattgcctgcgtccgcctcgccgcggggatgcagataaccacgatccacgcattcaccgactcgcaactcatcgccgggcagctcagtggggagtacgaagcaaagaacgagaaaatggacgcctatctcaagatcgtccaactgatgacgaaagatttcgaaaactttaaactctcaaaaattccccgaggtgacaacgcaccggcagatgcgctcgccgccttagcgttaacttccgactccgacttgcgacgaatcatcccggtggaaagtattgataaaccaagtatcgattcgaccgacgccgtggaaatcgtaaataccatccgaagctcgaacgcccccgacccagcggatccgaccgattggcgagtagaaattcgcgattacctctccgatggaacattgccaagtgataagtggacagcgcggcgtctacgaatcaaagcggccaagtataccctcatgaaggagcatctccttaaggtcagcgcgttcggagcaatgctgaactgcctccacggaaccgagatcaatgaaataatgaaggaaactcacgaaggagcagccggaaaccactccggaggacgagctctcgcacttaagctcaaaaagttaggattttactggccaacaatgatttctgactgcaagaccttcacggccaagtgtgaacaatgtcaaagacacgcgcccaccatccatcaacccacggaactgctacgagccggagtcgcaccatacccctttatgcgatgggcaatggacatcgtcggcccgatgcctgcttcacgacagaaacggttcatccttgtaatgaccgattacttcacga

SEQ ID NO: 46911 - DNA, 566 bp, Arabidopsis thaliana
  unsure (1)..(566): unsure at all n locations
tgtaaaatgtacaaaataaaggatgattgaaaagttgtttacacacaaaaaaaaaaaaaaaaaaatattatgccagtgaactccacaccacttaacatcttcaataattgacaaatacaagactccttttctgacttttctaaacaccagtgattaaatgttcttacacagagcaatactatgatttgaaatgacatatacacatgtgttatatatagcaaacgagttcttgtatgaataactcactcatatgaaaatccattattttgtttgaccaaaaaaaaaaaaatcatttttgtgtgcaataatggcgatgatcataggcttacttgaaatcttcatcgcattcattttcttctttgtctaccagtgtttctcgctccacaagaaaactccaaagcatatggtcatgaactggccggtccttggggttgcgcgnggtgtgctcttccaaatccctcgtatctacgactttgttacggaggctcttgaggcagaaaatatgacgggttgtttcatagggccatggcttagtggacagacatattgacactgttgcccggtga

SEQ ID NO: 46912 - DNA, 1056 bp, Arabidopsis thaliana
tgatgattctcaccccgcatcccatgtcaagagcagttctcaaagttccaccattaagcggaatatactgtgcaagcttttcaatgtattggccagctccgccaggtaacatcgtgccaccgcctgggaaagtaaagtattccccttcccttttcatccatccttgatgaccctttccggtcagcaattttgttatatggcatgtttgcatgccaaatctacaaagttcaaacagccatctttaacagtctaacaaacaccaagagacatgtttctaaccatgcaaaactagacatcaccaataaatcgaactagctaatagctatcctgaactatataatctacaaaaccatggtaataggagctagaatccaatataccttgtgaagactctcaggccacggaacaggaattttataaccagaaggcggaggaatcaaacagagcggagtctcctcaggcaaaggacaatgtctctccctatagaaattcatctctctactaagctgactattccttctcggatcctcacaaggcatatgagcaacagcttccgcaggacaatactcgatcggttgcaaatgctgaccagcttcaaccaaagtcactaatcgctgccgttgcctcggatctgacgccgtagagagaagcagcgtttgccgaccagaagccgccatggaatcaccaagaggagtgaataaaaggatgaagaagagaagtacgataccgaagaaagcagcggttacgatgtcgaggagacgccattgacgagggttaccacgctttgatgcaggtagattcacgtgtcccatagctttagcttcaaccagtactcgaagctttcgtcttcgagagcagatcagatgcaaatcttagggtttataataagattcaattttggagatctgaagaatttgtcggcgattataaaatattactatttcgcaatccgttgtgtgagtgtgatcaaaatctcatttagttttttctcagtgctttagtaagcgtctctggtgtctggcgacgtcggtgaatacataaattgatttaagaata

SEQ ID NO: 46913 - DNA, 775 bp, Arabidopsis thaliana
tgaaaatgaagacaacaccatcgggaacaagacctgatttttcgatatcaacaaaagttttcaacagctttctcaccttcgctatacattccatatgcataaatcatccatgtccatgtcacaacatcctttgtactcatacgttcaatgactctaaaggaactctccaaagaaccacatgcaagagaaacaactgccaaaatatattactcttcttatatataccagagagagttgtgtatataagctaattaagttgaagttgatgcatgggtgatgaagacaagatcagcatcagcagggagatgggtgaatgagcttgtgagctttgatgtgttttgtctcttagacatcgtcgattggaaacctttctattgcttgtcccacaggaaactcaccaccactaatagtgggaacatcttcgtatctcataataataatggtgaatccaagatttctttaataacttaagtattcatttttaccttttggtttatggcataccctttaattatttacaagaccaaccgttagaggatgccacaatggtattttctgccaatttaagtcgaaacaaattttattaagaacgacaagaaacctaagacttcattattttcccaagggcatagaatagatagataataatctaaagcagtttttttatatgatacaaaagataagcagaacaaaaggctaaaatgataagcaagcagaactcaaactcttgattattttgttttcacggtgcctgctgcgtttagatggtggcatg

SEQ ID NO: 46914 - DNA, 768 bp, Arabidopsis thaliana
aagagatctttgatcgtcgaacaactctgacatggaagaactcagaagttcctcttcttccatatgcgagatggctttacatctccagctatgtgagtcggattctctactggctccagcttttgtcagcgagtgcttgtgtggctctgtcttcctacaagctcgtaatgcacaactacggagatgttcaagacggagacttggacaaaaggaatagacaagccgctctcagcatcttctactcgcttgctcttgccgaagcgttgttgtttcttgcggagaaagcttactgggagtgggaggtcagtgtgtgtcacttgcttgagaatgtgactagagagtgtgggtttggggttactggaatggtctctatcaagagattcttctatgatgcttactccaagtctgtcaatgggagtatctttgatggtgtgaagatggatatggttagctttgctatggatctcttgggctcgaactgctctgatgaacagctcatcggagcgaggattcttaggcagtttgctgtaaatgagcggttcgcagaggatacacttgagaagatcggtatcaacttacctgtcattgaaaggtttgttctttacaatgttaagatgccaaattttgtagagagcttaatcatattgagattgcagttcgtggaaacagaaacaaagctgatctcattctttttgtctaggttggtggagatgttgaactggaaagatctgcaagaagaagagattaggagatcagcggctgagatac

SEQ ID NO: 46915 - DNA, 724 bp, Arabidopsis thaliana
ctttactcttaaacctctacacttacttcagctacgcgggcaatgtaggccaaatccggctcgattacgctctcttcacggctccttcaggaatcgtttcggaccctcctagatcttaccaaaacctatttgatgcgatgctcgatgcgatgtactcggctctagagaaatcgggtggcgcatcattggaaatagttgtggcggagactggatggccaacgggaggaggaaccgatacaaacatagagaatgcgagaatttataacaataatttgattaagcatgtgaagaatgggacaccgaagagaccagggaaagaaatcgagacatatttatttgccatttatgacgagaatcaaaagccgactcctccttatgttgagaagttttggggattgttctatcccaacaagcagcctaagtatgatattaacttttattgagccgaaccaatattctatcaagggaatggtatatttatatttgaaaactaatatagatattggtactatcattcattatacaataaataaagtttgagggactgtaatgacttatcatttacaagtaatgacttcattaaaacaagactttactgttaacgtgttggtaattgtaatgcctttatcaataacaagtaaaattatacttcctgtctttaaaactgaagtcgtgtgtaatcagactcttaaaatttatacaaaattagttatctcaacttacc

SEQ ID NO: 46916 - DNA, 609 bp, Arabidopsis thaliana
gaggttccttgttcttgttgatgcctttaagattctttttatgagttgatgttactaatgtgattgagatcggagagtccaggttagttcagtctgtatatgtgtatgcttattaggtgaagttgagttctcattttattaatggactcacagatatattgaaacgtatcgaagaacagtgatgttatgcttgcctataaagcgatactcaaatgctcatgaactgttagatggttttgatgtagttggtgggctgatgggttatctgaagagcggtagccagaaatcgttgcttgcaggtggactgtcagctgctgttctgctgtatgtcttcagtcagctcccaacaaaacctgttcttgcatcaaccgttggtgtaggtaaggaaaaacaattgttaataacagagtagttgtgtccaatttactagtttcaaaagctggattcctgaacggcggtgatactagcttttatttttgtaagtctgatgatgtggcgtctaaacatctgcattgttttgtgttgtaaaaaagtgatggcgggtgcgttaatgtacgtaatgggaacccgatacatgcggtcgaagaagatatttcctgctggagttgt

SEQ ID NO: 46917 - DNA, 479 bp, Arabidopsis thaliana columbia
atccaggattagtgtgataatgcagaacatcaaatctcaccatctaaacttctggtgaagcaagcaacccacttaacaaagacactctaatatcagagagaagattcaaacttttgacggaaaaaccacctatggtagagaaacaactcaatacatacaacagacaaaataattaaccatcatgaagagaaaaatgcaatcttaccctttctaacaccaatctgatcaagaaaaggttcagattgtctaaccaaacatgccaacagttcaggtacatccaacggagggacatcctgcaccaaagtaaaaggaggccaagttaaactcccaatccaacactgaactcgacctaaaaatatataaagtaacaagaaaaactgatagagctccaacttccaaataccaaccttagcctcatcagtttctttgtaaattgatttctgcaaataaaacaagagaaaaaagcaccattagaaaag

SEQ ID NO: 46918 - DNA, 660 bp, Arabidopsis thaliana columbia
gacaatgaacgaatgcttctcgttccgttacattgatagagtcttttaaaatcgaatttaaagcagctcgaactagaaccacaatcgaaccatagattaattcaaaaacgaaccataccatattaacagcggttgagtttgattagagttttaccaaacccatataaacctaaccagatccgaattcacactaaacccgaagtgtaactagaacgccagtaaacaatattcaaatagtataaattaatacaaaaaataaacatgacacaaaaaaattacaacataattgttatgtttggtttccaaataaataaaagtaggtggcgggaaaagaagaatatcagaatatgcgttaaaccaaaccggtttaaatccggttcaaaatctttaattttcccaagtctcttatctcttatcgacgaagatgataaggtaacaacaaccaccatcatcgtctccactctctcatcaccaccatgctttctctaactgcaacaactctcagttcctccattttcacacaatccaaaacccatggattcttcaatacccgacccgtttaccgaaaacctcttcacaccatcacctccgctttaatccccgcttcaaaccgtcaagctccaccaaaacaacaactctatcaaccattccgtccaccac

SEQ ID NO: 46919 - DNA, 493 bp, Arabidopsis thaliana
cagtgcagactctagatctagaggcaatcacaataagagtaggtcaaaatgagagggacggtggcaaaagaaaatgcagaattgagcgactttcaagaagagcttgtaatagttgctgcgggtttaaaaggagactacaaaaacgaagaattgctatacaaactatgcaaaaaaacttgcgtttcagatgcttctaaatacgttacgaaagcgtttgataagtttgtagaagagtctaaaaaggcaagagaaaggggaggtgatgagaacgacatcgttttttgcgttgatgatgatgatgatcataatgttgtgaaaccacaccatcacaatcagagccatcacatgctactccttggtcaaattaaaatctgatcgtctttttcaataagttaaacatttgcttcgtttgtcatgattactggactgtataagacattttcatttagttttcccttatgtagtctctgtgtgaagagcaatagtagtgtgg

SEQ ID NO: 46920 - DNA, 340 bp, Arabidopsis thaliana
attttcttttgccaccgtccctctcattttgaccggatttgacaatgtttctttttttttttaaaaaacgaagtatttattcaaaataatcacaaattttgatagaatttattagaaatgaaaaaatgtaattaccagggcaatcttgtcttggtgagtttctcgtaataacagattcaaaagtgccagcccacgaatcgctctttgtcaaaaaatctttgagtttgaaaattttcttgaccgttgcgggaattgacgaatgctcatatggtgacattaggtacggcccatttgacccatgaagaactacacattttaccaaaaattgtcatttaattaa

SEQ ID NO: 46921 - DNA, 1705 bp, Arabidopsis thaliana
taaatctttgtattgcaacaatatgctgatgttctgtcttttacgactcatggagtttcattgtttgaaacaataatataaaacatataaaatttctattattccaagttccaacttataataatttgataatcatatcatattatcatcttaagcattcaatgctacaaagataatacccccaagctattttacattaaaagctgaaacagagacacaatactaacgataaaagttcgtagtatctttatgcaaccatacatacatatacacaaagatagacaggtagtgtcctaataattctacttgggtgaggtatgaacagcagcaacagtagataccattgtatccataccacacatattatgaggccctctgcagattttgtagtaaccatgctctccccacatcgctccccacgagttcttgataatccaataaggcttctccttaagacggattggtgcataacccgatgaaccaaatccaaccaagagcactccatggtcttggctctttgaacatacatacgggcacgagactcctcctatgtatgtttgcatccacatcgcattgatagcaactgtaaaagagaccatgttgtgttcatatctaattcttaaattagtaacaaggtaaacagattttccaaacttactagctagaggtccatgctggactagattagcagcgatttggtcttcatccgaagagacaacgctgaagttagacacactcgcaacaatcttgctcttgtcgaacttacaagcggtatggtcacgtcctgtataaggctagtcctcttccttcattagaccaccagctttaagagcgtactcaaaagcgttgttcattagtcctccactgcaaccagaatcacatgaattggcttgtgctggatcacactgcaagaaacatatataaattagtcacaaccagttcttcaccaaaaacacatatcaaatgagaaacaaacctacctcatggtcacaatctacgagctgctgctcactgaggctaacaagctctttagtggctagaaaatgtgctccttcaagagctcctatcgcactaaatgaccagcatgaaccacacataccctattcacaatcaaaacacacaatcacttcactctctataagctccatgaacgattacaaagctaatccatacgaatttgaaatctctataaacctggtttttaacaggtgtgacggctccttgttcacgccaatcgaactccgtcggaagatcgctagtcggaagaataggcgccgtctgagtatcagtaggaagacgaaaccctcggcgtttcagtcctaaaaacttgcggcggaattctttcggagtaagatctgagaactgcgtgacgccgtggacggcagacggatctagaagctggttacgcctagctcgtcttaggttagctttgaagacacggaaccgatgatcgtgctctacctgagtcgcgtaagtcttctcgtacttggatttgaatagagtgaagtgatgttctgcgttgaggagttgttcatcgttctcctccgggacgacttgcctgatcgggttaacgaaacctgcggtaacctcgccggagatgacggtagatccgagagaacctgctagtaacgtagctgcgatgaggaagaagaagccacacgatccatgcttcttggtttcaagagataaggaagaggagctttgg

SEQ ID NO: 46922 - DNA, 719 bp, Arabidopsis thaliana columbia
tagaggatccctgacatgtatctttttgttctgaaatggaaaaaaagcttaatttcaacatatgaatgagtagaaaagagaggaaatgcatcagaatattgaatacatgttcatcagataaaatcagtactagtgtttcaccagttttctgtgtatattgtttccaaggatggataactttgacctgtagcctccatgttgtagtgtgggggaagaaatccttgaggtatgcaaaggttgtagccattttgatagaaagtaatgaattcaattgtaatgttgatgcgtttggtgatggtagagtaggttaagatgtattgtatttatagtaaaaacatagtaggttaataatattcttaagtcgtcaaaatctttggtgcttgtagatgattttttaaattagtttttgaaagatttaatctccatttatttttgattttccatgattaggtgatcgttaattgcttatgaattgttttaaaaatttgattaaaaataaatgtataggtttaggcaagtaatatatttcgtgattggaatccactagactttattgtttaaggatagtatgagttgaaagatattgaggatttaattctcgggaatatgcgactaagtaagatattgaattctatgttgagtttatcgaacattgtaaatcctatagttaagggattgataataatgtatggtgtgtgattgtttaaaagttatatgtt

SEQ ID NO: 46923 - DNA, 898 bp, Arabidopsis thaliana
ccctgtacgtttgcagaagaatggattcttgccatggagttgtatcccggcttttctctataccgcgggttgtatgagttctcgcaatatgcatcccgaggaaacgggatgaagtggcaagatctcagtgatagcggaatgggtgaagttttctgtatcatgtcagtagagtggtttcttgctctcatagtagcctactatatcgatcaggttttcacatccggaaagcatcctttctttttcttggtgaaccttttcaaaagtccttcttccctaccaaggaggcctactgtgcaaaggttggattctaaaagagtattcatagatatggacaaacatgatgtcactcaagaggtatgggagaagtcaagttttttctttgccattccatttttccatatttcaaagccctcatgataacaaagaaaataataatcagagggaatcagttcaaaaattgaggaatgaaggtagcacagggcatgccatcttgtgtgacaacttgaaaaaggtttatccaggtagagatggtaacccgccaaaaatggccgtaagagggttgtatctcagtgtgtcttcaggagaatgcttcggcatgcttggacctaatggtgccggcaaaacttccttcatcagtatggtcagttttgcaaacaaatgttgttttcagagtgtcaaatttagtaatctactgctgtgttttctttgctgcactagatgacaggactcctcaaaccgtcatctggaacagctttggttcagggtttggacatatgcaaggatatgaacaaagtatacacgagcatgggcgtatgctgcagcacgagtaaacctctaaatgacttttgaatttttttactccaagcatataatgaacaactttttgacaaaatgttat

SEQ ID NO: 46924 - DNA, 1014 bp, Arabidopsis thaliana
taattgaaattttttttcccctttaaacaaattcagtatgtgatttttttgaatcaacaatgaccaaggacatgttttctgaagcttccctgaaaacagactcaaaacacttagacaacttcaacttactagtctcatcatctccttctccatcacgatgaaggacatgttcttgaccctgattggtctcattccaagccaggtactccttgcagatttgttgatgattctttagaaatgttgtaccatttgatttagcacatgccatagttctagcacaatagtgacatctatatatgttcctattatccggctctcttgtgtaatgttcccagacccaagacctagttcttggattcttcttctttgacctagaacctcgaaagaactgtctgcacttctaggaatccctttcgttttgcttacattttcaggagaatcacactcttcagtttctattccctcatcataggcatcatcatttccatatccttcattcgggtttgaagagtccatctataaaataaaaaaccctgacagattatcagattttaaactcataagcatcctcagtttcagacatgatatgaaaatctcgaaaaaaaaaaaaaaaaataggaaaacaatctcagattctcagttataaaccctatttcaaaaattcacatacatactcatttatacactctaaaccgaagcaaaatcgaacttaactcaatcaaacaatctaagttataaaccctaattcgaaattcacatacaatcccatttatagactgtaaatggaagtaaattcacactaaataacagagatttgaaaccaaaggcaaacaaaacataaggtgaaaaaaatcaaactaatatagaagagtaaccctagaaattacctgctaatgatttctccgtgaagttgcaagaggaaacaaagttgcaagtcgtcggagactagaaacgaagagtgaaatgcgagtggaggcgacgagagaaatgcgagagagagaaagtgaggtgagt

SEQ ID NO: 46925 - DNA, 909 bp, Arabidopsis thaliana
aaccatttcaaagatatttaccctgtcatcggcgatcaagaagatttttccaacttcatctgcagctgtacggtaaagatcggaaagaaaaccagtaacagacctcgcagacagaaagcctctagcgttcgttggatctcggatcaattgcaaagtcacccatccctgcagtccaaaaatttaacttcagctcatgaataacacatttctatgaaaaaaaagatttgctatatagattatgttgcagtttgtaagagtatcaagaagcattctagaaagttcaatgatctcgtatttgtttttttgaatttttaaagcatggttgagaattataccttctcatggctgaggagagatcttgatgaaggcggctgagagaaaccactcaggtgagctagagctgcagctaaagcatctgttcctttctcctcatatagtttttgagcagttgctgagaaaaactttatggagtcagggtgaacaccatttagagtggccaccacttggtctgctgacgattccaacaagtctccaacagttggtgggctaatgaattcaaaatggcagcctacgtcacgctccagagacctcactgttctcttttggctgctggtgtgcatgagaatggcagagccttctttccctgcacgcccagtacgaccagaacggtgcacaaaagtttctgggtcattaggaagttcatagtggataacctgtagaagaaaatgtcagaacaaacagacaaacatgccataagagatgataaactatgtaccgaaactttgagaacttactagatctacgttcgggatgtcaagtccacgagatgcaacatcagtggcaactaatacggtgaatttcccttgacggaaagcattgagtgttctctctctttgatgctgagctgga

SEQ ID NO: 46926 - DNA, 476 bp, Arabidopsis thaliana columbia
tgatcgcatccgtagttaagtttatctctaattaaaaggttaagggtaaaggttcttttaaaccaatgctaaatcgtttggtgattcttaatattattatttctatttaataaatattttgtgcagttgagtgaaacaaattttgtcataaggcatcggtacctgcttttttcaagaaaatgggatgctttgactagtatgatatataattgtgttttatatatcaatcatgttatatttactcttggttaagattattttttattgttaatgatatcattgatacaatgatacttaagaaaaactaaaaatgttccaaatgtattctataaccaattatcatttgagctacattgttctctatctaatcaaatcaaaatcataatattaagctattatggtatataggaaatatttgaactcaatcctttttttttgtgcggttcaagcttctaaagaggtctcaaaatttgtgt

SEQ ID NO: 46927 - DNA, 910 bp, Arabidopsis thaliana
tatcgcttccgaggtcatacctcctatatctaagacgcttcggtaggaatttactgttgatgcccccaacatctttcgtatggtcttgacctttaggtgaacttcctctagatcagatcgaatcgccataaacaaagtcatatcctcgtcatcgagaatatggatcgggtttgccctctgccaatctgggcccatcatccattgcgaccattggtatgatagctcaacttcatcttccgactggagtgataatctttccttcacagcgtcaacaactttagcgaacgggtctctttcccagatttttaccgccaagcataacccatctaactcggcgacgtgttcatagcatccagactcatctcttttccactctactcgaaccagtctaacaaccatcgccatagttcctgtcgataatcatccataattgtagtgttagcgttcgaatgagacaaaatttgcaaacccctaagttagggtgtactatttatcacactctacatatgatgaacaaactaacttgagaattaacttcttacctgatacttcaattactctaatcttgttatcatcgccttagtaaatgcagatattttccgttatgtgttatcagttgtattgttgaagcaacattgatagggctgtaataaatagccaaacacgcaaaccgaattatatccctcctcatcattacgattctcgtactgtaagttacaccggcggatttttatgcaggttttgtcgactcattaaatgcgagatatccgaaaatcttttatcttcccactacgcgtatccttagcaatagggctaaatcaagcatattcgttttgcaatgttttcttctacctaaatatttcttttacatgtacacttccttaattaaatcacggtggaagtacatata

SEQ ID NO: 46928 - DNA, 613 bp, Arabidopsis thaliana
gaatgatatacatttttgttactataaaacatttcgttacccacacatatagattagtttttgtgtatctaaattcatgttttttattagtaatatgaatttataattatatttagttaattttataatacaagaattaactttttcctgaagaaacacgaaggttatgcacaacatgcttaatagtttaacacaaatagaaaattaattaatcaatgaccaaaatattattaagataaaacaacaaccaacatcatatacatgtcacagtacggctgaaccatgcttgtattaataaagtaattccaaagactatatttcttattacattattagaacctggcttgtaaattcctgaccgcattaacatccatttggaatgctcttgcaagaacattcgggtctacatctggtttagacccaaatattgtgttagcaattgtgataacccctgcgttttggctgctcaaagcagcgattgcaactgctggagttcccctaggttgaactggaaatggatgagtccttctggaaacacaaatacgtccccacgttgagtgttttggcgaaagatcggttccgcttggtttgatgagataaccctacaagtaga

SEQ ID NO: 46929 - DNA, 596 bp, Arabidopsis thaliana
aatcaacaatattagtaatcttctcttatgcataagaaaagttttactattggttcaatatgaaatacttaccctgtactcaagattgcgggatgaacattatactcttttgcaaacacaaacggcacgatcccttgaggcaatgcagcctacaacgttaccacaagatttggttaaactacttcttacaaagagattgttaacaacaaacgaaaatagtttaatttacttgaacaatggccacacgcaataggtctccacgtaatccaatagccattgctgccacggccattaccgctggtccagtaaagaatctcaccgccatcgcaaaagtcgccgtcgaatttccgcaagcaattaatttcggttgcaatgccatgaacaacccttcaccattttcacattttcagttaattcatttccactcaaaacaacaagtgctgaatgatgcaatacatgtaaacgtaatctaaatccaataaatgatgatgatgatgcattcatgtacattgtaagtccaatcaacttccacttaatatggggacacgacaacaatcaagacacgagctatgtcatccaccacgaccgtttatata

SEQ ID NO: 46930 - DNA, 1911 bp, Arabidopsis thaliana
gcgattattaaaaaataaaataaaatagaaacatatctcagcaccgatttttcaacagccggcccacgatccagaaccgtccagcttgaagccggcgccgcgtcgacttgttccaccgttcggatattgccacgtgtgtgagagacacctgccattacctcgtggaacatgttttgttagtataagttactaaccaagtcgctatcttcaattcttcattacctaagagttgaataaaaaaacaaccatatacgatgagacacgcaaataactgatatacgaaacaattatttattgatgtacattcttctaactataatactacaagattctgaatagttttagatgtaaaaagtacgagaagagttatgatcagagtaagttaagtgataagatcatgacacgtaggcagaggaaataaagtagaaactatcgacaacataataattgagtgagtacaaaaaccacgtaataattaggtgtacactgtagtctgtagatcgattgtacaaaatgaaaaaactatatgatttaaggaactagatatacatatgcatcgactcaagaacagttgctttatgtgaagactatcaattacattatcggctaaatttggcttcatgtgttgaatagatggattgtgtgctcaggtagttgtgtcagttaattataacagtaaaccttcactgcttcacatatataaaatttgggttaaaaaaactttaacattttatttctttaattgacaacagacaaattctgtaacggttacatataatagtgcttcagttaaactccttttttaggcaactctaattcctttatacccttaatccattattattctatcgaacttatctttttaaaagttccgcgttacgccatcacttctccaccatttaaatacctaaaccactttctttcaaatttcttattccataaaaagtaaattcacaacaaaaccaaaaaaaaaaaaagagaagaagaattagcttacgtgttcatcacatctgcattacgcgcaaacgaaacagattcaaattctccggcgaagttttcttattcatcaatcaatctctggattcatcaatcatgccagagatcgagattgccgccggagcgcggacaacaacgacgccttattcggtaaatatgagctcggaaagcttctcggatgcggcgcattcgccaaagtcttccacgcacgtgatcgtcgtaccggccaaagcgtcgccgtgaaaatcctcaacaagaaaaaactcctcacaaatccagctctagccaacaacatcaaacgcgagatctcaatcatgagaagattatctcatccaaacatcgtcaagctccacgaagtaatggcgacaaaatcaaagatcttcttcgcaatggagtttgttcaaggagggaactattcaacaaaatctcaaaacatcgacgtcttagcgaagatttaagccggagatatttccagcaactgatctccgccgttggttattgccacgctcgaggtgtttaccaccgcgatctcaaaccagagaatctattaatagacgaaaacggaaacttaaaagtttccgatttcggtctaagcgcgttaacggatcagatccgacccgatgggttgttacataccttgtgtggtactccggcgtacgttgcgccggagattctatctaaaaaaggatatgaaggtgctaaagttgatgtatggtcttgtggaatcgtcttgttcgttctcgtcgccggttatttaccgtttaacgatccgaatgtgatgaatatgtataagaagatttataaaggagagtatcgttttcctcgttggatgtctccagatctgaaacgattcgtttctcgtcttttagatattaatcctgagactagaatcaccattgatgagattttgaaaga

SEQ ID NO: 46931 - DNA, 584 bp, Arabidopsis thaliana columbia
ggtaccatcttgatttcttctagtcaataaacttaaaggaagggatcgtttatgaaattgactctttggctggttaattctcgtattttggtgttgggtaaaggatgaatcttgtttgtgtgcagaatgtttcaaatgaatgggcaaaaggagtgctgagtgatgctgagaacctaacagaagagaaaatagatgaagtgatcaatgagtacctcaaggattacaaagaaggtgcattacaagtcaaaggttggccaacagtgatgtctggatacatactatcgaaagctgcagtgatcgcattgacacgagtattggctaagcgacacaaatcgttcatcatcaacagtgtttgtcctggtttcgtaaacacagaaatcaatttcaacactgggatcttgagcgttgaagaaggtgcagcgagtccagtgaaactggctttggtccctaatggagacccatctggtcttttctttgatcgcgccaatgtctccaacttttgattcttcaatcttatgtgttcggttgggtgttggtttgtatattttattgtctcatcagtttagcagaaaatgaagtgaact

SEQ ID NO: 46932 - DNA, 544 bp, Arabidopsis thaliana columbia
tagtaacactaaaaatcaaaggaacatctcctccgatagtggtgaaagatcagatctagcatccacttaagaaatcttgaaaaattagagacaacacatttaaatgcagattaatcatacgaagtataaaataatacacaatgtaaccttaaacgtgtattgtaaacgtatttaagatcacaaaaagtagatttttaaacttttaaagatagatttgaagtcttcgttacgagtgcttcatttagtatattatgtgtcaaacttttaaatatttttataaacatgacggaaataaaaaaaaggttagattgcgtattattttggatttaatatgattaatctgtatttattagaagtagagagtaaaattgcaaaacttggtaaaatggagtttttttttgcacgaaaccttatataaataattgattgatattttccctctcatttttcccggatcccatatgtatatactattgacttcgcgcttttcttatgcccagtgatcaaagcatgtctgaaatgataacacaaattatgtatgggt

SEQ ID NO: 46933 - DNA, 571 bp, Arabidopsis thaliana columbia
ggattcagtggttgattgtgtgagagaggaagtgaaagaagagcaaattaggaatttctgataggtttattacctctaaaacgacgtcgggtgatctttttttttttatcttattaatttctctgtgttacaaaagcaatttttaattttttgttgtatgataaaatttaagaaagaaaaaaaaaatgccgaaatttacaattttacttttcacttccaaaaaataaaaataatcatatgaaattccaaataatacacaatctagtccttatacatatattgtaaatgttttcacgattacatatatttgtttattgtaattctaaatgtataattgaactactcattttgagagctttgatttgctattgttatatatcaaccttttaaaaatttgacaattgtgaaaaaaaaaaggttagattgcgtattattttggattttacaaaatttttctacattttttgaaggtaaagtagcaaaaattatctacttccagagttttttgcacaaaattctagttttaaagtggcgttttttttgtgtggttctagtgtttctcagttattgg

SEQ ID NO: 46934 - DNA, 651 bp, Arabidopsis thaliana columbia
aaatcccactgagactacattgaaataactaacgaccaagaggagataattgtaataataaataataataaagatttgatatttcagacaagaaaatttaataccagaagaagaagatgtaacacaaacgatatcaaaaaaatgaaattacaaccacaaatttgtttttttttttttttggtataacaatcttgtccctatttttgcttcttcctcaatgggacaaatttcactttccttccatcaactatgcgcactttcgctgttctagccattgagataatatctcggcccacgtattcctcatcctcgtcatcagaaatcacaacaacctcatcgtcaggtcccggaccaacgttacgtttctccgggacaaacgaagtgtctttcgatggaacttcattgtttttctcctccacgggcaagggactctcttccgtttcctgaaactctttcaagttctctaatgctggcaaatcagaaaaaatgagactctccgcctttcgttttcttgtgtccacttcaccttcgctaccctctccgcaaagaggaacaccatcggttatgtcaccggtttggtcttcgattacaaggttgtcctcgctggaaatagacttatcgtacttcgccttagaggttggatcagacaga

SEQ ID NO: 46935 - DNA, 1162 bp, Arabidopsis thaliana
ctttgagagagagaaagtcttgtccgatgttccgatttggtttcggcaacgatcagttttttagtggtgttggtcggctttcgtctagtgtcgttgactctcttagcaatgtcaaatagctctatttccatcaattcgctctcgattcggatggcttaggtatcggcttttatctggatttgttttttcatttttcgttcctttgtttctatttagtttcagttttcttgtgcttgattgctttgattagatccttagatctgggtgggtagttctttgctcctccttttcttaaagggtttatttcgttcttcaagcttattgggtttagtcaattaagaacagattgaagttgcagagcaaaatcaggttcgtatctttgggttttttgaagtaattaggatctttggggtttttgaagtaattaggacttaatttatgaagtgatgctttggattcaattgattttttgttttagagaaaagcaagcctagatttggtgaactgcaaatttccatggagattgaaaagctcttgattaaagaagaagatgaagaaaattttcggaattgcattttgtaaagtcataatctcatcaaaattggtcttcacttgtatttttgggcgaagattgagatatgtcgactgaagaattttccggtgactttggccagaattgaaggctttccgacgtaacaaagatcagcgagtgttcggagactcccacatctttgtcttcccacgtgtctgctaacatgttccctgcttgccacgtgtcatatgctgtgtagaagtttttcttcagcttaagttctcttattggactttgttttcttttattgggtttgcttgttttaaggtttgtacactataacctgttactttgtatctgtataataaataaaatacacttatccaatgtatcttctgcatataatggttttggattttctgtttttaccaacatgaatcatctgctcccaagtctctcaacaacagttactcccttcaagtgttcaaaatttgctttctcgatcatttggaacctttggaaaaataggaatcaacttatatttgaaggagacatagttcatgctaatgatatttatacaaagcaatggatgaagaaagccaatggagctttgctaaaagaatgtgatgt

SEQ ID NO: 46936 - DNA, 508 bp, Arabidopsis thaliana
agccttagaatcacgttccaatcggtagagaaatttgcagctaggagtttagaggtgaagctcgaccaaactattttagagtattggcagtcgaagaacaagtggtttctagtttccacgggttcatgacagagaatgcacgaggtgttcatccctgcattccaagtcaacatttgatctcctgtgcttaaacggttgtgtgttgctaaccaagctagaaacgagtatttaggagtggcattcgagaaccaaattcctttataccaatcctttcttgctctcggcgttcgagttgcttcccaagtgcctttggtactgaaactgggctgatatatgtcacctttgccccgccaaagaactatatcctctgttccaactagacctttaacccgaagctcctctattgagtcctccatttggattaggtgtgcagctcgatgtcttcctcgcctatgcgtctgcagcacatttgctaccgtgtcttgcagaccaatacccatgtctatac

SEQ ID NO: 46937 - DNA, 832 bp, Arabidopsis thaliana columbia
cattaccctaaagtcgtatttaaatttaaaaactaagagccaagcaaaagtagaaaagcagaaaaagcaattcacgccatcaaatcttatttgttgtttggtctctctattcactattctctcctgttttcctttttcttataacatttccaatcaatcttattatttacccaaaattaaaaaaatcttgaacactatctttactttgtatatatatatatatatttccgtatacttttaccaaacaaagcatgaaatctttgttgaagcgtgtgcatacatacattttcgtacgtgttaggcgtattttcataattgtattcgctggtatttatcgttcttgtctttgttggttatcaaagatctatgtcgagaactttttacgtgacgtgattatttccatcaattgacctcaacgcaatcaatgccattaatgtgggctttttacttatattttcaccaatcaaataagcttttttagtctttcctaaacaggagtatatacttagaaaagggaactttaaattacgtgtagaatataaacttacacggagaaaaagtagcagtcccaaaaagcccaaactaattatgttaggacaaaactaattgcaaggagttgacgcaacttttggacacacctgacgagcggaccgatcggacagctcgcttagggcattccgaaaaggtatcacatgccatgtttagcctcacggtctcaaagttaccgagtcatacaatttgtaacgtgccgaaatagaggctaaccaggcaaaacgacggatgccacacgaggaccttccgggaagtccccatcctagtactactctcgccc

SEQ ID NO: 46938 - DNA, 728 bp, Arabidopsis thaliana
  unsure (1)..(728): unsure at all n locations
gtattccctagaagcattggatctccaagagcactactgtctccaaggtttgcaggatcatcatcaccattgagcaatggaacacccataagtatggattctttcagagactcaattgatacagcatcaccttttgaatctgtcaaagaagctgtttccaaatttgggggaatactgattggaaggcacatagaatgaaagtattagaggtacattttacttatgttatgtctacacatctgtcttttttgcctctgtattggccaatagttgtgctcactgttttcgttgcagcgacgcaattttgtggaacaagagctcgacaagatccaggaggagattcctgagtacaaaaagaaatcagagatggtcgagatgtcaaaaatgctagcggttgaggagctagagagtacaaagaggctcatagaagaattgaagcttaatcttgaaaaagctgaaacagaagaacaacaggcaaagcaagactctgagcttgccaagctgagagttcaagagatggaacaaggaattgctgatgaagctagtgttgcatctaaagcacagcttgaagtcgctcaagcaagacatacatctgcaatttcagaattggaatcctgtcaaggagagctacaaactctgcanaacgagtatgacgcctantggtaaagagaagatttggctgtgaaggaagcctgagaagcggttattgcttcanaagaagttgagag

SEQ ID NO: 46939 - DNA, 1109 bp, Arabidopsis thaliana
tgcaaaataggctattttagatttcataagattattttgtatttattaaaacaacaaactcaagtctacataattaatatattcaactcaaaactccaaactgaaagcttaagaagcccaacaattgtaagcccaattaaaaagcccagtaagtgaacgcgtaaacaaaaaaagtaaagactctcatggaacaatcaaaaacgccgaaacaatgcttcgtctccgattattccacgaaacaccgcgtttttgtttacatttcttctctttctctctctctcttctctcatatctctctcttcgccgtcaggttttgcccaaatttctcggtcttcttcactcccgcgagttttttttctcgggaaaattttccaattccaagctccattgaagccaagtaagaggtgcgattctcttcaattttgacttggaacttgtaaatagcgtatggatttgagctggttatggacagaattctagctcgtatgaagaaatcaactggacgaagaggaggagataagaatattactccggtacggcggttagagcgtcgcgatgcggcgaggaatatcaattacgacgcagcttcatgttctagttcgtcagctgaagatctttccgtttcgacttcttcgttgatgactcgctctttggagtttccggagcctactagtttccgaatcggtggtggtgttggagagatggatcggatttatcggtctcttggtgtttctggtcctgatgatttggctatttcttttgatgcttgggaagcttgtaagaaacgttcttcttcagatgttgttaataggtttaagtcttttgatcttgataaggttcgtgatcaggatttgagtgaagaaggtcctagtggtgttgttgttggttctgattcaatgaatcataaggttcagggtcaggatttgagtgaagcaggtcatagtggtggaattgttactgagttgagtgagattgggaatttaatcactcctgtggataggttagtagctgatggtgtggtagagaataggcgtgttatggaaagacaccgaactatgtgaagtcgaaaggtacttgtcccaataatgtagtgctgtggtgtggtgtgg

SEQ ID NO: 46940 - DNA, 808 bp, Arabidopsis thaliana columbia
agcattgttaggacgcatgtcttttcagtctttcaatccctctatcgaggttagtatctgtgacgctgtggcctgaaatactttgtgatctttcagctttctaaataaaactgtcctctccttagaaattacatgaagaggcaataaacggtggaaatccctcaagctctagcagtaatggaggaaaaaagtcttttaggtctgtactcttgcttttatattcctttctttgttatttccagagagtgtgcatacaacagaacaacgctggagatctattgtcttactgatcatctaattttgagacaaatgaagtcgttactgatagcaatttgcaaatagatttatcacctacttatcgtttagttcatttctgattttgcttctcgttaaagttgtaaacggtaactagtcaaaatgcatcctctttcagtgaaccggagagttcaaaggttgagccaagtggggaaacagatggtgacttgaaaagaaaacagtctgaggtagtctccgaggaacaaaaccgtcctaacaagtccccaaggagctttgacaaaccatcaccgagcaataaaaagggcaatggttttaagaaacccaagagcaagaaggtggactggagcgttttgaggccaccaaaacctcaaaccaaatagggtttaaattagctaactacagcaatctatatgctattagttacatcggttcatatgttctagtagatcgtttgttgctctgtctgtatcgtcattcccgtggtgttgcaaccgttggataaattatagcaaaagttttgaatttgtttggg

SEQ ID NO: 46941 - DNA, 499 bp, Arabidopsis thaliana
tcacctggtacgtaaaatgttttagcatatgcaactagatcactcgttcaaattttatcccacaaaaaaactagatcattcgaataagctaccgatatttttcatatttttattttaatatacatataaattagttagtatttagacaaaaaaaaactatggaatcacaaaaccatttaccaatcagagaactagaacttgacactttcgaaaatgcgtaggaacggaattaaacagaggaagatgtcgtggcaagacggtgttttgggaacaaactgtccgatccaaccaaaatcgagttggacttaccattttcaacttaaggaccaaatcggtacttatgcatactttgcttcaacgtcgatgcatagagcaagtggtgcttttggtgcacttaacgttaaccagaggtcagtcatcttcgttccttaccctaaaccagacgctgacttcactctcctcgtcagtgattggtacaagatgggcataaggtcaaaga

SEQ ID NO: 46942 - DNA, 660 bp, Arabidopsis thaliana columbia
caccattatcctttctaataaattgacattactgattttgcagtgggatagatatcactgagactctgcgaattcagatggaacatcagaagaaactgcatgagcagcttgaggtacaacgatgaacatataatgagtcttagctttgtggtgttatctgtttatattccttgaagttgcatacagtagggattgaaaagggggcttgttttgatgtgcttgcagagtctaagaacaatgcaacttcggatagaagagcaaggaaaggcgctgttgatgatgattgagaagcaaaatatgggtttcggcggaccagaacaaggagagaaaacaagtgcgaaaacgcctgaaaatggttcagaggagtcggaatccccgcggccaaagcgtccgagaaatgaagaatgaaggaaacctttcttcggatggtagatcataaaactgtggttttggtggagttgtagagtatgacttattaggagtagagctttcagtcttcttcaggccttttctcttttttttttctttcttaaaactctaattttctgattctcagctctctaggaagaaacaaataaagagcaattccatctttgtgatgtaattctgagtgcagagattttagatttagtgtttaggtggattttaaactagctttta

SEQ ID NO: 46943 - DNA, 558 bp, Arabidopsis thaliana
caacctcatcaacaaacttgaccagcctttcctcttgacctggtaatttcctttttttttctgattaagaaaaaaaagaccctaaagatttgaactttatcattttcaaatgcttccaaaagaagaaatcctctgttttgcgttaccctgttgatcaatgtatattgtgttaccttttaaggcatttgtggattagtcctctgaaagatttgaacattagtggttaaactcgaaaaagctgaaaactttattgatcaatttaaaggtttaggctaattgggttcacactcgaaattgtgggtttaggaatgggattaagcagaggaagaactcatggcaagatggtgttttgggaacaaactgtccgatccaaccaaactcaaacttcacttacaaattccaaaccaaagatcagatcggaactttcaactacttcccttccactgcttttcacaaagccgccggtggattcggagccatcaatgtctacgcaagacctggaattcaatcccttaccctctcccaaccgcagatttcactttactcgttggtgattgg

SEQ ID NO: 46944 - DNA, 608 bp, Arabidopsis thaliana
catgctcgctttatattgtgataataaagctgctattcatattgcagctaatccggttttccatgagcgtaccaagcacatagagtctgattgtcattccgttcgtgatgcagttcgtgacggcattataacaacacatcatgttcgcactaatgaacaattggcggacatatttaccaaggcacttggccgttcccagtttctttatctcatgtccaagttgggcattcaggatcttcacactccaacgtgagggggagtattgtgataaggtcgtatattctcttgatatgtttaaatccctatagtttaggagattgagtttatcacatacaatgactcgcttgtataaatacacatgttttgtgcatcaatgaaatcaagttagttcaatacctaattctacaggaatggtcggcatatctgttgtcaagagatggaactcttgctttgggaaatggttggaaaagcttttgtgaggctaatggcgttaggttaggagagtcttttactttggagttcgttaatgtacaagatacaactcctggtacttaagttctctttcgagagactaacacaaaaatgttaattagaaatagatgacatgt

SEQ ID NO: 46945 - DNA, 538 bp, Arabidopsis thaliana
tagcacaaacaaaaaaccttacctcttctagtggagcactagccataaattctggtagcgacaacctccctcttcaacctctttttttctgccctgcttcccgtatcaattttcagaacctcaaccttacggaggaggataaggagaagtttcggccatttaattcttctcctcatttcccaaacacaagaagcggtgatcagcaaggcggatctttgcttgattgcgaccaacatggtatatgtaagctccctgtagtccctctcttttggtgcaacaataaaagtcctagttctgacgaattcatgtgcggtgcatgcgaaaaaatagtgctcagcacaaactattttgcatgtctccagtgtcaaaaaaatttccataaagaatgcgtccagtctccacttgagatcaaacacccttcccacccctttcactctcttcgactttatagttacctaaaagatttcaagacatgcttttgttgtaaagttttaacagtatggtcatgctttatcattgtacacctgggatttgagta

SEQ ID NO: 46946 - DNA, 863 bp, Arabidopsis thaliana columbia
tgtgatgtgaccacgtgtcataaagtttggttggttaattacgagtttatggttggtcgcgtcatttgtggtttttttgggtttcaggcttgatggtgaaccacaacaacaacaacacgccgttgctgatgatccagatatggttgctgatgaagtcgctaagcttgttcaaatgtgcgtttctctctctttttctctataattatgtgaatgcattaataagcgtttttgatttctgcgattgcattttagacgcgactaagtcccactcacgtgaaccgtaaaataaaattaattagagaacacataaacaagtactatgagagaaagaacaaaaacctttacttttttgaattattttttattaatgggtaagagaaaaacttttgcttttaatttcatcgtgaaacgacaaaactgacacaaaacccttctctctcgcataaaactgacacattgtcgtttcttcaccatgctctcgcgattgtcagagtcgtttgcttgcttgcacggacattgttttgtttgttttatggttttaagtttaaacggcgttttcttcctttactacattaattgtatttcagttttttgttctctctgtgactgaatttggggtttacacgaagaggttggtttagtaactgcttctgtcgtctttttgttgcattcaagtttcgaagtctctttcatttggatatattatggtctggtctattttaggtttttcactagccgaacattaatggaactttttctcggatttattcgacaaccactttgttgacctcatagatcaacaaaaattggaaccgttagttattacgttaggtgagaacaacagaattggcggctgagatatt

SEQ ID NO: 46947 - DNA, 1022 bp, Arabidopsis thaliana
  unsure (1)..(1022): unsure at all n locations
gttccagcaaaacagacaggaagttaaagtaccatcaaaagagattttggacaagcacgccttctccatcaccaacaaagctacccatttcgtacttagctcaggcctcatcctctcgattttatagctatcaatcaatctcaactccttgcaattaacaagaatttcctgagctctgtcaattatatcacaggagcttaaatcatgcatactggctgcatcacgtgctgcatcaacatccttgattattgataagagcctagatcctatattccgcggctttactttagtactggcagaaaccacaggtctcaacagcttaaccaaaaacttgatggagttgggtgactccataaagtgatcatcttgaccctagaatcatgaacataaaactagtaaacaagagaaaaatgccaatggagcaagagaaaagagcatcacaagcagatttcacaatgcaaataagttacttacatcagtagttagcacaaagaaaagggtagctgcagcaagattgcttggtatgtcatcaaggcaaagacccaaaatcgcatcaattatggactgtgagatcctgaaataacaaaattcagaaacttttaaaagaactcgacttcaaacaaaccctagaaagtctagaaaggaagatactgaaaatcttaagtaaataaacataccctaaagctctcaaagagcgtcgctgatactgagattcacaaatcgagagtagagaggacaaagcagctcttctgatcctaactttatgtcctttcttcaacccatcaagagcgaagttaacttcgtcctcattctcaattaactcgccgaactcttgagcctccatcaaagtcgaattcgaaccaaaccctccaccaccggtttctgggtctcttgttcctcttctcagaaaaatcattatccgaaaaagtggatcttgaagaataattccagacacaagatgattcttgagttgagaaatnaactggctcgagttctggagatgaagaagacggaaaaatatg

SEQ ID NO: 46948 - DNA, 765 bp, Arabidopsis thaliana
  unsure (1)..(765): unsure at all n locations
cattcatacattgcttatatacacaaagctgctagggttacacaagggtttatgagacttcatcgataagttacagttaaagcccaaaacatataaggtccatacatatggcccaatactccccctcacgttggagtgtgaagattctgaacgcccaacttggacattaagtagagaaactgattacgaccgagagcctttgtaaaaacatcggcaagttgttcagttgtgcgaacgtgttgggttgtgatgatcccgtcacgtactgcatcgcgaaccgaatgacaatccgactcgatgtgtttggtcctttcatggaacacaggattagcggcaatgtgtatagccgctttactgtcacaatataaacgagctggagtagactgttcaatgcctaattcttttaacaacttacgtagccatttgatttctttaagagcataggacatagcacgatattcagcttcagccgaggagtgtgaaactgtatcctgcttcttcgtcttccatgaaataggggaaccaccaagcaacaccacatacgcactaattgatcgtcgagttaaaggacatgactgccaatcagaatcacaatacacctctaacgttaaatccggatcagcgtttaacaaaatgccttgaccaggagaaccttttaaatacctaaccacacgcaatgcagcatcgaagtgagcttctctaggatntctgcataaactgagccacacatgaactgaataactcactcaggacgagtatgtagta

SEQ ID NO: 46949 - DNA, 1028 bp, Arabidopsis thaliana
agtaatatcaacattcacagtaatataataatttatcaatatttaatagaataatctgtaaattttaaataactattgattatattatgttgttaaaaacaatgttatatgggtctaaatgggttaagaatattttaaataggtttaaatgaggattattgggacaacattatatatcctcatgatatattgagataaggttatagagcctatattttagggatttgagtttatcaaagctaagatctaccaaaacataagaaatttactctctttcgtattttcaatcaagtgtgttcgattcggttaagttttcttctctttggttaagagtctcgtattttcgtgtgaggaaaacatgtctctcgttgatgatggctcgtctgccagaaacggtgaaagtttcacttatatgttatctagcatgcgcactcctggagctatgatctcgtcagtttacttatctagtgacaattacaactcttgtgcaacagatatggtgaacgcactccaagccaagcgtaaaacagggttcatcaatggttcaattccaaaaccacaatttattgatccaaactttgaaaattggaaaacagtcaacttaatgattgttggttggattcgaacttccattgaaccgaaagtaaagtctacgatgacgtacatctccggcgctcaccagttgtggatggacttagagcaacgtttctctgtgggaaacaaggttcagattcataaactgattggtcaacttgctgcgtgtaaacaagatgggcaatcagttcttgatatggtcgtttgtgtaatctttgggaggaatatcaaatcttcaagccagtcacagtgtgttcttgtgggttgtgtatttgtggtgctactagcaaaccaacaaaagaaagagaagacgagaagattcacttgtttgttttgggtctcgacgactctcggtttggtggtttaagcacaatgcttatcgcaatggatctgttcctactcctggtgaaatataccttgcgttacagggaaga

SEQ ID NO: 46950 - DNA, 892 bp, Arabidopsis thaliana
tcaaaatatgtcaactttattaacttatgaacatgagtatttatacaagagagccatcgtatatgataaactcaaatccataaaatataggctctataaccttatctcaatatatcatgataatatatgatattatcccaatactccccctcacgttggagtgtgaagatcctgaatgcctaacctggacataagataaagaaactgattgcgaccaagtgccttagtgaatatatcagctagttattccgtagtacgaacatgatgcgtttgataatgctatctcgtactgcatcgcggacgcagtgacaatcggactcaaaatgtctagtacggtcatgaaaaacaggattagcagcaatataatagcagctttactattacaatacaaacgagtaggcgcagtttgttcaatatctaattatttcaacaacttacggaaccatttaatctcacagagagcagcatatattgccctatattcggcttctgtagaagagtgagacacattcttttgtttcttagtcttccatgaaataggtgagcctccagcaacacaacgtaagcactaagagaccgacgagtcaaagggcatgtttgaaaatccgaatcataataaacttcgagggtcaaatctttatcatctttcaacaaaataccttgacctggggagcctttaaaaatttgaacaacacgcaatgcagccttgaaatgagctttcctaggagtttgcataaactgggataagacatgaacataataactcaattgaggccgagtatgaagaagatagagcaaacgaccaactagtcgacggtatagtttacaatcctgaagcaatggaccatcatcggaagcgagttgatggttttgtccaacagagttagggctg

SEQ ID NO: 46951 - DNA, 521 bp, Arabidopsis thaliana
cgcaggtcgactccctaaacttaaaaagaagaaacatgtagtttgtgctggcagtagaaaccaagttttaagcaatctagaaaaaaaaaaaaaaaaaaaagaaaccccaaaatagtcaacaggataaatttttccaatgatctgatggttttaagttgatcaggggacatctgcattgccgacgacgcgttcgatggtcaacgcattaagcttgtaactcctggactgaaacagaaactaggcccgtgattgagttttggtctctttacatctttagctttaccaatgaatccaatcctatcttctttgtttgctctctctttgctttcttcactatcaccatcaacacatgcccatcaatgccatttcccagcaatctttaactttggtgactctaactccgataccggcggtctctccgctgcttttggccaagctggtcctcctcacggctcttccttcttcggctcacccgcgggacgatactgcgatggtcgcctcgtcattgacttcataggtac

SEQ ID NO: 46952 - DNA, 903 bp, Arabidopsis thaliana columbia
actccgttatagtccttagagtataaagcttcaaagatgccaaaaagaccaaacaaccaaccgaagaaaagcgtgatcaaagcatgtctcgtctccatcctacacttttccgttagctgaataagccctatccctccggtgaacaacgatatggtgaataacgatatgtataacaaagacaacacgttctccgtaaacacgagtgaacaagctagcggcgttatgaacactaggtacaaggcaagctccgagaacacaacctgaggaatcctctttttaggtgtagtaaactccgtgtagcaagtggagggaggatcggtgaagaaaagatatctgagtatcgtcactgcgtagaatgttgtggcactgaccgcaccgtctcttaggaaccgagacgaggagtcaccagatggcaagagaaggttgagggatatggagaggccaaagatggagagtagagtcattgcataccataatcctctgcatacaatcacatctcttttactcttcatcttctccattaagtatctcatctctctctctctcttttttaaaaggctttatctctcctcgtgtgatgggtttcagagacttaatatagggatggtgaaataggtgtagaactaggtattgaactgactaatctttattgattcacaaaacatgtgtatttatacaagagtcattgtatgtgataagctcaaactcctaaactataggaactaaaacatatcaaaagaatatacgacatgtcccaataatagggttttcgacttcttgtctttgaaggctttttagatttattatacacatgctaaaaagatcttcacctcacaacgaaacttactaacaaaaataaaaatataaatataaaataatattaagacacttctagcaagatgt

SEQ ID NO: 46953 - DNA, 1103 bp, Arabidopsis thaliana
cgcaggtcgactccctaaacttaaaaagaagaaacatgtagtttgtgctggcagtagaaaccaagttttaagcaatctagaaaaaaaaaaaaaaaaaaaagaaaccccaaaatagtcaacaggataaatttttccaatgatctgatggttttaagttgatcaggggacatctgcattgccgacgacgcgttcgatggtcaacgcattaagcttgtaactcctggactgaaacattaactttgttctgtaagttttatacaagttgtaaatatgaattgcaacttttttgtttgatcaacttcctttttttgtttgacaattgtaaacatattaaacgacttgtctgatcttatattatgactgaaaaataaaacagatttttatattatacacataataattatgtctaacgtgtgagagagtcagagattgtgatacttttttaattgagaaaattagtagaaagatttatacacattgatcaaggttagctgtgtgtttcaagttgaacatacgaaagaggagagaaggagacagaaaaaaatatcacaacatcgtttttagaagcaaccatgaacctagtcggtgaatttcgtgaggaagaaattgatgggaaaacgtttttcttatacaattcttcaacctcctccggtgaagacatccctctccaacctcttttcctttgtcccctcttacgtgtcaaaactcacagccaaaaagatccggaggctaattatgatgaccaaggctttgtcctgttcgatatttcccctcacttcccaagcgctgatccacaagtccactatatgcttgattctcacaaccgcggtcttatctgtaagctccctgttctccctctcttttggtgcaacaataaagaacctaatggtgccgacttctgttgtagtgcatgcaaaatcacaaatcttgcacagcctactatttttgtaccacatgtcgtaaaaagttccacaaagaatgtgtggagtctccacttgaaatcaaacatccttcctatccttttcaatctctccaactttatagttctccctttgcccttgtgaattgcatttgttgtgatataagtttccaagacatgattt

SEQ ID NO: 46954 - DNA, 512 bp, Arabidopsis thaliana columbia
tctagacccctttatctttacttcgacaaagtgttttgttttttggaggttaacttcgatacgatctaatcctaaatctaactagataagttattgagcttatctagtgtaacaagaaaataaaacgcaaaatcaaatgaaaaaccaaacttgttgagcacgtaaaagacaactccgactcttgtgctcaacgactctaaactcaaaggatgcgctgcatcacaatctaagcccatatcttccgatggttatgcaagacttatcattatagattcgacttcaattatgactttcgacagaaattaacacaatatctacatatccatgaattatttataacttttaccaacaataacaaactaaattatatggatatcggaccaaataaagcatataccttattaatcataatttagtaaatcctaagatatgacttagccgactatagattaatataaatataggattgagaatgccaaagaagatacatataggctgtttgtttggcacga

SEQ ID NO: 46955 - DNA, 347 bp, Arabidopsis thaliana columbia
actctccctggagcaccttggtcagatcttccgccttgatcgttgtcaggtgctccgccgaaaacgttaagacccgcccggtctgaaacgggtgacccgtttgagctccagacgaacatgtgaagctccttggcgtcatggctgtttgacttgccgcccgttggaagagtcgtctgctgattcgtattaacgtctttcgggtttttattgacgcttttattggcggtagatgtggtggttgaagagaactctggattcggagccggataagacccggctcctcctccagggtaatacccgaatctcggggaggatgccatggcgcaattctcctcgaagtttgaagg

SEQ ID NO: 46956 - DNA, 557 bp, Arabidopsis thaliana columbia
ttttgttttgcttaaaaatttcaagaaagttgtatatatgtatgccttttacaatcattaaagtttttctttttcacattgttcgttttcatgtcatttaagcttgaagatgaaattgtcaacattcgtttgcaaaggtgttaacataataaacagtcttcccaagcccatacaagagcattacgtagaaaaataaatagtttactaatgggtagcctcatgatattcactaatgggcctgaaaatcaaaagattcataggcacgtgtaattcaatcgcgctatttacagggcgcgtttagtggataaaatagtcaaaatagtggagacaatgtcggtcggtatccgcgtctattacacgcgctatagtaacaagtgtaatctattaattcttgcgatttggagtattaatactcacgcgctccaagatcttttctcaaaacaattagagatccagattcactagattgcaccgtagccttcacagccgttagatctaaatatcgacggtacatatcgaaaggataattgtagcagtctagatttggttggctggaa

SEQ ID NO: 46957 - DNA, 549 bp, Arabidopsis thaliana columbia
ctcttcatcaacctcaaaccttgcctgtataaaattacacacgattgactgagatcacataaacaaacaggcatttgacttaattaagctgagtaatgtaaagaaatttgacctggatagatttccacagaactgttctcaattcattactagttttcctcgagtcatcaattatgtaaggaacattagctcgcactagtatacttatatatgaggataacttcactgatccaggaccaataggttgtcccttggcattccattcaacaggttcactgacatttggctctttagctatattcttcatcttagttggacctctatgttttttacgcttaggttgctctggattctcatgatcctgtgccatttcaacaaaaccaagaggcttttcatcttgaacatcgtcatttagccttccttcctcagtctctctttcttcctcattcatcgctgcttcagtcactctttcttcctcattcatcgctgcatcagtcactctttcttcctcagcagctgctgtttgatcagggtacagcgtaccaggaa

SEQ ID NO: 46958 - DNA, 885 bp, Arabidopsis thaliana
catatatctatgtctatatatttgcatacacaaagtgcccatatgtcaactctcaagcctatttagaatattttgttgaaaaagacgaagtgagaaaatgaagctagaactcttaagcaaagaagtaatcaaacccgcttcacctaatcatctccaaaccctttctctttctctcttcgaccagtttcttccttcaacttacgtttccgccattttcttttacgatgatcactcaaaccaagaagacatccagaggctcaaaagctcactctctcagactctgtctcttttttatccactcgctggacaaatcaaagatggagttactgtccattgcaacgatgagggagctttgtttactgaggcacgggctgaaatatttctctcggattttctgagaaacccatcagatgctgatttgattcaaaagttcattgtctctccggaccatgcagatccagaaacatggccgttgttgcacgtcaaggtcatcttctttaaagacaaaggatttgcggttgcagttagcgtgtcgcacaagatatgcgatgcggcctcgttgtcaacgtttgtttgcagctggacaaaggcttcaaaagggtatgcggacacagttgatcctgaatttgtgggggccgatttctaccctcctgctgatatttctatcgagtttcctccattactggtacacgaaacaaaatctaagacaaagaggtttgtctttggttctttgatgattgaaaagcttaaaaacagagcttcaagtggcaaacgtgtaccacaagctacccgtattgagtccatcacggcgctgctgttaagatgcatgacaaaagcagggcattcaaagtcgggtaaggtgaaagaatttgcaataacacagac

SEQ ID NO: 46959 - DNA, 589 bp, Arabidopsis thaliana columbia
gaatgtcaaaaggtttcgataaaatggaaaaacattacgcaagaatgtcaaaaagcttcaatctaacctttttccatttgactcgaggagtggttgcttagggtataggttggccagtttagacttgaatttgaagttttcgaatgcaataatttactttaattaaagagatttagtttttaatttatttttatatgaccatcatttgtacgtgacaatcacaattcaaaaacatataaacaatttcgtacatattatataaggaatgccactctttccatatcttcttttgtaaaaaaaaattatttttagcgtagttatttccttatctatattgaaaaaaatgcaaacttacatacaaaagggcccaacatgagctggctttggacccgtagatgcactaaaaagccgcattgagtcacatcgtgctcttttccatttaatgaaaataatttcacatggaatatttgggtaaaatttctgttttataaatatttcagtggagaaatcaattttatgatttgatttagccaattacacgacatccttatttgatacgaatcatcaacaaattcctataaactgatat

SEQ ID NO: 46960 - DNA, 551 bp, Arabidopsis thaliana columbia
gatttcctaattcctaatccgtttcctttttattccgatcaaagcagcgaaaaaagcatcggagatatgtcgtctaaggacaagaaactatcgaagccaacaagtggtcgtactggtggtatccgtacactttccgatctgaaccgaagatcagaacctgattccgatagtgactccgatggacctcaagaatacttcaccggtggcgaaaaaaggttcgtacttaaaaaacccttaaatcactagttttactatgatctgcttaattatgatgtgttaactaaagtttttgatgattcaactataatggtcttaggccaattaagtgttttaatcaaaatcattactttttgagatttgtgtagtttagtgagtaatttattaatcatcaattatctatttgatgattagtatggttggtaaattgttggatctttgttttgtgttttatgtgtgaagtggtatgcttgttcaagatcctacaaaagaaccaaaacacgatgatgttgatgagatatttaatcaagcaagacagctaggagctgtggaag

SEQ ID NO: 46961 - DNA, 615 bp, Arabidopsis thaliana
  unsure (1)..(615): unsure at all n locations
cttgagagaatggtgggcaaggcgtctcttgaggctcaagttctcgtctttgagggtctcaagggttagagaaagctgtctgatgacctctctcttctcttcgtccttgtctaagagctgtttcctcagagcatcagtctcttcgatcagcttcaacctttcttgttccaattgccaagtctcatcttctttgcaatcagctgcggaggcatcatcttgaagggggtcttcaatctcagaatcggcatcttcaaagtgagaattgctgtcacaaacggactccatggattgttggggaaccttagcggacgangatccatagtggtcggaagacttgaggtggtcgaagttcacggctaaggaacggtgagctcgataaaagtcttcgacaaagctgataagctcaggacgtttcttgtagtaagtctcagcacgctgagcgaaagagtctgcgtttccgtctaacaacttcaacattgcctttgtctttgcatcaatctctgcaccacaaacgtttcacaccaaaaagttggcaaaaaccacaaaacatagagaagaactgagtgagaaaaagaccaaccagcgagtgttgattgaaccattgagaatgtttgg

SEQ ID NO: 46962 - DNA, 587 bp, Arabidopsis thaliana columbia
atcccggtgtgggaaaatgcagacaggtaaattagttgaaacaactggcctgcttgaattattgtgtctataaattttgacaccaccttttgtttcaggttggtatctctgaaagtgggatagatgaggcagtgcaaaagctattagctcgtgggtaagggaaccatcatactttatggaattcgtttaccggctacttcggctaagattttagaaatgggaaatcactttcaagcatcattagttaggatcctgagaactcaggatgttttcttattcgttatataataagtcttttcatcaaggagtaacaaacaaaacttgcacaatatttgtgtgctcactggcaaggcatatatacccagctaacctttgctagttcactgtagtaacagttacggataatatatgtttacttgtatgtggtaccctcattttgtctctcatggaggctttcaagccttgtgttgaaactggatagttacatatgcttccaacagaaactagcatgcagattcatatgctttcctattctactaattatgtattgacacactcgttgtttcttttgacagatataaagttgg

SEQ ID NO: 46963 - DNA, 721 bp, Arabidopsis thaliana
tgaagtaggaccatttcgatctagccataaaactcaaacacataacaaacaaggatttggctattaagagaaatgagtaaggcttacagttacacaaaaacaatccatatttttccccaaagcaaaaagtttcaaataaggagaaaacaccattttgaagacgccgattctaagattaaagaaaatgattgcaaagaagatgagaattcgaaattggaacaagaaaggtttacacagcaagaaaaacttaacactcggacaataaagtttaagagagcgaaaaatatacatcacaagaaacccagcttttctccctctgacctattgcatgagagaccatctgaaagaaaataataatgattacttgtggatcattaatctaagaacgtcagagaacgattcaaccaaagtacatattaccgggtaggtgcattcccaaggttttttatgttcagcagtaaaggaaccttgaactccttggcctactagatacctttggaacatcagcagctgggtcatcgaggcgttgcgtcgacgggaagagatggtgccactggtgcgtggggaagtggatttgagaccagagaaagctggtatcaaacgcagttttcagagccattgtgagaggaaacactcacaagcgctagagaacatgtagaagacattgatgctctctatggttaaattgaaagagagagagaaatgaagacatggaagagaa

SEQ ID NO: 46964 - DNA, 536 bp, Arabidopsis thaliana columbia
atccccatgtttgtttttctgaacatcgagagacaatttttcgattaaataaatttatatatatttaagtctgattaaaatcagcaaattcatacaagaactaacataatttggtcaatcctaatgcttttcgtaactgtttaaaagcatgaaatttgttatgatagaaaggttaagaatgaatgaggaacatcgagctagagagattcaatggaataagagattaatggcttctaaaatctctggatacgcaaaatactctctcagtctctcacaaattgatgtattttgtgaatctaatggctggtaaaatttcctcattgtggatttcaaatccacataatccggaaaaaaaagatatgatctaaaaaacaacaaaaagtcaggaagaatgggcttggtgaaaggcggcccactaaaataaataaagaattagtggacaaaaaaacctccgccgcatatttaacaactggtcaacgttctcccaataagatacggccacgtgtatgaaccctggatctgcgatgctgctctta

SEQ ID NO: 46965 - DNA, 789 bp, Arabidopsis thaliana
ctctttgcctcgatgacccagctgctgaggttccaaaggtatctagtaggccaaggagttcaaggtcctgtcctttactgcttcttaaacataaaaaacttgggaatgcgcctactgggtaatatgtactttgattgaatcgttctgtgacgttctttagattaatgatccaaaagtaatcattgttattttctttcagatggtctcttattcttccccttagttggatcaaagtcttctggaatgccttcgtctcaaaaggagctcatgcaataggtcagagggagaaacgctgggtttcatgtgatgtatattttcgctctcctaaactttattctctgaatgttaagattctcttgctatgtaaacttgttaaatcttatatttgaaaactgtctgaaacttgtcattttctttatttgcaggatggtttacctttttcccatcagattttcccgactgtaaagcgtattcatcttttacactgagcgaggctgcagacttggaagaaaaggcacaacgtcgccctccagccataagacctttcagaattcccattccacctccatggaatagtatccatgtcacccgttctattggagagggttcaatcaaaagttttcaagcaatgggaggagtgttgtggaaatttccagttatggtggtaatctgtttgatggtatcgtggcaagaacatcagattcgctaactacttttctccaaacattcacaagtgacaacatgcttttatttctcacaacacttcaaaactagcacagacgttatgat

SEQ ID NO: 46966 - DNA, 535 bp, Arabidopsis thaliana columbia
cttctcgacattgataggttttgtcagggcaagctttacagggatctcatctgtctagactgcagtcccgtggtatatcttatggcagcaacaaaggtatattttctgctcttgtttggttttctttggtaaatcaggtttaattgtgaatctaccccttttccaacttgtattacgagattctgattcatatatgacttatggtttgcgtatgtaatattcagatgatgaagaagcagagcaactttctaaggaaatctccaaggactggaatactggtaatccatatgatctagacaattttactttttttctcctttcttcttttcttgtacgtctatcttccttggtgtttcctccccgagtattagtgattcctgatattctcaaatttgtagtctttgaacggagcataaacaccctgttcctcacagaaatggtccgcggtttgtcgctgaccctccaagtacttctttgatccaaaagttactgtgagtgatatcttttctagtcttccaaacttagattgaaagaa

SEQ ID NO: 46967 - DNA, 485 bp, Arabidopsis thaliana columbia
ggcaactcgtcgtaggtactccagggttttgggacgcacatcacggtcagtcatccacatgaaagacttctaaagacgcatcttggagtttcagattcatcgaagcgcaagatccaagttgaatatttcatgtagcttagagaataattctgtgtaacatgaaactcatggatttgaattcagggtcgcattgctcttactgttgcaggagcctcttttattgcagggagctatctttctttaacaattggcagtctctccctcagctgttaaaccagtaaccttaacatacctcgtcaaactctactagactaataataaattatgtatcaatgataaatcatgggaaaactattagaatataatttctgatttccaaaattcctacagaatgcgtggatattaggtcacactcaagagaattttagacaaatttggtgaggttctctgatacctcagatctagagtttcagacaaagtatagt

SEQ ID NO: 46968 - DNA, 555 bp, Arabidopsis thaliana
gtaacccctgtgccagtattggttcttaatgaagtccatcaacctgttatatacacgagtgccgagtggaaggaagaaataactcccagggctgaagctcaaggatggagaatagatattagtaaagtgaaacacaaagaggaaaccacagtatattagcaatgaaatacctgagttgatgactaaagaagagttcctgcttttggcccaatagtctgtggtcatactttttggcttcttctagaaattggagatatttctgtcgaccaaatgatagatattatgcatacttatgacacagcgtacgtgccataaataattaagatattttgagtaccttcagctgcttctgatcaggataagatatcccataaactctctgcaagctctcacggtctttgtcacccttccagtaagctgatgaggcctgagaaaaatatattggtcagcataagaaaacaaactagaatctgtagagatgtagctcctagagatacagtagcaaatcaccctcaaacacttgaacgctttcacaaaggaagtatttggtatgtg

SEQ ID NO: 46969 - DNA, 607 bp, Arabidopsis thaliana columbia
gcaggtcgtagaggaaccctgcatatagaattcttccctgatggtatacccgtcaccattgtcgacacttcctcgaggtatatatccttatataagttcactgtattgctggataattactctcttaaataaagctactttgaaagaaaataatttctagtttagagaaaagagtgttgcttttatatacaatattgttgttgggattgcactgtgccaactgtttgtgggtttaggatattttaagctttgccagctttgttgaggttcttgaagtatgttttgatgtttttgttcgttggttcaggccagaagatagggacattgttgctgaggaattgaagcgcgcagatgcagtagttttgacatatgcctgtgatcgacctgagactctcgaacgtttgagtgaatactggcttccagagcttcggcgattagaggtttgattttcatctctctgttttcagtttggtcatgtcaatcttgttgtgtgtaaaaggtgtacaatatcttatctattgatcatatcattgtcataatgctagaaggtgtgacctaaacctttgctgtttcttattaagattggcttgtgatgtttttgaacagg

SEQ ID NO: 46970 - DNA, 867 bp, Arabidopsis thaliana columbia
cccaatacagtttctacgaaatgtatatctatttatccaccaaaaaaaaaatgtatatctattttatttgtttcttatttaattagcatcaccacaatttggtgcaataaagagtatcaaattatcaaaacataaaataaataaatttataagccaaatattaaaataaaatctaatataataagatttgttcctatcccaaatcctaaatgtaagtacaacacattatttataataaacaagacagaggtctgatatttgcgttgaacagaatcgttgtcacttgttcagtcttcactacggagctgttttttttcgattcgccggaaaaatcataaaatccaaatctacaaccacctttttatcgcaatccaatgccggaagattcttcttctttagactacgcgatggagaaggcatcagggcctcacttctccggtcttcgcttcgacggccttctctcttcttctccacccaattcctccgtcgtctcttcactccgatcagctgtttcttcttcttctccgtcttcttccgatcccgaagcgcctaagcagcccttcattatcggtgatttctcaaaccccatttcgctctagcgttgtttaggttttatcaaatttgggaaattgggttctgtctctcttgatttcgagagtttcttctgcattaacttcgttggaatctagggttttgatgatagaacctctgagtatggtagcattttttgtgctcctgagatttaacagaactaatttggtttcaattgtattaaagtatcgtttttttttttttttgacgttttgtttgatttgaccttttgacaggggtttctggtggtacggcttctggtaagaccacggtctg

SEQ ID NO: 46971 - DNA, 616 bp, Arabidopsis thaliana
ccctttttgttttgtcaacgaagatagaataactataatgagaaaccatatagaataagtaattattgctttatttagataggtggcttatcaatatttgattgtgatgtgatctcatgtcggcctatataactgactcatttgatttgccaagctgttgaactatagtttattacatattttggcttgtttgacattgtgggtttctcctatatatttaacgttcactccaggtacaaggcatatatattattactaagcggtaatggcaatgacttacgcgtggttatggacgcttctcgcctttgttctgacatggatggtttttcacctcatcaagatgaagaaggcggcaaccggagatttagaggccgaggcagaagcaagaagagatggtgcaacggatgtcatcattgttggggcgggtgttgcaggcgcttctcttgcttatgctttagctaaggtatatcttttgcataagttggtcggtaagaaattaagatccgctgaattcagtggtcgcgcggtaaagatgattaattagagttcaaattttgtcgatgttctgaacctacatagctgattacactagaattttggtagtttttttatgtgt

SEQ ID NO: 46972 - DNA, 826 bp, Arabidopsis thaliana
aatcaggtgcggatcggcgtaccataatccggtggacagcatcttccaacttattgacaagaggatccgcagcgatatcaatctcgtagattactccgagatggttagagttagaccgacgattggaggattgagaccggatgaaaatggtttgagatgcacggagaacaagataagctgcggcgaaacggtatcgagacagagaaagtgaatcagataaagatcgagccattgtagagatttaggagaaagatggtcctgtttttctttggatcggtttggttgtcccttcttctagtctttttaacggataaggagaaaaagagcattaatcttgtttatcggaatttccttttttaatcctttttctgccctatctgaaaatttactttctccgataagaactgtcttttttcaaaacaggtacatcatgcaaatattttctgagtataaaacaacatgagacacaatcatacaaagcatatactgatgtccaaaaatccaatctgtgtagtttttaagccatactggtgtttaaaagaaaaagaaaaaaattatacactactctagtgatgaagattgaagaatcaaagaactcaaaaacaagagcctattcgtctagtgggccaccagtccactcaaggccggccttttagtcacctgaagttggacccaacccataagtggggccggaaaacaccatataatccaataggcaataaccaatttcactagtgtattaaataaaaatatattaatattattaggtgagatatcataattgataagaaaatgctccaacttagtaataattacaatagcattt

SEQ ID NO: 46973 - DNA, 592 bp, Arabidopsis thaliana columbia
  unsure (1)..(592): unsure at all n locations
gttaaaaatgtatgactctataaccatcataggatccatcatccttttaggagatgcttgttttgtttttttcctcttactctcttgaacaagaacaacaaggccaagatctccatcgtgtgtttcgtatgtctgaaaatccctctgaactttttattatagttttgatgagacttgtttggtggaagtttggtggttctgatgatgatgagagagagcgaagaaattatggcttataaaaaagaagaagagacatgatgattactgattggtacaaacattgaaaatagttataaaaagagaagtaaattgtcaaaacaatcacaactatttactctacctacgtatgggttatataacataaatatacgaatttgttatacatatggggtatgaacttatgactgcgtataatgagatttgaggaccgtgttcaaaactttccttttaacaatcgttgcatataaaaaatacataacatgtgatctacagtgcatatcttgcttttgggctcttgagttgatagcgtattacattgaggatgtgagttaatgaagccctaaacatatagtgttgtttgcctttntagtgt

SEQ ID NO: 46974 - DNA, 972 bp, Arabidopsis thaliana
acatcctgcttttgttgttaggccaaaacctgcaaaaccaatttaagaagacaattaaataaccgaaaaaacattttggtcgagttccaatttttgacaaaatacacgaattgtttttataaaaagaatcaatgttaacatgttagcatcataatcagttacctgtagcgcatgttccaaacacgagaggttccgatgtcttccatggccagagagatgccgtctcttgcctctagctccggcaagtgtgtctcagcttctttctaaaaaaaataaaaattcagtaaaatataacttaaccaataagagtaaaaataaaataaaaacttgacaatatttttacacaaacattgaaccttttttagaaaatggaaagcaaaggctacaagaaattagaagaaaaattacttttggcaaaacgatccttccgaggttacccacgtcgctttgcttcaagactttctgcaagagaaaccgcaaattcttttctggtttccatccctaaaatcaaaccaaaaagatcaaaatcatttcatttccattgcaaatgtataatcttccgattcacattttatcaaaaaaaacacatgtaaaatctttagcttcttcatcaaaccaaacgagtggtgcaattacacaaactattcgagtattgctaaattaaagaataaacaatgagaaagatgattgtgcatgtctacctgccggcgatctggtaccacctgctgacgtggcatagcagaagctgagccagctcggtccatggtaggtaactgagtctccatcactggcggtaattgaggcggcactgccgggacattaggccaatacatccaggtccctcccgatggcggttgtggccacggggttaagttgtggagccacgcggcacaggttctccgatttgggtttggtctgctgattattgttgttgtagttgtagctgttgtatgactgtggtgatgagacaag

SEQ ID NO: 46975 - DNA, 582 bp, Arabidopsis thaliana columbia
ctaatcattttctctataaatatctttaatccgttttattgtttcttaagaatcattcattggcaatcaagattttttaaccaaaaaaatggcgaattgtatcagaagaaatgctcttttcttcttgactcttctctttttattgtcagtctccaacctcgttcaggtaaaccactcaaaacagattcagtttattaaagtctgatattgaagttttatatattacaggctgctcgtggaggtaaaaatgaccaaaggctatacattccttaaaaatttaatggctattagttttctgatattgaagttttatatatatatgacaggctgctcgtggtggtggcaaactcaaaccccaacgtacggactcaaaacttttgttgtgtcatatgatcatattaatttattaatcactaattattgataatgttgataaataaactttaaagtaacaataatgggtgtttattttgtgaaatgtcagttttctagtatactgtatgctgtgaattataagcatgaacataaagatctcaatgatttgttttttgtatgtttgttgtgatatgcttttttgatgga

SEQ ID NO: 46976 - DNA, 493 bp, Arabidopsis thaliana columbia
tcgtccgtatattcacccatcataatccaaatcaattttaatttacattgatgaaagctaagcacattatgtaaatttactaacctggagcttccttgtgatattctgtgatcctaaacgtacgtatcagccacaactacaagagaaattgaaacaaataataatacggggaatgacattataaactgagatcgtaacaacctgtcttatgtttgagataatttatgggccaatattttgaacagctcattgatcatttctatctctgcatgttcatagcctaaaagaagaatatttgaattgatcaattacttaaatgttaaatttccatttgatctccgtagggaagaaacacaaataggatccgatcaaaaggacaaaccaagagccaaaatggagaaagcagcgtctcttagttgtagcaaaggatacaagccataagtattacaaaatcaaggatatttctgctactggaacagaacatttgatgtgg

SEQ ID NO: 46977 - DNA, 466 bp, Arabidopsis thaliana columbia
ggtcattgtctgagctgggaaataccgatgatcttttgtagtaacttctcaggcgcgacaatgccgagattgcatcagctaaaagatagcaataagtaatcttatttactgcgtaggtcgataatagggaaagacaagtgttgaagcgaccaaggagctttttctcagagatactcgagttgtcaaaaactgaggcttggctcctgtcgtggtcgtcaatggcgtttgtaaaacattgtatgctaggaagaacaaactctcggaagaacactgattttacaaagtgacccataatatttatactttattacaaagtgaccccctgttataagtgaactttgaaaataggggacttttgcagcaaaacaagctcattttggcttgtatgtcgtgtttggcacaagacaaatcatattttgatatttggttcctattccttattcattcaattgtatggaccctttga

SEQ ID NO: 46978 - DNA, 432 bp, Arabidopsis thaliana columbia
ttcgatacgctctctactttctcagcctcatcatcaggtgtaacaatagcagctctatccaagaatctgtagaaaataatagagagagagttaacactgatcttgacgatggtttctgagattataacagaacttttaattggttatcttacctgaagcctttggtatgaagaatcttcatatctccagtgtattgagtctcagaatcatagagattcaactcttcatggtgcacatcaatcttagcctttcttgttgaagcaaccaacacttgtccagaatctataccgaggacgctctctaggcgtaaagtgtcggtactttggcgtgccaatcaagaaaagcactagccccgcaaaagcagagccagcagacgcccataatccaagcggccattccccttgatcctcaaagtaaccgaggacagtattt

SEQ ID NO: 46979 - DNA, 573 bp, Arabidopsis thaliana columbia
tgaagctaagagcttcttcattgacgaaggagaagaaagttgttgtgctttttgatagtaaagagatcaagacctgtcgctaccaaatggcttacatcgttggagatgatggatacttcaaatctgtcaacattggagtaagtccgaattcccagcggaaaccaggcagacttgtgtgctcttcttatgttccaagtttagttcaactgcaagattagtcacttttcaatacttttgtttgtttcttgcatcaggttttcttttgaacaaaactgattttagtttgaagaaatagttgatacaagtatgagtgtatatatgacaaaatctcactttttcaagtatagtgtttgaagttcattttgaaatcttggtttcagactgaagatgaaaatatcatcgatttgtcttatagaggaagacttcattggcctgccgttctatgcaatagagtacttaaggtccatagtttacacatgagcttaaacttgggatttgatctctcttgatttcttttagattttgaattgtcaaaacccatttcgtagaaaatgctagtcatctgatgaatat

SEQ ID NO: 46980 - DNA, 632 bp, Arabidopsis thaliana columbia
catcggttaatagtttaaagagtttctatctgctttatattgttgatattaatgcatattagcttttactaactgtgaggcagaagcgttttctgttgcacagtgtttgttgcctggtggactttcttacccagctgtgttagatgggcatctcattatctagttatgaattaaaatagcgtatggattttaataatcttgtgatggatttgaaacttgattctatttattatttctcttgataacagtagctactgcatagctatttagtttgttacttgaagtaccatataaatacactgctgaagtttccttctgattagctttcatttagagcctactgaagctgatgctttattttcttgatcatgcagtgaagtaggccgttggttaatacttctatctttgtgatactctttatcgcaggaaaagtcatcaactggatcacgcactgatgatatatatcgccatgatgaacagcggtctgcagcaagagggtcgtcttttgccaaagggactccagaatgcgttatgagagccagacacatatagcaaatccaaaatgaatgatagagatgcagaacccagtgaggtactatatatagggtttcctgcttcgttgaaagtagatg

SEQ ID NO: 46981 - DNA, 266 bp, Arabidopsis thaliana columbia
atccccgtgtagtcggtataggtcgtcaatggtgtgtaggtagtcagtaaactagagagtgctttggccgcttgtttgacggctccaaagacggagaccgtatctcgatcatgcacttattagccacgtttagcttaattagatcttgtggtcaactgtaattgtatgtattgttctagggattaggaatttaattaattggtacagaattctaatattttcttcgacgaaaacccttgcacaattcaatgtcctggggtagctga

SEQ ID NO: 46982 - DNA, 517 bp, Arabidopsis thaliana columbia
taacaatgttaagtttcatggacttgtaactcaagtcccttggcaatagttggcttaaatccgtttaatcttataaaaccggactacgtactagtactaggtaatgttttgagagcttttgctttatttgattgtgttaatttaggaacggggcgagacaaaccggactacttggcaacggttgaatgtggatccaagctcacccacattttcaagcgtcattcacagactaaaaatgccatatataggagatgagcttcaccacactggttggaactcttgcagctcttgccatggtgatgcttctgctgatagacgttaccttgtcttaccaggcttaatgtaagatccttacattgaccctctcacatttcttgatgatgacttgactagaaatatgtttctttcctgtttgaatgaagttctggtcgcatctatgcaatcgacacaaagacccgcccaaaggctccgtctgttgtacaaggttgtagagcttaaggagattgctgaaaagaca

SEQ ID NO: 46983 - DNA, 348 bp, Arabidopsis thaliana columbia
aaaacaaaaaaaaacgtaaaatttggggaagagaagaacatatacgcacagaaggagagctaaggatctcgaattcaatcatccgacgtggaaaggaccaatatctccgtttctcagagaaccagcgatctcatcagcgatagcacgcaagtgaaaacccaaccactcagagaaaacccaaaccattctcatcagatacatcgccatgcccagcggcatcgccatctcaaagcttttctgcttctttctctctctttcgtcagatcaaatgattggccggcgaacgattgagagtggccaaaagcttggggaaaaaaaaatcaaagatgattcggtaggttcaaggat

SEQ ID NO: 46984 - DNA, 824 bp, Arabidopsis thaliana
aaaggttctttttttttttttctgttctcgtggatgtagcaaacgcattcacaatctttggttggtaaaacacattaatatatctttgtttactaaccaggataactggattgttggatattaaaataaacatcaaaatcaaaatcacaaattaagacccttaatgcaattagtattgaaaaaatcatttttcttatcaaggctgctttgctaatatcattgcactttcaacttcctccacgtctccgcctctagattgatcaaactcgagtgaaggcgggttattaagatctatcaatctccttacgctctgctctggatcggacacatttgttacaatactcccattgctactaggactacacttgtcttcatgaacaacaacctcgtcctgactgtctttgtgaccgccgtcactttcccctaggctcagctttagatccaacacatttttaacaacactcacattactgagactccacttgtctctgctgggaacaacctcgtcctgattgcgtttgtgaatgttgtcacttgcccttaaactctgttctgcatctaacacttttgttacaacgctcttattgctattgggactcaacttgagaacagcctcgtcattaccgcgtttgtgaccgccgagaaggccttcgtagtgacggcgtttgtgtccacctagggcttgtccggtgggaaacagaacatgacatatatcacacttgtggatttcccagacggtgacaacatctttgaccgcgttttttctcagcgtctgcgctgcgttttcaagttgcgcggccttaatactgtggctagctttgtga

SEQ ID NO: 46985 - DNA, 935 bp, Arabidopsis thaliana columbia
ctaaaggtcatcattgattttattaccctcttgggagataacatagatatacatatgtgttatgttcttccttataatttaccgttggttatgggtttgtatatttcttgtagagaaaagaaaactggaaaatcttttgttgagaactcagcgatttggggtttgtctcgagattctattttaggacattttaatctctcatttgtattttcagaccttttatttgttatatccattggcaataaagtttgatatcaattggatgagagttatggttcttaaatttgccaaaaggacagtttatgttctttgtatatgattgcaaccctaattccatagtcaatggagacatcaaaatgtcaaactatgcttgcattatataatctctttcgactcaatgatgtcaattaccgaaaaagtagaaaggaaggatttgttttgtttgcgactgttgttagttcttatgttgctcgtcgtaaacaagaaaaacctgccattcgtttgggtttttgaaatctagtctaacagaaagaaacaagagacaaatgaagaagagtaaatctagtccattcatcatcatcagtcttttggatcgtgcatatattaatttgtataagagtctgtctaacaaaattgtcaatatgtccgagtggttaaggagattgactcgaaatcaattgggctttgccgcgcaggttcgaatcctgctgttgacgtattctattttgttttgttttcagctctcttcagaatttttgtaaatattttaaaagggaaaaaaatctcaaaatacgatttcaattaaaattgtagagattctcctcacgtctgtttgtgaaatgttgtctctaataaatttccgtaaattactgaaaacaagacacgagaaattgttaatttacacaataaaaatacgttacgtttgggggttgcac

SEQ ID NO: 46986 - DNA, 521 bp, Arabidopsis thaliana
ttcctactgctcatggagctttgttgacacaccatctcaagactttgaagaccagtgggattcttgtcatggttaagaaatcttacaagcttgcttctactcctcctcctcctcctcctactagtgtagctcctagtcttgaacctcccagatctgatttcatagtcaacgagaaccaacctttacctgatccggttttggcttcttctactcctcagactattaaacgtggtcgtggtcgacctccaaaagctaaaccagatgttgttcaacctcaacctctgactaatggaaaactcacctgggaacagagtgaattacctgtctctcgaccagaggagatacagatacagccgccacagttaccgttacagccacagcagccggttaagagaccgccgggtcgtcctagaaaagatggaacttcgccgacggtgaagccagctgcttctgtttccggtggtgtggagactgtgaacgaagaggtagacctcgagtggaagagctgctgggagggagag

SEQ ID NO: 46987 - DNA, 1014 bp, Arabidopsis thaliana
tagtacatacaacttttccagattcagatgctgctccactgatctcaatgctgcagtataagaaatcactctgcattacaatactatgagagtcacgatatggagaaacttgaaatatacgtccacaaaaaagtatgttgagcccataccttgcacttggcaacccacaccgcaaaacagaagacgcttcactccggaagcctgttacaatacaaattctaagttcatgtgaaatggattcagtgattgaaaacacaaacaagaaataagggtttggcaaataacctcgattaattcaagagtattcagattaggagacagagttggcttgacacctcttgcagccaaaacttcttcaggtgtccttagaatgaaaagaaatgaaacatcaatacgcttctatatccagagtaacagcaaaatatggatccacatctaaaaaatggcgacttgaagaagaatggactcaaaataaaccacattaggaaggtggaaaacctggctaatactggtcttggagataatctgtcttcaggatcactgtaatatttcaataaatcagttacatggatagatggaaaaatctacagcatggtcgataaatgtaagcctagtccatttctgaaattcaacagtagttttacctctgcacacaaacgacagcttcaaccatattagatttcagcatctcaatggctatggttgtgacaattccagtccactgagctcctgcaaccgaaaatagaatgaaaagtaaacaacaaagctaagctaaattcatcttgaacgagacacaaaagtgccctagcttagattgagccaggaaaagaagttagtagaaaatgtggaacagtggaagggaagtgtctatttaccttcgacaggcttcaacttacgagcatagagctgctcttgatgcacccaaaatatgtatcttgtaaggaatctgctttcctcctctaccatgcacaacaggttcaagctctgacaagacttaaaatattacaaaataag

SEQ ID NO: 46988 - DNA, 1275 bp, Arabidopsis thaliana
ttctttgctggtttttttcttctaagacagtaaagaaattatgaacactaagtctgaagccaaaaaaccgaagaaaatcatataatccttttcttttttcgtagaggtttacaagtttggaatatagaaacataagaatatgttaaatgactggcaaataataataatgatacaataaacaacaacacacaagaaaaggcacacatcttttgacactaaattaaaaaaagtgggtttaattaagcagatccaaactcagagagccacttctcgtgtttctcgatatcagaggaagacacactcggttgcactttcctaatggcctcttcgaaatcacacattgccactggatcatttgatatatcgtctttcgacatgttctttatctcatctctcgttttccccgctatcttacgccgcatcccgttcattgatgcgtccctgcacacgttagtcagatcgtctccactgtacccttccgttctccgggccacatcttcaatgttaacatcactcgccacctgaaaagtgacaatgttcattgctaaattgattgcgttggaccagtagagagatttgcgagtgttgtaacaatgtatccacaactaacctcaactgttctcagattgatattgataagagccttacgactttcaaaatctggaagtgggatatatatacgtttttccaacctcctcctgcaccaacgtgagctccagaatcagcaatttcattatattagagcaagtctaaagacggcattaactcaaagaatatttaaacctgagagcttcatctatgtcccacgggaagttggtagctgccaataccattactattttgcgactaccatcttcatttgtcgctgtattgctcactccatctacttgaactaggagttccgatttcacccttcttgatgattcatgctctccagaacccctgcatcacacctccaccaattacaaatacttttcatttcagtatcgaaatctcagtatcgtcaggaaaatttacccccgagaattgcagagagagtcgatctcatcaataaaaattgtgcttggagcatatgccctagccagatcaaacaggcatctgaccatgcgctcactctctccacgccattttgaagctaatgtagcagaagatacattgaagaaggtggtaccacactcagttgcaacagcttttgccaacagggttttacctgtcccaggaggaccaaacatgagaactcctttccatggtcttcgaataccctgaagggaaaca

SEQ ID NO: 46989 - DNA, 415 bp, Arabidopsis thaliana columbia
ttcttagtacgtctttataggattttaaacaacaaataatctcgctaattaaattttatgaaactatttttattttcttttttattagatttttgtgaaatgaaaaaaaataaaataagaaaatatgaaaatatttgaaaatatggaaaaatttctaatattttataaccaaataatataaaaattatcaaaatgtaaatttctattttattaaatttataaactaaaataaataaaaaaaaaaaaaactttctaaatttattagtacttcatatttaattacaatagccatttaatcacaaggactattttattgaattatatttttcacatttatgagttttatattagaaaaattgtataaacataagaaaatatgacatatatctcagcaaaatgcatataaatttattta

SEQ ID NO: 46990 - DNA, 514 bp, Arabidopsis thaliana columbia
taaatattttgtcaccaaaataatattaaaaatatcaaaatgtaaatttctattttattaaatttatacacaaaaataaatttaggtctttggacctaactaataatattctttgatggcctagagaaatcgaattcactagatgatctaatatttgttgatttttagtccaaaatcgaattcactagagaaattaacctatttagcacttacatgaatatattgatcatcattgatagacttaagcagttgtagtcttttaagctttttacgggttcttttttttctcttcttttctttaagatctctttatttatatgtctaaatctaaacgtaattttgtggatttattgttaacatatattaatccccatatcagaaggatgataattgatgttgatatatcaggatataaaataattaactaatgatttattttagccaacaaaatataacatacttttaacaaatcgtgatcgaataacaataaattctaaataacactttaaaacac

SEQ ID NO: 46991 - DNA, 517 bp, Arabidopsis thaliana columbia
gggtatatctatatttataatctttatctatatttataaatgttgtaattttcaacattacaaagttttaaaatgttttaatttttattgtttctaaagacgttcacataggactttaaacaatcaatcgggattagacatctcgctaattaacatttatgaaattattccttattttctatttgtttgatttttgtaaattggaaaaaactcatatatgaaaataagagaatatttgaaaatatgaaaatttttctaaatattctgtgaccaaataatataaaaattatcaaaatgaaaatttctattttattaatttacagtatataccatctcattaataaaaactgaatagaataattgaatttttactttaataactgaataaaataacttgaagtactgataaatttagagtgattaataataaattatttatctctccataaatctcacaaagtggaaattttcattttgataattttcatattatttgatgaaaaaatatttagaaaat

SEQ ID NO: 46992 - DNA, 696 bp, Arabidopsis thaliana
catcagagacacatcaatccaacaaagagatcgatattttcagttcaagaatcaaatcttgttaactaaaggacaaataatgaagaaagatttcaatatatacacactttttttttggtatcaatgttaagtttaaaaaacagaagacgcaaacatgcaaagaagggaatcgaactcaacacccaaaacttgcatggggtgttgtactattttacaacatataccataagataagatgtcaatatattagttatgaatgttttcgttaatgacaaaatgcaaaaactgaatcaagaagatgaagagtaataagagttaaagaagacaaagtaagcaataacagcacaaagaagagccacaaagtttccttctttaagaagaaccttaaacacataaccagcaatttctttcgtcactttccttccttcaatcaccactttcttcctcgactttacggggaacgctattgtcaccactaccgatatccagatcacaacgatcgctggcacagcgatgaacagagctgccgccatagatagaactccgaacaccgcaccaagaagaaccgacgcgtaaatagcaggcaaaccagatgatgtctgatgattctctccgtaccaattcactatcgaattcaacgaatttcttgaagaagacaaaaggactgcgtagactacaagaaacagacagacccat

SEQ ID NO: 46993 - DNA, 1621 bp, Arabidopsis thaliana columbia
ataacatcgcagaggatcgcggcttcaaacgcttctctcaaggagttattcgctgaggcgttgcggcttacaggggcatgaagtcatctgttattattttacaatatggtctcaaccttatatgatcaaactcaattcaaaaacttaacattattgaatatttcttttcggtagaaagaaaacaaactcaattgttgagaaaaaaaaaaaactattttctttctgctaccctttgtgaattcaattaaaaaaaaatcatatgtttggtattgaatgatataattctgttcttccatgtagttgatctttgtaatcgagtttgcattttttttttttttataaaaggtggagtttaaggtattttgtgatccatactaaattaacaacagaggaaaatggggataatgagtccggcccagttacgactaacgacccagaagcatcccgaaagtctcaagtctaatcccgagttggatcgacccgacccgtaaaagagaagagattgcggagaagaacggagggaggaattttgattctcacggtgactgttgtcctcctctaaggacttagggtttgatttgaatagaacaaatttctcagatcttcgtattccttgcgaggttgtgataatttgggagttgcgtgggttgctacgaaggagagtgatggatgctcaagcgaagaagaaggccatgttccggtctaaactcaacgccaagaagaaagacacccgcatagattctcctctcgttaggtaaaccgttgttagcttcttcttctcttcgtttcgatgtcacttctgggtttctacaattccaaatatttgtgggttctggggattgggcttgagctgtagttgggatgaagagtttgttctttggatttgtaggtacaacgaatcagaccagcctgtgtgtcgagtttgcaatgtcgtcttgaaatctgaatcactctgggatgtacatcaagcttctcgtaagcaccacgaggtaaacttagtgtcttctgctccataagctttacttcacaatctcttataacctgagtaacaacaatgggatatttgataaattacatacattgaagataggtagatttcatgctcttatatgattttatgcgttagattctctgttttatgttctttaatcttattaacttagctttcgtaatgtaacgtttggacaggccattgatagtctcaaggctagtgcagcgggagtccaacggggtagcaaacctgctgaaactcggccaacgaaaattgaagctttggctaaatcatccaattctcagacatcatctggtcttccgccaaatttcttcgaaaatcgtgagcctgctagaggtaatgactaatgcactttcctcttcttgttcttatctttttcgaataattttcttagtagaaggcttttggtttaggtgctagttatgtggatgccatgcttaaaggctctagtcttaggttttttgaaagattgatgatagtttcattcgtcaatcgaaaaaaaaaacttattgatcaaatatatgtgcagcagaagtagaaccagcaaaatccaagaatttagagcaatcaaagcacactataggatctgaaacaaataagtcaaaggga

SEQ ID NO: 46994 - DNA, 547 bp, Arabidopsis thaliana columbia
tttattcataacaaataggcctaaatgggcctagaaacatctaaaaccgcgttacgtgtaaaaaggaaaaaatccaaataaagaaaacttaaaaatgacaaccaaaagaaaaatccaacttggacgctggcttcgtctctaagtcagccccaacctctatatatatatagaatcaagaacacaagaaatatagaacaacaacaacaacaacaagaagaacacacgaataagaagaaaaagaagaagaagaagaagaagagaagcttatggcaggaggaggaacagaagcgtttcctgatcttggagagcattgccaagaccctgattgcaaattactcgattttctcccttttacttgcgacggctgcaaattggtaagagctttttctcagaaactttcaatttttttctacaactgaatgtttcttgattgagaagttttgtgtgtgaaggtgttttgtttggagcatagatcatacaagtcacataactgtccgaaatccgatcatgggagcagaacggtgtccatctgtgaacatggtcaata

SEQ ID NO: 46995 - DNA, 573 bp, Arabidopsis thaliana columbia
gtccgattgttcgtttatctgaaaacccacattatcaattctaacaccacctagtcggcgtctctcagatccaatctcctgatgaacttcaggctccaacttagtgtgactaccttttttactagcatgctttttacttgaagagtgtttcccatactccttgcttttctttggggatttttccaccaaacctttaatcgaaaacttcagtgagcgcccagatacgggtccattttcttcatcatctgaaaatggaaatatcgaaaatatttcctcctctgttggcaaaccagcagcagcccttaaactagcaatcaactctttgtccaccacatcttttttcttccaaagttcttgaactgcatcctgaagatccttcacctgagaagccaaagatagaatttgagaaccaggaaaacttatatgatcaacacactagcaaattgtactattgaaccctctttccattccaaaggaaaaccccctgctcgacgagcaatacgtatatgacaataagaaccaagaagaatgatctgagtgactgagaagtgagggtactaataacagggtaca

SEQ ID NO: 46996 - DNA, 582 bp, Arabidopsis thaliana columbia
tgatttggatttaggattgtggaataaatattatgatcgaataaaagtttctcttgtttaaatattttatcttgagatggtttttgttctgacctttatattattaagcaacgacactacaatttgttttctctgttgtgttaagaaataagtttcacagttttctctttaacaatagccacaattttgtttatgtcaacattaaccacattttatagtatctgtcgtgctcttagctaaggcgaagttacttcaaaagattaaattactttctcattacacataatatttatgattttaaaagtattatcagcattctcctcatatagtactaaaattcttttttaatttggatagtgtaatatttttgtgattaccaaataatagatgttttagcatgattcataacaagaaaaacatctcagaatgatttactaatctataaatttcagaaagtgtggcaagagggttaggtaacgacccgacccgaccgcccggatcggacccgtttaagacaaaaaagacccaccctggttagagcgttctagaacacttgggcaataagaagagaggagttatgtg

SEQ ID NO: 46997 - DNA, 475 bp, Arabidopsis thaliana columbia
actgtgttgttcttcttgaaccattcccagattcttgcctcaaacctaggcggcttttttggtcgttggaaacaaatagggaaaacattgtaattaccatttatgttttctgtccaagaaagcagattgatgatacacaaacacaagtttgtaataccttgatgagagattctcatatacaagcaactctaaactttcaaaaagctctcgagcagcttccttgtgagattatcccccaccaccatactctccaattgcccaacatagctgtaaggctaactctctctacggaagaaaatgcttagaggagattatcttacaaagcatccgtctaaatattagaaactgacctttgcaacatcatcgtaagcttccccaagtcggtcaataataggcttctgtattatttaagaagttgagaatgcatatcttgcaaattactcgagaaaataagcggtaatcgataagactatgt

SEQ ID NO: 46998 - DNA, 489 bp, Arabidopsis thaliana columbia
  unsure (1)..(489): unsure at all n locations
tagtatctnnnnnnnnnnnnnnnnnnnnnnnctaaagtgttggtattggcataccccatcgcgttttattgccaccgggcgctggccggtctgtgtctttctggctctaacccttccggcaacattacggaaacggtggaagagcattttggtaaaactggcggcgtggttatcacgttcctgtacttcttcgcgatttgcccactgctgtggatttatggcgttactattaccaatacctttatgacgttctgggaaaaccagctcggctttgcaccgctgaatcgcggctttgtggcgctgttcctgttgctgctgatggctttcgtcatctggtttggtaaggatctgatggttacagtgatgagctacctggtatggccgtttatcgccagcctggtgctgatttctttgtcgctgatcccttactggaactctgcagttatcgaccaggttgacctcggttcgctgtcgttaccggtcatgacg

SEQ ID NO: 46999 - DNA, 560 bp, Arabidopsis thaliana columbia
tgcttcacttctataaatctattaaaagaaaaagtaaacttcagagctcaaaagaagaagtgatcaaagataagagaaatcaaaaaggagaaatagtcaccttgatttcttttaaaagtgaaggtattccagcaatccccaacagtgaagcaaacgagacaaaaacaaataccgcagcaactcttgtctgtaagaaatatttacaccgaacgataattgcatctcttggtactcaaatgtgacatgctgagaatggtttagaagacttactgcaacagaagacaaagagtgacctaagccagaatataatgtgccaatactaagtgtaagaatcatgtagaggataagtcggagccaatagtatttccattctcttgacataactaaaagtgatcgccatgtgagcactgcaacacgtgtagcagcaccggcctttcccttggatttaagctgtgtgccctctgcaaatgatataggaaacaaaaagaaaattgatttactaacacatgtctatttacagttatgaagctatgatcgaaaaattatcattagaaaattat

SEQ ID NO: 47000 - DNA, 348 bp, Arabidopsis thaliana columbia
tgcaagcattggcaaagtcgatgagccaataaggttcgtaaaaaccaaaatccggtaaggaagtcaccacagggcattggatgccgaacgcagcatatccgatgcaaccacacaagatgtagaaaacagttgtggttgagactccgacaagacttgctcgtttcatcactttgttctctggtgggcttgatctcaatgtgtcctgcaaaataaacaagacatactactagagcgtcactatctttagagcttcacatatctaaaatatgacactatgtttatccatcatccatccatctatattttttcctaactgtctaattaataatcacatcttatcttcaaggt

SEQ ID NO: 47001 - DNA, 493 bp, Arabidopsis thaliana columbia
gactgtttgtttatttacctcgagctttactcaatgcactgttgaactctgcttccgatttcaacactacaaagctggatcgatctaaatttcaaattacagagatcagcaaaactcctcaaacacaaggtaccattgtaccaccatcaagcttaaagctcatatttttcgattcaattcgtttctcaacaaataaaaaaaatcatctagacaatacccttgaaccaattcatgtactatgcaagaacaattagaattaacacacaaccaaattaagcaatttacctccttctgcaaaacagaagcttcttcgattaagaagagaagtgtttaagaagttgaattcgtttgaaacgtaaacagtagaagcagctaagaaagagtttctccaatctgcaaaaacaacgagtttgggaatagaatcagagatggttcggaattgggggtctaagatcagagaaagatgaaaaacctgatgaaaattagaccattg

SEQ ID NO: 47002 - DNA, 501 bp, Arabidopsis thaliana columbia
tgcggaaatggtaaaacattaataatggttttgttcataaaaccataatatatgttttcttctcttatgtgaacatcaatgtacatgaaaaaggccttctttacgcgttggtgggaagaacaaagccccgagagacaagagcaagtgaggagactagtgaaatccgggcaactagagtttgtgtaagtaggtcacgaccttaattttatcattttggctacctagcgttgatacaattcacacaatcaatgtgcagaaatggaggatgggctatgaatgatgaagcaacgtgccattacatagatatgatagaccaaaccacaaaggggcatcggtttataaagcaacagttcaacacaactccacgtgctgcttggcaaatcgatccctttggtcattcctctgttcaagcttacctccttggagcagaggtccttctaatctatttatttctttatttccttatgagtgtgttttaatttggtgggggtgcagttaggg

SEQ ID NO: 47003 - DNA, 522 bp, Arabidopsis thaliana columbia
tttaaatcccaaaaaacatttggcattggcattttttttttttgccgtggggtctacgatagtgttgagccggccttgcctacatttttatatctgacaattaaatggtttcgtcaactaaccttatgaacgtgatctattctgtcattgaaccatccataacaattatatttgaagttttaaagaaagactagcaaaagtctgatatgtcaccgacgacttttgagaaaagagagaaagagattttgaaaggagcacatcttgaaatctcagatccaacttatttcttcttttttcttctgcttctttttctttttcttcttcttcttccctttcttcttatacaataatgagttctgagggagtgtcactaccgttgatccacgagcatcttatgataccttggaatgacctgaggaaaggtgattgttgtggacgcttggcaactatcagtgatggctactattgcaaaagctgtgatttcctttgtcacaagaaatgtggcgatgagtgctcgagttt

SEQ ID NO: 47004 - DNA, 502 bp, Arabidopsis thaliana columbia
ttctcagtttcgtttacttccttttgagctacctttacctctagaattaggtgaagaagtcataacagggtatcttgaccgtttcttcttattagttttccaactatgtaatggcttctcattttcttcttcactctctttcccactctcctccttcctttcttcttcttcttcttctttttcctcatcgctttcactcaacacagcctctgcctttgacccattactcattcttgtctttgtgtccgttctctttcgtttctgagagactttggaagcatcttcgtcttcactctccatcgctttcatccactgcaaatcgcttaaagagtcgctatacactgcttcttttcgtttccgtttacccgtgaggctaccaaaatggtttttcgcgttagtcttgtcttcttgagtctctgaagtgtaagccactcgggaacttccttctcttccatgagacgtgtcttgtagttccctttttacgtcttcctcgtccatttgt

SEQ ID NO: 47005 - DNA, 995 bp, Arabidopsis thaliana
ttttggttggaccattgggcataaagtcgcaaatgactcactgcaactttataggttcatggaatggtgtgaagatgttgttctggtagatgagatttatttttaaagtacattgatttgtatctgagcctctgaggtcactttttggttaggtttgattatgtattttagtttttttttggtttgaaatatgtctttaagttagatttgtaaatgctttcactatccttctttggctataaaacataaaaagaacaccttctttcgtgtcgggtcttgagatcacttttaggtttgatttaacctttcttcctaatatggtttagtttcatggcagtcaataaatggattacaatatataggcaaagtaaaaacacagaaggtggttggtgatgacttttactcaactgctacaaacttctctgtatatatacaaaaaacctaaattctacttacttgcatcacacgtcttgaaattttccagaaacacctaacaagaattatataagaaggatttactaattcttgtaaactcttagcaatggcgttttcattcaacagagagctccggatctcagtcaccattgtcacttttttcttcctcttagtttcctttccaggtctgttgttcatttaatacacacgcatgtatgttacttgtactgcaggctttgggttgcttcatttaagaatgtcaatattacagggaacacttatagtgaagaagacgattcagaggtaggaggtgaaggtggaggaattggaggtggcggcacaggatttggcggtggtgggactggtgtgggaggcggagggacaggttttggcggaggaggattgggtgctggtggcagtggtggaggaggagcaggatgattaggcagtggtgggactggtgtgggaggcggaggaagattgggtgctggtggcagtggtcgaggacgagcagcaggattaggcggtggtgggactggtgtgggacgcgcagggacagg

SEQ ID NO: 47006 - DNA, 995 bp, Arabidopsis thaliana columbia
ccactctaagtgaattcttaccgggatatttgatcgatatagtcaatgtggcacttcccttttaaatactttaccgggatatttgatcgatatagtcaatgtgatcgattgacacatctctctccgctcttcttcttgcagtgtataccagaagataaagagagatcttacctttatatgcaaacatgtctgtactatttattaccttgctacttcctgttcgaccggagctccaaactcacagaacaggttctgaaaagaatgcgatctatggttagtgaaaatgtaaaagcattggaatcggttcaagacagggagagtggtcgagactcattgaatttgatacaatgcattgtctctgtgatcctgctgatgcacaacgatgtcaaagttaggaagataatatcatcatccaagtcagagattgatttgattctgcagaacgtttacacattgcaggtatcattttctaccctcttaacgttatcgcaaaccgcaaaaccacgtgctgatgagttttacctcgtaaatgtgcagtcctcacgaagcacgagcttgactgtagaaggaaagcatatgatgaaaattgcagcagagcgacttagcattgcatccaatagcttactcgcataataagttacacaactgtgacatagaatgatttgtgcactctttaacaaggatgctaagaagatatgacttttctttgcttgtttgggaaagcaacaattttgatggaaaattttgtagacttacatgtgccactttacttgatcaaaagcatatggattgctcaaataattatataagttaagaatccaaaagaagattgtataataaggaatcattttttgtacactcaaaacagcaaatttgagatttttaccttaatggcacaataagagcggccacaacagagaaagctttctctcacaatatacaaaacaacaaatatttgtctccttcctttttaaactctttacaaaactggtgtg

SEQ ID NO: 47007 - DNA, 748 bp, Arabidopsis thaliana
tgataatcaaaagctgagccacataagaacattcagcatacagtgaccaaacctcaaagattaacactgtttcttgatgacaaattataagcaacatgagctaattacacagaaatgtaagagaagaaaactattgtgtgattttgaactcatctctgtgacaggaactcaaaaaaacccattataactagcttaacgaatacatgtcttccatttcattttcctgaggctgatatgtatgtaccactcagagtaaaagctagatacggtgaacaagctaaacatgaagcagagaatgttgaatcagggttacacaaatgtggtgctaccatagcataaaaaagtttttaccttttgtagaattgttaatttgaagcaatggtggtcactggataatcggtgtcacagaaaaggcgacttcttttctgacggctttagaatctggaatgagcacattaagctctcatcaatgctcatcattgcgccacgttgtcaaattccccgcaatagttgggagctgaaaatactgtaacaagttgtctttctgcaaagaactcatacccatcttcaacaacctataaacagagccaatacactcaaattaaggttgcacagttttcataataaactaaatggcagatataactcaagttaaaacctggtgggcacgacagataaggtccatgtcatgtttctccaagaactctgcgactttgtcagctccaaaagtgtatgaaacaccacgatc

SEQ ID NO: 47008 - DNA, 587 bp, Arabidopsis thaliana
tagtaacgtacgccagtgtgctttaaaggatccacgcgcaatggaatgttacgggcatcacgattagggatagtcgatgcactggcaacgtgggcgctatctggcaaggtggttcgactggagaatggatcgttggtcagtagttcccgatggttattatcccgggaggcatcgctaagcagtgtcgccagtttgtcgctcagataagggcgcaaggcggtgatgtcgttgctgcggtgcaaaatgcggtagtcataaaattgctgggccacgttatccgggcctccttcaacgcaaggaccactgcgtgtgccgttatctttataagctggagtgactgtggtgcaggcactgaggagcagtgcgcaggggataagcattgtcaatttgctgtagcgcataatgatttccttataagcgatcgctctgaaagcgttctacgataataatgatatcctttcaataatagcgtatcagtctgataatgcttttgagatcgaaggcttagcaaacaaggagatcgatcatgcaattttctacaaccccaactctggaaggccagccatcgttgaatattgcggtgtggt

SEQ ID NO: 47009 - DNA, 730 bp, Arabidopsis thaliana
actccaacggttaaccacccactacatcaccggtaaaccacccgctacgccaccagttcaatcaccgccggtccaaccacctacgtacaaacccccaacgtcaccggtaaaccacccaccacaactccaccgttaaaccccccaccacgacgccaccggtccaaccacctacgtacaatcccccaactacaccggttaaaccacctacagcgccgcctgtcaaacctccaacaccacctcccgtaagaactcggataggtaataataattttctttcaaaagtgtgatgattatcggtcgttgattagatcggatgtataattggactaaattttggacggtttagattgcgtgcctttatgtgggacgaggtgtgggcaacactcgaggaagaacgtatgtatgagagcgtgcgtcacgtgctgctaccgctgcaagtgtgttcccccaggcacctacggtaataaggagaagtgtggatcttgttacgccaacatgaagacacgtggtggaaaatccaaatgtccttgaacctttatatgacgatggttgttaaacgaaataatttaaatcaatggagtttttataagtttgtaatgcgtttgtttttgttatagtaatattgagttggatctttgtttacgggacgtagaatactaaataatgaaaaaaccttctcgatgaattaagggttttatgaatttgttttggattgaataatatagggatg

SEQ ID NO: 47010 - DNA, 629 bp, Arabidopsis thaliana
caatagcacagatgctctggttggtcttgtgactacacttgctcgtgtcaatgttgagaaagcagaaagttatgagaaacagcttaagcccctaccaggtttgaaggctgttgatgtggataaactagaaaagacctatggtgcaaaacccattgaaggcgctgctgcttcatcgagtcaggaagaagtgaagaaagaaaaggcgaagaggaagaggaagagaaagccaaagtatcccaaaggatttgatccggcaaacccaggtccacccccagaccctgaaaggtggcttcccagaagggaaaggtcaagttacaaacccaagaggaaggacaagcgagcagctcaaatccgtggctcgcagggtgcggtgaccaaggataaacaagaagcagctccttcaacttcaaagtcaaaccaagtggccagttctaaagggaatgcacctgcgccttcctctaaggcctcaaaaaagaagtctagaagatgaacgaaacaaccctttaagattgtttcatctgttctgagaaaacaaaaacaaagagtacttaccccaaaatttccattgttctttttctttttggattcacaagttttagttgtcttgacccatttaagattttggttaa

SEQ ID NO: 47011 - DNA, 1017 bp, Arabidopsis thaliana columbia
caaacttaaaaaagaaataaaaaataaatagagaactaacagatttacaatgtagcaattgcaaattcgcactctgttttctgttaccgaccattgtaggttctccaaaattttgtgcaaacgaaactctgaccgtctggtttgttattgtggctgaggtcctgagtccagggtcttgatagtgcgactttagattgttcggtctgaaaacattaagagaaagctattttagagtattaggttgttttttgctactctcttggcgtttagaacacagattatagttcttgcaagcaatcggaaaatcaaagttctaacgacatgttcactatttatgacttctcttgattgatgactaatggataatctctgttcatgacctgtttacatatgtataaatgttttttttctcttttatatcgaatatatccaatttgtgcatgtcctattgtatgaaaggttgatttgattaatatgtgaaagtgacacttgtttgtatggcaaaggagaatatccttgagaaccacgcagaaggagaggtatgcggagcacattctggtattcttggtttatgtaaaattcatcactaaagacatctttgaaaatggtttatttggcaatagtatcatagacctttttgatagcagtgtgtataaaaactagatacaaatgcttttgagttctgaagtgaaacaacttaaatcatctaaatttttgttaatatgttatcaagtgtttcattgtttttgtttgtcccactattccactcattatattagctagtcagatgaaacgatcttaaagggttgtttcgttcatcttctagacttctttttcgaggccttagaggaagaagggccagctgcattggctttagaaatggccgcttgttttgacttagaggttgaaggagcttcttcttgtttaaccttcgtcaaggcaccttgcgagccacggatttgagctgctcgcttgtcctttctcttgggtctgtaacttgacctttcccttctggga

SEQ ID NO: 47012 - DNA, 594 bp, Arabidopsis thaliana
ccagaggatgagaaatgtgtagaggtgtatgaagggtctgataaagacgataatacatatgaggctctgaagaaaaaggtcaaggaaatgcagaagacaattgagtactttatgagtattcaatcagcagaagagaaacaatctccttcgtttaatattatagatgatactttgagtccaggagagtatttcaagatgagaagaagccgaagttgcagagaaaatctcttgtttacaaaggcggcggctgctgctgctagtagaggtttcatattcgagaccactaacacatcctttgattcagatatcactgtctccatggacgcacagagcatcaaagattctgatacagagactagcagtagcagcttccatgaatttatggcaggacttagagaaagaacaatgcagcaccattccacgcatagcgacgatactgatacaaagacgatgaagccagaaaacacagatgatggcggcgagaaaacagagtttgagagacaacaaagccaaataattgagctttggcaagtatgtaatgtacctttggttcacagaacatactttttcttgctcttcaaaggcgatccatcc

SEQ ID NO: 47013 - DNA, 555 bp, Arabidopsis thaliana columbia
tagagagagagatagagagtgtgacataccacatcgttcttggcgatgttaagagagatgagagaagcggctagacgacaacaacggtcataggtttgtggccaagtgaaacgagtttgtccgtaaattattgatgttcgattgggataacactctgaagctctcttcaagaaagttatgggcgttagaggaacgttgtttgcttcacataactccatgttatccatctttttcttcttcttaatttgtgtgtaatgaatgtttgtgtgagtgaagagggatatgcaaacaattactatatctagaaaaattatgagcaatgtaccaactagtcgtttttgatcgggtacgttcggttcagtccaaaatttcgaaaatgaaatgctcgaattttacttttcaattcaattcagtgactttttcctaaacgttttaccaaactaaaccaaatatggcaaacctttagttcagttcggttcgagcaatttacttcagtaccccacatattgaaacaatgttcaatggtctaatatatagtttagaagggaaaaaatg

SEQ ID NO: 47014 - DNA, 574 bp, Arabidopsis thaliana columbia
tggacagtcttggtctctcttatcattttgagaaggaaatcgaagagagcctaaaacatgctttcgagaagatagaagatttgatcgctgatgaaaataaattgcacacaatctccaccatcttccgagttttcaggacatacggttactacatgtcttcgggtaagaatttttaaaacatatacatgttgtccggtaagtaatattttatatgagttcttatagtcttattgtatcgaattttcaaattctatttccatgtagatgttttcaagatattcaaaggagacgatggtaaattcaaggaaagtttaatagaagatgtcaagggtatgctaagcttctacgaagcagtgcactttgggacaacgacagatcatatattggatgaagctttaagcttcacattgaaccacttggagtcactagctacaggtcgtagagcgagcccaccacatatttcaaagcttatacaaaatgctcttcacatacctcagcaccgaaacatccaagcgttggttgcaagggagtatatctcgttctatgaacacgaagaggaccacgacgaaacact

SEQ ID NO: 47015 - DNA, 515 bp, Arabidopsis thaliana columbia
tgccttttttattgtctaagcttgtaatctgaatttgctatgattattagattatcattgagttcgatttgaagtgatattagagattgggtttatgaatcatgcgttaatgtaattcttgaagcgtaatgtaattgagtgttaatgtgtattttgtatagtcaaagagaaagactaaagagccaaaggtcgatgttgtgactcttggaccatctgttcgtgagggagagcaagttttcggtgttgtccacatctttgcttcattcaacgacactttcattgtgagtttctgtctaaattgagattccatttcatcatttatgctgttggaaactgacctcgtatatctccaattccagcatgttactgatttgtctggtcgtgaaactcttgtccgtatcaccggtaagcatcttttgatttcttcactggtccttgctcattcctctatatgtggaacgagaccacaaatgttatactcttttgtggatatgacttgttagatgaattgttat

SEQ ID NO: 47016 - DNA, 520 bp, Arabidopsis thaliana
aacagacaaaggcttttgccctgtaaccaattcaagaagcacaatcccaaacccatacacatctcctttcaaagacgcaaccatggtgctcgaatactcaggcgctacataacctaactcccccaaatccccattattgaacgagctatcgttcgaatcacgagatccaactagctttgccaatccgtaatctgttatccgagcatcaaaatcatcatcaagaagtataacattggagctaataaactgatgcaaatacggcggttggcatccatgatgcaaccaagctaaccctttagcagctcccacaccaatcgcacgccgagtcggccaatccaaaacagcatcacacaatccaccattgtgcaactgagaaaacaacgtaccattaaccatatgcttatacaccaacagtctctcatcttccacaacacaataccctaaaagcggcaccaaattcggatgtctaagctctcctaacttattcatctccgacctaaactgtttctaccaaacccac

SEQ ID NO: 47017 - DNA, 520 bp, Arabidopsis thaliana columbia
gacggataagagactgactgtttgtgtcaatgactttacatcaagagtgtatcttcttagcagttttgtgatcatgggtgagaccggtgcggtctctgcaacagcggaacagtttggagcccgtgatgcagcagtcacttgttttcggactttgattagctcaaatggagaagtcatcactgtttctgctgcacctcccaccagaccagccagaaaagcttcaccaacactcacgtagttatcatgtcgaccatctggagcgaaatgaattcatattcagattcttcaagacaaaggtattgcccaaaaaggaaccaaatttgcgtatacatgacatgaatgtatgtgaacactgttgcatattctaacataatccatgaacaaatgattgctgtattgactaattaactgatgttattgagctaattgacagaggagctagacacaaagacacctaatcttgaatcatcgaaatcagacacaacagaggagacctggacctgtgtaatacccttgtaga

SEQ ID NO: 47018 - DNA, 1376 bp, Arabidopsis thaliana
tatctacaagactacaactgtgcgcaagccaccgttttggtgttacaacgagactacagttttgttttgggttttttctttttaatatgataaattgcatataaacatccttttccggaaatttaacaattaccatatgcgctatcaaacagtcaaaagcatctcataaaagcatcttagccatacttctcataatttgcaatatataataaatccagatgttaaaaaacgcatgttaatcgatataccaatcgtttaaatcgtttaaaccgtttaataatgctcaaaactgtaaccatttgcttccacaccctttggtcctttttgctacgttttaactgttcactatagttttaaaattttgagccattgcttcagctactaacatggatttcaaggcagttcagtttgaaactgattagaaaagcttgatcctaacacggattggtagtacacaagaagctaaagttaaattattatcctcattcctctctaccatatatatctgtattacattttcattctcacaatcacccgatctccttgaaagaacccaatttagtaaaaacagacaacatttctttagccttctcatacaagacaatatatatcagccagacctttttgccttatataacaccctacaccacaaacaccctttcagtattactcatctcatttcacaagcattagagattaagaaaatcatatttatataacaccccacactggcttatacgaagaaccttagaaataaaacaatggccatcttacggcttacgagcactgaggagcttaacatcatcgatcacgggcccacacagtgatgagaaatcatcgcttctcatcgagtaaaatgtgctgtaaaacattactcttgtgcgggtcgaaaccgccacaaaccgtagagaagcgcgtttgaaccctcctttgcctcgagactcataaggtacctttagagtgtcttttcccgcaaatgcctcgaccaccatcgatccttggcaagcattgttagcatctccaaccgcaaacgaaagcacgtaagtttttcccacaacggtcctagctacctgagcgattgcgctttctttgcctgccactagctccacggctcgacggccttgtgggaccgagaaatgctcgacatcaacgtatttgatggctttgagtgattcgaccatccacgcgggtaaaggagagtggtcatcttctataaagggaggaaccagaacgccggttgttgcgtttgggagtacgtagggaccttcttcaaatcctccgttcttcaatatattctctgttttattatataatagcaaaatcatatcaattaaatttattgtcctgaatcttggctaacacatgtcacgtcatgt

SEQ ID NO: 47019 - DNA, 889 bp, Arabidopsis thaliana
tgagcttagtgagaaacagtttaggtctgagattaacaagttaggtcagatcaggcatccgaatttggttccgcttctcgggttttgcgttgtggaagacgagatattgttggtgtataagcatatggctaatgggacgttgtattctcagctgcagcaatgggatattgattggccaactcgggttagagtcgctgttggagcggctagagggctagcttggttgcaccatggatgtcaaccgttgtatatgcatcaatatatcagctcaaatgtgattcttcttgacgaagatttcgatgctcgtgttattgattacggtttggggaagttagtgagttctcaagactctaaagatagctcgtttagtaacggcaagtttggttacgttgcgcctgagtattcgagcactatggttgcgtctttgagtggagatgtgtatgggtttgggattgtgcttcttgagattgttacaggacaaaagcctgttttgattaacaacggtgaagaagggtttaaggagagtttagtggagtgggtgagtaagcatttgagtaatggtagaagcaaagatgctattgatagaaggatttttggtaaaggatatgatgatgagataatgcaagttttgagaattgcgtgtagttgcgttgtatcgaggcctaaagaaagaccgttgatgatccaagtttatgaatctttgaagaatttgggagatcaacatggtttcttctctgagtatagcgatgagtttccactcatctttaacaaacaagaacacttaaaatgaatgaaaaggttttattactttcgtactccaatttgataccacttacttatctaccgttctcacttttaaccgtaggggatcctcttcctctagactctg

SEQ ID NO: 47020 - DNA, 187 bp, Arabidopsis thaliana columbia
cggctgttgtcctgcaccacgccatccagtccagcatggccggcaatggcgtttccgtcctggttatcccgggtgacgtttccatgcaggacgctgaggatgactccttcgtcgagtctaagatctctgctggccgcccggtcgtcttcccggatccggccgaggcgctgccctgacccaggccatc

SEQ ID NO: 47021 - DNA, 546 bp, Arabidopsis thaliana columbia
tacatatgattaaagaaataacaaaaaatagccgtaaactggacactgatattcagaggatttcaggggagaccagggagctacaattagagaaaaactcaatccaagaacgcctgcaccgatcatatgctgttgtggatgaaatggttacaaggtatgagcttttgctctgacatatttgaatcgtcttgtcagatatacaccaaaagaaacgttgccatgtcgctctggctttagagaacatgcatacccttttataatgtggtgatgaggacggtttctctttctctgcagggaagtgaagaaagacccagcagtacgacaagtctacaagctactgaccagtattcacagtatatttgagcaaatctctgagaaaattctcatgactgatcggtttagaagagaaacagttgattatgaaaagaagttggggtccatcacagctcgagtcatgagtttggagaaattacaagccgatctggatgccataaggaaagaaaacgacagccttaagaaataactgattatgtggcctggggaagg

SEQ ID NO: 47022 - DNA, 657 bp, Arabidopsis thaliana columbia
taaagagacacgacggccacgtggcggttcaagtttcggtagctgaggatgtggtgggagataaggatcatcgattgagatttctttcatcggactttgagagacggcttcaggaatgggtgtggcgggatgtacgtgatcactgatgggatttgaatttgaatatggaggtgaaacaatatccgaagagatagtgtaacttttgccgtttgttactttctcagattttctcggattttgacaattgtttttactttcctcaaacctcattgaggtttttttctagatatgagaagttcatctctggaagagttctttgtacctaaaacaaaacgttgaaatgagagatatatagaaacagatttcaactagttaggaaagaattgaagataagcaattttggtaagtgtacaatttaattagataatgcattagtccacagtcaacttacaattataactcagttataaacttgtcaaatttaagcttcatatatactaaaatcataatgtttattttcatatgagaaatgaaccaaaccaaatgaaattatccaaatcaagattgaaccatatgttaaaaccagttatctctagcttgtacaaaagaaaaaaaaaaatacaaaaacaaagtcagaaccgaaatatatacaatcaa

SEQ ID NO: 47023 - DNA, 577 bp, Arabidopsis thaliana columbia
ataaattgagtctcaaaagatttaacctgaaataactatcctaacggaaaactgttttgaagatgacaaaatacgagataatgtgtagattccgtgtgtatctctattgatagactttagtttttgtgtattcttgaaggacataaacctattttaagaccagttcaacagaaaactggtgcagaccacgatcacagttgtaatgagttttctaaaatggtaaccactccttttcctttaagaagcagtccttcttgtctcctgccctaattctcttcttctctataaacccatattctagttttgttctcattcattctctgttcaaagctcataaataataaactccaattaagaatggatcaagcggacgttgccgaggatcttccaaatgttcgacaggaacggtgatggcaaaatcacgaagcaagagctgaatgattcattggagaatctaggaatctacattccagacaaagacttggtgcagatgatcgagaagattgatctcaacggtgatgggtacgtggacatcgaagagtttggagggttgtacagacgataatggaggaaagag

SEQ ID NO: 47024 - DNA, 569 bp, Arabidopsis thaliana columbia
tgcctttcgaattcttttttaaaaattttctttaggtaaaattcgtcagataggtttattatatcgattttcaaataaaggatgataaataataatggggaaattaccgagtgacgcatacattcaaacaaacaaaaaatcattattcgttatacttatacaacatgatgatatggggtccaaaccgtacaatggtgtcaaaataaataaaagtgtaaataagaactaaaacatggagaatttatttggtgactaaaaataatgggccgggaaggttcttaggttccgacaaaaccaaaaccggagacgaaaaaggctgtggcctgaagaaaaagatagaaatgtaaccatgtgtgcccatagatcaggccatagagtgcacatcctaatatgtatacccccaccatcacttccttggaattcactctgcaacaaaatagcacacttttattttgttataacaatgtgtattcgttacaaaacatcataacatcaacggaaacattatatatttcaacttcttgattaatctaaccaaaagggaaaaatatatatccgtcttttttttt

SEQ ID NO: 47025 - DNA, 321 bp, Arabidopsis thaliana columbia
aacaagatatttgaggaatcttctgtcaaaacaacctttcagttggtcataaataacaacttctgaaagtgaaatcatttgctaatatgtcaatggaaaattaatttcatgttaccgaccaacacgatgttgaaagtaagactaaatgctattcactatagactctcaaagatctagagttcattccccctccttgatcaaagactctcaaagacaattcacaatttcaaaaatcggagccgtcgtataaacgaagatagatcgagaggcaatgtaccagttcctttgtccaccttctttgaactcaacatcaacgcgtcg

SEQ ID NO: 47026 - DNA, 444 bp, Arabidopsis thaliana columbia
ggaaaagatgctttagagatcttcacggagatggtgtatgaaggtattaaaccaaatggtatcacatttattggtgttctgtcggcctgtaatcatgtgggtatgttagaccaagctcgcaaactttttgaaatgatgagtagtgtttacagggttgaacctactattgaacactatggttgtatggtggatttgcttggtcggatgggaaaaattgaggaagcagaagaacttgtgaacgagattccagcagatgaggcttccagtttactagaatctcttctgtggtgcctgtaagaggtttggacaattggaacaagcagagcgtatagcgaatcggttactggaattgaatctacgtgatagttcaggttatgctcagatgtcaaatttgtatgcctcagatggaaggtgggataaggttatagacggtaggagagacat

SEQ ID NO: 47027 - DNA, 610 bp, Arabidopsis thaliana
tcttcccaatccgtgtgccagtctatcatcggggcgtcagagacatcctccaattgtcgagactccaacagttagcacggtgcaaggatcataaacctgccacgtatactgctcgtgccacctcgggtcaaaactgtctgttatggttcgagtcctgacccatttcttcccgtacttagcaacacaataagcatcagtggaacctttccctccgtttttcgccttcatcggcaacaacccacgagctccaagaatccccaactcaagtattccaatcggcggtttccatagctgcttagccgtcggacggaaatcgctgcatacatgcgccgcctcttcaagcacatgatacccaccttcgagacaaagtctaaggctaatccttccacaataaggtccaccaccaccaccacctccaggtcctcctcctccacctccacctccaccttctccttccagagtgtgccatttcgacggcacaaaacgctcatcaattcgctgctcgatggagctcactgggatcatggcatgtcctagaagtgttgcttctttagtcgtccggtcttccaccatcagaaccaagcaatcttccaacggctctccagcaaca

SEQ ID NO: 47028 - DNA, 498 bp, Arabidopsis thaliana columbia
atgaccaaacttcaaaatcacttttatctatcaaaatcataaaatcatagttttgtcataccacaaagtatcaaaacccggttcaataatcgtaattacctgttcgggttattgaaaccggttcatatcggtttggtttgatttgtatcccgacctaaatctggatcaaaattaaattatcctctttgaaaattagatctgacttatggcgagattctcagtttgcggaggagacgacggagaaggaccatgtaacaacaatcaccaatcccggaaaaggcaacgacttccttcaatcgatgaaaatgaagaagacgccgagacctccgacgccggaagttccggtgaagaagacgaagacgaaactcagaatcaaggaatgagaccagaatctgaggatcgaggatcaacgagcgatgatagcgatcgtgaagttgtgattgaggagagacgatttggtaaatttgtaaatagtcagagttcttcttctagcaaaga

SEQ ID NO: 47029 - DNA, 460 bp, Arabidopsis thaliana columbia
tcttactatacttctgcttgtgtttcttctagattgattgatgcatatcacaattttaccttatgcaagtattgcagtgacaatgtgagatctacaaactttcctttgcaagtacttcctgtatgaaacttatctaccagcttctctctatgagtctttatgttttaccccctcataagaattatcttgaataggctatgtaaaggttgaacataaataccaccaaatgtgtgcaccatctctctgtgattctgcaactaacagtcgcatataatgtggataatgtgtttctactaacaaattgtcactcgttttggtaaatcaacttcttattgaatcaaaaggtagaggggatggaggtgaatgcaaatgaagggggttcgacacaacacgtggtggcatttattggttgatcttacctgctggctgtaatgcacaatctatcgatatatgttataca

SEQ ID NO: 47030 - DNA, 628 bp, Arabidopsis thaliana columbia
  unsure (1)..(628): unsure at all n locations
ggtcgattccttattttattttactgcactaaataagaaaaaggaggaaacgaatctcagtggagtgagcacatgtatggatcttttattgaccagctagctaaaaaggcacaccacatcactcaaagtcttctaaaaagtaacaataaaaacagactcaaagtgtaaagactgatgggctttcttgtgttttgtgaatgtttggtgcaggcaggagccagggaatggttagagatgaagcatgtatggggagccaactggtgcatcattggagggccactcaagggaccattctccatcaagctcaccactttgtctgccggtaaaacactctctgccaccgacgttgtccctagaaactgggctcccaaagcaacttacagttcccgcctcaacttctcccctgtcctttgaaccatctcttctacatagtcaaagactattatagttctattactactactactcgtgtgatcgtttttttttagagagaaacagagtgactgctggccgtaggatggaaacagtaagaaaagtacatccgaatcaacggctattgcgttctntcctctgccttcttgtgatgtggatttgtgtgtgtgtgatgtgtcggtgagtgtgttataga

SEQ ID NO: 47031 - DNA, 547 bp, Arabidopsis thaliana
tagtaacgtcgccagtgtgctctaaagctggcaccggctgtaattaacaacaaagggtaaaaggcatcatggcttcagaaaatatgacgccgcaggattacataggacaccacctgaataaccttcagctggacctgcgtacattctcgctggtggatccacaaaaccccccagccaccttctggacaatcaatattgactccatgttcttctcggtggtgctgggtctgttgttcctggttttattccgtagcgtaccaaaaaggcgaccagcggtgtgccaggtaagtttcagaccgcgattgagctggtgatcggctttgttaatggtagcgtgaaagacatgtaccatggcaaaagcaagctgattgctccgctggccctgacgatcttcgtctgggtattcctgatgaacctgatggatttactgcctatcgacctgctgccgtacattgctgaacatgtactgggtctgcctgcactgcgtgtggttccgtctgcggacgtgaacgtaacgctgtctatggcactgggcgtatttacctga

SEQ ID NO: 47032 - DNA, 555 bp, Arabidopsis thaliana columbia
cattagtaaactcttagtgtacatatgctcctcaatgcccaattcctcgaaaaaaggaacctttatgctcatatctacttcatatgggttgttaaaatctgaaatgtttgaacttctctgcagatagagctcgcaaaacgcttggtggcgagttcttttgcagaccgtgtattcttttgtaactcgggaacggaagccaatgaagcagccattaagttttcaagaaaattccagagattcacccatccagaagacaaagaagtcgcgacaggtttcatcgcctttacaaacagcttccatggaagaaccttaggagctcttgccttgacaagcatagaacaatacagaactcctttcgaacccatcatgcctggtgtaacttcttagaatatggtaacattcaagcagccacagaccttatccgctcaggtaaaatagctgcagtttttgtggaccaattcaaggagaaggcgggatttactctgctacaaaagagtttctgcaatctctgcgctctgcttgtgatgccgctggatctcttctcgtcttcgatga

SEQ ID NO: 47033 - DNA, 571 bp, Arabidopsis thaliana columbia
agagtttcctttctggattgaagtagaaaacataaacgggttgagatgcatattttgtcgacaaaacaatgtcaccggtagcagtcatcccagaaacagaaagattatggttaaccttaacgacttgactctccgtccacaacgagtagacatgtttcgaccattccggtttctcgacatcctctaaaacccacatactcaacttaacggtagatccaccatcatgactagcatactccaaaataatcccacataatttccccttatagtttatcaatccattaaatctagaacggcattctgcgtcaacgagcttgaaataacatcaaaacaaactatcacataatttccatcagaattcatagctgagtaatacaaaactccattgatacaaatcctttcccacacaggctcatgggtaaaagcacatcggatcctcctccatttcaattccccagttcccaatgtcagaatataatgatctagatcttccaagctatagtattacgagtagtcatgaacaataccttgaattccttatcagctggatcaaccctaaatagctatacgg

SEQ ID NO: 47034 - DNA, 397 bp, Arabidopsis thaliana columbia
gctatatggaccttattaaaaaaaaaacaaatgcattgtatttccacctaatttctaataaacttcttattctacatatatcatgaataatcacaaataagattcactaacaacatacaacttcaaaacacaacattaccaataaaacccaacggcttggctcggggttctccttagtaattattaataatgtttttgtaagagaatgtgttttaaataacctgtttgaccacgttagaacatattctcctactaaatatacaacaaacacccaaataataaaacaaaaacattattaataattctataatatacatagaaaagaggaaaaccgaacataactatctcccgcggatgtacacggtgggttgaatcctagtttatactggctaagaat

SEQ ID NO: 47035 - DNA, 932 bp, Arabidopsis thaliana columbia
atatcaccaaaaacctttgtaatacacaagtgctttgagaaaaacagaacatggagccgtaaaaacagagtttgtaacagaaatcatcttcttgtcgcgaacacttgttaattcttatagcagaaaagttcgaaaatatatgtttggtgtagcaatttgaatcgatagagactatcttgactcgaaacaccaccagagtcactctgctaaaccctaaacctcgcagtgaaccatggacgaggctccatgatctcataattagacgacactcgatggcatagacataacgcggttattcataccagaaccagatgatcaaactagcgccgaatgactcgacagacacacagaggcaggcaatccacagcccaagcagtttatttggtaagtttccacttggttctagaggtcgaaaacgctcactagaatctacaccaaagataattaaaccagtaccatagttgcaacgaaactgatacaagtaccataagtctatagtatgtagataaagcaaccaacactacttagtctctatatgagtcgtagcagttttgacattccctggtttagtgaacatctctctctattaggaattgttgacatagcagattctctaggtttccactttggaagctaactcaagtaaaccacaacatttttgtgatcaattcagctataaatcctataaaaaccttcaaaacatatactaataccaccaaaatcaccgtattacaaaggcaattacactttcacaactttgcaggttttcataagtttcgtatattcaattactgacaaagctcaatataccaaacgcttagagagagaagaggttcagaaattctatgtaccagtaaaagtagaatacacactaagatgatgaaggaaacacatctttaacagcagaagctgcagtcaaataattaagtgta

SEQ ID NO: 47036 - DNA, 510 bp, Arabidopsis thaliana columbia
tttaaaattaccatatgaactggtggtgccttcctcctgtacaatatcaagagtttccatgtccacacgaccctcgtctgcctgtaacaatatcaagacttactaatcagttcaaaatgtgcagtaaaacaagtgatacatggtgttagagatagaattcacaataccccggtttcaggagtaacataatctccaaatattgcagcatcttgtgttctaggatcatcaggaaatgaagtcgtcgcctctatgccatcatcacgtctatttcccaccaaattcacgttattacaagcacgaagaatagatggtttcacagaccaatgaacccctcttgggaatgcatcttcattctgtaggaaacaaaaacgtttttcaaagacatgtaacatacaactaaaaagcaattcaaaaggtagacatagaacacttttacctcttctgataatgttccaatggtagatttgttaatactccactatccggcacattagtctcagaaggtaaagc

SEQ ID NO: 47037 - DNA, 1090 bp, Arabidopsis thaliana columbia
gaatgtttttgatgtagatagaatgcaggaggatgtactcaaaatcaatgtgtttctaaaagttgaattgaaatgaaacctctctggtctagtatctctcacacattaagggaaatccaatcatatatgtcccaagcaaatcacaccataaataataaggaaggattcaacatgttgttggtttacaagtaagagaataagatgatgctaggtgctacttgagaacaacagcagcattgcgaatggagagatactggtggacttggtcggaagaaagtgatctcacagtctggaaaacatgagcattagcatagcggaggtttgttcttgggtccacataaggtgcctgcgagggattagagaagctcattgagttttgttgtttttgggtagtgaataaatttgtagaaaagaatcgatcactcaaaaacagaataaaacctcatatccagtaatatcgcaaagtctcttgcatggttgagtggaaggaggcgattcaatgttaacatctgcgaggcacaaagaagatttgatttttgattcaaacagagtcaaaaatccattcaaaatcagaaatcagagagagagaaaagagttacaagtggggaggtcgggaggaagatctgggaagttctcagcttgaagaatctgcttgaggtgtttccaccttctgctgcttgattgtgcttttgggtacttttcgtaggcttgcttcttcttaaagctcaatcgcgacgccaccactatatctgcctccatcaactctctctccatctctctctctctctctggaaaaaaaaaccttattaattccgacgaggagaacgacgacgacgaaggcttctttcttatacggtgtcctcttaaaaatcaaaccggtccggtacggtagtggaatgaacaatttagtaaaccgatagcagtgtttacattggaaaccgaattgaatgaagtgaagctgtttctttctagatccccaaagcgagttcatcatcttcttcgcctggattcgatcaagactagcactttcatcagatttgattcaatctctcttatctccaagttataacataataccgagcaatttggg

SEQ ID NO: 47038 - DNA, 415 bp, Arabidopsis thaliana columbia
gtttcggttcagaaaaatattttaagcttaagtcctgctattggattttccatgtaattttcttgctcatgtcatctatggttgtaagtttagtgaaatacatgtacaaggcctttacttgaatataaacgaagaagtagtacattgatagaaactgaaaagatgatatcaagtgttacctattttgcatgaacttgctctgatgctcttttatgcggatacagtatatgataatttgccatcgtgccttatactttcatcctcttctatttcctaatcagtttcctatagacttttctgtaaattctatagactttttgaaagtgtgtaatttgatgaactccttgtattacacttcacttttgatggctctggattggagagtcgagaaccttagtgatactttacatgcaaa

SEQ ID NO: 47039 - DNA, 461 bp, Arabidopsis thaliana columbia
gtcgaagggcaaaatagtcagaaaactagaatggcaaaactcgtaaatacaagcgaaaacagaggggcaaacacaagcatgacagactgtcccgccaacgcgaccaaaaaaacaaagactcgagcagctccaacttgttcctttctccaacgccacaaaattaaatttctcatatttccaacaaatagacccctgaatttattcatcttttctgttttggccctacaagtttttattgtgcatgtttgtcaaagcgtattcttgtcatttgtcaacaaccaacttccaccataactaatcgaattagaattatttgttttggataattggttaatattcgattataagaaaacaatttgtattcttcgtgatgtagactagtataaaatattagagtgacattacactttgtaatagagaagtcattccacataaccactacgtatataagtatattttta

SEQ ID NO: 47040 - DNA, 453 bp, Arabidopsis thaliana columbia
tgtttgatgccttaatgtctctatgtattactcctcgcatatgacaatgctctagtccccatagtagttgcttcatgtaacattttatcttgtatgacaagaattaaaagagagaaaaaaaaactcaaaaactctatccaatgtcataagaaaaaagacatgaatttcgcagtttttgtacctgtggctcggtgaatctgatgtcgggattagaggataaaccggcaagatcatgttccatatactcaaaaacaaggtaaatgctgctggatgctcgtgacgtgactatgccctcaagtttcatgatgtttggatggttgagtttccgtaaaatcaaaatctctcttgccataaacctaatgctctctggttgaagattatcaaactttaccttcttcaatgccaccatctttcccgtttctacttcacgtgctcgaaacacgctactatatg

SEQ ID NO: 47041 - DNA, 516 bp, Arabidopsis thaliana columbia
tatccaaggatattagctacatcggtcaaagcttccttccatcggattttctcatccactgttttatttcggcatgtcttttcaaagatcttcccaaagtctccggtctgtttcctcacatgggatggatccaaattgtagaaaatgggtatcacaagttggccaaactctttcttgcatttcacaatctccagtagctcgttaaggcaccagcttgaagaggcataggttttggagaacacaaccaccgcaattctggaatttctaatcccatgtttaagttcgggatcaagtgactggcttctctcgatctcattgtctttgaaagaaatgatcagtttcctatccagttcttttagaaagtggctaaggaatgtgttgcggacatcttctccgctgaaactcgggaaaacgtgatatgaccaattgcgagaagacgaggaggaagaagtagccactaagagaggagattctggaaaaatttagagtcgaagtgagggctcccgtggttgttaa

SEQ ID NO: 47042 - DNA, 577 bp, Arabidopsis thaliana columbia
catatatattccaaaccatcttattagcctcactccactctagttttagatcactactaaagttataaattacacaatgaggtgttttaatttttttctcaacctacgaagacacaacttcttgatatcttcgagcatactaatcaaaaaatatagcctcccatgtaaactccagtataactataatcccctgagccacacgacggggcctcaattccgctgtctggaaacttctcatcaatatccgcagctgttccctgtcctgagccaccaccaaagctatgcggatcatcctcgtctagattccacaagctgccccacaagtgaccttcatcgatcatagagtggtcggatgaggttgttgctacactttgaggcatatataatttgtcatcgaagacacttgtcgggtaatacaaggatgaagctatgttatgatcgttgtcgatattcatgtgatcttgggacactagctgagactgatgattctcagattgtgcttgtggttgtggtttaagatcccttgttgttgttctgggatagagatttttactttgcttgctcgaagagatttttg

SEQ ID NO: 47043 - DNA, 631 bp, Arabidopsis thaliana columbia
gaatcagatccgaacaattaaaccggctttcaacgaggaacccttgtaatatcactagcagagtctatggaggtcacacttcgccgacgtttgataacaatggttcgatgatgtttctggacatgtcttacaacatgttgtctggatacataccgaacgagattggttcgatgccttatctgtttattctcaatttgggtcataacgatatctctggttcgattcctgatgaggtaggtgatctaagaggtttaaacattcttgatctttcaagcaataagctcgatgggaggattcctcaggctatgtcagctcttactatgcttacggaaatcgatttgtcgaataataatttgtctggtccgattcctgagatgggtcagtttgagacttttccaccggctaagttcttgaacaatcctggtctctgtggttacctcttccgcggtgtgatcttcaaatgcagacggttatgctcatcatcagagatctcatggaaggagaccagcgtcccttgctggtagtgtggcgatgggattgttgtctcttttgtgtgtatatttgggctgatccttgttggtagagagatgaggaagagacggagaaagaaagaagcggagttggagatgta

SEQ ID NO: 47044 - DNA, 478 bp, Arabidopsis thaliana columbia
cgttactgttgataatgggctttattcagacaacattatttgggcccaattggctatcttatggttcactgatttaaaattcacaatgatgatcaaaacacattatcggcttagatgggagatttatggtcgatactgttatcaaacattcaagcttaacacctattttagacatgcaaatcttgaaagcaaattcttagacctgaagtccactgtccttgaacatttcctataggggttccatttgcgatggggtatcccatgattcgggatttgtgcgaccaggcaaatttcggatttcgggggattcaaattcggtgtttcgactcgcgatttggcgcccctcacttatatggcgctcggactcttttggatcgagtaatatttgtctctaattctctggagtgcgcttatatctgtcccgcgactccatgtgatctgtgtcaaaaatcaaaagtgatatatttcaaataatatg

SEQ ID NO: 47045 - DNA, 590 bp, Arabidopsis thaliana columbia
gtttttcgcttagtctccaatgggaacgctacagtcatggcgaagagcttacggagccttaaaagacaccaccaaagtcggccttgtccgagtcaatagcgattacgccgtacgctcctttcgatttcgatttgctttgattttttcagcatttcgatcgaatagttttatatatcttagaccaccgaagtgaatcactcatagattcgagttttgatcttctaatttacaggaattagatgttgccatagtgaaggctactaaccatgtcgagtgtcctcccaaagatcgtcatctcaggagtaagtgattgcttctcacttgtttttttgcagagtttttagatttgtatttgtttattgtttttctaaatatcttattctctgtgaattgttacagaaattttcctcgcaacgtcagcgattaggcctcgagcagatgttgcttactgcattcatgctctctccctgcgattacacaaaaccagaaattggacggtaattgatttgctctttctcggattatgacttgaatcttttagggaagatagtgattatagtaatttgcagcgtttagtatgattagatgtg

SEQ ID NO: 47046 - DNA, 596 bp, Arabidopsis thaliana columbia
caaaaccaaaaaccgcacgaaagaaggattttagtattcttcagatatattttgtagaaaaaactgcaaagatttgagctttaaacaagatttaacctgagagacaagattggaagtttccatttggaatgtactcataaatcaaaaagactttctcaacgctgtaatcatcttttcctccacaatctatgcaatgacccaacaagcagacaagattcgggtgtctaagctttgcgagcaaatccaaccgcagtttaagattccttatcgagtatttcttcgatgaaggtaagcatcttattgccacttttgttccattctcaagatttcctttgtaaagctgaaagatgttaagcaaatgtcagaatctctttaaaggagatgatgatgctgaaaagtgaaaacacaaatggttttcatgaactttaccgtgccatataaggagctttcacggagtatcatagtcttatcgaagttctttgtagctttaactatctcttctaagctaaactgtctacataccggtaaatcctctgaaccaaacttggatgtttcagaaatgtccctaaatccaacacacgaaaaaggataatagt

SEQ ID NO: 47047 - DNA, 555 bp, Arabidopsis thaliana columbia
caaactgtaagaccagataattaacaaatttcgggaaaagcagagaacttatttaaccagtgtaagtgaatcaggtctgctaatacttaaactttacaaaaaaatgcaccagtagatgcaaaatacctttcccatctttttctttctttttcttcttgagaactttccccgacgacccaaggcgaagatatgacatgattttagcaattcgatctagcacagaaccatcaacattgactgtgacaaattcctgttggggagataggacagagaaacagtgcctgttaaatgaaacaattctcgcaaaaattgcagcagtgatttcaattataaatttttattatgttcagtaaacaaacatattaagcaacgttaattttggttccagattagtagaaagaaagttgaatttagtttaaaaagatttttataattacttaaagaaaatctatgcttctaccaaaactaatgacttatataatcgatattagctgtattgaatacatcaacactgtaaaagaaaataggttgcagagacaggcagagtgggcttat

SEQ ID NO: 47048 - DNA, 553 bp, Arabidopsis thaliana columbia
tataaatatatgatttaatcaaataagcagcaacaaacaggaccggtgggtttgtcgaagaggcagtggccgtccatggctgcagcgtcggtgctcctgtgacaatgcttgtcgcagtcgccgtcgttgttgcacgttcctcttaagcggcatggtccgtccattacgtctttctctgtttttatgtaaatttaacacacatgcatgtatattattaggtcaaaaaaatatgacatatgccacaaaacacaagttttggatttaaaagtatttgttattttgaaggggtggaagataagtacctacggaatttgcagtaatactaataacgagagagaagacgacgagaagagcaacaagttgaaatcttgatgaagccatttttcagattatttttatcttttgtattgcaagatattcaactttaaatttgtgtttgaaaaattatgacctatgttggggggttttaacgtgaattttagtgttaaagatagtaattttgttttgttttaaatagtagaccagttttagtcaagggtaatttagggttaat

SEQ ID NO: 47049 - DNA, 425 bp, Arabidopsis thaliana columbia
  unsure (1)..(425): unsure at all n locations
tnnnnnnnnnnnnnnnnnnnnnnnctaaagttgcgatgcgcatcagtaaacgctatcaacacctggtgcgtaacaattccgtcttctggttggcatcgggttacagtctggactttggtctgacgggcggcgtagtgaaaaccggcacctttaaccagtttatccgtggcggcatcgcttcgccacgcctccgggtacgccactggcaccgaaagcccaggaaggcaaacacttcctgttgcaggaaagtgaaccgaaagagtggcgtgaatggggaactgcgcttcccaaataatgcccactgctccggcgtgcctgcgccggagcgtttatgctaaactgcgcgcctgtttttttgccagtggtacatgctcgtggcacaacacaccgtttatttcccggacgcctttctgacacaaatgcgc

SEQ ID NO: 47050 - DNA, 475 bp, Arabidopsis thaliana columbia
  unsure (1)..(475): unsure at all n locations
ctaggatctnnnnnnnnnnnnnnnnnnnnnnnctaaaggcgactgtagacgttatgcaaagaacaaggtttattggtgggactggcctccgcgtcaccattacatatgctggaaaaagtgttgaccatgtttgacttacgcgacagtttcgatgccctcgcctcggccgaaaaactgccttacagcaagccgcatccgcaagtatatctcgactgcgcacacaaactgggcgttgaccctctgacctgcgtacggctggaagattcggtaaatggcatgatcgcctctaaagcagcccgcatgcgttccatcgtcgttcctgcgccagaagcgcaaaatgatccacgttttgtattagcagacgtcaaactttcatcgctgacagaactcaccgcaaaagaccttctcggttaatgaccaggggcagtgatctcgctgcgcctggttctttatctgaaattgcattcaactgacg

SEQ ID NO: 47051 - DNA, 522 bp, Arabidopsis thaliana columbia
agttctcaaggacaatgttcctaaagttcttcctaaagtactctggtggattcatgagatgagaggtcactatttcaaaccggatttagtcaagcaccttccgtttgttgcaggtgctatgattgattcgcacgcaacagctgaatactggaagaacagaactcatgatcgcttagggtctgtttcctctctgtagagtcttgcgatatattagtttacgttattgtcataagcttaacagtgtttattcttttattgttgtaacacaggattaaaatgcctaaaacttatgtcgtgcacctaggaaatagcaaggagttgatggaagtagctgaagatagtttcgccaagaatgttctccgtgagcaagttcgagaatctcttggagtgaggaatgaagacatactatttggcattattaatagttagtcatttcttacattctttctcttccttagtttctttaagaatcataatctgcaaaagactcaaaattttggttaatttgctttctgactggtg

SEQ ID NO: 47052 - DNA, 413 bp, Arabidopsis thaliana columbia
tggtgtaagtgtttccttgtgtatattcaataacttgattgttaagaaaccattacctcatcagttgctcactgattgaatagttgaattgatgtttgaacaatcgaagtcataggaatatttgaagattaagaaaccattttttctgttgagatttgatgagcagatcattaccactagacacttcatgagtgccaataatgaaagatttatgtatcacttaaactaacaaacatgctgatacacgaatcaaacaagtacgcatagagtctctagggaagatgaagaatcagtcacttgatcacgagctttagctgaggtagacggactacaagctcgacgttgatgaacgagctaagtgcattaaaacgatctgatcttgagtaggagttgactggtggtagacgagctta

SEQ ID NO: 47053 - DNA, 446 bp, Arabidopsis thaliana columbia
gaaacaggcctccaacgcaccggtaaaagctgtagactaaggtggttaaactatctccgccctgacgtccgccgtggaaacattacacttgaagaacaactcttgatcctcgaacttcattcccgttggggaaataggtatgctaaattaaaataaataaaacagtataacaccttttccaactaaattatacaatatgtagttgatgagtttatttaaatgaattaaatctggttttacataaaattatgcatcaaacatataataagattttttttgtgaattggaaataaaatagcatcataactattttaaaatggagaaaataacaaattatgtcgatgttgatggatgaaaagagattagatgtatgatactgagatatactaatgaataataatgctatagacgccaagaagataagaatttgattacactactaatag

SEQ ID NO: 47054 - DNA, 604 bp, Arabidopsis thaliana columbia
cggcaaagaccgagccgttgcggcgccgagaccacctgctccgatggacagatcttccactacgcagccttaccttcctacagcacctatggtttacgccgttatacccgacccgggaattgtggataacccggatttgcctagctatcagcctcacgtgcacggcaggtgcgacccaccggctttgattcctctgcagatgaattcgattgagctggatgttgattgttatctcgacacggctcttgttactgtcaccggatcgtggcgggttcattgtgttatgggaagcaagagatgtgattgccgaattgctattcccatgggagaacaggtctgtcgtgtttttattttcccgggaaaattgagatttctcgtaatgaaatcagttcactgttagggtttgaagataaaatgtggaattggggatatgtgtagggtttgtttataagctacaatgtttttgtttcacaaactaatatagtaaaatggctgacagggatcaatactaggtgttgaggttgagatcctagaaaatcgtcacaacgcagttgatcacagcagaagatggaacgaatttgagacacggcactacctgaactgg

SEQ ID NO: 47055 - DNA, 340 bp, Arabidopsis thaliana columbia
cctacaaatgtctggaatgcgatttcatcattcacaaagtatgtgcaagtcttccgcggaagagacgacattttttgcacaaccataaactcactctacgagttgacaaggcttctatatttttatgttctacttgtgataccactcctaatggtttcagatacgagtgtgacgaagaccatggcgatgaagaatttgtctttgatcttcagtgtagttccatatcagaaccctttctacacgagttgcatccacacccgttatactggaccttggaacattccggaaagtgtaaggctagtggcaccaaagcaggttatgatcgcatctgtatagtgtg

SEQ ID NO: 47056 - DNA, 526 bp, Arabidopsis thaliana columbia
cttcacacgctagcaaagcactaaggtcaggtctcacatgttttgctacaggctcagccaggtcatgataactttgaactagagccctactatctacttccaggatttgctcgctaccagaggtatgctcgtactgagagaattttcttagttccgtgattttactgataaacttttcagcctcaacttccacgttaggaagacttgtaacattgcaaacaagatcaccagttactaagcattcagctctaggacctggaacaatgccaatctgaggagtcccactagtagtgataccactgctgtcaggagaagctgcatccagagtatgtagactacaagatgcgcgcttctcacgtttctctggcctggaattcataatttcatcatcgttctttctcttcgcatatctctcaacagagtcggataaagaaccaacgccctcatcaccaggttctctgcattgttgactctggtgccttgattgccgagaccttttatatccatttggaaaaacaaaagatgg

SEQ ID NO: 47057 - DNA, 543 bp, Arabidopsis thaliana columbia
cttattcctgtgattttgctgagaagaagaagaatctcgaggaggaagaagaaacaggcgacatgggagaacggaaggtgctaaacaagtattatccgccggacttcgatcctgcgaacttcaacggctccggcggccgaagaaccagcagatcaaggttcgtatgatgcttccaatgagtgtccgatgcggtacctgcggaaactatatctacaagggaaccaagttcaattcccgtaaagaagacgtcattggcgaggtaattgaatcaattggtttggtttcatagtgtaatttatttcctcggatgcttttgcgtaatctctgtacctcttagttgatagtgttgatgcagattattaggagtgtcttctaattttattagggtttcagttttcgataatattgtcgtcggtccttgaattgaaactaattacgaaaacgattccagatttggggttttagggtttcgagaaattgagcttttatgatagcgaaccagtataactgagtaccattaccttgaaggctcttgaaccttat

SEQ ID NO: 47058 - DNA, 409 bp, Arabidopsis thaliana columbia
ccatcctcatcagtgaacatgagcagatccatctctgtatatattatattgacagctcctcccagaatatgctgatacctgagaaggggcaaaagtaagatgcgttacatgaatacacataaccaagctacaatatacgtgctgagaatggcattatatacctggacttttatagttgatgtctacatacttatcacaggctccattcaccaaagaatccgccatctaacttgcactgaatgccctcaaggaacatgcaaatctgttttgcaaacttctgtgtcacagaatcgtcatttcccaaacctttcttacatcttagaatctccatcctgtgaagaatctgcagctcgtatcttagagcttattacagaaatcagaacaacaatgccaaacgtcttcagcttag

SEQ ID NO: 47059 - DNA, 564 bp, Arabidopsis thaliana columbia
atgttctgttccaggatagcgaagagcaagtatagtagaaactccatgcctgtcttgccatgaaactaatggaggaagctctcatttaattaacccttgtaagttagtaattcttttggttgcgaaacttgtattcctcattttagaaatgttgtgtctcatgaaaagacaacataattctttggatttgtgatatattcttaagtaaaggagctttggtttataacttcctacatgatctctgtagtacagacagtaaccgtatccaatttggtcaacacacttatatatttgtacaggttgaatctttacatagacagagaatgtgcggatttgtatgaaagacttcctcttgtgatgtgtggtttgtgtcgtttacatatcggtcctgagcttgcgagacgatatcagaagctcgagaaatatttgatcactttagctcaagataaaacctttgcgattgttcccgatgtttctatgaggctcttaacgtctgcttcatgtatcttagagctgaccgtaacatggatctagctttgctatcgggtttgcatcctgacatga

SEQ ID NO: 47060 - DNA, 530 bp, Arabidopsis thaliana columbia
tacgaatgaaatacgtaaaataactacgcataactaattatggatatccgctgaccatgagttgggtatattctaagtggctaagaatattttatatagttactttaatatatttttgtttggctggggttattattcccatgttattggacaaaatgatgataaaaaaaaaggctgcacctgatatatatatatatatatatatgagtttgtagctccaatctaaaattaaccataaataaaaacaaccgtgagtttatgataatgggcccacattattgtgctgtgtgtgggaccatccaagtgctcctgagtcacttgactttttgttagccttgcgccgaccggccaatcagcgttcagatataccattcacatacatgtgcgtaagaccatatctctctctctatatataatctatatatatagtggtttggattacatgtgtgtttatcatatgtttaattagatgaatgctcgagtgttttaaaaaagttttatgaatggttgagaattaaaaatggtgaaga

SEQ ID NO: 47061 - DNA, 469 bp, Arabidopsis thaliana columbia
gctgcttaccactaagttcccggcggaacttttccggtcaaggtaagaaggggcattcttggacattactcaaatttatgttaagcgttttgcatgagaaattttaagtatcatgaacattctatcagacgtgtcgtaatttcattggttgatgtttagagttgcactaatgtgacattcctcataaagtcagaggaactaaatgaatcgtttacgatttggtttaggcttttaggttatcaaatttatatggtttggtttggttcggatttgagattcggtattttactaacagtagaagattacagtttgttgggactgtaagaaatcctaaagcggtttagattttgctttttcacatcaattttgtttccatcgttttggtatctagttgtccataccggtgatcccaacagtaaaagtagtcatgacgatcagcaagttcgtggctcttccaccgttggatgaa

SEQ ID NO: 47062 - DNA, 566 bp, Arabidopsis thaliana columbia
gaatgttgttatagaaaattggtattcaactaacgtggttgggtctcacatgttcagggtttctaaaaagctgaaagcctcaagaagcctattaaagacttcagtaggctcaattattctggtatagagctgcgtacaaaagaggctcatgagtggtttttaaggcgccaagacctgactcttgccaatgcctccgatctcaatgcagccttggaactggaggctcagcgtaagtggcttttgctttcctctgctgaggagagtttcttccatcaaagatccagggtttcttggtttgctgagggtgatagcaatacttcctatttccatagaatggcggattccagaaagtgttttaaccccataaagtcccttgttgactgcaatggggtggtgattgactcccaacaaggtattattgatcattgtatggcctattatgagaggctgttgggtgaggttgagactccttctcgttggagcaagatgacatgaacctgctgcttacctataggtgctctcaggcgcagtctactgagatgtaaagggtgtttagtgatgatgag

SEQ ID NO: 47063 - DNA, 586 bp, Arabidopsis thaliana columbia
tggcagaaatgaacacaattggtttttattttagcttatattattattatttatctttggcttaaagcttatcatttttgtttatcgtttttattaaataccaattgtgtgttaagtactgaagtacactagatgattcgaggattttaatatattttgtattcatagtgacttcatgttcattacgtagcgttttcatgcattagattatttgttggcggtgctatatagttaaccactacgttatattattgcttatattattatctattgaaaacgttttagaaacttcgtaagattactttgaatgtccacaaactgaattagcataacattgacttcaatcattatatatttatactaaaccaaagataaaaaattgcaaaatactcatacaaggtcatgtcactgcatttgaaaatctaaatgggccgatatctttcaaataaattacacataggctttcactaaatggcccataaaacacatgggattctaaatactccactcacaccaaaacaatagtatagaagagctatatgcccatatcaaatcgtggatatttcattattattgcatagtatac

SEQ ID NO: 47064 - DNA, 647 bp, Arabidopsis thaliana columbia
catctcttaatataaggagtccctttcgtctcactcttaagttccttaatacaggaggatattgctcttaaagtggaagaagcaggtgtgaatcacatcccccctcaagttactaggatcaaattctggagatagtctagtgaggaaggttcagaaagtcgaggaacaagaattaggtggtaggaaggatctgccattgacggtcatgggctcagggatccagtcccatgggcaagataatcctctagagaaagatctcaacagtagtcaggctagtcacaggaagcgtccactttgggaactgagtaaccccgctaacgagaattcatctgccataaaccagaaagtggagctcaataatgacggtttatgcgaaggatctccgaataagaagctgaagacagaaaacggaagcagcagcctctgccgggatacatctggtcacgattccgggataatgaaaaagagtccaaaagtcgtgttcccattggacttgaatgacgacagtgaaatggtggataatctcagcccactaggcaatgacgagaataacaacaatagacgtttaataagcggtacagtcccgaatctggagctggcattaggagctgaggaacaacagaagcacaatgggactattaccttct

SEQ ID NO: 47065 - DNA, 1790 bp, Arabidopsis thaliana columbia
atttcaagtttttttatgaatgtgtggttggtcttctcttcacattaactagctgctatgttagctttataagtatcccacattatgaaatttgttgcttctaatgttcattttgagcctctttaccgttactatcggagctagtatgccttaagaacccatgggagcaaaagtgagattaatctgaaggtaaacatataaaatcgcaccacaaggcaagtcaaaccaaacttcaattaccgagaatatgaactagaccaatccaaaagtacgtagaagattgaggaacttgcagctaaatgtagagcaaagaaaaagacagataaggctaaagtcgaagttgaagtagagaatcgcttgcaacaattacgaatctgatcaaaagtgttgtcgtttttatgactaaataaggatactcttgtattgtatcaacaacaatttttagttttgtaaaaagatttgggatttttcagaaaccatatatattttgtagcctctggatttttctttcttctatgatttagtaactggtacccttttttacctattattgtacataattatataagtttgaatcacaccgagatcaattgtgcaaggagtgttcttattagaacatttatagaagctaagggacaaatagaaaatacaacagtgggataagctggtgaagcttaagcttatcaactcgtgcttggtaaagctatggctgccaatggaggatcaagtacttggaaaagtcctgaagacagccttcttgtgaggtcctctgcttcaactttcgcgacgtcagctctcattccgatatcagtagcgtatctactcgcacaatacacaccaatcgctgtagcagccatcccatacacgtttgtagtcagaagccgcattggcgtggacaaaaccgcagcaatcggcccacctataatcgaaaccgcctgaccgctctgtcccattgtccttccctcaagaaccagcaatgcggttttgcaatatatagcgaaatcctcacagttgttcttgaaaacgtcataacatccaaatccgttttgaaggaggtgtttggcccggtgaacaacaatctcattagggtcagcgacagcgagtgtgcaagttcctcctctggctttgacgaggaagtgagcagcgttgactgagtactcaaaccggtacaagacaccaccggctaggaaacagttaaggcatgaggaaacaacaccgtgaccttcgttaggtggaacacaggttggacagtgggtgtggtttcgggatggacctgagctgactagtatgagatctagaacagtcccggttccaacttcttggcctcgtctagtgaaatggatgactctatcatctccaacatagatgcctacacacaaaagtattagcagcattatggacatagcttccacaccattctctgatcacaacatttgggaataaagcaacacagtaatcatatgtggaatctatatagggattaagcattatatcatactagagacacttcaattacatgattcgataactgatctcgttcgaaagataaatcctaattcatcgattaaatccacacaatacctaagttttgtcaaactcattagtagagagataaaggaattggaatagataccgtgatgggcatagatgtaagcagtcctccaggagtagatatgatctccaggtttcaaactcgatctatcgattctgttcaaaaagatacaaaagtttcttgagatgatcgttaagtagaataactaaagagttctcagaaaatcaaagaggggaag

SEQ ID NO: 47066 - DNA, 588 bp, Arabidopsis thaliana columbia
cgtcgttgtttcttagtaatttgatggcgtcatcttaaaagaaaagaacaaacgagaaattaccaaaatgagaaggacaaaaaaatacaaaataggatgttgtatattgcgagaaatgggacaatgatatattgtgttgtcatttctttttgtaaaatccaaattaggaaaaagtgtataatgcttttaagtggaaagaaccaagctagcagaaaatttaaatattaaagcgcaaaacgacaacgtattctccaccctctatgagttctatcgttttttcgcaaaagaaatatgcaaaaaaagggttacaacgcggaaataaattattgaaacaaaagatggaacagtaaaacttaaaaagttagaaacaaaataaacgtgtcaactgtcaggtgaataatatcttacatgatagaagacccacgactaaaaacttggtaatcctagttttattttgattttatttttaatgtatagacactgatttgacgtaactttattttgattctataagctttatactgtgtaaaatagaaaatatccgttgtgtcctactaatttactagtcttagatccgggaattttata

SEQ ID NO: 47067 - DNA, 516 bp, Arabidopsis thaliana columbia
gtttgcaaattctaaccatataaatagattgagtttttgaacttaaaaatttcacctgcttctctaattcatcagctcgtgcttgagcctttcccaactgttttgcagaatctgatgatccctttttctggagatgagtgaaaacacacagatcagatttaagccaaacatgtcaaaaagattagaaattttttatcacaagttccaaaaaaaagtagatgaaactgaaaccatataagatccatacctgtagtgatgagacttcagtctgcaaggaagcaatcttgtcttccctttctttgagtagtttctccttctctgctactacctcgtctttgccctgaacttcccgggttttctcatcgatttgagattcttcaaaacaaaacaaaaacaaaacataaagctcaaaccccaaaatttgcattcaccaaataatcaagctataacaagctcgaatcagaacggattaggcatttcacaaattccacaaaaccatagcaagcaattcgacat

SEQ ID NO: 47068 - DNA, 1491 bp, Arabidopsis thaliana
caagatggtgttactccaaacgctgtcacattcgtctctgttctcagaggttgtagtgtggttggttttgtagatgaagggcaaagacattttgattcgatgaggaatgagttcgggatagaacctcagctcgagcactatggctgcttggttgatttgtatgctcgtgcaggccgcttagaagacgcagtaagtatcatccagcaaatgcccatgaagcctcatgctgctgtttggagttctctgctccacgcatccagaatgtacaagaaccttgagcttggcgtgcttgcatctaaaaaaatgctcgagctagagaccgcaaatcacggagcttatgtcctcttatcagacatatatgcagattcaaacgattgggacaatgttagtcacgttagacagtcaatgagatctaaaggagtcagaaagcaaccagggtgcagtgtaatggaggtcaatggagaagtccatgaattctttgtaggagacaaatctcacccaaagtatacacaaatcgacgcggtttggaaggatatctcgagaaggctgagactcgctggttataaggcggacacaaccccggttatgttcgatatagatgaagaagagaaagaggatgcattgtgtttgcatagcgaaaaggcagcgattgcatttggtataatgagtttgaaagaagatgttccgattcggatcgtgaagaaccttcgggtttgtggagattgtcatcaggtttctatgatgatctccaagatttttaacagagagatcattgtcagagacagaaacaggttccaccatttcaaagatggtcactgttcttgtaatggcttttggtgagaacctagctatgtaaccattttttaatttcacctagttagtgatttgacgatttcagaggtaaaacatgattatgataagaaatttaaaatgtgatatttattgtttatccaatagtaattttttttttgaagccagtaattaattggcgttaatagtaaaaatggtaattactaattggagaaggcttttaagtttggtttgaggagagaaagataataacaatgagagatgatcaaagcaaatgtgtattcatgttcaaagttcagatttttatatcgtcggagatttttgagccaatctagttttgttcatagtttagatgcaaatgtttcatcacttatagctgctgtaaagtcttgtgtctccattgaactgtgtcgtttgcttcattgtaaagtagtgaagagtgtgagttaccgccatggatttattggggaccagcttgttggttgttacttgagattgggtcatgatgtttgtgcagagaagctgttcgatgaaatgcctgagagagatttagtctcttggaactctttaatatctgggtattcagggagaggttatttggggaaatgttttgaggtgttgtctaggatgatgatatctgaggtgggttttagacctaatgaagttacgtttttgtcgatg

SEQ ID NO: 47069 - DNA, 502 bp, Arabidopsis thaliana columbia
tgcagaacaagtaatcaacttcctaacctgcttaaatcatagagtaatcatttgatttagcttcttcagacgaaaataaaaattagaaaactgagttaacacaatgtagcactttaccattagctcgtgcttgcttcaaaaacgtgaggcatccatctggtgaaccaattgactgttgtatatccacttcctctggagaatcgctacgttgaggtttagcacgtttgcacttatattgtttccttggtacttctgaagcatcatggccttctccttcactgccactcccttcctagaagaaatatcatatgaatgagttacaaatcggtccacataactttatcaaacatacaaactggcccaacagataggtcagatagggtacacaaaactcaaagttttcaatgtcattggtgttactgtctactcacgttaacaatgaaaggtttttcaccaccacccacattttcaccaagaaatttcattttctcatctactggca

SEQ ID NO: 47070 - DNA, 965 bp, Arabidopsis thaliana
gattgtggtttgctgtattgtagatgttatgagttagacagtgctactcaattctatcataacctcatttttcattcttgcctccagaagcacagcaaggtggaagatgcgaaattgaagaaaactcgtgaagacctccaaagcaaagttgattttctgaaaaaacaagctgatgtaagtatagagaccgccctttggtagttttatgtctgtgtacttgttcgctgtggtcttgaatctgttctgtaaatcaattgtattttctgtagaaatatgaagacaaagggcctgttattgatgctgttgtgtggcatgatggagaagtatggagggttgcacttgatacacagagtctggcagaggatccagatagcgggacactagcagacttctccccactgactaactaccggcaagtcttcctttaaacatctatctcttatgacagttcaggaacttttcgtttggaagcatgatttgttcaccaatttttttattttattttattaatctcaatcaaatatgtactacagaattgaacggaagtatggcgtgtttagccgactagatgcatgctcctttgttgctaacgtgtatgatgagggaaaggttctaagcattgtaactgatagttctcctcacggcactcatgttgctggaatagctactgcacaccaccctgaggtgcaaaacgcatctatataatttagatacattgatgatttgttgcaaccaattaacttaccttctatgtgtatgttaggagcatttgttaaatggtgtggcacctggtgcacaaataatatcttgcaaaattggagactcgcgattaggttcaatggagaccggaactggattgactcgggcattgatagctgccctagaggtaataattcatcagctgatatgaatttactattagctgaaaatcatttgtacttcgtgaaagtatattgtatgaagtt

SEQ ID NO: 47071 - DNA, 595 bp, Arabidopsis thaliana columbia
agtatatcagtctgcctatttcgtagccataggaatcggaatgaaaataccaatatttttggtattaaaggcaaagttaatacggaaacaatttgatttgacaatattctaccgaaaatttgaaaagtaaattctttcaaaggaatttctatttgtcttagtattctttttgtcacgtttcagaaagtttctatttctcaaaacgttttccaaaaatagaaatttcctgccatttaaatcaaaataaactaacgttgaaaaaggtttagatcttgaaacttctattcctcttcggtttaatgttttgcaccatcaacaaatagtccggtctgaaaagtttatggatgtaatctctataattcactagacaaaaagaaaaaattcttaagaaggaaacaaagtatcattttaatattacaaattttgtcaacgttctgactctaatcataggggataattgtatccggtacagggcgtttcacaaagaatcagctcctttggtcgccggcgatttagttattaacttatttacattgtatgtactttttgtaggtacaacttcccaattactttaccgttgtacttgtcacagcaa

SEQ ID NO: 47072 - DNA, 1039 bp, Arabidopsis thaliana
atataatctattttatataaatggagtatagtcaaataaatatgcattatcaacgatatatagtcttctattacatagatacgtgggagttcacccaacgtagatacgttcggttgaaacaagtcaatttcatcaatgcctcttccaaaaaaaaaacaaattgcattattgatgaacacatgcatcattatcaaataggttggttaaaatgaccaagatgactaaagccaatcacactactaccagatcgagtaaccattagggaccattaattcacgtggacgtagtgaatatggtccttgtgaattaatgagtacgtaattgtcctcattcatatatggatcggttccacaaacatttcctgtataaaattctacatctttcctctcattattatctctacacttctcatctctcaatcccattcgcttattatttatccatatgggaaaggttcttgagaaggaggcgtttggattggctgcgaaagacgaatcgggaattctttcgcctttcagtttctctagaaggtttcaatttgttttcttaacgaatatttttgtttcctatatgatattccgataagtaagctgtttttgttctaatgaaattaagttttggtgtgtatatagggcgacgggtgaaaaggatgtgaggttcaaagtcttgttctgtggaatttgccacactgatctgagtatggccaaaaacgaatgggggttaactacttatcctcttgtccctgggtaacacaaattttctttactcaacaaataacattatttcatattaaaataaactataaatgctagcaaacgtgattgttactatttcaaataatatcaacctatatctaagattttcttgcatattttaccggatgagacatgttaattcataccattgttattgtaaaatcaaacaatggattgcacaaaaaaaaaaaaaaaaggctctaatgatgacatttaatcggagttaaattgtttcaggcatgagattgtgggcgtggtgactgaagttggagccaaagtgaaaa

SEQ ID NO: 47073 - DNA, 489 bp, Arabidopsis thaliana columbia
caaagatgggaacagctgctgtatcaatcaaccgcaccatttcattcacgataacacacaattcatctaccttctgaaccctattatccacaagtgggacatccacaacagtctttgaatgctcctcttgcaatgagccttttattattagctgcagagaattaattgcatccatttccatgtcatcccagggcacacttttccacctgactatttccataaaagccttgaatgaggatctaggatgcattctcttaccatctctgtcattaggatcgtgtcttgcaccaccccacttgatctgttttgcagtgctagaccggaaccagaaaaggaaatctttttcggaaatatatacggcagccattccacatattgactccccaagaacagaagcatccggatagccagactccattagactttcagtggtaaagccagtgtttctccatgacttttgagaaccagtcaattagatctctaatttgt

SEQ ID NO: 47074 - DNA, 161 bp, Arabidopsis thaliana columbia
cgacaatgatgtttttggtcttgaccttcgaccttttaggttaactttaacgtttctccgattacttgattgacctggtatcaatctcgaaatacttccactatttcttagtagcaatgctgcttcctcttcagctattgcttcttctatattaactaacc

SEQ ID NO: 47075 - DNA, 1086 bp, Arabidopsis thaliana
tttattcaaagcccggttaagttaagccatcacctatttttttccattgaagacaagtctctacaaaaacagtgaaacttaaacattacaagttacatcaaaacaagaaaggtaaaagaaaacacaaaagtactgtaagaaccgtctatcatcaaatgggctgtgtgcatttcttctgagaatgtccaagcaaatgacaccttccacattgcacaatcctctttggtctcttcaaattctcaacccgaaccactttcttcttcggtctacctggtggtctcctcgtttttggtggtcgtatcctcaagctctcaactcctcctccagcctcttctccttcatccttccacaagcttctatcaggaatctctccaatcatctgcgaatacgtctgctgatagctggacactgtgaaacacggttctgcaaacagatgcacattccgaccacacgagatcagtgctgcagccgcgtgacacacggcaatccgtaaatctgccaacgacggcatgagcaatcccgtgtccgtatatccacaatgttggttctctctgtcgacacaatctcaaactcgacctcgttcgctcgtaaaacttggtaacaccgtgcgtctgcaaccgcttctgttatacgtctctctgcagatggcacgagtattgagttccatcccatgctcaactcacggcggttatcgaaccaagacgatatttgatgccggatatgttccatcatctgtatgattgggagttcatggcattcgagagcccaattgtataatacctctgttatccctaaaccgaaatgtccataccgcacaccttggaaatatgctacagcccagagatgcggcaggtagagttcgaaccactgaacaacatcttgcgatatctcaatcatttcgttagacttcgtttcgaattccgctggtgtcagcgcgtaaacagcactccagaagatattaacaagcttcgtgttcttgaatgtatcccggaagttttcgctaacataacggagacaaaacccatggaaagcagttgggaaatgagtttcaacggcttccacaactgcgctctgtctctcagagag

SEQ ID NO: 47076 - DNA, 439 bp, Arabidopsis thaliana
tttgatttatgatcgtttctcttgttttgatgaaatgtatttttattttgttaatttcactacttttgcattcttttgtctgatttttatcttgtctgattattgttttgtctgatttttatcttgtctgattattgttaatgtgtttaagttgtgtttatcttttgtgttcaatatgaaacttatatattcattagtgttttcgatgatagagttacaattataaactttgaaaaatgtttctcttagtttggtagagaaatggatcaacaaggacaatcatcagctatgaactatggttcaaacccatatcaaaccaacgccatgaccactacaccaaccggttcagtacatccagcttaccatcagatccacagcaacaacaacagcagctctctcaacagcgttcaatctttctgggagactcgattcttcgaga

SEQ ID NO: 47077 - DNA, 386 bp, Arabidopsis thaliana columbia
gtaaaatcatagccgttgtcaattccagtaaaaacctagattaacttttaagaccaaaagaacatgacatggaccaaaaaaggcatatatattttgaaaggaaaatcttaaaacctctagagttaccatttgccatcatcaggtgaacaaccagttaccaaattacgaatcctaaggggcatttataaatgagactttgaaatgcaatatataaatatatttgtaagcctcatgagatgcggttcaaaatgatttctggtgagatttactgactattacaccatcattccaactcgtgaaactcttgagtgttcattccattaattaatttgtttaatttacatataatcagtgttcaagaaagcgcctagacggaagtgggtggt

SEQ ID NO: 47078 - DNA, 455 bp, Arabidopsis thaliana columbia
aggatcccccatgatgatccgtcattcaaaccccatatctattaggttcgtgacgcgtcctttcagacctacgtacttcaggttccaagggtgtagattctacgactcttcttaaatctagttgatgcccttcctgaataggtgaagcaatctcctttggttctcaaacttcttcaagttgtaccttactcccactatttctctttgaaagaattctctttcttgaaaaacataattcaaagcaataaacattttgttctgagtagggttgtaaaagtaataacctttggtctctttagaataaccaacaaagtagtttctcagatttgggtccaagcttattagcaatcaaacgtttaacgataagcttcacaatctcaaattttcagaaaagacaagtttgaaactttttcaatctatatctcatatggtgtcttttcaactgattttgatga

SEQ ID NO: 47079 - DNA, 499 bp, Arabidopsis thaliana columbia
tataacaatacaaattgtcaacaaaaaatctactacaatttttacattccataaaatacaaacaaaacttgaatttccatagacttcagagcttgaaagtctctcgtataacaaagaggtaaaacaaataaactttggctatgttttttttttttttgcgttgaataagtgtgttaataataaaaggaaaacttgatcaaatatattttgtctttctattttcacaaatgcttttttttttggtgttttctaaaaatctaagtaacagtgttattaatggagaaaataaatgagaagaagggttatgtttagattgtttcctgtgtaaatgtaaaatcaaacatataaattaaacacgagcaggaaattaaataaatagagctgacctgtcttgtctgtgtaactgctgaaagttttgaagagactgaaggcagaagtaatgatggcaatatcaataacatatatggagtcatcattaattaaatagtaatttaattac

SEQ ID NO: 47080 - DNA, 1333 bp, Arabidopsis thaliana
taattactacacaacttcgatgggtccaatgatggtatagtgtggaaaccattggtcggtagaaccatggccggaattgttgttcgcggttcctttcccttgagcatataagttggtgtggatcgtgtacggctgaccagtcgcatttcctaggaactcgaagtctatctcatcgtgtgtacttcccgtagacgataactacaaagaaaaatctgaaaacattaatctaatttttctatatataaaagaattgcgtattgattctatttttttttattttttttgtaattctatcgatcgagttcaaaagaaaattttacgtaataggctgcaacggttccagcagaattccctggcacaagtttgatgagcatttctacgcttccaaacaaatgagccacctttgatttaatagcagatcctgcaaaaacaaacaaaaacataaaaacagttatacatgtttatctatcaagtttctcatgaaataatagactaaaattaaatggactgattttaaagttattgtgttataagattactatatacctgcagatttatcaggacaaatcgaaggtcggaccattcatgaacatgtatctttaccccatgtaacaataaaattcttactgaagtctgcctccacaaatgtgcgaccaagagtcgctacggcagctgccagaacgaacattaacgtcttcgcttgaagacccgccatcttacgaatttgatttgtgtttggaatgttttggattggaactctattcgatcaccatttgtttgtcagtaaggctttctttatatataacttctaagaaatcgaaattttgacgtagtccaaaaagtatagagttttgacaattgacgtgcatctaatgaactttgtatgcatgaattagacaacataacaattaaagaactaacttctttaatataaagaaaatgctatcctggaaaggtactatgaatatgtatgtttcttagtttccaatcaccaacatgtgtttgataaataaatattagatagaaaaaaaaaaaaaaactaaaatataagaagatggacactgttagctggctcacgcggttgtggtagaggccgaggaatatacgtggggaagactccacaaataaatggggtcgatgaacttgtcaacttctcctcttccaaatcagaaattttaccaatagtaacttcgtttgtcatcaatctgttttattactctattgttccttacgatttccatatttttaatcaggtattttcgtctcgttgcatactgcatagggcttagataaaaaaaatccgttacattgttttaggattcatgaaaaaaat

SEQ ID NO: 47081 - DNA, 587 bp, Arabidopsis thaliana columbia
gattcgtgaataaagtttgatttctatatatcggtaatatttttgtttttatttggttttacaacatacaataacggtaatatttttattcatttgttgttttcgtgggatttagatcatctaaaactttcaaatggaagagagttgacttccattatacaatagttgcatttgacaactatttatttaggtttatttttgtttgaatattttggctcttaaaggtagggtttcttctggatatatttgtttagactttagaagtttacttttctggattatttttgttattacatatgtttacaatgttgaatgatatggattcaaatctataaatataagctcataataaatgagctgaacttaactaaaccatgaagtattaatattctaattcattatacgttgactggaattgagtgaactaactcactttaacactcctactaattttataaacatggaaggaatagataagattagttctagtgacctaaaagagagatgaaacaatggacttaaggcaacagctttgtttatctggtctttgtatatgcatatatgtgttgaagatgagaggtttttat

SEQ ID NO: 47082 - DNA, 608 bp, Arabidopsis thaliana columbia
gattaggatttgaggcttctataatgaccagccatgattaaattcgcattggaacaaactggaaccctttcttgtatttaagccagaaatgagtcaggtttttcagttataaaactgattgatactagaaactagtggattataaaagactcacatttcacactaatttaccttttcaattaactgatgttattgggttcacctaagaagcaccaaataattttatcttcaaattctgtttttggctctctccgtttctttgtaattgattaccagcttatttatttgctaaactatgtaaaaacttttttttttgttattaataaatttaaaatttctttaactgatctgtttttttaaaacataaaacctgctttgagtgaagagtttatgcactgtccatctcctcggcaggcaaatggttaggtcctttgagaaagtaagagaagaagagataacatcagtgatatggggaagcttgagaaacaaagttcttcttctttgccggtaaatctaagtgatttacccttaacatgtcaaacgatgtgatatgtagaattgctgtgggaagaaaatatagccgggcagaaaacactagcgattttgaa

SEQ ID NO: 47083 - DNA, 887 bp, Arabidopsis thaliana
tggttattagtgatcataacagcattttacataccccatacaagatagatatatcacttttttagtagtttctgaaatttgaatcggtgacctgattcttgctactcatgtttgttctttgaagtattgccatcttcgcttttgcaggtacttgtaagaaatgttcctccagatcctgatgaatcagtaaacgagcatgttgagcacttcttttgtgtaaatcatccagatcattatctttgccatcaggtacgtttctttagctggctgaaagtaaattcatcaacaatatctcgaaaaccactaatagagtggtattcagaattatttagtttcttcacttgagtatgtcatgcgttttcttatttgatgttcccaggtagtgtacaatgcaaatgaccttgcaaaattagtcgcacagagaaaagctatgcaaaattggttgacgtactacgagaataaattcgagaggaagccatcaagtagaccaacaacaaaggtacttctgttgcaagactattttaacctttgaccatatagctctcgtgtaatgtttcagcaaaatgactctttgaatttcatgcttatcatgaattcaattctcgtcggtagttatttaatttattatatagacaggttatggaggtttttggggaactacagttgatgcaattgacttctacacttcaaagatggatattctggctgagcaagtatgtactcacctgtagaagtaatcttcataccattttcatcttaattataagtgcattcgtaattctttacatacacaggaagctgtagaaagagaaaagatcatgaacgatcctaaggctatcatgccggcagcatttgtttcctcagatcacggtggggacagctgtttg

SEQ ID NO: 47084 - DNA, 647 bp, Arabidopsis thaliana columbia
taagtgaaaattgaactaaaaaaacttttaaaatgacgttttctcaacacattttgtaagtattcacattatacaaaattacagacactttaatttgtgagtataacacgtattattaaataaacagaaatgtaagaaatataaaacattattgcttcagtaatcaatttcaaatcaatcaactaactcaactctcaatctttgtatctagatttaaagcctgattggctgattttacaccactcacacgttaataatagttaacgtgcgtcaatgatattattatttctcgacttatgtattctacatgggccacatcagcagaaactaagattataatttcgtggactgatacacaacatattaacgggcttaacctagactctacaacatgggcttttatttcatagaggccttcactgtcaggttccaaaatttagcgaaaaggtttaaaagacgcgcctaaataaaaaaactaaaaaattgtgaaggaagctaaaaaacttgggcgctaaagaaaactaacctgattggctgctttagacgtgacgcggatcactaaaattaaaacaatcacaaccggttgattaaataaaagatctaacgacgcaaaacaaatacttcccttgtatacgcttcgctataaa

SEQ ID NO: 47085 - DNA, 504 bp, Arabidopsis thaliana columbia
tgacgatatttatatttaaatacttcaacaacaaatatctcatttgtatggtgccactttcacatacttaggacgactaataattaaataaaaaggatttatgtaataacgcaccatattaacctgtaacaagaagaattgaaagtaatacaagtatatatatatagcaacacatttatcgtgtacgatactttaatccttttatctattcttgaaaaaaagttaccaattcttgagaagaagaagaaatcagaatcaagagaaggagagagaaagatgggaagagggagagtggagatgaagaggatagagaacaagattaatagacaagtgaccttctcaaaaagaagaaacggtttgctgaagaaagcttatgagctttctgttctttgcgatgccgaagttgctctcatcatcttctcaagccgtggcaagctctacgagtttggtagtgttgggtatatatatctttgctcctttgaaccaacttttgtgctatatata

SEQ ID NO: 47086 - DNA, 477 bp, Arabidopsis thaliana columbia
ctaatcttaattgtcttctctctgttattgtttcttgcagatggtgtatgtggttgtttcaacaaggataaagatggtcttcaggcagacactgattcttcgattaacatagcggagatactcgcagaagaatccaaattacaggtttgttttatagatctttcttgaatagacaatggaaggctctcacatctaaaccaatctcatttttgtttatatcttttgcttttgactttggtagggctcagggacctctcggctcaccacatcattgaacaatcttgttgatactcatagaaaagaaacgtcctcaaaggtaggctcagtccttggctcatcttcatcagttacttctaccacaagcgaatcagcggctacatcagagagcatagagagcttaaagcaaacactaaggaagctacgcggtctaagcgcacgtgatctcgtaaaccaccgaatttcgatgcgattatagca

SEQ ID NO: 47087 - DNA, 271 bp, Arabidopsis thaliana columbia
tgatatatatgtattgatccctctctctaaagtataaaaacatatctcaaaataaaaatgttgattaaaattatgtctctaaagtatcatcatgattaaaaagttcagcaatatggattacaaccagaaacgagagagatgtgggcaatacatcgaagctctcgatgatgaacgtcgcaagattcatgtatatcaatgtgaacattctctttgcttagaccttgtaactcaaggtatgtatagataaacaaagaaatcaataaatatataa

SEQ ID NO: 47088 - DNA, 517 bp, Arabidopsis thaliana columbia
tatcgatcagttctattgaaacctatagacatgttgcatagctcctccaaacaaaaattatttgttttacaatgattttcttagttagattccaatgatccaaaatatataaaaatatgattattgaaaattatgcggatgactgaacaaacactgttgttacttctgttactgtcctgtactaaacttccattacaaacaaaagtaatggcacatggtttatggattttatagtcactaactacgcgacggttatcattcatcagtctcgtgacaagttttattggctgaacattatatatagtttatatgctcattctacataatagttagactttagatgaaaatggaccacttaaaccttaatgctaatagttacaaatttacaactaaactagtggaatatgaaacatcaatgcgttgcttttggatcacgtggtgggacattgatttattggatcgcttctaattgacaattaaccaataatctcaaactttttacagagtccttggcgtg

SEQ ID NO: 47089 - DNA, 542 bp, Arabidopsis thaliana columbia
attaagcctgatgtcgcctacaagtattatccgacggtggttgaccttgctcaaaactcagacatcctcgtcgtcgcatgcccgttgaccgagcagaccagacacattgtggaccggcaggtcatggatgcattaggagctaagggcgtcctcataaacattggccgtggaccacatgttgatgagcaagagcttattaaagctctaacagaaggccgcctaggtggggctgcccttgatgtgtttgagcaggagcctcacgtgcccgaggagctctttggccttgagaatgtagttctcctccctcacgttgggagtggcactgtggaaacacggaatgccatggccgatcttgtcgtgggtaacttggaagcgcacttttctgggaaatcacttctgactccggtcgtctgagtcatgtgacacatttgggatttggtttcacttcatttgaaaggtttttatgttaacgaactcatgaaaagggtaatttctcttccaaaagaaagttgcactgtcgtatataaggacggatttgacac

SEQ ID NO: 47090 - DNA, 478 bp, Arabidopsis thaliana columbia
gcgtctgttctatacgacatactcgagctcattagttttgcatccaataccagattcataacatcacaacagaagaggtctacaaatgtatactatataacttcggggtcaaaatgaaattattcttaaggtatgggtcaaaaacagaaaacgaaaattacaatttaataagttcattattgagaaatttgcagaaaaagaccttttcgatttcgtctccattgatgatattcgatagttagtggctaatttgctatcatctcactgcttcaattttggctcctcatcggaaatggcgtttttactcaacacctcgatttcatctcacctccgatcttcttcccaggttttgttcttggatcgaatcgaatctcttttaacggatatagttcgattcttatatttatgacaaaatcggttgatctttatgcagaagacggatggtgctttagtcaatcccgtcgcgggttccatgtgg

SEQ ID NO: 47091 - DNA, 491 bp, Arabidopsis thaliana columbia
tgaataacaaagttatatgaacacaatttcatagtttttttttgggtacctatataaattgtgagaaacaaattacagaatttattgaactacatattttatcacaaacttatagtttaataacgaatagtatatataataattttgataaaaaataatatataaaaaaaaaatccctcgtgccccagattaaatatttttctagatccgccactggattgtaccatggaagcgtctgatggagttgtcttaattagacatatgccaatggaaatgtaatgctgtccgacaatcgtcttgatgcttcaagtagcctgtatttttttttccgtgggggttcgaaacttggattcagtcaggtcattctttaatctttactttaacccattgtcacaatgcctctagtaaacaatggttttgtattctgtttgtgctgagacagtataagataagctattgaaattgcaaaatattctaatttgggtcttgga

SEQ ID NO: 47092 - DNA, 531 bp, Arabidopsis thaliana columbia
ggatatcccctatttactttctaatacaatatttagatagttagaacaaattaaacacacataacaaatagtaagttggtgcacaagatacttctctcattaaacacatgacagctgattcacaagttatatgttataatcattttacctttttaagaagtaaagatattttgttattacttgttgaaaaattggtatacatcataaatatatgagtcctttttactttctttgcataggtgaaaagtgagcttccaagtacttttagagccttccgttttcagcaacatagatggtcttgtggacctgcaaatctctttaggaaaatggttatggagatcgtaagaaacaaggtaataataataacaaaaatttacactttttcttcttttggttaacttctttaatctgatcctattactgatctggcgcagaaagtgagattctggaagaaagtgtacgtgatatacagcttcttctttgtgaggaaaatcattgcacattgggtcacattttgtttctactgcgttg

SEQ ID NO: 47093 - DNA, 564 bp, Arabidopsis thaliana columbia
ttacaaagattaaagtctttttgtctctgtcggccttttcaccttttgacctcacgtgaacattattacccctatcacttacctttctaaatggaaaataggttaaggaaaaccatttatcttactttttgtaatttgtttagataaggttttattttatttattaatctgccaattattctacagaaattagttcattttttattttaccttcaaatgttttctacttgttgtcaattgttctacaaacagaccattgccaattactctcaattctcaaataaccaaaaataataatcatttatctttcaaagactaaaataatagtaatgatgataatatcgcaagcacaatatcttcggtccttttgtttacaagaaaagtggtggaccattcgcaattttcattttttctttacgtcgtaaagatatatacttcatctgctcaaagaaaacgtttgtcttaaacccttctccgtcttggggttttctttggattccatacattacatatacacaaaataatcagttattatttctaacttatgtagcaaaaatgggtact

SEQ ID NO: 47094 - DNA, 419 bp, Arabidopsis thaliana columbia
aatgtcctatcctgcggtatttggttggttcaggatagaattcaccgtcttctttggctagagtatgattctgttcaataggaatgtcaacgggtttagctccaagaagtccgcattcagagatgatatccaaagtatatttgcgttgcgagatataaatcccttgctttcctctggagacttcgatcccaagaaagaattttagaggacctaaatctttcatgtgaaagcattcgctcatatatgccttaaactctgcagttagcttggaatcattaccacccacaatgaaatcatccacgtaaaccaaaacatacaaacacgagcccccctttgaaatatgtgaataacgagtaatccgtgtaattattcgtaaatccaaactctgtgagtgcattggagagttttttttttttgat

SEQ ID NO: 47095 - DNA, 603 bp, Arabidopsis thaliana columbia
  unsure (1)..(603): unsure at all n locations
nnnnnnnnnnnnnnnnnnnnnnnnnnnnnncggtggtagtagagaattgtattcaagatttgaagaaggtgcgtaatatggcggaggtgggaatttgtatacatgtggtggtacgtagtggagacttatagtcaatctttggagaaggggagtagtatcgtcgagacgtatggttgtggtaaaagacttggtgaagggttgtagtcaacctttgtagaaggagagtaatatggtggtggtggagacttttagtcaccctttagagatggacaatagtcagaagatgtggggagttgtagacgtatggtggtggttgaaacttgtatacgacctttggagaatgaatgtagtatgatggtgttggggagctgtagacatatggtgttggtggagacctttattcaaccatcgaggaaagagagtagcatggtggtggtgaggagctttagaagtatggtggtaatagagacttgttctcaacctttgggaaggtgagtagtacagtggttatggggacctacaaacatacgatggaggtggagacttgtattaaaaggttggtaaggtgagtagtcaggtggtggtgatggggactgtagatgt

SEQ ID NO: 47096 - DNA, 522 bp, Arabidopsis thaliana
actatgaataaagagcattcccgtgacacgaacgttcaggatgtaagacccgagcgggctagcaagttgtccacaattgaacaatgtagagtagtacttgagtccaaaaagttctgagatgatggcaaagagcagaggaagttgtgcaccgaaagagaatcccattagaattgacgctatatataccgagcctggtaccgggaacgcgatgagaaggtggccagcacaactcaataagaggactaatgtcatcataagcggccggggtaatttatactttgcaagtaagtattccgagacaaagccagagaacactcgaccgaagtagttccatatgctgactagagacacaaaggaactaaccgtgtggttcgggtagccgagggattctcctatctgcccgaggttgtctacggcagtcaagctcgatcctaaaccacagaatgtcgcgacaaataggattatcatgtcggtgcttacaatgcttgtaatattgtgtaatcttccctcttggcggtggag

SEQ ID NO: 47097 - DNA, 253 bp, Arabidopsis thaliana columbia
catgtcgatgtaatatattaggtgtaatccagataggcgtgatgcaaacagaagacatcagttcagacatcactgagtctggccaagcaatcacaataatcagggacctaacagacagcagtgtgcatgcagactacagacacaatctctgagagaccagaatcgctcgaccacaacacgctgatagccaaaggtagtatgtgatcgagtgacacacaggatatgaaagagccacaatcgcatgcacaatctg

SEQ ID NO: 47098 - DNA, 522 bp, Arabidopsis thaliana columbia
gttgttcatatctaagccgctggttttaagtgttctctattattagttcacagaaaaaaatgagaaaaacttttacctccaaacatgcgatcttgaactcatgaggtgctcttcttatcactgcatatcagttataatgtttataagaacaaaataagagatatttcttattaaatgaaaaaagcgtaaagatgctgcaaatgaaatcttgaagggtataaagattaaccttcacggtacaatgctggaaataggccatctggtgaaatgaccacaggaccggttggcagagcttttccgtcctgcaagccagtaaaaaaaccatatgaagcagagagatatcataacaacgggatacagatagcctcacacatcatcatttcagctccttaagcttctgtggttgattaggattagatatggattaagtgcctattcacaggtaaaaagatataactcttacctgcttcagattatttaagaaatttcttgttagatatgcctgaacgatggcacgagcgc

SEQ ID NO: 47099 - DNA, 472 bp, Arabidopsis thaliana columbia
agcattacaatgtctatggagagctaaagtagctcgaaaagagctaaaaaatctcagaatggtaagtttcattgataagagggcactttgagtgattaatctcataagaatcaatctaatctgtccacgaggcaggcaatggaatgcaaaattagaaaactgcttcagtctaagttactaacaagtaacaattaatctttccaacaaaggctgccagagaaactggggcactaaaggaagccaaggacaagttagagaaacgtgtggaagagctaacctggcgtctcgaattagagaagaatcaaaaggtattgtcaacaacattagaaactggtccttggaaaagttccaaatgaagcccatgcttaattgtgtcattaggctgatctcgaagacgccaaagcacaagaaatcgcaaaactacaaaataatttaactgaattgcaagagaagctagatgaagctacgctgc

SEQ ID NO: 47100 - DNA, 592 bp, Arabidopsis thaliana columbia
ccaagttctttaaattctcgtcaaaaatatcaatcctcttgttcttagcccgtagtataggatccggatactcaacaatcttcaaaggcgtctcaaattgaacatcagtagcttcaacattatcacaaaattacaatcatacataaacagtacatgctcatagagtaatcaataatagataagcaagtctgttacctgaagctactttatcgtctttacgcgagacgcgctttacttctgcgcggaccgaagatgtcagaggactggtccggttcacagtagagcagaacgtgaccgtggatttgagccgaccataaccggcagagagagtagtagctcggcgagataaaaccggtaggagtatgcgagagagtggtggagcttggaggaagcagttacagacggccatggctagagaggaagagtaatttcagacgaagcggaaaaactgaattttgtgtggagagtaagtaaaagattgagtagccattttgtaattctgcttttgtttaaggtgcaattccgaaatatttatattttataaggacgatttttaaactaatattctattattagagcttttgtgaggaga

SEQ ID NO: 47101 - DNA, 582 bp, Arabidopsis thaliana columbia
aatatccttgtcccagggccttttagaaacttaagataagcatttgatatctgcagcacgagataaatatgaaatcgaaggcgaaatgcaaccatgtctgagagtacatgatcaccatatatatttgttaccagattaatagagcggggaactcggaccagctttaaagcctgaccagttgcaaactcatcattgtaggttgagttataccatatggtcacattgaaatttttcctatccgtgctcatgagatcatatgctaacgaaacgaaaaaggcagacataatataaatggcataataacgtaaccaccaaggatatataaactaatggaagattttaacaaacctgcaacgatctcatttggcatccccgcaggatttcccctccaactacccttgaaaagctcatcattgacctctacagagttatttctccagagacacaacccttgaacacacttcacggctgagataattaataatatagacacaaacgatcatcaaaatgatttataaaaaccacaagaaaaaaaaaacgcatttcttacgtctagatccatgtcaaaacatgtctcagagg

SEQ ID NO: 47102 - DNA, 540 bp, Arabidopsis thaliana columbia
ccgattttttgaatattggtttaatttgatgttttttttttgctttgatatttgttttttcgtatgtatgttcattggtcaaataaccgactacaacaatattaagtaaaggaaaagaccttcccgagcatcagcatgacgcggactacacctttgaagattattaattagagtgaacaagtgtaattcgttaaaaggtgaagaataataattaaacaaacctttgacgtatgtataacttgttaatcaccaacacttgccatttcaaacttcaaatgcatcatatttcatcataatcttacgtatttatttttattccaatcttacgtttttcaattcaaatattaccatcataaacatagtgtgtggaattaggaaacacaatttacataaaaaaaaaaataacaattcaaacatcaagttcatcattcgtacggactagttctactcctaaacttgtctataaattgagagatatgtctcataaggttatcatctcgccattaaaaccttttttatctcttcgaagaattgcttcac

SEQ ID NO: 47103 - DNA, 561 bp, Arabidopsis thaliana columbia
cgttgggatttcttggcagagactttggaggcagcaggtttgtctgaaggttggatcatgagtattatggaatgtgtagctggtccggaaatgagtttgttgtggaacggggagaagacagattcatttacgccggagagagggttaaggcaaggagaccctatttcaccttatctgtttgtcctttgtattgaacggttgtgccatcaaatagaaaccgcggtgggaaggggtgattggaaatcgatttcgatttcgcagggtggaccgaaagtctctcatgtgtgctttgcagatgaccttattctttttgcagaggcatcagtggctcaggtgcgggttattcgaaaggtgttggagagtttttgcttagcttcaggacagaaagtaagcctggagaaatcaaagatttttttctctaataatgtgagtcgagatttggaaggacttatcacagctgagactgggattgggtcaaccgggaactgggcaaatatctaggtatgccggttttgcagaagaggattaataaggatccctttggggaagtcgtagagagag

SEQ ID NO: 47104 - DNA, 526 bp, Arabidopsis thaliana columbia
  unsure (1)..(526): unsure at all n locations
cgttaattcctgactacgagagttcgttttcgtggttttcgattgatcgctagttttgactttgataacgctgttggaagaagagattggccccaaccgccggttcctccgccggtggagctacggcggctgttgccgatatacgaggagaacggcatattctcctcctcggaatttcctttttcttttctatctaacgaattaaacctacgtcgtttcgagttgtcttcttttttctttcttacttgtgttctgctctgagatttatgtaagcggatgatggtcttttagattcgatggacttttcttccgaatcctgtttggttttttgtttttttaagggaaagtaaatgccagtgggtgttatggtcttttcgacatacgctacttttttttaaggcccaagttggtgagtaactttttttggggtcggttactgttgtggagtaagtctagtatctttactggtttagattattattagataaccctaaggtcagtnttataattataattattattatat

SEQ ID NO: 47105 - DNA, 533 bp, Arabidopsis thaliana columbia
gctagtgcatcccttgaccgtaccataaaagtaagattagtcttcaacttttaagttacaccttcttctttcattcccaatttcccattatgagaagcttaacatttgttttcctgtatctacatcttttcttacctagatatggaatcttggctctccggatccaaattttactttggatgcacatctcaaaggggtaaactgtgtagactactttactggtggggataaaccatacctaatcactggttctgatgatcatactgctaaggtctgtactgagctttcttgcttctttgcaagttgtttgctacatatgtgtgcttgtatgtatctgcatttgtattgtttgtatataggttcgtgcagggttttctgtttgtatattgttcataaatttcttctggaagcaggtgtgggattaccaaacaaagagttgcgttcagactctcgaaggtcatacacacaatgtttctgcagtatcttttcatccagagctacctataattattacaggatcagaggatggaact

SEQ ID NO: 47106 - DNA, 277 bp, Arabidopsis thaliana columbia
attgttgaacgttacgcattgaccacgcccaaacgtatgcgctcctatgcatattgaacaacaacagagttgtcattaattagggttttgtttgaagtgagctgcaagtaattaaacatgtctgatgatttaccagacaaggatactacatcggttgtctttagcccgacagctacaaattttgatgtgatgttgttaaggccttcgaagggagagggaagagacgaattggctccagacaagtttgcggtgagaccatctcttcttcctaataaca

SEQ ID NO: 47107 - DNA, 539 bp, Arabidopsis thaliana columbia
ccatcaaagctcctgctttctggggagcgcaagagtcactgcttggatgatcttgcaatctttactggaggtagtcaagctccatcttcacatatggcatacaccagttttgctttgagtataattttcttattgttagtctgaatcactgggttattctctctgcgtagcaccgtgatcagagatgagatgggcctgagcttagaaaaggctggaaaggaggtcttaggaacagcaaaaagggttcttgttactaaggattcaacactgattgttaccaacggattcacccagaaagcagtcgacgaaagggtttcgcagattaaaaatcttatcgaggtccttctatcatctatgtcttctcattttgttaaccaagtgacttctttgtaggcattataactggaagaacctaaaagaaattgacatttctactcatcatatgtggatgctcctgttttcatatgatctttatgtgtaattcagaacaccgaggagagatttcagaagaagatcctcaatgaaagagtagccagatt

SEQ ID NO: 47108 - DNA, 507 bp, Arabidopsis thaliana columbia
tgaggttggaatctcctcataccttgaggttggaattgcccattgagacctctatccagagttcatgtaacagggcttcatagttgaccgcattgttggagtctatgtacaagatttgtaacatgcatcaaatgctattgccagttggcgatgtaagcaccactccagcccctagcccaacaagcatttttgaaccgtcaaaatatatagtccaatgtgagtatgtgatgtattctctggggagttcgggctctttccattcggctacgaagtatgccagcacctgatatttaatagcttggcgtggacgataggttatttcaaagggtatgagctctatggcccacttggctatacgccccatcgcatcccaattattaattatgtcgcttaaggggacgtcggatgccaccgagcactcttggaagtagtctgtagttttcgtgacgccatgaaaacagtgtaggctatcttttgatagtgagggtatcgtgtcttgcatggggt

SEQ ID NO: 47109 - DNA, 607 bp, Arabidopsis thaliana columbia
aactgagattactactactttaatacttacattaccgacggatttgttgtcagggttagccagattaaactcctttcggaaatcgtccctttaaatcaaccgagagggtaattatttagagcatattaattactgtaatcaaattagtgaagaaaaaagaagaagagagattagtgatttttatttacaggaagacgaagaaaggacttggtggtttcttaggcctgtttggatcctttgttttctttccaactttgttccctctaactttcaatctgagaatcataaaagacgatttcaaaactacggaaacaaattgaatctaagaatcgagattacggataaatataaagatacctatcatcagtgctcctcgattcaacttccgtttggttatctttcatctcgagatctgtcacagagaggaacaaaagtgagaatccggtggggaaaaatagctgactcggagttgactcagatgaggcggcgagtaggagcgagcttacctctgtgtgaacacgtttaggttatttctttttttgaattggggagagcgacgattgagatattctttgatgcggtgttaatttaagatgttggtatttta

SEQ ID NO: 47110 - DNA, 609 bp, Arabidopsis thaliana columbia
atgtggaaacaaaaaataaaactgcaactaagttttgaaaattattgatgtaatgataaatgataatggtaaacatgatttatgcactaatgggtattgtttaatttgcttggtcaaaactcagaactcgaatgaccttgacttgtgcaattagttgacgtttttaggtacagattatttttgtaccaaagccagacaccaaatatatcgaataagggaaaaaataagccctcttggatgaaaaaatacgatcttccaattcttttattttcacatatcaaaataaacaatattgataaaatctgaaaaagaatttaaaataatatgctagctcaatataaaactacacttaaaagtgctgttttcgtgaaccacttatttaattcaaatcatattgcaaatcagaaatcttcttaatcaacccatcatctgctgactcataggaggagccatcgtccgttgcatatttccactccacctatcacataaaaataataaagttacatcaaataattaacaaacgtatgaaagacactaattatttcaatagaaagtgagtcccaaaacaatgcaatttaccaatagaggggtcaagccacgggttttgag

SEQ ID NO: 47111 - DNA, 508 bp, Arabidopsis thaliana columbia
caccctcggcacagcccgaggcgccctcggttcagcccgaggtaccctcggcccccgaggcgacggcactgcacgtcgaggaggagcggacgagcgccacgcctgatcaaaattggcagacccactacttgcaatatctccgccaaggagagctaccccttgaccaagccgaggctcgcgggtggcgcgaccgaagtcgttcgtcttgctgggcgatgaggaagagctctaccaccgcagcccctcggcgatcctccagcgatgcatctccatcgccgaaggtcaggaactcctgcaagaaatacactcgggggcttgcggccatcatgcagcgcctcgagcccttgtcgggaatgctttccggcaaggcttctgctggccaacgcgggtggctgacgccactagaattgtccgcacctgcgaagggtgccaattctatgcgacgagacccacctgcccgctcaggctctgcagacaatacccatcacctggccctttgcagtatggg

SEQ ID NO: 47112 - DNA, 530 bp, Arabidopsis thaliana columbia
gatagaaaaagtttgtactcaaaccaagataactatttcaataattggtcttcacttactcaatcagaggaagttgttgaggagctttctattcaacagactaaatacgaccatcggagtctgccttctttgagaagtaagcttggatatttgaaacaaaaggtgttttctttgccgttttgggacttactctttgagattcttgcgtatttgtagctgccgaagccgaggctgctgagtggaatgagttggagagatgggggaaccaagagttgcagcataatggcactcgcattagaggaattataacttacaaatcagggaacttgcccggtgttttgtcattctctgtaatagagattctcatgatggttgtggcttcgtttgttccaaacttcttgactggtcttttcactggagctggccttattgtacgagcagacgacctctgttttctttttaactaacttcaaagaaagctactaaagatcttgaataaactgatgtctgtttttatgttttggaaaggg

SEQ ID NO: 47113 - DNA, 561 bp, Arabidopsis thaliana columbia
tacgcctctaccagtatcaaccggaagcacagtactttactccaagtatgctggtaacgacttcaagggcaaagatggttccaactacattgccctcagagcttcagatgtgatggctatactttcttagttatgttatatctttgtaatctgcaacttgtatcccaattgtggaaattttttccgtaaacggcctgagcataatctggaataaagacttgagtttgaaaatgtgattttattgctgatttcatgtttttccttctctttttggttacaagcggtttcagttgatcagttaaacttggtagaaacagtgactcacagcaaataaaatctccgtgtaaacttagtggaagatattttacaggtaaatgctctacagtgcccagtggaaacttgagacatgttatcaacgagaagttatattacaaaacgaagaaaaaagaatctttgtctgtgagagaactcttctgccatcaccggttaaacgaagtggctgagttacatcataatgacgtctcaagcattgccctgtcaccgcactacaagcttgattag

SEQ ID NO: 47114 - DNA, 554 bp, Arabidopsis thaliana columbia
aattactcaacaagatcaatacctcaatctatagagaagattcaattaatctataataaatacatcagagaatgaatgagctatcaaactgatcaaagaacacacttaaactcaatcacaaagcacaaaaagagaccaaaccagatttgaggattgtcttaaaacacaacacagatcaaagcaatcaaaagaagaaatcacatacctttagaatccaatcaagagcttggtttcgaacagacaaatccaaatcaccagaaagcaatctcttaacataatcagttccagggcaaaactcaatctctctcaccaacatctctttgattctgacttcactcaaggacgatgaagaagaacccatcatcggaattgatccgtatgcgccaaagttgtcgtctttagcaaaaagttggtgattgtaatcaatcatcgttcgtaaatccgacgccatagttgatatcatcatcgtcgatgtcaatgatccatgactcgctggtttcacacgagcaagattctcaccatggggttaggtttgattgatgagttgtgtattg

SEQ ID NO: 47115 - DNA, 594 bp, Arabidopsis thaliana columbia
tacctcactttttttccgatatacctttcatttctatagtatattataaattttggatgataatgctttaaaattttaacccattaggcggtccaagtttacacacgtaaaaaaaatgattggcgaagaagaaaagatagactttgataggtatgattggtgccaaaaaaagaaaacaaaactactaaaatgacccaaaaaaaatgtataatatacgtgtgactgactaacgagttgatcacattatatattatcttgttcgcttttttggtttaaagttataaaattccttcttaattcgttgcattgatctgtaaagtcgaaacacacaaatctctcgcggcatggcttgcccctctggccttgtctgcaaataaacattgggttatacgcttcagacttaaatcatgattcttttgtcgtaaaaacataagttcatccacatcatttcattactttaaaaaaaaaatttgaactatacttattgatgaaagtttgaaatatgtttgacatcccgtaattgtttttacatctacttatggtcttggtaacacagtattcgttagcgtttatatgatgatattaatggatgat

SEQ ID NO: 47116 - DNA, 1213 bp, Arabidopsis thaliana
ccactgcaaccttcctgagcttcattttccttatcttcttcaacatgacagttcttcaaaacctcttctccggcatcatcatttctagtctccttggatggctcctcatccattttcttcctctttgcacggcttttccgggcttggttcaggaccatctccaactccagaaaagactctccaccaatttcagtcgtcttgcttctggtagaccttgtagttctcttctcatctttaacctccaatccaaaacattcattttctatctgcttgctccttgtcactctcttcctgcttttcacctctgagatttccactgccttgggagtatcctcaacttccaatttgattgatttctggacaatctcactgttcttacctctccgagccctagagttgccttttttctcctccacaacttcttcttcctccgtaattgcactacttgcgttcttccggggcctcccaaccctttttttctcctccacaacttcttcttccttcgcaattgcactgcctgcgttcttccgaggcctcccaaccctagctttgaccaccttctcaatttccacatccaattcctcttctttatcggcgatatcgtccagattctttttcctcgaagccctagtactcttgggcagttcattttcctcttgcttcgacgatccacgcgtgcgctttggtttctcctgaaccgactcaataggatccggatccggatccgaagcagcaagccgcttgttgttcctccttggcctgggcggaagcttatgctcctgcggcgcctgaacaacatcactcccaaagttcaccaaaatggaagtgtactcaccaagcttaatttcgtctccatggctaagattgacgggcgtatctgagtcgatagtgtcagagttcaatatggtgccgttggaagaaccaagatcgtggattatccagttctcggaatcggaaacgatccggaggtgcttggtggagattccggcgtctttgatggcgatttcattaccacggacgattcgaccaattcggatagtggatccgggtttaaaccctagagaatcgccagctcttggaccctgggtgaagtcgagcttcagcaatggcggaaccatcgtgcgtctcggggaagctttgctttgattcaaaataatggaattttgaaatttcggatttatgtcaaactcaaaatcgaacggaacagtcctga

SEQ ID NO: 47117 - DNA, 593 bp, Arabidopsis thaliana columbia
taaatttgttgatggaagaaggaacaggtttttctctaggaccgccaaacggaggctaccggcggaggaggagagcaagggccgtcgaggttgaagtcggagctgagattctctagtgggagtagtagccatcaagaacataattctctaccgcgaatctcggaggttgaagcggctgcagcggctagaaacggtgtcgcatcaagtagtatgagttttggaaataatcgtactaacaattgggacaactcgtcttctcatatcagtttcaccattgatcaacccggaaaacggtccaagaactccgactttttcaccttagaaactcaggtattttctataactttaatttgaggttatttatgtatgtgtatcaatacttttagattatttttttatacaacaaagttaataaatctcggattcttctaggtaaagggagaaaagagtgaatatccccaatgttagttgttttgtgtattattagtttctataggcttggagaaggtttatgattgatctataataggttgacacttgatactaagaaagtatattacatatcgtatgaaatttataccagttaattactc

SEQ ID NO: 47118 - DNA, 467 bp, Arabidopsis thaliana columbia
tccctctctatcaatattgatataacaacaaatctacaatcagccttgacacgtctcttctccttatctcttaaaactataaatatccactgaacattatctttatatctttgatgatgataatacattagacttataacacttggtatgatcactatctagtgtaactttcaactctatttttccaaatgctttactaagaaaacatttgtttcagaatcaagttcatgaacaagaagtaaagataatagaaacataaagataagtataagtaataaatacaataagatttacacaattttacaaataaaagtaggaacaaaaaaaagttaaaggtaagaaatcatgaaacaaagtgttctttactttcttttgaattttaatcacatattctccacacacgaaaacaacccccaataccaaaacaaagcaaaaacacaaccacatcttgagatttcaaaattaca

SEQ ID NO: 47119 - DNA, 454 bp, Arabidopsis thaliana
gaattcaagctccacgtcactgaccttaatgatgtcagccttgtcccagatactcatgatctgtgtcctagcttcttcaggtgatggccaaagaggttccctgaggtttggatcgtaggaaagaagagctccagcttctttcgccacttccattgccttcatgtgagctgatctacatggctctgttatcaaacttattgatccatagtgaaacactttcgcctgccaaataaagaaaaatatgcaacagatctccaaaacaagtaaatcttgttttggagatttgttgactatttgatgatcttcttaattgttttgtaaattttagtttactatatgagaataaacttgtaattaatataattactgatttttcgccaccaaaagtaaataaaatagtgaattatgagcatgagggtaaacctgtacagtatatgacccgaaataggtcggt

SEQ ID NO: 47120 - DNA, 518 bp, Arabidopsis thaliana columbia
atccttaggtcttatctttgtggccactcgagctgatgcttcaactcaagagtttctatgatacaaaaatcgcgaaccgcctcaaattgttgttacatcaatacaagagaggcaactctcgctgtcttgatcatcatttggcgaagaaaggaacttgacaaagaattcgtcttggtagctgtttttaccaagagaatggaattaatgtagaatgtggttcgttcttcacatggttttatttttaagagtatcttcccgaagatggcatccgttgcagagaccgttgaaagtccggctttaatcgcttgtttgacatcccaccaaatgatctaaacatcaacaagaaaccggtttttaaaatatatcaactgacatttttattttgataatcatatagatatagtcaagaacaaaccgtggagatccttgtcgtttatgcagaggttgacaagcattgatctcacactggacagtgctctctcagcagcctaaaggtaagaacgtcagagaagggaaaa

SEQ ID NO: 47121 - DNA, 955 bp, Arabidopsis thaliana
tattcaaataccttgtgtatctcgagaatcctattttaaaaagatgttaacataaaagcaatcctgaaactatattctataacacactagttttgccttctggtatcacctaatggacacaacaaacaaagcataaccaagagacaactatgctgatgatactgataataatggtgataatgatgaatgatgacggtaaatgcataaaaatattcaagtgtgtttgttaccttggtgtaataccgacagcccttttcaccaagagtgactaacaacagcttcaagttgggatgccacaaggtcaacgcggtctcatcatcaatcttgttgcttccagttagaaactcaagctcaacatcgctcaccttgatgatctcagctttgtcccaaatgctcatgatctgtgttttggcttcttcttttgatggccacagaggctccctgaggtttgggtcataggaaagaagagctcctgcttctttcgccacttccatggccttcaaatgagctgacctacacggctccactatcaaacttattgatccatagtgaaacactttcgcctacacaaaaacacaccacatcatgggacacaaaaacgtcaaaataacagaaaaaaacaaaaccaaggttggtaccaaaaacaactcacaaaataacacaacttagatcataaggaatataattgtcaagggacccaattgtggtttatgttttgaatattaactacgacaagggtcaatcattatcaaactatacaagaaaagcaaaagatcctcgccatgaaattagctgtaaaggtaaatgtacacaaaaatactcaacctggcatcatttcacaccattgctataaaaaaccaaactttacacgtatatgtgcacatttacttttaatcacatattcacatcataaacctagctaatactcaagactttaagatagatcaataagaag

SEQ ID NO: 47122 - DNA, 597 bp, Arabidopsis thaliana columbia
tcaaatgctctcgcatctacatatctgaaatccccttcaacattcattgtctcgtggttcccattaacctttaaaatgtgacaagaagttactctttgttagtcctatcaattatcatcattctagaactagcaaattaaaatgtgtagagtgcaaaagcttctctgtgtaaaatttacttatgaaattcaagtatgatagcaatcaaaaacctggaaaacagctccaccattagccttggcctgatcatcaagtgacctcaataaggagagtattgcgatttcatcatcaccgcgatcaagtatatctcctacctgaactagtacctgtattttcattatgatttcacaactcataagcatttaactcaaaagaatcagtcatcataatgaacctcaagatgcgtaatgttgaactctagcagatactgtcaataatatcatcaagcaaaccatttaacacgatactgaaccactaagagataatgtacatacggtgtcttggccgacccactggtctcgtccgtcggagctcaagacgccagccaactgaagtgcgtctctggctttaccagatcgcatgaaggctcaactgtga

SEQ ID NO: 47123 - DNA, 487 bp, Arabidopsis thaliana columbia
gttaatacaaatttgtatatatatataatacaagtacaatcctccttcaatatatatatatatatacgttacatggttggacgtaacgtataaaaatacaaatttgtacttgttatatatatatatatatatattacccctgtcacgttacgtccaaccatgtcaactaaagttatttataatttttatatttgcaagaccgtattgttaaataattatagtatgttccttaatttgcgcactcattatttttgaaccgagagtccaattcagataaaatatttttttttactagaagtcaacaaaatttggaaataaaacaaaactatcaacgaaggatgcatgaatcttttgtattttagtatttataaaacaaataaaacctttaaagaactatataatggacttctagcctaactatttctttttttgttttttttttagtttttttaaacttaccttcattaaaacgaaaagaggttacata

SEQ ID NO: 47124 - DNA, 248 bp, Arabidopsis thaliana columbia
aattgccagccccagcccgcagccgccggttgagcgatcccggctgggatcgcaggcgaacaaaaggttcaaagatatgttcgcggttttctggggcaatccctgggccatcatcctcaacaattaatgtcgctctattccccgacagtagcaggctggtttcaaccgttgaatggcagtaccgcaggcgttattgagcaaattatccagcacgcgctccattaagcgcatatccaacgccgcataat

SEQ ID NO: 47125 - DNA, 561 bp, Arabidopsis thaliana columbia
cttattgtgtaaaaaactaaaaactaacaaaacaatggaaatttaaagttgctgctgaatttgtaaaaattaaagtttccttttgactgaaaagacccttaaaagcaatgcacctgaccaacaattatcattacacaactttaataagctttagtcttaaaccccaccgtctgttgtttcgtacatagaagatattattaggtcttttgtaaaaactatgatttttgttaagacatctgaacaacttgggatagattaactaactaatccaccttaattgtttcttagctttttaacttgtcggttgggtcttctctctttctctgttagacaggtgacaaagctaaatatgtcttttcctttctctctctcttttttgcaaagacaagaggaaaaaaagattactacccaatttttgtcccattattctctctcttgctgtttttgcggttgtgtttttgcagcttcccttacctctctttcacaagaagattcaacacaagaaaaaaaaaatgtttccttttacttttagtcattttgtcatgtgaacttttttttttg

SEQ ID NO: 47126 - DNA, 525 bp, Arabidopsis thaliana columbia
gttagccgggtccatcgtggacctaccctaatggacggttgggattagagcatggaggcgagactttttttcttttctttttgataataacggaggcgagactttgatgataatgaaagtgaaatctgactctataaaattgtagggacaattaaacccaaactatcatacgtaaggaaaaaacattacatatcgtaaacacactctttgttaacaactgcatatggtatatatatatgcctaattaataatttttgtctccaaaaatgtactttataaaataagctaatgaaaacatatattgcaaaagataatcaatacacatgcgtatggatccaggatgtgcgtattggtaacaagtaatatactgtactaaattactaatacttatattgttaaactaactctatgttttctagctgataatgttatccttaataaactaacaatatatgtttaattttatgggggcctccaaatgataagcaataaatattgatgcaaaatgtgtataaatcacacaca

SEQ ID NO: 47127 - DNA, 317 bp, Arabidopsis thaliana columbia
tgtaaggatataaaaagaaatcaaaaaacgttaatgaagtatcaataaaaatcaaacaattaaaatttagaatcaaaacttgcaaacaagaaacaacctgtgtgagaaaatgatcgaaagaaaaagataaaaaaaagagagaaaagtgagaataagaaaaatgtagtcatctgaaaaattagtgcagccagcaatcccgagaattgatggctattacgatttctagtcagtgtcaatggcgcataaactccgtagctgtgcactgtggagattggtggaggaaggaataacggcaattgtcgttggtacgacaccgg

SEQ ID NO: 47128 - DNA, 490 bp, Arabidopsis thaliana columbia
actctgatcccttgaactcgttagttctggggatagagagctttcaagactgtgtatgttttctacaccctattatgcttttatgtttttagttgtaaaggaaagtgattctgatttgtttattaactcttgtatagatataaggcgtttgacgaagtagacgggattgaagttgcttggaacctagttagcattgaagatgtaatgcagatgcctggtcaacttgaaaggctatattctgaagttcatctactaaaggctctaaaacatgaaaacatcatcaaactcttttactcttgggttgacgaaaagaacaagactattaacatgatcactgagcttttcacctctggtagtctcagggtgtaagtatctcccccacttctcttttgtattgatgatccttcattctttttttttttcgtgtgcatcacatgggttgacaccatttcatttgatgtgaagatatcgtaagacgcataggaaggtt

SEQ ID NO: 47129 - DNA, 522 bp, Arabidopsis thaliana columbia
tattaattaacattttaagtaaatatatgttttctgacaattcatactatcgagacgttatcctgacaaggttttgtgattactcatgacatcataaatattccattatttgattgaaactatccgttttatgagattggttagatatatagtagtactatttttaatgtactaccttgattaatgattttaacagacaaacaaataagcccaagaccaacaactaccggctttctctattccggcgccggagactactcccagatgtttgacgcattagaagacgacggaagtctagaggacctcggcggcgttggacacgcgtcttctacggcggcggagaaaaaacggcggttgggtgtagagcaagtgaaagcgttagagaagaatttcgagattgataacaagttagagccagagaggaaagtgaagctggctcaagagcttgggttgcagcacgccaagtcgcgatctggttcaaaaccgccgtgctcggtggaagacaaagcagcttgaacgtga

SEQ ID NO: 47130 - DNA, 536 bp, Arabidopsis thaliana columbia
tttggcagactaaaaacattagtaaaaaatatagttcaatatattttctttaaaatttagagaagataggtgtttaaaaagaaacaaataagtgatcttaagcccaaaacaaattagttatcttaagcccaataataacacatcccatattttttgttttgattataaatgatactcttttttgggctggaagtaggccaaaaatgcacaaaagttaatcatttggcccaaacggaaaaaaccttatcttcctgaaatttgttgtctgtacgattgaacgaatctcatctgagatcccataaaatccgtcttcttctccgtttcaattcaaaaattccgtcagacaattccgttgaaattagctgttttcttcctgcgagtctatattaatacaaacgatcttcatcatcccactcttgatgtgctctccctgcagctgcacgaagcccgtctcctcaatctggttaatattaacttcactgagttttattatttgtttgtataagattatgatctgtttaagtaattgtggtttg

SEQ ID NO: 47131 - DNA, 1025 bp, Arabidopsis thaliana
tcgaattcgtgatttctccggccacattttgacctaatttcaaccaattgaattcgaattcgcgatttctccggccagattttgacctaatttctcaataatttcaggtgtcgaggaggaacagtcatggagaaggagtttggagagagcttttaatccgaccaacaccagccgtgcgtcgtgttatgatcgccgcaatcggaatccatttcttccagcaagcttccggtatcgacgcggtggttctcttctcacggcgaattttcaaaaccgccggactcaaaaccgatcaccaacagcttctagcgactgtagcagtaggagtagtgaacacatcattcatactagtcgccactttcttactcgacagaatcgggagaagaccattgcttctaaccagcgtaggaggaatggtactatctctagcagcgttagggacttctctaacgattatagaccagtcagagaagaaagtgatgtgggctgtggttgtagctatagctacggtgatgacttatgtagctacgttttcgataggagctggaccgataacttgggtttatagctcggagatattcccgttgaggttgagatcacagggctcgagtatgggtgtggtggtgaacagagtgactagtggtgtgatctcgatatcgtttcttccaatgtcgaaagcgatgactactggtggagcgttttacttgtttggagggattgcgactgtggcttgggttttcttttacactttcttgccggagacgcaagggaggatgcttgaggatatggatgagcttttcagtggtttcaggtggagagattcaagagtaagcctaagggtaaccccgagaagacggtaccgaatcccgaggttgagattggatcaaacaagcagtggaaggaaggagacacacaaagttcgtaggaaatttgatcagatatgtaatttgtatggtatgtgggtgtaatgatagacagacaaattagcgtacaaatttagtatgtgtgactgttttcgtaatgagagt

SEQ ID NO: 47132 - DNA, 531 bp, Arabidopsis thaliana columbia
taaagcccatgaggttaatgacgggaaacgacgtagaaagtggaggtcaggcaataaaagcatttccatcgtgatcagatgagaggaaaagtatgagagaaatagaaacggcacactacaaaaataagtacttcaaatctctatatacaaaactcctttgacatatgttttttaatgactggttcatcatttttcattgatttaaaattttaaataaattatattaaaatattatacttaacagactcaatgagtttctcatcgataaagatgctttaaggggtgttttttaaaaatgtaaatctttattaattaaagaaacatacaaagtaaaccatcattaatgagttttgtagtttttcaaaaaattatactatattgaatagttacatgtgattaggagattgaaaaaaatacaaatgaactaaatcacctattggaaaaacaaaacgtgttttttttttaacactgtggcaatttcgtagtttgataaagaaaggtcttcgttaaaagcagggcgagagaatgagt

SEQ ID NO: 47133 - DNA, 149 bp, Arabidopsis thaliana columbia
  unsure (1)..(149): unsure at all n locations
cacatacacacacatacacacacacatacgaatagacacacacatacacacacacacacatatacacagatagacacagagacacgaatatacatacagatnagaacacatacacatatacacatagatatacacacacatatagacag

SEQ ID NO: 47134 - DNA, 458 bp, Arabidopsis thaliana columbia
agctatagatatttgcaaagggatgagctacttacaccaaaataacataattcacagagatttgaaggctgccaacctcttaatggacgaaaatgaggtaatacttgcaacttattattatatatctttctcatccatgtacactagtacgtttgtagttggaatgtacgaatctactatatactttggatgaaatactgctccatgttaatactcaaatagtcaaattacatgtttgtgctgcatcacatatgatatctccttgagcttgcgttatacaggattttaaccatcatattcttctcatttacgtggtgtccactacctagttagttcttgcttctgtggatagcaattcagttgcagattcatatatgtgtcttggtttattgttacaggtggttaaggttgcagactttggggtggctagagtgaaagcacaaactggagttatgaca

SEQ ID NO: 47135 - DNA, 538 bp, Arabidopsis thaliana columbia
cagatacaaccaaaatcgcaccggagcctggagatttggcgatgtcgcgaaggttcatgcataacagtgctatgattaggccggcggagattatgcagatgccggtgggagagagtttgattgagaaactccgtgagattgatggaagcaaggatcggattcgattagacggactttctccgccggagagggagacgagtttgacggtggcggatacgaagaagctgcttagagcggcgcagatcgagattgtgaaatcgaagctaagagaaacgggaagaagctggatgccgtataaggagtttgttagcgtttgtggtgaagcttcttcagatccagatctcggatctaaaatcgcgaagatgcttgatgattcagcaaacgtcatcgttttgggagattcagtttgtattagacatgatcaggtactttcttcgttcttcttctctagccttttagcattttgaaatcgtgcgtttgtctctgagatctctctgagtattgcagctgattgattgggagagataagagagagatt

SEQ ID NO: 47136 - DNA, 613 bp, Arabidopsis thaliana columbia
  unsure (1)..(613): unsure at all n locations
atcttatatccttttatttcttcataacttccttttatctgacattttaataaatatatcttatctcatatttgttcaggacaatcttaatcaaggtgaaaatgaagatggcgaggatggcggtatgttttcgtttctagttcttttacccctaactttaactcttcaaaggaagtaatcatgtattctgtcataccatagaatttctttttctatcttcctttctaaatgtgatgctctctgattgataatttatcttgacatattctggttaacagagcatctatctggtgttaaagttctacatggtttggagaaagtggtggaaggtggagcagttatcttgacactaaaagaccaaagtgtccttaccgatggagacgttaacaatggttagtatctttttgtgctatcttttatttatgctatcagcattgttgatgttaggctctgtcataatgagatttcaactattcttgcagagattgacatgctagaaaatgtggaaattggagaacagaagcgccggaatgaagcttatgaagcagccaagaagnaaaagggaatatacgatgataagtaagtttaagtattgttcaaaggcatttagatg

SEQ ID NO: 47137 - DNA, 531 bp, Arabidopsis thaliana columbia
  unsure (1)..(531): unsure at all n locations
nnnnnnnnnnnnnnnnnnnnnnnctaaagaatattgccgcctatgccgcgctaactcaggcagaaaataccactaataatagcgactatctgtatacgatgggggttagcgccagattgaagaaatttctgcggcttttgaacgtgcgcacgagctgggtatggtgacagtgctgtgggcctatttgcgtaactccgcctttaagaaagatggcgttgattaccatgtttccgccgacctgaccggtcaggcaaaccatctggcggcaaccatcggtgcagatatcgtcaaacaaaaaatggcggaaaataacggcggctataaagcaattaattacggttacaccgacgatcgtgtttacagcacattgaccagcgaaaacccgattgatctggtgcgttatcagttagctaactgctatatgggtcgggctgggttgataaactccggcggtgctgcgggcggtgaaactgacctcagcgatgcagtgcgtactgcggttatcacaaacgcgcagcggaatggggctga

SEQ ID NO: 47138 - DNA, 522 bp, Arabidopsis thaliana columbia
tagtaacggggatcccccttttgcttcaagctttcaacttcaccctcagcattttctgcccgctgattggttaaccttgaatcttcctcagccttgtgcaacctctcttccaggttagatatggttttcaagcattgttgatattgaacaagagcagcttccttgtcagtttcggaactaacaaggctttgcttcagtgctagagtttcagcttcggctctgttggctcgctcatctacttctccagcctccttctgggctagagaaatgcgatcctccaaatcagctatgttttgcagacattgctgatactgaagaaggctggactccttttcaacctctactttgctgagggattctctgagcgtttcgacctcagcttcggctcttgtggctcgttcaataagcaccctagagtcctcttgtgcacgagatacctcagactccaaattagacagtttctccaaattctgatcaaactgagctaagctagcttccttttcagcctgcactttagaaaga

SEQ ID NO: 47139 - DNA, 642 bp, Arabidopsis thaliana columbia
tagaacttaaggaagaggtagatcaaagctcaaaggatacagaggaacatgaacatgtattggagagagacataccacaatgtgagacccttaaagctgaggcggtagatacttcaacagtcgaagaagctgcgatcttaaagactttggagaccaatattagtgaaccagaggcaatgcatagtgaaaccagtctggacctgaaagtggacaaagaacaaaaagaagcagaaacagtaaagactgtcattttttctaatgaggtaaagatatgatctccatagatattgattttatcttgcgttggcactttatgtgtgtggaattgatgatatggttagaactaagacacaatgaacactatgaaaagcttaaaatttacaagttttgactatgttggttctgcctataaagtcttttgattctctgcatcaaaaatattgattctttcaatcaacaggtgggaacttccgatgctcaagcagaggaatttggtgaacataccgaaccttgtagctcagagataaaagatgaaagccagggaagcgaagaatctgttgaggtaaatctaaggagactgttcaggcgaacgagtgaggagaaggatgtgaatagcatgatgtcaatctggagaacagagaa

SEQ ID NO: 47140 - DNA, 545 bp, Arabidopsis thaliana columbia
cttctcgacattgtagtgttttctttttcttacggtgcagttccccaagttgttgttggtgttttactactccactctgttcttcctctcaccacttccgctccatcctggagtcggagcaaatgctgacattccacatcccccgctgttgccaggttaccgatatcgcaacccgtaactgcagtgagggactgaagcacactgtctctcccgcattccctccgatactccagagtcatgcttttcagcttctgcctctccattattcccactggagcactctccaggatccacccaatgtactttacattattcacatgctggttaacatctaggtcactccatcgaggctgaaaatgttcattaccaagccattagagagtcttacaagctggtcaaaggtttgttgaaacatacagcagtaaatactagatacttacagtgagaccagatcgaacatagtcagcagtcttgtcatcaatttttgttaactttctgctgtcctcggcaaggacaggatcagaattcacaaaataaggctctat

SEQ ID NO: 47141 - DNA, 647 bp, Arabidopsis thaliana columbia
  unsure (1)..(647): unsure at all n locations
tgtctctcttcttctatgtaatgaagtacaaagactttgtaactttgttactgttgcaggataaagtatggtgaagtacatcatttcttttttactttttcaaatctgtatactttttcagttgccttttcaaattaatagaatcttttctagacagatttaaaagaaaaccaatcatcaaaaccatacaaactcatttgatatatttaccatacttgataggtatctgccaaaacccattaaaactcgatgaaaagctgttgttaaaacatttgaatcacgagtttattctatttttgatatttttgtaaagcccgtgtttaaggaagagtttatatgtgcatagcacatggtacataacaaaatttatatattttatggttgtacaaaaaaaaaagtgcgtaagagaaaatatttaatagacttcatattattaagcccatacacaatacaattctactacttgtagcaccgaaaccgtatctttagtgctgctctagaatctgtctattgggttcgttgttgggacagagaatcgttctttagcttttcttccataccagtgaattcttatttggactcttgtaataatancacatacataattgataattgtgtacgtcatcaaagatcttttaaatgttgtg

SEQ ID NO: 47142 - DNA, 533 bp, Arabidopsis thaliana columbia
tgatgtgtgcagctgatccacgtcacggacgttacctcacagcctctgctattttcagaggacagatgagcacaaaagaagtcgacgagcaaatcctaaacatacagaacaagaactcgtcttacttcgttgagtggatcccaaacaacgtgaaatccagcgtttgtgatatcccaccaaaggggctcaaaatggcggcgacgtttgtgggtaactcgacgtcgattcaagaaatgttcaggagagtgagtgagcagttcacggctatgtttaggcgtaaagcgtttctgcattggtacacaggagaaggaatggacgaaatggagtttacggaagctgagagcaatatgaatgatttggtcgctgaataccaacagtaccaagatgctactgctgatgaggaaggtgagtatgatgttgaagaagaagaggagggagattatgagacttgatccccaaatcaaacatgttacttaaaggacaaggaaccgactcttggaaatcctctatttaaatttgattgaaaaccattg

SEQ ID NO: 47143 - DNA, 149 bp, Arabidopsis thaliana columbia
gtagtgctctgagtcgtgagaattcaaaggttttggaggaagacggaggaatccgaaattgtctccggcgaacattcgagaacttgtttagtgtttagaaaaaggcccaaaataggcccattacttactttaatttttatattagtggt

SEQ ID NO: 47144 - DNA, 574 bp, Arabidopsis thaliana columbia
atacacaaaccatgtctcatttgattgacctgcacgttgtggatcctctactatacacgccattgtgaattgattctacaaaatcctgttcatgaccaaaagagagacaaacactggctcagatatggctaatccctatactaacttaaagtagcaattcacataagtggcctttgtgatcaagagcagcattaatcaagatatttgaagataaacaagagcattgccataacaacaaatcaaacattcaaagatgaagaaacagatcgaattccaacaagtacagatccaatgtcaaaccaaattatttaactctcacagtccactgatcaaacccgtcagcaattacatcaaatccactacacatacaatcagatctacaactccagcaataaataaataaataaaatcagaatcgaaacagatcttaaatcgtctcagaagaaacgagactgaggaaaaagtaagaaataagatgagaaattgagaggaatctagaagaagttcccttcagggcacgtcgcaaggaacagtagagtatattccgtttgtgagcttcccggcgaagaagaag

SEQ ID NO: 47145 - DNA, 487 bp, Arabidopsis thaliana columbia
aacgtaggaaattcatgtttgaaaagtgaaaatagcacacgtacataaatctcaagtaatctttgtaagtaaaggctcataatataaagattacataattgcatatgttccactacgaagccacaaacaatatgtatgtttctttacgtaagcagggataaagttaagttgcgactatgttatatgctgcaatcagcataagatctgtaaatggaactgtgaatatataaactcacgttaaacttgtagtggcgaaccatgctctcagatggagctgggaacacagagaagaaggatacaagaaatagaaaccaaaccatatgagaccccatctccctctctatctttctcttctctctctatctctccttcttcttaaactgtgtttttagtctttttctctctgttttcgagatgagcgactggccaacgcaagcttataaagggagaggagaaagagatttggaaaccacgagatggaggcgac

SEQ ID NO: 47146 - DNA, 602 bp, Arabidopsis thaliana columbia
gctaggttataccttttatcctctctttatagatttttttttttaattctggttaaaggtctgacgtagacgttgtaagaaacagtttggtcaaaagaaacgagtaagatcttcctatttctagttgactgttggggaaaactgacaccaacatttgctttcaaacgttttcgatttgtccggatgcattttattatgagaaactggtgctattcacttcaatgaatggtcggaattggatcttaacaagagagcaagattatgtgaatgtagcaaataacattagaaacagagtaaggaataagactacaagaggaatcactaaaacacagttataaaaagccaaggagcatcatcgttatccatggacaacacatagcctggaaccactctttcaaagctgactcttgctattgcactcatgctcaaacgcctcgttaccttgttaaaatcagtttaatcgatatggaaaaataattgaatggtcaagaacgtaaattctaatactatggagttggaaactaaaatttgacagatttcaattaattgggtttcttaataagtattagttttttcagtactttcatagtatgatgcttgtt

SEQ ID NO: 47147 - DNA, 567 bp, Arabidopsis thaliana columbia
atcccccatccctaagaataagatcaacagagaaccattccaatagtggatccaaagagaacccagcagatttagattttgggaatacaattcatagagtcataaacaagactgactgaaatggtgccacttattgtcaagagaactaccatgctcttctgattggaacagatctgccatactggtttttgctttcacaggaaacaatcttagcgacctttacctaattgttgtaacaattgatctaaaaaggataattgagctatccacgagagacctacgtcggaatttgaaagagatacgagttagtttagctacctccaagaaagcgacttcctgttcaacgcgggcaagctctgcaaggatcctgtgcttgcccccgccgtgagaaacagactcctcctgctcgtaaaccacagtttcctctcgcatcctctcgctagcaggtcgcagatctgacaacgtcagagagagtctggtcttagtccgtacaagtttgaattgtcgtcgaagtctctctctctctgactcaaatcgacttttccttccatttgcagaaaaatgcaa

SEQ ID NO: 47148 - DNA, 494 bp, Arabidopsis thaliana columbia
tttatcatctgttctatcaacaacatttcctgaacacaacaatttatatatactgtcaactccatccttctgattctcaacaagagaagtacatagcctaatttcatttttaattaacttattaccttctttgttttcagcaggttggctgtccacacagtctttagctcctgtatgtatggtatcagtagatgtaaccactttagattcaagatcctgtgcacaggtcttgatttcagatgcaactgaggcagtagcgacttcttcatctgtatttatcgaagatctttctttgacgtccgattcttccatctcagaaacttctttaggtggtatatcctcgcgcacagcaacaggagtagtctttgtcacgttcacttctgaaccacaattgacttctctgtctatttcaccatcttcaataatggatggagctacatgtgcttcagcgcattggttaagtgattgagcagcttcagattccatggcaacag

SEQ ID NO: 47149 - DNA, 600 bp, Arabidopsis thaliana columbia
ttagcttcccatcagaatgtcttatccaatcttgaagaacaacatgaacaggcaccgatggacctagtccgagttcctgtcaacaacaaaacaacacatatgcacaaacgcatcaagcgccaaccaaagacatcggtgatatcacatctcgaagagaagttttataccgtggcaagttcttcgatcatgatgactctgttcccatccttctcatacaactcatatgcacggcgtgcatgttgctcccaagtctccattgcttctagctgatatacacttaaagctgaagcgcaaaactcttcaaagtctagtttcttatactgaagacaactaatctgcaacccaaaataaatttttattactatcttcacccaccaatgaccaaacatagtgaatatatcacttatgtcctcattgccttaccatgtgtacaaaatccaagactcgtgaatcctttgtagcttctgtggagctcttcaagattgcctgcaatttttaatcacacgtaagaaaccagaaagatacaagtatgaagaaaagaaaagcgaataaaatagtaactcactgttttataattctgcatcgagatatatccgtttt

SEQ ID NO: 47150 - DNA, 509 bp, Arabidopsis thaliana columbia
tgtaacatttgatacaaaaaaagagctaaactaatggaaacagttcctcttaaagactacgtgaagcttcaacattcgttttagcgaaacacagaatcaagtgttcaaatcgccaacgcaaaacctttttaacgagaaaatctcagttccattaactataattaactgattttcaaaacgctatcgttctttgccacactattgccagaaaatcactgtaaactaatacgataaatcaatcagacgttaccggttttatagatttcggatcgtcgagtgtagtcacggtctcgacagagctgagaaaatccaaaacaaatcaatcaaatcttatcctcagaaatcggaacaaattcgaagagattgagtaaaacgtacacgttactgtgtctccttctccaagcttcaaaaacaacaacggatagaaatccgaataagacgatcagcagcagccagaggtgagattctgcaactgttaccagaaactcgattgttgctccgagatttga

SEQ ID NO: 47151 - DNA, 856 bp, Arabidopsis thaliana
aattgttattccaactaatgtcttttttagaatcttcttgcaagaggtcgaaatttaaaattccaaatactctaaaaaggttttggaaatcaaatgatgaatgctgatatgaaatcatcaatgacgacgtcaaagtttatagaacttatatattcttttcgatcatataataacaattttgaagtaatactaacaaatgaagaagaatacaattttgtttttgtcctcttaattataaaaaacactctagaacattgtcactaatggcgaggcggtgatcattaattgctttatcttccactcaactccactcctataaatcccactcgaatctgtttctgatttcacaaaaacacatagtctttgtatttctttttttttatcttctaaagattgatacatcaatggcagaggaagcttgtcaagtgcgtaggatgaagttagggagtcaaggtcttgaggtttcggctcagggacttggctgcatgggtctctccgacttttacggtgctccgacacctgagactaacgccgtcgctctcctccgtcacgccatcaacgctggggtcacatttctcgatacctccgacatctacggtcccgagacaaacgagctgcttcttggaaaggtaacaaatttggtgactgatgaccgctcgtggatttgatttttggaattagggttttaggctgtgatctagggtttaggattttaggcttttagggttcattccaagtatcatttttgtgttctttttggtggcaggctttgacagatggtttgagagataaagtggaattagcgacaaagtttgggatcactgcttctgaagatggaaaatttggtttcagggga

SEQ ID NO: 47152 - DNA, 553 bp, Arabidopsis thaliana columbia
caaacccataatataacgtataagataaataattttgtgagtataaaagttttgcaaatgtgtttacattgagattacatagaaatatgtatcatacttctcgaaagtacctgaaaaatcatcgcaattttatgattatttagtacatgcggaaatgattattaattaagtacacatagaaggagataaataaatacctcaatgcgacaattctgtttgtattttcgcaatcatgtggaagtaatttccaatttgatgaaaattttgactatgaaatcggtatacatttgctccacgtatacgtcattcgctaacataagtatcaatattatcacccatagaagtggtgaacacaaacatagaattataagctctaatattctcttttaaattaatatttcttttgtcaccgttgaatagagacgaacgaaaaatttcgaaggaagattggcttgaaacaatattcgccacaagataagataacttcattaaaataaatttatgacaaacaattttaaactaaagaaaatgtaatcagataattcatatttga

SEQ ID NO: 47153 - DNA, 505 bp, Arabidopsis thaliana columbia
gtgactagaagctccactatctataatccgagaattatgcgatagaaatgtttcaagagttgaaagtatatgattttgaaaagtgagattattattctcatatttaaggctagtagaaggaaagggaattatagtaccagaagtagaagtaagagccataagaccatgttctgagactgtagatgttggactaggattacccgaagaagcttcaggctcttgaacttgaacttgagcttgaaattgtgaaatcatttgttctatctgttgtggagtaaaatcttgtagacttaaattgtttccaccttgtgtgacatgaggcatctgttgaatattagaaccatatgaaccataaggaaccatcataagattaaaagagtagccttcagacagataagcacaattctcggtgtaaacatgagccacatcattagctttctgcattgagttagcatatggcttcatttgcatctgattaggaaattgcatccttggctgactcggc

SEQ ID NO: 47154 - DNA, 641 bp, Arabidopsis thaliana columbia
taataatcatttcattacctaaagatctatcagcacctgctttctatgtctatgatatttcaaaatctcgaatcgaagcatcgagtcaacattgtaccctgcacgttccattctgtttgtaagttgcgaaacaatctccatcttttctgttgattccaggagggagcttaggaggtagttgcaaactctaggcatcagcttgaagttgttatctagagtgtataagaacacctctattgcagcatcaagttgttctcttttgcagagtccatgaatcagtttgacacagctcggaggtgttacaaggatcttcttctcccttaaaaccgaaaacaccatcaaggcctcgtgaaatctccctgattggcataacccgataagccatatcgtgtaaggccctaaagttaactcgtcttttctggtatctaattcaataagtcgtcttaaagctctctcggtttccccttccttgaaacattgttcaatctcattagctgtttcatcatccagacaagatatcttcttaaggtatttcatccatagattaaaagccaccaagacttttcttttccgacatgaccatgtcatgagcgatctgtaaccgcgggactgtgtctaaaatcatctttagcgtaaaagag

SEQ ID NO: 47155 - DNA, 535 bp, Arabidopsis thaliana columbia
tatctctttgtatatttttgtaggacttctccatgacattggccatgggcgtttcagtcatatgtttgagcgtgagttcctcccaaaggtcataagtggctgtcagtggtatgttcaatgccatggtgttacttgataatttgatatgatacaagaaatattactacattgctgatgtacaaacgctttttcgaataaattttacattttcttcaaaaataaaataaaaatatttactactttggctctatggatttattcttctttctagctcttctttatatgccagttcttgtatgcaggtctcatgagttaatgtctataaacatgattgactatatagtcgatacacatcacatagatgttgatgcaaaaatgctaaaaagagtcaaagtaattttctttctcaagactgtttaacttctctcaaatgacctttagtattaaatattttccacttttggtgatgattttctcaaatgtttacttaacactacaggacatgatactagctagtactgaagtttcagagctg

SEQ ID NO: 47156 - DNA, 473 bp, Arabidopsis thaliana
tgaatttaataattcttactacctgggttttgttcagcaagtctatttgtctttatctgttttcttcttaatttgactttaggaatgtctaataatggtggattcaaggagacttattagaattaagctagaatttgagaccaagttttatgtcaagttcaaaaaacctaaacctacttttttcgcaacactccttaaaaaaaagtttctattaaactaaaagaataaggggaaggaagaaagcgaatcgatgtgctaattccccatcctcaaattagtccttcccaaggattgttgtctcaatgaataattgtaggagttaaatcttgatagaattaaaaaaactacaaaaaaaatccagaattttgtgatttctgggcttaaacaaaaggattcgcaaataaaagcgctaatgctacaaccaggccataaattgttaaagcttccataaaagccaactaagcaataaagta

SEQ ID NO: 47157 - DNA, 1407 bp, Arabidopsis thaliana
tcaagtagccttcagagacagggttacaaaggagtgctcacctctttgcgaagaagtccaggtaccaaggcaaatatctcgaaggaatccttctgtgaattcaagaaaaaggaaaacagatttggtaagaattccatattggaaacaaacatccagtttgcaagtttttggcgtttctttagccgttggcagaagttactcacagattctttgacatttatcttcacccagtcagcaacgggtccaacatcaacaacctcagcagccaacctatcatgacaaaaaggaaaccttaacgttaatctatagtaatatgttcaggtccagaaaatgctacgttttcatctcattactgctaagaggcattgaaagaagaaccaaaaaactaatataactatcttagaattgcaaataagaaggagagatcagctttccgtaactgtttgtcagcttcatttgtaacaacatggtccatgctagtttgttgtttgtgtttttgcagccctgaaaaaaccgtttaaaacataacgttaagcaaccctcgttgacaaaatagcaaagccttgagaactattttgtaccaatgcttttgagtttcttgtgctttggggtggaaattaagcccttatcctgaaacaaaaggagaacatcattttacttccgaaataaaaaacgacaaaagaaataaaaagtcttcttctttctacatgtgagtcagattccttggtgcatgaaaaaattctgcataatggaatcacaaagtgcagtaagatttgaagtgaaaccttaacagcaggcgcagtaacctctccagatccaacaaggcgctgcgcatgccaaccttgcatagcacgagctgcagaatctcttcgtgccctgcctgaccctgaaccttgatggctacttggctacagcaaagtccttgtatcagggaagaaaaaaatatggagaagggaaaaaaagggaggcacatgaattttcgtttaggttttctgcaacttatatggtaatttactgggttatgcacacggatttcttatggcttttgtatcgaacacaaaatggctacagctttcttcagtcagattgcagatagttgggtttaaaaggtttagctggtattacataaatgctgaaaaataactcttatgctatcatttcttcagtatcaacgacatttaatcacagtacatgaaaccttcccacaataaattgacaagtagatactcttcattaattttacggtgctagatcgatcttcatccaaactttccatatctaccattatttctatatattattcagtagtgtctaaaatccaaaagccatttttttaggggaaattcatacctctttctcgacactggaagacagaatcaatgttgaaccaggaaggttaagctcacc

SEQ ID NO: 47158 - DNA, 1142 bp, Arabidopsis thaliana
tagtagaaagagtaccatgttgcatctgaacttcaaacggtttagctttaaccatgttaattaattgtcccaatttttggttaatagagaatcaaagtaaagcggacttaccaaagaataacgaaaggctatggttctcaaatatgatttttttattcagaagtaattcgcgggattatgcactctttcctagttatagtgccactgggtgaatccagcctattcttgaaatgaacaactcacacacactccctttccaaaaaagatcaatacaccgaaaactacacttagatttattggatttgttgctaaaatatcggtattaaatccgaaactcccggcggatggccagtgacccaagtaaacgaaagaatcggttaaatttttcatataatctcctcttctagctaaactataaaaaaggaactctgtccttttttttttattctttttattgaaaataaaaagaaatttgaatttaataatttaatttacctatttggatatttgtaaacagaatcaaaaacctattctatttacaaacgtattttccaaaatttttaattttcaataataataatgagacttattagaattaagctagaatttgagaccaagttttatgtcaagttcaaaaaacctaaacctacttttttcgcaacactccttaaaaaaaagtttctattaaactaaaagaataaggggaaggaagaaagcgaatcgatgtgctaattccccatcctcaaattagtccttcccaaggattgttgtctcaatgaataattgtaggagttaaatcttgatagaattaaaaaaactacaaaaaaaatccagaattttgtgatttctgggcttaaacaaaaggattcgcaaataaaagcgctaatgctacaaccaggccataaattgttaaagcttccataaaagccaaactaagcaataaagtacctcgtatttttccttctgcctcaggttgtctcgcgataccttcgacagcttgacccgcagctgtaccttgaccgactccaggtccaatagaagcaagcccaacagccaacccagcagcaataaccgaagcagcagaaaccagtggattcatcatattttcctcatactataatatagtaatagttaatgataca

SEQ ID NO: 47159 - DNA, 732 bp, Arabidopsis thaliana
catgtctctatataagaagctagttcagggtaggttgcttagattgatgcaatttgattttgtgaactaatgtaagagactgttcctacatgactgagtgtgtaaacaaatcttaaactggagaataaacaagtttgatgtttttcgattcactgatgaacataatgatggtgcaataagtagaaaaacaaccagaagtgactcacaacatttgctatgtcccttcccgctgtcttttggacactttttccgagagatgcaagacgttctagttcttcctcgctcagacctgtttactatatattagcatctacattctataggacgtagaagaagtctagtgcagttgatccttggcgaaaaaaatttataactctgatctaagatcttgaaaccaagttggttttaggatatgtaaacggccaaagttgactaggagattagtgttaacaggttcgataagtccaaatccaagaatctaaaacattatgatccaccagaaataactgacctatgcaaggtactccattaaggatagcaattgttgcagggattgctccattttctctcacaattgactccacctcttttgctgtttgcagattttgagggtaaggcatccctaaaaatagccagttaaagagaaacaagtgaaatcagaccaagatccaagaatataggcttatttaaaaaaataaaacaatgttcaataaaaaagtctacagaatgcaa

SEQ ID NO: 47160 - DNA, 523 bp, Arabidopsis thaliana columbia
cagccgacgaacgagaacgattaggtccatactcgaagtttctgactgagacagaggatcttcttctccttctttgttgtgagagatggttcgaaaagtgaagtgtgggtggcgagaaggatcggggaagttgtaggaagtgtggaggatcgtcacggagaagccacggtggtggaatattccagcgagctcgatcatggggttgaagtgccctggaaatggaagagggaacatgattattctcctcccttttctctcttccatttttcttactgactttgtttttttttctgtatttgggagattttttagaggaaaagagttttggagaagtttaattaatttgtcgttaagggtttacggttacatgagcatagcttatatttatgaattatgacactcatgatccaattacaaattgacagctgtcatagcaacatgtgaaaagagaataaaatcgtttgctcgctgactttgacttgtgagaacttcctgccaagattgttacctgcatgcacaaatt

SEQ ID NO: 47161 - DNA, 1544 bp, Arabidopsis thaliana
cgcatcaaatacaaaattatgtggatttacatgtttgtattatattttactactattttaacggtttacaaaaacatgtaaaccaaaccataaatttcactaatttcaattatgtacgattttgagtcttcattacttcttatcgtttctttcactcttatagtcttatctcacaatccgtaatttgtgcacaattaatgaattcaatgttgtattttgtcgtattaaatatggattttgaccaacataaacctgattttttagtggattattttaaaatatatccacaaaatattccttcgaataaaatcccattctaactatatccataaaatgcccatcccaattgtcgagacagaatcagatatctaaaatgacacataataaatgtcgcatattacaccattaaagtacggtacgttgacctcctacctgactatgaacagctcatcagacagctccctgtgccctcaagtaggggtgtggataaattggtctggttaccggtaaaatctggagagtatacctcaagatcaggttacggggtaacatccttgacagtgctaccaacagctcaggtccgctttaagtggcaagcaaacctttggaaactccacactatgccgaagatcaaacttttcctatggaaggcggctgcaggagctctccctgtgggttgcacaactcgtaagaaggcatatatcatcaacttgggattgtgcacgctgtggggctccggagacttccacccacatgctgtttcactgtgattttgcggcacaagtttggaacctagcgcccctccaattgggtcacatccctatcggtacccctattttggaagctcttaacttacttaagaaaaccatcgttctccccccggttgggattcatacagcaaccctcttcccctggatctgttggcacatctggaaagccagaaatcagcttatcttccaaaattctcatttctctgtgatagagactgttacaaaggcggttcaggatgccttagcgtggcaatccgcccaattggcgctcccaaaagttcgtgtagcgaccccccgcccaaactccacaacaactctgactcatgattttctctgctacgtggatgcggcttggcaacaacagagctccctcgctggctctggctgggtgttccaagcaacctcacactcggagaaagaaattaccaccttctcagccggatgccgtcggttcccctcgcccttagcggcggaggcttgggctatcaaatcggcgatgctacatgctttacaactggaaagatccgatctccttgtgttatcggactcaaaatccatagttgatgctttgaactccaatgtctccctcaatgagatatttggccttctagtggaaattcgatctattcgaaacagattccgctctatctcctttcaatttatccctcgcttagttaattcgattgctgatgctgcggctaagctctccctttgtatttctggtaatatcgggcttgacccgggtactcttgtttttgtttgatttggaatgga

SEQ ID NO: 47162 - DNA, 578 bp, Arabidopsis thaliana columbia
ctcattcaagctcaagaaacctaaattttaaacgtcccttttgatttgcctataaatacacgtgcctccacacttctccaattaaaaaaaaacaaagcaacacaaggacaaaaaattcacaaacatcaaacattctccacctactgcccaaaaacgacagcattccttttccagcaacaaagaaaaaacacatttccttgccaatggcccgttgtaccaaccttgttaccgttttcctattatgggctcttttgatgttctcatggtgtaaagcttcaagaatcagccctaatgtatatgaccattcttataaaaggttcaaatccgatagcttaatcaagcgaagagaggacatcacgggattgagaagttttgtaagagcctctttgcggactccaaccaccgttagtgtttctgattttggagctaaaggagatggaaaaaccgatgacacgcaggtgtatatatacacataaaaatgtttttattttatttcatcgtataattaattagaaaactgtttttagtactaatgatccatgcatgcattgtttaggcgttcgtgaatgcgtggaaga

SEQ ID NO: 47163 - DNA, 962 bp, Arabidopsis thaliana
ttggctctatatttttcatctaatagtatattggtagtcttgatatctctgtggtatattggaatcgatgcagctgagtgcatgtatgaaagagctcccgctatctctatagctatacgaagacgtacttcccaagtcatcgtgtaatcattggattcagatttttcatgaagacgcttgaacagatctccattaggaatatattcgtaaaccaagacaggaacttcagtctctagacaacatcccaagagtttcacaatgttcctatggttaatttgtgagagaagtacgacttcattgatgaactcttccatcttgccttcacccacaactttcgatcttttaaccgcaacgattctcccttccgccaacattcccttgtacacagttccttgacccccttgcccaagcaccctgttcatgctgaagttatcagtagctttcttcaactcttttgagctaaatatccttgacatatcaacatttccgttctttgtaattagttgttgtttcaacagcaagccaccattacgtttgaaaaagtttttgttgcggatgatcctcgttcgcttcttaatgaatttgtacaaccccaagattccaaggacgaaaagcagcactcctagacttataagaacacctacacaaacgaaggtaaacttcttttatgttctctgtcttagagtctcgtaaatgcaagatgctactttaactcaccttgaagcacagaggctttttccggtttcgttatcttgggctcgcagctatgtgttccaggcatgttcacacaagtcccttctccacaattgtggtgtccttcacattcgtctatgtctacacatttttgaaccatagttattcattgatggtttgaacaatgaaaagcagcaacgaaagaagaagaaaacaatcacttacctatgcagccatgtcgaaggtatgggttccctgtgtagccatag

SEQ ID NO: 47164 - DNA, 502 bp, Arabidopsis thaliana columbia
gtaagtatcgattcaacagctttgtatcgattctctgtttttcttttttcttctttgttaacagtttgaaagacaaaagaagaatgagggttgatttttctgagccagagtacaggaactgttaccattgtcgcgattcaggcatacttaatactcaagaatctgaaccgaacaatgtgattggctcatccatcacttcagttccggttagttccggaccatttcaagctcttggacatgcttctgctgctattggttcaacctcaacatcatctccagttcaaagttcttcatcattcagctttggatccgctcctgctgccaccacatctgttggtgtgtctagtacttccacacccacacccattagcttcctcccatttggttacgtcccaccacctccaccgagttcttcactgtctgggccagcgcaaaatgtgccttggagtattagtgcttattctactgcagggcgcggtgttgaatgggcctgggccagacc

SEQ ID NO: 47165 - DNA, 613 bp, Arabidopsis thaliana
ttaccgcgaaaaagaacgccataacaaatttcttcatatttgtatactcagcctgaaattatcttaaacattagatgtttcatatttgtatatacaatttcaacatttggctaaagataattttttttcttttatctaaagtatatttacctggaggatacaaccgccaagacccatgccttcgaacatttgatggaagcaaagagctgctataagtcctttaatggtgcaagtgtcactagttgctcctagagataatccaatgaccaccgagtgaactatgatcccaagttccaagacctatatatccgtagaaagttagatatacctatgtattcggtaatatgtcatttaaaatacaatgatattcggtatgtatatatgtgcgtacgaaccatggcaatgactcggtatcgcaagagctgtgcatttgacgaatcatcttcttttattggtaaggtaacatcatttgcggggccgtgaccatgaccatgaccatggggcatgataccaactgcgttcttgctggtgtataggctcgtggccatggagtcaatggctagagtgattagcccgataacatagcgagaaatcaggagaaaggaaatttatg

SEQ ID NO: 47166 - DNA, 273 bp, Arabidopsis thaliana columbia
aaagatagttagacagaaaaattaaacaagaaaatacatcggatatacaaaaatggataactagccatcagatcaaacgagctgtagataagagaaaatgaaaatcaaacccttacctgcaagatcttgtcaatgaatggtacaagctttgattttaacaatttcacgactctcatgaacaagtaacaagctctacggctcacatagaaattctggtgatgcagacccctatcatcgaggaaagcaaccagaacattgggaatgtactgcgag

SEQ ID NO: 47167 - DNA, 1245 bp, Arabidopsis thaliana
  unsure (1)..(1245): unsure at all n locations
tcacaatcttcatggagagaatgataaagagcttggttcttatttacagcttctgcggtatcgtattcttgcaatcgttagtattccttcactctcgtttttttttttttttgtaaaaataaaactctcttaacttgatttaattacaaaaatgcttttttaacattaaaccagataaattgtttttttataaatgctcacattgagaaacatttgtgttaaaagctaagtgaaattgttataacttggttcgtttataggaaaaaaatgattattcacattatcacatacgaaggcattaatatgccatttttctaaggttaactggtaactcaaattttaattgtaggttgcatagtgtaaaacaaaattgttaccctgtttgttgtgttagttagaaaaataaaaataaaacacagttctttgttaaaaaaaaaaggaacaagtaatttttcattttaatttattccactaattatatttcatcttttgcttttatttgagtgacaaccatttacactaattatgatttaataagtgagtagctgaaatgaataaaatggaataggtattggagctaggaatagtggtgcagtcgatagtgataggactatcggtaggagacactaacaatacttgcaccatcaaaggactcngccgtgcgctttgcttccatcaaatgttcgaaggcatgggtctcggcggttgcatccttcaggtgagttcctcctttccacttaatttattagtcggaccgagtaattactcccatccattctggttctataaactaaattccacatgatttttttttcttccttttcttggtttaaacacaaaaagttccacatggtttgatttcttgaaaaacgtcgtgcttttgaatgaattgatatgaaatcatatatatgatgagaacttgataatacatgtaggcggagtacgggtgggttaaaaaggcggtgatggctttcttttttgcggtgacgacgccttttggagtggttctagggatggcactatctaaaacatacagagagcatagccctgaatcgcttatcacagttgggttgctcaacgcttcctcggcaggactactcatctacatggctttagttgaccttctagcatgcgattttatgggtcaaaaaatgcaaaggagcatcaagcttcaattaaagtcatatgctgccgatttgcttggtgctggtgacatgtcagtcatgccaaatgggcttgatgatg

SEQ ID NO: 47168 - DNA, 520 bp, Arabidopsis thaliana columbia
actctagatatttgttttatttttacttgatattaaacccattttggtgctgatgccttttgtttctgcttctaatttttactcgttattgatgatgttcacagcttggaatttaaggtcacgtagcaggagcattactcaagaagaacttgccaagcgtcctgacccattctgtctaccgaatctccttgatgggcttgaagatggtttatacggacgtcttgctgatgatgccaagagactttgtacgctgatacaggaatatttgaatggttccatctcattggaagatatcgaagctagacaagacaacaaacgagccaagtcttctcataatcttatcatcgattcagatgacgagttgcctcaagaatcagttactcaaattaatgtttgtttattatatggtttcatcttttgttgccaagtttaaatctttatgatctcgttttgcatttttcagcctctagaaaaaaggctgaagaagctcaaggaagtgattgttgtgaagaatggagat

SEQ ID NO: 47169 - DNA, 486 bp, Arabidopsis thaliana columbia
tcttccttgccaaatttgtgtttcagaggatcaatacttgttgtgtgaagatgtctcagctttgacttgaagttttgctgatcatatctcctaccaaaaatcctatgaggaggcttagctagtgcatcaattatacccttggaagccaacaaattcggtttctggagataaactcgacaaagttgcttcgttggaatcactgtgaaaccagaattagactccttttggttaaaccgttttggtggttgattctgtttctcaacaactctcagcttatcttgaaagagtccattaaaacgcatcgatctctcaaagacagaggaggatctaatttccttagactccatttcttttgagacctctactcttcgagaataaccagaaatgaagtaatctgcagaaagatgatagctttatgaaataacaaatcagagaaatgtcaacaagttcaatctaggagtaacaaatcaagagcaacccagaaaa

SEQ ID NO: 47170 - DNA, 483 bp, Arabidopsis thaliana columbia
taacactatcgagaaagaaaacggagaaaaaaatagtatttaacaaacgtcacaatttttttttattagaatcggtaaaatctacacagcgtttagctcaaccctaggaagcttcacgccggtttctcaaagcttcgctatttctcggttctctactctctctctctctctctctctctctccgcgccgcgctctctctctctaaacttagctcagcctatcgattaattcctctccggaataaggtaaagcttcttcgattctctcctcttagccacagtatcgcttcgtcgtctctcttgtggtgtcagtttctagaaggattgtgttgtgccgatccctagaaaacctgatttgtttccgttcgaattgtaggaaatttcacctcgatttatggactagtcggcagaattcggaaccaattctgaaccagacctgaagttttccaatggggcgcaagaagccgagtgctcgatgtggaga

SEQ ID NO: 47171 - DNA, 516 bp, Arabidopsis thaliana columbia
gtacatattatggttttgtattgcttatggttgtgtcaaagatgagtttacgagtattagaagtaatgtttaaagacttgataaaagaggaagcaagagaaaaattaagaacagaggatatatagagagaagtgatgaccaacataaacaattcagtcaccgtcataaaaaatcagtaatagaaaagaaaaatacaagtttcgattaaaccttcgtacaaataggaaggacaatttagaagaacgaatcagaattgttggcataaaacaaaaaattacataagcacccaacgatatcttagtttttcacttcacccccaaacttttttcgacttaaacttcacttttaaaacttttttaagttccacagcatgcagatttctgtgtggcctgccctgctccagctgcttggtccgtttggcttatcttgatcgttgcaggctgcaattgaccacgtaacatgaatgatcaatgcgttttcagacctaacaacgcaaagatgtgaaagagagagatg

SEQ ID NO: 47172 - DNA, 552 bp, Arabidopsis thaliana columbia
aatgaaagcagaagaaccccactacaagaacagaccaaaacaaaacactcgaccaaatgggaccataaaccaacccaacaaggaaagcatacttcaagagatcctttgatagtacatatcgaagatgcccgtggcaaccatcgataatctaatcctcctctaaagatgccaaactgcctaaaagtaacagaactcctatgctaatcttcataatccgcaaagacagaaccacacatggaacctcacactttcttccggatacggtgacgtcggagacaaggcgacattttacacctagatagaagcaaaaccataggaccagatctcgatcagatctgaaatgcagagacaaggagcaaaaaatccacaccgggtaacaccattctcgaagaatcaggagcagcagaagatcgaaccagagtgaaccaaagaaatctcccaagaatacaaaagaacttgtaggccagataatcaccacaacgagcattcgttcattcatcaaaaagcataaaatgggaatccatcttctatcaaaacagccagagacaaacg

SEQ ID NO: 47173 - DNA, 471 bp, Arabidopsis thaliana columbia
  unsure (1)..(471): unsure at all n locations
ataaaaatggagtgaaactaactaaccaacctttgggtgtttaatattaggtggcaagaaaggatacatcaatgtctcaaagttgggtctccaccacatcccaatacattctcctacctacaacaatgttgtaattagagagaccattcttaagccagaaacaatcagatacaaaagcactttaacaagaagccatagttcctacctcataacccgaaacacccacattttcgttaaccgatagctttgatgctagtttccgtttaagaccttcaatatctagaagattaaggagaaacatgactttagcgtttagaattgagacagcgatatttatgcataaagatgcaaggaagcagcatactaaacctgattctccaggtctcaaacgaccaccaggaagcttgnaaatggagtttctatattgaagaagcaaaacatgaggatgcttgaacaactcgacctgatgtg

SEQ ID NO: 47174 - DNA, 918 bp, Arabidopsis thaliana
  unsure (1)..(918): unsure at all n locations
tgatgatgatcatctccttccttcactttgacaagagcacttctttggtatcctggattcggtagtcttcccttggcgtccttaagaaccgcataagattcttgaatctcggagacagtgaaatccaaaagatcaaggctctcggaagaaatacgcaatggaaaacgtgagagagggttgaggagatggaatctcccggagttggtgtccatgtcggatttgattatccagcccttactcggagaggaggagagagtgactcggaagaaggctgcacgtgagaggaacgcgccggggttgcagctgaagacatggtcctctagaagggtctcacttggggcgatggggttgaagtcaatgagagggcgcctatggaaaggattcttcttcacgccggagacagaggagtgccatgatacacagatgctgctgaaacgcttgtattcaactagggagaacgatcgggcggcgataaaatggaggagctcctccggtaaggtagaccaatctaccattttgctactttgattgtttgtgatttgtgagtcacataatatatatatactacgtatacttacctaaaagtcctaacattttaggttccaaatggttgtgtttttaacttttaaagaaacaataaaatataaaatcaaaattcactcattcccataaataagaatgaatacattgaacctaaatgaaaaatatgagttctaatttgctaaagaatattaattcatattctattcgattttatccattaatgattttcatggttcatcatttgttgaattgaaatttaatagcagtacttaaagagtaaatactctctccatttgtagacaaaaatattttgggttgactccctaaactacaccanaacagggccccagatagtgtttgacttaggcaaaaaga

SEQ ID NO: 47175 - DNA, 640 bp, Arabidopsis thaliana columbia
ggtaatagcatcgatgtgtacttagaacctcttattgaagatttgaatcatttgtggaagaagggagaggtcacttatgacgcttaaagtaaaagcacattcacgctaaaggcaatgcttctttggactataagtgaccttccggcttatggaaacttagttggttacaaggtaaagggtaaaatgggatgtcctatttgtggtaaaaacacaagatagtatgtggttgaagtttagcaggaagcatgtgtatatgagtcatagaaaaggattggggccaactcatagttatagggataagaaggcttggtttgatggaaaatcagaacatgggagaaagggcagaattttgactggtcatgaagtttctcaaaacctgagaaactttaaaaacgattttggaaatgtgaaaggatctgggaggaagagaaaaaggactgttctattatctgatagtgattattcatcaagtgaatccgaagaagaagaagaagtagaagttgacgaggatgagttatcaagatggaagaaacgatctatgttattcaagctgcgttattgggacggatgtatagcttaatataattttagaattgataaacggatatttgtttaatgtgaaccttataattgtattgta

SEQ ID NO: 47176 - DNA, 585 bp, Arabidopsis thaliana columbia
tttatcaaatctgttcatatctaacggaacgctattggatcgaatgacaaagacattgttgatctgaacatccaaaggctgctcagcaatatgttgagaggattgaagaactcgtgggtgtgcccattcattacattggtattgggcccggtcgtgatgcccttatatataaatgatttttagtgttaagccttttttggttcctccacaaactcaaaaattgatcaagtgtcaagttactgagaattattactctctttggaatgactagtgtatctgttgcattgtttctaatattggaatgaagaggaattctgtgcttaagcagtgaggttgctatattcataatgtttaagctttcgtgtttgatcttactctattcgttccattgataagagatccttttatgtcttaaacctgagaacagcgtgaaggttcattgtagctgctgtttatgcttgttgaatatctgtggatgttactatacttagcaaatttcttcagattttgatcagtgctggcaggtgaaactttctggtgggaagttatgcatcgtgtgatatgcacctaggttatcagttttgt

SEQ ID NO: 47177 - DNA, 560 bp, Arabidopsis thaliana columbia
tttaacaattagatcatgtcttctataaaggtaaaagagaaatctgacaaatgaagtgtaagtgtttataatgtttgtgtcccaaaacacacatcccccacaaaagtaaaaacaccatcaaaactttctttctttcctcttatcttcacttcctcttgtaaaccctagattctcttgttcctcttatggattcattctctttttgtatcatcatcatgatacttctcttatcattccaccaatctaagtctcaattgattcaatctacacatcttcttgatctcatgatcagagattacaccattagaaactttaagctcaatttcaacacaggcgtcactcagaaaatctatctcccttctaatttctctggtatcgatattgacacggtcaagttaaggtgtgggagtttgagaagatatggcgcaaaaattggagagtttcacatcggttcaggccttacggtggagccatgtccggagagagtcatgctaattagacaaaactttggttcgaattggtcttcaatctactctactggttataacttatccggttac

SEQ ID NO: 47178 - DNA, 434 bp, Arabidopsis thaliana columbia
tgaggagaatagaagctgaagaacagagcctagatgcagcggagatggtggtgacaagcacacgacaagagattgacgcgcagtgggggctgtatgatggttttgatatcaagctggagaggaagctcagggttagaagacggcgtggagtcagctgccttggtagatacatgccacgaatggtggtataagtcctttcccgcctctcacatcatctgatagatgacaacacgattattatcaaattattttataatcacatagacactgcacttgactggtgcagctaaaagaacagcaaatttaattaaaagtagagtcattcaccaatctgacctgtctttgtggcattaggttataccccaggcatggatttcagctatgtcttgacacaagattcacaggaacccgatggtgatcttaagtcgctaatt

SEQ ID NO: 47179 - DNA, 432 bp, Arabidopsis thaliana columbia
tgtgctctctctaaagtaataatacagaatatccactggaaatccaattaaatcaatgttaaatcatttatattgctattttgaatttcaatattaattgtaattaattaatatccatgctaaaaatttttttaaaagaaataatttcatacatgtcaatatctaattgaccaataactcacgtaaaattaagatatgtaatttttgattaatttttgatcgctatgcctcttgcatgtgaacccatgcataaaccatttgagatttatatgatactccatgaaagaagaacaattgggagttatctcattagtagcaatttaggtcattaaccgaatcgaaccaaaaatttgaaaataaccgaatgaataccaaattctataaccgaaagaaccaaaatattttggatatatgaaaatattcgaaatataa

SEQ ID NO: 47180 - DNA, 139 bp, Arabidopsis thaliana columbia
gtgtgggactgggcctggcgatctgcaaggccatcgtcgaggcgcacggtgggcgatcagcagataatgcggccgccggcggtgcctgcgtgcgcatcgagctgcccctggcacgccgccgaagagtcacgagcgaggg

SEQ ID NO: 47181 - DNA, 576 bp, Arabidopsis thaliana columbia
gcagattatattctgtgatggcttcgaggtggttccttcgcccgagataaacgatctaattctttacgaatgcgaccaatctttgacaaatagcgaggtcaccaccgacgaagaagaagacactattttttccggtggtgatagttcatcgggacttgcagctgaagaggattcgtctggagataaacctctctctttctacattgttaagcaacctgtttacgataatcccgagattaaagccaagatcgatgaagctaatcaggagatttttcgttgtaatgaactccgaatcaatgtcttgagcgccaagaaatccgaactggctgaggtttcgtctttgtatactcaaatggagagtttggttcctcaatctgaaggatatagaatggttattgaagagaagaagaaggagtttgatactctacttgaagctctacggaatctccggtgcactactagtgatcaactttgttttacaaaggaggaacttgatcatcttgtaatacaactgttttatctaaccattcgttaaaattcggttaggtttttgactgtagaagtgttttggtgtgg

SEQ ID NO: 47182 - DNA, 412 bp, Arabidopsis thaliana columbia
gaccattaatctagagatcatatttacctatcctgagtccatgtgtggactgaggaggattatacattaatcatagaccatatatataatatacacaatcaactaatgaaagagggaggaatggtatcaacatagggacctttttttttccatgttagagaaagttaggactacacgcaaagccctacgtgcactctttcattattcctctcatctttagcccccaacagtctttgacgacccaccttgcccttttgacccttctctctcacgcacatgtatgttattaattcaaatggttcttttatgcttcggcatttatcatcatgatatacatacatatcgatcgatagaggactcatgaaaatcatttatgtagtagagaatttacagatatatatatatatatata

SEQ ID NO: 47183 - DNA, 244 bp, Arabidopsis thaliana columbia
catccttgtaaattacaacatactttaagggtaatttcgtcttttcacaatcagacttcttttttcttcaccctgttaagtgcttcttcatttattactccaccagaaaaaactcagaaccagaaaaaggaacaaaacaaaaataaagcgcgaaattagttttcaccggcgagattttttatcctctctacgagataacacttagaagaagaggcagttaaaacagagagacgacgtcgtgtta

SEQ ID NO: 47184 - DNA, 853 bp, Arabidopsis thaliana
cctgaccttgaacccatttatacatacgaagggacttatgatataaacaccttagtaacagggagggaagtaacgggtattgcgagtttcaaaccggctacacgtagccgtctctaagttaaaaggttgtccattgtttgttgttgtctgttggttagtattgatattgtgatgtggggtttacatctacaaatgtgccaaataatctgacccaaaaagatttagggtccaatgggggaataatatcgttgttgcaaaacttaatccagttattgcttcttgcaatatggattcgtcttgtggcttgtactgggggaaataccatttgttaccttttattaatcaaattgccaatgtcaataacttttggtgaatgtcaaagtgtaattaagttgtgtttctttgtttacactgaccagagttcggtttttggacggttggttttctatttcgcaagaatttaccaacctgtaacaaaaaaaaatgttttggaagaaatcttcttatattattttgggttataaaactgattgcattgaataaagaagttcagtaatatagacttttagttcgatttttggtttgtgcggacgttgaacgagaaagcaaagagggacagtgggtgtgggttttgggaagaatgtgagacgcaaataatctcaattcaaatggaatcaaattagatggcaaagacgaggccttgaagtcaagtgccttccattggctttgatcatcgccacaactcctgcagtcactccagcccacaaagccgacgccagatactgctgcgtgtttcttcccgctgttttttccacccaacacacacacacatacacaaacaaatcaatcaaaa

SEQ ID NO: 47185 - DNA, 554 bp, Arabidopsis thaliana columbia
cattacattaacaacgataaatgaccctcacctgggctctgtatcgccataagctaatagaagaagtgtcccacctttaaactgcacagagtcaagcataactggtagtgtcttctcaacataaacagcaggcagcttctccagttcatcgctcaagtgaggagcattcggatctgcccttcctgttaacttcttagaggaaccagttaaaatattaaacactgcttcttttaattttttgttccgtggccagctgggacgccaatggtttgctacaggttgatgctcatgctttttgaacgtaaagtcacgaggctgatttccacttcgattaccatgtggaacatcgtcagtattctgattaacaacattcatagatatatcccctctctgactgcttaaagtctcagattcagaagaattcacaatatcttcaacagatgggcttcgtttagtttgtaagagtgcacagagtctatcaacagtcataaggaatggatcacatgatactgtgaacttgtctaacgtggaagccttttttacccaaggagcct

SEQ ID NO: 47186 - DNA, 593 bp, Arabidopsis thaliana columbia
caagactcttcttctctcactccattctacgatccacgtcaccgcaccgttgccgaagagttacagggttcttctctgatcatcatcagccagatttcaagacgataaactcgggaccagaaatcttcgatgactcaacaacttccaacatcggtggtactcatctctccagtcacgtggtggagtcatcaacgacggcgaagttagggtttaaaggtgattgcaccaccaccggaggagttttgtctctaggggttaacaacacatcagatcaacctttgagctgtaacaatggcgagagaggtggaaacagtaacaagaagaaaacagtttctaagaaggaaacatcagatgattcaaagaagaagattgtcgaaacattgggacaaagaacttcaatttatcgtggagtccccggtaatttagtttatttcaattgcaatgatctaactcaaagttttaatatttatcatgtgggttgggaaaaagattgaaacttttgagatgcttgattttggggtatgcatgttggattacaaatcaagtaacttttttacataggaattgtaaatgaatatggggtgtatgacaag

SEQ ID NO: 47187 - DNA, 580 bp, Arabidopsis thaliana columbia
taaaaatgaaacatcattattattagcctgttagatgttccaaaacttaatatagtttctttgtccaattagatatttacgaaattttaactcatatatttttttttttttctttttttttggctacaaactatgagacttcagtaaagagctaaattttagcagcataactaaaacattcagggaaagaaaaaactacacgtcaaacaagaaccccctatagtagacaaactagacatagatggtcatataaataggtagttgaaaatagaaactagtcaccttgtgaaagcaaacgagcacaagaaaaaaaacttgataacattatcataataatcttgccatataacgtaacataggaacaagaacaatccatacaagatcagacattcgtcatattacatattggtcctcgaatttcaaaagactttggagcatagtggcacctaactttaatatcttacataaataacctccctaccaagggaaaaatggagtaaaatctggtcttcttatttcttattattcttcaaacgaacgaccaattcacgaacatgaaagctaagcagtggtttgatca

SEQ ID NO: 47188 - DNA, 532 bp, Arabidopsis thaliana columbia
gtgtgatttttttttttgtttctctctttttcttcacagttcttgtttcagaaccaaggcatgacaggtccagtttatttggtctggtgggctatgtttatatagcagacaattagtgggtttaacaaatgtaccctcgtattttatttatgttatgaatttctccatatacatttaatttacacatttttgtctatgtttgtaaataatttattgtagtaattttctctctggtgtttttatatcttaaagtctaaacccactagggtattttgcatgacataagctaaaggtaagaattgacaaaccttttatactcatttgctattgaaatagaaacaaatcgaatttagcgtgtgattcgtagagccattgacgacagtggacttttgtttgaaaaaggagaaattgaaatttggtgtcaatgtaacggatctgactttgaaaaagtaaaatttacatgcggtaattggtgacggtaaaaacttattttgtaattctttttttttgcgggcaaaatattttgtaatat

SEQ ID NO: 47189 - DNA, 536 bp, Arabidopsis thaliana columbia
tatttggtattaaatccaaatgaaattatgtttgaccaaaaaaagagatctcgtacacgccggcccatgggctttacaacagattgaaccaaaatggaaacatagaccaatcaggataaggtatatttctctctatatttgcacaattcaacaacaacacgatttctcacacatttcaagttttcattatcatccagaaatcttcttcttcctccgatcaccaccatgtgtacgttagagaaacgcggcgatctcttcctcctaaccctaaccggagacggcgaacacagattccatcccgacacaattgccaccattctctcccttctcgtacaagccaaatctcaatccacccgtggatccatcctcatcaccaccgccaacggcaaattcttctccaacggattcgatcttgcatgggctcaaaccgccggatccaaaaccggagccgcaaaccggcttcaccaaatggttgaatcattcaaaccggtggtagcagcgcttctcgatctccctatgccgacgatcgacgcctt

SEQ ID NO: 47190 - DNA, 543 bp, Arabidopsis thaliana columbia
tctagaggatagatttagttttcaaacgatttatgttgaaggatttggctcttcgttttctgaggatgatgatatcaagagtgcattaagtaaacatttcagtgtatgtggagagatcactagagtttttgttccaagaaacccttcaaccggtgctatcaaagggtttgtgattatttcctccttaatttttgtgactactactagagagaaaaggttaactgaagaagcaatgttttatttatcttcttacagatttgcttacattgatctaaaagaaggcaaagaaggcattggaacttagtggaagtaagatgacaggaaaggaacttgttgtaaagacggtgccgctaccgatgagagattccaacctggctattctggtagatatcctggttttggcggccgttttcgcggacgttttggctttgttggtggcatatttggtggtggtcgttgtggaggttatggtcgctgtggccgctgttgagggtttggtctttggtggtcgaggaaaacagacttagtgcattcaagaagact

SEQ ID NO: 47191 - DNA, 1193 bp, Arabidopsis thaliana columbia
gataaccacgtttaggatttatccacaaaaacaaagtaataataaaacatggtaaatgcttaaatccatatagtgaaaattctggagagccaaattataaaaatgtataatacacatattaaaagataaagtagcatattaataagaaataatagaataatcaacaatatgagtaattataaaatgaacagtacgacaaatacaaaagccagaatggcaaacattaaacatttgagatcatgagcactaaaattgttctgaacgctctcccttatagaattgttacgcctccgggacgaattgaaagaggaagacaacgacatttgctatcacataatatcgagatgtgtatatataggcgtaaataataaattaactattcaattaaataaaaacataagaaagtgtcattaaccataaaatcccttacatgagttcgtttcaagtatgttgaaaaataacaaaatgccaaattaataaatatgtacaattcggtaacaggtcaatatgggtatttataagtctactgcacttaaaatatgtggacgcaaatttgtggataggaaattcaatgtgaaaatatgagattcctttaaataactaagacattctgtatactgaagaatatggacaaccattttttggatttatccacacaaacaaataataataaaacatggtaaagcctaaatccatatagtgaatattttggaggccaaattataagaatgtttaatacacatataataatataattattttactaaggttaaaaaaaaaaataaaaataaacagaaatagtcgttaaccaaaaaaccgcgaacatgataccatatcgtcgaggttatcagagtagcaaaaattgcaaaattaataaaatacatgtgtacaattcgtgctaatgtgacctggccgacaacaacggccgcacctaggtcgaaccattctacgttgtttagtaggaggaagacataaaatttgacatccgttaatctctcgtgagtgaggcgtccatcaacaaactcgttgtaagctgcaattccaccattgtatgattctcaacgcccaaaacggtagtgagcattaaccaacgtttgataagcccaagatttactcatataagcgaacatggctaatggattattctgagaaaggcatttcaagaaaaacttgtggtaagaagaatggggcac

SEQ ID NO: 47192 - DNA, 603 bp, Arabidopsis thaliana columbia
aagttattcattggatgttagattagtcacattttcaaaacaaagtgtttcaacataggttatgtagaagaagtttttttgcccgaagtatagattgagacatgtttctgatactaaattttgtttcggttgggtcagaatcatatggaaggagatgaaattcgagtcaggagacagcattttaatgcttgtgttgtataataccaacagtctttattcaattttttcctagaatgttttattaccttgaagtttggtatcatctatagaaatcaaaatctctgaaatccaaaatacatatgctagcatgtagagtgtgctttaagacggagccccgagatagaaagcaaggcgaagaatgtcactgaagattccaccggctgtgacttgagcaccagcaccaggtccacgaacaatcagaggctgttctttgtaccgtttggttgtgaaagcgatgatgttatcagcacccgatagctgagcaaacggatgatcttttttgtacagtttcaactcgactgttccctttttctctactgcatctacaactcctacgtatctcaagacctaacaaagacactacgcaacaaaatctgaaatgag

SEQ ID NO: 47193 - DNA, 520 bp, Arabidopsis thaliana columbia
tgatgccagtgccgcggtaagaggagaagagtagacaagagcaccactcagatctcaacaacgagactgcaggtatattatactctcgataggaggcttgcattgatacgacgaacaactagctagatacgtgtacacttacgcaattctcattgttttgtgttggtggtcagctcctacatgaggatcagctggtgatgaaattgttttgccttttaccaagactttagcttcgtggaaagagtttgagtctgatgaggtctacaaaagaacaccacaacgtcctcacttcccatcattggcttacacgcatccaagttttggtgaaccgactgcagcctatctgactgcagcttttatcgattgtgtaatgacagtagatggtatgtgtgaggacactccaaaaagtgaactagatgtctacagagagacatttaaaatgttcgaggagcagggtttcgacgttgcagaagctttatcacaggtcctcacgctgttagttcccgcaagatgagacgtg

SEQ ID NO: 47194 - DNA, 803 bp, Arabidopsis thaliana
tgaaagaaaggtaaactgtaacagctaagataccattttgcacacaaaatcattccactagataaagaagcaaagaaaatttcagtacaacacagaaggtatacaaatttatgctcctcctcttagaacttcactcgatgagagaactagctacgtgtgaatacaacgggttactttaggtagttctaaatatatgtgaatcgctaagaatctatggacgaataccagtaaggaagactgtatatataacatcaaattgacatcaaatcagctcatctctaggctcaatttaaaaattggtcttttcccaaaatattgagtattttgcgccacatactgctaagcaaacaaataggtcaaggattcaggccatagaaaaaggttcagatgaaccagtatctaaggacagtgatgacataccttcatcctttttttgaagttacaaccacgtaggtaaccaaacacagtgatatttctatcgcatttcttatccatctgaactttctccggaggggtaacatcttcaaggcgatcaaccaacacataaggatgtgctgttcgccatgtcaatggctgaggcttgataacaattacaaagcgggcgaggttgtgaacttcacgcggcgtatacctaccaataaaagataaatcaaaggtgaacctcagacgctccttgcacatgtcattcatgttggtgatgcaccaattcagatacttacttcccatgaatgagaccagatagttataacaatttagctccatgatatatttcagtccaaaaccgatgcttgagatgatgtttt

SEQ ID NO: 47195 - DNA, 557 bp, Arabidopsis thaliana columbia
ccctcttcgttattgatcctctctaggttggttccagtactctttgctgtcatttttttgttcttcgatcagttttattgcaaagaaatttctaagagcaatttatattcagggcattcacggttgctggaagagttaaagcagaggatgctgtccgagctacatcttcttctctacctgacgaggttgtggatactgttggtattacttctctgccatctgaagaccctgtttctgagcgaagacggaaattagagtaccttgagatgcaagaagaactgatcaaggtcttgatacaccacttgactgtattggattatgcttgcttgaggaagttagagaaaccgaattttggttgctccagattttacattttgtatttattatatttgcaggaagaagaagagaaagaagaagaagagcttacaaggattaaggatgttaaaggtggtgacgaggataaggcactgcaagagatgaccatatcaacagccagcgacgacaagaacaggccagagctagagttcttgacaacaagatgatctttgcaaacttag

SEQ ID NO: 47196 - DNA, 568 bp, Arabidopsis thaliana columbia
ctgttttttttacttataaaatatcacataagcttcctctgtttcacaagtttgacatcctgaattgtgttttaaatcttctacattgtctctagtcttcaaacatacatgaacataaggagttcaaggctcaaatcgggcaacactgaacacaaacgggaggctgtttttctatgttgcagtcacagcaagctgttaggcaatggttgttgcagcctgcacgtgaagaacaacaacaaaaagcaatggtaccttccacagttaaaaaacattatcgttgtttttactttctagaactagtattcgaagctatggtaccttccacagtaacaaatagagacttctgatgctcccgcaagctcggaaagaactcaaactgttgtttagttgctggagcaacatcggttgctgttccaatagtaaccaaagagacaaagaatatagctagtgttgccggtgtcatctttcttgtttgttgtgtgatcagtacttgcagttatacttacgcagtcaatcataaatgtcaaggaagttatgattgatacttttctatgattaagctatgatt

SEQ ID NO: 47197 - DNA, 575 bp, Arabidopsis thaliana columbia
aggatcccccaaaccctttcgttagttagaccaagtagaataagagaacgtaattattgcttatgaaagtagagaacatgagagatgtgatatatatgtaacaaaatctgcgtttgatcttgattattccatagggagcgttcatggaatatgagaaggaaagctatgagaagctgacaaagttgatcgaagctcaccagagtaaagcaattcaagcagtgctaaaatctttcttggctaagatctacaagaggcagaagtagagacatactcgggcctctctccgttttattcttctgacatttatgtattggtgcatgacttcttttgccttagatcttatgttcccttccgaaaatagaatttgagattcttgttcatgcttatagtatagagacttagaaaatgtctatgtttcttttaatttctgaataaaaaatgtgcaatcagtgataaattgatacttgttaatgtggcaaaaattttggtgtcacatgagggtgcaacagaaattttggaggacctgaggctgtttgagcttacatcaccttgcaaaatcggaacagggtttgggg

SEQ ID NO: 47198 - DNA, 530 bp, Arabidopsis thaliana columbia
gttgtaaatattaattttctacaattaagtacaagtgagaaagcaagtatcgtgtgtagaagacaacaccaacaaattttaatgaagtaaaaatattatagacgaattctaacaaaaattattgcgagttctagatgttttactgtattaatacttggagatcattgttattaacagagtgggaccattaaaaatttgaggcccatacgaattattaagtattccgtattatatatttttataactacaagttgtactatttttatatttttattcattgacttataggttcgctctctgtcaaaaatttttatcaatactaaaagacacatcttcctgcttttaaagaaatctctctttttataactacaagttgtaccatgttattcattgacttatatatgatcatctacttcgaacaaattttcataatactgaaataccccctctctgtcaaattttctaaacaagaaaaatcgttaaagggtttaaagagacggatcttctcccatagctcaccatattccagt

SEQ ID NO: 47199 - DNA, 497 bp, Arabidopsis thaliana columbia
atcccatcgctccagttatactgaacaaagccatagaagataaacatcaaaatttccaattttaactaaatcaagacaggacaaagaggaaatttggctaacctgaccctttacaggctcgtgcccattccaaaacacataagtttgaaccacatcagctccaccttctttactctttgcgatgagatcagaccacatctgaataaccaattaacaatgccaattcttctatcagcatttcatcaaaaaatcaaaaattgttgagctaaggtcggtgaaagagattgttacctcaggagtggctcgagggtagtgaattccagctgagacgagcatgcgcctcttgccggcgatgattaaagcccggtgatcgtagctcacattgaacggtttaaagtaacttcccgacagaatcggaaagtacacaagtaaagcgatgatcagtgacagtatcgccattgaagcgaaaaagttcgaattgactctgccattgaagt

SEQ ID NO: 47200 - DNA, 527 bp, Arabidopsis thaliana
cggcagtgagtcgctaaagcatcttcatagttaaactgttcataatatcttgcaaagtctccatgtcctgaacatgccgccagatccgtgtaaaaaggggtcttgggagtctcagctctgcagggcactgggggaaggtggtaatctggagatcttgatgagactgtggggctgtagactgccagtagctttgtagagcagatattgtatttgcctttgccctgtgtttaagagaggcaaatgagtgtctgtgtgcagggggagggtccatagcagctcctttctttgcagcttgatcggctgtttcatttccttctatctgggcatggccgggcacccagcatactcgtacagagcctccattagtataggagaacctctctcgtgcgggccaggatgcagctagggattggaaggatctaaagacctcttgggatgagcctgtaaagggtgataggagtcaagtagccactctagattatcaaggaagaccagagattagtggcaaacaggctgtatatagcctg

SEQ ID NO: 47201 - DNA, 497 bp, Arabidopsis thaliana
tgaagaatgaaacagcattcctcacaattgtatattcgaccaaattcgactggatggccacatgcttcacatcgtgtactatcatcataaatgatattgttcttgtggagtcttaaagaatgtttgctgtgactaaaatgacgaatcaagtcatccccaaccaccttaaatggcgcaatatcctcaatattctcagctttcccttccagttccacaccatcccatatgtcatatcttgttgcacaccgtgaatgaactgcatagttggggcaaactaagcaagaataagctccattgaattggcatacacttcttcggcaaactccacagttcaaatacccaggaccaagatgctgtgtgaaagaaatgcgatgatcatgacgatttatgtttatgacttgaggtaagtctacacaactacaatggaccgcaaaaccacactgaagacacatataagagagtataagtccttttacccacaaacgttacaagtgcag

SEQ ID NO: 47202 - DNA, 447 bp, Arabidopsis thaliana columbia
aatcgtgcacacgaacttagcttgctctcttgacaagtctgtaatagagtactcaatggacgttactttgtaagctcctaagatatcacgtgggtaattccaacgtcacacctatctgaagcgaacatcttcttaggtataacttcaatgccgagttgaggttgaatagcttcctttgcaactgactcactgtatgcctaacttcttcaacagtgctagctagcttctggatgggttcgtctttgagatcagaattccttttaagttctagccaatcaactatagagagcgtactagactgagtggttgagcttgaaggtcgtgttggagctagactcaggtcctttactccttcagcttcaaatctttctgcagaaaccaatccttggaccccaaaggtctgtccctctatggttgatctgcttggagttttgttgatgtgaaact

SEQ ID NO: 47203 - DNA, 567 bp, Arabidopsis thaliana columbia
aaatgttaatatttatggaattttctgagccgtagattgaagatagtctcgtgtcagccactagacgatttttttgttggattttcacttttcagctcaattataaaccacatacgttttccactaactaattataaaaaaaaaataacgttgatctcctcctgtatttgttaaaaatctcttttagatattagatattttttatacttggacaaaacaaacaaagatattagatattttataatccgatttacgggttggtttcttgtttttgttaatgaaaaaaaaaattagtttgatcttttatttcaaaaacttaataatattttattttaaaatttgttggttcattcatttcagtttagtttggtacactgaaatcagttttaattcttttttttttctcatctgaattatattagaaactaaagtagaatacaagttgaaatacataagccaacagaccaacggaatattttgagaaacttagctgaaaaaaaggaagtaaaaccaaaagcatatataaggaaacattttaaaccaacgaaattgaatcaagagacaaaa

SEQ ID NO: 47204 - DNA, 574 bp, Arabidopsis thaliana columbia
agaatctgctttcgaagaatcacactcttcagaagaagttagagaatctgatcgtaggtaagttctgacagttggtgggtttttttttgtacatttgaatatagtttgagatcacatgcatcttccccaattaacttggtgatattgttgacagttcgccagttacttgtcctgaggcttcagcagatggtccgggcgttctgcctatcactattgatgatcatgtcagagtttctagatctgactcacccgtctcggcagtatctgagccacagttacccgaacagaaagaaactcatagatctgacaatttggatgcgtactcggggattgaattactcaataggaatggtccaccttatactcctttggagtttgaacagcagcaagatcctccggagttgcaaaaattttctgtaagggttcttgcaattttaactcttaaaaatcaaggaaagataaattcattcaaaaatgacatgctcttcctttccagcaggcttatgacaatcatggtagttatgaatttccgtactttagtcctgcaatggatgaaactgtacgagttcaagga

SEQ ID NO: 47205 - DNA, 432 bp, Arabidopsis thaliana columbia
tggtcaaacgagctctctcgatttcgacatatatctacacatgctcacacacacatattcatcaagaaaaaaacttgcacggagtatcaagattcaagcaaatataactacaacaacaacaacaatagccaactctaatccgcacctttccagcagctacattgtttagagtcttaataagctcaatccgagtttctatgtctagtgtctgatcaatatactgcattgcttgttgcaccatggattgtacagcctgcaaatcaagagacctaaccactttcaatatctcactcagttcttcattcaatttctcagtaagattcagaactcagtagaaaccgttccaagtaatcgaaaaccttaaactaccacaagcaggtttcaaaagctaaatcgatagatagtagtgtgacctgcttaagctgaccacgt

SEQ ID NO: 47206 - DNA, 511 bp, Arabidopsis thaliana columbia
gttaaagctcaaagactctgagatcatatttctcaaagaaaagtttcaagaatccatgactcagaacaagttgatggagaagagattaaaccaaagtggccaactttgcaatccattggatcataatcttcatctatcggcggtaagttcgacccatttcgttacttatctgcaccacactgtcaaatccatccgaggattcgtcaagttgatggttgagcagatgaaactcgctgcttgggacatcgatatggctgctgagttaattcagcctgatgtactctattacaagcaagaccacaagtgttttgccttggagcattatgtctgcaagataatgcttgatcgttttcaactaccttacttctcaaacgaatcatcgaagaagacgagcagagaagacaaagcaatgttctttgagagatcacagagcttagatcgatgaaccaagagagtatttagcatctcggcctaaatcaagattggctaagttttgcagaactaagtattt

SEQ ID NO: 47207 - DNA, 460 bp, Arabidopsis thaliana columbia
gtgttgtggtccaaaacatccatttcaaaaaataaataaatttgattgactatataaatgggtaaagcgaaattgtcacgagttcaattcaatgccatactcttttaaaaaaacttatattaggtatgcatgcagattcatggaatttggaatcgacacatcatcatttgttttccttagccatgatttcaaattatgctactcgtcgcacacccatatcatgtacacacatataagaacactaattcttattcatttttttttgccttagtttctatgtcgaaatttcaatttatttacagctggtaactaacaagtattacaatgttgtaaatatttggtccaaacttgatagccagaaatcaaaatatgcattgactacatgtgtaagatcagatgttgcttaaactttgattggttcaatttatttagatcatacaacggtctgaaatcttcaaat

SEQ ID NO: 47208 - DNA, 470 bp, Arabidopsis thaliana columbia
cttgtttaattaacaagtttgattgtgtgaacaattggtatcaccttcttctcgcgttctttcctttttccagaagagtagctctggttctgattctccaccattgaatcggtctcagcaggctcggctttgactctgtccagattcgcgccgggattagaaggtaaagagttagcagtctcgccggaaaaattaccgttttgctctgtagcaatcaccgagaaacgagcggcgcggtccaagagaagcgagttagaaggaaaagtcaaagccccgaaagggtgaagagtggtaggagaaatatcaccactggtaacggttctggcctgagaagacgatgaatctgggaaatggagaagctccatggcctgagtcacaggcatctcgagtaaagccgtgaaggagccgccagtagtctccggaggcatcgtcgtcactaagtgccgaaattcgtcgctgaaattgagaga

SEQ ID NO: 47209 - DNA, 468 bp, Arabidopsis thaliana columbia
gggatatggcgaggacgaagatgaaaatatgtagatggtgcaatgcctcaagcgaaacacatggtactttaccctgaaaacaagagggagagaagtaagtactgattcaatcaagtaatagcaagagcaacacctaatatgactatagtgaggccctgaaggtatttgaatttaccttttcgctacagtaaccaacttgcacagcagcatgttcagcaagtagacgcctagtggttccaacaataggtaaaaaagtctgaaaatgttcttttgctgtaacgtttttatgttcacttgccccagcttctcgtcttgaatcgagagaacatggaagcatatgcataagcacattttctttcacacagaatttggaaatgagcccttggaataccgtcagtaacagcgatataaaccctaacaacatcagctctgcaattcaccagaatgattcatcatacatccacaaat

SEQ ID NO: 47210 - DNA, 519 bp, Arabidopsis thaliana columbia
ttactattgatcaatctagctatctcgtagttcaaaaagctttatcgttaacaagtaacaactttcaagtattgcccaaatagataaggttcataacttcatattttttatttattttatgtgtaaaagagtgacagtctatattattctagggggaggacaaggctcatgacataggacaagagaaagaaaaatatagaagcatatagtatattagggtcggtccaaatgaaaacaacgtttaggtatggggcggcgaggctaagttaaattaaccacaaaactccattatcaaccataattttagaattaaaaggtctctgttcctattgatagctccacaatcattcttttaaataatcagaatctcaaataagttcatctttagttacagatttgtatcaatagttgaagttgaaaccaaaataataataatttagttatagttaattttgtcacaaaacaataccttaactatcatattatgacaacactaattgagatgaaaactcttagcag

SEQ ID NO: 47211 - DNA, 1090 bp, Arabidopsis thaliana
tatgctgttgatgatactatgatatggtgtaaaacaaaaaaaactactacaaaccaaactttttacaacacacaccataccaaaagacatcatcagtagaatttgcacttccttctaagcctcagatcaaaaacctaatgtccagcgacttcttcgtggtccaaatatcgattggatctcttcaggttgcttctgcattgtcgattgcatttcttcagattgcttctgcattgtaagagtaaaggaaacaaagtaaaaacactgatttcaaacctcagcaacaggtttcaagcaaaaacaaaacccaaacaacattcatatacaaagattcttagactcaaagaagttacgtcaagattcaattatgagctaggaacagagacaatctcgcctcttcttcataattgtgtctatggaatctaaaacccttcttcactactcaaacaaatttaggggcaattctaaactctaccaatttgaaactagcaattcccaaatacaatgaaattgcaaaaaggtacctccaaatcacggggtctagagagatcaaccgcacgaggttgagattccgcggcggtgcaatctcgaggcgactcaaagagcgaaagagaaagctgcttatcagcgacaccgacatcaaagtgaattaacccagagctctgcggatcaacatgtattcctttcacagcaaaccaaagaaacagctccttctgcgtcacaccagataaattcccgatccgtccatcggagagaacgccggagatattgtagtcgaagtggaactgattctcgaatttagcatcgcaaggaacagggagagcgacggtgaaacgccccgttttgatgtcgatcgagaaattggtaactcctttgggaactattccggcgggaagattgctttcccggagataatcgtaaaacgacggatccggtagcgaggacagctgaggcaagagaatcgaggagaagagaacgatgatgaggaagaagagatcttgactagaacccattgaatacaaacagacattgtcaaagcaagagaaagtgcgaaacggttttcgattgctatgaggaagaagaaaaaggcggt

SEQ ID NO: 47212 - DNA, 526 bp, Arabidopsis thaliana columbia
atcactcttgtatctccatcaaaagacttattgcatataaaaaaaactgctctgtttccattttaattacaataattttttaagattttagttccatgttaactgctctgtgtcatatatgtaacacctaatcacgtttcagcttgagcccaagttaaagctgaaacttgggtttgcaatggctggtattgataataaagctgctgtaatgggagaatggttcgactgtagtactactaaccacaggaagagatcgaaagcggaacttggtagagagttttctttaaattacatcaagaatgaggattctttgcaaaccacctttcaagaaagttcacgaggagctcttcgtgaaaggattgctgcgagatccgggtttaatgcaccgtggttaaacactgaggatattcttcagtcgaaatctttaaccatctcttctcctggtcttagtcctgcaactctgttagagtctcctgttttcctctcaaaccctttggtaactttttcttttcaacatttcattatg

SEQ ID NO: 47213 - DNA, 460 bp, Arabidopsis thaliana columbia
aatacaaaacaatcctaaagcgactcagcaaccctaattttgagaatgaatacttttgataatgtgcataccatcgcggagttgtgcttgcagctccatagcttgaagacgaaacttcagctcactgttctggtttgtcaaccccatagaatctctctgagccaccaaaggaaacaatataagactacagacttattcaaacatgatagtttgttgtattgtctcgcacctgcaaatgtgtgagctgagccgataatgtagtagcttcagtctgaagtgtctgcaccttgtgttccaactctgccatgtatcgcgtcttccgctcctttgaacgtgcagcagatacgcggttcgccaagattctaacgagatggttaaatcaaaacagtcaagtcacaacaacaacaacatcaaaatgtctaatgaagcatcactattttattaccttttaacacgctta

SEQ ID NO: 47214 - DNA, 547 bp, Arabidopsis thaliana columbia
tacatttataaagtattttaatgattaaggggacgatgatgatgtcatcagtagttgagttgggggtagaataggtaattcaagaaatatgtgattgaaagtggaaacgtaagctttctggcttttgtgtcctctctgagtctcagtgtcgggacaagacatgcatcagcatcacacatccgtgaatcggtgctttatcctcttctatcttttttaacttcacgactagaaaattgatttttaaattttgttttacacaaactgatattaactacaaattaagaataacatagaaattaagaataagtttctagaaatgtacatcaagtattggccgttaagtttcaacatatttataccatctggcctcaattacaatcataattcataaataatcttctgacacttaataagataacttttcaccgagtgatatattcgtgaaagtaaattcaacgctttagaataatgttcttatatatttgattattaccaaatacacactatgcttcaaacccctataaaaagaagaaacgacttatagcac

SEQ ID NO: 47215 - DNA, 565 bp, Arabidopsis thaliana columbia
gtgagtgataaatcagaagtctaaaatggatttctaggttacgacaaaaaaaataaaaaaaaatggatttctaggttagctttcttgggtagagaaataagtttacttttcactttcagttttcattatccattgaatgggtcatgaagaggcctgatatggtgaataatgggcttaaataggcccaataaaagtacttagtccaccggtaatgaatttcccgccatagaagaaagtcatcaacttccgaagatcttccgttttaagtgatttacctaaatatcccccaaaaaaggttgaccaaaagttaagacagaggataacgattaagggtaacaaagtaaatggcaattataagggcaaaatagtaattaaaaggaatacgagatcccccgaaacacaagccctacgaatctagtcgaaagagcgagtgtgttacgcgacctcaacgagactcaacgcttttacagttaaatccggtaggtgagagagagagagagaagggaagcttatggaggcagagatctgtgagacgatcggaagtaacgggattaagaagggaggt

SEQ ID NO: 47216 - DNA, 471 bp, Arabidopsis thaliana columbia
aaaagcccccgatatccgccggaagaccaccgatctctgacctccgagcttgtttcctcaatggaacgtcaaaacttgagtaaacttccatgtccgtccgatcacgattcctagacgaactaggttcgccgaaaaccgccgcttgtctccgcatctcaattctccgacgacgacgttcacggcatttagtcggagaaacgtcgtctccacgtccggttgaaattgttctgtagatttcagtcatcttttcaaaattcgtttcggtggatcaagagagcaccgctttatatacatggggccgagagaaagagagaacagtttgaacataaagaagcttacgaggaagacagaacacgtgtcggtgtttcgatgtattcgcgtgttaggctcaggtgttaagttgttgtccacgtggagacgcttcggtttttgttaaccgcatctggttttgggttcatgcgatagtcgttt

SEQ ID NO: 47217 - DNA, 511 bp, Arabidopsis thaliana columbia
acttaaagtcgtagctccatgtgagtttataaatatcatcttattctttctctttctcaacatatgtcggtacgtctttttcttttcacgtatgtcggtacgtcaaaatgttatagtgctactcttagattgttacattcatatcaacatcagaatacccaacaatactacatacatatatccaactagtcaaatactctataaaaaactaactaaacaattcaacagacaggataaaaagaaatttggtagtctattgagcattttggcttacaagtaaaagatcttgaaacatatcaacgtaaactaataatgcatatttttaccaaaacaaaaaactaataatggatatatactataacattttggcttttggccagttaacaaaaagaaaaagaaaaaaaaagtttagaaatattaaaattatgacgttaggacaaaagaagaaaatatcaaatttatagaaaacaaccactacataaatagtaggtcggccatgggtcggacaaaa

SEQ ID NO: 47218 - DNA, 575 bp, Arabidopsis thaliana columbia
tgagctgcttataaaagaccattccgttcaaagcaaatgaaaatggtcgagagaagaggaaggtcaataaaagacacgtacgtttaactctttatttaggttataggaagtagagggcatgtacaatctagtgatcgaacaaaccttctacgacacatgcacacacacacacacaaaccagaatagcaagagtctagcatttgttttttcacatatacgaccattacaacagtttaggcggcccaggtgggactacatagctcttggtacagaaaatagaacatcccttggcacattgttccgacgctccattcacaatttcacttgcatctagtcaccgaaacaaacattagaatatattctaacaaaataatgataaaaatgagacttaaggagttcgctttaccagagttctggagagtgttcatggcaccacacacagaagtttcacaccctaacttgcagtgctcattggtagcatcagctgagtttttttttaaagtattaaaatcttgatcgatcttttaacaaataacatcaaagacattttcctatttacctgagttttcgagaat

SEQ ID NO: 47219 - DNA, 565 bp, Arabidopsis thaliana columbia
tcgcatagttctattaagctcttcaaattttggacttgttttctcttccgctcccagtagtgcagcaacagctaatgaagtctgctttctaagatcggtatgcaattgctttccagggctgtcagcagtggctggagtattcgagctaaatcttggctgcctcaacaaggatgacaacttatcagaaactgcagtcatagtttctctacaccacaatcttggagaaccgagaattaagggaacatgttttgagtggttcagcaatgcaaacaaaaggcgtcccataaaaagtgatttctcaattattatagcaggtggaattgcttcactgtccttgttctctttcttcacggcagcacatagaaattcaagttctttatctacatctgcaagaagtgctgagacactgtcataacacttattctgcacgtatggtgcaagatcctttaaccttggacctgccttttctgactcgaagaagcttaggaggtctccaaaacactatggcagcgctatcaactgcatctctcatttggctaacttcaggaccaaagtacgcagttag

SEQ ID NO: 47220 - DNA, 465 bp, Arabidopsis thaliana columbia
gcagatgttcatgttaaagtttgattctttcttgtagccagtttttcaaaatgctgacaatgtgttaaggaacttgagcaatcactgaactaggcaaaaatttggctaatttttcagttctgttcttactatgctatagtgtgttgaaagttcataatatcagccaggctttgatctatttagcactatggaatgcttagaggagtatagcttttgagttctcttcttgtagtaatgacttgggcttattacaggttttgcttcgggatccgtctgatgaaaatgttattccagttgtggaggagcttcgaagacgcttacctgttggaaatgcatcacacaatggtggtcaaggagacgggaaagagatcgcaggtgctcaaaacgacggtgatactggtgacgaagatggtattgtcctagagactcttggctctttcctaaaccatctaaactctgtgaaat

SEQ ID NO: 47221 - DNA, 493 bp, Arabidopsis thaliana columbia
tttcacacgcacaaatataattgacccacaatcacaaaaaagctggtcatcactaatttttttcaacaatttccctacccctctccaataattgaaaattttatatatattcttttggcaaccatatttaataaacatatatatatatatatattggtttcaattatggatattatataatagcattattatgtataattcccaattttatgtaagttatgaatatattttacacagcttgttaaatgctttactttaaatctacatgaaaatcaaaatgtattaatatgtccacaatttaaatggttgatttcatattaacatgagaactcacaacatgataagtatagaaatgaattacgtaaatgatgattttttagtttaaataatcggtcaccaaaatattcatattcgaacatggtcgccacaagcgacattctacaatgaagacacatacaagtaaatagaaaatagaatttctcctctcaatgat

SEQ ID NO: 47222 - DNA, 606 bp, Arabidopsis thaliana columbia
catcttctccatcagcatcgttagcatcgttagcatcttcctccacagcatcgttatctccaccacgtattgcatcgtcaacaccattgcagtcatcatcaccatatacggcacagtcatcttcgatatcttgagcaacttccaattcaggcttttcctcatatttttcaacgactcttcttcgttttcgactctgtctagagactcgacctccaagaacattgggttgagctaaacctccatcttctacagacagtgaggctactacacttccatctaccgccggtggacctccaatttcacatctcgctggatcttcaacttcagctgccgaattagagactcacattgttgtcccaatcctagatacaacgcctttgtttcgaaccaaaggcatttgtgaaagatttgtaattaccaattcgatttaggtttctgggaattagggatatcaagtttgagaattggggattttttgtcgactaatttgagtataagtgctgattaagtcgaaaacgacgcagttttgtcactaacaaagagatgttaacggatctaaacggctgttaatgggtctgttatcggatttaacgacgagtatattta

SEQ ID NO: 47223 - DNA, 513 bp, Arabidopsis thaliana columbia
ccctatacgaggtccttttggtccactggcaaagaagctctgtatttaacgcaaacaaataaaaaaggagcaaaaagagtaacggagatatggtaagcgacggcggcggcgagaataacagagcggaggcagatcagttgcttgctacatcggagaagctcttggcttcaagtgactttcatggagcaaagacatttgcgatccgtgcatgcgaactgacccatcccgaacagacgcagctgactatatcctcgccatcgccgacactctcctcgccggagaaactacaatcggagattccaaagtaccagactggtacgcggtacttcgaatcagccgcctaacccaaagccctgaacacgtcgcgactcagtaccgtagactcactcttctcctcaaactcaatatcaatcgtcttcctttcgccgatcaagcgcttaaactcgtctccgatgcttggtatgtctctctgatctccaaggaaatcaatttacgatcgagagttgcagctga

SEQ ID NO: 47224 - DNA, 549 bp, Arabidopsis thaliana columbia
tcttcgtcttcaccagtaccaaattgatctgtttcacattcctgtttctttctatcacaacaacaacaacactgtttaaaaaaacactctacaagaaaaagaaaaaaagagactaagcactaatatgtatcaacaagttagtaacaatcatcatacattctgagagacgaatctccatggacacttgtgttattcttacgacgaccttgacaaaactcgaaagcacagataagtccattggtccagagattatggtaacctggattcccgttcttgtgattcgcattcatgcttcactttaaatcacagattttcgattcatatcagtcaaatctcgttttctgagtaaaaaaaacaatctcgaaattttaggctgcaatttcacgtaagatcatcaggaagcacggaattcgaaagaaaactaagccaaaggagtcaaacgcaacaaccttccccagaacttccctgaattttctgcaccgattcgaagaaagaaaacaacaatttgcctgagagagagagatgaatgtggcacaggtcgaggacgac

SEQ ID NO: 47225 - DNA, 531 bp, Arabidopsis thaliana columbia
aaaagatattttaatgcctttgtctctgtagctcttttctttatgtcgtcaacatcttttttgtttacgttggtcatattgtacttttttcttctgactaaaacattctattatgagttattttcttttctttttgcgcgtcttttacgtttttgacctaatctggtcggttccgtcggctttgtatcagtttctgtgagatcaaaagtgtttttaactgattttgatattcagaaaggaaagagtaaaagatgttaagaacgttcttgtaaagtttctctaaagtagtccaacgcttcaagccttcaactgaataagaatttaaaatgagaaaaagttgaaaatgtaaattaaaatgtttatattataggacttattgttatatgttttgttcattcaaattacaaaagtcacaattgtttctattattgtatatttttcaacattgaactaacgattttaaacactttaaacaaaacgaaggaaaataaaacactgtaaacaaaattaattgtgtgatggtgaacaaat

SEQ ID NO: 47226 - DNA, 532 bp, Arabidopsis thaliana columbia
cggttgtactttgtatatgtttcaaaagcaggaaaacattttttaaagcaattgtaaaataacaaaacaaacataaattatttgatagccggaaactatatatgtatttgttacggccagaagttgattataaccaaagtagttaaatcttgaatctgctttttcattctaacttttttttttaccacacatcaatccaaaatactgccgatgaaatttgtaattagtatcaacttctgtctaaaatacaaatttgaacttctaatttagatccaagcgatgacaactacatttcaagtatcattgtagtttgatagactagtgttacactaaacctaataaatataccaatcaacacacaatgaacccttgttcaggagtaataagggttcaaatttgcaactcttttgtcaagggaaggaaataaataatcaaattgttagccgatgcatgattgacgaaaagtaggggtgttttttcaaataagctaagatggctttagaggaccccaatcggtccaatcctttaacac

SEQ ID NO: 47227 - DNA, 447 bp, Arabidopsis thaliana
tctagctagaggcacgtgcttggtggtataattatacatcgatctccgtccactcgaatctgaaacaaattccctcaaatccataagctccgcaatctccaactgatgtctagatctctctagctttcctgcatcttgactattccaaattccgacgaacgtgttatctcgatccgcgaggaaattacggaggacctgcgggaccgttcacagtaacggagttggatgatgatacatcgattaccaacgcatagctgcagagtatccgccggaggatcggagctatagaaaaccggtggagaatcggagcgataactgtccggagaagaatcggaacgataactaaccggtggagaagcagggtggtaacagagggtgtcactgaacgccgactccaacgacgagagggtgagaagagagacggttgtggaagaagacgtcgtgaat

SEQ ID NO: 47228 - DNA, 559 bp, Arabidopsis thaliana columbia
tgaatggcttaattctttatataatgctcgagctcagtgggtacctgtttatttccgggattcgttttttgctgcagtgtttcctagccaaggttattcgggttcctttttcgatggatatgtgaatcagcagacaacccttccgatgttctttaggctgtacgaaagggctatggagagctggttcgagatggagattgaagcagatcttgacactgtcaacacacctccagtcttgaagacgccatcacccatggagaatcaggctgcaaatctctttacaaggaaaatatttggaaagttccaggaagagttggtagagacattcgctcacacggcaaacagaattgaagatgatggtactaccagcacatttagggttgcaaattttgaaaatgacaacaaagcttatatagtaacgttttgctaccctgaaatgagagcaaactgcagctgtcaaatgtttgagcactccggcatactctgccgacatgttttgacggtgtttactgcactaatatactcgctttgccacacattagtatttgagacggtggac

SEQ ID NO: 47229 - DNA, 531 bp, Arabidopsis thaliana columbia
agagaactcaacgcgtgagaaccttcagacatgttctacacttcatggagatgcctttaattctgccattagtaggatgcacccatcggcgcttgcacaagtgaagcaagccttaaagctgccgtgaataaatgtttttgcctcgtgattgtttgtttccttatcagttaaagagcagcagtattcaagtgagtttctgattcgttgttattctctcttttcagcgtcattcattaaaaaacctccattgtgtttttctatattcatcagtattcaagtgattgaatgtttttgcctcttcaccatttgatctgactcgccacttcataactgttcaggtgagtgagcttttcttccctttacggttatggatttgatgggtgtgttacataggcgcgcatgttgcattgacctctgcgaccttggcggtttgatgaactatgtacatatctttgatgaggtgatcccttttagctgcccatgattccctacagaacaaaaggaggcatctttcagagacttatatttgtg

SEQ ID NO: 47230 - DNA, 526 bp, Arabidopsis thaliana
cgtcatcgtaacgccggatccatccgttatcggccaatggattcacgacgtcctatcccacaaccgcttctcttcccaccctctcgttgttggagtcggcgttcagtggacaccctctagttattactctgcttcttcaccggttcgttatcgctccgattctcctccggttagttatcgctcctattctcctccagttagttatcgctccgattctccaccggttagttattgttctgattctccacaggttcgttatcgttccgactctccacgggttcgtcgtcgcttcgatcctccggcggatactctgcagctatgcgttggtaatcgatgtatcatcatccagctttctcactgtgaacgagtcccgcaggtcctccgtaatttcctggcggatcgcgattacactttcgtcggtatttggaatagtcaagatgcgggaaagcttaaacgatctaaacatgagttggagattgcggtgcttttggatttaaggaagttggtttcagattcgagtggaagg

SEQ ID NO: 47231 - DNA, 584 bp, Arabidopsis thaliana columbia
ccagtgtgctctaaaggcttcctgaccattaataatatagtcgcgttcttcatcggtcagatgcttctggtcgcgcggatgtttatagaaaatcagccatgccatcgcccagataaagctcaatgcaccggagatgataaatgccatctgccagctgtgcattacgattgcccataccaccagcggcggcgcaatcatcgcaccaatcgaagaacctacgttaaagtagcctactgcgatggaacgctctttcgccgggaaccattcggagctggctttcagacccgccgggatcatcgctgcttccgcggcaccgaccgcaccacgagcaacagccaggccaccccagctacctgccagcgcggttgcaccacagaacacggcccacagcacagcaaacattgcataaccgattttcgtacccagcacatccagtacataacctgctaccggttgcatgaccgtataagcagcagaataggctgcgatgatataggaatactgttgggtggagatgtttactcttccatcagagttggcgcactgcctgcacagtgttacgcgtcaggtaccaagcacggtgc

SEQ ID NO: 47232 - DNA, 523 bp, Arabidopsis thaliana columbia
caagccacggttataagaaggtatataccagtcaggactgacatcaagtacaaccttccatgaattagactcaaaactgtagagttcaaactcacaaatccgttcccgtggagcgtaataattatccttcaatctcaggattttgtggttcttcttctcatcgtacccaagagcgtaattgtcctttctgtggtaagaatttctgggttggatccatcttgtttgaccaaaataagggttccaaaccacaagcctatagtggaggtctttggtgatgcataatagtaaaccatcgcagtgaaagactctagatacattatcgacttgatgatggtttgcatcatcgcttaagctaataagtgtacctttaggcgtaaatgatggatcaacattgttgtggatatcgatgcttgttagataaaccctaaaattcctcatcatgatcacctcaatctccttcgattccaattgcttcttctttgtttcgacgatttgcttcttgagaaagctccgatctttggat

SEQ ID NO: 47233 - DNA, 546 bp, Arabidopsis thaliana columbia
caagaccaccctgtaattaatcaaatcacctctttaataaccatgacctcaatacaaacgttatcgatgataacacggttgaagtaatgaatcggtatagtatagaactgacttatcttctatcagcaaacacaaccacgcgaaacaatttaagaaccttaaagtaattacatcatgttgtagaaaagggttataacctgaggtcattattcttcatgagaaactgcttaacacagacaagaacaagatctgactccacagatctttcatgcacttcatcaagaatgataaccttgtactttagtgcattcaaccccttgtctagcatttcatccaacagaactccagcagttttgaacagaattttcgacctgcatgcaacaggataattgcataaaagtcatcaataagggggaaaaagccaaatattgtcctgaaaactcggacacagtagaagaaactgaaaggagatattgttctataagtcaagaagatgaagataatgatagttaccttcggtcaaaatcttagaatgcccaatgtggt

SEQ ID NO: 47234 - DNA, 339 bp, Arabidopsis thaliana columbia
tgcaacaaacacgatgtgtgttgctcaaatgatatggccttaatttgcagtttgtcagttactgaggcaattttttttttgaataatttctagccctgatgtgagcttttttaaatgtaacattctatattgttagggtggcccgttaggtggttatggtgttcctccccttaaccctctcccagtccctggagtttcatcttctgccacattgcaacaggtactttagctatatttttccaattaagcaaatctgaaaatgttgtgatgattaacttggattttcaattgtgtctattccatagcaaaatcgggcagctggccagcatataacaccat

SEQ ID NO: 47235 - DNA, 579 bp, Arabidopsis thaliana columbia
ctttcacgttctttttccacgtgtccatactttcattttttttttacacaatcgagctctctctttttttttctatacccaaaatataataccaatctcgagatttacaaccaccgcgtgaataaatttcatagtgctaaatttacgcaagtacaatagaaaaacattttgtgttctttgactaaaacatgacagcagattcgatcggtgaatgttttagtaaacaatcggaacaagtgttgatcgagtattctcaagatatttaatatagttggctacataatttggaattatgcaaaactattatctaatttcaaaattgggttttaatacgaaacggatcgaacatatgaagcccataaagttttatctaactcgaacataaatagcccagtaagatatttgtgccttggaaatgtggaatgccactagagatccagaatattttggggcattagtacattatatatagaccaacttaatgttccaatgaaatattagttagaagtttgaattctaatgttctaaaccttgagggaggtgtattggacctagtaatttggaggattctgatttttt

SEQ ID NO: 47236 - DNA, 723 bp, Arabidopsis thaliana
atgcaacatcttagccatcaaactctgaaccaaaacagcatcaggattcatcgtagcattaggcgtatccaatttgttatcgccatgaatataacaagaaactgtgctaaacattcctgttctcacacccatcgcttcatagaggctcttaatcaaatacgtagtagtcgttttcccatccgtaccagtaactccaatcaccgacatgttcttcgagggatgcctataaaaggaagaagctaaagctgctaaaactgcattcgtatcttcaacaatgacaagtgctctgcaacctaaagtatcttcaatatcaatctctttgctagctacaaccgccactgctcctctcttatctgcttcactcaagaaattttcacttcctaaacaacacacgaagagatctccggcgctcacaccgcgcgaatcatgttgaatcccggtgatttcgacatctaaatcgccgtaaactgagattggtaccactttactctcatctaaaagctcagctaagcacattttgaacttaggttccacgattctcgctttagattcaccaaaatcatccaaatcgaattcaaattgatgatcagacccaaactccttcttcttgttgatcctagtgttacctcctcatcaacccaatcttcttcatcagaaatctctgttaatacagttaatttatcaatttcatccagatcaacaacttcttcttcatcaagctca

SEQ ID NO: 47237 - DNA, 489 bp, Arabidopsis thaliana
ccataacttttgctgtcttcatgatgcaaagacccgttgacgagtggaaacatgagcttgagacttgacggatacatgagaaacaataggcttcaacaatgccttcacttcctccggtaaatcgagttgcttcctaacctcattcgctaactcaatcacatactcttcctcatgctctgttatcacaacatttcatctatcaaaaatcataccaaaaacagtggtttctttaatataaagtcgttaagaaagctctctcttataccaatgtcgaacattgctttctctagcttgaaaagatactctcggttgttcccacaaggtcccgaagccgtagcgatttgcctcgccatttcttccaatggagctggacctaagtagtatttgttcgacactttgtctggtgttgacgtgaagctacaccaagaaaccacactgatttcaacattgagatttcctaattagaatcattacgggatatttatgagt

SEQ ID NO: 47238 - DNA, 551 bp, Arabidopsis thaliana columbia
tatataataatgaataacagttctatcatataaataaataatttataatccaccacatgacaacagatgggttttcccattttatttaactataaacagtattttgctctcacagatccacaaggacaagcatattcaaggatgttttagttcttaaagaaaagataaagagagaccagacgcatagtggtaacttggtctacaagttagagtggccaagccggagaaggacacggtgccacgaagtgttgagaacccctcttaggttccacaccgactccacattttccggttgaacattcgccgccgaatcaacctgcacatttccacagttttctattaactcttgtcagaagccatttatattagctgagcaagatgttgaggctttaccgctttggcgatgacctctgtagtctgtgaaacatcaatggtggcttcaaacaacacccatgcccatttgtcactggagctgtgttctgagatgtactgctttcctggttcctgcgttctagaagcttcacccagtttttgcaccatccagggatatg

SEQ ID NO: 47239 - DNA, 515 bp, Arabidopsis thaliana columbia
taattggtgaaatcgtcgtagttctcttgggggcttcccagcttttctaccaccacttgttgtccatctatcctgaatattatgaacctatagtttctcttcgcttttagctccaaaaacttcagcttacactcgtcctccaccgccatccccgacgccgcgttcgccttttcagttcatatatcagtcaagataaaacaaaatgtcacaacactgatacgtcgtttaaacgttatacatttatgcattttgcgtttatatgtgattttttttgtttcatcaaattatagaggacgatacattttcatatttttgtaacatttctcggacgtatgtctttaaggaataaaattgggttgcataaaacattcatcgttaacatttacaataaagttcatggaaaagaaattccaatcactcctctaggaaaaaaactgaaaaataaaatacactagttccacaacaaaatgtattatttgcaagaaaatgaatatatgtctctaaatttcatattc

SEQ ID NO: 47240 - DNA, 436 bp, Arabidopsis thaliana columbia
ctcctctttgtgtaaatcgttttatgattgtttatagggtggagttgttcgtgttcaaggctctgagttttggcatatggctaaagttcttagactgaaacaggaggacaggtaattactacattcatatatgttattgtcattttccagtgttgcattcatgaaaggcccttttaaaaattgatttgttcattttttgtttgcttgtatccatgttgctaaaagttttatcctatctgaatgatgtttgtaatgtatctggatccatcctttcatttgtatgcatctttatcatgaggaattcagttgtttaagtaatgatagcatcaaaagtaaccctgaggtgagaggaggccaaccttttctttagtttaagatcactaaaccttaagtgactgtaagtaatgacttgcaccccctttctttgcaagggtag

SEQ ID NO: 47241 - DNA, 558 bp, Arabidopsis thaliana columbia
tctcattgtgttgtgtatgcgttcatctgtccagtgttatcctcggatcggacccccaatgtggtgaagaattctgcttctaatgctgaggaaaaccatgcaaaacacacaataatggttttgccttttgcaaagaagtcaccggtctggaagacttatgaatcactggaggtcctccaaagtgtatcacacagtcttcatttcagcccattgtttgagactaagcaagatttccgtgaagggtatgcaataggtatgatggtgacttattttgggttactggagaaatttaaagatcttgaagccgacgttcctgtaagccaactaaatagccttaaagattcattttcggagctcgagaaacatggcttcaatgttacaactccattatcacggatcgacaagctgttagcactcaaagatagacaactatatataatggaggaactaaaaggttttgacaaggagatgacaaatgaatttagcaaggctaaacaagagtttgatgacatggaacaaaagattcttgaggtgaacacaagattatcgagctgcaga

SEQ ID NO: 47242 - DNA, 599 bp, Arabidopsis thaliana
ggtccttaggtaaaatcctcaaaaacctaatacttcatcgcctcctcttcttcttctctcatctccgtctctcagagagtgtacacttctccttctgcttccgtcatgctcgagtaccgttgcagctccgttgactggaaaccatcaccggtggtagccctagctaacagctccgacgactctcaagtcgccgccgctcgcgaggacggttctcttgaaatctggctcgtctcccccggcgccgtcggatggcactgtcaactcgtacgtactctacgctagtagcttcttctctattccgatttcaatcgaatcggaatctcgtgaagtatgttcgagttgatttgtggttttttgattggttttaatttaaccgttgccttctttcggatttttccggggttagactatccatggcgatccaaattcgagaatctcgtctcttgcgtggtgctgttctccttctatagggcttccttctggtcggttattctctctagcatcgatggctctatttctgaatgggatcttttcgatttgaagcagaaggtcaaaaatatcctcagtttttcgattacattttgagagtgatatcagtg

SEQ ID NO: 47243 - DNA, 972 bp, Arabidopsis thaliana
  unsure (1)..(972): unsure at all n locations
ggtgttgaaaaactgcttctctgtttttaactttggaaagaaaaaagtagaagcttttctcagaatgggttggtcgttgagaatgtggattgtgagtatactcgtgcttacacagctcgttaatggagctctctgttggggagacgctggtcattacgctgtctgcaaaatagctcaggttaaaatttccttaacttactttctaaagcgtactctaaatttatcttagtaaatgatctatgtgagtatagatctgagagatttcgtacttgagtgagtgttgtaagatacttgaatatcaatttaatactctattgttaagactgagaggaaaaaagggaggctttttgttttgttttgttttactgtttcattgaatctactaaaaactcttctttggacctttgtgtgatatcttgattaataccatttttcaatctttagagttattttgaggaagatactgtagttgctgtgaagaaacttctgcctgaatctgcaaatggtgagctagcagctgtttgctcatggcctgatgaaatcaaaaagctcccgcaatggcgatggactagtgctttgcattttgctgatacgcctgattacaaatgcaactatgagtactctcgtgggtcttttattgatcttttctttcaaatttcactcatgtttctgtttgacgttggtataaaagtatatgtgctttgttgtctttctgtgaaggggactgtcctaaagactggtgtgtgacaggggcaatcttcaattacactaaccaactaatgtctacttctgaaaactcacagagtatagtccactgtgagttagagttctagtgaattctgatacttttgtgtgtgagttatatgaagcatcataatagtgtgacttggtgtntttttttgctttgcagataacttaacagaggctctcatgttcttacacattatatgggagatatcatcaggttaattg

SEQ ID NO: 47244 - DNA, 521 bp, Arabidopsis thaliana columbia
tgatcttgatgagatgatattcggtaagaaaaacggctgtgattcttcgactaatccagatcatgacccaaaaaaggagcagtcctcatccaaaaacgacgatctcattcgattctgagacggatactttcaggcgacataataaatcttttataatgtatttggtgtttaattggtagtatgaatgaacaggttcaatgtaagtaatctgtgtttggagatctctttgacttgtgtgatggtttataaaggagatttgttatgatggcacatgagatttgaaatacattctattctagtttctgctatcaaacacattttgacatctatccaattgctatcgtgcacatttgaacacaaactttgtttcaatttagcgtttacagtcgcagacgcaatcgcggttaagtgaagcgcatcgtcactgttcacattcatagtaatatgcaacaactgagtaacagaaatttgtaatcgaactcagatttcgaagaagcagatctcacaatgtctggaaaaca

SEQ ID NO: 47245 - DNA, 577 bp, Arabidopsis thaliana columbia
cccacaaactttcctctatgacccacgactctttgtacagatttgataaatcaaatagtgacactatcaatatagaaaccaaaactttacaatagcaagatgttagcttttgagaactcaaaaccttctactttgaagaaaatataacaaccaatatgcccataccaaggctactctaagcaatcagattaacaatgtggtcgacaacaagtagaagggagtgagttctcgatagttattagagtaagtggatactaaataaagagaccatcacattctttatcaactagtataaacaatgccgagatgttgaaaccactaattcttagattctacaatccgggtatgaaaaacagtttctatctaaataaaaaagtagagaaagaatctagaaagagacaaagatgcttacttcttaaacatgttcgaggtttattgaaaatgatcaccagcttctaactatggtatcttcttccctgcaagcgaacagtggaagatgattgataacggaaatatcggaacatcactcaacaaaccaaaaatttggacatcatatcgcaacaaattcaataggaaa

SEQ ID NO: 47246 - DNA, 523 bp, Arabidopsis thaliana columbia
cgggcaaaagatgacggtcaaagaagcagatttctccatgacctaaaacattcaaggcaaattaaaaacatcaataacaagattgaagcaaagggacatgtgaacctttgacaatcaagtagcaaacttaccaattcaaaaatccgataatgatcgctgtaaattgagatattatcaatccctaaacccacagcttcggttagtccacgcttcagtgccataatctcaacctctagaactgtaaccctagagtcatgaacttgttctttcatctgaaacaagagattatcatctttgtcgcaaatcgcaaccccaaatcccgctaataactctacggtttcctcgctaaccaaacccttgaagtaaagcctgtacgagtcaggtttgatttcgctggagactctacccacgtgttttggatcttctgctcgtactagagtgctttcctctccatatatgtttctttagttattgtttcaagccttttaatttctcttagacaattaattgaacattaaggttt

SEQ ID NO: 47247 - DNA, 625 bp, Arabidopsis thaliana columbia
tgttcgagtaaaactttctctacaatctgaaggacaagagaactatcacccatttctgacaaacatgagcacacaagctttgtaacttctttaaatgtgccacaatatgtctcccgttcattacactctatcgatgactgcagtttctctgcatgcacataaagccacaaggtaagctatcacaaaacataaaaagtatgattatctctcaaataagctcacaccaaaacaaattacaaaaatgtaataaaaagttcaaaagttttttcttaagctcaaaagagaaaaaaaaaatcttgcagatacctgggacaactttgaaacgtgcaattaaggtgataaggaagctaaaatgatctgtaatctggatatatccagctctataggcagtgtgaagaatttccactatccgatacaacacagctggttcaagttgtggatctgcaatttacgttgagtcaggtcaattacccttttcttgcattttattataaacagaagccacttttaatgttgaataaaagcatcaggaaataaaaagtgatactcacataaacagcatgaaactattgctttcacataggggagctgaatttgtctgtggtgaagtagtaagggaacagag

SEQ ID NO: 47248 - DNA, 516 bp, Arabidopsis thaliana columbia
tctagatcatacaaaattacaactaaagcaaacaatgggttatggttaaactagcaaaattgtatgaatgaaattgttaaatcgaccagttagccaacgcgtactaactaatctacaacgagtcggtttagtacatatgatccaaagattttaatacgttaatggattagtcatcggtcaatttttggaacgttgatattatttatttaacgtagactttatgttcactccattcaaaatctgatcaactgtacaaaaacaaattttgcaagaagaagaaaacataaagaaacacatctattgcatcgtgctgataatcaaatgacccaaattttttaaaaaacaactagaacaagtagatagtgttttttgttggttttgtcacgaaagtttctaatccgcatatctcacgttgtctaaaaaaaaaaaaacgttaatcgatcgatcgtatgacgtatacctcaaagatcgatttttttcttgcagtcaacatcttgaatcgcctgtcccgtaatg

SEQ ID NO: 47249 - DNA, 626 bp, Arabidopsis thaliana columbia
cccagcagtccatctgttcatctttattcatatgttaaaagctgaaactgtagatatggtgaggagaagggttggagatgcaaagaggaatctgcagactatgtttgggttttggacccaatcgacggaacaaagagctttattacaggtggattctttattctaatatttagcatttttcttgtctttttcaagagtttgaggatttgattgtgctatcaattgctttgtctcagggaaacccgtgtttggtacgctgattgctctgctctacaaaggtaaaccggtaagacatcagactctcttgttgtttgcgaccttcccatgtttgtggttgtatgcattataagcacattctgatgtcagatcgggaattcttattgaacgtgttttaactacttttctgattctgaagaattgcattttaggcttactaactgaccttgtcttcactttcagattctaggactgattgatcagcctattctaaaagagagatggataggaatgaatggaagaagaactaaactaaacggggaggatactcaacgcgatcttgcccaaattacacaagcatatttgtaagtttgcgtcattgaccgtaatagcaatactttgaaggaaat

SEQ ID NO: 47250 - DNA, 587 bp, Arabidopsis thaliana columbia
tcctagtgtcattcttagaaagcatattattgtactgcattggagaaagggctggagagagagcagcagttgcagatggtgcaggtggcaaagaagttgaaggtgcaactggtggttgtggaggtacaggctctggaagaggccgaggtagaatgtgcttcagtctgttgtttctgtagttcttccaatagtaaaactgttgtctatgcgccaattcctggaaaaatccagattcaaccgaagacaaagttcaaaacttaagaaaacttcaacaacaatagatttcctataagaaattctgacaaaggacataaagtttagaatattaaacaactttctctatctcatgaatagatgggcataaacgcagaatcacagaaccaaactagcagaacgtaagcaaggttttgtactagagagaccctaaactctacaagtccccaaaacacattccaaaaacaccagtaccctaacattttgaccactccctatgcacaatgctcactaacatgctgatttcacttgatgattcatatcgtattcttgtaccttgtttgcaggatgaccatagcagtctgaagttgggg

SEQ ID NO: 47251 - DNA, 535 bp, Arabidopsis thaliana columbia
  unsure (1)..(535): unsure at all n locations
tnnnnnnnnnnnnnnnnnnnnnnnctaaagtcatcagcgcaccatggaacgtattatctggccaaccgtgaaaggcatggcggcggaaggcaacacctacaccggttttctctacgcgggcctgatgatcgacaaacagggcaatccgaaggttattgaatttaactgccgctttggcgatccggaaacccagccgattatgctgcgcatgaagtccgatctggttgagctctgcctggcggcctgtgaaagcaaactggacgagaaaacgtccgagtgggatgaacgcgcttctctcggcgtggtgatggctgccggtggatatccgggtgattaccgcaccggtgacgtgatccacggcctgccgctggaagaagtggcaggcggcaaagtgttccacgcgggcacaacactggcggatgacgagcaggtagtgaccaacggcgggcgcgtactgtgcgtcaccgcgctgggtcataccgtggcagaagctcagaaacgcgcctatgccttaatgaccgatatcactgggacg

SEQ ID NO: 47252 - DNA, 506 bp, Arabidopsis thaliana columbia
cccaagggtgttctttgctatggtcctcctggtagcggaaaaacccttgtcgctagagctgtggcgaatagaactggtgcttgctttatcagggttgttggcagtgagctcgttcagaagtacattggtgaaggagctaggatggttcgtgaactgtttcaggtagtccagtggtaaaagcgccttctcgccatctcagtttttttcttagctaatattgaaattgtataatactcgctttctagatggcacggtcaaagaaagcttgcattttgttcgttgacgaaattgatgccattggcggtgcaagatttgatgacggtgtaggcagtgataatgaagtccaacgtaccatgcttgagattttgtatcagcttgatgggtttgacgcacgtggtaacatcaaggttcttatggcaacaaacaggttagtccacaatcctgttaccagggtaaagcaaactacacaaaagcacattaaagcgttgacttgacgcactcaatgt

SEQ ID NO: 47253 - DNA, 436 bp, Arabidopsis thaliana columbia
tcatcatgtacattataagtaatgttcgattcaaattactgtagatgcgcacgtgtcacttattttattgtgacctctaaaaaaaacaagaatatataccaatataccattttattagttggtaaaagatagaaatactaattttgacaataaaaatttaaccatttcaccaaataaatgatatataagaaactttgtagcttatgctttaaccaatgtacaaataatattcccggaaattctgatgttgtttagtccgctgcttaagtagttgcttgctatcttattttaagattttggagtatatttcaataaggtagaaaccggagagatgacatgattattggggggtccgaaacgtataaaatattgaaggtggtgagacaacaagttagcgaggatcgtgcataatcgtcatcaacagatcaacaaattg

SEQ ID NO: 47254 - DNA, 513 bp, Arabidopsis thaliana columbia
caaagccattattaacggcgaagaaaccgccgttaaaaccattaacaactggcttagtaagtgaaggaggaataaactctttagccataggattaagcttagacaagagctcgtgaagctctctcatatcacgcttaaaactctcaccaccgtcggatctcgccacgtggactccgatctcatcatggattccatttccaccgtgatcgttgttagaagaagctcctgattcttgactggtgacggaagacggcggcgacggcgagatcaaaccaccagcttccacagtagtattagctccgacgctctcaatgaccgccatgatcacaaaatcgaacaaaacccagaaataaaaatctgatttttgagagaaccaacgatcaagtaaagagatttgaggaatacaatgaaaaagggaacagtggctataagaagagagcaccaagaaagagaagagagaagaagaagaggcaaaagagtaatcacccaaagattaatggtgattaattttga

SEQ ID NO: 47255 - DNA, 561 bp, Arabidopsis thaliana columbia
tgatagtagctgtgtatgttgattatctattcctcacagggacaagtttagagctcatcattagattcaagaaagaaatgtcttcaaagtttgagatgagtgatcttggtctatagtcatactatcttggaatagaagtactacaacacggtgaaagaataattttgaaccagagtcgttatgcgcttaagattatagaagaagctgggatgaaagactgcaatccagttcatacacctatggatattaattttcaaccatcaaagtctaaatatgaaaaagaagttgatgctaaactttacagaaggaatgtaggttgcctcaggtattttcttcatacaagaccggatttttcatattgtgtaggagttttaagtaggtacatgcaaagtcctacagaatctcatgatgtggcaatgaagcaatgcttacgatatatgaaaggggcgactacagttggcttaaactacaatcgatgtactgaaattaagttaaatggctttagtgacagcaatcacagtgttgatctagacgatgggagaatgttgggagtcctgtgtt

SEQ ID NO: 47256 - DNA, 575 bp, Arabidopsis thaliana columbia
ttgcatctgacttgaaagcaagctccacagccagcaccatctttgtaaatggaaggtatagcggccgcaatgtggccggcaaagaagctcgtagccatagggccataggacaagccccggctagaaaatacccataaacaagacatgagaaaaaagaaacaaactagtagttaaacggaagtagttagaagaagatgggaatgtttacaagagagagcagaagcagaggagaaataagatgctttagaacggtgtagacatcgatcacaagcgttaacggatgaagagaagaggaagatgactacgatgaggtagagaaagcttctcatttttggacttttcaagaggaaagaaataatatctagtgagcaaattagagagatatgtgaatttacatgtaaagagaagagaggacaaagaatggattatataatatagtatgatgaatgatgatgaagattgaagagagttgatgccaactcagcgtctcaatatctaagaagctagtgtgtaccttttctaattacgcgtttgactcatagagtcattagtcattattagtgtgtgactgtgtg

SEQ ID NO: 47257 - DNA, 384 bp, Arabidopsis thaliana columbia
catcatagtccattgcgcacaatccggcgacgggatacatttgcaataaggatagagaaatgtcttccggtagaagcggtggcttatcctccgataaggtcgtaactccctcaccaactcctctccccaccgcctgactttctgtgtccttaacggaacatggaacatcccgaactgctcaagaaaatgtaccgccatagcctcatatccaacacacatacagaagataccacaagctattgttgcagcgccatcctctgggactaactgcgctagaagcgcaataccagcggggatgtcacaacattcagccagcaccctgagcccgtcataatatatggcggtcttgctatgaaaatctgtctataaacatatttcatatga

SEQ ID NO: 47258 - DNA, 659 bp, Arabidopsis thaliana
tctgctgatgggctcaagtaaactcgatgttctattatcgggacatgcagagacgacttgttgagtttgtgaaaaagcgagttctgcttttggagaaggcgatgaattatgaatacgcagaggaatattatgtatgttgtaccatctgcagtgttggtacttactcacatgttttgcgctgaattgtttaactttgattgaatctctggttgcagggacttggtggctcatcatctatccctactgaagaaccagaagctgaaccaaagatcgctgacacagtgggagtgagctttattgaggttgatgatgaaatgcttgatggacttcctaagactgatcctatcagtaagttccatcacaagtttctttatttaacgagttgttgattctaatgtgagctctctgaatctcgctgcagcttcagaagaaattatgggggctgctgttgacaacaaccaagcgcgggtcgaaatagctcaacattataaccaggtaagctatgcttttttcctttggtggtaggctaatgtctagaactagtatatcacactaatatctctccggttattcagatgtgcaaacttcttgatgagaacgctcgggaatcagtccaagcatatgtaaacaaccaaccaccgagtaccaaggtgaatgag

SEQ ID NO: 47259 - DNA, 471 bp, Arabidopsis thaliana columbia
cgccagtgtgctctaaaggcagaaagcgctgagagcagggcaaattgagtagcggaaaatgacttattacatagcgtcattaacagcgcgacaaaggctgatgtgcccatcccgccacagaggttttcgaaaaagacggctgcgcccatgctgtagagatgcttatcagtaatcgacagcagccagtaaccggcgttagacgcaccttgtaaaatgccgaaaatcagcaagtgcccggaacagtgacaggcgctgcatcaaaatcccaccgtacaatgcgccaacaatggtcgctagtaagccaagcgttttgttaaccacgcctacttcacccgcatcaaacccgacgccgcgaatcaaaaacgtggttgtcaggctcatggcgaatgcgtcgcccagcttatacagcacgataagaagcaaaataagccaggcattattgcgaccaaagaaatctcgcagaggtgcaac

SEQ ID NO: 47260 - DNA, 1169 bp, Arabidopsis thaliana
ttaaactcttagagaagcatttaaagatccaggcgactttcttctaagtgacttttcaaagtttgaccgaccacctcttctccacttagcattccaagcacttgataggttttcgtctcaagcaggccgatttccgtttgctggttcagaagaagatgctcagaaactagtggaaattgcagttgacattaatgagggtttgggtgatgcaaggttggaagatgtcaactctaaactgttgcggcatttggcctttggatccagggctgttctgaatcctatggctgcaatgtttggtggcattgttgggcaggaggttgtcaaggcatgctctgggaaattccatcctatctttcaggtaaagacttttctgtttggtttttcaggggctcatctgttcggtctttgtatgttaaacttctacttgttgagcaatgctgttcatctatgttatacaggcatttactctacatgagtcctataccaggactaaagtttctcttcccttgttagtagtatttcttttatacttggtaatgtggtaattagtttgcattatttgtgcagttcttttactttgattcggtggagtcactccccaaggaacctcttgatgcatcagagtttagaccacaaaatagccgttacgatgcacagatctctgtatttgggtctactcttcagaagaaactcgaggatgccagagtttttgttgtaggggctggtgctcttggatgcgagttcttaaagaacttggctttgatgggtgtgtcatgtggcacccaagggaagctaactgtcaccgatgatgatgtaattgagaagagcaacctgagtcgtcagtttctttttcgagattggaacataggacaggctaaatccacagttgccgcaacagcagcagctggaataaattctcgcctcaacattgatgctctgcaaaatcgtgttggacctgagaccgagaatgtctttgacgacagcttctgggagaatttgacagttgtggtgaacgctttggacaatgtcactgcaaggctttatgttgattcaaggtgtgtgtattccagaagcctctcctcgagtcaggaccctaggtgcaaagtgcacacacagatggttatcctcactcactgagaactatggtcctcgagagaccacagagaaca

SEQ ID NO: 47261 - DNA, 561 bp, Arabidopsis thaliana columbia
cctttctgtcttctcgggtaattacgtatctgacatatatcacaatccccttcgattttgcagaagaaggaagcagagcatgatgctgacggtatgaggagaggggttttggttccttgcaaattctctgccagcaggtaatctctctgctaaagaattgagttattttttgttgggtttggtcacaacaatttgtgtgtctgtgcaaatgggaaccattttttttctaggggtttttctgtcgaagtgagtgtatatgaaacctgccctttttttttttttttatgagctatataaaccaaaatcagttgtagtttcgtccttattagctactattggactcaacagtgggagttgaatccttcatctctcagaatctgagggagatcacttgtttttttttgttcttcttttcaaagttgtagctgtcttggtgcagcatatcacgttatgatgtcttgctttttgatcatcgaaaccaattgtgtaaaaggaaaggctgacttgacttgttctgcatatatataatacagcttgggagaaagacaggaagatcaaatg

SEQ ID NO: 47262 - DNA, 534 bp, Arabidopsis thaliana columbia
gaaataccccttacaatacgcggcgttttaagaaggctcggctcgtctttaactgctataacaacacactcttaaaaccctaagtgattgtccgtctccgtcttcatcttcttcctctctctcacgcagctgctttgattaactcttcaggtatttaatatctctcatcttctctcttcacggtgtttcacttttccattcttgctggagattgtggagtttcgaatactcatactcggacagagttttaaggctattgtagtttatctctctgttttttcttctcctgtatttcttatgtgatctaaaagtaggattagggtttatatggaatgctgtttctcgctagtttttaatctcaaaacgaacttttagtttaattagtgtgactcggacacgtatctttactgttctgagttaagtgttgtcttaattttctcttcaggtccagcttaagagttttgtgaagatggtcttagtgctatacgagacagcggcggggtttgcctctttaaagttaaagatgaaggaaag

SEQ ID NO: 47263 - DNA, 505 bp, Arabidopsis thaliana columbia
ttgataagaccattggagaaatgagatcggagttgactcatgcacatgaggatgccgatgtgaagcttagatctctcgacaaacatcttcaagaggtttgttattgttatgcaatgtttttaatcctttttgttaattttagtttgtaaaactctgatcagtaattgaccatggatgttctgttgtaggtgcataggtctgtccagattcttagagacaaacaagagctagcagatactcagaaagagctagcgaacgtacaacttgtgcagaaagagtcatcttcgtcgtctcactctcaacatggtgaggaccgtgtcgccactcctgttccagagcctaagaagagcgagaacacctctgatgcacacaaccagcagcttgcacttgctttgcctcaccaaatagccccacagccacaggtgcagccgcagccacagccacaacaacatcagtattacatgcctcctcctcctacacagcttcaaaacacacctgcaccggt

SEQ ID NO: 47264 - DNA, 589 bp, Arabidopsis thaliana columbia
  unsure (1)..(589): unsure at all n locations
cctctctacaacatcaccggacgctgcgtttgcgccgctaaaggcgtngcgtgaaacgctgaaactcaacatggctctgattttggtcccagtctgtagaaaaaccctaacgatacttaggtcaacgttcttgaaccgtgtggtcccattcgacgacaacataaacttccacaaggtgattgcatatatgatcgcgttccaggctttgctccacacggcacttcacatcttctgtaactaccctaggttaagctcgtgctcttacgacgtgttcttgacgtacgcgggtgctgccttgggaaatacgcaaccgagttacctaggtttaatgttgacgtcagtgtcgatcacgggtgttttaatgattttcttcatgggattctcgtttacactggcgatgcattattttagaaggaacatagtgaaattgcctaaaccgtttaacgttcttgctgggtttaatgcagttttggtatgctcatcatttgttggttcttgcttatattcttctcatcatccatggttactatcttatcatcgagaagccttggtaccagaagacggtaagataattttgtaaatatattta

SEQ ID NO: 47265 - DNA, 557 bp, Arabidopsis thaliana columbia
aaatctgtgtatggttataggcctaattacaagatctgaggaacagaagtactaaccaaattagaacctagggcatatactgtgaagaacatgatccggtgatacattcgtcaggaacaattacaatatatagcaatatcctgacaatagtctgcagagttttgaacttttgatgcctctggatgtgaatataccgccaaaaagtccttcatggaagagaatgcaggttctcgatttcgaactgattgataacaatccagaaataagaaaatcagagacgaagaagcgaaaaagagagagaccactcgcagcttgctaatcaaagtgtaaaagaatatacaaaaggtagtctaccttaacttcaggatggcctgtactgagccgcggaaggtacatctggtcgagacagaagcatctgcgaacgaatattaccttgaatggcaaattaaaacgttaaacattgcagtgaaacgcataggatccccaattacaattgaaatagatcgtctcacctgaaatcgtagagccaccttgtaagttattagcagcaagctgat

SEQ ID NO: 47266 - DNA, 608 bp, Arabidopsis thaliana columbia
gtctttgcttgaaaaagagagtattgtgcatcagtatgggattcgggtctattttatcggtaacttagcgcttctaaatgaccaagtgagagctgctgcagaaaaagtcatgaaagccacagctaagaatagtcgggtagtgcttctcatttgcattgcctataactcgacagatgagatcgtacaagctgtcaagaaatcttgtattaacaagtcagacaatattgaagcatctaattataaacacgaggatagcgatagtgatatagaaggaacagatatggagaaccaagagaagaagatacagttggtggatattgaggagaatatgcagatgagcgtggcgccgaatcctgatatactcatcaggagttcaggagagacgaggctgagcaattttctcttatggcaaacaggtaatacccagctctgctctccggctgctctgtggcctgagattggtttgaggcatctgctctgggctatattgaacttccaaagaaatcattcatacttggaaaagaggaagaaacaattatgattgtcttgaaaggagactagtgaaggatatacaaaggctcttctctatttggctttgtatgtgatgg

SEQ ID NO: 47267 - DNA, 376 bp, Arabidopsis thaliana columbia
tcctggatttttcaatgtttagtctcgtgaaagtttgctatgtattcgtagtcttttagccataaatttataattgtggcaaatcaattgttcaggctgttgcttagtcctggtcaagattggagatgttatcttaccaaatatgaagggtaaataatgtatcaaaaactattagtctgatcttattaattagtcaaaattcaataactatatttctgtaattggtcatgtgtatcttgaccagaaaagctagcagatcattactcttgtatcacagtataaatagatatctctattgtgcatgttatcccgtatatttagtagccattaactatagcagatcttcatgtggaatttcagatatctttgttaacga

SEQ ID NO: 47268 - DNA, 717 bp, Arabidopsis thaliana
ataacagatgagtcttctataagcaaatgattagaaatgaaacaaggaactgtgtcatacatgatagtagtgtgaatcagtagtctccgcatgaactgggatctcaatcaaatttgcatctaagcatctgcacatatagacatagtacagttagaagtaatgaattgagagtgaaaccaactatataagtttcccaaatgagttctaaatctaggctagtcatatgaaactttataacaaactcattttcagtgtccctttacctgtgattgatgaacctggaaatatttccatagtgcgttccttcaagagaaagtgctttgtcatcccctgaaatgtcttcagaaccccagtacgcatccaatattactggagaagtaggcctgtcagagatgcgttggaacaactctggaatggtcaatatctctccagcaagctcacagacaaatgctcctttaggcagtttttctagagttctgagtccccagcctctcccattgggcgtgaaaaacacctgattcaaaaaaaaaaaaaaaaaggaacataaacaaaattcaggcatcagaatctctccactggttaagtccaagttaaaatgatcataatcagtttcaattctatcagaactgagatgggtttagattatcaaatcctggactacttggctaaaaaggttggtaagttgaatgtacctgcagcttgttgtgaatccctgtt

SEQ ID NO: 47269 - DNA, 616 bp, Arabidopsis thaliana columbia
tgtgaagtctctctgaatgaaacacatgttttacaaaaataaagtaaaagctagctccaaacgacgacgtttctagttaatttaaccgagaaattcacatctattagatttggttcttgtggtttaatttggtcaatatcggtttgctacaaatgtcatatccaggacatgaataaaggaaagactgaaaaattgaaaagttgcatacttcccaagtctcaattataaggaacttccagagacattaattattatacaaaacgaccatttttgttctttacaattgaatagacaatactgttttaagcttttcacacttgtgatctccccgaatgtgaacagatcaaagagttattcgtcgtgggtaaatacattctctaccttaagagctaaaaacaggaaagagaagagtgaaacacagaccataaccagcatcactatgagcattgcttgcagtgatatgtacgggcttaggaagaacactatcgctattgctgcgctctgccatacttttagctgcgcaaatgctccttcctgttttccaagtacaaacataggagactgtttagaggatttgtcagttgagagaatacgaatataatattttgataatatt

SEQ ID NO: 47270 - DNA, 394 bp, Arabidopsis thaliana columbia
cggacgaattctttcctccagctaagggttgaggcttatcttggtaaggaacaccgtttgaaataccagtattaacatagttaaattgttcacctccctgagcaagcttgctttccacagatgtctgcataactggtgtctgcatgattggtgcagcagtgaggtttgtctgtaataatggcccaggcagaggctcacgcacctgtagatgttcattatgtaaagttgggttttcagatggcacccaatttgggtctaaagggaaggctctatcttgcaaatggggattagggtaggaccgctggccaagggaggacattccatcaaagcctgaaatcctttgcggagaaccaaccaaaacaccttgattctccattccagtagaatacctagg

SEQ ID NO: 47271 - DNA, 418 bp, Arabidopsis thaliana columbia
tatctttcttcctctgttacgcttcttcttgcttgagattgtgatattgtagagctatgagcatttgcaaataatgatatagtaaattattggatcttttggccgagatgtaagaatcacgcatggtggctggatcatgaatgaccagagccctctttcacgaccctggttgtgaatggatgcgaatagttatcctcgtttatttggaactaggaactttccttaaagtcacttgccactatgtacatatgaagtttttagagttgctatatttttgcaatgcaatcctattaatataaactttgttataaataaaagaataatagctttgttaggaatatatgcagcgaacttagcttatcctatctataacttgttatggaatcttctaaacttatctctattgttcaacaacaca

SEQ ID NO: 47272 - DNA, 381 bp, Arabidopsis thaliana columbia
atcatcttcacaagaagaactgtttcttgttatagatcaatctagtatgtagcctactagacctatttcctataagttaacgctctctcatttctcctgcagtctaatgggaactcaatgtatggttatatcattaggtcgtcgtaaatgagaaaatgttggactagcctcagagtgggttgtatgctttcaggcagatgggaaagttacctgtagctgtctgcaaattcatctctcacaagcctttgactatgtcaaatgggacaacctcatccagactcttaccgatttggagttacatgctgcattcatcaattgcatactggtttgcgtacgaactgcatcatatatgattgctttcaggtaggagctaaatgggag

SEQ ID NO: 47273 - DNA, 343 bp, Arabidopsis thaliana columbia
tgtcccgtatacgctcacctgcaagaactcatcattgcatcagctctattaatatgaatgactctagaatctcatgaacagcatacctggtctagcaggcaagtaaatatagctttacatctggctgcaagtgtggctggctgcacaaagaaatgcttataaatagcatgtatgcaatcccagatatgaaagtctactgactgcatgataattgagccgtcagcaataatatagagtatgtctatgtcaatagcctattccgacatctacactctaaattcacagcaactaacgtatgagggaaaagttgcgcaaaaattgctaaggacagtaaccggagatg

SEQ ID NO: 47274 - DNA, 439 bp, Arabidopsis thaliana columbia
ctttctggagaacaatagcgctaaaaggtaaagaatgaaaagaaatgtacacatgactaatgagtaatcatgaggtctgagaagacataaaagcaacagcaaaacaaaatactgaaatgttaccttgccactgggctgaaggtctttatcttccatgtcttcagcttcggcagttgaatcaatagctgctaccttggaggaacaactgagattaatgtccggagctccagctgcaacttgtacactgcacgatccttcccgctcttcgacataatttgagttattacagtagatagagaactgttgaggctcagaagcaagagaatacaatttaggatctgaggtccatggaatcagctgctcatagttccggatatcagcaacatctacattattacttcttgtcctaacgcactctcagctaccagttcatcagtgt

SEQ ID NO: 47275 - DNA, 408 bp, Arabidopsis thaliana columbia
atgaatgcttcacaaaacagattaatgctaaggtattgttgaaacagataagaaaacaatgagaagagaagtatagttacctgactagtagatttggcatcatcatgaccttcagttgctggtaagttggggttaaaaggagagtcaaaggatggcgcatggaaaccaccatcctgaacaatatccttagaagtgtcaggagataatgattggacttctacgcgttgacgcttacgggaatcagatggaggaggttttttgctgacaaaaggcgaaggtttcttgctgagagaagttttgactttgcgggaaggacgaacacctgacttgaaagaggcagacttcgactctacaagcttctccatatcagcaaataaattagagcgcacgaaatgtaactgttgagag

SEQ ID NO: 47276 - DNA, 473 bp, Arabidopsis thaliana columbia
ctaggtcttcatgattttcatggtggaggatatattttaggccgatttgagggctttccatcagttttaaacggaggaagtgacgaaaaagcatcaatcgagagcaattaaggcgtgaaattagggtttctgaagtatatgtatggcttcggagcctgttaacggaggagaaggtatcgatggagctagagagaagcaaatcatcaaagtttataagaggaaaggcaaaggtcaaagaaaacagtcatctttctttgcccttgaggctgccatcgagaaacctgaggggctattagaaaacgagaatgataacaatgatgtgagtcctgccgaaactctagctccagagtttgaggatcctatagttgtggtgaagaattctatcgaagaggctgctcttgggactaattctcatggagacaataacttaactgaagcgccttctgaaaacctgcctggtgatgattcagaca

SEQ ID NO: 47277 - DNA, 644 bp, Arabidopsis thaliana
gaggagttcccggtggtgtgtttggaagtgtctccggtggtgtgtttggaggcgtttccggtggagtgtttggaggactttgtgggggtgtgtttggtggagtttccggttgtgtggttggaggagtttccgggggtgtgtttggaggagtttctggtggtgtggttggaggtgtctttggtgtgtttggaggagttcccggtggtgtgtttggaggtgtttctggtggagtatttggaggactttgtgggggggtgtttggtggagtttctggtggtgtgattggaggagtttctggtggtgtggttggaggtgtctcaggtggtgtgtttggaggagttcctggtggtgtgtttggaagtgtctctggtggtgtgtttggaggagtcccggtggtgtgtttggaggtgtttctggtggagtatttggaggactttgtgggggggtgtttggtggagtttctggtggtgtgattggaggagtttctggtggtgttgttggaggtgtcccggtggtgtgtttggaggagtcctggtggtgtgtttggaagtgtctccggtggtgtgtttggaggagtcccggtggtgtgtttggaggtgttctggtggagtattggaggctttgtgggggtgtgtttggtgaat

SEQ ID NO: 47278 - DNA, 370 bp, Arabidopsis thaliana columbia
taatatctctatccatttatttatgttattaataaaataaaattagaaagaaaaaaaaaaactgtttttgtttgaaattttgtgcaacgcgcatgccaaaacaaaaattggagggaagcgtgaataatgggaatgatgagatttacttacatctataagagtagacttgtttaggcttttaaaatttgtttggtccactctaagactaagacttgtttgaattattttattttgtatttctaagtatttactatggtgaaaactgaaacattacggtgaattacaaaaaaaaatcatagtaaactattcaaaatatttttttgttatttacaaactatcagttttgaatttggactatatatatatatat

SEQ ID NO: 47279 - DNA, 523 bp, Arabidopsis thaliana columbia
ctgtatacaataaaaatgaatcaaattaattaggtacctttccttgtaattgtaaacgaacccaaactattgttttttggtcaggaacgaatccaataatttaaatttagatggaaattttaaatggaatatgattttgtttattaataggtatggtagggctaaaccatctttagcaataaataatagtttagtgtatttagtgaggatcatgtgaaagtcatcagggcttacctgtctcttttaaaaattttaatgtgtcttatttttttgtttaatatgtacctgttctttaacaaaatggtatccatgtgttgcgtgcccaaaagagcaaaaacatattatgctgttgcatatacatataattagttacacactatttatacaacctatttagcattaatttttctcataatgtgacatgaacaagagaaggaacaacaaaagaccaaccaatgtatcatttataatctgtgttagggatacaaattaaagtcattcaatatgcatgccccccaatagt

SEQ ID NO: 47280 - DNA, 657 bp, Arabidopsis thaliana
tggtggagtttctggtggtgttgttggaggtgtctccggtggcgtgtttggtggaagcgttggtggagtctgtggtggtgtgttaggaggtatttccggtggtatggtcggaggtgtctgtggtggtagggttggtggacctgttggtaaaacttccgtagtggtgtggctggtggacccgtcggtggagtctccggtggtatggttggaggcagtgttggtggaatctgtggggtcacagttggtggaggcggtggcgatggttctggacaagtacatactggacatggtggcggaggaatgcgtggtggaggtgggcggagatagggacggttttgggcttgggtttggccgaggagaagaatgctgatcagtgtaaggaagagagctaaggtttttgttgaaccctttggggccattttgttcttaggcaatctttgtcctcacaaaagagaaactgtacggaaacttgtgaattgaggtgtagtggaactatgggtatttatatggccttttggagatttactagatatgtaaattgccatatgtttacgtacattgccaaacctattttcccagtcaagtctcagaggtagtttcccttcgattcacagctcaaaaagtttcggtgcttaggctgaagctagtctgtggtta

SEQ ID NO: 47281 - DNA, 562 bp, Arabidopsis thaliana columbia
aatagctaactactcataactgattaccaatccagacgcagtatgaaacatccaaactaaagatccaggggtcttgaatagagcgaaacaaactagttaaaatagatacatattgaacagaactcacgataaaagttggtaaacagacgcctgtctgggactgaatgcaattgcggtaacagctccagtgtgtccccgcaatacagaaattggcattccatcaggcaaccgccactgtaataagaatcaatactatctaactgacaaataaataaaaacaagtaagacattaaagactagaattgtactcttaccactcgaatcacaaaatcgtttgaagctgaagcaaccaaagcattgtttgaactaacggccaagtctgtaatgtcaccctacaggaaacatgcataggcgagactaattttaatagaatagtcgagaacctatggcttacaaatatggaaagcaatagctcacttcatgcccacggagcatagccaagcaaagcgcagtttccattgaccaaattttgacaagccggtcatcggagccagtgatacat

SEQ ID NO: 47282 - DNA, 595 bp, Arabidopsis thaliana columbia
tgaatgttcactgtcttttgtgtgaaacctaactcgttcactagcccttttagccaaattgcctcctttgctgcatctgttaaagccatatattcagcttctgtactcgacagagctacaactttctgcaggttagacttccagcttattgtatttcctccaaaagtaaacactactcctgaagtagatcttctgcttcctttgtctgcagcataatcagaatcgcagtacccttctagaatgcattctccttcattcttgtaacacaactttcggtctaatgtaccactaatgtacctgagtatctattttacagcttgccagtgttccttcagaggcttactcataaacttgcaaactagacctactgaatgggctaggtctggtcttgtactaatcatcgagtacatcagacttcctactacgctttgatatggaatagccctcatcacttcagactgcttctgcacttcttcatcatttgctggctttagtttgaaatgaattcccatgggtgtgttgacagacttggcttggccattccaaagtccttgagtacctttagtagatagcttcttgtgagatagcaaagtac

SEQ ID NO: 47283 - DNA, 516 bp, Arabidopsis thaliana columbia
cagtaatcaaaacgagatgcattgatgcagccccagttctgccctgccgaaacacattagttaattaacttctcagagcagttaagcttaagggtcatcaatactctttaactttaacagataatgttctacctaagagagatacacacatctaattgcatatttataaaatgaaattaaactcgaggttaagaagaaagaatctacctctgcagtctttccctgatatagcttgcttggaagaactcctctactagcatgcaagctaaggtattgattaatctacaaaacatcaaaccagagtgaataaaccagaaatcgcatgaaattgtgtaaagaccagcgaacgaacataaattcaggatcattgtctatctacacggaagaaaatagcatatcataaatctcacttttctgtgattattggggtgaattctgttagctgccacaggatcaagctctttaagaagttcatagccatggctcaaatcatctctcccaaagacagactcaaca

SEQ ID NO: 47284 - DNA, 417 bp, Arabidopsis thaliana columbia
aaaacaacaaaccggttgatcttcaagatttgtgtttgaggttaacttttgacaacatttgtggtctgacttttggtaaagacccggagacgctctctctggatctaccggataatcccttctctgtcgcttttgacaccgcgacagaggctactctaaagagacttctctacaccggtttcttgtggaggattcagaaagctatggggattggatcagaagatgagctcaagaagagtcttgcagtcgttgagacttacatgaacgatgcaatcgacgctcggaaaaactctccctccgatgatcttttgtcacgtttcttgaagaaacgtgacgttaacggtaacgtacttccaacagatgttcttcagcgtatcgcgcttaactttgttctcgcaggccgtgacacttcttcgg

SEQ ID NO: 47285 - DNA, 494 bp, Arabidopsis thaliana columbia
atatatactgttgggatattattttttagtctataataaatgattttatcatactataatttttttattttattttggacggcatatcatctagaattcacatatgcacacgtctgagtttgatccttttagatataagatttggtatggtttcgtccattttaaaaatgtaaagtacatttgggaaaagaaaactaaaacttcatccaaacataacaaaacaacatttctttctttttttgaatgaaaacagtacaacgtttctaaacacacacaaaacaaaattgttgaatgtgataacgcacaaaagaagaagattggtttgaatatataatattgattccccatacatctttatatgatttaggatgttatatattaaacactgagatttgtataactcgtggtattcactgatcatgttatactgtcagattgtcatgacttattactttattcatgttggctgttggctattgcttggaaaaacaaag

SEQ ID NO: 47286 - DNA, 506 bp, Arabidopsis thaliana columbia
tgaagatctcttctatctaagaaacaggtcagttgatattcatcaactgttccaaatgtatactagatatatatgcataggagatatctttatcaaaaaaccatgaagtaatttcattgttataacttataagaattctttggttttagttattcctaataataataatcaacatccatctcaacgatgaggttgagatgttaatacatatcttcctctgtttacttttccatattgcaacttgtgcatctctcccctcttgagctgttgcgtgtggtccatccaattctttgtcatatttaaaaaatgaatgctgacttgtacccaaccatgagacaaaactctggctgctatattctttaaacttggtccctcttgcaacttgttcatctttctactcaattcactgattcacgctttctggacatgtgaactaattaatacctcagtgatatcgaatagtgaatactgaagccactgtacggtactgtttgtgtcattggaga

SEQ ID NO: 47287 - DNA, 532 bp, Arabidopsis thaliana columbia
attaattaactagataatttaagttaaaaaaattgttttttgtaaattgtgtctcattaaattataggatgttttgactcgcacacatatcaatggttcaaaacgttgaccccagattggtttctttaaatggtaaagtaaaagtcaacctttagtttgagataataaaatttaaaagccaattaattttcttttgaaatttatttacaatttcttgttatgagatctacattattatatacagtaacactcagttagatattaatctcttgtatttagccaaaccaaaaaccatcggatcaatgcataagttttggaatttctagtaatttatttccagttaagtatgtttttatagtgtagcgtagggctagaagacgatcctgatcaatgcaactaatagaatctcgaacatcaaaacaaaacaaagaaaattatagagatcgagttcatatctcggagcgacgtgtatcgatgatggtctgacgcacacacgtgaccgaccaagcatcacgtgctgctgaatgctgat

SEQ ID NO: 47288 - DNA, 543 bp, Arabidopsis thaliana columbia
gaatgcatgaaacgttcagatacattcattatattatacatttatacatattggacatggtgtacgtatgtacacgtggtgcttgttttgatcacgggctcactgactataaaaatcatgttttttgggacatatagattcgcttacatcaactgtgtgaccaatggggtatctgaattcagcttgttcgatgtcttgtttgactcttttaaactaatttggtagtaaaaagccaaaaaggaagagcactgattacgaaagcctttttgtctttttgtttcttcttctctagctctctttcgttctccttttgggttagtccttcaaaataaatgtctttaacttgtcatgtatagtttctttctctagttgaacaccaaccataggccttgcaatgtgagtcaaaacatgcattgaaaaaagaagtgaatttcaacattaaatgctctagtttaacatgcctatggttccattaagcaaagtacacactctatatatgtcgaaagaactatacagtcggtgttttagcctatagttagatac

SEQ ID NO: 47289 - DNA, 524 bp, Arabidopsis thaliana columbia
atgttaccacttacaactgatgaaacaaatcagtttgatgtgaattaaaaaaaaaaaaatatcatgagagggcttactaaatataacaatcttcttacactttgaactaatattctcagataacagagaaagaaagtatgcacaatacaaacagagagctatcaatgaccctaaaatatcaatccagagttgcttaacccctaaaccctataatcaaattgactattaactgatttcatttcatgattgcgtcaaaactaattgaccttgagagttgcttttcttaactatatcatcaacgttaggatcaaagaaagagaattagctaaacccaaaaatggaaagataatttaaaggaggattcgattactcttgcttatgaaatcacctggcatccaccaaaacgtcgacgagagtgagtgacggtgatcgcaatagctccgcttgtcgtcgcgtcataaaatctccttttcgactttactgacataggaataatctgggatatgaactgtgtattaacggtt

SEQ ID NO: 47290 - DNA, 631 bp, Arabidopsis thaliana columbia
  unsure (1)..(631): unsure at all n locations
gccagtgtgctctaaagacaggcgcggcatcagtttagcggcgcgtttgtggaagtgaactgcgccaccctgcgcggcgataccgcatgtcgacgctgtttggtcatgtaaaaggcgcgtttaccggggcgcgggaatctcgtgaaggtttattacgcagcgccaacggggcaatgttgtttcttgatgagattggcgaactgggcgcagacgaacaggcaatgctgctgaaagccattgaagagaaaaccttttacccgtttggcagcgatcgccaggtgagcagtgattttcagcttatcgccggaacggtgcgcgatttgcgccacgtggttgccgaagaanatttcgcgaagatctgtacgcgcggatcaatctctggaccttcaccctgccgggtctacgccagcgccaggaagatattgaaccgaacctggattatgaagtggagcgcacgcctcactcactggcgacacggtgcgttttaacacgaagcgcggccgantggttggcttttgcgactctcccaggcaacatggcgcggtaactttcgcgaactttctgccagcgtcacgcggatggcacctttgcactagcggacgatcactctggacgtggttgaagatgagat

SEQ ID NO: 47291 - DNA, 591 bp, Arabidopsis thaliana columbia
gaggatagaggatccctcctaattatgattctctctcgaatctgtaatgtctcgggcacggcagaaacaaataaaagtaatatatctttttttttgtcatcaccttttgtttagatgaagttaataattgaacttgaagagatacaccattaataaccgatcatatgcttcgtctgttcattccaaaacatcttcgactgcttcaccatctcagaccgttcattcatcatcctctccttccaatattctttgcttctacaaaaaaatatattatgctttcatcatatgacattaataattcttgcaatataaatacagtttgaacaatatataccaccccaagaatatattcagatgtttatgaaaggctcactcataacgacttcaaaacttaaaaaaaaaattaagaacaaaaattcgatcgcaacttcattttctagttacttaacgaatgaaaacaccatcttgctatatgaatgataataatcatcagttcaaattttatggacacatctatactgatttggtgcaatctaaaatttgagacttgtcttaccgtgtctttaaaagaagatgcagctcgatcatgtg

SEQ ID NO: 47292 - DNA, 495 bp, Arabidopsis thaliana columbia
gcaaatcccctcgcatgcatgatcttactaagcaagaatcttctttgactaattatttcgttattagaaagatcaaatatgtttgctattttttcacgaggagctgttaggatattgctttcaacgtcaaattacaacagtaaactccacttgctttaacttattattgatccaatttgaaagaaaagaacaacataattaaattttctattccaaaattattgcttttccaaaagctggcttatgacatttcatgattacacttgtcgagtatttgactatgcatttgttcatttatttattgactttctcaaacttttgttccactcaaattcagttttaatcttcttgataatcctcgtaagaaaaaagcataccacgtgtttaggatagactaattattcaccttacttagcataagcttatctaaggaaaagttaacttcaaatagattatttgatgatgctcaaacattttccatttattaaattttgg

SEQ ID NO: 47293 - DNA, 582 bp, Arabidopsis thaliana columbia
tgatgctgctaatgttgctgccttagccgcactcatgactttcaggagacctgattgcactgtaggaggggacaacagtcaagacgtgatcatacatccacccgaagttagtaattcatattttttttttttcagtttagttgatgaacttaataactagagagaaggaagttctcaacttcaactgttttgtactatatttggtttcttttacaggaaagggaaccacttcctttgataatacatcatctcccaatagccttcacgtttggattttttaataaaggcagtatcttggtaaaaaaattgtgttttgtttattgataatcttgtttactacgtttttgtttgcatctgagattacaagtgtgttgtgttcttatgcaggtgatggacccaacttacgttgaagaagctgttatgtgtgggagaatgactgtgacagtcaatgccaatggcgatatatgcgcaatccaaaaaccaggagaagaaggcgtgaaccagagtgtaatccttcattgcctgcgtcttgcttcttcaagagcttctgcaacaacaaagataattagagatgcagtaggg

SEQ ID NO: 47294 - DNA, 1347 bp, Arabidopsis thaliana
caaatattgaattatatactaattcccacctccccccccccccccgtaccccacgacatacctaccccactcccgaaattccgattgacgttacaaagagtactagtagcaaaacaataacaaaatgtacagaccaacagacactgacaaaacagcaaaggacaaacacatatgtatataacgcacataaaagaagaaacaccgattccgagatgccaaatttagaaatttacgtaatttccacaactctaaggagctgaaatctcatcctagttgccacgaacaaacccaactagaggcccgtccacaaaacctcagtatcaaacgtctatacctttctcgtaaactaacgcaaaaacgcgatgataacagcggactataattgttggggatgattttatgcttaccaattcacctatcacacgttgacatggacaacgtttagcatagataggaggacttttaaaaaatgagcatgaaccttctccctccctcttttccaacaaacaaagacttctccgagtgattatgcttggataagcattttccaaagcggtttactccactaaaccggtttaattaaatttccaaaaggtcgggttcagtcaacgagaaccgaatgaccgtcgaatttaaggaccttgctctcatagagctccagattcttcttcactctcacatccttcatctccagctgccccagccgtcccgccaactccgtcactctctctctacattccttcgtttccttctctctccgccgcagctcctccctcatctcctccatctcttttttccccgccgtcatttccctatcgcactcctccctcacaatcttcgccgtgtcgtacttcccgtagtactccaccgcctccgctagctccgtcaccgctgttttgagccacgatacatcgattttcaccgaatccatgtccttcacgaccgccgcgatttccgccactcgcgtcttcgtcagatctctcaacgccgttgatttcagttccattactgctgcggctagggattcgagataaaacgacctcgttgaggtagattgtaacttcgacgaggcggcgatgtcaccgtgtttgtcaatgatcgcttcgagcgtggcggcgatgctcatccgtaccttgtaattggcgacggagacgtaagtctcggatatcgctaattgtatctcttcctttccgtagctttgaagtccgcgcattctggcgatctcctgcatcgtgaagctctgtgactcgtccggcagctccggcggctcgaattgcctctcctgctcgtaagtctctaccgatgtgatctgatacttgtagtgaaccggctgcacaaaccaaagca

SEQ ID NO: 47295 - DNA, 645 bp, Arabidopsis thaliana
tttggtcaatataatatatgattaaatagatattttgatacatgtgtctatcagtctatcgtttaagctaaaactcaacgagacgacagacgataaaaagggattaagtttcttctgtgtagattattcttcttcttcttcttcttccattgtctcttgggttgagattccgatctcaatgtcgatcaatatcggagaaatctcaattccagaccttcctatcttcttctccatgttcttaaccatctacctaatcgcttacttcatcgtcttccgcaattggaaaccacaaatccgtcccgaagcttcaagctgcctgatctcaatcttccatggatctccagcggttttcctcgccacacgcgcagttttctcctcctccgaacgctccttcgcctccgcaaacaccgccgcacaaaacaccgtcctcgatttcagcgtcgcttacttcctcaccgatctcttccactacatcgtcttcaaccctaacgacgtactcttcatcggccatcacgtagccactctattcgtcttcctaacctgcagattcctcgtcttccacgcggtgcgccatcttaggcctcctgattctagctgaagtaacaagcgcgtgtcagactacggtggacgctcgccggagcaagg

SEQ ID NO: 47296 - DNA, 452 bp, Arabidopsis thaliana columbia
tattttttctaaactctgctcacaggtttttacgaatgtagacaaggctcatgcagccaagattattgctctaggctaggcctagagggcttgctttgagaaaatcatatctttcgagactctgaatcccatcaccataactgaatctcctgttgataccaaaaccagagaaatcattgacataatcagttacatggcaaatcctgatttaagcattgatcttcctaaagacttctgtagtatgcaaacctatctgaaggagcattctgatactaggttttcaagatggctaacatctatatcctaagaagacagtaagaacatttcactgcttctgatcagttttcctactctaaaccaattcatcactgaaacttaataagttgcaaatatcttgcgtgttttcagttgttcttcgatgacagcatccgcgatattcattcggggaagcg

SEQ ID NO: 47297 - DNA, 551 bp, Arabidopsis thaliana columbia
taaaactaaaaagggagattaaagtttgttatttatgaaattttccttttttcctgtcaataaaataaaaataaaaattggactctgtcgaaaccttcaccagggaagaaagaaattagaagatatcagatttaagagagaatcggaggagaaatcgaagaaaaagggaagccatggacgaccaagagtttcgtagtctcctcgacctcttcccagtcgtacgttctcgtgaccaccgtgtaattctctcttctctcttctctcttctctcttctctcttctctcttccttccctctttctctttttttgctgctgctactgtcaacttatttgccgcgaacttgatttttcttttaaaaccctaatttactcatcgtccagtttcgaaagggcttttactagcaaactggttcacattttccccttaggtctaattcttgtcctgaaaatttctgtgttatggtttagtaaattcatcagtgattgagttacatatgatcgttttaagatatcatctgattgagtcttttgtggttcaggctgaattaga

SEQ ID NO: 47298 - DNA, 541 bp, Arabidopsis thaliana columbia
cccattttgagtacatatcaataagagaattctgaaggaccgcgtaaaacggaagttcacgtctcaagacatggcaatgagcttgcttgccatgatctagcaaagcaagtccagataatgctgtcaaaagactagcataggtaacataattgggactcattccttcactatgcagtctatgaaacatctctaacgcctcttcatcaagacctagttgggcataaccagcaataatagcagtacatgagacaacatctctctcaggcaaacactcgaaaatctcacgagcttctttaatttgaccagctttagcatacatgtcaagaagagagcttccaacaaaaatatgagaatcgtaattccacttaactatgagtccatggatttgcttaccaagacctaacccagaagcacgtatacaagaagtaagaacagtagcgaaagtgaactcattcggtttccatctgatctcatcatctctgcaaaaacagtgagagcctcagaagaatgcccagtttgagaataacgcgagatcatagca

SEQ ID NO: 47299 - DNA, 635 bp, Arabidopsis thaliana columbia
  unsure (1)..(635): unsure at all n locations
gctataaaggattacagataggtaggattcttgatcttgacacaagtttgagttaaatagatttagttcaagacggggcaggaacagagccaaacaaaggaattgtcattctaagttatacaaacattgagccaggcataacttgaaactatagagtctaagttactactattgctgttgttttgaatcgtgatgggttttgttataacatgggtttgctttgcagggtctttgtggggactgtgagtgcgttctgtgtgaaacatgcggagtgtccagttatgacgatcaaacgcaatgccgatgaaactcccagtgatccagctgatgactaaacaataacaacgtcccttccttctttgatctatacagagagagagtgcttttgtgtgtacaaaatccaaattcctacccctatatgtatttgtatctgtgtatgtatgtgtgtgtgcagcttgttccgttttctgaattggtttcaaactgaaccaaactgctatatatttggtttctttgaaagagccaaacatcaaaaacaacaacaatttgaaagaaaaaaaaagagtacagtagtatatatgctttacgaccagaagtactcaacaccantccatatgtattgagatttatgatta

SEQ ID NO: 47300 - DNA, 541 bp, Arabidopsis thaliana columbia
tgcatctaatgtcaaagtgtctttaaatgcagataattgcgggattaatagagcatcgcctatctgatgagctttcttcgcaacctctacttgtaaatgctatttcatttgttgtcaggaccctaaactcatatttcggaacgcaggtcagagttacaagcctgaatatttggctttcattttctacatctttatttccttttctcctaaattcttatttttgaagtacagtactatttgatttgatcccaacttttgataaaaatgttgcagcaatggatcgatcttgcacgctctacgggtctgcaaactcagaaaagcatcccagcctctaaagaaatttcagaggctttggaagaaccgacagtggaatgcgatactactactgaagaggaaagtatcgataagctcaataatcaatgatactggtgaggctacccactagttatcaattaatagttgtctgcatataagctttagatcgtagaaattagcatataataatttcagatttcttaagttgtatgttcgtcatgtgctt

SEQ ID NO: 47301 - DNA, 528 bp, Arabidopsis thaliana
aggtggtcgaagattgcgacagtcttccgggaagaacggacaacgagataaagaacttctggaggacaaagattcagagacacatgaaagtgtcatcggaaaatatgatgaatcatcaacatcattgttcgggaaactcacagagctcggggatgacgacgcaaggcagctccggcaaagccatagacacggctgagagcttctctcaggcgaagacgacgacgtttaatgtggtggaacaacagtcaaacgagaattactggaacgttgaagatctgtggcccgtccacttgcttaatggtgaccaccatgtgatttaagatatatatatagacctcctatacatttatatgccccagctgggtttttttgtatggtacgttatttggtttttctattgctgaaatgtcgttgcatttaatttacatacgaaaagtgcattaaatcattaaatcttcaatacatatggaggtggtgtttgagtaacttctggtcgttaaagcatatatactactgtactcttttttt

SEQ ID NO: 47302 - DNA, 491 bp, Arabidopsis thaliana columbia
atagacgtcacacactatacctcgaatggagaatttcaatacctagttctttaatggatagagggaaaacaaatggaaacttactgtattccgctgccagatgaacatgtaccactcgaagtgcaagaaccacgactcccattgataccattacttgctatagctcctcgatctatataattgattaagttgacaacacaaaacacaaagagaagcctgtagagatagccaaaaaaataaccacaagaataagatcatcaaatcaaatgtaaacaacttcgattcaacaaaaatgtataaaacttccataaatagaaccaattagcagatttcaagcgaataaagaaattttttccacttcatgcacactgtgaactaaaagcttcgacatttcgcccaattttgccaaaagttacggtaattttgacctgagagaaacgtatacaatggagaaacaagagaaattactttttgggggtaaccatgaaggc

SEQ ID NO: 47303 - DNA, 791 bp, Arabidopsis thaliana
ccccttaaactgaaacgcacattggcatcagtttaatccttcaagcgccgaactccaagcatctctctaagcttctcgaactgatccagcttgattggcttagtcatgatatcagccacttgatcttctgttccacaaaacaacaatctcatagctccctcatttaccaagtcacgaagataatgatacctcacatcaatatgttttgttctcctatgcatgactggattctttgacaacttgattgcagaactgttgtcgcacataatgtcaatacactcacagctttcaacacccaattcctgcaagattcccttcagccaaacagaatgacacgccgaggaagttgctgcaacatactctgcttctgtagacgataaagtgacaatgtcctgtttgcgtgagtccaacatattgctgcaccattaagcaagaacacatacccagaagtgcttctcctgtcataccgatctcttgcataatcactgtctgtgaaacccaacaaattcaacaccgacgatctcttgtaaaagactccaaaatccagtgttccacttaagtatcttagtactctcttagcagccatcatatgttcttccttcgggtcagccaagaaacgagaaagcaaatacactacaaacatcaagtcaggacgagttaccgtaagatacattagggagccaacgagctgtttgtagagtgttgcatcagttccccggacgccttctctcaaaagttcagtacctgggacaatcggattcttgacagaattacagttccccatattgaac

SEQ ID NO: 47304 - DNA, 484 bp, Arabidopsis thaliana columbia
tcttgcatgctgtgatgtctgacaaagaatatgatattattgtaagttgcacatccatgaatttgtttgaggagccaaagctacctccagatttccgtggtagcagttctggtcccaaagctaaaatgcgtctactggctgacaaagtcaacttgaatagtcagatgattatgtcacgtacagttaccatactggctgttgatatcaagtatgctcttctcgagttacgtaatagtgttaatgaagagtcatcattagctcatgttgcggtacgtgcttctgagcctaattcttctatttcctggtacattttgtcatctaggaactataccatatatctaagataccaaatttccattcacagcttgaaggattatgggtatctacaggatgacatcactatctgagacagacttgtatgtgtcagttcctaaagtttctgttcttgatatccgcctaacacaaagcctgaaatgcgactgat

SEQ ID NO: 47305 - DNA, 516 bp, Arabidopsis thaliana columbia
ggatggctaaaataatttcactggctttggacttactatttttttcttttcttgacatcactaaaacactattgtttgatatgtttctataaatgtattatttacacaataacaaaaaaaaagagagaaagaaactgttgaattggagaggaaagagagtggggggaaagatgtcaaggctggtccagctcaaatcgggtaaaaactattatcaaattccaattctgtccctccctttccccaaaaatctgattgtcacataccctaccaatcagacaacgccacgtggacaccttagacatgatggtgggagaggacaacaacatgggaggcacatgattttgtgtttattatatttctccaaaacacaatttttacccaaaaacaatttaatcggatcactgagcaatgagatgtttgcggatccaaatttaacttttaaagccttccttactctttgctttataacaataataataatacacataaaattggacttaattaaatagatgtgga

SEQ ID NO: 47306 - DNA, 532 bp, Arabidopsis thaliana columbia
cgtcaaatgtttttgatgtattactaccaaaaacagcaatatctttggattttttgcgatagagtacatacggattaaattccttcaaatcaacaacaaaatatagtcgtcggaaaaatgttatggaaaaaatatcaaaaatagtagttgaagttttaccgataagactaccagtctagaaaccggatttagatctcatatactttattttacattacaatttaactatctatttcatcgtaaataattatattttaattatatgcatttcatctaaatggataagagttcaaaaatatatattaataacaatttgtttcgtattttgtttttctcgttctagcttagctatatctctcgttcgtgtaattttaaagtggatgggctaattcgatcttctagattagtatgctaaattaccaatttatagtttatgccaaataatttaaaatcataattcacaaacacttcaaaattaagacatattatttttattattaccctgagaatagtttatagagagaacaagaaa

SEQ ID NO: 47307 - DNA, 582 bp, Arabidopsis thaliana
cccctaactgaacttcaaaatgcgctcaatatctccattacggtacgtccttaaccttgatacttccattggccactgctccttggacaatccacgaaagtgggatccaataacctttagtcctaacggaagttcaccgacatggtatgtaatttcacgagctagttcatcgaaaccatcttcaggggtcttttggttaaaagcatacttgcagaagatttgaagatcctcatcaaaacgaggttttggatagcttcctttgatatcctcgatgactgcgctattctggaaacggctggaaatataagcggcgatgttttcaatcatgtctgtttcatcaaccctaacaaagaagaagatcaatttatacatacgtcttgttaatatataatcactaagagtatagtttgatgtgttagaaatattaacagcaccactaaccgtcgcggaccacgggaccatttttaccagctctattggtatgtaaaaacggtccgtacttggtccgctacagttttaataaagctggtaaaaatgttccgtgcttggtccgatcacggttttcttgtatttatttttggg

SEQ ID NO: 47308 - DNA, 582 bp, Arabidopsis thaliana columbia
ccctttttcttttgcagatttgttcaatcatcatggcttacctgatgtagtaattgggatcaaattcattcacaaagctcgagtttttattattagtggctactgttatctgtgtatagaagaagcttgtgtgtgtggttctctacgtttcatgatcggtttaggtatctgttatatccggctcgtgttggtttcagatttaggcactggtctagaaggtctttcttcggctactgcttcttctgttcaccaaaagaagccttttttggtttcttcttctgtttcatgtcgaggaacttagacagtcctgttcagacacaaatggcagtggcagttttcaagactcctcttactggagctagtaagatggaagggaagcagcatcataagcatcagcatttacagaggcaatcatcggggaggagagttttcgtgcagactgaaactggttgtgttttggggatggagttggatcgtagtgataatgttcatactgttaaaaggaggcttcagattgctcttaatttgcctactgaagagagtctttgacttatggtgatatcgtgttgacgaatgatttga

SEQ ID NO: 47309 - DNA, 544 bp, Arabidopsis thaliana columbia
attgatcttcaaaggctgaatctccaagttctgatataacctttgacttggctggtaaacagattttgacccagtcctctatgaagtcactgcaattaacgtatatattttttactaatctcatttaataaatcctgttattaaaattgattaaattttaataaaatggatatagagatattttacgtggagttgtttccatctaaggggaaagacataagccctttgatcccaccacatgcactgtgtcctatcaccacaatgttctccacctacagtaataaattcattcaaaaattaattacatgtactttgataaataattttttttggttaaggtgttaattattttattttattttcggcttaaggtgtaagaccgcgtattcaatggctgctccaacgccaccgtatttgacctgccaatttagcaacccaaaaatgaaaatagaaagtgaatgtcacgacttctcaagacaaaagtcaagactcaagaggcagaaggtttagatagaagagttatatctatagagagacagacgtg

SEQ ID NO: 47310 - DNA, 897 bp, Arabidopsis thaliana
acagacgttttagagttttatcctctggcttgggaaaatagaaatcccagagcattttagagacagatttaagatctttccttcttggtccatctccctgtggagtaactgttttacctctatcaccatcttcgatcacttcagcagcagatcgtagtagacacaacgcttcagagagccaaagagaaggctgcagtgcatcttttctacgtaacttagtacgtggactatcttgtagctttgagacagaacataaatctccaggacattcaggcaatacagaattggctagtcggcggcatacaggacacaggaattctttctgacagaagaaacaatgtttaagcttcagaaggagtacgttaaagcaccagaaaaatatctctaaattggtcacacaaataccttttttagatccacaatatgtgcaccttcaaagacagttcttctgccagacctacaccatcccaacaaaccaaaaaaagcttttaaacgtgaatatcacagctgtaaatcaaggaaggaaaatcaattcaacacgcctgattaacctatgcccaacaggtaggaaggaagtatcaacttaaaagaaaaatatattcacctatctacacgctgagtaattaagatttttgtttcacatacgaaaccaaaggaagtcaaacatggctcacctttcctttaaggattttaaatatcgttcaaggcagctttgatgtacagcatgtccacatgatgaaagataaaccccatcacagtcgatagggtgaaacccaatctgaaccagcatgcaggacgcctggaagtttgtcttgatcgaatatcaggaaatctaccttgcaaagtagatggaccaccatacagaatttttctccgaacaattttcagcttcatggg

SEQ ID NO: 47311 - DNA, 625 bp, Arabidopsis thaliana columbia
aagaatataacagaagtaaattcttattaattcaacaaagaaaaaatatgttcttttcggttgtgaaaaccaataagaacatactttcaaacaacagtttcacaagattaattattttctggtggaaactataaaagaagaagaaaaacttgaactgacttctgaaaacaaaacaccaagctataaatgacatcaaacatcactaacttaactattaaaagggcacttgcaacttcggtaaaaaacagaaaaaagagacttgtttcttgatgtcctagaaacaagaggtcaccggaaacaccgcaagagaatccatcgcaggggcaatgcttggatgaccttcttctggtgttatctcttcctcaaggatcatttcgagggttgtgacagagatcatgaggcggcactgtcgtatggctgtagcacggtgcgcagtcacggctgagaatggagtccgtggttgaggtgagagagcctgttggtctggtcggtagcgaaacgggtgctttggatatcaccatttttacaaagggttttgtgttcttaggctgaacaaaagagttaggagtagtgaagcttttctttgttttgggtgttgtagtattgttgtgttgactggattgga

SEQ ID NO: 47312 - DNA, 405 bp, Arabidopsis thaliana columbia
cattgtttttcacttattaaatttgaaatttaatctcgattgatttagaatttgcatttatcttattgacattatcaatattgcaagattaagatttcgtatcgtgttctcttagtatagatagtgttgttttggttcggtacgagttaatacgacgattgtctttttctttcaatatctataagtcagaaaagcccctaggaatagttccaacaaaaaaaccacagaaccaatggaaggcagttttgaattggtaaaatggagcagagcattacatacaaccatcccgtagctactgcttctgcgtcggtttcacctgggacagacggcgaagaagtgttcttgctgctaccgcttcgacctcctttcagacgcgacgaaaccttgtcaatggcggtcctgagt

SEQ ID NO: 47313 - DNA, 524 bp, Arabidopsis thaliana columbia
cgctggaagttcatcctttttggagacactaagatgtttagaccgcaagtagcctgttcagtttttcttgttgttgttacataattcgataacaaccaaattctagctctaagaaaaatgtttaacattttcctttattaaccacagggactgctggcaggttttgtggttgatgaggctcactgcgtgaggtacaatactgttctacccttctttcacacattatcttgtggtctacactaatgttctctgattgttcatcaccaacaccttaatatcaaaatagatttctgcctgcacctgaagaatttttcctttgtgatttacatgaacgtgttgttttttctttccagccaatgggggcacgacttccggccagactacagggaactgggatgtcttaagcagaactttccccgtgttcctgtgatggctcttacagcaacggcaactgaatcagtctgtcaggtaataaccatcaccatgattagagatagacctcttaaaattgggacagatttaaa

SEQ ID NO: 47314 - DNA, 431 bp, Arabidopsis thaliana columbia
tgtgatcatgtttacacaacagatgtctttgtaatttgcttttatcttagtttttttttgtgtgttttttggcatgttttacttcaatatttaacaaattttacatgtaacgcttatgacgtggccacattcactaatcacaacacgcaaaaatcaaaacatttgttcctaaaacgtaatgtagccgttattggcattggcgagaacgttagaaatgtgccacgtggcttatataatgtcagtaaaaaaaaggtttctattttttgtttttttttttaataaaaggttaaattttataccattttcatttttgacagaattacagggaaaacatgaaacagattaaagcaatctacagaaatataaagacaacattacaactcaaattgcaaaggatcactgctaagcggtcaaagtcaagttgtaaggag

SEQ ID NO: 47315 - DNA, 300 bp, Arabidopsis thaliana columbia
tatattttttttttggaaaaaagcttgtttcctcaatctcgttctcttgttgatgctcctggaggatctgatcactccccaatccaggtaacagctggtgagcctgaagagcgaaggaaagaccaattcaaattttactctttctttactactcacccagactatcaatgccttgtggagactgcttggaatttgccgtcaatacatggctcgatcatgttttccctctgccaaaagcttagggcagttaaattggcttgtaaggtgcttaatagaagtagtttcaacaacatccaggct

SEQ ID NO: 47316 - DNA, 544 bp, Arabidopsis thaliana columbia
agatcatgaagcttttcttctaaccagacttgttcatcatatgcttttctttccttcttgttcttctgcattcccattctccttcagcttatatgcaccatctacatacaattccgtgtcccacaggaatgtcccaaacgccacagcctcgagaaccaaccgcttcagactcgaaaacgatgtcactatggtctcatcactctcttccgtgccaaaaagagccaaactttgcttctctatcagattccttgcctcctctgtccttggttttgcgcatctctgcaatgtctcgggatcaaagtctgagatgtaatgtctcagctgctgcttgttggagatctgtgcagtgcccgttgtgaatgagcatccaaagatgggacttttcagatatccgcttccatgaatatctgataaggaacactcaagctggtgccttagggaagctgatttcaagaagtaaccgtacaagatcgaggcagcatatactttcctgagatgcagtttctgtatctgcgttgttgcccaattgtcagtacacatgagt

SEQ ID NO: 47317 - DNA, 463 bp, Arabidopsis thaliana columbia
tttaacgataaaaacaaaagaaacaaaaccccaaattagaaaaaagggtgaaaagaaagctataacaacaaatcaaaatagtaaaaagtaaataaaagctttaagctttttggtaccaataatttttttttttttaataaacttttttcctcttctaaaaactctcgtctgcaatcatctgatctccatggtatagatttgtcacttctctaagctgcaattcctgcaacaacaccattttcatatgatatcatcagattttctacaaatgcttgaattctcggatagaaaaaaggcgttcattcattcattattcatacctccgtttggatgcctgttgatgtatcagctggtcctctagacatgaagtccaatggtcacattcacaatccctcatctagctttgcagtcagccgaacgcacattgagtcgctgtacagagagtctgcctcctagatgcttg

SEQ ID NO: 47318 - DNA, 374 bp, Arabidopsis thaliana columbia
aaacaaaccatttattcaggttatactcacagcaatggcgctcatgggcagcattcttcattcaagcggcatggaggaaacattgcaaaaggaagctttctaagacaagagacaacgagaatattccacaaggcacgcaactcaatcttgcatcatcgctctacgtgtccagattcgtgtccaaagctttgcaaaatcgacgaacagatacagcagattgttccagctctcctgatatgtcacctccggtacctcatacaccaggcgatctcgagtctgcaatggctgaagcatagtgtgtctctgaaggataatgactctctacacatacacggtagtgaagactccatgtaagctcaaatcatgccctacaa

SEQ ID NO: 47319 - DNA, 264 bp, Arabidopsis thaliana columbia
caaatgcaaacaaaaaaaaagcaaacatcaagatgaatcaaaccaatgaataaacggaaaccatttgaagaggccgggcccagtacttacaggagctgggtcattgctttaggggctaggcctggaaatgattgatgggctcaaacctgcgtggcccattacgggtaaccgtcgcgaggcttccgttgcactgcggacggtgctggtacgacgactctgtggtgacaggtcggacctccgatgccagctgagcgctgtcgttgg

SEQ ID NO: 47320 - DNA, 470 bp, Arabidopsis thaliana columbia
  unsure (1)..(470): unsure at all n locations
gtacatctagaaatttgtcagtaggcaaattctcgtcactaaagtagtattcaacctgcaaaaagtagaacaacactagattcagcaaaaaccttaagatgaagaacataccaataaatcccaaatgttaagcatattcgtgaaactactcgttaagataattaatgaagtgccataacctaaaaccaatcgacattgatacacaagaagccattgaatcacagttaactaattccaaaattgctcgatcaattcagccaattcatcaatagaaattgatgatcacttgcctgtctaatgatcttctgattcaactcatcgattggaacaacaacaccatcggtctcaaccggattctcgccgtgatcctgatcgcgatcctcgccgctatttcgctcgtggtcaaaatcatcatcagacggagataaattcggtatctccgagancgttaacaacacatcatcggagga

SEQ ID NO: 47321 - DNA, 529 bp, Arabidopsis thaliana columbia
  unsure (1)..(529): unsure at all n locations
agaggatcacgtatagtgccgactcatatattttcgatgctctgaaacaaatttaaaagatatgtattatgtgtcattttgtatatataaatcctttccgtgtctttttatatatacaaatcccctccctgtgtatggatatttggcgattgcattgcttgtctatatacttattagaaatagaaatagaaatagaccgtgaagtactaaatgcgtaaattaaaagatagataatctaaagaatgtctaaagtattaggtttttttttttacatttttaataattcaagtataagagaaaacacaagttggaaattgcatatatcatgtaaactattggtaataaagaaagggatgagtttcatatatatgtctgcgtctacaagatttgaaagnaaacttttgtctgtttttaactgtgttaaatttggtttcttctcgtactttnttttagtagagtttcgtttatgttacatagatatatatatacatatatagagagagagaagaggataaagagttgaaagatg

SEQ ID NO: 47322 - DNA, 505 bp, Arabidopsis thaliana columbia
ttttcgagacatcattatcactagtgttctccgttgtcttctctcgtcacatgtttcgtaaccaacttgtccacaaactctttaaagttcatatcagatgatccaccgtccgccacggcggcctcggcctccgccttccacctccgagcgttttctctcagctccaccgccttttccccaactgtggcctcaagcagcttctctgctacaacctccctcgaaacaatcatctcctcagcggctccgcggcctagtctcactcctgtcttgaaaacatcagccaagtacaccgcatcagtcacttgatctccccattgcggaaaacaaacaacggggactccggcagttaaagcctccattgtcgagttccatccgcagtgacttaagaaacaagcaatcgcaggatgagccaagactctctcttggggacaccattccacgattttacccttttcttcgagctctcgaggcaaaacatgtggttctacaaatgtccttccatggg

SEQ ID NO: 47323 - DNA, 732 bp, Arabidopsis thaliana columbia
cttcaatactataaacaataactcgattctgaaacttggaaagtgtaatctcgacctagacaaaacaatcaatgccagaagtaagccaatactcgatgcaatctaatctagaatcaatcagattacacaacaagaagaaagacctagtaatctatggagaaaacaacgatgccaaaaattgagggaaaagagaaatcaaaccttgggaggaagaattgcgtcgaggagttcatcggtaagaaggggaagcctatttcggacggtgcgacggagttttttccggtcagcgccggagagacgctggtgagacttagcctccaccgccttcttaaacattatgttcgcttgtagtcgtccctttaccactgcgggactcgaaccaaaaccagactagtgtcgtctctctcttaaacctttttgtttttgctttcggttatttttctaagcctgccacgtgtctcttgcattgtaatttctaatttcatcaaaccggttcaccaaaaccagtctagaattgtaagatgatgaaacctccaggctttgggatgggcttaaaaataaacaagatatggcccatatactgctattaataacccatgaattaatttgattgattgtactatcccacatcggctcatttcttgagaacagtgagtaaactttagtataaataaagatcgagagcttgccttcaagagtcacggagctgtgcagtgaagacaaagcgaactg

SEQ ID NO: 47324 - DNA, 344 bp, Arabidopsis thaliana columbia
aatttcttttctaaaacgatctgaatcaagaaagattacaaataaaaaaccgtgattttaaaattatgtccataaatcattcttattttatttcttgtaaaaataaagaaaaaatcaactgtaataatatctcagcaaacgtatgcatatggatccacattaataatttaaatcatcctacacgatttaaattatgctctattctctattgtttgtaaaaagggttagctagaaataatatacaatgcatgtatataaccaataggttttgttttgataaagcatgtaacatatttcaatagggtagcatatctacttatatatgctatatgtgcatgcatgta

SEQ ID NO: 47325 - DNA, 444 bp, Arabidopsis thaliana columbia
catcaaagttcactgtggccgttatattcccaaaaggctagtgatacacggccaccatctagggatcctctataaacaagaaattcaatagaagttctaggaagcagacaaaaaccagtacattatgatagcttgtttactataaatgctacatgattctaaacttctcatactaaccgagtggtaatcaggctagtgaaaattaacaaatagcattatccatagtccatagagcttcttcgattgaaacaacaaagttaagcatttaaagccagagcatgagaaaatgtttagaaaactcacccttccttagcaagttgatgaaggagtaagccatttccagtaccaagatcaagcacattccaactagacaaatacttatcagcctgatcattcacctctgtcgtaacatcgttttcagaaccagacatgtgtcttttgaga

SEQ ID NO: 47326 - DNA, 576 bp, Arabidopsis thaliana columbia
tgatagcttaaaccgttttctataggagtgtgattgaggagtaatttgttgatgaattcggaaaaagcgaataaataagtttgttcaaaaggttgttgaagtttacaataaagataacttgaatcatgataagaaaaaaagtagctatatgttctctaaagtctaaacccatgatgatgaacatgccatatgaattaatatagttctttcatgttcttagaaatggtcgataagttaaaacagtgtttcattaatcgttgtgtttcttcgataaagagtaaaacgtcaaagttttaaggtgatatcacataattcatgagattattttggttattggataaagtgacgatgaaatcgattcataattgaaattaaactggtagtgatgatgaactaattaccattgaaaatattgatatttatgtgtgggtaaatgctttttataatgttactttatattaatgtttcgatcatcagaatctatattttcaaaatgttatactttaagttttagttattgggttgtacaaaaatcattcttgtcacgagggtgtaagtaagtgtaaccgttgaagt

SEQ ID NO: 47327 - DNA, 538 bp, Arabidopsis thaliana columbia
tgtcactccatccgaaaccgagtaagtccaaggcgtaaaccttgtatttcttagccaattcaggaatgttatacctataaaaatctaccgatattagctcgaattcgtatgataaggtaaaaagttgacttaaagcctacactgatcaatagagcatggaggtgagattgaaggtacctccaatgaaagacagaagcaccaaaaccatgaataagaactagaggcgagccttctccttgaacaacataatgaatcttgtgacctctccattcccaaaagttatagccttctggtttaaaagccaacctctcactacctaaagaatcatccaaattctttttaacaaagatgacatttttagaccaagagagaagcgatagttccaaagctagtttgtttttaccttgaacagactgagaagaagcagaagaagtatccatgactgaaactccagaagcaacaatccctccccctaattgcaaaatcccttctgctgatttcacatttgtttccttcattgccaagattaaacagattg

SEQ ID NO: 47328 - DNA, 570 bp, Arabidopsis thaliana columbia
gtgtaatgctttcctgtggtctggagctccaaactctgctagaggagcaaaaatctcttggaacattgtgtgctctcctaaagaggctggcgggctaggcttgaagcgcctctcctcctggaacagaattcttgctctgaagcttatttggcttctcttcacctctgctggttctctatgggtttcctgggttagactgcatctcattgggcgccggaacttctaggaacttaatccttctctgtctggcagctggatatggcgtaagttgtgcaagctacgaccttttgctcgtcctttcatcatttgtgaggttggatccggggtgactgctagtttctggcatgataattggactgatcatgggcctctccttcacctgactggtcctgctggtcctctcttagccggcctgcctttaaattcggttgtcagagatgctctccgcgatgatacgtggaggatctcttctagtagaagcagcaatccggtaatcactttgcttcaacgtagtcttccgtcatgctgcgagtctaattgattgtccgcatgatgatacttcctttggaa

SEQ ID NO: 47329 - DNA, 555 bp, Arabidopsis thaliana columbia
  unsure (1)..(555): unsure at all n locations
nnnnnnnnnnnnnnnnnnnnnnctaaagattcgggcgcagacgacgcgtggcttctgcgacaatggctgccgggttggagtagttgagcatccaggcatttggtgaatatttttccatataatccaccagttccaggacgccgccaatggaacgcatgccgtacgctattccgccgggtccgcaagtttcctgaccaacaacgccgtggcgcagcgggattttttcatccagttcgcgcatcgggtatttgccgacgcggatgtgcgccatgacaaaatcaacgtcgctgaatgccacttcaggatcggtggtgtaactaaacgcaatgtccggcgctttttctttaaggatgactttacaggcttcggcaatcacttcctgccgcgcaccatcgttatcataaaatttcagtgcacgaagcgggaaacggtcctgattcgccaggagcatcaacacgatgcctggcgtaaaggtgcttccacgcctgcgacaaccactgagaatttggtcattatactgcctccgtaatggcaacattttctgctgattgatga

SEQ ID NO: 47330 - DNA, 506 bp, Arabidopsis thaliana columbia
tatttaatttaaataaattaaactcttgaagcaaaccaagtttgaagactagtgtcatatctcttgtctcccttgaacagaagtgaagaaagggttcagatcctctccatgtatcctcccattccgttctttccagattgcgtatataaccacctgaaatacataccgagctagaaacccttctacatgtttacgtcggcatgagagatagacgatgttcgtgtgccaatccgttgaaaaatgagacccaaaaatattccttgctagatttgtccatatggccgcaaaataaccgcattcaaagaagagatgatctcgggtctctagagtattattgtagagaatacaatgccctggagctcccacattccaatgcatcgtccggatccttgtagataatctgttgtgagctgccaaccacacacagaaagagtatttaggggtaccttgagagaaccatacttctcgatgccaattaaccgtgggtgaaccggttctgagattat

SEQ ID NO: 47331 - DNA, 449 bp, Arabidopsis thaliana columbia
cattctttttcttcaggttccaattttatcaaacgatcgatcacttctactgcttctgtaagctttcgagatttgatctttacctccatcaatgaacgaagagcgtcgacatcagaagggtgagtaatcaaatgctcatcaagcgctctctcttcttcttccgaggtaacggtttctttgctttcaactgacggcggagggcgatgggagctgcaatcgccggcgatttgagatggagattcgccaaaagcagagccgcggcggttgttagagtgatgcatgtggatttgaagagacggaaaggtgtggactttgggagaggggtgatagagttttgaaatttggaggacgaagctttaattgaagcggatttgagagatgaaattggttgaattgaggatttgaagaggttcttggggaatgttgaagaagacgtgtgagtgaaggaa

SEQ ID NO: 47332 - DNA, 554 bp, Arabidopsis thaliana columbia
tagtaacataaccaaagttactattaaccacaagctgaaaaaactcagctctagttaaagtcaaaagctaacgctagaaagccaaacataattaccgactacactgttcttcttcctgctttgctttcagaatccagctttggacggttcacaaacgcggacgcagccaaccaccaccgcggtagtagttaaacgccgttcttttgactcactacaaagagcttctaaaacgagaatctcgggctttcaccttccatggtggatatcacccgtttgttagtgaagagattacagtgagagataagagtgttctcattggcattctgcgtttacaaatgcagctatctcatccataacggtatggaagtgattgttgttaggcaataagtagaagccaatagtggcttgctccaagtaaagaagcttcacctcttgacccgctttcttgagcccttccgcgtacttcaattgccaatcttgaatcaaatctaacccgctacaacgacaagactcttggggaactcaacccttctagactcttgcttctcgggcca

SEQ ID NO: 47333 - DNA, 546 bp, Arabidopsis thaliana columbia
cgcgggtttggatttgattagagattggcagttggcatacgcggaagggctcaagaaagcgggtcaagaggttaagcttatgcatttagagaaagcaactgttgggttttacctcttgcctaataacaatcatttccataatgttatggatgagatttcggcgtttgtaaacgcggaatgttaacactgggttagagaaagaaggttgttttaacaaagccaagacatctttcaaactaacacacaggtgaatgtattgcctgtggattctctcgtttagttttgtttttgtgtttagtatctaagtgtgtggcggtctgcggcacgctttgtgatgactgtttaaacgctggattctgaaacgctaaagcttgtggaagaacagtgaggcgtttagagacttggaaaggaaccaagcactagtaaaaatttctcctttttttgtctgtaatatttggcatttagcttttacccttgagcctttttactaactaaaagctgattttttcagcatgagagtggtaattagatatctataaatatata

SEQ ID NO: 47334 - DNA, 569 bp, Arabidopsis thaliana columbia
gtccagaatatactgagttcttactatgatcatgatttgtgcaggttttaggaactcttctcactgtctgcagcttgtttgagaaaagcttttggaagaaaacaacaacaaagactgtctcaatcgactcatatatcttgtgttttaacataaagtttgttttactgttgtcaaattttgagtttatgaaaaaaatacaaaagattttgctaccaatctttctgcttaatctctatatgaagtattttagttcgttgcccgtgaatcagctaaagactggtgaaggaaagatccttttgaataacaaaaagttaaattttgtacttaaatgtcattttacgagacataaagcatagtgagtgttggtgcttaaaagttaaaactctgcttcaatcttatacacacatttttcctgaagttgctattataatacacttcttacaaacctattttacatacaatagacatgaataaatgcaacacaagctctaccatctaacaaatcattgaagagaaaggactccagaaagcgtttcatgtttcttctgttgctgtgaaagtgtatatat

SEQ ID NO: 47335 - DNA, 541 bp, Arabidopsis thaliana columbia
cttggtaacaacttttgatgtatgacgttgctaataatttttcagcgagagggcgttgaaaataaagtcttattaaacgcaatcaccgacgcaaaatgggtggtatccagtttatgttcatattcatatcatactgctgagaaaaagattggtcatttcttgattctcactacgacccaacatgagctcaaaccatgaaggattctaggttattattgtcagaacaacaatatggaatagcactaaagcaaaacttacctatagtggtggtcattgttgtctgcaacgccgtcacgcagaagatgacattttacatgttgaaaagtttatttacaaagggagaggtagttgagactggtttaagccaaggacgggtaagtgatgctctagaagtcatccctagggtcactgtttcgatattagcaatttagcatcaatctacaactatctagcaatgtgtgacacctaacaaactatcgagtaaacagagtgaattcgagatctgagagatcagaagaagaacaagaatcgcggagtgtga

SEQ ID NO: 47336 - DNA, 497 bp, Arabidopsis thaliana columbia
actactataaggagtagtgaaaaaatataggatgaaatttagggctcttacttggatgcatcataggagcattttccgtagcctgcaagcaacaacatcacaaaaattcacacttaatattaccatgagaaataaaataaaataactttaaagatttgattatgtaattagtaggaaaaatgtttcaaagtatgatacaataagagttcgagtaagagatcgattatctcttacgaaatactatccgaatagaaataattgcatatgtaagttaacctttttacttactagggttaatcttggtgaatgtagctgttccaccgaagtaacaagcaatgcgattgttcccattggtttggtaatatgcatgaaacgcaaaagatgcatgcgatacgatcgtgtccggttcgtaacaatcacatgtctctcaatgactgagcagtctaccctcccaattccacatggccaatcaagagctctttgtagctcagcttgtg

SEQ ID NO: 47337 - DNA, 531 bp, Arabidopsis thaliana columbia
gctcacttgaagatacaaagctgccataagttcttcttcgttcccttgtatggacctaactccaaatgttttctgcaatttaatattgaaaataagtatagtaaccgaatgttgttgatgtgatattgtacactacttacgctgaagaagtctgtgtcatgagctagccagaaaaagagtacagtggtaagagccatgtaggttcctagaacaacgccagtggcgaaaatctcattgagcttccaagaatctggcaccggggaaggtttaaccctgtccttagagatagtcatgatggttccatcatttaggattgcgataatcaagaccatgaaaggtgcgaaatcaaatctccagattaaagcaacaagcatgaatcccaaaacaatacggatagtgatggaaacagcgtagattgtgtagttcttcatcctctggaagatagcgcgacttgtcaatacggcacttattatcacgcttagtcctggttctgttagaacaatgtctgaggcgcttcttgccgcatcagta

SEQ ID NO: 47338 - DNA, 538 bp, Arabidopsis thaliana columbia
tgaatcaatttatttaaaccaaataatgtaaatcaaataggtttaaactttaaaacgtttgatatcgaagtccgttggtactcaaaactaaacctcaaaaacagagaagaaagtagcgagcgaaaaggaagatcttatttatctaaacttaacgttcggccgtttacaagatatgtttacagccaagcctcgttttaagagatacaacaagaataaaactacacaagtcaattgtcgagcttatgtctttgaatccgaatgagaatgttcttgtactattctcgtccgacttcaggtgtccttttctggcattcctctgtcaatatttatagtacttcaatgaaagtacacagtaccattttctgagcgatatgaaacttctatggcggctgatcctttccagaaaatgggcctcatctcgcaatgggctgcggctttctcaggggggctggtcttcatcattcttaactgaggttttcaatgactgtttgtttgggccccgaatgttaaatggggcgacagtagtccaacaaagttt

SEQ ID NO: 47339 - DNA, 565 bp, Arabidopsis thaliana columbia
  unsure (1)..(565): unsure at all n locations
nnnnnnnnnnnnnnnnnnnnnnctaaagctgcactgtctgccggcgttccatgacgaccagactacgctcggcaagcagatggcgaaggagttcgatctgcacggcgggatggaggtgacggacgaggtgtttgagtcggcggcgacatcgtgttcgaccaggcggaaaaccggatgcatacgattaaggcggtgatgatggcaacgcttggggagtgattgggtccgctgcgcgttggtaccctcaccccggccctctcccacagggagagggagaacaccggctccatttcattgatttttcatcccgaaaaaggtacgttttcgccgtaattccagcgtggacatgccagcattatgccgattattcagtctgttgaacgtgcacttgcagatcctcgacctgttcaacgagcaggccaccgagcttaagatatcagacatcagcaaactgatggggctgatcaagagtacctccactcgctgctaaaaaccctgcagcttcacggctatatctgatcagaaccggagaacggcaagtatcgcctcggcatgaagctggtcg

SEQ ID NO: 47340 - DNA, 535 bp, Arabidopsis thaliana
ctctaaagaaaatatgaatatattccggcgcttaatgccacgccggaacatatcgaaatgatggctaatcttgttgccgcgtatcgctaaagctgagcggtaaagaactgagcgccgtcgcgaagagcctcgtcggcggttttcatcatccgtgaataatgcaaaaaggcgtgcagcgtgcctgggtagagtttgaactcacagggctgctgatgcgccgctaacgtctggtaaagcagacggctgtcatccagcagcggatcgaactccgccccggcaataaaacagggcggaacttcgcgagtgagatcattattatacagacagtaatacggcgactcgcggtccgcgtcgattgcttaaatatgcctcttcgtacatctgcaaatactgttgcgttaagcatcccagacaccgcccaacagacgacgagtcacggaatcccgtaatccgtaaagcccataccacagcaaaacgcccgcaactttacagcaatcgatctgtttatcacgcaaccacaacgcactggcgagcg

SEQ ID NO: 47341 - DNA, 590 bp, Arabidopsis thaliana columbia
taatcaatcacaaaatctaaaactagttttttttaatataaatcaactagtaattaagtaggtaaacggaaagagatcttttgaaacaaataagaaaaatatctaaaagaataaaataaaatttgaaacaaataagaacttggttaattatacataatagtctatatgatacatgaataaaacaaaaatgaaaagtcaataaataattaaatagattctcgaaaataaagaaaaaaattataagaacaggaaagagatttagaaacttgatatataaatggaaataaacaaaaacttgataaatcatacctagttttgttatatgcaacatcagatgtgtgagaacactcaaagtagcatataatatatgaattagtccgttaggataatcataatttttgattattaaactatgtatctaagaaaactaaaaatattgggtgtatacagttgtcctcctgacatgagtatatgattgtaagtagggataattaatccgaatactggtttggtttggtcaaaaattttggtttttagtggggcgataaagaggaagagtcatataaagattacttacataataatgggtt

SEQ ID NO: 47342 - DNA, 841 bp, Arabidopsis thaliana columbia
ggaaatgagatatagtcagttattagctcatcaaattgcaaaacagttaaagaagaattgacaggagcaaacaagattcatcattctcagatcagatctgaattagactaaagcaccagatactatgaaacacaaacagaggagacgcatattataaacggtcgtaaactttatgcattaatcttaactccagattcatttccagattaaccaatgtattcatggattaggaactatctttaagctaaaacacgaaacccaaatctaagaaacagccccaaaaaatacatgaactaggataaaatgaggaatcaaaaacacccaatttcacgtcagaaatgcatcatgaattttgcggggaaaaaaaatgcatcatgaagaacataataaaactatccagacggattaatcgtcagaaaatataatcctctgaggatcgacacctgaatctaatcgcgatatgaatcagagaagtgattaagctaaggagaaatgacggatatgagaaaaagcgatccaatgagttttagattccaaatcgttcggattcagagatacaacaacgatgaatctcgttatataaacttggtaatcagctcatggatctatcagcttgcgaagaaattagttgcttgattctcaatctcaaattttaacttgtttcccatcgcgattttcccggaataaacacacgagattacgaggaagcgaccgaccgcgaaatcgtagaaaagggagaaagagaagaagaaaaagccttacgccacggcggatgatgagccttccttgcggcggctccggcggttgaaggtgacggtggttgcggtggaaaacgcgaaaa

SEQ ID NO: 47343 - DNA, 520 bp, Arabidopsis thaliana columbia
taagcgattcatgattcttaattttttaatatgcgaaaaaatcaaaataaacacccccaacttttaaatattcttacgaaataagcgtgtactcttaaattaaccataaataacctccaacttttaaaatattcttacgaaataagcgtgtactcttaaattaaccataaataacctccaacttttaaaatattcttacgaaataagcgtgtactcttaaattaaccataagtaacctccaactttgagttgacttttaacaaaaacagttgacttggtgttactgtagtatgaggttgataaacggttggtcaatttggacattgtcaacactaagttcaagtttacctgatacgattttaacatcgagtctaattaagaggaagtgaggaacaaagagagaagggatgaaagtgatttaattaatgttacaatagtgaaacagccaagttcgaagtctcgtttcttttatgagagccagacaacaagacagaggataaattaggaggtagcaaacata

SEQ ID NO: 47344 - DNA, 609 bp, Arabidopsis thaliana columbia
agacactaatagtccagtaacgatgtaaactgatccaagaatggtgaaggaagagaactttctgaaatctgcttctgttggtttgggatttttggtttgggaaaagaagcggaagagaaacagaacagggaagccgattagttggacaagtgttcccatccatgtactctttcccaccattttcatagtaaactctgcccaaaattgtagaaagtgcttggcaagcaaggacaaagaacacgtaaatggaaatacgaagccatttcttatagttcttcgattgaggtacggacgaagattcgatttccatggtggtattcatttcctcctgacctgttaggtttgcttctatgttgttatgatctgaaaacatcaaaaacaacaggttagcgaaaagaatcaagtaatctacactacgagatgcatcttgcttaccattgacatagattacttgagttatttccatgaccactctaagaggacttccacaaacagagttttggtaaagcttttatatatatgaaggttggtgggacaagtgcacatatttctgtaaagatgtttccgttgactttgaattattgaaacattttaattggcggttttaag

SEQ ID NO: 47345 - DNA, 508 bp, Arabidopsis thaliana columbia
caggacaaaaatggccaaccagataaaataaatacgccaagtagcaaagtactcaggactatgagttttgaggtcagatgacgatctcaagcaatatccagcaacttcatccaccaaactggaaaaaagaagagagatctataaaacggagactaaccacttaacaaaagataatgaacgctcagaaagccaaccctgaatcttaacatgtaatgaagaaccgtgtcttaaagaaaccaataagcattaagcaatatacactctcaattcaaagaaatactaaaaagcttctctctttatgacaaattttgagcatttaacatagaataaaatggaaacgcaaaacaaaagaggtatcttaaaactgatccaatgaagcagcaaaaaaaaaaaaaaaaaaaagcagaaacagccgtatacgtttggagataatacagatattcgaattgtccaaaacacaatatatcaaacaagcaaaagcaaacacattgagatacatacacgtaac

SEQ ID NO: 47346 - DNA, 641 bp, Arabidopsis thaliana columbia
atttaaactcatctacttgaacaaataacagagaagtttgatgaaacaattccataacattaaactcttatgatcactctttataaatccatgtacgcgattatcctaattggtagatctcataaccatcaaaaacaactaaattccaacagaaatcaagcaaacaatttcaaaactaaaaccctaaattccaaatcaacatacacactgatcgaaatcttgcgcatcttcttcgatttggtagtactatcacacgatccaaatccaatctgcgtatccatcgttggattatcaccgacccaaaatcgaaacccttggatcccgatttgaactaacccaacgaatcagacgacattgaacatgaatcaattgatcggagaaaagaatcagatgaagatagacgaacaaaatcgcttctccactcaaattcaaactcgttttgaagaaattagaaatgaattttgaaatttgaatattcgttgacggtttatttgtggaagaagagtttacgttgcgaaaatcagctatttatgtgattcttcgacacaaagaacacgtagatttacgattatgcccttatgcgtatatgctcgaacggtattatttcaaaattgtgttccagctttggagatatttagtta

SEQ ID NO: 47347 - DNA, 552 bp, Arabidopsis thaliana columbia
tgttaaaaaatttgaataacaggtgattttgttgtatttaaaacctcatggtacaaatgcttaatccaataagaattaatttatcgcatttgactttaatatacgttcaattccattagttcagtagttttgcttgactctgctatttgttactttgacgtgattgcatgactctctacctcacagcttgaattaatgtaagtggaaatattcttagtcttacttggttgcatttgttctctctctctccattgttttgttgatgaaattcttaaatctcatgattttgccggggttagggctttaccttgcacctatcaagaaattattaacgtgaaacgcctcttctttgcacatatctaaaaagagcaatccaaatagtaaaaagattagatgagaaatcctagtcctcaaagagaacttgtgcactaagacaatttgaaagattcaacgtttttattttgtcaaacgttaaataaatgaattttgagaagaatgataattatccatatgggggagagaaataagaaaatttgagtggacagtagtttt

SEQ ID NO: 47348 - DNA, 607 bp, Arabidopsis thaliana columbia
  unsure (1)..(607): unsure at all n locations
nnnnnnnnnnnnnnnnnnnnnnctaaagtttattaccgcaccactccgctagaccgtagctgcctgttccaacagttccgggtattgatgggtaaagccgtaatatttttcatagaaggtggcgtcgttaacacgaaacgcgccggaaaggtcgaacaccacgcagcccgcttcaagaaactgcggcgctaaatcgtggctaacttcatgggcggtggcgagaaacactacgtccacccctgggctaaactcgctgatatccgacatcggctgcaacggcagatcaacgatgccttttagctgcggatgaaatcggagattaactttcccgcatcattgctttgcgctgaaacagtcaaagcggttatgttcatatgcggatggcgatttacataggtcactagctctgcgccagggtagctgctggacccacaatcagcgtattcaacatcggggctattcaccttcttatgtctggttgccaggttaaacgtaaaacattcaccttacggctggtgggttttatacgctcaacgttagtgtatttttattcataaatactgcatgaatattgatactatcatgaccagaggtgtgtcacaatgaa

SEQ ID NO: 47349 - DNA, 590 bp, Arabidopsis thaliana columbia
tagaactgttgaggtatgccctagctttggtcttttacagtcagagattatttaaaagccggaaaagttcacggtttgagcaagatttaaagctaaagtgaacaaaaaagcacaaccttaataaagaccgctgattttgtcgtatttccttttcttttcctctcaggatatgaagcaacaatgtgaagaaaagaggtcagtgactttctgcaatgtagttttttattctctcggttttgatttgataaaatcttgccttaacctctgactcttacttacagagacgttgttaagcacatgctaatggagcatgtgaaagacaaggtacaagttaaaggcactaaaggggagagacttattcgccgtcagctagagactgctcgcgatgagctacaagatgaggcgactctgtgcattttccgattgaaatctctcaaggaagggcaagctcgaagtctcctcacacaagcagcccgccaccacactgctcaggtaccttctgaataaaattactattctatgtaagaaaccttcctgcaatttctcaatcaatgtcgcttatactttcttattgttgcatagatgcatat

SEQ ID NO: 47350 - DNA, 557 bp, Arabidopsis thaliana columbia
  unsure (1)..(557): unsure at all n locations
atatgcgaattttgttttgttttgagataatctctttattaaaccgaatcgaactaaaccgggttaaacgcttttataattatttttattttttctcataagtattgtactttatctagtgttgcaaaatatataacagtggaaacttccacttacattttgacatccatcttcacaacattaagcttttaaacacatgcccaaattaatgaaagcccaccagagaaaactaattcctgtaaggaagtaatagtcgtcgacaaagttgagacccgaggacagatgacgcataagtcatcgccgttcatcgtcgatttgataagcaacgaaaggcacctccaaaaccaccggaaaccgctagagcttcaagcacagaagtccatcggtttttaattagagaaacccataatcttcagcatcaaatctgcaatcttcccaggcaattgtttccaaaatctgaaggacatcacatagagagtaaccaactgaactttcacaacaccacacggcaaacaaccatgttggcaaagaatagattttnggagagacgagagagc

SEQ ID NO: 47351 - DNA, 499 bp, Arabidopsis thaliana columbia
tgtattgtgtgaaccgagtgtgttcccagaagacaaatcatacggcgtaggaaatacaagagtagaaagtggtccatatcttatctccgcacattcttttgactgctagagaaattacttattttgatctctacccacatccagaatccaaactttgatctatttttagaaggattattaaaagtaagaacctcaaatcagaacaagaaggaattggccaatgagccttgcaagttgccaccacgaagcctggagcatacttggcagagcgtaataagctcataatgttgtactcttgaagacctcttcaaaaatagtcaaaacagcccatgaactgtgaagacacaaaacaatgcatattgtacttacttggacaagaacatatgaagtctaattagcatggatccaaatacctttgtcccatgtcgtaactgagcagagtaaggagaaacaattgattgtggcgccaaaattctagaaattttttcattacaaaata

SEQ ID NO: 47352 - DNA, 666 bp, Arabidopsis thaliana columbia
  unsure (1)..(666): unsure at all n locations
tattctactcaaattaacatgtgactgaacttaagatttggctacattatcaaacatattcaaagaatgaggctgaaaaaaacctgcagcaggaagagctaagagtccagtgatccaactcttagaagcaacaccagaacctgatgatcttgcaaagttagatgcatacaaaggaatttttcctgacgccgaaaccgctgccgcagcaccaatggctcgtccttctgaacaatcaatcatccccaaatcaagaaataagaaacatcagatcttaaaaaactaatttgattagatacttaactattagaatcccaaattcatattctttttctttcaagaacaacacacaaaagcataattctctaaccttacaaaaatgaatccatcagatcaaataatcactgaatcacgaatctcatcaaatttatatcaatttctaaaaattcgataaacgatttcaaaaactaatcaatcaattgatttcacgaagcatctatagagattcactaacggagatgagataatgaacgtccagagaagaagcgagcatttttagctgaagagagaagagatttggctgctttggaagcagatctgcagatttgagagctcatttntggttttttgcagagagtgtgatgaagtgaactggagccttggaaatgt

SEQ ID NO: 47353 - DNA, 315 bp, Arabidopsis thaliana columbia
ggtgtactagtaattgtgtggtttattcacatgatgcatatcttaaaatattattcttgtttattagtgttattgagttacctgacgttgctgctgatagttgccatagccagtgtaaccaccatagtacgcattagggtcttgagttggtggttgagctgcataaccatagccgtcctgtggctgtggagggtatccatagtatccaccactgttccattgcgcttgatcagactgtgacgacaaagtttgaagttatgatgttgctcatagtatcacgaatatgattgatacgtatagctttgagaaattggt

SEQ ID NO: 47354 - DNA, 505 bp, Arabidopsis thaliana columbia
atcataaactacacaccagcataaaaaagacagaaacacgcataccttaatatgcccattttcatcaagtaatatgtttgatggtttcagatcacaatatataattcctttcgaatgtaaatacctaagaaattcaggaaaaaaattgtccataagagaagagtcagaagacatggtcctagttgcacctagaggtattctggtcatgtcaaaatggtttagataggatcttactgcagggctatgacaagatcataagcaagaccatagatagattcttctggcagtttacagtcctgcagaacaagtgaatttcagaaaacctgtgaccatatattatcagaaaacatagccaaactacaagcgatacctgctgcaataaggtcctgagatcacaccaacgcaatattccagaactaaccacatgggagcagaagtttcatacctgggaccacaacaagaagacgacaattagacccaaatatatggagccaaataattgttg

SEQ ID NO: 47355 - DNA, 494 bp, Arabidopsis thaliana columbia
ctataaaagattcacacctcaaaagacataattcgcagcacaaatttcaggtacagtgaaaaagatcaagatatcgagaaggaaagaggaggcttaccctgagtaatagtctctggggatatagacatctctcacaggtccaaacctctcaaagggctcacgaagctcttctggtctacaaaatcaaaaacaacaaaatcaacaacaacccaacgaaatcttcaaagataaactaaaacaaaatcaaaactttaaaccaaaggaagagaatttacctgcaatcaagaggaatgttacgaaccaagagacttccatggctagatcctctacgtccaccaccaccaccaccaccaccatatccacgtcgaggaggaggaggaggaggacttctacctcgaccaccgtatcctcttctcggaggactgtaataaggcggactgtatctcctcatcacctaccatagacacaaaacgatttcaacgcaagatcctcaa

SEQ ID NO: 47356 - DNA, 310 bp, Arabidopsis thaliana columbia
gatgtatgcatattaaacattttcaaaataaacagtgagtaagagattcccactaaccaatggttacattgtctccaattatggatgggtgcaccttcccgcttaagtttgattttgccacatgcacaagtgagttgtcctgaatattagttcctgacccaacaccttacggcgttcacatcgcctgcgcagaacaaaagagagcaagcaagtttagattgtatgttatcccagtttcctggtagagtactaacaggcttagccatacagtaccagtgcgtaatgacatgaaagcactctgtagcgagga

SEQ ID NO: 47357 - DNA, 532 bp, Arabidopsis thaliana columbia
tcatgaaaagacctaagagcatcatacccattaacataattatctttcaatctctgactgattcctctgttctcgtccagtgttttgctgagaatctgaaggaaaccagttcacacgatcggtcataccttgatccccacggtccagttcggagacaccaaatcttctaaactcatgttctagggtttgcaaatcagaagaaaataaggtttcaggtgagtaatcactcaagggaaacgaatggtcgtaagttctgagacgctcccacaaaatccgttgagcgggagattccacggcttcctgaaacggtgcggccgccactctttcgttctgattgctcattggagaagacttggaccacgacgacttggagatgcgtttagtaaaaggagatgttgagaaatgaaagatcaggttccgataattattagagatgctaaggtaaatcttattttataaagtatgaatttcaaaattaggaactcatatgattgtacacgtgttaattttattgatcttagattttgacacg

SEQ ID NO: 47358 - DNA, 294 bp, Arabidopsis thaliana columbia
atccccttttgatggacgttaaccaaaaaaattaaataaaattagattaaattaaagtatcaaaagaaataaaaaaaaaaaatttgaaccaggtttgaatgtagaattaagtaagattttggtttaaattttaatcaaaaatctattcatggttttataaaaataagtttccctaaaaaatagagaatttagtttttgagagatttaacccatgtttaagaagaaccaagacccctcgtatactggtttctattcaacgtgtgttcttactttcatttgcagggttctatttct

SEQ ID NO: 47359 - DNA, 571 bp, Arabidopsis thaliana columbia
ctccccgtagtcaaaaagccaaataagtactaaactatgagacaaaggataaaatgataagagactatgatagaagctaactaaactagacagatgaaatcatactaaatcaacatggcatcctaacgcaggcaaaagtctctctcttgctttgaactacatgatgatgtaaaacagtctattattgtccaccctctaaaattaaactggagcaaattttctcttcttgctttgaaaatgaccttcatcaatcacatccaaacgcaggtgaaagcctctctctcccatcttggtttcagcaaaagacttcccagccgtccgatcccatatagtgcatcgttctctatccattctagcttccaagccgctcctcagcatctgagaaacactcaatgcatttcccacgagccctggagcgtaaagaacattcttgatcgtcttcttaccttcttgagtcatgatagtcacatctccagttccttctgccatggtagtagaccatttgtgaatctaatctagcttccgcgatctgtctaagtggtgaaacttccatgtgaagtatatgatcgag

SEQ ID NO: 47360 - DNA, 392 bp, Arabidopsis thaliana columbia
tcctcaggttacatgtgtaaccataaagaacccttctagtataacataatatctcgtcacatcctgaatcgctttgctaaaactcttatttctaaatgcctttgtagccgttggaacaattcaggatctaccgacgtcaaagacttgatttttgacaccatgaactcggtatagtcctcacccaactgcatcagtgacagtatctcttccacatacagctcaacttctctcgggtctggtccttcagacgcaccaccgggaagaatattcagattgggagaattgttaatatcagacgccaatatagctaactttctaaagtccatgtacttcttcaagatcaacgaacctcttaaatcacattcctcttgcaattcacaaatcgcatacgc

SEQ ID NO: 47361 - DNA, 315 bp, Arabidopsis thaliana columbia
ctatagttcaaagtatccccaatcagatcatacggcttaggaggaggcatcaataacagtacggcctgatcctcatctgagaccacaacattcgagcactccagatctgccaccatatgacgaaatccatcgacattacctccaatagagagattctcggacatcatggagctgtagagcatctgcgtcagatagatccggtatgggagagctctagacatgtcgagcctatccatggcttccagcatcgcagcagcagatgtcgctttcgaaaccttccgcgatacccgatctgagacactcatcacgaaggtg

SEQ ID NO: 47362 - DNA, 342 bp, Arabidopsis thaliana columbia
accgtttctcgtcttttatttaatgaaaagaaaaactatcaaatttttaaattttgtgcgtagaaaagttggagagtacgattgatctaactgttcaggaatgtgagagcaaataagatagtcaaagatttcgttaggactaaatttgatctatcaagcttactctcaataaatgtgaagtcgtgacgatgtcaggctaatattctcgggtgacgtgtataatagcataaaaacaggcactacaatggtgcactcattgtgtgattacacaaaacataattgacgaaattacatttcatttatttacacaactgtcacttctttcacaggaatcgtgatacg

SEQ ID NO: 47363 - DNA, 441 bp, Arabidopsis thaliana columbia
tgattgtgaacttgttttcgatggttttgatcgatttctggttcagttttttttttatccttcttaaaggattttatactatagatgggtcgatcaagtgttattgatatgccattgaagtgaactaagcttgaaatgagccaagttaagtcttttatggggattcttacgaagttactgaatctgatgtgaatattttgtggcagatggttcagctcgtagctgacaagcatgtacgttacattctgatggcagaaaaggtacctagaaactgtatagaacctttgctcgttgcctctgtttatgtcactgtgattgtatagcttatgttcttctttacaattgctttttgaattttatttaatttgctagaagaaagagagtttcgagtctgtggtgatggatcatccaagaatgaatggtgcatactggggactcaca

SEQ ID NO: 47364 - DNA, 470 bp, Arabidopsis thaliana columbia
atttagttacaaatttttatgttataagtaatttgtttaaaataaatacatagagagtagtagaatcaatcaaatatcaaacataacaataatgccatgcatacgtaaaacaatcatctaataataatgtcaacaatggaaagagaaaactagttttacttgctctagtcccagtccgaggggattatggaccaaaagcccccaaactctttatctcctagtgacctatatataagcactagaagaggtaaaaacttttttcatatgatatccaagtgactagcaagtagggaccaataagatacacattcaaacaaatatattgtcaacctaatcaatcatatggcatgtacagatgctatttagataccaaaatatgctatgagagtcgagtttgcgtcacgctcatctttggttgtatagaagtttatgagagcgatgttaccgaatggcttatacataagtgggtg

SEQ ID NO: 47365 - DNA, 389 bp, Arabidopsis thaliana columbia
aggatgctacgaaaaccgcggttatggatggaaccgttcatccacttactagctacgttataaattatgtcaagttcttgttcgagtaagtaactttacttagaccaacggacattgtcatttttgttggactaatcagtggattttgggatatggagacagttaccaaacgacgttcaggctacttattcaagagtttgatagtaaagatcctgatagcgagcttggagcatgtaacaatgaggatcatgctcgccttacaggatgttcagtatggtaaatcgaagcagtacaaagatgtagcactaactcaactttgcctgatgatcaatgttccatatatagtgagatctgttaggaggtttggtactgtttcttcggctccatct

SEQ ID NO: 47366 - DNA, 504 bp, Arabidopsis thaliana columbia
cataccagtaacttacgatttgatgaaattggacaagttataactaactctctatgagggggtctttgctgtttgttgcagacagtggtgttctgtctagtagacatatatataatgcttgggaaagcatttttgccgtatttggaaggtctaaacagcacgcaggttcgtctagtgaccatctatgcaaaccggatctcgcaggctagaaacggtgcccctatcgacgcagacacctgacgagccgcttgtacttatggttcagtgggtttatcttgtgtcttggggtcatattcattattgtttattttgtatatgggtgtgttttccgcgtttcaattttttgggtgtaattttgcaaattggtttttccatttgttgttgcagtgtgtggtctatgttgagttgttttgggggaatgtatttattgctttcctctcgtaggacagaaaaaaaaaatgtattttacctcgcaactgatgattaaatacctttattagtgac

SEQ ID NO: 47367 - DNA, 959 bp, Arabidopsis thaliana
gctttataaccagagagacaatgggcttgaatcttaattgtgtagtgagcaagaaagaagcaaactttaatacaaacccataatagtcttaggattaataaagtcacaaagataaaactttgcagagatatcttaatgaccaaaccataaaaacacacacagaagaagagaaagaccaacgttcgccggcaaaactaccggaaaaatcagccaattattacatataagcaaacctaacataacattagggttattacagacttagggtttatgaagttcttcatttgcaggtacaagggttgcacttgcagtcagatccgcatttgcaagcatcattctcggcaacgaaagtctcgccggaagcctcgtactgagagttcatcgccggagcaacaccgaggacaagagtctcggtggcggtgttcccaagtcagggtaccttttgcaactgtacaaagccccaaaaaaaataaagatcatgggttaaaaatgatgaataattaaaaccagaaagatttgattaaaattgtattataatctcatcgagaaattagggtttttgattcagaaaatcacaagaaacaccagaagaatcagaattatgagagatcgagaaacgcgtaccctccgcaaccattgccgcacttgcaggcagatccacaaccacagcttccaccacagcaagacatgttttttctagaaaattggaagagatctgagaagatttatgaagatgatcttaatttgccttaaacgataatcagtgaatgaaacttacatattcaggagctttgatatttataggcaaaattagaatttgtagaccgtccacgtgtcaacgatctttgtccactcttatcacctaaataatcgttcctcaagtaaataattttagtttacagcccttttccaataaacagaaaaataaaatattgaggattagagttggaaacaaaagc

SEQ ID NO: 47368 - DNA, 584 bp, Arabidopsis thaliana columbia
atttcatttgcaataaccaaagagaataatatttatttattttctttggctctatcatctaataggaggagaagtaaaaaaaacagaagagaaagatccaatcattctagaaaggaacacaatatgcttcacggatcccaagaatctttctatgcctgcctaaacccagcaatataaatcaaaccttcacacgcttcggttcttctttacacgtgccggaaaaaaaaccctagtagtagccgcccaatgaccatctaaagtggtccccgtgatgacacgtgtcagttggaccactatccgtaacttaacatgaaagcacatgtggggtcccctctttcgtcctttgccctaccagttccttgtcctagcccacaatacaatctacgcggtatctatatcaaagtttatctagctattttccgaaatagaaagcatatacttccatttatttttgaacaaattaaacttggtagaaataaaatctttcgatattgatttatttcgatttagtgtaattctattatcatctcgcgtgtcattctaggcttatagcaacagtgtaggtatgttgcaatgttgggttg

SEQ ID NO: 47369 - DNA, 833 bp, Arabidopsis thaliana columbia
acgaggaggaagaaatgaagaagtttgtgctccatttattggttctgtcacattgctactcggtcccatctcttaaaagactttgtgtagagattctcgatcaaggatggattaacaaggagaatgtgatcgatgtgcttcaactagcgagaaactgtgacgtgacaaggatttgctttgtatgtctttccatggtcatcaaagacttcaaatctgtatcttcaacagagggatggaaagtgatgaaacgctctaatcctttgctcgaacaagagctcattgaggcagtcatcgaatccgacagtaggaaacaagaaagaagaagaaaactggaggagagagaagtgtatttgcagctctatgaagccatggaagctcttgtccacatatgtcgtgaaggttgtgggacaattggacctcgcgataaggcccttaaaggaagccataccgtgtgtaaattcccggcgtgtaaagggcttgaaggtgcgctcagacatttcttgggatgcaagtctagggcttcatgttctcattgcaaaaggatgtggcagcttcttcagcttcactcttgtatctgtgatgattctaattcttgcaaagtttctctctgctggtaagttatatcgcacatttcagacaacgccaacaaccttaagatacagatggtaatcgttttcttaaccttgtaggaatttcaaggagaaaatgaagaagcttagcaagaaagaacaatctaaatggcgattgcttgtagaaaacattattagggcgaggaacagtctcgggcccttctcgtcacgttcttctggtttgatatagaaacaggttttaga

SEQ ID NO: 47370 - DNA, 828 bp, Arabidopsis thaliana
ggatcttaccaaaacagaggatattatcaacctgagacaggtttttcaattcaatgtaagttccttgcttctgtaacattttagtctgataaaagagaaactgtattgatcaatgatagcaatttatacaacacaattctgaacagagaaactggttcaagaagacatcacatatgtctctcttctctcttcttttattcactaacacaacacaaacaggaaacaaaaccaaaaaaaaaaaaagaaatcgaactccttgaggttatttatgatcagatcttggcgtaatcgacggttttctttccatcgtgtgccttcctgaagaaatacttgacgtaatcagagtacaggacgtctctgtaaatcggttcctctccgtttgcaatcacctcaggtagaggaccaataactgactctggttttgggttcacaaagataggaacagagattctattattgtaaccattggctaagacacgatgctccacgctcttgtacagaccattgctcatgatctgcatcgcatctccgatgttgatcacaaaagatccagcaaccggaggcacgtgaacccagttccctgaagccagagaacgcacgtgtagaccaccgatctggtcttgtaagagaatggtgagagaagagacgtctgagtggcgaccaacaccaactgttaggtccggattagggcagatggggtagtagttaaggttgactcgaatcgagcccataaagagtgattctttcgtctcgtcaagctctttaacattgagattcttcccaaatactctagaagcgtcctcacatcttctttgacttgttaatgta

SEQ ID NO: 47371 - DNA, 561 bp, Arabidopsis thaliana columbia
caagtggataaagtgtgaagtgagagctctcggcgttcgttgttgattaaacccaatggcaccttcgtaatttgttgacagtttgaggataaggagttttccgtttagcccctttaaaacataatatttcaactaaggccccaatatttgataatatactattatacttagagattttagataaaatataggggttgtttcatatgggcctaaatctcagcccgtttactatttgggcttctaaggtataacccgtacccgtgtttttgttgttttacatatccacaccgacctgagaagagtcaaaaacgaaaaacctctcttttgtcgttcctctgctttcttcgatttgcttctgctttcttcgatttgcttctgctttcatcgcggttcaggtcactcttttctcagccatggcgattcctttcatggaaaccgtcgtgggtaagcttcaaaacctttttctgagacattttactatcctgtttcactcatcgtatttcgtttttgtttgggttttgctttctgtgttgtgtgtgttgagatccatgactcgtttgt

SEQ ID NO: 47372 - DNA, 528 bp, Arabidopsis thaliana
caggcatattaaaatgtaaggtcccttcatttgtgaataagacactgataagcgcgccaatttggcatttctcactttttaattcatgacgtgcatatgattctgctatttccaaaattttcccacttcttcatttctccaaattctgtgaagggatgggatctttaggagggagggaaattagaaactaaagttgcaattgactttaccaaactttttacacagttttccctgttaataattcctttcgaaatttatgcctttatcagacacttaagctctaaattaagcataatcttccaggtatatgcagatactttagacattcgtctagctctttacctatccttcagcaacccatttgttcaattcccctgggtacgtgggtccctagaatcggagaatcaagtagcaaacctctcgctacattgagacctcacgcctctttgggttctgcgctcgcattattagttcaaggtaatcgtttttcttatcttgttgcagcaacatcttattcaaagctcatct

SEQ ID NO: 47373 - DNA, 713 bp, Arabidopsis thaliana
tttttttctctctcttttttcgtttttgttttctttctcccacctctccattgaccgttaagttgccgccttcttctctcttccaccaaattgttcttgacacatttggacggtccagattcattacagttcacctatcaacggtgatcagatcagttgagagttaacaaaacaatattaaagcccatctcaaggcccaataaacgagagatgaagaatctgaaactagtgatctgattggttgagggaaaaagctgtagcctggaagacacgtgtcactaacccaaaactaccttatcttctgtcgctcctcaattcggggaaaatcgaagacactgtgacactctagcaccttcagttccgtacaacaatggctctccaagctgcctattctcttcttccttctaccatttcaatccaaaaagaggtatgttttcaccattagtaatgatttccatcttgttatgatttgttttcgataaaatgaagaatttacctcaatgcaatggtgattttgcagggcaaattcaatgcttctctaaaggagacgacttttactggttcttcattttcaaaccatcttagagctgaaaagatatccacctgttgaccatcaaggtaaagtcaatcacctatacgatgtgaaatctcaaaaaaagatatcgaaaacgtcctgaggtttaactctgtttcgtgcaggacagagaagcaga

SEQ ID NO: 47374 - DNA, 577 bp, Arabidopsis thaliana columbia
gtttgatagacttgcctgattctagatttcctattgatgttcgaatcctattccgaacaaacaactgactacgattagttggatcttcaacccaatcttgtctaccccattgacatatctgctaggaaataagataagagttgatgtcaacaaaccataaaacgataaattcttgagtttctagttttaagagaaccttgtacatgtcttctttccataaatctagtagcggaccactaagcgaatagattggttcttcatatgttttgcatctaactgcagatttctggagaaaatctcggaagcaaaagctgtacccgcaagaccaagtacaccgctactacgagataacctgagaatgaataactcagcctgcatccaacttcagacaacatttcatgaacatctcaacataacactttacttctctaaattctcaaagacccttttacctggtcatctgcatgatgcgctataagcaagacctcaatctgttgtcgaaaacacacattcgaaatcatctcatacctcatttcacgagctgcttcttgcaagtggccaagctttggtctacatc

SEQ ID NO: 47375 - DNA, 464 bp, Arabidopsis thaliana
ttaaataggtcctagaagcggttgaccaccttagtttgccatctctttgaggatggtaagccattgtcattttgagttcaacaccttgaagtgtaaaaaattccctccaaaaagcactcgtgaatacagcatctctgtcacttacaatcgaactaggacaaccatggagcttaaagacattgtcgaggtaagcctgagccacagtcatagcactgtaaggatgagcaagagcgatgaaatgagcagctttactgagtcgatccacaaccaccatgatcactgttttcccattcgaaagaggtaacccatctatgaaatccatagatacatcactccaaatgcggtctggaattggcaaaggttgcaacaacccaggagaggcagcattatcacttttacactgttgacaagtaccacagcttctgatgaatgcctgaatatccttcaccatgcttttccagtaa

SEQ ID NO: 47376 - DNA, 689 bp, Arabidopsis thaliana
acacgcaacagaacaccacagaacaatagttgaacttcgcgctttttgtactcgtcaaggtcgctaacaggataaaaaaatcccacatccaggacctataatggcgcatcagctactcattggtaaaggaatgatcaccttgaatctcaaacggatttttctcgccctcaccttacttcccttgtttgctgttgccgctgatgattgcgcactctcagatccgacgctgaccgtacaggcgtataccgttaatcctcaaacagagcgggtgaaaatgtactggcaaaaagccaatggcgaagcgtggggaacgttacatgctctgctggcggatattaatagtcagggtcaggtgcagatggcgatgaacggcggcatctatgatgaaagctatgcgccgctcggtttgtacatcgaaaacggtcagcagaaggtggcgttaaatctcgcttcaggtgaagggaatttctttatccgtcctggcggcgtgttttatgtcgcgggagataaagtcggcatcgttcgtctggatgccttcaaaaccagtaaagagattcagtttgcggtgcagtcagggccaatgttgatggaaaaaggtgtaattcaatcgcgtattcatccaacgtcgctcaagcaaaattcgtaacggtgttgggattaataacatgggaagccgtgtttttcttgag

SEQ ID NO: 47377 - DNA, 533 bp, Arabidopsis thaliana columbia
  unsure (1)..(533): unsure at all n locations
aaggtatacccattttgctctagtttccaaaccttcccaaacgctgctttcatgctcagttttgaaggatcaccagcataaacacctaaaagcataaaatctaaagcattaagggtgcactagaacaaaaatgaaaactgctagataatcagattcgctgacatctaaatgaataaatggttcacatgaagttttatctataactctacctgaacaaaacggttcaatcaggcgctcaaaaacctcatcaccgaggttacgccgtacaaactcctccacagattcttcacgaccctgtcacctttgccaaactctaagaacatgagcagattctaccaacataaagccctaaaaatcatattgatctaaaaggtcgtaagaatacacactggaggtgacggtcgaatgccaagtgcaccaaaaccagctctaatcttcccaccaatactcatcaaatcaaagaacggtaagtctgttagcttcgatggaaccggcctcaatttccantccacaacacaaaccttggcgcagta

SEQ ID NO: 47378 - DNA, 721 bp, Arabidopsis thaliana
  unsure (1)..(721): unsure at all n locations
tgaagatgaagaaaacaccacttgcgagaagtaaaccgaaatacatgagcgcttttcctgaaggcatactacttgttgctgactgcaagctccctggaatatctctaactccttttgaaaccctgtagtcatcaaattcaggtacattgcaaaaacaacagaagaacaagaattttatcagangaacaaaagaagattcctgaaaacaactacaaatataaataactcaatagacttattcactaactctaaatccattggtatgcaaaactcataaatgcatttcccaaactatcaaatctcacaatcaacaaagtaaatctcaatagctcagattcactaacacccacttctcactaccactaataaacctcatcttcttagattcagtcacggaataaacattatgagatgactaattgcaatctacttacacactgaaggtgcccgaaacagtgtcattggcagatctaacggcggattcgatatcaaagccgaagcttccgccgctttcctcgaaatctctagaggctgcgtaagaattccaatccgcaagcagagacgaacccgattgctgctgctgatctacggtgctactcccgcccatcgaaaaccatcgttgtgacatgttttgggtttcgggatcttcaaggaaagcgaacaatgatagaccagaacgccggcgatcggatatttttgggtgacgttttaaggttttttg

SEQ ID NO: 47379 - DNA, 559 bp, Arabidopsis thaliana columbia
gagaattcttagccttttgactctccattcttattagtgtaagttagtgcattatactagatagctttcttatttcccgcttcttgtgatatgtacctggatgaaatgtttttcagttagtggataatgggattattttgaaattatctaggctccattgtggcacaaacctcacctggtgcttcatctgttagattttctcccacaacaagcacgcaaaagaaacctgatgttccagccagacaaactagtatttcatcacgagatgattctgatgacgatgatcttgatggagacgcagataatggagatcctactgatgtgaagcgtgctaggaggtacaaatcttgatttttgtaccttagaatgtttctggtaatcgttctgaatctcgaggctgatagatatagacatgcttttgggaaaaggcttgtacctaatagtttctactttctactctctctaaagagaaagacagaactgaaatctagtagaggaatgtttcagtcaattttatgttgtgactgttggtcttaggaaacagtcaggctctatatat

SEQ ID NO: 47380 - DNA, 515 bp, Arabidopsis thaliana columbia
tgcttcctttgaacggggaagttaaccttagaatggtaaatagcaccaggactccacttttccgggataacgcctttcgcaatgatcttcttaccggacacggcggaggtaagcctgatgttgaacggacctttcaaaggaacaccagggcttagtctccaaacagcggatctcatttcctccattttcatatactgtcctccggccggttggacctcaatgcaggcgaagttcccatcaccgtttgcaaacttaaccgcgaatgacatgtagtaaggatttgctccggcgtcgacatggatagcgatcatagtcttcgggtgtttgcaacatgcactaaatatacgtatgatattgattagaatttagtatatggttttacaatccaacatcaatgtaagtttattagaatttattggttgaacaaaataagtcactaaaattttatatttcaaattaactctagtaaattaatataacattagtttaaaatgactatttatatttgtgaatat

SEQ ID NO: 47381 - DNA, 523 bp, Arabidopsis thaliana columbia
cgtaccctgccgatctttcattatcagccttaatatgcctagccggggctgtccaaagcttcgcggtacgcttgtggtggagagacaccctagcggatgggcggttggttgggatgcaaggctttttgcacctctttatacagtaagattatatatattagttttaaccataatcaatcaattgagacaaatatcaacaaatttgatttaatgaagggaatagttagctcggggataacgtactatgttcaagggatggttatgaagacgagagggccagtttttgttactgcctttaaccctctctgcatgattcttgtagctctcattgcctcttttattcttcatgaacaaatccatttcggatggtacgttacataaatgtagacacattacattagtagccatctcaatactcattctcgatccccatatattggggatgtgtcacagtgataggaggggcagtgatcaccgagggtttgtatatagttgtttttggaaaaggagaagactatgaagt

SEQ ID NO: 47382 - DNA, 627 bp, Arabidopsis thaliana columbia
ggccatagaaacacagtttgagaacttctctatcaatagaggagaagccaaaactctcaagacacaaaccaaatggagatatcgtaatcggccaatgccgagaggagcttcttcttctacaatggtgtgggtgaagaaagagcagaacgagagagctggtgatggaattgcaagtggcgtgaagcatttaatgcgtaacgtttcctttaaggtttgataaatgttgcttctttacggtttctatttactgatttggaatcaaacattgatcttttagaatattttggtttcaggttttctgcttagctctggaatgctactattcttggatgttcattgaacagagagatgatgatggtgttggattaaagactctgaagcattagggactaatggtttgaggttaattgtaagcaaatgtacataagtttgtaagtataaagaacatgattccataacagtttttggtgttctgcttgtgctacttgaaaatacttttgaatttcggtttgagtgttcaaatctggacaatatcataaacaagcctacaaattcaattttttaaacatttacttgttactaaattttgagatagtacacatttctagagtgaaagttgaagataat

SEQ ID NO: 47383 - DNA, 636 bp, Arabidopsis thaliana
gaggatacaggatccctctacagacttggatcccacggaatcacaatggaggctcacgtcagtcacttataaaacatgccgtatcctcaacgaaatgaaggattcgaattcggagatggcatcactcattaatcaaatacacgatctcgttgatgcagatgagagacgaaagccagagtcgaggctcatatcacgcatcactcaactaatgtctctcacaaactcttggagttatacttcagatagggattccaagatcatatctctcattattcgaataatcgatctggtcaaatcgatggatttggattcgaagacgaagccgaagtcgaagctaatgtcactcattactcaaacaatctctgtttacaactctatggatttggattctcagccgaagccgctaaggaagctcatatcacttgtttctcactgtcttcataacgttaggcctacagattcggactcagactcagatgggaattacgtgtcacacgttgaagattcattgaatcacgagccggagctggagctcatttcactcatccatcagataggctccctcgtcatttctatgaatcctaaatggaagaagcttatttccttctgccctatatttgaagtaagtttgaatca

SEQ ID NO: 47384 - DNA, 526 bp, Arabidopsis thaliana columbia
cgcttaaagtctctgttaattgagaaagagatgaaaatccaacaggtatgacttagactttaagaactagaattcacatcttgaattatctcttctgaatattttaaatgtggagtccacagactaggtaaaccatatgggacgtgaacttaagtttattaacaaaaacaacttgaattttttatcacttgcaattattcattcatgtttaactaatggcagatggaatccgaaatgaaagagctaaagcgtcagagagacattgcacagtctgaacttgatctagaaagaaaagcaaaggagcggaaggtatgtgcgctgctaatatgatataccaaaattttctgggataacttcaaccttatgcagacatgcctatataattggttgcagggatcaagtgagtgtgaacctttttctcaagtggcaaggtgtctctcataccatacaaaggaggaatccattccaagcaaatctgttccgtcaagccgcagaacagctcgtgataggagaaaggataatgtga

SEQ ID NO: 47385 - DNA, 588 bp, Arabidopsis thaliana columbia
cgcacgaatctcaaatcacgtcccttaaacttgtaacaatctgacggtgtagattatcgatccatgcagtgtcatatcattggtcagaaatattttctatctcgccactatattaatcatcatggcgggtttcgctgatactcattattgttatttttgacagagagaaatttctcagttacgcttcatcctcctctaagagatcttttttctatcttgggtagtagagagaaatggcgggtcggggaaaacaacttggatctggtgcagcgaagaagtctacttctcgtagtagcaaggctgggcttcaattccctgttggtcgtatcgctcgatttttgaaagccggtaagtacgccgagcgtgttggtgcctggagctccggtctatctcgccgccgttcttgaatacctcgccgctgaggtaatcagtctcttctatttatcacgtgtttaatttactctttttaccgaattaaatggttatagcttgcatctagggttctggattttagattttcttaccgccttcgttaaattatgcgaaatttggaatattttagaatgcattagttcgttagtttgtttt

SEQ ID NO: 47386 - DNA, 563 bp, Arabidopsis thaliana columbia
gccagtgtgctctaaagaaaatttcttaacgatttaagaatcatacaaataacactttgattaaatttaattttttgtatcgataattgtgaacctctctggcatggagaactattttgaacatgaggtgttacgtggatatgttgcttattacaagtactgctaatataaaaacttgagaaagagataacgggttatatggtggtttatccccgctggcgcgggacactcgacagaacggcctcagtagtctcgtcaggctccggtttatccccgctggcgcgggaacacctgttttcgcaaatctatggactattgctattcggtttatcccgctggcgcggggaacacgggcgcacggaatacaaagccgtgtatctgctcggtttatcccgctggcgcgggaacactggctctgcaacagcagcacccatgaccacgtcggtttatcccgctggcgcgggaacacgaaatgctggtgagcgttaatgcgcaaacacaggtttatcccgctggcgcgggaacacattacgcctttttgcgattgcccggtttttgccggt

SEQ ID NO: 47387 - DNA, 469 bp, Arabidopsis thaliana columbia
tagaacaacaatccagtccatgtaatatttaacagtttcggacttaaagttatacacgcacatgagtatatatgatacaagagttcaaacatcatgatgatgttactaagacaagtttttacttattcatacaatatggttcacagacatgtggaaaccataccaaacagactgatcaaatctcttttaagcaaaaagaatctgagaattcgatggagttatatctgcataacgctccggcgactcaacaacctcccatctcacagcaaacttattctccgactgccaaatattcccaaccgcgagatgaagattcctaccaaccacatatactctgttcccataacagttaaccgcaaacggtctacaaatctgctcaggcaattccggtccgttaatcgtctcccacgaatctgtaaccggatcataaaccttcatcttcattctctctaactccgaaactataaac

SEQ ID NO: 47388 - DNA, 269 bp, Arabidopsis thaliana columbia
gaaaagcaataaaactttctacacggattcaagtggacgtgattatatcaaaagggtatgatgtccattatctacatgtgtgcatgtgttcttgagtgtactctgcttggtgcagtgtatgaataaactgaaaaacatgtcttggagatccgtgattacatgtcagactggaaactagatgtcgaccaatctattgtaggtaattattagccggtatataaataactgacattgatcaagtagggatgtggttgctagtctacagttcc

SEQ ID NO: 47389 - DNA, 449 bp, Arabidopsis thaliana
aactttctacacggattcaagtggacgtgattatatcaaaagggtatgatgcccattatcttcttttgtgcatgtgttctttattgttcttttcttgttgctgtttaagaataaactgaaaaacttgttttgcagatccgtgattacaggtcagactggaaactagatgtcaaccaacctattgcaggaaattattacccggtatgtgaataactgacattgatcaagtaggaaattggttggtagtttacagttccctgcaaatgatcttggattgagttcgaccaaatcagttgggtaataattccatatatctcttgctcagataaatcatggaatttacttgcaagacagtaagaaggaattctcagtgatggtggacagagccttcggggggtcgagcatagtggacggacaagttgagctaatgcttcataggtattgggcat

SEQ ID NO: 47390 - DNA, 519 bp, Arabidopsis thaliana columbia
ggagcatacttttgtgcctttcggaaatcatcacgtgctgagtccatctgtcctagctctgcctttgctttccctcttctgaacagtgcttttgggtttttctcttcttctgtcaacacctgataaggttttgagtttgattagatttcgagaaaccgagtatgaactttaatgattttcttcaaatgaatggtttgatgagtcttacaatgttgcagtgaccaattgcttcatcgtatcgttttagtttgatgaggcaagctgctatgttaagatggcatgggtttttaactgctaaagccatatcctggtacttcccatacagctgaaacataaaatcgtcccccatgtatgctatggcctgaaacagcaaaaccatgactaatcaaaagccgaaagaagacacaagagcctcgagcagactcactaagtatgcctgaaaacctaaactttgaccgtaattgttggaaagagagatagagatagagagagatgcataaccatttcatactgttgcat

SEQ ID NO: 47391 - DNA, 590 bp, Arabidopsis thaliana
ctcgtctataagatttgtgagttccttttatgcccttgttaagaggatttaactcttacatcgtcattgccattgtgtagcttttctctaaaccctaaaaccttaactttttgctcttctccctccgcctcaatcgcacgaagacgataatcgaatatggcggaactaaagctatcagagagtcgggacttaaccagagtcgagcgaatcggcgcacactcacacatcagaggactaggtctcgactctgccctcgagccgcgagctgtttccgaaggtatggtcggtcaagtgaaggcgcgtaaagccgccggtgtaatccttcagatgattagagaagggaaaatcgcgggtcgggctattctaatagcgggtcaacccggaacgggtaagacagcgattgcaatgggtatggcgaaatctcttggcttggaaactccttttgcgatgattgcaggaagtgaaattttctcattagagatgtcagaagacagaagctttgactcagtcttttcgtaaagcgattggtgttaggatcacagaagagacagaggttattgaaggagaagttgttgaggttcagattgata

SEQ ID NO: 47392 - DNA, 513 bp, Arabidopsis thaliana columbia
ctagtttatgcttacaacataaaaaatgtatgggacgaggaagtaaagacgcccaaagcatcttccacctgattaccacgagctctcaacattctcactcgcatgagtcatctttcaatgtgtaaacaataatcttactatcgtgtcatatacatgtttgattcttacacaatatgctgagcttgtgactaaacctagttcatgcgtggaacataggcttcgacacgtgccaacctatgccctatagagacctaaatatttctctttatagtatgtaagtcgtataacacaatcatataatctcaacgaataaaaacacttattatatagtttgttgaacaatatttaacaacagagatttgtttctttagtctttcatccgcatatataatcaggagactataatattcctaccaaaacaacttcaagaacaaaacagaatcaataaccttgtccttgattaagcaagaaatgtgtgcattagtcccttcatttttcactaacttcggttgg

SEQ ID NO: 47393 - DNA, 523 bp, Arabidopsis thaliana columbia
tatatgaccatacactgatgtgttcgactgaattacattcatatgttgatatatatcatattatcatgtgacatctctgctggtttactaaccactttcttcatttttcttctttcagactaatagagtgacgtttaacttgacacctgagataatttttcaggtgagctctttggttcactatgtttgtcattagtgtaactgctctatcagtttctgaatccctccaaggtcgtcatcataagttttttatatgttatggggttgaagttgcagctagtgatatattgggtcagaaatccattgttaggtgttcaggttgcatcatgtgcttgaacttctagtccaatctgaaactacaaatgaggaatataaacttttttaacagtctttcacccacattctatcttgtgcttgcttagccagtaaatccattgcaagtaacttaaatgttactttcgtaactgctacagtccttttcttacttatgttttcttcattacgctttcagatttttgctgag

SEQ ID NO: 47394 - DNA, 335 bp, Arabidopsis thaliana columbia
tcatttttggcattatagtagccattgttgttattaagacaaggatttagagtagctttctttcaccattgtcttaacaaaaagctctcctgctctatatgaagatcttacctgcaaaaagtatatatccaatatcaaacaagtacatttctgtatcttctatgttctcagatattttttgacataaagagtaagaaatagtttgtggctttaccagtggaccacttgcaacataacgaaatcctattgattctccgtatgttttccagaaatcaaacttctcaggtgtgacatactctttcacagtcagatgcaatggagttggcttcattgtg

SEQ ID NO: 47395 - DNA, 620 bp, Arabidopsis thaliana columbia
  unsure (1)..(620): unsure at all n locations
ttaagttcagttcttaatatcaagcaaacattgaaattttcatcattttggatagaagaaaaccgacaaaattcatacctaattcgccttgtttagcagcaatgtggaaaggatcgaacccatttctagctttggtctcagcgtcttcaagatcatagtacttgatgagctctgcaaccacgtccgcatcaccatattctgccgccacataaagagcggtctcaccgcattggttctgtttccgcaacaaatctcttagttcatcttctgattccatatgattactcaaaatctctttcaccgcagagaaatctccgcgtctcacagccgaaaggagctgcgaatcttcgcgtttcccggtgaattgcttcgccattgtctttttaacaacggttggttttgcagccattggtgctggtgtcgatgttgatgcttcctccattatatcaacgcaggtagttacaaatagattcaataccaacaaatgactcctatatcaaatgggatcaaaaacaacatgaatttttgaatgtaacgctaatagcnacttaaacaattaaagagacgtggactaaagataacgtacaaggtaaagctcttgttcgttatatatgacaaga

SEQ ID NO: 47396 - DNA, 593 bp, Arabidopsis thaliana columbia
tttgtagtgcgtagtatcaaaatgttgttacaaaaaacaaaataaaataccaactttgcaagttgatctagttggacgtggccataatcatattctaaccgtattttggaccatactaaaactctaaccatacaagatagtaaaaaactgtaaccagtaactagaaaatattttagttatggtaactataacagttaattaactttaaaattcaatacgtattatttttaactatccgttaatttaccgtttatttttaaatatatatatatatatcatacagtgaaaaaaaactgcatatcgcaagaaatcagaatattgatttatgttgtcggcaagactatgtcactattcggattctaactcattatatgttattcactaaaaaaatagattacatcaattttctaattatatatagtccatttaaatatccaaatttgaatccttctaactttgactacactttaatattgtatagctaaatagatatatttcttctaattgtttatttactttccaaatcattttatttataatcaatctttgaatatttcacttgtatatttctacactactccatctatatatat

SEQ ID NO: 47397 - DNA, 484 bp, Arabidopsis thaliana columbia
ttctctctctctttttcttggtactttaaccaaaaaaatgagagaattaggacccagtatttacattttctgtttcaaaacttttagatgagaaataagagatgatggttctagttttgcttgcttgaatatgaaaaaagattacttgcttccttgtgtcagtttcctttaacacaagaatcctacttaaacttctcaccaagtaatcatctctctcatttggaaacactcaaaattttctctcttcattgctttcacttaactcttttctcctttagttgtacttcaatgtctcaccaccactatgaaaccaaccctcatttcgttcaattttccttgcaggatcaacatcaaggtggtccttctagctcatggaactctccgcaccatcaccagatcccacaggctcactcagttgctcacccagggtgaaaataaagactaggggacgccaccagactgagccacctgaaacaatccatga

SEQ ID NO: 47398 - DNA, 382 bp, Arabidopsis thaliana columbia
taacccaccatttcctctacgacaatctcatcacgcttgtaaatctgactctctgctccacaatatccagagtttatatttgatctaaatttctccagaacagcaacgatctatgacaaaagagaaataaaaaaccatgatttctcttgatgattaaatcttaccagatatgccgaattgagattctaaatcaaaggattgagagaatcgatttaggttgaaacaaactctaatagttgattaaaacccaaaaggtaaagattagaaatgacacaaagattgactttcatctagataaggatgcaaaaaagcttgagaaaagaggttgataaggagaacccgtaaaagaattggtactaagatcacaatgattattgaaaag

SEQ ID NO: 47399 - DNA, 750 bp, Arabidopsis thaliana
tgattagtgtaaaagtaattattatttacacaacaggtgcttcaagtggatctaattgcagaagaagaagcacaatcaaattcaaattcatcaaaccctaatttcaccttcggtttattcaccagagaattcgctcgccgtcacggtctccaccttctcggcacaaccaccacatggttcctcctagacatcgcctattacagcagcaacctcttccaaaaagacatctacacagcaatcggatggattcccgccgccgaaacaatgaacgcaatccacgaagtcttcaccgtctcaaaagctcaaaccctaatcgctctctgcggcaccgtccctggttactggttcaccgtcgcattcatcgatatactcggtcgattcttcatccagttgatgggatttatcttcatgacgatctttatgttcgctttagcgattccttatgatcattggagacatagagagaatcgaattggttttttgattatgtattcgttgactatgttcttcgctaattttggacctaatgcgacgacgtttgttgttcctgctgagatatttccggcgaggttgagatcgacttgtcatgggatatcggcggcgagtggtaaggcgggacggattgttggagcgtttgggtttctttacgcggcgcagagttcggattcggagaagactgatgctggttacctcctgggattggtgttaggaatcgttgttgatgcttgcttgtgtaattcttggggattg

SEQ ID NO: 47400 - DNA, 1151 bp, Arabidopsis thaliana
aatttctctttcgattttgcagaaaaaggaagaaacggcgacgaaacctcaaggagagaagaaacctaccgatggtggaatcaccaccgtcgttatgaagcttgatatgcattgtgaaggttgcggcaaaaaaatcaaacgcatcttcaaacatttcaaaggtatttaaatcaactgatttctctctggatttgattactatcgaatttgaaaccctaacccgaattttaattgtaatttaggtgtggaagatgtgaagattgattataagagtaacaaattgacggtgatcggaaacgtagatccagtggaagttcgtgataaagtggccgacaaaattaagagaccagtcgaacttgtctctacagtagcgccgccgaagaaagagacacctccttcatcaggcggtgcagagaagaagccttctccggcagcggaggagaaaccggctgagaagaaaccagccgccgttgagaacccggtgagaaaaaagaagagaagaagaaagaggaaggagagaagaaagcttctcctccaccaccacctaaagaggtaattaattcattaattgtctctatctgtcatttatctcttctaattaaagaattttataaacaaacttaaaaattcagatagcgaaactatatattaaaagtaatatatatttgtttttgtggtctataacgtgtgtgtgtccacttcgaaactttacggtatttacactcgttcaattccaaatatatttggatgactttttctatctttatataaagatgattcctttagttataattaagattttaactatgatcataatcgttgtttctaatgaaatttctttgatgtgatacagagtactgtggttttgaagaccaagttacattgtgaaggttgcgaacacaaaatcaaaagaatagtcaacaaaattaaaggtatgtttatgatcattaatcccattttaattaaacaaattgatacggttggtgattgaagaagatacggaagcaatagaaagttttattattcctttaaataaggttggactcaacaacctatggttagcttatttattattttagtgagaaaatatcatatggttagctaagaagtagttagcataatcttccagcttaattattctgttaatgtta

SEQ ID NO: 47401 - DNA, 541 bp, Arabidopsis thaliana columbia
  unsure (1)..(541): unsure at all n locations
nnnnnnnnnnnnnnnnnnnnnnctaaagttttaccaaatgttcgctcggatttggtcatcgcatccacaatggctgacattgtatttagcgcaacatcgcgcagtgattatccccgatgatgcaaaactgcacagaaatttactccgctggtatagcgcaggtcgcctggatatccccgaacttctggattacgcccagtcatggcgggaaactgaacctgataatgaagatgcgccttattatgaatacgcgcaacgcgtctattgtggagaaggcgaaactagtctggcagaactttgtgactactggcgcgagtatccctccacccaggcggatgctttaatgttgcaatggtgccgtcagcatcgggtcgattattaccattactggtgatgatgattgaagcgcgtgatctggttaacgatcagggaaaaccgctactttatgtccccggcgacacggcccgtacgcgttttcatttatacgaaatactcagcgatgaaaaactctctgcgctggggcgttcactggtcgagatgg

SEQ ID NO: 47402 - DNA, 473 bp, Arabidopsis thaliana columbia
tcgccctcgcattttcgatcatactctttcctaatcatctcactcgcctgcataaaaagaaaaacaaatgagatgtgaggaagcacaacaccaagacagccatagagtcatgatttttttaccttgacttcatcatagagttttctctcccaagcgtataaccgatcaagcgaagaagagtgacttccagagatcatacaaaactcttcgatgaaatcacttccactttcatcatcgtgatcttcttttgatgtctggatcaacggatttctagaagtggaggatcttgacgacgatgttctcttccacacaatgactttagtaacttgatgactcaatggctctacattaaagtttcactcagaacactaaaaccataaatagcaaagacacgggtcgatgataaatctttaccttgagaaactggtgaataacttttccctcgacaacaagctcgcttcaaagctgcaagc

SEQ ID NO: 47403 - DNA, 544 bp, Arabidopsis thaliana columbia
ttataataattgatgtgcaccgctacaactacagtagatatttttagaaggtaatgcaaattggttgcatctattgtccgtaagaaagtaaaattttattaacaagaataaatatcaaagaagcttacaaaacatgttaggtgatgttcaaatattttggctccgtactataatggtcttcctgattttccaaatgaattatgcttcgaataaataaatgactaattcgtacatttttttcttcagttctaggtctggcttgcaattgcaaagtcaacatattcaggaacggcggcatcacaaaagtactatattacacaattcgttataaaatcaaacttctatataataattaaataaacatgcaagattggtattattgattagaacatttgctttattcctataaattcaaggacgtgataaagtgtaggaagtgacatcattgtacatttacgctacacgtgaacccccccttgcaagcttctaccccatattgccaatctttgaaaataggagaggttaaacgcacacgtcaaaatgt

SEQ ID NO: 47404 - DNA, 1591 bp, Arabidopsis thaliana
cataaaaaaagttaaagcataatttttcggaaagttgtattgtatctaataaattttgtcattgttgagaaaatttggtagccttattcattaaaaggtaacgtaccatgaaggtgtctccaacgttgacgacaagagcaccaggacgagggcgaacggtctgccaactacctgcggcagagacctctaagcccacaacatcgtcttgaagcaaaacggttatagccgttgggtcattatgggggccaacaccaagggctttctctggctgcttgcacggcggataatagttgcatctgaagatgccacttccatcttcgaagaatctccggtagtatgtcctgtcttttaaacccatacttatacccaatagctccatcaaatccataaccagtccattcattgcatcacaaaattcttgaaacacttgactgaaaaaaacaagagtttcaagcaacaaaacagttaacattttaaaatgtaaacatcatcaagtaggattttttttacagatttagtaacgggaattcgggtttcgtcaaagtgcccaactaatcccggggcgagcaaacctttggcaaatagttttaaataaagtcaccaccgctaaatcacctgacgaaaactcaagtgatcaagcggtctaagggcaaagtttacatgtgaaatgaaacatgagcgcgtaaaaattttaaacccttgaccctaaactctacatcattatgccaccacacactagattcaaatagggtttatcataacgttactataactacaatatatgcatgcaatagatttacccgatctcttgacgatggttgcctagccttgaggttagaaagtcttcaacaacatggggtggcccctttttgaaggccaaagtcaaagtctcattccacggaagattggaggaaaatctttggctatgactgcggtatagccagagatattccccgggatcctataagcccttagcttctcatccttggatagcccaaagaacaaactcgatatctcaagcgccttttcagccaagcccgacttgaagccatgattgaccactagaaaagtaccgtgagccatgcacgcttttttcactgccttagctgcaagttgcgtctcggcctcattgccattcaagaacccactcaagtcgatgattgggagatcgaggtcgccttctgaaggggcaacgtctttctccggccagaagaattcagccggaacatttggttggctctggagtagggagaagttgacgtcggaggaattcatttctcttgacttgggtcttttaactttgaagggggttaaataggggcagacagtctgtctagatgcatatatgcacatattgtttttttagttttatccttttttaatatcttatcttaatgttgatattggccacgtttgttttcaaaatcatacattgcatttcttagtcaaacgaaaacacaactcgacatatatatgttatgtctgaaatttctatataatagcattcacacttcagaacacaaatcaaattttcttttatgtttatcagtttatgcttcgtgtcatgtttccaattttaaacaattattat

SEQ ID NO: 47405 - DNA, 218 bp, Arabidopsis thaliana columbia
tctctctctcgtgtttttatataaaagtacttaagaaaaaaacaaaaaaataaaagatggttcttcgttctcacacactatatattcggaaaaccatctatataagctctcactctctctctctggatggaagctctcgctctgatctcataatgtaagctcgctctctctctctatctcagttgtgatgtaggaatttctctccgacagctagattt

SEQ ID NO: 47406 - DNA, 627 bp, Arabidopsis thaliana columbia
  unsure (1)..(627): unsure at all n locations
atcgtgattgatatgcaaataatactagttagtttctgacacaaactctaggtggaaaaaataatctagaataatagtttctgtttctacaaagacacgttgtcaattacactaacttccaagtgttcactcttcaccggctgctgtggtcttcccttgtcggttgccggcacagacggtcaatgccacaggcacgtgtccgtttctttccactccgtaatgtctccaacgccttgagaacaattaaaaaatcaggacctctatcttattaaactttatgtaacgttcccaaagtttcagcatgtgctatttgactccgaaaattttgaaaccgattttttagtccacaaaaattgtagttgaaaacagatttatcttttgttaattccttttattttctactgtgcatcacgtatatttgattaactacaatgaaattcgtttaattaaaatagttgaggggacaaatttaactataatataaaagaatctagtgtaaatcactaatattacggctaattttcgaaatctaaaatagttaaggggacaaaaccgtaaactttccataaatagtttggtaagaanaagcaaataaatatagtttcattttttgtaaataaaaaaaaa

SEQ ID NO: 47407 - DNA, 616 bp, Arabidopsis thaliana columbia
ccgacattccatcgaacgccttctgagcgcgggaatgtctggattcatattccagttgatcataaaggaacaagcaataagcgcaactaatctagaagggattccaatattctaaactcaaccatctagacgactaaggttaccacaactactctatcccatcctcagaaatacaattcactactcagacataagcaaagacaatatcatagaaacgaatgaaaacatgataagggatcgagaaatgacaaaagataaacgaaatgatactaagactgaaatatttaatacttgaaagtgaatacaaaatcgcaggagagcgttgcggctacaaaagttttagaaaaaaggatcatgccctagggaaaacccctagaggctatttataaaagcaagacaagttaagtaaggaaagtctttgatagtagtcttcacatcgggagattgcgattgggcatatgatgggctgaaatgggactcactgcgatggagtatgtcatggatcaaacttggcttcagggactccaccttgcaatcgtgtggtctggagtgaagacgagataaaattgtccagcgaccctgcgatcgagtagatgtcatgaggtggtgacgagtg

SEQ ID NO: 47408 - DNA, 591 bp, Arabidopsis thaliana columbia
actccatcggattcatggctgcagaaaaccagaacatgtccctggttgaggagcagttcaggctgaatattgatgagcttctagaagagaatttggatttctggttaaggttcagcacagcatttggacagatacagagctacgacacttcaatcgaagatctacaagccgagatatcaaagctcgagcagagaagaaagcaagatggaagcagcacagccaaatatgccctgagatcagatgttcgaccactgtatgtacacttaagggaaataaacacagacctggggctctggctggagaaaggtgctgccttgaaagaggaactgaaatccagattcgagtccttgtgtaacatacaggatgagataacaaaagccctcaagtcaagtgctgaagacgatgatttcagattcacgagctatcaagctgctaaattccaaggtgaggtgttgaacatgaagcaggagaacaacaaagtggcagacgagttacaggccgggttagatcacattaccacgcttcaactcgaggttgataagactctaggaaagctgatcgacgagtttgctctttcgggttcaaagaaca

SEQ ID NO: 47409 - DNA, 495 bp, Arabidopsis thaliana columbia
caagacaacatactgaattatcgttttatccttttaaaatgaaaatcaacacattcatacgagatatggtaaggacaatttagtcatttagacacgtgtcgtgcccgcgtcgcaaaagcctataaagaatccatttaccttttctcactgaatctgaaagaaaaagctcgcagagatggaaaaatgggggattttgctactcgtaacattatcagtgtcaataatctttacttctgcggccgcagatgattacgtccgaccaaaacctcgtgaaaccttgcagtttccatggaaacaaaagtcctcttctgtacccgagcaggtataaattagaattccttaagctctcctctgttttgatgattcttgttccgaaaaaatcatgtttttaattgtctgaaatctttctattcttgtaactgcatgtgggtctctgtttgttttctccgaaagatccgatttttgggtttatgcttactccagagaatcccattt

SEQ ID NO: 47410 - DNA, 630 bp, Arabidopsis thaliana columbia
tgtcacagagaccaaactctgtgcaggcttgttgaagctcgtcaatggtgatataaccgctaccatctttatcaaagtatgaaaacgcaaccaccaagttctcttctctctccatcttgtttatatgtaatgtcgctgctaggaattcaccgtagtctattgtcccactgttgtctatatccgcctgcaaaacaccatttaagctttgtgattcctagaagaacggagaaatcaatattctaaaagagagtttttgttttggtataattaccgcatccataagagacttgatttctgattccatcaattcagatccaactctctttagacctgctttaagctcttcaaaggtgattgttccactgttgtctgtatctatcattttgaacaattccttcagaccaccaatctcttcctccgagagtctctccgcgattacctaaaccgggaaatcagttcttgaatataagcaatggcattgagagtttaaagaactatagcttccaacttataaggccatttacttaagtttattcatttcctgaaaatagttcttaaaatgtgttatcttagtcgaccgtcctacagggaaatcagttcttgaaaataagcaatgagagtggagctaaa

SEQ ID NO: 47411 - DNA, 478 bp, Arabidopsis thaliana columbia
ccatgtggttcttgtctcctctcacgtggttccaccaccttcacatcccttcttattccctttgacaccataccccacacctctccatcattatgaaggatgttatcctcgaccaaacggggttagtcttggtcagcccatcttaatcatatcccggttagcggactctacgggttggtcaggtttaaccttgaatgaccaacttgtagttagcctacataataagacgacccgttatgcgggatttcagccaatggataaataacccaaccgagaaaaccgaaccggattgaatcaagattttcagttctatcggttgaacctctaggaagaactttaattttgcatcgctaaacggaaaattttggttcggttcggatcgaacgtccttaggtatttttgttttaataaccagattatacaaactgagacccgttttcacacatttttagacttcttttaactgttactagagttt

SEQ ID NO: 47412 - DNA, 552 bp, Arabidopsis thaliana columbia
caggatccccatatcgctttgtgtacgacggtcagctagatcgttattcctatgcacctgtacttgcttttcttgtgtttgtttctttgtaaagttcaatgttgaagatgggctttgttgtctctcttgtgaaaagtagctagagtgtccaccagtaatctccaatgtagagtctgagtacgagtgtgggattcccaagcaagaatcatttgagtttgtagacccagagaaggaaaccttagattcctcgggcatgctcactttatcatagaagacccttccgttattcgcagacctctcagggttaaagcaaagattatcaacatgaccaagattgggagtcacaggtttgtcattaaagccattctggaactgaatcccatataggttctctgcctcctgcttgttagactgatagttaactgaaggtagtggtcgctgttgatgatatttggaatcaatcacctcgaagatagacgtgtcttgttgagctggagtgaaggaattattgctctccgagctggagttgttgccatggaactgtgagtatgc

SEQ ID NO: 47413 - DNA, 557 bp, Arabidopsis thaliana columbia
gttattgctcttgttcacttgttgtaagaaatattattgaatttgtaaccgtgtttatgatgagcttccaaaaccagctatgacgtggccgggaaagtcatcaagattaagaaaaccaaattccggaaggtctcggaactgcaactcatggaagtgaggattcttgactagtttaaagttgagatcatatgagaacaaacggttgcctacaggagcatgcaagctaagtagaacctttggtctctctttgaaaacatcagatttgagttttccgaaaagtccaaaggagttaagatattagtccaccgcaagtcacgatgaggactacatagactaagctgtctatccaagaacttgatggcaacaatccaatcttgatcaggaggagaagaggacattgccacattccaaaagatttggctttgacaagacttaagagcagtaagcgggaggcagaggaatcattttagggtttgtcttagaagccaaggggttaaaacgtcactgatacacacaaaccgatcatgagggtcacagaaactaccatccatgagaag

SEQ ID NO: 47414 - DNA, 529 bp, Arabidopsis thaliana columbia
tgcagagatggttacaaagaatttaaacctcgactaaataacaaacgaagatgaaaacaaggaagcatttctgatactggaaatttccagaacatctagaaacatgttctctagaagttgagaaagattctacaagaggacacctgaatctccgattgtgtatcctgtgaatctagagcctgcaacgaagttcgacttcccgataaactgtccgaaaagccacagtccatgtcctggatctgatggaaataagagcatcataatatgaagcactgtgagctttacagttgactaccttttatgggtcagaagagacaaaacataccaatgaagcctgggctttcatatcatcaagattgaaattccacccgctgatacctctcttatattcattctgcatggtactatgacaagcgtttaaaggctaaatactttgcagaacaagttaaactaaaaaccaaaagctagagactcaaaacaaagataaataaagctaaaagtggaaactggaaacacaaacctgggacaa

SEQ ID NO: 47415 - DNA, 507 bp, Arabidopsis thaliana columbia
tttcgtttatgctagtcatttctgtaaatccgttctgtttcattgcgttttcatggatttggcgtggttttactggtgatcgattgatttttccggtggagaaattgataatttctggtgatcaatttgattgttccggagagaaattgattatttctggtgattgattgagtgttatgaagattaataatcttttttattaggaaaatcaatttgatttccgcgaattttggaatctaaaatctcgttgttccgttttttgcgttgttatggattctggatcctgcgttgaggtttatttgctggtctcgttgtttgtgatgattcatgagtttctttgttcatagattacaatccggacgaagcgaattggagtgagaaaattctggatcatgtgggtgatttcaaaagtctggaagaagtgggtgtctaagctgacagagaatctgaatctgaccgagtctcagattgcgagtatttggaagtcattgattaaggcagaagaag

SEQ ID NO: 47416 - DNA, 468 bp, Arabidopsis thaliana columbia
cataatccaagcgttaccagtgagtgcaaatcgacctgggcttaccatcgggcccataatgacattgatcttacaaaataggtattatattatattttagtttcatttaatttaaactaattatacattggtggtttagtataaaataaaatttggagacaatacttgttctaattcgaaattttaaatttgctgaaacaaaatgattcattgtacttgttataattcaaaaattgtagtagaagcttggtaattttaaaattactaattatagacttgtttattctttcaattcaaattttaaaagtaaaatccactttagatttttcgatatgatacattaagaatattgactatatggtaataattaataatgatttaagtatttcgaacatatagataagaaagcttgttgcctaaaatcatataagcatctttgagaatttcctgataaggtacttataaata

SEQ ID NO: 47417 - DNA, 296 bp, Arabidopsis thaliana columbia
atgatctttgataatgtatatagttttcgaaaagaaaaaaataaacatactactatagtctattgacaaaccgacacaaacagatgattgactggacaaaaacacgttcatcttatatagcgaggataagaaatgaaatgatgaattattgtagtaagtcaaaatactgttataagtttaataccacagttatgacaataaggactacaagtattgattaacacatagatactcgtctagacaaatactgtaattctgctttgtcaacaatgatttcacaggaatgatgctttacc

SEQ ID NO: 47418 - DNA, 451 bp, Arabidopsis thaliana columbia
ttgtgtaatttatgataaatatctgtgaaattgcagtcagctaattggatagttgtgcacagagctatcatggcgataaaggatatcgaaggaatgttaaattctcttactgccgagtattacgacattctcatgaagtaagtctcttgccttttgctctgctagcttttaattagcgtgatgtggaagcagtgttttgtttgcttaaatggtgtggatcaggtacttgtacagaggtctttcgactggtgacgaacccacatgcgaacagtgtttgatgattcacgagaaactaacagagagagctggtctcggttgcattctccgttgtctgagtgatactaccaataccgtttaaaccattaagctgatcttgtcatgttactcgtattcttgttttctatgaaagtttccccaaaatctcatgttactcaatagattatagacagtg

SEQ ID NO: 47419 - DNA, 512 bp, Arabidopsis thaliana columbia
cttaaagcctttaatttagtcttcgagccctctaatggcggatcagagcaaaaacactccagagatcttcgagctcaacaatggcaccatgcaggtcaagatctcaaactacggcaccaccatcacctctttgtctgttcccgacaagaacggtttgttctcttcttcctcctttcaatgatgatctctgttttgtctccaaatcctaatcctctgattatcgtctttgtgtttcttatttgaagggaaactgggggatgtagttctcggattcgactcggtggatccatatgtggtaatttctctcgaattcacctaatccttgaactgatctcgacatagattcaatcaatctgatcgaaactctaatcactgcctctggatctcatgaatagagtctgaatcataatttaagaaatgtatatggtcattcatgtaccttgttgaatgactttgtgatgaactatcaaaataagatggactttgtacaatgttaaggaatatgtgtgttt

SEQ ID NO: 47420 - DNA, 504 bp, Arabidopsis thaliana columbia
atcattcgttggtggcacaactgctgttcaaagtatgtgactggaacaactctctctcgcaatcctgccattagatttgactattagtaagcatctgtttttgctacaggattatggagaggtatcccacaggtacaccacggagaatcatggattaaacatatagtcattggagtacccagctgctgccgtgtttctgttttgcgacttactcattttcagtgcgactatgacattgacaatctcacagtcgtatatggtaaggaagtctcagctaaagtagaaatgtggttctcccgcccctctgcaaatgattgtataacagtgattgttggttgtcatggtgcagataggtcggaatattaccagcaacgcatgatggaacgcgaagagattcagttatgtgcggggacctgacgggagagtctacaagccttataaccagggcttgcgaagaaactgcaccgattgtttggttcatggctagccagggacgacgaggtt

SEQ ID NO: 47421 - DNA, 465 bp, Arabidopsis thaliana columbia
tggatggatcaatcttagccttttcgatagcagagaaagcagctaaaatctcatctgctgcaactttccgagtttttgcagccgtttttaatacattcacactctccgttacttgctacatttcaaaatcatttcacaatcaagtaaaaactagttgcctagatatattcagaatcttaaagttagttagaattcatgtaatttccattcgattcaaccaaaactctaataaccaccttggttccatgaaattctatctcctagagctagaagtaaacacataacacttatgcgaagagtcccaaaatataaatttgaccagaaagtaacttggataagctttgtactcctcaactgaatttctctgaaggagttcgttatgaaacgactcttcatcggtctaacactatcttttcaaacacaatcgaaatgaagaagggtgctgcttactttgttagggatttg

SEQ ID NO: 47422 - DNA, 459 bp, Arabidopsis thaliana columbia
caacttgcaagaaatctgtttcaatttcttaatgtacaactaaaccctctttagcaaaagtagaattattaaacgaatattgtttcttgtcacatactttatatagagacatataaatagaaacatatatgtagataacaacgacacaagtcacaatcgtgcttactcacgtattacgtatagccaaaagtttcctactcatatatatcacaagtgtgcttgcgtctgagatatactcagagacgtgtagcttcactaattccacatactcagagagaaatggcaaccgaaaccgtattagccacggcggtgagcaatggcaaaagcaaaggatgttgcaagtccggtccaggttacgcgacgcctctcgccgccatggcgtccacgggaaaagctcatctatgtcactgccctttactccggtaaacatttcattttctcatcttcaacttatatata

SEQ ID NO: 47423 - DNA, 572 bp, Arabidopsis thaliana columbia
taaaacttcttttggactaaaatcaaacttgttcttaagaagacaaaatgcaccaaacataaaatgcattattctcaaatactcaaaaacaaagcctttcttattttgtctttgaaagtaaagacccttttattagcagcaccttgatatatgaaacaagaaagacataaaagatagataaaacgcaaacaacttcttcaagccgaagccggagaagaatcatcttgtacaaacttctcaaactcttccctacttctcccattcggattcttcttccactccatgaatttcgtcgccgcctctataaatttctccatatgaagcctcttccattcctaccaaaatccacacacacatttcaccaaaacaaacctaaaacacacacaaaacttcttcatgaaaatcaagaaagaagattatcaaacctcgaaatcccattctccatacatattaggatcatccttgtttgccatacaattgttcaacttgcttcttctcaaagtatctgatgaacaaaagcttcatccttaagctaccatcagatatcatatattgtgattagagaatattga

SEQ ID NO: 47424 - DNA, 525 bp, Arabidopsis thaliana columbia
taaataagatggcttaaatcggttagtatgttcaggtgtccaaatattaaatctactttggtcgacgttttggcatgtctggctcagtttccgcgagaagacatacaaatgattcaatctttcatgaacgaaacaaaatttttccaccgaacatactaatgtttttcacttcctagatgaaaatagttaatgatttaactggtgtgggagctcgtataatggtatgaatgaaaccgtaatgtaatgaacaacctcatttaatataacaacaaagtttttcatcaatttctatcaactgtctccaacttatcttctgtatgtctaacaatagaaaaatatcaatacaggtataatctccttaatccttttagagtcttaaggtaagatcaggctttgagctattattatctacacctccatttgccgcaaccgagatcaaatcaaggcctgactcagtactagccaccacaaccaccggagcctcagcttcctcaaccaccttgacggaagctgccgggccagaag

SEQ ID NO: 47425 - DNA, 560 bp, Arabidopsis thaliana
aatcagaaaccagaaatagtcttcttcttcttcctcacacacatacttctctcaccttatcctccgagatcggaaaatatggagaaatccggctacggcagagacggaatttaccgatcacttcgtccaacactcgttcttcccaaagatccaaacacatcgttagtctctttcctcttccgtaactcctcatcttacccatcaaaactcgccatcgccgattccgataccggcgattccttaaccttctctcagctcaaatccgccgtcgctagactcgctcacggattccaccgtttaggtattcgcaaaaacgacgtcgtgttgattttcgctcctaactcttaccagttccctctctgtttcctcgccgtaaccgcgatcggcggcgttttcaccaccgcgaatcctctttacactgtgaatgaggtttcgaaacagatcaaagattcgaatccgaagattatcatatccgttaatcaactgtttgataagatcaaaggctttgatcttcccgttgttctacttggatctaaagacaccgtagagattctccggga

SEQ ID NO: 47426 - DNA, 872 bp, Arabidopsis thaliana
gattcatttgctcatctcttagattttccttttcccggtcccgatttggctaccgggatagatcatagatgcatgcgtagatttcgagtattcgatcgggtagagattcataagtaatggatttcaatcattggtgctgatatgagtaattccttgggttcaatgtctccgtcactctcgtttaagctctctacctttctcaatagaccctgttttgtttatcgttgatctggaatagccaatttgaatgctgtgattctctttcatgtttagcatttctcaccatttaagtcccctttgagaatgttttgttaataagctgtctaaaactgttgctctgctctgtgtatttgcagatcttctgtacaaagaccacaacagtgaccagaaattcagtatcaccactttctctcctgccggtgttgtaagtttctcatttcattatagatgattagggtttatggaatgtcgtcttctgtattctgtttccacttttgctttattcattagcttctgaggtttgtgtcgaattagcattgttatcttatgtaacggatttcttactttgttcttatgtttcgtgtgatggtaaacattggatttcttctatcttgggcatcgttgctcataatctggctctttctttgttttaggccatcacctcaaccggaactaagaaaggtgacttattgttgggagatgtcgcttttcagtcgaggcgaaagaacattactactgatttgaaagtttgcactgattctactgtaagtgtatttgtgtactcaatttcatctcctgtttttcttgtatattgagttatagttttttgtttgtttgttgggctacttaccttacaactttgtgtgtattgg

SEQ ID NO: 47427 - DNA, 440 bp, Arabidopsis thaliana columbia
cttaaatctctacctgggataacttcaccctctgaacctgcatattacaacaaaattcattacagaccaaccaatttatttgattgaagcaataaaagaaaaggtaaggcattgtgtctaaccagttagattcttctcctgtgcagatactttctgttctgtatcttcattcttggcaagttttattatccacagtttctttagtcttcaaactcagatcggccatacatttctctaacagcctggttgatctcctagtgctgtagaccgactggaccaattcatccttcttagtgcaagaagttgctgctgaagttttccttgtgcttcctgctgctggagttttgagcacattggcttcaaacttgacattgctagtcttcatttcttgagcaacattctggtttatgttttcctggtccatatctccagcaagagac

SEQ ID NO: 47428 - DNA, 615 bp, Arabidopsis thaliana columbia
acaaacaaaaaaccattactcacaagtgtcttaatacgattagttgatcagatcagaaaaatacgaccgccacgtcatcgaccgcatgccctcgtcgtgtcttcgctcactcaacaaaacgtatccttcgctttcacgaacgtcgcataaaagctctgcaaaacacacacaacacaactgagagagatcagagaaagagagatttgtaataatcaaatcatggggaagagaagaggtgtctccgccgtgaacgttgttttcgggtggctgcgacaacaatcgaacaaggttaaaatagctttaggaattatcatctctttgatcctcgtcgttcttctgaaattcaccgttaggaatcacaatcactttttcatcgcctccgagctcatccacgccgccggaatcttgatcctcatctacaaactcactcgccaaaagacttgctccggtaacaataaaaatcccaccaccttatcataattcataagattttgactttaaatcatagacctttgtttcttggtaatgtgattagaagtgaaacatttatatgtttatattgtgacaatgttgtggaacttataagccttttggtttgctagtgacatttatgtt

SEQ ID NO: 47429 - DNA, 538 bp, Arabidopsis thaliana
tcaaaaccttcttctcaacactcctttcttgatcgtctccctctctcgttactctcttcggaaatgattatgtctctccctcagtgttctcatctgcgtctctctattctcgctgcgacggcggcgatgttaatggtgattacgactgcgcagatcggcggtcaagtgatacaggtggagttatggtgtgtggcgaagaacaacgcggaagattcgtcgctacagacggcgattgagtgggcttgtggtcaaggcggagccgattgtggtccgattcagcaaggtggaccttgtaacgacccgacggatgttcagaaaatggcgtcgtttgttttcaacaattattatctgaagaacggcgaggaggacgaagcttgcaatttcaacaataacgctgctcttacttcactcaatccaagtaaaaagccttcttctaagaatcgatatcttatatctgctagtgtagtgtagtgaaatcaggattatcatgatgatctcttttgaaatagagatcgagtctttagatcagatacatatg

SEQ ID NO: 47430 - DNA, 570 bp, Arabidopsis thaliana columbia
  unsure (1)..(570): unsure at all n locations
gataatgtgaccgtgagtaacgtggatttcatgggaacgaataacggagttaggatcaaaacatgggggaaagatagcaacagtttcgctagaaacattgttttccaacatattaacatgaagatggtcaagaacccaatcattatagaccaacactactgtcttcataaaccttgccctaaacaggtaagaatatttattaattaaccatatctttacacccataactcgatatattgactcatttaatctgtatattaatttctattattataggaatcaggagttaaagtatcaaatgtgagatatgaagatatacacgggacttcgaatacggaagtggcggttttgttagattgtagtaaggagaaaccatgtaccggtattgtaatggacgatgtgaatcttgtctctgttcatcgaccggctcaggcgtcttgcgataatgcaaatggatcagcgaacgacgttgtcccattcactccttgtctaaagagggagatcattataacttaactataaatggatcgctgaacgacgtcgtcccgattgctccatgactanaagatg

SEQ ID NO: 47431 - DNA, 530 bp, Arabidopsis thaliana columbia
ttttgtaactattaaagttaaaaagttaaaatctgtggtctatttctgatagaccaaaactccacagaacaaccaatttacctctgttgcgaactcgattttgtaaaacttagaaaaatgtaggcaggatttagacccgttaatgtaaaaccagttccgttaagacattaccaaacaaaattgcacaatcctacagacaatgaaacaaacatgcaggatcggacaaaacctcaaaatacaagtccacacttttaattgtcccttggaatcaatatttataaaaatgtaatgagctcaaatttttataacctatgaaaagatcaaaatcttgattaaaaagaagaaaaaaaccaatcaaatcctggcaggcttctgcagaacagccgagagaaaaacctcagcatcagttttctctccaacaacccatttcaacttcttatacccaaacctctctatcaaacgcgtaagaactctcttcttctcatcattaccgcaatagaaattgtctaactagaacaatccacccgggt

SEQ ID NO: 47432 - DNA, 561 bp, Arabidopsis thaliana columbia
caagagtaagcattcatctcacaggataattggctccataggctttttcaaaaaattacaagcagcatagtcaaacagcaatcaccttcaagttgagataatcggttgtggatacgattcttataccgagtttcctttaactcggctagtcgagagcctgattcatagtttagtcgctgttgcaaaagtgcatcttcgaactcgctcatcaaatcacctctattgggagtataactatttccctgcaaaatccaagcatataacttcatccaaaaatcacaaaaatcaatgaattcggattcatcgaattcgagaaggaaactccaaggaattggttagagaaggagttgaagaagcacagagccagaaaattcgattcacaaccacaaatcctaacatgcaaatcgaagaaacagcttacacgaagaggcggagaaggagagagatcggagacggaggcatggtaaatagaagaaacggaagcgtaaaggtgagaaggcaagagaaggtcgcgagaaaggtagttaagagcagagatcagagactttgtcttctcgacgg

SEQ ID NO: 47433 - DNA, 558 bp, Arabidopsis thaliana columbia
cgctatctccaaccattatgaccggcattgtgtgtgggatgaagtgttacagaacaaacggctgaataagtacaaccattcggccattgatgaacagtttatgttttaccgatcagatggtctcaagaaatttgatccttcagatcctaattctcctcttccaagttgtaagtaatcaatcaacccttaacttctctcacaccatacacatttactagttttgtttgtttaatgtttattgagtgttatgtcttgttgttgttagatgtaccggaaggttcttttattgtaagggctcatacaccaatgtcaaacctcttcacttgcctttggttcaatgaagttgatcggtttacctcacgagatcagttgagttttgcatacacataccttaaacttcagagactgaattcggatagacccttgcgcctaaacatgttcaaggtaaaatagaaagacgaaaaaaagtatataagagagtgatcattggtctcagttctttcatgagtacataaaaatcataatcaacttggttttcatttcaggattgtgagcgtc

SEQ ID NO: 47434 - DNA, 579 bp, Arabidopsis thaliana columbia
cctgaaagtaactattatacagttcataggtttttaattgatacgcaattaacaatgaatggattggtacatgtactcatgtatcagtttaggttttctctaactttctatatatgtgagaacctaattatcataagcacaaatacagctttaaaatgttttaacaagtcctaaatacatcctatatatatataccatgtaattagaccatatgattcatggatcttatcaatcaactaataaatatacaaacgtgtgcatgaatattatgaatatatggaatcacaaaccggttagtaggactgaatgttgacccgaaggaagagctgactcggtacggcaaaggacggtgcagaggagaagaagcacaattagaacttgacccatttttaaggaaattgtatttacaatttctcgatctttatataaaccacgagtttagactcatatttatgtacatgcaggtggagggaacgttccacgaaaaaatgaaacaaaccaaaacctaataataccaagttgactttttagttttctcactagtcaataatactcactgatcattaccctttacaagtt

SEQ ID NO: 47435 - DNA, 594 bp, Arabidopsis thaliana columbia
cctgctgcatcaacaacattgcgggaatagttatcagttaacggtgtgacatggctgatgtccagctcgaaacctcccgttttcgactttctcactgccaaattcttattttgttgtaccatcaggatactacctggggagcttttatcattaccagggttatactccagcaaagcaagcggagttttgcgcacgaccggtggagggtcttgatgactatttctttgagcaattttctgcgaaggtcttacatttcgtttagtcaaggatgtcataagatgggaagtttgctctctaaagtcctcactttcgtcttcatcttcattaggaaacatcagcattctcatttctttcatcttttcaggatcaagtcctaaatgagctgggagagaatgagaaagctctagctccgaagtttccatctgatcttcttcatcaatgtcagctacctttttaccatccagtcctacgggatctccaaacctggcgcatcatccattgcaatatcttctgcctcatcatcactcaacccaaatctgctgaaatgaggacgaagaacttcataaaccattatcgggataaatgagatgaaag

SEQ ID NO: 47436 - DNA, 517 bp, Arabidopsis thaliana columbia
cccatttaataacaatattttggataaatatctacgagcagtctaatttatacaatcaaacaactctatggaaacataacttgattcacaagtttaataaaaattcacctatttgccaataaggaaatatattaaaatgtcaatctctcgatgtttctaacagaaagattgacaaaaaatcaaaaaacaaacagtcaccaagaatggaggaagaagagaaaaaccctagttcgatctacatagttgccgatcttctagaagatatattccttcgacttcccttgaaatccattctcatatcgaaaagcgtctcaaaacgatggagatcaattcttgagtcgaagacgttcgtggagagacgaatgagtcttcaaaagaagcgcaaaatcctggctgcttacaactgcaaatgcggctgggacctaggctctccccgggtcgtcgcagtgcaaagggaacgaagagatcgtctatctgcacagcaacgcgcacaaccctcgtttacttgcgacggttt

SEQ ID NO: 47437 - DNA, 494 bp, Arabidopsis thaliana
ttttgcatcctctgcattgctagatagatctttgctcaacccgacgggagggggaacaccacgtgctaatggaagcataggtacaagggcagcaaagctacgtgttacgctctgcctgactgaactgtcaacatcgctcatgcatctcaggagaggaacaaccaatagaggagaatatggaaccagttcaacacccagcccttgcacaagcaaaccaataagcattcctgcgccttgtctaccactaatgcatgttaaatctcccaacattggaatagcactttccactactgctgccatgacatctgttgtcattgatttagccattgtcataacacatctagaagcagccaatctaacagccacatgggaatggcgaacacatttgaaaatacaaggcagaagactgagcagtctaggtttcagtgtttcttccatcactggtgctattgaacgtaccacctggaaaacataaaatataaaagtacaccatg

SEQ ID NO: 47438 - DNA, 537 bp, Arabidopsis thaliana columbia
  unsure (1)..(537): unsure at all n locations
gatcccatgtaantcatgttatttcataatctaaagctaatgactggtaattacagtgaaaatgtcatgaactccaaatagattcctgaattcctgcactcttttcaccggacagatacagctcttccacagagagggaaaattatgcaaatagaggtattgtaacaaaaagtcaccttgacaagtgggccagcggtaactagatcttcaagaccctccacctcatctagtggcaacgtgctatagagctcatcgacatcactgaattcatcaaaatcatcctacatagaagaaagttaaacacagtacaagataatataagtgtattttaatgttcgaaacccagggtataacacataagcataatattccaggatttagatatagcagacctgatttcgttcaacataatcatccagaaaatctttgacgtcatttacttgttctggacttaattcatcattgtccagaagcctcaagatcagttcccactttattatgtgatcattgtgtcttgtaatagatgtctccagatga

SEQ ID NO: 47439 - DNA, 496 bp, Arabidopsis thaliana columbia
gcatacatccaagtttcatgcagtggcattaggtaaggcaggcaagccaaagttctccaccaccattgtggcttcttggtcatcgggggaaatcggaagctagaaggtacatcttttgacgctcgtggagtcaaaagagtttttctgcggacaggtaacacaagtaatgtaccagatagactaccttgttctccattcagaagcagagaagacgaggctgagagatatgacagaggcacacctaaaacaatcaaagtatacaagattgaattaggaaacaaaagcagcacctttgaaataccaaagtcacttatcctagtttcagcccatggacaggtcttttaatattcacatcatataaactcattggagcaatttacagatataagcagggatatatgataataagtgtttgaaaccatatgagtagcagaaattcacatgcctcttgacactctcggaagctcattgaaaggtgaaggtggtgatcccacga

SEQ ID NO: 47440 - DNA, 346 bp, Arabidopsis thaliana columbia
ctggagtaggttatcggagatagaggaacgatatctacaacaaaaggccaaactccattggatgaaagtgggagatcagaacaataaaacattctattccgctgcaaagctcaaggaagttagaaataacatcatggagatacagtgtgaagataaaactgttactgcgaatcacgagagtatcaaagctgaagcagagagatacttcaaggaattattgtctataaaacctgcagattatgttcaatggtccacagaggagcttgaaaacattctgcaattcaaatgcgatgaagaagtagcacacatgctgataaccgaagtaacggaggaggagatacccaag

SEQ ID NO: 47441 - DNA, 432 bp, Arabidopsis thaliana columbia
aactaataaataatgattattgaatataggaaaaaaacgtcgtcgtattatatatttctcttaaaagggactattacatgttagcaagatcgagtttccaaggttttaaacttcaaaatgataaatattgagcaaagaattagacacgagaatcgattcaacgttatgtggaaccataatgcaagattttggtaaaccgtgggatgtctcaccatgtgtactcttttgaagaaatcccaaaatcagcaattgtgaagagatcgtcatgagcttgattcgacgtactagagtatatataaaggcataagataaatttgagacgatggatctagtcatcaagtagaaagacaaattgatctctctattcatgactgtgaaggccattgatgatcagatagcatgtgaaatcatgattttgcacgtgatttacct

SEQ ID NO: 47442 - DNA, 578 bp, Arabidopsis thaliana columbia
tgtatatgccattgacattttagaataaatagtcagcttgttgacttggtgttttattatagcacatcatgtcttaactactttaacttttctcttaaaattgtttagaaacattttctacaattagcaaaagaaaaaaaaaaggccagaaaaaaaaaaaattcagctaaattcgtcgatgcccaaaatccgataacaccgtaataagtaagagaatacaggggtatatttggaaacagattaaaacgcagaaagtagtgttccatttacaaaaccctaaaccctaattgctctcgccttcttttagctttacatctttacctgtctctgcccttaacctcacacagatatcgagtctcggcgattgaagtgaactctcatccttataatttcatccgaaaggtaaaattttgacagctctagtcgctaaaccattgtggtttaggtctccttggaactcttctgaatttgcttttagattagtatactctttttgagcctttgtttgtgtaatctcgaatggatcatggttttgcgttaatgggtactgtttgttatacagatgttggataaaggtt

SEQ ID NO: 47443 - DNA, 455 bp, Arabidopsis thaliana columbia
gctagaccggattcaagcagcgggtggtcgtgttatctactgggatggcccacgtgtccttggagtacttgcaatgtcacgagccattggtcagttaattgattacacttgacgaaaacactcttgtccctatcctaatgtttgtacaaagtttttccgtactttcaataatgatgattattaactctcgtttcgccgcggattttcgttttttgtttcaggagataattacttgaagccgtatgtaatcagcagaccggagtaaccgtgacggaccgggccaacggagacgattttcttattctcgcaagtgacggtctttgggacgttgttcaaacgaaactgcatgtagcgtcgttcgaatgtgtctgagaggtacagtcaatggtcaagtatcatcatcaccggaaagggaaatgacaggtgtcggcccgggaatgtcgtggttggaggag

SEQ ID NO: 47444 - DNA, 993 bp, Arabidopsis thaliana
taaatggatcatattgcagttttagaggagaagtttttaaagcagagatctaagctacattggttggatattggagatagaaataataaagctttccatagagctgtggtagcaagagaggcgcagaactcaatcagagagattatttgtcatgatgggtctgtggcatcacaagaggaaaaaataaaaacagaggctgagcatcatttcagagagtttttgcagttaatcccgaatgattttgagggcattgcagtggaagagcttcaagatttgcttccgtatcgatgttcagattcagacaaagaaatgctcaccaatcatgtttcggctgaggagatacataaggttgttttctcaatgccaaatgataaatcaccggggccggatggctatacagcggaattctataagggagcgtggaacataattggtgctgagtttattttggcaattcaatctttttttgcgaagggcttcttaccaaagggcatcaactccacgattcttgctctcattcctaagaagaaagaggcgaaagagatgaaagattatagacccatttcttgttgcaatgtcctctacaaggttatctccaagataattgcaaacagactcaaattggtacttcccaaattcattgtggggaacaatctgcgtttgtgaaggatcggcttcttattgaaaatgttctgctcgctacggagatagtaaaggactaccataaggattcagtttcaagccggtgcgctctaaagatcgatatatcaaaagcttttgattctgtgcaatggaaatttcttattaatgttcttgaagccatgaactttccaccggaatttactcattggattacgctttgtataacaacggcctctttctcggttcaagtcaacggtgaactagcgggggtttttagcagcgaagggaactaaggcagggttgtctctatctcgatactttctgtgataacatggatgtctacaaaaatgt

SEQ ID NO: 47445 - DNA, 549 bp, Arabidopsis thaliana columbia
tcgatttttttttttttctttctagcagtaattttgattcaaagacatgggacgtttgtacttgtgcaaaacaaactagatattcgtttcctttaaacaagttcggtttactttctccacctccatctcagaatcaccagagacgtttgcagccgctgcagctccgtcataaaccttctacaatctcttatcatcattgtctggctagcaacaccttgtcttgtgaactcctccgccgtcgaaggaactcttccttcttccctcccccccactcgcacatcctctctacatataaagaaaacaccccaaaatattatcttattgtatatatatatagtcaatttatttctatattccatgaaaacgtaggaatctcagaaatatatatgtaccttgatataaaaagagtaaatacatgatcttatattatgcttggcgattgattttgtatttacagtttcatgcataagttttcgtatttacaaaatcgactttggaagtgaacattgaaagaagtagtttttttggttgcgaagattagagaggtaa

SEQ ID NO: 47446 - DNA, 533 bp, Arabidopsis thaliana columbia
attatccccgtttccagtaagcaaccaaaatcaaaattttcttctttcaaccacttccgcattactccatgtttacttttgttgttgaaaccccgattattccaaaagaaaccagacattaatgatggtgttggatgggacgtgtgttaggattgcattgagttgctctcctagtactttgttttgcattgttgcctagaactttgtgactgtcttttgatgcgcgaggtaaagtttgtctcagtaccacacttctatcttgacaatcttttcccgtactctcttcctcattgtcttgattaaccccttcttttttatcttgttcctctattccaccgttattattcgattcatggttctctgtttcaatgtcctaaccttttcctcctttctcacttaggcaggaaaaagaattagacataatagagatctctccataactgagctcctcgttcctccccggacttcttattatcttagtaggagtatccagtccttgtctcttacatccattgatttcgttttatcacttt

SEQ ID NO: 47447 - DNA, 537 bp, Arabidopsis thaliana columbia
ggacatctctcgtaaatcatcttagggaagcgctacgggaacaggtaaaggtcttgcaatcttgcaagttcaataatttgctcagacatttcaattacttactgagttttgtgtatcaggaatctgaattggagaatcttcaatctcagatacaggtaaaaatctgaattggtttaataatccctttacgcctgggaactattttgcaatcttgagtacaagaaaactgtatttctgcatcaaaattgattgtgtgtctgtctttgttcttattcatcaggtagcacaagaacaaaccgaagaagcccaaaacatgcagaaacggctcaataacgaaacaccggttaacaataacaacggaacatctggtcaatcagcgaaaatcactcctgcctcaatcgctgcaatggcggaaatgctaacctcatcaacaaactcatcaatgattatgcattctgtcctctcttcatttgcagccgaagctacacaaacttctggtctaacaaatcaacacctcagacacaaatgcatttgttg

SEQ ID NO: 47448 - DNA, 571 bp, Arabidopsis thaliana columbia
tttcttgaagagtgtgaatttgtcgacacttcactagccggagatgatctatttgccatcttagagagtcttgaaggtgccggagagatatctccgacagctgcatctacacctaaagatggaaccacaagttccaaggagttagttaaggatcaagattatgaaaactcatctcctaagaggaaaaagcaaagactagaaaccaggaaagaagaggacgaagaagaagaagacggagacggagaagcagaagaagataataagcaagatgggcaacaaaagatgtctcatgtaaccgtggaacgtaaccggagaaagcaaatgaacgagcacttaaccgttttgcgttctcttatgccttgtttctacgtcaaacgggtatattcaatacatccatagattttactagtcagtatgtgagtttctggtagtgccgactaattaatactattcgttcaactaatctttttggtatactaactatcatagtcatatatcatttcttagtaacatccaaagtatcatgcatatctatgtttttttaggaataatgccattataatgacatttt

SEQ ID NO: 47449 - DNA, 527 bp, Arabidopsis thaliana columbia
  unsure (1)..(527): unsure at all n locations
caaagcttttgtaactttacctggagattccttctgtttgtgaatagaatggctttttcattgcatccaccacacttaatgttgttacaaactgttaaagctaataaataatcagaagagctgctatggaaaaggacatgcagagtagtaacttgtgccacaagcttcggaatgttctgttttactatgcacattgagaaaagtgatctagatgtctatttcgtaaagccatttaccttagcttcgaggtccaaatactccttctcaagctgttttctagattcaaatggctttgtatccttgttgtctatgattttctcggcttctaacctaatatttccccataagcagatcaacttgagctaccagcctaacttagtgtcaaatagaatttacaagatcatatatataattaccctttacttggttccaaacttgccacgactcctcggattttcggtatatatggatcaattgttcctgatntgatattgacaatatgaatatgagatatacataatatattt

SEQ ID NO: 47450 - DNA, 772 bp, Arabidopsis thaliana columbia
  unsure (1)..(772): unsure at all n locations
ggtcggtcgactctatccccgtcacatgacagccacccttgaaagagtgcgtaatagctccacacacaaactcatacacaggcaaatgtacaggtcaagtggatgtgtcacagaaaccaaaaaaataaagaaacagtaaatattaagacaggagcttacgcgacatttgagcttcaggcagtgctgaccctctttgtgaagaacaatgctttgggatttattatcacttatgtagttatcattgtgcttgataaaatctgtggtgtaaaattctgtgattagcggcccctcactgactcctaagagtgctagactcgtttcaggacgtagattaagatctgatgtactattggatcttttaagcctatttttatttccatctgaacgagattcctttctaacatcagcctcataaatctggtgccctccaacatgtaaagatgatttaccaaaatcctcagccatctgtgcttgtgactgcttatcagtgctcactttagggggtaactgcggcactgcgttttcttttgctccagtagaagaaccctttttcagagattttttgtactccttcttttgatagttccttcctttcgtccacatgttttcaaggttttcaggtctaagaacctctgttctcctttgntcgcaacctctagcgaccgagcccaatcagcagagtgctgttgaacgtgtagatctgggtgtctgtcatttatgtttggtgatttctgctcaatagcttttgtcaaattcatattttttgcttgac

SEQ ID NO: 47451 - DNA, 1044 bp, Arabidopsis thaliana columbia
gtttttagagaacattctagaaagaaactatttttctaacaaaaccacgaactttgttttctagttattccactttctagaatacacctgaccaaattagaattctagaaatgaattttaaataaaccaaaacacctaaacgaaaagcaaaccataggtttttggttttaacatatttcaaattcataaaagtgaaaccaacctacaccatattaaccaatatttattagagtttttatatgttttatgatattgttcaaaacttcaaaagagatttattcatataacatacctataccataccaatgaatattaaaattatgaattagtatccttatattatatgaagtcaatcaaaaaacttagaagcatttcaaacggaatcaaaccattcatatatgaagtattattattatatctagaaggtgttgattttaaactattccgtataatatatctagaagacggctccgcgcgtggggaatgcatcaaactcagagagtttaatagctttttttggttgacgtcaactactcaaaagagtttagtttttgatgtgtatatatccaaataaaatatctttaaaaagaaaataataataataaatggtttcgagaaaacacgaggaagattctcatccaaccgaaacgactctttcgtttttagtagtctcttaagctacgcggtgtcgcaaatcgtgaccacataacccgttttttccttcttttaccccttatctttccacgtatttacgttaatacctacactcttcgctgccacttccttacccaccaagtcacaagggtatattcgtcactgtccacacgtctttggtccacacaaactcggtatctatatatagttcccaaacggacacgaacacatcatcacaactactatcacaccaaactcgagaaacacaaaccacaagaggatcatttcattttttattgtttcgttttaatcatcatcatcagaagagaaatggttgcgatatcggagatcaagtcgacggtggatgcacggcggcgaattgtttgatgc

SEQ ID NO: 47452 - DNA, 528 bp, Arabidopsis thaliana
gcgactctacccctaaaagaagagatgtgcacttctcttcacatcatcattcaacctagtttagttccaccatggtcaaataaaaaacccattgtcatgccacagtgtaaaatgaatttctatcaataagccaaaataacaaaaagccgacactgtgaagaaaagtatattacagtacgaatgcatattagcaattaccctttattttttacatcaatccgaactgcccaatccccaccataaccaaggccgtctcccttggacttcacaaaactcgtctctattaccatatcgttttcaaccagctcttgccgaccataatcccgtccattatgttctctccagccaaatgtacttaaatcatcagagttttcacagaaatgccgcataacatacatctcatctttgacaccaagccacatcaagccagctaccaaggacaatggagttctgcattgccatatacaacttctttacttgtacaaagaatatcccagagtagagattcattcacagtggaatttgcat

SEQ ID NO: 47453 - DNA, 550 bp, Arabidopsis thaliana columbia
tttgagtaatctgaaaaacttccgctgcttcatcagatggctgaaatacgcaaccaaaataagatacagctgcttgttctctaagctcagcgattgaagggtcataataggagaaaccataagaagcatctgcatccaagcaatttgtagatagatccaagtgcaatttatagatggtcctgagatttttgctttcagagcatgtccattcaattactcgcatatgatcaagcactctcaaaaaagatgtacagaggatcgggcaagggcacgtcaatggagaagccaaccatgagcaatttgcaaggacattgatcaattttccaataatctgatccttcttagagttatcagcaaggtctctacagtttgtatctaggagattaccaagttgcaacaaaataccgtgaagataattgaaggacccaccttgggccccattagaaggtaatgttgaggcaattcggagcagaacgctttggagtttctcattggaaacaagacctactagagcacgtgatgcaaaacacgaacacggagattactttga

SEQ ID NO: 47454 - DNA, 497 bp, Arabidopsis thaliana columbia
gtttgattgttcataaaaataaggtcatatctacataaacacacacataaatatgtacctgaagagctacttgggactgattataagaacctcttcttccccagtcgccgacaacgagaaaactgagtgaaccatcgggttctggtggttggacgaaccgcggtactctgccgttgaattacaggcggatagtataataactagacagaaaatagaaaatatgagtttgataggcttaacatctctcaagctatccattgagagactttggagaaaaaatgtaagaggtgatggacctgatggtgggttttcgtgtggctttgtttatttatagctagtccttatgtggacaagaattaaaaatagaaaaaggcaagagaaaaaataatgtaatgaactttgtcactagaaaaataactcttcaaaataattaataaattttaaagtcgaaaaaattgtttttcttgtttcaatccgagactatataagactaaaat

SEQ ID NO: 47455 - DNA, 556 bp, Arabidopsis thaliana
tacaagagtacaaaaagaaataaaatgactatgacgctagacccaagagtaaccattctaaagacgggtgtgattcttcaggttacaaagctttgatcgtatgaagagttgcaacgaataaatcattccaagtgtcggtaaggcccgggaggcaccaatgcatgcagtcatcgtgattctttccaccagctgctgccggatgagcgtcggctctgtactcgctcattcgagttatgtccaaaacgtggaaggcgcttctactcttgagggagttatagaggtgttgattcacgagacgaacctctacatttgttccgttgtccccactgagaaaaattcctcaacctaccattaaaatatgaggctgattataagcgtctcctaacaatttactagactaaagcttaagttccaaaatctctcagctcctctacccaatatctagccagtcccattatcttatttgatcctggttcgaacttcgtcgtatccatactggccagaccatactaatgatttcatgtagcttttcatgagtgacttggcatgagtatga

SEQ ID NO: 47456 - DNA, 1094 bp, Arabidopsis thaliana
tggcagtgccgcactttacacgtagtttgttacggaacaatataagacaaaatcattagaatcttgcttgtaggttacggcacttagtttagtagttactcatctgcagaagcagaggaatggtgagaaaaacttgaccagatttgttgccacatctttctttgacccactgatctaaaccactgaagctgctttttccaaactggtttctttcttcttgtctgtctttctgatcgtaactgatgtttcaaaattacataatccacgttcaactgttcatatacacaatatgtggatcgagacaatcagtgttcaaaattacttataactcattaggggagaaagataaataacttgtaccaatatttacatgaaaaaaaacaaaaagaagactctctaacttcaaaagacgattaaaaagaagactttctccaagtctctcatcggaacaacattttaagctcctcaagtcttgcagaccggacttcttcatctgtcaaagctccggcaatcatcctctgcttccttgcctgaacttgctgcatccgttcctccactgtatcctgcacacaatcatccaaaacaaacacaatgttacttacttacgagatcttgcttacgatgctagaaactcagagaaagttgcagtttatagtgttaccttgacaatgaatcttctgacgaataccgttcgtttctgccctattcgatgaattctcatgatcgcttgctcttccaccgctggattccaccatggatcctacgtatttcaagaaacataaccaaatgatcaattcatcatcatcaagaagacttaaaaaaacaaagcttgaagagagatggtaccattaagaagacacttgaagctgcagttagattcagaccgactcctccagctttcagagacataagcagaatctgtaatacatcacagaagcagaagcataaagatcttaagctctctgttcgatttggacaagagttagttagaaatttagacaatgacttaccgttttctgtttggtttcattgaactctttcaaaaccttttctcttcccttctgagccagcttcccatcgaatctaagaaactc

SEQ ID NO: 47457 - DNA, 561 bp, Arabidopsis thaliana columbia
  unsure (1)..(561): unsure at all n locations
nnnnnnnnnnnnnnnnnnnnnnnnnnnngcgacatggggaagcaaaacatgcgtgtataatggtagcgggaaaacgccgttgttgtgtggtgcgattgcgtttgtgggactagcggtggcgatggtgggcttccacatgtacttacttatcgcagtcaccacatcgccgtctctggttctggttgagtgggatcctgactctgttcctgcgaagaggctcacttttcaagctgccttcttcttcgtctcaacatggtacgtagacttattctaacgcaacgaattaatgtcatgtagttataaaaaataaaatagaaataaaaaaatcctaactataagcaatcgtgaaatgacatatttatgttactgaccatagcttaagttaatgataattttgtgattatattattcttttttgttcctataagggtttgctttggtgttggagaggttctactgttggttgcacttagtgtggaatcaggacatctaaagaactggtctaaaccaaaacctagttgtctagtaatctggcaaggcttgttttcagcggccggagtg

SEQ ID NO: 47458 - DNA, 946 bp, Arabidopsis thaliana columbia
taccatttccaaccataaaaataaatatcaatgtctataaattcataaatatatggcttttgaaccaagactaattatttataacaaatgtgagtggcatttaacaaaatacaaatcattttcccatatgtaggctaattaaaccaaaaaaagaatatgtaggcagtgagcgaactaattgttctgccaaacctatgtatcttatagtgttttttttccttgggtcgaaaatcttatcgtattaacacttcataaattttgaatagttaaattattacttctttgtattagatgtggagtggagtgactatttttttaatatcttttgtggttatagtatagtgaatatgaagaatgacgaatgatgttacacgagaccaagtttttgaaaaaaaaaatatatgaatctgataatcatttttcctttacgtgcgttatcgtacgtaattgctttgcatgatctcacgtcatgacagcaattatagaaactaaacaatttaaaattctcatttatacacaacgtgcatcgttttgaggcatggataatttaaggttttcgatttatagattgaatcagcaagaaattacaatgtagccacttataccaaaaataaaatcaaacaatttgaacaagatacattgaagtatggatcataacaaacaaacaaaagtgacactagttaagtttagagactagagtgagtcggttttgttatttcataatttggttcatgtaaatatatgtacccttcatttgaacagagtagtataatccagtaactacattcatatctagcaaagaaaacagaaacctaatcaaaaatgtattaagatttctcaaattttcgttcaaattagtgatagaaaaccagacgtaaccgtaataaaacaggtcaagccaaaccagactagattcaatcttggttcactcttaaacgaagcagat

SEQ ID NO: 47459 - DNA, 426 bp, Arabidopsis thaliana columbia
taatttattgtggttttcttgtaattgatctattcaatttaagttttgggatgtatttgtatggccgttttttaagtgtaaagtgttaaaaaaatagtcggtcacctctttattcaaagatgaaaatgctactttatagtcaatattgccaaactatcaattttttgaaacaagctactcgaatgccattaattttgcagtagtccgcttttttcaatctgttaaacaagttcgatttgataccataaaaaagaacaagtttggtttgtttcaaacttctagaaaagaatacctattctttgttcttgttcttgattctcgtcgtctcaatttaaaggctaccgtgtttagtacagatttctcaattaagttttgtggatgattcatttgcaaacgtttcatctttggattgggtataactagggg

SEQ ID NO: 47460 - DNA, 458 bp, Arabidopsis thaliana columbia
gatacatgttattagttatgttatatacatctaaaaactaaaacttaaaagagtgtgctttctgaaaatttcccaaaacttatcatacttaggggaaaaggcttgtcatactttgaccaataagcttaccaaacatgtacatcaagttactttcataatccgagtttatccattggaaacgggaaaatcaggttaaacaaatgtgaaacaacttgattaaagaattaactaaaatagatacaaacaaaacatataaatcgagaatgctcttatttcaccgttaatttttgtatctagccacattcatcttaaaacttgttttggttttatatgtacaatcaaatgtaaagatattttgtaagtatttcgcatatactttttttgtgaaataagttatcaaatcagttaatatgaactgtttagatcgttgtatttgtctgttaaacaataattgtgtt

SEQ ID NO: 47461 - DNA, 272 bp, Arabidopsis thaliana columbia
gttgctatgcgatatggtgcaaacgaaccaactgtaactgcggcctcatcagcttcttcttcctccgctacaggctctggagaaaatgcgtcttcagcatctgaaagattcgtatcatttatctcctcctcattatctgccaccacacgtgttaagccaggattaactactacatcatcttcaaccactgaaagttgctcgaggcgatgtagatgacgtgtaagcatctcagcgtgtatttccgtcaagcaagcctgttgaacatcaatata

SEQ ID NO: 47462 - DNA, 527 bp, Arabidopsis thaliana columbia
tgagtgaagaagatagtctctgaggcagtgcattgataagtatggagaaggcaaatggcatcaagttcctttaagagctggtatatatactattgttgtaaactattgagtcacttatattgattagacacaagtttatattcctcacacacaaatctaatttatttacataatgtaattatccaatacaacttgttccaatgcaagcttagatggtcaccgattgccggtagattgcctggtcggatcgctaataatgtcaagaattaccggaacacccatctcaacaagaaagaagaaccgtgttgtaagagcagaatgagaaagagggaaactacatgttcagctacgtcaccgatccaaagactcaatgttataaagcctcgaactcaattctataacggccggctcaacgggcagccagaagttagctctttcaaagtcagcattaacaaatatggtggtatcagattcacatgtagcaatgataagacgaaatatgagtttgtgaacattatttgcaaaat

SEQ ID NO: 47463 - DNA, 841 bp, Arabidopsis thaliana
cttctccaaatgcttcgttaaacctttgtagttccctagcttcacttcaacgtaaggatctaagctaccggaaacatccatgacaggaagatctcgagctttcacgacgctaacgtagaggtaatgcatctgctcaacgagatcgtatgtgctcgacgttttatctccactgcttctgtaatagtaagattgtctcatacgagctgctaaaggaggactagtttcaattagctgaaactccggattctgctgtctcggaggttgcatctgcattactgctccagtcggtggtcctggagctctcatgaaatctgacctaaactccggttgattcggaggtggaggataagcttgtttcgcttgtgacatcggtggagctcctcctcctcctccggcgtgagcaccgattgagtgaaaagttctcgactctttctctttcttcttcgtcggcttcaacgtctccatgttattaatctcatcttcaaactgctcgtagtgattctgattctgattctgattttgaaattgaaactcctgagattcgaatctcttatcttctttcatcactttctcagcaaaatccggcggaggagagacgaaatcgccgccgtcgataggagcggcgtagattctcaaagcgatatcacctttaatgttagaaaacaaacctcgtttatcaagaggatatctctgaacaccggattcagattccgataacggaacaaccgcaccggcaattttaacacggccgagaaacttcccaggctgattatcacggcggtcatcgtaaacagtgacgtcgacagtcttgttatcaaacgcttcaagtcacgacgttaaa

SEQ ID NO: 47464 - DNA, 586 bp, Arabidopsis thaliana columbia
aatgaaactgtgcaacaggcaacttcaactgctgaaagggtgcgatcatttaaaaccgatcaagacccttcattggtggaacttctattccaatatggtcgatacctgcttatatcttcttcaagacccgggactcaggtggctaacttgcagggtatatggaacagggacattcagccaccatgggagtgcgttttcgccttactatcttttcttggactttcatagcttttgttgtatcactaactccacttcttcttctgcggtattgcagtggtgctcctcacctgaacattaatctgcagatgaactattggcattctcttcctggtaatatccgggaatgtcaggaaccattgtttgattatatgtctgctttagcaattaatggccgcaagacagcacaagtaagtttctatccttttttctaatgatgacctttgcaatgcatttgtgctccatcactagagacattagtctaagtatcattttgttgcgctgtataggtgaactacggagcaagtggttgggtggcacacaagtatcagcatatgggcaaaacttcccagatagaggtgagcagtgt

SEQ ID NO: 47465 - DNA, 561 bp, Arabidopsis thaliana columbia
ctgttgttatcactagaaacctgaggtggaataaactacaagatgtgatccctcccgagattggggagctgaagagactaacccatttgtgagtaccttaatgtttctttttaccttctgatgatcgtccatttttatccacatgaaatcatgatattttttcttcttttctttttatgtttaaggtacttgagcttcaatagcttcaagggagaaattcccaaggaactagctgctcttcccgagcttcggtatctataccttcaagaaaaccgtctcattggtagaattcctgccgaactggggactctgcaaaaccttcgccacctgtaaacaccaaatgccgttttctacatatagtttgggtacctccaatgatttatttactgagatcatgtttggtttgtgtccattatttttcagagatgttggtaacaaccatttggtgggactatacgggagctcatcgttttgatggaagtttccagctcttcgcaacttgtaagcatccttcagaaatttccatttgcttctctcttccgtttgatatattcttttatg

SEQ ID NO: 47466 - DNA, 231 bp, Arabidopsis thaliana columbia
tggtcaaagaccaagcaagtcttagcatatgcattgcacacctattagagggtttgttaaaagaatgtgatataagataagcaccaacgcagtatgaagagactgcaacatgtataatagatacaactcaaaatgcgtctttaatattacagcgaactgaaacagagtataaggtctaacgtcaagagaataaaacagagcattgacaccaaagctagcagaaggcagatg

SEQ ID NO: 47467 - DNA, 431 bp, Arabidopsis thaliana columbia
tgattgcccctgccttccagttcgagtactcctgtggaagaaaccttaatgtttgcagctgagtttcgattaccaagaagcttacctaaatccaagaagaagcttcgagttcaagccctaatcgaccagttagggataagaaacgctgctaaaacaatcattggagacgaaggacaccgtggaatctccggtggagaaagaaggcgagtttcgatcggaatcgatatcatccacgacccgattgttctcttcctcgacgaacctacttctggtttagattccacaagtgctttcatggtggttaaagtattgaagagaatcgcagagagtggcagtatcattataatggcaatacatcagccaagtcacagagttctcagtttacttgatcgtcctatcttcctgtcacgtggacacaccgtctttagtgg

SEQ ID NO: 47468 - DNA, 438 bp, Arabidopsis thaliana columbia
tgttgatgcggaatcgacggtggagatgaagaccactggaactaacggtaagcctttgaacaggctcgagtgcctcaagctagccattactcgctttatccacgacaagctctccagaaattccgatcatcgctttgctttcgctaccctctcccagtcagccgcttgggtaagacttactttctcccccagctctctttatgttaggttgcttttgcttttgagtatgcatgctccttagatgtcaaattttgaattcgtgatgttcattggactatggtagcttataaatgtgttgagagagtcatatttgatgtattgcataagcttcactagtgtgactgttaaagttgaggtcttttatgtgtcagcttaaaaaggaattctccaacgatgctaaatctgctgctgcttctttaagagaaatgtcagctacta

SEQ ID NO: 47469 - DNA, 1188 bp, Arabidopsis thaliana
aataaaagcaaccatgtagagattggtttagcactttcattttatcgtctcaagagacactctttcgttacgaagtgtatgaagtttcttagattaatataattcagtctcgagaaactatcccaataatactcagtttcactaagaaggggcttcatcatcgacctatagattcttctcaatgtgttgcagttgaaatttgagaacgaatctgaaatcatagaggtttcaaaattgaaaaacacaaaaagtagtcattgtaaatagaacattaaagattgtgaacaaggaactgaatcaagagagtttccttcatcctaaataccacaaaacataaacaaaagctctctttcactatcctgatggttcttcatcatcttctttcaagcttcgactgggtactcaaaaacaacatctttgccagtaagtttacggtacacaccgaccatagtctcgagcttgtactctgtgttgttcttttccttggcatccaaaaagacctgtgacatggtagtcaaaacagaatgtaaaggtaagctcaatatcattcgtatcaatatctgagtatattctcatagtaaatgatacgataccttcatgatcttggaaccatcaagacggtagcgagtacgctttccaacaatctcagcggggaaagcaacatcttcaagcatagcttcatgaactgaggtaagagttctgttacgtggcctctgaacagcagcacccttcttgggggacgcatgatccttcttgtgtaacaaagataacatcctgtgaagaaaatgaaaaagaatggcagagtgtgtaagagagatagtacaactattgtttaggcatttactaaagacagagcaatgttataaaattacctttccactgaacttcttctcaagctctctgacgagacggggatgaatcttgcggaaagctttcctcaatctgaatggaacgtaaatcacaacagctttgcggtttccagagatatccatgtgactgcaatgacaaaatcaaattagtttcccttcgagaaaggtaatgcaaccatggagtgaaacggggaaaaaacaaaacgcagcaacatacacagcttggttgatgtagagatctttcaactcgcttttcaactcctggttagtgttctcctaaatcaaacaaagcctgagaaagaaaattccaagttattca

SEQ ID NO: 47470 - DNA, 598 bp, Arabidopsis thaliana columbia
gggttaagtataggatcaatttccgacaacttgtacaccaatccctttatttaactaaaataatatatccaacccagtctaaaccggtttgaccgttactatttcaatcttcttctttctgttaaaacggttttcgatttaattttctttttgaatgtgagaaacgtgagaactaaactggcgacttttatattaccatgatattcgtcttgatgtagttgttttcaaaacgaatttgaggattttgaacgttgattaatcgtttttgattttccccgacacacttgcacttgttctccgagaaatagtttcaagacaattgcaatgaaaaagtgtgtgtttgccgcttttgcgttccctgcatttgtatatttgctttattagagtcttatcaatctagtaacaactctagatcgcttcactgtgtaaatcactactgagaagctggattaaaccagtttttttttcattgtgttttggttaactggttcgattaaggtaattatcaaaaaaacatgcaaaaacatattaaaacaaaacaaaacacaaaaaatgcttaagatgagtacacactttcgacaaaaaaaaaaaaaaagat

SEQ ID NO: 47471 - DNA, 547 bp, Arabidopsis thaliana columbia
tttacatttaagtttatcattttaagagaacttagatttatttcatctctttataagacaataaatcttgcatctttattctgatgagagtctaacataattcttcctaaacatttttattttctttactctcatcaatttatcggttactgaaactgtctcaacccataggcctacacatcgaaaacctttccacttgtgctctcttggagttatcatctatcgcttttggaattggtatatacatgtactacatcagtagaggttaccaattaaacccaaatttgatgaaacaacacgtttaccaaatggaccccgtataacatgtgaaagtatttggattttctaatattcattatgttatattttcgattttagattttattcaatacaaaaaaaagatatcactcaaacatttaatcaaactatacttttgattggtaaagtttatctattttgttatttgatcttttatatagatattgagaacataggaaaactgttgattattttttcaagtagatacatttacattttcgttggatta

SEQ ID NO: 47472 - DNA, 538 bp, Arabidopsis thaliana
cccacacacttttattacatatacaaactgtatttataggtttacatgacacactttgactaagggacacgtctctagaagacaacctaatgtagagacacatacacacatgtaactgttttgtagttaacaattatattcgtatctcttcgatgtgtgatacgaatatacataaaccagttacttcactatataatatatctcttctaaaataagatgatgacttgatcacttccaacagagtattgaattccgtgaaatgaccattatccaaatccaatccaggaacacacctccagatatttctccatttggtggataagacactagtcttaaccacatcttttgtcggaagattcaggagaacataaacgagcaaggcttctggcaattcacttaaccaatcaacttcatcaccagatcttttgtcggaagctcaggagaacatgatcgtttacgtttctctccttcttcgtccatgtaacttcaaaattgcgaagaaagcggcatagagtaggggaaaatgaaacgataacta

SEQ ID NO: 47473 - DNA, 734 bp, Arabidopsis thaliana
tgtataaagaaagacaaaaattcaaatatcaagaaactgcaaaaatgttgaggtcaattgagactactcaagaaaacaacaacaaaactcaaaacatgaatgaaactactatactgacaaaattctaaacagtgaaaaagggtacgatgacattgctctgtatgtatcgtcttcatttgctcttgacaaaatagagcttacccatgacatgaagaacagctacaaaagcaatgaaaccaatgctcatgataagaacaacatttggagatatcttgagaccaggcgcgtcgtctgtgtagaactgaagcattgttccagctccaccaccggcgctgctgctgccaccagcaggcttcctcctcctcatgcttgcagttgcagctgcacttcctctctgtggagctccaccaccaaccatttttgcttcacttcttgtttttcaactaagtcaataacaacacaaacttaagaaagaatgaagtagaatctcaaatgtttataaaaccatagagatcaaagatgaaatctatgaacaatttggcttaataacagtgtaataattcttgataatctgatccatattgtccaaaaatcaagattcatcatcacaaccgaaaaaagaagcaacattgggcatgcagatcaataaagcgtgtcataatcggacaagtccaaatgttacgctagcgaaatcaacatctagaattctagatcagacaaatatatgcgagcat

SEQ ID NO: 47474 - DNA, 546 bp, Arabidopsis thaliana
tttccctctccacgcggtacgatacaaaaaatgcaaacccattcttccccgaacaatactcattatgcttttaggtggtggagtttgaaactcagctggataatcctcatgcaaaatagacgtgattaatcgtggtatgccggtatgtttacaattgcttgaggtcttaaaagaccgcttgcatgagtacatcttcctctgaactttaacaccgaaataatctgagctctttacttttgcacatcgtaaatactatttacaacctgttgttatagattgccgacatcgtaacatgagtcgctttggatctgactctacagttgcggtcgcaaaacaatacttatttgcagctctattaaccaaatcttgcacgacctccttagaaacaaattcttggtgcaattcaatccccgttccatcttcccattccttaacactctgacttttctcactactctgacttccttcaccagcacatggaagctcataatacttaattctaccatcaataccattatctttatcacatccatctggctaccacat

SEQ ID NO: 47475 - DNA, 409 bp, Arabidopsis thaliana columbia
ttataaacctttagtaaagacacaaatcccggtaacggatgagcccgaaaatcaagttgttagcagctctaatgggaagaagggaatatgcagctctggctcagcctctagtctcaagcagctaagctctcattcgcgtgaccacgatcagatcagcgataggagatgctattagtttatcaaaaatgtgtttctttcctcagtttagatatgttgtttctattctaaatctgtctagtgatgttttaaagcagaggtatcggatcagaactttgttaacgaaggaatacaaggcgaaaacggaaactcgacgaagatgaagatggtgatgatgagtgaatcgtcgagtaccgatcaggtaacgtcttcctccactatgagtttgatcaatattagtgaatgttgtgag

SEQ ID NO: 47476 - DNA, 617 bp, Arabidopsis thaliana
ctgaagctaagaatggtctgcctaggatcaggggatccttgccttcttcatctacgtccaataccacaaaatctgtaggtatctcaacatttccaatcttgacaggcagattctctattaggtcatgtggatgtgcaacagaaccatcagctaagagtaaagctaagttgcagaacttgtaaatccgtgatccctagccttttagctgtagagagaggcataaggctaacagatgctcccaaatcacaaaggcacctattgaatgtcaatggtcctagagagcattgcagagtgaatgaaccgggatcatcaagcttttcttggatgactttcttcttgtatgtttcttgggtggaggcactactaatcatctcttgattctgatccttcttgagtttttcaattttgaacttttctccagaatgttgagtattcagcaaaagtgtgtgctctatagtccagatgaattgctgggtggtaggtgcacaatttgagttgaatcccccccttcttgaatcatattgtcctcagtattgagagtctgatgacttggtggagactcacttcttggtggattgtgatagcttttcgagtagcgtagtccttaggattttgga

SEQ ID NO: 47477 - DNA, 476 bp, Arabidopsis thaliana columbia
tgctttccatgaaatcgtagaacataggctctgctaccaatttgtgaagcctaatctataatttccgattagaacttgcgacttagtttagggatttgaaagaaaatagaaaaaacgcaaacaaagaacaccgagattttacgagtttaggttccggtgtggaaccctacgtctcgccggagattgactccggaatccactagatcatagctcaaactcgagctcatacaagtgaccgttacaatcgctcaccggattacagtcactctcaagctttctctcactcaccaacacaaaaccagttactctctctacctctaactctaagctcacgtctctcgtcgacttgcgtagtctcgttgtcacgcttctcttatctgtttcattctgttacatactcaaagaagagtagagaagaagaagatacagagccaatgataaaagacccttttacccttctagttgtgacttattac

SEQ ID NO: 47478 - DNA, 541 bp, Arabidopsis thaliana columbia
tatctattgtgtttgtctttctggtacttcatttcaagaaaaatagctgctcttcatgctcttcctcaatgaagcttccaaaaaggatgtgtgtgttatgtgtaataataaaaaaaggcaaaaagaaaaaaaaaaaggcctgaaggaatgaacaaatgaaagttcaaaaagaaaaaacaacaacaacaaaggttgtgtgttggcaggaaagggattggtattctttcttctcttggggtatatatgtatctatgagtacccccacaaaacattgttcttcattacaggctctaccaatccccctggccgtgttacacacacacatcatgaggttgcttcttcggagagtatgacgagtgtagactatcttgtcttgatcagtgtgtatggttcatctcactgggccaggaagctgctattttctccatactaaaagtaagctatgcacctctgtactttggaatttgtccttctcgcttggatacatttcgcatgtgggttccttgcctagtagaagtttttttaagctatgtagtataga

SEQ ID NO: 47479 - DNA, 490 bp, Arabidopsis thaliana columbia
tgttacaaatcgaatcaaagccgataaataaaaattgaatatgcattaaggagagtgatactatataattattataataattttatatacaaatatcaaaatatatatttgatatcttttgatacaatgatctgaggattaatccattaataactaatttgaaacaaataaaacaccttgcatatacgcatatataagtgtatgtatatgcatgttatagcatatacgtacggagctcatagatatgaagaatcagttgaaatgatgaacgtcacttcggttcaatcgcgcttgcaccgagtaattttgctgcagccacgtctatactcgttagcaggagtaggattcttctgttgggctcccggaggatagcatcctggagtaggattaggaccagcgcacttggtaatcacaccatagtctagatgcttccgacgactctccactggtaccgcaatcaccgcggcgaaaatcactagcaaacatatca

SEQ ID NO: 47480 - DNA, 550 bp, Arabidopsis thaliana
cagtacatctaacttcatatccccacactggtacatgaaaccattggagagtctatcacacgcagtgcagtgaaagtaatcatccttgcttgtaactaaagtaagacgttcattatgtagaaaaagccatttctttctaggagattcagcgcagttttggtgaagaatgaaatcacaaacaacacaaccatagaaagattggagaccaatgggctgggtgcaagcattgcaacgcttgttttcctcccaaagaagagcactaacatggaatcttaggtaatgctctttgtggctgaaatgttgtattgtgttttcatctatcaccacatatggctctacatcttctatctcttcaggcactccttcgagctcttttccgttccacacatcctctctagtagcacatttcgaatgaacgacatagtgaggacacgctgacaagaatacccgccccaagtccaatccaccttccggcgacaaactccacataccgaattcacaacaccaagaacggaagtgcgagacaccggtgatcatgccgattgatgtt

SEQ ID NO: 47481 - DNA, 458 bp, Arabidopsis thaliana columbia
aggatcccctgatttgcaacatcaacagattttccatccacatgtggaacttcatctgttctactggcttgaagttcctcagaatttgtctcaatcttggagttaacattcgtttgctcttccgaacttaggaggatagcttctcttttatcaccattgagagttttaacttcatcttgaaaagaaatatttttttccaacttgtcagtaggtagaggttccgcagttgtcgacgcagatgcagtaggctcagatcgaacataactcaatgaagatgccgtttcttctgccaggtgacatgtttcacatcactagcaggtgtggtttcacttcttgagacagtttttctcccagaagctgatctgcagtgcacttttccaaagacgatttagcagtcaaagtatttccaaagagagttgtattacagaagaatctacgtcaccacccggaattttgac

SEQ ID NO: 47482 - DNA, 524 bp, Arabidopsis thaliana columbia
caccggttattccaggaatgagtctagaaggttcttgaatattagtttgtttgatgagacgcatcgatgaaagcgtggtggatatagttgtgaaacttaggtatgaaatctagaatgtggtgtaggcttgcggagaagtacatgtttgttaggatttgattagagctgctaggcatatggatttggttagactgatcaaggcaatagactagagaatgttgggagtttctgtgttttcaaacctcttccacgggttcggcttttgtgttttgcttgagggcaagcaaaaactaagtctgggggagttgatataaccctatttttactgtttttacctatgatttatgtatacgttttagagtctatttgttattgtaccttcatgagactatcatctctaaaaagtgcataaacaccctgcacacaatgcaaaagcagagccatatgagctaactttcagatttttgcaacaaaacggtttgttttggttattgtacttttaggccgaaccagcaagtatgatg

SEQ ID NO: 47483 - DNA, 519 bp, Arabidopsis thaliana
tgagtgtcactgaaagatgtaaatctaactctaactagcattttgtttagggatcatgcacaaaagaaactagatgctcaaatgggagtttaaagattttgataacctacttttgcccttctccggaacacatcagccacttcaggattagcaatcatatcaacatacctagtaagaacaacagcaagcggaacacaaataaaacttatgagctttctttaagaattagaaacagggatttacatagacagaagatagagctcaccgttggcggtaacgtttatcaatatcagttagaccatgatatttgtctggaagtggaaggagagactttgtgagaattgaaaaagaattcacacatatagaaagctcccctggaaaattagagaacaaacagttacaaaacaaaccccaaaaaaaaaagattctccatcgagtataatcatcttagtcaagctcacctttctcagtcctcttcatcgagccactagcacccaaaatatcaccaatgtcgataaa

SEQ ID NO: 47484 - DNA, 536 bp, Arabidopsis thaliana columbia
caagagttgtgtcaaatgtttgttaaattcatgtctcaacttcttagtattcttgatctatttgagtacgacggcgacaaaagctagctacggctattacttttataactagttttttcaaaagtttcaaaaaagtatcaacaaaatgaaacagggttcactccaacttttaatcacttgcactttttcatgttggtatgtgatgtgtgcagcagctagcatattttactttcaattgttgaggaaactctttatgtttcttttgagcatatgtataactttttattataatataaaaaataaacaaactcaacaataaagtagaaaataatcttccttaaaagttctccaatttcctattataaaagagatagatagatatacgtagtagagtaaatagatcatgagtatccaatcctttatcttgaaacttttgcttttgaacagcaacagagtcaagtggagaaggtagattcgatgcttcagttgccaacgagattctcccgtctttacgacacgttggtactcgccagctt

SEQ ID NO: 47485 - DNA, 562 bp, Arabidopsis thaliana
atcgttatacgaggtgaagaggtttttgagatattttgagatgggttatgagaagatacacgcttgtgtggatgactgttgtttatccagaaagcagtttgagaagctcaacaattgtccgaaatgcaatgcttcacggtggaagattaacacccgcattagtgaagttaagaaaggtattccacagaaagtacgtaggtattttccgataattccacgtctcaagaggatgttcaggtcattagacatggagaagaacttaaggtggcactttagtaataagagcactgaagaaaacttctgtgacgtgggatcaaatgaatgataaatacccgtcttttgcctctgaagagaggaacattaggttgggactctcgtcagatgagtttaatccgtttaacatgaagaatgttcattatagtgcttggcctgttttgctagtcaactacaacatgtcacctgacaagtgtatgaaggaagagaacatcatgttgtcattacagattcctggtccacccaatgtggaaacatatagatgtgtacttagaacccttattgaaga

SEQ ID NO: 47486 - DNA, 426 bp, Arabidopsis thaliana columbia
ttacaattgcttttaaagtatttactataaaacctataataaatgtctttacattgtcttttgtttttgcatgaattcaatgtgaacctgttcatagggaacttcgacgaaagggcaaggatacgttaaaagatccgtacttttgggcaagtgaaggagtaaatactcttgttgaccttgaagatcgtttggttacaaaacctaaggaaggcgaagatgctgttgaagatgatgaaaagttgtgtcttggtgcagtgttattgactgaaagacttctgttgacaccttttgacaaagagaagatacgtttatcaagattgcaacatgcttttgagtttgagatgtacacagcccaaccgtgggcaaacaacaaatacgatatgagaggatttggactcgcgcgaatcatatgggtgttcagtgcag

SEQ ID NO: 47487 - DNA, 521 bp, Arabidopsis thaliana
ccgatgttcaaacctgttaagcagaagaggagaaaattgggtcgggagcgagcagaagctgtgaaagtcgaggttgaaaaattactaaggatcagctctatcaccgaggcaaaatatctcgattggctagcaaacccaacgtagtaaaaaaaaaagcggcaaatggagagtctgcgtagatttcatcgaccttaacaaagcctgcccgaaagacagtttctcattaccacacatcgatcgcctcgtagaatcaacttctggaaacaagttgctgtcattcatggacgctttcgctggttacaaccagatcatgatgaaccccgaggttcaagaaaaaactgcattctacacagaacaaggcatcttttgttaccgagtaatgccattcgaactcaaaaacgctggggaaacttatcaacgtttcgtcaacaaaatctccgcattatagatcgggaagacaatggaagtctacatcgacgacatgttggtgaaaccttggcagaggaagacacgtacccatt

SEQ ID NO: 47488 - DNA, 479 bp, Arabidopsis thaliana columbia
cggtcacctaatcaacatcatcagtgtcaaaactatctcggatgcagaaactaattgacaaaaactgcggagtttacctcatcgccgactttgcattgatcgagaatccggtacagatcactcccgttagagacttttgtaccgttcaccgacgtgattatgtctcctagtactagtctcccgtaaccatcacgttttgttgactgaagtccctgtggaacaaaaccaattttacacatttcaatattaaaaccgcggagtgaaacatagagaaaatatctgttatatggaaacttggaaacaggaagagcttacggctttgcggcgtggaccacttggaggagcatccaagacgagcacaccgctcactcccaattgctcaacagattggtccggtgcgaatttgatacgtaagattggtctggtgactttccaaatacaccgactgatcaacgataccaccacctgaacatgagaga

SEQ ID NO: 47489 - DNA, 550 bp, Arabidopsis thaliana
cactacgcatatatacatacaattatagtcttctgtgaaaaaccagaaatctgatttctgagtcttgcagttctggcgttggagaagaactttgatagaaaagccttcttgcaatcatcccaagtggtgattgattcatggggtagatgcttctcccagatgtgtgttttgtcgcccaaggagaatggaaacaaacagagcttcaatccgtcttcacagacaccattgatttttgttaggttgcagagcctatcgaattcatcaaggtggtcgagtggatcctccattggcagaccatggaatttggtccccttaatcatcgagatgagaccactcttaatctcgaagttgttgttctggatagcaggaggtgcaattcctttcctttgacgatggttccgtggtgcatctctaataccaatgttggcagggctattttgttgattctgttcgtcggccatttcgaatggttgttgaggtaaaaggttgactgtgtctctccttctttgatatcgctagctatgcggtcgatgttgtcgttgaaaaggag

SEQ ID NO: 47490 - DNA, 553 bp, Arabidopsis thaliana columbia
agagaagagaagaagtctataagaccttgattgagagttgagaaaaatgtcctagatccgcaaacattgcttcggaacctgtaatgcagagtaagataccaccaagagacatccagcctctactttgagttttcttgaggaacttgtacatgtaataaggagaaagtgcttggtacacatgcgggttccaatggaaaatgttgtaaacaccgatggcgctgatacacattagccacaacagaatcaccggggcgaacaagaacccgaccctgtgtgtaccgtagtgctgaagtgcaaacaaacctatcagaattacacaagcagcagggagttctatatctgcataaacaaaacaaaaagccaaagaaaaaagtttcagacacaatcacaataaccttattatgaggcaaaaggtcaaaactttaacatctacgagacttgttgaacatgacagttgcagattgaaactcaataataaagtagaatgttacacaaagatccaataatgaactactagttttggtatagatatcccttgatgtctagagaagac

SEQ ID NO: 47491 - DNA, 509 bp, Arabidopsis thaliana
atcaggcaacgaatcagggactacaccacctaagaacatggatcccttaaaaaggtgatcctctctaataagttgtaataagctgtcaacacgagggtcagcttcgtcatcaatccaccctctcgagaaagggtcaccattagctgtaccactcataacagatgtgactttggtctgcaaaaaaatcaagatttattactttaaaaacatgctattgttataaataaagaaggtttagttttacttttaaaagccagagtatattgataaatagcagatgatataaatttaaaacaataataatgtagtaaaatagctaatacattattacgttatccctaaaccaactaaatttacacccaactacagacgaaacataacacgggtgattaaattaaagcatgttacatatatttccaacatgcgttttatcaataaatcatactaaaacacataatgtagactgattttattaaatctctaacactacccttaacgtaatgcaatat

SEQ ID NO: 47492 - DNA, 219 bp, Arabidopsis thaliana columbia
accttacaaaaaagcgtgtgctgttgattattcttgagaatctaggtatacctgaaaatgctataaattcagaggcagtacatgagctctataactgcaaccaacaccaaaaatcttctactaaatcagaaacacgcaaaaccctagttaaaaatggcagtggtgagtcacaacaacgcagaaggcaggctatacgaatcaactcagacttggccaatt

SEQ ID NO: 47493 - DNA, 435 bp, Arabidopsis thaliana
tctagtaacgaggactacagtggcatagcaatcaccaaaacgaacaaggctcgctagtacctcttcagtaaaatcgggattgttcttctcaacatcctcatcaccatcaatatctgcaaacaaagaagaaaacatataaaaatccatacattaaaagaataagacacaacaaagctggttggtattctcaatcccagaactacattatatgaataaaaattagagctttagaattagtatgaagtttatagcttagaagtaacctaactaaatagagtacaacaatgcttaactgctcttaagtcccacatattaaaggaaagagaaaatgggaaagctttaagtcaaacttcacatttcaaacgaaacggtagctttcagattcgaccagacaataaaccaaaaattcaaattaatcctatctaaactgaaata

SEQ ID NO: 47494 - DNA, 417 bp, Arabidopsis thaliana columbia
tctagaaggttcaaacaagtagtattggatcaagttagcagagaataaaacgcaaaatcttacgttaactctattttgtacggtgtaactttcaaaatttggtgtagtatttctttgaagcttaacttctagtattagaaggaccttagctttatttgagatactaagcataagtttcaaaatgtatttatctgaaattcaaagaaactcttataggtaattgaactaatgtacacactattcagccttcggagacatacttgtgtcacacaaattgtgtgcattggtcttgcatatgcaattgggagaagctacgtgctcttataacacccacatattttctctattatttgtcctcaatttcttgagcgttttttttctcttccacgcctaaaattttatagaaagaggaccaca

SEQ ID NO: 47495 - DNA, 562 bp, Arabidopsis thaliana columbia
ttatgatcgatacagtatcatcattctactgaagaagtaatcgagaaaacgtatatatatgaaatcctacatataaatacgttttctcgactaccaccacttcagaagaacgatgatgtgcaacttttccttcaccattgctattgccaacatctctgcaaatcaagccttagacgtccacgtaactaatttgggttgcttttgaaaacgcaaagtatatacatatcacacacattctgacccgtctaatgacattcacggttcatttgatcatttaactaaggtaaggttttagtatgggcaaaaaaaagtagggattcgtataaataacttatattgcagctgtcaacaaaaaaaagataattagtaaatgtaatgtcggtataaagcatactaaagcagagaaatattatacaattttatatactccaatataaaagtgtttgcatatatatagaagcagaagagacacaaacagttctcatttggtaaatgctccatactttcttcacttctccaacaaaacacaaaaaacaagaaaaggaaaaaaaatgacgaaacg

SEQ ID NO: 47496 - DNA, 962 bp, Arabidopsis thaliana
gctcggactgaactctctctgattcggaatttgattgttttagtgtctaccacatatgcgtcaatctttaccgtcttgtctccaagtggccagatcttgttcacaataacgtgaacttttgcaatatgcggagatatttgtggaaaccgccctatgagcaaatcatcccacaatggtgttgaatcttcaaagatttcatttgggacttggacaatcgaatcaccgttgaccattgttacgttgaattcatgcttcgaaagggttggtctattctgaacaattgatgagtatgatggtttggtcgtttctggggaagcttctgaacttttcgatgtgctctccaccaccatcgccgtcgacatgatgggggaagacggcggaaaagcgccagatctgccagattgggacacacggtagtgaaaccctaaatcgccttcaaaatcgccctgccacgtcagccctaattttttacctttgattgattggtctatgattagtttgccgctgaaaaaatcaacaaaatataatgtgtcagtgaataacatgatttttctttttaatcaaaaaacatgatctttgtatactaattctgaaacttaattatatatattcgatccaatctagtaaactagtttataggacgggatccaaacgaaatacttatccacgaaagaaacctttatatatctttgtgctcgaaagttttctcattcgttattttggtggctgactactaaatgaagatataccaaatgatttttcttcactcaagcaatttaagcacatagacaaagtaagatcatctggcgataaaccatacattcgtggaggaaatattcctacacatgacgagtctcctgaacatatacaactattcaacaccagattgattatttccacgatcattatttaattttctacccggagttgacttttgtatatttcattccaacttatacatg

SEQ ID NO: 47497 - DNA, 1078 bp, Arabidopsis thaliana
tgtgtttctttgtgctcatcatgcttatcgaaattagggttaaatttgttccttactactttgagttatcatagttggcactgattgatactgtcaattgtgttctcaaattcgaaaaatgttgttgttcacttagttttgtctttggatatgtgaacatgtctgcttgggaactgaatttggtgcgctcactttctataggtacttgagcttgctgggaacgcagcgagagacaacaagaagacccgtatagttccacgacacattcagcttgctgtgaggaatgatgaggagctaagcaagttgcttggagatgtgacaattgctaatggaggagtgatgcctaacatccacaatctccttctccccaagaaggctggttcatctaagcctactgaagaagattaggttcattacgaagatagggaaagctggaaactggttgatatcagataatgcttaggattgttttttttttcatttgcttttcctctgcagcaatggaagctgtgtggttgtactagttgttaaggttacctttgtttcactttatgtgaatatatgaagaaattgttctatttcagtcttgactccacttctttagcattgttcactgattcatttgttgttcctgaaagtcaatttaaattccttcgataagctacacgaaactgcacacatagtcacatgtaacttgtttttaaactttttgttttgttttgtttttggttgaaaactcgagaaaaatagaatcagtagacccataatcacagaaaagtcaagccaccaagcgattcgacatagacagtggagaagtgacgagattgagagaatcgaggcgagagagagagagagacagggacgattcggtttagagctctcgtatgaggtatatttcaatttcgttttcggcgatatcttgtgtcgcaaatgtcaatataacgagatttagtagattgttgatgaaagtcattggctatagactctgttatcctaaagaagattagtccatagactctgttacccctccaggttttacgatgacccccctaccttgatcctgaatgcagtttgatgc

SEQ ID NO: 47498 - DNA, 773 bp, Arabidopsis thaliana columbia
tttccaaaacaagccaaatcaatcttacaaagttcagtaaaataaaaataaaaatctgaagttaaaccttgagaagaactctatcattgttattaatgtatccatgccattcttcatcagaagggtaaccaccaacaaaatcttccgtcggagcctaaattatcaaaactccaatttaatagattttccaaaacccagaatctggtacctcaagctaaagtagtgatctgacctcatcttaagacaaaacgttgaacgaatggcttcagcatcaggtaagacatcagtgatgtgaggtatgctgaatcgttgctcgaaatctttctcatactttaatttccaatctggatcgctgagatcgatcgatgaagctgaggttttgctgtgttgaatctccgaagctcgcaccgagacgcgagatcgtgatgagggattcaccggagatctcgatttcggagattaaggaggtgagtccgtgagaaggaacgagagaagaagaattgttcttgtaaggaacggagatcccggaactgatcgcctgagaaagagcatccatggcgaataagaagattccgatcggagatctttttgcttagttttctcagtcaactaagtttttttttggagggagtttttgccaaatttacaaaacaaaaaaaacacaacgacagtgttagatcacagtactttggccctttagattaacgaagaagtacgaaacaaaatctaacttcattttttgtctgtaatattatcacgcctctaaatatgta

SEQ ID NO: 47499 - DNA, 457 bp, Arabidopsis thaliana
tacaaaaaaataataattgcgatttgggtcacccggaaaatatccagacccgtaatatcacaagcagtcggatctaaagactttcacggagaaaagggtgaccgagaagctgcgacgccgtccacctctcactcgattctttacggagacaacagtcaacaaaactcctaaactcgtcggaacatccttccggcgcacgcggtggttctccaaagcacacgacgcacattaacgtcgcccagtcaggtctctgtccctgaggaagcaacggaaaatgtccgacgaagagctcaagtatcatcactccgaaactccagatatcgcctgcgtaaacatcggagttttctccggcggcagagtcaaatctctccgggctcatgtaagcgcaagtgccgacgtaggaattgcagtaatctaacgatcgggtaatgattttgctcactccaaaatcagcgat

SEQ ID NO: 47500 - DNA, 535 bp, Arabidopsis thaliana columbia
ttctttttggtattttagtctcaaatccgatttcatgttagatttttcctctgtttagatcggcctagatttgtttattggccaatatgagatagatagatttctcaatgctctgtgtttttaacatctcttatcttttgttgtttgtgttgaaatttgctatcctctatggattgttccatgatttttttcttatttaggatgctataattttaaattttttggctgtctcctgctttttttttcgtgataattgttttaaatgtctcgttaaaatccaaacttttgcatgttgatagcttcaatatgagttctgggatcacctttattgagtttcaaatctgtgtaattgcctcagttaaactgattgtcttgtaacaaccaagtaattgtaattacatatgtatggtttatgaatcaagagctaacgcttactttgcttatggttaatgttgctgcaggattgagttttttaatctctgattgacagatttgaagagcgtgacaaaggaagaatcttttattaaaacaaatt

SEQ ID NO: 47501 - DNA, 566 bp, Arabidopsis thaliana
atccacaccatccacatcatgtatttgtttctgattttgtcgatttttcgatatatgttgatgcaccggaagacttacttcagacatggtatatcaaccgttttctgaaattccgcgaaggggcttttaccgacccggattcctattttcataactacgcgaaattaactaaagaagaagcgattaagactgccatgacattgtggaaagagatcaactggctgaacttaaagcaaaatattctacctactcgtgagcgcgccagtttaatcctgacgaaaagtgctaatcatgcggtagaagaggtcagactacgcaaataatttgcaggggagcgaatactcccctttcttatttttctgcactacgcagggatatttcaccgcccatccagggttttattattccatcctgctcaagtaataaagccccctgtttgtctattccgcgtgaaatgccaaatatttctttatcaccaatgataagtttcactgggcgattaataaaattatccagcttttcccagcgcgacagataaggtgccaatccttcttgttcgaagagtt

SEQ ID NO: 47502 - DNA, 433 bp, Arabidopsis thaliana
ttctatactattttcaattagagatagctccaccaagtcaagcataccagtccactgagaaaatataatcgtttttattggtcctccattagaaggagttgacttcagactcgttttctcgacaatggtgacatcatcatcatcatcatcatcatcatcattcggctgctgcgaggaagaagccatttgaccattctgtgttgagtttgaagtgccttggttagaaagcgactgcagaatatctaagacagctttgatctttgatgaactaaactcgccattctgaaaaactgatttatcatgactattatcctctgaggaactacaacccaaatcatcagcaacgcaacttctaagcgtggatttagagataacaacatcatgcgcaagtagttctctgcatctaggcgcagggcacgtgtcctcatcccct

SEQ ID NO: 47503 - DNA, 700 bp, Arabidopsis thaliana
ctaccagatatgatgataatgatagattgtgtggttgaggtgatatggtttatacagataaggcatagagatttgttaggattatttttatttactatattgacataataatattagttgtgttaatgcaaaataggaagcagttgaatgggaacatataagcaaagttgcaggcaaaatgcatgcatgtggtcatgacgcacatgtgactatgcttcttggtgctgcccatattcttaaggctcgtgaacatcttctcaaggtacttcatcaaactctatgctttttatacgagttaagagttttggtgttttggcttaattttggttttatgggtttcttttaatattggttttaggagttttcttttttacacaaagtattgtggcctatataaggtatcttcatcttaataaacaaaaaaactcccaagaattaaccttaacttccaagagagactagggttaagagaaagtttgcttacatatttccttttttccccacgttaatcaacggctacgattacaagatctaagtctaaggctttggctcctatcactgtttttcataacattgttttataactgatttaaaagtggatgagatttctaaactttatttcttggtgggtcactgtttgttgtgctataatgacaactgatgtgaattaatgatttgcttttgaagataagggaaatca

SEQ ID NO: 47504 - DNA, 523 bp, Arabidopsis thaliana columbia
tatagagatgacttgactcgcaaatccgtcgtaacttttttgcgacagaaccaatagaatcgcttcatttttgcgacagaaatgcgaggaccctcgaacagtcctcgcaaaattataattagggtttgtctagattactatgcgagggaattgcgaggaccctcgcaaatgcctcgcaaaattagggttacacaattagggtttcgcggcttattctgcaacagaagtgcgaggaccctcgcaaattcctcgcaaaattagaattagggtttgtctggattacattgcgagggaattgcgaagaccctcgcaaatgcctcgcaaaattggggttacataattagggtttcgcggcttactctgcgagggaattgcgaggaccctcgcaaattcctcgcaaactgttgggttatacaattagggtttcgcggcttattctgcgagggaattgcgaggacctcgcaaattcgtcgcaaaattagggttacacaattagggtttcgcggcttattctacgagggag

SEQ ID NO: 47505 - DNA, 544 bp, Arabidopsis thaliana
cttctacatacaaatttaattctttatatttgtgtagaatcaatgagttgactttgttttttatgcacagagggccgtccgcgccgtccttgtcccgcagcagcttcatcatttacacgtctcatcctttcttcctaacgacaaggttatttctcacaataacggacagtttatcagagatgtccaattactgaaaaaattatagtggtcatttcatcgagtttaatcaatgacctcccattcagggccagcttaacagtttttctcctcacagcttttactctccgcagcctaatggtttcctcctcatcttcatcagactcaggtagcaggcgattatcttcagcgacccactagtcagtaatatcaagtatagaatcatcatcagctaccctctcaccgtcagttttttccttggctacctcaggcttattcttggggacagaaaaagtatcaccgtcagatttttccttggcttcctcagatgattttagcttttttattgtcacctttagaggcacctttgtaggcacctttgtaggtg

SEQ ID NO: 47506 - DNA, 515 bp, Arabidopsis thaliana columbia
tcttcgcttccttgagacgatagtatctctattctggttccaaatatgcaaatttgtagctttcacgaccaataccaaaggtagacaggaagaacatgcttcaccatttcatcgtgagaagcccgaaagagacactggttcaatacggtttacaagtttggttaagaatcggtatggacggttttaacacagaagaagccaatttagaacattgaccaaaaaatatagaacaatgacaccaacagaaccacattaacacatacaaaacgaatcaaacaacatttgatttcgaagaacagcttaagtctcctcaaggagctctctgctcctttttcttcaccgccaagcttcagtacgctctaccctcgatcctacacggctcaagttggtcaaccctttgttctgccactggcactgagctggaggatctagattcagcacacctgttgactcgagtcgctcaatcttcctgttctgtattttcaaagtctgtatctctctgttcacatgcattg

SEQ ID NO: 47507 - DNA, 579 bp, Arabidopsis thaliana
aatgcaacacacacttcctgagccctcccccaaacttaaatcacacagtccactgtgtgaataaacttggaagagagtactcaagacaaattcaatcacagaaacaaaataaagaacaaatcacaagagatgatataatacaatggtgaagtgaggtgcttacctcagtcgaagaatgaacggagttggtcatcaatggctgcatgtgattgctcctaggccatagacaagccgccatgttcagtatcagctccggcaggtgggtactcgacctcatcaggtctgtggcggccagcaccgctctgaggatactcgatctctcttcttctgctgcggccaaccctgcggtcgagtgaaacttggaattcgattatctctccttctgttgctgttgagtatttctttcccgcaaaagtcgagtagatccagtgtggtcgagtattgctcaggtttcagcggttcgcttcttgtggtcgagtatgtcttctgattttaacactggaggtcgagtggaggtcgagtctataggacgaagttgaatgactcttgaaagaatgagactgcgattgagatgggtga

SEQ ID NO: 47508 - DNA, 588 bp, Arabidopsis thaliana columbia
attttcaatttagagctgaaaattattgttagaaataacattattagaaaagtcttcttctttagctcctccatgttaccaggaggaaaatatcagaaatattgctgagtctgaaattaagggcccatgggctgcggacacatatactagacaaatcatgtttcattcaatttaataacgaagtgcccaaattcgttaatattagtgccgagatcttcggctgtctgacaattttcataatgtctacatgcagaatgagctagtgatacaataatattgtgattataagaaatatgtaatgtaatgtagcaaacaaatcgaaacgtttacaaaagcacatataatttttctttttaaaacgcaatactaaccaatattgaccgatgcattgaacaatagtgagaatagttggattatgacttaaatggacgccgcacgattaattagaataatcaacaaattaaattaaaagtaagtactaagtaagattaaatgtacgtgaccacgccgtacaaattgaaaatttatgttaaagagtccccacgtgaatgatctgatcgaaagcactctgacagattggattttttt

SEQ ID NO: 47509 - DNA, 488 bp, Arabidopsis thaliana
gtccttgtctcttcaccgagaaccttggactgtcctagttccattctcgggcagctttggatcgcatggtccttgcttccacaccggccacatacacctatggccttccagcaagttccgctgtggctcttaccacatgtcacacattccctggtcttagcatcggacttggtgttatccaccttgtcaaatttccttttcttatccgcgggtttggtgtgctgattgttccggatcagagctttctcccgattcaagtacctttcttactcgatcccttcctcaatcattgttgccctttcaaccgattcggaaaccaagttgaatgtccggaccaaacaatggttgcggatctctattcttagtccgcggataaatcggcgcaccaaggcttgttcctcctcaagtttgcgtcccacataacgcctaaggcggttaaactcctcatcatattcacgtaccgtgcggttcccttgaactaggtcgag

SEQ ID NO: 47510 - DNA, 519 bp, Arabidopsis thaliana columbia
cttgtctcaaagattaagccatgcaactcttcttgattttatgctaacaactacattgtgcatatcatacacttttgctttccattgcccaaccatttctgtcttctcttgacgcctccatgttaattgcgggaagagaacagcctgagtaacatcgatcccgggtctgaaaatgcttgttttggacattgcagccacttcttgacgaacttcttcttctgatgcggcactccagcaccgtctagagcattcatgatctccttatccttatgtgatatcataagtagagaaccggaaggaactttaccatcctctgacccatctccaagaaaaagtatagtctgatccgatctttgaatcctgaaaccatcaaacccagccagtgtcatatccgctctaagattcgcacccctcttccaaatcttataagtatccgaaggcgccactctagaaatgaaaggtataacagaactctcgaaatggaaagtgatctccatgtagaaatctctcattctatgc

SEQ ID NO: 47511 - DNA, 583 bp, Arabidopsis thaliana
tcacgcgtttcttgttttcttcttttttttgtgtttcaggtgtatgtctaggcaaacaaggagcacacaaaagaaggagttgatcaacttgtctgttctggaattggggaaacttgaacgtagaaaccgaaaaactcatagatttgcaatggctgacagagtcatccaagctgatgcagatggagatttgagagatgaggatgggcaagcctacaatgaggctggttagagattggatgatcatggactcatcctacctgaggacgccaatgaggatcaggcgcgcttcaatgcgcaattagctgccagagacgcagcagggctcggtgtcgagcgacaccaactgggtgtcgatcgacacctttgggagcataatgtagacgcgattggtgtcgagcgacgcaacagaggtgtcgatcgacacaaccccaggttcttgtagctattcctccagctgcggaaccacgtcatactctcgaggatttcacaggcctgacctgttctatgctaatcgatcaacgatcgtacccccacgcttccagaggaacgattatgagatgaagccttctactttgctttagta

SEQ ID NO: 47512 - DNA, 532 bp, Arabidopsis thaliana columbia
  unsure (1)..(532): unsure at all n locations
nnnnnnnnnnnnnnnnnnnnctaaagccatgcacaaatttactaaagccctggcagccattggtctggcagccgttatgtcacaatccgctatggcgagaacctgaagctcggttttctggtgaagcaaccggaagagccgtggttccagaccgaatggaagtttgccgataaagccgggaaggatttagggtttgaggttattaagattgccgtgccggatggcgaaaaaacattgaacgcgatcgacagcctggctgccagtggcgcaaaaggtttcgttatttgtactccggaccccaaactcggctctgccatcgtcgcgaaagccgtggctacgatatgaaagtcattgccgtggatgaccagtttgttaacgccaaaggtaagccaatggataccgttccgctggtgatgatggcggcgactaaaattggcgaacgtcagggccaggaactgtataaagagatgcagaaacgtggctgggatgtcaaagaaagcgcggtgatggcgattacgccaacgaactggat

SEQ ID NO: 47513 - DNA, 478 bp, Arabidopsis thaliana columbia
attgatctcttatttgagaaagtagttcttaggataatttgaaccttatcatattttacaacatgttaccaaaacatttataaagttcttatggccaatgcatagtgcccaaaagcacagtacataatataaacaaatttgttttacaaaaggcacaaatttacactaggtttcctatcgtccaccatgccctctattcccctctatggatttcctgcaaaacaagtagaatcatgagtaatctaagattactaagtgagttcgggattcctgcaatagatattagtttcctcgtcccgtaattctaacacaaagcacgcatcacataatagcaacgaaagatagttcgccgaagcaactacaaaatcatgcaaatgcacttatgactccaatcttaataagttttatagggcctgatatgttgccttcaaacacccacaccaaaaacacacctaaaaaatcatgcaaatgcacttat

SEQ ID NO: 47514 - DNA, 602 bp, Arabidopsis thaliana columbia
cctctcttctacatgaccgtcgtcggcttcatcaccaagtttctctctaccgctttcgctgctctattcttcaaagtccccgctaggaacagtattacacttggtttgatgatgaacttaagaggtcagatggatttgttggtatacttgcattggatcgataaacgtattgtgggctttcccggttacactgtcatggttttgcatacggttgtggtcacagctgtaacgaccccactcatcaactttttctacgatcccactcgaccttaccgaagcagcaagcaccgcaccatccaacacactcctcagaacaccgagatgggactggttcttgcagtttccgaccacgaaaccttgtcgggtttgataacttttctcgatttcgcctatcccactaaaagtagtcccttatctatattcgcagtccagctagtggaactagcaggaagagccacgctgttgtttattgccacgaacaacgaaaggaggaggaagaagaagaatacgaggaggaagaggaagagcctgaacgtaagcaaagtggacggatagatcaggtgcaaagcgcctttaagttgtacgaagagacaagaaatgag

SEQ ID NO: 47515 - DNA, 588 bp, Arabidopsis thaliana columbia
tgttcctaaaaaaaaatgtgttcctcatatactcgttagaaagagctattaagatgcccccataacaatataacgtaggctcatattaattaaaggaaaaacccgcaaaaaaacttaactaatttttatttggacgttaatattcaattattttttgtttggaagaaaaatacacgaaataataaaactttgcaatttaatattcaaaatcttaaatgttgttattttcacactcacatctgacaacaaaaagaaaattccaaatttacccttaccttctcaattgactattaattattagatgatatgacattaattttataattttggataaaaattaattctattaatattttattttatggtgtttaaaaataaaatattttattttattaataacctatgatacaacgtgggttttaacctaatatttataaaaatagaaaaaaatagaaaaagccagctttcaaattgtagacgttttaatagcatacttgtaataagttaaccatttaatcatgaagttagcgaattgttaggcatttaatgatatttttaacagttgaagatttaaacgtccttaattta

SEQ ID NO: 47516 - DNA, 463 bp, Arabidopsis thaliana columbia
taacttgatcttcttcctagggtaacgggtctgtacacatgaaacagacgacctctaggttcattaagcccggcaaccattgtagattcttatactaaggaaatcacacatatagcttccccaacattttattggtactaatgaaacaaaaatgagctaatttacccaaaagaagaatctattaaagtaaatgaactgagtatgctcattctgtggtgtgtcaacaaagtattaaatgctcagagactcagaaacggaatgctaaacaattgacgtaattaatttcggtgcagacttcccttaagaaagatcatggagctttgataaatcctttaaactacaaccctcaaactaaaggattactttccttcttgtcagggtataaactcagcggcttcaaccaattcgttcacaaagtttgtactttgaacacagttaagattaaagctttcagtaaaacaga

SEQ ID NO: 47517 - DNA, 500 bp, Arabidopsis thaliana
ggaaatgggaaaagtcataatgttcaaagtgtgctggagactcaacatacgttgggaatgattgagaccttgttgactcaaatgattcaacaacagcaacaccaacaatagatgcaggaaagccagcgtgctgaatctccttcggctaagttcttaaaagttggttatgatgaagaaggatctgaagtttaaaggagagcaaaatattgttttagcggataagtggttaaggaacctggaaatgaattttgaaacttcaaggtgcccggaagactttaagggccacatagtggtacactttttagatgagtatggtcgagtttggtgggatagtgttgtttcacgatatcacgaccagcctatcacatgggaaatgtttaagcaagagtttgagtctaagtattttccacagagagtgttcgggcgtatgagcaaatttttacaagacttcagagatatatgtacaatggaaggaatgatgaagcaatgatggtacgaag

SEQ ID NO: 47518 - DNA, 482 bp, Arabidopsis thaliana columbia
cactcgggcttccttaacactccctattagaaaccaaagcaaagattctcaatacttgtaactcagcaagacattgttttgtcgattaatgaagcagtttaccatttttagaaggtaatgggtggattttgtcacactgtcttacaacaacagccatgtggctgagtcctttctggaattcgttcaatatgtcatataaaggcaagatttctggaactctaaaacaaagcaagaaatcagcttttgaagcacattcagtggggcttagttacttagatttggaagtttcaccttggaatccttcttatcgtgacattcttgacaggtatttcttcatctgggttgatagttaataagttcttcacctgaagataatagatatgaatggttagaagtggaaccataacactaaagaggatcatatttgtgaaaaatgacttcacagagaagcgagtcaaattgtggaagtaatgcatgagact

SEQ ID NO: 47519 - DNA, 445 bp, Arabidopsis thaliana columbia
tattgggccaattaagcaattgtccctttaggcccattggtaagaaaaggaaaaaaccatacttaatgataaattaaaaccggtatggctgtaccggttcaatctgtcttcaaccaccgacgttgacttgttaccaatcttcttcttctgctcgagtccagtccagtgaaagtgattatgtttatggttaataatgttaactctataatttagtgggaaaaatgttatttaatacctcaacttacaaaaaatggtcaaattaaccgtgaactcgtgaaatggccgttttaactttcaacaaaaagttgacttctgttttaacattcaagtttgcgttgactcggcctaattaaccaccgttaaaattccttctaacagcgtaattgacagacgttacagaacatccgttaaggtgatacgacgacgttttgtgctatcaacagac

SEQ ID NO: 47520 - DNA, 541 bp, Arabidopsis thaliana columbia
gtctagaacttcaacagctttctctagccccattaccccagcccgtcccataaacgagttcctctgcataaactgtagaaaaaaacaagaaccaaattctcatcaatacaaagatgaaatctttagctagagaagttgcatatcctaaagaagcctttgaaaacaaaaaccttggtggaatcgttccttaatggaggcatcggaccaagctcgccagaaaagttgaaaacaacctcatcaggcttagaacttttccgtcttgagcctccgtaattatctgaataataagaatcagaggttttacttcttctcatagacttaagtttcccagaaaaccctcttgacttatcatcatcgtttgatctcaacttcttcttcttatcatcatctttgaatacacaagaacaaacacctcccatttgtcttctccaacaagttatctctctggtaaagctctaatcttcagaggaaaacagcagaagagagccaaatgaccaaaagatcaaaacctgagagaaaacaagaattgcactatggtggg

SEQ ID NO: 47521 - DNA, 513 bp, Arabidopsis thaliana columbia
ttctcattcttgtctctcgagaggatttttacttatcaatgtgtttatgagatttgaatgtgtttgtttgtttggtgatgagagaaaatggtgagaaaggctttggcttctttataggaaaagtcccatccccttgaattcttggtttttaattattgaggacccactcttttcagatgctatttaggctctgttcgtttcatcattcagatggatcatctggatggtgatgagtcttcatgttcgtttagtgcaaaaaacggttcattcagatgatccatccaaatgaatcatttggatgagtttgaaaatttaggctaaattttgaaactcatttggctgaatttaattggatcatttggatggagatggttcagtcagaattaacaaatgacaaaaatatcctaattattttaattgattatttagatgtatttttagataaaaacaaatagacttaaatcttattttccaattatttttttaaaaaataaaaattaaattttccgctaa

SEQ ID NO: 47522 - DNA, 420 bp, Arabidopsis thaliana columbia
  unsure (1)..(420): unsure at all n locations
tnnnnnnnnnnnnnnnnnnnnnnnntaaagcctatgctatccttttttagattgctttcaacaagagcgatacgtttaattaaatttggttcgattctgaacattgttcctgcttcattagagcaagagttgctggcgaaagacatttttgtaataaatatacaaaacgtgaagatggttaagaatttaacttttggtgagcgcatattttttcatgtgtgaggattgaatgaaaggaacgagatactattataaaagtatctcgttatgatttatttggtcaatcgtctaccactcaattttatagtaaggtgagataggattatcttctgaatacatatcattttgaaaaggcgccatccatgttgaaactataaatgcttgaatttgatctgtatcagtagcactggtgttgatgtg

SEQ ID NO: 47523 - DNA, 581 bp, Arabidopsis thaliana columbia
caggactgattggatcagaggagacagatgaattctcttcactaattgaaactatgcttttgtcgtcttcatcgggaagcaaatttgagccagcactgctaactgaatcgttttcaattttggttgaacatctgacaggactggttgggtctaaggagacgaatgaactctcctcacttggtgaacttccacttactatactctcttcatctgcagaatggaattccataatgttttcctcagtttcttgaggatgaatgttctccttgttcacagtcacatgacaatcaacattgagctgctcagacgaatcttcaagcaaactttgtgtcactggagatgagtttgctttccgttccccaattcctaacttatgatgtgatagatcaatcactgctcggaaaagttttgtcacattcaaccacctctttttcttctgtgtaggaggagtctgtttctccaaacaaattttattttcttcttcctcggctttgtgtagactctccatttctcgcccaatagctttcaggagcgataatcaaaggagatctaggtgaagtggagcacttttagtcttgcag

SEQ ID NO: 47524 - DNA, 914 bp, Arabidopsis thaliana
agtcgactctaccccgtacgtttgtcgcttatcgattatctttcttttaagagcttaactttgattcttttttatatccagcatcttgcagcatgtagaggctatgaagacattacattattccttattcaggaaggtgttgatgtcaatctaaaaggtaaaatatgaatcgttctaatggaaaacattacattgttttatgtttacgcttttgatcacaaattttcgcagataagttcggacacacaccattgtttgaggctgtgaaagcaggacaagaaggagtgattggtttgcttgtcaaagaaggagcctcctttaatttagaagattcaggaaacttcctttgcacgacagttgctaaaggcgactctgattttctcaagagattgctttcaagcggtatgaacccaaacagtgaagattatgatcacagaacgccgcttcatgtcgcggcttctgaagggttattcttgatggctaaaatgttggttgaagctggagcaagcgttatttctaaagaccggtaaaaatcatgcaaaatgaatcatttaattctttaaaactatagtttatagacttcataacttctctctttgaagatgggggaattctccgcttgatgaagcccgattgtgcggaaacaagaaactgattaagttactcgaaaatgtgaaaaatgctcagtcgtctatctacccgtcaagcttgcgtgaattacaaggtactcgtatacttccttcagacgatacaactcaaaaatggatcttgtaattctggaatttgatttatgttttgaaaaacagaggagagaattgagagacggaaatgcacggtgtttccattccacccgcaagaggcgaaagaagagcgtagtagaaagcacggagttgtggtttggatcccaagcaatc

SEQ ID NO: 47525 - DNA, 972 bp, Arabidopsis thaliana columbia
acaactcaacctcttcctctggttcggcttccaccaaacagttgagaagctggagggtactcaagattgttttataaaatagaggcatgtcagtcaaggcttgcaagaagagttccccaacttgtcccactgtaacctgaatcacacttaacacatcacaaaacaccaaaacaacctcacccgcatcctcaccagtacaagcattcaacttttgcagaatccaagtcttcctcgagtctagaaacaactcaagcacttgctctggatcaagctcatcaaccaccgcgacagcagttaaggcatccacataagctcccagtcctaaacccggatctagaagccgctcatggctcctctgcgaaatctgagccttaaaactctcaactatctgccattggtgctccaatagtggaaaattcgccaacagcttactctgatccacctctgctacaccaccaccacatccctccaacttgatcagtctctgctgcacatgctgagcacgcatgtacctccccgcagcctctagaaacatagactcgtcaaggcatccccatatattctcaggcgtatccaacagatacttaacacgacaagcgatcccatagacattgactcgtactgggttaaggctagcaagcttaggagtttccgctacagaagaagaagaaagcgatcgaatgttaccgtggatcgaagagatattggctgagatcgactcacagagcgacttcatgtgaacaatcgagtcagctgagtcgattagatcacggtacctagtcccaacgagttgccgaagctcctctttcttatcctcgatgttcttcctagtcgccgactccacaattcgaatctccgacattggtttcgtgcgaaaaagagactcagcatctcgttgaccacctccgttactgctgagacttacggcggaaggcgggtattcccggcggaacgtgatgacattctcatggt

SEQ ID NO: 47526 - DNA, 539 bp, Arabidopsis thaliana
ctaaagtgatggagtaccgactgccgcgcttgctgctggcactgtttgtcggtgcagccctcgccgtggcgggcgtgctgatacaggggattgtgcgcaaccctctggcatcaccggatattctcggtgttaaccatgccgccagcctggcctctgtgggggctctacttcttatgccgtcactgcccgtgatggtgctgccgctgctggcctttgcgggcggcatggcggggttgatattgctgaagatgctggcaaagacccaccagccgatgaagctggcgctcaccggcgtggcgctttctgcatgctgggccagcctgacggattatctgatgctctcgcgcccgcaggatgtgaacaacgccctgctgtggctgaccggcagcttatggggccgtgactggagctttgtgaagattgccatcccgctgatgattttatttctgccgctgagcctgagtttttgccgcgatctcgacctccttgcactcggcgatgcgcgcgccaccacgctcggtgtgtcggtgcccataccg

SEQ ID NO: 47527 - DNA, 501 bp, Arabidopsis thaliana columbia
cacccgccgaattcgaggacgaattcagtttaaggggggtagacttgtaacgagaaagaggccggtttattttaggagaaaactagatcatggtcgaggaacggacaaaaatacttagtcgaaagaacgagaaagttcaagctgaactagctaggtgagctggacaagctggatgaactagctagctaagctaagtgagctaaaccagctgaaagactagctagctcagctaggtgagctgaccgacagctcgactgagctcagtgagctgatcgagtactgacccagctgggtggtccggtcagctgacactcgagctggtggactatggtagctcacggatgaagagttgtctcggccaaaagatgtaaagtctagcgggtaccaatgaacggttgcatcgccaaaggatgcaaggaacggatatgacctttcggaaggatgcaaggaacggatgtgacctttaggaagggtgcaaggaatggatgtgatgcttcggga

SEQ ID NO: 47528 - DNA, 859 bp, Arabidopsis thaliana
tgtcaattactgtttttttttaaacattctcaattttcttgagttggtgacgttttcgagatttagttgattagtgcaagacgacaagtgatgaaaagacagacaaaggcttcaagtttgttgataactgctgtctaaggagtttcccttgagacattctgactctgacgtaagaggtaaaaagttaaaaataatactcgacacttacttggaatttaaaactgagttggttttgaagaaatttttttctaattcttttgcagaagaagaaaagactctttattagtctctgtctctatggacacagatctgatcagcaatctccccgatgatgttcttggcaaaatcctgtctttagttccgacaaagcttgctgctgcaacgtcggttctgtccaagaggtggaggaatctgcttccgcttgtagatagccttgattttgacgaaacgatgcttttctatcccgacaacaaagacggagaggacgaagcatctagttacgagagtggtcaacgtcgacgtcatagcttctctcatttcgtggacaaaacgcttgctctgttaagcaatgctcctcttaccgagaaattctctcttaaatgctatcacgaagatgatggagctcgtatcaaccgttggattccaccgcgctagaacgtggctgcttggagctaaacttagaggcagccaattatctacctatagattctcagtatttcactagcaacacactggttaaactcaccatttccgatggattttatcctggaggccatcttcttccttttgggggtgtgtttttccctgcgctcaaaacacttactctcgtttcagtttgttttacaagtgttgagatgat

SEQ ID NO: 47529 - DNA, 622 bp, Arabidopsis thaliana columbia
tggataaggtaaatcctctctctttctctttttcgggacaaattctactcgtttttaaccagttcgtattctaggtcgtcgacaagtatcgccgcttatgcgatgaaaggcaacgtttgggcctcaagaggcaaacgctcgagacccgaattgcccgtatcgagaggaaggtaagggctatggagaacgaccattttcaatgggagtggaggaacttcgactgtgtggcgaagatccagcatatgctccggatgtaccttcgtgctcgaggccaagtccctggtactgtaaaagctccggtcaaagtgatcccgtctaacagtgaagacggggacgacgaagaggaggacagcaacccttggaagcgcgtgaagaatgaacccgacgtggacgttaaaaatgaggtgtccatttcgaaccccgaaccggcgatgaaggaccctgttcccgagccccttccctaaatgttctctgagactcaaaactcttttttattattttcgcatggacttacctattgggcttcggccattttatttaaggaaacttccaactttccttgattcatcaaatattcgttttggagatctctttgaatgcagggcgacaaggcgacgtgaat

SEQ ID NO: 47530 - DNA, 956 bp, Arabidopsis thaliana
ctgatcctttcttccgacacatcatgctgcaaccacatcggttctgtcgaagaggtggaggaatctgcttccgcttgtggacaagcttgaattgactgaagatcatccaagtggtcgctgttctttaggcttccctgatttcgtggaaaaaacacttgctctcttagacaggccttgttcagtcatcaagaaagtccatctgaattgtgatcatctgcatggagaatctaggttttacagttggattcgcacagttctggagcgaggcgtgttggattttcacttggagtcctcgcgtatgtatcgtgtagaaactgagttcttcactagcaacacactggttgagctcacaatatccggtgcgctttatcccgagggtgaacttcctcctgggggtttgtttttcccagcgctcaaaagactctctatagtcttagttgcgtttgcagattgtgacatgtacgatgattttgtccttggctgccctgttcttgaggagttaatcctctattatgctgatgatgaccaacccccgggttggaatgggaaagtctctagcccttccatcaagcgactcaccatcagtcacgattaccccgattaccctgaaacgcacatatatgtttggtttgatacacccagtcttgtgtaccttgactattctggtcatgtcgcgcgtaggtataccgctgaaatgggttcccttgaagaagctagactcaatcttctaccatgggagcaacttattgactcagacgaagaggatgatgattttgatggttatggtcctcgctgggaaaaaagatcgaaagatgctacgggtctaattgcaatgataagcaatgttaagacccttcacttgtcttcagattctcttgaggtcagttttttttttttgtttttgtgttaattgtttccgatttgaagctgctaacaagagttgtttttggttgtga

SEQ ID NO: 47531 - DNA, 527 bp, Arabidopsis thaliana columbia
gtcgaacccacggcaaatggatcataaagtcttaaaaaaagaatagatacgattgcattgcatgtagtaacagatgcgatcataccagcactaatgcaccggatcccatcagaactccgcagttaagtgtgcttgggcgagagtagtactaagatgggtgacctcgaagaatgtcctcgtgttgcatccctcttttttttcggtttttctctttttatgttttgttaaaaatgtatgactttataacttttagaccgtgaggccaaacttggcatgccataccttttcggaaagcccaaagagagctctccaattaatgaggaaggaaaatggaattcttctattgttaggtgattctactctaaattttgaccttaatgtactttttcgtgcctattcgtgatctttgctatagtacggggtgaagattatatgttcggacattgttttcgaatattctgcatgtagcaaagctctaataaacaagatagggtatcctacatagctagtgggaccacgacaaatgg

SEQ ID NO: 47532 - DNA, 547 bp, Arabidopsis thaliana
ctatcatcatcatccctatcatcacgtgatccaatctcatgatcttgagtatcatcaaccaccactattgccccatttagttctgttccttgtccgtccaattcgcctatcacaatggttgcattatctctcatttcatcctcatttgaacccaaaccatcatagttcttaccaatagaacttttattgacgacctccactctcgacaattcctcgggcaattccggtggagtgatgacgtcaacagtcaaaggatatctactaaccatttcacccgaagatatatagacaccgacatcctcatcatcactaatgtgtatctcctgagtgagtcccaacatcactgcattgtactgcatttgcaacttaaccttactttcatctaatccaagcttcgagcaaatcctactctctaacatggagagagttattttccattcatcatcaagctgtacgctcgatcttgccatctaaaatatatgatcatcttctccaccactgtatcctacaacaacaatacaatgactctgtcagatatactagttat

SEQ ID NO: 47533 - DNA, 479 bp, Arabidopsis thaliana
gggagatcctaggatgcatcaccctacctttctcagtaggaccattatctttcaataaatacctatgtgatttgggtgcctcaattagtcttatgcccctatctgtaactagaagactgggtttcagtaaatacaagcccagcagcatccaactgatattaaatgatagatcagtcagaatttcccatgaagtcctggaagacctacatgtcaaagtcggatcaattgaaatcccacagatctcgtaatactggagatggatgaggagacaaaagactcattaatcctaggaagaccgttcctagcgacggcagggacaattatcgatgtcaagaagagaaagatcgacctaaacttagggaagtatcccaatctacgtagatgaagatgacattcgacataaacaaaggtatatatgaagaaaccaacaattaatggacaagtcttttggatcgaagagatgatatattggctgacga

SEQ ID NO: 47534 - DNA, 1549 bp, Arabidopsis thaliana
  unsure (1)..(1549): unsure at all n locations
aacttaaaacaagacgtgcctatgcaattcaaatcttgcccttctactctcgttttccctaatgccttatattgcttacccgcctccacgtcgtacaaataccctgcgacccgaacgtttagcaagtaagacccgatcgggctcgcgactgacccgaagttatacaatgtcgagtagtacttaagcccgaaaatctcagatattatagcaaatagaagaggccattgcgcaccaaaacaaaaccctatgatgaccgatgcgacataaagtccaccggggacattaaaggcgatgaggaggtgacccgcgcaggacaagaggaggaccatcgtgagcattaaaggccttggaaatttgtatttgatcaagaagatctcagagaccacacctgaaaccacacgaccatagtaattccatatgcttacgagtgacacaaacgtgcttacgcttctcttcgggtaacccaacgagtttccgatttgacccaaattgtctatcgccgtcaaagtccctcctacgccacatatcgttgctaagaacaaaatcaacatgtctacgctaaacaacgcttgcaagattgtatagtcatctcctctctccggtggattaaacacagtcgtccaacacgacggtgttttcaccttctccactacctcctttgactcttcaccatcatcatctttgaactctgatgaatctaacttgggtttctcagttacgacattgatgggtgctggatcgtttaaggcgacttgtttctccttccaaagcttcttctcttccaagatgacgactataatgggcaaaagaagtaagacgatcactaccgcggcgctacctccaaactcgctttgtgtaaagcccgagagtttgttgatgatgatgaccaccatgagaaacgtcgcaagcccgagcgatatgtagaggaagttatagaacacctttagttcgtttgtctgtcttttcactttcattattcttatcgttctcaaaaacgcaaacgagactatagccggcaaccaacctacaaatacaatcactcatacaattagtatgtgtttctatccaagatttactctgttttgctctgtttttgctctgttttactctgttcatgccattaaccatatagtctcatgaataattttagaaattgtgcttaccaatcatcaagatgagctcttttgtgtcttcaccataaaaggcacggtagagctgtgtaataatggcgccactaagaccaacgtagcctttgagaatccccaagacaaccccacgtgactccgggaagttcttaacgcacgtgacgagagatccggtattagcgaacgactgcgagttggctccaacgcagatatagagacacatgtgccaaacttgaggtttcgagatccgttccgtgacggcgagccaaatcatgaagtatcaaagaagttaaggatggctccgatcaagaggatgaccaaggaggagttcctcattgagtagcccgcgagacntcaacgttggctccgagatctttgaagaacttaggagattagagtggttt

SEQ ID NO: 47535 - DNA, 229 bp, Arabidopsis thaliana
caaagcttacatactttccccaccaccatacatctacatctctccaccaccaccatactactatcctactccaaagtttgaatacaagtctccaccaccactgtaatgcccccgaatcgctctatggtcggacaagccaagggcaacacggaaacgctacattgatagctcacacagacaacccaacttagttgtcaaatggatctagacccttagccggatcacccac

SEQ ID NO: 47536 - DNA, 922 bp, Arabidopsis thaliana
ggcaaaattaaacccacatcaatactacaacgtcaaggaccaaacgaattgtcgtagcttttatcacgggactgaacggttccatgtaattgatgccttgttgttgggagtaacctttcgctactaaccgtggtttgcatatgctaagagaaccactaggtaagaatttatttttaaacaaccatttacagcccacaagatcgaatgtttggttccgagcaaacgcatcaattttggatgacattgctactctccaatttgggtctttcattgcctgattcacggttacctgtttgggaggaattggatgggatagggaaacaaagagattgagtctgaattgaggttttctcatgttatttttcttgcaagttttcattgggtgttgactgaaagttttgacagtggaggggattgaagccaacgtagggttaacggacctatgttgtcgttgggcttgagatgaggggagtttatggctcttattaatagcacaatcagtacaaaaaagttgttaggaatctaattgcaaatgtggaagagaaaaggaagaaacaattgttttgaaaatatgagaggctggatggcctaagcgagaattccattcaactagggatggtttcgatgatgaggatgcaaagaacgaattgattgtggaaggggaagctggcactcgtagagatcactattatttttgccttggagtaatggggcccgcgagttcagatccttcacctcaaagtgagtagggaaaaatccaacagagaccttattagtgttgcatagacgatatattgatataaggtttttgtgaatgttagggacacaaagaacattggatagggataagctatttagaggagggtagagatagtgaccaagtgtgtgtgataagagatctgacccataccaataagaaaag

SEQ ID NO: 47537 - DNA, 446 bp, Arabidopsis thaliana
gggtacgagctctgatgttcagttctatagtctgttgacttgtgaagattacgatctgtgtttgcatgaagagaaaatgggaagaccggtccctcttggtgaggtgttcatccagacacacactaagtcggatggaacttatgttgatcagaaggcggagaagattgctctaacttatgagcaaaatgtgagagagaagctgtctggactagaggcggctgctttcgctgtgtctgatggctcttcacgtcctagggatctcatactagatgagtatacatccatcttcctcgaggtaagatgttgcagtctaattcagagtcttagagtccaatgatgcattttgtcactaattatcttcctttctatgtcttgcagtccacataacgggattcaagaggcaattcttatggacttggatgtcttaaagacactctaggcagtgc

SEQ ID NO: 47538 - DNA, 505 bp, Arabidopsis thaliana columbia
gcttgttttttcttggtgctacgagattctgttcttgacgggtgttgctatctcgaactcaaaatgttagctgttgacaagttgtgagctaggaaagctgctaggagacttgttgaagaactccaagctgttgacgagctgttaggcgggcaatagcaagctaggaaggctgccgacgagctgttagctgggcgaactacgagtcagagcaactgcagacgaactgtgagctagaaaggctgcagacgagctgttagctaggcgaagtgcagacgagctgcaagctagacgaagttcgagctaggtaagctacagacgaactgggagctaggaaggctgcagacgagctctcagctaggcgaagtgccgacgagctgctagctagacgaacttcgagctaggaaagctacagaggaactgaggtggttggctcgagtcaaagctgggttcagtatactttgttccgagctgatcgtctcggtaccaggtgatttctaagcacaga

SEQ ID NO: 47539 - DNA, 587 bp, Arabidopsis thaliana
tacaaattgcgttaaccggaaaaatgttggaccaaaatgtaaaatattaaaaatgtatggttcagtagcctgggaacatcggtggtggtggcgatgcatattggtgtccaatgtttggtgggaggatgaaattatcgccgtcgtcgttgtcttccgatggtggtgcagttacatctggtgatggatttgaagatggcggtgatgacgaaggggtggcttctgattgttttggtgcttcaacttctggttcgcttgatggtactggtgcttcaacttctggctcggaatctggtgatggagctggacttgatttgaacactggtgaatgatttgaatctgatggtgcttcgatgtcctcagagtctggggtcggagcttgaaccggtgttgagatttctcctgattctgatgatgaaggtgttggagcgtttgccattggcgatgttgctggtggtagaggcgttacaggtttcggtggcggtgagaaaactggaggaggaggagagtagataggtgacggaggtggtggagagtggactggtggtggtggataatgactggaggcggcggggagtgactggaggagc

SEQ ID NO: 47540 - DNA, 465 bp, Arabidopsis thaliana columbia
gggaatagttagtcttggaacaaactccaagataactcggaaaaggagaaatcataaatgaaagtttgaacacaaaatagactcttggccttccaaatttttgctcctcttattgggcttgggccggattgataatgggggttttgaaagtgttatttaggcctcgttaaaaacctactaaggaaaacccaatgggacaaaactttagcaggcaaaaagagcacccaaagcaacacttagcccattaccaatcgtcttggaaagatatcgcaaccatcgtggttattgtccaagtgtttgggtagtccgaaatagcttggttgagaagtttggtcttcgagcgagtcatttgtcttcttggttcagctaaagcttcctccaaagcttcctccgctacacgctgctcctcggctacaagtagttcctcgactacaagctagttcgctggttctagttccgggtggt

SEQ ID NO: 47541 - DNA, 592 bp, Arabidopsis thaliana
cgatttacgtgaccttaaggtctatatttatagaactggtgatctctaaggaaaaagaatttatctacaagtaaatacaataaaaggtaaatatacaaatcctaaatatttgttacttgagtatcaagtctatccttaatttgtttttcacgattatcaaattataacttaaaaatattagggttccgttttattacctcagcattgagatatagatctttcttgtcaacatgagataaccaagacgggctattgggaaccaccgagttaagttcggtgttgtctctcggcgaaatggagataaaaagagccaaagctacctttgccttagaaatgaggtcttgaagctgtggctcgacccgacgtttataggcaccgtcaccaatttcgtcgatacatgtgatgtagctagtaagaacgccactgagccaagtgtggatgttttcgtaagatccaagataagggaattctcctctaagagttctccactgaacggatcatcctatcttttgccgactccatcatctcctcaaatagatttgtgtcctccttcaaacatagcttatcattctccatctcctcatgttgtttt

SEQ ID NO: 47542 - DNA, 1102 bp, Arabidopsis thaliana columbia
acctgaacccacatgcgtcacgctcaaagaaaatacagctctaaggatccagatcattacttaataagtgttatgttcatatttagaggacatgaaacaaaacacagagaaactagttttcatggagctttgtctgagatgattcctaaatttttagaacccctgagtcctacactcaaactctcccttactcttcttttctcaacaccatattttaagttttccctcattgaccttatcactattttatcgtaagtcttcccactgtatttccccaccacttcccactgtattcccccaccactgaggtaaactttatgctttcccgcctcttaaagtaccagtaatttggttgttctactttatttgttagtcctacttttgttcgtactggagtataacagtgcccaaatgaactcaggtactcccaaaaagctcttttgatgaactgaaatggcttcttatttcaccaattaaaacacacctctccaaatacagaaaatttatcctgaattgcagtttgcagtttgtcttctgcttcatcttcagaaatttctagcaagaaataaaatcatggtctcaagattaacagaaattcaggaacagttaaggttaatagtcatgctttttacaacttaggagccattatgcagaagatttattgcgaatagtacctgcaactgcaccaatagtcgttcccacatttggcaaactaagttcggttcgcactccttccccaccgacagaaggtccccatgaaaaagggccagcagttaaatcgataaatgcccacctgagaggaattgctcacaaaatcatgaaacatacagcttcgtcaatttattggcatgcataagatgtgctctaagccagaatgacaaggttaaatatatgtacacacatgaattgagagcttcagaatagcaacctgccctttccgatccagatatcagtcagacattctgcgttaagattgctaaagtctccagctcttaaatccttctctaggaacaccttcatatcttcatttttcctctaagcaacttgaaatttccattgagaaagatccaaagttacgcacatgcaggaacatccatttaga

SEQ ID NO: 47543 - DNA, 684 bp, Arabidopsis thaliana columbia
tctcctaatagtagtaatcgtcaaccatcagattttatatttgttgtcatcaacaacttaaaccatcaggaaaaaataattgtaatttttactgagagtttttttttttggcgaagtttttaccaagtagcttttgagccaaatgcaaaaacaaatagattgtttgatcttgtaatagagttcaccaaataatgagacgataaatctgacaccaataccaaaatgtaaactcgttgtttgttgctaagtagattactcgtgtgagtgtataactcatggacctaaaacttgaagctcaatagaggctcaagcccaaaaagatggttgttaaaaatctcaggattgttggtggcttggtgtgcttttggttcatccaacttgggtttaacattgtatttagtcgccgtttaatatctaacggtttcaactttatgcactaaatgattctccattaaccaaattattccaaaaatacattatttatcatcataaaatggtaccatcgaacaacaattcttcattttttctttttctcccgctttatactctcttctccacctctctaactgcccctttcctcaaaaccctaagcaagcttctctcactcagcaatggcacccattgatccacactctttcaccgattcctctcatcctctcaccacgcatgtcgctctctccctct

SEQ ID NO: 47544 - DNA, 486 bp, Arabidopsis thaliana columbia
tgtagcagaggatatcgattagaaatttgcaacaaaatacaattattggaagtatcggttggaatatcatatgttttcttgtagtgagagaatgttttattttgaattcatgtatgacagtttgacatctacatcatcatattttcctttgatgtgatggactcgctgaaggacttactgaaggtttcgctgaaggactctccgaaggatttgctgaagtacttttcatacaagattattcggtgccaaataaggaaagagacattacccttattaatgatgtgtctaagggaatcaagaagatactccaaaccgtccataaagttacccacccgagttatgctacacctcacctcacccaagacccgttgactcacttcttttttcttttggactcgcaggaaagcacacctcaacggctcttttcttttctacatgtatgcatgtttaagagctccaagtgatgctaaagcttccaagaaaccg

SEQ ID NO: 47545 - DNA, 628 bp, Arabidopsis thaliana columbia
cactacaaattttattttacgaaaatgttacatcaaaaataatttatataaggcggtaatcacatattttcagtatatatagttttttcactgtagtttggttttctagaataagtagttacacaaagaatttatgataaacgactgtgaatgtgtgcttgtcctaagttagtagttaccgaaaaaaatagaaacaatatctcaaaataatatcggagtctcacttgtaagttgtgaaggccaccacaacatatatttgttgcatttctgtctaaatctttgaacagaaatgaagtaaaggaaacaagaaatcgcattatttctaatcttatacttttggataaaacctttgctattttagtccttgccaacaacaatacatgtatacaagagagagtattgcgaccaaggaccgtggctctgccacgtaatcttagaccggcccctaccggcttaggcagcgaccgaatgggggcattatagacttttcaataggtcggacttttcagctagttgtgcacctcgtcactccgactacgacacgtgtcgaagaaacccattaagtgtacgacacgtgtgttgagagagtgtgaggggacacgtgagaccttgtgtggagttacttgtc

SEQ ID NO: 47546 - DNA, 638 bp, Arabidopsis thaliana columbia
cctccacttccaaaggggaccaactggcctctccctgtacctagcttcaacatgtcaggcttctgactcgtattgaggatcttcttcagggattatatcatcaagcaccatatcatcgggtctcagatccttctcagagccctcttcatcttcgattggcgatctctacaaaattagacatctcatcatacatacatgcaatttcatatggtttctaaaaggaagcaaacactggaaaggaaacagatattctgtaaactgaaatgtaatattagatgcaagactcacatgttcatcctgctcaacgtcattccgaacatattcttctgcgtcttcatcatccgaagatccgaaaacattacgaatatttacgtctgactgtgcaacttgaacctcttccttctcctcactaggtgatctacccaccacgccatatttccatgtacaaaagacaaagtgatccataagaaatttgaaaatccaaggaacctcagaggactagcaagtattattaaatccagagcacagaaaagatcaaaaagaagctatgaaacagctaggaaaaaaaagaatggaaaaaggggtacttggactcctagtctgatcaacctcttcatcttcagactcataatgctttt

SEQ ID NO: 47547 - DNA, 563 bp, Arabidopsis thaliana columbia
ttctggtaaatctctgaacctatggaaaggttcatgattaattcctagagagagggtatcctatatcctatatatttgatatcttccgggtttttaaatagatcttaagtagcatgtctatacttatagtcaaaaaaataaaagtaagcaattctacatatggagagaatcgatccctgacttaaacaaacaggaccacttccaccagactagaaccactagcccaccacctttcgttgggtcgtcagactttgagtgcttaggctatcgatgaccgtcccaaaaaaaatatggtaaatataaaagatctacagagctagatatccgcattttttaggatttcgaatgaagacgatgcagtcattctcatatagattctcttagaaaaattacacttttatagttttttgtttcttttgtcttggacttttcactacttattttttacttttgtatgttttttgaaaggtcggactcttcaatcattctctaaattattccgagttgaagaaaaagttaagcatcaaaatatacaagtaataattctaaacttttttatattt

SEQ ID NO: 47548 - DNA, 2537 bp, Arabidopsis thaliana
tcaactcccaagaagtacttcatctttccaagatcagtcatagcaaattcctccatcatagaatttttaaacccttcaatcatctccatcgagcttcctgtgtaaataagatcatccacatacacacttaccaccaagaagtcacttctctctttcttcacgaacagtgtatgttcacagtagcacttttcgaacccttctttaccaaagaattcttctatacggctgtaccaagctcttggagcttgttttaggccatataaggccttcttcaatttgtacaccttgctggattcttcttccacttcgaatcccttaggctgctcaacaaacacatcttcctttaggtctccatgcaaaaacgcacttttcacatctagttgaaaaacactccatcctttctctgcagctaagccaagaatcaatctgatagtatcccacttagctactggtgcaaatacctcatagaaatccactccatatctctgatgatagccctttgcaaccagtcttgctttaaacttatcaacttctcctttctcattgaatttagtcttgaaaatccacttcagcccaatcacctttgcttcttcaggaattcaactaactcccatgtgtattctcttctatggaggttatctctgcttccatcgcctttctccacacctctaattgagccgcttcttcaaagcaaaccggatcacctggtccaatgaacaacgcaagaacttcatcttcttcatcttgtgttatgagcacccgggcgtttccaacaacataatctttcatccaaactggttgttgtctctgtctaacacctcctgttccaacagccgggagattttgatgaaccgtttctgctaccgtttcttcttcttcttctgtttcctcttgatcttgttgcccgttgtggtttatttctggaccctcttctcctgcaggttcatgatcagaattgtcccacacaagttcttcctccagcgacttatcttcccattcccagcctctttcttcgtcaaactgaacatcccgactaatcaatatttttcctgttgcagggtcatagagacgataggctttggattccttgcttacaccgaacatcacacatttgatgcttttctcatcaagcttgattcttttctggtacgggacaagagcatatgctaggctgccaaatattcttagatgctcaactgatggtttccagctactccacttctcttccggagttatgtcatttaaagcctttgacggactccgattcagtatatacactgcatactgaacagcttcaggccagaactttcttggcactgacatctccattaacatacaccgcgtcatgttcatcacgctccgattctttctttctgcgacaccgttttgttgtggcgtatatgctgcggtgagttgtctcttgattccaaattccttgcagtactcgtcaaactccctcgaattatattctcctcctctgtctgaccgcaaacataccaatttttttcctgattctctttcgacttcagccttaaattccttgaagaactgaaatgtttctgacttctccgacaacaaataagtccaacacttccggctaaagtcatctataaagttcaaaatgtaccttttcccactggttgatgcaggatttatcggtccacaaatgtctgtgtgaacaagctgcagaacctgagttgatttccacgcactctcctttggaattgactctcggatttgcttaccctttaagcatatatcgcaaactgcttcttcttctccaagatcaaactttggtaagccttttaccatctctttttcagctagcgatctcaagccttgatggttgagatgtccaaatctcttgtgccacatattgttagctttgccgatcacttgaaggcatcttgtttcttcagtctcctttgactttttcacagctgcaaaaaccacaaacatgcgattttttgtcatcgttgagtgcatcaccattctcttctctgttttgtgccacacttcacacacatcaccttcaatgatgaatcttaaccctttttgttgtagttgacccacgctaaagaggttattcttcaaccctggcacaaagtacacatctgagatcacttgaattcttccatcaacttcaagtctcagctttccctttccttctaccgccattcttcgatcatctcctagtctcacgttctgcttaaaaccactatccaactcgaggaaccactctcttgtaccgcacatgtggttactgcatcccgagtccaagaaccaaatttgtttctcttcatcaccaatctgttctacatgagccatgagaagcagatcttcctccatctcaacataattcgcttctttctcccaacttggacactccgccttgtaatgtcccatcttgtggcacttgaaacactctaccgtgtctctgttcacatagccacgccctcttccttggtaaccccctctagctcttcctcggcttggacttcctcctctgcctcttcctccatccggtctccattgag

SEQ ID NO: 47549 - DNA, 796 bp, Arabidopsis thaliana
agtcctaaacaagttcatttgattcaacccatcagggaagaggaagtcaagaaactgatgaattcattctcggaatcagctgctcagaaaactccggttaacttgagcgagaagttagcttctttaactgttggcgtgatatgcaaggcagcatttggtgtgagtttccaaggaactgtgcttaatagtgacaacttcgacaagttaatccatgatgcatttttgttcttggggagcttctctgcctcggattattttccaaatgtcggctggatcatcgactggctcacggggttacaagggcagagagagagaagtgtcagaggtcttgacgcattctatgaacaaatgtttgatctacataaacaggggaacaaagaaggagttgaggattttgtggacttgctcttgaagttggagaaagaagaaactgttcttggatatggcaagctcacaagaaaccatatcaaagcagtcttaatggttagtactatacaaatatgtgcaacacattagataccttatgattctaaactttgttttctcatcttatcacagaacgttcttcttggggccatcaatacttctgcaatgacaatgacatgggccatggcagaactaataagaaacccgcgagtgatgaagaaagtacaatccgaaatcagaaaccaaatgataaacaaatcagtgatcaccttagatgatatagatcatctaccttacttgaagatggtgatcacagaaacatggaggctacatcctccagtacctctactacttccaagagaagttatgt

SEQ ID NO: 47550 - DNA, 527 bp, Arabidopsis thaliana
gttgatggaggattgggagatggagtattggcctcatcggattccgtatgaggagattgaatccggcactaaggggtttgatgagaagaatgtgattgggattggcgggaatgggaaagtttataaaggtttgttacaaggaggggttgtggaagttgcggttaagcggatttcgcaggagagtagcgacgggatgagagagtttgtggctgagatatcgagtcttgggcggttaaagcaccggaatttagtttctttaagaggatggtgcaagaaggaggttggtagtttcatgttggtttatgattacatggagaatggaagtttagatcgatggatattcgaaaacgatgagaagattactacccttagttgcgaagagagaattcgtattttgaaaggtgtagcttcaggaatattgtatttgcatgaaggatgggagtctaaggttttacatagagatattaaagctagtaatggtttacttgaccgagatatgataacccgaggcttagtgattttgggtt

SEQ ID NO: 47551 - DNA, 534 bp, Arabidopsis thaliana
gtccatcctgataacatgttgtacgccggaaagtcgcttatcgtccatagcaacactccttttagattaaaattttgattcaaagacccatcatatgcatctattccagtagaccataactcttttacctcctcaataagaggttggaggaagacatcgagactacctcgcgggtgatttggcccaaaattcagaattgtaagaaacaagtactctgtattcatgcacatacccggtggtaaatgatatggagtcaggatcacaggccacaaagaatgatttcgcgacatgtcaaatggattgaatccatcggtacataatccgagataaacgttatggggttctttggcaaacatgggatgtagctcttggaaatatctccactccactgcatctgaaggatgattcacttcttcttctttcgattggtgctcggcatgccaacgcattgcagctgcaaacttgtggctctgatacattctcttcactcggtcaccaataggtagatacacatacgactatatggcactttgg

SEQ ID NO: 47552 - DNA, 639 bp, Arabidopsis thaliana columbia
taactgctaaaaaacataaccgtctcatttaaacgatgtttacccattgcaaaccattttccttaaacaagcggacaatatttaaattgcaatgaaagcgagttatgagttcttttggcctaaacttcccaattttatctctctttttcccactaatcttctaacaattttaattaacagtgacaacttacaagtacttaggtaaccaagtatatttccctattgtaaaacctaattatgagttgtgatgatcaccttttctccttttgacgaacgcttaggacctaacttattgcaacaatggcctaactaaaacttaaatgcgatttgcattcaattctcaaatgggcctctttagttaacatgttatctccgttcatctgacgtgtcatagctcagatcaaaggttaatctactcgtaaatccaacgaccaaagaaacgaagcgtacgttactaacatacacgtgcacgcactgtaaccatctctctctctgctcttctccttcaatgaaatgattcgtcacccaaagaaagatctgcaacttcaccaccggaccagtctctctctatctcttctgtctctctacctcgcgcgacgaatcaatcatgactgaagaacaagacctcatcgaccaatc

SEQ ID NO: 47553 - DNA, 504 bp, Arabidopsis thaliana columbia
ccacaatgcaacctgacaacctgccttaatatattcaagcattcacatcaaccaattccctttaacattcattaagcacgaacagtggatcaagcaatgctatggttatgaactcacttggtttcgggcttaggctaagagacaaaaatggtccctctaataatttggtcgagtaacaggggactctcagagaaaagattgagctttagcagaatgctaaaggtaaaacccaatggacacatacaagaatatactcccatctacccaatgatatatagtatgatagctcagaaaatgatccatgtcccatagatgtcctaactctacccttttcctcattctttctttctttttggttcaagttctaaggggttcttctttaaaaatgattcaagagtctagcgggtttggttttatactttgacaaacttaagacttttcttctaatcttagcatagagggcgctttaccttttctttgaatcacaatgcctaacttctttga

SEQ ID NO: 47554 - DNA, 478 bp, Arabidopsis thaliana columbia
atccccaacacaacatagagaatagcttataactatattcttattgataacaaactgattacaagtgttatctcggagattacttgatctattctactcaaaagatcaaacccgactaagaatacctaagcctaattctcttctctgtttcttatcactctcacgtgtagacaaagagaactacacactcaccttcaagcttttgcaatgctctgaagtttacaatcgtataacagtattctagagtgctcaaagaactcctcaccctaagttctagaatacttatacctactctccagaaccttaaacctaggatctccgagaatctcgttttaaggaatctttcttgttttctccaagcttattccttcctaaatcttcgagacgatatcttccatatcttctaggtgattcttgtctctgacaccacgccaagtcagcttccatccttggctcttcacatcatccgccttagctt

SEQ ID NO: 47555 - DNA, 618 bp, Arabidopsis thaliana
gagggtcgagtgagtatgaaggctgatcaagcttaattggttcatcagtttgaacttcgtttttatgctggtcctccccttcttgaacttcactatcttcagtgatcttttctgttggttgggtgttgagcaatttccttccactacagagtgtgactgcgtgtgcatattccttggaattttgaatggtttttcctggatgtggccctgtatacgttgaggaggtattggaaacaggtagacgttccatggatgtcattttagatgtgagatcctcatatttgcttcttaactcattataggaacatgcaactttactattaatctcagccaatcgtttttccagaactagagctccagtagtttgaccctgaatgatttgttgaagcattcgttttgagtcaggatcttgagctactgggcttgttgtggttgttgagtgaaccttgtggtggaatctgatgttgatatcctccattaaactgttggttagggagataccttggttggactgaacaaaaggcttagactgattttgttgtggtggatacctggatcttgggggttactacattggtgcttctgtaggagaggtttgggttgggcttgtagttgttg

SEQ ID NO: 47556 - DNA, 600 bp, Arabidopsis thaliana columbia
aagtttaggatatacatcctcatccatttcccaataccgtcctatactgagtgtttgaaacaccatcacgacataatcgtacatgccaagcacatgtagagaaggtttggaagcgactcgcgttggcctcacatcaatatgcttcaaagctgccagtagctttgtgtcttccttatcccatatgccggataacaggacgcttgttaggatcttcttttgccgatgctccggaagtgctcgtgcgtgctcgagaagttcttgcagcgttgtttgtctttcccataccttttgcaaaagagacaaagtgaagtcaagaaatcactcaaaaataaatcaaagaacttaaacattgtattttagttattaaaactaaacaatgcatcatgaataatcaagttctaagctctaaaatccgtttttctcaaagtgtatgaacatgtccgttttttaccaaaggggaaattttcagatctcaaattaggccttaatccagcaattaaaggcttaaaaaggtttcaaaaccatcgtagacaataagctagcatcagataacccataaacatcatgaaaattcaaggaattggagatttatcacttttg

SEQ ID NO: 47557 - DNA, 651 bp, Arabidopsis thaliana
cgactcaagcctcatggtttcagtgaggcacaacttctaggcaccttcaacatggatatgcctaataggtacaatagagggagtagttgtagcattagtgatggagaaaggaaatcctagcgtgtgggccattggttgggacactaaacttcttacaatcacctatagtgtaagatttagacttacaataaagtagtgcttttgagagtagcttgtaggttatttattataaaagtcaaattgttttgaacataaaactcatgcaggggatagtgtgctcagcgcttggttactacattggaggagtggtgatgaaaaccagaggtcctgtgtttgtaacagctttcaaacctctttgtatgatcgttgtggcgattatgtcgagcatcatctttgatgagcagatgtacctcggaaggtatgtaaaaacactgaaacaccagccatgagttagataactttgatagaaagaaaaaaaaaagaatgaaaagatcttgttctttggcagggctcttggtgctacggtcatatgtgtaggtctataccttgtgatatggggcaaagcaaagattatgaatacctagccaccgcaaatagatgatgacttacacaagcaccacaagcaagcaaaaagaccgaagagacagtgat

SEQ ID NO: 47558 - DNA, 484 bp, Arabidopsis thaliana
cttaccaatcttctcagtgaactcaataagaagttccggatgaaagacatgggacagttgcattattttcttggaattcaggcacacttccatgaagatggtctcttcatgtctcaacagaagtatgcagaagacctcctgactgttgctgcaatgtcagactgttccccagttgcaacaccgcttccgcttcaactgaacaaagttcctcaccaaaaagagttgttcgaaaatccaacatattttagaagcctagcagggaaactgcagtacctcacactaactagaccagatcttcagttctctgtcaattatgtgtgtcagaagatgcatgagccaaccgtttcagactttttcctgttaaagaggattcttagatacatcaaaggcaccatcacaatggggatttctttcaataaacgaacagatacaaagttgcgggcttacagcgatagtgattggggaggttgcatagacgagaaga

SEQ ID NO: 47559 - DNA, 457 bp, Arabidopsis thaliana columbia
gtggagtaggatgatgtgataatgggaagcttggatcatggagctaaggagcagcttgaacccgaggagtttggagaaagaaagcagcttgaggatggagagcttggagctaaaaaggatgaagcattgcatgttcttgaaggtccaataacaagatcaaagatgaagctactaaatcaagctatcaccacacttttacaaaagattgagggcagccttaaactagaagcttgtccaaccacgttggttgtgattcaagccgtttaagcaacaacaatggaggtgtgtgacttgcactctttttccctcctcttggttttgtcccattgggttttccaagagagatttttaatgaggcaatcccacacactcttttcatggcccattgttgtttttgaagcccattagcaaaggagatatcaaatttcgtttttgtgtttttatttctctagaatga

SEQ ID NO: 47560 - DNA, 456 bp, Arabidopsis thaliana
tggttgtttatcaccaagtcacttgcaagaaaacatcagtattaaacttgattttattaatattcattgtttcaggttgcggctttggctagattaaaccatgagaatgcggggaaattactgggatactgtaaagagagtacaccgttcacaagaatgcttgtgtttgagtatacatcaagcgggacactatgcgaccatctccactgtactatataatcaaacttcttcagagctctttctttggtaggactgataatgataccaaatgatgataaaaatttgatgcagatgcggacgggagtttagtatcgtgggcaaaacgcatgaaaattgttataggcatcgcaagtggtctcaagtaccttcatactgaactccatcctccatttacagtctctgagttgtcgcaactgcagtgtgctcactgaagattttactccaaagtaaatttga

SEQ ID NO: 47561 - DNA, 492 bp, Arabidopsis thaliana
gaaagtcgtaccattgatggtgtatgacttgctaataggcctcaacagttttatagaatcaacaagggcttcaaatgctgaccgagcccatggataaatcttcatggcttcgtcatcaaaaacttcttttagcactctcaaatgatatcctagagttaggatgcaagccgtaaagtctattggctagaagagtcaataacccaaaccatctacgctttttaggaggccatgctcatgcacacgaacttaggaccttcaccggatggcacactcaattccctgaaaatgttttgtagtccacttcaggttcatacagttctgtaggtagtggatctgtgtttaaccccgtgatatgaccaaattcattcaagcaaacctgataggttgaccagccacgagacaccaaacctccttcttcggtcttcttaactatctgcagagtagataatgtacagtcttacagaccaaacaacatgggtatcaattagctta

SEQ ID NO: 47562 - DNA, 475 bp, Arabidopsis thaliana
tagttcacttttgtgttgatgattcagagaaagaagaaagaggaggtcttgattacataacattcaaagttaaggatgtcgagtatacacttgatattacccactttgataccatttttgggtttccaagtggagaaggaatccgccaagactatgaccaagatgagctactctctctctctttggataacaatcgccggtccaaagcctagtcgctcgccaagagcaagagttcttgaattcgaagtcccgtgattagatatctccaccaatgcattgccaacaccatctttccaaagaagaccactggatttgttggtgaagaagagctatgcatgattgatcaagcgttggtcttcattctgagagagaccaaagatgggaggaagaatgtgcgagatagagcggacacatcgctgaatgttgtgcatttggatcatctattgagctatagagagtatgctgcaatgatagt

SEQ ID NO: 47563 - DNA, 549 bp, Arabidopsis thaliana
ggaatatttctctatacaaaagttggtttacctgtgtatatagcatgttgggcgaagtatgagcgcggaagataaaattgcttccccagttgatagtagaccggaggtgatgcggacatccaaattaaaccaaaccgggagcataccaaaccagacggtacatttatcaaactgactaatgaggagcattttggaggactcttgcccaattggagtctcaatcaagcacaaggcctagggttaattattcaccagcaaattaatcctaagaagacaaatgaaggttcaagtggagtcaaagaccaaggagccgagtcaccttattatgggaatatgagtgttgcacttttttcccttatttagggtttgtccaatgggtttacatagaaaggtttttaacgaggcaacatcaagtcatcaaagaatcatttacctagcaaatgattcaaagatatcaaaagtacatatagttgatgtacttgctgacagaccgactgaactacccgctgcactaccttctgaaatacacacgaaatgaagcaaacaatg

SEQ ID NO: 47564 - DNA, 521 bp, Arabidopsis thaliana
ctgttgtggaacaggagcttctgagcctgagatattttcatcaaaaacagcttctgcagaagatggatatgtggaatcaagttcttctcgagagatcttttcatcaggtacaacttctgcccaagacggatatgtaggtaaggattcttctggcaagttcttttccttagaaacagcttctgccgaagaccgatatgtgacgccaggttcgtctggaaaaccgatttcgttgggaaaagctgattccaaaaatggatttgtgccaacaagttcttcatgcgaggcttcctcatacggaacggattcttccaaagatggatgtgtggaaccaggatcttccagtggcgggatcttctcatcacaaacagcttcagaaaaatatggatgagtagcatcatcaacttcttcttcttgtgcgatcttttcttctggcaattcttccaaagaaggatacacttccggaggttcttctggaaagattgtcatgatgggcgccgtttcgtcaaagaccgacatgtggt

SEQ ID NO: 47565 - DNA, 726 bp, Arabidopsis thaliana
atctagaggattagaggatcccgctggagttaaaagaatcataagttcgagtaccaattgagtaaactagagctttgaatcaacgggactaagagaagagaagggttaacttaccggtggtaagtgttgaatcgagaatctgtggtcttcgaggaggagctgcaaaaccatcactgtagagagaagaaggcttagactttgtgacgaagctatcgtctcgcgaaaccatatccttggggcgaacgggagctctctcagaaaaattcaaacttgactgagaatcagaacgagcagccgtcgtagtcgccggaggcagcggaggacgagacgaaacagagccgttagaggaaggagaagcaatgcaattagaagctctttgaatgaaatcatcgaacaaagagtgaacagattccagatcgagaagcttcaaagcttctcttatctgttctttgctacgaaactgaacataacccttcttcatttcttgcaacaccatgaaaagctcaccaggaacttcagagcttttcctctgtctagcaatggcttctaaacaagcttgatcttctttctcaacgttgtcaatcaaacccttggcagcttcaacttcgtcaattcctggtcttgcgggtagagatctgtgaattctcatgatttcttcaaccacttgctccgttgaatccaaacgcttatccatttgcatcaaatccattacaaaatttggaagaa

SEQ ID NO: 47566 - DNA, 601 bp, Arabidopsis thaliana columbia
ctcttgaatttggaaattaaccttaatttcattttattttcacgattgatctttagcatttgcttataccaagaagaacaaaagacccaataaatgtggagcagtgatgaatttgggcgtggcaaaaccaattctcacgtgaacagtgagattaatcgtgtgctgtatagaagatatgaaaggcccttagtaaggattctgtagtcatttccaattgttgtttcgaaccgtgtttcgttcttccggtgttttggaggagctagtaagaccatagggtcgattagcgttattgtgtatcgttgatatcttgttttgtgctagctgaccgcgggaaatgcgcttgttagagtgaactaccactatcgtatactcgggtttttgtagttccgttctgataaagctcatggttaagttcgaagaaccgcttgcatgtgacttgggtggtgtctgtaattgagggttctatgctctttgccgtttatggctcgggccagcagtaaaatgcttccagctctaaaggttaacgtttcattggtctccactttttgccgcgccgtctccactttgtgcatcatagtggaaacataccaattggagtgat

SEQ ID NO: 47567 - DNA, 1035 bp, Arabidopsis thaliana
cgtgtgattctgattctcctctctaagatccgtatctctcttactctcccttctcaagctcacttcaatcaaccatggctgtttcactaccattgtttcaatttatactctttcttcttcttcttcttctttcaagaacggtttatgcatacttaatcggagtcggaagctatgacatcactggtcctgccgctgatgtcaacatgatgggctacgcaaactcagatcaaatcgcttccggtattcatttccggttacgagctcgtgccttcatcgtcgctgagcctcaaggtaaccgcgtcgtgtttgtcaatctcgacgcttgtatggcttctcaaatcgttacaatcaaagttcttgagcgtctcaaagcaaggtatgaatatttaattagctaaagatttaatctttgagtagagtgttagtggaatcagtgattaatccatgagaatggatagctaattttttaaaagttcaataggtatggtgagctttacacagagaagaatgtagcaataagtggaattcacacacatgctggaccaggaggatatcttcaatacgtcacatatattgtgacgtctcttggatttgttcgtcaatcttttgacgttgttgttaacggcattgagcaaagcattgtccaagcacacgaaagcctacgtcctggttctgcttttgttaacaaaggtaaagaagttacaatcttttctttgtcaatctcctttattgatgttcttgtgtttgttgagccattttgtgtgatgatttgttaataggggatcttttggatgctggtgtgaatcgaagtccgagttcttatctgaacaatcctgcagctgagaggagtaaatataagtatgatgttgataaggaaatgactcttgttaagtttgttgattctcagttgggacctactggtagttttaactggtttgctactcatgggacttccatgagtcggactaactcgttgattagtggagataacaaaggcgctgcagcatcggtttatggaggattggtttgagaatg

SEQ ID NO: 47568 - DNA, 733 bp, Arabidopsis thaliana
ccagtgtgctcgaaagtgtgctctaaagggtaaaccagcgtggtatatgtacgatagctgccagagcaaacgcagcgacagtatcggtgttctctgctctgcggtcttctggtcacaaaacaatggcctgcaactgcaaaatctgaccatcgaaaacacgctgggcgatagcgtagatgcaggtaaccatccggcggtggcactgcgtactgatggtgaccaggtacagattaacaacgttaacattctcggtcgtcagaacaccttctttgtcaccaacagcggtgtgcagaaccgtctggaaacgaatcgtcagccgcgtacgctggtgaccaacagctacattgaaggggatgtggatatcgtttctggtcgcggcgcagtggtgttcgataacaccgaattccgcgtggtgaactcacgtactcagcaagaagcgtatgtgtttgcaccaggtacgctgtccaacatttactacggtttcctcgccgtaaacagccgtttcaatgctttcggtgatggtgtggcgcaactgggccgctcgctggatgttgatgccaataccaacggtcaggtggtgatccgtgatagcgccatcaacgaaggttttaacacggctaaaccgtgggccgatgcggtgatctctaatcgtccgtttgcgggtaataccggcagcgtagatgataacgacgaaatacagcgcaatctctttagagcacactggcggccgtta

SEQ ID NO: 47569 - DNA, 501 bp, Arabidopsis thaliana columbia
agtctagaggatccctttgagaaaaagttcaagaccaaaactaacaacacacaaagaaaaataaaaatgctatggtatatacaatggttgtggtggtgttacctcagcgtttaggtgaagtaggaggagacgaagtcatccatactctcctttgtgtaactccaaggaacgggttgtgcttgacttggattagttggatgctctaccctttgctcgggctgttgatcgagtggtgcggtagagtggcttaccccatctgatttccttttccttctgcgcttctttaacttactcctcctctccttctccctagattcaaaggatgattgccttggtggtgaaggtgcagtatggagttctctcggctcatatgaataatgtcttggtggcgaaagataatcatattgcataggttcatgtcgagtggatctgcttctcctaaaaggcatctcctgtggcatcgctatagtagaagatgaacagctgaacttgagttggagt

SEQ ID NO: 47570 - DNA, 494 bp, Arabidopsis thaliana
acatgtaacgaaaccttattattttgtgacttgcttcacttgggcttcaatgggctccatggacgtttgtttttaacaaaacaaatagggtgggttcaagggattgggtttggggtgttacaaagtacctcgtatttttccttctgcctcaggttgtctcacgataccttcgacagcttgacccgcagttgtaccttgactgactccaggttcaatagaagcaagcccaacagccaacccggcaacaataaccgaagcagcagaaacatgtggattcatgataagttcctcacacaaaaataaagaaatagttaatgatacaatcatcccttaggacgtaattctaattaagtaatcgctaagattaatccagccaaaaaaacacaaaaactttaattgaaatatgaaaaaatataataaaattattgaatcataagaattactttgatagtagtcctatccatgggatttttaaaaatccataatatatatat

SEQ ID NO: 47571 - DNA, 443 bp, Arabidopsis thaliana columbia
ggcagcacctttgctacacacgccggacatcgatcaagcaaacgtccacctcacccaatcttaggccgccgtaggacgctcacactttgttcacggtcatttacgggcataccacgggcataccgcagacgtaccacatgcataccgcagacgtaagacaggtataccgcggatgtaccacggacataccggggacgtaccacgggcataacacggacgttcactggcgtaccacggacgttcacgggcgtaccaccgccaacgtccttggttagttttcttgtccttaagaaaatgcaacgacctaacttacccatcttgccccaaatcttgcccgtccatgagtgatgccattttacccattttggtgatggcctccgcccaacctactcaaggtgagggtcattacaccggacgtagagactttaaccatctagtggtct

SEQ ID NO: 47572 - DNA, 593 bp, Arabidopsis thaliana columbia
gcacatgggtgtggaacattaaactagggtttagtatagagttagtaacctaagccgatagagtcagataaaggcattaggatttgtaaagaaaagaaaagagttcttgttagctaatgaagaagggcaaaagccgtcggttttaaaatttcaaaaaacaggaaccttagttgttaaagaaatccaaatccgctagatgtatcaaagtgttgagaagcttctcctagagttaagagaaaagaaaagaacgattagaaaaattgcttaaaagattcatgaatgcaaaaggtagagtcaagttcttatattgggattggacatgggattaccattagagcttcattggttatactctgggtagatgggatcttatctttgtatgcatagcttgggacttacctttagcattctactaaaacttaatcattttttgagagatccctgttactgaaacctattctgtaagggaccatctttgtctcttgaccttaaccttagccaaatgagttcattgatgatgaattgcttgattcacgttccaaaactaatgaatgttaatggtggatttgaaacatgtgtgggtcgacataaga

SEQ ID NO: 47573 - DNA, 402 bp, Arabidopsis thaliana columbia
tgctggtggcggcggcggtggctgatggtactgaggtgcagcaactccaggtgctggtggcggtggcggtgcatacacaggtcgatccaaaatctcacgcatcatgtttcagagctcctgcatctcggtacgattcgctgcaatctctgctgcatgagctgcattagctgcctgagctgcctcatctgcttgagctgcctgagctggttgagctaccacaggtggctggtcttgcccaacaactggtgccttcgctactcggtttatccgagcgttcgcggggcgtcttgctcttcttggcggcattttctgttttacacaaaactaaacattaggacccttacaataaccgaaactttacacaactactttaaaatcaagtctagctcatttggttttttt

SEQ ID NO: 47574 - DNA, 552 bp, Arabidopsis thaliana columbia
gaggatccccaaaacccagaaacgaagatcgaccacacctagtgtctggcaacagactgtgcagtcgagtatagttgtctcatttcctgtttgttactcgaccagtatactcgaccacacccagtgtctggcaacaaactgtgcagtcgagtatatctgtttcatatcctgtctgttactcgaccacatcctacttctggcatcagcctattgtggtcgagtgattttagtaattctgttattgtttctgttttctgcatgttcgcttaggattgttagaaaccccaaaactgttattgcttggcttgacttagtgacttctgatcacatctcatctgtttgcatcactcccatttggattgacaccctaagtactacaacgacatgatagtgctttaggattaattgacttaaaaacctattatcaatttggcgtcattgcaattgggtgtttgtttgctatatttgagatttcagaatatttaagatcaagttctttttcatttttactgaaagttaccaactatgtatttattctgtttgtctgttttg

SEQ ID NO: 47575 - DNA, 569 bp, Arabidopsis thaliana
ggcagtgaatagtaggcggaatgactgttcgaggatttccaaagtaggtgattccaacttaattcctattctggatccttgttttgacgaagattcgtccacatgtaacttccaagtttgattctccggttgctccggtgcattgagcattggtaacttagtcaaaaatcagctaatacttgtgccttcatacttacccggcttttgaactctatatcgtactcacagagctctacggcccacttcgccaatcttcctgactggtatggactgtgcagtatcgttcgcaatggctggttagtgaatacttcaattgggtgagattggaaatacggacataactttcgcgctgaagtaaccaccgctagtgcaagtttttccatcattgtatactgagtttttggatctgtcatcgatttgcttatgtagtaaattggcttttgctctccacgatcttctcgaactaagactccgcttaccgcatgatttgatactgacacatacaaatatagcttttcaccacttcgggctttgatagtacatgaggggtagcaagtatgctttaagtt

SEQ ID NO: 47576 - DNA, 771 bp, Arabidopsis thaliana columbia
ggatttagttttccagaccgttcaagcgcaatctcaaaaagatcagcatcggattcttcgtcatagtcaagcttacgtctatgactatttcccacggtggccctcccgcttgcaatctcgtcactatttcctcggttaatgaaaaaattacttaaatagtgagaatctattcttccaatggagaagagctctttgctgtcctcgagcccggctacagcaccagcacatgggtttgatgtccgctgcccgtttgccgggctgtaataaaatggagattgccccaagttgacaagaactctggcctctgtgttggaagcaagagtgggatatagaggtgtcccgaactcgtctgctttacagttaataacatgaaccaggtgtgagttaactgtgaagtaaaccttcttcttcctcggatcgtaaccacaaccaaccactttgttttcctttgcccactcatgtttctccgattcacaaaccagcttcattcctaacatagacagagacgaatttttaagattgtatatatgaaatgtagtaaataaatgtataatattaatataatgaggaggaagaataatgtttagccgatctataacactaggtcgataatgttatatctgtcttcaacatcagaaaaaatagttatgatttttagcagatttaattcaacttagcaaattgtttacaattttactactgtatcttggtgaaagtaaaataaataagatttcaaaaaatcaattgtaagaaacagaaaaagggatgagg

SEQ ID NO: 47577 - DNA, 559 bp, Arabidopsis thaliana columbia
tgactcgttcatacctgatattgagaacaatgtgataaaaagaatgtgttcatctccccttataaaaataaaaagaaaatgagagattgacatgattttcaaatagtttataggggtaggaatgtttcctatgaccccaatattatacattatttggaatgatcaattaccaagatgggaaaaatgccgagggtgttgatctaatatgcgagttcccctttgtttactctctaaaaagaataagtctaggggagagaaagaacaacaacaaaaaaaaatataaagacaatggttgatttaccatggtatagtacatgaatgagtctagaaggatcttaaatgttagcttgtttgatgagacccaacgataaaagcctggtagatgtagttgtggaacttaggtatgaaatctagaatgttgtgtaagcttgcagagaagtacatgttggttaggatttgttagaactgctagacaagcaaaagctaagtctgcgagagttgatataccctagttttactgtgtttactatgttttaggtataggctttagagtctattt

SEQ ID NO: 47578 - DNA, 538 bp, Arabidopsis thaliana
caaatggaagtaaccgttgtatgaagacatgacaatcgtggctcttcatacccgagaacttttggccttgctctacacatctagaaaattttgacaaatatccatctgggaacttcacttcagctttaacccattcgaacaacgctttttttccctctgtagtcaatcgaaacttcggaaccggtaattttccatctcgtgttatatgcaagtcaggtctgttgcatatctccgccaaatccaaccttgatttcatactatctttagtttttccctacacattcagaagcggatgcataaaattatcgaagaaatttttctcgatgtgcatcacatcaaggttatggcgcaagaggagatctttccaatatgggagttgccagaagatactctgtatgtgccaattgtgggcacttccagatccgtctggcatattcgccggagtgtgccagttacccccacgtttacatgtttcctgagaaccataataatcaatattgttcaacaaatcatttccagaaagataaactggtggggg

SEQ ID NO: 47579 - DNA, 418 bp, Arabidopsis thaliana columbia
ggtccacacagcccagacaacggctagaatcgttctcaatcgtgctcctcaagagaacttaattagtttccttattttagcttatttctttcttaaaacaatggtttttgtgttttgatttaaatttgtttccttttgcgtttttacatttaattttggccttagggatagctgatagactcttataaagtccccctgcaacagttgaacgatttttcacctttgattatcaataaagaaccgcattttctcacttcttctctttaaatgttcttaagagaataagcttgttctttgtcttgtgtgtgcaattcaccaaggccaagttcgtgtactgtatcagagacttatcacatctctgtggtgtacttcaatccgccagcacttccccctctaatagatcccacacaagagaacc

SEQ ID NO: 47580 - DNA, 475 bp, Arabidopsis thaliana
tgaccttaatggtaaatactataagatggttcttgataatggtctagtggttgcagtcaagagactaggctcacttgaaggagttggttcaccagaaagtagtagtagcaagtcggttaagagaaggttgcagaaggaacttgagcttcttgctgggttaaggcataggaaccttatgagtttacgagcttatgttcgcgaatctgatgagttctctctggtctatgattacatgcctaatggtagccttgaggatgtgatgaataaagttagaacgaaagaggtagagcttggatgggagattaggcttagagttgcagttggaattgtgaaagggcttcagtatcttcatttcagttgtgagacccagattcttcattataacctgaaacctacaaatgtgatgttggattctgagtttgagcctcggcttgctgattgtggattggccaagatcatgcctagttcacacaca

SEQ ID NO: 47581 - DNA, 548 bp, Arabidopsis thaliana
tagaggataggatcccctttaggatcttctattcagtaccggatgagacttacttcttcgccggtattcccgttagatgaaatggatccccgtatatttgctgcagataaaatcagtacatctatctccccagtatcatgtatggagatacgcatgaattctgaagtgagaatactacaaagaaaaaatcaatgaaccatcaggcactagaccaaataaacaaataaaagaaaataatagagaaaacaggactggtagataactgcatatagaaagtgaacttacattatagtaaaattttcacggaacaattcactaccaaagaaaatcaatatactaaacatttaactgatacaaatgcctacaggttgtatactgttctacaccttttgaaggtaacaaaatatgaatgaagtatcaaaataatgacgaacatagtacatttcaatgcaaaccaagatttatcataataagggtaattccgccagcaaggcatgtacgcatgcaagaacttaagggggaagtttaagagttcagaagttatgatt

SEQ ID NO: 47582 - DNA, 552 bp, Arabidopsis thaliana columbia
ctaaaatacactaaaacaaaccagctcatgcggcaaaagaatgttgcatcttgcagtcaaacacacagaaacaaggatgctaaaactatagcaaaaagttacccctgaattgaaacaaggcaaaccaagacgttagaaaagagaccgaagtaagaatagttcgttgagttcaggataaaagatcaagatgagctctaatggctacatgtgatagtgagagtcgaagactcaaagaacctgaatgaatacgaaaattctgtttcttttaaatcacataaacggctgtttaatttggaagatttcttcactttcaataacaagtctaccaataaccaatagatataagatttatgaatcactacaaaacaaaatcatgaaccaatagatatcatcatcttattgacacccaaggattaacactaacaaaaatgtaattatctaaacaatctaaatggcaagatgggtttccttcacatgtgaacgtgacggtgacggatcatttttgttgtgggttggtttgtctttagacatttgcaaaagggaaaaaattgt

SEQ ID NO: 47583 - DNA, 518 bp, Arabidopsis thaliana columbia
ctaaaccatcatttgatattgaagattgggacagttactcaggccaaacggtacgaaacggtcagaagtctgggactgaagagctcttgtcttttcggggtgtcgcattggagcgggataggttttctgttcgttgtggactcgaaggcatctgcatccctggtagaaggtggaggaggaaactcgagatcattcaacctattgagataaactcttttgcagctgactgcaatacagatgatcttctctgcgttcagataaaggtttgtctctgcatctctgttaatttttggtgttattgtggtcaattttttttctgggatgcatcctaacttacgttttttactggcagaatgtggctcctacccatgctccagatattgtaatatacatagacgccataacaattgtttttgaagaagcagggaaaaatgcttccccttcttcagtaccaatagcatgcattgaagctggaaacgagcacagtttgccaaatttaactctcaggttagcttttt

SEQ ID NO: 47584 - DNA, 727 bp, Arabidopsis thaliana
gggtacgagctacttttgttgtgttccacaaatattggaaccaaaaaccaaaggcatatcttcttcttcaccttccactctttcccacgaaaaataaaggctttgcttatttcctcgttaccgagaaataaatagcccaatctccgaggctctctcaaaagccagttgatactgaagggaccaattcaaaggccaagaagaatatagtagaccagagttataggtaaggctattaacattccaaatatgaccctgcatccatatttttcaccatcattcacacatttgttaatatattgtaagtttgtaacaaaaataaaaatgtggctgtaacataaaataagtttggaacttacccagtgcttagaatcgtgggatgcacattgtactcttttgcaaacacaaacggaactattccttgaggcaacgcagcctaataattcatgcattcatcaacatcatcatcgtgatcatgtaatatttataatagacctagctatatcatgtaacgttataaatttgtatacctgaacgatggctatacggagaaggtcgccgtgtaagccaatggcaatcccagcaacagccatgatggccggaccggttataaatctgaccgccatggcaaacgtggcgacagagttcccacaagcaatgattttgggttgaagtgccatgaataaaccttaaaattacaccaaaaataagcaattcattaactaaaagg

SEQ ID NO: 47585 - DNA, 1143 bp, Arabidopsis thaliana columbia
  unsure (1)..(1143): unsure at all n locations
aagatagagatacatgttatattcaactattatcaattgatttatatgttaaacaaaaacaatattttctataacattatgtgaatgtttggagaatgatatttatcaaacatgaaaatattggtattgaaacatgtatgtgtctttttattgttgacccttgatttctgctacaactattgtcagtcaatttaccatttcggatgtgtaatcatggtatgagaatgggttgttgctctttctgattcttagttagaccacatgtcctaataaaagagagagagaaaaacttcgcaattcttagcaattagcattagtgcagagatagtgatctgattagtattcttctaactcactttcctgaattctcttctttatgtagatatgcattcacaaatatgtattcatgatttttggcattaagaaagttttactgtaggcaaatttcaaaggttatgtggatttacagtagaagtaacgagatgtgaaagtttgttttcattcttagctaagaagcaagacataatagttgactaagaatttattcatttattggttctaaagttactactacaacagagtgaatgacattgaatagtttctgccatcatgcaggtgaaagattcataaaagaagtcaaaacgtcagagaaaaccctatcaatgttacaaaatcttttaaaaaacaaattgagcttcgttacataaaccggcacatcatcccgtccttcaaactgagcttcacacactgatatactaacaaaggctttagcagccccttgagatgctaactggtacgccttagaggtcacagacccttgagcttcctcgatcgctttaatggctccttcataatctctcacgcaagtctcatatgaggtcctgagcgtcggatcagtagtggttctcactgcgcctttcatcgccgctacgtcnttatagcccaacaattgcgtcttttggaagactaaatcgagaagaccttgtaggtcgagggtgaatgttgtaggatcagcggttacgcaagtgatgcagaaggggtggcaatgtgcggacttgcgcagagttgctgaagtaaatcttttgtgattttgctctcggagataagatgaagcaaggggtgatgatagagacgagagaggag

SEQ ID NO: 47586 - DNA, 1251 bp, Arabidopsis thaliana columbia
ctgagatgcaagacacggtaattttgactatgaatatattcatttattggtctttaagttactagtacatcagcgtgaatgacatttagtagtttctgccttcttgcaggtgaaagatacataaagaatcaagaagtcaaaacgtcggagaaaaccctatcaatattacacattctcttaaaaaacaaattgagttttgctacataagccggcacatttcctgcaaactgagcttcacacactgatatactaatgaaggctttagcagccccttgagatgctaacgggtacgccttagaggtcacaaacccttgagcttcctcgatcgctttaatggctccttcataatctctcacgcaagtctcaaatgggatcttgagcgtcggatcagtcgtggtattcactgagcctttcatcgccgctaggttcttattgcccaataattgcgtcttttggaagactaaatcgagaagaccttgtaggtcgagggtatatgttgttggatcagagattagccaagtgatgcagaagttggtgtcaatgtgcggttctgtgcagagtcgggataagaaggtttttgtgactttgtcactcggagacacagatgaagacaaaggggtgattgatagaagaaggagtagaggaagaagtgaaaatacgtttcttttgacgcaaggataagccattgtcttggctgcggaaagataattatgcgtatacttgagagtctgggaggttcttactgcatactaatattaatatacatagtttttggacgacaaaagtcaagttttagcttggtgttgttgatgaaatgttacccaaatttgtttttcttagtcaattgttgactctaattaaacaccttcttctttagttcaatataattcgcaatccaccgttgttattcgattgattaagttaagaaaaatatctttgacttttgacttggggttacaagaaaatcttacactttcaggagttttgtttttgaaaagatttcaaaatcttgggttattaaatatatattatatcatacaaaactcccaaaactttctttttattttttgtgcaaaacaaaactcccaaatctaaacataggaattctatggatgagtgtccgcattccaaacagtgttttatatcttcttttgagtattgtttgtcgtacgtactattcaactatcgttttcgtaagttttttatgacaaacatagtacatatttaaaggaaacgaatcattcccaaaaa

SEQ ID NO: 47587 - DNA, 424 bp, Arabidopsis thaliana
tccgtagggttgatgtttgctgctatggagagcggtgttacgtatatgagagacggagacgacggttcgttgacaactgtgatcgctggtttagccactggtgtgctttacagagctgcttctggacctagatccgctgtggttgccggagctgtcggaggagttgcggctttggctgcagttgctggaagacgcatcgtcaagcgattcgttccaatctaatgaaagtttctcaatctctcaaggttagggtttaagaactagtttaaaggaggggcttttagatagtgaatcattggtactggattaagggcttatgaattcaatttccactgtataaaagttgacatttttattgatctaattagtcaatccgactcaactttttgctgattttgtcgaattcacgaaattgaaatgatct

SEQ ID NO: 47588 - DNA, 336 bp, Arabidopsis thaliana columbia
atatctcatcaaatccgttacaaaacgcttgtaatgtgcgcttaatggactcacgggctcgtcttccttacacaggagatgattctgatcaggatgatgatgatgatgaagtggtgtgagctttgtttgtgagtacagacaagagatgcgcccagctcactgtgagattaagtgcagcgtaatagtctgtgtactgctcatgtgcgtgtaagccagagcctcccatgagttcccctacatatgtctcgctcgagctcgctagaaatggtcgtgattgtgcagcacaaagatgcaagacagagcggggcctcggttggaggttgaccatgcgtcgca

SEQ ID NO: 47589 - DNA, 533 bp, Arabidopsis thaliana columbia
tctagaggagtatatctcatcaaatcctttacaaaacgcttgtaatgttcgcttaatggactcacgggctcgttttcctttcacaggagatgattctgatgatgatgatgatgatgatgaagtggtttgagctttgtttgtgagtagagacaagagatgtccccagctttctttgacataaagtgcagcgtaatagtctctgtactgctcgtgtgcgtttaaccaagactctcccatcatttccccgagataagtctctctcaagccgcagaaatgggagtgattgttcatcataaagatgcaagaaagagcggtttctttgttggaacttgaccatgcgtccaagttcaaagcaatctctctcagtatgttgtagatgtgacctgtgagaagctcttcttgatactttgcgttcttccatcccaaatcaatttctaggaccttcgacaagattggcttgttgttgtccccagtagcttgttgcagtactcagtcacaacgcttacaagctttgggacactccatcaagaggt

SEQ ID NO: 47590 - DNA, 1024 bp, Arabidopsis thaliana
gacctattgcattggcataatcaaagcacattaatatcattgaaaatccaaggacttcttacacattacaaacccaccacagccaaaacacaatgaaacagtaacttaaattcactggaaatgatcatacctcattgccaccaaatacattgagtcttccgacctcacctccactagcagttatgcgttctctttcttcaacattctcttctagcctgtgatcaacagtcagtagagaaaccacaccaccttgggtgtccaatatgcagcgcgagtcaccaacagaagcaacagtaatagtccaaccatcaattataacaaaagtcacggttgttcctgaagtttcccctgtaagcacaacagatcttatcggttagagcatgcttgaaaaacaagaatagaaagcaaaaagcctttaaaaaataagcataagctaagacctttctgctgaaattcaatgtcagttttcacaaagccagcaactaaagccctaggaagagcttgaagccactcatccctgcttgcgccttgaggaattgcactcaccacgttttccagaagatgttccttagtatatatggcagctgaattaccattgtgtccgtcaaatatctgaagacaaaacagaaaaagggtaagctattcgtcactaaaacagagaatccttaaagggaagaatgcctcaattaccccgaaaactgaaaaagccgatgatggatcaccaggtaccctttcacagtcagttttgatcaaaaagtagtcctctcctttcttagcgagagctgcttgaccatacttgacaaaaggcttctctactttctcgctcctcagctccctaccaatcagggtcgcaagaggaacgagcgaatgttgcgtcctcgatgcttttgacacgctcattttagtctagccttcagcattggctggaacaaattctttgttcatcacagaaaacaaaattatttagttgctgcaaacatttagggttcaattctaataaataatactaaggaaccctataaca

SEQ ID NO: 47591 - DNA, 554 bp, Arabidopsis thaliana columbia
tgtcgtccatcgactgtaattgtaattgtggagtgaatgaaaaaaagagggtgaattagagggggaacccgagaagagtgacccgaattttgacccgaccgggttcttcttaattagaagctccaacttcatgccgtttaggtgtagcgttgacgaaatggcttacactttaccattctgtgatatttagcctatggactatggttatcaaaaactaaggttagctaacagcaaatgaaccaaatgatgttgcaaacagcagttaggtcatttgcttcattttggatttttatctagtccacccccttagcttcaaagattctctagttagcccctttataaaaaacatatgtttatttatttattttaattcagaataatagtaaaagacaagtaaaactagagttttttacttatttacaacccaacctctatgttggatctagatccataacaattttggatcttttattctcaacaaaaaaaaatctaatttctcatatcaaattttttcatcttcaatttattttcgctcaattcacaaaacaaaactt

SEQ ID NO: 47592 - DNA, 520 bp, Arabidopsis thaliana
tgaattgagagaaaaataaattgaagatgaaaaaaaattgatctgagaaattagatttttttttctgttgagaagaaaatatctaaaattgttatggatttacatctaacatagagattgggttataaataagtgaaaaactctagttttacttgttttttactattattctgaattgaaatagataaataaacatatgttttttataagggggctaactagagaatgtttgaagctgagggggtggagtaagattaaaatactggttatgttacgttataaattaactcatcggctttaatttaaaccataatcttgtaagaaagaatcaaaaatctgaataaaccaatggaaatttcaggacggcgaatgagaagattcaggatgagattccgaagagatcacctcaccggcggcgagaacattgaaaacgaagcctcgtgttgctattgtgcctcaaaatctcgaatttcaacgaacccatcttccgtttaggacgacgattctccggagttttgaa

SEQ ID NO: 47593 - DNA, 1177 bp, Arabidopsis thaliana
  unsure (1)..(1177): unsure at all n locations
tcaaaaatacattattttttgtgttgcttgcttcacaaaatatttaaatgttagtgaactaacacatactttaattgttaaatttgacatgacgttatctgtaattttcttttctcatcttacgtttgtacttttcgtgttcaatgtgtttatgcaagaagaagttattttgtcaaattacttataggttaatttattcattaaaagacaaagagtaaagaaggaaaactatctaaatagatttctgttgacaaagattgttttcacatcttcaactttattcaagacacacacaaaaaagtacatttgatttggttgattttacttatacaacacatacatgcttcaaaaactcttcatcagtcgataatttttccaaaacactagacgataaacacgtttgaaactcgatgtttccttcttcgatccccggataagcaatgagtttaccatcggtggtatttcccggtccagctcgaaccgctattggtttaccccaaccgaaatcgtttccatacacattgaaccgaggagagctagcaattgttatagaattactaaaagccttagcattcaatatactcggtttcttcacccaattctcagcaaactctctaaactcttcattcgtttgtgacccaacagttttgtttatttgcaatgcagcccaaccaagcccattgtgaagcatctccgccacagtagtcgtcaccgtcgcgaatccgaccacgttaccgaaacactctttctcaagcggagggtttagtcttcctctcatatccaccagtaacttgcaatgaatcacttcttccggattcagaccactgtttctgattatcgatcgccacatatacgctgaaaccgcttgaagcgacgatattttccgatcatcggagtcaacctcgccgttagctttcgctttaagctcagagatgtttctactcgtgactcgaaaaatcttctcttgtaataacgatgaagtaacaacaacctggttcggtgtctccgtctccggtaacggaattcgaatcggatactcaataccgtcgagaaaccatccacggagaagcaaaggaggaaactttctccgatgatcggcatcaaaccccgttaaagcaaatctccgaccaagtattgaagaacatcanaacgaagaccatctgcacaatatgattat

SEQ ID NO: 47594 - DNA, 662 bp, Arabidopsis thaliana columbia
ttgttttgcagacacctcaagcaggaagagaaacggtgtatggatgaattgcaatgcaacattgtggtgatgaagcgttcgcaggcaaaagttctacgcttaaaccttgttggatctcctaagaaagatgctggaaaagagtgtcccttaccatctggaccagaagcagcatctgagaaacactcaaagaacactaaaggattgttagatgctgatagaggactacctgtcactcctactagcagccctgagctggggacaccgttcacaagtacagaagccgggacttcatctgtgtcgagctccgacctgggaacttcacctttcttcacattgggaatgaacggatacatgaagaaggatggagcattggtgatcaaggagaatgatggtcttgatgattctggctctgaaacagagagtgaaaaccaatcattagcgtcaacgagtatgagattccagccatggatatcagaatatattggcacccatcgccactcatcccaggaggccgaagaaagcttattatggaaaaatgatgacagggcacaaatatccactacaaaggctttgcttgaaaagttctctaaacttgatgttgaagttgggttgtcgtctagtcgaaggatggatttagagtttagtggaaacgtaagagatgc

SEQ ID NO: 47595 - DNA, 284 bp, Arabidopsis thaliana columbia
tcgggtaaaccctgaataccacttagacacaataacctcatgtagtactaaatataagtagtttaccacaccccaaacaagtataacaaaatcaagtactaaatcacgtatttatatatatctccccatatatatatatatacatgatacagcaaggacttattcacagcctcatagcatatctcatataagtataacactctaaccaggcaagtaatccctcgaatcaaatctcgattcatcaagtaaacttagttaagtccatattcacttagcctagtcat

SEQ ID NO: 47596 - DNA, 412 bp, Arabidopsis thaliana
  unsure (1)..(412): unsure at all n locations
cagtcatttagatttacatttataaatgaaaatcaaagatcccaaatcacttctatgtattttagggtttagggtaaagatttgcgagatttttgcgggtggtttgcgagggttgatattgttcattgcaaagtactcgtactttcctcgcaaatttgcgaggaagcagtctctcgcaatatttgcgagggattagcaatgtgcgtccgtggtcttgcaaaatatctgcaattccctcgcaaatttgcgaggaattccttcccatgcagatttttccacgcanaacgacatgtattctagtagtggaagcagcgtctactgcagcttatctaatcaaaagatctccctcaacagccatagatcataatgtacctgaagaattgaggcttaatagaaagccaggatataaaca

SEQ ID NO: 47597 - DNA, 442 bp, Arabidopsis thaliana
gcgagattatgcacttcgcgtttgttttgaggcgatgcattcccaataacgcctcgatttgcttcggatttgcctcgatgccgagttacgtaactagatatccgaggaattcaccgaatcttactctgaatcggcattaggccggattaagcttgacgttatagaggttaagttgccggaaacattcgcgcaaatgggctatgtgttcttcctcttccatggattttaccaacatatcgtcgatgtacacttccatcgttttaaaatatcttatattcttgttgtgtgtattcatgataataaacaaattttagaatcttggatataaaaattatcagattatacatgaagatatatagacattgatatgtagagtcaaaaatgaatctaacaataaaaaatgtaagttcataacatgagtctaattttactaagtataaaa

SEQ ID NO: 47598 - DNA, 590 bp, Arabidopsis thaliana columbia
  unsure (1)..(590): unsure at all n locations
tataaagcgtatatatgctaaataatatatagaaaatatttacagaatactttattttttcattccatcgacacattaagattacgtagtatctgaatttcgttacataggaatatataggatacaatcggtaattaccttgtctaatgtctcgcgtctcttggacagctatgacctaaataattgacatgacaaagagtaataacctcaattttttaccgaaaaacagagacaacaagaaagccaaccaccagcaccagcaccagcaccgccctgtttcgaatcatccgggtacaatccggtcttcgagtcaagtcttgatagttctctttttccactttcactcttcgtgtttagtgatgtctttcgctcttgttggtactctcctaatctacaaaggattttaaaaataaaccaatagacctcataagcacaactcaattaattaaaaccgagttttcagtccaaccagtctggttttaacgagcaaattggcatggaagattagagaacgacttacgtgggaaatgcganagaagttgtactgttantacttgtcctggagtgacaagacttggttggagaaatag

SEQ ID NO: 47599 - DNA, 194 bp, Arabidopsis thaliana columbia
tgaagaagaaaagttgtcctggtatgcagatttagtcaattatttagtaagtggtatgatatctcagagtctggatgcatataaaaagaagaagttatgtagagatatacaccattactattgggatgaaccatacctgtataaaaagggaaatgatgggctattcaggaggtgtgtctctgaaggagaagttc

SEQ ID NO: 47600 - DNA, 663 bp, Arabidopsis thaliana
atcagacatctagaagaagatgataacaagatgaacaccagtaaacgaaatcaaaagaaaatgttgaataatgaatagattaagagaaatcccgattacaaaaggtcaagaacacattatctgcggaataaaaactagataaaaacgagaataaaaatacatgctatttatagcgaaatattctgaaaccctagtactcaaaacgacacagtattgggacggattaagaacggcactcgacccatgtggtcgagtgattggtcgagtgataagctggagtcttctactcttccttgtgcccgagactctggttgagtgcagaatggagaagactctgaagctagcagtcgagtattctgtcgagtggatgatgatggtgatacttggccacgttggtagagtgattggtcgagtgaatgatggtggtgatactcgaccttttggtagagtgattggtcgagtgaatgatgatggtgatactcggtcatgttggtagagtgattagtcgagtgaatgatgatggtgatactcggtcatgttggtagagtgattagtcgagtgatgatggtgggcacggccatgttgatagagtgattggtcgagtgaatgatgatggtgatctctaccttttggtagagtgattggtcgagtgaatttgtgtag

SEQ ID NO: 47601 - DNA, 533 bp, Arabidopsis thaliana columbia
tgctctcctatacttgctaagttcagataatagcaggttcacttcatcatcattttactcaccattaatgatcatggggtaagtagagtttggaccaaggaatgcataccttataccttaggaagtggtttgagattgaccttcggtgctttgagtttagaccagtcatctgaagttggaatgatctgctccccagagttgctgacagtcgaggtcgagtgattggtcgagtaagttctcgagtgagcaggttgaacttgtgttgatccttcttcattcattaccattacctttgttgctggtccattcaattcctcaaagggtttggattcttccatcgctttatgtgagtctaaaagcttctggtacccaaaaccttcaaatgcagaaacccatcttgaccagttttggttaaagcactgttaaggtgatcttcttgtgcaagctcttctagtaactcatcagctaactgatccatttcttcgatccaaaagagttgccttctatgttaggctcttcattgcatctttgat

SEQ ID NO: 47602 - DNA, 472 bp, Arabidopsis thaliana
ggatccccatgcaaatcactacttctctatatccaaaatacactcgaccgcggtgctggccgccacgaaggagttgaggtcgagtacccacagggcgaagtagagacacaacaaggagtttcttcaatggactgggagcaatcacaggcagctattgacgaccaactccgctccttcttcaactgaggtaccacacccaaccatcattgtatataccatattctgttttcgtttcttttagtgtctgttgaactcttctttagacttctaatacaccagagacttggtagtttaaagtttgggggaggattcaagaagtatttaacatgtttgctagtgagtcttatttgcatcatttgagtcttaacttcatctaaggcatggaagataccagaaaaaaaattggacaaatttctgaaaatgtattcccataaacagagtgttcctatagtggctcacatttaggattgag

SEQ ID NO: 47603 - DNA, 491 bp, Arabidopsis thaliana
cgtcacgactccaaggcatgtactctgtttttccggcgagaccactatgaccctcggcatcatcaatttaccagttcgagccggaggaattacgaaaatcatcgatttttcagtcacagaccagccaactgtctataacgcaattataggcactccatggctaaatcagttcctagccgtcgcctcgacttatcatctctgcctaaagttcctgacaaacaacggtgtgaagaccatctgggaaatcagaagaatgctaggatgtgtttcatggcagcgcacaagctcaggaatcccgtcactgagtcgacagccgatgccgaacacaaaaaggtgaagctaggccgagctgaagaaaaagttatcctgcagttttagcaattaaagattgacgaggctcgggaagcaaagaaacctatttctgatcttgtgatctccatttgcctcgacgataagaagccaaacaatgtgtggagatttgtggagactta

SEQ ID NO: 47604 - DNA, 606 bp, Arabidopsis thaliana
tcctaaacccgtgattttctcgcaaaaaacgtaaacccgagattttcccgccaaaaacgtaaacccgagattttcccgccaaaaatgtaaatccataattttcccgccaaaaacgtaaacctgtaatttttccgcccaaaacgtaaccccgagattttcccgccaaaaacgtaaacccgtaatttttccgccaaaaacgtaaccccgagattttcccaccaaaaacgtaaactcgtaattttcccgccaaaaacgtaaatccgtgattttcccgccaaaaacgtaaatccgtgattttcccgccaaaaacgtaaacccgagattttcccgccaaaaacttaaacccgtaattttcccgccagaaacgtaaatccgtaattttcccgtcaaaaacttaaacccatgattttatcgtcaaaaacgtaaatccgtaaaaagtggaatccgtaaatatcctaagtttgatgataatgaattaataatggtaattatttattattgttttataataataattaattcaatgtattcttaagtgggttaaccatttacaactcacccatcaaattaaatgactcatttgattatgagttgagttgagttggg

SEQ ID NO: 47605 - DNA, 543 bp, Arabidopsis thaliana
tggatatcatcagattttcatctgaatttgtccccttgacaaaacgtgttcctccttttgaacttgtcccatcatatccaagactccaagtaacgtttgaagttcttccaacagtcaggagctcatccaagtctttattccccctactcagcatcttgatgtttctcagttggtcttctagctgtttttccagtccttgggatttgattctctcttcaccgagctccttttcaagtgtagaaactttttccatcaagattcctttttcagaaatgagctccttatttcccttccttttcagagtcaactcctcgattaggatcctgactttctccaaagggaatccatgctcatcgttcactgaatcagtatcatacgcctgcatcatcccaatgatctgataagactatagttgataggggttcagagatacatcaatcgctgacttgtgtgactgaagcttgtctggcagactcctaagaaatttcttcaacatcttcttgtcattgtatgtgttcctaggacaaagcttcgtgtgtgatg

SEQ ID NO: 47606 - DNA, 567 bp, Arabidopsis thaliana columbia
cccttcgcttcagcaatttagttactcgattgtaacacaagttacagctagctgtaatctgtccttggttactacagaaacaattcctcgttcttctgctcagctgtttgacagtcgactgactaactcttgcttctgatctcgtctttgccttcacaaaaacaaacttagcgaagttgttaacaggaacaactctattcataaccttaactaaggtacataaatatccaccattacgataaaaatcatctttctttatgtagacttgcttatcattcttgtggtgctgcttgtggtgcctgacttgcgtaacacgatttaggaagctgtaacaatcacctctgttgtgtttcttacttccgcaaaaccaacatcatgttcttctgctcctcagatgattgtgatcaacctgataatttaactgtctccagttatgagtagccatactcctggtcaacgcctttcgagccttcgaaggtgcatccgtgcggtgtgctgctgctggttggatacatcagattttcactgaatttgtcccttgacaaaacgtgttccccttttgaactt

SEQ ID NO: 47607 - DNA, 489 bp, Arabidopsis thaliana
accggaaactttgatggtcccggcagagatttgcttcttgatcaaaccctggtctcttagtaaagctctcagcttcttcacctgcaccaccaatccaattttttaaggggggcaatctgatagaatcaagactttaagggataaattaagaaaacgataatatgtaattagatcccatgattttaattttgtgcaatataatacacaaacctcatcgtgtaacatttgtttctccctagaaacgacgtcgtactcttgtctaagcgagtcgtacaactgctcaagctgcttcgccttccaccgtgcacggcggttttggaaccaaactgctatctgacgtggctgcagaccgagctctctcgacagcttcaccttcctgtctgaatctaatttgatctcttcttgaaaacttcgctcaagtgaagctaattgtccactcgttagtctcttcttttttatcatctcattgttgttgttcggaaatcggta

SEQ ID NO: 47608 - DNA, 1105 bp, Arabidopsis thaliana
ccagagatcataccatagtcagctgccatttgtttcatccacatgatttgagtgtagcaactccctagagcaaagtactttatttcaacaatggatagagacacaatatactactccttactctacctcgagaccatgttgctacccatgaagaagcatcaaccacttgtacttcaacattcttccatggatccagtccagtcagcatcttgcactgcatcaaactcttgtaatggtatctatgcattgcaactcccctgatatgtacagagactcatcaactttgactctggatatgtacagacatatgtacaaacaccatcagattcagttccagattcatccgccacaagcaggcttggtaactttctccccccgaatccttcgcatagcatcatgtgggatatgattcgaacacttaccagactgctgcaccttgctactagtggcaaagtcctggctatgttgacacttcaaattcagaaaacctctctgaacaaactactttgaatgtggattggatggattccacatgtaacaacagttactagttcacacacttttgagggtcgtacgtccttgtttatcagcagcatgacggcaaacatcaggtttcttcatccaatcttgactagatatacaaatatatctgtgatatttgttttgcttcagcaattcagttactcgattgtaacacaagttacaactagctgtaatctctccttggtcactatagaaacatttcctcgttcttctgctcaactgtttgacactcgactgactaattcatgcttctgatcttgtccttgcctttacataaccagacttagcaaagttgtaaacaagaatagctctattcataaccttagttgaggtacacgaatatccaccattacgatgaagatcatctttctttatgtagacttgattcccttgcttatcgttcttgtggcgatgcttgtggtgtctgacttgcgtaacacgattcaggaagctgtaacaatcagctctgtagtgttttcgacttccgcaataccaacatcctgttcttttgccctcagatgattgtgatcacctgataatcggaatgtctcagttatgagta

SEQ ID NO: 47609 - DNA, 599 bp, Arabidopsis thaliana columbia
atcccctagctttttgttcatattcaatataatgtgttgttgtttccaatgaaagaatcaaaagacattcaactattctacatatcatttagcttttgttcatattcaactatacatgtttcctatttttacattctaatatctactgtttgtatctatactgtttcattctgcactatgtgtgaccaacggtggatacttgaggtttttcagtttactagattggtcggcgataagctgagcagtagtattaggacctgcttgcataaagacctcgtacccatcacctaacagaccagttctattggtcgtaagctgccagaaaacaccaccagtacacgaaccaccagcccttgcactgtcgtagataacatcgtaaactctttggaaaaacttgttccgtttctctaagctaaaaccagggtactttgaagatttccaaactctgttatcagcaaaggcttcttgatgatattgtcacagtcttcaatatgtgctccgatccatctgtccacaaatgtatcttgttctcctgttcttgagctctgtaatggtagcctgatcttgatttggtaccagagagaatgtgttaaaagcac

SEQ ID NO: 47610 - DNA, 651 bp, Arabidopsis thaliana
tcaacaagttcacgaatgaaatggtgtaaaatatcaatatgcttagtgcgtcaatgttgaacaagataatttcctatgtttaatgcactcttattatcacaataaattagtaaagaatcagagatcataccatagtcagctgccatttgttttatccacatgatttgagtgtaacaactccctagagcaaagtactctatttcagcaagggatagagacacaatattctgctccttactctacctcgagaccatgttgctacccatgaagaagcatcaaccacttgtacttcagcaatcttccacggatccagtccagtcagaatcttgcactgcatccgactcttgtaatggtatccatgcactacaactcccttgattatgtacagacttggctcgtcaactttgactccagatatgtacagtcatatgtataaacaccatcagattcagttcctgattcatccgccaccagcaggcttggtaactttctccccccgaatccttcccatatcatcatgtgggatatgattcgaacacttaccagactgctgcaccttgctaccagtagccaagtccggctatgtaggcacttcggattcagaacaccactctgaacaaaatgctttgaatgtggattggatagattcca

SEQ ID NO: 47611 - DNA, 851 bp, Arabidopsis thaliana columbia
accacatggtgtattattctcgcttatatatcaatctgtgaaggaatcaatgtctctcggttattttattctatatctatctagtctttgatattgtcgacatttgtttcttcaggtccaataacatgaagaatctctctaaaatttagtcttgattgagctaaaatatatagttatacttcatgatacaatgccttggaacttcaagtccacgtcttgttgttgtgaccctccaaaagcattccctagaaactttgcaacaatagatatgaattcatctggtttttcctcttgaggaagatgaccacatttcttaattacttcgaacactgatcccggtatggctcgtgccagcctctctgcgttccatgctggcacaatacggtccgtatctcccgtcacaatcagaactattagaaacatgaagatagtatgatgtcattggttcagagttcagacatacaatgcacaatatttggttccaatttctaattcattgtcagaatcttatagaaagagatattaccagggcatttgatttcttgaagccttttagacaatgggagttttttctctgagccattattatctgttagtgtagccaccgtgaattccacgagagctttgtcccatcccttggctttaagaggctgttttttttgcaacaaatacaatcaaatttcctaaatttttaacataacaatgcagaagaaataaagaaacctgagaaaacccgaaaatctcacctttgtataccctgcacgacatgatccgtcacttgttttgagtcatacacgcgtcctaacagctgttactcaaatttattgattgcgacctcacctggtgaaaaa

SEQ ID NO: 47612 - DNA, 1023 bp, Arabidopsis thaliana
tgaagatgatgaccacacggttgaggaagatgctcagatgggaacgatcaagagtctgatactgattcagagtgattctgaaaaagaaggaaaataaggagctcatttctgaaaaggaaatcttgatggaaaaagtttctgcacttgaaaggagcatggtgaagagagaatcaaatccaaggattggagaaacagctagaagaccaaccgagaaacatcaagatgctgagtagggggactaaagacttggataagctcctgactgttggaagaacttcaaacgttacttggcgtcttggatatgatggatcaagttcaaaaggaggaacgcgttttgtcaaagggacaacttcagatgagaaatctgatgatatcaaaccagtaaaagcccaccgcaaggatgcaccctcgaaggctcgaaaggcgttgaccaggagtatgcctactcagaactggaggcagtcagattattaggttgatcacaatcatctgaggagcagaagaacaggatgttggtattgcggaagtcagaaacactacagagctgattgttacagctgaatcgtgttacgcaagtcaggcaccacaagcagcaccacaagaacgataagcaagggaatcaagtctacataaagaaagatgatctttatcgtaactgtggatattcatgtacctcaaataaggttatgaatagagctgttcttgttaacaactttgctaagtctggttatgtgaaggcaaggacgaggtcaaaagcaagagttagtcagtcgagtgtcaaacaactgagcagaagaacgaggaactgttggtactgtcgtgaccaaggacacatcacaggtggtaaccattacatgtggaaatcatccaatccacattcaaaggagttcgttcaaagaggtattctgaatccgaagtacctacatagtcaggacttggtcactagtagcaagttgcagcagtctagtaagtattcaaatcacatcccacatgaagctatgggaaggatttggggggagaaag

SEQ ID NO: 47613 - DNA, 622 bp, Arabidopsis thaliana columbia
tgccatttctaggttattcaaaaacatgacacccttgaagaacttgtgtaatattctcggttcttgttccggccttgtcctattatccattaatggtatcctctgcgtcgctaatcctctcacaaagaagttccggttcctgcattactctatatggggaaacgaaacgtggattgggttcgcggttgatcagatcgatcgagccactcagagattcaaaatcgttttcatatccgagcagctagaggtttcaaatccatacgaaacgacgtatcaattcaggatcaacaccggagaatcatggagcttatcgaaaaccaccattacttgccgcgcaagtaatctcaaaaagggtaagaattcgaaacctgtttacgtgaacggagatcttcactggctgagaaaagacgggagcatcgtagcgttcaatcccgaaacagagaaagcacgactgattcaaagccaatttaaccggaaaccggggaagctcttgctctgtaccggcgataaccgcctgacattgatatcggctactgatgcagtgatttccgtttatgccctcgagactgatggtcaatggatcctcgtgaggtggatcaagaacgaggtggtgcaccaaagt

SEQ ID NO: 47614 - DNA, 1376 bp, Arabidopsis thaliana
tccctgacaatagccggatcagctcgaaggagcaacctcacgacttgtgagctaactcctttcacagccatatgcaaagacgtctgtcctttcttgtctgttcgtcttgctaactgcggatctttatcaagcaaggttcttacaatatctacatgaccttggcgcgcacgaaggtgaagcgcgttttttccattcgatcttgaaatctcaagcaagcttgagtctttagcaagcaattcattgacaacttctgaatgccctcgagttgcagccgacacaagtggggttgcgtttgattgagctactgttttactcaattgaggttcatgctcaagcaataactgaacaatagctgcatgaaaaaagaagctcacgtgcggttagaaagacagatttgcaaatcctttgcttcaaagaggttttggtttacatgaatcaagacttacatcgatggccttgactacaagcaatgtgtaaagcgtcaaatccagaaagattcttctgcataagagattcaatggtcgtgtaaggcaacaattccttgacaacatctatgtttcctttctctgctgctgtaaaaagcggtgtctcccccagctcattcacctcgtttactacggatgtcattatttgagctacctcgtcatcaaaatcagctccggtaatggtaccagtaatctgagaatcaatgtcactaagaatctgcttaacagaagccaagtctcctctttgagcagctaggtgaagctcggtgtcgttgtgccgtcccgtgacctgtttaacatacttcttcttccccgttggatcaaaccttttccctgaattcgaaagccccaaggacttgctcgagttagacaccattaaagccttacccgaattggacagaaccagagtcttccttggggttggagttggcgacaggtccgctacagtactccctgtaggactcgttggatccgtcgccagacccttctccatacctggttccagttccttctctgcgagagtgagattgattacacaatgtttgtttgtttatcacgtaaactagagatccgttgaagaaaatgattaaaaaaaaataacaccctaagagatatttcaagacctaaccctaataacacgcattgtctaattccgcaacgaattttcgtaacgattggagtcagaaatgtaaaatgaaggagaaggagaaatcattgtaccttcttcgattctggatcccattttgagagattagaaaacagagaaatttcaaagcgggatcatgatattgtaaaaaacgacgactctccgattggagaaagatgaataaccgtcggccaccggtgccttcagtgtcacggcaagggtttgcgatctgattatttgtagga

SEQ ID NO: 47615 - DNA, 523 bp, Arabidopsis thaliana columbia
ttctacatacataaactcaaatcgccgcagctattggttagatcctctttgttcaccgtcagctcaactcttcttatatatatacgagagtaatatctccacatgtttatccatggatataggcctattacggccaaagcgaacttcctactataggagcagattgagattatgaagatttgttttttctcgatctacttcaagatggattcgatggggttctctcgactttagcaacgggcagcgctgtagaagaggagcggtggtggatctgaagtctggcggcggagtgcgctggatcgtggatttggctagctacgtttgtgtcatctcatctccttctcgcgtgtggacacgtataccgcacgtaacacttttttaatctcgtccttatctttaaattttagtaggataaatagacttcaatttaaattgaagttgtaacgctggtggtttgggctttttcatcatctatatactcaatgggctttcatttttatgaaatgacttgtggcaaaaaaat

SEQ ID NO: 47616 - DNA, 545 bp, Arabidopsis thaliana
tggtatacataagtgcaaggaaatagacattattaacacaaaatatgtttgttctttctaggagagttattacaaaatgtggaggctgaggatcggagctaaggcaggagatgaccctcacttgtgcaccaccaacaacttcttgggaatgcagatatgggagtttgatgccaacgcaggctctccagcggaactctctgaggttgatcaggctcgacaaaatttctcaaacaataggtcacaatacaaggcttgtgccgatctcctttggcgtatgcaggtaaaactttgacagtgaaacacatgcgcgtaaattggtctacctatacggtatcacataatattttgtttatctaaaagtttctaagggagaagaatttcgagcaaaagattccacgagtgagaatagaggatgccaagaaaataacatttgaagacgcaaaaaatacactgagaagaggaatacattatatggcagcgttgaatctgatgatggacattggccttccgaaacgctggttgcatttcttcaatgcccctttgta

SEQ ID NO: 47617 - DNA, 1191 bp, Arabidopsis thaliana columbia
ctggaccgttgcttccattgctctgcaatccttttaaccatgaccttaccgatcgctcttgctcgcctggtgatctcgatttgaacaatgctactgaagtaagtccccctctgaccaatttctttactgttgaaactgtctctagtaggcataaaattgcacttgtacaaagaaatcttagtgatgtcaaaacactctcaggcatggaccagtttcgtgtgccaagtgagccagaacgggacttgcaccacaacaggaaggcttacacctgcgctgtacagtcagatggcatcaggtgttaatatcagcacgggattgatcagagacgcgccattcctggtccagcttcaggactgttcatacgcaaaacagacctttagagacataacgaatgaccattgtcctggactacagcgttatggctattgggtctatgtgggtctggccattttagcaacggctgtgatgctctcacttatgttctggatcatttacagtagagagcgaaggcatcggaaggaagctctgcctgaattttctgaaagtaaggagattgtaagagttaacttttgatgtatgtctctgtagatcttaagcaaaatgtttcaagtctcaagatacttgatttgtgctttcatgtctgaacatagtccactgagaaaaatgaaaatttagataccagtcaatgaaggagagtcttgtacttgttattacagtgaaatgtaaacacgaaacctttggttttctaaggttcttcgcatagatatatgcattaagattatacttttcgaccctgaaagaccttgaaaccaaatgggaaattttgcacaccaagtttttgactatctttagttcatgtttccaacttggctgcagcagatgcatagctgacactgctgtctcgcattgtctggcattggcttgactgctcgtaccgcaggaaattgatcttaatcttgcttgatgaatgttttagcatctgaaagcaatcacaaacataaaacagaagtagtaagttgtgaggaatatctacaaaccagatacatgcaaagtagcctcggtgagtaccagattcaccattatattggttgcatctaaaagaaaagtatctagatactaaataagaaggcagcaagcttaaggctattttttcatgaagttattgaccaatgcaaagaaacagtctagcac

SEQ ID NO: 47618 - DNA, 504 bp, Arabidopsis thaliana columbia
tagagctagaggatcccctgcccgacggtgtagtaaaagttttacagtaagggagttggtcccttttacacggtttggagtggggaagggatgtgatcgttttagactttgtgtctagcggtcggagaattgccttatgggaaatcagcatcgtatagtattgggcccgtagatgaagagtcgttagcatgctagttttagatttagtagtttccgctgcatatactctgtaaagagtattcattgcttgtttgtttgtgttgtgttatttcttgtcgagtatactcaatcgagtatactcgtattgattgtttgattggggattgggattgggatttttttgttatttgttagaaacctggactcaccgagtaatcttagattactcaagattctagtttttgtcttacaggtaaccttagttggggagaccttaaggggagcacggacgttggggaaccggtgtagattttgttgtttttgtaaaattagatttgtaactga

SEQ ID NO: 47619 - DNA, 615 bp, Arabidopsis thaliana columbia
ggtttgacagctacagtacgacaacacgaaaattagtagtaacctagtcgttcttttacgactaactcacgttgtcggaacacagtcgtacattaacgactatttgatgattatattattgaaatgagatgttagttgttacgtagtcgctaatagactattcaaaattagtcgctaatttagcgactaattgacgactacgtttcttaatcatcctgtaatcataaaagagtcgcataggagtcttataaagtagttggaaaacgtgtttcgcattggtaagtaggtacacctaattatttagttgtagtcgtaaattagtcataaaaatttgcctatataataaaaattcacgaaactcttctttcaccaacaaatcagaacgcgaacaacatcaaagaaaaaaaacgatttattataaaaaaagatttagttagtttattgtataatgtcgggaaactaaaataatggcggtagtggcggtttctatcgagattggatgtacaagagatttgatgaagtgacggggaatttgtagaagagttagtagtccttgtagtgtatgaaagaatgaaaaacatatgaatatggatataggaacgagttcacggatat

SEQ ID NO: 47620 - DNA, 402 bp, Arabidopsis thaliana columbia
tgaccattaatttgtttattcattggtttatttaagaaaaatagatagttgattcactataaatatttgaaacacataattacgtaaaataaatattatttgatatatcactatttatttatttattttatcataaaagttacaagatataataatttgtctcatatattaactatatcataattatcaaataccgtatttaaccataaccgtatttaaccgtaaccgtatttaaccgtaaccgttttaaccgtatatataacggttaaggttcagattaacaaaaatttataaacgtaaccggtggttaataaaccgtaaccgtaataaccgtaaccgtaataaccgtaaccgtggtcatgcctatatggaagtttataaagataggctttaatcgagtat

SEQ ID NO: 47621 - DNA, 513 bp, Arabidopsis thaliana
ggtcaaaaccgtatattgagtgacggtccaccctgaagaagaagtacttggttcgccaattggtgtcccgacaggccttcaaaccacctaggatcaaagatccgggatgcgcgctactctagtaagtgccctggtcgctcctggcgttggtcttgacctgacaaagctgaagcaggtcatggcagccgaattctctgttcacctcccgggcccgggtaaataacgccagtacatggcggacgaaattcgggcacatctgaggaaaggcaaagctaaggcagtaaagcatctcgaggatgcacgccgaaatcgggaaaaacagcccacatttctcaaagaaattggcgtaggacaacaccacccctccgaaacgttctcgagagacagcggtggccttgggaatatcatagtcaccccaccggaatctggcatctcctccggaggttgaccaagtcgttgttcgtcatcgacgtgcctcccttttgcctgggagctttctttttcttttgtttg

SEQ ID NO: 47622 - DNA, 505 bp, Arabidopsis thaliana
ttacgactattcaacgatacttgtttgattagttgggcttcaaaatttcgaggcccaaaccaaaattagttggcgacaattatgcgactattatgcgacctctattgtgttgaaaaccctaaatcgagtcatttctcttcgagccaaacacttagccatttcttcttcttcttcgtcttcttcgtttcgcaaaaccctaatccccaattctctttcttcttcgatcttcttcttcttctttctatttctcaccttaaacctattcgatccaacctcctcttcttcttcttcttcgtctcgaaaaccctaatccccaaaactctttctaagatcgatcctttctccttgtagatcgatcttcttcttcttcctataagatcgatcgatcttcttcgatctctcaccttcaacctctccgatctgcttcgtcttcttcttcttcttctcttcaatctcttcaatctcttcatttggctcactatcatgcctatcgccggtcgaggtg

SEQ ID NO: 47623 - DNA, 529 bp, Arabidopsis thaliana
cgccaaagtctgagtgagaaagaaaattgataatatattgtgattattctgttacttaataaacacgttaggtaacttacacgtccgtcggaatatttggctctgtaaacacgtccgattgagccttcccctagtagatttccaggtgagaaattggctgttgcgctttgcaaatcagagagctcgaattccacagcggaacgagttgaagtggttcgttttgcattgagcttgttcgcaaattcggtatcagtgaaagacatcacacgcgacgaaacataatgttttagtccctttgatcctatcctatggatattttcatcacccgaatctccagatttcccatctaccataaataagctcatcattatcagttacttgccaaacaagataggttgaaatgtgtcgtatacctttgtaatcgttgccgaaatcaacacgaagctcttgcgcagatccatgcgaggtgagagatttgaactttggggtgtgatgactgttatcttcgtcgatgaaatgaggtgagaga

SEQ ID NO: 47624 - DNA, 516 bp, Arabidopsis thaliana columbia
tgaacctgaatctgatctttaatgatcacgtctgcatcaaatttgaactcatagataccctaaaatacttggattttcttattcattttgatcactcttgttaatccaagtagctgactctccttattagagcagttaacccgaacccaaacctagactttgtttcaagccatatatcacttgtgagtgtttgtgaggtcttattccgattaagcttggtagaaagtgttaggttcgtaacgttagagatagtgtctcatgtagttctagttcgcatttttcggactagataggactaggtgggcgcttatactttgggttgggatgtgtctaaaaaaaaaaaaaagggttgattcattgatgagaaaaggtaaaaaagtctaggtgaagtaagctaaagatgcagaaaaacaattctggaaaagactgttgggattacaaggaaagactggtctacaaagctcgatgatgcattatgggcttacatgacagctttcaagaccgcccattggtaca

SEQ ID NO: 47625 - DNA, 583 bp, Arabidopsis thaliana columbia
cgtcgtcgaaaaagtgagaagaatcattagagttctttcttcgagaaatcaatgcaatcaaccctgcaaataaaatgagtccacctatagaagacaccgctattataactcctagtgtcagagccttgctgcttcctccaccgcctcctgatgagtttctgtctatgtgacgggttcccggaggtggtgaaggagctctaccgcttgaccacttgtttcctccagttctaaccaagaaatgaagaaaaacacattaatgcttttgcatcttttgattgtgtttaagggagaatgagagagataataaaacttactcaaggtttccaatattcttcaactcgtttgggatccaaccagtaaattgattgtttgctacgtttctgtcaacgcaagattcataaacaacattaatgaaagaaagttcatatttcaaggatttaaacgatgtgttatgtatatagcatgaaaaatactaacacatcatcaatctgagggaggtcctgagagcatttatagagcctttgaattggttttcttgcaaatgcctataattagaatggtaaggtgagtaacagtacaaagg

SEQ ID NO: 47626 - DNA, 979 bp, Arabidopsis thaliana
aaaagttataagtgtacaaagtcggctcaatcccattctctttcattttacgccaaacccacaacaattcctccaccattccaagcttcccaaaactcttaatcagagcattcgccgcagaaacagtcataggaaactcaaatttcttaatctcactgcttacaaacctaattctatccacatcttttgccagagccaatacatcaaccaaggagacataacactcgaggttatgagtatacttcttctgcttacgagaccaacagaagaaactccaagcaatatcaggtttttcgcgaatctcatcggatttcaacacaaacgaaacaaaattgggcgatagtttgataagaaacttacggcagaaaccatctagattcgattccatagaagccgaaccatctaaaaggttgagaatttggcttacccatggcgacggcaggagattacgattcgatttcaccaaatcggagacatcgttaaaaggttctatccattcgggaggaggaagtgagctgctattgaacacccatctaacactcgtccttgagctcgataaaggcgagcactttgaatcatccgacgaaaagtctccatttttgtacaaacagtgagattgtgaagaacaatgcggacgattcagaagcggtacagaaaagggcttccggtaaaatcttcgcatcggtaatttcttcaagcagccgcaccggcagcgacattggtcatatagtactcgaacactaagttttaatttttaaattaacatggagaaatcgtaacgaaatggtcccatggtctagtggtcaggacattggactctgaatccagtaacccgagttcaagtctcggtgggacctttttttttgttggcaatcacgtaaaataattgcgtaattacaacaagttttttttggatcttgtctttatttgttttctctgtacattggtgttacaaaaaattattatgatagctttatta

SEQ ID NO: 47627 - DNA, 499 bp, Arabidopsis thaliana columbia
cagttttcttggttaatatgataaccattggttcacttaaatctccaacatatttccttttacgatgcctccaatcttaacttcgtttaactcatcatcttctttgtaaacaaccttccctttaaatcttgaacccccataacgtgagttcatgctcacccatcattatttctacatccttccttttagttttgaaccattcatgtccttttgactctttcactcgattttcttcccagtcttcgatttatctcaccacttctcacagtacccatccttctcgaatccttaattatttggttcttcccttgctatcccaactcgttttactagcactacttcactattcttccttacttgatgccggtcctggcttcactataaacgcatatcgttccttagatatgtgtattgttgttcactcttcttctttttcaatattatctttaccacgtcttcttatcgatctttgtcccaattctttgatgagtagactctg

SEQ ID NO: 47628 - DNA, 304 bp, Arabidopsis thaliana columbia
tcttctcaaaatctctccactttaactatacgattagttactaaaataaaacttccaaaatatttaatatcatttaattactacaaaattatcatttttgatattgtttttctacatgactataacaattcaattataatcatcaaactgcagaaatatttgatagcatttaattactacaagattacaaaatattttgacaatgattcataaaagcaacctcattggtagttcccacacataagtatcttggtttagagagagaaaatatattaataaaaactgtgtgggtttcttaaaagtt

SEQ ID NO: 47629 - DNA, 1437 bp, Arabidopsis thaliana columbia
atctccttctcactctctccatcatcatcaccatcagagccgagaaaattacgaagcgaaggaagagaagaagcaatatcagcatcagaagcagattgagcgtagattgaaccaggaaattgtggagttcttctagttacaagagagagctcaagtagcttggatcggttttcaccgtctaaatctcgccgcggaggaggaggaggaggaacaaaggtttcttgagattcgttagggtttttgttgagctttaggtctcgattatggcggatgtatagagaaatggatctagcattgtggcggcgacggattactgtatcttgtgaatcgtcggcgttgtcttgacggcggagagatgaggagatgaaggaaaacgttgaggtgtagtagctaacgttgcagtggagaagcattagagcaacgttgtcggagagaattgagagagatggttttacagtgaacggagaaagtagtaaaatggaaaagagatagagcaaagcaacggctcggagaagatgaaataaaacaagtataaataaataataagttagatacgtatcaattggttctatggtctagcggttaggacattggactctgaatccagtaacccgagttcaattctcggtagaaccttctttttgtcattttttaaaaatgatttaaacttattaaaaggcacagatcttccatcattattatgctatgcttattccagtttattctacaagtggaaacgactttcttctacactcacaagtcacaacaaagatttgccgacaacaaagatttggaacgagagctcacaaaagcagagtaaaagagaaaagcagcaagtttcagtttggatcattctccaggcaagattcagtttcagtacgatgatgagtatccaaagccggcttttcttcccataagtgatgaaagcatcatctgtcccacaggtgtttccgatccatcagaccatccatgcttctcaagcaactgttccagaaagttaccaaccacataagaaatccccgacaccgatacagcaattgacccgtagtacagaatgctcttcaggtagctgcctctcgggtacctcacatgagctttggctacggcgagcaagacgatgcagaatagagatgccccgaaaactgatgcgactttgtagtctttgttgtgttttgcgctgaatgagaaatagtagactacaggagggagtattccggtgattatgaaggataagattgcgactgttgcgtgaagtgtgaaattttctcttcgtccaaggagtcgcttataccgaccttcttcttcttctctaccgttagtctggttatcttctgttgttgttcttatgggttcccctctctaagttcttggagctgcagaagaagattctctgtaagtttcttgaatttgccagttacatggttcattaccaagttc

SEQ ID NO: 47630 - DNA, 545 bp, Arabidopsis thaliana columbia
tttttcttacaaaatttatttatttttgaatttttagttttatttatggttttaattattaagtatgtttaatttttcaaatattatcaatttatcataataatatattgtattttttttcttttaatagtaatatattatataaaccccggttattttttatttaattactatcgcacccgctggtttaccagtcataaaactcccgcaaacgcactcattaccaaacgctcaaccagtcgttcaaaacacttgataacgtttgaaaccgcaaccgcccgtttccgcaaattcccgcaaccgcaatcgtacccgctgcgtttaaaccaggcccatagtcaacataagttacggaaccacaactatttgcgactcgaagatgtgtatcgtcatctcataacatgattagaaaaaggattaaaatgcaagaacataaccacgtggcgtcatgttgaccctgtgatatgattgtagtaagcaacaagcttatccaaccggcaagtcgcatcggaaaatctaatcgtagcttcaattatttgcatggg

SEQ ID NO: 47631 - DNA, 458 bp, Arabidopsis thaliana
ccctggatcgttgccttacccgaaattattgtctagcccgacatcgttgccttgcccatgatcgtcgcattgcccgaaattgttgccttgcccaggatcgttgccttgcccgaaatcattgcctagcccgacatcgtcgcctagctcgaaatcgtcgcctcgcccatttctgtttttacgattaagtctcggctcggcggatagtctacaacccccgcagtgaaactaacttgttgtaatctctcgatctttgctatcgttattaaaaaggaccagctccgttcaccccccaaaatctcgtatattattattgttacatccccagtacaaacaattggcgcccaccgtggggccgttgatcgaagctatccttttttgacgagcctatgcatcctgagcctcacacgattcgtgacgatatgatggatacttccagcgatcgagaaaccgatactggc

SEQ ID NO: 47632 - DNA, 544 bp, Arabidopsis thaliana columbia
tgaatgttaacaggttaagttatatgattctgaaagttcttttagatcttgggacttaattttgtcactacggctttggcaaagtacagtctagaacggtttgatgaattttgtgatggtggtttgcaagcaattgataagagcatgatccaaagaaaatatgaattctcgtgttttcaaacctcttttccttataaagattttttgttttccttgaggacaagcaaagatctaagttggggggagttgatatgttgtgtttttggtgtcttaggtccctttgttttgagtcatttatcgtgtcgtagtccgttttttgagtcttttggttgtgtcttgagtcttttgcaggttttaggtacttgtgacgggattggatagttttgggcttgctcgtgtcaaaacgggcgagagaagttaatgttgcgattctggcggtcaacttccagcggtccacctccatatgtgcttgactgccaattttaccgaagatttggcagtctacttccagcggtccaccttcatatgtgcttgactgctagtt

SEQ ID NO: 47633 - DNA, 586 bp, Arabidopsis thaliana columbia
tacaaaaaatctcaaagaaaaaaaaaattaatattcaaaacaagcatccgctcctttaaaaataggtcaacattgtacttatagataaatggtgcggatcaggccaatccgagacataccgggtcaatcccgctttttgcttgagaaaatgcttgcaatcgaccttctaatcaaccacatggtggatcacggttatgtccgagagtgtgttctcgtcaaatcgaccagtcactcgaccatcaggtcgatgaggctgtaactttttatctgctactatgtttgacctgaaatcaataccgttggaaagctaatttaaatttctatgactttgatgaaggactccaaagctaaatcacaagggaatgtcttcatatgacgtgattttcaagtacttcatattgatcatggattatcatatctcttgttctttcctccatatttctttggtcattgtttgttcttttaagcaccaaatctccgatgctagctctcttcttcatagttcttactccaacacctaaatggatgaactcattgcaaatgcaaccttaaacaagtctaaatgctatgttaatgcatcaaaata

SEQ ID NO: 47634 - DNA, 892 bp, Arabidopsis thaliana columbia
catcactctgcataaacgacaccagatatctgcgctgtccattgatagcttcaacttttcataatgtgctgcagcagagcacccattggtataaacaacattgacaagagtaagcattgaataataagacattgaatggcgttgttaccttgtagtttctacatgcagggcaccttgagccaaacaaaaattatgggtcaatgtcagtatacaagcctttcgcatttatatataaagttaagttatttccggataaatctcagagaattggataacgtaaagtcaggttcgaatatgaagaacacttgcaaacaaattccgtgtaagatccagtgcttaaaagcctaaagtttgaatttttttcagattttttacgagagagagagagaatgagaaaactgaccagtgagcgaagaactctaaaacggcatatttggcgggggaatcttggaaaactgaatcaaagttggtagcgttcaattcgatagcgttgtctttctgatcggcgacgttactgccgatgtcccggagaatcgagcgcgatcccggtgaaaacgacgccgcagcttcaaggctcagcagacccaacaacaagaacaagtgtatcaaagacattaaatcgaataaagcatacaaattttgaagcttgatccggatgagagggaagatctaagagcaaaaagagcttccctccttccgttgagaaacaaaggtctctggtgtttattacgacgtcgtaacgcctttgaccggcgtcgatactttgttctcctcgacaactttcatactgggctttattataacgttataggcccattactaatctcgatttgatgtttgtgtttgtttcttttgacccgccaaaaagaaagaatttgaatggtagatagat

SEQ ID NO: 47635 - DNA, 715 bp, Arabidopsis thaliana columbia
accaacttggtaagctagatgaagtaccacttgtatgtaaaaaattagaagcgtctagagtttgtaaaatcgattgaaatataaaaagcactttttgtttgtatatagtcaaaagtcagaagatgaatgagcatggaagacgcaaggcgaagtaaaggatgcatgtgggaagcacgtgcctgttgaacacgtaagccgtttgcagcgacggcggaagaaacttcgagtttcacattggactaaaatagcggcggacctgcgcgatataaaaaataaactcagccaacggtcaagatttgttatcgttacataattaataaggagcataaatatctgaagcaacccgtatgaaattaaatggaagcaacattttaaggttgcttaagaaaatagtctaatcgacttatcgaccaatagtttactcatgtattgtcaaaaatccaaaagagttttctatttatttattttatttttataattatatactctagaatgattaatctaagaatctatatgttggctacggcaaactaaattattgatcattttcaaacgattaaaatgtgtaattatttggaaaatcaaagtaaactgtatataatataaagattggaaaatcttgatatcgtacacaagtattttcctttggttatacccaaatttcacatggaataatacgagaattatgaggaataattagcggcgatgtcatgag

SEQ ID NO: 47636 - DNA, 891 bp, Arabidopsis thaliana columbia
aatcaaggtttttcgtggagatgcaagcaacaaaattgacccttcggtaaatgtcggctcaaaagaagaaagaggccgaagagaggagacttgccgagatagacgtgggagtctcggcggttactccgagggagtcgcgtccgagacgattcctatgccggaatggagcgcgggtgtggtaaaccctacccttcctgcagtgctggacggtaccgaggcgaatgaaaaccgcctggttcttgatgctactgcacatgcagagggtatacaaccgatagccgctttgccgcctagagggcaaatgaaggctttggaaaagcgccaaaggagcacggaccccgaggcgaagagtaaaaagaagaagaagaaggccagtcgggaagagggcgagccaatttatgtagacaagatcgcctcggcgaatcttatcgcctcctgtggggggcgtattcttcctcctcctgagaaacttctagaatctgagcaatatgctgaggcgtcatcgttctttttgagggtaaacctgtttcttttgttcccgatcatagttttggacttgttctgatatttattatcattattattttttttaaactaggctttctcctcaatgaacaagatggtgcgatcctacgattccaccacgcgggcttgtctcggtgccaatgaaaagttggccgaggcggagaagaaactcgctgctgaagggcatgcccgagccgaggctgaatcaaaggaagtagaggcgactctggcaaaggaaaaagccaaggaggaagtcatcgtccacaaggacaaagatagctagctggctgagcatagtctcaaaatgaccaataagctatcttccgacctcccacgctataagcgtatgctcaacgaggagaagga

SEQ ID NO: 47637 - DNA, 492 bp, Arabidopsis thaliana
tcaccattcaccagagatcaactctcattacttcaaattcttttaggaaacttctgattgtttatgattagctaacaaaatcatttattcacataaagtgaggcttcttaacaacttctattaagccagcttacaaatctcttgtaaggaaaaaagctatgacccctctaatgaatataatatataatatagcttttgctcatctctataccatttacattactactatatgaataaacccactgaattcaatcagcgaaaaaggccataggggttggaaaattgtataggtcattaagctggcgagaatcatcagtgtaggctcaagtgcattgagtcttgaagcttctgtatatgaaaaggctttttctaagatccagtcacggaatttgcatcggagagctcagatctttgcgcgtttgagctgcgagtgaacagggtagacattctctgtttctagctctctcttctgaatactctttgtgaaagaca

SEQ ID NO: 47638 - DNA, 512 bp, Arabidopsis thaliana columbia
atgtcatgtatcggtttggttctgttggtcaggtattcagttatactaaacacttttttgctttaacgttgagagtataccttgacctatatctgagaattgaacagtgttaatacctttatttctattagtttaacaggatacagattgtagaatgattctagtgtaggggagcgataaagagtgagagaagtgagatgaaatctttgattggaaatttcatgtagacgatgctatcaccccatatgaccaaaagaaattcccaattaaagatttcatcttacttccctcatgtggcttttgccagattacgggtatagatttgttaatctgctgggtagaaatttgttagaaaatggcacgccctgtggtcattgtttgataacttatactatgatcatctttggggttttgggccttttggcttgcattccatgtctttattcccttttcttgtgccgaacaggacacacagttactgctatgggacctagaaatggatgagattgttg

SEQ ID NO: 47639 - DNA, 1273 bp, Arabidopsis thaliana
tcaaatttgggttttgaagttttttttttttttaatattacggattttaagaaacttgatttttgcaatatgatatgaaattaaccggattttgtatctgcattagtcgttagaaatttcaaatattcaatttgtttttatatcgttatgtagattttagtattcaagtttttaattcaaaattttaaaataggttttttaattttgatatttccatggcatttactaaataaaattcattttattattttaaaaaatcaaattatttgctacgctgggttttgagaaattttggttttgttaattagaaaagagtccaaaccaaatataaaagccatttaatataagttttttttttttaaagtacaaatatcaagagatgcacatgaaaggagcaaaccaggtcgagcaacttaacctaacatcagaacaaatacagctaaacagtaaataaagagagtaacgtacacctatacacatggttaagctgcctaatagtataattaatgaaattaatgtgaggtttaacagatgaacagtaatggctacatacaagtttggcaggcggttgtcttaatctcccatgtgtcattatagttttagaaacatatattatttcttgcatgttttgaatccaattaatgacactaatacaactcactattttacatattatgtactcattgtttatataattagtctgtaccaaaaagaaatcccatgtttgtaagaaatttaggcaagtatgtaaggttcaaactttccataagtgggcatgacaaaaacaaatttttagaaactcagatagtttgtaggtgttataagcagcaataaacatatacattatgcaaccgattgacagtttttgagaacttgtttctccattttagataatatctttaaacttgtgaataaattcattagaaaaaaaacttaaattcatggatataaaatgcatgattgagttatattttctaggcactctccaatttcattaaacaaggagagtagaacctaaagaaaaaagtggtcgtccaatggacctctcactaattcaaggcatgtctctgcctctctattttctcttaacattattctttttcttctttgctaccgcaaaaacgcggagaagctctagcaccggcacgcttccaccgggtcctccgatactgccattggtcggaaacatattccaactcggattcaatcctcaccgttcacttgctgccttttcgaaaacgtacggacgtataatgagtttgaagcttggaag

SEQ ID NO: 47640 - DNA, 512 bp, Arabidopsis thaliana
cttctcgtttacgttgtttacgatgctaaagatattcccccatgtaactgtaaaacctttatattgcgatgaatgtagaacgatctcctcaaggagactttcactatctctactctagctcttttttctctctagcctgaaataattgtagagtgaacttcacgacaacgttatcattcatacccatcttcttttacacattttctttaaaacacgttacatgcaccccttaatatcatgttgggaaaataaacatgaaccaagaaatcagattcccacaataaaatctctgtttctgtttttttttttttttttttttgcagaatccttaaacaagaatggcgtcgaagaagatgaccaagagttacttcgatgttcttggaatttgctgtacatcggaggttccgttgatcgagaatattctcaattccatggacggtgttaaagaattctctgttattgttccgtcaagaaccgtcatcgtcgtccacgacactctcatcctctcgcag

SEQ ID NO: 47641 - DNA, 838 bp, Arabidopsis thaliana
tgacagtacacaacggcagatgtgtgatatacaccagatagctatttcaggcagtacatatattacagtttcagttgtgtctcagagagaagcatctcctcttctatggattctctaatggctttcaagagccgtggcataaggttcttggtgctgaccacgatccctgttttgtgttcaagatgatttcctctcgagaagtccagaggattcccgtcagcatcgcaaactacacctccagcttctacacgaggttattggcttattgctcacagcttttggtcactagtgtaattgttttgtttgttttccgtaataggtgccatgaataaatatttgcatacctgttgtgatgattgcaccagcagcatggttccatatgaactctcggtaccctttaagagtgaaacgcaagtatatctctgcatctcctcgagccagagctgcgtacttcacttgactatggattcttagaggtggagctttgatcccaagtttctgcttaccgtaagagagtaagttttagtgaaagattaatgcctcggttaggttaggcttgatgccaactacacacataaaatatgttattctgtacattggcaatggagctatggattgggactggtttgtgggatgattccacaaaggttgcttcttcaggattctcaatgttgctcacttgcagctatttgcacacttgctccactctgttttaagatcgcaaaacgagagaacaagcctatcggacatcaaatgctctgataattataataccttctgtggaggatgagagtcgccttcatgcgattgcacataagctccttctcccactgtagca

SEQ ID NO: 47642 - DNA, 524 bp, Arabidopsis thaliana columbia
ttgctcattgtatcatgtcattttgcaccattttagcttattttgcatacttaggcatctaggatcatcttgcattcgcattgcatgttttggtgtgttttcaggtgcaaaaggggcttaaaaggactatactcgatccattcactcgatccatgcagatacaaaagaggcatcaattcactcgacctctttactcgatcaaggatgctacagaggaggctgcagtttactcgaccctcttactcaatcaaggcaaccttagatgaagcagaagattgatctactcgcccctcctactcgatcctctactcaaaccatttactcgaccaagggtgaccaactctacaagacttgttgagctatcaaagcgtcttcggatcctcctcattccccactcagccagacatctgagcatacatatatgagaggatgaagcatctactcgaccaattgatcactgggagcatagacacaaaggcgcagactttgcagcaccctctttactcgatcccaagatcgagtat

SEQ ID NO: 47643 - DNA, 584 bp, Arabidopsis thaliana
cctataacatcattcttggaactccgtggatttatcaaatgaaagcggtcccttctacttatcaccaatgcctcaaattcccaacttcgagcggagtggaaacaattcggggagatcaagaagctttgagaacttgttatttagctagccaccgattaaaaattcaatagcaattaacgaaacccgcaaagaaaggagtgatcccgagatttcctagcgggcagaaagtggatgatgtcgtggtcgaagtaattctagaagcagacaaaccggatcaaaaaattcgaattggagctactttatcgggcaaagtgaaggaagccatagttgagctgttaaaaaggaacaagaaatcatttgcttggtcggcagcagatatgccaggcatagacccacatataatttgtcacgagctaaacgtagacccgagttttaaaccagtaaaacaaaaaagaagaaaactcggagcggagagagcaaaagcagtgaacgacgaagtagataaactcctaaagactggatctataagggaagtataatatccggattggttagcaaacaccgttgtggtcaaaaagaaaaat

SEQ ID NO: 47644 - DNA, 574 bp, Arabidopsis thaliana columbia
agaggatccccaacatgttggttaacatggtaaacgtagaaacgtaagacaggaaggacgcagcagaacaggtgctcacgctgcaaaggattgggtcataacaggacaagttgttctaatccaatttgagaaattgtgttttcgaattttagttgttaatatatgtatgatgattaactagttgctatttttttttgtaaaatatttcagttcttattgtaaaactagttgttatgttttttgtaaaatatttcagttcttataattagttattgctgaaacatatcttgattgtatcgcaaatctctgcaataccgtttgcttatccataaagccgtatccatatggagatgctttttaacaggtaatgtagttctaatccattttgagtacttgtagttgatttttttagattgggtcataacaggacaagttgatctaatccaatgagaaattgtatatttgaatttaagttgttaataaatgtatgatctataactagttgccatgtttttgtaaaatatttcagttcttattgtaaaactagttgctctgttttttgtaaaatatttca

SEQ ID NO: 47645 - DNA, 467 bp, Arabidopsis thaliana columbia
ctattgatgtattgcgttcttaacacagttatgatatgaacatgcttttatctttggctagatattgcttgttctgtttctctttggttggtttgtttagtatcttttcaggttgaactagaaggatgcttgagtatcaaactaagtcaaaaagggggagattgaagatgcagattctgacatcaacgagctgttagacatcagggagctgttggatatcaagacgctgcatcaaatctacattaaacgtttgagctgctgacatggacgcgtgacgtgacatggagaagctggagtggttgatgtgatgagccaagaagctttgctgacttggcgtggtgatcaaagacgaaagtcggttgagaagatttggtgaatattcttctcaacaagataaggaaagagataggcttgaatatcaaggagcatctcgaacaaggaatgagataggctggaatatcaaggag

SEQ ID NO: 47646 - DNA, 462 bp, Arabidopsis thaliana
cccggctataacacgagcgtacctgatagacaaagaaaatgaagcaggtcattgccgtttctttgcagagaacctcgtatgtgacgcactcaaatggtttgctagtctcaaagggaactctattgataccttcgaccagcttgcccccgccttctaaaaacagtactcggtactcatcgtaaacaggacgtctgaagccgtcctctgggtgtcacccaacttcagaacgaatttttgcgatcttacgtcgaaaaattcaaagcaatcaaatcaaagattgcgaacctaaacgaggaggtagccatagccgcccttcgcaacggcttgtggttttcctctaggttccgtgagaactcaccgttagcaactggtctctttagacgatgccttcacaaagctctccacttcgccaaagccggagtccggagaggagctcgccgtttcgcgcctaagattcaaaga

SEQ ID NO: 47647 - DNA, 1063 bp, Arabidopsis thaliana
gattaaacaaacaagaaaaaaggataataatattcttgttccttttgtcacttttaatctttgtatatctgtggttgaatttgaatatactcataaaattaattctttctttccttctttatcaaaattttcacatattctaaaaactttttgtgttgtttttgaatcatttcttcctctctttagcatcaaccaatcacaaccaccgttggattcacgggaaataacatcaaccaacagtttcttcctcaccatcccctcccaccgcaacagcaacaaacgcctccgcagcttcaccacaacaacggtaacggcggagtcgctgttcccggtggacctggcgggttaatccgaccaggttcgatggcggaaagagcaaggctagccaacataccattacctgaaacagccttgaagtgtccaagatgtgactcaactaacaccaaattctgttacttcaacaactacagtctcactcaacctcgccacttctgcaaagcatgccgtcgttactggacacgtggcggtgctctaaggagcgttcccgtcggtggcggttgcgtagaaacaaaagaaccaaaaacagcagcggtggaggtggcggtacaccagtagcggtaacagcaagtcacaagacagcgccacgagcaacgaccaataccaccaccgagccatggctaacaatcagatgggaccaccttcttcgtcatcgtctctaagctcgttgctgtcttcttacaacgcagggttaatccccggacatgatcataacagcaataacaacaacatacttggacttggatcatctttgcctcctcttaagcttatgcctcctttagacttcacagacaacttcaccttacaatacggtgccgtttcagctccttcttatcatataggcggtggaagcagtggaggagcggcggctcttttaaacggttttgaccagtggagattcccggcaacaaaccaacttcctttaggtggtttagacccgtttgatcacaacatctaatggagcagcagaatccaggttacggattggttacgggtcgggtcagta

SEQ ID NO: 47648 - DNA, 832 bp, Arabidopsis thaliana
actcatcaagtttccacatccatcattttccgtgtttataacaaagttcatacatttgcttctatggctaatacaggttcgtgtctagacgctaaatcacttcatgaagaggctttaatatccttcttcctttcgctctcgatcgaaccagatcacgtacctagcattgtttctatagcagaggtcatgatgaaatctggagatgaatcacttccaaccgctaaaagttttctgatgaatgccttaaggttagacccgagaaatcatgatgcatggatgaagctagggcacgttgcaaagaagcaaggcttgtcacagcaagctgcagagttttaccaagctgcatatgaactagaactatccgctccggtacagagtttcatttgacgaataatatgagttgaatagtgcacaattctttttcttttaagcctttttttctttaatatatgatttcggtactactaaacttgcttaagataataacactcgagtattatatattccacattaccattttttatagcgacaaacagattcagatacgggttaaatttcctccagctcttgaaatatgtgtgtagtttaagcacttaacatttgagttctctaagagattctccttctacgatcgcttccagcccaagttgtgaagacaacaacgttaagtagacatttaccaacgaaatttataagttctgtatttcaagagattattaaaccattctactataagaaagaacttgttcttcttaactcatactgtatttcaacagcgtaattatatatatgactaacgacatttacatatttgctatagaggatatatata

SEQ ID NO: 47649 - DNA, 518 bp, Arabidopsis thaliana
tcttcgcatctcttaagtaccctgcacaaattaagcaaacataaggagaaagaagagccatacacagaaaaatcattcatgaatatctcgaccatctcctctatcaaatcggagaaaatagaagtcatgcactgctgaaaagtggcgggtgcattataaagtccaaaaggcattcgtttataagcaaaagtcacatagggacacgtgaatgtagttttctcttggtcatttgggtggataggaatttgaaaaaagctgctataagttttatatttatcaaaaccaagtttctaggctacggagagaggcatcagactgaccgaagcacctaaatcgcataagcatcttgtgaatgctaaagggcctagtgagcatggtagagtgaatgagcctggatcttccaatttcttaggtatgaccttctattggataattgcactgtactcatgacttaataccaccattccttggacttctttgatcctttctgtgattaggtctttcacgtatttgtgaca

SEQ ID NO: 47650 - DNA, 353 bp, Arabidopsis thaliana
cgccagtgtgctgtaaaggataactccaaacagcttttcagtcagccactgtgcctgcccggaaaatggcaggatgtgcgctttagccatcaacgcaatgccgcttaacagtaacagcgtatcgacaaccggcggcacaatgcgcgtccagcgagcaaatgcctgtggatgcttctgataacgtagccagaaacgtaaggttaatagcccaacagaaagcgcgatactaataagatgaacactaagcagtgtagaaaaacttgtcattgataatagcggccgagcgttacgcgctcgttatcaccatagtcacggcaggtttcgacgtcatgataccccgcgaggataaatgc

SEQ ID NO: 47651 - DNA, 626 bp, Arabidopsis thaliana columbia
tgtttatagaggatttcctgaggttttcccagtaaacagggaacaaagtcaaaagacaagtcaacaaagtgtggaccacgcgttttgttcctgaagataagatggagagagaatcacagaatcaatctccaccataccttttgaactcgaccacacattccccaaaagtaaaacctactcgacccatctctcttcatctcaccaccgacaatccaatttctctagtcaaccatgaatcgccatctttcaccaaagagttactcgactcaacttcacttgagttcgtcgctatactccaccatttcacttttccgttcgccgtcactttgttctcaccacactcgaccttctctgcgccgccacagtcgagttccccacctccttcaccgtcgaagtctcaggaactagtcgattacaaccacaggactcgaccgtcaacttgtggttttgtcccaaccaattccggctcatcgaagaagtactcgacctctggtgctagcaatcaacatagccactcaacttcaaaacttaactcgaccaccggtctctactctactcgatccaattcttgatagagtaactcgggagactttagttacgtgattacaatctgtacttgacaaatt

SEQ ID NO: 47652 - DNA, 859 bp, Arabidopsis thaliana columbia
tcccccagtcatgattcttggtttattaagactattaaccaagtcaaagcaaattcaggattaatcgactgttagttcagggcaaaacaaaatgcaaattcacgttgattttcacaaacaaaagcagcaacacatgtttttgtcacgacactacgatatataacccgaaccggtttaatcatacttgccgaaagtcaaaagatactacataatcaccaatcagttagcacaatccatacaaaaacctcttaagaattgactcagtttcgtaccaaatccatctaacaggttcagattttcgtcttactagtgcgaggagtagttttccattgggacttacctgatacgttaggtggcggcagaatgaccggtggaaacagtgtcggaactccagaagcttctggccaagctgctacttccgggacaggagaaaaagtggcagcataagttttgtataatcggtcaagagagtaacagtcgtctacatactgcaaagggttgattttcagcttctcgcagactgctagaacgtgcagacatggaaacttcttcaactgaaactccccacacgtacaggaccattcactcagctgaacgatccattcatcctcctgtaatggttctgtgacttgaaacagacctttctctaatggcattacaacgtgagggatggaatctgtcattaacttttcgagctggtccatgacgggtttggtgtacatatctccgcggttgaccctaccactgctatcacaaagacccgagtaaaaaaaaaatctcatctcatcaaacagaagcagtgctgtagctgtcactggcaaaccaagagactgaaagctttcacaaaatgcaaacaaat

SEQ ID NO: 47653 - DNA, 657 bp, Arabidopsis thaliana
tgatttctttcctatttcggccttatttgactttttatcttcccaaagtcatttaatttctggaaaatcgcagttgacaaagaaaaagcagaaaaaatggactgtggcggtggattcatgatttgaaaaagtcaaagagaaagatgagagtggtaacgtttgacctggaagaagaagaagaagcaacggccacagagaaacagagaaagacttgtccaggtcttatattatatattcaagcctctttcttctctctcgttgacactaaacagagaaacacaaacgtctagaagactaacaatcaaatcaatcatcagaaaaaggaaacttttaagttttctacgaaacgatgtcgtcttcagttgccgtttgcaactcaccggtgttctctccgtcttcgtctcttttctgcaacaaaccgttgaacacttctccggcacatgaaaccctaaccctgtctctttcccatctcaatcctcccgtttcttctacttctccttccgccgcgtctcccacatctccgttctgcctccgtctcctgaaacctgccggctaaactagggtttggatcggactctggtccgggaagcattctgaagaggaaacgaccgacgatgcttgatatagcggaggatcccgttggtattgcagctccta

SEQ ID NO: 47654 - DNA, 428 bp, Arabidopsis thaliana columbia
catatttagttgtactattactaaatttattttaatattacatgatttttcaataaaaccattataatagttttctcatactcgaagattttttttttgtaatccaaacacaaagtatgagtgtataatagtcgtggattacttaatgatttgagtaagttattctcttaaattgatatttatattctcctaaattgatatttatataataaattattgagggtgaggaatacgtaaggagctccactatcaaattcttaagtttctagaatccaacactaccatctattaaaatgggttaagacaaacgttgtttatgaattatgtgcatgatgcattggtgagaatttgttagaaaaaatattttaaatactaaaagtaattgcttattgcatgagtgaatgattagatacataaattatttatat

SEQ ID NO: 47655 - DNA, 453 bp, Arabidopsis thaliana
cgcaaagaaagtgagaggatccccacgacttaaaaagaaaaataagaataagaataagactcaaaaagaaaaacgtagttagtaactgcctcccccacacttaaacgtcattgtccccaatggcattcgaattcagagtaagcgagaaaaagaaaaaaaaaacgtaaaagaaaagaacaagaaaaagaaaaccatactagtgggttgcctcgcactaagcgcttgtttagagtcaatagcttgactttggtggagtttagggatcaggtggatcaaatggaggaagtaaatactgcctagtagaaccccgcatcaaccaaggtggcgtattaacagtcggtgtgtgcggtcgtacaaggaagtgaggaatgtcagctgggcaggacagaggtatgggtggtggactccttgtacctgcacaatcatcaagagaaagaacaagtgctcgacgag

SEQ ID NO: 47656 - DNA, 534 bp, Arabidopsis thaliana
taatttagcctctgtaactaacctatctacaagctccttgagcctcacagcccctgagctaggcctgatcctagccacatcttcgacaaccgagcactctggtttcccaccgcaccaaccgcctggagtaaaaccgtcttcgtttatccgtataagcagttccttatcaatcttatccaaaacagtatcatttcttcagaacttccgaccaaatgcagatccgctcgaaatcatctttcccatgtctctttgagacaacatacgaggatgctgcctcggtggcttgtcccatgcgatgtagtgaagatcatggttcaccgcggttttggagaactcaggcacgttacatatgactgtatggaagtaaccttcaggtgcagatacgacattggtgtagtacattagtaaagttctcggtaaattgtcccaaccgtatatgatatactccacgaatgcgtgccgacagagccatccaagctgatcctacactacacaaaatagtttcaagctaacacgaaccgcgtaaaatatgtt

SEQ ID NO: 47657 - DNA, 529 bp, Arabidopsis thaliana columbia
cctagtcatagcaagatctacaatttatctatttcctaagactatccctagacctcacgctttaatctcctgaactcacaactcgatttactgttttcttgtcttttactttcatctactttgtctagcttaatattaatcatcataagtttattgtgtgaacaacgagagcttagtgaaattcgatcattcagtgctaacgacgatctcttatttgagggaataagcttaaggataatttgagctatatcaaatttgaaattttcgaaaattgaatatgacctatgaatgatactttgacagaggtatattaattttttgtttgttttcaagattatcatgattggtcttgtttctaagtgattattttataatttaaaatctttagcaatcaattgctttttttctcaagatcataatgattgtttaagtttaccttttaagggattcataatcgaatctttgttttttttttggacaaatgcttgttttcatacacctaagatagaaacaagtacaatggaaagag

SEQ ID NO: 47658 - DNA, 778 bp, Arabidopsis thaliana
agatacgattgagatgcacgtaggtgcagtagagcctggtgagcgtgctattcttattgatgacctcattgccacgggtgggactctcgctgctgcaatccgactacttggtaagtccaagatttgataatgcagcatatgcagttcagttaaacttgactatttctcactcccacaattggttggttttgcagaacgagtaggagtgaagattgttgaatgtgcttgcgtaattgagttaccagagcttaaggtttagcttatttatctctgttttactatctgcttccaatctcttacactgatttgcttataaagagatatgtgggctgcaatggttttgtagggaaaggagaaactaggagagacgtcgctatttgttcttgtaaagtcggctgcttaacaagaaactggaagagaaggttattggatcgagtgttgatgctatttttcatgtatggtgagacattttgcgtgggatttgatccttgttgtttcaacttatcataattggttcagactagaaaatggcatttgaatgtcaggattcgattgcagtttcctattgttccacttaaaatccccgattaataaggtgttatgggttttatttatagaatcaagttgtaatagtagactccaacaggggctaaagtcttggtaacgcaattcttcttttaagtttcgcagcaccttgctcgttacttctcttctcaactcgtaaggacacaaatcacaatgctcgtccatgtcccatgctgatgagtataatttgaca

SEQ ID NO: 47659 - DNA, 622 bp, Arabidopsis thaliana columbia
tctctatcagcttcagagctttcaactttggctctgtatccatgatcaaacttgttttgtgtatcctttgctttgtgcaggtcccatttgtcattgttggaaaggatcagcaatcgaactctagttttgtcgctgttaacatggatggctcaaggcaacctcttccgcttaccactgtgtataatcgcttgcagcctattaattcttcgtttcttcaagcctttttgtaccccgattatcctgtgagtatatatatattcaaagaaatttctggttttgaggaactgatggttacttgttcttggctaactttgtaatcctttctcttccaaggttggtctgcttgatatagagaagattttaccacctgggaaagatataacagctgttggcatctacagttttaataatggagttcctgaaatcaaatcgtgccaagatcttccttatttcttgtgagattttatctgaatatttttcgttcttatatatctgcctgcgttctagctcaaattattacttcatcttcttctttatgttttctcaatctgttgatcatttgacaagatttagtccattgttgcagaaaggctctatttgctgttcatatataaatctttat

SEQ ID NO: 47660 - DNA, 553 bp, Arabidopsis thaliana
cgtgtgctctaaagtccgttcaggataacgatagtatccgcacccagcaccgggagatccttcgccgtttgcgcgacacctgcccgtgcttactcgcgcgccagacgcacaacatactgctgcgcgctctcctgcggctgacgctgctcctcaatgcccgtaacaatacgttcaaaggtcacgccaagttgcgcaagtaactcctgacgacgcggagaaccggaagctagatacagagaagtcatagaaacctttattgcactgcaaactgctgacggactttgcgcatcagcaagaaaatccacggccagagcaccccattgactacactactccagaacacttccggtctgaaagagacgttaatcactaaaaactctgcccagaaaacaataatatccaccaccagcgaagaacatgacgaccagcgcctgctgccataatgcgaggttgcggaaaagctggtatttcagcgccaccaggtaagcaatgatgctcatcgcaatacgcgtacccaagcgtcgagccgctgatcagatccagtatggaccca

SEQ ID NO: 47661 - DNA, 587 bp, Arabidopsis thaliana columbia
atccaacattaactaactatattttttagatattcagatgctacatatgtcctgcaaagacagtttacttacttgatacaggcatatccaagctgccggaacctctggaacaaaagagaagttggaggacattttggatagtctctagaacgcaagaactcgtcctttaaaactgacaatgccgtggagaaccgaagagcctttatcgcatatgcacaacgtaatacctaattttttcaaaaccgtttagtaagagaacacatcttctgggggagagttctggtcataagatctactgaactcgactcacctggttgaattgagggcctgcttgagctagtgatacagcaagatctccacatactggagcgcttctagcaagaatatcaagagatcttggagtaattcgcaagctatcaaacctgcagccattatatatataaaaaaagaagctaatatagttagcatggaatgcagtcaataaagatagctagggaaagagacaaagaaactcattgatgtatcctgcacacctattccaaagtatttgacattaaatatgtaacaacgtgtaagcaaagaaaaaa

SEQ ID NO: 47662 - DNA, 462 bp, Arabidopsis thaliana
ttacttgatttattgcttgatttgcgccaactccctgaagttcaggaggacgatctgcggtaagtagtagcagtggtaagaaatcctcgggggctgggacaacctttatttgtcaaaaatcatgaggcttacgctgtaagggaacacatgtgtttggcaaagtatgtagcatgcaacaagctaacaagataatttagtgaggcataaataagcacaactctgaccgctggaagaagatttgaaacggcagttcctgatgatgttataatgactgctggtttgagggatcctttagcataaccaatagcgtgaaaccgaagagatcgttcatcaaagcatgcaagacacgttgtaaggggatggttggcagcagcgatacgaagatgggaagaccttgatccaggggctacacaaaagtactgtggtagtatgttatgacaacagacatacaaatttgagatt

SEQ ID NO: 47663 - DNA, 590 bp, Arabidopsis thaliana columbia
ttttgctattttgttcatttttttgaaaaaaataaaaaagtggaatctcgaacctgtgatcatgggaacgtttaattcagcttttaccactgatccatataaacattattgacacaattactggtgtaactctttatatacaaataaaatccatgggattggatttagtaaaacgacacgtctacaagttttagggatttcgtattttgctttcatttcttcttcttcttcttcatacgagagccgaaaacgaataagaagattaattgaggagaaatcgaagatgtctatagcgttagtggagaagattcaagccaaattttgaagaagtctagtagattctgtattgtaagctactaaaatctgcgatggtgaggtaagattctacaaaaccgagtatttttattaagtttttgtttggttgcgtacacaaaagctgcgtatttgttttgttttcttcggttgaatctctttgacctcaggcatttcaatcgtcgccggaaaattcatcggagatattaaaattgaatcaagcttcgaattggtcaaccgatctattaatttgactagagaggacgagctgtatgata

SEQ ID NO: 47664 - DNA, 524 bp, Arabidopsis thaliana
tctagactaagaaaggaggagttacaatagtcaagaacgaggaagacgagatgattcatactcggacaatcacatgccatcggatgtgcatcgattactgaaagttgaatgctgccaccaggaaagaccatttctccgtaccatttatcgatcagatgttggaaagggtagcaaatcataagtactatttctttcttgatggatactcaggattctttcagatcccgattcatccagacgaccaggagaaaacgactttcacctgcccctatggtacatttgcttatcggagaatgccctttggtctttgtaatgctccaacaacatttcagataggtatgatgtctatcttcacaaacatgattgaggatatcatggaggtcttcatggatgagttttttcagtttatggatcatcgtttgaggatagtttagagaatctctgcaaagtgttagcaagatgtgaggagaaacatctggttttcaattgggagaaatgtcactttatggtgcaggatgggatag

SEQ ID NO: 47665 - DNA, 489 bp, Arabidopsis thaliana columbia
tagaggatattgagaaagctaactctttgtctttgtattaagtgtgaaaataaaatattatttttttagaagactttgacaaatcacttacataaaagaagattgatgggtaactatacagtttaggttcctcatggtgaaaattagaatatagcaaacaatcattttgctacgtttttaggcttgagtcttatacgaaaacagtgaatccttaaataacaatggttttagatgaatttgataatccatagccaagatttggttaaaaatagaagaagattataatgatgaagaaaaaggttttattatattatgaatgctgtaaaaaatccaatttatgatggatataaagaaggtcattagaaccagtgttaaaaaatgggtaggcggtacgtaggtggttaacctgagtctagcgcctagagcgattaatcagggccgaggcggacgtaggcagttaatgtatttttatttaattttatttattta

SEQ ID NO: 47666 - DNA, 571 bp, Arabidopsis thaliana
tagagtgtttcagccgcggacaccatggctgacagatcaccagtacgagcaggagccccgacgttggctcgttgaacacgaagacttggacgcctcattcttctaatgagcgggagttctgaagtggagctggagtcaggaggaattgaacagacaaagcacaacatgtgttagttagcagctcgaattgcgcactgtctcgataactcgtacattttaaaaaaaataacagaactcgtacctatgggcagattagcctcggggctcggttcaatccgcgggacctctttgatcggatctagctgtgctgcaggaaggacgattgcatgaactgctagagctacgggagctgctggaactacggcaagagcagctacgatgcgatctctgctaaaagtggcccagttagtctaatcacgtcggagaagggttaacagctcgagttccgtcttagagagagtaacttccttggtccttgctgcaaaccattaaaaaaaacattagtttcagtactaactttcagcaaaagcaatcaaggattcgacacaaacaacaacaaaaaaactcaaga

SEQ ID NO: 47667 - DNA, 509 bp, Arabidopsis thaliana
agatttaaacgacacagtctccagtagcattcaaatccgaaaaaaacgagaaaaataaatctaaaataaaagaaaggaaaagaaaagaaaagaaaaatcaaaccactgagttgcctcccactaagcgcttgttttgagtcaatagcttgacttggcggagttcaggacgtggttggacgggtggaggacttgtgctgcaaccttgccttccaaggcggtgtgtaaacagatccgctctgtgcagcagcaggtgtcgatcgacactggtgttggtgtgggctatggagagtgtgcagcaacatctgcctgtaaatcgcgatggtgtcgatcgacaggaggtgtggtgtcgatcgacacagttgctctgcaactctcattggcgagctgagctgtagggagctctgtggttggctctgttgaggggttctgagcagcctgaagagatgtgtccttgctggaacaatactactgataggcaatgtgaaaccgaacaatatatccaaacttca

SEQ ID NO: 47668 - DNA, 815 bp, Arabidopsis thaliana
aagtgaccaagttctgtcggcttttgaatccagagcttgcgattcagcacatccttccttgtgtgaaggtaagactccttaaattctatataaacgagttgtttgatgtcccctgtctcgtaatattctgatacatactgatgtctggcaggaattatcatcggattcttctcaacatgtccgctctgctctagcttcagtaataatggggatggctcctatccttgggaaggtatgaactgaagatagccaacattttcgcatcttgtgacaatgttctgagatttaatttgttttatggttttcatcaacaaaatcagccataccttgtgttatggcgtggttataccagccccaactggtgttgcagaccttatcaaaaaattattaacatactaaaatctttcaatacaggactcaaccattgagcatctgttaccaatttttctttcccttttgaaagatgaatttcctgatgtgcgccttaacatcataagcaagttagatcaagtcaaccaggtttgttgcatctctcttgtgtgctttagatactacttttattgcttccttatttagttggtgactgaattatcttttacggcaggttattggaattgatctactatctcaatccttgttaccggccattgtagaacttgctgaggatcggcactggagagtccgacttgcaataatagagtatgttccactgttggccagccagttaggtataggatttttagatgacaagctcggagccctttgcatgcaatggctgcaagacaaggtttacattgaatctttgatgtttgcat

SEQ ID NO: 47669 - DNA, 478 bp, Arabidopsis thaliana columbia
catcccctaattttggaaaacattaattttattcatattttattttatggtgtctaaaaataaaataatttattttattaataacctacgatacaacacgagttttaacctagtatatataaaaatgaaaaaaatagaaaaagtcaacttttaaattgtagacgtttaaatagcatactcgtcataagttaaccatttaatcatgaagtcagtgaatagttaggcatttaatgacatttttaaaagtcgaagctttattgattagtaacatcgtttttaagaatgtaaatactttaaaatacaaatatagcatttaaagcttcattgtttattaaatttttcatgttttattttgtcaaaattaaagtactctaatgctctgtttttattggaatgattttgtatttttgaagtattatttattgttaaaatggtctcttgaattactcttgctttagtattgaaatattatatttat

SEQ ID NO: 47670 - DNA, 581 bp, Arabidopsis thaliana
aaacaaatgttctgcagcaatctctgctatctctggattgttgtgaatcctgcaggcaccgagcaatgcaccccatacacctccgtgtggctcaacagacatagttttaatcagctcaagggcttcttgtaaccgccctgtacggccaagaagatcgaccatacaagtatagtgatcccgcgttggttgaacaccaaatgtttgatacatagaatcaaatacttgacgtccttggtcaacaagtcccgagtggctgcaagcataagcgcaccaacaaatgtaaccgtatttggttttatctctgtctgtgttaccatgtaatgaaaaagatgtaaagcctcttgagcacgcccgtgcgtagcaagacctaggatcatcgaactataagtgaaaacgtttttgttgttcatcgacataaacacattaactgcctcttctacgtttccacatttcgagtacatatctatcaaagcagacccgataacaacgtgatcactaggagaatacccagatttctgagcaatttgaacagcccgatcagcgtatttacttgctccaagctgcgcacaagccgatatata

SEQ ID NO: 47671 - DNA, 453 bp, Arabidopsis thaliana
aagaagatatgaaagactttgtccgtgagcagatacgtgttgcccttgatccaaaaggcaaaaggccagaacaaaccatactttcccatgattcgcgggaaccacctacttctatggataaggcaccggttactgcgaagaagccatcgagaaggatgtctacaaaaggaagcactggaacgagaaagtcttcaaggctgactcgtgtttctcatgatgtggacacttttgcgctttctgttggctgtaattccaaagaggaagatttggatgtccctggtgtacataccactgctgtcggcggaagaagaaaaccttcaaagccgaagaaaaatgtttcttttgctgttgacactactgagctatctgattccaataaggaagatatgcaaggattcattgatgaacaggtaagtcatgtacgtacattgctaaaatatttataatccatat

SEQ ID NO: 47672 - DNA, 585 bp, Arabidopsis thaliana columbia
tgatgagttctgttcaatcttactaaatcaattcaaatcttagacaataaggttatatgggtcttgaatggataagcgcagacttatacaataactttggtgtagaatagatatggctccgtaaaaatgtttctgtatggacacatataaatggactcgttattatggacatcaaaaagttattattctatactaaccatataataaaggtttttacttatttagtaaaatgatccaaatcttaaatactaaaaccagaaaaaagaacggagcgaatacatgaaaaacaaaggttcttaatggttcaaataaaaagacaacattaaaattgaacttcacatatttggacaagttttgtgtgctgcccttttgcatcgacctcaccctgcattcattgctcgcactcagggctgagccagtaaactccatcgatttgtaccatccccgtcctgtccataaggctcacccataaaggtgcctgtagcattcttcacgaaattctcatatgctatcctttgtcaatcatcagtcaggcatggggattgttgcttcaagcatttattgaaaaatgataatagtcgagtg

SEQ ID NO: 47673 - DNA, 487 bp, Arabidopsis thaliana
cccccgcgattgtccctttgtccggcttgcttctctgcagtcagcttagtgtactcccgcttagatgtccagccttcccgcaataaaaacaagtccttgtctcttcaccgagaaccctggactgtcctagttccattctcgtgcagcttaggatcgcatggtccttgcttccacaccgaccacatgcacctacggccttccagcaagttccgttgtggctcttaccacaggtcacgcattccccggtcttagcatcggacttggtgttatccaccttgtcaaatttccttttcttatccgcgggtttggtgggttgattattccagatcggagctttctcccgattgaagtacctttcttcctcaatcccttcctcaatcatcgctgccctttcaaccaatttgaaaaccgaggtcaatgtccggaccaaacaatgattgtggatctctatccttagtccgcggataaatcggcacacttgagcttg

SEQ ID NO: 47674 - DNA, 1281 bp, Arabidopsis thaliana columbia
  unsure (1)..(1281): unsure at all n locations
tcaatgtacaagccagttctatcactttccctaaagtgcgatcaaatccagcccgccattattttttttcacactaacttcacagtcacttagcaaagtagattatatacactatgttaaaaaaggaaacattgtcttgcctgtttgtatagacccccgctaaaggcatgaaaataacaaatctaagttactatacgaaataatatacgtgtctttcccaagatgattcaatctctctttccattaccacaagctactagtcacaaaggcagagaagcaaacaacaaattttcattgataaggtgcctcagcacagtatattggtactaaaacacattcaaggataagaatagagtaatgcctttgtgctaagtgtaccaaaacttgcagtagaagacgaggttggagttaatcatcctttattcttctcagtaatttagaagcccagcgtcgaacccgtctcttaagtgtataacccacaaacactccagcgacaaagaaaacagcgcacaactttgaacacgtccagaccgaaactccgctgccaccaaacacagtcccaagataggtcagataattttcttaaattagaactaatagtacacaaaacacgtaaagccattacatattagtcgaatcaaatcagaacaacccaaagctcctactagatagtctataatcgacctgcacagttttgttcctcgggtatctaagatcttagatcatttgaacaagccattacaaatttacaagctctgtgtgatgtggaactgggaaatcatcatggtctctaggttttgagctataacacaaaatctgccctctttttcatttttgttccatctttttaaaatttctctcaagcaggcagaccaattcataatccatccacagaaatagtgattattattatcatccttcccataattagagagaatctgaaaaattggagacatgccctcactcactcacccaaaattcttaaaagttcttagctttactggcaaaatgatctcttttcgaacaaatattgaatagaagcagcttacctgggaggtctggttaccagagtgccggatcctgcgtcgtatgtagtagtcaagttgccggcgcggctcngtttgtcttgcatcagattatccgcaaaatcagatagagaagacgacgaagaagaagctgccgatttcgcttctttcacatcttgctgtaaacttctccaaacctccatttctggccgatcaattagggtttagggttcaatgatgattccagtcatgaagg

SEQ ID NO: 47675 - DNA, 922 bp, Arabidopsis thaliana columbia
attcccatccctggaggaagatctaagaaaaaaaagatatccatataaagttgtggtccatctctagtttgagtagactggctggactcgtgatcgttattcgcggacttcatgttaaaaaatgtagaagttataaacttgatgaatgaataaaatccttatatctgaagaatagccacttaggtatatttcattgatattttaagggatacgtgtatatgtgattactggttagtattcaacaaaacccctcaaatccttttatacaaaggctaaagtaaaatacgatataaccattatgattggctaggcgtgaacatgacatgattagtattgtttggcaggttaactctacaataccacaagaacatctggcaaattaatcggtccattcgttgagttttcgggtgtttggttgttttttgacaaattaaatactcgaatacttggattaaaagttgttagtcaacgaattggagtctcacatcaaatcatgcaatttgttaggtaacgacttgcacatcttttattttagtagttcggaaggtgtccaaacgaaagggatttatgaactataaaagaatacagtattattaccaaatcattatattgagactatatataatataatttacttaccaaaaagcctgaattacgcattgactaataaatatccaaaatcgagaatgtcatctctattttgtctgtcgataatgatttattgataccattgatgtttcacaaaccctgaagtaatatcatccaccaaatcagttttgttttgctaagatgatggagatggagatggtgattggtgagaatggtgcggttaaaaacagaagataatggatcattgtggttagtaataatttaacatcacttagagtaagtggctttatcaactcgatgtatatatttgttt

SEQ ID NO: 47676 - DNA, 544 bp, Arabidopsis thaliana columbia
tccccaattgtaactacatattatagatctaattttattaacattacaaaaataaacaaatagtaaatagaaattaacataaagaacaatcaatgtaatttttttttaacaattttcaaaacaaacccacgcgtagcttgatactcacttagtaaaattaaaatcacgtgtaatgtatcctattacaatttttgatacagaataatttcaaaaacgcaaacgcaggtgacgaatactgcgacggaaacacaaaggacggtgagaatcattgattagtgtactaacggctatttgaactaacggtcagggatactcacgtggtcgctttattgtcaactgctagagatcttcaagttcatcaaatctccaatcaccgtcttgcatcttattattatcacctttcataagttttaaaataaaatagatatcattatattacacatgatcacgaggttaatctttcacagtaaaaattacaatttctattttgtaaaatggaaatagtttgttgaaatattattttagggagtaaatatagtttttg

SEQ ID NO: 47677 - DNA, 524 bp, Arabidopsis thaliana
ttttgatgaataaaggtgtagagtcggagctggtacgtatcctcacaatctacacagcagtcgacttttcgggaaacaaatttgaaggagagattccaaagtccatcggtctattgaaagagcttcatgtgctcaacttgtcaaacaatgctttcaccggccacatcccttcaatctatagggaacctgacagctctcgagtcgttggacgtttcccagaacaagctttatggagaaatcccacaagagatagggaacctctcgttgctttcgtatatgaacttctctcataaccagcttacaggcctagtaccaggaggccagcagtttctaacgcagcgttgctcttcctttgaaggtaacttgggacttttcggctcttctcttgaagaagtttgcagagatattcacacgccagcatcacatcaacagtttgaaacgccgcaaacagaggaagaagacgaagatctgattagttggatagcagctgcaataggattcggacctggtattcctttggtttg

SEQ ID NO: 47678 - DNA, 549 bp, Arabidopsis thaliana
taaatcacacagtccattgtgcgcataaacttggaagagagtactcaggacaaatccaatcacagaagcaaaaaaatgaagaaacaaatcacaacagatgatataatacaatggtgaagtgagacgcttacctcagtcgaagaatgaacgtagttgctcgtcaatggctacctgtgattgctcccaggccatagacgaaccaccttgttctgtatcagctccagcaggtgggtactcgacctcatcagctctgtggcggccagcaccgctctgaggatactcgacctctctccttttgctgcggccagcaccgcggtcgtgtaaactacgagactgtagaagtcgtcaactcctactgctagaccgagtgagtagggtcctcctcttcctcccagattcacgaggctcgaatgatgaatgcctcggagggacatgcggaatctcctgctctctaggttcaggcctgcgccgacttggctcgggcgcgtcatatctcctcgaaggcatgtcctgagggagatgtcctgcggaatagctgtagtggaagag

SEQ ID NO: 47679 - DNA, 348 bp, Arabidopsis thaliana
agagagagattccaaagtccattggtctattgaaagagcttctcgtgctcaacttgtcaaacaatgcttttggtggccacatcgcatcatctatggggaacctgacagctctcgagtcattggacgtttcccagaacaagcttacaggagagattccagaagagctaggggcactttcgttacctcgcgtatatcaaattctctcataaccagcttgcaggcctagtaccaggaggtacgcagtttcgaaggcacaattgctctgcctttgcgaataacctgggactttttggcccttctcttgacgaagtctgcagagatatgcatacgcgagcatcactacagaat

SEQ ID NO: 47680 - DNA, 561 bp, Arabidopsis thaliana
tcaatccaatggaaataccaggtatggatccaattgcagctgctgtccaattcatcacctcttcttcatcttcttcaggctctggcatttcggattgttgtggtgttttcttgtggatatctacacaaactctttcaagtgaaaggccaaagagtctcgggttgtccgcaaaagaagagcaaggctgtgtttgaaactgagtgccccctggtactagacctacaaactggttttgggagaagttcatgtacgcaaggtatgagagtttccctagctctggtggaatttctcccgaaagcttgttttgagaaacatccagtgactcgagctctatcaggtttcccattgatgatgggatgtggccagtgaaacgattgtttgacaagttgagcacatgaagctcttttagtagaccaacggaccttggaatctctccttcaaatttgtttccagaaaaatcaattgtagtaaaggtatttaggatacgtaccatctccaatgctatgcgttttatcatcacaactattgaatcactgtaatagtttgtaacgatgtagtttg

SEQ ID NO: 47681 - DNA, 876 bp, Arabidopsis thaliana
gggcctaaattatgtaagcaagcccattttatcagcccaatttcgaattcacataacgatcctcctgctttattcctccatcttcttcttctcgaacgaacgtcttcaattccgtgatttaggatttcttatttgcaaatcaaagttaagaaggatgatcaaaattcaattctgatagtgcaacgattgattctattgaaaggtttcaagttatagagaacaaaacgttaagggaaaaggtacctcagaacgagttcgtctgcgtctacgactgttgttgatgtacaacaccttgaagaaccaacgcggtttggaggaaagcacgatgtgcccaatggtcaatccaagcacgataccaggtgtgaaccctatggcagctgcaatccaactcaagacttgttctgattccaatgtttctgattcccctgaaggcgtcggctcatggacaactctacattcttcgagaggacgaccacaaagtccaaggttttcttcaaaagacgaagcggattgcgttcgaaactgggtgcctcctggtacttgaccgacaagctggttatgagaaaagttcatgtacgcaaggtacgagaggttccctagttcttgtggaatttctcctgaaagcttgtttcgggaaacatccagtgactcgagctctctcaggttccccatagatgatgggatgtggccggtgaaaccattgcttgacaagttgaggatatgaagttctttcaatagaccgatggatcttggaatctctccttcaaatttgtttccagagaagtcgagagctgtatagatttttaggatacgtaccagctccatctctaagcctttattcatcagaaccattgaatcatggtaatagcctgatcc

SEQ ID NO: 47682 - DNA, 631 bp, Arabidopsis thaliana columbia
ctctagacagtgaatagaacattttccaattgaaaaaaacaaacaaattttttcggttctcatttgttctttctaggcaaagatgtctcaatgttgaagttttaatgtattggcgatagatcgatgattttgagctggcttgaatttggacatgtttctttgtttacaaatcccttcttcatctctacttgtcatgttgcatttattctataacattctcatttcttttctttttacaggctgggagactacttgcaaatttgattgtgatgggttctgggatcattggtcgtgctgtctttcaagcctatcgtcaagcacttgctagtaagtttccaacactttttgttttatattcacccttttcacatcaagtgattgctttatgaatccaatgataaggcaattacatttcttggtaattgttgattctggcagctcctgtttgtgtgtgtttcaactgttagaacggttgatatgtttctgaatcatattgctgctctcttttactcgatacgtaagacaaagggtggtcaggtatttgttacgaaggagacctgtcttacctaggagaaaattcttttgcagatgcgtctaaatctggtgttgcgcagaacaatgcaaaatggag

SEQ ID NO: 47683 - DNA, 597 bp, Arabidopsis thaliana columbia
tgcactaattaagcttaagaataagatatatttgtgtagtccaaaggtgactgtactgtgacatgtttcacatgtttcagttctatttcatcgctgtatcggaccaatcgtcacagacacagttagctagtttgtaattatatatatctgccccaatctctatttattaatattagagacatacatatacttccagaaagtgtttaatgcgtgacctatgtctatcaaactgattaatatattgcatccacttcgataagacgacatactgatttatatttaatttttctattcacaagtaaactgtgaatcccacacatatataatatatttatttgatttaatttataaaccacacattttacatattagttggatattctacaaggacatgacttgattaatcaattaattaaatatacatcgaatcacattgctctctcctcttgatcttcacctttagcccaccagccatgtgagcggttagaagaggaacaaagaccggccggttattgcaaaccggtataatcttaaaccgactcaaaactgaaccaaccacgtatttcatttgtgtaaaaccatttctttacctatgca

SEQ ID NO: 47684 - DNA, 1181 bp, Arabidopsis thaliana columbia
  unsure (1)..(1181): unsure at all n locations
ctactccatccagctctgtagatgatgtgtatctctccgctgagcttaccgatgctttctccgcctcctcattgtctttcctagtagacgtggattttgacgcaacatctatttcatccggagataaaacttgtgaatctaaactaacatccagaaaagggaacgcttgttaaacaggtaaccacattgagagataaaataagcaccaaagaacttaacctatacggttcgggtttatacctctatagctttcctggttatcttgactagtcacaatatttccttcattctcatccgtgctgatttgatcaattgaacttttagtaactgtggtcaccatcacttctacttttggtcctaaacattcaccaaaatttgataacttcattattaaaatcaactacattgtatcactaaatgaagattgaaacacatacttaagacattgcgtttggaagataaagctgcgtaagttagcccaacgaacaaaaccattccagcaactccagataacaaggttcctgaacaaaaatcaaattccttcaacaaaccatgaaaaaggtacaaaattgcagaatattataaccaaattcgaatacaaatctaccaagttaaccaaagtccgtacctttaaaccaatcgccaccgcgagaattgttctcatcgtctcccgaatcagcccacccacgaaaacgatccgacccgttactctcacccgaatcgcgacctggctctgcgttctgcgcgacgcatgatatacggagacgacgactgagcttggtcatcttcgctctctccggagctttgaagataccgtgatttagggcaattctgagctggagagagcttggtgtccatgtcgccattgtagacgccataatttagcaaacgattcgaaaattcgcatgaaactgaattttccatttacgctttactttggtccgttgcttcatagacgagacaagaaacgtgatacgaacctttcgtataattacggtaaaggcccttacatttatctactactttcaaaatttacccaccttaatttatttattaggtgtaaccatccatcttttatcttacatattaacacatattttatacacacacacaatcttgaatcttagcncaaaatcgtatattgcattaatcagtgaaattcaagaaataaagatgatgta

SEQ ID NO: 47685 - DNA, 556 bp, Arabidopsis thaliana
gatcattttatgcagtttggctaatggcttttacagtgcctacagttcttcagctgcaagacatatatgatgaaatcgataacagttccacaatgcaggatttgattaaatcgtgccaagcagataaaacgggtaagccaagctatactgtgagagatggcaggttatggtggaaaaacagattggtcttacccaaagactccaaatttttaccgttgatattagaagaatatcacagcgggttactaggtggtcattctagatttttgaaaactatgaagagaattcaacaatctttttactgggaaggattagtgaaaacagtacagaagtttgtatcagaatgtgaagcatgttagagacataaatactcgactttgtctccagctggtttattacaaccgttaccaatacctacacaggtttgggaagacacaggtttgggaagacacaagtctattatcgatcgacactacattcaagcctggttttctgctccatttttgtccaaagtgtccataatcgcttgacacccccagaacatacaagacctgta

SEQ ID NO: 47686 - DNA, 1045 bp, Arabidopsis thaliana
gttaacggtgttggtctccccggagaatctttcttaaactctcgtgtgatttggttatccgggtctggtgctttaaccgggtcgggttgtgaaagagcgggtcaaggtcagatttacgggttaaagacgatggtgtgtatcgcgactcaaaacggcgtcgttgagcttggttcgtcggaggttataagtcaaagctcagatctgatgcataaagttaacaacttgtttaatttcaacaacggtggtggaaacaatggtgttgaagcttcttcgtggggttttaatctgaatccagatcaaggagagaatgatccagctttgtggattagtgaaccgacgaacaccggaatcgaatctccggcgagggttaataatggtaataactcgaattctaattctaagtctgattctcatcaaatttctaagcttgagaagaatgatattagctctgtagagaatcagaatcgtcaaagttcgtgtcttgtcgagaaagatttgacctttcaaggtggggttgttgacatctaatgagactttgagtttctgtggtaatgagagtagtaagaagagacttcggtatctaaagggagtaataatgatgaagggatgctttcgtttagtactgtggttagatcagctgcgaatgattcggatcattctgatcttgaagcatctgttgttaaggaagcgattgttgttgagccaccggagaagaagccgaggaaacgggggaggaaaccggcgaatgggagagaagagccgttgaatcatgttgaagcagagaggcagagaagagagaagttaaaccagagattctactctttgagagctgttgttcctaacgtttcgaagatggataaacgttcgcttctcggagacgcgatttcgtatatcaatgagcttaagtcgaagctgcagcaagcggagtctgataaagaggagattcagaagaagctagatgggatgagtaaggaagggaataatgggaaaggttgcgggtcaagggcaaaagaacggaaaagttcgaatcaagattctacggcga

SEQ ID NO: 47687 - DNA, 625 bp, Arabidopsis thaliana
atattccagtgctgatctccaatcacgatacgatgttaacgcgtgagtggtatcagcgcgcaaaattgcatgtcgtcaaagttcgacgcagtataagcagcaacggcggcacacgtaaaaaggtggacgaactgctggctttgtacaaaccaggagtcgtttcacccgcgaaaaaataattctcaaggagaagcggatgaaacagtatttgattgccccctcaattctgtcggctgattttgcccgcctgggtgaagataccgcaaaagccctggcagctggcgctgatgtcgtgcattttgacgtcatggataaccactatgttcccaatctgacgattgggccaatggtgctgaaatccttgcgtaactatggcattaccgcccctatcgacgtacacctgatggtgaaacccgtcgatcgcattgtgcctgatttcgctgccgctggtgccagcatcattacctttcatccagaagcctccgagcatgttgaccgcacgctgcaactgattaaagaaaatggctgtaaagcgggtctggtatttaacccggcgacacctctgagctatctggattacgtgatggataagctggatgtgatctgctgatgtcgtcaacctggt

SEQ ID NO: 47688 - DNA, 548 bp, Arabidopsis thaliana
tacaattggaaagttaactcataagatggaagagttaaacagcaccattctggaacttcaagaaatggtcaaggactaccccagctttgaaattgaggattggtcaaaggagcctggttcagaacaagaagactactctgctgatcagaaaaagcttattttgaagaaatatcaaatgagtattcatcctaccatatgtcaagagaggatgcagagtatgattcaagcattgaaagttcaacaactaaagatgaggacttctctgttcctctcttcaacctttttttgactaagctttgtaagagtcaagcttagtgacttaaaacaagctcacttggaaggaagtctcatgtctatccatgtatataaatttctatttttatttttatttttgatgtttttgtttaagtgcttcaggtttgttttagtgaccttgaggaagtcaaaggtggagtaaattcaaaccaagtcaagaaagatctcaaacgttgatcgagtagaatgaggaggagtgttttgaggcgttgatttgaatgaccaaatgagag

SEQ ID NO: 47689 - DNA, 535 bp, Arabidopsis thaliana columbia
ttaaaaaaaacttaaagaccaacatagttacttgtcttttattttggttacttattgcatacaataacccctctcttttattttggtcctagcttcactctcttcttaaggatttctctgaactacttctctccttgtggatccgatcctaaaatactactccgatatattgtgcacttgcagtagtcgtgtggtctttcaggtaaaagcctgaggtgaaataaaacacgcatcaatgatccggaatcgcatagggcatctttgaattcaactcctcgtatagaacaagtcacaaggaatcttcccggactctctatctttcaaagagtattgaatggttttaagtggtgtagggcttcctcatacaattccttcatttctcttcttgtttcacaactctcaagaaagaaacgatcaatatggtaaactttagaaaaagggatacctcgaggtagcttagaaacggctcggttaaaatctctaagtcttatcaagctaatcatgcgtggatgcgactggtttctaggagagtgag

SEQ ID NO: 47690 - DNA, 553 bp, Arabidopsis thaliana columbia
tgctaagaaaacaagtaatttgaaagatgtttaaggagctatccttataactaatacaaattatgacaagaatttaactaaatttttcaagaacatcaagttgaatatgattatattggatatgcagagacatggttaataaagacatgttatatttttaatgtaagaattaaattttctaaaatttcaccgtctcacaaactagatatataactaaaagaacaaggatatataaattaaaaaaacaacggagaatctagaacaacaataaaaaacaattcaagcactttcgttttcagatgaactaatatagttggactttttgaaaacaattacaaatcatatttatgtttaaaaaaacagatgcattcaactttactttatatgaacatacattatataaaacaattagtaaatagtaatacataaatccgtagtgaagattaaataaataaaaagtctaattaaaggaagcgggacgatgatacaaaccgaagtgaagattagtgaccctggatgggccttcgtgggcttctatttgggtttagtgttt

SEQ ID NO: 47691 - DNA, 539 bp, Arabidopsis thaliana columbia
cccgttacgctctggcgtacgtagttggtggtggcggtggcggagggagctttatgccttattcgtcgcttcgtttggtgcctctctgctcctaattactctggtatctctgatatacaaaattagaaagttcttaatcttattccacatcagatctataaatttgaaagtattgtttctgattgatttgatttcctgagagtaatcacttctaattcaaagtcaagatgaagaaataaacgagaggttgagacacgatgaaaatcaaagtaacttttgtgagttatgacgttatacaatagatgtatatttgttgaatttctattgaataaaaatctgtagtttatggcaatggacacatccttctatcttatacctattacaaatgattagtatagacgggtttatcaagtgaactaatggtcttcattgagagtgataagatcttcgttaaattctttataaaagctatataactgacattgtcctactgatgggattgtttatcacaagtgaataaatggcaaagaaaaatggat

SEQ ID NO: 47692 - DNA, 527 bp, Arabidopsis thaliana columbia
tatatctcaataaatgtcaaatatagttgttttatctttttatgaaaaaagtaaatgttctttaaaagtaacatggataataatgaatagatgataattttacaaattcacatcttttttttttttttttttccggttagtttcggtagaaaacgcaccgaagtacttcagataggacttctttccgaagaccaccacactgtttgtccccagtttggaatgctttccgactaatgccagagggtagtcaggccgccatcatttctgactaccagattaaccaattgggccaaggaccaattaacagacttcccaaacaaatgtgatttttgttttcagggaggatcgaactcggatctgaaagtttcacccttccccaaatcttctcctaccactggacaacagatgcttgggccgaattcacatctaaaagtttgtaatgtatccttttttagcgattgtacactgcctcttaacatgatataaatacttagtgtggtaccacatctagatcataagtgatcata

SEQ ID NO: 47693 - DNA, 562 bp, Arabidopsis thaliana columbia
  unsure (1)..(562): unsure at all n locations
gattaacccgaaaatttcgggtttcggcgtaaaccgaagagagaagtctaaactgatcggttgaattaatttgttgcaacggtactcggttcgggtcggttcggtaatcggaccgatcggtttattactctaaacctaagtccattaataggagccatatataagtgtaaacctaactaagttaccctaatttgtttatcttcttcgcttcggctccgcctcttattctcgagaaagctcatcttgcttctcacatctaaacaaatatctcatctcttctattctactttatcacttcatctccgtacgctcttctttcttcgttgcttcttcttttgatttataaattggatccaaaacatcataggctctcgtcatccttacatacaagcattgttactttgtgatataaagaacgaagaattgtacgaaggcaacgagcaagatgagtagcaaggcgaatgaggtttaaaagagtagcaaggcgaatgaagttgaaaggaggaagatgaatagcacggctaatgacgatganaggatgaataggatcatcagagatggc

SEQ ID NO: 47694 - DNA, 584 bp, Arabidopsis thaliana columbia
cgatcctaaaatactactccgatatactgtgcacttgtagtagtcgtgtggtctttcaggtaaaagtctgaggcgaaataaaacatgcatcagccaacaagagcagtctttcatgtggacctagctcacgctttttgggttagctaggactaggtggagacttgtatttgggattgggattggtgtatggaatgagaggaaaagagaatgggaatgaaaagaaaaaaaagagagaaagtgtttagagttcttaatgggtgatacaaaagaaagtggtagtctagtaaagggtttggagttcaaagagaaaagaaagttaggcattgtaattcaaagaaaagggtaaaacgctctctatgctataagattagaagaaaagccttaagtttgtaaaagtttaagaccaaacccgctagactcttgaattgtttttaagaaacacccctaagagcatgaaccaaaaaaagagaaaagaatgggtaaaagagttgagttaggacatctaagggacagggatcatcttttaaactataatactatatatcattgggtagatgggagtcagttcttgtatgtgtctgttg

SEQ ID NO: 47695 - DNA, 592 bp, Arabidopsis thaliana columbia
gtaagtggttgtggagatttaatgagaaaaaaacagatttgaccatggaagcaatacgggggatacgaggtcttggttgacatcaaaatttggttatggatgagatagtggttgtgtcagaagaagcagtggtggaaaatttgggtgaaaaagataggatctagcggtagaaatgatacagtggttggtaggaatgtggttatggagaaggtgtagtggcggaagagaaaacagtgctgatggaaaatttgggaagaaggtggaagaaacaccaatgaagtttcgggaagaaaacagatgaagacttagatttgaagggaggaaacagagaggtccgacaatgaagttttgggaagaagacaatgaaggtttttcaaataccatgaaacatggaaaaattaaatgaatttatcatgtaaatgacatgtgacattgataaaaccatacaactattttaagtaaataacaataacatttgatattatcatttgttggaaaaacttagtgtcattcaaaaatagcatgacatttcgatagacataacgttaatagtatgattagttgcagtagataaaaatagcgtgtgatatta

SEQ ID NO: 47696 - DNA, 521 bp, Arabidopsis thaliana
tacccccgtgaatcattccctggactcttcttttccaggcgagctcgaaggaaagacgtgaagccgagggtttcttgtcatgtgtcgagtcaagacataaggaataccgcgagatgttgaggtactatgacgaacgaaagtctgatatcgctcgaataatggctatgctagagagagtcgcatcctcgccattggctcaagaatggttttcagcttctggctccgatgccggacattcttttgtcatattgtgaggactgtgatcgagatgctgctgccgcctcaaaggagaagaatccaacaatcattgctgatggggacttcattcccaggacgccttctctgttctatcttgggccagccgctactgatgctgataccacggagtgtcagaactttgttaaccaggtaaggattgctttggttcgtgttttcgatatcgggatgatttttaagaatttcgttgctttgattgctcaggtcggatttctgcatggggatcaatgccgcgagctgcagta

SEQ ID NO: 47697 - DNA, 573 bp, Arabidopsis thaliana columbia
taaatattacacaacatgttaccaaacatttataagttttacataatagaaacatacttgttttacaaaatgcacaaaactacttcaggtttcctattgtccaccacgccctctattccccactatgggtttcctgcaaaacaagtagaatcatgagtaatctaagattactcagtgagctcgggattccctgcaaaaacattattttacccctacccgaatacccaacatgaaacacgcaatagagaatggcaacgaaaggtagcttcccgaagcaaactacaaaaacatgcaaatgcattaagactccagttttattaagttttaaagggtccgatatgctgccttcaaacccaacaccaaacacacacactctcgtgatctcccacgttacaaccacaaaggtatgcaaccggagcatcactaccaaacgctacaccgttgtgtagacactcggccagggtagctagcccatctctccgagttcttcgcacttcatggcgatcaagtaactttgttacaagccccacgatagcacggttcactatgaaggtcagacatatcatgatcttg

SEQ ID NO: 47698 - DNA, 591 bp, Arabidopsis thaliana columbia
taccttatttctctgttttatcgttatcgcttaatcgttctcattgcctgtttcttagtttttacaatcactcgaccagtatactcgaccacacccagtgtctggcaacagactgtgcagtcgagtatagctgtttcatatcctgtctgttactcgacctgttactcgaccacatcctacttctggcatcagcctgttgtggtcgagtgattttagtaattctgttattgcttctgttttctgcatgttcgcttaggactattagaaaccccaaatctgttattgcttggcttgacttagagacttctgatcacatctcatctgtttgcatcacacccatttggattgacacctaaaatactacaatgacatgattggtgttttaggaataattgactaaaaatatattatcaagttgttatactcaatcatacacaagacaacaagtcatattcgactcgaaaacactaaccaaccttcttcttgattctcaaagctttcatggtgtaccaaagtccatatgagtctttggctttgtgtctctaacaaggatacaattcttacgcctttaagattcggttgcggtttaag

SEQ ID NO: 47699 - DNA, 644 bp, Arabidopsis thaliana
tattagctatgcctataaagcctgacgctatcttgttaagaagcctctgcaatgcctgcagcatttatggagagactgtaatgggtgaagagatcggaaaggctcttctcgagatagaacgagaggacgagaagctttcgggttctgagtgcgaagattatgtcgctttatcgaatgtgttagctcataaagggaaatgggtagaggtagagaagctgaggaaggagatgaaagaaagaagaatcaaaacaagacctggttacagttttgtttaacatagcttgttacaggtcaggattcaaaacactactcattttgcaatgaaagttttttagtttcatcaagtcattaattaacattacacaacaaataaacttgcaggtctcggttctgttaaaagctctgttatcccctgaagactctcttgtcttcttcttcttctttaagcacatgcattggattcatcacatcaagatctacacatagattaaaaatattcagatcccaatcttcttaatctatattaagaacaaagtcttcttaccgtgtagaatcttgtcaagttcgatgtctcctgatctcttcttggatttgtgctctgtatcaccaccattaacagattgattatcttccttgtaccttga

SEQ ID NO: 47700 - DNA, 526 bp, Arabidopsis thaliana
tctgcttactttttcctcatgaaatgtgctcatcgtgtcttgtcagttgtcattagttatttatgctcaaccactcatgcatgtgtttataaacgttaatgtgtttataatattttttaatagatttgatttaagaggaaaactactattcaaaacattttatagtttcattgataagtataactagccaataagttattcccgtaatttagagtatacaaacaaagatattgttgatgtccaacaaaactggtgcccacattatattttcaacaaaaaactttatatgtaactactttttttgctttttcatgtgttttttgtagttaggtatgggcagtgcagtcgaaacactatgtggacaagcctatggagcccatcgttacgagatgcttgggatctatctccaaagagcaacaatagtcctcgctctagttggcttgccatgacattactatacaccttctcgtaccctattctaatcctactaggggaaccaaaacggtgtcgtcatgggatcaaatac

SEQ ID NO: 47701 - DNA, 513 bp, Arabidopsis thaliana
acatatatgcatggtaattagatttgcataaaaagaaaattcacaatttggagtgcgtaagagtatatacatataatctttcatttccattcatacatagcttgtaaattttttttttaataaactataattcttttttagtgtccgagaagttttaaaaaaataataatgtagaaacaatttcaacaaataaatatatttatatagtatatgcaaccatagtgtcccagaaattatagcatcatttacttttcttgtcttctgaaaattcttgtctgcttcggaaaagtacgtatagtcaaaaacttattattctctttctcagaataagtcaaagaaaacaaaaaattagctttttataatgtttatttcttccttttttagttgggcatgggtagtgcggtcgagacactatgtggacaagcgtatggtgccaccggtacgagatgcttgggatctatctccaaagagcaaccattgtccttgctctagttggctttccatgacaatact

SEQ ID NO: 47702 - DNA, 882 bp, Arabidopsis thaliana columbia
ttttgggaacgtcgtcgatgaaccaagacatctaatgggactatgcatttaatatatgtcattgatagatgagtactattttacacggtgacacattattttaatgcatgatatgttacttgatacctcatcaatatttctgcgcgagaacgaatggcattgtcatcaaaccggacaacaaaggttttcatcaaaccaaactctaatttgctgtcttttttaatataaaaacaaactataatttgctgatagtgatgttagatttttttttcttaaaaaaaaaaaaaagacacacacggtgaaatgaataatgtaactgtagaataagagaagggttatgaaattgatggtctgcggcatcgtcagatttaaatatcgtacgtcttttgtaaggtctcgtgattacaaatttcactcgtttagattttgtcccatcatttttctttggtccttttaacccgctcgaccaaatcatgacatatgcagaatttatttcatggatttaaacaaaaataatgatttgtttcatggaaaatgtccttttcatttgtgctattccatttatttcttcccacttctgaatatgacgactacgaccacatggtgccagtacccacgactaaactatataatatacaatttattttatttttctccatacagaaaaatgttgggccataatgatattattttttatataatataatggatattaccatttttttacatctcatttactcaaaaagtaaacaaaaaacctcagtggtgtttggttgcagatttcaaagtgagctaatgatatagattccagtttttgaaaacatgcatgggttcttctgatcaaaattccaaatacacgaaataaaaatataaattttttta

SEQ ID NO: 47703 - DNA, 752 bp, Arabidopsis thaliana columbia
taaacaataataatcactatgatttgttcctcttatctcctcagtccttattgatgctcgctcgatgtcagttggagaataattaacaccaatagatatactcgaaagcaagaggagatcaatatattagactttatatgtaacgaacaaaacccaacaattcgggctaggcccatatttttgtctctttaagtccaaaaccctaaagctagctaggtctctcgaaacctttagaaaacaaaaagaaacaaaaacagaaaaggagaacgcagatacacgcagagagctcctccgacagagaaaaaaggatcctccgagaagagagtaagaagatatcttcacaaacccctagcatttcagccacgtcattgcaaattaaaggtgagcgagtgatatgtggattcacaatactcgatttatcttctcactttccatgtttcatttaacatatggattgatctatgtgtgttatgcatgtgacgacatgtgatgtgttgatacgctatttagatgatgtgattacaatataagatatagtatgatgatgctaatcatgaaaagatctagaatgtcatagtatggttgatgatgctaatcatgctatgatgatctgacgaccgccagcttctatctgaagtgaggaacataataagtatcaaaacctttgttaagcccacaatcttacatgaatggtcggtttataaattgtttctttttttgttcaaaatattttgaaaacgtgtcttagttta

SEQ ID NO: 47704 - DNA, 588 bp, Arabidopsis thaliana columbia
ctctgagaaggtaccggaattgttacttgttcttccaagctgaagtaattgttttgaaagcaagctaatgttaatggggtttaccgccgtcgagaaccggtgagaatgagccaccgtcatcgccggcaaattcccggagctcgcgccgtgccgcctttaattacccgtttctgattttcacatcctaaatcctaaaatgcacctatgtatgatattgacttaattacgaaaaatgtttgtcactggatgtaaccttcacgtagcctttttggttaaggcccggcccattaaagtaaggtgggcaagctaagtttcataaagactgtactaccctgagcggtggatcacacacacacatgttgaagacactagaagtcaatttgagactttgggttgtgccagttaaaagtcaagtatgaaatgctttaaaattgtttttaaatcttgtaaagcttattgttaaatttttaattcattgtttctattttctgtccatgcattgttgaagaagccaaaaaaaagtttgttacaatatatgcatctttagtttgaattagagttaatcgagaaaaaaagaaaaaaatagtg

SEQ ID NO: 47705 - DNA, 621 bp, Arabidopsis thaliana columbia
gtatatctcaattatgaattaattcaatatatagtccaagtactaagactatgtccatcagtgtttctaatgggcttcttatctgaaatcctaaagaataaaagcccaaaattaaagaaaaacccaacaaaattattaggatcgatcctaattttaggttttttagaagtgtttagaaactcaaacgtggttgcttctaaggatgaaaatttaggcaaaacaaaaaaaaatcatgctccgcgtgtttttctttcctcttctcctatctcttttctttggttactctaacgacgaaatcaggcgatttgaatcgatttgataagaaactatggtgtatcgatcatgaaattgggagacagtctctttgctccaatctctttctcatggtaagaatctctctgtattcatgtgaggattatttgatgatggtttcgagtcatctaatcagcaatttagggttaatatatgtggttatatgcttgaaatttcactcgattacaagtctgttttgatctgagacttgttctactatgtgttcaagtttgactctgaaattttgttccggaatgaatcttaagtatcaattttgtcttagttgctaaggtctgatgatgaggatgt

SEQ ID NO: 47706 - DNA, 719 bp, Arabidopsis thaliana columbia
gatatgaaatcattataccacttacttcagagtgaatttcttcctcgcaagaagatccaaaatcgttgggaatcgtggatctacagaactgttccttgaactggaggtacagagagcgagaatgtgaaataggagaatcagaggaagatttctcagagaattcgctgccagagtcgacagaagatggacggagtgtaatccgagtaatcgaagtcggaatactgtgaatatatctctgaacgttgctcagatgactcatcatcgagagaatccgaaacctcttccgagaatttctcagagcaagcgagatcagagacgcatccgactatctcaagctccggcttcaattccttggccgatccaagagaggaatcagcttccacgaagctgctcggcttggagatttcaatttcttcgttatcagctcctccggtaacgctcccgaacttggaacagtactcaactccagatatgacagaaacgacgtcgctctccttattctccgattcgaaattcaaactccggctgttggagacatgtccggcgaaggtcacatcggatcgtgagaaagagatctcatcgttgtcgttaattttatttcccttcacattcaatctccttaatccagcaccagaattcgaatcaacacaagacgattcgcttacttcgatctcatctccctccttctccttgtgtagcttagagtaagacctcgtaat

SEQ ID NO: 47707 - DNA, 514 bp, Arabidopsis thaliana columbia
tctatgccatcacgatacggaacccatgcatgaagtgaatgttcgtggggttactgatattgcagcgattatggaaacttctagtggggatggttctcagaatgattttggctcagaagcaaagaaacaaagagttgacgaggattcttcagatgggattgctgcaaacggttccttatatggcagtgaatttaaatctgatgatgcaatggaaacagatactacagttttaagagacttcgaaggtgcaacagcactgtctgctaatgcttcattggctgagcgtgctattgagcctgcacttgtcatgtttgaggtaaagacgaaaacttctctcaaagttatcagtttcaccagctgttgaaatttaatactttttatgtggtgtgctatttctcactgtttcttttttgattcttagtagtcaattgatttttcattcacaacatttgataatacttgagtaagtttgggtgtatcagttgattcaataatttgcacagaagatgggtgt

SEQ ID NO: 47708 - DNA, 510 bp, Arabidopsis thaliana columbia
atattgaacgcgaatccacttcttccttctcagccgcactaacaccacctgaagggtcttcattgatatgcaacaacataaaaggtattgacccaattagctaactgacaagactccacaatactattaatgatttccttctcatactcaaactccagtaaatttctagacagattcattgattcactaaaagattccaatatgtaaacccaaagcaatatcataatcaacaagacaagctttaaacctaatctatcaatttaaaggttaatgtgaagctgcgcacaaagattcaagattttacgtatcagttaataagtacaaaccttgactagcacccatatctttctcagccttggcttgcatttcacgcaaagctccagcttcttcctcaatctccttaattcgtttcttcatatcctccaagtcctatcacactatcagagcatataacagactaaatacagtatgaaataagaagagtctcaattggatagacagtaattatag

SEQ ID NO: 47709 - DNA, 1022 bp, Arabidopsis thaliana
cactgttaatttagtaatcaatccatgtctataaaccttcgtttaatatggttatacttctctagtccagacaaagtatctctgagtatttataagtaaaattagtttgcttacaactaatatttgggaccatttgcaatttgcattactaacaaggggtgttatttcagggagcgagtattgccgatcaatcagtcatcattgagttggctcccaactacagtccaccagcagcccctcatgctgtaatgtcttcttcatactgtttttcttctttttgattagtgaaaagtattcatctcaacactcaatagagcagtaatttcgtagaggtgttaatttgtgttaattttctcaggaaacacagagcagcggtgcagaatctgttgtccagaaggcagaagatgttgtgagcagcatgttagcaaagggtttcattcttgggaaagatgctgtcggcaaagcaaaagcttttgatgagaaacatggtttcacctcaaccgccaccgcaggagttgcttcactagaccaaaaaatcggtcttagccagaaacttacagctggaacaagcttggtgaacgaaaaaatcaaggcggtggaccaaaactttcaggtaacagagaggaccaagtctgtgtatgcagctgcggagcagactgtgagcagtgcaggaagcgctgtgatgaagaaccgttacgtgttaactggtgtgagctgggccgcaggagcattcaatagagtggctcaagcagctggagaggttggacagaaaacaaaagagaaggttgaagctgagcaaccatcgcaaccagcacagtcgcagcagcaactgccagaagggtattctccgattcattcgtccgaatactcgaagaactaatatcatcaagttaaacagtttcctttgtttctccttgttggtttctttgacatggaagttggaaatctggtttggtctttgggatgtaccatataagctatgcgtggattttccctacactattagactatagtttgggttt

SEQ ID NO: 47710 - DNA, 716 bp, Arabidopsis thaliana columbia
atccccaggaaacataataaacttaatatgatatagcaaattagatgtatgtcgatatttactaaccttccaagccacatgtgctaagcatagactacatctctagatgattcactggtaaagctaggcttcagagactccaagtaaccatcgtctttctcaacagtcttctgtttcatgtttctactctcctcaaacgaggaatctccttcaagattacttaagacctccttctttctcttcctcttgaacgtgtacttgatgcaccgatttttactcagtgctaaaactggagtttcttcgcacaaaggagatgcagaaacctccatattctcacagctctctttttcttccttccttgcctctgtttcgctaatctccagctttctgtcattttcatgttccctcggaggagatgttttcaaggatataagagtgccgacatccttctgagaagagtttggagacactattggggcttctccatctttaacagaagatatggagtcagtagcatcagcacaaccagacatttctaagctctctacaattttacaagacgaaacttcgtgaagacatactccatcattcacatctcctacttctacagaggaagacagaaccccattggccatactgctatctactgtgtggatcatctgagctaaaccttcagtttccctgcgttttgtcagtatagatggaagagtgtagtg

SEQ ID NO: 47711 - DNA, 647 bp, Arabidopsis thaliana columbia
cattacgaagcaaatgttgtctttgatgaatcaaaccacttggtatgtgaaggagacaaagttgtgtgatcttgttggagaaatcagagccactctcactctctttcctcagtttctcaattttccactttggtaacttcaacttcacgctactcacttctctctcttcatcattaacctctgtcttcttcttcattaccgagagatcagatgatgatctacgagacagcttcagattctctaatctctccttcgcactcatctggattcccgaccgaacccttcttggagttctctctttccatgttctgtcacatgggttttaaatgatttactcaaaaagattctaactttgatacctaaaactaagtagaaaattgaggaatataataccttggaagttcaaccatgaagtaaatccttttggattccaagttttggtgaggctcaagggctttgctctgattcctaaacgcttcactgcttcggattccaagagaacgtggcctggaaaatctttaaccactgtaccagcttccacaggcgttttcagtttgaaactctcgccattgatgttcatgattgtcgctgttttcttggtcccaagctatttcctattttggtgaatgatgttgtgtaaatgttag

SEQ ID NO: 47712 - DNA, 809 bp, Arabidopsis thaliana
gcgacgatgatctctaatcttccaagggatttgatggaagagattttgtctagggttcccttgaaatctatgcgagcagtgcgattaacttgcaaaaattggcacactttatccataaccataagtgagagtttagcgaagatgtacattagtaaaacaacaagagaatcaagagaaggggagtctacgataatcacgttgatgaattacaaactttgtttaacgagtctcgtcgtcgacgttgacccatatatagagcacaaaggtaaactaacttgctttaatcttgagcatcaagtcaagatatctcaagtcttttactatgagggtttaatttttatgcgtattgaaagacgatacaattactactaggcttgtggtttggaatccgtattgggggcaaacaaggcagatcaaaacccgatattctcaccacgcattctccggaagggatagtacgtacatgttcaattactctctcggatacgagaataagaattcatgtcgcagccacaaattattgaggtttatagattatcattggaattatcgcggcctacaccaatttttttggtatgaaatctacgattttgactcggatttatggacaactcttgatgtcactccacactggtttataggtatatctcaaagtggtgtttccctcaaggggaacacatactggtgtgctaggaagaggagcggcggttatagcgatcacatgatttgtcttgatgctactagagagagatttggaccgctttatgctttggcgattagcgttattgagtcgcatcagtcatgtgtga

SEQ ID NO: 47713 - DNA, 1044 bp, Arabidopsis thaliana
cagtttccgtctacaagattcagtttttctaagtatccatcctctccgacgatgctaataaatgttttgagacaattagagtcggggtcaaggtttctaccgaaacccatgaagactttcttctcttcgtctacgaagaaactatgtgatatctttatcttaggtctcgtatcaattctaaataacttgctccacgacaccgtttcggcatcaatcttagtcgtaatccatatctccaactcagataacgctgaaataaagctgcaagcttctcttctttaacacaagataaagtcacatctacagcgctgcacggtagagggagaagcggcccgaatctctctcttgtaaaatcaaaacagataatgtgatctttgtgaccctgtgacctcctttctttagcacaccagtaagtgtttcccttaatagaaacgccactggaagaacaatgtacaccccagtgtggagtgacatcaagagttgtctataaacccgagtcaaaatcatagatttcataccaaaaagattgtgtttcgggtgtattgtagaaataatctagaaacctcaggaacttaaaggtacgacaagattccttatcttcgtatccaagagcataactaaacctatcaaatccattcggaggttgagaatatcggaggttgatccaccttgtatgcccccaatacggattccaaaccaaaaccctagtaacgtcgtctttcaagatgcataacaacaaaccctcaaagtggaaaatattagatatactcacttgattgtgaatgaaaagttgacctttaacctctatagatggatcaaagtcgacgacaccgctcattaaacaaagtttgtgaggcatcatcatgatcatcatagtctctccatctcttgttggtgttgtcactttaccaatgtgcatcttcgtaaaaccctcacttttggataaattgttccaagtcttgcaagttaatctcaccgctttcatagatttcaaaggaaccctagaaatgatctcctcgatcaaatccattggaagattgtaga

SEQ ID NO: 47714 - DNA, 830 bp, Arabidopsis thaliana columbia
tcatgtgtacgtaaactccaatatttttcccaaaactagagcccaacaaatagctgcacttgaaaataaaattgaatcttagcaatcctaaccaaatataatttcctaaatcacagtgtctctagattttaaattcaaatacatatataaaccacaacactcaagccatcacttggaattcacataactaactatgcacaaaagtttcaagttggaattgacgtatcataccatgtatctgctcgataattttactaagtaaagctctgtgtgactgacgccaatccttgataagatagctgccgtcaccaaagacctaataaaaatgtagcaaaggccaatggtgaatgtaaaagctaaactacaaacaagaactataaattagaatataataatttacccctagtggatgttcatcaacttgtggaagatcttgttgagctttctggcgagcttctgcttcagctttacggcgagcttctgcttcagctttgagttcatttggtacattctttcccttgccttttccgcctcccgcaccgataccaccaattcctcccgcgccaacatcaccaccaccatcttccttttccattatattccccttgaaacacaaaaagcgaagttatttacagagctttagtttttctctccgcaggaaggtccccatattcatatataacaaactctccaaaaacaaagctcagcattggaaaacgtattagaacaaaatataattaattctaagcttgtctgaacagatgtatatttactgaaattcctcttcggttctgtttatctactagcagtacgttttcatgaattagtag

SEQ ID NO: 47715 - DNA, 576 bp, Arabidopsis thaliana
cgtggtggtggagaaagggagctttagacacgacttggaaagtttcggcatgaagatcgaaagacaaaacattggtggtttcaccctcagtgagccaatgaagtgacccatctacatatacaggatcttggtaaggaagtatccggtagggggacgccgggacaacaaacctccaagccttggtggtaaaatcaaaaacttcacaaaaagtactagtgttgttgttgccttgacaaatcatactaatgttgtttttgtcttcgtcgtcgtagtcctcgtcgtcatcgttaaggccgcctaattcagcagaattatataaccaaactggcttgtatgtgccattgattttgtctttaccgaatccaagcttagcccatgatactgaaccgacctggtgttcataacgatcgagtcgttgaaaggtagaaagagggaattctcgatgccatcgagtggtgggattacaacaatattcgaagcataggtattgtagaggcatatcaggccgtcacagctactctggcaaactttgtacaatgtgtctcccaaggagtaaggaccctacagaaactgatg

SEQ ID NO: 47716 - DNA, 794 bp, Arabidopsis thaliana
gctaaggaattttaccaccaaggcttggaggtttgttgtcccggcgtccccctaccggatacttccttaccaagatcctgtatatgtagatgggtcacttcattggctcaccaccaatgttttgtctttcgatcttcataccgaaactttccaagtcgtgtctaaagctccctttctccaccaccacgactactctagtagagagttgatcatgtgcaaccttgatgatcgtttgtgcgtatcagaaaaaatgtggcccaaccaagtgatatggtcgttggattcagatcacaagacatggaaggaaatatattccatagatctcaatataacttcttctttgtttgggagtaatggattcgcactcagaccactagcagtttttgacaaagacaagttattgttttgtgaacctgaatacggggatcaattgctaacacatgatcccaaaacaaaatcttatgaatttgattacagatttttttcccctactactgcactccctctttgttatttccagagtttaatctctattttgtaatgctttatagttttccaaaacattgtaatttcaaagttttaataatctcaattggttcacctcctactaattatgcatgctagagatgtttaattgtttacgtaaatttcatctttcttatatatggtgttgtttctcctactattgaattgatccatttttctattttattttttctgatacatttggatttgtatatgcagattccacaatttattctattgtgtatgctttgctctcatcttagcaaaaa

SEQ ID NO: 47717 - DNA, 548 bp, Arabidopsis thaliana
aaatgattgaagaacacaaatggcgttacctaaacgttctgctcactagaacccaaaacctaactctagaggattacatgaagagcgtgaagaacgttgaggaagtggcgagagaatgttactccgagacaatccacatggactcggaagagttcaacgagatgatggttcttgacggttgctttctccttgagctgtttcgcaaagtgaacaatcttgttcctttcgaaccaaacgatccacttgtggccatggcttgggttcttcctttcttctacagagattttctctgtcttgagaatcaaatccctttcttcgttctagaaactttgttcaatctcacaagaggagacaacgaaaacgagacaaacgcttctttacaatctctagcgtttgcgtttttcaacaacatgatgcacagaacagaggaagatctcgccaggttcaaagagctaagagccaaacacctcctcgacctcctccggtcaagtttcatccggagagtgagcttacacgccgccggaacgaatccagggaaggaaaagatg

SEQ ID NO: 47718 - DNA, 563 bp, Arabidopsis thaliana
tccaactattttttatcaatagaatagcatttttccaaatgaaatttagccagtctctaattatagattgtagtttcaaaaaagaaaagggtatgaattaaaaaattggcattagaaatgtaaataaactaattataacctagttttgttttgtacttaatctgcggtttctatatatatcactaagatgtagaaaaacttatgtaaatattgtgtggttacctcggggatggcagtctcaagacaagagcggcagtcagaggaggaggcatcaccgcggcaaagggccaaaccgttgacgttgtttggagtgttgccagtggaggaggcggcaaaaccggtggatggaactttgtaagagagctgactaaagagattgttgagatttgactcgtagagactttttgaggtaaagcttccttcgatgtctgagcacttgtggaagagaaacgcattgttctggctttgagacaaaacggtatgtatagagagaatttgtatggctatggcaagatagggaactaacgatgcgttttaatgaagcattgtttctggagaaattg

SEQ ID NO: 47719 - DNA, 900 bp, Arabidopsis thaliana columbia
agtcgagaaagaatctgattaatggctcatcaagcccagttaaaatgttaaaacttaggacacaaattttaggccttttaaagcccattattaaatcatttaatacgtttggttaacatacatatgagagatgaggagactaattattatttacttctcattctcaaatgaggtttatcaacttaattaccagtaccaaaatgtttcttgaaagtgagaaacatgcatctctcttctgtaataaagagatactacaagaagaaggtcaaaacacatataataaacaaggtcaacatgtgcagtctgcaccgaccttagttttacatcctaattattattagtgatactatgtgttttttatttcttaattcaactttgattaaatctataatcttaatctaattattcttttgagatatgaacttattacgctgaaaccagtatcatgcagccctactaattggtatatgcatctaatacagtattatcagtacgtaatcactaatgttttgtaatatggtaaaaaaattatataatctcaatatctcgagaaatattaacatttgtttacaagagtgtcttttgtcatttcttacatcacatgggggccttgggcggttccacgttgtttttagtatgttttcctcatttgtttattacacagattttcttagtggttttagtaatagctgttttgttcgataacataataaatagtactgttattatacttaaataatttttggttactaaactcaaggtacgtgacgaaaagaaattaaaaaggtaatggacgtgtggacgcgtgattgatcattgtttaattgcacgtatagtatataattcattaatttgtcttgaagcctactcttttcctttcttgcccatgggaatctgagc

SEQ ID NO: 47720 - DNA, 777 bp, Arabidopsis thaliana columbia
gttttgcttttcatctgagtctgcgatagaagagcttctccatagttctctgttgtgattgatgtttttagcagattgaatggtaaggatgagattacgaaagagctggattcgaatgatgttgtgattagccatgaattagcattgagagttctgagggaacttgaatcaagccctgatgttgcggggaggtttttcaaatggggtttggaggcttatcctcaaaaactttcttccaagagttataacacgatgctgcgtatttttggtgttaatggattagttgatgagttttggaggttggttgatgatatgaagaagaaagggcatggtgtttcagctaatgttagggacagagtcggtgacaagtttaagaaagatggactagaaaatgatttggagaggctgaaagagctatttgcttcaggttctatggataactctgttgacaaggtttgcaatagggtgtgtaagattgtgatgaaggaagtgtggggtgctgatgtagagaaacagctaagggatttgaagctcgagtttaaaagtgatgtggtaaagatggttttggaaaaacttgacgtggatccgaggaaagctttgttgttctttaggtggattgatgagtctggaagttttaaacatgatgagaagacgtataatgctatggccagggttttagggaaagagaagtttcttgataggtttcagcacatgatagaagaaattaggagtgctggttacgagatggaaatggagattcagatgttctgtaattgg

SEQ ID NO: 47721 - DNA, 1966 bp, Arabidopsis thaliana
cccctaaacacagacataagattaaaataagtaatatacaagcataaacttaagcaagattttattcctcgtgaaaatattacattttgtaattttattttctctagtattaaaaaaggaacaactaattaacggaaatacttaaggaattaagaacagagaggtctcatacttagtcaagtttggtgaagctatcaaagagaatgtcttcgtgttgtccgccgacgacatagtcaagaatcccttccgccgccacttttaagcctgcgccttcgcctgggatgatggtagacgaaaccgggagatcggaggtgcgtgcgaagaagaaaacggcagcgagaaagagagccgtggagagaaaaagtggccagaagtaagatagaacggtgaggaaaccgggagaataagcgacgagagctacggtgaggagagataaaacaaaggcaaacacgatttgcaacttgaacttcaaaagcttctcccggaactccatctccgatcaccgacaaagatctgtgagtctgtgactgttgtgttaacacgagaaagatggagtgaagagagatagagatatatctaaaagagagatagtacaatgctaactctctctctgtctttcctctgagtgtctatacgtaaagaaataggaaagattctctgtgacaaggataacgtcaaaatctcaagttattttgtttttaaacgcgtttgaaaattatactgtttttcttctaacgaaaatgataatatatttttaagatttttatgttactttgttctgtgacttgtatgaacatttttttttttgtaaagttgtcgtaaaagtcaaagaatgaaacattttctgacataaatagtaaatcgtacaaagctaaaataatgataagagagatattttcaattcagttataatgttgtccgttttgcatgattgaatttttaactttggattcaggccgaccaaaatatgggcctttaaaagcccgatttgggttgctaacagacgactactcttttgttagaacttacacgagccgccgtttctactttctagctctggcaaaacggcgaggcattttctttaaacatatcaacatacaattagcagcatctctacaagtttacacttctctcataaaacccaactctacgaataaaagagaaggtgttttcatttatcctcttcgtctaattgcatccaaactctcagcagagacaaatacagcttgcttttaacgtcacaaggctcgaaccagacgagctgcaaatgctccatctagtgagtgtttcactgggtttgataaaaagaagccttgtgaggttacaaaactcgacggtacaaaactggttactggatctatggtgaattcctgtgaaagcagagagactatttgttaatatcaacatctgaaggaaagcaaatggattataaagattcttacaggatgtcttaagagaaatgcttcgacccttccttcattttcctcggggtctatggagcaagtactgtataccaacaccccaccgtgcttcaccagtctttgagattcaatcaagagtgtcacagataaaagtatcagataagtcgcatattagtgtttcagaattaatcaaatgactcatcaaaatgtatgtacagagtgcatacttggaggcagaatcaagaagctcatcctgcagtttagtgagctctaacatgtcctcaagtttacggttccagcgcaaatccgctctctacaaaatacagattaatgggaacaggttaatcagatcaggtcaattcaactagcaatgttaaatcttgctggcgaaacagttagataaacttttctcatgttaaccttggagaggacgccgagtccagaacacggggcatcaagcaaaactttgtcatattgtacttcattggttccctaaacacattaagttggaaggaagcatgtgagtagcttacaaacttggaaac

SEQ ID NO: 47722 - DNA, 599 bp, Arabidopsis thaliana columbia
tggagattttccgtgtaagttgattttggtgttgcttcatatgctattgaacttgttgtcttgtatgttgaagtttgtttcttagagaaaattgctattcaaccctttcaccatcattctctttggttcttgttttgtttttattttgagtaagatatgcattcatcagtgcaagtatatcagcgcttttgatttcatttttcttttttgatgcaggacgatcaatctttctctgaaaatgatgccttttttgcatggacgttcgaaaaacggcatccgctatggcaaacgcttttgtccttcttctggcctgtattgactcttgcaatttgtttgtttcctgtgtatccacaccgttgcaaactaattgtactctactcatgtgcgggcattcttctgatgattctctccttacttttcggtaagctctattacacaaatactctgtttaatatttttgtaattgcaccttcgagagtcattttcttgggagtattatttactagcgatcgtacctaaactgaagggggtcatatactcatgtagtttaacttggcttatactgagattagtcgttcttgattacgcttgcagtgaga

SEQ ID NO: 47723 - DNA, 606 bp, Arabidopsis thaliana columbia
cgctagtgatttcattctatgctcaatccaaatttcaggatatatatatttcaaatctgccatattttcaaaaattatcatgcaaacccagttttacaaattttccaactgatatatatcttttcaaaacatgtggcagtggctttggaggttgtatatattaagatatccgtagttttaatgtgatgatcatatttcatacaatttctgcaacttggtagtccaccacaattcttttcttccgtactaagaaaggccaaacagtgttaatacttttcttttgtttctttcttatcaactggcttaatcttttttatggtatgtaaaatggaccaagacaacagaggagatatagatgattaaaaattcaaagacttttacaagcaatttgattaatcaaaaagtctcagctagtttcggttggcgaaaccatttgatcaacttggaagtccgtttgcaatataagcaacgtggctcatgcccgcaagtatatctacatacataaaaagtcaacggcaagatatttagaaaaggtcactttgtcatatatattcgtatcacttcagttttacatttgacaaaggatggtgatgtttcgacttgtgt

SEQ ID NO: 47724 - DNA, 577 bp, Arabidopsis thaliana columbia
cttcttttttattttgataggaacgttaggtatctattatgtaaaacttgctaacaacaattctctaattctttgtttatatctgatctcttcctccatgacacggggctaatctaaacttctaaaagcatattgatccaatagcttatttaatatattttgtctgtcaaccattaggttacttttgttacgatgaatttttcaaaagaaaaatacaagaattatgggatgaggaaaatctagtgggtcaattgaccataaaggctaaatcggattgaagaataaaaatcggattgtgactcgtaactcgtaagcgtgacgaaatattaacgcaacatttatatgtattgggacaaattattaacgaataactaccaaatgcaaaaaatacgagacagttgagtacttgagcttggtcacaaaatcatcatcaaggaaaaacaataaccatacagtaaaaatatagttctacaactttacaaatttgaaagcgtgtttagaatgatgcacacaaataatcaatctgtcaaaaaaaaacatattgtttgattttactctaagattaaggcgattgttt

SEQ ID NO: 47725 - DNA, 842 bp, Arabidopsis thaliana
cgtgtctcttaactcaatcgacgtctccagtgagatctctacgagcaaacaccaaaagagtacacgtcgctcttgcaggttagttgaacgtcctgagtaatctgatccacatagcctgcagatcctttgacctgagtcgatatatgagtagccccaagatcttccgacactaaacgagcaaagccaaagtccgccactttggctctaagcttattcgtgatgaggatatttgatgctttaatgtctctgtggattattggactatctgcattataaaatccctaatgcgttaaatcttggcacaataagctataatgcaacaccgacaacaatatgacaagattaccagtatatgtgtgcaaataggtcaatgcatgagccacatcaattgcaatctcaagacgttctgccatttcaaggcggttaccccttaaacctgtgtttttatatagaggatcaatagttgagaattcatttagatattttattttttgggaaagttctctatgctctaaaattagagactggatttttctctatatacacgtaaaagaagaaggaagtacctcttgcaacttaccatctagatgttctcgtaggtttccattggcaacatattcaacaacaataaccttttcatctccatgttcaagaaatccatacagctttaccaaattcatatgctcaatctttgacaatgtgtatatttcattcttgaactctagcaaccagcttttgccatagttgttctgcacagaattttgagttatcgataatgtcttctccgaataattcttaagaaactagttcaatctgttttccacatatttccaagaaaagga

SEQ ID NO: 47726 - DNA, 523 bp, Arabidopsis thaliana
gctagataattaagttagtccagtaacacaaatatatcactgttgatgttgaattttattgatccgcagacgttcaagatatggttgacataaccagttcagctaatttgctacaagtcgataaacattgaaatgctcttgcaagagataaacactgaagaattcaattaccacaacaggatctgaatttcttgattttggaaggacaatccacgagggtattgtaacgcaataactccatccagttcgagggtcatgaggccaaacagtatctctaccattctgcagaaataaacataaatatctcaaaatctccaacttgtacatatatggaattcaatcgagtagaatgatactttatagtctggagctatccaaagctgcataaataaagatttagctacccctgatgttaaacaaaagataacctaacaattcaatagagggcaacaacagaattcaccaattgtaggacatgacttctaattgcttatgtggtgagtctacattggacttgctggta

SEQ ID NO: 47727 - DNA, 703 bp, Arabidopsis thaliana columbia
ccgtacattctaaaactcatttttagttatcaagatatttttctttctctttagatacggattagtgaacttgagataggtatatctaatttaaatagacagctttatagagctatgatgacacttttaaaaactgatagatatgcaacaaatatcattattgcatgcctcacagttcacacatgttatttgaagtttgaacattaagtcataaacaacagtttaattacaataaaataatcaacatttgctagcaagaaaaagagaagatatggtaataaaaataaggtttattgaaagaaaagatgagaaaaggagatgaaagtacaataattgtatatatcgtcaaccatggcgacatgatcatatacatacatgtttaaaataattttggaaagtgtaaaagcaagtgtctaaggaagtgttatgcactaatagaagtataggacggtatctagtgagaagaaacaaagagtaaagatacaaaaaaaacagagtgattaacatttcctacatatattctatagttttttttttggaatatgttgtaacagttatgacatgattcatgtggaagctgctacaaaaaagtggaggacgagagggaatagtaataaagcagaaaggggtgtttctttgagagagtacatttgtgaacgaggaccagcctttgtgggacctaagagtggagggtggttcactt

SEQ ID NO: 47728 - DNA, 699 bp, Arabidopsis thaliana
tccatgttctgttgcgattttggttgatcgtggacttggtggtacgacacgtgtcgcgtctagtgatttctcgttgactataacagttttgttttttggagggaatgatgatcgtgaggcgttacgtgttgcggtgcgaatggctgaacatcccgggataagcttaaccgttgttcggtttatccctagcgatgaattcaaaccggaaaacgtgaggatcgagataaccgaagatcagctctgttcaggggcaactagattgattgatattgaagctataaccgaacttaaagcaaagattaaagaaaaagaaagttctcgttctaattcggattctgaatctcatatcatttacgaagagaaaatcgtgaaatgttacgaggaagttatcgaagttattaaagagtattctaaaagcaaccttttcttggtggggaagtcaccggaaggttctgtagcgtcagggataaacgtaagaagcgacacgcctgagcttggaccgatcgggaatttgttaacggaaagcgaaagtgtttcgacggtggcatcagtgttggtggtgcaacagtatatagcaagccgtccggtcggaatttcgaagaacgtcacgactgaagagtcgctggttgaggattctgagagtccttagtgaattttctatttgggattccaagactcgaaaggtcaaaagattggctt

SEQ ID NO: 47729 - DNA, 870 bp, Arabidopsis thaliana columbia
caaaaaaagaaaagcaaaaaagaaacaagattatataattgatattctttgtatgtttaatttaattgttgcagaagcaaagaagtcgattctcaatttccaaccgtaactaagggggagaaacgagtatttaaggctaacctcacatagcaaaactacaaaccaataaagacagcctcttcttctaacaaaagcaaactgaaccaagaatggagtcgctgatcaagtcccagcacgctcagcaactggcgggtcacaagaatacgaccggtaaaactccgtccatggagatgataccggcgacgggacttgcgatgtcatcggacgaaagcatgatgctgaagctgattcaacaaactcactccccagatgctcgcgaagtccaagtgcgtggccttctctctctcgttgaagatattctcgatcgtgccactcttgactctgaagacaccaacgcctccgttagtattcctacacacaatcaatttcgttcttagtacgtacgtatgatcatgttcctttacgtacttgctttgatttttcagatgcttccgttgcccactgaggataaactgatgcagtcaagcatgatgagcgttcttgatagtgtctcctatgctatcgatcgtgttgcctgcgaggtatagctacattcactttttgtttgccacaattcaagtgattctttgtttagacttttttggctcaccaaaataacatccaagttattaggtttcgttcgggctaaattcggtgtgttttggttcagtttcaggatattcagtctaaatataaatatgttgaccatcttggttcggttaggttgcgcagtttccacgtaccctagatatcaatctttgtggttataga

SEQ ID NO: 47730 - DNA, 954 bp, Arabidopsis thaliana
gctgctgatgttggaactgctgctgaattgcttgacatcgcagataaggttaggatcattcttggtatcgaagtttgaagactgttcattagaattatgttttagtgacatcttcttccaaatgttttgtgttgatgcaggtgggaccagagatttgtctcttgaagactcatgttgatatactgcctgatttcacccctgactttggctctaagctccgtgcggtaattacttttgtactaatttgctctcacacatcttcgaaattctgtttctttgataggtttagttatatagagtaagtgaagattgtaatatctgcaatagacatgagtctcatgtctgttactgattaattggtctctttgatactcattgatctattgtttattgttactttagattgcagacaagcacaaatttctcatatttgaggatcgcaagtttgcagacattggtaacactgtcactatgcagtatgaagggtaatttttctacattatgtcacttagctttcattcaagtcttttcgagttttcgtgtgccaattttttctggtttgttcgcagaggcatctttaaaatattggagtgggctgatattatcaacgctcatgtaatatcggggccaggaatcgtggatggcctgaaattgaaggtatttttcatttctctttattaccagattatagattcttttgtttttctaatgttttgttgcattcctatatgattgcagggtatgcctcgtggtagaggtttgcttttgcttgctgaaatgagctctgcaggtaacctggctacaggagactacactgcagcagctgtgaaaatcgcagacgctcattctgattttgtgatgggattcatctcggtgaatcagcatcttggaaatgcgggtatgtgtaccgtctatgattcatgaacacctggtgtcaaatggtgaaggtggtga

SEQ ID NO: 47731 - DNA, 476 bp, Arabidopsis thaliana
gaaccatccattttggtatatgaacacaagttttcactaaaatcttcacaagaactataccgtttggtgtcggcttagcgatgatttgcgttgttcctgcctgttacaaaaccaaacacaatcaattcaagatcatgaatttgttacttcaaagcaaattagagaacatgaagagtataagtttcatacattttggtcatcatcttgaagagacatcataagcgtcttcctagaaccctcaagctgcacacaaatttagaaacaaaaaccctaaaatctcagctacttccaaatttagaaacaaagagacctgacgtcaaatttgaaacagagtcaaaattacctttgagacatctctctgaagtctcttgacagtattagacaaagaagcattttctcttatcagattctcctggaagaagataattagatcaaaatcagtaaaaatgaatcgggtcaaaacagaacacataaag

SEQ ID NO: 47732 - DNA, 588 bp, Arabidopsis thaliana columbia
tgataattcttagaacttgaattgaattattagtgttgacaaaaaaataaaaagaattgaattattagtgaattcagtgtttaagtcaagtatataaagcgatttgtaagttatgcttttttaacatttaaaaccagttatacaagcgaaatagtagttgattataattgaataaatctccaaccccttttagcaaaggaagtcaaaaccaaagtcttcgttttttcgttatatagttcatacatttcttttaaaagaaaagcttttctttttggtcaacgaggaaaaggctgatgaatccaaaaatatataggtaatcaaagtaaagaaattacaaaaatggaacaaacgtaaccttttgaaagtatataataaattggatgacgtagaataaagaagctcatggaaaatttatcaacttttctttatcatatttatggtcaattctgccggcagaatagaatttgggaatgtgattcagtaagggatagctatatagctaagctaacgttggagagctgctggaccgtggcccatggcgtaagttggttggctatacatataacaaaatgggccaaacggttatat

SEQ ID NO: 47733 - DNA, 877 bp, Arabidopsis thaliana columbia
aaatagaaaataatatatataaattgaaatagtaaaagatctcgttatctataaattcgagaccatttttctattctacggattaacaatcatatgttttgaataacattgttttaaaaatatctcaacgataattcatcgaatactatagattttattggtgtaaaggatgtaactagaaaactatatatcaacacaaaagaaagaccattacaaaaggtttgacactaaaaaaaaaacaaaaaaaagtttgactatttttttgtctttcgcagaaataacgattttgagaaaagtaattaaatttttaacatggtaatatgagaaattaagtaagtaacatgagtagtttttaaaaagtctattttctccttctgatttggtgtaggacgtgcgagtgaaacacacacataacgagagaataaagaagaatagaagaagagagaaaataatgatgatatgatattttttcccaagtgaatgttagattaatttcataaaattaactaactaaatcatctaatagtttttaataaaacatagatttttttctgtttataacatgatttaaatttttgaaatctgatacaaattattaaaatagtaaataataaaggtctaaaacacaccaataaaatagtataaaaaaaaactaaatagtatagaacgaacagaacagtcgactaacaaatgatggagctaaaccgatctgatctaaaaaaactataccccatgagagtcaactttggctacccaagcgaccagagtaaaccgctgtggtgacgttgacgatagtggtgatagtgttacggtagcggttgtggtgatgctgcgatggtactagtggcgctagtagtgacgttgatggtggtgattg

SEQ ID NO: 47734 - DNA, 1112 bp, Arabidopsis thaliana
taccggttcgtgtcgtggagcagctggaagagatttgaggcgacggaagcgagattcgagatcatctggaagagtagaatcggtgaatccagaacaattgatagcagctacttgctccaaatcagaaagctccttcgcttgcgaaattagctcttccactgctgaatcgtctgtatctgaaaaatacccaaaatccgccattatcgatgagatcaagcttcttagggtttattttttgctttttggtggagacgaaagaaataagagtgagagagaaagaaaatgataaaagtcgtcacaacggctaattcatgattttgtcagttacgttggctccgattctgtgcgcgtcaattttgatgactaacccacaaaatgtgtgattaagctttaatctaattactttattaaagacaattttaatttaagattctattcatataatatgtaagcaaaaactggtgtctttctctcaataagttccactaattatcttttctgtggtttctttgtgttacagatttgatttacaatggatcaagatccttgtacgatgatgttaatgaaaccttgtcttgttcaagccggtgataaacggtttggttcgtatgtacagtgacagacttgagacgacgccgaggatagacaagcaaccccaaaacacaaacgttttgaagtagcaatctcttccgatgcaaacgattgagtcagacactattggtgttatatcggggcttgcgttggcttcgtaaatggaggcagcgatgtaaccgtataagagtgagccgattggtatgtttgtgatgagaatgttgtggttaacacctacgctattgggtccaaagagatcagatgttatggagactgcggctgcgaatatgaaacctgaactcagaccgattaatgcggttgcggtctgcaatgctgtttgttgtgaggatgataccgctagtaaaaagaaagcgattggagttggtaagagtgcgattgcaaaccagccggttcttgttaaacgaaatctcctgcaagatccaatattcttgatgagaatatgttatttcaatttcacattaagacattccttaatctaaaatgaaacttacttgtgcata

SEQ ID NO: 47735 - DNA, 555 bp, Arabidopsis thaliana
tcttgactcgacgtttaaaacagtttatcaactaaattacaatgagatggttttcttcttttaaaacattcctaaaccccttatagtcttaaagattgatttaagcagacatcgaagcccactcatcagcctgaataaagttagccaccgaatacacatgaacatgctcgtccggtatctgactgctccatgaaaccctttgtgacctatctgatcccggacccgtgttcttagattcaccgtaataaagtgtcttgagcgcgaaatccccgctccaaggtaaccatccatcaggagtaatcaaagcctctaaattacaacctataaacacagtccttgagtaatctttccatggcctccccaagaagttcttatgcaccttagggttagctttaaacagcttcatgtactcctctgttccgttaatcaaacagttcaagaacacgaaacctgtggactgggacgggtcaatccttccttgggcagtgactgagtttttctgcccttttcagggttaatttgacgcggtgcgattaggattcacagtcttggaag

SEQ ID NO: 47736 - DNA, 613 bp, Arabidopsis thaliana
gatgacttcggagcagccacggttcgagcactgatgcattggcaataccgtacgatctctagagaaggaacttcgattcttgacaaccttaacgctttgctcggtcccaagacgcaagattacatctctttctatggtttgagatcgtacggacggctgtttgaggacggtccaattgccactagccagatttacgtgcatagcaagttaatgattgttgatgaccggatcgcagtgatcggatcttctaatataaacgataggagcttactaggttcacgagactctgaggtactttcaaaaatccaattcattctttattgcagcaaaacagagttatgtattcatttgaatcaatcatgtttcagatcggtgttgtgattgaagacaaagaattcgtggaatcttcgatgaacggaatgaagtggatggccgggaagttctcttacagtcttagatgttccttgtggtcagagcatctcggccttcacgccggagaggtaattttaaaaaatttctagaaacgcctactactatacatttttgacttcagaaacctttattttcatttgagtatatatagctgaaaactttttagtatttttacttgttt

SEQ ID NO: 47737 - DNA, 498 bp, Arabidopsis thaliana columbia
gtttttgtttagtcagcaaaatcaattttgtggactactttaaatgaaaaaaaaaaaagagatatatacatcaaatttgttcgacgtaaactttcatatgtattgataaaagtttttaattgttgttgatgcagttatcaaacaagtacaacgaatgggatctctggagaagtaagaagaatcttcaagttgttcgagccggaagctaaacgaggtggacgagttgaggaggacgatctcggaacggggaggagtgggagtggcgatcttgaggtcggggtgatccttcctcgagtattcagctcgtcgaacgagggcgtcaacgattttgaggtcggggcgatcttcctccggggttcagctcgtcgaacgagggcgtcaacaatcttttcttcgcttgtagtcgtactgtcgttctattagagccctcttccgtcccatcaacgtttctttacgttctttatttatagccgcttgtttagggcgtacacgagggta

SEQ ID NO: 47738 - DNA, 545 bp, Arabidopsis thaliana columbia
tctttatttatagccgcttgtttagggcgtaccacgagggtaatccggccaattccctctgtttaatgtgatgatctgtcctttctctagaacattcattttcaacagattgggctttgtttgtaacgggctttgacttataaatcgaaatcgggctgttaactccttttgggccagaattgagacttgtccaattcttccctcaacaattgtaaatgttttattttgataaaaaggtcgaattaccgtgacttaaaagttaaaacagttaaccagtgtctttgcatataagaggaaaatacggagccaccaaaatagtgcaaatgtcaaccgaaactacccacttttgttatacagacagaagaaaaatggcgcgaaattgaggaggccgtgtctttttaatgtcctttttttgttctccacaaaaaaatcaaagtagtgaaaaacatataacagaaaataaaactttaatctataattaaaaatcccatacagttgcataacaatatcacaagtttacgcaacacatcaaatacacatcaatg

SEQ ID NO: 47739 - DNA, 614 bp, Arabidopsis thaliana columbia
tcacactcatgccacaaatgtcgactatattgctcacttttcaatggagtcttactcaacaagtatctcgattgtgtataaactgtacggcccatggtctgtgaggatgatattgatgaataacgcagggaattgatgaacaatgtcattttgttgtttacatctagtacatgagttaattcatattcgtcaacatcgatgcaaacaatcggactcatgaattttcattcacatcgcacgatgtattggagatggcttctacacacgtgagtaaatcttgttgaaacatcaaccacatttcattattagtatttcgctctcttgtaagagcgactctgttttcagtcccctgtcttgtttaaattctcttcacttatacaacgagacaaacaaaaagcaaaaaaattcagtttggtctgatatggttattactcttattgttattgtaagcatactttattataaatgaatgtgaaagcaaagtctaattacattcatcaagttttgggctcaaaacggtgatgcccaataatccggtgagtcaaaataatgatccagttatgtttcccatccatatatatatatatgaacaaaatttagcatagtacccaaaa

SEQ ID NO: 47740 - DNA, 882 bp, Arabidopsis thaliana
tagaggatccccgtttgcaggggcttttttgtagtttaacctggaccccctcctgactacacctaaaagtcacggtccacatggctggtgacacagacatgcgaccaatacgcttctccttctaaaccgtcgatttaattacatccacctctagatctcgccacgtgtaacattgatttagaaaactcgtcacagtcccgtgactgaagaatcaccagataccaacagctacaagtttttaaaaaccttctctcatcctcttcctcaagcctccctcctcctctttaatctcaccagtcaccatgaaagtttagagattttttgaaagaacaaacagatatcgaattcgagttttgcaaaaatggtatcggtggaggaacctttatctcattccaattccactcgctttccgttaacaaccgatttctacggttcatcatcgccgtcggcgcgaggttacaccgtcaagctggccggtcgatgagaacagtgagatctaacttctatcaaagcggagatcaatcttgctcattcgtcggctcaatcggcgataaatcagagtatgcgtcggagtttctctcggattccgtcatcgacatgagactcggcgagcttgctttgaaaaacagtaattctctcaattcaaacgcttcctcaatgaaagaggaagcgtttctcgacatttctcaggcgtttagtgatttttccgcttgtagtagtgatatctccggcgagttacagcgtcttgcttgcttgccgtcgccggacgtgactagaaatgagagcggcggagataacgaagcggacatgatccagagttagagagagagcattgtctagggtttctcagagagaacactctctacagagattacgagtgta

SEQ ID NO: 47741 - DNA, 1041 bp, Arabidopsis thaliana columbia
aattgtatctctgtaaatatttacatagttgtacccagttatgtcaattgtcccaattcttcgatcaccaaatgtttctacaaaattctgcattcaagctacaaattcaacatttctcaatcattatcatcaatgttagatcttagtacactaataaaacaagtcgacttagctaaataagcataaataataaaataaaagtatacaataaaacaaatataaacaaatattcaaattgagattccactacaatttcattagctaatgttttatctaataaagtttttcacattgctaatctaaagaatataaaaaatattaaattactttgaagtgagttttaatggtggttggagaagaaaaataaaataaggcatatgcctttgaggttgcataattgaaaaaggaaaaattaaggaaaaatccaaaaagaaaaggaaattattaatataggccatatcttttaaaatttcgtatgtataccaacaaaagtaaaaattatccttatatttatctaagggaaatttgcatattaaccaacaaaaattttatatttgcaaaaataacacttcaaacaatcaaaaccgatatttgttgaactttatgtaatattgccaaagtaaaccatgtgtgtaacacacgctctgttgcttcttcattctgagttaaccatcgataacttctctgtctgcctttgtaaaaattcaaatactggtttttattcagagaagttacaatacccaaatctgaagaatctggaactgaaaaagagaaacccgggaaagttttgaagagggatatagtcgtgtgcagtacgagtggcgagtctagggtttaagcgaattgaacttgtgggtttcgcattgtgggtgttaaaggcttcgatttgtggaattcagagcacaaagcttctacaattgttgtcggcacctatataaccatccaatttcagtcgatgttagggtttgctctttttcatttggggtttgctaattagatagagattcatcagtttgggttgatagaagggaccatagttgt

SEQ ID NO: 47742 - DNA, 878 bp, Arabidopsis thaliana columbia
  unsure (1)..(878): unsure at all n locations
gtcgactaacatccgccagtgtatgtatggggtgaccttatactgaagaccagactgtgtttctgtataatctggatacttcatttttgttttgccataatccttccctttaagcgctggcactgtgaatgcaagtaatataccaagaaaagaatgtggctttagaaaaaaaagaggctatatcgatgatttcaacaatcacgcacggataaattaacttcacctaaagaacacatctttctctcacaaccaaactcttaacagtggacaatcaaacaatgttccaaattacaaatgccaataactttacttaataaggcacaaagcaacaacttaatcgaaatgtaaccctgagaaagattctctgccctccaaaaagaaattgaaaattcttactgtcagcaaattgagaagctgatgcaaagtctccatctttagaatcgtatgacaatgctccaatcaacaaaccaacagaagaaaccaacaactttctgcgatcaaactctccagaattattaacacatccacaattcccacctgttttcaaaactgaagttataattcaattcactgttgaggaggaaacagaaaagtaaaactgtagaagcaagccaaccagaagaacgaagaggagcgaagtcatctgattggtcagctaatcgagcagccacagtcgtccggcatctctgagaatcaaaatgagagattcagtgaataaaaaggaagaagaagaagaaacagagagatggtgcggcgtcgtacggtggtggaggaagtccggcgagcgctgtggattgagggaagcaccaaaggacgaaattgacgccattagagtgaacttanacactgatttttttgtcagtctaagagagatgaga

SEQ ID NO: 47743 - DNA, 845 bp, Arabidopsis thaliana columbia
cttacattggaatttatctctattttggaccgtttatgcaatttattcccaaaatattggaaaccaagagaaccggaaataaccgatttggaattctggtttaccactgttttcagtatcctcctgttctctgtactcaatagccgacgacactctgagagagagagccaatcgcgattttgaattttgcatcgacggcgaaaaatgcgatcgttagaagagctatctccgatagaaactctagatatcgaagagaacggtctcgctctcgtctcacgcgtcaagctcaatctcacaatccacccagtagtcccatccgtatccaaatccatcgacgaatggcaactcaagcgatccttaatagattacctcaaaaactctgtcgtaacctccgtcacagttccggagaagacatcgtagttcgtcgtcacaaggacttgaagaaacggaagcgtgaggagccagttgctcatggatcgttgtttatacgcgatttagggtttctcgatgggaagaagaagaagaaggagaatgatggagagagagatgtgaaggaattggagaagaagtttttggattggaggaagagtttggtggagaagatgaatggtattgagcttaatttggaaggagttaagtataagcttagtgtggtacttccgatttcagatgatttcgagaagttgaagaaggattgggaggagttttacgcttttggtaatcttggttcttcaattttggattttgattttacgattttttcgtggtaattgatgtgattgtgatttgcaggacattcaagggaaggaaggagagaggctgatacgattatacttagaggtgtc

SEQ ID NO: 47744 - DNA, 695 bp, Arabidopsis thaliana
tggtctcaatgttgtgagtggtgaaattaacaaagtaacatgattagcatttagagttaaatgagataataaatctcacctcttgagttaatgacactagctggactgttgagtcaggagaatgttgagtttggtctatctgatgatttgagctagcaaaactagcacaagtgctcgaagttccaatagaattctgtcatatgaaacaaaaactttagctttctgatgtcaaatctgaaaacagaggattatcaagatgcagagtaaaattttgcttactgttttaggagatatcaaatcagaatcattatcatcactgctatcatcactgaagacaccagttaacgactttagaggtgtgtaatcgctgcgatgatcttgcataaacatgatattcctctgctcatcaccatcattattcaaccatgttttccattcctcctcaatcggtgtagttgcatcatcgatttgagattctccctgcacattagcaaagacaccagactgacttgaattctgtaattcttggctgtgaaacgacgaaccctgaaaaaggggaggaacactaatgtcagatatttcaaagtttctaaagacaaaacagagaaagtttgagattctcccactcagatctccagaactgtcacaagagggattaagagtgatctgtcaatttcatacagtagaagagagag

SEQ ID NO: 47745 - DNA, 483 bp, Arabidopsis thaliana columbia
ctgaagagtggatggtaaagaaaggtttgtcatggccatggaaagggaatgagcaggaaggttcaaaaggaagacctacaaattctgtttggccttgggtacagaatgaacaaaagaaagagaggtgtcaccagattaatccctctgctggtgttcagtatgaaagccatgcctttgaaagtaataagcctatcaataatgaggcttctagtttgtggtcttcccctataaatgcaaacagtacaagcagcgctagtagctgcggaagtaccagcagcagtgttatgaacaaggttgatactgatagcgaaggcttggaatatgaaattttatgggatgatttgacaattggagaacaagtcggacaaggttatttattcctcaagcctgacacatccattctttataacataatattttttatgtgatattctgtctccgttctgctaacatgcagtaatttccattttacaggttcatgtg

SEQ ID NO: 47746 - DNA, 529 bp, Arabidopsis thaliana columbia
ctagaggataggagtacatcaccttgcccgatttgttctccaattgtcaaatcttcccataagatttcataatccaagcagtcactatccatatcgaccttgttcataacactgctgctggtacttccacagctgctactactgcttgtgctgttcacattaacagaggaagaccaataccccataggctcgttactggaagccttaatactttcacatgcctggctttcagacttaacactgtgattagaattgctttgataagcctgttgtttttgttgttcattccgcacccaaggccacacagaatgactacgccttccttccaaaccttccctttcattccctttccatggccatgataatcctttctttaccatccactcttcagcttttgaggtcagtgttttaggtacaacagagtttccatcactttcatcactggaatctctgaagggctttgtagaagctttctcatcgctacgtaagaatacaccaaaaggagattggataaaacccccctaggtgt

SEQ ID NO: 47747 - DNA, 2178 bp, Arabidopsis thaliana
acaagtccatttctcgagagaactatttgggtatcaatataggtcatatgatatgactaatatctactgcagcacccaatttaataattctagaaactctaaattcaacatttagtgggtattaaaaaatagtttaatagactatgacagtccattggaccattaaacaaaaactacacgcccttatcagagcgacgaattttttgtaacttggatcagaaattcaataaagttatagtaataaaaatgaaataatttggaaaagaaagaatagagaagaaaacacatgcgaaattataatggcctgcctctcttccttcttatctcttttacttacactctccaggtccctcacttccctcattggacctctctaactctcctctcttaccttctcctgtttaaattcttctcctttctttccacaatttctgtctaaccaattccaacaccaaaaaattccatttcttgacgatgaaacgaagccatcaagaaacgtctgtagaagaagaagctccttcaatggtggagaagttagaaaatggttgtggtggtggtggagacgataacatggacgagtttcttgctgttttgggttacaaggttcgatcttcagacatggcagatgttgcacagaagcttgaacagcttgaaatggtcttgtccaatgatattgcctcttctagtaatgccttcaatgacaccgttcattacaatccttctgatctctccggttgggctcagagcatgctctcggatcttaattactacccggatcttgacccgaaccggatttgcgatctgagaccaatcacagacgacgatgagtgttgcagtagcaatagtaacagcaacaagaggattcgactcggtccttggtgtgactcagtgaccagcgagtcaactcgttccgtggtgcttatcgaggagacaggagttagactcgttcaggcgctagtggcctgcgccgaggcggttcagctggagaatctgagcctcgcggatgctctcgtcaagcgcgtgggattactcgcggcttctcaagccggagccatggggaaagtcgctacctacttcgccgaagccctagctcgtcgaatttaccggattcatccttccgccgccgccattgatccttccttcgaagagattcttcagatgaacttctacgactcgtgtccctacctgaaattcgctcatttcacggccaatcaggcgattctagaagctgttacgacgtcgcgtgtcgtacacgtaatcgatctagggcttaatcaaggtatgcaatggccggcgttaatgcaagccttagctctccgacccggtggtccaccgtcgtttcgtctcaccggcgttgggaatccgtcgaatcgagaagggattcaagagttaggttggaagctagctcagctggctcaagccatcggcgtcgaattcaaattcaatggtctaacgacggagaggttatccgatttagaaccggatatgttcgagacccgaaccgaatcggagactctagtggttaattcggttttcgagcttcacccggttttatcccaacccggttcgatcgaaaagctgttagcgacggttaaggcggttaaaccgggtctcgtaacagtggtggaacaagaagcgaaccataacggtgacgttttcttagaccggtttaacgaagcgcttcactattactcgagcttgttcgactcgctcgaagatggtgttgtgataccgagtcaagaccgagtcatgtcggaggtttacttagggagacagatattgaacttggtggcgacggaaggaagcgataggatcgagcgacacgagacgctggctcagtggcgaaaacgtatgggatccgccgggtttgacccggttaacctcggatcagacgcgtttaagcaagcgagtttgctaatggcgttatctggcggtggagatggatacagagtggaggagaacgacggaagcctaatgcttgcgtggcaaacgaaacctctaatcgctgcatcggcgtggaaactagcggcggagttgcggcggtagatacgtcgtcataaagaggagaagaaaaaagacttagcgaacgtgaccttatgtttttattttactttaacttaccccagtagtttcgttttgtgacaatttcgcccgaaatattccgtgccttatactttt

SEQ ID NO: 47748 - DNA, 829 bp, Arabidopsis thaliana
tcacacaagtaaattttaaaaatctcatttccggaaataaataaactgaaactacatttaagaaagacaaaaagaacataaaaaccaaaaggctttcttaaatcctacatgttaaaaaaaaaaaatccaaacgaagtttcacatcggaaaccgtcatcgtcacggtattgaatgcgacggagattgcatttcctcgccgggaataaggtccatttcaatattcattgtagtcttatcctccgataaatcaacttgagccgatgcttcttgaagctgcaaagcatattcaagattccacaacacatctcccattcccggtcgatcaacaccgtactctgccaaacatttttctgcagcctccacgaatttccttaacgatcctttactaatcgttcccacgattttcgggtcgatgattttctccaacataccttttctatgcaaattcatagcatattctgctaagttaacttgttctctaggtaactgtgggtttatcactggcctcgcgcaaagaacctcgaataacaccacaccgaatgagtaaacatcggatttatcagtgagttgttgtctgcggaagtattcggggtctaaatacccgaaactaccctttaccgcggtacttacatgcccttcatccataggcgcatcttttgaaagtccaaaatcagaaactttagcgactaggttctcgtccaagaggatgttggtggtcttgacgtcgcggtggatgatccctgcgctgcaccgtgtggagatagtggagtcacgcgctgatcaatgcagatcctagacgttgcttcaggacaaggtaggaatagggtta

SEQ ID NO: 47749 - DNA, 714 bp, Arabidopsis thaliana
tataagccatcagagacgtctttgaggtcaaatcctttggtaaacgcggccggggctccccatgaggtactgatcatcgtcttatgccgaggttggtaccagaaatcatacccatacaaaggactgtttccatccttctcccacctattaaaagacatataaatagctgttactcaaaataacctaagcgagatattaggttttgttcttctttcttgctgtataagaaatagtacaaatccgttgtcctcgaagttaccttcctttgatgttaaactcggaatcaagtaagagaaacccactgccttctgcgtttccatcttcgtctccaagacaagacacaagaacgtctccggaagctaagcaatgaggctgatgcggataagccaaccccgtcttctccaaaacctctgcagggtccacgaatttgtgcaaagatggttccctcgggtttgttttcgtatcgatcacgtaaatacgaccagaccttttcaaacataagttcacgaaaacagaccttaatacatgagaagttttcagaacaaaacaaaggagagataacaagtttcttacagaagagaaggcaagatgagataacgtctctcgcaagaagaatcaccatagcaagagctacatgagttccagcctgagtgatgaagttcatcttcaaggtaaggcattggtaatctgtggatacactcgagtatgtggatg

SEQ ID NO: 47750 - DNA, 597 bp, Arabidopsis thaliana columbia
caagaaataaaaccaaaactaaaaaattacaaaaaccaaacaataacatgagatgtataaatcatatataatctaaaccaaaaactacaatttgaaaaaaggaaagctatctatccatcatttcttccgatcatcatcatggaggtgaacactcgactgactcgagaagaacatccattccaagattcatctgcatggtttctacggtaccttgaccaccaaggcgactggcttgaaaaaactaggggaaacctggtcgttgctgcaacagtcatagctgcaatgagctttggggtaatggtgaaccctccaggcggtgtttggcagagtgaagattgttcctccaaaggccaaactacttttcaaaccagaacttgtgaggggaagcttgggacttcgatactagagcacaatccttcaaagcgtatcttctatcttggcatggtcattagcaatttggtatcgttttccgctcaatgggtatcattttcctcgtcatcattggcttccgattcaggtactagatccattcataaacgataattatataatgtgtttcttcttaacatttcttgcaaatagtcgaataaatagtga

SEQ ID NO: 47751 - DNA, 998 bp, Arabidopsis thaliana
ggaattcaggacagaaatcgagatgttatctcagtttcgtcaccgccatttggtttctctgatcggttattgtgacgagaacaatgagatgatactaatttacgagtatatggagaatggaacggtaaagagtcatctttatggctcaggtctacctagcttgacttggaaacaacggcttgagatctgcattggtgcagctagaggcttgcattaccttcacacgggtgactcgaaaccggtcattcacagagacgtgaaatctgcaaacatattgcttgacgagaacttcatggctaaagttgcagactttggactgtccaagactggacccgagcttgatcagactcatgtaagtactgctgtcaaaggaagttttggttatcttgaccccgagtacttcagaaggcaacagctcacagataaatccgatgtttattccttcggagttgttctcttcgaggttttatgtgctagacctgttatagacccaacacttccaagagagatggtgaatcttgcagaatgggctatgaaatggcagaagaaagggcaactggatcagatcatcgaccagtcgcttcgcggaaatatcagacccgattcgttaaggaaatttgcggaaacaggtgagaaatgtttagcggattatggagttgataggccatctatgggagatgtgttgtggaatcttgaatacgctctgcagcttcaagaagcagtcattgatggtgaaccagaagataatagcacgaatatgattggtgaattactccgcagatcaataatttcagtcagggagacactagtgttaacgttccgggcacagcggggcgattcgaggaatctagtattgatgatctctctggcagttccatgagtaaagtatctcacaactggtgaaatctgaaggaagatagtgaaagatttgagcaatgcagtgctaagaaaagctaaagatctgatctttttgatagaacagactagcaaagtatgta

SEQ ID NO: 47752 - DNA, 669 bp, Arabidopsis thaliana
ttaccaaaggatttgacctcaaagacgtctctgatggcttatatggaaagcatctacatgtctatagctggccccaaggagaattgaaacagattcttgaccttggtgataccggacttttacccttagaggtaaaccctaatcttccaaatatcagcttatactactttcttcttccacaagaaacttcatctctgttttgttctgcaggtaagattcttgcatgagccggataaagctacgggatttgcagggtgtgcgttgtcgagtactttagtaagatttttcaagaacgatgatgaaacatggagccacgaggtatataatgaatcttctctacttattattcttcatttctttttgatttttgtcctaacaacaaacaacctctccaatttgaaggtggctatatcagttgaacctctgaaagttgaaaactggattctccccggaatggccagggcttatcaccgactttctaatctcacttgccgaccgattcctctattgttccaactggcttcatggagatattcgtcagtacaacatcgaggacccgaaaacccctgttttaactggtcaaatacatgtaggcgggctagtccaaaagggaagtcttgtcttggccttaggagaagaaggaaaagcatttcagtttgatgtccctaa

SEQ ID NO: 47753 - DNA, 1587 bp, Arabidopsis thaliana
  unsure (1)..(1587): unsure at all n locations
ttcaacgtacttgtcatattagtacttataaaagtaacagagattgaaactagaagctctttctgcttgaatagggtgagaaagacgacaagatcattgctgtctgcgctgacgatccagagtatcgccattacaacgacatcagtgagcttccgcctcatcgtatggctgagatccgccgtttctttgaagactgtgagtgttcttttcttacaaacttttggttggttaaggatgatatgaggctcatactcttgtaatcttgttgcagataagaaaaacgagaacaaggaagtagccgttaacgacttccttccggcaactgcagcctacgacgcagttcagcattccatgtaagtagccttcatgaaacttactgttatttacttcatatattatgaccttgtaaatagccgcaatttgtttatatcaaagaataactaactaatcaaattgggacaactcttttgtgtcatgtagggatctctatgcagactacgtcgtggagaacctaagacgttgaatcaccacctcaagcaatggaatgaaagctcacaactgcattattcacaaatataaatatacatataaatgtcaggcttctcaaaggatatatttgttgtgtatgcctctgatgaatccggtagatgatgccgataattcttttttttttttgtcgtatgaaactgataatcaaagactaaaacagggatttttctcatttgtggcatcactttttaaattttggtgtcatttctcatcttaatcaatttgtttttgagttttattcttctattagatcttttatacatcaaagaatagatgaagattcctccctaaaaccttatagtatgtcatttattcacaatatgttatacgtgttaattttctctcttttagtatactctttttttttctttcagattccatcccaagttgcttaaattttgttaaaaccaactaaattccatagttcaatttacaaatctgtgatcagatgctatctaaatgaatattaccattttagcccttaccttttctgaaatttaccacgtttacctcaatgaaccgtcatcgcaaaaccaaaaaccctttcctatccctaaaacccgagagagcatcttcttctcctcttagggtagaagaaggacgaaaatcggaggaggaagaagaagatcgattcgatttgtgatcaacgatgagctccttcaatggaaacagcaacatcgacaacctcctaatccaaaccctacttggacgtctccaaattcgtccccctaactctcatttcctctctcaatccctagacgacctcctcttcaaatccgacgacagcgacggcgatgatgacggagaaggtcagaccagtctcgacagagaagaagctaggcttgagaaagagctaatccgagtcatcgtctctggtcgaagcgattctctcaagccgaattcaggtcaagccgtgacagtcaacgaacaccacatctgcgttgggtttcatgaggatgaggaatcggattatcgtgtttgggagtggcatggtcatatcatgttngttgatgaagagaatgggtacagcctgagtat

SEQ ID NO: 47754 - DNA, 589 bp, Arabidopsis thaliana columbia
  unsure (1)..(589): unsure at all n locations
atttcaaaaatcattatccccttgcattacgtctcggtaaagttcattttcactgcgcatgtttctctatttggtagcaaatataattagataattgtgtagatagaaacaaattaggtttgggatttattcaggaagtttcttctacaatattgtgataaaataagattgtattgggtaccatttgaaggttccttcaagttaagcacatgcaagttcaaaagagtcagtcatgtctctctttttcattttctcgttttctcctttttttttgttcttgcctaattcttattaaaaacctttcctaatttttttttaatgaaccaagcctagtttgaaacccgttaactctatacatctttactaaattctccaaagaaagacatgatcaaaaagacaaatctatacatattcactaatacccagagaaagaaaattgagatgtcgtatttattgatattccgaaacaataacatgagatgtcgtatttattgatcggaagaaaatttaaactcccattagtaacgaacgcaagaaataaaaccaaaactanaaaattacaaaaaccaaacaataacatgagatgtat

SEQ ID NO: 47755 - DNA, 834 bp, Arabidopsis thaliana
  unsure (1)..(834): unsure at all n locations
cctgccgcagtacatttgactgtaagcatagtatcatggatcacgccttataagagaactcggaaaggtctgtgctcctcttggcttgcaagcctcgcacctgaacaaggttagaagtttgtttcttctttaccataactgtgaatggctcagttctctatttctgatatgttttctttgtcttcggttgtggttagaggtaaacataccggtttggtttcacaaaggctcccttcctgctccatctcagtcgcttccgctcatcttagtgggacccggaaccggatgtgcgccattccgtggattcatagctgagagagccgtacaagctcagtctagcccggttgcccccgtcatgttcttctttggttgcagaaacaaagacacagactttctataccgcgatttctgggagtctcacgcaagagaaggaggcatgctctctgaaggaaaaggcggtggcttttacacagcgttctctagagaccaaccaaagaaggtttacgtgcaacataagatccgcgaaatgagcaagagagtttgggatttactctgtgatggagccgctgtttacgtggcgggctcgtcgacgaaaatgccttgtgatgtgatgtcggctttcgaagatattgtgtcggaggagacaggaggaggataaaggaggtacttcacggtggcttaaggctttggagaagacagggaggtacaatgttgaagcttggtcttaatctctaacttccttcatatgtaatcttattacatatatgttctctgattattttattgctggcacattaatttttattnttattttgataattcatacaaattaat

SEQ ID NO: 47756 - DNA, 562 bp, Arabidopsis thaliana columbia
gatattcaaacaaagcaaaacaaagtcaatcataattgagccgttgatgattggtcgagcagatgttcacttaacttatatttgtacctcgtgtcctgaatgtagaaggtctggacaaagccaaaccctggaatcctggcaaatacatcatgcacctcaggttcaaccagaacattcatattctcttggtgatacaagaaagaggcagcctggaaacaaatttgaaagaccaacaacttttcatggacttcctaaattgcaggcaacctcaaatgtggaacaaagaaaatagaatcttttagacttaaaaagcaacgcgtttacctctttagcttcctccatcagttcttgcccgagcttcttcagcagtaagacagtttttggggtagttttccaaagaagcatctgctgttgagtacttggatgtgtgaaggccagagaggattctgtcaccttttcccttgtacaagacactccatcagttcggactaagaacatctctgctttctttctcgactgcacccttactacaccagtggcagaagccacatattccctcaat

SEQ ID NO: 47757 - DNA, 619 bp, Arabidopsis thaliana columbia
tgtataaataccaactctcattctttcacaccctttcgagtctctctactcctcttcttattcaccggagtaacccaaaaaaaaaaaggaaaaaatataaaaataaatattctcccctaaaaattttggaaaaccacaaacagaaatctctctgtctcaccctagaaaaacctagaaatcttatcgctatggctgcggcggttgcatctggaattgccccgacgacggccatggttgatcaagtgatccctaatcaacccacggttgctgctgctgctcctcctcctttccctgccgtgagtcaggttgcggcggttgctgctgctgctgctgccgcggaggctttgcaaacccatccaaactcgtctctctatgtcggagatttagatccgagtgtcaatgagtcacatctcttggatctctttaatcaagttgctccagttcacaatcttagggtttgtcgtgatctgactcatcgttctcttggttacgcttacgtcaatttcgctaaccctgaagatggtaaatattataaacaatcatacaggaatttaatattattattatggattacgacaggaatataatattgttcatgtgtttgcttttgtggttttgt

SEQ ID NO: 47758 - DNA, 496 bp, Arabidopsis thaliana columbia
tggttttgggtatgaagatacattattcatgatcacacttttattatctgtttattatcactgttcatgataagatcattatgttaattggaacatggagcgaccacccgggaaaatagtgctaccacaagggtttatggacgctcactgtatgatctacctcttcccttcgttcatctgtagttctcttttatttattgttgcttcatatgccgaaaaaggagccgtcggtcgaagacacaagcccagtccccggggtcgcatatctgagctgttcttggtgtaaagagtaaatgtagctcagtagggccttggttcttaatagagaaacttgtgccttgactttcctccttccccgcgtccgtgaatggaatgggttcttggcacgtgttcattgtttttgctggtctttctacgtcttcctctgctgttgaatgaaagctttgctcgcctacggttcggcttgcttgtccccttcactgacttctacgactag

SEQ ID NO: 47759 - DNA, 402 bp, Arabidopsis thaliana columbia
tttccaaatcaataaatttcgaaataaagttgttatgtatatgagagaactatataagaaaaagatgtaacgtctcactcaaaggtaggctagtcaaatcaaaattttccagagatgtcaagaagcttaaacattgtaatggaagaaatagagtattgtggagaaaccgaaaaaagaaggagataaaagggtacaacatcagagaaatcatctttaaagtgtggagagaacaaaacgaaaaaaaacaagaaaaaaaaaaagacaagacccctctctttttttgtggcattgttcttcaaacttgaaacccagcgttatatagaaaaacaattatacacatttggcatgttacaactccagaacattttctgatcgacacacgtcggggaaagattcattaaa

SEQ ID NO: 47760 - DNA, 605 bp, Arabidopsis thaliana columbia
gataaacaagcaccgctcaagtttcagtaaactctaacctatcagagaacacctgagttgtcttggcttcatggaatgactctttttctctctgcaaatggactggggtcacatgtagtcggaatcacaagagagtcactggttggatctcgaaggaatgaaactaaccggtgttatctcgccctctatcggtaacctctatttcctcacatctcttagtctcacgtacaactcttccaatggtagtatccctcttgaggtagggaagctgttcaggcttcaacacttgaacctgagcaagatcattcttggaggtgggattccacttggcatatatatctaactgtttttcccttttgaccaatgatctatcctccaacaatcttgaacacgaggttccttctaaactgggttcgcttcctctgcttgtccttttatctctccgtgtaaacaacctgacagggaatttcctgcatctcttgggaacctaacagcaatttcaaaggaagccattcgcttaccttctttaccttctctttcttttttggtactgaagagtaagaaaaagtctctggattgtgatgttagagctgatcaaggtttaa

SEQ ID NO: 47761 - DNA, 628 bp, Arabidopsis thaliana columbia
agcaaaattatccaacgaatacaaaagtttagtttgaaccagcaaagttattgagaaatcagaaaacacttcacttaagtttacgcacgtgtgagtttgtccaaagtccaacatgttcttttacttcttagtttctctcacgtacgacgaagactttctcgtggaaacacggagaaccaaaaaacagaagagaagcgatatgaaacgaagaaacaaacaagatcatcgtcccttttgcctttagggcacaaaggggaagcctttttcactgggtatgtttcttctctaatgatccatcttcttcttccctctttcgattctcaatctcacgaaattacctgtgacgcttcgatctctttcaatttcttcttcgatttctctattcctagtttataattgattgcaatttcgaaatcgtcccaattttgattatcggaatctgatttttcaggtatgtgttgagaatttggggtttttaggtttttggctcagaagagagaatctgggatcttaaaaatcgaaactttctagatgtggttttagtcaacttagttgtagaagatgggatcaaacaaggtcttccaggttagatacgtagagattaaactctcattaccgggaaattggg

SEQ ID NO: 47762 - DNA, 436 bp, Arabidopsis thaliana columbia
agttcctgtataacatgttgagcagggtctccatctggaaacttctccatggcaagagaaacaacttccacattgctcaagtattggtacaatccatccgatgagagaaccataaactgatcattctctgttagccggtagtgacgaagggaaggtgtgcatgatatgtatggatccgtaccaatgtattcgtttcgaaacatttccagcaaagcatcgttcaattttggctgcaaattcacattctttatgagaattacggagtgatggatatttcgattgtaaggtgaagatattattgactaacctgctttaagaatcccgctccaaacgctctggtcaccttaagccgtcctttcaccctgtcattcactatgcaatggttgtcatcggggtgctcgttttttattcttgttacttcctgagttcatcaatg

SEQ ID NO: 47763 - DNA, 511 bp, Arabidopsis thaliana columbia
  unsure (1)..(511): unsure at all n locations
nnnnnnnnnnnnnnnnnnnnctaaaggtacaatgccagtctttgtgttgcgcgttctgtgccagacactgtttttccagtgcttttaagccttcgtgatcgttcgcacgcagcaattcagtacgctcttccatcactttgtaaggtgcccatgacttcggataaacgatgtctgcgtctttgaaggcttcttccatgctggtgacctgacggaagctaccaccggaggctttagcattgtttttcgccacttcaaccacatccgggatcaggtcgtagccttccggatgggccagggtgacatccataccgaagcgagtcatcagaccgatgatgccttgtggtacagagagcggtttgccatagcttggagagtaggcccaggtcatggcgatttttttacctttcaggttttccagtgaaccaaagtgttcacgtaaccacgcgaggtcagccattgactgagtcgggtggtcaatatcgcattgcaggttcactaaagccggacgctg

SEQ ID NO: 47764 - DNA, 563 bp, Arabidopsis thaliana columbia
ccacttcaatcggagtcgtcgcttgcatatctaagtaaagaggtctacctgaaattcgaactcctttcatcataatcgattcatcctcgtaattcacctccgtcgcagcagcggcggttgataagtagcgacaccgggaaaaagtgccgtgtggtttggttagggttctgcggattgtggcagagattaccttagacgccatgtttctaaaacctcggtttgtgtttcttcttccgatttttgtctagttgattgattctcttcgattgcttctccgtgaagaagaagaagatgcgagaggtgaatatgttacggtcactggcggtttcatgacggtggtaacgtggtcgtctctgaaaccctaaattttcgagtccatgaaagtatcaaaagcctatgagaaactggcctgttaatatacataatgggcctataagttgcccaatactatttttatttttttctttaagaggctcttgtatatttgtctaacctggtccactaaaaaggtgaaaatagagtctccatatcgccaattaaaaaccgtgaaagttcgtctacat

SEQ ID NO: 47765 - DNA, 437 bp, Arabidopsis thaliana columbia
catgaattgtcctgaagcttatagagagaacaaaaaaaaaaaaaatcaaccagataacacagacaatgaaatgagatgtgaacaattaccaaacatttaacagcttaaattctccatctttacaatacagggaatcaaacatgttcacaaaccagccacgtatcgaaacaaggaagtaaaatgctcgattcaacgacataaatcgtacaaaatctgttaaataagcttgatttcgttccaacaaacacagaaaaataaaacttctcagaattaaaaacagcttaccgtcaagttctctaagtatgtacggccacagcctcttggtcccccgtcggcagattcccggtaaaatttaactccggcatcgcttacgtcttttttttatatttgttttattcctaatctttttcatatttactctttttaacagatatgtt

SEQ ID NO: 47766 - DNA, 1043 bp, Arabidopsis thaliana columbia
gttgcttttattgaaagagttgttcgaaattcgcaaatgaccgttgttgttcctacacaagcaccccaagcagcggtggcagaggatttgatctcatttttgaattagaaatatttgattttatttttgaataaatcgtgattagagaggagagtgttttagggtttacaattagtttaaggccttttcaagacctttatatcaatatgggtaataatgctaaatcccaatttattggcccaaataatgagacatgactcagcccagtaaagtatgcagaatacatttaggtattgaacatatcggggggagatatgtttgtgaatgtcccaaagcatatcttatgaacgattccaaaatcatgtttggacattcattcacccgaataagttaatttagcaacacttttaaatctagactattacatcatttggagttttcgtagaaacttcaaattacgtgtcttaatattcctgtctcttactctacgtcacattcatgtctatggcggggctttgaatagttgttcgactaactatgagttttggttttaaggctttgtgtgaagacgtatttcttcattggattcaacatgtgtcaaggactgtttctatgttcttttgactattaccttctaatttaattataaaataatggaaccgaatttttgatttaagatttttctctgattggttgttactcctatcagatcacgtttacttggaaaacaaaacagatttttctcgattggtgtattttaagaaaatactcacagattatttagtgtcgtctcctcagcaattacatatccaaatattagtgccattatttcatttcttttgtggaaaagacttctctaaaatctctgtttgttgtttttacttgcatcacacactttaagctataaagagaaacatatgcttatgtacaacaaacagtacctccaagaaacattaaacaagaggataatgttgatcgagtcctactgaatctggacatcgatgactttgcgttcgactttggtcttagggatagtgataaga

SEQ ID NO: 47767 - DNA, 449 bp, Arabidopsis thaliana
cttcaggccagctcgagctccggtgaaaccttgatgatttgcttttgctgcttcctcttcactcaccagaagaggcagccaccatccactagtagggcaaagatgcccaacaagatcaggtagaactgtcttggtgggatcagatccgtcatatttggtccgctctccatctaaaatttttatctagatcttattcttaatctttgttctaagaagcgtttgattcaataaacataccttggttgcgtcacatatgtctttcagaggagtcaagaagcagagcacaaacttcgattggaaattgtttcgttgagtttttttttatgaagtagtggtttgttctgttttgaactttgaagggtaactaacagtctaataagtcttagtactctaacactaaattaattatactttagaacacaagtaaagtataactaaccgtctaataa

SEQ ID NO: 47768 - DNA, 935 bp, Arabidopsis thaliana
ctctatttctttctttctttttcaaatctttactctttattttattatactcacaaacgaattttaagtaaaaagaatggcacaaacaaatcttataaaagttttctgtcgtcaggatcactctcaatctcaatctcaggccgacgttgctgccggcgatttctccgccgttcacgcgcctccgtaccaccaaacttcaaccttcccgtttccttaaacctatctttctcagccggaacaatcacacattccggtagaggctcaggatacctaagtgtatcgtaacagtaagaatagtacatgaaacgttgtcgaaatcttcgcatggcggcgcgttgatgggaattaatggaagagtaatcttgagactcaaggaaatcgactgagtcggaacaatccatggggacttcttgaataggatcaacggagcaaccgtctagagagaaagatttgaattcagctacgaaaggggcaaatttgtaattagctttgtatttgccgccggaagtagcccaatcagaagcgtcccaaatggtggcgtaaagagccattggctttgccggataatctgctcccattgcatcgtttctgatcacttctcttattggcacatcatctacccaaaatctggaatgattgttacacaagttacgttaatgacaaaactaattacacaaaaaattcaaaagatatatagtagttcgcaattgttaatgaaatgtaacaattataacaaacaagaaataacgagagagaaaaaggaatattaaaaaattatttgaagttatgattaaaattgttttcactaatttttttaataaagagagatttatagtttaattacgcgcaatgtaattaatcttcagtactcaataaagtagcctttaattgccactcgaggcctacgttgatctcattgattaaagtctaactca

SEQ ID NO: 47769 - DNA, 548 bp, Arabidopsis thaliana
gccttacaaaacaaccacattcgaacggtgagagggttagtggcaatcaacagcagcttagttagcatcaagggaagaggaatgattactcctttgcatcatgtggctcgaataggagatgcggaattgttgagtgagttcttgtttgcttgtccttcttctataaacgatttgacgagtaagtgtgagacagaagattgcaatcttcaggccagctcgagctccggtgaaaccttgatgatttccttttgctgcttcctcttcacgcaccagaagaggcagccaccaaccaccagtagggcaaagatgcccaacaagatcaggtagaattgtcctggtagcaataatagataggatccatcatatttggtccgctctccatctaaaaatttatctagatattgttcttaatctttgttctaagaagtgtttgattcaataaacatatcttggttgctcaatgatgtctttccgaggagtcaagaagtagagcgcaaatttcgattggaaattgtttcgctgagtttgttttatgaagtaatggtttg

SEQ ID NO: 47770 - DNA, 740 bp, Arabidopsis thaliana
tatatgattctttcagtctctcaagggccaagataagcaactttgtgtcatgtttatatgataatggagggaatgggattgctgaaaattttctagattccagccaatttacagtggtgctataaattgcaattccttcatccgctgtgacatatggaccatctttctgaaaattatgttgtcgttcctgcaacaattttacaaggaaaatgtattacagaactgggcaatcgagaataaaaggaactaaattcaatcagacaaaaaaatgaagcctcttcgtaaccatctttgtcaaacaacaatgattttgattttacgagttgtgacaaggtacagacctgttctgccttgagccaaagacgggtcaaccgtccaagattctttctacaaactgtcttatcaacagtagcccctcttctgatacgttcacgattgtagtgagcaacatttgtccaccaatcagctttagacttgacatatcggaggatcatattctcaattgccacaggtaatccagggaccttccatggtatattagctttccaacaccgccatgcctcactaaggtgctgcaatatcgtccgcgccttattttgcttaataccctctgcacattagaagacagtataaaccaacaaggaagagataaaattaaaggaaatcgaccttgagaaaaacaaatcagttatagacgcaagaagcgaacctggcattgcatcaacaacatcatgcatgac

SEQ ID NO: 47771 - DNA, 821 bp, Arabidopsis thaliana
gtgccgtgagatcctccgcctgacaaaacttgtagttgatgcaaatgtccaattccgacttggtaatgtcgatgccttccaattggctgatggtctgcagtatattttctctcatgttggccagttgacgggtatgtatcgttataaatacagactgatgaggcagattcggatgtgcaaggatttaaagcacttgatatattaccgtttcaatactggtccggtgggtaagggtccagggtgtggattttgggctccaatgtggagggtatggttgtttttccttcggggtatagttcctcttcttgaaagatggttagggaatcttcttgctcgtcaatttgaggggcgtcattcaaaaggagtggccaaaacagtcacaaagcagagagttgaaagccattttgatctggagcttcgggctgctgtcatgcatgacgtccttgatgctatgccaggtttccatttttacaaacttgtttatcaacgatgaaattgctttgctttattctttggttaacattttctgataatgtgcagagggtatcaagcaaaataaagcgcggactatattgcagcaccttagtgaggcatggcggtgctggaaagctaatatcccatggaaggtccctgggttacctgtgccgattgaaaatatgatcctgcgttatgtcaagtctaaggctgattggtggacgaatgttgctcactacaatcgtgagcgtatccgaagaggggctactgttgataagacagtttgtagaaagaatctcggaaggttgactcgtctttggctaaaggcagaacaggtctgttcatcc

SEQ ID NO: 47772 - DNA, 874 bp, Arabidopsis thaliana
cagacaaatgatcacaaggatgaacaatgatggaaagcaatgtgtgaccatcacattacacactcttgagactatttcccttcagctactgtttcctaaggatatccgtaaacagtgaatattacagttccactaattgtaaacttacaagctcttcccatacatacggttcttttctctgtcaacgatgtcccaaacaaagcacaacaacacagtggcattgatattagacaaaggaactgctaaagctagtgatttgcagaaaataacaataggtaaaatcctcctcaatgcatattgtcacagctagtgcctaaactaaacctcaaactataagaactcaaattcacaaaactagtttcttgccctctattcgataacgtattgtcaccagcaatccaatccgaagtacagggcatctcaataccaacaacatttaacagagaacccttcttgaaggctcaaattaacatataaaaatcaatcattttgtgaaagtttagtattgagatgttagtactaccttagagacattttccaaagtaacagcttctggaattattggtgctcttagcctgactagaacatatccattgcttcctttcagaggaaaacactgtccaggctccccgaaactcggagttaacatcttaaccgctttgctatgaacccgtctcctgcttgtcccaaaccaattacgcccatttccaacaagaaacggatccgaatgccccattacaaaagctccaccagacgctaacgcataatctactcgaccaaggccatctgcaacatgtttccctatctctttctccactatgtcacgagcataagccctcagtttatcaatgttaacatcagaatcaccgacctt

SEQ ID NO: 47773 - DNA, 1260 bp, Arabidopsis thaliana
cattgttgggatcaggacgctcggtgagatgacgttgaataagatccctagcctcttcatgggtaaatttaaacattatatgcactttgtctatataccgagaatacagtcttatgggatggcgtgtctcaacttttgtatcccagtaggtcataaactcattaggcctctgcggtggcccggcaatttcacttgctcgagtcaaaccaaggagcaaaagatctaacactagtccataaaactgaacaacaaacgatgcgaactgcagtcccctaatgagtccatacgtattagtatagctcatatccttgtaagacagcaccacgttattcttgccagtcacatagtttgcaagcttgggatcaagaaccaaacgaagaaggctgaaagaaacaacaaaaaagacgtgttactacagaaagtctaagttctatgtctgtaatcacataagcatttcacagagagatacctgttcaacactgtcaaatcaatcttctcaaagagtttttcaaacttcgtctggagcatcactacacactgaccatcactagtgtcccatatgccttgcaaattattgataccttgacaccatttgtaaaccaggagcggtggcggctctgagtctgcaggcttaatccaattgggaaacaagtggcgcttgtcaccctcataccacaaatactgatcaagataagcatcagtaattttctccaggggatcaatttgatagactggaatcaaatggctatatagatccataaactctatgccaacctgcagaaaaaaataatgtattcaccatcagaataacatagtaaccttgagatctatatgttcagaaaactgctccagaataggtgcattatcaacttacttctttgaagctatgctgagtgagaagatgacgctttattcgcatcagagcttcatgaggattgtcataagcttgttcaattaaaccaagctcttctctctgctgctggttcaacctcacagctacactatatgattccttcagtctctcaagggcaaggatgagcaactttgtgtcatgtttgtatgacaatggagggaatggaattggtgagaacttaggagattccagccaatgaacagtagttgtataaattgcaagtgcttcttctggagtgacatacggaccatctttcaggtaattgtgctgtcgttcctgtaacagttttacaaggataacgcatcaatatataacgcagtttcataaaatgttcaaacaaaaatgac

SEQ ID NO: 47774 - DNA, 1085 bp, Arabidopsis thaliana columbia
tacaagttaaataatttttttgtaaataattttttgttggaatgtcaaatttattcaacaaaagaaaatgattacaaagagttttgaaagctaaaaaatagagaaaataaacgtgaaaagtagaaacaaaaataatggaattggcgccacttacatcattacagaaagttcaaaaggcctaattctgacacaatattattaacgggccatgggcttaatgacaataataaacttttctcacttttgagttttaataagcccacatttgctttagggtttctgcgtctctatctttaaattgcttccgacgattcataaactagggtttctgcctttagccgtcgtgagagagagagcaaatcgaagagagagcaaagagaaaataatatgttgtttgcgtttggtacggtgactcgatctgtggctaattcagtggtggtttgctacggctttctttcgacaatggtgttttctttcgacctaaacttgatagaccgaaccaaactgaaccaatttttatatatatttactcaattaaatcctaaactcctctatttgatctgaacccgatcaacccgaatacataaatatctaatcttatccatctgaaaggatactaaactctctaattcgaattacccgaatccagaaaaagccgaatagcatgcattctattggtacttgattatattaattggcatatatatgacctgttattgccaataatatattttgggtgtttcctgggcttcagttttattgggctaggaatgggtgtacttttaaacccacttctgattagtctcttagtaaaacccacttttaaacccacttctgacccacttctgacgccgtcatttttcttgagaaggagagagagcaccacttccgtcattccagcccaatatttttaacgggccatgggcttattgtaaataatgtatttttctcatttttggttttctttatgggcacgattgttagtgggctgaattttgataaaggcccacatgtgaaagatatttagggttttatctcttgataccttttaaaacgccgtctgagaaatctccctctagggtttc

SEQ ID NO: 47775 - DNA, 1193 bp, Arabidopsis thaliana
gggtaccgaatataccccccaagttaaaagaccctaaatttgtttccttaattaacatttgaaatgataacggaatctctctcaaacaaggaagaacacttacctgcattaccataatcatcatggctttggccaagcttggagtagacgaggaagaggaagcaccagagtaagagaacgagagagatagaacgctcgaagaagctgccgcttctggaattaaaattatcagccttgtcggagattctgacaattcgaaacctttgcaatttttcattcaggcatatcgtcgaacagcttccgcgcctcgccatatctataaagcagagaagagatctatactcgtgtgtgacatgcacagatggagagagtcaagagagatcgttggttgtatgactatgacctgtatctgtagaaaccgagaagagggcacgaggaacaagagcaaaagaagacggatgaagaagaagaaaaaaggtaagaaagagagtgcatgactcgtgttgttgctgtcttgtgtggtttgaaacaaagaaccaaactttttgtccgtcgatttcctcggaattaaaactttttttgtttctaaatttatacttaagtttgtctaatctattgttagcaaatcaaagaagtgtctttgacccaagtttttttctttatttctgtaaatttaactgtccgaaacttcagagattgagtcgaagttacaatgacggacaatgaataaacctaagcttagtgatttgatgtctctgggacgccggaatcatacttgagcattgacgtcggtagagtgattaacaaggacaaagtcgccggattcacgccggagatgttcagggacaaaaggaagacttcccggattttgctcttgtaagagagaatttaacggagtctgaggagggtaatggtcaagtatgaagtctattgcttctccacttatctctttctggttcaatagaacctacacatgggaaaataaaagtatgaacaaatcaaacgaaaacgcaattgcggttaaatgtttgaaattaccttaacggttttgaggagagcggtttggttttgcctgaggagagaaactgtcttgttatacatctggctaatgagttcttcgcttctatgtgcgacttcatcatccatgttgaagtaaactggcggctcgacgaggtcatagtcgtcatagagag

SEQ ID NO: 47776 - DNA, 626 bp, Arabidopsis thaliana columbia
  unsure (1)..(626): unsure at all n locations
nnnnnnnnnnnnnnnnnnnnnnnctaaagatctggtgaacgaccgtacctgggatacttccaagtctaactacggttacggtattgttgctatgaactctgatggtcacctgactatcaacggtaacggcgacgtagacaacggtactgaactggataacagctctgtagacaatgttgttgctgcaaccggtaactacaaagttcgtatcgacaacgcaactggcgctggcctatcgctgattacaaagataaagaaattatctacgtaaacgacgtcaacagcaacgcgaccttctctgctgctaacaaagctgacctgggtgcatacacctatcaggctgaacagcgcggtaacaccgttgttctgcaacagatggagctgaccgactacgctaacatggcgctgacatcccgtctgcgaacaccaatatctggaacctggaacaagacaccgttggtactcgtctgaccaactctcgtcatggcctggctgataacggcggcgcatgggtaagctacttcggtggtaacttcaacggcgacaacggcaccatcaactatgatcaggatgttaacggcatcatggtcggtgttgatacaaaattgacggtaacacgctaagtg

SEQ ID NO: 47777 - DNA, 822 bp, Arabidopsis thaliana
tatgcttccaaaaaaaagtttcatccagactgttgccggcctctacctcgcccacgtccgaagcgaccccgccctctacctctaccacgaccatggaagccccttccccgttcagaagactgcccgctgctaaacccttgagattgtggttccattggggactgcaaatcacttggtgactgcgggatttgtgactgtagtggtcgcacatcagattgtgcttgcatttggaactgcgggttcgctggagactgtggtcggtgcatcatttggtactgcgggttcattggagattgctggtggggctggaactgtggtggcatttggaactgtggattcatttgagactgtggccggtgcatttgggactgtggtgggtgcatttgaagaccttgagaaaacatattaaaactcagctcatttggtaatggctgctgctgaataccacgacccatcccaaactgttggttgaaacaattctgacctaccattgcaggccatggcgctgaagcctgtcctggaaagaagtttaagcctcccggtccacctggcattggcatctggccaccattgaactgcggttggaacatcatttgattttgattttgcattgccatgaaaggtatctgcattcccatctgattaggtataggaggaagctgatatgggttctgctgattactctggggtctccatgctgcattgtttggaggaaaaccgtccatttgaggacgcggaccacccatttgaggatcagaacggtttgacgatagagaactagatccctggttcttcgtccattcccctgagtaactgcttgta

SEQ ID NO: 47778 - DNA, 528 bp, Arabidopsis thaliana columbia
ctagagatctccctctatttaaactcgatctttattcttctctttagctcttcactcgtgcctaattccctctcacatgtgctcttatcacatttattacaggacgactatggtcaatttattttacaaacttttattatggattccaaatttcattaaaagtcacagtataccaatatgtttttacatttttattgtattcctatgcataagtcaaataaggatgatattctcgtagacacttatagtagaggctagagcaaataatgaaaatgatagtggggattttgcattgaatgtggctaccaaatccaaagtagttgagaagctctaaatgtagaacaaagtacgatatatattcttaaatgtaattacacatcctcaccgatcccactgtgtttcctcatagttttatcgaactagtaattgtttgtattttctctgcacgttcttattatacaaaagtccttagttcatcaattcaattggttagaaacacattagagtatatactatatatgagagagt

SEQ ID NO: 47779 - DNA, 521 bp, Arabidopsis thaliana columbia
gcaaatccatattctttcttccaaatgattctcggttgtggatagccatggctaaatgttatcaaaccgaacagctttacatgcttgaagaggccatcaagtgttacaaaagagctgtgaactgtactgacacggaaggaatagcacttaatcagctggcaaagcttcaccagaagcttggacgtaatgaagaagctgcatattacttcgagaaggatttagagagaatggatgctgaaggattagaaggaccgaacatgtttgaggctttggtttttcttgccacacattttaaaaatcacaagaaattcgaagaagcagaagtgtattgcacccgtcttctcgattatagtggacctgtaagttttctgctccaattttctccattgttaactagtttataaggatctgagtatcctgatacacttattacacttagtgagatagtgtgacgagattgcattcatcttttcaggaaaaagaaaaggcaaagagcttactcagagggatcagaatggcgc

SEQ ID NO: 47780 - DNA, 607 bp, Arabidopsis thaliana columbia
cactacaaataagcatgcatcaatcgatgtaaatatatccatttgggaatattatttgagaatctaactcgtagtcgtaattataatatgtaacgatgctaccaactaattaaataagtattttgaggttaaacaatgtttttcggtttagcttatttaagtcatccaagtataataacataagtttgttgacaaaaaaaaaacagtattttgaggtttactcattactaccaactcattcgcattttgtcgtaactaatttggtatatcgtatacttgaaaaatacatatatctatatcttgattttcataatccttaacgttacagtatccacatatggtccaattaacatcactggtcaaacaagagaacaatgatcaatccgttactatgatatgcacacattaaatttaaggctcctgaagtggtttcatatattataagattccatgagccatatatcacgaattaatgaaaatgcgcaaatgataagcaaaaggcaaaaaaaggaggctacgcgacctgtcaatgtagccgttgcccttctcctcctttttaaaaataaataccgtttttaacattcctcaaacgctccaattttgttgg

SEQ ID NO: 47781 - DNA, 747 bp, Arabidopsis thaliana columbia
tcactttttaaggtaatttaatcataagcagacaaaaacatgcctttcaactctcaagtagtggtgtagccggaatccaattcgtctagagtaaagaatgaagatacaattataattgtttaacttacctcatctatataacaagattatcatttctcattccagctattaaattaaaccctcttttttcacaactggtatatcaattttgtgattaatctagttaccattcatacaactagctttgcctatacataacattcacatgagtttagtggattttacaacttaaatttcccccattttttttttttaagtaggatcgaataagagttaaatgcatgtatttgtgaaacacgaaacaaaagggtcactaaaaatttgcaccagccgggaatcgaacccgggtctgtaccgtggcagggtactattctaccactagaccactggtgcttcttgtgaattattaagacaagttagtttataatctaaatacaagttatcactgggccttaaatgacgctacagctgagcgacttaaggcccaaatattactacgtgagtacgtgacctatatatgtcaaaaatacgtgaagcttagatgggccacttaaggccaaataaatacgtgaagcagagcttatgtgattattcctctctcaggtcaggagttgttgtagcacagcagcttggtctctttcattggcacaaagagagaaaatctgaaattgagagagcagagaaaat

SEQ ID NO: 47782 - DNA, 551 bp, Arabidopsis thaliana columbia
ccttctttatatccagagaaattttatgcggaaacgtagattaatatcatcgaacttgttgatccaatttgttttatcttttaaaacatttacagtgattacaaaatagaatatatagcaagtaaatatccaacgaaaacacataatgtctttaacaaaaaaaaagaacgaaaaaaaaaagaaaacacataatgtcaccattagaaactcgtgtctacaccagaagtcattagtttaagatattcattttttttttttttgataagatgatattaaatgttgttaaaataaacaataaaaatgcaattatggactgcatatacacgtccaacactttgacaatctgtatcgctctctctctctctctatatatatatatgtcatggtctcactatgattgttctataaatacaagcctcctaactcataaaataagcataaccctaactctacaaagttcttctgattctttctctctctctctttctttcaagagcggtttcaatccattcgctaaagaccatgaacctagaagagaaccaaccatgacg

SEQ ID NO: 47783 - DNA, 836 bp, Arabidopsis thaliana
taattttagccatatggaccgcacatgaatgatgggcggtctcaaagcaatatttccaaaatggtcttttaataattggtctttttttccatttctgcgtaacactttcgtttgacgttttgtttaaatttatttttcagataattagtatacacttgctgttacattagctagctagccttcgactttatgcttttagtggactcacatacgtttataatagttcaaatcattatatatatatatatatcactctccccgctgtcaaaaaatattaaatctatcaagaaagtgaaattaggttgtagcttagttaccaccaaccccgcttccgcatggtcgttaaaccttatgatctttctaatttatatcttaaatataaatcggcaaaacatcaacaacccattagatatgtccctcaaactttgaaaacgattatccaaataaattatttattaaaacaagtgaataatacttctatataaatgggtttaagcctccttcattaaacacatctcacaactcactaatctctagctaaccatggcatttctagtagagaaacaactcttcaaagccctcttctcattcttcttattagttttactcttctccgataccgtcttatctttccgaaaaaataatcgaccagaaaaaaccctgcaaacacttctcgttctatttccatgacatcctctacgatggcgacaatgtagcaaacgcaacctccgccgccatcgtgagccctccaggactaggaaacttcaagttcggtaagtttgtgatctttgatgggcccataacaatggacaagaactatctctcaaaacccggag

SEQ ID NO: 47784 - DNA, 895 bp, Arabidopsis thaliana columbia
ggtattatgagactgcttcgatactaaaattcaaagtactaactatgctaataattccattagtcaactgtaattaacattcactaagtcataaacaatgaagataaaaagtcataagatcataatgtttatttgaagaataaaactcggtcattgtttagtctttccatggttctttatttaatctcatggtgggttcaatagtacgattttaaaaattaaaaaacgcgttagatatataaaatataattgttctctggttctccctttgtgatcattcacaccaggttcaacttcaatggaatccatcgtgcccaaacgccaagtgcttgacgacgacgatggtctatatggtacgtttctaatcattcctttattgttatttaggtttttgatttatgagtaggatgtacattgttcttacatagaattttagtgctagagaattccattgaaatggcacccccatggtagattaatgtactcgttatcacatttctttttagttatgggaatcaagattttgtgattttttttattttatttttaaccattcttgagagtgacttggtgaatccaattagttattcttgtcaacttttggctttaatacaaataaacattaatggatctcaaaatggtcatgaagaaagctcgaaaggtcgatctcccgagaaggctttggaagagatacgtaagcaagacactcatgatctctattgccctaagtgtactagtaacatcactaaaacagctctaatcgttgaaaagggagatgatttttctcccgacgaccagaaacctttcgtgctctggatccctaccttcaagttcctttcaagttctcccaaaggtatccatatgtacacgtaaacatgtatatatattgttactc

SEQ ID NO: 47785 - DNA, 620 bp, Arabidopsis thaliana columbia
ctgagtctttgctgaaacttggttttatgaaacaacagggagatcacacattgtttgttcgttgtcaaggttcagattttattgccctcttggtgtatgttgatgacattgtcatagctagtaccacggagtctcttgctatttcattaacagaggcattaaaagaaagcttcaaactgagagagctgggaccactgaagtattttttgggtctggaagttgctcgcaccactgaaggtatttctctttgtcaaagaaaatatgctttggaattgcttacttctgctggtatgttagactgtaaaccgtctactatacctatgacaccaaatctgagattatccaaggcagatggtgttttgttagaagatgctgaaatgtatagaagcttggttggtcgtttgatgtatctcaccattacacgtccggatattacctttgctgtaaacaagctttgtcagttttcttctgctccaagaacatctcatcttacagctgtgtataaagttttgcagtacattaagggtacagtgggtcaaggccttttctactctgcagattctgatcttacattgaagggttcacagatgcagattggggtattgcccagatagcggaga

SEQ ID NO: 47786 - DNA, 488 bp, Arabidopsis thaliana columbia
tttttcgtctatcacattttcaaatgggatttgaataattgaaagcaaaatatatagttaaaccttcaaaactttaaatactagacgaatacacaaaaccatagtttccagaaatacttttctttttgctcttaaaatcaatgaattcgactataagcctcaagtacagaagttatgaacttatgatcaaaatcagaatttgatgctcaccactcatccatctttcgccaccacgtggagaggtcatggagaataccttgaactgtttatcaattggatcgtatcccaaatagctttccaccgtaactctcctattttcctgagctagggttatatatcaccggcaccgttttcatcactccgtttgagtacagcttctccttaatacagaccaagccatgaacaagaccactcatttcactggaccaacgaaaggagaacttcatatgatagttggcgactataggagacgagtcctcattaggatt

SEQ ID NO: 47787 - DNA, 558 bp, Arabidopsis thaliana columbia
taaggagaagaagaaaacatgatcatgtcgtgttaggatttttcaaatcgaaataaatctatattaataataacaatgatcatgtagtgcgagttatttagtttaggacaagttattagatatctatattggcttaaacgtagtaacacattaaagaaacacttgtacgacaatagtttcctgactaagttagtaaacagcatcgtttcatttgaactatgaagtaacaacagaagaaactaaagcagctaagagttgtggaattgcatctcctgttgttgaatcctgtcaatagcatcctctgctccagcttcaagatcagacatttcgtcttcttcatcttcttgtttgtagtatatgatgttagaagagtgaccagtggtcttggaacggtgaagagtggttgcagaggaagaggaagagaggctgaaactctctgaaacaccaagtgtcttgctcgggagcttcctcgctttacctttcttcaatttgatgtctttgtgcacttcttcaatgcctttgccatttgctcatcgaacactgctttcttcatgtgtg

SEQ ID NO: 47788 - DNA, 551 bp, Arabidopsis thaliana columbia
caatgactttcctcaattgttgccaaaaggaagaaactttctgaaagtcacagaaactaggccctgaattctgagctaactcattcaacaaaagaccagttaactcagtaaagaacgggaaaatctccaccccaaaagtctcatattgatcattatatacaccatgagggttatcaaacgtttccagcatcgatcccaaggtgttccggcaagtaacatatagcttctgatcagggcaaactttcctaagcagtttacaaaactctaacactattggtaaacaatagttcttctgattcttcggtaaagctacacaattactcaagaacagcttaacagagctcttagcacaagacttattcctctctaaagaagaagcatatagcatcactaaagcagctggaaccgaagagttcgagaaaatgttgagatatttcgcaatcgattcgtcactctccacaggaatcatcgcaaagaaagtaacaatcttctcgttgatgttagattgaagattctcacctttatacattctcgaaattgtatacataata

SEQ ID NO: 47789 - DNA, 310 bp, Arabidopsis thaliana columbia
catcccaaaatttctagtaaatggcggaggaattcgatgaatctgaggtagtgttctccgatggtttaagctccgttctccataaagagaacgagaatcgcctgtttggttctgatatggagaggaagaagacgaggcggatcaagaggacgacgacggagaaggcgtcgttgtcgagctcgcttccggtgagtatccctgagaacatctttcggaggtacgttgggaaagaggaggatgaatactcagaggaggaatattccgaagagcgaggagagatgattccgccgcatattatgatcggacggag

SEQ ID NO: 47790 - DNA, 858 bp, Arabidopsis thaliana
tatatgcccccatatagtgaactgctcgggtcttctcggtgcgatcatttcttgggggattctatggccatttgtatcacagcatgctggggattggtatcctgctgaccttgggtccaacgatttcaaaggtctctacgggtataaggtacagtaagcagcttaataagaaaccttttcataacaccacatattcatgtcaaaaggggaaaaacaaatgattccaagtactgatgcttttatgttatgcctgacttcttaaggtctttatcgccattgccattatccttggtgatggtctttacaatcttgtcaagatcatcgctgtcactgtgaaggaattatgcagcagcaggtctagacgactcaatctacccattgttaccgacggtgtaggtgagagaatattagatcctgactcatctcttacatgcttttgtattaaccaataacttggatcctctcatgggcactttccacagactgttaactgtatgttttccaatgccgtaattcagatgacagtgaagcttctgagatactgctggtgaagaagaaaagagatgaagtgtttctgaaggaccgtataccccttgaatttgcgattgctggttatgtgggtcttgcagctatctcaactgccacaatcccaataatatttccaccactgaaatggtactttgtcctgtgttcttatttcattgcacccgctctcgccttctgcaactcttatggaacggggctcacagactggagcctagcatcaacctatggaaagatcggtcttttcataatcgcttccgttgtaggaagtgatggtggtgtcattgcgggtttagctgcctgtggtgttatgat

SEQ ID NO: 47791 - DNA, 565 bp, Arabidopsis thaliana
agtgtgctctaaagatgctggcccggtcaccacgatggcaaaacgcattacttatcttgcccctggaaatcaccgctcttgaactggcggatgtagagatagacagtgtgtttggagatgttcaggcggtcacaacctggttgatcgcatctttaatatcgaagatccctttctcgtagagattcagcacgatctgacgatttttggcgttattagaaacattgcgatcggcattcacttcttcgatggtgaactccagcgtttgggtaaccagatcttcaacagaagaggcaaagttgacgcttgaaccgacatccggggtttctggcggcacaaaggtgctcataatctgcgagaagggaacatcaagattcatattgatgcacagcagaccaattacacgctgttcgcggttacgaatcgcgatagtcagggacttcattaatacgccgcttttggcgcgagtaaagtagcatttagaaacgctgctatccgctcccgtcatatcgtgcagcatacgtagcgccaggtcagtaattggcgaaccaatcttccggcctgtatg

SEQ ID NO: 47792 - DNA, 1722 bp, Arabidopsis thaliana
ttgcctgtgccatgaacatggttcttggtgggatcttcatgtaagttccaagctttaaatcagagaggaaagtcaaagattgagacatgctgatgtatccgtaagtcttgaagcatatgttagcaactggtctctctggatatgcatatccaattatgtactccgtgataatgttcagacccggagcctaacaaaacaaagaacagaatcatggttttgttaatcatagccggtttttgaagccaagttataagcatgtgaatctctcttctaacctggttagtagtggccatgatcacaccaacgagaggagtgaagaagatagctatcaaacaagccaagaaagctccccaccatggaagctgaatctgtgtcttatagtaaatacatatgaagacaataactgcaagattcaccgcgaaaatcgaaaggaaccaccagagaggaacttctttataattcctcttcatgatctttgtatgtatatccattttcttgttttttccaaacgctcctctggtttgagtccagagatctttgccgttgaaaatcaggacatggaaaatactagcagacaaggtcgcgaaacctagtccataggtcacggcaaagaaagtgctcatgtggactggtccggtctctgcgtaagcgtgacgatccaggcggaaattggcatcgatgatgctcgttactttgtattctttcccactggctacaaagagtttaccggagtagattgggaaggttttggcgttgtacaaatcaagatagtaacagagaggtgtgattacgtacatcacaagaaagaacccggccgcaatatttgcagaggcaaagaatgggctagcgagtggacttccaaggtatgacgcgatggttgaccagtccagaccaaaggaaccgataccaagacctgctgaccctgaaccaagctggtttactagaatcgatttagggctaatccaacataaccaagagacggtggttaagaccgtgaagagataaccaggtaggagataataggagaagctagtgatgagagtgatgacaaagaactgatttcgactaattccccatttcgatttgttctctttctcatgcaatgcttctgtgtataatcaaaatcagatacttttagaaatgcttaatcaaaacatataagagaatcattagaaagaaccgttacctgaagagagacacttgaacgagattgcttggccaccacatttcacctggctcaactaaatgtttcctatacaaaccagcccaaccaaatcccaataccttgcagcacaagaaacagggaaaataaaactctcagttcacatagccctaaacctacaaattacgaattgcaaagctatcaatttttacctgagtggtgatcataacgagcaaagcgggtaagaaatcaagccttctcttgtaataaagcttaacagcactaagaatatgagtagcgtaaacagccccagagcctgagtttgcaaacacagttataagaacatgttccttggtgctaaagggaccaggattcatcgtgaaagaccacctcgtcccttcgaagaatctccttgtgggaagaactttagccatgagatgaccaatgggaacaacagcaatctgagccgaaacagaggagatggtcaaaggattggttctgtaccagaaaaactggttaagaaatgacaagagaacacaagcggttatgctaagacccac

SEQ ID NO: 47793 - DNA, 385 bp, Arabidopsis thaliana columbia
tccttgagggagatattgttatcctgtgtcaaattaaccacttgcgccactgcatctgaacttggatttttatctgtcatgtcaccatctctaccgtttccaatgtcgacatcttcttcatcttcaatccacccgttactgttgcccttctctaacttaacaggtatatccatcctctgtcttttcaaggaactaccgggatttgccaacaacggcgaacgagcaacagacacaacaaccccatcagatttcacttccaaatacagttctacatttttaatagaaggatgtttgcttgggacttcaagcattgtcaccaaactagagtcgttcaccacaggcgaaagtagagcatgaagcattgattgcggttgaacagctgaag

SEQ ID NO: 47794 - DNA, 609 bp, Arabidopsis thaliana columbia
tcattaaaattcaaatatgacaatattatgtaaaaatctgccgacattaataaaagtctgtcgtgacgttatgaaaatttctttttaaaaaaaaaaaaaatccagtcaaacccgatttaacatacaatcagaccggaaataatttaattgagggctagctaataaatctcatataacaaaaaatttcgaaattttaaaaataaatctgccaaaaaaagtctgttattactaaaaaggttattctagtcataaacaaatcggccataacattgacatgagtaaatctgttatgctttgacactgaaaaacaaaactgtcatcactaaaaacaaatctgttatcactatgtgactgtgtagtaattttattttttaacaaaaatctgttgtaaaacaccagatttgttaacaagttaattaaatctgtgattacacaaaacaactctgtcatgcctatataacatttttcgaggttaacaaatctgttataacacaacagatttttgggtgcaaatagaaaatctgttgccaccataaagaaaaatctgtggtccggaaaacaaatcagtgacagatttggtttcacattcttacttttgaaatttaaata

SEQ ID NO: 47795 - DNA, 515 bp, Arabidopsis thaliana columbia
caacgaagagaacaccagcaccgttacaatcgatctcaatacgaccatcatcgtctctcttcaagcgaccagccatagggtaaaaagggacaagggctttggaaagagcttccttcatgacctgagggtcaaagaaattggaagcgccggtgggtctgtagaagtagacactaggggtatggaatctggggatgacaaggtcgacgttggagttccaaagattagtgattggtgtctcggtggcaggccggaccatggtggaatctctgatgttaattttcatatttttaagaaagatcaaacgaacaaacaaattttgttttgagtttgatctgagaaattgtgtgagaagcgaggaggggtagatataagtgggtgtgaacaaaaaaggaaaggtcgtaatccttcacctaccgccccacgaccccgcctactccatctgtcgaccaactctctcagaaggtttatcattggtccatctcatcactcggtcctacttttctatccggggttgg

SEQ ID NO: 47796 - DNA, 533 bp, Arabidopsis thaliana columbia
tataataagcttcagtatcatactatcatgttttctatacttactttcggccaatgataacacgaacagcatcatgcattatggaacgtgcaagttcttcaacagaatcgggcaaagtagcactgaacaatgaacgtatgatcgaaggatttgaacaagccttaaccacacaatctatctgctttaacaagctctgctcaaacagcttgtcagattcatcaaggccaaggtactcgaccctgtattcaacagagataaagatgaatatgggcacaacacaaatagaaatacaatgtttatattctaacatatgatattgacttacttgcttaagtcaatctttttagccttgattgctcttattcaaccgcatcggcgttgatatgagaacatcacaccacagctttgagaagtcagccgttttgacaaggggcttagtcatcaatctaatgtggaaattgcttcctttaataagtttctttccttctctagctgtttgggcagccagttcccgagcaggagaaaggataaca

SEQ ID NO: 47797 - DNA, 593 bp, Arabidopsis thaliana columbia
  unsure (1)..(593): unsure at all n locations
ttttctcccaatgattccggagatacctaaatcagttttgatgcttgaatatgattcatggctatcttttctgtcgacattaatggtggtcttcatatatataaaaggtattacaatgtttttatgtagttcgataattggaccagacttttgacattgaaatgtttctcatttcacatgttactatagaatcatagttttagtaaattgataatttaaacatgtttgttttaaaccaagaagtagttggtcacgttagtataaagagaagaacaaactactgtacaattttttttcccatgaggattaaaattcattctaattttcggttcgagggattatagactaaagtttagaatcttcgatttattaaaaaggaaaaagaaaaaacatgttttcttcgaaataacttttagggagaaaacaaaactctactattgtgaacttaaagagaaaacaaattggagaaatattttagggaggtcggttcgtggcatgaaccaagtgactagtgagtaagtgtacaagactacaaacattttgacatttttagaaaacctttttgattcagactanagttgtatttcataaag

SEQ ID NO: 47798 - DNA, 536 bp, Arabidopsis thaliana columbia
  unsure (1)..(536): unsure at all n locations
nnnnnnnnnnnnnnnnnnnnctaaagcgcccagtaaatggcttaattcggcacgcagctgttccattcagattaccctcataaaagctactgctttcataatgagcgccaatataaaagatgtcacctgaatgagatcaattgttgaaaagaaaaattgaggaaaatcgtaacggtacgacactcctcccaaaattggctgaagtgtcgtgaagtgaaattagcgcatttcagcgcgaaccgtccacagatcttcaggggtatccacacctgtgccaggaacttcctgagcaacagcaacatggattttttcgccgtaccacagaacacgaagctgctctaacatttcgatgtgttctaacggacttggctgccagttgacgtaacgacggataaagcctgcacggtagccataaataccaagatgacgcaggaagttatcagcaacggtttcaaggccttctgcaaaacgatcacgatcccaaggaatggtggcgcgagagaagtacagtgcatacccttcagcgtcgagaacac

SEQ ID NO: 47799 - DNA, 401 bp, Arabidopsis thaliana columbia
ttactaatcctaagccccattttgacttgataaaacaaaataatttcattagtaatctataacaaactcggaaatctatcccctattcctagtaatcagcttgaatatagttacatacacactgtgtgactgactttttccttttacttcttctctgcaacgaatatataaacactatcagaagcatttttcatttcctctcaaaccaaagaacaaaaaatggacgtcgaatcttcatcgccatcgtcacatgctcttattaagaaggagaaaggaggatggagagctatcaagtacgttattggttcgtttttactatcttaattgatgttttattggggtctaatcttgtaatctagtgtatagtcattcgtttttgtgaagcaaacgagtcttttgag

SEQ ID NO: 47800 - DNA, 514 bp, Arabidopsis thaliana columbia
ttctttatttgtctcaccaggttttacactgaggtctttggtatgaagctgttgaggaaaagagatatccctgaggagaagtattctaatgcttttcttggttttggacctgaaacatctaactttgttgtggagctcacatatagtatgcactctactcgccctctcctgttatacgctttttcacaagttaactactttgttctaatgttttgtgtttcgcagactatggtgttagctcatatgatattggaactggctttgggcattttgccatttcaactcaagatgtaagtcctattactttgagctttaggtatcaagaatcaaaatatgcatgtgatccttaacgaagagatacacggctttttttttttgtaggttccaaactggttgagaacgtccgtgccaagggtggaaatgtgactagggaacctggtccagtcaaaggtggaggcagtgtcattgcgtttgtgaaggaccatgatggctacacttttgagctcaccagaga

SEQ ID NO: 47801 - DNA, 660 bp, Arabidopsis thaliana columbia
aatagggatggataatgtggttgattctcatcatccttggcccttgaacacggatgagagatacaaagagatgtcacttgataatttactctactttaatggctccagctattcttgggacgattccaaaattacacagtttgtggacccaagtgatcatgattatctccggcgtagttacctctgaagaataaggaaacctgataaacttacatggaactataacactactggtaaatacaaggttatatcaggataactcatgatccttcggataccacacctataataatcagacctcgttgctcaattgaactaaaaaaaaaagtctggaacctgccaatcatgccaaaactaaaacagtttctctggtgaattcttggtagagctctagtcacaagagaaagattaactaaagaggtatgtgtatagatcccacttgtccatgttgctaatgagataatgaatccatcaatcatatgtctttacatgtccttttgcaactatggcacggtgactagctaatactcaactccatcgaaattattcattttctaataacattgaggaaaacatctaaatcattctaagtttcattcagaaaaacacgatatcaaattttctgaaactcgtacctttttggctactttgaagaatatg

SEQ ID NO: 47802 - DNA, 552 bp, Arabidopsis thaliana columbia
ccgacttatgtaaatacatattgtatagagagaaaaataacccatagtataaaaacttgcatctctaaaaccgcagcattgataataagagtctctttcttcttaagtatctcttaattaacccacataatatatttacaagtggccgcctcatacatcccctctcaagtcctttgcttcatttcttataaaactaaaccaccttcttcttcatcattcatcaccaatctatctcatattccatatactgaatatggactcattctacttctgtatatacacatgggatccaaacttaaactttaccctctcttaaatcactcatccgttttcacccagacagtcgttaccaatcggcccctacaatggaggaagagcaacaacaacttcgtgttctcttcgcgaaatacgagatgggaaggttactaggcaaaggaacattcggaaaagtttattacggcaaagagatacaaccggagaaagcgttgcaatcaaaatcatcaacaaagatcaagtcaaacgtgaaggtatgatggacaaatcaacgagaga

SEQ ID NO: 47803 - DNA, 966 bp, Arabidopsis thaliana columbia
gatgaggatcgctgcatgggaccactgccgacgaaagagcacttttaagattctctaatttcactctcatttttaaatatatataatttaagttttagctttttttttccataaaaaaaagagagcaaatgtcaaattagaaaaatgagaaatttcctatagtttgtgtgaatatcagttttataagttatacacattacccatacattttctatgttattcaaacacagatttgtaatgagagaacatttatttcatcaatttatgtattttatatatcatcatgcaatgatgcaaagaccttacatatttgagataattgttatttgttatgtctgctttgttttattatgagacacaaaaagtgattttggtataaatggattgatgtctaatatctatcacgtatcaaatattgcataccaacataagtaggtcaagattttctttgcaacatgggggggtttagttataaacttatctcggaatcattttaaagttattaacatgtgaaattgatcgaagttcagaataaaatggtgatccatatcgtattctcggatgctgctggtttttacttttgagtaagcaacaaacgaatcatggttgggttcatacaaagatattttaagcccaacagaaatgcaaattcgaagcccagctacccaacaagagtgtcgacctcttcaacaaagcgactaaacagccgtacggaggaaacatctgtacggtcaatttgttcaggtaaaccgaaattgttttaaaatctaagcaagttgttttattcatatgaaaatggaaatattctatgaagagtgatatgagttctttggaatggtcaacgtgaaatcagattaaaccgatctaatttgttttggttcgattggtttattagtttatttgagctaataccggctttgtatttgtgtggatagatcggttattaacagggtctgtaggtgtggc

SEQ ID NO: 47804 - DNA, 487 bp, Arabidopsis thaliana columbia
gtttttactttgttcagtttttgttttgtctctttttttcttgactatgacactgcattcaaaaacataagaaaacagattaaagaaaagagaaaaaagataaaattgaaagattcgtttttctcaaatttcaataaaaagaaagatacatttctctcttcacacttcactcttctctttcccgcctctccgccatggctgctaaacctcttcttcttcctcttctcctccttcttcatctctcaatcaccttagctcaaaacgacacaaatgctctcacactcttccgtctccaaaccgacacacacggcaacctcgccggaaactggaccggctccgacgcttgtacctcctcatggcaaggcgtttcttgctcaccatcttcacaccgcgtcactgaactatctctcccttccctctccttacgaggaccattaacctctctctcctccttagaccaacttcgtctgggatcgtcgatcctcta

SEQ ID NO: 47805 - DNA, 562 bp, Arabidopsis thaliana
ccccggctcatagagctctttggcatgattctttatggaacatgcatgaggtatttcattttttctcattattctggtttttcttttccggtttactgctaacaaattaagaatattcatagccggttattggtttgtggcagtcacatcacaaaccaagagaaggagcgtttgagttaaacgatgtgtttgctataacaaacgcggttcctgcgattggtctactctattatggattcttgaataaaggacttgttcctggtctctgcttcggtgccgtaagtcttttttctctctttcgacaatatccgaaacttataaagaaaagatcaaaagtcttttgtttttctataaagagagaagcaatagtaaattggtatttgacttctttaaataaagtcacggaaaccgaaagtatgaaaattttttgtggtgtttttttttcttttcaccgtcccacaaagagtgtgaacgtgtgagttgggtgagacctatcatctagtacctcgccaaacatgaaagattgggtgtactagactaatgaaccactatacgagtacta

SEQ ID NO: 47806 - DNA, 1179 bp, Arabidopsis thaliana
tgtttaatttaattttgaaaaggcaaaaaaaagagcacttacttttacccaaaaacaaaaaaatcgtggcctcacttgcatttaaatccatccacaccacatctctctctctgtctatctatctctctcgctcgcataaaaggttaacctcaaaacaagtagctcctccttccattaggatggcggcaggactctcaaccgccgttacattcaaaccactccaccgctctttctcctcctcctctaccgatttccgactccgcctcccgaaatccttatccggattctctccgtctcttcgatttaaacgcttttctgtctgttacgtcgtcgaagaacggagacagaattctccgattgagaacgatgagagaccggagagcacgagctccacaaacgctatagacgctgagtatctggcgttgcgtttggcggagaaattggagaggaagaaatcggagaggtccacttatctaatcgctgctatgttgtcgagctttggtatcacttctatggctgttatggctgtttactacagattctcttggcaaatggaggtataactaactaactaactaactaaaccaattcgaaattctgaattctcacatccttttgtttggttgcaaaaatcagggaggtgagatctcaatgttggaaatgtttggtacatttgctctctctgttggtgctgctgtaagtttcaaaacttcatcccaatttttctgattcataaacaaaaaagtttggctgagatttttggattattcaggttggtatggaattctgggcaagatgggctcatagagctctgtggcacgcttctctatggaatatgcatgaggttactttgcttgctgaaaattctcatcatgactatccaatttcaaaccgcctgatttgaattttgttgcagtcacatcacaaaccaagagaaggaccgtttgagctaaacgatgtttttgctatagtgaacgctggtccagcgattggtctcctctcttatggattcttcaataaaggactcgttcctggtctctgctttggcgccgtaagtccctctttcatttggtcttactaaataaaacgcacaaaaccaacttccaagatctttgactctatggtttggtctttttggtttaattagttaaacactaactaatcaccagaattaggaca

SEQ ID NO: 47807 - DNA, 529 bp, Arabidopsis thaliana
tcccatctcacaccttcctaaacactcttctctcggccctaccttatcttccacgctaagtatcaaactgtcatcaaacggctcaaccgctacaaacatcatatcctcgttccacacaggactcacactcttcgtctgcgaaatccgactcctcacaacaacgtttccaagaaaccctttaatcagaatctctggattgattcggttcgggtgcaacagaaccaaatcctgagcttcgattacattaactcgcaagtaccaaagcctcggtgaaagataaactttagatcgcgtgttcaccacgttttctccggtaacactcgccgaatccgaatgccaagcctccgagaaaacttcatcagcttgtgtcccaatccaaacagataccataatctctccaccgatcttgacaccgtttctatcttccaatctataccattgaggagccaatggactatcaggaggaacacgtgtcggaatctccgcaacatcgaacttacatttccgacaatatcgtcttcgtttgggt

SEQ ID NO: 47808 - DNA, 496 bp, Arabidopsis thaliana
gtctgagacgaccaatggtcgattatctcggctagaaactcgctcatcccctgtcttgaatcatgagaagtccgtttgacagcgatctctgcatcggaacccggaagtgttcctttgtagacttgaccaaagcctcctttcccaagaagttgtttctctttgaaaccctttgtggcattgaaaagctccttataagaaaacctatgaggtccacattgaatctcccattcctcaagaacctccttaaccttcttatgcctcaaatagaagacgaaaccgattcctgaggcgagaaacacagcaaacaaggccagcgttaagcagaccgccaaaaccgtccttaatctgtcagacggtttcttcggatatggaggaagggtggggactcttccgaactccaacggttgatagactgcttcaggatatgtgtacacagcaccatataatggagcgctctaatggatcccgtagatgctgtgaaccaatatgcatgtgt

SEQ ID NO: 47809 - DNA, 631 bp, Arabidopsis thaliana columbia
tgagcttccaataaagataagtataacgcaagagttatcagaagaaatcagccaagacaaggtttcaaatcagtagctaggacttgaatcagacattaataaaggctaaaaagagtatatgattctgagcaatctataatctgtagttgcattcttaatcctataacttaatactaaaaacctgagaaagattaagctggggagaaagagaaaagtgaacctgaggccaccaccgctaacaggtccatcgtcggagtgaacctggctcgaagatgacaaaacagaattcagatatcccataactcctcagaaatgctccaaacaccaatgcttcttgtctcaaacaaagatcaaattcaattctgaagctgattcagctacctttgtccaccaatcaaatcctaacacaacgtcgaaaaacatgtaaaacaatatgtcaataatcaccaaatgctcaacagacatatcaaaccaatgacgagaccgagtcctgaagccagaacgactatccacagcacaaataatgagcagataattggaaatagccaatggattgagcaaacaaattgaaatggcaatggattgagcacgatcagatcgaaaataagagtaatttgggggagattgagag

SEQ ID NO: 47810 - DNA, 717 bp, Arabidopsis thaliana
agcctgactaaatttggatgtctgagacgaccaatggtcgatatctcggctagaaactcgctcatcccttgtcttgaatcatgagaagtccgcttcacagcgatctctgcatcagaacccggaagtgttcctttatagacttgaccaaagcctcctttaccaagaagttgtttctccttgaaaccctttgtggcattgaaaagctccttataagcaaacctatgaggtccatattgaatctcccattcttcaagaacctctttaaccttcttatgcctcaaatagaagacgaaaccgatccacgaagcgacaaacgcagcaaacacagataccgttaagcagacggctaaaacagttttcgttctattagatgttttctttggatatggaggaaggactggtatactaagctccaatctcggatactcgattacaccattaactaaccaacccatcaagtaatgaattgctccaactgaccccgtcgatgcagtgaatccaagatacattttctcaagcaaatacggcgagagatctcggttcaaagacaagagcggttttagtggcggaacagggatctcagcagggaataaagtaacattgagctgttgatcaggttgactataaacgatggaaagcctcattacctctctgctgatcaaagaaagttttttaaagcttccatctttatcatcatagtaaccagcagaagcagag

SEQ ID NO: 47811 - DNA, 557 bp, Arabidopsis thaliana columbia
tgacattctctttcaagctgaatgtgtacaaagctccatatctagagatcatgattccaatttcatctaaaccaaaacccttttcgaggaagaactctgttactggcttcaaattcgactctatgcttaatccaaacgtttggggacatcgatgtaggagaaccgcaacatcgacatttagcgatctaaagtactccatagttggacggagcttgtcttctacactgtaactcatgatgtttggacatcgggttaggattctccctatctgttcttctgtgagaccagtttgtgataagaactcgacagttgaagtaagtttctggcggctgtaagtgaggatggctgggaaacgggaaatgatctttgcccattggttcttgtcaatgccaagtgtctcaagaaaggccattgtcggtttcaggttatcggttaggctgattccgcatatctgtgggcgtttgcagaggattgtggggatatctgatttaggaattccgaggtctagaaggaattcacaacaggttttatttttccacgaggctgtaataaggaaa

SEQ ID NO: 47812 - DNA, 637 bp, Arabidopsis thaliana columbia
  unsure (1)..(637): unsure at all n locations
aggttactgtccataatttacccttaaaaaaatggttactggtaagatattgaaaccggaaaagtcaactaagcacattggatttagcgatcgttaagagccgttgagggcgactgtttcgaagtaacaaacgacagttttggctcgacattgtgaaccgtcggacatggagataactcatctaacggtaatttcttagccttttaccgagagccgtccaatctaaaagtattaatcacccagagcataaatggacccaaaaaggccttttaaaagttttttgagcataagccaattgaaaaataaaaatatcaacggatcactcaaattttgaaattaatcatctctctcctttttttaaacatacagagaatggattattcgaaaaccccagcgaaaacaaaaactgttgggttcgtcttcgatttctaatgtcagggtcgtccttcgagttcgtccttttcttccccgggagatttccgcgagagtggtgacggacgatcgtgcgttccataatcgcggcgatgaaggagatatcacgaagtggcggtttacttaaagatcagatagctggtaacatttntttgttcaccttctttattttgatcttgattactagaattgaatttggattggt

SEQ ID NO: 47813 - DNA, 652 bp, Arabidopsis thaliana
cgtgttctattatacgacttctttggatatggaggaagggttgggattacgccaaggtcccatgctggatatataactccttcttcataggaaaattgcatcacataatagagtgctccgatcgacccggtcgatgccgtgaaacccaagtacgtctcctccaaaaaatagggcgagagatctcggttcaaagacaagagcgatttttgtggcggaacagagatttcagcaggtaataaagtaacattgagctgtttatcggtgtgactataaacgatggaaagcctcattacctttgtgctgatcaaagaaagctttttgaagtttccatcttcatcatcatagtaaccagcagaagcagaggcaacagatgtcaaaccattaatgttaatcccaacatgattatcatcaatatctccaaactcttcgtcttttcgtatatctaactcgatagctataacgttattcgaggctttaccgttgtttgtctcgttaaagattcccaggtattgatcgggggaagctccgggaaggcctcttgtaggagagaaaacgaaagccataccgtgtgaacttgctgcttatgttcagggacgatcccgaagatgatgttgaatgagaaagatgaggtcttgatggggacgggagtgtt

SEQ ID NO: 47814 - DNA, 614 bp, Arabidopsis thaliana columbia
cacacgtataaaggtagtttgtatataatttttacaaaattacacacatttgaataaatttcatattttaagggtatttttgattaaaaaaagttatagagaaaatacatttttgaaattttatcgcaatcttagtattagaattcctaatggttgaaaaaagttgtgggttgtcatgtaaacactaaaattttaaaatataagatcagtattcatgtggaattctaaattaatacttcaattaaaaatactatatggcttcgaatggtgacgaaaccacacagtacgatgcagtttcaatagaacaaaaaatatttacattatataaatgtatatattttgttactatttaactcgctccataccttatccgcacttgaatcgtacatctccactcgaaacatatatacattgggacttaggaaaaagattttaaaaacctttaaagtgaaaacagatatcaaccgaaaagtcataataagttgagacaactctaaaagaaatttgttcctaataatatatgaagatatattttcagacaatatgattaacaacataacctcataaacatttattaagattcatattataaaataatatattatggtgaacat

SEQ ID NO: 47815 - DNA, 547 bp, Arabidopsis thaliana columbia
gaagttaaacaaaactatataaaatcaacatttggaaaatcatattaaaaaaatggttagtggtaagatattgaaacccgggaaagtcaacaaagcacatgggatttttagcgaacgtgaactgccgttgagggcgattgtttcgaagtttagacctcaaagtaacaaacgacagttttggctccccagtgtgaaccgtcggatcatggagataactcatctaacggtaattacatagttttttagcgagaccgtccgatctaaaagtattaatcaccctgagcataaatgggcccaaaaaaggccttctaaatttttttttaacataagccaattcaaaaatataatatcaacggatcactcaaattttgaaactaatcatctctctccttttttcaaacatacacagagaatggtggattcgaaaacccctgcgaaaaccaaattgttagattcgtcttcgatttctaatgtcagagtcgtccttagggttcgtccttttcttcccgggagatttcggacgagagttgtgacgggagatcgtgcg

SEQ ID NO: 47816 - DNA, 730 bp, Arabidopsis thaliana columbia
tcaatttctgctctttgcaaaaagaaagctgaacttcttacggtctcactgatgaaataaagttaaactgcagaaagtgaatataattgctacgacaatcaaatcatccattggtcgaagaagactgtttgcccagataaacagctttgttgcagttttcatactcattggacaactgactttaacggtaagtcatatgcgagacaaaattcacacattgattcaccatacctggaatatttgctatataagttagtatgctaaatcttacaggggcgtatcttgactgtagctggtgtcacggttgcaatatctgcatctccatttgttgcacttgggaatttggttgctattgccatatggccaacttgggttacggttgctgtgtctgaaaccctgagaaaggtctgtggtttacaacaatctctctcatgttaacctactgttccattaatgacacttgattttttataacatggtaggtgacaacttatgttgtaactagacctggaagggaactcttgttcaccgttgtctcgcaagacgagaaatacaaagctaaggtacagaatctttcctttcctgaacttctagtaagaaaatcagtcctgcaaaagggaaagtttacactttggtttattatttctcattctgtgtgctatggtttcaggtatgcatagatgtaattgttcaacggcttggagatgctgcagcggcgggactatttgaa

SEQ ID NO: 47817 - DNA, 571 bp, Arabidopsis thaliana columbia
tgtagatataaacacaataatagttcattcctagatggccaattttttcgtagcatctttgttcccttgttctcacaaatcatgcgactgtctcttgcagggtgatctcgggtatctttaccttgacttatactcaagaaaaggcaagtaccctgggtgtgctagctttgcaatcagaggaggacgcaagatttctgagacagaataccaacttcctgtatgctggttcaaatttcatttattttccttcatatatgaaaactgcctagttggattaaaaaaatatcattttcttacactccgcctgttgatctaatcttattgtaggttatagctcttgtttgcaatttttcgcgagcttgtgattcgtcaattgtgaagcttaatcactctgaagttgaagttttgttccacgaattcggacatgctcttcactctctgctctcacgaacggtattgtacaaatttatcaattcaagaagtgaagaagctaagtacagtccccctctcaaatttctctcttactttgctgattgctatgttttctggattttgcaggattacaacattt

SEQ ID NO: 47818 - DNA, 591 bp, Arabidopsis thaliana columbia
tctaaaaataactctttcaaacaacagttgttaggttctatatatgaaatctctaattagttggaacgacaacaaaatttaatagttatttcttaccaaaagaaaatggtaacaaaatggtctatcacgtgaatatactatgtttgggatttacaccaatttcataaataaaacagttaattaattaagacacaaagaaaagtgtaagtaatatggtagtataattgaacacaatctctcagaatatggtaatatatattatttcaattttctcttttgtcaacagcactcaatggtaacttagttgctgccaaccacacattacgttcgatttcatgatttgttgccttgcctaacaaaaagaaaagtaaaaacatttacataaaaaaaaattgaaacgttttataatggttaatagattcttgaaaactaattctccacaatttgtctcaaacaattaaagattttaaccatgactttgttttttgctaaatgattcttgaataaacatttacaaagtgctataaaaggaaattccgatttgaagtcttcaattttccaaatttaatgtcaaaaaataaaaatttagga

SEQ ID NO: 47819 - DNA, 623 bp, Arabidopsis thaliana columbia
tacccgtggctgctttaccttgtctccttcagccacaacaatctcacacccagtcctctctgcccatatctctaattggtcacttgctgctgctctaaatgtatcacctgctgccattaatacctatgacaaatcatcgcaggattgctgatgaacatactgatactcaattctatttctacctaccctggcaaaatttctcatcacctatttgagcaaccactttctagtctcaactctcaagagaagaacaaaaaggatctagtttacatgatatcaaacatgaaaggtgtaccttagttccttcatttttcaatctatgagccagctttcctgaaaaacaaaagccagaatctttcacataaatctttctgtggctaagcaaagcaaaccagctagtcatttgaattcccactctaaagcattaatgccaatttccttaccaagagatgtcgtcttccacctccgttcactccaacaatcattataacagctggtttcctgatacaccataacatataaccagacttagaccacaatctttcataactccacttcaacagagcagaggcgtgaaagaataacaagtaacacagctaaatgaagagacctaaacccaattg

SEQ ID NO: 47820 - DNA, 523 bp, Arabidopsis thaliana columbia
catatgttgatgttatataattgtcaaaacactaaccagtgattacaagttcttggtgagagggaagggcagattcggtttggcagagaaaggtacaaagcagcaaaagcaatatgagcaaattaatagattttgaagaaaaagtattattttccatctctttttctttctagcgttcctttactgcgactattatttatatatacacgaatgggagggaattataaattcggatggaatcatggagaggaacgttccaagaagtaaaacccagacaaaaagtataattttaaatgccaatgtattaattttctccagtactcaactcttttaaaattaatttgataatcttatgacatacaattgaccctcttgtttctcattgacttataatttcttagaacgtagccatgaatatagtatcaggaacttgatatgatctgatctaggaaccagtttgatattttccaaatattatctgaaattcaaatcttaattttgattttaataacttaaatatatt

SEQ ID NO: 47821 - DNA, 368 bp, Arabidopsis thaliana columbia
taatgtttgtggaatctatattacatgtagccctttccacctggtcctgctgctgctaatgctggtgctttactagttggatggctgctgcctctggtgcttctgctgtccaagctgccgttgttacacctgccttgatgcctcaacctcagaatcaaagttagtttttgacgatcctctagatttctaatcctcgacttatcaataactatcatttcagtttccatcaaaaacttattatttttcttccaaaaagtgtcaatcttgaagcgaccgagaacaccaccagcaactccaggtatagtagattatcagaatcctgatcatgaactaatgaagctgtctcgccctgctccatctgtagagga

SEQ ID NO: 47822 - DNA, 358 bp, Arabidopsis thaliana columbia
acattttcttattttgcgccaaaaaaaaaaaaaactgttaatgaaatgtaaaaaaaaaagatctgatctgatctctttatttttttaattgatcgcgcaggtcaccagagatggctgcccaatcatattccacgacgacttcatctactccgaggaacagggagtggtgtacgagaagagggtcacggaggtttgcttgtcggagttcatgtcctacgggccacagagggatacaggcaagacaggaaagcctttgctgagaaagtcaaaggaagggaagatccataagtggagcgtcgcaaccgacgactctttctgtactctccaagaggcttttgagaaagtagagaatccaaac

SEQ ID NO: 47823 - DNA, 1047 bp, Arabidopsis thaliana
cttgcaaggatgagccagattgcgtgtagatgaagcatcatatcagaaagttgctgagcatcaacggccatgtaattaacgatttgaccaacgccgtgattctgacgagcagagcggttagctttgaacctttcttgtagagagctgttatgagagtggatcttataagcatccctagcttctgtgaattgaaattgaactgatgagtagataacacttcgacgaatttggctattaggaggataagaacgaggtagtaaccctgtgacggcgatgatcttttgccggaagtgaaatcgacgaagctttggatgagaactggtccgacgtagatgacactgagacggatgatggctagaaccgccgtgaatgcgatctctttccagaaacatctgattagagttgtacggacggggtttctcgagttctcttgaggtttgggccatttcgattcgaagagcgtcgcgagcttctctgctctgtgctccggtgatagagtcggaacttggtcgaggtttaatggagatttgtagccttttcttagtaacggattcatccataaccagaaagttttcgatataaacgatgctgatgcgtatagtgaaacgttttcggatttctctacaacgacgtcgtttgatttcgccggagcgtgtgacgttgctggtggttactacaactccggtggatcctttgatggagacgaggagtagaacggcggttaaagggaaggagatgaacgaagcgacgtcgtctgctcttagactcgcggcggcgggatcgtcggagagaagatggagaattccggagacggtgaagagagttgtgacgacgaaattgaaaacccagtagattcgtaacgttaacggatgagacggagatgcgaatcgtttttaggtggagaactaaaacggcgatgacgacgttagtaacggcgtggattagccaaaacagagtatcaacgagctttaatttcgtccgagtggtgaaaaaagccgaaacgcagagcacgagagagcaaaacgacaggaccatggttccacgact

SEQ ID NO: 47824 - DNA, 421 bp, Arabidopsis thaliana columbia
ttttagaatctattagcgcaattatggatgcccatctgagatatttcaaacttgtaagggctctaatttcacatttgaagtacttaccatgtaagaccaactaagtttgagatttgtgtcatgttgtgatccttaatttggcctctttatgtttcagggatatgacttgttgaatcaactggaaccatttatccatcaggtacaaacttgtagtcaacttgatgtctcaatattttagatgtgcaaaacaaatatgagcttctatagttcccacagggactttaaacgtgcaaatggggaagtaataattaggttagaaggactgaggtcttgaagagactttttaggcttttggaagcccaaagtcatctaattcatcgatttaagttttaatgtttacatttccttacataaaatttga

SEQ ID NO: 47825 - DNA, 706 bp, Arabidopsis thaliana
tgtcccagaacaaaatagctcacttggcgtacgtctcgccacggaagcttagcaaaccaaagcatgatccttaaagatccgctcgtcaatctttttggcagtctccacgagaagatgccagaagcaggcgaaacactcggagtggattttccctcatttcggaagcatgttcagtactactgccgatgcgcctcacggtaaaccggctcattgggaaaaggacatagagagccattacaacaaagacaatgatgactatgcgactgatgatggtgcgggtgatgatgatgactcggacaacgatttgcgtagccccttaatgtcgcgccagaccacaagcatggacaaggatatgatcccacatcctacaagtggaagcactttaagcatgagacgacacagtacgcttatgcaaggcaacggcgaaagtagcatgggaattggtggtggttggcatatgggatatagatacgaaaacgatgaatacaagaggtattatcttaaagaagatggagctgaatctcgccgtggctcgatcatctctattcccggaggtccggatggtggaggcagctacattcacgcttctgcccttgtaagcagatctgttcttggtcctaaatcagttcatggcatccgccatggttcccccggagaaaattgctgcctctggaccactctggtctgcacttcttgaacctggtgt

SEQ ID NO: 47826 - DNA, 550 bp, Arabidopsis thaliana columbia
ttctgcggttaagattgttaccagatacaacggttacgtagataattcccccgatggctgttttgtgaagatctgttgcgggtaacgagaaacatccccggcgtggctctaccatcttcttgttcaaagtttccgttagaatctttacctgaaacgggagagaattacggttttgcccttcgtaactgtaagtatttttggcggtaaagtttgggagaaatgaaatggaaacgaaccagccaagaggagacaccaggaagctctgtagcggggagagattggccaccgccaccaccgaaagcaactccgattctaacttcaggattcgatacaaaggaataaagcaatgctcttccttcaagaatcggtctgatcagaatctgcaagatgattcagtaaataaacgaaatcctatgtagagaactcatttatcttttaggaaaacaaaatttttgcttacatctcccttgatgcagagactgttgacaacgattcgtgctgttcgattaaacggcatggataacttggcttgcaacaaattacttagaag

SEQ ID NO: 47827 - DNA, 826 bp, Arabidopsis thaliana
cccgtcttagaatccgctgttgctggagttgcaatggggcagtcatcagacttctccagttttaaaaaagattctccggtcttgtcgattatcctccatcattggagtttccttccaagatgtgctatcagcttcattaggctcatgcaccgaagagaagccacactttatcaccttgcatttttcgatctcgcttgtaccatttgtcacttgaaatcgatgggacatctcagtagctaatggaaactcttgacgtttctgcatattaagcaaagtggtgtagccaatgaaaatatggtctgactcaaccgtatgtgtctcatcgccttgttcagaccagccaccaaccatgaagctttcctggctcaaggatacattcgtaaactcacacgtgcactgcacttggagactgctgttttggtctctatactccttaaacgagactacaacacatagagctatcccgattatcctacttgaattccaagcttgaggaagttccaggattaagactgatcccagtgcttggtgattaaaccatgcaggtatctcacatcccggaaagcaagtaccaatcaaggatttgtaaacaaaatcctgaaagtcaaaagtaatgcacaatgaaaatcataaaatgtggatgtttgaggatagatagataatttgagaaacagaggattcataccggactatatcgatcagctgacatcaatttgctttttttctgaacgtaagaaatgatagcattctttgagacttgttctagttcgtgacagttagtgaaaataaaggtggaatgaatctgctctgttggtgtaggaagggt

SEQ ID NO: 47828 - DNA, 630 bp, Arabidopsis thaliana
gagtctagaggtgggtttactagaggattcctcgaccaggacttgaaatggctgctcctctctgtatggggcatttcaagagcttggtccattccgcgtacatagcgacaacaaaacactctataccaatccttattcatggaacaacggtacaaaccttcttctaatagaatgtttagtttatcttcttttttggataatacttcttttgcttctctatatacgggtttttagctaaaagcccgtttctgcttattcacattggcagtggcgaacatgttattcttagaatctccggcaggaacgggattctcatacacgaacacaacaacggatatggagaatcccggggacatgaaaacagcagctgataactacgttttcttggtgaaatggctggagaggtttccggaatataaaggaagagatttttacatcgctggtgagagttacgccggtcactatgttcagtggagacacggatgcggtgatttcggtgacagttacaatgtacgcactgaagatgatgaatctaacggctgttacggaatggcttccgtggtttagtgaaggacaggtgggaggtttccagaggaatacagagggaattttaggtttgcacagtgagag

SEQ ID NO: 47829 - DNA, 513 bp, Arabidopsis thaliana columbia
tgaaagagataatcctaacaatgaattttgtcctttataggccagaagaagaacaaaatcctgttggcctgtgactatatgatttaaccttgaaatgatgatgtctccctttgcatttcaccagagtcgtttctttgttgtttgtatatagctgaagcaataactataagctgtgttatatgtcgagattctccagattcatcctagtcgcagcacttttgatgagttccttcctgacatcgacctgaaacatacacagaacataacattgtcacgatgagttatgccagtgtattgactattatcatgagtccgagtctggcaattcattggcgttacccgagcacccatcagagatgagaagaccatattcgtttctgctgcgtcgtcaacaactagttgcttcaatatccttgtatctggattcatcgttgtttccatagctgcgaggcatcatctcacccaaacctgcagatgctaaagctagacacattacatagaatcaatagttga

SEQ ID NO: 47830 - DNA, 573 bp, Arabidopsis thaliana columbia
tgtacggctttgtatttttttattttaatttctttgtctccttactttttgccactattattgcttctttctttgctcctactactagtatttaaaaaaacagaattcagttttttcttattatgaaataaattgttataatattcgctggcaagttacgtgttagcatccagcgttaaaaacggagaaggtgacatgtgtcggaggagacacgtgttgctctgtttcggtttaagttcagaggaatgggcttatggttctttgtctcaggtcctacaatgcgtaaacattccaatacgtatttatcatttttataacttgttctatagtgtgttgttattcatgattggttctattcttttcaaaatagaaataatgtgtctattttgagagaaattaaattaaaatcattgataatcgaccaagtattcaattagtaatagtttcaactgattgttataaaatgagacttcatatttacttgacaactcaaaatggaggaactcaaaattattaatagttagttttttttctgtcgacgccgcctccaaactcaaattaatgattttatat

SEQ ID NO: 47831 - DNA, 280 bp, Arabidopsis thaliana columbia
gtagtaacccaaccatgacctgttagtaatgcaattctcttttcatttctaccttgagatttttaacacgtctcttgagatgatggtttttttttgctcaatcctttttagttggaatacaaaccttctgaatcggttatacacatgtttatgtttactaaagtactctaagaacatatgacggacaatgtccctaaatgtatttgattttcaaatttcatgtatgattactcaaagtccacggatcatcagttacttaagttaacttacctagagaggg

SEQ ID NO: 47832 - DNA, 451 bp, Arabidopsis thaliana columbia
atcttcatcctccttgctagcccaagcagcaatgttaaatttaccaagttgagtacccaacaccattatctctctcctagttttcatttgaagctctttctctgacagttccttgttactcataggagaagctgatgcttgtctgcctggacttgaaggttcagaagatataggacttcgtagtggcgttgttgccctaatcggtgtcccgtttctagaaggttcttggctcgctataggagtcatttcagttcccatgtctctcattgacacagaccttgccgttgaaggcggttgagcaaacgcagttgcgtactgacgagtcatgacggctgagattaactgcaagagagcaagtagaattggctttagaagacaaatagagcatacagactgaataactcaaagagctagctaacaccacgttcagttgctgattctacaagagagt

SEQ ID NO: 47833 - DNA, 565 bp, Arabidopsis thaliana
atcactacatcaattcacgtttctcactcatttacgcgtacgtccacaattccaagtgcagctacgagtgtgtcattctcctttcacacgtgcgtttgcatcctttacaagttggaaaagagtttttcgtctttctatcatctatatgtgttactttcttcatttaccttattatgatgctatatatttaataactttagctagaatggttattcacctaattcaccctatatcaaatttacaccgtaatacacaacacaattctgcactttttttttggtgttaaaagcagtgaatgataaaaaaacttttacctttattgatagcaatgctaaaagaatcatacaaacccgttacatgatcacactattttccgtgtgttatacatatatataactttagcataaagaaacaagaacccataacaataaaagaacatggaatctacttctacttgtgatgattcccaataacctccacaagaacacttcccttctttaaaatgatggaaccggctcgcgtctctcactaccatctctcgtcctgtaaccaaagatatgaactc

SEQ ID NO: 47834 - DNA, 376 bp, Arabidopsis thaliana columbia
tggaaagaaatgtcaactccaaatctaattggttctggtttcaactttggcgttagtttcagaccttgaactacagaagaacaactgagtcttccaaatgggttcttccatcttcttcctcgtaacgagaattttcgcgggaaagtgagaaccttgggattggaagaagagtctcgaatctcgtctaatcttatgctctggtaacgcgagagtggaatctccatgattggaagagaatggggtcaataagagattaggagcaaacagaggatccagatcatattgatcggaatcgcccgagaaagcaccgtggaaagatggatttgtttacttgatgctccgcaatgtctgaagcaaatgggttttgttgctgaaa

SEQ ID NO: 47835 - DNA, 509 bp, Arabidopsis thaliana columbia
cttcatgagcttgtttctggttcttgtgttcatcataatacaaattattacgtggcttgctttcaagtttcaataaccagtagtgatgtttgcactcatttgattttagagatatgttggaatttagtatatttttcaaacttaattagaaaactaatacagatactctatttacaattggcaaattcctcatgttttactgtgctctactgttttgaagacattgtaatccccagatgtttcttatatttacgacaatgccatatacatattttacacattaaaaataaaaaaataaaaaaaagttttttgtttgggcgttagaaagaagggtgaattaggtgaataaccaatctacataaagttattaaatatctaacactataatatacataatttattgagtagcacatgtgaggtgtgaaaatacaacacactctttccttcaccttcttcccggttcttgtcttccctcaatccaagaattttttccagaaaaaataattatg

SEQ ID NO: 47836 - DNA, 559 bp, Arabidopsis thaliana columbia
  unsure (1)..(559): unsure at all n locations
taaatgttttttttatgggacgagttggcgggacgagtttggcaggacgttacttaataacaattataaactataaaataaaaatattttatagataaatacaatttgcaaacttttatgtatactaactttaaaaaataaattgatcattaaaaaataaatagtatatagttattgtgatcgtattaaaattgcattataacgcattacctaactgaatatttgcaatttaattcgcgactttgattgtctattttccttcttattttgtcacgcattaacattaaactgatttttgcgtaaataagacatgtagatgttgattctgcataaattttgaagctttaagaagtcatttttatcgcatttatttcataattgtttttagcaggagagcttaaaaagcacatagcagagcagatagtgaaacactttaatttccgccttaaacgcgagagaacaaaatatccaaacttctaaagatacaaaattcactcaaaacatgacccaaaaaagagaaaaaaaaacctaaactgtttttaganaagacaacgagcga

SEQ ID NO: 47837 - DNA, 444 bp, Arabidopsis thaliana columbia
  unsure (1)..(444): unsure at all n locations
nnnnnnnnnnnnnnnnnnnnnnctaaagacagtgaattcggtgaccatgcaagcgtcgcaattttcagcccaggttctggactggtacgataaatacgggcgaaaaactctgccctggcaaattgacaagacgccctacaaagtatggctctcagaagtgatgttgcaacaaactcaggttgcgatcgttatcccctattttgaacgctttatggcgcgcttcccgacggtgaccgatctcgccaatgagccgctcgacgaagttctccacttgtggaccgggcttggctattacgcccgcgcgcgcaatctgcataaagcggcacaacaagtggcgaccttacacggcggtaaattcccggaaacctttgaggaagttgcagcactgccgggcgtcgggcgttccaccgcaggcgcgattctctcgctttcactgggtaagca

SEQ ID NO: 47838 - DNA, 433 bp, Arabidopsis thaliana columbia
gaagctctgtcctgtaaaggaactactacaaccaatgaggtgaccagggagtctagccatacgaccattagtgagaccaactgtgatagtctcctttgcgaatacgccttgtgctgctgacccatctgcatatctaacccaaccgaaaaaattaatgttaatacaatacattaacaatttttgtattaggttaaatgtcataagagaggttgaatttatgtatgctcaaatgtcaaacctaactcacaagtcatacaataagtgacatttatgtattgtgctgaattatagctcaactcacatttaatttcaccctcccttgcaatgcacttgcatctaatccatgccaccccaaagaattctctaaatagttgtgagaaaatgtgatgagaagagacaatgatatggtgacaagagagacagagaaagagag

SEQ ID NO: 47839 - DNA, 373 bp, Arabidopsis thaliana columbia
atctacatagaaatcttttgttatgataaatatggagacatgagtaacatttgttgttttctacattttggtttaaatcattcggttatgttctctacaatgtttcaatcaaaatggcaaaatcaactaaatttgggtattaaatcgggaagtcaacaaaagtacactattgtacgattccaaacttagcaattttacggcgagtagaattgaaacattcttgcatcacaacttcttgtgattccaaacttagcaatcgggaagacaacaaaagtacaaaatcaaccctgggcttttgtcttgtttgtgattccaaacttagcaatttacagtcagcaagtaaaattaacattggtttatctattaaaaaggg

SEQ ID NO: 47840 - DNA, 553 bp, Arabidopsis thaliana columbia
ttacatctcaacttcccacgttgttagtagacacaagacagactggagaaaacaaaacccacatcgaaagagacactcttttgatcgttagcaaataaagcgattcctcaatcgttttgtttgacaagtttgtaatataattccaaaagtgaatggtttgaagtcacaaaattaactttttatttggttttgcatttgttttggtatgtgataacgacggtacgtattaaaagatgaaagatccaagtaaacggattaaaaagaatatcagaaacaaaagagcatctcatcctccggatttacaaaagtaaagctcttagttaaagttgtacataacccaaaatactagctactaccagcattacgtctctcggccaacctaagtccaaatcctagaaagacgagtgaaaacaaagatgactctatcaaccatgagccgttggcaagatctgatctctcagcaactcaattacaaccataaccgcgtgtggcttctaagcctcatatgacaagcattgctgctacaccggttaataagaagccactgtgttag

SEQ ID NO: 47841 - DNA, 812 bp, Arabidopsis thaliana columbia
gttcggtttaggatttggttcacagtgataattatttaattgctcggtttatccgattgtaactaaaaaagctcttgttctccggtttagtcgatgtgtacttgagcaaaccttatatttttctccacaaaaccgacaatttaccaaatttacgtcaaacaatcttttttaggaaacatcagccagcaaattaattacaaagtaaaccaacagattggccggttcaaattcttttacaaaccacagaagtttggaacactagagatcgtaacatcgaaataagtaacccaaaaagttccaatcgatcaaaatggaaattttgttaaaaattattctctacttatatgatcagattcaaattctttagaacatgatatatatttcttcaaatcattgtctctaccaaataaatgagtaacaaactagatgtatatttgtacatattccattatgactctataatgaaatgtaaagcacacttagaccaaaagggtgcatcgtgcatcttgcagcttgatgacacgttttcaacacgttcgataaacaaagcaatttaacaaaactcataacacctacacatacaaaacttgaggacttttcaaccaaacactctctccctttgacaacaaaaaatgtcgttttcaattttgtttttgttttacagagtattattttgtactttgaatgcaatttttaaagcaaatctgagttttaaccttattcattagataaagaaactgttttagtgtattaactaagggtataacataaatttacatattttgcttactttgaccactctttacaagaga

SEQ ID NO: 47842 - DNA, 472 bp, Arabidopsis thaliana columbia
ttctataggagctgttatgcatatgaccatgttacacttcagataattcttagaggagatatgaaaactacgtgaaccaaagattataataggagcccacaaccaaaagttagatttataccagagtaatggagtgctcgggtagcacgagctttagggaagcccatcgcttcaagttcctcgagaatgttattgtcaacgtctggaacaaccatctctgcagagtgaccataagaaatagcgttaaagtcacattcagaaactcatgcaatacatatacattaacatggcaatgtaccttctgcagcctctccacgtacactagcattatcatcaatctccatggcaaacttaggagcttccaagctgatgggtttgattgtctccaatgtcttatctacaaactcagtatgccctgttcttttcgtgtgcaaatcgctttccttcacattatataagaatgagacaagga

SEQ ID NO: 47843 - DNA, 511 bp, Arabidopsis thaliana columbia
cttccaaggaacaagattattacagaacacaactacagtttaatcaatggaaactcgtaatgtgagttggctcagaacattgaacacacgatggtgaataagtttcaaaagatttttccacttacgagttaaatcgtctcactctaccagatccagacccaaaagctcgaggtggtgcaccatatccatctgcaatctctgtgaaggtaaaaactttcgagcttccatatacttgtacattcttctcgcatctttttcaaacccaccccttttcaacgcgcttataactttgtcaaactcgttaggtcccatttgatctctcttagcttccaaaaccccaagagcttgaagagtcttcttctcattcctcacacccgaatacatacagcacaagctcacctggagttcaaatggtggagcttctcctaactgagagatcttaaccagaagctgctcagcttcctcgataagcccaagattagccatccaatcaacaagaacggtgtaagtg

SEQ ID NO: 47844 - DNA, 528 bp, Arabidopsis thaliana columbia
aaatacgtctcgacataaccacataggctacaaaagtttaataagatgaaattgcataataattgagacttgatgacgctttctaagcacaaaactgacaaaagaaaataatataaaagatgtccgtatacacattcaactagggcttacagcgtaagaatcttgcattacaaggcattttcttgctatctccgaaatttgaggctaactactagcttagctaacacaataagcaacaatgattccaacaatctgtttctactttcactctgcacataccattgcatcacagagtctaatgtttagtgataacacaacaagattaaataccactgtgtgagcaaaggtttagattctgacaaaatctgcagtagagagtttggtttttgtgcttctttgttacctttggtggtggttggttatgatgtgggtatgccaggaacttgaggaacagcaggtttaggttgcctgatcttctccacgagtactgcttgagttgtgagaataatgccggcaacgaatctgcgt

SEQ ID NO: 47845 - DNA, 599 bp, Arabidopsis thaliana
gcgtctttagagcctttccatctgtgtcttcttcaagttgttctaaaccaaccatatcgtctccagcattcaacacctttccgagaagagacaactgttcttcttgactgtggtagcccaagcttgaacccgcgtccggaggtgggaggcttgttattaccttgaagctataaccttggtcgatcaaaaactgctgtcttttcgttgaataatacatttcctgcatttcaacattcacgatccttacatcagtcattctccattcaatcagtcattcgatttttatcggttcaggaattcaagtcacgggttctggaaagcaaaattttttctgtgttttggaaacgagtgcggactagaactgaattatattttggttctgatttggtctgatgaatttcagtttttatggctacttcaacaataaagtgatttacctgtgtatcggtagaaacaagcgagtagaagaatgcattgtactcttcttttccaccagccattctatcttcaagtttaccctgtttttgatcacggagaaataaaacgtgttggatccaacaaccaagaggaactctaggagagacgcaaaatgtgatgag

SEQ ID NO: 47846 - DNA, 454 bp, Arabidopsis thaliana columbia
ctcttttgagaaaacccaaaagtaaaaagacttgaccacaattggttgactccgcatttacacaattacacctcaacaccccgaaccggttttggtgctctttaatatgatgtcttaatcacatacatatatggttgctttctttgaccatcataaatcatgctagtaatatttatgtttttaattgaatttaaaaatatgtatggaccactgaatatcaatttaatcaaaccttttcagcttttcttaatcatattggctttgcactatcataatcgtgaggatattatttaaattttagtgacccgcactcaccaaactcgaatgttatatatctgatttgatgtgaaccctctaaccaagccgagatttattttacaagtttttgtttactagtaacaatgttatatactttggacataaaatgatatatatatatatatatatatatata

SEQ ID NO: 47847 - DNA, 528 bp, Arabidopsis thaliana columbia
ttgtcaaggaagcaatggctttgtttagtgaaatggaaagcattggtctgagtacgtggaatgctatgatttcgggtcttatgcagaataaccatcatgaggaggttataaactcatttagggagatgataagatgtggctcgaggccaaacacggtgaccctttcgagccttcttccttcgttgacatatagttcaaatctgaaagggggtaaggaaatccacgcttttgccatccgtaacggcgctgacaacaatatatatgtcaccacttccattatagataactatgctaaattaggatttctgctaggagctcaaagagtttttgataactgtaaagataggagcttgattgcttggacggcaattataacagcatatgctgttcatggggactctgattctgcttgtagtctttttgaccaaatgcagtgtcttggaactaagccagacgatgtcacactaacagctgttctttcagcttttgcgcactcaggggattcagacatggcgcacgatatatttg

SEQ ID NO: 47848 - DNA, 607 bp, Arabidopsis thaliana columbia
  unsure (1)..(607): unsure at all n locations
acaagcaaaattcagaacaattccaaggaatagaaacattcttggtcaaactctgcttgagtagacatctatataaatgcttaagcttctcgatattagactccaaaatatacattacatctctttctttgtggcttgagattgaaaaatggttaaccctttttttcttggaatgaagagttgcagaaccttaatttttgtggcaataattctcaacgggctgagtactttcgttgcacatgccggtgctgagagcaaggtactttacaattatataaggctattctcttacaagcaacataaatagcttaaaaagtttttctgtttcaataggttcacatagtttatttgggtgagaagcagcacgatgatcccgagtttgtcacggaatctcatcatcggatgttgtggtcacttcttggaaggtatgtaagtgtagtttttccattctatactatgtctctatttgtacaatcatgattgatggttcttgcgtttgctcaatatttctntatctcaagtttaaaaatttctcaaaagattactcagatttcttgccttttgtccatgtaaacagtaaagaggatgcgatagtcaatggtcatag

SEQ ID NO: 47849 - DNA, 494 bp, Arabidopsis thaliana columbia
gactctagagtgacagtagttttattgaattattttaggaacaatttaggtaatgatttagatatatacattcgaataaaaaaagaaaagatgccgaattgttctattaacgtcgcttcagtccacgaaacctggttattcaaaaacattaagggtcacaagattgagcacatagattagtcactcattatcatcttacttattattcatgagctaagtgattttacttcattttacttcccttgttgctccagaaggcaagagaatgctccgagggaacaaagaagaaccattgttcggagctggtcggagtccaagaagctctgcaacgacgttatagatctgcacattctcgaatgatggcactttttttcctctactaaacctagaaccatgtccgacaaaaatagtcctcatcgagaagagctcgttgtcataaccatggtctccatagcaaacttgagcatttgttctgttctgtctgaccattagac

SEQ ID NO: 47850 - DNA, 540 bp, Arabidopsis thaliana columbia
gaaagaagatgagatgaagataaaatggaacaagattggagaagaagagaaattggttctggttagagagtttgttgatgaatgggctggtgattttcaacctttatctattacatctgttaaagaaatggttgaccaagagtgtttagattctgacaaaacaatcgaatcttcttcttcttcgtctatgtcttcgttttctggcttgtttcctggattgaagagaatcattgggtttgagtagaaagaatctccaattttcttttataacattgcaatactgtaacatgtttctttagctgagaatacattggtttctttagctgagaatactgtaacatgtttttcgatttgtgaaccaaatcgttatgttttgttctgaatacgaaatgatcattgaagatacaaacagagaaaatactgatggagattgttgataaatgatttttgagtccagaggatgaaaagaaatcaacaaatgtgattccaaactgagcttagtctttgtcaacttcattggtattgaactagttttgttag

SEQ ID NO: 47851 - DNA, 463 bp, Arabidopsis thaliana columbia
gcacacaatgcctacatcagtgctctcaggagctgttgccaaccttagaggctgtggaagggaatcagctgctgtgctcttctgggtccacattttcgccatcttctcaatggctggatggatggtactctacattaacatactcttctgaattctcttcttattgacacattcatctgctactatacaatacttctgtgtaaatacagtggcatctcctatgtgcctgaaccaaccaaaattctgattttttttttttcctttcctgtgtaaatgttagtttataactcttttcaactaatgagcactccctttttctctggatatatcaagaatattatttgaaacacgcgacaaacagcacaactttagttaaacgtcaattaaaactaatgtgtggaaacagtaccaagtcgataaacagcagacgaaactcaagtatcttttaagggtcttaaaaaaa

SEQ ID NO: 47852 - DNA, 790 bp, Arabidopsis thaliana columbia
  unsure (1)..(790): unsure at all n locations
gggaagcagtgtatcccgcctcacatacaaaaggatcagaggcaacctgtaggattttcccaccatgaccatcaagatataatacttttccatcaatgcacttcaataaactggatttatttggggatgaatcttccgagtcatgtgactttattgtgtgcaaggaagaccaatatacagtattctgcggagataaataaatcgacgagcagataagtggtgtgccataaaggttatttctcaatacagaaactttcttaaggggtaatcgatcagaagaacctgtagcactcgctagagagagtgatcctgcaccaatttcatttgattcttgtttcgcccacaatgttactcgtggaaacctcataggagagatgtcatcaagacaatggacagcccacaaagtagcaaaatttccagggccataccctaccaaccactcacattttccaacattctcattatcgtacttttccatagaaaaaacttgattagtaccttcgatggttttgaatataccccctgtacgagttccccaaaaaagaaataaatctctacccaaacagccatccaagacctgatttatctctatcacagctgccacgcaaaacgattttttatgatcaggcacatctttcatgcctttttttgtctttccaccatctacctcacaccataaccttactgccccatccaagcaacatgtcattagcacattcctcattgatttacctatacctattgcagactgttctgcagccatcggtctccactgaatcatgnngagtcg

SEQ ID NO: 47853 - DNA, 504 bp, Arabidopsis thaliana columbia
accgacagcaatggatagggattttccaccatttggtctccactcaagggctttaacatttctttgtgaatcacttgtcaaaatgcaaggttctttctcatctgttcaaaagaagaatatgaaactgtatgcacacaccggcaaatgtgaactaggaatcctgaattgaataaataaaacaaacctttgtcctcataatcacgaattgtaacttgatttgcaccggatataaaggcaataatatgcttcccttgatgccaactcactccttgaagatcaatctctgagagtagagttacctagaaaagaaaaggtgagcaaggctgtggctttattaataacagctatgataatgccattttgaaattgcaaagaacatccctcctatcaattcccctagatacataaagataagtattgtaaccatcaatcacaaaatgctaagctttctttagtcaaccaaacaaagaaacagactgatagttgaactcttacatcggtggg

SEQ ID NO: 47854 - DNA, 420 bp, Arabidopsis thaliana columbia
gctgtggtgatgtctcctctacagaggaacattccatggactgtgtcagggctaagaccttctgtggcgtttgaatagtgtccgagagaggaagactcgcggagagaggcgagtagggtgtcgcggttggtttcgtatgaactggtttgtgtaaagttgttggtaggattgcagacagtaaatatgtggtcaggttgagacatggtttggtgagataacaaagagaagaaaaagaagtaaaacagagggatagtgagggtaattatgattcttgccattttgttctttgttttttttttgacaaaacagaggagataggaatttatagtagaaagaaaactttttttctttttgttgatttattcaaaatgatgtcggaataacgatggtattaccaattcgaagaaagaatatgtaaga

SEQ ID NO: 47855 - DNA, 549 bp, Arabidopsis thaliana columbia
ctaaagattagggcgaatgaacctgtcatggtcactcagtgttacaacggtggataataagaggggatcataatcaaataatgcctgtggatctaaaccaggaaagtcattgctaccagaacttacgtcggtgctgaaacttctgatacctgccggctataaaatgtctcctagagactcaaaaaggacaaggcaggttcttgatctaatttcggctttttggagtggtttgggggcctcgtcagggtttctcgtctcctaggacattacagctgaccgtgtcggcgttggtacaagagggcaacaattccctcagcagttgtgatagaggttgggacctttgcccctttcgcgcaagtccaccttagcctcccactgtactggccagagcctaggctttttgaagcccctcatacaaccatccagaagatcgaaaattagcagagagagacaaggtatttggaatcaggactcggctggatcgcccgtgatcaatcagcccctaagaaaagataaaataacgggcaaagacagactataccttaagag

SEQ ID NO: 47856 - DNA, 550 bp, Arabidopsis thaliana
gtctcctggattcccttatctcaaatcttatagaagaataaggatttccatattcacaaaaacgtctttacaaacaaatttgacttatcttccaaacgtttcctactaacagactatcaagtattataaacctaatgtcatacctgagattgtgtgtgtgagcagataatgatgatgatgaagccagagagccttggattatcttcattggtctccttaagatcaaaagatatgatgaacttcgattttgctttttctgtttccatcagactataacaaacattaaaaatatttcatcatgtacgtgtaaaaaaatcattgacatctagatttcgatctccatgagcaactgcgtcttcgggttctggcatgaagagactcgttgatgtcgcctgcacaaggaataacacaaccagttctcaatccatatcttgaaaataaggatctacaagtttcataacaaacatatggcaaatgcaaaagaagacttaccttggtatcaagaagcatatctccgttgctgtcagtaatgatgttagcccatgagttt

SEQ ID NO: 47857 - DNA, 485 bp, Arabidopsis thaliana columbia
catttacaaagttgagctctttggatttcttgatagtaaattctcttacaagatcatggattctaaaagacatcagtttccctttctttcttttcacgacttccactaagcttatgtacaccagatcttcaatataatatctagccacatcttccatcgtcatctcttcatcctcttgtataaacccttctgctacaagtaactgtatcaatttctctacgtcgacctcatagtcctcggggaagacgctaaggtaaagaaagcagagctttaactcatgtcccatatccttgaagcttaggtcaaacaaactggagacatgaatgttgtcatcctttacacgcaaactggaccacacatcgttccactcgtttggcttcttcctggacataagcccggcaagaaccactgtagtacgcggtaatccacacatttttgaacatttcttttccgattttctgcagttcttgatcgacctttaagat

SEQ ID NO: 47858 - DNA, 526 bp, Arabidopsis thaliana columbia
gattctgggccaacagaaacatcttccaccaacaacaacgagaactttcaagaggcggacttgtttgctgatgcagcttttgtatcagcctcggctcagggagctgaatttgggtcacagacacaggtggtgacttctttcatctaagctagtatgcagcttttaacaatggaaaattcccttattaactgtccagttatgtgatgcaatttctcgctaattgacaaaaacgtttgtctgttgaagtcgttctttacacctcacaattacttgtgctgttgaatcgttgactgatgtgtttccgcatttctgtttctacagaaacaagttgatcttttctctgcgtctgaaccttctgtcacagtttcttcagctcctccgacggttgatctctttgcatcttctgaatcagttgtaagcccagaagccaagatatcaatacctgagtctatggctactcccaacattgttgacccatttgctgcagttcctatggataattttgatggatcagatcattttggtg

SEQ ID NO: 47859 - DNA, 276 bp, Arabidopsis thaliana columbia
taaaaacataaactcaattaatagcatcgcaccttcttcggatctctcctcttctaccagtctgtataccaaaaagactcaacttctgcatagctttagcaaaatctttgaaaaacagatcttgattcttagcataaagatcaacaaaatatctggttctagggtcagaatataatccatgatccgattcaagtaacccaagactctttttaagattctgataatacatattatcaaacttattaggagtcataatatcattaaacacagagatag

SEQ ID NO: 47860 - DNA, 583 bp, Arabidopsis thaliana columbia
gagaatacatatgttcatttatctatacacacaaatcatattcttttagttttaatcttcgaaaaacgagaggacattaaatacccctaaaaaaggaggggacattactaccaacgtacattaacatgtttgatagcaaacgatttattttgttcgttttgaaaaggggaaagtaatgtgtaaattatgtaaagattaataaacttttatggtatagtaacattttcgaataataagagagggaaaacactcgccattgtcggcaatttagaaccaatattagaagggtttttttagagaaaaaggacttaaaagtttagagaccttaacaacaacttatttagaaatagacatgcttaagttgacaacagcgagtttattttctatatcgaagaaaaatacgaactttttcttaattagatttcgaatgcatgcactatcgagaatcgaccgtcacaagaaaaaactaatatacatactgtacatatctatattcaatattggtggggatgggtttaatgtgtatttataattcatggataaatcacacaataaggtccatgaaactagaaggtccaaaaat

SEQ ID NO: 47861 - DNA, 529 bp, Arabidopsis thaliana columbia
aaaaattgactaaaaaatgcagtgagttcaaagtaatataatgtggtagaacacactaaataaccaaaaaaaagatccttgaatgtggtagtgatcgttcaaagaagagagttaagtataatagtttttttcttgtcatcaattcacaatgattaaagctccagactaacctattctgtgattttatcattcctttattcaatcaggacaatcattagatcataacacatcttacacactttcttatattcatctcatgaaacaactccactgaattcaaaaggtactcacatcttctttgtagattatctagacaaagacaattgtcctcatcaatttctctgtatactgtagggataaacatgcaaacattagaattcatggctctaccaaaacgtaagctttagctcattttctttcaaacataaacagttgctaaattagttaaacttagatgtcaattgcacatgatatcagtgaaaagatggaggtgaaccatgcatacatgcacaacttctctgatcaatgc

SEQ ID NO: 47862 - DNA, 471 bp, Arabidopsis thaliana columbia
cttaatctattgttaatggctcttacaagatccttagagctatcattaacagaaagcatctcacgggagcatcttagtgctgagtagaataacgactgcaatgaatccaaagaggaaatcatgaatcagtctcataaaaagatatatatcaacgctataaacagaaaatgagacaaaagagttggtacttggatttcgagagggtggccatggatacccatacgacgatcaatcatacaagaaccatcagtgaccaaaagtgttggaaacatatcaaatccatctgctaaacacaagttcatgataagctttatccctgtctgaacatctatcctctcttgtaacgagaaatctccagttatctttccatatgccctcaagagaataatccaccacaaacctataaaggacaaaagaaaccaatcagtaacaaaactcccttagagaatacaatcaacataatattgacac

SEQ ID NO: 47863 - DNA, 534 bp, Arabidopsis thaliana columbia
tgataaatacatacctcatcaggtgtatgatactctcgaatcctcgagccatcaaatagaaagcgaaatgtgttccactcgatgcctctcatcttggtgtaaagttccatcattttaagcagcttagcattccttctcacccaaaacactctaaaatcttcttcgtcctatataaatccacacaagttatgttattagtcagatatgttatatgtatgtactgaattaagaaaatgtaaggtttaaacaatcaatacctgacccttaactttcagagtaacatgagttgggtccgacacaactttacgcttttgcccttccatcttcacttcattgcttccaactctgctcgttgttgacattatctcaaccggtctgaacagatatgtcagttctcaataaatgaatacacagaaataaacaagaacagtacagtacagatcatgaccgatcactcggcttggcggctctaacggcgaagtggacggctctacagtaaagatctgcggtggttcaacccatggttgttaggta

SEQ ID NO: 47864 - DNA, 597 bp, Arabidopsis thaliana columbia
tggagaaaaaatggtttcaaaaactgcgattcactaaatgtacattccaacaccgaggaagttgcatctaccaacgacgatgatgaggcatctaagcgattcaccttccgtgagttgcgcggtttgttcatcattgcgggactgctcatgttctcgtactagccctacatctctttcatacgcgtcaagaggtatcacgactatgcaccaaacttcaaagcttctataagtaaaaagtgatccatcgttcataagctctactatagcaattgacgggacaggactcataagtaacaacaaagtacacttcgaaacaaatttcacatgtaatacttgttttttttcccgtttaaattcacatgtaataatttaattcacgtaaatactaaagtgattcacccatcacgaagtattttttgaattaaatacatcaactaatcgagtttttgatagggacttttgcttttttgaatattgcttatcaaatcaaaattttcaaattcttgtccatatacgcctatcaaatatcttcttttaaagaaagtctcctaaagagttgaaaacttgaaatatatacttttctaaaatataatttta

SEQ ID NO: 47865 - DNA, 765 bp, Arabidopsis thaliana
ggatggaacacaaccatggaagatcagaaatctgactacaacaagcttcagtcacttctaacctccatgtgtttcaaaaagtacgctcaaaaagatgacatagccgtgtggcagaaactctcagacaaatcttgctatgacaaaatcgctaagaacatggaagcttaccctcccaaatgtgacgacagtatagaacctgattctgcttggtacactccactccgtccttgcgtggttgccccgacacctaaagtcaagaagtctggtctcggatcaatcccaaaatggcccgagaggttacatgtcgcgcccgagagaatcggtgatgttcacggagggagtgcgaacagtttgaaacacgatgatggtaaatggaagaacagagttaagcattacaagaaagttttaccagctcttgggacagacaagataagaaatgttatggatatgaacactgtttatggaggtttctctgcggccctcattgaggatcccatttgggtcatgaacgttgtatcatcgtacagcgcaaattcgcttcctgttgtctttgatcgcggtctcatcgggacttaccacgactggtaacatttctttttgtcaaaaacactctgttcattgtttgatctttgtgctattaacctgaaaaccgaaattgtaggtgcgaacgtttctcaacgtatccaagaacatatgatcttcttcactcgacagtctttttaccttggagagtcacaggtacgttatgaatgatgagatacattg

SEQ ID NO: 47866 - DNA, 422 bp, Arabidopsis thaliana columbia
acaaatctcttctcaaagaccttttgttcaaccaaagcccttcgaaggacgttgcattggcttctgtatcaatgaggtcaattccatttgcgccggttcttgaaaaactctctctttgcggatgctaactacggatcagttagacggtactatatagagacgttagaagacaatgctataccagtgactcttcaagaagacatgatcaatagtagtcctcctgaaaaggtttatcggttaaaaggcgccgaccatgctcctttcttttccaaaccacaagctttgcataaacttctgcttgagatcgccagaattagccctgcttaactctctatcatgatattcactaactggtgtctcaaagtgtctcatcagatctctgctccgctgtaaactctgtatcatttggtgatgttgcattt

SEQ ID NO: 47867 - DNA, 633 bp, Arabidopsis thaliana columbia
tcgatatatcaacccagaaacattttgaaacacaaactatgcatacttgattctttattgcagatacatgcaactcatggagcctaatactaaacattgctttgatcatgtttcaatttaaccagactcattttttaattcacccagggagtaaaactcattaggttttgggcctaactgcctcagtcatggtaatcctgaattaacttcactaagttaccctcatctgttggttcgcacctgaattagctcgctaaattaccttcatctgcagttttttttgcttaccaagaatcgagttcttgaaaattgttataataaagataagcgcagaacacttaacaaaatggggatgtagctcaaatggtagagcgctcgctttgcatgcgagaggcacggggttcgatcccccgcatctccaatctaatttttccaaaaatattaattgcctaattttgaaatcatgtgtcaattgagaatcccatgtttttttttgttttccttcgttaataatgcaaagctcaacagcgtctatctgaaagacggcaaataatttaacattttcatatattaccaacgtatctactttgatgcgtcagaccgtcagtggtttatatcatgttattgtgatgc

SEQ ID NO: 47868 - DNA, 969 bp, Arabidopsis thaliana columbia
catattctggcatgataatttttacagaacacatgagcgaacaaaccaacacaaatatacgtgtatattcgtggctgcctgtatataatatagattaattgtatatctattttgatttttgtatataggttttagaataactatacatagattcagaaaattttagtcttagagggattaagttttattttgtctttgtatctctgattttaatttgtacgatattatatcgatatgaattataagttggttctacatggaacctagtttgcctcaaattcagctacctgtgttttaattatatattcatctgtgtttccaaaaatctaaaaaaacttgttttgcctactagattaattatatgaatacttgtgaaccgacataagatttctggcattcaacaattggaattaccctaaagggaacacaatattcccagcatgaattggcacatttggttagtccagcatcaacataaaatgtataggctttaatgacataaaaacaaaacaaaaacgtaaaccaagattatagttcaattataaacaatggatgattataatcaattggggatgtagctcaaatggtagagcgctcgctttgcatgcgagaggcacggggttcgatcccccgcatctccatttttatgtacttctttttattttagattttgacatcaatcataatgtagcaaatagcaataatatattgctctcgcatagataaaatacagatacttaagaatcaagacaaacatcatgatatttcatgtatataactcaattgtactaaacatctcaaaacttcaaaaaaatgcatagtggaaaataaaataaaaagaaacaatctcgtttacaaaattaaagagcaaacaaaaattggatgaatgaaaaatatatatatagctacaattttgttcaatatcaaaaattaaagaaagatagacaaaaagaaaaatgaaagaatatt

SEQ ID NO: 47869 - DNA, 488 bp, Arabidopsis thaliana columbia
tcttgttttgggtcgtttggtttcttcagagagaaactgaacccatttttttttatttttttttgacaaacctgatttaggaaaagaggaaaataagaaaacagaggaatgagtttggaaggaaatgtaaaagctttagaatttcaacggttaatagatccttttctattataaggaaaacttaaaactgaaatcttttgagttctgaaatctcctttctttgtgctttgcctctctctatctcaatgaaggttgcttatcaatggttaaaagattgtgtataacattgtgagaaaactagatagatcaaatcatcgaaaatgataacaaagatacacataaaaacactctctctaatacaatatcagactctaaagctagaaaccaagggtttagctttaccaaatttccctaatttaacaagcattgaatttcacataggaggggaatcagaaacaataccaaagcaggtcacaggtgcatttgga

SEQ ID NO: 47870 - DNA, 1133 bp, Arabidopsis thaliana
  unsure (1)..(1133): unsure at all n locations
ctaaagatctcttgagctaattcccagaaaagatccatgtttcttgagttcccgatgattgctagcatcttattagaggtagtggaagtgtgggtgaaatcagggtggtgagtttgagaatagaggaagaaacggtgtacaggacgccacgagagtggaaattgttgcagacttggaggaagaactcgtgagttagttgaaatttggtggaggagagtttagagacgagacgtgaatcaggtgagttctgttgctggtagagaattgtacagactcggagaagatggtcttggtttatcggtgtgattgtggttggagttagctcggtggagaagaagcggtggttgagaatgaagcatcgccgaattgagtttccgatgttaatcatcctccgagaagtcacgacggccacagccataagtttcccggccaatggagaaaacaaaagacaagaactaaattaaataaaaaaaattagggtaaaattataagaggctacaaagaagcccatctaagcctatgtctaaaaatgagtgggaaaatggagatgcgggggatcgaaccccgtgcctctcgcatgcaaagcgagcgctctaccatttgagctacatccccgttgatgtttaaatacgtaaccaaaaacatatataggattagataaaacggtgtcgttagggagcgaaaagttcgttaagttagttagaaagaatagcgaaggaaaaacccaggaatttcgcagacacagaggtgtgttcggatctcaaggttgagattcagtcttcttccgccatttgcgaaccatcttcgaaactctttttatatttctctctttccctcccatctctttcgattattttatttatctcaccaaggaaaacaaaacacaaaacaaacaaacaaacaaacccataaatcaagatctctgttttcagacagattattatcggaacaaaatgtcatcatcaggatccgacaaagagagagagacttttgtctatatggctaagctctccgaacaagccgagcgatacgacggtaacataatctctttattattttcgattttaattgcgagaatttataganaggatttggtaatgaatgtgcagagatggtggagacgatgaagaaag

SEQ ID NO: 47871 - DNA, 626 bp, Arabidopsis thaliana columbia
  unsure (1)..(626): unsure at all n locations
attgatagaattggtacccgagatagtaggcagatcaaagactgaacgtgtgtttcttgctaacggagtcaccaacgaacgccattcttgttcctctaactatttccagaaactcgtaaggatcaaacagagggagatcacattctttaggtttccatctccatttcatgaaacctaaatcaggtcttccatacttgatgcagttttggtgttcgtgtatcgccctgcatgtcgtgtttgtgtagtacggggctttagggtttgggatccactcgccggagaatatatcgcatttacgttttctctttttccggcggtgctctttcttaggagttacttgatgatgaccattcgatgatgagatggatagacgatcattgttatgcaaagatgatgacttgggatcatgatatgtgtcgtcgtaatcattatcatacgacgatggttctgaatcttctgtcttataactatctgatgatgatgatgaatggttaacctagatggagaagatattgccgacgacgatgatgaattcgataaatgtttgtatgttgatgttgaataatagagaggataccanaaaagagataaaggattggagctatcgtaagtagaataagaggaaa

SEQ ID NO: 47872 - DNA, 508 bp, Arabidopsis thaliana columbia
ccaatccaagtggaacaaaaaaaaatcaaccaaatatacaaaactaaaacttgggacacctgaagccaggtatgattgtcttcgatccaagatagctcccatagtttttcactccttttttcgtgaattacttttcgcaaggaaatatgggccagtaaggataaaattttatgccagtggaattgaactattaatgaacttattatgcttagttgcttcccaaagcccaaagcctgttaattcaaaactcgaaagtccaaactttgacataaaattcaaaaagacttttccactttactcaaatttccccaatttccctcactagaaacaaaaaaaaaactagcgagtggaagacaactgacaattctatctcatgtatcaaaacgacaaagcaataaacgtcaaacgatatcaacacgacttggctgtctcagctcatttcttagcttctgagagaagagcctacaagcatccatgcttagatccacgccgctgctagtgcacgtgc

SEQ ID NO: 47873 - DNA, 753 bp, Arabidopsis thaliana columbia
tgttcaagttcaatgaaacatttactagtaccactcgcagataagttgtaagttgtaagttggtgtattaaaaacaaaagtggtggagatgcgggggatcgaaccccgtgcctctcgcatgcaaagcgagcgctctaccatttgagctacatcccctcttgaaatttgttggcgtggaacttaaggaatcttaaaaatacagaattctacaaccttaaaataaaaactaagttaaaaagcaaattggagatgcgggggatcgaaccccgtgcctctcgcatgcaaagcgagcgctctaccatttgagctacatccccatttgttatgatcttgtcgggttcaatagatataactcaggtaataataaaagctggattgttgcagcttctgtcttaaagaaagcccaaagctttcgatgttggacggctgcttttcaggaccaaaaaacgacaaattaagagcggacagcaaacaaaatactttttgtcgtcttctttcacttttgaaaatttatcccaaaaaacattataaaaatgaaaattcaaacacattagtggggaagatttggggttaagagctcgtttaaacacatcaatctgtccatttcaaattttttgaaattatttttgtaagggaactagagataagcatatcttcattgaattatcatgcttacaattctgatagtattgggaaaagtgattaattgtacattggttttctacatcttcatacttttttatatacgattat

SEQ ID NO: 47874 - DNA, 555 bp, Arabidopsis thaliana columbia
  unsure (1)..(555): unsure at all n locations
nnnnnnnnnnnnnnnnnnnnnnctaaagccgccggaacgtttattacgtacatcaggtaaaactgaccgataagccgctttcttttgggtatagtgtcgtggacagtcattcatctttctgcccctccaaaagtaaaaacccgccgaagcgtattttacgtaaaacaggtgaaactgaccgataagccgctttcttttgggtatagtgtcgtggacagtcattcatctttctgcccctccaaaagcaaaaacccgccgaagcggtttttacgtaaaccaggtgaaactgaccgataagccgctttcttttgggtatagcgtcgtggacagtcattcatctttctgcccctccaaaagcaaaaacccgccgaagcggttatttacgtaaatcaggtgaaactgaccgataagccgggttctgtcgtggacagtcattcatctaggccagcaatcgctcactggctcaagcagcctacccgggttcagtacgggccgtaccttatgaacccctatttggccttgctcagggtggagtttacagtgccacgactgtta

SEQ ID NO: 47875 - DNA, 743 bp, Arabidopsis thaliana columbia
tgatgaaacgtttctaaatttaataatataatactgttattttagaaaagggtacttgtcttgtgcacacgactgaaacggtaatagttttggggttgaacacaaaattttgtttgctaatggtttgaactttgaacttaatttaagaatggttttgactagtaagtgcctaagtaaagctttatttaattaattaatgcattattttttatgaataccattacacactttttatcatcatctcatatatatgagtcatacatttactaaaactacgatttttctttcccaaatgcaatttgtgtttggagtgggccaacgcttgctataatagttatatgtttaatacagttcaaattcagcaaatggggatgtagctcaaatggtagagcgctcgctttgcatgcgagaggcacggggttcgatcccccgcatctccaattttgaaactttttttttgattaaaggtttttcagacatctgcactccaggtttcgctgttgtgtctttggattcacgtcttgacattgcctccatgcatatgcgagatcattaggttttgcagatgtcactttactcaatgtttttgtgcagttttcttcgacttaaagactttttttatagctcccatttctatttcctatgtaggcttctggcggacattaattagggtataacataaccaagtcttttctaagtcataatcctaataataaagcatatcaagttttaggtaacaaatt

SEQ ID NO: 47876 - DNA, 1083 bp, Arabidopsis thaliana
attgtgtgaaaattgaaggaagactacttttcatgacagcaagctacacttggctgcagtcaaaaaatttcaataacattacccatttctagcagtggttgttagatatgcgctgataaacatcctattaaacctcttgttcatgcttgatacttactcaaatctttctctattatgcagatccatcaggctttatcctttttcctctagttgttcattcttttgacttgattatatcctcaattggtattctatcaatcaagggaacacgtgatgctagtgtgaaatctccggtagaggatccaatggctgtacttcagaaaggatattctctgacaattatattagctgttataacatttggcgcggtaatgttgtcacacataaccattgattgtcttgttcctttcattctttttacaattaattctgctttttatgggctttttggttcagacttttcattagcctacactagccttgttattactgaaatttcgaacaaattctttgctatattcttctgacagcattatttatgtttgtagtcgactcgctggctgctttacactgaacaagctccatctgcatggttcaatttcgccctatgtgggttggttggcatcatcacagcctatatctttgtctggatatccaaatattatacagactataagcacgagcctgttcggacgttggctcttgctagctcgactggtcatgggactaatatcattgctggagtaagcttgggcctggaatcaactgctcttccagttttgactataagtgtagctattatttctgcgtattggttgggcaatacctcgggtctagtggacgaaaatggtattcccactggaggtctatttggaacagccgttgctacaatgggaatgctaagcactgcagcttatgtccttactatggacatgtttggcccatagctgacaacgctggtgggattgtcgagatgagccagcaggtaagatgtcacatgattggcttgaaaggctcttatgttccatctttattctatgtagaaataataaatgtttcgtgcagccagagagtgtccgtgag

SEQ ID NO: 47877 - DNA, 556 bp, Arabidopsis thaliana columbia
tagtaacggtcgccagtgtgtgctgtaaagagactactttcctgcaaaagacgcagttgcaatcgtctcttcatgattatatttaccatggattactgatgtgtattcccccttcttgtgcttctcaaccgtgttccagacctttagagtcacaaatgtcaaaaaggaagatatcaataacctatgctagagatgaatgcgagaaacaatattacggatttatggccacaggaggaatgtacctttgtcacccaaggacaagtcgtgtcaacaatttgcacctttttatcattaagaacatacatctcgtcaacaccagctccaaacgcaggaaggataaccacatcatctttctctactacatcaaactgtttctttgaatcctcaaccggaataattttaacatccatatcttccaacctctgcaatgttccatgcaattcaactacactgattggccacaaagcaaaagcatctagctatgtttacagtaaggttactgagtatagtgacgacataccttattgacggtcgggttatgaatgatttcgttagt

SEQ ID NO: 47878 - DNA, 1252 bp, Arabidopsis thaliana
aaacactcattacaggtccatttgaggaaatcttaccttggatgagatattgccttggttcatttggccgtcgacatcatctttcataagctggtttgcagcaccgacctgcggtgataacataaaactcttgtggttgggaacatacacaaagctgaccatttgttgagcaaactacttacttgtttgaggaattcaaaccccacaaattctactctcccggtcacattcgacacattctgcctaacagcttccaaagttggtatttcatagtgtcttgggagaactccaagcaagtaaccaacaagaaaatgccctgattcatgctgcagacgtcgcagaaaatcaatttatatatatttgcccataaaggtacaccacaaaaagttctatttgatttggtctcattaccaaacaacatttgtgataaaatttcactttgcaacaatgttaagttctagttttatttgacaactaagagatcttcacctgaacaacagagaaccaatcttcttcaggtgaagttttaatttccatctctttggatgttctcactgaatcctacaaaaaaaataaaaaaaattaaggtacatgaaattacatgtgtttattggtaaaacactgcaaaaattgaaagtacctcttggacataaacagattcaatacttctggagacagaatcaatcaacgacctgagatcagttttgctactcatgtctaatttcttcggaagctaattaaaaaaaaaaaggaattagagatgatttattggcaaataagcattaagagagagatgcgagagaaaccaatttagcagagccaaaagcagataagcagccatgtttgctcttgagttgtttgacgagtgagagagcagtttcgtaattgcctcttaagagttctttatccactctttcaagtgatttccggcggcggtctaccggagatttagatccgagcaccatgacgcggctcgcttggagataagaagagttcatgttggtttagatattcgaatttataaaacgtgaagcattgtaactcaacaactggggatgtagctcaaatggtagagcgctcgctttgcatgcgagaggcacggggttcgatccccgcatctccaagtttttggacaaattttgtattttatatttcgttctaattagtaatcatcttctggaaattgtgtagaagaaaaagattaaaaaagcattgggattatgaattcgaaggcttttattagtgattttta

SEQ ID NO: 47879 - DNA, 2098 bp, Arabidopsis thaliana
tgtgttctcttggtgtcaagttttgtgtaaatctgtataaccaacctttttgaaaaaatgactcaaaagtttactttaaaatgtaagatgtcactgtgaagtgctcaggatcattgatttaagaccaactacgatactctcttttcagaggagaggaaaaacatataccacttaaccatattgcatgaattcataaacctacctcactcactctatatatgtgcaaaaaggattagatgtcttttttcagagaaagataggagccatgacaagcgtgatagtcgccaacattttgatgagaacgtgaatcgacggtcctgctgtgtccttgaaagggtctcccacacttgccattttcagaataacgatttctcattagaagacagttcgactaaactttataagtaaaaggaaatgaccaatgagaaaggaactaagaagaagggaagcacaaggaaaatgaaagattgcttacgtatcaccagttactgcagctttgtgggaatcacttcctttgcctcctagagctccagtctcaatgtatttctttgcattgtcccaagcacctcctgctgtatttaagaatagagccattaagataccacatactgtcgcaaacattagcattgcagctactactttagctccaagcaaaggttgtccagtgtagtatcccaagatccggaacacaaaacctgtggacatcaaatagagagcgttggttccttatgtctgtttctttctcgtttcacgggcttaaccaacatttttactgactcaccaactgcaatgggtgatattatagccaaagctcctggttttatcatttccctcaaagctgaagatgcgacaatggcgacacatcgaccataatctggcttctccttgtagtcctgtgacataaagttcaaaaagacacccgatgaaaaaaataaaaataaaagggaacggactccagcggaattacatttaccattatgccaggcctctcaatgaactgtcttcttacttcgttgacaacctcctgtgcagttcgaccaactgctgcacaagcccaagcgctaaacaggaatataagcatggcacctaataaccctccaatgaagacttctgggatcgcaatatcaacctgtttagatgtgaggacaagaatcaggatgagtatgcgagtggaatggaataagaggaaacagaatacaccaaagagtaaaaaatgtacctctttaaaagatacattagcaaacgctgaaacctcgtccatatacgcactaaaaagaaggaatgatgcaagggcagcagatccaatagcaaacccttttgttgttgcttttgtggtattcccaacagcatcaagaacatcagtgatctcacggacactttctggctgcaagacacgataagttttatagaagcttgaaaattcaaagatacaacataggcataattcgaaccactcatgactcatacctgctggctcatctcaacaatcccacctgcattatcagctatgggaccaaacatgtccattgtaagaacataagctgcagtgctcaacattcccattgtagctacagctgttccaaatagacctccagtggggtttcccttttcatctattagtcccgaggtattgcccagccaaaaagcagaaatgatagctacacttataaccaaaacaggaagagccgtggattccagacccaagctgaccccagcaattatattggttccatgaccatgtggagctagcaagagccaacgtccgaacaggctcatacttatagtcagtataatatctggatatccagacaaagacataggctgtgataatgccaactaagccacacatgaagaaattcaaccaagcagatggagcttgttctgtgtatagcagccagcgagtcgactacaaaacaggggcaatggtgtcagtgaattccattgaaattacagcactatcaagagcttcacttgcttagatgggcccttatgtgcatgtaaagtcaactatcgataaaactgacaatataacatcaaaaagctactgctcgacaaccacataatgaacaaaaataatcaatgacattaccgcgccaaa

SEQ ID NO: 47880 - DNA, 114 bp, Arabidopsis thaliana columbia
ttttgagtttcagcttgctttttatcgtactcgctcttttcttctcttaaatcgcaaataagacgctctgagaccgtgatttcttggtctagttctttaatgacttgctcattt

SEQ ID NO: 47881 - DNA, 766 bp, Arabidopsis thaliana columbia
ttttattaataagatattggtctagtgaaataaaattaagagtttagttctcttatgtttttggttcaaagttcaacttatttaatatggttgttttaaaattgaaggagattttgggaaaggcctggttaaaaaaataatatacaaaaatacattttattattacaaaagaattattaattaaacgaagatgtaaagtaactaataaagtacaacaaaatatagaacacgtaattataatttcaagttttactaacaagatttttttttaaaacttttaacattagtattccaacaaataaacagttcaaactatacaattattgaaacattgaggtggtataaatataacataagaaaaagaaaagtggagatgcggggtatcgatccccgtacctctcgcatgctaagcgagcgctctaccatctgagctacatccccatatgtgtactgattcaatttagttttatataaatcagatttataaaaaacaaattcaacgaaacatttattgccaagaaaaagagcgacgtaaaatttaatttgagacaaattggaaatttcattttctactcatatttcattaatctaaatatctaatatgtataattcaaaccgatttaccttagtaaagatataataattgaaaattctttaacttaaagtaggatcaacgactcacacgatcgcagtatatgattgaaaactcgagatgtgattaaactttattaatgatgaaaattataattttttaaaaaaatggtat

SEQ ID NO: 47882 - DNA, 600 bp, Arabidopsis thaliana
ctaataccagttattggtggcagttcgtattgtatgcatctcaaagaaattgacgccggagacatcttgtcgttcaaaaccattcttccatgcatcttataaagtatcaaagacaacagaaatacgaataagatatgtgcatgttgtattgcttgatttgtagcagtttaacaaccaaaggcttaacgtcaagatttgacagattatagactaattagtgtgtatatatagaagtgtcttttactacagtttcgatatagaggaaaagagagtaacagagagagagagagagagaaagcttctaagtttctcagtctcttaccattttgtttcgctctgtatctccacaacataattgcagcaaataccaagatcaagaaaatggaaaggctgacagtagtgcctacgataatcttccttcgactgcttccagctgagatattcaccagaaacagataaaaaaacgctaaatcatgctgctacaaaacattataaagaaagttgaatttcataatctcggaagaaatgtattttatccttacccaattctgaacttgcaagacgaatgaagagaactctccgctagacaaaaattgaacg

SEQ ID NO: 47883 - DNA, 503 bp, Arabidopsis thaliana columbia
ctctaaagatcatttgcgatgaccaacgaacagcgctgttctcgggtaatgaatggggcatccataccgaccagacaaataatgccatgcagataaaacgttccagttggttgcccttttggggaacaggataggcaagcgtgaaaccgcagcggcattggccaatatcaaggggaacacccgcaggtgtcagcatatcggcaagtatgtggctcaaataacccagcaccattccttgtagcgcatcagccggaatgaaccagccttccggaaccttaaggtaaaaggttgccagcatcgcaaataccgccagcagactgtgggtaaaaccacgatgcccaaaagcgcgtgcgatcggttttgatatccattttaatcgctgcccaagaaacgactttgggtgatcgatgtccggtaacaaacacgtcaggattgcggaagggacaatatgccaccagtctacctgtgccagcacgggcgtcactcggcatttttggcaaata

SEQ ID NO: 47884 - DNA, 912 bp, Arabidopsis thaliana columbia
ctggagttttttactttgcttatttagggaaaaaaagaagaagaagacagagatgggagcgagagagtggggtcgtaaactggaccatagtgggaagtggatcagtcttagtctgaatcattactcattaggtatatttggtcaggatagtgccacgatcaacatcatcttttcttttcttggaggagatattggaagggaacttggaaacaaagtaaacaataataaattaaccaatgagtacagctttacagcttccatgagtaccaatcacacaaacaaacaatttcatttgttcgttgtaaaacacaaactcaaatgagaaaaaaggtattgtgttgcaattgcaaaatggtaatgtaaaacaatttaaacagtattactattacgcatggcgggatcggtatcagtcaacgactaagcgttttatgtaatcgatatcataattcaaaattattcaactttaacataataaaagggattaacataataagttagccaatatggggatgtagctcatatggtagagcgctcgcttcgcatgcgagaggcacggggttcgattccccgcacctccacctactctaataataatcatgttataattttattattcattttttttttaatttaattaatacatagagtcctcatagaattaacatattcctatatttgttacttaaatgttgttcgtttctagaagttttaacactattcaattttataaactgctaattaataagtgctattaaaagagttcaaagacgttaatcaagataattaataccatagttttgttcccttccatttaaataggcaaggattttattgttgttcatcaatcaactactaaacatatattttgttatactaacaaagttttttttctttattttttctcaatatctc

SEQ ID NO: 47885 - DNA, 509 bp, Arabidopsis thaliana columbia
  unsure (1)..(509): unsure at all n locations
nnnnnnnnnnnnnnnnnnnnctaaagctgcggcccgattggtgccgagtatatgcacattaccagcaccgaagaaaaacgctggatccaacagcgtatcgagtctggtcgcgcgactttcaatagcgaagagaaaaaacgcttcttaagcgaactgaccgccgctgaaggtcttgaacgttacctcggcgcaaaattccctggcgcaaaacgcttctcgctggaaggcggtgacgcgttaatcccgatgcttaaagagatgatccgccacgctggcaacagcgcacccgcgaagtggttctcgggatggcgcaccgtggtcgtctgaacgtgctggtgaacgtgctgggtaaaaaaccgcaagacttgttcgacgagttcgccggtaaacataaagaacacctcggcacgggtgacgtgaaataccacatgggcttctcgtctgacttccagaccgatggcggcctggtgcacctggcgctggcgtttacccgtctcacttgagattgt

SEQ ID NO: 47886 - DNA, 113 bp, Arabidopsis thaliana columbia
ttttttttttgagatggagtcttgctctgtcccccaggctggagtgcaggggtgctatctcggctcactgcaagctctgcctcctgggttcacgccattctcttgcctcagcc

SEQ ID NO: 47887 - DNA, 1236 bp, Arabidopsis thaliana
ctctcgttaataaagttatatttctgaagaatgaagaggactagtatacaatacaaatgcttttttttttttgttaaagtgtacaaatgcaattatgcaacaacgtgttaaacatgtaaaaactcaaatggatgcgtacaaaacaaaaaaacaatcatctccgtttttttttggtcaaccaaattattttcgttccaactataaaaaagcacttatcaaaacaaatgtttccttaagaaaatctcaaatagatataacaagtattctggaagaaagaaaagagagagaaaatgtcgtccagtaaaatccaggtacgagggcagccacttcttagggttccggcaagaaaccaccgtatgacacacttggttgtttgcggcgtttccacaaaacggcaccacccgtgaaatcaatgcactcagcagtaatagtggtccatcgttggattcggtcccaacaagaaccgacaagaggcagtttcttcgtggtgacggtaacggtaaattcgggaggttcggtgggaagtttgtaccggagacattgatgtctcgcctgatagaacttgaagacgaatttaactttgttaggtgcgatcacgaatttcaggttcgtttttctcatatattgagcttattgcaaaaaaaaacataaacacaaaaccaaaagggcaagttcaaacaaaatggttacttaaatatccaatggatatatattttattttagattctttgcaaaaaaatcatctaactcatttatttttgcaactttacacatcacctttaataaatgcaagttaatcttatcacgtctaaaagaatctaaaatatgatccttatacgtatattataaacgtttttacggtcatatacattagaattttaaaattttgaaggtagagttgaactctttgtcgaagtggcttcgatttaacattatatgtcaatattttacaaaattgttggtaacaaaaatggtgaaaaagggttatactgcgtatgatattagattccgtagggttaatctaacatgtattagatgtcgaggataaagtcgcaaaaagagatgagttataagttttttgcagaaaacatttttttttgttttggaaataaaacataattgctttatttttaattataactaggaggagcttaccacagcgttaagagactacgtaggaagagaaacgcctctctacttcgccgaacgtctaaccgaacactacaagaacatagt

SEQ ID NO: 47888 - DNA, 708 bp, Arabidopsis thaliana
ccaaattcagaaatcggattgaaccaaacttaaattgacggtccggttagtcttcggctctacaaattaaaggcccaagtttctgctttaaaagaacgaaatagttaatgggctcaaaccatagaccaggtaagtcatgggcttggttagtccgggtcaacccggtagacccgattcctgaagaaaacctagtggaaggtttaaagttgtaaactttccgaccaaataaacaaaatcgttttccagcttcttccgtcgccactaaaccctgaggctaaacctagacgagtcaaagtgtaaaatcgttaaaccctaagagggagtgagagagagaagaatgaagtacaacaacgagaagaagaaaggaggaagctttaagagaggaggtaaaaagggttcgaatgaaagggatccattttttgaggaagagccgaagaaacggagaaaagtcagttacgatgacgacgatatcgagtctgtggactctgatgcggaagagaacggatttactggcggagatgaagatgggagaagagttgatggggaagtggaggatgaagatgagtttgctgatgagacggcgggagagaagcggaagagattggcggaggagatgctgaatagaaggagggaagcgatgaggagagagcgtgaggaagcggataatgatgatgatgatgatgaagatgacgatgagactattaagaa

SEQ ID NO: 47889 - DNA, 611 bp, Arabidopsis thaliana columbia
gagagataagtcaaacaacgttgagttttggtaaggctctttgagtgaaacaacaagttcggggattctaagatactcctttgtttcaacagcacattttatcgccttttcaaccgcttcaaaggacgagattgaccggaaaaacggaatgcagacatcaaaggaccgagaataagcaagaggttttcgcagatgcgtcaagcgaattgccatttcctattctcagagacctgatcaactataataaagtcattaacttggcatctgaaaaagcttctcctcctgtagtaaacctggaacgtaaacagaaagtaacacgtggaatcattcaacgctcttaactaatgtcgatgatgttcaattaaccccttaaaaggttcttattttagtggcaaaaatatattttctgcaaaccgggagtttggggaaatcatataaagtcatacctgaatgcgtttaagacaggttcaagctaatcccaggaggaataatccggtaatgggagagtgagctgggaagaacgagattttgcttcacagaggaatatcatcgaacgactggacggcaagatgtgaagactcaaatgaatagacgatgacttgaggtttagt

SEQ ID NO: 47890 - DNA, 614 bp, Arabidopsis thaliana columbia
cgtttagagacgaactttgttttgctttttacttaggataagcttttaatgctgtctttgggtatgtgaagggggaagactgaaaattttgtgtaaaggggtcaagatgagaccagctatacctcttgattatgctgtcttccaactctctccaaagcggtcaaggtattaaaatcagagagtgaattcttcatttttgtgttagttggttttttagatactcttcttgttgtttctttctggcagatgtgaattgtttgtatctactacgggaaatactgagaaacttgcttctggactggtgaaacatttgttgctcatttgaaagttgcagaagaacaggtttcccgggaagttcagtctatcaggctagaagttgaaagcaacaaaaatgctggaacctggtttacgaaagggaccctcgaaaggttatactctatcttgaacaaggggtttttgagtcttgtgaagcataggtcctggtaaatactctaatttctcttgtgcctgctggtttataggtttgtacgctttgttagtacccagaggttctggaattggttagcgctttggatgtggaaatgtctcagttggaggctgctcggaaaatatat

SEQ ID NO: 47891 - DNA, 1612 bp, Arabidopsis thaliana
cagtattgaatactatgttattactcacgtcatgaatgagacatcaatatcaaaatttcatttttgaaaaaaaaaatattttaaaaatacaatatttttgctattacaattttgagttcgaaagtataggtattggtgttatcgttttagctacttaggatttagcgatggatttatcattttatggtgcatcaaattgtcgaccatttcaaattcacatagcaattagaagatatccctcaactagtatgaaattttgacccacaagatcaaaatatcagaaacattatattctgaaagttccgatgatatttattttccaatttgtatgccaagataattatgtaaatagtttactgaaatgtaatgcaattatgttccaaaataacaaactagtacatctttttgatagctttttattgtaatagtaaagaaaatccaaatctttaggtattacaatgatagtaattgttgaaactcccctattatttttgattgacttaaaagggagtccaaccaaaagatattctagacaaagcctcaaaaaatagccaagatcaaatcacaaatcatacacatctcagttgagatgaaaaacaaaacaaatcacatatgaaaccggagaaaaaaaagacatatttatcatgtatgtatatatagtgttcatcttaatcgaagaattcccatttgaatcgcggagggaccggtttaaccgtttcagccgccttggccgtcgatgcggaatcaaacatttcccattttgaagctacaaccgccggagtacctgatgaggatgatgcattggaattcctaggctcctcctcctcttcctccacaaacgataacaaatcgcgttgctcaaatcgcgtttgcgtttgcggtttgtggcggacggacttgttgacttcaacttttttggcagagtttttgactttcaagaggtcgagtgcctcaacgtacttctgaactctttgcacctaccaaaatcaaatcatgaaataaacaaacttaaccaatcaaaattagagatttgaaatgtaatttagctaatctaattttatacctgcatcttcctcatcaatttgacatcaccatcagcaataatagcatcaagtctcaataactgattcatcaacatctctatcagattcacaagactcttctcttcaactttacctcctttattaatcaccgtctcaaacgccgacacctgaaaaatattcagaacattgaaatccaaagattccgactttgagaaacagagtaaaaaagctctgttttttttttttgaagtacctgtccggcgagtctgtcgacttcgaaactaatatcagagatagatttagaagctttttcaatggcggcgtttttcctttttgcaaggagacgtttctcctgagaaattggatcttctttaacaacaagctttgaccgatctttaactccacaaagatcaagaaacatctttgaatctctctctttgtctttgtacaaaaccttcatgtcttcatggtgaagtccacttgatcagacaacatcttcttcaactctcctgtttacaataatccaatttaagaaagaaaggaaaaaactaatcttttggttatatata

SEQ ID NO: 47892 - DNA, 774 bp, Arabidopsis thaliana columbia
atgattcaaagcttgcgaatctgccttcttcttccctgcaagccttcttggctttccttgtagaaacaaactctgtgaaaatcttgacttttctgagaccagctttgattgcagagacatcctccttctcaactgagtgagtttcagtaggctgttgtggcgatggagatgggagaggcaaagtcacaaccgcggtttgtgctgccgagtctgatgtttctggagtagttctaagctcaagcaggctcaatgatacctaaaggaacaagagattctcaaaggtcaaaaaaccaatatccagccaacaaagtagagaagtgtctaaagagagaagtaaccatacaaagagcaaaggatgtgtctcagaggccacacaagcagagagcgtaagtggtatgtttatatcgaattcttttttatcggtcacacacgcgtactcagcaagattcaaaaatgccgttccaacaacaggagctttattcttctgcccttgcttcattccctagaaacaaaatcaaatatcaatcttctttatctttgaggatgacactaacaaacagaaccaattacctatactctcaacctctacaatagaaggaatcttatcaaggtctagtttaaagtctttagaatcagctgaatcaaacaggttgagacattaattggtatcaaaatcttacaaccaataaattcaaagagtctcatgatttgatgattaccagctagggtttcatctacaacctaattcaccatttccaaagtttcaacatttga

SEQ ID NO: 47893 - DNA, 523 bp, Arabidopsis thaliana columbia
ctagaggatcccctaactttcacacctccagtcaaatcgtctttattatcagaaggccacgcacagattaaagtgacatcgtcgttcaaatcccctacactccaaacggcgaagtaccaacatggccaacactgagaagcaacctccactaccttctaacatatcatcaaatacaagagagtgatgcaacaagaatgacgtcaatgttcctgcactttctcaaggccgtgcacatatcaacacaaagtaaaagagataaggcgattcttatatacttcaaggttacagattacaactttcaagctgattctaggattgacaccgacgtactcattgcccatctcgaaactgccaaaagagtaccaactacatcggaggaaaatgaagattgcgccatttgtctacaaacattcaaaggacgagatgatatcaacaatctagcatgtaaccacatctaccaccatgactgtatagtcacttggttatatgcaagaaaaattgtcaatatgtaggcaaccgaggt

SEQ ID NO: 47894 - DNA, 529 bp, Arabidopsis thaliana columbia
gtgaacattcgtcaccaatagattcagttcccgaagcatcctcaccagcttcggaagcatcatcaccatcctcatcgtcagcgtcctcatcattttctccttcagcttcaactgaatgttctgttttcgcagtagccttcaactcacgatcttcgtaaacaacaaagttgtcttcggaatcaccaacaggtgataattcaccttcctccttctcaattttggatggaccacccgattcatcataattactgttggctttagaagtatctgactgcagaccatttcctaagactataattcggcctatatcaactccctagagaaaaggtcaggaacagtgagaatggtcagaagagtccataaaaagcagaacagacaaataagaacatataattaaaatgtgaaactgaatacagtacctgcgtatgttgaatgctatcaactttatctatagcttcacttggtttggataatatgccccgtgaaccttgaaaataaaagtaaagcaccgacatgttaaggtaggtat

SEQ ID NO: 47895 - DNA, 565 bp, Arabidopsis thaliana columbia
gtgttatgggcaatacggtgcaaaattatccaaatgttaaagaaacttgtaatagtttttgtggacatcacagatatgtagatactttaagttaagcttattatgacaaattaatactttaacatatagagaaatagatggaacattatctacctttatagttgtccgaatttcttgttcctcttttatttttcacactctttcagtccatcgtccgaccgagattttgtcttctcgtgagttcaaatccaaatccatggggaagatccttgtggaaatctgtatgatatcagctcgagggctccgtgtgggaattggaatcggatcctctctactgaaacaccaatggtacgccgttggttggcttgatccagaagacaaatactgcaccacaatcgatgcttcaagagcagacaatcctgtctggagaacaaagtttgctactttgctcgatgattccacgattcaggattcgaagttggctttgcaagtcgaggtttatagcagagaacccttgttcttaaggaagaggcttcatggctctgctactgtttctttgaaggag

SEQ ID NO: 47896 - DNA, 535 bp, Arabidopsis thaliana columbia
gccatcttcttatactttgttttgtttagggtgtttgtctcttggcataatgcttgagacttttagcctgccttgtccttcatagctgaagaggagcctagctaccttttgtttctcttcgttgacttgaataaaacagtttgattgaataacagttattcattttcatgtcatgatggtagtggatataagacaaaacaaatacatagaataattattttaatgtttcagaggagaaatcctacttggcttgtgccagactcataacccaatcaaaacttcgtattaccaaaataagtgtagttctaaattttattctggtttaggctgtagttataaattactcattttagtttgtgaatataaaattactttctgcaaaagaaaatattctcatctttcgacgaaaagccaattattcgaatgttctcacgttggtctgtagctgtaaactttatagtttatataataaggtgttctactgttcttatataatttgcaagaacaaataatattaaatgcaaataaaaaatag

SEQ ID NO: 47897 - DNA, 526 bp, Arabidopsis thaliana columbia
cttaatattttttttttttggggggcaaacgaaattttcttaatattttataatagagaaagacacccaattaaattgtccattgaggatgctctaaagagtcctctagtgaaggtgctcttatgactccattagtcatacactaaccgtatgcaaagaaaacctatcacttggtggtagaatataattaagtattattaacccaaagcacaccaaaaaaaaaatgtaattaaaatctgtaactaaaatgaattagtcagtcaaaaatatcataactacgaaataaatgtacactaaacactatcaaacgtcccttagtttagattttggttaataaagctatgcgtttacaggcttctaagttttaataatgttggtgcaaacgtggttgaactaattctgaaaacaatttttagcctaaatggatctaacatgaaaatctacatttttctgtttatatggatcctaattctgtgtagaaagggcttcaaacttttggcccaaaactttatatgcatgtatgata

SEQ ID NO: 47898 - DNA, 512 bp, Arabidopsis thaliana columbia
gacactttccttacaccgtcgaaagcaccatcatcccataaagttcctgcctcactaccagctccttctagcttttgggattgtgttgcaggagtcaaaggggtggtgcctgatggagctaaataagctccaatagcattaacatactcaccagctcgtccgtggaacccagtgatcttgtaaccttccttcttgaattcaaactttgtgccagatacaatcccaaacggtccagctgttttgttcttgctagtcttgaaaatcagcgttgtcactacagtatcaactccaaagtttttttcgtagtatccttccacggatgttatatattcgtctgattcaagctcgaactacatagataaatgcataatgaatagtgaaattagttgaaaagggaaaccaataaaaatagttggtcttaagcgtgcatacctcttcgaatcctagcaatgttctcgttccacgttcatctccaaaaacaacctgagaaccatttttgtatcaaacttgac

SEQ ID NO: 47899 - DNA, 133 bp, Arabidopsis thaliana columbia
ctctagtaacggccgccagcgtcgcgactcgagagcagacgcgcttctttgcttccactcgagatgaatgcctgtctccccgggtgcgtctggaatgcaaccccgagatccctgtcgcccctggagaggaaca

SEQ ID NO: 47900 - DNA, 510 bp, Arabidopsis thaliana columbia
caggtttcttagaactcacttccattggtctgttttcatcacaaatagaaacaccaaagattaacaaagtaaccaacaactgaaagaaagacaaaaaccaagaaccagagaaaacaatgttgtgtatacctgtttttgttagcacgagcacgacctgttttcttcacttgatttggtttccatggaacagctttagacccatcagctcgtaatttatgaatctcctcaaaggttaactctttttctgtttcttcttcctaattccacattcaaaaacagatgcttcaacaaacaataataatgtatttaagttccatacctattctaaagctactaacctcatctgaagaagacacagatgaacacgagagatcttcatcttcttcactatcctcaaaaactatcttacttgagctcccttcaaacttaccagctcctttcatgtcgacacgtgaacctaatcaataaagatcacacctttaagatgcaaatttcccaacataaacagag

SEQ ID NO: 47901 - DNA, 512 bp, Arabidopsis thaliana columbia
ctgtgacatcccgagaaccctaaaccaatggaagaatttatcatttataagctttcaaagaacagatatcacaaagaacaagaaaagtaccatagtaagttccatcaacttcaatcacatcaatctgttcaaaaacaaaacacaaaattagaattatgaaccgaagaaatttgaaatcagaattgaataaccgagttgcttaaccggaacttgaagaccgatttgacggatactatccataagctctttcactttgttctgatcgttggatctggttcgcatcaacggtcttcgtatcttctccaacggtaattccacaatcatcggtcctacaccgccgctagatcctccgatcaccggcggcgaaccttgaaatcaaaaatcaatcgcagagactcagcttcaatttcaagcttaaatttcagattactgtgcaagtattagagcttaagagcgttacagttggatgaagaagctgaaacagagaagcgtctcaagctaattggtaatct

SEQ ID NO: 47902 - DNA, 434 bp, Arabidopsis thaliana columbia
taaaacgagattttaatcatattaaattctgaaaattaaaaaacaggaaaaatcatatctttgtagcaacttcattccttagcagctttgaacactctcctcaaggtctaaatgtccgagtaagtggaatgttactgcttcaagacgagtatctcgattggtacggacttgagagaacggtttctgtattcttcggtttgtggaagttgcagactgaaactaactctgtagctttcatactaagaaatggtggacgagatttcagtcacacgcatttgactggttagtcttataagctccttagtctcttcatctaactctacattaaccgttgccattcgctcagcaactatgagtgccaagtcacctgctttagcgtatgctccgtaacaaggaattgtagagctgagtgtcacataaccagccttttggag

SEQ ID NO: 47903 - DNA, 540 bp, Arabidopsis thaliana columbia
ccgaaccacatttgaattacacattaaaccggaaccgctaatcaatttttatatgtatgcaaaaagcaagcgacgacgtattgccaaaacaagatttggctaaccgatttgtcagagttaaacaaccaaaacgtttacaaactccatcaaagagcattaagtcactgagtttttctctcaagtacatagacacacagcttcaaattgtacgttcttttccttcctattttctttctcctatggttttagttttctacaggagtcaccaacttcttcttccaaaaactttaatcgcctgttcagctgcatctagctcagtgaatcgtctctctactcgggatggaagactagaccggcacacgcttgccccagtacttgtcaaagaactacacatcacataaataaaagtgtcaagtaatcgcattagccaacaattggcagactatgcaacagagttaatattaaagttaaggcaaactgagaaaagacctagcaactcaagatcatcagaaacaaagagagaattatcaactgtaattt

SEQ ID NO: 47904 - DNA, 572 bp, Arabidopsis thaliana columbia
acagagagattctaaaaatctttcaatcccacagattcggatttgtactccatactcatggaagcttcgatttcgtttctggggtcaacaaaacccaatatttccttgtttaacccttcttcaaacgtccttcctcgtagagatttccctcttcctgctttgaaattgaagaaagtttcagtgctgcctcgaatcttgcaccagaaacgactcatcagagctcagtgctctgatggattcaaaccagaggaagacgatgggtttgtcctagaagacgttcctcacttgaccaaatttctccctgatttaccggtattcgattcttcgctgtttctgtcatgtgttaatatctttgtcaagttatgagtttttccatctaaaagtattaacttttctgttgggttgatgttacttccctaattgatgattttgtttctgacatcacagtcatatccaaatccattgaaagaaagccaagcatatgccattgttaagtaagttcaaatttctacatggcaaagtcactaaactcataaatacctttgagggttgtaatgtattgtcaaatggtt

SEQ ID NO: 47905 - DNA, 578 bp, Arabidopsis thaliana columbia
taaagtgaaaactttataaaaaatatcaaaataataatttaccgtgtgtattaatttatagaatttttactgtatatatcaaattatctctatcgaagtttttatttcttacaaatatttctgttatttcttaaaaaatttaattttttccaaaaaattattaaatagagatttgttttggattaatgaataaacaatttatggtagttgaccgttaattttgtggctgaggcttttcttacccacgatcttttcacctgtgaataatctgccacctgtcaccgagacttatttaacagttggcagatttttgtggttcattcaaaatgggggtgtaatcgtctattgaaaagattaaggtactttataagagaagtaaattatgtaggtgtgaaaacaagacatgatttagtacaaggactattttgtaaaacaagtaaagcggtgtttcgaattttctggcgagagaagaagagaaataagggcaaaggagaaattaaaaaaccagagagattaaaatggaagacgatgaagcgacgaaacagcgaggaatacttgaagcagaagaagaaattttc

SEQ ID NO: 47906 - DNA, 557 bp, Arabidopsis thaliana columbia
gtttaagtcgcataagccgtttaaataaagttttgtatggtagaaaaatagtgtaagatggaataagagctacctgattcttctgtaattcctacatattgcctgcaaaacacgagaagagatacactctaaaactaacagagatgaatgtaacatatgagcagatgtctttgtggtcggtcattaccggcttccttagtaacttttcctctcttctttctatctttgcaacttcagcttcaagctccaccatatagcctacaaagcaaaacaagagtactaaaaacattacatgaacttctttaaccactgagccacctcaggtacattccaatggtcggccatgaacatatcacatataaattaaattcagttcactaggaaacttactacactttgagcgactaaaccaggtcgacaaaaaaatttcggagctggttgaacccaaataaaatgcattaacctaacaagatataaatgacagtgcgagagaacccgagtttgattccggaatgccacatggcagtttcaaacgcaattgttggatcaaatgcata

SEQ ID NO: 47907 - DNA, 753 bp, Arabidopsis thaliana
  unsure (1)..(753): unsure at all n locations
ttttatttggtaaccaggctgattctagcaaggttatggatacattgctgtcaatgggaaagacattgggcacccaacagcagagcggttcatcggtaatgtcgcttggacaaaggaaagagatgatcatgtctatggcgaagtgggcacaaacgattggtcaatttgttgtgagtgctgcagcaaagagcggaaacaaaattgatatctcatctttaggaattgatggcattgatgctagtgctgccggagctggagattctactgccagtggtggagtttctgccaccggaactggaagttatggcgcgggactggaggttctagcgcttctggctcagataccgcagctggaggcactaccgcaactggaggcactaccgcagctggaggctctacggccgctggaggcactactgctagtggtgctggtaccgcaggctatggtgccacagctggaggcgctaccgctagtggcgctggtactgcagctggaggcactaccgctagtgacgctggtaccgcagctggaacgtacgctagtggcgctggtaccgcagctggaggcacaaccgcagctggggctggtgccgcagctggggctggtgccgcagctggggctggtgccgcagctggaggcactaccgccgctgcgtgntacagtggaagctatggcagtagtggaggaagtcnttcgaacaccaatggtggaactagtagttgcggcacaagtgcgtggtctaatggtggtgg

SEQ ID NO: 47908 - DNA, 576 bp, Arabidopsis thaliana columbia
taaccaaaccaaattaaaagatatttgtaatctgattgattttataagagaaaatctcttccaatgaattgcatacaataataacaaaattaactccttttttggaaaataatatttgggatatgattctctcaatggctttgtgagaaggacacgcaaagtcaacatattttttcttaaaataaaataagatattaagatatatgctgaccataaaaaatggaaagaaaattaacaagaaatatagaaacgaatgctaaacaagggaaaatcgaagaaagtgaatcaataaaagaagatgtatatacataaaagtaaaactgttgtccataacattactgtaacgtgtcggtgtttttttatggaaaagaaaattaacatttattagatggattctctcctatttatataagagtctcaatgacttcgcaaaagtagaaaacgcaaacaagtctaattgtcgcataagtcataagaaagttgatgacgatggcttgtaagaatttggttgccattctcataattgtctctctctttggtcttcccaatgtaagaatttgtgcatgtttttttttt

SEQ ID NO: 47909 - DNA, 518 bp, Arabidopsis thaliana columbia
ctagaggatcccctcagtagattacaaatcccgatcaaaataattaagtatgctatattattgttgtaaatgtataatctgtagatattaactaacacttaggatgaggaacacgacaagcaattagaagtctgggcaagagcacagggttcttgataaaatacttgcaggcacatggttgtggctttaccattcttccacaacagtaactcggcaatttggtgcctttatcaatggcaactaaacaatttgcaatctcatgcatgcatctgcccatcatctcatcaccattaactttgatcggagccgccgacaagagtatgacgacgaaggcaatgagcatcaatggaacaatcttcatgtctaattattttagtaactagtgaacaaaaagataaataattttgcagaaaattaaactggttcatgccttctttgttttgttctaggtaaattttaaataggaattggaagcactgcttgaacaattgagtttttcagaagtcaccatcataaaa

SEQ ID NO: 47910 - DNA, 919 bp, Arabidopsis thaliana columbia
attttggaagttcatatgaatctagtagaaacttaggatgtcatgtaaaatcgttatcaagttctccttcttctctacactcgtatttaactttttctttacagacaaatacttgcagttcctcaggtatcattattatgaataatttgatgtaatctttaacaaacaaaaaggaagtgacgaaaagttagagcgggaagagagaattaaggagaaagaaacttaaaatacccattgaccattcgttgttaattacatgatacatattacatgattatgtttctaaaacatttctaatccgaatgttggtttattatatcttagcaaaaagcagacttcctcagctctctataccataagagttgggtgatatgaggctctctacgtatgtatttgcctcgaacccgtcactgagcttaaccccacaaattcctagattactcgatgcattggtttcaaagttgtacaacaccaggtctccatcaagctccagaagaacctcttcatcgttcttagtcgaacagagcggtttcatcgacctatacaacaagttgattcgaattctgctccaggatttagcttcaccgtactcactcatcacccatatatcatcatgcacatcgtagcaactattgaccacacagagacgtccattgagacttccgaccacaaagttgctaaacctatgggaacaatcttcagcttcatcaggcactggcatctctcgaaactcctcggtttgaatatcaaatgctacaaccactctttggttgtgcctactctctgtgaacacccagtgaatcgcaccgttgaaatgcacaccggacgtgtaggagccatcgttgtgctcataattcaaattgcagatccgtctccatgagtcagccttcaaggaatagacactagcatcgagaatatc

SEQ ID NO: 47911 - DNA, 590 bp, Arabidopsis thaliana columbia
tgaggtcttgatgtgtacagaacaatggatgaaggctgactattatattagtgaaaaagttgtggaaaactatgcaaagatggttgaggatattgaagattcggatgatctggagaaaggtataagtgttggcacttgtccgtttcttactttcttttcaaagtctaataattttatgttttcttcaatgtatagagtttgacaatttgtgtaagagactagagacttaaccaagacaagtcatccactcatgaactcaggtacgtgattcagattcttcagtttttgtgacatgtatttgagttttactaattaactatgattaagtttaaaattgttgtgacatgtctgactttatcattcaattttgtagacaagaaaaaaaggtatggtaaagaagttctcaacatggtaaagaactaaagattaaagaagttctcaaacttttcaactctctgttgagttttaactctctattttctctagaaagcctttttaatttgagtttgatttctcgtttgtactttcactctcttttggatttgagtttaactctagtttgtactttttaattgttctattgtattttg

SEQ ID NO: 47912 - DNA, 545 bp, Arabidopsis thaliana columbia
tcaagatctgaagcttcctcctcagttaaagggtggtccaggtccgggactggctctgttcctatgaacaagaatcctcagatgcctaataatcctaatcagaaggctgtgaagttcaatgttcctgatgatgatgatgaggaagattttagtgatgaattcgatgatgagtttgatgaagatgacgacgagtttgatgatgatttggaagatgatgagtttgacgaccacccacctccgcctaacaaaatgaagcctatgatgggtggtggtaacatgatcatgcctaataacatgatgcctaacatgatgatgcctaacgctcaacaaatgttaaacgctcataagaatggtggtggtcctggacccgccggaggtaaaattgagggtaaaggtatgccttttccggttcaaatgggcggcggtggtggaggtccggtggtaagaagggaggtccggtggaggcgggggtaatatggggaatcagaaccaaggaggaggaggcaagaacggtggaaaaggcggtggtggacatccgttagatg

SEQ ID NO: 47913 - DNA, 112 bp, Arabidopsis thaliana columbia
taatttgagtaaatattcgcgacgtctacttgaaccattctggatcaaaattccatcttgaataagctcgttaaaatccatcagtgcgacgggtgataatcccgtcaaaagt

SEQ ID NO: 47914 - DNA, 520 bp, Arabidopsis thaliana columbia
agccttatccgccgtataattcgcagtctccttcgccttctccgctgtcttatctttagcttctactgccttatccaccgcatagtctttgtactcaccaatcttctccgccgtcttatcctttgcttccaccgccttatccgcagtataattagcagtctccttcgccttctctgcagttgtgtccttagcctctttagctttatcaaccgtatagtctttatactcacccaccttctccgcagtataatcagcggtttccttagctttctcgacggttgcgtcctttgctccaaccgctttctctgaagctatctgagctccttctttggtagactcagccgcttcgtgggtttttcaactacagcgtctctcgcatgctcatacgttccttggacagccctgaacactgatcctatcacacctgggcctatcttgctccggtggatgttcagttgttctctccgtcaccttatacattgtgacatcagcaccaccggatttgttaatgtcatgcaag

SEQ ID NO: 47915 - DNA, 592 bp, Arabidopsis thaliana columbia
agaatcatcatgctcctcccaaggcgactcttccgggtctgaaaattccaaatataatcacatatttttgctcgtaactatttgtttttgtctttatcatcttgtcctttttgacaatattcatatcaccatgttggtccaccactatcaccacctaggatgattccgctccatagctcattgcttgaaccaccttctctcttcttagtaccatcatcgggtttcccatggggacgttgttgacgggcttcatgatctccataaggatacatcatcttacttccttcctcattaagaacgaagtgatcatgattaccaatctcttcctcgttcctgtctaatgaaaacccaagattctttttggggtgctcatgatcatactcttgacgagactgaatcattcccataggagcttggaaaagacagttctgccctcctgtcacaacttgctcactgaaatgaccgtaatgcccttgagctcgcttgtcttgcataggggaggagaaggataggctgaggtcattattgttgtgatgcgtcttgctacggtttgatgatgaagctgatgatgtgaagacgacaggcgggttga

SEQ ID NO: 47916 - DNA, 633 bp, Arabidopsis thaliana columbia
agaggatccccagcctgagcctcacttcctcttcttctcatcacaactacctcatcatcccgaccccgatcataatctatcactctttttggtaagatccaaactctttttttcatgttttaaacctcatgcatgatccatctaggcatctagcaaggctactgagtcctaactgattaatggtcttctttttctctccgtttaggccttccagactttagagccgatcctaaatttttgtctagtatacactaccaccaaaatattattgaataccaaaaatcaagtacaaggaaaagttattagttttagacaaaaataagtttacatacgtacatacactgagacacctatatttttttctcaagcaatagactgatgatatttattgttcatagtggaagatcacacaaatcaatttttcagccatttacttcacattgatcaacattatttcagattaagaaatgactcccacagtagttaattaggaggatgacttaaagcgaaaaaaacgtttaggggaatagagacggaagaggttgaaggcggagatggaagagaggaggacgatgagagctgccgcaatgtagtttaagatgatggcacttcgatctgaaaacagaccttgtg

SEQ ID NO: 47917 - DNA, 637 bp, Arabidopsis thaliana columbia
gactcggactcatcccaccatgatcaagaagacacttgacatcattatactgtttccaaagattagtataccggcttttcaaaacgtctttatcatactgtgacccgaatttggaattgaaaacagtaagcatctcgttccaagcttgcttattgaaagtgtgaccggttctgtttcctctgtgtaaatgctctaacataagatctataaagaagcgttccattgttggagtccaatacgttcttgttcgatcattgcaagtggtttggttactcatcttctaagtgagaaacacacaacgaagaagacgatgagagtaaggaagaaacagagtaccgttagttagctgttacagttgcacgcggcggagagagggagagagattgggcggagtttggaagagagagtaaacctaatcctgaattacgattcacgacatcttctgtttggctgcactgtttcagtgttttgtctctctctctctctgtttttttttttttatattatgggccttttgtattattgggtgagccttttaacttattagggccttatcggatccattataaacatatattttttaattaaaaaataaaatgaaacttataaatgaaattacatatttacgaataaataa

SEQ ID NO: 47918 - DNA, 543 bp, Arabidopsis thaliana columbia
taaaatgaggtttgtaatatagttttaacgtgtaacaagccaatgaagaagaagaagaagaaggtagagagattgacattcacaaaggaaagaagatcaccgtaaaagtcagccgttcgcctcctgcaaaaggctggatttgttgcaatgattaactaaaaggagctatgtgaacattttcataagatcccatccttcaatttctatgaagataatatcgaccaagatcaaacttcaaagcttgaaattagaaacgtgtatttgctatatctcaaccactaatttaaggggctttcggcccattacacgcatgggaagattcaattatgttgattttgtaagttttggggctaaagtgtaaattattgaaacttgtaggcttgatttcattattccaagtttccactttttctcctccgccgtagccggtgcttcttcttcgtgaaaatctttcgtctgagattttttctttactagttgaataaaattgaagatttcgaagactacccaaaaccgcgttttacaaaaagccagattcttttt

SEQ ID NO: 47919 - DNA, 492 bp, Arabidopsis thaliana columbia
tgtgaaagaaaacgaatgtaaccttattataagagaataaaagtgcttttgtatagtttagaatttcgttgtttagaatcagaattaaagtggataattcgttgaatataggagaaaaagaacaagtctttatgatcatcacaatcaaaagaaactactaagaaacaaactaaacaagattgaatttgaaacctacttaacatgtctctctctctctatttatctaaaaccaaagctaaatttaagagaaatagtaaaggagaagaagatgagagagtaagagagctcaatctactttatagagataaatctgatggagagatgtgtcaaaaggaacagagaagcaaacccggtcaaatcttgacccatgaaccatctgtttattgaggactgttgccaggccagagattctggtacatctgcataggaatttggtgaagcggttgaggtgtagagtttccaaatatcccatgattgttgctgttgttgttg

SEQ ID NO: 47920 - DNA, 455 bp, Arabidopsis thaliana columbia
ttgtgatacaacgaaaggcaccggatggtggaacgcatcacgcatcatgcatcctcgatcccttttcaaagtggtatgtaagagatcattatttcaacataacatacatttgctatgatgacgcattttagtcaaattagttgtttgtccaatcatattaataagggtcaacagatatttatacgaactgtaattaaaatgataaaatccaaagcgacaagtttgctactaccaaatgtgtgtttaatatatataactcagacacattgaatttgagaaaatgagtatacggttgcacaaaagaagaagaagaagaggagtataccatcaaaaggttgtacgtaatacaattccgaatccctaaaaagatatataataaggtggagagcgagtgatctgagattgatgggtgtgtatatgtgtgcatatcagaagttaaaaatgtatttatatta

SEQ ID NO: 47921 - DNA, 594 bp, Arabidopsis thaliana columbia
tcttactggtttagttgggctttttcttgatggcaacaattttactgggagtcttgaagagggtttattgaagtcaaagaatcttactcttttagacatatcagataataggttttcgggcatgcttccactttggattggtaggatatcaaggctttcctacctatacatgagtggtaatcagctaaaaggtcctttcccttttctacgacagagtccttgggttgaggttatggacatctcacacaatagcttctctggttcgataccaaggaatgtgaattttccatctctcagagaactaagactacaaaacaatgagtttacgggtttagttccgggaaatttattcaaggctgcgggattagaagtgcttgatttgcggaacaacaatttttctggaaagatactgaacactattgaccagacatctaagttacgtattcttcttctacggaataacagctttcaaacttatatccctgggaaaatatgtcagctaagtgaagttggtctgttagacttgtctcacaatcaattcagaggcccatacgatcatgtttcagtaaaatgtcttttggtgcagacagaatg

SEQ ID NO: 47922 - DNA, 582 bp, Arabidopsis thaliana columbia
tgcacctactagtgatagcgagatcttcagaccacaaaggaaacgctttcgtggtctgaagtgtgactatggagtctctccatccattaaggatgcaagaattgaagaaaacttcaagcttgtacaccaagttacctttctcaacctcctctgacatctgaagatactctgctgcaacatctcgctgctacgatgttatacgcgctgatagttatcgttattccgtagcagaatttggcacagagctcaaaggcctccactcctcctggaaactctggaagttggatgatggattctggagattcagagcacattctttgaagcctcaagcattttgagagcagtggaaactacagaacaagaagatgaccattcaaataaactctaaaactgaagaaaaaaaaatcatttccacagtacaagacagggtttagtaccttgtgaagaagatatctgcttcctgacacttcaatagtaaaatcactggaaacttcagaggacacacatctgcaacaagcaaacaatttttagcctttttttactcgacatttatggccaaagattttactacttttaagaaat

SEQ ID NO: 47923 - DNA, 1863 bp, Arabidopsis thaliana columbia
agaggatccccttatcatacatcacctggatgatatcaacacaacatcaaataacaaatcttgatgataactaactaagaaataatagaagaaggagatgttatgaataaaaacctgaactttttcaacagcaccgtgttcttcaacaagtttagtgagctgctcattggtcaccgtcctgggtatgttaccgatatacacacgcctggcagcttctgaactagggtccaaagcggcgggtttttcttccgtctccgttacagcataaggaatgaatctcgttctagagctccgggagaaagttccagcgagagaaggaaagggtttcgaggagaatacattgacccgtgtatgcaaaggagtgaaggattcggactggaatgagaagattgtaggtttgattgaaacaacatttgttaggaaagtcgccattgtagcaggagagtgtaggtgtcgataaggaagaagttgcgagtgtcgtcaacattatccattagccgtcctcacttctaacctgtgtggataattgggccttattaaggcctataatttgggcctagaaacattacccatttacccgtctctcacgccgcagacttaaacttaaatgggttgatatacacttaggtacttgttcgggttacgcctgaccactgttttggccagtgacaacatcactacaggccactgttcatcttcatcattgatggaagatgaacataaatgaagtatgtgatgatcattaatggttgatcgaaattgatgtatccactccatgattcttcgttgttagtcgagttcaatctagtgtccctctaaagtctagactctagagacacaagaagccaagtaaaagatttttgtatagagcacaaaaaaatagtaaggctgcaaggttaggtataagcgtgaactgtgagcttattggagttactagaaaatcaatgacgtttttgtggtataaaattacacccgcagaaaagtgaggggaaaagaaaaaagaaaaaagccagacatgcctggaagcgggacttacccaaatcgttgtgacataatgggaagaaaaacaaagcttaacgtacaaaagcgttgttgtcatgtaatgaaatcagcaagtggtttatcgacttccagagacaaaaaccaacttcactacttagaatcgtgcactttctttgagcaccattttccttcaagatcctactgtttcttattttttggctttttgcttcttcttatccaaagatgttaaaccagcacctaatcctgcaggagccaggttttctgttttcccattttcagaggattctttcttctcttgtacctttgcctccccgttttctccacctttctcagacgaaactgtggcggtattgatcatgttttggagctgagagagcggtggcatggcttgaactggaacaccaccctgggggcgaaccagtagcccctttgcagctgctttcttcctaacttcagctgcagcacgagctgctctttcatcaaaacctctgccccgtggttgagtctccccaaggacagcagagttcagtgcatttgtcctcccagtagcagctgcgttttggaacgcatgtatcaggtctggatgtgcctattgtataccaatcaggaaaacgatttcattattatttcaactctacaacatcaaagatagaggagttattccttttcagcaaaatatgccgaaatctaaagctgcaagtatacctttaggagatcgatagccttttgcgtgttggctgcattagctgcctgtcctttctgcttttgtgcagtcatctgattcaaaacccaaccagaaaatttgagaaatcaaacaaaatgtatactagataaatgagg

SEQ ID NO: 47924 - DNA, 1557 bp, Arabidopsis thaliana
agatggccatcatgttgtatttcagatttttatctctattatgcaattattaaacaacacaactggttaattccttttaggcttagagatcagaagctcagggcatatagcactaagccagaacaggacacgaacccacgacggctctgccacaaaggttttgcctctgcagattccgttaactaccgctttggcgcattccgctgctgactcgatggtcacaacttgcgaccagtcttgtttctgcaaaagagacttcagtcataaaacttggacagactaaaatgaaaaatgatgatagtaaaatacctcagctaaaaggtccggattagtatttccgttttcgattagaccaggaaacacgattgtcacaccaacttctggatgaagctcgatcctaagagtctcgtagaagtttatcatagctgctttgcttgcctgaaacaaatgttacattcattatgttaatatgttacgcttggttaatttagagaacaagagaaagaaaaagaagaagaagcatttacagcatatatgctcatccttggtactccagaccatccagcaggtgatgcaaccgctatgatctttccttttgttttcttgagatgcggtatagcgaaatgtgtcgcgtaaaccggtccccaaaagttagtgttctgcaaattttgccaaggttcatatattgtaaaaaagacttcactatgtattaaatctaaaaatgtataccacaatgggaagaacatccgaaatttcagaatagtcctcgaaaaatttagcctccgcaattccagcattgttcaccaagtgatccactgatgtaaattttgttatattttttatgttctttaagcaagtagtaatattagttattcgaataatagtgactaactcacatcttccaaaccgagagatggtttcttgaacaaaacgtttacagtctttgatgactgagacatcaccgcgtaccacagcaacgtctggtgaaccaagcttcctgcaccggtcagccaccacctggagacgatcctctctccgagctactagagtcaagtatgctcctctacgagcatactcatacgctaggtgctacaccattaaatcaacttcaaattgcttttgttttttaccaaataactaaccaatttataaaaaatagaccaagcttttctaggattacaaacaaactaacctcgccaattcctgaggaagatccggtgatgatgacgacttttccgttgactttctcggactctttgcatccccttatgaactggaggagcttgaagaatattgaaaatggcatgaacactaaaagaaacgaaaccgtgacaataggaagaaggatgttaaagatcttgttgtttaaatccatatccttgactttgtgattctgcttcaccagaggctaagctacaatttatatactcttgagctttcttctgttcagatgtcactgtcatagactttagtatttaagattaaggataagagaatctccaaatcattatttggtatcttttgtgtttgcctcatccacttatgtttttacaaata

SEQ ID NO: 47925 - DNA, 599 bp, Arabidopsis thaliana columbia
aggtaaataaatctgtctcttcaaattgttcaagtggttctgtaccaaacaaagagattttgagaaaacagagttccctgtttgtttgtggtgctaaataaaaggttgatagtgtgaacaaacatgggactctattggaagtagtacaagtgctcactgatatgaatcttgtgatcaaggaaagcttacatctcttccgatggaggttggttcatggacgttttcaaagtcatcgaccaagatggcaataagatcagagacactcaagtccttgactatatccaaaaggtttctaatgtatttcatcactttttttctttcattttcaacaggtttttttctttgtgtaaaacgtttgttgaattcattgcgcagaggatagagagcaacgcgtgggtggttcattccacctttgagaagctcagttggtgtaatgcccactgacgaatacacatccattgagctcgctggaactgacagacccggtctcttgtctgaagtatctgctgttctcacagaccttcactgcaacgttgtgaacgctgagatatggcgcacaacaccagagctgcagcggttattcatgtcacggacaattc

SEQ ID NO: 47926 - DNA, 400 bp, Arabidopsis thaliana columbia
ggcctccaccaaaagtgttgtgctcatggccctactgtaagtgagatctaggcaagtggccatcttctgctgtagtcgatcattcagacctctcatgaaacaattcttctttttcatgtccgtgtcaacttgctcgatagcatactgggagagatgttgaatttggcaaggtattgcatcactgagtcttgttcttgctttaagcgaacaaactcttacattttcatctacagaacaccatcgggaatgtaatgttctctgaacatttgcttgaactctgcccacgtaataagatgtccttcagattgaacagctacaaagtttgcttaccaggtactagcgggacctctcagttgctgggcagcaaacaggggcttctgggtctctgtgcacctaatca

SEQ ID NO: 47927 - DNA, 609 bp, Arabidopsis thaliana columbia
ttgcaggttggaatttgtctgggaagtgaaaaggttccaaatttcatcaaattttcgagggaagaagagaaatactcagagaaaatctatacatttatatatatacctcaacatacatgcaattcaggtgtcttgaaaactttcgacgattcccaccaaaaggtttcggttagcttagagaagtagagatgagagactaaaagagatggtataatcgggttggtgattttcgacggtgaattgaagagtccgccggagggtttagcgacggccgtcagcttttcttctttgattgcggtttgtaatttaattgaacccggtttggttttgtaaaccgtgcggtctaaagcactaaactttaagacgagtaagattagagcccaataaggcccaaatagtttggtagcttggttaagccaaatatatagccgttggtagacgcctagacggagttttttgtactgaccaatagagaatggcttgcaagagggaaacacatgatctgaaccaaaagtatgtttgtttgtcacttgaagcgtatttttagcatacgtttgctcaagcagggccaataattgacaataaaacattcgatccacgtgatttgga

SEQ ID NO: 47928 - DNA, 717 bp, Arabidopsis thaliana
taatttgtgtgcatatggtatattggaaggagtgtcttgtctgattcgtatgggggttcgaatcagacgacggaacttggtgatgatagaggtttttacgcttccttagttttgttgtaaatgcctagattccttgttgaggaagttagggtcggccgcgtttcttgtgatttcttcctcctctctttcaatcattttcttactaattttaccatttccatttactaattatatcggaataatcttgtaatatttagtcttcgtacaaaaacttttctccttaataaaatagcttttagatttatagcaaaaccctaaaatcttgctataacattattggaaactttcatataacattaatatacatccacgcatacatgtttaaacatacgaaaaatctcaaatgaaaccaaatcaagtcccctaaagtctcaactgaaataccaaatactataatttacacaagagccgaatcgttaaagatgacacttcgagttatgttcatcaactgattgatcccggccggagaaaatttccgggcgaaaagaaatggatctttcctcgttcggttgccgtccccatacctaggccgtgcacttctcagcttctgtataggctcagccctaacctccaacggtttatatgtccgaggatgaccatggtcgttgacgctccaatcaacgtgcgtgactgtagcggatacacaccctttgtggg

SEQ ID NO: 47929 - DNA, 606 bp, Arabidopsis thaliana columbia
ccaacagtaactgaaaatctatacaaaacatataaacttttgtaagatcaagacaaggaagctccatttcctacaagcaaaaaccaagtcaaaatatttcacatacgaataaatccaaaagaataaaggaccacaaagaaaaaacgagagaaatgatcaatctcgaagcaaatccaggcgaacaaccaaaagaaaagaatcaaactttaacaattccaccaaaaataagaaaccacagaaacatcaaaatcaaaagatgtgaaactagaaacagaagaaacaggaaatatcaagattcatagattgaacaagatggagacaaaaagagagggagggagagagatcgtactgccatggattaaggaagagctgagatgcgttgtggtggtggtcgtcgtctccttcctctggtttcctcctttcagcttttgtattatcttgattggtgaaattttggggattaggcgaacatgtaggagccatgatattttgggccttaatgggccagttatgtcttttttatgtgctattttgttttgacgtttcaacagtgaagtgaccattcttttatctataacctggggaacatttcttatggaagatttg

SEQ ID NO: 47930 - DNA, 706 bp, Arabidopsis thaliana columbia
cgagttctgaataatatgcacatgaatatctagaaactgttcaaacaatattattctacaatttctttatgtatcatgtaaaggtacgcatgcgtttgttaacctttcgaaaataaatattaaaatttataaatgttaaaaaagaaggaaaactattactccacatgggtcgtgagtcgtgaccattattggagtcgtcggtgttctgcagaatatacatatataaatgttcgaaactgtgctaattaactttagtagtgcgaacatgcttctcgtgacattaaattaagatttttatataaaactagatattttgaatagtttatcttatttcatgttggtgtttggttttcgtgctaggtcaaaatgtgagttgggtcaatcaaaaaccacattctcgcgattggttttttggccggagttggctatcaaaacctagccgagcgatttggcgtgtgagctccgagtctaaggtgtgagtccgctttggaagggatcatgaaccaacctggttcactgaatatgccgatattatcatgtgtcatgcgttaacatgcgagtttagtaattgagtcgaatacaacaacacgtgctttcaatattaataacctcaacatggagattttgatttttctaagcattctactgcaaaactatgaacctcaacaacatttatgagtttgagttctgtattcaccaaatttta

SEQ ID NO: 47931 - DNA, 518 bp, Arabidopsis thaliana columbia
atcaggtgttccagatatgacaatgatcctgtcacttgttcctagaggaggttcatggattatgacccttgcacccgatatctgagtaaacaagcatcaaatggtataagctatgcttaagccgtttaagtcaaccaacggggtgctacttcatctttatgacactaattatttggtctgtagatgattatttcagactgatggggctagatgaaaattctgtttttaaacaacgactgtaacactgaataatggaacaaacgttgagtacttcaacgaagatggagttttcgtgacttaaaacagttttttttgagtaaagttatacatcgttgagaatagtcctagactcctattgacttagattaatggtagcacgattgtttgcaccatgtataagactttacgtatatgaattttattttctcatgctatcttcttagtaccctagagttcactccgtttttagtaaccctagagttcactacgtataagagcaccaatggaaacaaacctat

SEQ ID NO: 47932 - DNA, 516 bp, Arabidopsis thaliana columbia
gccgagtatcttaacggagaccagtttttatccgattacagtgtcatcgtcgattatgctctcgcgtttgcgaaatcggttgaaatttccggcgacggcaaggacgtgtggatcttcgatatcgacgagacgcttctcacgaatattgactactacaaggctcatggttacgggtatgttctaaccattattagccgttggattttgtttttatctacaataatcaacggtgactatttgactttacttcgttgaccctattactaaaccggaatcttagagtaggtttaagaattacgaatttagatccggttctaggtttaagacttccggttctgttgtaattgctgcgttttctctagcgtgctgatcggttattgtttttttttttcttttgtttctggtcgagtaggtctgaaccgtatgacgataataaatttagtgagtgggtggacaaggaacagctccagcttttgatgcgagcttgagactgtacaatgctctcaagaaacttgg

SEQ ID NO: 47933 - DNA, 559 bp, Arabidopsis thaliana columbia
cccgtgaactatctgcttcaaaaagagagatggttgtgaatgaacaaacaccggctttaggtcaaaatgggtcctttaagtgtttcgcctaactgagtttctgggacatgggcttggggtaatcagcttctttggggttatcagacttccatggatgatcagcttcaacaagcttttgaattggctttggaaaatggaatcaatttgtttgatactgctgattcttatggcactggtaggcttaatggccaaagtgagagacttttggggaaattcattaaagaatctcaaggtgtgtttctctttaacctttcccaattttgttactggtctaaagattctgattcaatagatagtttcagaaatttggggaaaaaattgcctttagttggttctaaagtattatcctggagctgtcttgataagttactgtggtgggtttgtgtgttgtgattaatggttgcaaatgtcaggacttaaagggacacaaaatgaagtagtggtagctacaaagtttgcagcttatccatgtaggttacttcaggacagtctgtgaatg

SEQ ID NO: 47934 - DNA, 611 bp, Arabidopsis thaliana
agttgtctgtatatgcatctcattcacatttgagaagattccttcatatgttgtgattttgtctaatacgcttttggaggaatcacgcaaactcaggggtctttaattggtgaaagaaggagaatgatggatgagtaactgagcattgggtacacatttgcatctaagaagtgcctatactgcttcatcgccgtttctctctctgggagatccggtgttatgcagtcgtaagggctcggtttgctcgtgtctacaaatggctcccatcggtatcctggcctattcggtagcgaaacaagtgtggctaaatgactggtgttgaaggccacatagatttctttcttcacagaatcgacctaccgaaaaacaaaagggattaatatcacccactaaggaaactgtccatgtaagagaaggggtatgagaaaatggtaccagtgaaaatgcaacaaatcgacttgtttcagaccaatttgggatctcaggagcaagaccatgccactgcagacgctttgctgttgggaaacattcaaccaagtgattccatcactacaatcagtcaaatggcatcgatcaaggaaccgagaacaggggatgcgaaagaagaacca

SEQ ID NO: 47935 - DNA, 962 bp, Arabidopsis thaliana columbia
cacaactttcttcaataaagaagatgcataacacacaacatgtataatgtggtaagattatagaaaaaatgagtaacaaagtgttttggaaacactaaagaaaaaaagtagtctaaaatatggtcgaaaaaaggactacaagtctacaacatacgaaaatatacacatacgtttgtataagacatatttgaaatcatgatagaaactgttgtatattccttaaaaaaagaaagcatatgctcaaattcaagaacaaagacatgatgatattggcaaccctagaaaaaagggaaattaaaaacacaaagtcaaactatttgtctgtctggaaatgaagaaaggatctatgtaattagtaaccaaaagacaataaagaccagtcaacctaagaatcttcttgatatcactcagaaagaaaaaaaacaataaaaacaataaaatctcaaacgcggtttctacgatttttgtagagtcaaaaccagcaatggtgttggtgagagtctaaaaaaaatcgatcgaaagctcaaaaactccatcttctttcccccaggaactcacaaaccctagatgaattgttaatcatcaatcatcgatttcaagatttagtctcgaaaggttttattttttttgtgcttgcgtcttaaatggagaatcgtaaaggaggaaactttagcgtacctagctccgaagctttgaccacgacgcttcgtaatgcgatccaagctttgggtcgtggtttcgatgttacatctgatgttcggcttctttattgcaaaggagctcctgggtcaagacttgttcgtatagaagaaggacaaaacagagatcttgagttgtctcatgggtttcttcttcctaatgtccctgctgatattgactgttcacgcggcaacagtggcacacaaagaatctctgtttgcagcttccatgaggtgacccctaattttctactctgatgttga

SEQ ID NO: 47936 - DNA, 482 bp, Arabidopsis thaliana columbia
cataaaaaaacactccgccattaaaccattgactagccttttgacctatcatgcaaatacaaattttaaaaaatttaattcgccattaatattttactctaattcaaaagacctgattaattactaaatcacatctatataaacactcttcccatgcacacacacttcatatcttcttcataaactctaaacacttctctctagctcacactcacaacactctctctctcctgccataactcagcctgagatgtctccggaagcttacgttctgttctttaacagttttaacctcgtaaccttcgaagcctttgcttcagtctcacttatcatagccacagttgctttcttgctctcaccaggtgggctcgcatgggcctggaccgggtcatccaagagtcgggtttcgattccaggaccatctggttctctttccgtcttctccggctccaatcccaccgtgttctcgccgctcttgctaa

SEQ ID NO: 47937 - DNA, 576 bp, Arabidopsis thaliana columbia
ttccatgaggtgaccccctaattttctacttctgatgttgaaatgccattcttagattcaaccccttttttgtctttgtcttgattacgtatctacagttagatgatgtctgctctgtgtatttgtgaaaccactagttcataggaccctaatctactttggacatgtctaaatttagaagctttacattgagctttaacttgaatgaggcaatttgtagttcgatcaagtcagatgctaagggaaatttcagagcagaatgatgtttcttatattttcggataaagattggtctttggggaacaaaaatgagtcttgatgtttagatattctgtggaaatatattgttttgctgctggttattcattagatatacgttttttggcagatggcagaagaattcaatgtgagatcaggtgtaaaagggaacataccactcggatgctttaacgcaatgttcaattacacgggttcttggcaagtagatgcagcatccactaaatctcttgcactggttggatattttacccgctttatgatgcaaattagcaaacttacattggttttcacaatgag

SEQ ID NO: 47938 - DNA, 466 bp, Arabidopsis thaliana columbia
aataaacacatatgaagagtcaaaggaaaatatgcttaaatcatatgctgaaaaaccagcctaggcagagagcagacccttctccttggcaaagtttaccaggcatacaaggttctgtttcctacctactttatacagtttgatactcttagaaggattccatgccaaagcaaccacagcagcatgcacaccagtcttgctcctagggatctctctgcacctctccagctgcttgaattctagtaatcccaccacacaaattctccagtggctgcagctcagagttgatccatgtctcactatcttccttacatccatcgttcttccttctaaacctcccattcccgtttcaattcctttcagacaaatttgtcccatcactccacaaaatggcactggaaaactttcctttctctttcccttctttacaaaaggaataaatgttcattttagaaattttccaaaa

SEQ ID NO: 47939 - DNA, 481 bp, Arabidopsis thaliana columbia
ccgagcgtaacatcgcccgcgatatactgaattctccctggttaaggaggagggtctccgttaatggcggcggcaatgttcggcgtcaggagctttttcttctcggcggtgattgtgatactgttcgccggccgttatggagaagccaccgcagctgacagaggatacattaagtacaaagatcctaaagtagcggtcgaagaaagagtagaagacttgctgatacgtatgacgttaccggagaaacttggtcaaatgtgtcaaattgatcggttcaacttctcacaagttaccggtggtgtggccactgttgtgccagaaatcttcacaaagtacatgatcggtatgtgtggtgcaacatcttgttatatatcgaatttttgaataactttattgtttttgataaagcttataattgaattggtgcacgtacgagttacaggaagtgttttgagcaatccgtatgataccgggaaagaca

SEQ ID NO: 47940 - DNA, 463 bp, Arabidopsis thaliana columbia
taattatttgacaaatatatatatatatatatatagaaaatgataattgtgaagaaaggaagagtttttcacacgtgacagacatatcaaacaattcatatcaattgcgacatatagagtccccatgtgatgtgttgttcttgttcctctaatcccaaagtctaagacaattaactaacttatctaaacatctactatataacttagtttccgatatcaatacgtatttcagtttcacaaacaataaacttccaagttcaaaaatttatgatgaaaaaatacttgcacatgaatttgtatggggcaagaaaaatatttgatacaaaaggtggacaaatgctgttaacaacaaccttagttatggtagactatgaacacgcacataagatcatattactgtaccatatgctacattaagctatgttacctatcatccctcactacaacaacactatgaacatca

SEQ ID NO: 47941 - DNA, 509 bp, Arabidopsis thaliana columbia
gtttatcagagatcaaacaattcttcagatattgaaatcaaacacaaaaccaatagtcaggaaaacaacaaagcgataaagaaaatcaaatcacagatctagcaacacagatctcactacctaaacaacacaggaacacagatccacaaacatgagctcagaaaacaaacgaaagacaacggatctaaaggttacatacctgcatattgcacttgacgagatcgagaggagtcacggtcatgtgagtaagaccacagctgagaattccaccaaaggtacaagcagcgtagaaggcaggtgaatacatctcgatccccttccctggctcggtgggagatgcaataaggaaattcttccgagaaatcatcgacgtaggagaggaacgcggggccggagaaggagatttctcgaatgcagcgttggagttggaattgagcacctggtcgaggaggaaagatctcggagatgaagatgatgaatagaggaagctcgggatcagagaattcttc

SEQ ID NO: 47942 - DNA, 1921 bp, Arabidopsis thaliana
tgttttatctatatttctccttgcctttttaatatgggataaatcctcgtatgtttggatttcgaagaagcaagggattacagtttcagattcaaagcttacacttcaagggaattcatcttctaatggtgaaactatttacagaagcaaaagcttcgcctttaaggctcctcaggagaatttcacttaccatgatttcgagctcggcaagatctatggcgttggctcttattcaaaggattcattttttcgattttttttcctgtaaaaatcacacctttttctgcaatttggtttgattcatgaatcaattcatatcctggagattttacgtatgtgtaattgaatcaggttgttagggcgaagaagaaggataatggaactgtgtatgccttaaagatcatggacaaaaagtttatcaccaaagagaataaaaccgcttatgtcaaattggagaggattgttcttgatcaactcgaacatcccgagattgtgaaactgttctttacttttcaagacacgcaatcactatgtaggtagtttctattcaactaaagtctagactagaacaaaaactctaaaaccctaaaccagaaaatctcatcaaaaagcttaagccttgtatagttgttgaaagcttgctaaactcccatcatcttcaccatcatcatcgaaaaacccgaagttttcctgcaagtagcggccatattgatccggagaaatttggtcattaaaatgtggctgctggccaatagaattcaagttggatccagtgacggttacattgtcccgggagtaggggtgatattcacccggaggaatttggtcaccaaaacgtggttgctggcccataaagtgcatgttgcatccagggatggttacattgctctgggagaagtagtcttgataatgatccggaggactttggtcatcaaaatgtggctgctggcccatagaattcaagttggatacagggacggttacattttcggcatctcccagagtcatatcatggatactgaagcgtttccccttcttatttttttgccttaagaaatacttctgagcatggcttgccacttgcatcgggctccttgacgtcacacattccctcgatatgctcttccaatctcctttcccatacttgtttagtccatccaaaaacaatctgcaaaatattatcatttattaatcaaccaaaagtccataaccattaagagcacattattattaatcaacaatatcatctataattagcaaagacatgtatatataatataggttcctcctagccctaaccaacaaaaccctaattcatcaaccctagcaagacttaaactgttatgatatatacttcccctagtcaacagaaactctaattcaaagatttaaatatgaactttaattccacaatccaaagaaaccttttattcatataattctttgactaacctgtgttcttctggtgaccaaggtattcccttctttttccccgtgccctgggttttagacttagtcgcttccggcagtgacacgtaatcatcttccgggtacttgggcaaaggatacttacccgattcgatcagcgtaacatcatcgaccaaggcttggtagtaggagtacacctcctttaacggtttctgcagaaactgagcgatattctctaaaaaatccggcgaaccctcagcagggaatcgaaccagagctaactcaaaacgcttatcatcgtccctcttccaaatcggaattgctgcatccatagtatccaaagaaacagagagaaatcttgagatcgctaaagatcaggaatctaatatataagcagaacaataagaaaatgttgaagagactttaaggaatctgttactgagggtattgtttccgcttctaatcagattatagtgagaaataatagggaatg

SEQ ID NO: 47943 - DNA, 458 bp, Arabidopsis thaliana columbia
ggaaccctggcagaaccatcaccaacctcgatctcgggagccattcgggcatcacattagcatattcgctagcaactagttcctccttgtcctcaacttgagccggagtcaacactgctaattcagcgtcagtatttgcctcctctccctctttcagtttcttcatcttagattcatcatcacacttctttggctctaacctcttcctcttgagaaccttaaccaaaccctcaagcgccgcatcagcatcttcatccttcattagttcctcagcgacttgagccggagtcaacacgtgtccatcaatcaaatgctttatatccggacagagagggtgagtatcatcattttcgtcagacaggcctaaatagttagacgccaatgtcttaaatccctgaaaactactatgtcccatgtaaatgtgcatatccatacgtgctggtctgagcaatgccgga

SEQ ID NO: 47944 - DNA, 997 bp, Arabidopsis thaliana columbia
cgagtagtatgcttttttttgataaaccttgtatggctcttgtttccgcaccagagattgctagtggtttgtctttgtgttttcgactctctaatccttgagtagcaaactagaaccttgagctcttgctcatttgtggagttcaaagacttttcagtccagatgcaaaaaatgtgaaatccgactttttctcttttgatctccctgatttttggaccctgcttcttacaacactgttacgcggactaacatcaaaaacactcctcaaaccaaacaaactcctcaatcattgtcactagttcgaatgtctctagtttcttgtttcaatcttttatatgaaactaatcaagaacaagagatttcatgttggcttatgtttttaacttccttatcaaatatttaaatcttctttgcggaataatacatatggaataatgatgtcgacttggcttccggaggtaaaatattgacactcattaaattagagaccttgtaatactctgaagcaaaggaagttaagtttcaatgactgattctaaacagcactcaacgacttgatagagagagttcttcagaatcttcgctgagtaaaaacaaaattagattcactggagttgttaccttgtggaatttctgttatggggcaaattctttactaagtatacaaatggatttgacatccaatattcgtgattaagcatacagtaatgctacatgtctactacgaaatctccggccttctgacgatggaggccttcactgttctcagaagtccgaccaactaactcttacccacccataaacacaaacattttcgggaggattggccaaaaagttaattatatggatctatcaatagttagaaagagagacattgtaccctatctggaatatgccgaggcagtggagctacggtaacatatctgtgtgggtttacctaagtgactcacggaccggtccatagatgaggatgattggtggaacttgcaaacgattg

SEQ ID NO: 47945 - DNA, 548 bp, Arabidopsis thaliana columbia
cgtttttaccgcattagctttttatgataacataacaaaatgtgtaaatgatagttactgattacagtaatagatagcatgaacgacattgggatttgataattgcgattttccacaaacgtacctccttcgccatcttaataagccaaaaattgaaacctagaaactagttttttttaactccttgtttttcaaaaagcaaatctaacacaacgtaaatttgttgtgtttgaagatcatcatctcgctatgctgaaattgtcttgattggacgaccctcctttcttaatatccgctcctttaaactgcacatattaaccgtttttactttttcgaattaaccaataccaccagcgatgaccaattagtcatgatttccggattctaattttcggagacataattgtcacttttcactaaacaaaaatggaaagccctcaacttttgaaagtgtctatattcacttaagtttcccaaagtgctcaaagtgcacacacctttactttatttaggcaaaagcctttattttagacagtacgaggatatta

SEQ ID NO: 47946 - DNA, 862 bp, Arabidopsis thaliana columbia
cactgctactcacatagccgattcttcattatcatcatcagagaatcttcaatttcacaactgacttcacatgttttgattcggcagccagtgatcctttcttcagggatttatatttggctttcttcgcctttttcttcttcttaggcttcagtacatgagcactttcgttcctgaggaaaagaatggttcaaattatctacttgttttaatggtttaaaataagtagaaatcactgcttgtctctccgactgaacagcagcgtcctagattatcatatcgacaatgaactgtgtgggtttgaaagcgtcttactgtgtcaaaaccatttcagccacctctgccgcttccctctctctagcttcattttccaaatcttccattaactacaaacataagtaaatacgtgaccaagctgaaatgcaggacatggtagatgcactaattaatctcacctggtgctgagctaagacttccacttgctgcctgtatgcctcagttgcaaaatcagcatcccattctgaaaatagtattaaaatctcatgtgagctacaaaccagcccataaattaacattatacaaaactacattatcgtcaaggtttattgtcagttaaactattgaattgaatgagcaaaaaaggttacacttactctcgtaaacaagaggctcttccccatcatcaatctcagcttccatttcctccttgtacttctcaatgtggtcaagttcccattctttctcttcaaatcctgcttcattttccattgcagcctcaacaatgatggggtccaaagctctaaaaatctaatcgcatatctatcaataggacgtagctgattctcaaaagatgagatagctt

SEQ ID NO: 47947 - DNA, 555 bp, Arabidopsis thaliana columbia
tgaaagaaactgcgactgcatgcattcttgtatcaacactgatagcaactgtggtctttgcagctgcctttactctacctggtggaaacgatacgagtggcgacataaaaacactaggcttccctacttttagaaaggagttctggtttgaagtgtttatcatatcagattcggttgccctcctatcatctgtgacatctattatgatatttttgtcaatcctgacatctcgttatgcagaagctagtttccagacgactttaccaacgaagctaatgttgggacttttagcattgtttgtttcaattatttcaatggttcttgccttcacagcgacattgatcttgatccgtgatcaagaacctaaatggagcttaatcctcttagtttacgtggcttctgccacggctctctcatttgtggtgttgcattttcagctttggtttgacacacttcgctcagcctatctgtctaagttcctctttcatggacgtaaaagtggcctctacctctaaagactaaagttatagagcctcaaagctttaatttgtattg

SEQ ID NO: 47948 - DNA, 543 bp, Arabidopsis thaliana columbia
ctaatgacaatacctgagtgcatagggagataatgtctgcgtattgtgaggggactcttgaggagaatgtgccggctatgctccatcaatcatctgttctaagcttcgcctgtcatgaagtctggttgatgcccatttcaccagtagctgttctcctcggggtcgtgagctgcaaaacgatccatcagaaaagggtcatgattagcttagcttaggcatcaatgattatattattatgtgaaacgcttgtgtacctgtcaaatgctttccttcctgttaacagttctaagagtagcactcccagtgcataagtgtcactctttgtgccactgcttcctggttgtccatgtgctggtgctatgtagccagtgtgttgtatcgctatttctgaagcctgctctaaatcacaagtcagtaggtctctctgagtcagagaattaggtgacacatcagatgctgtcttacgttacccgaagtttaacactgttgccctgtaagtggcctgaaactagcaagcccacagtcagcagatacgaggtgtaa

SEQ ID NO: 47949 - DNA, 528 bp, Arabidopsis thaliana columbia
agacccaataagagttaggtacctaaaacccaagcttaaatcatcttgcaggtttatgcatccaggggcacaagccacatgtctgctccccccacgtgcggctccctacgcgcacacattgaatccatatgcgcgcgtattaagtcattcaccttctattttagacattccaacgtacattaagtcagtatttcattatttttatgcatcttagacacgtggttcagtcattcttagcaatattaactcattctagcttatagacaacattaagtcatttcagagtccaagcaaagtcatttagaaattcaaacaacgttaagtcattctaatcaaaattaagtcattctagtaaatattaactcattttttaggaaaattaaattattattgtttagccatttttctgggtttctcaaacatttcttatgttattggttcagtcattccagaaaatactaagtcattctagcgtcaagacaacatttaagtcatctaggttacattaagtcattccaaagtctaggt

SEQ ID NO: 47950 - DNA, 541 bp, Arabidopsis thaliana columbia
  unsure (1)..(541): unsure at all n locations
cagatgatgctttgaatgatggaaaacgattttacatggtaaaatgccctataatatgttatgacacttcattatcttaacttttgttgtgctagctcatgatcaattgatatgtggttattgcttttgcagctgaaggaatcagagtggcaggccactgattggatttctatgtatttggaacttgtaattactacaactgataggtcgatcactgaggtaagttttacatatatatatatcaattaatgacataccaccacgagtggcactactggtaataataataagatgaactccaaaattgtagacagttcagaagccagaagttctgtccaagttggagattgtgaaagtggcgatagaaactgctaccaaagatgaggagccgtctaatgagagactcaaagcctacagggcacatttctacataacgtttaagggcttggcagagctcngagcccctcggcaggtttttgagattggggagcatgttgaacgccaagctatagttagaagagtcatgggccatagaggagac

SEQ ID NO: 47951 - DNA, 602 bp, Arabidopsis thaliana columbia
ctcatcccactatcgttgtcttaaggactaccagatgatagggatttgagagaagattattgtcttcttgccctgaatcactctccttgccgctgtttaggtcaagtgatgtacagaccttggagttaagactcaataataaatcttaagagcagttaaataaatcaaaagttagtacctgttagccacaaggcggagttgtctaaagggccatatgtatacaccttccagatttatttgggcaccacccacattttgttcattgtcaaatacgtcatggaaaacaactacaccctgtttcattaacgttgtataagttcaaaacattgcattctacaacatcaacggtgatcctatgatacagagcttagaagctgaactctttacctgaacataatgcacaccagttatcttcgttggaactgctactaactcaaccacagaattaccattttctttttgaaagtcttgaaacttcgaagagctatttaaggaattcagaaacttccaagtgtctgaaaatacccgctttacatttgataagtagtctaaaacattaagctacagacatatcccacaacatcgtagacaatcatgaagtg

SEQ ID NO: 47952 - DNA, 548 bp, Arabidopsis thaliana columbia
tgtcgtttcaatttaaggatcacctgttaatgatggaaatttctttgggtttataaatgatgcagcctgatatagcagcccctggtgtgacgattttaggagctacatctcaagcctaccccgattctttcggcggttattttctaggcacagggacatcctatgccactcccgttgttgcggggctcgtcgtactactcaaagctttacaccctgactggtctcctgctgcgctaaaatctgctattatgactacaggttcttgaaaatggaaaaccactttcttctcctcaccagaaaaccaccattcgttaatttaatcttaccagagtttcttctcttgttattatagcatggaagactgatccatccggggaaccaatctttgcggagggagaaccacggaaactggctgatccatttgactacggtgcaggactcgtgaacgcggaaagagccaaagatccaggactagtttatgacatgaacatcgacgattacattcactatttctgcgccactggttacaacgatacatcaatcactat

SEQ ID NO: 47953 - DNA, 654 bp, Arabidopsis thaliana columbia
aagcggaatctgattgcgatgctattgagtcgaaaatggaagaggttcttctttctcagattgcagctgaagaagaatctgcctgtctgcttcgtagttttggcacggatgctgagaatgatgctggatcgattctggagaaagcagaagctttttattcagatgaaatggagaaatggcattcatgttctgaagatgttgaggttagaaaagtcgaattggatatagaatctgttgttgttgataacgttcggttgtcgttgaatggtattcttgagggatctgttgaacaagatatgaaagagaaggagatactgcagaagaagaaagaacatttggcaaatgaacttgaggagctgcttgctttggtgaaggcaaaggagaaggagattgacgagaacgattcgcaaatagaggcagttgaggaaagaattaacaatgtggtgactggcttcaaggaattgcaaacaagtatggataaaatgttaaacgatgtgcaagctggtctcactgaggttgacaaggaaactgaagatttatcaaggaagaagaaagacgtggacgagttcatgacatctgagaaggagagaggagcgaacttcgtgatcttgcccgtgtttcacggatgaacttgtgatatgaggaagtattaaa

SEQ ID NO: 47954 - DNA, 1333 bp, Arabidopsis thaliana columbia
tcacgctcgatgttgtcgttgaagaggaggtacaggatcagagatttgagacgccctgatgactcaaccgctgattccccttttgatgcctcttccgatatatattcggcatgcgacgttaatgattactaggagggtgcttcttactctgaatcttaggaaaattcctattcgattgagtaaaagagtttgataaaaccttgtgatgcagtgacagtatcagtggcaactggtaatgaaagcgtttatgttctctcttttgttaggtcagtagttaaagttgactcctgtgtccctctctgcttttgtaaagcttttgagaaaacagatttaacatgtatgtcatgcaatgcaagtcacaaggtttaagatgtcagaggtcttcattctccttattgatattgagcctatttatttagcttcacatatataatgccggtcatttaccacgtttaacggatgagtgtaatttcaggcctggacccaagagtttttaggaacagacaccatcatagtcttaaacgccattcttgacgttgtcctcacctggtttactttgacttaatttcgtgccccaatatttagtttctgttggaactagcattagttttcacttttcagctatcaaatagatatattatggatataggcctgatagttttgatggaagtgtccgagtgttgtttagagatttggcgctgacttgatcagtgtcagaaacagagatgatggaacataggtgtgatactacattgttgttataacatatgtgtcgaacagagaacaaaaacatatttgcttaatggtactttattctctgattttcaatgattgtctctgatactttttcagaatgagactacatgaatctgtagaagaagaaaaaaacgtaattgcacccatcaaacccatcgtctcattatgtcctacaattaaaacagaaattgaaatccccaaaccgtgtttgaattattcttcaacattgggtgacaataaatgtatttatagcttttgccctcgtgaagattaattagggcataaattgtatttgtaacttccacttcttcttatttcatagatctgacaattttatttaccctaaaaaaattgcttcgtcgtcttcgttgtcgtcaactcccttaccttcgctgatgaaagacaaaaagttgagaaactgggcggacctccgtccaagttgacgtcatcgattctacttcgtcttggcgctattgagatacttcaaaacgctcaaaaagtgtgcaaaccgtggcatcgagtctgcaaagacccctcgatgtggcggaagatcgacatagataaccgcaatgatagg

SEQ ID NO: 47955 - DNA, 589 bp, Arabidopsis thaliana columbia
tctttcaaaatgggtcatacttaccacaacctcataaatcaaagttttgtgatgacctaggtgtcttggccataaggcatcaccattattggcgagaggctcaagtcaagcatgcgatcgatcaccgaactcgagattcattaattaggtttggcagatcaaggacaattcaggtgatgatgacgtttaattcattcaattcgaagacgggaagcaaaacttgattgctttaacatggattaacttaaaacttcaattaaggcttcttctcattgagaaatgcctaaatctttaagatacaaacctgaagctaccttttgtagtgagtgagagaacaaagacgtgtggtataaatgagaaatgtaatgggtgggtccaaacattttgcagtgaccatctcgtggccggcggccggcgcatcaatttttccagacaaaacttaaaaaacattttattgacatgcttagctgctgtctgataaatttatcatatgacaacgatataataaaattaaataaaaaagacatttcttttattaagaaaaggccaaagaagagtgccacaagagtcaaacgacaaaggcatgaga

SEQ ID NO: 47956 - DNA, 582 bp, Arabidopsis thaliana columbia
ggttctccccgaaatgcgttgaggcgcacgagttgactggacatctaggggtaaagcactgtttcggtgcgggccgcgagacgtgaccaaatcgaggcaaactctgaatactagatatgacctcaaaataactggggtcaaggtcggccagtgagacggtgggggataagcttcatcgtcgagagggaaacagcccggatcaccagctaaggcccctaaatgaccgctcagtgataaaggaggtaggggtgcagagacagccaggaggtttgcctagaagcagccacccttgaaagagtgcgtaatagctcactgatcgagcgctcttgccgcgaagatgaacggggctaagcgatctgccgaagctgtgggatgtcaaaatgcatcggtaggggagcgttccgccttagggggaagcaaccgcgcgagaagtgtggacgaagcggaacggggaatgtcggcttgagtaacgcaaacattggtgagaaccaatgcccgaaaaccaagggttcctcgcaagttcgtcccggagggtgagcaggcctaagataggtcgaacgtagtcgatggcacaggtgaata

SEQ ID NO: 47957 - DNA, 1045 bp, Arabidopsis thaliana columbia
acattaaattatcccgcaaagcactgttgcccaaacccaaacgcaaacccgcatctgatgctggaaaagatccggtgatgaaagagtcgtcaacagtctacatagaaaattctagtgttggagagattgttgcaagcatgcccagtatcgtaacgccacttcagaaatctagattatcagttcctgcagttgtcatccgtactgctgtggagtgtaatgaggcagagaaatcttcccctgtgaacgacaacgacaaacccagacgcgctgctacatcaaagccagaccggaaacccaaatccacagcctctaaactgattgcgacacagaaggaagaggaggcactcgaatccattgctccagaagaaacttcagctgaatgtggtgagatactgaagcaggacgggaagctaaaatccgtttctcccaaaaacaatagcactgcttctaacctagtatcattttcaaaagctaagaaatcaactatgaaggagaatctatcagagaacaaggctgaagagagtgcatcggttagtacccgaaaactgaaaataggaacggagatgacagccacggtcgaccatgttcgagcccttggattggttcttgatttaggtggtgaaatccgcggtatgtacatattccaggtatgtttcagtaaattctcctttgacttgttctcccattttcttgagttaacttttgaggcgatatacttaattcttgctttgtattgatattgtgtactatgaatgagtacagggagataaagataagttcaaaaaaggagacacattgcgagtgaaatgtacaagttttaacaccaaaggagtccctgtgatggctttggttgacgaagagggagaagaatagtggtaaactctctttcctttctacaaggttttttcaacccaagggatcatgtggagtcgatcatatggatcatacgagagttttgcttgaaatgtttttatcatacggatcgaatcaagagatgctcgttagctgcttttggtgagcaaatcttggtagatggatagattca

SEQ ID NO: 47958 - DNA, 446 bp, Arabidopsis thaliana columbia
gatattaaaaaaaaaaaaatttgggtaaggggatatttcaaattgacattgtcatattatatttgtattatgggttttatttaagagtttttttttctaatcagaattaaaaccaaagcaacatttaattaaagcaaaccaaaaataagtaagaaactatatatacagtatatcagatgatgtgaccttaaaatcttaatttatataaacccttgtccaagggaaaagtgtcacatgtcagctttttaaagctttgtgtttgggaaaaacattattttattatactaaactagattaaattttgcaaatctaaaagttaaattagttaaaatacaaatattattggaagagacaaataacaaacatacatattggatcatctattatattagattttgcaattctaaaagtttaaacttattacaatacagatattattggaagag

SEQ ID NO: 47959 - DNA, 501 bp, Arabidopsis thaliana columbia
ttctccggtctattatctcagcaacatcgtatcaaagcaaccaacccgaatttagtttttgaaaaaattaactaatccaaccaaaccgaaccggagaaattcgattttcgaatctaaaccagtttcgaattaaatccgccgcttcgtcctcgacaacctccatcgccgccttgcataaacctccgtactttccttgccgcatctgttagtctctctctaaaaaacaagacggaaatttttatggagttatactgaacctcttctatgatacgcatatttctggctgtttttttaggttgcgttgtttggaaaagctctgaatttaaacctcgcttattcagttttttaaacagattatactgttgtttgtctccatggaattggtgagtttccttggttaatgaaagtctaatacttttcgtgtgagttattgaaaacctcgggttgggtaagtatgaaagttttgtgtttttttgcagacatgtctgagcaaaggagatg

SEQ ID NO: 47960 - DNA, 546 bp, Arabidopsis thaliana columbia
tagtcgaaagcggaggagagcggcggagaatcataaagaggtgacgacggttgtggtggttgatgaagcaatggaggtggctgagaaattagattcatcaaagaagaagaagaaggatgatcaatgttgtcgtcttcttggagaagattgttgaaacagaggtaatcgaagttccaatcatttgggacgaattggtcaatcgccatgaatcctccattaacgccgttgagattgttgctttcttgttttctcaattgcgtcaattccgtttccatctctctttctctctattttctgaaactctgttatttgtgaaagtggaagtgaacagagtttgtgagcttggggtcaaagaagatacaaatgcatgtaaatgcattacataagtgtgaattgtaatgaagaattcactttttaactgattagaattactttattccatttgacatatgtatatttatgacttgtttgttacataaaaagtggattttaatagttaaaaatatatatacaaataagtagttttgtctagttgtttaaggagag

SEQ ID NO: 47961 - DNA, 380 bp, Arabidopsis thaliana columbia
gcagattgtttccatattatcaaacaaaaagatatgcaatgataccccaagtgaatgctttaacaaggtttgagatcgcaaacctgcctatgtgaccaagcatgataatgtttggcatcaagtgaaagtactctacgggtaaattcaagttctctccctgcaacatcaggacccagtttctctgcaacccatcgccgatgatgcctagagaaaaggaaaacatagagcagaagcatggaccatcaaactcaaaacaaacaaccaagggttttaacgttgtataatcagcagatatgagacactatgaacttaacaatgtgtacaagaacaaactttcatctatggagaagtagaatatacatttattgattcaaaattat

SEQ ID NO: 47962 - DNA, 574 bp, Arabidopsis thaliana columbia
gggtacccacgagttagtatgtcttttgacttgtacagcattttgaacttgctattatgaacctattctttttccctgcagactaggaaagctcagagtcagaggcatgtccagagtttgatcgtcgtatccttgggcttatcaatatcagctgactctcagagtttgctctcatgctttgcccaccacaagggcttagtggcggatgcattgatcgtcctctcggagttgtccctgaacagaatccaaaggctagtgacacaaaacaaaaaaattagtacaagtaaccaagttcatatttgttagggagcctatatatatatatatatatcggctgatgataatctcacctggtttttgaattggtttcaggctagaagctcttttcagaagatttgaaacctgcttcttgctcataccaacatcatttgaggagcatgacaatcttctttccttggcatatgacaactgctcatctgatcctgccccaccctcatcctcgctacacgaagcccattcacttcctgattccgatggttccggagattaccttttccacgtttttgccgttcac

SEQ ID NO: 47963 - DNA, 483 bp, Arabidopsis thaliana columbia
tttgagtagtaaacatggcgtgcaaaatgactgaaagtacttactgcagttgattggtcatcttcgaaaaggtctagcgctttttcgtacagctgcatatttaggaaagactgccaaaaggaaatccaagaaaaataaggtcacaaaatactatgtgatggtgctagtggtaaacagtggaaagacattggtagtcaagcgaaagatacaactatagttgaagcagttggtgtcaacctcatcaagctttttctgcagatcatcaatcaagcgcctcattctatctgcattttctgtgaagattttctttcttctctccttcagtgaattaatgagcatcggtttcatatgatcagctaaatgcttaagaatcgaatctgggttctccgtacctataagaaaccccgtagtttatgtcacatgggctcaaaattcatagctacatacttattttaaacatacataggaaaaagttctcagatg

SEQ ID NO: 47964 - DNA, 462 bp, Arabidopsis thaliana columbia
ttcaactcttactcccacctttatctcctccacaaccatcttcgcattgagcggttgctcggccatcatcggccaagccaacaatgggaccccgacacatatgctctcttgtgctgagttccacccacaatggctcaaaaatcctttgacactttcatgtgacaatatctcccattggtccacgcaatctctcactatcatcccactctctcttattctatcgttgaatccttctccaataatctcctccacatcttttcttgtgacccacagaaagttcacctagagaattaaacacgtcatgatataaaattgctttttactcgacatgcatttataaccataccttacaattaatgcctaatttgtttagtgtcgaattctagacttaaagtcaaggaattaggtagacgaaagcaggatatgtctattaatatattagagtagatgaataaaaaattt

SEQ ID NO: 47965 - DNA, 621 bp, Arabidopsis thaliana columbia
atattttaaaaagacgtaagcagctctgatccaatgataatttcatttacattaccaatttgaacatggttaggatatcagccaccattttttcttaagatatatgcaagcaaaattcagaatccaacaaatggttaatttgcttttttttttttaccacagaaaaacaaattacgttgcttttaagattttttttttttgtgtttaaattactttggaagttttgttcctatttggagtatttggctgacatatcacttgatcatattttttttctatttggagtaacaaaacagagaactacaaattaaataaaaaaaatatataaatccaagaatttgagggataaatgaaggaaaaaggggacttttgaaatttaccagctaaagaagtgacgtggcaaatcggaccatttagaccaccaacggcggcgcggcgaaaccttcggcctttccggcgagagagcggaggctggagtctacgtggcaataaggtccactgtcatgtggtgatcggatggcgatgacggagctggagctggagctggagcggctgtatatggtggtgggaaaggtgaattgggagctcgcagggaaaatagaccacagtgatgggactgtg

SEQ ID NO: 47966 - DNA, 1003 bp, Arabidopsis thaliana columbia
tgtttggtctttatactttctttttttccctattaattatatatctatacattatctataatgcgtgacataattcaagagaatcaatactatttcgattttttttttttgaagaacttgaaaaaatatatccaaaattagaccgatttcaataacacaccgtacaggttgctttgaggtttccatttcattggttctttgggaaacatcaataacaagctgcttatgagatgagaagagtaaatgcttcaaatgccaaaatacttaacgttgagagtatctgttgttttttgcaatttccacaaaaaagttttagaaagtttttgattcaatgggtttcaggatgtattcttttgtaaagaagtttgtgtcaatgcattcatgttgcaattaggcattttgtcgaatcacgaaaacggaaggaacactcgtattcgtcacatcaaagtataaggccctagatcgtgtgtatcacgtctctaatttgcttacttacaaaactgtgttgtttgctcttttcactaatgatggatctatgtgataacaggaatcacattccacgtcaattatttctgtttacttcaaaagaatgtcacacctatgcaacagtgagacaagatctgaggaagagagttagagaacatgaaatttaagaaagagtgcttcaatatcttgttgtgtacaaatcaatagttctgtttgataatatcaacttgacagcttttgtcaaaatgatgagtaaaaaatcaggatctttgggacaaatacggctgaaccggccggtttagctaagtcgaaattaccggcctaatcgttaaaccataaaaaccgcaactttcagaaacactctgcttcgtcgagcggattcgacttgtctggctcaggggtcgcacaactctcccgcaagtcacacatacactcggtgctcaaaaagtttgtcctttgtgcatctctcagttctgaaatatctggttctcttgtccttgaagatgttacgaggttg

SEQ ID NO: 47967 - DNA, 490 bp, Arabidopsis thaliana columbia
tccgagcttcatgaatcttgccgatacgagagagatgagtgattctaacatttgctgtgggaggagggatggttgtgctatacgttcgacgtaggagtatctgtgacttcatactcagagtactacctagctctgagtgatgaacctttaacttgcagaacaagagttacaacaaaaacaaaaacctaaagaggaaacctttatcaaaaagagatttaactaaaaagtaaaaaacaaatcttgtaggacaaggaacgatttacggtctagaaatacatttctatagcccaattgtagttttctatacagatattcgacctaacgaatcaaattagttacgtataaaattaaaaacaattagaagttaatttgttattacgtatacatatttgtgtactcttgactttttaacacctaacatatttgtgtctctgtaaacttcctctgtttcacggattctggtaataaaactccaaaatactctgaaaaa

SEQ ID NO: 47968 - DNA, 556 bp, Arabidopsis thaliana columbia
tgaacccttgaccatgtagcctttaaacctctggcttttgattatgccagggagacaaaaatatcatcaaattcgatggagaccacaattcaccacggccacaattctactttgattcaataaacatctttttccataacgttcttcaacctccagaggtggttgggccaacattttttgacccggtggatgactactttgctaaggtaatgaatcttgcagtatgcatatttagtttttttttgggggttctttagcaagaaaggtcaatgatgttaactgttttatgttcagggcagttggagcaccatgcaacaactaagttctcccccatcctcagcacagaaaagtacgtcattcaacttcttctatgtttattccaagttttgttgtacccttaggcaacatctcttctaattggtttcaggtttagctccaggtagcacctctgatgctataaatgaagtccgcttaaaaagacctatgagtcgcacagaggttggtggtctgtgactatgctctgcaagtttttaatacacatttttgaagtataatt

SEQ ID NO: 47969 - DNA, 1110 bp, Arabidopsis thaliana columbia
tgagttgttcttatacgagattgtgtatatttgtcttctccgaatgcagatccagtttatggagcagaagcagattcttaaaaacttgatttaacatgttgacatcaggctagtctatgtatcgagagagaagcggcatggatatgatcacaacaagaaagcaggttagcttcaatactaagccaaaaaaaaggaggcgacatatctaatatagactatgaattttatttccaattgagtaatacattatgctgtgctaaacagatacagatgtatacaagagctgttacacataacattatataagcgttatgtgacataccacagaacctcttctcaaaaaccaccagtttatgctatgtatctatctctcacaatgtgatagcctcaatcctgaccaaaagacatgcataatgtgagccaaagatccaaactttacacaaacccaacaaaaacgaagaaaccaaaacttacaagtttccttgccctgaatctgaacttgaggggaagctaagaatgtgcctcagaacgattgttctcgccaatgtgatatttttgctacacttagtcgcgttatcacccacttcctcgattctctctgtgaaaacatcaaacttcttgctgatctcgtgcatcgaaagcctcacagccacttcttcttctttctccttgagtgcaaaatcaaccttttgcatcatcgattccatctcaatcttcaacttatctacatgtactcgaatgttatccatgtctttcatggtaacataagcaccaatcctcatcgacagaacaatatctttctgtcctttcacagccgtttcatacttcttccaaagatgattacaccatttccctattgatccaattggaaccgctaacgcagctgcaagcgcagtcacaactggcggtgcagcaacagcggctgctacaacagagaagatcataacagagacaaacgcagtcacaaaaaccacattcgagattttcttccaatactttatgttctgaagctttttatcaagcttcctgttttgcgtatgaagtatctccagaagcataacctgctgctcgtaaacagactcaagcagcatgaagaaatctccatcaaac

SEQ ID NO: 47970 - DNA, 589 bp, Arabidopsis thaliana columbia
tccaaatatcaacaaacaataaatgtgacacaagaaaatcatgtaacgttttcctcaatgagtccatttgtcaaaataaaaaattgggtttttgtttgagtctattttttgttctgtttttcaatctatttaagcacactagatttgccaacttcatcactcaccaaaatccaacgtgatcaatatggaagctctaatgcttatcttcacgttctgtttcatagttctctctctcatattcctcatcggaagaatcaagcgaaactcaaccttcctccgagtcctgcatgggcgttaccagtgatcggtcacctccgtcttctcaagccaccactccaccgtgttttcctctccgtctctcaatctttaggcgacgctccgatcatctccctccgtctcggcaaccgactcctattcgttgtctcttcacactcaatcgccgaggaatgcttcacgaagaacgacgtcatactcgcgaaccgacaaaccaccatttctacaaaacacatctcatacggcaactccaccgtggtctctgcttcgtacagcgaacactggagaaatctccgcgcatcgggccttagagatt

SEQ ID NO: 47971 - DNA, 534 bp, Arabidopsis thaliana
tccctcaaggatttgaaaacgaaatatgagaaggtatcattcttcgatctaacttctactttgaaaagttttcctaaactattctttgtttaacaatgtgtcaatgttgtcttagggaccaaagagcaccactgatgatgaatctgatatgagacaagatgggcgtgctctggatgaaaaaaagccagcttctgcttccagtacacagatggaagaagctgatccccataattccaatgccacagctgcaagttctgcttctagcacacagatggaagatgctgagccctataatcctgatgtcacagctgcaagttctacttgtagcacacagatggaagtagctgagccctataatcctggtgtcaccgctgcaagttctacttctagcacacagatggaagaagctgatccctataatcctgatgtcacagctgcaagttctacttctatcacaccgatggaagtagctgagccctataatcctgatgtcacagctgcaagttctacttctatcacaccgatggaagtagc

SEQ ID NO: 47972 - DNA, 724 bp, Arabidopsis thaliana
aagaacacagaacggagatacaaataactctttcacaacttatctaggttctatttctttcttttttctgagggaacttcgccattagagggcaaaaactaaaggcacctaccaataaatgtaatatacgaaaagaatggctttagaacgaggaggcagaggtatctgttactttcacctattgtatgatcagaaccgtcggttgttgaaaggccgagtctcagattcattccctgagaaatctgaagagcttttggcagagtagtttccactgtacaatcctgactctacgctgttatcaccaccaaacgccattttcctgaatttcataatgtcttcattgtattgccctgagtcataagttgtgctttgcccaattttgattccgttgctaatatctcccgagtctccgtcgcagtccaatgctctcacaaccttatttcgaagagtagataagttttcagatgtgagaaatcacttgttactatatatgggagcattggacttttggttagtcagaattacctgaaccatgcgtgggcgttttggaccagaatgtctaacacatgcagcggctgtatcgatcattctgaagacttcatgctccacataacgcttttcaagccgtgtatcaatcagttcgcttaaatctccggtctcaatggctttgagaagcagcgggcgcgcctgtgagttcatttataagtactatataagtatacta

SEQ ID NO: 47973 - DNA, 725 bp, Arabidopsis thaliana
ctaattcttcataattgtatcatctaaggtgcaactgcaataggaccaagaccggagtatcaacatcagttacatgaaggatagttccaaccgcacccgctgctttctgttccataacattatttggacatcgcacacaacaatctttccttccaccgtgttcaggcaaccgctagcgcaacccctaccagagaatgaataccaataaataaagatatatccatacaagtgaaatgcttgacgcacaagttaggtcattgtggattccttgaatcacaaattaccttgctagctcctctgtacagttatttgaagcagtttttccatacgccaaaggatacttctttccctctaagtcaaagtcattgatcgatcttccctgcatataaaactttaattagtcaccatgatgacgacaacaagcacattcatatatcaactgaacaagggaaagacttctaacaggtaacatcttgtcatctccattaaccacattagtaacaaattttctgtcagtagagccagcagccacggatatgagccatggtgcaaggttatccgcttttgcgagtgcagtgccggcatttccaaccgctaccgtggtaacaatccctttggtcatcgcgtgaaatgatccaatagcgatagggtcaatgtcaactttagtaacaccgcctccaagagaaatggttaaaacatctaccccatccgctatagcatcgtcg

SEQ ID NO: 47974 - DNA, 1062 bp, Arabidopsis thaliana columbia
tcaaattttggttaaatatattttaatatgttaattaattagatttaaaaatgtttgacttataatgtgactgctcaggatttgttgtgtaattttaatagtatagatttttttatatataaagtaatttcaaattttggtaattttaatttattatattaaatttcatcaaattttattgaataattgctgagaataccctttccacactacccttttcaattctaccctttcttatttgcaatttttatttgggattattgtcaaaaatgccatttttggcccaaaactaatggacttgccataaacgaaatggtctttcgaaaatgtcattatctatgttgagaaaaatcgattttacccttaggttttggtgcaggagggcagcgatttcgaatccttcctcactccgccgtctattcatcgatttgaccggcggcactgtataatctgcgatttgtgtggctcagattgggtcgggtttaactgttgctggagctgttcatgtgtacactgctacaaaattttcgccttctgcagaaacttgcatcaagtgttcgagaactgcaacgataattgtgtcgacatcgttatggaatcacagatactgatttgtactctctctgcatttcgacatttggccactatagctgtttccgattatgttgtatatggatgactatacatgtcatatatgtaggggatgtgttattttcaaatgttaaagactatattagaagtttatttggatttgttgggtgatatagtgtattgtacctcagggtagttttataatcaacgttttatgcggctgtctcagagatgggtgttgaaatgaagagagggtaaggaactagctagctttgtttttccaaacttgtgtttatggaggcaggtgatgtgcctgtttttgtcattgctagtagctgggaattctctgaaaaggcactacaagaatatggtcatctgtagcggttgaataacgctatcttacgatacgatagcgttttaagaagcgatctatcatcgtccgtgataataggttcgccactttttatagcg

SEQ ID NO: 47975 - DNA, 442 bp, Arabidopsis thaliana columbia
tagaggatccctgagaaactatttcgataccaaatggattcagattggcagagagagacgtacagggagcataataaggtcgaaaaccgagtcggtgatatcagagagaagagtatcagcgaccattttgattccatggcaagcatcaacgccgacctgattctcaacggaagccaccgtaacatccgctccgcctcgccgtagcacatcgatcataaccaccgcttcaaacggctccgtaccatgagcaacaggaatcaaaacctaaagaaaactcagatttatcaagagaaatttacaggatcgatagggataagaacgaaatcgatgagaacgatgtaccttcttagtagatgaagacatagttgcagagatagagaaggatcgtcgatttacacgaagagagattcgtctcggagaatagtgatggagttttttagtg

SEQ ID NO: 47976 - DNA, 517 bp, Arabidopsis thaliana columbia
caatacacataaaaattctgagaaatttcgagaaaaaaaagtggacattgcaagcgaaactgttgattaacctttcaggatcaggctgaggaaattggccatggacgggggagaaaatttcacgagctcgtctaacagattttagactgagttttttcagtgactgagtttcgacctctctgttcaaagctatcatcgtcattctagggttttacacgaacaatcagaaacagaacgagaaagacggaagagaagagagggaaataggattttatccgacccgaacactatttatacgtagcccaacactcgaatccccacccggttggaccaaacccggctcattaagcgtcggttcagatttatttcctttatttaaaaaaaaggaaagggtaaaaaatagaaaattggaaacagttaaagcccaaaattgtaatttaccgagaattgtaaatttacctgaaaaccctacgctatagtttcgactataaataccaaacttaggacctcacttcag

SEQ ID NO: 47977 - DNA, 477 bp, Arabidopsis thaliana columbia
gctttattctctctaacaactctatgtcagacgggctgggatacggcaaaccaaccatcacaacacaccgacacatgctgtcgctgaagttgattccttctgacaccttcccaccaaccacagctagcattattgcccctctttcgctttctatcgcttccttgtaatctctgagaacagcttctacttcagtgtttttccttgggttctctgaacacacgcttcttcttcactattcttctgagtatccctgagttactccacgctgtgtgcacctgtgtttcatactcaaaggaggagaagaagacgataattccttcaggaaccactgccacaaggttgctcattaagagtcctaactcctgtatctgccaaccatacccagaaagtcaaaatcataggttactctcaatactctttctgaatctcattaatgttaaaggaaagaaacatgtgagaaaacgagcgtcatttgga

SEQ ID NO: 47978 - DNA, 515 bp, Arabidopsis thaliana columbia
  unsure (1)..(515): unsure at all n locations
nnnnnnnnnnnnnnnnnnnnnnnnnctaaagtcaggcgagccacggcaagagtgattttgatgccagatcgaagttgcgccgactaaatcgtccggtattaaccagttgcgcaacttcatcccataacacatacaaccaacgccgccagatgaacgactccgccactggcgcgcgttgcaggtaactccagagcaaatcttccgccagagaattatccattagtcggaacagttcgtattctcgcggtgcccaaagcattagtcccggcccgaccatcgccagtaactgatcgctgcgcgaatctttcaacatgctgcgtaaacagaagttaccgtgaatcagcacacaattgtcgttaaagccttcaaataatgccgggagacattcgcgagtgcgaaacaggatccgcttatcctgcatcgtcagactggtgttattgaagtgattgagcgtggtccatagcacttcaacatgttgccggtaccatgagggccagaaattttcctgagtattg

SEQ ID NO: 47979 - DNA, 516 bp, Arabidopsis thaliana columbia
aacagatcgagaaggagagaatctgttctgattctgggatgcataactagtttgagatgaagaagaaccagtagaccgagaagatatcgatttaagggtttcatccacagatataggctggaaatttgaaggatagttgtcaccgattcccatcatttcaggtctagcttgccatggaacaggtgaagccggagcagccaagacctcatcaaaaaaattatcagccaataatgactcagcttccgcattaacagctccatcacagctatcagcaaaagatttgtcttgaagagcagcattatctctcaaagatgaccttaacctcctaataggcaagcctaatggctgatgcacaacgtgaccatcaagaccataagcaggtcgagcaaccacaaccttagacttaccctggaaatactgcgaattccaagctcggacttcattagtttcccaaattcagacgattcttccaattcgccgctatcaacaacaaaagactcagatttccaaccacag

SEQ ID NO: 47980 - DNA, 480 bp, Arabidopsis thaliana columbia
  unsure (1)..(480): unsure at all n locations
atgttgctcactcataattaaattaagccttaatgaaaaatctatctatctcctcctttaattttctctctgtgttctttcttgtatataaaggcctaagctcaagcaatccaaccaccagtggtaataagagagaagactcttctttttttttggtagaagaagactcttctttgtgatacaagtaaccagtctttgagatcacagaaaacctccttctcaaaccgtagtttcaaggtattttctccgaccaaactcactttcacttataacaatctctcttcttggtctgaaccaaacttaatccaatttagatgagtcgaagaagtccaaagctggaactgaagttgaatctctcgccgcctacgtcaagccagaggaggatggttcgatctccaagccgctcagcgacggacttaccgacctcacgtcnaagctcatgcgtctcgtcggagatgaccaggacgagcatctgtgaga

SEQ ID NO: 47981 - DNA, 531 bp, Arabidopsis thaliana columbia
ttttcttcgaaattggatgataggttcatttttaacagttaaagaagttaaggctttgtgttatgattatgaaagtttttgtttatttccatctggagagatgttttgagttatggtttctgtaatcgatagagaccggtttaagagatcaagagatttaaactttaaaagtcttgtttgaaccggttttaaaccctcaaatgtgaacgtttaaccggtctgtaattgcttattattaaaggcccattaagagcccatggatgtttatgatacagtattagagtcctagaattgggtaacgtgttgcagaaggtaaacgaaaatgaagaaggtgctgagagtatacggcggcgttatgaggctggtgagacttttgccggcggattcaaggccgtattacgccaagtacgccagggagaatttcgttaattactgtgaagtcgatcaaagcgaaacatccctcgacgaactcttccagcgagcctataatcactcactttgggtactcaagaaggtaacaaagattctggg

SEQ ID NO: 47982 - DNA, 471 bp, Arabidopsis thaliana columbia
atttttgtatatattgactttttttttgtgtatatattgacttctttgtcgtagaacaacaacaacttatttctggtcacattgtgaactctattgatggagtaagtagaaaagtacctaatagtaagctacgctcaatgtctcatgtattttggtttttgactgatccccgtgactcaagagatattcgtgcttagtcaggtaaaactcatgatagcaggcaaaaatccatttgatatcaaaatcaaaaatatgtgaacactagtttgaaattaggtatataatagttaggatcatttaccttctcatctctaagaagacatgtaaggcttagtaagatgttgtttctcctaacaacaatcttattcttaccattggtttctttctcgttggagagtgtatctaggctagtgtagggagtacacggttaaccgagtatcacggttaaacaatctatagttatatttatga

SEQ ID NO: 47983 - DNA, 492 bp, Arabidopsis thaliana columbia
atgcgtaatcaatttttattggtgtgagtttggtttgagactttctctctctcttttgttttctgagttttgagctctgtctgaagtttgaacaattctaatttgttataatttttattactccctctgtccataaaagataaattttttaggaaaaatatttgtcttacaaagatagaaattttatatttgcaatgcaaattttaaaattgttttcccgttttacccttactaaataattagataaatatttattattatattgaggcatgtgggggggtcccgattatgtttatacaatatttcttaaaaaatgtgcaatttctaaaaaattcatcttagtgggacggagggagtattttatattcgcaaaactcaggaataatttcttggaatgatttattaatctgaaatatttaaaatgatttaatctgaaatacataataaataatcaaattaataagtcaaccattataaattcaaaatgggttg

SEQ ID NO: 47984 - DNA, 465 bp, Arabidopsis thaliana columbia
taatctatgttgctcatttaaattgcttgagacatgttttttcaagaactcattatttctgaaacactacaaaaagatttttcatttttctgagacagtatatgttctgtctagtatctttaatgtctgaatctgaatcataaactgagataaaaaaaatggaagaagaaaacgaagaaacaaattattatctgaaaactatttacattgtatctcaaaagtatgaaaatcactccctacaaaatgtatcatagtgtctgtgatattgttcctctttcttcgagacatcatcaagccaagagactaactgttgagtcgttggcctctgtgtcgggttttcgcttaaacataaacaagcaatctcgagaacccgaaacatctctgtatcattctctttactgtatattaacggatcgaaaacctcgcttgctcgattctcatgcttcatcttgacgacccacgaga

SEQ ID NO: 47985 - DNA, 860 bp, Arabidopsis thaliana
gcagcaaagcttttttgtcatgagaagaagaagaagaataagaggtcaaagaagatctctattcatgatgctccttctgaagctttgagaaagcattttgtcgcatatgggtttacacatatacaccatcttctgtatggctatgccaaagaaaatccggactttgcttctaacttggtaagccttgtctcttcgatccaaagaggtaaagcgaatctgatgataaggctactgaagaacaatgcaacctgccaatactcccgcccatataccaccaaatctgctgcagtctacctttctaaacttacaagtattgcagcatgttggatgtttgtttggaaaaactgcatccgctttcgataattccgatttttgaggagaagagggagagagagattgaattggcccaactgcaaccaaaaagtttcaagcagcatctcaccatgagatttgaagaaaatgtttcatggtttggtaaagaaaactcagatatgataaagaaaataaagttgttggaagaagaaaattgtgacatgagaaagaggatgcttctcctagaagaaaatgcttccagaaaaatactatattatagcatatgtttagtattcatgtgcaccaaacactataaggtttagtgctttacaatatagcactaaacatgtgctataatatagtatgtagagcactttattctctctataattaaacgattcataattctaataggttaatattctctccgtctcacaaagatgaattttttagaaaataatttgtgtcataaaaatagaaattttatatttccaatgcaaattttaaaactgtttatctaattttcccttattaaataattagataga

SEQ ID NO: 47986 - DNA, 527 bp, Arabidopsis thaliana columbia
atcccctcggattttttttttcgttacctgaaattccgattgaagataatcaaagaaaaaaaatggaagctttttgtttgttttgactttaggattgaggaaagaagaggtaacaaaattgggttttgggttgttgttgttgttgttgttgtggcgaataatagagatttcgcggtggactttattataaacacgacgccaaaggttcgcccaccagattatgaatttatttacgagaaaatgccactaaaggccggagaatgaaacgtctccgacaccgtctgaggtaatcgatgacagggaagaatgatgacgtggcgtattgttattggtagaagtttaagaagttgcgattccggcacattaattagttgttgaagggggatttaggaaattacccgtgttattagatagggaaaacgtgcagataataatattctactaactccatttgttaaagaaaatgtagaaatgctttttcaatagtggtgagtggtgacgcaaaaagataatatgaaattaggaga

SEQ ID NO: 47987 - DNA, 1724 bp, Arabidopsis thaliana
attttgctagttttgttcacgtgaaatttgtttgtaaatgttaagactaaattttataatcttatcatcttctgacatatttgcctcagaatcgaacatggaacacatcaactatatgtttttgttttcttcttgttttctattttgtatagactatagaatatacatttttactatttctaagaaaaacaaaacagcatgcacagaccttcagccgaaaaattgttcccttctcactttttaataatgaattaatgatattccctccgtcccactaagatgaattttttaaaaatttcacattgtttaagaaatattgtataaagacaattttaacctcttaatatactttaaaaataataataaatatttatctaattatttagtaaggataaaacgggaaaacagttttaaaatttgcattggaaatataaaacttctatctttgtgggacaaatatttttcctagaaaatttatctttatgggacagagggagtattttctatcattctaaaaagtttaaactatcagaaatctttgtgccacttatcatattagaaagaagtagcctgtccatttcccactgccaccttacaaagcttgtctatctcccttatgcatgcacgaggtagtctacaagctgcaagccaaaaattgcatatgctccacaaaacccaactgatcagatttaaacgtccagcaaaagaaagaaatcgggacgtccaagattcaattttccttgtaatcttttataacaggggaagacagccagatgctgtgaatcgcttagtgaccagagggagtccgagatacctcactggtaactgaccaacttcgaaagggaacctttgggttatctcatggtggactgaatcttaaattcccgtcagatacattgtcgacttttccttgcttatttttagtcgtgataatttttgcaaaatcgtttaacacatgaactattcctcctattgatatgacctttccatcggataggatcttaaggttatcagcaaagctcaagtgagttaagccaagacttccacatttcagatggtaaccaaattgtctagcacctgaagctttatccaacattttagagagaacatccatactaatgacgaataagtatggagagagagagcatccctgtctttaacctcttgcactgttgaaaaaaacaactaattccccattaacttgaaccgagaaggaagacgtagctatgcagagggtaacccaatgaataaagactgagggaaagtccatggctgtgagaactttggtgaggaagtcccactgtaccgagtcaaacgcttttgatatatcaattattagagcgcaacggctagaaattgagtcattatggtagtccttgactaattctgtcgccaacaacacattctctatcaatagacggtcctttacaaacgctgactgatttcccgctatgaattgaggaagaaccaatttaagccggtttgcaattatcttggagataactttatatgtcacattgcagcatgagataggcctatagtctttaatctctttcacatttttctcttaggaataagtgctaatatcgtggagttgatgcctttaggtaagaagccttcaacaaagaaagactgaatcgccaatacaaactcatctctggtgatttcccaagctcctttatagaattctgaggtaaatccatctggtcccggagatttatcat

SEQ ID NO: 47988 - DNA, 478 bp, Arabidopsis thaliana columbia
caaatggatttagtattagttaacgttttacccatacccgtcgacttttctcaaaaatgttctctcatgtcaaaacaaaataagaaagacagttggtcaaaccatgcatttcacacactaagtatttgggtaaacattcatgcaccatttgatattcaacacaaggggcgatcttcatcatatctctcccataacccctcccatacgaattctccagacgcctatctatctatctattattatttaattcgatctctatgactacaaataatcacatatcaatatgtgagtttctctaataatctctagtatcaaaatcgtaaatcacatgtaattaatttccttgaaatgtaaaacacacctaccaattctctaaaaagtaaaaaccattggccgacaaaaaagcgattctctatctaccatcggatatgcaaggagcccgtcagtgtttgggcctaaaagcccaattatcaatggg

SEQ ID NO: 47989 - DNA, 465 bp, Arabidopsis thaliana columbia
gagctgcgtgccgcctcgcagatcgaggccaaggaccgtcggcatggtggcgatcacgatcgcggacgctgcgagcagccctgaggaccaccccgatgatcagcaggtttcgccgccgtccacccatcagttctcaacctcgtggcggtaacgcagcccgtgctcaccctactggggggtgagaacgagcaggagcccgccgtcgtcgtcgtacgcgggaaagacgtccgcgaccgcattcgcgggcaggtcgccctcggcgttgacgtgaacgcgcttgcccagcgatcgcacgccccactcgagcgtcgtttcaatcgggtcggtcgcaccatcgtggtccgtgtcggccgtctccccctcatcgccctcgtccacccactcgagcccgagcacctcgcggaccgggcgcccgatcacctgctcgtccttgaggccggtgagctcgaagccgcccgggcgacg

SEQ ID NO: 47990 - DNA, 357 bp, Arabidopsis thaliana columbia
tttatctgtggtaatttagatgatgtgctataagactcgataatatttttatcgctttcattcgatgttcttgtagccaagtatacatatcctctttatctatagatcaaatttggaaaagaaaaactcgccaatatatccatttaaactaggatcgaacatacgatgtaacagagaacaaaaagttcttgaatgtgataaatcatggtgaggaaagtttagatataataatatacaaggagttaaaacatgcgggaaagtttccatagaaaaaaatcgaataaaagtttatatataggcatcgtcttatatagtcagctctcataaacccttgtagagagtaccatgaagccattg

SEQ ID NO: 47991 - DNA, 524 bp, Arabidopsis thaliana columbia
aactgtttatttttaatggcttaaattccactacacaaatctgtaggtggccatttagttatctggtttagtttggtttagttcggttataaagttttttggtttttgtgtgattacgatttattttttggtttggtgggacttctctttcaacctttttcttaaagtttgtttctctttcccttatccaaatcataaaatatcatgaaataatcgtagttaccaaaatcaaaatatttagccgtaacgttccatgtttgtctccataacaagacacaaaaacaatcccctcattgcacaacttcactgttcagccaaaaaactcgcaaaaagctgttatgttaagttttagttcatcttcccactccttccatagaactagaagtcccatttaaaccttcaaactctactttcttcctgcacacatcaatcagcaaatttagttttatcttatcgaacagatattattacaagagtcaagaggtaaatagatttgaaacattattacctcgtcttttcctctt

SEQ ID NO: 47992 - DNA, 996 bp, Arabidopsis thaliana
tcttgcagatacatgatgaagccaaaaaattctcctactaaactggtgtgaaggttgttgttgcttatggaggaacacccattcaccagcaggtaattatcatacacttttttgtttattggtttttagcttgtcattggagtttggattttgctacatgattctagcactgttttttgttttatgttcgtagcagctttcgcttactgatttgagttctgctagctctttccttcccaatgccagtctcctttgtcaacatatgttctgattttgaagtcagcaatgcataatgttggcgaaaatcaaatcttgtattacaaattttttcatatgctagttaacattgtcgtatcgcttgtatcatctttacataacatgcagaagcattggaatttttaatcattgttacaggtgttagttagtcaaacagttttcaagcatcgatttgttgaccacatattttattgtttattcagctcagggaactcgagaggggatgtgatatctttgtggcaactcctggccggttaaatgatttgcttgaaagagctagagtctcaatgcagatgattagatttttagctcttgatgaggccgatagaatgcttgacatgggttttgaaccacaaattagaaagattgtcgaacaaatggacatgcctccacgtggagttagacagacactgttgtttagtgctacatttccaagagaaattcaggttggttacttgtctgtaaatcactttttctttattcaccttctcattggttgaaatatcatttttagtgaacttcttcactttctgactactacccctgccttgctccgaatttttatttaagtttctttgccatgtgtgttgattcttgtgttccatactttttccttgcaaattatctgcttgttacattttctatgttggggttttgtcgtaacaaccttctgtgtccagttatatccatttggtcctctgaaaaaaatgagggggaaaa

SEQ ID NO: 47993 - DNA, 624 bp, Arabidopsis thaliana columbia
tttcatcatcaagaacataatatatgaggttgaataaatggtaaatgacgttggggatgtgtaaaagacccaccatcgatcaaatcgaccgacttagcaggtaacctccacaagcgtgtgagtgtttcaatactcttaacacgcgctttcattatcacgttggctactcttttttctaaagatcactataattaacacacaacaatcttaaatatattttacatgatcaattaaaatatttttggttcggtagaactactattcaaacaatacatacatactttaaaagattggtacgaatcaaaatctattggtagtaaacaattcgtaaatagagatcaactttatctcagtgttcttattgataagcttatcttaatggtcttgtaggtatagttgtaatggagtgattagggtaaagcgagtgagaaacacgggcaaggagaagtgcgtggagaaagagggaaagtgaggcacgccttctcttctttggtgtttgggtgggcgacagagaatgtcttcacttggccgcccgcttacacttgttccccatttccttaattgtttgctatcaaaaattaatgcacacctttatcttttgctaaatatctatagtatatagta

SEQ ID NO: 47994 - DNA, 549 bp, Arabidopsis thaliana columbia
gaacaattgctaaaactcctgtaattcactttattattttgttaataacccaaccggattaaaccaacccctccgaatcggaaccggcggttaagttcagagaccataacataatagtggtatgaaacagtaaatattaagaaaaacaagggcaagtaccaaagacgccagccaaccacatgctctcgtttatcttcttcaaaatgagtttagtctctctactagtctctcgcctttactcttttctttcttagtactaaaaattaaacgacacttctcccctcaaatccctttttctctctctaaacacatttacacacagaacacaacacactctctctctctctctctctctacgagtctcgctcactgttcatcgaatcctgcattggatcgattcgaatttggtgtgtgttttcttccaatacctctgattagagatgtcagcagatctgaacggaggagcagcagatcggagacgtccgtcggtggtttggaaaaaaaaaaatggaggaagctttagaaatggcgagacgaaggatacaaaag

SEQ ID NO: 47995 - DNA, 535 bp, Arabidopsis thaliana columbia
ttcctttatatatataataactacatgatactcacaagatgatatataagattatacaattcaaaaggttcggttgttaggtgatgatactgactttgataagatccatcttggtcttgagttgttcttcatctagtccttgttccttcaactctttaactctttctttgtaaccaattgtaacctgataaataccaatataaacttcataccgagtccttcaatctcaacatgtatctaaatttcttataatctaaaattgaatctaaagagaatgaaaatgaggacacattaaaacagacctgatcataagaacaatttctgaaaatcccaagccgtccataatgatcaacatctgtaattgctgcattctaatccaaaccaccatcaatttttcttattcatcttcttattctttcaagattcaaaccaataatttaaaaaaatggaaatgagatgcagagagagtgagagagggattacgaaggccacgtagcgcgcgttcgacgttgagagcggatattaaagatggaga

SEQ ID NO: 47996 - DNA, 456 bp, Arabidopsis thaliana columbia
atttggatggacttggtagaatcatttggatggagatgatttagtccaaaaacaaatgacaaatataccctcttttaataatgttaattttcgatagatttcttatttaatatattttttaaaattacctattgtactaaaaaaactctaaaaattgtgaaatcacagactatcattttacgtcaaaattataatttgtttttcccgccaaaatcgcaaaatcatattttccgccaaagccgcaaaaatcatattttcccgccaaaaccgcaaaatcatattttcccgccaaaaccgtaaaatcatattttctcgccaaaatcgtaaaatcgttagatggttgtgttcgaatgatttcatgtattatgtaacacttttgtgatataatataactgatttgttgttaaacaaaaaaaaaatcttttagagatttcagtatagcaccaaattatttat

SEQ ID NO: 47997 - DNA, 425 bp, Arabidopsis thaliana columbia
catcaaataagttcagtcgtcttccctaagctggtacagccacatagattttaccagcttcatgttaaggagcagactgatcttgtgaagaaagctcttcaacctgatcccatcacccccgtcatcccttaatgaaaacacagcttgagaggcttgagcctgtataaagaagacacaacacataaatataagagtcatgagagaatctttggttaccaaagagtgtcactggaaaataaacagatgtttgctagacttacaaatttgagtgtagtcgatttgtgtggtttgttataggatttaatcgagataaaaggtgtatagatttaaaccgtttggtttagtatgataattcattaatttggttcaactttggattgagtttggttcggtttggttttatcagtgactgtatcagcttgagg

SEQ ID NO: 47998 - DNA, 863 bp, Arabidopsis thaliana
acatcccttatgctaactctctcataaactttcccttatatacccctgaaatttacatgcatgatgtctataagaagtataatactgacaacaagatattacagattgcagaattcagtacctatactctagaaacccagatgttggataagcaaaagatgctctctttgctagaaggtagagtatatcttaattcttggcgtccttcttttggagtttaaaattgctaagatacttgcttactacttattttatatgcacagaaaagtatgagccagtcagggctaagtggacgactgaaaggtgtgctgtatgcagatgggtagaagactgggaagaaaataaaatgatcatctgtaacaggttactttaatggcataatttggttatactgaattctacagcgttcttataactaaacatgagtcataaatctgaccaaatctgtaagcaggtgtcaagtggctgtgcaccaagaatgttatggggtaagcaaatctcaggacctcacttcctgggtatgcagagcatgtgaaacaccagacattgagagagattgttgtctttgtcctgtaaaaggtactactgcagaattagctctctttatgatttttttcctgatcttgcattagtgatgttttattcttgactgtcctgtcacaaggttccatacagtcattctgagaattcgcttttgggtagatgtgctctaaattgaactcactttccatatttctagttctttcctgaactcttccattatgtaggtggtgctttaaaccaagcgacgttgagggtttgtgggttcatgtaacatgtgcttggttcgaccggaagttgggtttttgaacatgaaaatatgg

SEQ ID NO: 47999 - DNA, 441 bp, Arabidopsis thaliana columbia
agtatctatctcatcttgagttcatatttttatatctaggcaaaaactggattcaaagatcagaaaacactaaaatgatggaaacatacccaaagaacaagatggtgatcatgaatccgaaactaaacacagaagagagtaccaatcttgagtagagtgcagaataggaaagtatgggactgcgaaacacactctacgactcgttcgagctcaactctttcaatcgccaactcaactcagccatctcttcctcagctagatccatgtccatgcctcacctctcttctcctcctccaccgtcagaaacaacatcttcttcaaccaagaagcaacaatcccctaccaagaagatctcacgttctctcgggaaactcattaaatcaatgtgcagacagagaagaatcaaacgctctgttttaagacaggtcatagcggtgtaga

SEQ ID NO: 48000 - DNA, 534 bp, Arabidopsis thaliana columbia
caagcgcacttcgcttctctctttaatgtcgttcacaatgttttttccaatcgcgccattgatatcctcttcagagacatcccctgaaaccttgagcagttgaggccaatgaaacagaagattgttgtaactgatcaagcaaaaaaaaatagatttttcgttataataatataatatatatgaagaaagttaaataattaaaatagatatttaaaccttcttgggggtgaagtagcaatggtaatattcttgtaaagtaaagaagcttgaaagtctccttgtagacatatataggaaccaggaaggttttcgggaactctaatggataagttccattttgcactaagatgagtatttatatcacacaccgtaaaattcataaaagctattgtactatacggcacatgattagttgttatagatttcgataggaaataggaacacgacaacttcacggcgcacaacgttacccatactaccaacaattgggaaaaacaacagacaattagtgttgctgctggttccccttttttg

SEQ ID NO: 48001 - DNA, 623 bp, Arabidopsis thaliana
tgtgttggtccagtgtgttgccttcgtagtacaaacacagtccccatttggctataaaccgaagcgaaaacaatccctgtggcccaaatcggtaagagacggatcagtgctttgagctcttctacttgtgtcactgtgcatagcttccatgaagacgacttagctgctcctttgttgtcactctctgtttccactgctgccttatcaaagaacctgaaatgatttgaagtgagccaaaagttaacctaacaacacaaaattacagaccggacttgcttgtgccttacgttaatattttggtgtgttcgagcttgcggcttcctatgatactgctttcggcgtcttggttctcgtagagaagagattcatcttcaggaattttcactttagattttctgcatgaagccacaatgacttgcagcattcttgtgagaggacttcctcctggtttctgcagcctgtagaagttgcttccggcgaagaagaacacgacggctatagccattgcgacggtgggaacactaaaccccaaccccaaccaacattcatctgaatccaaacgagaacagaggaagcaatcattgcaccaacgttgatcacaaagtagaactagttaaagaaag

SEQ ID NO: 48002 - DNA, 426 bp, Arabidopsis thaliana columbia
aaacatgatgttaaacaatcaagttgaaaaactggaattggaaaaaggaagacagtaattagaaaatttagatgcgatggaaatcttcttacagtgatccccaacttgggaagaaaattctccatgaagatcctagtcttcctgtagcaatcagtagtagtgagaatgtgtccaccagcaggaaccaatgccaaaagcataacagtgcttgcacacatcccagatgccataaccaaagttgattcagccccttcaagtgcactacagcaatatattaatcagacaaatccaaaaggatcagcaacataatcttcaggaaaggcaagtgcaattataaaacgcattattagagataaaatagtaataaccttatcttatcttcaagtaccacagtcgtagggttaccataacgaccatactcgaaac

SEQ ID NO: 48003 - DNA, 598 bp, Arabidopsis thaliana columbia
aatgtataatgcaaagtgtaagcaaaaacatcatatactacaagaaaataaaaaaaggagaaaatcattgatgggtcgactcatcactagtgggtcaaataaaggcccatgactaagaactcatcaaacatatgttttcaacccataaattattggaaatgacacgtgtaagtgcacttcccgatcactatccaatatcatatcaccgccaaaatctttggcggcaccacccatccaaaaaaaaacaacggacggtacatacgtgttagtcacgcgcttcataaacgcgagtggttgagtaattcatccattcattcttccgaacttctggtgtatctgtcaccgtgtctctcctctgattggccaatccaaatttaaaatatttattttaaatagcaaccccatgattctcggtctatcaaccaaaaacttaaacaagatctgtaccgttgatttggtatccagataaaaaatcgaacggtccaaattcattgtctttgaacgttttaattcgccgtcactggacagagagagagagagatatcatcgacagagatcaacgagtgcaagaacttctcagagagatctgtggaggaga

SEQ ID NO: 48004 - DNA, 568 bp, Arabidopsis thaliana columbia
gtaacggccgccattgtgctctaaagagcacctgatcaaataacgccttttgttgcagactggcctgttcagcaatcgtcgttttggtcatctggttgatggccgcagttaaccctgttgaacccgctgcaaatagcgccaacgtaatgccgtgttttcggatagttttcagcatggtttaccctttgcgatggccgtagacgcgcggacgctgatagtaatcgatcagaggaaccgtgatgttcgccagcaggacggcaaaagccacgccgtcaggatagccgccgaaactgcggatcaaccagactaataagcccgcaagcgcgccgaaaataagacgaccacgattggtcgtagaagcggtaaccgggtcagtcaaaataaagaatgcgccgagcatggtcgctccagacagcagatgaatttgcggtgctgccagtgtttctggtgagaacaacagcccaacattgcgcataacgccagcgttactaagaagctgaggggaatatgccagcgaatcgctttctgccatagcaaccatacgccgccagccagccaggcgagattt

SEQ ID NO: 48005 - DNA, 562 bp, Arabidopsis thaliana columbia
cgggacaaaccaggctgaccaaatttaacaagaatgaacctgccatcaaagaactaaaacataaaccagtatcaacaacaatttcatgttatttgttcaatcaagaacaaataaccaatccgggatcaagttataaggtttggtcaaatggatcttgaagacccactaaagtatgaaacccacaccatagaggataaattgaattcaaagaagtttataatatacctttcgtgttcatggcttcgacagccgactgtgcgtcctctttgctgttgaaccagacatatccgtatcctagtgactgccgagtcctttcgtttgcgatgatttttactgccagaaaagtagtgctctacagtaagaaaaataagattgaacgggtttctgactgatgctaaatcgcaaattccttaatcaagctaacctattgatactcttaatgctgttaaaaattgactcactaaccacaaggtttgcttataatcgacctagcgtaggttttacagttatatgaagggaaaagaaaaacactaagaaacaacaaataatatctagccaatga

SEQ ID NO: 48006 - DNA, 366 bp, Arabidopsis thaliana columbia
ggaactcaacgatggaagctgtgtcttccggagtcccgacggtttgttttcctcaatggggagatcaagtcacggacgccgtttacatgatcgatgtttggaagacgggagtgaggctaagccgtggagaggcggaggagaggttagtgccgagggaggaagttgcggagaggttgagagaggttactaaaggagagagagcgatcgagttgaaaaagaatgctttgaagtggaaggaagaggcggaggcggcggttgctcgcggtggttcgtcggataggaatcttgagaagtttgtagagaagttgggtgccagacctgtggggaaagtacagaacgggagtcataatcatgtcatggctggat

SEQ ID NO: 48007 - DNA, 671 bp, Arabidopsis thaliana columbia
ttctgaattgtgaagctaattcctgcattttcacagagaatgcttcgtcggaggagaagaaaccggagctcgcactacaaactcttctcaaaggattatgtttcttcttcacatcagttctaatcttcttcgtggtggaattagaaaattgccaaagctcacatgatttagatcggtgaagtttcccagattgtgttccgagaaacgtcgaaggttttaatctcaaagatcctcctccgacggaaacatcaccggctattccacgagaacgacggcgtttagatgaagttagggtttgcgaaaatgacggacattgaggaatcgctgtgtgtcgtcctgaccaatgaaacgacgtcgttgttgctactttcacttccattattccgatgaaacgcaaacaaatctcagaatctgtataaatcgagaaaagctataaagattaagacaaaattgattacgagaaattgaaagataagagagaatgagaatgagaaagagagagagcttacttcttcttggtgattcgaaattcgttcgttgagagagagattttctcgggagaattttttgtatggttgtcaggtcaaatcgaattcagaggcttacgagagctcctgaactttgttagaaccagagaagaagaatgaagaagagacaaaagcccttgtatg

SEQ ID NO: 48008 - DNA, 605 bp, Arabidopsis thaliana columbia
aatcctgagtttagtggcactttgcttgtgatttttcacttgaggacattgatttacagtgctgaatccgagtttcatttgttttctgatttgtagtttcatctttctagatatttgaagaccaatatcattttatgtcttgaatgtcttactgtaggatgggaaaatcgaagctgaagtaaaacttactggtatcctcagtttaggagctctgcagccaggtgaaactcgaaagtacggtactactattgctcctgggttgtatgcaccagtccatcaacatttctttatcgctcgcatggatatgtctgttgactgtaaacctgctgaagcttttaatcaggtacctttttatgatgctgctcttcttcttgttatttacttacatatgcggattattttctcagtatttaggaatggcattggtagcatatgaattttagaagtccctatagttcttgaaaaaaaatcttagatacatgttgtcagctggttttgccaatagtcagcttaatcacttttatctgtaggtagttgaggtaaatgttagagttgacgagcgaggtgagacaatgtctacacaatgcgttttatgcggaagagaa

SEQ ID NO: 48009 - DNA, 572 bp, Arabidopsis thaliana columbia
gtccattatatagtaccagctaacaaaggattcattgtgggtattgttctgaatgtttaacagaagaaataaatgaagcaattgtttctctaaaacaagattcgtttgaatatttacggtgaagagacagatagatttggtttctggtggaggaagtgttggtttaatgggtttgatatcttggagagtcatcataaggtgttgccatgtacttgggttagtttttagagtctctctgacacttttccatcatatccttagcaaaacttccattttaagagcttttgtatgtaattaggatcattcctaaagcattgatgcatattgaggtatgtttaagacctctacaaatttttcattttgtaaagttttggttttgtgaattgcttttggattgtgtcggtgttttaagcacatatctggtgagactgttggagaggtaagaattgtttcagacatgcacgagcgcgaagctacaatggctcaagtagcgtggggctttcattgcgctcctaggcgagtattcttattcaaaatttctagcaagttttgacagtttgcaacatgatgat

SEQ ID NO: 48010 - DNA, 529 bp, Arabidopsis thaliana columbia
taacaaaaacatgaaatttaattagaaaaaaaaaagttgcaatatttggaggacgatagttccgttgtcaaatgatgaacaacgaagaaaccgtacattgatgagataagttttatgtgaaacacatcttgccacctatatttatgtaactatgtgaaccataataatcataagctctttacaatatattttcttagttttgtttgtaaagcaaatttatggaagaaaaaaaaaaattgtcgtccacatatttccaatctcttccactttgattctcttccattcaatctttcttcgaggtttaaagcattttctatgatacaaaagtataagagatgtgtatccagttgcaaaacttatactatgaattgactatactattttgataatttctataaccataacggctgcatgaactatatacttaaaactatgactacgatagtcgcaataaatgtatcgtactatccttcgaactcttatacgatttaaaaccttagcatatcaaacatttaaatttctagatagt

SEQ ID NO: 48011 - DNA, 561 bp, Arabidopsis thaliana columbia
tgttggatgcgttgttgaggtggaacggctggatttgttttgggatgtgtataaggggatggttgagagaaatgtagtatttgatgttaagacctatcatatgttgattattgctcattgtagggctgggaatgttcagttggggaaagatgttctttttaaaacggaaaaagaattcaggacggctactttgaatgtggatggagcacttaagcttaaggagtcgatgatttgcaaaggattggtgccattgaagtatacatacgatgtacttatagatgggttgtgtaagataaagagactagaagatgctaaatcgttgctggtagagatggatagtttaggtgtgtctcttgataatcatacttatagtttactgattgatggcttactgaagggtagaaatgcagatgctgcgaaaggactagtccatgagatggtttccatggtattaacatcaaaccttatatgtatgattgttgtatttgtgtgatgtcaaaggaaggggtgatggagaaggcaaaggctctctttgatggaatgatcgcatccggactgata

SEQ ID NO: 48012 - DNA, 568 bp, Arabidopsis thaliana columbia
ctaacttcttccacacgttatgacacacttattccccaagctaaacttagtaaatgcctaccttgttaaatcctctgtattataggtggaaatctcttcttcattcgtcgccctcctctgtctaaaacaccaatctaatctttctcttcccttcacactttttgccaaaacgttttcttatatacacacaaaaaaaaaactcaaatttgtggagaatcgtttactcttttcttcttgtatatctcttgccctaattctaattacagatttttccgtagagacgatgcagaaagtttgctggccttactttgatcctgatttcgacaatcttggtgaacgcatatacggtccaccgtaagctcttctctcttcctatgtgataaattcgttgaacaacaatgtgaatccatatacatttttcatcacgatcatcttcttttttggtgtgtgtaatttacagatgcagggtctatattgacaatgacagcattcaagattgcaccgttgtgaaggtaccaaaaattggtccaatggtatctatgcgcgaataggtcttgtgttttgtgat

SEQ ID NO: 48013 - DNA, 604 bp, Arabidopsis thaliana
aaagaacatattgaaaaacaaagaaagagaggcaagaactggacatgcagacaagaaacgcaattcacagacttttagacaacacacagaactaatcacctgagaatactgggaaagtagcttcgcccatggagcctttaaagctcgcttcttagccgccttagatttgtcagcatcgccaccgcttcacctagatccacataaacaccaaaacattagaaaggagaatactttagactagaaatggtgagatcacaaggaaagaaagtgaaaacctgctacggtaggtgtggccaagacttcgacttcagggttagcgtcggtttcaggagagttctccatcacagggacatcagttgtaacaacaggcttctccgcatccatagcctgtggatcagaagatccaagttccggctctccagattccgatccaggatccgaagcaggtccttgattctcgatcggaacttcgctcgctgatgaagaaccagccggttccgccgtcgcctagggtttcaaaattcaaaaaaaaatcagatcccggagaaacaagattacccagatcaaaaatcgagagaaggaacaaaaactggaattgggagga

SEQ ID NO: 48014 - DNA, 520 bp, Arabidopsis thaliana columbia
taaacttcacattaattacatggctgccaatatcattaccacacagctctgttttgtttttttactctacatgtcttctcattaaaaatgagctataaaaaaaggtaatgattgtttaattagcttattttgtttaaaaaatattagtaatgacctacttaaatctgcttatgttaacaaaatatatttttgtcatgtgttttggtaactttcttttgttttctatgaacaaatgcttatgatcaaatggacaagtgtttatggtcaaatattagtggataatctgaaagtgtttatatcccttaatccattgtggtgctgatggtgtccaaagcctgcaacaagtcttgatgattcaaataaacgtaaaatgagatgaaccctaatctttaccactaaatttgaaaccgtaaaacaaaactctaaaccatatagtatatcataactataaaaaaatgataattttacagagcgataaacacattcacagtagatcaagacatatgtgtcattaatgaat

SEQ ID NO: 48015 - DNA, 705 bp, Arabidopsis thaliana
cgccagtgtgctttaaagttggtttgttgctgccccggtggtgacgtatatcctctgtgcgttagtggtattgttggcaagcgcctgttttgaatggcagattgtgcgcccgatagaaaatgttgcccatcaggcactgaaggtggcgaccggagaacgtaatagtgttgagcatctgaatcgcagcgatgagctggggctgacattacgtgcggtagggcaacttggcctgatgtgccgttggctaattaacgatgtctcaagccaggtgtccagtgtcagaaatggcagtgagacgctggcgaaaggcaccgatgaactgaacgaacatacccagcagacagttgataacgttcagcaaacggtggcgaccatgaaccaaatggcggcgtcggtgaaacagaactctgccacggcgtcggctgccgataaactgtcaatcactgccagtaatgcggcagtgcagggtggggaggcgatgaccacggtgatcaagacaatggacgatatcgccgacagtacccagcgcattggcaccattacttcgctgattaacgatattgcgtttcagaccaatattctggccctgaatgcggcggtggaagcggcgcgtgccggcgaacagggcaaaggttttgcagtggtggcaggggaagtgcgtcatttagccagccgcagcgctaatgctgccaacgatattcgcaa

SEQ ID NO: 48016 - DNA, 512 bp, Arabidopsis thaliana columbia
ttgttcatagaaaacaaaagaaagttaccaaaacacatgaaaaaatgatacaatattctgttaacataagcagatttaagtagaccattactcttattttttaaaacaagataagctaattaaacaatcattaccttatcttttaaagctaatttttaatgagaagagacatgtagagtaaaaaaacaaaacagagttgtgtggtaatgatattggcagccatgtaactaatgtgaagtttataacactaatgtgaaattatgaacacagagtttagcatttgatatataaaaagagtttaggctacacacctagataaagaactggttaatcccaagagagttggagtaacagtaatatcagaatggtggaccatcacttcccctttcaaagcaaaattggtgagtctcatccatcattttcttgcataggaacgacaaagctaaaacaacaaaactccaaaacccaacaacaatctcttacaagtataatatatatagcactatgaaatt

SEQ ID NO: 48017 - DNA, 596 bp, Arabidopsis thaliana
tctacctaatcaaatactatatgaactaaagactatataaaaacagtaatgtttaaattgatacttttcatattatagatggacaatagcaagtttagcaacacgtacggttacatgtttatactcaaaatatattctaaaaattattgagtctttaataaatgggatatattcaaaatgccatgcttgttttgacaagatgatgtatacaaaacaaacaacgcataatgtcacaattcaagacaagatgatgtgttgttgagacatttctttatttattcttcagcaaattgactttaaattaagattcaaaactagaaagatcattgtctttttgagtatccgtgcaacatgagacagaagcagagagactaaagagagaaaaagatttagagatggagaattggccgatcaagtttctataaaacacctaaatcttctaatcaagataatatatgtgtgtctatgcctccaacagagaaaaaaaatgatcttttatcattcaatttgataaacatactcctttgccctttcaaaacattattcgatttcattagtgtaaagacacaagacttaccttgaatattgatgatgac

SEQ ID NO: 48018 - DNA, 538 bp, Arabidopsis thaliana columbia
gtctgttcgagagagagcgatcgagcgtcggagatggagagaatatgattcgactacacaacaactttgatgaagctagaaagtagtagattctcagatcagaagcgagtatttgtggggatttggatatcgagagatcgagatctcacatgcaagatatcatcgcccttagagagaagagagaagtgagaagagagtaaagctggttagggtgttcaaaggtacagtgaatcgtttccgcttcctcgagaagataatattaatgaggcattcgagaattattttaaattttaaaaactttgctacaacattgtcgtttcgaactgtgagtacacgtaatgattatttagacgacttcacggcattatgaaatgactacggtatatgacgcggcaacttccgaatgcaggccacgtggagaaagttttaccgcgtctatttgttactaacgagttacaaattataatgtaactaatcttattgggttattgaatttttaaaagcccatcacggtagcccaaaatttttggatgtttga

SEQ ID NO: 48019 - DNA, 606 bp, Arabidopsis thaliana columbia
caaaaattatacagcttaaaacaaaaccacacacaagatttatcaggaaaaaagaaagaagatcgaactttaaaatcaaaaagaagaaaaccacgggttaccttgaagttgaagaagtagaaggcttagtaaacgtcggagatggagtgatgacgagagagacagatcgttaatattggatcgagaggttacgagtctgttcgagagagagcaatcgagcgtcagagatggagagaatatgatcgaggacacaaagactgtgatgaagctagaaagtagtagatttgagagagaagcgagtaaatcgccggtgtggggagagagatctcgagagatcgagacacatgcaagatcgccataagagagaagtgagaagagagtaaaatctagttagggtttacaaagaaacgggttgaatcgtttccgcttcctcgagacgaataatattaatgaggcattcgagattattttttaaatttttagaactttgctacaatattttgtaccaaatatgggtaaacgtaagtagaagtttctaacgggccgacccacatctatctgggccggccgcaatggacattagttttgatggccaagacgggccgg

SEQ ID NO: 48020 - DNA, 375 bp, Arabidopsis thaliana columbia
tccccgttaaaactagacaaagaaaaacaggcgggaaaccaaatcaatggaggattcttagctttttctctgtaactcccattatcgtatcttcagcttagtgagatagatggaggaaattggcggcggaacatcagcagcaatggtgtggtgatgaagaaggaaggattagggttttctaaaaggggaattaaaatagagaatccttttgcttttaaggctcttcaagtcttcactggatttggcgttggttgtggagttggtattggtagtggtgcacctttgaatctcggtatatactctctttttccttttgctccgtttttgaggtgtgaaggagtgtgtaattaagaaatctggtgagattgattgtaa

SEQ ID NO: 48021 - DNA, 557 bp, Arabidopsis thaliana columbia
tgaagaaacagcactaagaccatacttcatggctgcttcccacaccaaatcgatacggtcaacatcaatggctccaacctcatgatgcttccaaccctcaagcatatgaaccactcctcctgcatggcacgcatgtaccacccctctctccatcgtgtactgccacacatatacactacagtttagtataaaaacacaaacaagacatgattattaaccaatcactctttatacctcgcaagttccgagtccttcaacatctttagggagcttcatagctgctagatcaccgtaagtgcagttccttctaaacttaaggattggtggcaccacaaactgatggaaatgcgtccctgcaggagcccagctctgctctcttggtgttaccattttccaacgatccaagtctgcgcaaacatatatttaaactctccaaattcagtacatttacacttacacaacaaaccaaaaccagttagaaatcgttgcagtaccttgcagtgttgagcagcattgtatttggtccttgtacaaggttgttctggaactcaacagga

SEQ ID NO: 48022 - DNA, 1639 bp, Arabidopsis thaliana
cttagtattatgcaattttttctagcgtgtaaaattaacttcttttttttctttgttgagaaggtataaactaaacttgataatgataaatatataacttcacatatagttccatttcaaagaaaactaaagaatgccctaatacagttgtattcaatggacggcgcataatatagatcacttattctaaggtaaaagatttcacgtgatcaccgagtccaaccttctattcaaatctctcgttatggcaatttaataaccactagaaaaaacaaattatagagaaaggtaatttgggcaccgacgtgaatttgactaaattacgagagagaaagaaagagagacttggtcacgaaggtgttaattagcatgaaagagagagaaataatcgtcgttgaccattgaccataacttagtcagtcatatatataaaaatccaaccgcccactattgttcccctattcacaaggtccttgctttctcagacgtaaacaacaagaaattatattaacacaacaacaacaacaaaaagaccaaccctatttattcatattttctcttatatgcaactctcaaagaatccgatcaaacaaacgagaaatcgagagaagaattacaccgacgatttcaccatgaagagatctgtaatcatggctcctgaatctccggtttttttcccacctccgcttgttttctctccgacgtcggtcaaaacgccgttgtcttctcctcgttcgtcgccaccgaagctgacgatggttgcttgtcctccaagaaagccaaaggagacgaagactacgggttctgattctgaaacggtgttgaaaaggaaacgaccaccgatgcttgacttaacggcggctccgacggttgcatcgtggtgcagtacgacgagagagacggcggagaaaggagcggaagttgttgaagcagaagaagatggatactactctgtttattgcaagagaggaagacgcggaccaatggaagataggtatttcgcggccgttgatcgtaacgacgacggaggttacaaaaatgctttctttggggtatttgatggtcacggcggatccaaggcggcggaattcgctgcgatgaatctagggaacaatatcgaggcggcaatggcatcggcgagatcaggagaagatggttgttcgatggagagtgcgataagagaaggttatatcaaaacggatgaggatttcttgaaagaaggttcgagaggtggcgcgtgttgtgtaaccgctttgatatcgaaaggcgagcttgcggtttcgaatgcaggcgactgccgggctgttatgagtcgtggtggaaccgcggaagctctcacttccgatcataatccttctcaagcaaatgagctcaaaaggattgaagcattggtgagttttatccttgtgcattggattttgattagtaacatcacataattgtggaattgcatttcaaaaaaagaaaatcattgaattcgtggaaaaagcgactctagtaaaaatgcggttgataaaatttttgcaaattggagaatcattctaccattttgcgttcaaaataatgttttagtgcggtttggtttaatttgtgtttggtttacttatttttgaatgtgtgtagggtggttatgttgact

SEQ ID NO: 48023 - DNA, 525 bp, Arabidopsis thaliana columbia
atattaaagaaaataatatatcaaatcaaagcctttgagatgatgagttcaattatatctttaaaacttttgaatacaaatatatgttatagtgaaaacgtttataacatatgcaaaatcgcacaaataaattatattgtgtattattttaaattttataaatttattttgcattttttgaatgtgcacaataaattgtaaaaataagcgattttgagtgattttttcgcaaattcctaaaaaccaaagtgaactagtttttcatatttgtaacaaaagcaaacaaaaaatttaaaagaaatggtaactaaatttcaaaatttgattgaggtaactaaacgagtcgttgagctaaataagtacataaaaaatgagtatataatattaagttgacaagaaacaagacaaattgtcagacaatttaatagctttcgagtcgcagttttaaagctctatgtttagagttcagaaaacaggtaaacttcatagacacgtcgctctctcgagtcacgtgtcaacagaaac

SEQ ID NO: 48024 - DNA, 509 bp, Arabidopsis thaliana columbia
tgcgtcgtgatttcacctaaccagcaacaacactcatgggaacacactgatatacggtgtatcgtaggcagttacaataaagttatttgcgtagaacacccaaatgaatcgaccagaattcaaaccgaacatttgtgtatatttcatggtagcgtgtctgaagttagcagcaacgaggcattgtttgaattctgcatcgatgcctcgaatcaatttgataacttcaagattctcgaatgtggtgtacgaatcttgactaatgaaccggagagaagcagcaagaagaccgtctctagggggctcaggtcccatgccaaaattttgaaagcttgcttacataaaaggaaacagaaaaaaatgattggttatttactaaaagaggaatttggtttgccaagggataacaggattattgaagtcgatgaggacaacaacaatgatcatacagtgagcttggactcggcatcagacaatgttgaaggaaaggagacacctatagattgttggag

SEQ ID NO: 48025 - DNA, 577 bp, Arabidopsis thaliana columbia
cattccaaaagagcgaggctttcatggaacagtagttactgcaacaccttcggtttgctgaataagctccaacaagctcgcagctttcctctttgctctatcagtgccattctcagtaagttccttcaaggccacatctgcaccaacctctcttgctacatttagcctttctatattcccaatacatagataccaaagtattgctgcagcattttcccggttccttggtgaccctgtccttataatctcaaccaaaaccgggatagattctgcttcagctatcgctgttttcccttcttggttagttgaaagaattgctaaaatggccagagcctcatccaccattccgccacctgcatctttcagtaatctggtcagagggtcaacaataccgcctttaaccgcccttgatttgttcccctggtatatgcataagttgaaaatcgctgtagcagcatcttttttgcctcttcgggttccttcctcaagcaagcttataagtgcttggatagctccagcagcacctattgccactttgcttgcaactataacagataaactgaaaagggttgcagca

SEQ ID NO: 48026 - DNA, 376 bp, Arabidopsis thaliana columbia
aataaatatttaaccaataaaaaatactgcataatttaaataatcataaactatggaattaatataacttatgcctagtacctagaggaaaactaattgggaacaacaatgtcgaagctttcaagatcttaattacgaatggacagtattatcttgttacctcgaacagtacaaagtcatggggaagctttgagcgaaatattatatattaatttctaaggtcgtaagaatatctgtttagagcactaataacaaatttggaacctcatttcttctttacaattgaagagcacattctatatataattatatattgatatatgtgaacattctaattagtacaatgctctcgaatgagtatactacatagagtcat

SEQ ID NO: 48027 - DNA, 544 bp, Arabidopsis thaliana
tttctacgtcaaactccacatctccattctccaggaccaagcggatatttgaaggaaacgcggtggtcatggtgattgacgtttataacctgtggtaaacgagcacacttttgatggaagatcatgaaatcacattgaacacagatgtaaggagaacgatcgcctttcgtcccacaagcatcacacacgaaggagatcaattttggcatgtgtgagtgtatgcttatggatcttcatatttgatagagaaactggtggagggccttcagtcgcgcaatccagatccaagctgaacttacatatatcacaatgatatagtaagttcccagtagtgcctccacatatatcacaacttcggtccgtataatctggagctccactggagataagcttaagagggtgtctgacatgagaagggtgaataatctctggtgattcaaatacagagacacatccctcatgaatcacaacctgcaacgagggcagcaatatccatgtttgctagtaccatgacaaaagtcgcatgacataagagaagctttta

SEQ ID NO: 48028 - DNA, 462 bp, Arabidopsis thaliana columbia
attgaaaacctaattaaatcaaacttccatttgtaattaggcaataaacaaacattaatttcaaatccattaattcactaatcaccctaatcatctcttatttgataggtatgaaaagattagacattttattgaacactctaacacctctggacacacaagatgttcatgctctatattctaattagaaagatcaattctagcattaattggaacatttaaatattacttctgtctttctatagagaatgtatcagacaataaagaagaaaggatgtgcctcaatatctaaatttgtctccattgaaaatcttaaccaattgaatcatggcttatagatcactttctaaacagcaatttgtactactttcaacctgatgttcaatggaaaagaactaacatatataaatgaattatcactttattaaagacctcacaattgattgacattcttacaaacca

SEQ ID NO: 48029 - DNA, 889 bp, Arabidopsis thaliana
tgaatccttcgctaaacatttgacgacaagctcgacatctccctaagacgtatggtatccattggaggctaagatccagaggctgtgggctaagaaaatgtcgtttctttgtagcaagattagcacacctttcatggagaaaaaaaccgcaatatgattttgaacacttgtagaatgtgtaagagccgatgggatgaacacatgctccacataagctgctttcttcatcgtcattgtggaggctaaggttatgttcatgagcgaaatgagtgatcgtgttgtcatcattcctcttaaatggctcaatatcttcaacttcttcaggtactccatcaagctcttttccatcccatacatctttccttgttgcacacagtgaatgaatagcataattaggacaaagagagcatgaataagccccatatgaccaatcaatctcttcccaacaaactccacatctccattctccaggaccaagaggatacttgtacgaaacacggtggtcatggtgattgacgtgaatgacacgtggtaaacgagcacactcttgatggaaggtcatgaaatcacattgtacgcagacataaggagccctgtcgcctttcatgccacaagcatcgcaaacaacggaaatcaatcttggtatgctcatggaccttcatatttgaaagagcaattggtaggagcgttttaatcgcacaacgcagatccaagttgaacttacacatatcacaatgataaattaagctcccagtctcgtctccacatgtatgacaacatcggtcttttgtgtaatctggagccccactagtgagaagcttaagagggtgtctgacatgagaagggtgagtgatctccggtgagtcaaatacagagaaacaactctcat

SEQ ID NO: 48030 - DNA, 157 bp, Arabidopsis thaliana columbia
tagttgatatttgatataccttcactttcagttttccttagtgcagatttctttcacttggcagctattattcttccagttacataatactagtagctactgatttcttaaaatcatgatatttctcacaaccatcatccttcgcgcattacccatc

SEQ ID NO: 48031 - DNA, 570 bp, Arabidopsis thaliana columbia
ctcatgcttctacaggatcccctatcaaagtacttattaagaaattaatcaccaagcttcattaggataatcgaacggcagaggttgaagcggagaagtcttactcaaatcagaatgaacgtaaccatacacgcgcatcacctgattatcagcaaaattaagggctctgatcatctcattccaacacgtgtcaccatcgtaactcggattatgatcaccgctacatggttgacatcccgtaaaatgcgttataaacgcgcgtctgcgacttcctctcccaccaaactcgcctttcaaaaaccgctcttctctaaacgcaccgtatcgttcgctcactttctccgcgtgacgcctacgcaacgtgtcgtcttctcgttccatctcaagataccgttccgtcacgttggcgaaatcccaaatacaccaatccaatacccttggagataatactctgcttcgaggtatatcttaggataatacaactctttatgtttataaagcaaataaatcagagccgtttgatcatctgactctggaaacaacttatctttgaatatcgaccgttggatg

SEQ ID NO: 48032 - DNA, 602 bp, Arabidopsis thaliana columbia
tcatcatccttatccgtaacctttatccaaatttatagggaatgatagcgggccacgcatactacttcttggcatttgtgtatccccgaatgacggatcgacgtcccttgaaaactccatctttcctcaaggccctatttgctgatgagccagtcgtgattgcaaggccagaagatgtgagatttgctcatgcgccttttgatgaaatccaccaagactgaatcttgatcctccacaaaacaccagccacaacgcacagttcaagtgtactcagataatgttattgactcttgacctttatagttgtggataatgtggaagtgagatagtgttggctctgatttttttccctagttttctgtctgcttttcttgtccgatacaaatgtgtttcctccttgtgcatatgaactcaaattgtgtacaaagtcttcaaaagtgctagtttatagtttcgtcattagatcattagacaatgtctcacaaagagaatcaattcttatgttttaactacacaactgggacaacaagggaaggacgcaaacaaaaccagtacaagcgtcttgataagcctggtctttgagtttaatcataggtagtaat

SEQ ID NO: 48033 - DNA, 726 bp, Arabidopsis thaliana
cccatgccgttcttttcaggtccaataccagtccgatcaatttttagacaaaaacaaagactatgttgtcgccgagcatcaggatttgttaaatgcttccaaatgttcttttgtgtcaggcctctttcctcctcttcctaaagaaagtagcaaatccaagttttcttcaattggcgctcgtttcaaggtgacttgcctgcaaatccattaagacttttaactaatagataagactgcattattggaccacacataagatattgttgaaattttgatgccacattcatcatctgtacggactgacatgtttaagtaattggtgcagctacaattgcaacagctgatggagacattgaactctacggaaccccactacatcagatgtgttaagccaaacaatttgttgcaaccaacagtgtttgacaatgccaatgtcttgcatcagttacgctctggggtctgttttcttctgaataattcataccaacatctttgatgtcttgaggtgttatatgatatttgtcttatgcagggtgttcttgaggccatcagagtgaaatgcgctggatatccaacaaatagaactttcattgaattgttaaatcgatttctcattcttgcaccggaaattctgaaaggagagtatgtatcagttaccccgttaagcttggacctttcttccactcttgtatgataaattgctccttgagtctgtttacacagttt

SEQ ID NO: 48034 - DNA, 531 bp, Arabidopsis thaliana columbia
aactgtggcggactctctgctattcagctgtcgactgaacacaatgctaacaatgaagatattcgttgggaactcaaggacttacatcctgatgacccgcagatcgttgtgttcaggcatggagtttggagagttaagggcatcattcaggtagtttctcattctcctgccatcccttgtgatgttaattttccaaaagaaaaatgtaaaattagtcacttagacataactaggttccttgttgtgttaactctctttggtttcgcaaactttgacatatctaccttatgcttgtttcggaagagctaaatcatttttcttctctcttttttagtctttgagcggtttggcctttcttataagctatagaaaagttcattagaggtctgagaagtacaaatctttaaaaagttttgagaattagcaagtaatgaggtagtgcataagcagaattagcaagtaatgggtttctgatgaactccagtcatatgtactgaacaagctaaatatatgtcttacgctctttgtgat

SEQ ID NO: 48035 - DNA, 487 bp, Arabidopsis thaliana columbia
tgatgctctccataaaaaaaatgaagttgacctattatttaaaggacgagactgaaccaaacggtgaaatagaaaaactctatttgctaatccaaattttctccaagaaaacatatctttgacgacctatcttcttctccaagaaacagttagggtttatcttttgaagcgatgggttgttgttcatcagattgcttcgtctacttcatcctctccattgctttagctttcatggccatctccaccactctacgttcacctccggattccgaacccagaatacccattgctttttcttcctcttcgccttctctctctttaaacgcctcaaacactctacggcaatctaatttcaaagcaatagccactcttctccacatctcccctgagatcttcctctcttcttctcccaacacaatcctctttgccatcgaagatgcttccttcttcaacacgtcatcgcttcatcctttgtgtctcaagcagc

SEQ ID NO: 48036 - DNA, 573 bp, Arabidopsis thaliana columbia
taagaagattttgtaattgttcaattgaaacgaagaaccatctttatctaaatagggctttacttacatatttaatattccttttagaaaagggaaccaagtctccaactggtgaagattagcaagaccttgaaccaatacaacggggacaatgtataggatcaaaagagctacgaaagccacaagcaccactacattggagatccatcttctcacaaacgatgcagtgaaaaatggccaatgaacatcttcgggctccggggctgcctcagttagccattgtgttggatctattccttgctgaatgtttgttgctattgcagcaccatgtcttgtcctaaaggaaacaaaagcagctggaacttcctaaaagggtttgccaaaaaaaaaggaatgaatatgttgaagaatgcaagtagtcacaaaaagacaaattctcacctctcctgctaataaagactgtttcaatctcatgtcatcttctaacttatcaagcttcttttggtaatggtcaccacatcaacattatcccaaacatccctagaaccacccacctagacttttggcgagata

SEQ ID NO: 48037 - DNA, 104 bp, Arabidopsis thaliana columbia
atggccagcgtggaattctccggcctgatccgcgaagaagcctctcgccggccccaaccccttccgtgaagtgtggaacatggccaagcccaaggacaactcca

SEQ ID NO: 48038 - DNA, 518 bp, Arabidopsis thaliana columbia
  unsure (1)..(518): unsure at all n locations
nnnnnnnnnnnnnnnnnnnnnnttaaaggtcaggggcgtgaaacacagtttaaggcgctgctctatccgttcggcaactatctctgcattgccttcctcggcatgattttgctgctgatgtgcacgatggatgatatgcgcttgtcagcgatcctgctgccggtgtggattgtattcctgtttatggcatttaaaacgctgcgtcggaaataaggcattcacgctacatccgacaaaacgatgtcaaccatccgaaaccgctctcatccattcgatgagagcggtttttttaattactgcttaaatgcacccgccagagagcgaatatcattgccggttggcgactgatgaagtcgcagaccaaactcttcgacaatcgcaaatatgtgatcgaatatatcagcctgaatgctttcatattccagccacaccacggtgttagtaaacgcgtagatctcgagcggtaaaccgttatcacctggagccagttggcgtaccattaaggtcatatctttacg

SEQ ID NO: 48039 - DNA, 623 bp, Arabidopsis thaliana
gaggtggtttaatctcgccggcgatgagaagaaaccgtactccgggagaatccacgtgaaagtttgtcttgaaggtgggtatcacgtgctagacgaagcagctcacgtgacgagtgatgtcagaccctctgctaaacagttagccaagccacctattggtttattggaagtgggtatccgtggagctactaatttacttcctgtgaaaaccagagacggtacacgtggcaccaccgatgcttatgtggttgctaaatatggaccgaaatggattcggactcgtacgatcctagacaggtttaatccgcggtggaacgagcagtacacatgggatgtttatgatccgtgcacggtccttactattggagttttcgacaatggaagatacaaacgggacgaatccggaaagcaagggagagatgttagggtcgggaaaatccgtgtacgtctctcgacactcgacatgaaccgcatataccttaattcctacaccttaaccgtgatcttaccaagcggacctaagaaaatgggagaagttgaaatcgcggttcgattctcttgtccatcttggctaagcattattcaagcctatgtcacaccaatgctacctaggatgcactatg

SEQ ID NO: 48040 - DNA, 814 bp, Arabidopsis thaliana
taaacgatgctttcaaatgcaacttgtgtgtgagaagaactaggttttaagctcgatgatgagtctccaagacctcttaggagcttaagcacgtcggcttcatcgtccaagaagtatttagctttgcttggttttcttccaaccgtgcatgcaaaaacctctggctgcacaagaagttccggatttgtcactgtgcttaatatgctctcaaacatgtcttcgtctgaactatcgtctcctatgcacatcaccatttccggtggctccccgcgttctaccatttctcggattactttctccgcagctagacctttgcttacaccctaaatacattacaatgagtcaagtcaaaacatattctttgtttcatggttttccaactcaaaacttggcaatgagtgaactttgatccgttctaactatcgaatgtgcggatggaagggaaagagattctctgtttttatacttacttgtggtttgacttcaacgatgtgttgacctctcttgacaaccacaggctcattggcgagaacactctctagatgatcaagcatctccttagcttgacatgatccaaagtcaggatctgcgtcttgatggtgccacaccaaagcactttctttaaactctatactcgtcccatctgttgcctccatatacgatctcataaccggttccaccattgacctccactctgtatccgtaggcgaataacaagtctcccactcatctttgctcttccatctaacacacacgtaacaggatataaaagagtattctcaagtttagtcagaacaagactgcatttataata

SEQ ID NO: 48041 - DNA, 380 bp, Arabidopsis thaliana columbia
caaacttcattaactggactcaatcagtatatactatagggttaattagtcctataattatgagatttgaaaattttaacacataatggaccaccttaggttaattgagtatccgagcgaatgttactgtatgcagtcatcgagaaatctcaaattgtgtatgagtaggtctgagtcaacaacggcgatattcctccattgaccacaaccggacaatcactttggacattactagcatcactatttttgtgatatgaatgattatatcgaattgctggtcgttgcaattattgtgggcagaaacaacactggtgcgatggcatatcatgacttaactctttccagtgtgtagaatctgtgtgcatgaacagtatcacgtt

SEQ ID NO: 48042 - DNA, 506 bp, Arabidopsis thaliana columbia
ataagcaatgttacaaaacagtaacaaccacgcatcgaacaaaccattaactatgaatgagaagcacacgggattacaaataaaaaggaattttgaattttcatatgtcacttgaattggctagaaaaatacatcacctctatttgaggaaatatttctaatttatatgcaacgttacaacttacaaatggtaaccacgagtggaacaaaaaagttgaaatgagagaacagtagaatgaaatatgattatcctgtaatttcacattcatgattgattccacttacctaaacctttgcggatataaaatttgaattagtgataaactatattttggtgcggtccataaaatagaaatccaaaagacaagtttcccataccataaaggtcgagacatacaaaagtcacttcagacataatgatgtgatgactttgtctattttctctaccatccaaaatggccgtgagaattgagatcctcttgaccttacatcacatttattcacta

SEQ ID NO: 48043 - DNA, 607 bp, Arabidopsis thaliana
gagaaagagcgtcaacggctcttggaaactctcaaccaaattccgatccaaactagagaacaaatcttgtgcagttcctttgaggtgtccacgaacaacaaacacaagctggcgtctctctctcctagtttgaatctgcctcatctaacagctatcatgaaagacttttatatgtccctttgggtcgtatgacccgttcaaatactcgatcttgagctttcacaggtcagagatcgtggcctaagtgatcatgcgtgtgaatggcgtattgtacgattcttccgggatgcggtcaatatggaggccgaggaggccatgctatgcatctgcgaattcacgagcttcatgtcagcctcaacattggctagcgaggcttttatcacgtcgatctcatactccctttcgtactcctcggtccatttgatgttttcctcagcttcttcatcgttagtgacttcaatctgtttgattgcattagcctctgcttggggatgcagttcttgatggttgccaagctcgtccgtttagtttgatgcgtctaaatctaacggctcagcatgattgttacagtaggggatgtcgagcggtttcttaacttggctcggca

SEQ ID NO: 48044 - DNA, 584 bp, Arabidopsis thaliana columbia
ctgtcctctataatccatttggctccaaatcgttgttgctttaatacccttggatagattcgtgtttgaggataatctcttcggcgatatctccctctacacgcttaattgcgtgttcgttcaagacagacaagcttccgctcggtgccggcgtcaatctctcctggtagcccccggttgtcaagcgctctctacagaagaggcaggttccactcatgatttgggagttttagggtttgctgaatgtctctaatccggatgttctttgtttggaaaattccacagattggtgataaggtctgctactattgaagaaatagaagcagagaagtctgctattgagactgatgttgtacgttctttatatctcttttggttactgtctagtggaaacgatctggatgtgattctctgtcttttggtttgtgcaatccagaaatcaaagatggagaagactattgaaacgcttcggacgagtttcaactccataaggactgggagaccaatgcagcgatgcttgacaagattgacgtattacgatatcgagctacagatatggtttcatatgtataacttgttgatgt

SEQ ID NO: 48045 - DNA, 518 bp, Arabidopsis thaliana columbia
taaagggaacggctcatttctcttgtgggaggtagctgtacgtggaacagctggtctctgtctttgtcacctgcagaagaaagagagccaaagaaaatgacataaggaagatgtgttgtagtaacctctgaagtctctggttctatagatatatgactacggacctctgaagtaagagaggatcctgaaggaagaaatggtgtccagagaatagggtctgcaagaggatccaatgtattgtagttggtgagcaatggagccgttaagagagaggtaagtgggtacatgcttttctgaagagacaaagcagcagcaccgcctaaagcaactccatgactcacaactggtttctctattgccttgccagttattcttctccatattgatgatgttacggtttgcattctcatcgttctcattattgcagctttcttggatcttcaacactttctcctctaggctcttgaaggcaggcgactgagacaagatgcttaaagcagaagagcttgatggtgatg

SEQ ID NO: 48046 - DNA, 474 bp, Arabidopsis thaliana columbia
gacattccttcatgtaaaaaagaaaaaaatatctgggttttaaaaatatctacaatgagtttaatggtaaatatacttatcataatttggagaataaagacctaaagaagaaaattacactctagaacagaagttttgtaagcaaatcattgctcacaaaacttgtgaattacagaattacaggctcttgtaggttgagttattttatgcttcattttggttacaggctttatgttgacattaaaacaaagagattgaagtagagtccaaaaaaaaaaaaaatatatataaatatacccccccagattaattaacacacattggtcttcagagagataaataactaggggaaagagaaaacagtcttctcttctccgatcccaaaaacgcaggaaaacaatgtcgtttaacagctcccacctccttcctccacaagaagaccttcctctccgacacttcaccgatcaatcacag

SEQ ID NO: 48047 - DNA, 418 bp, Arabidopsis thaliana columbia
tatgtgaagctcagaggtaataaagagatgtgcttattgttattatgaaagtcttcgttgtcttttatcacctgcgcctgtaatgtttgatcccttgaatgatgtgtttccagtaacagtcgctccttctaagttagcgttcgttagattcatctgcaagatgtagcatttttaactattatgggccattaatgtcaaagatctcatcgttatccttagctttatgcacatttaagatcatatagcaacacgtatatgttacatcgaatacaacctctgttacatttgcctcggagaaatctgcacctcggagatcagcttccgataaatcagcacctggattcaccatgataagagtttagcatccatgaatgagaagtggtctctatcagtacagttcttctactacctcaataga

SEQ ID NO: 48048 - DNA, 472 bp, Arabidopsis thaliana columbia
tgcatctaatgtcaaagtgtctttagatgtaggtgacttcaactcccggcaaggtatgcagtctttgtattttgcttacagtaaatgtgctgctctttcattaacagttttcttcaccaagtttctcaatactctttccaggtatacaaagcggttgatgcctgtaagagtgtgcttagaggtttgcatagcaaccaaattgcccctagggagttggatagggttagttgtctcttttgcctctcagcttagctcttgatagctccgtctctgtgttaatggaaagtagtgttgtttgtaaaatcgacaggcaaagcgaactcttctaatgagacatgaagctgaactcaagtccaatgcctattggcttaatctattagctcacttgcaggcctcctctgttccgaggaaggtaatactcacctgtgtattcctaaatgtttcatatctgacttgacttcttctgatgggg

SEQ ID NO: 48049 - DNA, 539 bp, Arabidopsis thaliana columbia
tgctcttatgtttccttcttttccactcgaccatctttttacttcggtgtctaaggtttcagcaattctctgtgggaaacataaacaaaaatgtgattattgaaaagaaaggaaggctttagtgaaaatataggaaggagttcagtttggtggttgtacaattctctctgcttgttctctctgagccacgagatcacgcatgttcttctctgctaaagctttagcctgttaagaattcaatatgcccgttaactaacatcatcaatggtgtggatttcaaaacgagtattgaagcatcagttaccacacgatcagccgttctttgatgcctttctaatcttgatgtatacctttgaggcgattcaccttcagtaccttaaaagacaaaagaaacgaaaatgggttaagcacttaagctaataggggtatgcaaaaataaaaccactagagagttttcagagtatttttaccatgagaatcttgatatcttgaagcaccaaaagagactgaattttgaaattgcttatcagaaagtgata

SEQ ID NO: 48050 - DNA, 539 bp, Arabidopsis thaliana columbia
actctagagcccttccctctctcaaacgatcccttggatcgagtgagctttctcttcttaatcacttggaacaaaaagttcccacaagggccaccacacaattggtgcctcttgcctcgattacaagtgagtgcttgatcacaatgaaagagtcaagaagacagaaagcaatccaagcgcaagagctcgaaagaacacaagcaaatcactctctctagtcactatggcgttgtgtggaatttggagaggatttgatctatttggtgtgtctagaattgaatgctagagctcttgtagtagttgggaagtggaaaacttggatgcaatgaatggtggggtggttggggtatttatagcctcaaccgccaaaagtggccgttgggaggctgtctgctcgatggcgcaccggacagtccggtgcccctgccacgacatcactgccgttggattctgaccgttgaagcttctgacttgtgggcccgctgggtgtccggtgcacaccagacaactcctgttcattgtcgggtgcgccagtatgg

SEQ ID NO: 48051 - DNA, 482 bp, Arabidopsis thaliana columbia
  unsure (1)..(482): unsure at all n locations
nnnnnnnnnnnnnnnnnnnnnctaaagatcaatcagcgtgactatatcaagtgatatgaagaaacatacataaccgtcacgatctgtaccatagcgggtgcaatctggagcaaagagggtactctccatgcccagtctgacggaatcgtaaccgtccccaaccctacagcggcggcggtgatttgaccgatgaagtaggacgaattgaacagcgacgtgaggatcggacgttcctttggataacccagctcacccaacatagaggaaccagcaacaatgcataaagggataccgaaaccgagaacgatacgggcgatgcagtacatggcagctaatccaattagctttcacggtcacgatgtagttcatgtcccctagctccattggagaaacctgaagaatggctcccacagactgatgcacgatccgcacatgatggtcaccgccggccaactttctgattgatccatggcacaacgggg

SEQ ID NO: 48052 - DNA, 812 bp, Arabidopsis thaliana
taaattaaaagtgttgagttctgttagttgtatgttgttgttatatgaggattaataaaacaaggcttgaacttaaacaagaagaccatctctattgcttcattgtgtttcagtcaagaaacaatccaagacaaaaaagaattggcagattaagctctttggcacattagggtcgcggagtgggtgattgaagaacatctgaaatgaaagatcttctatcaactgtgtgtgggtgaaattcgtgttcaccctcatttggtattattggttcagaattccttttaaagattcagaaaatcatacgacaaaaacatacacatttgtttggtattctcattacatcccaaagaacttaatctgttctcaaaagaaaaaactcagtatgaaaaaccctaatcatctctgtttctcactgttctgtcgacgtaaagaacatcatcaatccacgacacaacattataagccaaaccttctaaaacccttgaatagctctccaataccgcctttcccacatcctaaccaaaaaaataaaacaacacacaagaatattcagcatataatttcgatattttccatcgatatcttaattaaaacaatatgcaaaatggctggggctactcactcggttaaactgaatcttgcagatgtcaagtgaggtctgagaaagttcagggtatctctgtttcagacagaagagtaagctcctggctcgagccgcaagtatgtggttcttgtcattgccacgatctgcatcgccactgatatctttcatcatgtcccatgaggacttagagtgagtcaatcctccagtc

SEQ ID NO: 48053 - DNA, 519 bp, Arabidopsis thaliana columbia
attcagaacaaaaaaccatccaagtattaaagtaaagttgaatggacttgtatttataagacttgatcacccaaagtccacatataacctaacacctaagtttgaagaaccaaatctcttcctcttcttctctttctcctcttcttcaatggatgatcatgttgagcacaattataacacatctttagaagaagtacacttcaagagcttaagtgattgcttacaaagctcattagtaatggattataactcactagagaaggtcttcaaattctcaccttatagttccccttttcaatcggtttcaccgtcagtaaacaacccttacttaaatctcacttcgaattctccggtggtctcatcttcctccaatgaaggcgagcctaaagagaacaccaacgataagagtgaccaaatggaggataacgaaggcgacctacatggtgttggtgaaagctccaagcaactgtgagttttttcaaccttttacttttctttcggagttctcacatatttttg

SEQ ID NO: 48054 - DNA, 423 bp, Arabidopsis thaliana columbia
tagaatggttttatttaattttctggatatttggtttccaataaaataagagtgaagtggcttctagatctccatatagaaatttatgtagtatttggttgaggagccaagtagaacggagttgttccatccctgattctaggaacgtagtcgctctgttctgtgtttggtaagctggaacggagcggctctgttttttgtttggttgtagagtaaactggaacagagcggctccatcctttgtttgattgaagagtcactgaagtagaaattagcatgacatacaagctcatcacaacatgcatatatttgacatcataacatataaaccacaagtcatcacaacacgcatataatccaaagtgtcatgttcatgaatacaattagcatgacatacaagttcatatcacctaaaatgaagta

SEQ ID NO: 48055 - DNA, 568 bp, Arabidopsis thaliana
ccatgtgattcaacgttgcttgcaatgccttagcactgaagataacaaggtcaaataactaaagtcacttccttttaactctctcaatcatcagattatattatagctaaatcttgttctgttttttcaacagtttatctttgacgcggcgacaaagttctgcactgaaatcgcaacacatcgacatggatgttgtgtgctacaaaaatgcattgcttattcaatgagacaacaacgagagaaactgatcgctgagatctctagaaacagtctccttcttgctcaagacccctttgggtaaatttatcaaacaaaacaaacatttatacggaagaacctaataacaaactttttttggatgatcaatattttgcaggaactacgcagtccaatttgttatagaactaaggattccttctgcggtggcgatgatgctggctcaattaaaagggcattacgttcagctttcgatgcagaaattcagtagccacatggtggaacgatgtctcatgcattgtccagagagtcgccacaaatcgtgcgtgacgtcgtctctgtcctcactttg

SEQ ID NO: 48056 - DNA, 500 bp, Arabidopsis thaliana columbia
tgaaggataataaaggggtcaattttaacatttattaaaagtcatggacacaccggtctaacgggtgcgtcggtcggcgagaattacgctgtaaaaaatagaagaacataaacatgtaacgatagaaacaaaaagaacatgaggaataatcatacgaggcgaacgcacccggagaaccataagtcgataatcccaaagcttagatgaacggtgagttgacttctgtccgattttgacccaatcatctatcgccacgtcatagggtactgcgtcctctgcaatccataccctgaaccggcaccttctctgtctctcccccaaatcgaaaacctaattcgatcgtcgtctccgacctacatctgccggaaaatatcttttgaccagtaagattgtccttattccttacaccattatatcgggatattaattttcgattttggactgatcgattaagccacttagactagtcgctgcgagagaatgagactgagaagttggac

SEQ ID NO: 48057 - DNA, 379 bp, Arabidopsis thaliana columbia
tatttgtcataatatttataggaacatatttctttgttatgttgctttcacagttatattgttacccggctactcttaacaaaactgatcatatttaatttttatttttttttgtaattctttttatccatcaattttccgtaaaagatatttcgttgatgctttgtgtcactgacctattgctcccaattttgttattcaataccgtgatagatacacaatcattgtgaatttgtgattactcttcacaaccacgaaggagaagagaggagaaaaatatgatacataccaaaataataagcatatacgagaatacttcatatatcagaaaactcgcaaaacgataagacattaatcaccttagatatgcttgttctct

SEQ ID NO: 48058 - DNA, 445 bp, Arabidopsis thaliana columbia
ctcaattcctacaaccataaaaagttatgacattaaagatcatttactatacaacagaatatattcaagaacttgtatctgtacctggagaaggtaatgaagtgttgataacagtgggcaaatcaaagttaatagctttgataatgtgagtatgcttagagatgattctactgagaagagagccatctccaccaccaacatcaaccaaagacttcacaccatcaaaaccattgtagttctttagaaattcttctatgaatacttcattgaaacctttcatggagctttggaacacttctctgaatcttgaatcactgcctaccagttcaaccgcgcttgaaccgtgagtgttgttgaatggaagccctccttcaagaacagaatctttaaggttgtacctttttataggtagatacaccatcagattgcataacaagtcaaagat

SEQ ID NO: 48059 - DNA, 556 bp, Arabidopsis thaliana
tatgacagccaattttaaaacaaccaaccaagactccattttttaaccacagaagatgaagatgaagatgagaactcaccactaagatggcaatggcaatggttatgatctccatcacaggattccaagtggcgaacaagaccataccaccatcctacacaacaacatcacacaagcttttttcagaatcagattgcaagttcaaaccaaaagcatcatattattattatttaccatatgggaactctttgttccttctccactggatttcgatgtgatctccaggtttcaactcttttaaagaatctgatacatggagaagatgaggtgatgcatcaatgggagctgctcttattctatcccatgtcacacccttttcaatcgcagatgctcgtctaccatgtggtggatacctaaactcccaataaacgtaaacttatgatgagaaataagaaaatttgttagcgtcaaatgtggacattagatattttatacctggcttggaacgtatccgtgtgagtacatagctgagctccgcatcatagcatgacacatg

SEQ ID NO: 48060 - DNA, 1157 bp, Arabidopsis thaliana
tattcattttttaaaatgttttcgaatactaatatggaattttaattttgtttttttttctataccaaatttgtctaacttataggaaacatatatttattaaatgttgtaacaaattttttaatgtgcaaaaaaagttgaacacttaaaaaaaaaattcttgatatgtgtataattgtataatatgtaaattatgtcgactagattcagcactaattaaatccaattaattaggaggagaactctttggtggggtgaaaaaaaagttggaaaaataaagaaacgaaaaagttaccgttgggatcagtgggaagatgttggtcgtagaatccagccggagagcttctgtgtcggaacaaagaagacgaagaagaagcgttggaatcgaatccgatggaagatggctcgcccggtaaataatggccgacgaggttgggattctgctgatgctgctgctgccgctgcggtggcggatgatggtgggtttgagggccaagagaggagaaatcacgggtagctccagcggctgagtcatattgattggtgtcggcatcgccgccgccgtcatgagcggtggacttagaggaattaggagggtacatgaaaccggaaaagaaaaaccctacaaaagctaatctgatgcttaggaaaaaatcttgaggagagggtttgagagaaagagactttgagtagttattaattaatactatatgataatgcaagagggttactaattatagttaggactgttaaattaaattaattaaactaagggtgacaaattagagcgatggcttgtccttgtgccttgtgggtgcttgaccaagagagagtctcctactcacggtcccgtcaacgcacgtgcacctcacgtggttgacagatggtggcttgacgttatttgcgaatttttcttataacttagcatcatttttcttataagatatttcgttttattaggttaatcttaattctatcaaaaattcaattttaaatggagttattattatgtatgacggtatcgatataatgattccgggcatattcattgataaactttacagcctaaaatgccaatttgatattctcataagagagaagcaaatatcaagatgatgatggactgtacatatgttagtgaatacatttacagagaa

SEQ ID NO: 48061 - DNA, 442 bp, Arabidopsis thaliana columbia
atcatgaatctttttagatttctcttaacttagtgtattataaatttaaatcttaaccaaatcttctaaatatttatattattatatatagaaaaattggttcacaatttcggatatattgtaacctaatccatatacaaaatatacttcaaaaatactagtataaattaatttaaagataattatcagagagatttgtctactttcataatttacttaaaataatatatttaaaataagaatgttttgttaaaatccatatttttctaaaactaattacacgtaaagaaaattattgcatccaaaatcattcacaaatttttgatgtaattcgacaaaacaacatcaaaaagtttggatacagtagaaaaaagctaattcaaaagaaaaaaaaacaaaaacactatagtcatatttcattacaattatacatatatatata

SEQ ID NO: 48062 - DNA, 536 bp, Arabidopsis thaliana columbia
ttaattatcaaatatagaagaaaaaggagtatatacataaatctacaaaagaaaaaaaaaaggtaaacatccacctctatataacaaagaaataatctcttattttttctcacaaaacaaataaacctcaaaatcaatattgatggcttcggtcttgaattgctagcaactaacgggaagctcttatacgcagagggtctattggtacgtaaacttctttctgggctgtgactataacacatacactgtcaaatttattttctactttagacgtgcatgaccagacacattgctattagagtattattgtacaatgcatgcattagaaaaattattcttcgttgtttttttgctaaactgcaaatatcatattaatgaaatgggtggctttacaatgggtgcaacctaaaattggtatcttggcaaaaaaaaaaaaacaagaaagcaatacaacaaattggaccagacagaatcagagaagccaaagctgcatcagcggcctgaaacgctttttgtggcgtctagcagtgatagag

SEQ ID NO: 48063 - DNA, 629 bp, Arabidopsis thaliana
gtcattaagcaattacactcacttgatccaagccacacatgattctacctctgaggcaaaggggattacatcttttattaatgtgtttgattggaacagtgttgctcttgtttatgaagatcatgatgactggagagagagtatgcaacttttggtggagcattttcatgagaacggtgttcgtgtacagtccaaggttggttttactgtctcttctagtgaggattttgtgatgggtcggttacagcagctgaaggacttggggactactgtctttgttgttcacttgtctgaagttattgcaactcatttattcccatgtgctcggagattagggttgatgggtgatgggtttgtttggatcctgactgctaaaactatgaacagcttccatgagaacattgatgatttcacaaagcaggcaatggaaggtgtggttggtttcaagtcttacattccaatgtctatagagcttcaaaatttcactttgagatggagaaaatcattgcctgttgaagaagcggagctaactcggttgagtatctctggcatatgggctcacgatatcgcttttgctctggcgagagcagcagaagttataaggatgccaaatgtgacatcaactctcc

SEQ ID NO: 48064 - DNA, 228 bp, Arabidopsis thaliana columbia
attatattatttaacaatcccgcttcgagcattcattctctaaactattatcgttaaactattctgatctatatttaactttcacaatttttaccaagatcataataattagtttatattgcctctaacagttctcaaatgatgtttcaattattattgatttcttacaagtttgatgatattgtgcctttgaatatatgtgaccaagcctctctttgaaactgtgac

SEQ ID NO: 48065 - DNA, 543 bp, Arabidopsis thaliana columbia
ctctctgagcttccgtctccacgactctgtgattcttcgactttttttgtgagttgacttagcaaagttctgagaatcatttgatcaggggaagcattaaacaatgggctggagttcttggagattaaaccggattggttggtttggttatgtgacaaattattggagaagcagggtacatgctgattgatgatgtgatgatggtcgaagttgatgtaagagtccatgaatgcagaagctgttgcatcagagcagctccttgtgatgtcgtctatatcagctccgttgctgttcttgtggaaaactctacacaatacccactcttcctgttttcattaatttgtcccagcaaaactaattttgtcaaaattatggttaagagtagatatgtgcgccaagtcatagatcatcttaaatcagccacaaataaatctttgcaaaatcgtcagcaaaatcccttaaagacatttaacatttaggttgaatgtgaaagaaagataaagtcaaaccttttgccttaagtcatgggataatatgattgcg

SEQ ID NO: 48066 - DNA, 453 bp, Arabidopsis thaliana columbia
gttactttacattcacaaatatagcttcaggatcaagtaaatgtcgttgaaacagagtcttttgttttcttgctagttccataacgctctgtatgatgatgctaaaggttgggcaaggagatttgcttcctctgttaatagatacttacctggaatcatgaatcctcatgccaaagaggttcaaacctggactaaattcttcgccctttcatgcttgttagctatttttatagatcccctcttcttcttcctcataaaagtccaagaggtatgtttttccttcagagatatcttttgcttttccaagtgtttttatcttgcctttacaccaccgtttgtgaccatctttattttctcactgtagcaaaacagatgtattatgattgattggccgatgactaaagcatttgtagctgtaagaagtgtaacagatgttatattcactatggacat

SEQ ID NO: 48067 - DNA, 519 bp, Arabidopsis thaliana columbia
  unsure (1)..(519): unsure at all n locations
tnnnnnnnnnnnnnnnnnnnnnnnctaaaggataccgatctgctgggacgggcgtcgatcattgatgaatccaacggtcgtcgtgtgcgtatggcctggctggcggttgttgtgagccacaaagttaacggtgtatcggaactgcactctaatctgatggtgcaatcgttgtttgccgactttgcgaaaatcttcccgggtcgtttcaccaacgtcaccaacggtgtgacgccgcgtcgctggctggcggtacgaacccatcgctttcagccgtgctggacgaacacctgggccgtaactggcgcaccgaccttagcctgcttaatgagctgcaacaacactgtgatttcccaatggttaatcacgctgtgcatcaggcgaacgtggagaacaaaaagcgtctggcagagtatatcgcccagcagctgaatgtggtggtgaaccaaaggcgttgttcgatgtacaaatcaaacgtatgtacgaatacaaacgtcaattgatgaatgtgttgcatgtgat

SEQ ID NO: 48068 - DNA, 475 bp, Arabidopsis thaliana columbia
tccccgggtacgagctcagtgtgctctaaagaccaattcagatacaaaaagtgaacttttagatataaacaacctttatcaagcagcctctgatgaaataagagcgattgtagctttcctgttatctggaaatgctacagaaccagattgggttgaccacgatgttcgcgcctacatagcagcgatggaaatgaaagtgggtaagtatctgaaagctcttgaatctgaacggaaaagccagaacatcacaaaaactggaacttaaacttatatggtctgacggaaaactcctggattccgttatttaagcccccatcactttctgctgtcgccatcacctattaggttacgctcaaaacattaggcatacctattgacaatcaattaggcattacctataggtccagcataccacccaccccgccccacagaacgccgggcaatacttcgagttaccaggcagtggcaaggggtt

SEQ ID NO: 48069 - DNA, 349 bp, Arabidopsis thaliana columbia
tgtgtctcttttaattaggcgatggagttaggttttagttgttgcgatgaaactaatagagtccaacaacctgattttgttccaagatacgtgggagactcaaacaagttctttaggcgctttcatcttccacgtgtcctccatatagctccatccagacagatcccttctatgactcaggaattggatacgtgagataatatacccgtaatatccatcggaatgtcaacacgttatcatcccagcatctccgtttaataccctttcccatcaccagagaagtcgtagcatgattcggatagtgatgcagtgaggcagccaataaggcgtgataaactgggttcacgca

SEQ ID NO: 48070 - DNA, 503 bp, Arabidopsis thaliana columbia
tggtgtaaatatctccctctacctttagccgcttcttctcattacgatctcgaaagcatttagcagaagcatcatcattcttctttgatcaaccttgagcaggggccatccttgttctttcttattgagaaagtagtaaccacttgtcaccgtttgtcttcggagccgtctttcaccaccggattcgtgagccgttgtcgtcgtttgttgggtaaggaaaacctaaccgagtaatgctttttgctaatagaattatctcttttggtactttgaattcgtgacttaatatcaaactattagatttttagtgaagaagaagaagggtgaaaactgttgaagtaggagtttaaaggagtgatttccgtcagatcttaaggaatcagatcgttattttagtgtctttggatacatctcacttcaaggaatccacagcaacaaacggctctctgttacgaggtatactacatccacaattcaagcttaaagttggacaaaagtaacag

SEQ ID NO: 48071 - DNA, 551 bp, Arabidopsis thaliana columbia
tatgcaaaaagtattgtttaacaaaagagttatccaacctcattgtgtgttgtttctttgaaatatgtgcagagtatggaatgggaggccaaccatcaatacaaggagatgtgtacagcttcggaattctacttttggagatgtttagtggaaagaaaccaacagatgaatcatttgcaggcgattataacctccacagctacacaaagtctatattatcgggttgcacgagcagtggaggcagcaacgccattgatgaggggttgagactggttttgcaggtggggataaagtgttctgaagaatatccgagggataggatgagaacggatgaagcagtacgagaattaatctcaataagatctaagttcttcagttccaagacgactattacagagagtcctcgagatgctccgcaaagttctcctcaggaatggatgttaaatacggacatgcatactatgtagaccttctcaactacttatggggcacagtaaaagtgtatttgcgtgtgcatcatcgaaacagaacaaatgttgggaggaggagag

SEQ ID NO: 48072 - DNA, 622 bp, Arabidopsis thaliana
taaaattatagaacacgtttgtttaatgaacctaattctatgtttttctagtggtgttcttaccgcgtccgacctgacggagatccctccttgtttcgtttactatccctgtcgtctccatagctctgagaaagaaaacaagaaaacattagtttcttccggaagaagttaggttttgataagaaatcaaaaaccctaactaggttaaattttagagaacccacaaggcggcatggtagttaaagtggtccgtgacgttctctgggttcgggtcataagattccaaagtttctcgcaatgcgttggtttgacgctgcgtccagtattcatcatattcggcgatgtgagcttgaagcgatggaaccaccacggtgagagacaacgcgacaaagacgaaaacgtagctcccaagattcaccatttgaatcagcagtggtgagagatttttatttcatatgtatcttattccggtgatgaatttattagaacccttgaagtttgggtcgccaaaaagtttctggtcggccagggttagaatagatatcggatcatggctttctaaatacaaggacgtgaaagagagagggacatgaagacattatggagaattacgattacaggg

SEQ ID NO: 48073 - DNA, 571 bp, Arabidopsis thaliana columbia
ggtacgagtccatttccgtcgatacctaacgacagtcatttccgaattagagaaagcaattgcacatttctaactaactcaattaatcgggactaaccaggtaggaagagaaggagcggggcaccgtcacatggatccttgcttctttcgaggggagagaaccagcgagatgggccgttgtcttccggtctgatgaaatccttagccgcctcgaggtagttccagaagctcttaacgaatggctgctcgtagtccacaagcctcgagctaaaaacggtgacagaagcggagaatcggcgtgccgggggtagggttactccaagggggtgcttgtgcttctctccgttgaataatccgacggcagagagcgtgtgaaatccggtggccgccataggcaaagagaagctagtagtagttgtggtggttcgccatggagaaagaatttaaccaaagatttttgtgctttctttttcttttcctttttccagccgaaacgaagatctcatgacttaacggtctccctctcccccttgtcgtgctgtttcatttcaacgaggcgaatgtgtgatgt

SEQ ID NO: 48074 - DNA, 490 bp, Arabidopsis thaliana
gtttcagtttagagactacttcttccttcgaaatggaaacaatttctgcaagcaacgggttaacaaaagggaaagcgaaagaagggactgcagcttttctcatagagcttgagaagcaaagagctataaaggttgaaacatactactcttcctttaccctaacagatataactgatatgtatatatgttctctgaagattcatgattggcattgaggacaggtctttggcaaaagcacaataatcggattggtgataactttctttgccggtatctgcttttctctgttctcacctgcattcaacttagcaacaaacgatcaatggcacacattaaaacatggagttccaaaactaaatgtgtacactgccttcttctacttctccatctctgcatttgtagttgctctgatacttaacatcagatttctctattggcctatacttggtctccaagatcttctttcaaggcttatttgaatgactggaac

SEQ ID NO: 48075 - DNA, 611 bp, Arabidopsis thaliana
cttcaatgagcttaatccgattgtcaatactaatagcagataaacatgacatatatcaggagatgagagaatcatgcgtacagattcacacaaggttttttttaacaagaaagaatatacagatatacagatagagaagagaaaagaagaaagaagaccttgagggagtatcgacgatggtgataggtatatagtcagggaaagcgtcggcagggagagtaatcggaggaaggacgcgagggacattatccgggaaagtctcggaggcgacggcagagatcaggctggatttaccggttcctttgtcgccagcgacggcgactctaaggcttgtacggcctccggcggaggactttccaccgagcatcatcggagagatttagagaggaaggaaattggcggttattgtttcggagatgagattgatcgatctaccaacgatgtaacttgccggccgaggatggatgctccatatatctaaccgggttgacccgacacgtgatccgcaaagctcttattattactgtagtatctctatcttcgccatcacggatttctcataattgggccttcgtattttcagtttctagacccgacacaagtgattatgt

SEQ ID NO: 48076 - DNA, 925 bp, Arabidopsis thaliana columbia
tggagtgagagaaacgaaaggacacgaaaggattattacaatccaaaggctttctgatgaaacctggttacaatggattacactactttggatatgagagatttttttactccgttacactttttgagtggttgaatccactatcaagtatcaatcccacgattagtccattacacttgtactttccatactcatttacatgccacatggtacagtcgtcgtttcgtcaaaagactcttgttttcttcgttggttactttgaccaaggtcacacgactcaaactagtttagttactactcctcccaaatatgaccaaggcccatgggctttgtcttaagatgaacacatttattttcatacgcaaaatgttttgtcggtagcagaaataaacaatttttcattacaaaattcaaatacacaacacaaataaactacaccatccatacttgagaaacaaattaaaataatttaaaaaaaaattgtagaagctccaacgttgtcagcaaaaacttcactcctttttgttacaaaagaaaaagatatatcgaaatagggataaatatgtacattgtcttcaatatttacttcccctgcggcaccatgagaagcagcagccctgcacatcccaattcacatcaaaacacaaattctaacgatggacaaagtagttgtgtttgtaattaaacatttgtatattaataaataaactaccttggaagaggtttggttggtagattgatcatgttgactgttgatggggcgggaaggagtgttgccggctgttcctccgttgggtctgatgacaccttcgtttctctcttctttgactttctcgaaaatttgtgtgtactcatgtcccccctgcaccaactgatcctgggaatggcggtatagttgtccctcctacagatcatataatgacta

SEQ ID NO: 48077 - DNA, 553 bp, Arabidopsis thaliana columbia
tgatctcgagaaaatcgtcgtctccgtccccgattcacccgaaatcctccccgtgcttctccattgtcttttcgattcctcctccgatcttaaagctccggtcaagagagaatcaattcgtctcctctcctttctttgcctctcttacaccgatctctccttttcacaattagccaaaatcatctcacacatcgtcaagcgtctcaaggacgccgataacggtgtacgcgacgcttgtcgcgacgcgattggttctctctctgcgcagtttctgaaggagaaggaagtagagaatggaaattatgttgggtcttcgttggtggggctatttgctaaacccttgtttgaagcaatggcggacgagaacaaaagcttacaatctggtgctgccatttgtatggggaagatgattgattcagcaacggagcctcctgttgcagcttttcaaaaactgtgccctagaatctccaagcttttgaatagccccaattacattactaaggcttcactcttacccgttgttggaacttgtccaggtttgtgcaatgtggta

SEQ ID NO: 48078 - DNA, 522 bp, Arabidopsis thaliana columbia
gcagtgagagccaagagtagaccagttctatttctcttacatagctttccaggaaagaccaatattccgtagaatcttttgtgtactttgaatggaaacttaaagtagaacaagaatctgtagttaaattattcttctgctggtttattggctgcgtgtttacaagcacattgaggcttatgcttcggtttctcattctgattcttcagctcgtttccagccacaaggaaaaatgcggtgtgtctgaaacagatcaaaagtagccaatcaaatctgtttgctaatatctacagaattctaaggttttaagctgaataaaacacccgatcaaactttcatcgaactatgtgacttttgactctgagaagaagatggtgttacctagagaacttcatcattttgatttttgagtcctggtcaatgtcaaccgaatcgtccagagcattttgcatgtgctctagccatctctcagcagcttgatggagcactggaaatggacggtgacgccgatcaaagcaggat

SEQ ID NO: 48079 - DNA, 459 bp, Arabidopsis thaliana columbia
gattgatttcttgcagcaagaacctaagtttttgcctcaaatgcaagcgacaactcaaggtaagtgtacttttcaaacaaagcatgttgaactaacatgttacaggtgtaaacaagagggacacattgccaagatctgccccacgagagagactacaacaaaggtaggattggagcaacaagaattgttaaaggctaaagagaaacaagaaattgtttcaagtccaaaaggtaaaaatgaacaagccgaaacttgtcaaactgatttaaacaactcaatgaatgtgataacacacttgtctagtgccaaaagcattgcgaaagtttcaggtacaaaagaaaacattacagatcaaggagaagcttcaacaatggagaaagtgttcacggaagaaagtaaaaaccaaggaggacaacactggacgaaattactgtgaataaagatgagagtgtcaatgac

SEQ ID NO: 48080 - DNA, 1000 bp, Arabidopsis thaliana
ccactatttggcaatgataatagcaagttgtttctgcaaaactttggcactgccatcacactttttgggcaatatatatgccttattttatgttcaggaagactactgtaatctggtggttagtggttacgaagactcaccccgttggagtagaaacacgtccaggtgtcctgaaagactttgaagcctcatctgactgtcttgtttgtctaccaggtgtaggtgtagtagaactatcaggctttaccatagtgtcattgctcacggattcctgaacttgagacttacgatgtcttatagtttgcacaacctctgtgatggaatccaaagctttctccttctggcgagctgatatcatcatcaaaaccattacatgttaaagattgtggatcagcactctttgctaaattatatcattgtttttggctaaaaaaaacttgttgaattaacgaagagatgcaaaaaaacagataccatcatatcgaatcaaggatttggagagtccattaggcctcaatgctttatcatttaccccttctgtgtatttgctaacttcaacctgcatcctgcagatggaaatgtgaaaatgattgatcgagggacagtcgattaattagggaaaaacagggaggaattaagggacgtacccaatgaacttgatggtattgccctggtcgtccttgataggagtgactgtgagaagattccagaagggagttccgtcctttttgtagtttaacagccttccacagtaactttttccattcttgacacaatctctgattttggcaacctcattcttgtcggtgtctggcccttgcagaaaccggctggcgttttacccacaaagattaagagcatttcagagtaagttggcatgggtttcaaaagcaatattattctaactaataactgggaatgaaactagaagcaagatacgagatgagcagtaccagtttcttccgacaatttcgttggaagaataccagtcatggtaaag

SEQ ID NO: 48081 - DNA, 566 bp, Arabidopsis thaliana columbia
gttacttttcatcaaagtttgagactttcgtttactgttcatataattactgattacatctacttagtttatgaatctgagggttaatgatttaacacattgcagtatccacctgcgaggccactagttgagactagtatcagtgttcttcttgatcttttaccagacattccattatggatgaagaatccagattatgaaagagtgagtcacattttaataggattctgttgttagacttaagcatctaagctagattactttacttgactgattctggtttctattgtttacattaaggtggactggttcaacaaatttatctcatacatgtggccttacctcgataaggctgtttgcgggatcatccggagttctgtacaacctttatttgcagattatattggcaccttctgtatagaatccattgagttcgaaaatttgagtcttggaacgcttccacctacagttcacggcaaatccttgtctcatttagctcttgtgatctcttaccgttggtttctcaggtgttaatggttaagagattcccctgcaggtgttaagtc

SEQ ID NO: 48082 - DNA, 464 bp, Arabidopsis thaliana columbia
cagtcctcttatatctcaccgctttcaaattcgcgccattaacgaggttgactgagaacgagggatagttcaaatcaccgtgactcaaaacgacggcgttactatcacacgtgtagtcacgtgccggagaacaagagtattctctcactcgtgtagttcaagctgcacaagtagttgagataatcgacggtggaggtatcgtataccagcgcgggatctacagctcgcgtgggatccacgtttcccgctccaaacgcaaacgctgtgagcgccgattcagctcccgcggcgcctcaatcgccgatcggtcggttcctattgtcagtgatcctcgccgtcgtcatgattgcttatttgatcatcgccggatgaccagtcaccgtgaacagacttgattagatcgagcgattccgctgatctcaggacaagcctctggaggttcccgagatgatattgaattggac

SEQ ID NO: 48083 - DNA, 551 bp, Arabidopsis thaliana columbia
cttgattgaggacaaaggtcttgaagctgttgcctcatattgcaaggaactgcgagaactgagggtgtttccatctgagccagatcttgatgcaaccaacatacctctgacggaacaaggcctggtctttgtgtctaaaggctgtcgaaagcttgagtctgttctctacttctgtgtccagttcacaaacgcagctttgtttaccatagcaagaaaacgtccgaatctcaagtgcttccgtctctgtgtgatagagccatttgctcctgattacaaaacaaatgagccacttgataaaggattcaaagccatagctgagggatgcagggatcttcgacggctctccgtctctggtcttctctctgacaaggccttcaaatacattgggaaacatgccaagaaggttaggatgctatcaatagcatttgctggggacagtgatgtgatgcgtcatcacttggttgtcgggctgtgagagtttaaagaagcttgagatacgagactgcccttttggagacactgcactactggagcacgctgccaacttagag

SEQ ID NO: 48084 - DNA, 448 bp, Arabidopsis thaliana columbia
tttcaagagaaaggcgctcatgacatttctctgttgtgagcgcctgagtacctataccaattcactcggtcagtaaagtatcaaacatcaacaaattttaggaaaatcaagtaaatgggttatcaagtgaaatgagatcataccctgtgaccagaaacttcagctatctcagggatcgaagcagacagcacatgtttcagttcaatagccacgagtaaattctccatacgatgcatgattgatggtaacaaggataacgagcttccgatgtctttagataatccttttatctttaagtgagaaagttcgggaggaatctctatgaagtattcgtcaagttcttgtggttctggtcttggcaatgtgagaatgttataacatgtgaaccaaacatgagaattaccattacagtatacaaaggtcaaaagtgtgctgtgtgtacatgtac

SEQ ID NO: 48085 - DNA, 568 bp, Arabidopsis thaliana columbia
cttaactacatcattctaaactcatataacatacagcagtatcaacataaccagcataggtagacattggagaatcatagctcaacctacaggtctaaaagtttcgcgaacgcagactggaccagatacaccttgtgtaacattctcggaactccagtaagcaccgcaaaacggcctatcgcatcccttgcctgcaataaactagagtcaaatgtgtatatatataattgtcagagattcctttcctactgaacatgtttaaatattagtctcttatcagtccaaccttgcaatacccagctctaagaaacatacaaatattattctctgtattctaccagcatcacattttttcccccagtttcgcagacgacatattagatatcattacataacatgtttaccaacaggaacagcatccattcactcggtacaaattttccgatgtagagcaattgaaagtaacaacaacaatgaacttacaatatcaagacgggaaaaaagtacagaaaccagtcttgagagctagatgttagattatttaaacagtggacaatgcgaaataaag

SEQ ID NO: 48086 - DNA, 773 bp, Arabidopsis thaliana
agtttcattgtaatgcatcatggaaggtcttgtcaagaagagcgactttggagcaagatcagataatggaatcggatctggagatcctgaggattgtccaaagctcaccatgtatcctcggctcttcaaacatgctaacgatccctggaaatttataaaaaattcattataagaaatccgaaaaaccagctaaagaacataaacagtctggctctttgtgacaataccttaaaggtgtcttttcccacagagtcataaacaacatttactcctttacccgatgtaatgtcattgactcgggaaacaaaatcctcgttcttgtacataataacatggtggcatccatcttctttggcttgagccgctttctcattggtcgagacagttccaatcacagtggctccaagcgcatttgcccattgacacaacagagacccaactccaccagctgcagcatgaacaaggattgtgtgcccaggttcgacctttccaaatacaaataggacttgagtcatatagtgaatagatctttgaaaaacgcgacccatataacaaaactctactctgttcaacaggcaagaagacacaaatcctgctcttgggcttcttattaataacttcctagaaataggaatgaaaactaaccttgaagcaacggcgaaggagaaactgtgcagtcatacccttgagcatgattgatgctgcaacgataggatcaatagatgaaggcacaggaaccactttatccgctggaaggatttgttcctcagcat

SEQ ID NO: 48087 - DNA, 479 bp, Arabidopsis thaliana columbia
tgatgcattgattgcgtttttgcgagcagccgattcagatgctggaaggtatggtgttgtttatttttattgctttagaaatgggcagagtggagtgttcgtttgcatgtgaataattagtttgtttctgcttttgaaggtatgcaaaggaagtttgcgatgctattgcgctcaaatgccttacgggtcggaagaatactgtggacaaggcgcaggctgctttcttgctttgggtagaattagaggccgtcgatgtgtttctggtatgtcattcattctatgtttttgcaacactgctagggttatctagacacatacggttaacccttgcactctgatgtataggtcaccatctagccatagagttacttgctagattgctgatactggtatctgaaactagataggtgagctgacatagaaatgaaagtgctttataacccagaattcaaccatatactgatcttagaaggagtgac

SEQ ID NO: 48088 - DNA, 579 bp, Arabidopsis thaliana columbia
tgagctttacagctcctttggttattctccggcgaaatttgtgaattcatttagacgagatcaccaaagccctatctctgtgcttcatggtccggtctcgtgtagttgtagccctccgatgagaatgtctcgtgatcggaatctagatggttcgtttcgtttaggagctagtggattgttcaatggtttcgttaggaaagctcttggatcatgtgttgattacgagttcggatcggattctgttctcgttgatgagctaacgtttcctatggaggttgatacgataaagccatatgctagggatttgctaagacgtgcacaattgagacacaagattttcaatgatgaatctgtgatcaaagctttttatgaagcagagaaagctcatagaggacaagtaagtaggaaaagatacaattctcaatcactagttttagattcttgtttggttttagtgtgactcaacttttcgtttcatgtgtgttttatcagatgagagctagtcgtgatccttaccttcagcattgtgttgagactgctatgttgttggctaatatcggagctactcaactgttgttg

SEQ ID NO: 48089 - DNA, 752 bp, Arabidopsis thaliana
gctcagtgctctcatagggcaacttcaggtagagtcatgggacaatcggttcgaggagtggttaagtgagatacaacgtcttcgaaagtagcagcccatgcatctctatgtgttaagaaattggaagagagattgaagagtttcttgattgtcgctggtattgatgaatgctcgtactctgagctctctgttggtccttttgcttcacttacgacttcattcaaaacatataataaaataagatgttattaaactatatatagtaaaaaaatattaaaatcaaatggggtcaaaggatggttgaaaaacatgagtcacgcaacgacgccgacaaattataatatactccatctttcaatggcataatcaatggattcaattattttctccaccattattaatgaatacaatcttatagttgtcaaatgccatccatgtgatttggtttttgcagccttaaattttgttagcaaatgtcaaaaatctgtcggaaatagtagtagaaagtggaaatacatgaaatacaaatgaatttctttttttgggttaaagaaatgaatagtttcaatattaataattcataagtgaaaaaaatagtacgttaaataggcataaatactacatataagttttttggtcagtagtttcaaaactatttatatatcaagttcaaaagcggagtgttcttgttaatttggaaaaaagcttgaggattctactataaagcaatgcacacgtaagacaaatttgta

SEQ ID NO: 48090 - DNA, 683 bp, Arabidopsis thaliana columbia
cacatttgtataactacttttttttttttcatacacatgatcaaagttcatatccacaattcacaagtcatggtcgctgatcattttacgtacacgtctctatgcacactttacggattgagagcagataacaaaaacatgaagaagaataaaaaaattacttggagtacgaaaatagcgagaaaagcgagtacgtccgtcgtgacggccaccggtggaagaagggagttgaaaagcgtcgaggttgagacgccaagacgattcaagcggcggcgcatcgtcgtcactaggtaaaagctcgacattgtattcatctcccgtacgagttatatgctccgtcgccattatccgatcgctgtgcgttcgaattccgaaaaaagtgtttctaggggaagttgtgagaaagagaaagaaaatataggagttaagcggcatatacgactcacacacaaactcttcgaaacaagttattactttttttttttttgggatagtaatttagaatcattccttttctacaaggaaaaagaacaaattttcttaacatttactaacaaaatcgccggaaagttatttagtcaatattttatagtcatatactttacatttgtcttctgttttaaaattgtgcacataatcggcaaaaaaaaaattgaatagttatcataagttgttgagttgcg

SEQ ID NO: 48091 - DNA, 234 bp, Arabidopsis thaliana columbia
tacttcataatttccaaccaaacatacaaaaaaatgtggatcaaggacaatcattctagatcaaccagtattacactaggcatttttttcttcctcaaaaagttgttttaaccaaaaagaaaacctagttgctacatacgattaacggcgatcattttttgttacgctcttggcaataaagtgagcatcaagattagatctccttaactcaccaagcaattttcaatccaaaaa

SEQ ID NO: 48092 - DNA, 494 bp, Arabidopsis thaliana columbia
tcagaaaagtaatctatgttgttgttgacgtatttgacattgctagagcttaaaatcattcacctatttgacatggctagagattaaaatcatatgtttacacatgagtttgtaccgaactatatcaaagtctttgaaacattaacaatactcgactttgcttggtgatcagatcggtctcgtaaacaaaatttggtggcaggaacacattacattgcctaaaacaaatccatccatctcataatgtaggatgattgacgtttattcaatcactttcgtttttttttggcattatatatctttatgaatatttgttacttgtatatttgcaaaaagataatgtatagtttttattcttccaactagaaactcaagtgtgcggattttcctgaatacggatgaagaagacaagcacaagtagatctcatagatacaaccaattcctctcgtcatgtcccactatcttcattttattccttaaaaatactttttat

SEQ ID NO: 48093 - DNA, 518 bp, Arabidopsis thaliana columbia
aaaggagagagatttcgcaaaccctaattcgaacccagaatcataaatacacaacgccacgaatcaaactcctgatttttcaaatccaactaacctgttggtactgagggtaagcgtagacggcaggaaccggtccaacaggctgaggatagaccgtagctccgggaatggatgccacaggcgccggtacagcaggcgaaggcgccgccgcgtaaggctgtggaggctgatacggagcggaatagtaagaattagctgcgtatgtgtactgagacgaggaagatgaagaagaagaacctgaagatggtgggattgacatcggagaagcaaatcgccgaatcgcaaaatcgaaacctcaaattttgtttattctttttttttaatttgttttcccacttaaattggaaatttacggttttctaattattgggctgaggcccaatagtatcttcacaaaaagcctatgggttcctaaatcagacgagactacaccaatagacgatcaattgagaacgtgg

SEQ ID NO: 48094 - DNA, 474 bp, Arabidopsis thaliana columbia
cagataaaaggggagattctaacatcgagaaagattcagaactccgagaatctattggttgaacttgactcgaactacctgtaagatctagagatttcatttcactggaggctgacacagagccaacatgatcaccatcttgtttcgcaatatattcgcgaccttgaaatgatttgtttgattcccctggcggtgttgtaagaaagttctccaccttatcaacagccacataatccgaaggtatatacatgtctacagaaatcacactgctagtctgatcttgagggaagcttccagcacttatggaggtttttgtggacatgtcctggtgagacactctacaaaaattcccttctacgctgctatcatcaccaccagttatattctgctcttctgctttcattgagagctgtttggccagcttaacagcatgaaaagccctgcaaaacgacccagattttggtcaatatttgc

SEQ ID NO: 48095 - DNA, 480 bp, Arabidopsis thaliana columbia
tgtttccaatttttgtttaatgaaaaaaagaatatgattccttttcttgtgacaagactaactcacgcacatattttcgaatattacgaatgtaagttcatagttaatagtaatactatttccagtttattcactcgttatataacgagtatagttaaacaagtatagttaaaatttgacggtgaactagatggagtctcaattaatttaaaatatccaagttgatagcaaattcagaactatcctatggtaaataaaatatataaatgcaaggaaaatatgaaagtaacgcaaatacatggaggagacataattataacaattcataattaaagtaactaaacgaatctccttacaaaatatagaatgtgagaatatatacgtaatacaaaagggttaatgcattacattagtttctgaaaatgtatatgaaattacagtttgtgtacggggatgaatcacgtatcatctgaacattgc

SEQ ID NO: 48096 - DNA, 473 bp, Arabidopsis thaliana columbia
ctttagtgttcaataatttgaagatatgttcttggttcatatcatcaacagagacacccacctgcgaaaattacccgagaggcgcgtggagtctacggttatgaaacggatggctgagaatccacgcgccttaacggcctttattcctcgttcttgaaaaagctttcgtcaagttggttttattatcggctttatcaattgaaacacgactctgcatgtctttgagttataaatgatttaatttaagagccgtacaaaaacagatcagtgtgtcctatgttcaacatgttcttgttcggcgttacatagctcataattagctgttcgtattttcaaacttttatccgtattattatccgttcatcttcaaagataaatttagattagtcttaattataaccacatgatcagatactctcttcaaaaatgtgaacgtaatcgtgaataatgttgaggtccgctaaattgcgtca

SEQ ID NO: 48097 - DNA, 612 bp, Arabidopsis thaliana columbia
taccgcgttcgtgacatatcctctactctaccttacaaaaaccctaaccctaatttctccacccccaaattcttttcctcaatctctgcgatggaagacgaagaaggcatcgggttaattttagccagagccaccgagctcagactcaagatcagcgattgtatcgataactccagtaccaccgtcagcgacaacggcgatggaaacgaggatctttctcccggagaaggaagaaaaagcgagattattgggaatcaagacaaggattttgactcaatcagctctgaggatgtagatgaagcagaagctgaacggcttttgcgtattcgtgatgctcttgaagctcttgagtctcagcttgcttctttacaggtttgaaccaaaccctaaaaatttcctctgcttctcatcaagtttctggcttttagtgtagtattggacattgaaagtgttaggttctggttttaactgaaattgagtctgaatttgcttcaagtctggtctataatgtctgaattgcttctttacaggtttgaaccaaccctaaaaaattcctctgcttctcatcaagtttctggcttttagtgtagtattgaacattgaaagtgtaag

SEQ ID NO: 48098 - DNA, 553 bp, Arabidopsis thaliana columbia
caaaaaaaaaaaaaaatcagaaatttgaaaaagaagaagaatcaaaaaccacccaaatcgaaagaaaaaacgaaccttgacgaaatcgtatttggaagaagcgttacgaggagaagaaggaacagaagagaatgatcggatgttgatatctcgaggttcgtgttcgccgttgttgattattccattagttttttttgttgtcattgaagaagaagacgatgatgattcctctctgtccttcatcttcaaattttgagttttttgagaagaggaaatttcgatctctctgattaataatctgttgatgtttccgacaatctgacttctttaggacatatactctgttttctttttcctttattttttttgcttaacaaataaaattacagtatgattaacatagatagcccaatatcaattatgattagcccatattaagaattgaatccacgtttatttgggccacccataataattttgttatttgttgattctgcttctttgatttctgatttttgatttttttgggttttgatctttcagatatatatgt

SEQ ID NO: 48099 - DNA, 505 bp, Arabidopsis thaliana columbia
aatatataagtattaaattaatatacagctttaattagtaacatgtataatgtaattatacactacaagatgcacatacatgcatgggtttctactaacacatcatatatatataatggggcattaaaatgtatctttttttttttggtaactgcattaaaatgtatctgaatgctaatcattattaatttgtaattacgtgaatataggcacaaagaaatatgaatggtatatttcctgaggaccctggtcaggtacgcacatatatttttttactttctagttttatatactttactttttattggatcaactaaacccaaatctcaatttaaaaaaaataaatacttgccagctttattccaaaacaattaccctttttctctactattgttctcttgaaattgaaatgactacgataaagtatggtcaatataataaaaagatgacattaccaactttccttttcagtcctctattaaacctagaaaagccatttaaatga

SEQ ID NO: 48100 - DNA, 534 bp, Arabidopsis thaliana columbia
atccagttttggaatttttgaagattttgtttagtttctgttgaagagatctgagatatttgaacgaagcagagtgtatatgaaatcaaatctgtgaaaatttctttgaatttgaattgactttggacttgtgagagaagttagatcttcttcttcgtgagctatgccatttacgatgaagatccaaccgattgatatcgattcttcaccaaccgtagctagagctgaatcaggaaacaaaccggtgctcaaatctcgtctcaaacgtttgtttgatcggccgtttacaaacgtattgagaaactcaacaactacaaccaccgagaaaccattcgttgtcaccggtggtgaagttcaatgcggcggagtagtgacggagttcgagccgagttctgtttgcttagcgaagatggtacagaacttcattgaagaaaacaacgagaaacaagctaaatgtggacgtaatcgttgtaattgctttaacggcaacaacgatggttcttccgatgatgaatcagatctattccggtggtc

SEQ ID NO: 48101 - DNA, 580 bp, Arabidopsis thaliana columbia
gaataatttatttacatttacaagtattgttgatcatttaaaaattgggtactaacatgatgtctttcgactttcaagacaatttacatgcatttcaatttttgcaaaaaaaaaaaaatgaatattttaaattttttttttaatagtaaaacataccatattcacaaaaaacaaaacaattagtgcattcaaaaattttaattaactaaattgtctttttaaaacacatcattatttgtaaacatcaaaataaatatttttaattatttgaaggacagataaacaattatagataaatttatatataatctgacgtttttcattacatttaaccgatttttatatgatttcttttttcttttgaaccgacattctgtgagatctttagtcaagttggaggggttttcattaaaagtcatcttaaatcataggctttcaattttcaaaaatttccaataagatgtagaattaaattatatttattaaagtaaaatagatattgaaattgtattgtaaaatcgaatttgtaagtttgaaatttggtttaagaaatctaaatgaaatattgaaaagtatgtga

SEQ ID NO: 48102 - DNA, 1186 bp, Arabidopsis thaliana
actccggacttcctcggtacgacttcttttctaatcgaatcctactctaatctttaaaacattaagtatgttaaaaatagtatgattacgtaaaaataatcataaacagtagtatttataaatgcattttaagtatgctactagtgaattacttaaaaaatagtaaatagtatgattacaaaaaagattttaaatgcattgggttcagcggctattcacttttcgggacacattctatgaaattttatttagtattttcgtcaacagattcggagatgtagtacaaggaatgatttgatattatatgaaaaactaaaatatttttaacatacaaaatgcagctaaattcatgaagattccgctcgcgatcgcgccggcgcttcaaccgaacgtcaatgtctcacgtggagctagtttcgccgtcgaaggtgctactctactcggagctccggtggaatctgtaagtcaacttaatttcttactataatcatcttattcaaaataaatgaaccatgtctgtcttttattgacccggtcatacatagccggtccttaatttaccttcaggtggccttagcacaattggaagatggccttcttaatgatataaaatatattaaaggttttaccaaattactgtttttattttttttggcgaatgatttagtatatatcttctggtctaaagcatgtgcttgacctgtcttatggactagcctggatcatactaaacggcatatttttgttttattaaagacatctgactttaactgcaattataattttgtctttttgtctttttttgtttttttagttgactctgaatcaacaagtgagaaagttcaatcaaatgaaagcagcaaattggaatgatgatttcgtgaagaagtcagtgtttatgatatacattggtgcaaacgattacttgaatttcaccaagaacaaccctaacgccgatgcatctactcaacaagcttttgtcacttccgtgaccaacaagttaaagaacgatatcagcttgttgtattcatcaggagcgagtaaatttgtgatccaaaccctagctccattgggttgcttacccatcgtcagacaagagttcaacaccgggatggatcaatgctatgagaaacacaacgatttggctaaacacacaacgataagattggaccgatgttgaacgaat

SEQ ID NO: 48103 - DNA, 385 bp, Arabidopsis thaliana columbia
tacgtcacaagtccattgcaaatattacgaggtatttgcgactaaacgaagggagccacgcaactccatcgaaacttttgcgaggaatgagggagccaaaataaacagtaatcacgctaaaaaaaacttcaaataagtcggttgacacatcgctaatcccatcgcaaatattgctaaggatttgcgatggaacgaacggagccccgcaactccatcgcaaaatttgcgaagaatgagcgagaccataaatttgcagctactttgctaccgaatttgtccttcgcaaattgtgagtgcttcgcgagtaagttagttcgtcgcaaaatttgcgagagaaaggctaccaagtttgactttgcgccacgcgcagtgcgaggaaccgtgg

SEQ ID NO: 48104 - DNA, 499 bp, Arabidopsis thaliana columbia
tggtcgacccaaaaattcacgtattgaaatatcctttttaaaagtttgcgtataaaacaacatttttcctttttttttatgaactttttttttttttttttttgcattactttgatttttagttttcgtcttttttttctcatgcgattaaaatatattatggctctatttagtaggtctaatttaaaggggtttgttgaccaaagtgtgacaaataacgattgaacttgaggtaaatcaggagttggttaaggtggtttagatttggaatcagtttgtctggctaagttaaattattattggttaacaatttgttttgaatcgggtttcactttacaagtcaacaaaagttgttaagttatttttatgagtttgatctgagattgagatcgtcttcagaagcgagatcttgaagtttgaaaccagttcctctgtgatatagtggatactaacattttttttttttcaaaaattccattaaaaaaagtttacaatacat

SEQ ID NO: 48105 - DNA, 534 bp, Arabidopsis thaliana
aaacttaccgatatgccagcagggggatcacggtaaccagtcagaagcgcaaagacatagtttggaccattgtgacgtgcctggaaggagaacattaaaactatttaaaacacaaaacacaagtttgctacagatgttcagttaaagtaaagtagcagcagcagaccttagttataagacttagatcaggaggatacgctccaccattagcaaaccttgcagctgattcatttgcatatggctgaggaaaccggtcactgagtttaccagggcgggtgaacatctcaccctcatcattaggtccatctactacctcgatttcagctgccattgcctttgcctcttcctctgtgtaggcgacacccaccaagtctcggtatgagatcagagacattgaatggcatgatgcacagacttgctgataaacttgatgcccacgacggatcctgctcatacaacatcaacctttcaataattcatacagtacaaaaatttcactgaagtttcacagtctaatattagggtagcaggata

SEQ ID NO: 48106 - DNA, 495 bp, Arabidopsis thaliana columbia
tactttgctataacttaattaacgtgtaacgtgtacgtatcacgtaatgtatgaaccacatattcgatttccagtggtttcacccaccactttggcactttctatacattcttgcattttgattttcttgttctacatgtatttaaagtaatatgaggacaaaatgtatatctacgaaatacttacgtggatatgtaaacatacactcatctcacgttcagttcgaaagactactaatgtggatatgtatgttacagtaatacccttttgatatgtatggtgacattcgaaccaattctgatccagttcaatcatgaacttttgttctacataggcattttcaagattaacgaactttgggccgagcaactttattagattaggttaaaaaaattcgggaactctaaaatgtgaaaaattgtaagagaaactagttttctttacatcaatattacataacaatgttttttgtaggaatgtgtgtgagcgacacaa

SEQ ID NO: 48107 - DNA, 580 bp, Arabidopsis thaliana
gttgagcatttttggcatagcgattgctccaccagggaaataaggattgtagtgtagcccctctctgatctgtacccgttagtcacaggattatttctaacttccaacaatttgaagttgtaataacaagtctaaagcaaaaataggagagaaatttaccgaaattccagcaggaggatcacgataaccagtcaacagagcaaagacataattttggccattgtgacgtgcctggaagaaaatagccaaattgcttagatcatagtagatgaattttctaattgtatacaaatggagagaaagagcaccaaaccttagttacaagacttagatccggtggatacgctcctccattggcgaacctagcagccgattcatttgagtatggttcaggaagccgatcactgagtttaccaggtcgggtgaacatctcaccctcatcatttggtccatcaacaacctcgatttcagctgccatggccttcgcctcttcctctgtgtaggcaacaccaccaagtctcggtatgagatcagagacatcgaatggcaagacgcacaaacttgctgatgaacttggtga

SEQ ID NO: 48108 - DNA, 565 bp, Arabidopsis thaliana columbia
tgcaggaggatcgtgagaatattttgcgagctagagaaaccggaaaagctgtcttgactagcccttttaggttgttggaaactcaccatctcggagttgtgttgacattccctgtctacaagtcttctcttcctgaaaatccgactgtcgaagagcgtattgcagccactgcagggtaaagttcccatctgattactggagcaaacttttgcttgtgatcatgtaaaaagagattttcgagatttcatgattggtttatgtgtgtgatcatgtaaaggaaagaggttttttgagatttcaagattggtttgtgtgtaaagtaaagattgatgcttgaatttgaaatgcaggtaccttggtggtgcgtttgatgtggagtctctagtcgagaatttacttggtcagcttgctggtaaccaagcaatagttgtgcatgtgtatgatatcaccaatgcatcagatccacttgtcatgtatggtaatcaagatgaagaagccgacagatctctctctcatgagagcaagctcgattttggagacccttcaggaaacattagatgatatg

SEQ ID NO: 48109 - DNA, 396 bp, Arabidopsis thaliana columbia
ggggggatgcgaaatgatcgcttggtattatctggtattcgctttggctctttacttattgttttgctcgtttgttagtatcaggaatgtgatcacaatacggtgccgcaacagaggaattatgtacgtgtaagttatttcagatctggttggcgaattaggaaaggcaagtgtttcttgtcagggttagcatccatatttcaactaagtcttctcgtgatatctcatcagtgacatataccacatatctcggtaagatgtaggagtggtgaattaggtttttcattcctccatactgtctacgcataactgaaacttgctgcagttcctgggaggaacgcttgtgagatacacatggttcaccaggaggatgctggattaaatgttgagatggct

SEQ ID NO: 48110 - DNA, 478 bp, Arabidopsis thaliana columbia
ttcaagttttcttattttcattttgctaaagagtgtcatacttaaattatatttaaacaatagtttcttgatagttattctatttttttttgcatcaaagatttatatttagtaattttgcatattttaaccaacaatggatgtttgatcagcaagtggaggctatatacttaaccatatattcttattggggaacaaaaagagaagaagaaattcattgcaaaggaaaaaaattggataaacagagtagaatttgcactgttcaagagttgtgaaaacacagagaaaaggaaacgagagattgatagtgtctataatcctctctttcatgttattagaacaggtttgaaagctgaagcactctcagtagtttccataagaacgcttcggcttctcagcttcgacaactcacgtcagtagatcacctgagatttcacaacagaacatgaacaaacatagagaatggtaagtgtgttgg

SEQ ID NO: 48111 - DNA, 458 bp, Arabidopsis thaliana columbia
tgtttaagtgctgatcgatcaatttctcaaagctttgttagaaactaccatttgtttgtacttgttcatcaaaacttgtccttaataccatcgaacctatcacccaaaatcttatttaataaatagtgtagttactgaaatagtgtgactagtatgagtgagtaccagtataggttcttgtaagagtattcattttgatttatttaagataaattaatgtatttacaattagctagctgttagattttgatagaatgaagtacttttctgagatttatcaagtaaagatatatgactattaattgaaagttaatatatatacgtggcaagctgcttgaagtcggtccatgtaggcttctcccatattaaagaccccaaagtactagaaagaaccgcttgcttgccaccttcttgtttcaaatacttccttattatccccgaagtcaatagttaggacc

SEQ ID NO: 48112 - DNA, 524 bp, Arabidopsis thaliana columbia
gatggccctaaattgattatccgatggactcagcattgacaccgtaaaggctgtgataaaggaaaagacgaggcttattgatcacctcaagagatccgacagcaaccgagaaaccgtggttgctgctgtacacgacttgaagaaaacgaacgatcttgcatcgcagattgagatgaaacaaaaatccaaaacaggaactttggtcaaacctgagaagcttgatttctcgaaagatttctttggtcgcgacacttatctgactgcttctgggaggtttcatcttgagagctatgcttctgcacttggaaaagtttatacctttggaccaagattcatagctgataaaattgacaatgcaaggcatttggcagagaagtggaatgtggaaaccgaaatggctttcgcggaattggatgtaagattcttataacactgattttcggtagatgctattcaatgatatttaacaaattggaacttgtttcgtttgactgttacaggatgctatggattgtgctgatgaa

SEQ ID NO: 48113 - DNA, 597 bp, Arabidopsis thaliana columbia
cttcttcgcaaagcctttcaaaaacccttcactactctttctcagagtctcaagcatcattttcccgagaaaactatgaattcaaacattttcccaccatcgaaacaacaaaacgagcttaataatatacaacaatccttctcaaatctccaatctcaatgctccaatttactcctcaacgtttcacaaacccttaatcctctcttcaacgccaacacgaacaacaaccaaccctaatatattctctgctctcaattcgtttcgtgatcaagctaagcaagctttagattctagaatctctcgattcaattctggtaaggcacctgtctgggcgagaatttctgacgacggtggtggtgcgagggctcaggtgacggttccgattcgcggaaggcgaaaggattatctgctgatgctattgaggagagattggcgggagttcctgtttacgcgttgagtaattcgaatgaggagtttgtgttggtttcagggacttcctctgggaaatctctgggtttgttgtattgtaaagaggaagatgcagagactcttcttaaagagatgaagagtatggatcatcgtatgaggagagaaggt

SEQ ID NO: 48114 - DNA, 613 bp, Arabidopsis thaliana
ctctaccaagattccgtcaaaaatatacaacatgactgccgttatgatgtcttaattcaacctaatacgtggtgcaggaaccctacctcaggagagccagggcaattccaatcaagaccaaccacttctcattaggagagcacttatagtttataatttgattgtttgccaaattagccgttctatcaaacatcttaactggctcagaatcacctggaaatatcgaagcaaaaatgagaaacaacatatacatgatatgaagaagctgacagtaagttaaagatataaaaccttcaattgaccaatgatacacagaagtttgtgtgaccagtcccagcatcttaggtgtgatccacttccaaaaagcaacctataatatccaaaaaattcagaccagtaaaatcagagtctgtctgaagagtacaacatgaaagataatcgggttacaatttgtttgcttcaaaattcacctgctcaggcatctgatgtgatttcaactttgctttggcttcaatgttaaatatctgtagatgatcctgagtagttcctggaacttgagctacataaatattgaagtaaaaagtgaacatcaagataagtggattatgaacta

SEQ ID NO: 48115 - DNA, 1105 bp, Arabidopsis thaliana
caaaaatactctagcgagatttctctcttaggcactcttcccgagtgaccccaaagcagtaaagagtttttgaaaaaccagatctcacccacttttacttcctatacaaggcaattttacaactccggtgacctttctttgctctttctcgccgaggaaacttctcttaccatgccaccaggcatgggcgagttggactatcaactcaacatgactccagaggactcaaacctcacttcggccctcccgctagagcatgtttctcaaccttgaagctctggaagaagactccaacaaccgtattctctcttctcacggtatggttaaaccttctgtccagcttctaacaatatcttaacctcgttgaactctcttggaaccttttttagcatttgaaccagcctgtatgtcatgctctatggcttagcagcatacagttctcttactggggaagataactctcacctctaagtgaagaaccctctcgaaactttttaaaaactctgaagaaccgtctcccatcatctctcccaagtcattctgcccaagtctcatcatggccttaagcactcttactctgcaaaaggtaaagacatcctagagagtcctccttctcagacagagacattagacagtcctcttataacaatgaaaaggaaagatttcgagagtacatacctcatcccagaagtcgcccctctacaccatctcttagtgagcaagactcttcaaagcagtttatgccccctgctccaagacgtatcaaagccctactctggacaactcagaccttatccaggaaaactctctaaccctaattggacgactcacaaatccttctatccaaaggctatggtccctcatcccctttctctccaacagatggaacctgaaaggcaaggcaattggctcagacctaggaaaagatggcttccaattcaggtttgaccacgaagaagatctacaaaaggttctaaacaagagaccttaccattttgattactgggagcctatcatatttgcctcattcccgtctcagatcccgttttagattgaaatacacggacttcctctacattactggaagctgaaaatgttgacaggg

SEQ ID NO: 48116 - DNA, 547 bp, Arabidopsis thaliana columbia
gttggaggacgagatgatgatgaccgcggaggagtacgtggcggagttgctagagagagggtttattttgaatactgtggggaatcggttgttctacgcggctttgccgttgatgctttggatatttggaccggtgcttgtgtttttgtgctcggtcgtgatggttcctctactttacaacctcgatttcttcttcttcggtaaagaaagaagaaaacttgatcaaaagtctagttttggatctgtgtaaaatcgagttctggtcagtagaacaagtgatttgtaattaagtgatatcatcgtcctctttgttaaatcctggactaccgatgaacgcatgaggactttacatggaagttgaaaagttcgaagatcatagtttaggtttcaattctagatcttccgattaagaaaaaaaaatgtaattaaataacgcattataattttcatatattagggtttttcggccgtatgtatttggtgtggtgtaatatatgtcacgttttggtttattgagcgttattattggcatttccatgtgggtgac

SEQ ID NO: 48117 - DNA, 1326 bp, Arabidopsis thaliana columbia
tgtaacgcttggggatgaggggagatcgaagcccttacgtatgttttccgtgtattttattgacatacacttagcctgcagtcaccatttgcaaacacaatattattctttagatgtatatctctttcattatacattgatgagtatttattaggccaaaattagaattaaatcaaacaaaacaaatgtattactatacagtattttttttttcttgggataagaaaataaaagtaaaatctagagttgggcaaaaaagaccggaactgattatccaaatcggaaccgattatccaaatcggaaccgattatccaaatcggaaccgattatccaaattggaaccgatccgaacgttggacccaaaaccgtatctgaacccgatgatttgccctattggaacctaaattcctctacccgaaaaacgaacccgaacccgactcgaatctgaacccaaaaatactcgaatatttttttcgaaaatctaaattttattcgaaacctgatatactacccaaaaatccagatatttatccgaaaaatctgggtatttacccgaaaattcgaatatatattccaaaaaaagtgctattagaagctaagaaagttttaaaaaacagatctcagctactttttattgctttttttaggaaagttttagcttgttttcctttttccgaccacctttgttgggcgttagccgccggttcctggtgagccgtccccctagctctccctccggtgctgggacggtttttctgaagacctgaagcttcttgaatttgttcttcatgtggttccccactaacagctctgctcaaattgtttctcggagctctctagtctttggtttgggaagaacctggactatggtgtgcccctctcttctgtagtgcaattgtagttctttacttactcccctggtgcagcctttagctttggtggtgtttattgtgtgggagtttcccttttttacctcaggttgaggtctctggtgttttacttttggttccccttgtgtacctctgtttgagggctctagagttttttattgcttttggaggttaagtttgttttattcacagttcccctcctatctcagcatggctcagcgatactcaaaacaagaaaaggcgaagtggttggacagtagcagcaaacctaagcgtaggtcacctctcagaattctggagagtgaaaactctgcacttattgctgaaaacaagtttactctgctgggtagagttacaaacctcccagatccaacgacctagagctcttgtggagtacatggttcaatactggaacctagaaaatagagttatagg

SEQ ID NO: 48118 - DNA, 311 bp, Arabidopsis thaliana columbia
gacgtcactttactatttgtgccttttcactaactcgtgagaccgttgtggtttcttctcgtggccagaggactacaatgcaggaacagcagtggcgcacgtgagacggccgcttgacatcgtcgcctgtaccacttgcatcggtccgtcgccggagacatcagactccgtgagcagtgcgcaggttacgggatgtggaaagactacttaacagccggatatgtcgcctcggacgtctcctgcgacgaaggatactgtggttgatggagccggcgagacttagctactctttcccgtaagcttggaagttt

SEQ ID NO: 48119 - DNA, 433 bp, Arabidopsis thaliana columbia
tagacaagaaaaataaaagagagacactgagttcacgtacttgttaggaatgtttttaatcatcaatgttgtcctcctgtcctccccacgtaatatacggtcaacgtcaagctcatacagttttctgtcagcattgctagagctagattcgcttcttcggtgagagagattcctgtatcgttcatttggcgagtcaaatgaccctggcatcgaacccattggactccttccaggaaagagatgagataactgttgacgagatcgcaggacagcattttgggaatttacatccatgcgattcccaccaacagagcaagtcttatgagatcccatgtccattggatgtgatggtgacgagccaggaatccccatgctaccatgagaacctatgtggaagccagatgattctagacattcgagcgtacataggctt

SEQ ID NO: 48120 - DNA, 1758 bp, Arabidopsis thaliana
ggcagttcagttttggaagaggaggatcagcgtggagttgctcatatagtagagcatcttgcatttagtgctacaacgagatatacaaatcatgatattgtcaagttcttagagagcattggagcagagtttgggccctgtcaaaacgcaatgactacagcggatgagactatttatgaattgtttgtccctgttgataagcctgaattgttatctcaggctatttccattttagcagagtttagctccgaggtaatgtctctgtgactctgtctcctcctttttgttactttatttttttctttccataagaaattagttacacggtgtttttagattcgagtctcaaaggaagatttagagaaagaaagaggggctgttatggaagaataccgagggaatcggaatgctactggaaggatgcaagattcacattggcagctgatgatggaaggttcaaaggtatgtgaggtcttttgttaatcagttgtctagtttaagagagaggccaatgttttcttaaaaaagactttcatttaactgcagtatgctgaacgtttacccattgggttggagaaagtgattcgatctgttcctgctgcaactgtgaagcaattttaccagaagtggtatcatttatgcaatatggcagttgtggctgttggagattttccagatacaaaggtactactattttagtttatgactatgattatgttgtactgttagagtttgttgataatccttgtttctagactgtagttgatttgataaagacacattttgaggataaaagatcaagtagcgagcctccacagataccagtgtttcctgttccttctcatgaagagacgcggttttcttgctttgttgagtcagaggcagctggggtaagtcaaatttaactctccaaacgtcttcctgtattatcccgatgtcaactcctaagcttcttttgtgtttttttttcttgtagtctgcagtaatgatcagctataagatgcctgtaagtgatctgaagacagtgaaagattatagggatatgcttgcagaatcaatgtttctacatgctctaaaccagagactcttcaaaatatctcgtaggaaggaccctccattttttgcgtgtcctgttgctgctgatgtcctggtgagccctttgaaggcctatataatgagttcgtcttgtaaagagaaaggaactcttgcatccctagagtctatgcttctcgaggtctcttctcctttccctcttgtccaagtctttgtcactcccttgtcccgccccttcattggttctcgtgttttaggttgctagggtacgccttcatgggttctcagagcgtgaaatatctgttgttcgggctctcatgatgtccgagattgaatctgcttatctggaacgcgatcaggtccaatcaactagcttgcgggatgaatatatacaggtaaaatatgtgatgaactttaatatccagctttttgtcttccccctctaccaaaatcttgtttatatatgtgtttcatcttgcagcatttccttcacaaggaacctgttattgggattgaatacgaagcacaacttcagaagactcttctaccccgtgagaacatgcatacgcttcttataatgtagtcgagttccattttcactattaaactcgtataaattatattgggttctctctgatgcagaaatatcggcgtcagatgtgtccagatactctgaaaagttaagacatcatgcggctgtgtgat

SEQ ID NO: 48121 - DNA, 463 bp, Arabidopsis thaliana columbia
gtctgtatagtagtttcaaggtaagtaagtgaaccacgacacaaatctttaagcttcgcttatggagcattgctgatcaatttcagacttctctttctttgcctaggagctcgaggttttcagccataaagagacccaatcagacttcgaagatctttcattttggttcaagctgcgagaataaataataatcaaacaatgaaagaaacagaacaaagatctcaaatagtcaaatcaaacatgtctgaaacagaacatatcttaacaatggaggattcaatagcaacaaaatgggattttcatatccttataaaccttagctaatgtggtcttactcgcgcataaatcaagtaacatgtttaaaaagttagaatttcaaaaatagtttatctgactacctgtttttcgcgcgcatttctggtattccaaactccagaagcgcaaaaagtcccacgcatggaga

SEQ ID NO: 48122 - DNA, 482 bp, Arabidopsis thaliana columbia
aagttctcagagcttcaaagctgcttatgcttggatcttgttgacgagcacaaggatcatataaggacaccaaaagcacatgtggatctcctgatgattggctaagatggtggatcaactgtctttcttggaaactaggggattggattgtagacatccattgcttcgatacagacttgaacttgaggagggttttcacatcaagcctcaccattatatgatactctatcacatcgtgtggtaacaattcttccatacttgtctctgaatctctcaatgttatagattgaagacaagagcctccgtatgctttatttataaaccaaacctatcaccctagtcagagtccgagaaaaataaaagggtagatcagtaaatctagaaactgttttctttttctttttgattttatgaatttgagaaatcttaaaattttaaacggatttcatcaaatcagtatgataaaagtagaattttcaaaa

SEQ ID NO: 48123 - DNA, 358 bp, Arabidopsis thaliana columbia
gttacgcaagagagtgacacaagtcgagagacgtgcaagacagtaagaatcttcgttggatcatatgatgtaactcactacgtagttgatgtcttttagaatctgtcgtctctcttatcctagtctcacaaatctttagagacacgacgttccttttttggattttccaacttaaaaattcacatatatattcttctttatttccacaaaaatccgcaaggaataaatcagtttagcatcattctcttgcccacgtcctcgcgtaataaacaaattcgagatttcgtatctctttaaagtatctaaataatatgaatttcaccgactcggagaaataccaaagtatctgattccttat

SEQ ID NO: 48124 - DNA, 490 bp, Arabidopsis thaliana columbia
tctcaattgaaacaaatttagacattttgaaaaggatgtctctcatttaaaaacatccaaacatttgaataattatattttggagggaagacatctaccctaaaatatccaatgtggatggtgtaaagccacctccattgcacaagtaatatgagtgtttatagatattaaattgattaaaataaaaaggtctgtgtctttaaattgaagacatcctcttatatctatgtaatgtagatgctctaacacccgcacgagttgaccacaacgatttcacatatcttgctaccgcaatcaccatgactgaatctctaattgtaattaactgctcttacgaaaaaaataaacatatataatcaattcctaaatcggatgataatatgctaaacacacagagatcaaagaatatcagttccaaaggaagaatcttcataagaaaatcataatattgatctctttatagtcaatccgtaaatcggatgttaaatat

SEQ ID NO: 48125 - DNA, 570 bp, Arabidopsis thaliana columbia
  unsure (1)..(570): unsure at all n locations
catgtcgagatacaaatatatctcgtaaaaaaaaccatgagtttctgtggtttttttaataaaatgaaaaaatcttttaacgtttttcgacctttgcctgagtatttgatttgatccgaaaaataaaataaaaaactcgtgtatgaatatagtagtcaataatatgttgcgtaaaaaataaacttactacaaatttggtgtcaggttaagaggataatgacaaaacaccaacaagatactctcacgtgttatggaaaatatttattcgagtgttttacttttaactgtatagaagaatttaccatgaaatttgtaggtgattgttctagtgagaaacgtagtagatgtgtgtggatagacaattgcaaccattaggtccattacagtggaagtttaactcgattgtgggttttgccttttggtaagaaagtaatgaaataaatatgtgtcatctaacataganataaagtaaagtcaagaatgatattcatttttttacggacgggtgaaaaatcacgttaaataagtagctgaagcgtcactggggtgttgtgacaagttgactattat

SEQ ID NO: 48126 - DNA, 637 bp, Arabidopsis thaliana columbia
cgactctagtccgccacctattgatctctttatagtcaatccctaaatcggatgttaaatatgctagacagaaagagagagataaagaaacgaacaattgcaataaaatcactaatcaccaacacaatttttctctactcttacgtgttattaggctactgcttcagaacaatttattgggccaatactttaagtaaggaaaataaagtaaagaaacccaaaaaggtcattttcattcattttttctatcacacaatttagaatacatgcacaggagacttggagttattgaatcacagattcacagtacttatattcaatagtatcagcatgtataagtaaactgtggaaaaactaaactggagttttcatagatatatacacacaatcatataccaaaatatgaacttttattcatctggtttgttagaaaatagagcttttaagatatttaattataaataaatcgtggaaccaaatttacacaattttttaaatccatccagaaagaccatatattaaaattttaaatatggaagtttaataaacaatatagagattacacatatttaacgaggaatcgatacaaacaaatatattagatcacctcatgaaacaaataccagatagactagag

SEQ ID NO: 48127 - DNA, 234 bp, Arabidopsis thaliana columbia
aatcacattctctcaatcaatcaaacaagtttttcttacgaactctttgcagattgtgaattacatatatgttttcacaatttaatcgtccataggtagaataggtttaagaaacgttacaacaacgatatgaatatcacatatacatacaattacgtgagagaatgcagtgtttcttcaggtatccaatttggtcctagtacgacacgacaatatctgacatttcaccctgag

SEQ ID NO: 48128 - DNA, 606 bp, Arabidopsis thaliana columbia
gaaaaccatgtttaaatataggaaataccaaaaatgaaaggatagccatgtgatacgcttgtataaaaagaaattgtccctattgattacttcaaaaaaaaaaaaaaaaaataaataaataaataaataaagaggccaattcgacaataaaggcaatgcatagtctctcgtggtttctcctcgtcattggattatccgtagggttgagtagcggaaagtggaatgagaaaaactctgtcatctttacgaattctcttggtcggaacaaagtcttgaaagtaaattgcatatcaaatgatgacaatctaggcttccactttttgcgccatggacaaacctacgattttagtttccacgatagtcttttcaaatcagaattctattgtgacctatggcaaggcgctaatttcaagttgcatgcagcatttacggcatatgaaggtggtggtttgatagttcattatggtaaaaagaacttttgggatgttagagatgatgggatctatttcaccatggccaaaaaatgccaagttagagtatcgtggaagaaatattaatcctcaagggaaagatggaatttactcacttgttgttttaagtttgcag

SEQ ID NO: 48129 - DNA, 484 bp, Arabidopsis thaliana columbia
actctaggatcatcgatttagattatttaaacaacacggttagttgaaacatagtggaaaaatttcttacatacataatttattgaactttacttttagttgatttgggaaagttaactagttaaaattcattaaaaaaaaaaagtcaacagtaattgttcttctaataggtgtccatcaagatcatacataattaagtgttagaatcactattaagagttttcataatttacaataaataaaaaatcaagactttaaaaaaatattgttttggtaaacagtttcaaaatagatcaaaacactagcccaagagttgaaataagtgagactattaatggtgcacagagatgtatgaaattagcaaattttgttttacacttcaatgagttttggaaacctaagctacctgataggttaaaacacaaaaaaaaaaaaaacggaaagaaaaaaaaaccagaaaaccacaggcaaagaggtcacgggg

SEQ ID NO: 48130 - DNA, 588 bp, Arabidopsis thaliana columbia
gtaacgtccgccagtgtgctctaaagtcattacacaacaacaacaacaaggtcaactgaatagatacagatcaaccagattgtcccttctatgggctatcgcacgctttatatcgaagcgaatcagcctggcaacgtaattgcggcaaaaagtgacgctgaagggatactggaaaatgctttctggcaaattgcgctcaatgaggatggttctctgcaactggtagataaagacagcggtgtgcgctatgaccgggtattgcaaattgaagaaagctctgatgatggtgatgaatatgactattcacccgcaaaagaagagtgggtaattaccgcagcgaacgcgaaaccgcaatgcgatattattcatgaagcctggcagagcagggctgttatccgctatgacatggcagtgcgctcaatttgtcagaacgcagcgcccggcaatccactggcagagtaggggtggtgttggttgtcactcttagtcataacagcaggcgtattgatgtggatacaatcttgataccaggctgacgatcatcgcttcgtgcctggtcctacccttttacaccgcagtgtctggcag

SEQ ID NO: 48131 - DNA, 568 bp, Arabidopsis thaliana
atataagaagccattgctaatagttcaaccacatcaacagctcgaatgtcggaccgtaatggtcttggtcttcacaagcaatgcggttaatctctttttaattttttttatcactttgatcatcttttcttttgtttatgcagttatctgtcacaaacgagagaggggtatatttaagaattagaagcttagggaggtacatcaataagaagcggaagtacatacaaaacagttcttctttcacttccttgcaatcacagctggaggacgccaaccgcaaaatagaggaagaagcgactctacaagcacgtcgtgaggtagagacattgcaggtgagaacgagatttaacaaacaaagaaacttgttgcaagaacgagataaataacacccatagtgaacaacaaggagaagaaaactcttcaaactttgaagacctccataataaacatacaaaaaaaacttctacttacagaaggaccgagtccaaagagattcaaaggatgtgcgaggaggctaagggtgagaggaaatgcaaaggcatggtggacataaatgcacccacgacaa

SEQ ID NO: 48132 - DNA, 1032 bp, Arabidopsis thaliana
  unsure (1)..(1032): unsure at all n locations
aggatccctctccaacacagctcaggaaagctgaaaatagcaaagaaacaatcagaaagaacccgatggaagagacagggatagagaatccatattttctcagtaattaagaaacaaaaacaagaaaaggacaaaactctcgtcttcttgtgaattatgggcctttcaatttagaccttttatttagcccaattgagatttcaaagcccactattgagtgttcttcgaatggaatctgaaccaaagatgttatttgagttgttgttttgtctcatgagttattgacttcgagagagagggtttcaaagtttttttttttttgggatgtatattaggtaagattgtctcaaatggcaacaacatttttgattatttcttaataaaacttatactaatacaatttggtaaatacctaggaaactagataaaccaaaaaataaaacacatttaacatataggctggacctatcatatctatgcccatcattaagcccatttattatgcatacatacacatacgatctttggttttttaacacatacgtattttagtaactccaaagtgacaaatcttcgtaacacatttcttcgtccacgtacacactcgtattcatatcaatgtacgatcttggcggcgacatcaacggctcctccgcgagcctcatcatcattccagcgactccttcatccgacgtgtcaaactcactggctgagggtaaaaccgtaattcctgtactaaactccggcggcctgaacatctccgctgcttcggccgccgtgcgcctgatcgtgtccggatcagtggatgccggcaccggagacctccaagcagaatcggagaaattcaaacacgcggatctcccgcgcagagcaagaaccgccacgtcgtgagcacgtgcggccatatctgccgtcggataagttccgagccagactcgacgctgatgaatcggttcacggacttcgcatacccatttgtcgcagtccntacgccgcacgcctctgtagattgggtgacgtgtctcttgaaaa

SEQ ID NO: 48133 - DNA, 799 bp, Arabidopsis thaliana
taatcgaagaggttatggaagacaggaccgtcccaatccacatctacgttgaagcgcttgaggttttcagagacggaaggatgaggatcggttacggtttccggcgtgacggatttgaggaagttgatatactccagcgagtggaatttttcgaaatcggaagcatcggcgaggtctgggtggttgatttccatgtggcggtggaggttatagctgaggatgaggttgtgagtgacacggattcgttgaggtttcgttggctggttaacgccgtagtagtagtcgccgatcattggctcgtagaagtaactgacgcggcgttttcctccgtcggctaagctcgccatcgtcactttctctgcttcttctttttccgccaagaaacgagatatctccgatttgattttattgctactcttttttctgtatttattgttttagttaagataacaataaatgtggattatttatttcagttagattctattcggttagaggattcttttttgcggttaatttcagtaacaatagtgtttaacacttcgagtttgactgagaaagtaataataactaataacatttgagtagttaaattaaataaaaaaattaaattagtcaactatattgtattattgttcgccctattttatttttacaatgcttttttgcatgatgttgcatggagataattaaatccgatataattactactaaaactataaataattaggacaaccctccactttgaaaaatgctccagtgatgaccatccatgtgatctatgtattgaaataattag

SEQ ID NO: 48134 - DNA, 494 bp, Arabidopsis thaliana
caatgaaccaaacgacgccacatattaggaagagtccccagaaactctgtaccgatatttgatagttttctgtatctgaaatctgcattgtacattcgtggtcgtaggtaagccatttcttgcggattttctcgagttttccttcttcagccagttgcaggatcgctgtcgacatgtccacagctagaggagagtctctctggaacgcctgcaagaatcgagatccattaagcaaagttttaacagagactgatcttaaaaaattgaagttggttttcacatacaaatccccagcctgtccgagtgaattcctgtccaactgttcgaaacttgcagttgctgtttgacaagagagctttaatgtaaggaagctcgtcgacaatggctgccacgccaccgcctctgggaccacgttgaagagcagagagatattcttcttcgtctttaagcggaatgattcttgatggagctatgttaagttcattgaccagaaa

SEQ ID NO: 48135 - DNA, 776 bp, Arabidopsis thaliana
tgcaagacgaacaagtgaactgagtcatggtttcaataccaagtagtctcaacattttaaaagatctaaaacgtaacactaagaaatgtaccttgctaaagaatttgcttaaggcaatgcaaggttgtaacttgcaagtgtgtttacgaatatgattcctccaaggcgtgagagataaggaattttgaaatgatcatgtctttagactccctgaaaaataaaaaataaaacatctgcaaattcaagagtcgaaagttattagaaccgtagagttcacatttttctagactatgtagaggatgtgaaacttattcaaatgtttagaacttaagattttgtaacagatcatgggctctcttaattagtgtagtccttcgggtgactattttttctggatactatatacatcctccgaggaagattatgggcctaaggcagtgtagtgttcgaatttaccactgaatcaaaccggaaaaatggtagccgtttaaaccggttcgctttaatttagatttggccaattattaagtagccggctcttcgtttccgcggtcaacgacagattaaagcagagagaaaaacaaaatccattgaagaaggagaagaagaaaaaaaatgggagcattttgcaagttgatcgatgcggttctcttcttatactttgctctcatggcggtaattgcgccgcttatcgacggtcaaacgagtcttcccggcgatatctcccggcgtttatcgtcgatctgaatcgctggtacattgatgaatttggagat

SEQ ID NO: 48136 - DNA, 514 bp, Arabidopsis thaliana columbia
ctgatatgatcaaatatagctattttctttgctaatatgatcaaaaatatagctactttctttgctgccatgataaaatatagttttgattcttcacttgctcacatgccacctccatatggagagctgcgggatatcatcatcctttattgactgatcctaaccaatcagtgttagaaaaactacggctcctgcttgatatggcccagactcaacaaatcagcaattttcaatgtcttctcccattctggctaatgtggcgaatatggaaatgcaggaatgatctcgtatttaatcgcagattgatcactgtggaggttgctgtagaacaagccaatggccatcatcgactcaagaaaatggctagaaaaccggacgattgcggaactccggagaaccgatattaatcatcatcgatcctctagagcgaagtggacaacaccacaaagaggttgggttaagtgcactatgattcatctcaccatgaaggaacaagtgcgtctggtatagggtg

SEQ ID NO: 48137 - DNA, 897 bp, Arabidopsis thaliana columbia
tgcagaagctcccaacacttgtatccgttttgcagccaaagattttcttggtaagtattctcttccactctggtgaagaaatatttacatcctgcatctgtctatattcttctatctaataccatattatgaataggtccctgatgctgtcaatcagaggatcagtttggctgcgataaagaccatctcaatcctgaattactttgagaacaagacgctacatgtaccaagaattgtagacaatccaagcgtagagattacgacagacttggcctccaaattgagctggagaaaactgaggcaacgtgaaagcttcggtattgcaagattgaaaggtgggcttctgatggaagatgggaaacacagattagtttccgggttggagcaggaagaaagttcaggaaaggctcggccattgaggcattggggctcagtggctccggaattacttttagacgcattactgaaaatgggaataaaaggatccatcgaacagagtacaggtgataatggatcagaagacaagagtataatccatatagaaaatcctaacagtggcctgatagagttctcagagatgggtactgctattataacaggcgatgagaatgtagtctctcaggtcttccaggcgattgatggagttcttgacggtatatagaggaagtatcaagcattgactcaccagagctattagtgtaatagagtgaccagttcagataaaccttgtaattatgattggttcggaaatactctctgtaacatactatatatagaaaataatataatcttatgtactatatgcatgattaaatgttaatcattgtattctgtgagtattgttttgagattcatcttatgtacttcatatttcgaggcttgactgaatattattta

SEQ ID NO: 48138 - DNA, 528 bp, Arabidopsis thaliana columbia
tgtatttgaactacaggatgttcagagaatatatggacgaagctctgagagatatactgggagaagatgtggctcaacacgtagtggtgaaggccatggaagatggttccagcattggctctgcattgttgctggcttcgtcacaaagtgttcaaacaataccatccgtatgaataatttgtgtacatatttacaatgtatatagccaattgttttagaagcatgtaggtttgtgtaaatattgtaggcactttttagtttcttctactcatgattaagtaaattacagtttatttacaacaacaaaaaatgacttgttagtgcaacggaattaatacagaacagtgaaacctaatcttttggggataaatctttgtgtcattgtgtgagagaggacattcaaaaactacaccataaattcaaacagtaagagacgaaagcccaacttcattacatgcgttacccgcaaaaagcaaaaatttcttgaagtaaaaagtgagcaagaacgagagagttgaaaaataacag

SEQ ID NO: 48139 - DNA, 576 bp, Arabidopsis thaliana columbia
ggatccttcacaacttttgagattattttgttattgttttatggattttgatattcttcataaaatttaagttttattaattttcatgatttttaaactccattaaaaattgtgttattcaaaggcttaagtttcattaaaatatatattgtttgtaaaattttattcataaaacaaaaaaaaaaaactgtggatatcctttacaatattaaaattattctataactacaatactctctacaatcttaaaaatctctcatttcttgaaagttgaaaccaaactcccatattatttaagaggtggagaaacaatgattaagtttttgggttttgctcaacaaatgtttttttggatcaatgatccaaagattccaaacactaaactcaacgtcttcttccaataacttttacttttgttgttaataaaaatgacataaaaaagattaatcgtatacagtacattgagtttgattgacgactgactttaaagtcgtaacaaaccaccggtatatttcacgttaatcaaataatcagcactagtcagagagagaatataatttgtcagtttataaatgg

SEQ ID NO: 48140 - DNA, 479 bp, Arabidopsis thaliana columbia
ttgacttatcaatttaatcgctaacttatgttgacttcacgaaatcgttaagtcgcgtactacaagaaaaaatagacattttaactcaagataaacgctattgtatgtgtttaatatcgttttcataaactttgatggattaacgagttactagaataatctgaatataagaaccgagtgcttttggttttttttttattagttagttttttttatggtttttaattggtttagtctatccgagtggaattgttttctttttaattaggtttttggtatgtctttataaacactatttatgcaaacactgggaaagtgtgcttatttctaaccaactcagttaaatgcggaacttggaggaaaaaatccgaattagaaccaatctggctgacatcatatccattgatgaggtaaagacaagaaataaaattgataagacaaatttgggaacaattaaggggaagatggatatcaatttg

SEQ ID NO: 48141 - DNA, 844 bp, Arabidopsis thaliana
cagttgctatcacagtgattcagcttattggaatcattggagtaatgtctcaagtttcttggctggtttttctcgtcttcatccctgtggttgctgcctccatatggtatcaggtacttttcaataaactttacaatttagtcttccataagagttgttgattctgacaaaattaagtcaagtttatttaagtgatgaagttgtgacaaaaagctttcaactttgcagcggtattacatagctgcagcacgagaactttcgcggttagttggagtatgcaaagctcctctaattcagcatttttctgaaacgatttcaggggcgacaaccattaggagtttcagccaagaatttagattccgttctgacaacatgaggctaagtgatggttactctaggcccaaattctatacagctggagcaatggaatggctttgctttcgccttgatatgttgtcatcacttacatttgtcttttcattggttttcttggtctccatacctactggagtgattgatccaagtctcgcgggattagccgtgacttatggactcagtttgaatactctgcaagcttggctgatttggactctctgtaatcttgagaacaaaatcatatcggtagagaggattcttcaatatgcaagtgttcccagtgaaccacctcttgtgatagaatcgaaaccgacttgagcaatcatggccttcacgtggtgaagttgagatccgtgatcttcaggtatccatatctattatactttactcctatcaaagtttgtgatatagagctcgcacttgttttatattataccttgacagtttggaatatttggacacattgtta

SEQ ID NO: 48142 - DNA, 465 bp, Arabidopsis thaliana columbia
gtttttgtggcatatgttggttatagtgtttagcataaaggaagtgaaaaacgaagtttgttgcatcacaaggtaagcatgtgaaaggtgtccaaaacaaggatgaaattcaggtctcgtgacctatatgagaatttgcatgcatgatttcatgggaaatgaacattacgtgtctgttgagtaacttatggtctctgttgctaatctctacctctatctcaccaactccatgtagtggaaagattgttgcatctttcaagcataatgctagcttgagagaagtgagaactttgactttgtaattggagacgaagaccagattaatacaatatgttaataaaataaaataactaaaatcaaaaaaaagaaaaagtcggtagggcaatatcgtctttttccgatcgtggtcgtttcttacaagtttcttcgttcgttctctagaaacgcagaaatggagactcagta

SEQ ID NO: 48143 - DNA, 556 bp, Arabidopsis thaliana columbia
tctgtaaagtcagttccgaagcccttgaatatttccggaaggtaatctgctgatatcctatctatgtggttaaacgaatattaggatgccttatatgttctagtttgcgttcttcttctttcttggagaatcggaaagtactctacatttgttcattaggcttctctttgtaactcatagcctcttactgtctcatggtttcatgattcttgtctggaatctgtatgatccctgcattctccattttgtctctttagattcattatcttcctggataatatttgcctgtattctaaactgatttgagtgttttcaatctttgatgttcttgccatgatggaaaatgagcggtttccttatctaattgacagaaatgcacagagggcttggttaaaaccctgagagatattgcaaacagtccatattcacctgagtatgacgtcgctggaattacggatccattccttcacatcagattgctcaaactgttgcgtgttttgggccaaggggatgcagatgccagtgactgtatgaatgatatacttgctcaggtttg

SEQ ID NO: 48144 - DNA, 740 bp, Arabidopsis thaliana columbia
gccagtgtgctctacatggatattttcttactaatggattatgtataattggatctaatcacatgtttttacttttttatttattttttcttttctttgatcataaaaacatagcatgattttctttgttttccaatcttatttttcgttgttaactaatatttatggcatgaaatcgattaatgagtaagtacaaaataattgtgcactagtagtaaatacaacactgaaccacaatgatcaatgtcaacatcatgtcaccgagagaattgaagaatttagctatagctaaacggagggggttgttgagcaatcaataaacacgagatttgtgttgaagtaaattacaaatgattcggatcaaaataaatagttaagtaccatttaagaatttaaacacatatatattataactttctttcagaccattacaaggtttcacgataattattttacaaattaaagtgtctaaccaataccaaatccacacaaaaataggataaactagttcaaatgtaaatattttagaaactaacgaaccaaagcatcaaataaaatgagttgaatgttattccattttcattcgatttttataaccgaaaactcagattagacacatcgacacctagaatacaattagaaatttgctaaccaaacttgcattaattatcatctacacatatttgcataccaaagagattccctaatagcccagaagatgtagtattatatattcatgt

SEQ ID NO: 48145 - DNA, 438 bp, Arabidopsis thaliana columbia
aggaagtagatcaataaattgttactcttaaaagataaaaagtgtagattttgatgtcaaatatgtgttctgtgtgaaaaatctgatcaaatttttgctctgtttcaacaacatatagattacagagtaaaaagaacgatgagaagttgttgctcttgtgtctctcttggaagcattcaccaacatggaagagaatgtgattcatctgtagcttgggagaatccggtgaagtgtgttctttaacccgggcttcggtttctaagctttggatcggtaactagcagcatttcttctcgcacagcatccaacaaagtaaaccattgactgaaaagaatacaaatagatcagttctcacaagaacatttcaagatccacaaatttttttagtttgaaactgttttggtactgctgtggtttggcaatccttaaaggttatgt

SEQ ID NO: 48146 - DNA, 480 bp, Arabidopsis thaliana columbia
tcgaccaggagtttcctccgtctttgggcttagtcttaggcttcgtagcaaccgctgcgtcgccattcgatcctttccccgatccaacttcaactaataccgcacgaatttcctcagcacgacggagatactcgtagaacttgtcggtgatggcatctctgatcctagggttcttctcatatttgagatagattttgaagtattcaagcgcgttcatgtacaaaggaaaagctttgttgtagttaccagcattgtcctctttaccgcttgtctaacgtactcgatcgcttgttctttgaaattactgtacatattttttttagggtttatagaaataaattccttcaatcataaaattgaataatttatcgtgaaaaatcagatgattacagaaaccctaggagaagcgtggttgatccatgatcagaaatttaagggacagcagagagttttgaagtcggtgaggctaacagagagaaa

SEQ ID NO: 48147 - DNA, 598 bp, Arabidopsis thaliana columbia
  unsure (1)..(598): unsure at all n locations
atgtaagtcatgttatttcataagatcccgctnngggcgggcgtttgaggaggaggagaagaagaatcgatggggaaattagttttggctttaggaccacggaggttacgagcggcggagtcgtaagcgcgacagcttcttcggcggaatcgaaagtacctaaccaaacacgagcttttttccatggatcacggatctcagctgcgaatcgtccccaaggtctcttccttacgcctctgaatctgatttcttttacagatccgttgatggcggcaacgacggtaggtccggcgacggcggaagagcctcttcctctcctcatgatggtggatttaagagaaagccagaggtaatggtaatggagaaagatctaatagagattgttgagaaagagagaaagagagaggaagatgaagatgagggagatggtgggaggaatggagaagataggaaactctctcttcaacacaaaaagctcttcctcttcttcttttcttttgtgttcttttttttttgtaattcaaaatgtttttaataaataaattgttttttttgttgtgatatttgaattttttaagaatttaaattgtaatatttg

SEQ ID NO: 48148 - DNA, 332 bp, Arabidopsis thaliana columbia
tagaagcggttattgaaatgagaaacctgttagcgtttggtcatttcatcaaccaccctggtaaagagatggaatctaatgtcatgatttgcccttacgacttcctgttgtcagagacagagatacgagcttacattccgaatgtagctttcgagaacacaaggagaggtaaagatggggagatttggaagcttcttgtctaggacaggaagtaatagcagtttggatgcgcaggtgctgaagactaattggtcgcgtggcgtacagaagcgttgtgcaagtgaggaactgagtgctgaattacaggctgagcaattccgagaaaagactcg

SEQ ID NO: 48149 - DNA, 627 bp, Arabidopsis thaliana columbia
tgtaatcatacgtacgtgtataacggaattttggtaactaacgtcttcgatgagagaaaataaaacgacaaatttaaactattttaagaggtttttcccatttcgaataaacgccaaatgtacaaaacatggaagaacaagcaatacaagtctcttatctccggaaagataaaacagagatcaaagaacagagtatatagacagaaggaacacgttcgagcttacaagttttttttgtagccataaatggtggcgatattcaatccaactaatgcagaaaaggcatctaactaacattattaaactcgggaagtatttacagcagtcgaagcacggatgagctttggcgggactgaatcacttcgagtcaccgtcgacaacttttccgcatccgagatttcaacccgcaactcattcaccaatgcgagcaaggcaacaaatgcgatgacgagaggtgaacaagcgccgatgtttgtgcccacgacttccccacgaaggagaagccgcgggcaaaggtgtaaacaaactcaacaattccttcaaattaggtacgaaacacaggccccggaactcatcatcgagcgtaacatcgcccgtgaattaactgagaaggataggtggtaggta

SEQ ID NO: 48150 - DNA, 557 bp, Arabidopsis thaliana
cttgcagccaaacactcggaaacaacaacaccaacaaataccagatctgcgaggagatcggccgtggcgtttcggcaccgtctctcgcgtctacgctccggccaccggtgatttcttcgcttgcaaaaccatcgacaaagcctctctctccgacgaccttgaccgtgcctgtctcgacaacgagcctaagctcatggctctcttgtcctatcaccctaacatcgttcaaatccatgatctcatcgacactgattcgactctctccatcttcatggagctcgtccatccctctgtttcgatctacgaccgtctcgtctcttctggaaccttctttgagcctcagacggcgtcgttcgctaaacagattctccaggcgctttcgcattgtcaccgatacggcgtcgttcacagggatattaaaccggagaacattctggtagatctacgaaacgatacggttaagatctgcgatttcggttcagggatttggttaggtgagggagagaccacgaagagtcgtcggaacccgtattacgtgcccggagttttaagggata

SEQ ID NO: 48151 - DNA, 638 bp, Arabidopsis thaliana
tgatccattacatcgataaacaaaaactatgaacaagattattcatgaagggatgcaaagaaaacaaacctaaaaagttaaagattacgtctaagactgaaagaaacagatcacataaccttccacgattcaagcgttggaaatgttgggtaattatcaaactccacggcagaaccaccggggtcggccgttgcacttggcttccccgacggtaatcctacactgctgctgttaccggagaaagcatttcccactgcgagattctcctggtgatgattagacaaaaatgctgatgtgtcgagcattggaaccgccgtggatcgatccgaagaccacaaggcagtttgttaacgaacctaagcggctccggcttgacaatcggatcgaaaataccaaaggaagaagagtcatcgatgtacttggcgccagtcacttgctgaaccatctgacgaaagttggacggatccgccgttatgaaagtagtctgagatttcttggaagcacgagcgcggcgcttggcggctattaccgtcggtaagaaggcagttacgtttccgtttagctcctcgccgatgatttctggatcagaagcacggagacggtagaggagagtgtgttagtggaagaagggtgagaac

SEQ ID NO: 48152 - DNA, 298 bp, Arabidopsis thaliana columbia
tttttctttaaaggttgatcgtctgtatatactgtgtaatatacgtatgactgatccaacagaactctttgactatccggttcgaccggttctacggccatatggtgaatcatttccacgaacccggttagtatctggaccactgctccttttacgcctctcttcttggggttggtctctgatagtccttacgacttctaattctctaagcacatcatccaactggcggtcggtttttggggtcagcctccagacaccgcagtatgatctccgctgctgtggtcaccgccataagtgg

SEQ ID NO: 48153 - DNA, 433 bp, Arabidopsis thaliana columbia
taatttttctaatgctttatccacgagccaagatttatgaaatcttccgtgatattatatctaaatttgtggttaaatcaacttgtcctccaaactcaaaacacatatagattaatgctaaaagaataatcaaagctaattcgttgtgtgattaaagagacttgtgtcattaaaaaaatgatgacacactaaaatgattaagaatatatcctatcagatgacatcgatatctcaactccaatttggctataaaatatttaaaagcatagtttatggagtactagtcactaaatggcttttgtgtgctgattaaagacattttaagttaattgtactttaacctaacttgtgtgataaactacaagtctcatacttcgatctaatagatcgtcttcgaatatttttgtatgtaaatgttgaaaacttagtaaaa

SEQ ID NO: 48154 - DNA, 572 bp, Arabidopsis thaliana columbia
gcattactgattaaaaatatcgatgaaattttcatttccttgatgcttgtaactatttgctattttttctggtggaatgagctttctgcttatgtattaactcttaagcactttggtttaacgcgcagacagaggttgaaaaggttaagaagaggagagaagagagagcagtggagaaagctcgacatgaagaagaaatggtaaattctggtatccagaaggatgtatacaattgaaattcttattagccagttacctctctaatttggttaatactgtatagctattgacttaaatcgttctatcctctgcaggcattgttagctagagaacgtgctcgggctgagttccatgattgggagaagaaagaggaagaggtataactgcgttttctttgcttttgcaattaattcttctttacagttgtttggtgtatgttgcttgatatatctgcttgatctacagttccatttcgatcaaagcaaggtgaggtcagagattagattacgtgaaggtcgactgaagccaatcgacgtcctctgcaagcacttggatggttcagatgatttgga

SEQ ID NO: 48155 - DNA, 431 bp, Arabidopsis thaliana columbia
aaattatataatcaaactggtttaggactattatcaacatttgactcacataagcttgcagcaatagaaaccctaatacaaactttgtagagatgacctgccatgaagacttgctctttaaggaaaaacctaagagctataagtatataatctttatgtgttccttctctgagcttgctagttttatttacaaacagggaacctaaaatgtttcagaatcttcatcagaatcttccacaacccaactcttcctagccatctttttaggacgattatcgccactttcttcttctccttcatcttgttcttgttcttcttcatcgtcctcttctgttgctgctgctattgttttatcagaatctaatcctggtgatgatactgaactagcatttcggggggacacatttcttctgaaccatcatcatctgact

SEQ ID NO: 48156 - DNA, 569 bp, Arabidopsis thaliana columbia
gtatatactaaagagattgtagcaataacagtatttgtggtctgatgtgattaactaaggttattgcatataatgtgtacaagtctaattcacaaactaagctaagctaagtttttgtaggcctcgaccctttctcttccaacaagtgttcagtcccgcgagctttgcatcagctcgaaccactgcaaaaacaaaaacaaaacttgtcagatatctaagtattttgacagtgtagaaaacagagaatggatagtgaaaagttacctgtctcaacacatcaccaagtgttctgggtaaggcttcgatgtctcttagcacaatgtagtatgggaaggggaaggaatccaagtaattcattttcttataaggtctcctttcaccatcatatacatagtcctgattagagaacaaaaaaaagatgtagtttttttagaatcattcatgataactactcgtttcaatcttataaatatgtataggaagtaatagaattggacataccgctaaatcaaaaacagattgctctgcgtcatcgagaagcagatatacaccatacgtttttgctggag

SEQ ID NO: 48157 - DNA, 461 bp, Arabidopsis thaliana columbia
ggaaaagtttacacctttacgagacaagaggtaatgacaccaaaaattaattatgagtaagtaaatgttcttctgaattatatttttgtaatttcattttcatgttcttgaattttaggtatccgatttcgcctagggtttgtgcttgttcccaatgtggagaagttttccccaagcttgaaagcttagagcttcatcaagcagttcgtcacgcaggtaaggctttttttttccttttaacaaaaattgtttgactttatcacttacctcaaattaattaattacgctttagctacaattttttattctttggtgtgtggtagtcacatttttaaatttaaccctaagtatctagtgagattttcgtaaatgcgaatggcttggcaaagtaagattatgtgttgtacccttggatataaacttacagatcttcagtcactgatttgacttgtgaatgatga

SEQ ID NO: 48158 - DNA, 530 bp, Arabidopsis thaliana columbia
  unsure (1)..(530): unsure at all n locations
nnnnnnnnnnnnnnnnnnnnnnnctaaaggctcttccgcgaaggcgcgaagatacccgcgagcgcataagcgtaaaacctcacgcatcctctatatttcaccgataaaagccctgggcaccgacgttcagcgcaacttgcagatcccgttgaagggtattgccgatgaacggcggcggcgcggcgaagacggaagtcaatcttcgcgtagggatccgtactggcgatacgcctgcacaggaacgcagcaaactcacccgtaatccgccggatattctgatcaccacacccgaatcactctatctgatgctgacctcccgcgcgcgcgaaacgctacgcggcgtcgaaacggtaattattgatgaagtccacgcggtagtgncaagtaaacgtggtgcgcatctggcgttaagtctggagcggctcgatgcgctgctccacacctcagcacagcgaattggcctttctgccactgtgcgctcagccagcgatgtggcagcatttcttggtggcgatcgcccggttacggta

SEQ ID NO: 48159 - DNA, 567 bp, Arabidopsis thaliana columbia
tattgggtatgattggtacgttttcattgttaccaatcatgaaaaattaaaaatgatatcagtgatataaaaacaaatactgtcatttcttataccttgattacccactattttatattaactagtttacctacctttttggttactgattggatatattatttagttggatttttatcacgctgaaagaagaacagattgagaaaaaaaattacttaaagacaaacagttgagtacctttttattgttattaaaattttagtattaattagtttgtagcctactagttcgacgattaggtattgtatgtagtatcatcagcatgttaggagcttggcgaagaaatgaagagggtgtcaaatctccacatctttttcaaaattttcccaaccaaaacaatctctagaccaacgatttccgaaggactgaacccattagtgatcattaggtaacacaaccgatgcggctagggacggatctagaatgtaatttaatgtgaggcaccatatatataaatagtactaagtataatttagttactaaattgtattgtgattataatttttt

SEQ ID NO: 48160 - DNA, 544 bp, Arabidopsis thaliana columbia
tgaacaggtctgaaacatgccacatccaggtttttacacaggacggctacacaaagttactagagaatgtgataattgcagacaagagcaaacaatgtgtaagaacaaggaaatatagattttaccactgtaacactgcaaagtccatttgaccttagatgcatcatgatctggcaactgcacactcatatgatcaatgctcgcgagaggggttctaagaacagaacaaacagcctggtaaaaaagtaatatcagcaacaactacttacaccaatgaatttcattgctaaaaatttcagaataacagtaaaaataccttcaaaagtacactgaaatgagcttgaggaccagaaacagtatatacatcaaagaaacttgactgaaatgtgatacactgataggcagaacgtgaagcattcaaagtgtgcaatgccagctgcaaagttatgcacaaaacaaaagaaattagatctaacaaggcgaatacagtagacagtaaaatcagagtaatgtgacgaattgttcagctaaaagaggtgataac

SEQ ID NO: 48161 - DNA, 566 bp, Arabidopsis thaliana columbia
acctctaattctgcagtttccagagaagctagcagtattcatgagagggagatcaatacctggaaggaaagacataaccctcaaaaccctgcccaggatcccctagagaggagatatcatagtggtgaatcaagatctagacgttttcactcgacctctgatagatttgatgcttctcggagaactcctaccaaaagatactctgctagatcccaagattttaacaaagatacagcaagaagaagttaccctcgtagagagaactctaataagagctactatcagtggcaggaattatccagaaccagcgtttcacctagacactatggttctgactcctcaaaatctaggagaccacccctagaaagaactttctcccctgctgaagttactcctccacctcctccacctattcccaccaatgaagagattatgggagatcttagagatgtcacactccaatacatcagttgcgctgatccaactgagagtgctgcaagaaagcgcagagttatccaaggagaagagagaggattaatggcagaaacagcgtcacatatgttgga

SEQ ID NO: 48162 - DNA, 539 bp, Arabidopsis thaliana
ctattcgagaaacaatcaaaacccaaaatccctcttatttcaaacacgtggcgaaatcctgttcgttcataactggcagttagagatgcaaacagaatcaaactgtagggagtaaactgtaaatacttccttttcaaagtaagtgtatttgatgataatggttctctgattagaaaaggctccggctttatcattctcagaccatcatcactaagcagtaagtaagcactataatcgcagaagatagataaaatggaagtagggtttctgggtttgggaatcatgggaaaagccatgtcaatgaatctattgaagaatggattcaaagtcactgtatggaacagaacactctccaaggtaattttgtttttttttttgtctttgattgtgttttggtattatggttttgtgatttagttttagttgttcagatctgataaagtcggaaactttttgagtaatttaatgcaattttgggaatttttgatgattgtgacagtgtgatgagcttgtggagcatggtgcatcagtatgtgaga

SEQ ID NO: 48163 - DNA, 749 bp, Arabidopsis thaliana
cgtgtcgagattgtgcagctcgatgaatccaatggtgagatccgttccgatcctaacctctcctttgagcatccttatccaccaacgaagaccattttcatacctgacaaggaatgccaaagacctgatcttctcgctacttcaagtgatttccttcgtttatggagaatcgctgatgatcattcccgtgttgagctcaaatcttgtctcaatagcaataagaacagtgagttttgtggtcctcttacttcttttgattggaatgaagctgagccacgtcgaattggaacatctagtactgatacgacttgtactatctgggacattgagcgtgaagctgttgatactcagcttattgctcatgataaggaagtttttgatattgcttggggtggtgttggtgtttttgcatctgtttcagctgatggctccgttagggtgtttgatcttcgtgataaggaacattcgacgattatctatgagagctccgagcctgatactcctttagtgcgtcttggttggaacaaacaggatcctaggtacatggctactattatcatggacagtgctaaagttgtggtgcttgacattcgttttccggctcttcctgtggttgagcttcaacgacatcaagctagtgtcaatgccattgcttgggctcctcatagctcttgtcacatttgtactgctggagatgattctcaagctttgatttgggatatttcaccatgggacagcatgttgaaggt

SEQ ID NO: 48164 - DNA, 579 bp, Arabidopsis thaliana
tgttttcgggcaaacaagctcgagttctttcttagcttcatctatgatctcgaaacctctcacccctgcatttcgcccgacgcttttctctgatggtctttcggttgttgggtcgatcaagagggaagcatcacaaccctacacaagaattcaaaatattagctagtttacgatataccatacatacatgatacatataaaaacacacaaggagaagctaggttactaactttgacaacacaatcatgaaactgcatacgaagcaatgctgcagtaaccgttcggttacggtcccaatggttgaaaacaactctacccacgatagattcagcgggagggcatgtaccctcgtaaaacccatgccggagctgcgcaaaaacagagggaacaaggtaacagaaaatgaaaaaccaagctgcgattgccctcattttctaagttttctctcgtatgtgaaagcttaaaaatacttttggattgtgtttagttttaagttttggtgatgaaatggttaattagtgcccgtaaaatgcatatctatacgtaaatatggggacaagacattggcaaagaaattgt

SEQ ID NO: 48165 - DNA, 556 bp, Arabidopsis thaliana columbia
catcccctgccaatgtaataaaaccttttcgttgcaacttctgtgtagtgcattccacacaaggtcttgaaaggagagaggaacccacatttttaaatgcaagtccttcattggattctttagatagtattgatacattatgtttttgttaggtcagattttggacctacaatttccgaaacgcttaaagtttgttatgatgaaaaaattaaatttcatccttcttttaagaaatgtcttggaattttccttttgtagtatatattaacaagaaataataaaattttgattaatgtaatatggggtcaaaaaaagaagaaagccaagtggggatttcccatgagctttcttgtctttggtcctttgacgccgacccctccttttgaatttaaacctggcttctctctctcttttttatctttttggtcggttacaaaatatcaacgtaacttgtttacaacaatggaaagttaataacaacagtgtgatattttattttattgtaaaaaccttagtctgctcaatgaattttgaacagaagatcaagaataaccat

SEQ ID NO: 48166 - DNA, 708 bp, Arabidopsis thaliana
tgtgcaatatgttctaaaacgtctcgagcactcaaaagtttaggcaaaaccatgatttccacctctcttgcttataaatcttccaaaatttaaaacccactagcattgcgcctctcataattaaacaacgtctgaatcactatgcacgtcattgttatcaatgtggatgctaacgaactaacgaacatatgttaaattcgaatggactaaaatataggcaaaaaagaattcagaatttctattgttacaataaaataaaatggccatttgatgcttgttttgcatcggtgttacaaaaagaggtcctcacgtcatatacacaaatgcctcccccgaaattaagtttgttttcttgtagatatatattctcagaacaaatcaaatgccatatagaaagtcgtacacatttggtcaacattgtgaagcaaagtcaatgcgactaggttattattttgattagttataccaacacggtacataccaagactctatataaatgataatgtattttggagaagtcacatacaaaattaaataagagcgaaccactggtcgttcaaaaatatataagaaaatattaaacctctgtttttgctggcgatcatggcttacacaaacaaagttacgatatcagccgcggttgcgacaatgatgctgtttctggcggttacgatcgtggatgcacagtcaatgccaccaatgccaaag

SEQ ID NO: 48167 - DNA, 618 bp, Arabidopsis thaliana columbia
  unsure (1)..(618): unsure at all n locations
nnnnnnnnnnnnnnnnnnnnnnnnnnnnattagagatcaccgacacattccattattgtcacttgtgatcttgtgagagtgaatgattaactaaaatatttgtaattgatttgattttcctaatttctttgatcattaacatctaaagacgccttggatgatttgtgtgaaaaatagtttaacgggggtagagtagaggaaacaaatttaattcagggaccattttagcaaacaacgtgtttaattgacaaaaggcacgtgagaccacgtgagtacttgttttggtttcttcttcatcggtccgatcagagagagagaatcgccggtgagaaaagaaaatggcgtcggcgatttctctttctctcttaaacggagcaacgcctttgaaatcgaattcgctccacaaatctagactcactccacttcatcttcgaactatctcttgttctagactatcttactctccctcgagtcgcgaaatttctctcaaaactcaatctactgtgcctatttggtgtaggcgtagtaggtttgacttcgttcatcgttgcggcatttcgtctgacgatttgcctactgagtaaaagaagagctttggggagtgggttagtttgtggg

SEQ ID NO: 48168 - DNA, 488 bp, Arabidopsis thaliana columbia
cccgccgtcgtcgccgtctgacttactcgatcatcgactgaatctgaatttggtattcatctccgtcgggtttccgcggcgggacacggcgtagatcgatgtaggggattggtctcgagaaatcggtgactaggcaaatagtgttatgggcttagtttgggctttaataaatgatgggttatctggtaataggcccttatttgaggaatccacgggttttcgggttttaccgacccggacgggatcaatatgtggtgtcatgataatgaaattacttgaagacaacaatatcctataaaacgttaccacgacacctttatttccacaacaaatgctccttacattgcccagctttttctgctcttattcctgactaatgacacaagcatgacaccagtttcacaactatatatatttgtgatctctctaagccttcaactatttaagaccaaaagaagctgaaatgacagaactccaatggatatgta

SEQ ID NO: 48169 - DNA, 964 bp, Arabidopsis thaliana
tctgttgtaggtctaagagcatagtttccatataataacatgttttgtctaacaccatttttgattagctgggattcatgttatcttgtgtacttagcttctacgcctttaagctaagtttccgtctttatttcgtgtaggtttgccactctctagtctacttgaagagaaacatatagcatttaatgctaagttcaatgaatgcttcaacctttctgacaaggtgtggattctactcctttccttaacacacaaaaatacttttatgaaggatctcttttgcacattatttatgactctctctttatgtgactccagcttgatcctgaaactttggtggttggtgatgagcaatcgggaacatgcttggaggcattggttacttctatggtcaatcaaagattcattttcctaaaagtcctctggtgagttatagttctcttgcttttttgcactccaaaaacagattcatagagttaataacaatgttcaattgcaggctaaaagtgaggatgatttcttgctatattggccagctgagctatacacagcagttccaagccggccccggtttcctaggggatttttgtgggatgaaggcttccatcaattgttgatctggttagtcattatagatcattgaataggctaaacaatttcttgatatgttactttaaacgattattgtttttatatggattcaggcgttgggatgtccatataaccttggaaatagttggaaactggttagatttaatgaatatagatggatggatccacgtgagcaagttttgggagctgaagctctcaggttgttatatatatcatacactcttactagccacaaaatattcatcattactgcttgttgctattatggattctaacattcttctgctgcagtaagatccaaagcagtacgttgttcagttccaagtaatggcaatccactacactacttttg

SEQ ID NO: 48170 - DNA, 443 bp, Arabidopsis thaliana columbia
aaagtcattttcgtcacctctagaccggacttccaacttctctggacggaagaaaacatctacccctgaaagccgtgattcacgactcattattcttccaaaggtggaggttaaagctggcgatgacatggtacaaattcactttctctttgtacttgctagattttcatacaataggttcaatcctttctgtggttgttgattaatggatgtctgtaattgcttaagagattggatcttagaggccacaggattcgcagtctaacctctggtggcttacacttatcaccaaacttagaggtaaacttatatttccatagtaacttcacagtgttctagtgcaatgctttgtgacaatgatgtttatgtacatatatgccgattgtggatttgaatagaagtagggaggattagttatttacatctcacgaggaaaaactttg

SEQ ID NO: 48171 - DNA, 398 bp, Arabidopsis thaliana columbia
gtcccgtagttgtactaatgaacataatcgtgaggttccctcgagagaacgggaaggcgtaagaggctgtaccactaagaatggctttagaaccagcttttctgataatactcccatcgattttgagtccgaggagggagagccggatgacgaaaccgacgtttgaaagcgtttgtatgaggatcttgcctcccgcgggaagaaacctgttcatgtaaatcacagtatgtcctaagagagacggccctcacacgacaccagtctgcacatgcagacacatgaacatgcgtaaaaacggataattacggaagaagagatagggaatggggcatttggaagtctatccaagacttgagcggagatcattcctcgcattacaggttgaaggacgcggtaga

SEQ ID NO: 48172 - DNA, 475 bp, Arabidopsis thaliana columbia
ccttgtattgtggcaatctatttccacatgttttgtcctctcgtgaaagacaggattattcgcaatgtgcatggcaaatttgttatccgcaaatagcttggccttgaagtcaactttaatgtgcaactcttgaagcatttgactcagccatagtagctcctttgtagcaacagccatactcctatattccgcctttgtgctattgctgctagctacatcctgctttctagacttccaagttataagagaagaacctataaatactgcaacaccacttactgaccttctactatccttgcaagtaccctagtctgcatcaacaaaaccatttaaacacaattctgtgtctgccgaataaaatagaccttgccctgggttattcttgagatacttcagtatatgatgagcagcattgagatggacatcagttgggcaggacaagaactggctcagacaatgaactgcaaaggtgata

SEQ ID NO: 48173 - DNA, 473 bp, Arabidopsis thaliana columbia
caaaatcgaaacattctcggttcagctttggctatcgttttcccgggttcagctttggctatcgttttcccggtttagtctgattagttggcttaatatttgtggtctttaatcataaaagcccaattagattggcccagataaatcacaagcctctttcttctctcacttagacaagacaaccattattcacggcgaagaacatttccccgaaaaaccctagaatcccaaaatagaatccctaaaagagaaagaaagcaaaaatggaggacacgaagccaccattgggaggtaacaacaatcctcagcagcagcagcaacaacaacaacttctctatcaacaccaactacaacaacaacagagacaacaacaaatgcttctattgcagcaattgcaaaaacaacaacagcaacaagcagcaatgtctagattccgtcgaacatcgacgtgcatctccggccacctggggttg

SEQ ID NO: 48174 - DNA, 508 bp, Arabidopsis thaliana columbia
tgggtcattattagacatttgtatacgtaaaaagaacatgtgaaaggatttttgccctatcgtacacgacacgtttaagtgtgttcacaacttatgaccacaaaaagtttctgattctttcctagccacgggacaaaaagataagaatcacatgtaaaagaacataaaagaagggtcatgtgctttctttgttgacatcttgtgattgaagcaaaacctcatcatataagcctaattaccaatgatacaaaaacaagatgaagatcatgaaagaacagaagatatcaaaacatgaacagttagatcaattacctcagccaaaaacagaggtcttcaaaaaaacagttggagattgatttctgtgtctaaatctcatcactgcatatgagaggacaagaaccctaattcagatgtcatatgttaagcaaccacattgcactcaatcacaacagtcaggagaactgtagacaaagaatttgaagtttttttattcacttgacacaattaa

SEQ ID NO: 48175 - DNA, 463 bp, Arabidopsis thaliana columbia
gattccgcttgatctaacataacaaaagcttgatgaagagacggaagaggattcataagcataatctgcgttctcacattacttagtccattatccaaccccatcaaaaacgcataacgctgatccttctctctcgcctctttagctcgtttcgcaatctcgcaatcacaacactccggcagcacaggatcatactccaacaactccacccaagctctcataaacttcgcaaaatatctacctacagagtcaccatcttgcctcaacaccgcaagtctctgacgaagctcatagatcttaaaatcaacacttggtacaaattcaactcggagatcttcccaagctttatgtgctgtctccgagaacgttacatagcttcgaagctcttcgcttaacgaactcatcatccaagatttgactctcgcgttacatgtatcccatgggcgatagagcggtgaggaag

SEQ ID NO: 48176 - DNA, 647 bp, Arabidopsis thaliana columbia
cttttcaaactacatatttttacacaatcaacagtgtatgctttttggtcttcgtaatttagaggtcagttctattttcaatttatttagttacaagacttgatatcagagcgacaaaggacttacatagttctaccactttgctgtgggatggtaaaagatactagtctaatagtctacacgaaaatgaaagatttgtcattttgaaaagtcattagatgccatattattgccagacactaatttgtatggactctagctaccaaaaaaagaagagaaaaatcaaagtccttcatatggaaaatgggtggtctgaaaatcagtgacagcaatgtcttttattatcttctatctttctttgataatctcaacccacccgtattggagcaagatgttatctaaaacacttcttcaccttcagctttagctttagcttcgttgttgcttactgaaacttttctctcttaacttcaccatgggaaattttgtgtgtatagaaatttctggtgatcaaatgctggatcgtatcattagatgcttatgtggtaaaggttatattcgaaacatcgagaagaatctagagcctgcagagggaaatggaagatctagagcacatcacatgaggtacagacaaggtacgagagaga

SEQ ID NO: 48177 - DNA, 1036 bp, Arabidopsis thaliana
gttactacattgatgctcatatcataacagcatgaatctaaacttgttagaaaaagttaattacatggatttgtgaacttctcgtgagataatgtttggcttctatgaatgctctaatacttaattaggtccttcttgactgcaagcttcgacctcgttaccagttgaaaaaaaaggtttggattattgcataacaaacgcaatattcgaacggtaacaactattaatcagtaatacggttttactcgactcgatggtaacgattttttttttgttagagagttccctagtgttcatggcatggtttgctacacagcattgagcatggcgcgacgtgattatcttcctctgataaagagaattagatcaaatcacgtatcacctcatgcacttgtcgttgtttatatttcgtcggttgcaccaattgataaaatcagtcttttcaagccacacaaacatatggttttctgcttttcgtctgccaagtaagtgcatagaaaaacttgaaagtttattctctacatttttgtgttcaaaattttgtggtattaaaagacaaaacaaaaatctagaatattgcatggttttacaaacaactgcagagtaaagatcaattttattttacaaaacaaattaatcaatcaacaaaacagagtataataaaaccctagtaaaaagcttataatagaaccataaacgccgcaacataaaacgttataaaggacaaaaccgtgatagccccatttcgtctgccaccactagccatcggaagcagatcaggaagcaaacattcctcaccgttaaatatcactttcgccggaaacccgtcacgttccgccacattaatccccggcgtgagtttcttgctgaactgtatcacggattgttgtttaccaggaatcctaatattcttcttctttggatctttttcatcagcctccgccacaagataatctagacccggaagaccttccatgaagatggtgttgtttacacctccgtccacgctaaggagactcgcgttaaacgagtaggc

SEQ ID NO: 48178 - DNA, 1244 bp, Arabidopsis thaliana
cccatccacagaagtcgcagctaataaggtcccctgatactttgatttcaactgcatactgtcgagaaacacaagtggtcgacaagcctcgagaaaaccatgaaccgaggcgtgaaacgaaacaaaaacacggtgaaaacttgaatcttccttcgttgtgaatgtagcgagactgcccggattagtttccattatcttctcgcagaacagcggaagctgtttgtaaccgtccttgtaagatccttgaagctgctctcttgcaatttctttaccacgccatgcctgaaagtaattcagctgaatcccatactcttccttgatgtcgctgacaatgtctttcggtttatagttaggaaagactttcagcttctccttaataatgctagcaacccagcttctactcgtctgaagcccattaattccacccgcaccttcacaagtatgtgtcggattcattttcttaatacagatcagctgagttgttgatagccttgaagcatggatcctccaagggcaaccttcggctttacatttaactgtcactcggtggctatcgttctttttgtagcggaatccaaactgatttgctatggcgtatttccgtagcgcttcacgaaactccccaacatttttaaaccgttgacccactcctgtgattgtgttctgccactgctgtgttcttgcctttgtgagaatatctcctttcggattcgggacttcaacaatcgatgacatcaattcggatggattaataataatctgtgcatcttcagctcggttcatgacttcctccatagtcacagcgggaggagctgagactgagattgagatgggaagctcttctggtcccattgtgtcgtcaatcatgtcgtccataggaaccgggggaatcgcttcagacaacgttgttctgcttgatctggacgaaaaaaactcttagaaacttaaaaaagataaggtgatataatgatttatgtaaaggctttgctaacctgctagctggcatgtttgaaatgtcgggagtagcttctaggggtaagagatagacatcagcagtgttggagttctcatgaaatttgatcatccgtttcaaatctttatcgttagatatggagatgagcgttttcttgttatccgggagaaagtattttagagaaactgtcctgacatcgcaattaaacatctcaccaatttctgagataaagtctatgaatttcatctgctcgtccacatctatcgcgtga

SEQ ID NO: 48179 - DNA, 573 bp, Arabidopsis thaliana columbia
gtctgatctgaggtttggctctattactgctggtctcattgctgtaatcttcttgggagcaaacttcataccaagcatttgggatgctttccaatttactggagcaactgctgctgtctgcatcggtttcatattccctgctgctgttatcttaaagtaagatccattgattcataagctaagagattttggttttggaacctataatgaatcattatctgaattgatattttcttgtcttctttcagggatcgtcataaccaagcaaccaagcgagacaagactatagccatttgcatgatcgtccttgcggttttcccaatgcaatcgccatttacagtgacgcctacgccttattcaagaagcacacatacgtatatccaatatgaaaaccagtgatgattctgtttcttctctcactcactctatgtgaaacgaaatatgagaagagttattggtgtaagatgtctttagatgattttgaccacatgataatagttgaaactctctgtatataagagaatgatcagttttctacgttcttttttagttgtaaaagggctatagaagtga

SEQ ID NO: 48180 - DNA, 626 bp, Arabidopsis thaliana columbia
tgaaaatagctaaggttgtgtccctgtttgttgctttgtcatgacgatccctgcgagaacatacaaaaatcgaaataaatttaccaaatctgccaaggattgtgtggaggtttatataaacaatctacttactttagtatgatagaagctgggaagatgaagccgagacaaacagcggcggttgctccagtgaattggaaagcatcccaaatgcttgggatgaagtttgcacccaagaagattacagagatgagaccggcagtgaggcaaccgaacctcacatttgaggtagataatgatcgagcggaagggaacaagagcccgtcaatgttaatccgaagagggtagaaaacaatcgggaacacgagcatcaaatgaagcgcgtagctaactcgaaccgcatcattaaggatagaaccaaaagggattccaagatcagtgtcaaagtttgcaaggacatcatcaagagtatcatcaccaaacaagaggaacccgaaaatacttgtcattatgtaaacagatgagcagagcataagtgctgatcgaacaacaggtcttatctgagaggggtcttcgagctcgttctgtatactgtgaactgcaacaagtcaaacaaaaccaagaac

SEQ ID NO: 48181 - DNA, 1465 bp, Arabidopsis thaliana columbia
cgatttcttcttccttttctctaatcttcaatttgatcaatccgttgcaaaatcgaacttcaacatctgtatctaatccaagattctcaatgatttcaggatcaatggagaatctagatgaaatccgtaccgatattgtcgaatctactgctccgttgttgcaagaatcatcatcagagagcaacggaggaggagaattcaacggagcttcgtttagtggtgcggttttcaatctcgctacaacgatcatcggagctggtatcatggcattgcctgcgacgatgaagatcctcggtcttattcccggaatcacgatcatcgttctcatggctttcttaacggatgcttcgattgagttcttgcttaggtttagtaacgattgggaatcaaagatcttacggtggtgttatggatgattcttttggtaaatgtggaaggattatgttgcaagtttcgattctcgttagcaacgattggtgttttgatcgtttatatgatcatcattggtacttatctttaacttctttgggtttaggttttagattggatctaatatttggttttataactctgtttttgtttggtattttgaaggtgatgttttggctggtaagaatgaatatggaatccatcatgctggtatgcttgaaggatggtttgggattagttggtggaacagaagaacttttgttcttcttgttactactctcactgtctttgctccattgacttgcttcaaacgaattggttagtattcttctctgtaccacttgtatctgttgataggcttagattgtgatggttagtatgcttccttgcagattctttgagattcacatctgctatatcagttgctttagctgttgtttttcttgtcatcactgctggaattactatcattaagctgtttactgatggtttgatgatgccgagacttctacctaatgtcactgacttgtcgtcgttttggaactcttcacggttgttcctgtgcttgtcaatgcatacatttgccattacaatggtaagtaaacagagaagcctctttgtctataattataaacaaggaagatctcatgtttccattggtttttgtttcagttcatagtatacagaacgagcttgaagacccttctcggataaaacctgttgttcgatcagcacttgcgatgtgttcttctgtttacgttatgacgagtttattcggatacctcttattcggtgatggtactcttgatgatgttcttgcaaactttgacacggatcttggaatcccttttggttcggttcttaatgatgcagtgagatttagtacgcagctcatctcatgcttgtgttccctgttgtcttctatcctctgcggattaacatcgacggtctcatctttcctacggctccaccacttacttcctctgagtctgatctgaggtttggctctattactgctggtctcattgctgtaatc

SEQ ID NO: 48182 - DNA, 681 bp, Arabidopsis thaliana
cacttactgcaaaggccttgatctttgacttcagtcactgcgccttcgtttctccagtcaacggacttaggaagaacatcaccatcactagtcttgtatcggttgctgctagtcatgaagacgtggttcctaggaggtcttggatcagccccatggcaaatttctccgtattcatggagagataaatccgcaaaccgattcaaaccaagccggtaactgagattctcagcgttccggttagtgataaaacggaggttgtcctcaaaaatagttaaacgccgttccttctcggcaacggagtcgtacactttcccatgtttgaccatccatgactcgaacatcaaggtggcttcagcgtcgaaaataccctgacggcggccgggaccggcggtcacgtggtggttatcgttggaggaaacaacggacatgtccatggccgtggcacaagatgcgatgaccaatgctagtaagaagatcagcatggctgatttagcataacccatttttgttgggcttaaaagtaattaaacttttatttgtgtttctaaaagttattaaagaagagaagaggattttgtgttatgttctttttggctaacacatgacagtatttatagtactcagcgctcagatatattagaattgttatttatacgtgtccattggtgtgacaaatgggta

SEQ ID NO: 48183 - DNA, 529 bp, Arabidopsis thaliana
aagttaatatcttacacaactcatttgaagaaattttagttataatgttagaattaatttagattgctaagataacaaactaattaatacaacaaaattatcgaacaagtcttaacaaacaactatggttttctgtatgagttgccgcatattttcgtgcgggtgtttcagtcctaggaatacatgagatctatacttaaaaaaaacgccatttcaagcaaaacgttaggtgtttatacactaccagttaggtaaaataacatctgtcgatacgtcgtctgttgcagcattagaagtagtttgtccaaatggacaattcatacaacagtgaaatattcgtttgtatctaaccccactggataaaaacattagagaaaatcttttctttaaaacagtaaactttcttgaatttggtttaactgtaaaacccaccgcctgaacctccaccaccaccataaacaacattaggcgggtcgagaataggcgccgaggcagaaactccgttatggttatgggctgaaccacctaa

SEQ ID NO: 48184 - DNA, 950 bp, Arabidopsis thaliana
aagtttcagaaattttcataatgttttgtgactcccacaaattttaacgtgttcgtcatgtagaaaatctttggtaaaagagtgactagggcagtgtcccaagcaacgatgggtcggcacttggtcactccaatggacatgtgttatacagttgttacctatctgagctctaagtactgagtactaaaaaagctgtcatatgttagccacattttacacaacacaaaatccatttttcttctttcataactatcagaaacaaacacaaattaaatcaaagtttcattagttttaaccccccacaaaaaaacatgggtagtgcaaaatcagccatgctgatcctcttagtagcaatggtcatcgcatcatgtgccacggccattgatatgtccgtggtttcctacgacgataacaaccgtctccatagcgttttcgatgctgaggcctcgttaatcttcgagtcatggatggtcaacatgggaaagtgtacgggtccgttgccgagaaggaacggcgtttgacgatttttgaggacaacctccgttttatcaataaccggaacgctgagaatctcagttatcggcttggtttgaccgggtttgcggatttatctcttcatgagtataaagaagtttgccacggggctgatccaagacctcctaggaaccacgtctttatgactagtagcgaccgatacaagactagtgctgatgatgtgcttcctaagtcagttgattggagaaacgaaggagcagtgactgaagtcaaagatcaaggccattgcagtaagtgtacaaattttaatcctatccgtctggtttgtataaactattttaatttagagtaacatgataggactattaaaatttggaaatcagttaaaatttaaaaccttacagaaatcatagagaacttagttcaagaataataagaaaattatttaaattcga

SEQ ID NO: 48185 - DNA, 483 bp, Arabidopsis thaliana columbia
tatatagtaaatgtaatcaattattgtagagagtggtagagacagaccattgatcttttgtcccactccctcaacaacttttttgggttaattgccactacctcaataatatactatctatattttgggtattcgtattttaatactctctaggtatttacggcttatcttaaggtcaacaataaagttcacgtatttataaatttccaccgtatcagctaaacaaaggcgaatttttttttcttagctatacataatttagcgtgttgggaaaacagagagatatgtgttggagcaaagctggcgataaaattgtcttgcatgtgtattttgaattttccaacggtgcgaattcataataattgaagaacagaaagatattctgctttaacgacaatcacatgttaattataagctaatactatggattaagcagagtaaaatatactactagccgtgaatttagctgattaatagattaca

SEQ ID NO: 48186 - DNA, 597 bp, Arabidopsis thaliana
ctcaacacacggtgggagcccaaattatcaggaccgaaaggatgtacaccgggacgaccgttggtaacattgccgccgatctgccatacctgattcacactatcagctcccgccggaaccttaaccgtcgtgaaaatggcgatcctaccgccgcttaacgactcggcgcgtagattccaaaaatcaaaagcaagtttaccttcgacgagactgctgtagctgctaatgttgtacgtcttcacgaccggagccgcaccaccgccggatctgtaagcgaggaaggcttgagaaccagccatcttagtccccgtagggttaatagcccaagcgacccagccaccgttggcttgagatggagtggcgacgaaagcgacggagagagatgaatttgaggaattgtaggtgtaatggaggtaggaattgagtaccggaaggtcttcgcaactatcgaacggaccggcggagttcaagttctgtgatttgcaagcctgttgtgaaatcgccggtgagattagcgagacgaaacaagcaacggctaggattagaagagaagaagaagaagaagccatggctgagttctgttctggtgtggtttgg

SEQ ID NO: 48187 - DNA, 635 bp, Arabidopsis thaliana
agctccaatccaagaaattccaccttttttgttggttagttttcacattacaaaacataaaaaattagttaatagcagaatcaataattcacaaatccagaatctatcttgtgtttttgtgcggtccatctcttttattacttacatcaattcctactcgcatcatgcttccatacaaatcatttcttgtaacattgtcaaaacactgcggaaactgcacgaaagcaatctcttttccctctttctcatcgaggaggatgcagagcgcgtcgcgtgttgactttgagttgtttgcgtacatatcacagtccaagtttagtatgattttcccacaagtaattttcgaagaaaccctcagctgtaagagagtgaaacggtcacataaagataccatgttgccttgtggagcaagaaatttgttacttaccaatgcgttcattgctccagccttgaagttatgatgatgttgaggtctcttttctcttgataaatacaccaacgttggtattgctattgtatcccttctcttccatctaccaaaacctgacatttaatgaaacaaaaaaaagacacttagatttagttttacgattgttgtaatacagacatactaaaaacccatacgtcttgaagaa

SEQ ID NO: 48188 - DNA, 507 bp, Arabidopsis thaliana columbia
agaagacgtcaagacaccaagatctcgttcatccaaaagttgtgccatacgatccgccctggaagtatacgacaaagtgaatatgaaagatgcacaagtaaactcaaacaaccagtaacccaagagtgttcacacacaccagccatcaacgttgacagcatccggattttttcggaataagcgcagtaggcacagtgccgcttttttccttacgagaggtctgcaactactagaaatctgcagcgaacaagccccaaaacatttatatgtttacttatatcgggaaaaaaaacataacatgtcatctttgggagtcacttacaagtagcttttgaacatcaggtgccaatgattcagcaaaatctcttccaccaatatttccaacctacaggacaaaataagcagggaaatgtaagagagctagaagaaaaaaagcaccagttcaatgaagtaagtggcttatgatcgcaaaataatagagcacaaaagataaatgtatccaaagac

SEQ ID NO: 48189 - DNA, 507 bp, Arabidopsis thaliana columbia
gtagcattaccctataagacaaagatttatgtcagatccatgaaaagacaacaaaagattgaaaaaacatagatttatacctcttgatcggatagttgttcagtatcaacttttgaggattgaagaagctcttctggatgtatagcaacagtaataacaaaaggtttgctaatcgcaataaaagatataataaggattaaatgaggaatacttcgttcatggtctgatcatcttgttgatcaccggagtcagaccttccttcactctcatcatcaccctcgtccccttgttttggatctccatccccttgatgagtatcacaccctcgtcccctcgttggggatctttgtcccctggattagtatcatcaccctcgtccttttatttgggatcttcgtccccttgaagagaatcatcaccctcgtcctcttggtttgctccgtcatcaaaatcgtctccggattcagagtcactaactaagacagcctcatcttgaggcgttaggaa

SEQ ID NO: 48190 - DNA, 583 bp, Arabidopsis thaliana columbia
cagctgtctctgtccttgaaaagatggcttctacgcttgaggaacttcatgcatcaacaacgtcaaactctgcatttggcacaaaattacttgaagaaggagaagagaacattgggcacttcctttacttagaagggattgaatatcgtatgtggaacacttacgatgttcatttctatgcatcttttgcactggtgatgctgtttccaaaactggaacttagtatccaaagagactttgctgctgcagtgatgctacacgatcctactaaagtgaaaactcttagtgagggacaatgggttcagaggaaggttcttggtgcagttcctcatgacttgaggcattaatgacccttggtttgaagttaatggatatactcttcacaatacggatcgttggaaagatttgaaccccaaatttgtcctccaggtgtaccgggatgtagttgccacaggcgataagaagtttgcatcagcggtctggcctcagtgtatgttgcaatggcatatatggctcagtttgacaaagatggcgacggaatgattgagaacgaaggatttccagatcagacttacgatacatg

SEQ ID NO: 48191 - DNA, 531 bp, Arabidopsis thaliana columbia
gatcccctaaattattcttagaataacctttttgactatatatgcccgaatccgattacattaatggtattaataattccccttcaaagttacatttctctcttgtatcattcaaataatattctgataaaatcctgatttttcatgattgtatttgacattttagatccaaccaaatctttgaagaacaaataaagaggggaaaaacagaccaacatgtccttttgcattcagtgttaattcatggacaatataatgttggtccgtacgaaaatttgattttgtatctaaagaagcataagacatagggttagttaaccacaacgaacaaagcctctattatacatatctaaatgtgggataatgaggcaaaatgtccaatatgattaatgaaaaagatggaaaacaagtcttaggtggtgtgtgatttaaactgtgttttaattactttaaatgatatgcaaaatctgttattatttaactaagattctattaaattctgttaaagtcttccccttagtagtagagggg

SEQ ID NO: 48192 - DNA, 738 bp, Arabidopsis thaliana
tcgactctccacaatttattctccggtgctttccctgagttctcatctttaaatcagttacagtttctgtatctcaacaacagcgctttttccggcgtctttccgtggaaatcgctccgaaacgcaacgagtctcgtcgttttgagcctaggcgataatccgtttgatgcgacggctgatttcccggtggaggttgtttctctgaagaaactctcgtggctttacttgtcgaattgcagtatcgccggaaaaattccaccggcgattggagatttgacggagcttcggaatttggagatttccgatagcggattaaccggagagattccgtcggagatttcgaaacttactaatctctggcagttagagctttacaacaactccttgaccggaaaacttcctaccggattcggaaacttgaagaatctgacttacttggacgcttcaacaaatcttctacaaggcgatttatcggagcttaggtctctgactaatctcgtttcactacaaatgttcgaaaacgaattctccggtgagattccgctggagtttggtgaattcaaggatctcgtgaatctctctctgtatacaaacaagttaaccggttctctgcctcaaggactcggttcacttgctgattttgatttcatcgacgcatcagagaatctcttaaccggaccgatccctccagatatgtgcaagaacgggaagatgaaagctctgcttctcctgcaaaac

SEQ ID NO: 48193 - DNA, 508 bp, Arabidopsis thaliana columbia
tcccagctctaaagcgcgtggtattatcatattccccgtcccactacattctgtgtgtttgtacaggttggatttattcctcaccacatatatcttaagtggactgcaccgatcaagaagattatagaatacgggccagatctgatactgggtcgggttaagttgggccaattgggctcttaataacaaacatcactctctctacgcaccattgatcactgatcaactaaacgctcccaaattcaaagacagatttaaaccaataatgaaattgtacaactcgtaaaaaataaaagacaccccaaaaccctaaaaattgcaacagagtatgtggtaaaaaaaagagacagagagatattataagaaagaagaccctaccaaaattttctctagagttccccacacaacttaacttatccaaattaaacaacacaaattctcagaagctaaacttcaagaacccagactatcacaatccacaaaaatgccttttgactctttagatttt

SEQ ID NO: 48194 - DNA, 521 bp, Arabidopsis thaliana columbia
tgagatggtatgcatttaactgatcttgtttctcattgtgtttgatagttgtattaacaatttactcatgatgaacttgcagaaaaaaaacagttctgatcctaggaaagttactagaaataaggtgtggatagcaggacatacccattctgatgggagacctgtgagggaagaatttgcagaaactattgtaagaatcatagtgtcttatcttcttaaggttcatttaaaagtagtttctactcagtgtgtattgtttttgatttcaggaaatgatcaagacaattgatagtgaaatggactccaccacatccacagataatgttagggacgatgtcgtgagtcaggtactaggaaaagacagacctggaagacttagaggaatgggtagaggcgctaatgttaccaagttggctttcttacagactagagactcacatgtccagaaacttgaagctactcaagcagaattacttagcaagattgagaatttgcagaatgtggttagtaacttagctagt

SEQ ID NO: 48195 - DNA, 515 bp, Arabidopsis thaliana
cgaaacaaataaatgacataaacaaaaataaagctcgaattttaaccgaaacaataaagctctaattaaatggtaattaataagggagaagaagaagacgtacggccaaggaacgtcgccgacgagcatccaatcaccgtctttgtcttcataagagggaacatagtcccagctattcaccaaatccatcaatttcctctcattcatgaagtctatcattccttcttctcctccatgtttgcctaaaataatcttaggtataagaacttgatatcctgaatttaaacttggtggttttcttttatggtgcaacaaatgaaatatacatttttcgcaattggattttatcacatagttttcttttcacagtttctaaactactactaacgggttactcaattatgaaatatttgtatactcgataacggtaattcatttgggactgatctatcatcatgatgattaattttactttctatagtaacaattaattagtaactacatgtgcatggaag

SEQ ID NO: 48196 - DNA, 637 bp, Arabidopsis thaliana columbia
  unsure (1)..(637): unsure at all n locations
nnnnnnnnnnnnnnnnnnnnnnctaaaggtaaacaagagtattctcgcaatagtgcaaagagtagttcacttcctgatttgcgaaaatacccttccggaacaccaaggaaaaaggcgtttctccggaccgtaatgccttacattaccagccaaaatgcggccattactgcggaacgtaactggctcatttcaaaacagtatcagggccaatggtcacctgctgagcgtgcgcgtctgaaagacatcgccaaacgctacaaggtgaagtggtccggtaatacgcgaaaaatcccgtggaataccttgcttgaacgcgtagacattatccccaccagtatggtggcgacgatggctgcagcagaaagcggttggggaacgtcgaagctggcgcgcaacaacaacaacctgttcggcatgaaatgcatgaaaggacgttgtaccaatgcgccaggtaaagtgaaagggtactcacagtttagttctgtcaaagaatcggtgagcgcctatgtcactaacctgaatacgcacccggcttactcttcgttccgtaaatcgcgtgcgcactgcgtaaagcggatcaggaagtgactgcacagcgatgattacaagctgaagggctctcgccaaagggaagagt

SEQ ID NO: 48197 - DNA, 597 bp, Arabidopsis thaliana columbia
  unsure (1)..(597): unsure at all n locations
nnnnnnnnnnnnnnnnnnnnctaaagaaccattttcaacgctgccggaaagcgtcccggagaagtgttccgcacccggtaataatttccattgcttccaggccagatcgctccacgatgcctgaaaacgggtcttgtctgccgcctgaagcgggagtatccagcgccagagtgttaatcttgccgctcggttgtgtggagcgccaaacatcacccagtgcaggtgaaagtttcgcggccaggggcgtatgcctccaggcctgccagctccagattactggcgcgaatccggagttcgtcactgcgtttattgtctttgccgccaacgtcctgttccggtatccaggccagcgtcaatgctccgctcggccagggtttgccgtccatcgtgatccgtgtatcgggaatagagaactgccagcccggattttcacgcgtaatatgcgcggtcagattatccacgacagcgtatgcgtttgcttctcgcccaaccagctggcaccgcactgtttcagccagacgtcaccgccggttacatcgcctttgtcgatcgtcatccagccttcaagggagaactgtgcagtttcagcgcaatatt

SEQ ID NO: 48198 - DNA, 613 bp, Arabidopsis thaliana columbia
catgttgaaagatagaataagccacccagtcagatccatcggaggtatgcttaatggaatgttcaaaggtaagttacgtccaatcaagaaccaacttgcggggacttccaactccaatgaccaaaacaaccatgggaatggatcacacactggacctcaacttcaagtgcccgagctgttgcgagaattcggtttcgacgatgaagaatgatagcttccctttgtgactcaataataccagttgttatttaggaacaggggtcaccctcattgtttctttgcttttagtataagtagtttacttttatatgatcagaatgcgaaagaatagttgatgactcagacgatcaccactagtgatgacgatcctagtgtattctaagagtcctgaggagcatgaagtacatctgaggagagtgatggagaagctgcgggagtagaagctgttcgataagttgagcaagtgaagtttttggcagagagagatgagttttctgggtcatattgtttctacagagggagtttcagtggatcaggagaagattgaggctatcagagactggcctagactgacgaatgcacttagatcaggagtttcttgggttgcagggta

SEQ ID NO: 48199 - DNA, 609 bp, Arabidopsis thaliana columbia
agagcatcttgcttctgatatcatctcctccttatctaactctgtatacatataatcagacatcacaataatactcgcaacaatggactcagctagctgatacatctgtctcatgcctatggttcaatggctgaccgagttgccaccatagctcaggtatggttctatatccagactcgttcttcttcatgtcctcggtaggtaatattttggatttcggattgcaggaggagggtttggggaaacggttggcgcatgggcatccgtttttggaagctgaggttgcttactgtgcaaggcacgagtactgcgaatcagcggttgatttcatagcaaggagatgtagaatcgcgttcttggacactgatgcagcggctcgggcgttgcagcgtgtggtggagattctagcaagtgaacacaaatgggacaagtcgaggcagaagcaagagttgcaaaaggctaaagagtttcttgaaactttcaagtcgtccaaaaacgcacagtttaacgatggcaagcacaactaaagcggcatctcagagatttcttacactattttattattgaatttattatttcctattttcgaatttgttgaattttttgggt

SEQ ID NO: 48200 - DNA, 618 bp, Arabidopsis thaliana columbia
  unsure (1)..(618): unsure at all n locations
tatatttcctagcactctaagtagagcaacgagatcagaaaaataagtaataatctcttttaatccatctcttgggcttcatatatgcccaatatgtgtttattttcaggaatgtgttccatgtttggttcttagctgactctggcaaaactgtgtatgttttggcaaattttaatggttcttctaagcatgattattttaatgaaatttcaggctattctctttcccactccattcctcccaagtggacatcgtaaaacgcaatccagcaagagaagattggtggacaggctctgctccttctgggccatttatttacactcctttcagcaaaggagatgccaacgaaagtagcaagcaggaattgatttgggtggtcggtgaaccagttcaggtcttagtggagttagcaaatccttgttgcttcgatttgcggattgatagtatttatctctcagctcactcgagtaactttgatgcgtttcctgtcagtgtggacatccccctaactctgcaaaagtgatcacattatatggtattccacagctgtaggaccangacaattccaggctgcacagttcactgctttggtgtaacactgacatgtgtcagggatgt

SEQ ID NO: 48201 - DNA, 970 bp, Arabidopsis thaliana columbia
ttcctgtaccttttaggttataaaaccagtttcgtttgattcacattttgttgaaaatgatgagtcaaaatagacattatattcatcattggctgggatcggatcgaacagtgcctgttcttgttaaaacaaatggctctcagtcatacaaaagatgcatctattattcatcatgtgtcgtgatcttgttattgtcatactatctaatgtgactactcatgcttcatttgtttttgtttgtgtttttgaagtaggtcgtaggtcttaaacatttccaagtgaaattgaaacgcttattcttttaggacattggcatcaagatctctatgttacttttataagtgaattagtctttaaagttactttttattaacattgattcataaagataacttttgtaaattagcccataaacaaagatacttgtattgatgaatcttcttcgtctcatccttttaccattatccttgaaaattctgattacatcattattatggatgaaaattaacgaagagtcttcttttttttcttgtgataaattttaaaattattgaagaagcagaatcggacaattgaagcctagattattttttatttattttttgcaaaatgaagcctagattctaatatttcatattttcgatattgtacatgtgtaactttaaaaaaaaaaaaaaaaaaatcccaagtaaatgcttgttagcaccattattatgtaacggtcaattattgctcattatttcactgccaaaaaataacgaaaatggtcccattttattagaaggaaataaacatgttgtatgtgtaaaattcttaacccatttttggacatgtacagattccatgtaaaagctggattttaagttggttttttgttgttgtcatttaataagtactatttaattgattgtatttatagttctgtctccatgtgaagctgctcataagaaagtgaatgctttagactcta

SEQ ID NO: 48202 - DNA, 1530 bp, Arabidopsis thaliana
aatactagatgaattttagtggatcttggtctattttgtttggtttggttgtaccattgagtaatgttaccatttatttagacaatcaatcaagacgttaattaagtggaaaacaaaaatcaagattacaataaaaatatttagtgggcagaattaaacatctcttattagcaatacaattgaatataatgatgttgtaagcaacatgcaaattactgaaacattagagaaagtgagacagtgacacatctcaaacaccaaactaaaaagcacaatgttacttgtctcccttgataaaccctgcgaatctgtgcacgagttcatgagccttttcagaattaggatccctcaaatgaaaaacatgaccttctcccttagtctccaccacgtccagtacttctccgttccaacggctcttaccaagcttctcccagtaaccccaaccttgcctcaccaacgcgtctttctcagccaccattaccaaaaccttaccacaacccaacccggacaaatccaccgactctgattgcaccacgttgatgaatggatcatctgatccatctttgctattgggactagccaacgtccagaccgactcgatccacgtccttattgctacatccgtcgtctccttgtcgtcgactggggtttttgaccagaaataaggatgaactaagatgattccagagattcctgactcgttcaaagactcgggactgagtttatctttcgcagctttcatcgtcatgtgatgcgttatgttcgctccggcgctatctccggcgaggaacactttgctgaagtcggcgtgtttgttcaaccaatcttctgagccagatccggcgatgtgggagaaaacccatttgagagctgtccaagaatcatcgtaagaagtaggaatcggatgctccggtgcacgtcggtaatccacggagaccgctacacagtctgacgctgagacagccgccgtgaggaaagtgtggtaagtcggggagaaagcggtttcaacgaggaatcctccgccgtggaagtagacgaggagagggagttttacagaggcttcggtctcggcggtggcggctttctccgggaggtaaatgcggagggagaggttgttgtcaggagaataaacgacgtccttggaaacgactccgttttgtgggttggaagaaggtggcacggtggtttcacccacgagtcgctcaatgcggccactcttgtagattatgagcattggagagtagtcggcggcgatctcggaatccatcgttggttgagattgagagagtatgattgtgtgtgggagagatatattatagtattgagaatggtgtccaaaatgtcattgtttacactgaagatatatgccacacaattcaaagtacatgtcagttattctacggtgcaccttttttccttctttttaattttctctacttgtcctacttatatagttcaataaaatatttaatttttaatattaaactagttaggaagagacaagtgtaaggaattgacttctaattagta

SEQ ID NO: 48203 - DNA, 653 bp, Arabidopsis thaliana
catcctcattcttttggtgacaacactcctggtttccgcaaaaaactagcctcgcatttctctgattgaagtaaaaacttgtaacttggcaaagggggaatgggttgaagacaagaagcggccattgtattctggttttgaatgtaaacaatggttatcaaacatattttcctgcagggtaatgggcagacccgacttctcatttgagggttaccggtggcagccagaaggttgcaacataccagagtttaacagagtcaacttcttgagaagaatgcagaacaagactatagcatttataggagactccttgggaagggaacaatttcaatccctgatgtgtatggccactggaggtaaagagagtccggaggttcaaaacgtgggatcggagtatggtcttgtgatacctaaaggagctcctcgtcctggtggttgggcttataggtttccgaccacaaacacaacggttttgtcttattggtcagctagtttaacagatttggtaccgatgaacaatacagatccacctcatcttattgcaatgcatcttgaccgtccaccagcattcataagaaactaccttcaccgtttccatgtattggttctaaacaccggtcaccattggagcagagataagatagaaaaaaatc

SEQ ID NO: 48204 - DNA, 631 bp, Arabidopsis thaliana
  unsure (1)..(631): unsure at all n locations
tccaccgtcctgatggttgggcttatcggttcccaaccacaaacacgacgatcttgtattattggtcagctagcttatcagatttggtacccatgaacgatacagatccacctagtcttactgcaatgcatctagatcgtccaccagcattcatgagaaactaccttcaccgtttcgatgtattggttctaaacactggtcaccattggaacagaggtaagattgaaggaaaccattgggtgatgcatgtaaatggaacacaggtcgaaggcgaatatctcaaagatatcagaaacgccaaggattttacaatacacagcgttgcgaagtggctcgatgcacagcttccattgcatccgcggttgaaagctttctttaggacaatttctccgaggcattttaaaaacggagattggaatacaggtggaaactgtaacaacacggttcctttgtctagaggcagcgaaatcacaggggatgatggatcgatcgatgcaacagttgagagtgctgtgaacgggacaaggatcaagattcttgacataactgcactttctgagctaagagacgaagctcatatctcagggtctanactcagacctcgaaaaaccgaagaaggcaagtaacgtga

SEQ ID NO: 48205 - DNA, 672 bp, Arabidopsis thaliana columbia
atgctggtgatgtttactgttgctgtggggcttctaatggcctcggctggggaaagagagacgcgatttacttagagagctgatcgatatgaccaaaacagatggtgtcgctcttaatatgttgtacattgtggttacttcaattgaaagaaaatgtaaatgattgctgtttgatattcgtttttataagaaatgaaatgaatacagataatatattagtaggtgctacaatctccaaagtttgcaaaaatttgagtttcttctattcggtaagaaactctaatatcaaaaaatctaaatcgctagaaggagggatcgaacctccgaccttgtggttaacagccacacgctctaaccaactgagctattccagcttttgttaatatgtgttagttaacttttatatatcttaccataacaaaaaaaaaattcaacaaagattaatcgtgcaccgggggtcggggggatatttttaagataacattcaacaaagattaatcgtattcaactttattaaattctctatctgtattcaacttttttccactattgaaatttgcaatatatatactagatagaaactacaataatataatcccagaacatgcatgtcaaatagcgaagtaattccatagtcaatccctgatcccagtcatgactcatggacacgac

SEQ ID NO: 48206 - DNA, 1086 bp, Arabidopsis thaliana columbia
tttacatattttaataaagtaagttttgtttcaaatcaacctttagacgcttagaattcaatatttgattggcgagaagaattcaataatgactacaaacatggactgtgaacataaaggctattagaatatgtgaaagaagtttgtaaccccgagagacgaatacgatcaagatatgtgaactgatgttttgtaaccgcctttgagcatctttacgttcagatgctggattgggtacaagaccccttcctatatatatgtgaactgattggcatgttcttttcgttgagcttcttcatcattgttttcaacttcattttcttcacaatccattttttcagaaaagcaatgggcctgaaactctcttttgaaatttattttatgtaagccatcactcccagttgtatccaatccatcattctattttactttaataagattcaagaacatgttgaaagatcctactgtaataaaaatccataaagactacaggaggagatgaagctggagagaagtagtctaagcgagagaagcaatttcacagcatttgactctgttaaaacgatttagatccagtaatatttataaaccttaaaaattgtctcatagattatccaaaatccaaagggaaataaaatcctaactgtgtaaatatatgaccaaaacaacataagatcacctggtccagaaagaaagtcctccattaccactatatatatgtgtgtatgtttcaggaaatatgatcaaatttcccggacataatctttatatatgtttctttaaaacttccaaaaacagaactctgcacaaaagattcttatcatatatgtaactagacaactgcggatcgcagttttacttaccctagtcgtttgaagtgtgctttgctttcattgtgctacactgattggaatgctgcatctgttggtgttgtaactgacttatgctaagctgctgaaacatctccgggtttagtgacatctttgattcgctgctgctgctcccactttgcctgcggttcggctccctatcaccagtttcaacgctggacttcttcattcagttctctgacagagctgcaaacaa

SEQ ID NO: 48207 - DNA, 537 bp, Arabidopsis thaliana columbia
ttcaggaatccaaatttgttagttggaaaaacatttaagtagatacaactattctcactaaacacaaggacacaatttttttttttaatgtgaaaatatgataaataatcattcatcttgttcatcattgtgtattttcataggttcttaatggaagtatatgcagagacgagaaggtcacaacacaagtctttctccattgagttgtccattccaaagggagcaaaaaacaacttgtccctagatttcaagctaggagatttcaattagtatgcagtgattgatggtattgcgataacttgacgtgtcagtaacttacttgtggatagctaaagttggttcgagaccagggattgagctatgtgaggatgacattattacgactttgttggagtagacaacaccgccctaagtataggcatgtgagatcaagaatatgtagatcggcgataattcttgtgtgtcattgtctccacttaccttcaaaatattaacaaaatgtggatttgtgtgacttgtaagcgatcaagacggtga

SEQ ID NO: 48208 - DNA, 683 bp, Arabidopsis thaliana columbia
ctgtcgataaacagcattggaattggtttccttctatttttagtagattaacttccatttaaaaaaaaaccaagacactttagtctcttttgattagtcaacactttattgtagatattttcttcataaaaaaactttctccttaaatgctaacaatttaaaaaaaatctgaccaccataatagtaaatgcaaaaaaagaagattaaatactcataaatgtagaatggtaagtcgtatttgctttttatatcaaaattaagatacattgtacacagtttgaatgtttatatctctacatacatattaagaaaaaaaatattttctttgtgatgggaaagaaaaagaaaataataacatttcttctatagccaatcaaaataacatatttgttgaccaaaaatttgaaatagaaaatacatttctttatttccaactgtactaacatatctgtacattatttacagaatcagaaattcatagattttcacgtccaagtctgtgatatatatcacactaaaaatcttaagtaggaataaaatctgcatatatatcgtgtattccgatgattaattgaattgaattgctttctccgataagaaatgaaaaagcttcggtggatgtgactgagagcgaatcggtgcttcggttctaaaatcgtcacgcgcgactgaagagtgcgtgg

SEQ ID NO: 48209 - DNA, 637 bp, Arabidopsis thaliana columbia
gaattaattatacatattagataactattatttaaatttggtgtcattaacattgaatttaaaaattatgcagcattgcacaaggcaggagcctacacacacttgatgaacgatgaggacagagatgatctcaagtggctccatgtcttcaagtaagttttttttttcttttttgttctctctttcatcttatgttatttattttatagacttcatttccaattatgtgatactgacgaacaataatgtattgcagtaaatatgacctatacagtaagagcaaagttctggtagatgtcgaacaagtgaagccttactacatttcactcatcaacaaggtaaaaatacatttaaatataatttctttaataaccaaacttgtaataatttgtctaatgtgtatatatttttttgacattgcagtattttccggcgaaactaaaatggtgagataaagctacgagtcaattaattaactatcttttatgaggagaacgagatcgaaggttaacgagtttctattgtatcaacggaagataaatctatctaataaaaaagttggtgtgtcatttgtaattttttccccatcagtttaaaagttatgttgtatgaaataagtatttcaataataatataa

SEQ ID NO: 48210 - DNA, 600 bp, Arabidopsis thaliana columbia
  unsure (1)..(600): unsure at all n locations
ggaaacgaaaatatgatgatgaagtcgttgatctgtctctctctcatcctcctcccacttgtctccgtcgtggaaggtctcggtggtggtggtggtcttggtagccggaagccgatcaagaatgtatctgatccggatgttgttgcggtcgccaagtatgccatcgaggaacataacaaggagtcgaaggagaagttggttttcgtcaaggttgtggagggaacgacgcaagtggtctccggtacaaagtacgatctgaaaattgcggcgaaggatggtggtggtaagatcaagaactatgaggctgttgttgttgaaaagctttggcttcattctaagagccttgagtctttcaaggcgttatagatctttaattggatttttgtagatcgatctctctctcgggtatatctatctagcttttgatgatttgagactctgacgtttgtgttgttgttggtaatatctgtggaattaaaaataaaatcaaacttatgttttatgagaattcgttaagatggatctgcatttggattgaatcgaccgacaggataatgatgcacncatacaacacgtgcgtcgaccgtgagttttgacatg

SEQ ID NO: 48211 - DNA, 581 bp, Arabidopsis thaliana columbia
  unsure (1)..(581): unsure at all n locations
tacgtatgaaaataaataatttatggttttacaaaatcaactatttctaaataccaactaacatctataacgtttcattaaaaatttgagacaagtagttcgatgatgaccaatgtggttagcttacaattggtagtcttgttgaataaacatatagttggaaactattaacaaacaaaaaaaaacttactacatgatcgaatacaaaagttgttatttgatccataaaacttgcgaaacttttggatattatatctaaatcacaactccgatacgtgtgtaattattttccaaaatattaaatatcaactcattatttctcaattctagggacaaccgtcaagaaaaccaagtaaatgcaaatttgcaatcataaaaantgacccatatataatattgggaccattcaaactcgaatttaaagaagagcccacagatgatacggttgcaatctttctaaatttccaaatggcgtcctccggcatgcctacactcgaccccactgaaaatccgtatgccggctatatgcattacaatcgagaaaaagcattcttactcggtgacaagtaatctattttttt

SEQ ID NO: 48212 - DNA, 1020 bp, Arabidopsis thaliana columbia
tgtttaactgcttgtggaacttcaggattgggaagatgggttgtgtgagagcaacctgatggctcatacttgcatgaaaactggaacaaagacttgaaactctttagtgatggtgaagatggcggacaacaactgcttcaggttaatgtcttccttttataacctactgtagtgataagttaggaataaaaaaatggaagataatctttgtaggatgatatcttcaaatgtacttaaaatagctctattatggaatgatctagttgacaaatatatagataaaccttcagatttacttgtttgttgtttgtagccttctatctatattaacaggagaatttgttacttgacaattagatgagtacgcagtcatcggcaatgttgtgagctattaacttgggaatttgttttttgagaaattgttcacggaaatatactttgagaactagttctcctacatttgtttttcagtaacctagttgtatcgcatgttttcttgtttccgatactctactttagtttatacgactcttgaatcctttagctcatagggggggagtggagcttaaaacctgttttactttgctgaaggcgtttgttctttgcatttgcagctattcatactgcgggcagaagccgaactgcaaactgtatccgataaaaacctcacagaggcccttaagtgtgtagattcactaaaatcagcggtttccaacttctttggcgggcatgtcgtaaaaccaatcgcttttttcctagagccggaccatcctcagaaaaaccgtgacgagctcttcaagccacgtggtgctggtaaccaaacagcaggcggtgtgaagtacaaaggggactggatgacccgtccggtgtcagaagacgaggttgcattgatggctaaactgctaatcaacatgtctatttggctcaatgaacgcctcgggctgaacaaatctgagacgagcaacgacaagaaagagaattcagagtcagtatcatatgtagatgtatcaggggaagatg

SEQ ID NO: 48213 - DNA, 566 bp, Arabidopsis thaliana columbia
  unsure (1)..(566): unsure at all n locations
ctggattgtaaataactcgtagcaccctttttattttcatactcatgatttgaaatctttgtatcattggggtctaattgggtgttgtgtggtagtgtcgtactctttcctgtagctgttacattcctcatcacttggtggtttatccagttcgttgatggtttcttcagtccgatatacgagaaccttggtgttgacatatttggtatgaattgaaattcttctgacttgtatcgtaatgttatgtactaagtaaaacttgatgtagaaacttcgtctatgaagtctaagatatcttaatagattaggattcagggtttgttcttactgctagagttagtggaatgttgtacaagtttgttggacttctaaagttttactagatttccttgcttaattctttagtccaactcttacttgtgacaatgtatctggtanaatgaaacatttagtttcatctctatctgaaagtttcctagatttccaaagagatataaatatcagatattaatttcttatcttgaactacatcttttaattcctttttgtatgttgcaggacttggg

SEQ ID NO: 48214 - DNA, 565 bp, Arabidopsis thaliana columbia
gttttgatcgatttctcacaaaccaaactaccaagaattcaaacagctggttatcattctttaacgagtttagaaagttttgtctgaagaacacgaactctatcttcggtcttacgacgtttcctccatctataagctgtccacatcaaaaaaaccaccgtagacaacaatattataagaagcccaaacacaaggataagcttcagccttctctttgagtttcttgtatgcttttccattcaagttagttatttttttatgtggtttttacaagtaaactaaaattataaaactgaaccttaaaaccgaatcggaacacttatacatttttaaacttttaaaaccgatatgaaagtggaacacttgaaacattttctgctctgacaaaacaaagaagacaaattccaacttaagtcctctctacaagagctattcactgctcctaaattgacacaacttaaagcttgagaatctcagaaaatcgattacaatttacacaacttacaatatcgtcaaattttgggattttcggggttaaactagtaaaaattattagttgaagttg

SEQ ID NO: 48215 - DNA, 618 bp, Arabidopsis thaliana columbia
ctctaaatctagaggatcatgattttaagagaaacgtgagccataaacttacgggagttacgactatagtagacgtgaggacaacaaattacatgtcttttttttaaatgaaaaatgagtaacgtgtccacatgcattaaccctatccaatctcttaacatacacggtttagctttatagaataataccattactaatttcagtagataaaaatttagttgcgacaaataaaataatgatcagtaatttaaagaaaattggagggaaaaaggttttaaagagtaattaggcatgaaatatcgtttaagcaaaaaaaaaaaaaaaaacgataaagaaagaaaagaagagaatattagctcacgcgcccttggactccaaattattggattcagttgattttaggccaatttccgtaggggttagactgcgaaaaacgggcgcttttaacaacgcgatttacatgcgcgtgggataactatgatgatctggatttttcatgggttcctttatgggccgaagagtgaatcattggcccaaaacatcatgacaatttttagtcctttttccaatatctgacgaacaaatcttatcatagttttgttggtttaaatcaattgt

SEQ ID NO: 48216 - DNA, 464 bp, Arabidopsis thaliana columbia
tattttcgtgaaagaaatatataaaaaaaatttgaattagttggcattggaaaatgagagacagaagttgataaagtagaccaaatggatttggcttagtttgtgtttcaacctcaagttgagattggctgcggtttttagtcgttatatgtaaaacatgaatcgtcatgtggggctcttcacttgtgctttcgttttaatacatttcttaaaataatcacaaccacatgtttataacatctaacccctattatgtgttaagtttaagagcatgctcaatggtgatttctaaccatagtttctaatctactaaagtaataataaaataaaaaataatattatttaatttgaaaagtttcttaaaatagttagaagagtcttcaaaatctcttgaattagaaattctcttacctttccttagaaactatcttaattaaataatattatttattattttattatta

SEQ ID NO: 48217 - DNA, 351 bp, Arabidopsis thaliana columbia
ttcatttatcaaattacaattaattacataaataaaaaaaaacatacaaagaacaaacatatatataaaaagaggaactgcaaactggagaaaaattatttcaacaaaaaattgaaccagagaggtaagaacttgctcaggagtttttagcaacgtcgaagaactcgaattagacccgccggtagttctcagctccgaactcggcctgggactcacctttagtggagttccactgacatccgaacacttccacgtcttctgcgagttcaagcttccttgttgcttaatctcactcaagcgtatacccgtaaatggtgagccctttagaccttgaatcgtgccagcgtttcg

SEQ ID NO: 48218 - DNA, 563 bp, Arabidopsis thaliana columbia
ccagtgtgctctaaagtttgtttagtcatgtggtttattgttgcgggcgcgatgttggaaatcggttttcatgtggcctggcgtcagggttacaaaatttgtcgacttaatagatgtatgtctactagaaaattacttggtctaccctacttgagctacaagtaatcacaggtatggaatccgagattccacccatctgattgcagacggaaaccttttgttcatggtcgcatgacagacatcgcataagagctgggcaactagctcaaaaagaatcaaagtagctgatcaacatatatcagatagaaaaccgtaggcggccaagtagacctcgcctccggactaccatacatgctgctgtctgtccattcaccattaagttcccaacagccgaaatcctagcgtcatccggtccagtacctctgccatgacgtagtcatcatgcgaatcaagcatggcgcccagtcccaaatgatgtctttgtccggatatttttcttttttgcctttcccttttcgatctcgtgcagagtgcgagtatcaggtcggagagatatgagaggg

SEQ ID NO: 48219 - DNA, 588 bp, Arabidopsis thaliana columbia
ttttttcttgaacaaaacaaagtctcattttaagtaaggactgtacaatgttgatttcgtataagctaattcactggatatataaccaacatttacaaacagtataattctacatttcctatactctctaatgtgcgtaacaaacctgtcttgtacactaccgctcacccggccaattcgttctagctagctgcttccgatcttctcaccatatccaatggaaacgtagctgcaattttgtttttcttagatgagacattttacgtaatgcatcaattctatgaagtggtcctactgcctatgaatgcagcatgagataagcttcattaggatatacaccaaaaccaaccgtgaagaataagactcaacgtgaaactcatataaggccataagagacattattcacaaatagaatgatataggtaaacattgtttatttctctacttttcactatgttaaatgatatatatctcttactatgttaaatgatatctcttaaaagagttatatggagcattcaaacattgctccaacgattgagagaacgcgacgatcatgaaaatgtataagacatcttggtatgatgc

SEQ ID NO: 48220 - DNA, 505 bp, Arabidopsis thaliana columbia
tttaaaaatgaactagcttttgaagctctttcctattcttacctgaatcacaacgaatctagtgtgactctgatcatcatcacatataaaccaatcgcagggagacgaaatcgtggatttcaaatcgtctgcaactgcttgcttcacatcttcctcagcagcaacaacagaagtaacagaataagcaacatctgatgatgactccgcattagtcaaatttacatcatgtttgtccgaattctcggctttcgatgaagagttgaaaggaagtatgttgttggtacgagagtgaaggtaagaagcagctgatgcaacaatctcatatgcagcagaagcactaatcttgcgacttttgttcttctcttcttcttcaacttcttcttctgcttccacaattggcttagtctcacctgaaacttcaccattctcagcttttaacgccgattctgttttctcagctgatgaagttacaaatctcaggccgtaatatttcgacagattcgca

SEQ ID NO: 48221 - DNA, 443 bp, Arabidopsis thaliana
tggtattttttgtagaagttgtttttctgattaacgttttcatttattgttggtaataagagaaataagcaatcaattatgtaggtgtgctatgggaaattgctatagcttgcaaaaggaccatgagaccgcactgaagaatttcctacgagctgttcaactgaatccaagatttgcatatgcacataccttatgtggccacgagtaagagagcctctatccatttgactttgtcttgcacaatgtgcttaaaattatctggttattggtctaattgacactttctatctttactgtctctgtagatacacaactcttgaggattttgagaacggaatgaaaagttaccacaacgcacttcgtgtagatacaagacactacaacgcatggtacgggcttggaatgatatatctacgccaagagcagttagagttctcagagca

SEQ ID NO: 48222 - DNA, 616 bp, Arabidopsis thaliana columbia
tcaaatactgtttctgatataaccagtgactgcaccccaaacatcaggtcagcgtccaaaagctcgttacgaggtaatttattttttctctctcttttgaagaataagtaaaaggttatgtcattcatgtatcttctgtatttttctaagtcttgtttattatatttttttcagcatggcgcagcagttattcaagataagatgtatatatatggtggaaatcacaatggccgttaccttggtgatcttcatgtaagcaacctctatggtttataagcataagctcctaatgtaattgagatattcagctcctagcttgacaataccagtcccggtgacagttcctaagcaaagcttctgtggaatgtatacaggttctagatttaaaaagttggacttggtcaagagttgaaaccaaggttgcaacagaatctcaggaaacatcaactccgacattgttagctccttgtgctggtcattctttggtaagtttattaactttttcgttttgtttttgttattatagttttgctttcctgcccagaaatattcaggagaggggtttcactaaagcaaagtattctcttcatgaaagtcacttgctatattagtttgt

SEQ ID NO: 48223 - DNA, 942 bp, Arabidopsis thaliana columbia
atttatttttttctgtgacacttctgctgacaattcagaagcatgtcttctgtaaatggtgtttcaaatacaggttctggatttaaaaaactggacttggtcaagagttgaaaccaaggttgtgactggatcacaggaaacatcatctccagcaaaactaactcactgtgctggtcattctttggttagtattttaacttgcatatgttttgggtttttcgttttctagccttgaaacatcaggggcaggtttcggttcagtaatctcctcttgaaatcacatactggccttctttgtttgttatgtagataccatgggataaccagcttttgtctatcggtggtcatacaaaagatccttcagaatccatgccaggtaggagttgaaacacttctgaaatgattaattgcgggtaagttgttatttctggagcataccaattcttgtatatcagttttttcttctgttttctcattacagtgatggtctttgatctacattgctgttcatggtcaatcttaaagacatacgggaagccacggtaaatcatctttctcccagtttttctatgtgaaaagtattccaatctagtaaacaagtaaaaatttgaatatatggaaggaagaaaaattaaaagttgctctctctttcgttcttcataattttttcaggtattaagttgcattctgaacccaatttatcgatctcctctctgatattggaaatcgaacctgttattaagctgagaatatttttatcactctctctttctctcttgctagcagatttcgcgtggaggtcagtcagtgacccttgtgggaaaaagcttggtgatatttggtggccaggatgcaaagagatcgcttctgaacgatttgcatatacttgatttagataccatgacctgggaggaaattgatgccgtgtaagatcttatgaca

SEQ ID NO: 48224 - DNA, 578 bp, Arabidopsis thaliana
ggtaactccgtctacgtcggcggcctcccttacgacatcaccgaggaggctgtccgtcgcgtcttctccatttacggctccgtcctcaccgttaaggttaattttctcttttcaatatcctgatttaagtttcttaattaggatgattcaaattcgtttcgtgattttgaagttccaatcttattgtatgatcttatagatgataagctttagtagatatctatgtagaaagactgaccaagtgatttagataacatccaattgctagttgatatatcttacatgtgagctggtcagagtgtatattgacatatatgtgtactatttgagaattcagattgtcaatgaccggagtgtaagagggaaatgctatggctttgttacattttcgaaccgtcgatcggctgatgatgctatcgaagatatggatggaaaagtatggttctactgctaaagttttgttcttttgtttatattatcatgtacgtggtgtgtttatattgttgacggtattgagctcgtaatcagagtattggtgggcgtgcagtgcgtgtgaatgatgtgacacaagaggtgga

SEQ ID NO: 48225 - DNA, 964 bp, Arabidopsis thaliana columbia
ttttatgagactttgcaacaacgaactaaatgctttctttctagaaatttttaatttagatttgtgaaggttttgggaatggcccggagaagacgattttatatacatacatgcaagagtttgatatgtattgtttcatcatggctgagtcaaagttttatccaaatatttccatggtgtggtattagttaaacaaatctctcgtatgtgttcattgaatatacccgtgcatgtaccaggaatgtttttgagtatcgttttctttcttttatcaaaaaaaatttcgattctaaaaacgtttttttctttgttgtaacggttgagtttttttcttcgtttcaaaacgagattctcgtttgtctcttcccttgtctaaaaacatctacggttcatgtgattcaaaaacactaaaaaaatagaaactcaaatttttttagtacttaacatttaaactatatatatatatatatatatctcagactagtcccaagttttagtgtgaggtttttttattcaaaatctatcagtaagttttttggaaaaaaactaagtgaaattttctccaaattttccttttactattgattttttaattactggatgtcattcacccccaccctctcattctttcaacatttaccattgggaaccttcacatgaaataaatgtctactttattgagtcataccttcgtctacataaattaattgatgttcttctccaaattttgagtttttggtttttctaattaataatctaagcgaaacgtttttggtatacatgtaaaacgtaacggcaagaatctgaacagtctactcaacggggtccataagtctagaatgtagacccacaaacttactcttatcttattggtctgtactaagatcgtgcccttgattccttgtttctctaatccatcgtatcctcaaatttaacatcattctacttcaactatctttttatt

SEQ ID NO: 48226 - DNA, 540 bp, Arabidopsis thaliana columbia
tggattattgtgttaaaggccaaagtattagtagcaaactattctgtgattcagttctggttagtgccaaatataaatctgaacttgtctgtactgatcttactaataacattatatttggtcagatcttcctgatctggaaaaggcaagaaacaagtagcttaaccgcaacaacaaccaaccaaccaactctggaagatgaagaaaaagtaaaagactacgagctgaaacatagtgctttaggatgatccggtttgttctgtacctgactaaaccgaccacctatctcttccggtttactcaggtttacctctgatttaggtttcgtagggtaatcagcattagttgtctctgatgtagtttggcttttttttctgttatggttggttcacaagttagggttcggtatgtgaattctaccgagagtaggaacttataaagtaatgtaagggttgaactctaatagactaataccgttgaatgactatgtctttttcaatggttcggatactttatcgtctttagcatgtgatgtcgccg

SEQ ID NO: 48227 - DNA, 698 bp, Arabidopsis thaliana
tagggatttgtatagcatacaatctaaatcccttaacgattgaataatttaaaaatatcttctaagaaagctactaatcttagcattacgaaatagagttagaaatgatacaacttagactagaaaaacatgaaataaggactgaaatttaaacgttggacacgtctcaaaacaaactctcctatagtagtagtagtaaataagaaaaacaaaagaaaacgacaaaagtaaaatttgataatattgtaaacatttatcccaaaaaaatgggtaaaaaagattacacaagtaatgaagagaaggacacacgtggcgtatatcgagcaaaagaaatcaaaatcaatcgtcctcgcatagtacacttgtaggtcccacctatcctctataactcttttctcggcgaatccaaaaaaaataaaacttcttcttccttcttttcgctattaacacctgaaagaaatgagataggagagaacaaaaaaaatggtgggactaagtattgttttggagatgactaacaacaacaacaacaacaacaacaacaacgacaacaacaacagcgaaaaccctgttagtgaaggtgtcttaattagtcctaaagtcgtcaacaaagccaacattattgtcaccaccgccgtgacgacggacacgactaatctccgtcgttgttatcaagattctggatttctcgaacattg

SEQ ID NO: 48228 - DNA, 899 bp, Arabidopsis thaliana
cggtcatgttatattcatgagattgagaaagcaagactcttttgtcacaaactcatgctgattgatccacttctcaaccatatttatcctttttctttttttccataacaaaattagtctatttacttcatgaattttttgatgaatttgtgaatcttttttttttctttggttctgataggaaaatggcggagcatggttacataagaaacgcaaagaaatgcaaagagaaattcgagaacgtttacaaataccacaaacgaaccaaagaaggtcgtaccggaaaatccgaaggcaaaacttatcgcttctttgatcaattagaagctctcgagtctcaatctacaacctcactccaccatcatcaacaacaaacgcctcttcgaccacagcaaaacaacaacaacaacaacaacaacaacaacaacagctccatattttcaactcctcctccggtaacgacagttatgccgacgcttccttcttcatcaattcctccgtatactcagcagattaatgtaccttcgtttccaaacatctccggtgattttctatcggataattctacatcgtcttcgtcttcttattcgacttcttctgacatggagatgggtggtggaactgcgactacaaggaagaaaaggaagaggaaatggaaggtgtttttcgagcggttgatgaaacaagtagttgataaacaggaagagcttcaacgcaaattcttggaagctgttgaaaagcgagaacacgagagattggttagagaagagtcttggagagttcaagagattgccagaatcaaccgcgagcacgagatcttagctcaagaacgctctatgtccgctgcaaaagacgctgctgttatcggctttcttcagaaaatgtcagagaaacaaccg

SEQ ID NO: 48229 - DNA, 992 bp, Arabidopsis thaliana
gttgttgaaatttgcttgggcgaatccgagagccatgtataaagcacgggttgcagcaagtctaacatcagtattaccttcagcagcattcataccctgaacaacagctgtgagtatcttatttacatgctcctgttcaacaacatcaggtgacacttcttcacatagggaaccaagagtctccaaagtggcttgcttgacatgagcaggtaactggtgaatatttgagagaagagacactatgagctcaggccactgcttctgtggtaactcaatacctgcaaccttagcaatgacctgagatgcagtcgaacgaacatcaggcacaggtgccgacagtgtcttcaacaagaaagctctgatctgcgactttgttgacatgtctagagccaaccatctctgaacaagctcatacttcctgtgttgttccttagcatcaagagcatttttaaggactaaaccagctaatttcctgctatctactggcttctcatcattcgcaagctctccagcaagcgacaacaagaaacccgcaaggttttgctcctgaaactgcttaagactttcttccgcgtgcttacgtacagttccatcaatcgactgagcattaatgagcaactgcgtaacctccattgccataggtttatctgcaacagaaacaaacagattcagcaaaactgaaaataaagaagaagtaagacagaatcagtaaattaagccaacaacatgaagaaactcgtcaacgatccaaaaagccataaaggtgaaagactactaaatcactatgaatcgaaaaaaccatgtaatagcaataagagatcaaagcacgagccattgacgcttaaaaacactgtcagattcaactataacagccagaacaacagatccgagcacgaaatcgaatataaaacacgaaatcaaactagttactaagatgaccaaatcaacaagttaatagaacaaatgaatctaactaaaaaatcgaaaagcaa

SEQ ID NO: 48230 - DNA, 566 bp, Arabidopsis thaliana
caaaagagcaatgccttggatgggagaagactttgggatgaaggacgcacagagttcgatgttccctggtttaagtctagttcaatggatgagtatgcagcaaaacaatccattgtcaggttctgctactcctcagctcccgtccgcgctctcatcttttaacctaccaaacaattttgcttccaacgacccttccaagctgttgaacttccaatccccaaacctctcttccgcaaattcccaattcaacaaaccgaacacggttaaccatatcagccaacagatgcaagcacaaccagccatggtgaaatctcaacaacaacaacaacaacaacaacaacaacaccaacaccaacaacaacaactgcaacaacaacaacaactacagatgtcacagcaacaggtgcagcaacaagggatttataacaatggtacgattgctgttgctaaccaagtctcttgtcaaagtccaaaccaacctactggattctctcagtctcagcttcgcagcagtcaatgctcctactggtgctaaaatgcacaccagaacataaattctatgggga

SEQ ID NO: 48231 - DNA, 1117 bp, Arabidopsis thaliana
caaggcctacattttatttttgttctgatgtaattaaattgttaattgtctgtatttattttcatttttaaaaaattatctttttaacttatggtagcttcaacttctttttcttttttttttttgtcatctcaacctttgtaagaagaaaaatggtcaactatagcttcaacctcaaatctactgacttgacacttgagttttaaataggtaacatctcatggagatcccaatattcattctaaattcctccaagataatgcaacatgttacaacaacaacaacaacaacaacaacaacaacaacaacaacaacaacaacaacaaaagagattggccgagacatatatgtagtatgtacccaccatatcacacataccttcataatcatcatcatcatcataatatcaagtggtctaattcaaatgttttgatttaattatgtgtttaagtagttcatatttaattgtgtgctaaaatacttattgtaattgaagaatcaaatatacaagtcttattcactattcttaatcaaatagaaattagtcttaaatttgtaatttagggggtacaatgatccactattctccatcaacgtagaagacaagtaatttactttgtaatataggtaatggtacgtacgtagtaatcacatgtaaaagcggaactttcctttctcttgttttgccggcttgaccacgggatatgagaccagtaaggtacatgtgtaatgtgatacctatcagaaaccctattacactcttatcaaaaaacaaaacaaaacctattacactctctcggcttaattaagattatgatcaattccaaatatgtttctgatataactttaattattaacgagaaaaccaaagtttattgctacttttttccgtcgaaatggccgctattttaagttttagacaataacttggtccatgaaattaaggtacaacgtcgatattgattaagatcagtttacttttgctaatataacgtgttaagtttgagatgggagacacgtgaatgacttttcattactttcaaaaattgttcaaaattccaaaattggcaacaagactgttttagttgttaatatgcaattagactgtttcaataga

SEQ ID NO: 48232 - DNA, 1388 bp, Arabidopsis thaliana
tgactaaccttgatttgcccatgtgttagttttttaggtttgagacgaaaatctccatagttatgtgactgagtagctgcgggtttcgtggcggagcgccgtaaacggtggtggtggctatcgaattgattgcagctctccacttgggatcttcatcttcgctgctgctatctcctccacttaactcccgtttagccattccaataccgtcgccgtgaaatctctctactttgtttctatgtcttaccgtgaactgcgtaatctccggcagaagaacgtcgtcaagggtttattagataacactttttccggattcgggtcgggtttaattttgacacggaagagagattagtttaattatggaccccgaatcttttagtactaccaaattaccccagaatatctggggttttatcaaaatacccttggagattttcgtatttaatgaaagcctcaatatcttttgttattgacataaataccccaaacctttgatatttatggaaacacccttgtatacatgaagaaggcaagaagccatattcaactgtaatctatctgctagatatatcgatcgctttgatagtagtgtggcacaatatgctatgtactgaaatctaatcctggaactcgaatgaaatactgatctctaagagacaatcaatcacctaagataatggatgcatagaatatcttacaattttgatgcgttaacaacctgatggaagagctgggtcagtcactgttggatcttgagactaaattacatgagaccgcgctataaaaccggaactggaaactcttcaaagattagtcacagaactgtgtcctaaagtcaatgttacagaactcatacactatccttaaagtgatctgtattcacaatggccctatagttctctctctataactttctaacctgtaaacgacgaaaacagagcagcacaacaacaacaacaacaacaacaacaacaacaacaacaacaacaacaatgacaatatgagcagcatcacaacaactgaccaaaggaagaagaagaagaagaagaagaagaagtaacaggtgaaaaagactttgaaaagctttgtctttttctctaagcaatcttcttctctcttgctgaaggcaaccgccattgtctatgccaatatacagaaactctcgaccacatcggaaacccgaaactatactcaagagacacatcagccggtccaccaactatcaacggtaaccacaaatatctcgaatctcgcaaatccgccggattccacctatcggccataaatataaacacaccaggaacacctggtaacggaatcacgaacgtgctctgcgcgaaaaacgtcgtcgaacggaaaatactgttcccgccaacacatggattccc

SEQ ID NO: 48233 - DNA, 920 bp, Arabidopsis thaliana
ctcagcaagatttggatctcctggaggatctctccacagactaataatctccaaggcatgtctctatccacaggtggtaacaacatcaattctctcatgcatcagcaacatcagcaacaacaacgttccgcaacttctcaaccaagcataatcccaggattcagcaacaacccgcaagttcaagcacagatgcatttcatggcacgacaacaacaacaacaacaacaacaacaacaacaacaacagcaagctttctcgtttggcccgagattacctctcaatgcaatacagaccaatgcaggatcaacagcttcaccaaacgtcatgtttggcaacaaccaactaaataaccctgcagcagctggagcagcatcgatcaaccagccttcgtttagtcacccgatggttaggtcttccacaggttcaggctcagggtccggcttaggcttaaactaagatccatctttctctagcttatttagcttatcagtatccatatttatttcaccttgttatttttaaagataagttatttggctttgagaccgtagtcttgttccaagttagtgtcttgtagtatcaaaccatcatcatcatcattgtgaattaaaacagtcaccaatcttaatgtctctctttcccacaaccatttctctactcttcaaacattaggggtcttttaactcgattcattttgacgataatatatagacaatttcattacaaatctacatgtaacatattcgttcttgtcgcaatgaaaaactcaaaatcatttttatttgattaatctctaagatgtttttttttttttaagcctaaccatttaaccaaggcgggaacgagctatcattaacatggtttttttctcataagagcttaaatcggaatcagtccgttttagcggcgaaccacggcga

SEQ ID NO: 48234 - DNA, 1191 bp, Arabidopsis thaliana
tttttggtgatgaataacataggaatcgaacacgtggacggcgcacatgctaaagtgaccaaatccactggtgatccgggtaaagtttcgggtccggctcacttcacaacaagtggtgacgtggcggaggtgatagaggagcttcgaacggagaacaagcagttaaagagagccgttgaagatctccgggaagtaatatcaaacgtccgtccatactcgccggcgacaattgattacggatcacactcgaagtatcgcgaatccgagaggaacaacaacaacaacaacaacaacaacaacaacaacaacgggagatcgagagctgatcggtggagcagcgagagaacgacaacgtctgattacggtgggaagaaaagcaaggaagagggcaatgtagctgaggagctgaagacagctttgacaggagctgcttgaagcttctatggcggctattggtaatcgcaggctttactcgaattacaattacatttgtcgaccttaatcagctattgcttttgtatatatatgcgttgaattatctggattagatttgcacaacttgttttgaatcttttgatggaatcttcagagttttgtatgagattatgcttttcaattctctttattgaacttatatgcaggttgattgttgaattgatttgaatcagtattctattatagtatcaatcaatctgaagcttgatggtgatacactgagctctattaccttgaacgtattttgtatatcttctttttaaggcattggcaagtgtagttgaattaaaagaacttatctatgcattacaattcgagaagagtttgggaagagatttgccggtctctctaagtagcagcaaaactatatttgtcgatggcaaaagtaatctagacgatttaggacatctcagtatcatcctcggaagacatagtcatatagatacgaaagatccggatgctcatccatcaaatggtgaaggtcaatgttatggtgaacaattagacacaattctttgtacattgcagaaaatctgaaagaatgtattctctacagtactcttttttatatatttagtttggattaaacattagctgcttccgtacaatccaattttaaatgttatgagaaacgaaattggaccctcttggtgcttttggttcaaaccggtaatgccgtaatggatcaggtgtaaa

SEQ ID NO: 48235 - DNA, 939 bp, Arabidopsis thaliana columbia
ttgaataagttggctttatatagagatttgtttcttttcactatatggaaactttctgtagaaaaaaattagtattgtgacagaagaagaataaatgaagttggacccaatcttttcttctcaatattctccttgtaagttttactttagtgccataaccatgtaaaaggtataattcaattggatggcaaaagctaaagcaaatattctcagtttgtggctcttcttctatctctgcttttgtatgagaatcaaatgatcacatatttgatttcaatttgccaaagagtgaaatttttgagactgtaatgaagttttgaactagttggcctttgtcattttagattcctatgtcctaatgatgttctagattttattctcgataacaatttttgctagtgggcagaatatgacacatatgggaagtgcttgaattgtggcaagtatggtcatttaataagccgttgtctcatccccttgcagaagaaacttccctttaaaaaagactatccctccggggctaatgaagtggctctctctgctgttaaccttccttcaggtgctgggatttcagaaactagtgtcattggttcagcttcagctaatccacctgagctcccttggtccaaaccaaaaagaaggcgttcgagatcaaagaagcgctctctcagttctccacctcggattgttgacccgttgattcccatttctcagcaggtccctctattgcccaagccttcggctagtaagaaatgggttgtgagaccaggtttgaattcgccagttcctactgttgtcattggtgcagattctggaatttctcaacctcctactctccctaaaaaatctatgagagagtctatcaaagatccggatcaaacttcctcttccctgggctgggcagtgatgtctctaaggaaaaaagaagacttaagaagt

SEQ ID NO: 48236 - DNA, 626 bp, Arabidopsis thaliana
aaatcctcatccaaggtctagaaaactaaacgcatgacccatctctttatccacatatgacatcttctaatacgcatggtgattgatttgttctgtttcaaacattcaggaactactaccgatgcacttcagcgggatgtccagttcgtaaacacattgagacagcagtcgagaacacaaaagcagtaataatcacatacaaaggagtacacaaccacgacatgccggtgcctaagaaacgccatggtcctccaagctcaatgctcgtagctgcagccgctccaacatcaatgagaaccaggacagacgatcaggtgaacattccgacttcaagccagtgctcggtggggcgagaaagtgagaagcagagtaaagaagcattggacgttggtggagagaaagtgatggaatcagctaggactttgttgagcattggattcgaaatcaagcaatgctgattatatgtagtttatgagttttatagagttcatcgactcaattttcgcctccttgttcttgttatataataataataaaaaaccccatgaagattaccaactaaatacgttaacattcgtctgtgtaatgatggtatatgtttattgtgatattaaatcgctaatttt

SEQ ID NO: 48237 - DNA, 629 bp, Arabidopsis thaliana
  unsure (1)..(629): unsure at all n locations
ccattaattggaaatagcgacgataaagtcattgatttttcagacacggacactcgtttacccatgtttgtgtatgtgtcacgtgagaagcggcctggatatgatcacaacaagaaagctggagccatgaatgcacttgttcgtgcctctgctatcctctcaaatggaccttttatccttaatcttgattgtgatcattacatctataactgtaaggccgtacgagaagggatgtgttttatgatggacagaggtggtgaagacatttgctacattcagtttccgcaaagattcgaaggcatcgatccttctgatagatatgctaacaataacactgtattttttgacggtaatatgcgtgctctcgacggtgtccaggtactgtatatatacttatttttgatgcaatgcaaaccaactatagacagatatatatataacgcatctttaccaaaaaataaatgattctctgtttttcttttccagggaccagtttatgttggaacaggtactatgtttaggcgctttgctctctatggttttgatcacccaaccctgacaagcttcttgagaagaaggaatcaganacagaggctctaaccacccagtgacttgacccggaccttgat

SEQ ID NO: 48238 - DNA, 730 bp, Arabidopsis thaliana
ggtccaggagcgtcgcttgatggaagaggtgggctagatgacggagatggagatggagaatctggcttcgtggtcggtgctggagctggaacttgagcaggaggggaagctagaggagctgggggaggagtagcgacgggaggaggagttgctggtggaggagaagcaacgggaggaggaggagaagcgactggaggaggagtagctggtggaggagaagcaggaggaggagaagagactggtggtggtggatttgctggaggaggagcagtggtgactggaggaggagatgttgtgactggtggtggtgctgagacaggaggaggagttgctgctggtggaggagttgttggagttggtggagctggtgtagcggttggtggtgaagtcggagcttgaccagtaacgccggcgatgaggacgatacagatcacagcaatagcgaaagatcgagccatttttgcttttgctttttctctctgttagtgagaatgagagagttgagtgaggaaatgtaaaaggaggaaaatgaaggatttatttaaataggaaaaagtgagcattattatcaaaacgcggatacatggcgtcgtattgaagttggttttagtaagtgtgtataataataataacccatgatgccatgtgagaagttggcggtgctagatctgttgacacgttggcgagtcttcattttatcaaaattatgatgggatgtgggatgtgtatg

SEQ ID NO: 48239 - DNA, 543 bp, Arabidopsis thaliana columbia
gaggattacaagcaaagcacagggaaattctcctgatactaagaaaacaagtatgtcaacacgagtggatgagttatctaagaaaatctgctggagtctctcaggtcagcaagatgagacgtttctttggcagaaaacagcagacccaaattgctactcatctcggtaagtaaaagaacagagtcctgaagcttggtttttaactcacagtcacactgatgccgttctttctttttcctgcttgttgtagctcgcaagcttctatacctgtttgcaaagatgatgatagtgttccatattaccatcctcttgttccatgtataagtggaaccaagagtaaacgctggattcctattcagaataggtctagagcttcaggaacaagtttgtctgagcttgaaattcatggtaactagttattttggtgtgtcatgttctgttttcactgctcatacttttctggcgattaatgttcttctccgataaatatctttcaacaggtattaaacctgaagaattcgatgaggatatacaagtatggag

SEQ ID NO: 48240 - DNA, 678 bp, Arabidopsis thaliana columbia
gataaatgaaatgttcccacagccaatgcagcaactcttgctccatttcccactcgtaggtccacttgtcctttctctaaagctctattgttgctgcattaaaacccaacaaggtgactactcatacatgattaagagaacaccaatcataatccgaataaattgaattgaattattatatgagataacgttaaaggagttcagaatcttctctccaaaagtagaaaatctctcacacacaaagcttaagtctaaacaatgactttaaatatatatataggttactaaaaacgtgtagagtctattttgaaaattagaaaaacttctggaacttctgctattcttaatgacttgatgaaacgtgaggaaatcctttggtcgataagggtgtcgatcaataccagtggggtgtcgatcaataccagtggggtgtcaatcgacaccatcccgtgaataacgtccttgcccatcttctttgctaaaaagcttccgaaatttcctatgtggctctatagctctcaaaagtagatatgcacctgtaaagacttgtaaacatacgaaaagactaaaaactattctaatatcatgttagaaattagtaagaaccaagatatatctgctcctcagacttttcttttgcttccctcaagacaacacaaaccgaacctgtgaagaagt

SEQ ID NO: 48241 - DNA, 993 bp, Arabidopsis thaliana columbia
tgctatcgaagattataacgatatattaaagttgcttaacttcgatacatgcactcatatagagaaatacatatgatcaagcaacaaggatttatcgtctttcccttgcaaaaatacatagaagataccaaaaaaatgaagttaaaagtttgagatttcgacaaattttggagatctttctcaaggaagaggaggaacattagaaactccttgacgttgtaactccgtcataacaccgtcaaccgacggcggtttcagtcccaaaggaagcggcaccacggctttgatataacgtccccaatagctgcatctatgctctcattcgactgcaaccgtcaagtaatgaaatattgttaattatccaaaatttattcgaaaacttttttgggttatgtcataatcaaaatctaataaacaaaattgaaaccaaaaaaggtgcactcacgggatgaatgtcgatgggaggattagtgggtcctaattgtcttgtgggaacaccgatgcttgaatgattcgatgatgccataccatatccctacacatatatacacataaaccatgattagaaatatgtttttgtaaaatccatacataattcatagctctaaatctttattagttgtctacataaaaatgattcatgatcttgcaatcttttactaattgcgttgttagacaaaaccacaatctaattcaatgattccgttttatacttatatatgttgcatgtgttaaaaagccaatagtgtacaaagactagctttttgcagtgtcatgattgttcaacaaagctgatttagttatgtcatttcgattatttttcatgatttaaccatacaactaataatggaacaacatgtaacatttttacgcatgaattattattacctgtggatagagtggttgctgatgccagtacggtggatgacctggccaagatgccggagccgccgaatggcggcattggatacgccgatgagcagacccggagta

SEQ ID NO: 48242 - DNA, 569 bp, Arabidopsis thaliana columbia
tccatctttgcaaagaggtatagaagcttgcgaactagaccaaccagaaaagaaagaaaaagcatcaatacaggaaagccaagcttacgctttaaatgccaagaatatgcctcaggatcacacttaccgagaagaatagcaacttgaatcagaagttttctgccaaagaaacgtctcatcctgctgagctgttagactccaacagattttcttagataactcattcacccgtgttgagatgctcgttttcttggtatctggtaagtttccctgtgctttgtttgtgggagaagttaaaacaaagtatcccccgggtttcagaacacgatccacttccaaaagtagcattgcatctgcttaagggacaaacagaacgtcaacatatcagaacaaagttaaacatattaggagatctcaactttaaaagttcaaaaacaactagacacgcttgcaagacctgttgatgtgattcctttgatacccaagtagtgcacattgagccaatggccatacaaaagacagtgctggataaggagctgttttgaaagaaattgcaatcattgcaggaa

SEQ ID NO: 48243 - DNA, 901 bp, Arabidopsis thaliana
ttcggaacattttttttgctttgatacttttaggttcagattctcttgttggcacaagtctaatccctaataattagtgaagagcactaatttaaggaatgtcctctaatcattttattaaaataaaatgtacatatatgtggaaatcaaacactggacagatcacctggaaggtaggatcaatgtgcaagtgggacatgagacacaagaacatgtccttaacaaaacaaaacaaaaatacacaagaacatgtcccatattaagatactgattagtcaaaccgagatattgctcttaattcttttggactgaaagatggtaaacaaaggatatttctcatttacggtgaaaacgtataagccacatttcccagtattctcgatcaactccaaatggaagatgataagtggtaacaacaagggctttgagaaaagaaaagaaaaccgaaaagaaaaaataaatcagaaatgcccgaaccagtatgtgtgtgtgtcttccaagtcttgttcagtcatatagaccttcttgttcccaaatgtccactagaaaatccaccatttcctgttttcaatcagtaacacagttagttgactgggtttttttcctgcactcggaggagtttgattacttacggtgagaggaatgggttggggaaataacttgttgctccccagcaagctatcatacgttgctgtgttccaactgcaaatgatagacatataaaatgtaacattgccagactttagcccttagctttcagcaaacaatagtgtgtaacagagccactcactttaacttggctccttgattgtgatccacgggttgttgggtttacctttccacccaacgctcccgtgtctgatccaaagaagaagactgcaacacacaaaccacttcatat

SEQ ID NO: 48244 - DNA, 594 bp, Arabidopsis thaliana
cttgagataaggtcaaaccaatttcgtcttctcattcttttaaactgaccggttctacagcaggcggcggctcaacatattgttccccctatcataattattcctagactcatcaacggtttcatcacgtgtttcatcttcttgagtctagtgatcctcctccactatttcctcaagttgttgggtagttcattgttcctcttctaagcagacgatgagggcagcattatccactctcatttcatcctccgctgaattcaactccgcatagttcttaccaacataacttttctcaactctagacaattgctttggcaattgctcgagcggtttagagatctcctccacaaccaaaacacttctccggttattttttgcggatgttatattaataaggacatcctcatcatcatgaatgttcatctcttcctctactctgaacaacgatggagtgtaccttatatggaatttaaccttattttcatctaatccaagcttcgtcaatattctatattctaacatggagagagttatcttctccctaatgtcttcatcatacaactatacatacaaccttcgagtttaaaatatatg

SEQ ID NO: 48245 - DNA, 1237 bp, Arabidopsis thaliana
tagttgataccaatttaaagtttcatgactccggcgaaaggtccagtaagagttccgatgtaaagatggccgttgaactcgttgacttcactaagcaaagtattcccaaactcattcttgaggaaaatggtctggagcacttttccattagcgtctagtttgaccgccctagggtcggtaggcataacaaccttgttcacgacagaggcgacccagaaatttccggtagaacctaccctcctgatgttgtcggggttcgagacaagacttgagaagtcttcaatagttccagctttgggccctttaatccaatatttcttgatgttactctttatgaactcgctaactagcacgaatgaaccatctgagctcactgcacaaccagcagcaccacttagaccttccattaactcagtcacggctttggtcgctgggtcgtatttgaacagctttccgctcgcgtcttttaatcccactgcgattaacacttccctacattgcataaccaacaattattttagtacacatattaaataacatgcatatattaccatcttctataataagcatttaaaagttgattttgaaagaaaaaaatatactacaacttaattacttgaaaaaattattagtaaaccaacataattaagaacgttttttttctaataacagttttgtaaattaataattttgtcctttcctatatatatactagatttttaaaaagaaggaatttatagcattatatatgtaattgtactattgcctatctataataactcgttcataataaggttatagtgttatagatgaataaatatgtaagaaaattaaacacgttaccggggtccaaacttggaactgaaggaagtgaagtagacgacgccggtggtgggatcaacatcaagaccgtcaagaaacttgaaaggctttccgtcaacactgtccgccagctttgtggccaaacctcctgcgggagagataacgtgaagacccaacggagcatcggcgacatagagatcacctgttttgctgtttaaggctattcccgctggtcgaccacactttccggcgaaagggttcctaatgctccgttgcaccatgccgagttcctagagtaatcaaaccgattaaaaaatatttcttaaaaaatgcagcaatacaaatattttgttacaatatatatacaacaatttaaaataataatgagccagatacagtcttaagaatattagat

SEQ ID NO: 48246 - DNA, 586 bp, Arabidopsis thaliana
gaaaatgagaaagagaaaggggcggagagatttgagagagaaatagaaagaagttcaaaattcattatccactccttcatatttcgacatcacttcgaattgttgggtagttgaattgagccactgaactccaaaatccggcgaagagaaagttgcagttttttgagcgaagtgaggaacctctggcgagatagcaacttttgctatggctgggaataaagcaaacgacgaagtccgacaaagcaacatacccaggatactggtccagagaaggagaagcgggtactcagagtttccccgaggagaaaactctctccgacaaaggcaacagaggagctgggttagtatctctaatttatcgtctgttgtctttgggtgtatcggaatcgtaaagcttgtttgattaaagggttagaactagtcggaatttagcatatctttaggatggaattttgagaagttgaattggaaatttctgtttccgccaaaaatcagattttgagttataatctggataattcctgtgtacgtacaggaattcgtattgcctaattggatacacttttaattgcaggcagtacaagtg

SEQ ID NO: 48247 - DNA, 362 bp, Arabidopsis thaliana columbia
gtgacaactagaacctcatgagtggaggctggccctcgtggctcggacactcccatgcatgccgggctcgtcagcctttcattaccagcatgtaacccgtcggcccatcacagtccacattactagggagaccacagcctatagctcgattctccccagtctttcatacatcacacatacatactcataatcatacttaacatacacatacttataatatcatacataacatcaccatcgttcattatcatcattcctaacatttactctcaatcataacatcaaataatctaatcctaaacaattagatctaagcctacatatcatgcgtcaagaagcatatctaaagattatgataccat

SEQ ID NO: 48248 - DNA, 514 bp, Arabidopsis thaliana columbia
  unsure (1)..(514): unsure at all n locations
ggaaacgtcaggtcattagtagatctagttattgctaggatgttatcaaaccgttcttaaactcaaatcattattacagagtaaccggtggcgtgccgcattactcactatgtctaataactaaagattcagaatgtcggtccgcaacttcctaattcaaaacatgcatgctaatcgagtttgacacgttcacctaggtaaatacactgattgctattacacatctaaaagcctcgctcatcaaatagtagttatggtaatagatgcctttttgagtattacctatcatttaagatcaaattctacttaactactctataactagcattaagaacaaccaaagatgaaaaatcatatagatatcctaacaggtggacgatctactaaataatctataaccctaatgagaaactctaaccctaacaagcagactactcaggcatgatcatagaaacatataacatgtttgaatanaaagcataaacataactcgagaagataaaagtttagaaaa

SEQ ID NO: 48249 - DNA, 523 bp, Arabidopsis thaliana
caaaatggggtctcataaaaccgaatgggcattctgtgaggtagttcatcgtagatctctgttgccatcctaacccgtagcccctggatatttgaatcagtaatgccatcaaaagaaacaccaagcaataaacattcaagaatctttaacgggtaaaagccgcagtccctggtgataatattctgcgggacctttgtaaagttcctccgccggaatgaaaattggtcgtattgcgggacacggacttcgggagggataatttcactcatgatctgtggaatcatcctcgtgaacggcctacagtgttccaggatttttccatcgcttttctttgtatgacatctgacgatgcaatcatagcagtccacgtgacccctaggcaagtccacgtgaatggtcacccaatgattacctcctgtttggaggatagtatacaagttatccacatctgttatccacttcttgtttttcgggtcttctccaccaatccgttgatcaactttcatacgtggtactttgaaag

SEQ ID NO: 48250 - DNA, 552 bp, Arabidopsis thaliana
tgccaggcctgttgaaatccccgagagtacgacgtggttccgcagcaagaggaatagctgcaggaatctggggtttgtgtcgatcgacacctctgttgtgtcgctcgacaccaatcgcgtcttcattctgctcccaaaggtgtcgatcaatacctctattgtgtagatcaacaatgagccctgctgcgtctctggcagctaattgtgcattgaggcgcgcctgatcctcattggcgtcctcaggtgggatgagtgcatgatcatccaatctctgaccagcctcattgtaggcttgccatcctcaactctcataactccttttgcatcagctctgatgactctgtcagccattgctaatctctgagttttttggttggtgcgttcaagttttcccaagtccagaacagacaagttgatcaactccttctgttatgtgctccttgtttgcctaggcatacacctgaaacacagaaaagaagaatacaagaaacgcgtgagtaacaaagtaaaagtaaaaactagacgaaatctgtaaattaaactcaatggtga

SEQ ID NO: 48251 - DNA, 944 bp, Arabidopsis thaliana
cgtagctaaccggaaaccgaagaaaaccctaactatatataattaactcatcatcttcttccttcattttcgttttcactttctccgaacaaccaaaagcttgtagcttcctgctcctcaaatcttcttggtaactcttcttccaatgtctctcaatcgattcccttgtgtttaattctatttctgagtaatttgatttggttttggttttgtattaaaagcagaaaaatgaaggttgccgctgctttcctcctcgccgttttgggcggaaacgctaatccttctgctgataatatcaaagatatcatcggagctggtaaatttctgtgcttttgaatttgtttatgaatgtgttttgattttattggattgtgttactgtgatcggcgaagtagtagcaatgatgatttgggaagattctgtatttgctttgttttagctataagagttttagtttgattgttgaagagtataagaacagaagatagttttgttcactgtatatgattcattaaaggactttgtttgttatgttttgttatgtagttggtgctgatgttgatggagagagcattgagcttctattgaaagaagtgagtggtaaagacattgctgagctgattgcttctggtagggagaagttagcgtctgtgccatctggtggtggtgtggctgtttcagctgctccatcaagcggtggtggtggtgctgctgcccctgcggagaagaaagaagccaagaaggaagagaaagaagagtctgatgatgtaaagcatttctctctttatcattttgtttccttattacttagtctttgttatggtcttgatattggtctttatctgactctttgttataccttcacctttgatgcaggacatgggattcagtctcttcgagtaaggtttttgtcccacggaaaggagtcgagatttgattttttg

SEQ ID NO: 48252 - DNA, 560 bp, Arabidopsis thaliana columbia
ccggttttgctggcttattcctttttgcaaagatttcttttttgtcttctacttccatccaattgtttgctcgaaaaagtgcatcttgaattgtgtccggtttgtgaaatattacactaaaagaaaacaggcaaacgacgactacgaaaggcgactaacaatgtagtcgtccttttgtgcaactactttacgactgatggacgacgttacggcaacatataaattggtcattccgtagtcgtattttagcgactacaaaaattagtcggtcaatggtcgtccaaatacgactatttgacgacgacattactgaaggaaataagtagtcgtaaagtagtcgtacgtacattgacgactacacttctgactttaatattaagtcgcaaaaaaggcgacaataatacgactaccttttgtttgtcgtcaaatagtcgcataattatcgtataatatggttggaaaatgtttttcgcgttgttgggtaggtatacctaattttgtagcgactacagtgtgtagtcgtaaaatagtcgtaaaaatcctctatataatgcacgaca

SEQ ID NO: 48253 - DNA, 595 bp, Arabidopsis thaliana columbia
tcggaaagtccaaagagagctctccaattaatgaggaaggaaaatggaattcttctattgttttttttttccactccaaattttgacattaatgtaatttttctggccttttcgtgttctttgctatattacggggcaaaacttatatgttcggacattgttttcaaatattttgcatgtatcaaagctcttataaacaagatagggtattcctacatagctggtgggatccacgacaaatagatcataaagtattcaaaaaaaaatagacacgattgcattgcatgtagtaacggatgctatcataacagcactaatgcaccggatcccatcagaactctacagttaagcgtgcttgggtgagagcagtactagtatgggtgacctcccggaaagtcctcgtgttgcatcctcttttttttcggtttttctcttttgttttgttaaaaataaatgactctataacctttagactgtgaggcaaacttggcatgtgatacattttcagaaagcccaaagagagctctccgatgaatgaggaacacaatggaagtcttctattagtttttttctaatccaaattttgaccttaatg

SEQ ID NO: 48254 - DNA, 537 bp, Arabidopsis thaliana columbia
agtggctctttttttgtgaagagagattccagcaatttggtccttgataatctttcttgcttttcaaaatcctccttctcttgctctcgatccttctgccttagctcccaatccttctgctttatctcccaaatagactgaatctccaacatcacattccctttgtcttccacagttgttgtcttactcacagccttttttgctttcgcctttgcagctttaacaccaataggacgagacattgcttcttctgcttcatgggtttgtggctgggaggttgaagccttgtcagactttcttcttttggacattacagttgctttagtagaaggagcagagagccatttctgttcaaagcgacgacctctccaagcatgctcaagggtgaacttaccatgttcgctgttgtagatttcatgtgctaatgcaacgacatcatcgtcattctgtccactagatttctgctttgttgcagcttcatagctccctacaaacttgcctacaccttcattgatcttagtcacctctgctttatgt

SEQ ID NO: 48255 - DNA, 999 bp, Arabidopsis thaliana
taaatctattgtggttgcctaatgtatacagaaattacctgtgcatcaatattgcaataatcaagagtcactctcttgctgcgatagatgtgaagttctcgagaaagctcttcattggcagactctagtttcatgattttctctcgcattacctttaaaattgaaatctatactattattgatgagaagtttataaaccttttgaagaatatcagcagaagttatatacctgcactgtcctctgatgaggttgccccacgagcacaaagtgtagcttgtagatattgtagctcttgacgcatcttttgcatctcagaacatattaagtctttattggcctgtgcacccaaataaagaagcctttcctgttagtgctccgaagtgaacaatcttagtcctgttttaatctattttttggcctcatgtactttttgtgttagctgatagcgtgatagtggagttctgtatgcagaaaaattgaaagctcatctaagatagttccttggtacttacaacaggtttgttctggatattccgagcacgatttgcatacttgagcgtgttaagagtttcctcagcattgatgtcagcaggactgatgcaagctacaagaataacacaaacacagagagaagttgaatctgtgaactgataagagatttccaggggattacctcatacaactaagaagtttacctatcatgactgttttactatttccaccaagagaatcctgcagtaatgtaaaggacatctttaatggaaaatttgtcacatgaatcatatgtatgtatagttaaatgccagtaaagatactacagtgttacaaatcatatgtatagttataatatgtacagtgttacacatatcaggatgtagaagtgcaaagatagaaatgaacctgcaataaccgagtaagtttactatcgcggtatggaacatgtgcaccttcttttcgccttttctcatccccaagcgcactgataacattaccaagtg

SEQ ID NO: 48256 - DNA, 363 bp, Arabidopsis thaliana columbia
gagtgtaagagataaagaggtaggcagcaattctctgttgaatggtgatttagggtctcgacccctcttcttagtagtgtctcctcctatttataggcaaggagctgatctagggttttcttactctctcttgcgatttctcctttttgcccttttaaatttatcgggctgggcgagccgtgatgggccaagttgtgatgggccgagcagtcattctgatgggccgttcctccttgttagaaaccttcttgacttgttttatttgtgcttgggccgaattgggcatggagggcaaagccgtatcccacaattagtcccccccccgagttcggcgagagaaggttgcttgcgagcggcgaatat

SEQ ID NO: 48257 - DNA, 582 bp, Arabidopsis thaliana columbia
tcatcccctaatcttattttgagtttttgttggtgataattgaggcaacgtagtgtttactcaatcaatcctccatggggaaaaaacaaaaacaaaaaaaaactagtcgacgagaggattttacgggttgatgagaggaaggagacgagaccatcaatacaaaaaaatattggtagtctttcattacatacataattgtttcaagttttacaggaaaaaaaaccacgacaggaaagagaaaagaacaattccatgaaatcaaagttgtaataaaaagaaaaagaaaaaaaatgttgtaatgcaaagtggtttgggatttcataatgattaataaatcggagtggtgttgagagattgaaagctcttaaattggtggattcatgagtaaagaattgaaactttgcatcggattatgattaatacgtatccattcatatatgtatttgccaagtcttaagagttgtttggtttgaccgtttgtggttattattttggatatatatattcacgttatatccatttgagtttataataatcatgatgaatagcatataacaagaagaaataatgcaaaatgaagac

SEQ ID NO: 48258 - DNA, 684 bp, Arabidopsis thaliana
tcaaagacttttttttttctttttttctgggtttaacatattgaacaaaaaaatatatcaaactttctcttgttcagacaaaaaagaatcattttttttacaatgagaactatttcacaatggagtctaaagaactgaactttgctccaattgagtgaagatgattaaaattagagattgtctagatgaaatggtgaagttcacactcgattactgtgtagaattcgatatagggcttaccggggagttctgctccggccttctgtgcggcgaatcagttcttcacgacggtgaacgaatcgaatcgtcttcctacgctttgctacaccggttttcaggtgccccagaatagccccagcacactgctcaagccggagcgctccggtcttctagtgagacaggcaccttcacatccgacatggctggggagacgaaaggttcatttttttagggtactcctgggaacagatccagtggagacggggtggggcttgtagctcagaggattagagcacgtggctacgaaccacggtgtcgggggttcgaatccctcctcgcccacaaccggcccaaaagggaaggacctttccctccggggggtaggaaaacatgctcgggatagcgatcgggactcaaagctatggaacttggggatgggtcttttgtcgaaatagagtggagtga

SEQ ID NO: 48259 - DNA, 1201 bp, Arabidopsis thaliana
ccctcccacaagccactgctgattgttggttttgggttggtatatggtcacatagctatacatgttttacagagattagagtcttaacatgcttatgtccaaaataaggctttcaagacactctcgaaactcacctcagcagcataagcgagtatgcgttcttgtgtttgattctgagtcaattcgctctccatccacacggctgccatttcgcaagcactgcacatcgcttggtttaaaagacccgatgttccatcgtctacaactgactggatccccatactgcagacagacatgaatcagttttatgtttgacatatttgttttgactggatagtgtcagtactgacctcacactctgtgtaccatcataagcgcagactccaatttgtgagcatactttcttcggatcctcctgcaagtcaagtgatgtaaaattcaagattgtattgcttataaaaatgtgaatggtgtcatgaccagtgatttaaacctgagctagaagagaattcaacatggtttttccgtattgatccaccacggccttgcattcacggcttacaattccttgtgctcctatcgcgtgattgatcatcgtgatgacagtctaaacaagcaaatataaatattcagcatgtttcaggtgctaagtagtgtacaatctacaaaagtttcagtgaaatgattctcaccgatggaccggtgagcagagaagttccggaatcagcaatagcagaacaacctttagcacaatatcctgaataacatagaagtcagatgtcatatcataggtaaaaggactcatttatgttgaaactgaaacatctcaaaagcttacttaccggttggtttgccagcaatttggagatcacccatgtcaaactgccagtaacctttatgtgtcacaggtactaaagtatgctctcctttgaagtgcttcgggtcgactccactgaaaacattctcaccgccttctggatctttcgggttacggttaagccagaacgataaaatcggttccttaactaaacctttttctaccatgttatacctacacacatcatataaatttcatcattcagaattgcaacaacaattctttcatcagattatagatcaaaaacgttttcataccaaaccggagttgagtttcctacagaaatctctttgaaacccaaaccgaggataccatcaaactaag

SEQ ID NO: 48260 - DNA, 570 bp, Arabidopsis thaliana
tttgttgttgaatttgtagaatcacagaataactaaacaccaatttaaataattccaaaattcgaaaagtcttgtaattgataaaactttgcagaatctgaatcacatatctatattacaaattataaacaacaattaaaaaagaatttcaagaaactaatattgttgttcccttttctaatacaagaactttaaaaaaaacatgtaaatgatcaaactaataatttgcaaaaccaaaaaaaaaaagccttaacaaaaaaataataatctcaacctctatacaatggagaccgttgttgaaatatcatcttcgagactcgagattgccggaaaaccttgatcggactcggaaaattccagcctttacccttcccggtcgccggaaccggaaccggagaaaatccaaattctccggcgaccgcaacggatcttgatttcttcataatagccggtttagtatctcctctgtttcccataaaaattctccaaaacgacgacgttttcttactcctaccatgatccaaaccggaatcaataaccgaatccggtttaatcgggatcgccatagat

SEQ ID NO: 48261 - DNA, 574 bp, Arabidopsis thaliana
ggtgttggcctatcattggtcctgaggtcactgctgctgtctcagaatttttcaagtcaggttagatcttgaaacagtggaatgctacgagtctcgttcttatcccaaaaataaccaatgcttcaagatctacagatttcaggccaatttcttgccttaacactgtctacaaggttattgccaagttgatcgcttcaaagcttcaaactattctctcacatgttatctctccctctcaatcagctttcatgccgggaagattacttgctgagaatgtcttgttagctactgaacttgttcaaggttacaatagaagcaacattgagtcaagagcaatgcttaaagttgatcttcggaaggcttttgactcggtaaattgggattttattttgtctgcgctgcgtgccttggacattcctgctaagtttattggttggatcaaagaatgtatcactactcccactttttctgtgtgtgttaacggttcctcaagtggctttttcaagagttcaaaagggcttagacagggagacctgatctctccttatctctttgtgcttgctatggaggtgtt

SEQ ID NO: 48262 - DNA, 536 bp, Arabidopsis thaliana columbia
gtcttaacagcatcttatgcgaacatttccattcgggacttgtaacaccccgaccatcatacttagtgggtcccacattctctcttggtctgtgggctcatccgtatcggacgaccggtccactatcagaaggctttaaaggcttgtttaatgaacctacaaatcactacatgatctttctctatattttgtcctcactcacacggttctgacaatcacttctccgaatatcacctattctgaaattgctccagcataagcacatttaattgtggagttctttttggatatttgaccggaaatatatgtgtactttgttgacatagatgatcaaaataattcttttaaacatctatgcatgaattaccatattcttgaaaccaggatgttacaaacacccccactagtaatagctcctaaaagaaaatgaaaagtttttttatttttgtaaaaaaaatgagaaaatcataaaacaaaatttaactcgatagtggcatatgaaccgccaaaacgagaacaaaattacagttcccaaa

SEQ ID NO: 48263 - DNA, 872 bp, Arabidopsis thaliana columbia
aaaattctctgcgtccacatcggcttgatacattggtctcttccccattttccacacaatcccttcagctaaatgttctttgttcggtgtcagcattacaaagtttggatcagctctttggtaactgcaatttcacaaaataaaacaatgtgaagaagatcatgaagctaaagagggttgatttaattttaaacttgtcacaaatggactgacctggcttctcttaagttatcaacacgtagaccgaacccacattggacatttccagtcctatgattagttgttgctgcataaaaaatgagtccaaacatgttcaaataccaagaacctatgttcatcttgatttcgctgcattcaggttatttatcaacgcatacctgaaatattgaatgcgaaagacggtttccaccacgacttgaatgctaatgacaatgttgagctatgagctccgactttaccctgcaaaagttgaaaatgttacatactgagcaaaatttgagataaatggtttctttttgagtaactcgataaggtaaatatttttttataccttcagcaaaaagttcttgttggcctgccaagacgcagccacctgcaataaagaatctggggcattgggtggcgtcttggaatcatcaacccttcaatattaagacgaaatataaagttctgtttctgtatagacaaacagtagctacaatgttttttttttttttaattagagatgttcactacctcgattgtagctcaaaaccaaaatcaatgtagtttgtgattccactacttggttttctcgaaaggattttgcacctgtccaagccattaatcgattcatattgaccaaagatgtgctactttatatatggagctag

SEQ ID NO: 48264 - DNA, 430 bp, Arabidopsis thaliana columbia
ccctaaaaatatccagggactaataatgcaaatagcggaagtcttctgaggcaaatttcctctactataaactcgaaagcgtctaggacttttgctgggccgacactggtgtcgatcgacaccaagagtgtgtcgatcgcattcctcgctgattcctgaatttaaattcgtccttagcttcctttcctctagctcttgctccaaaatgtttccttatctccattgttgtcctacagcatagagtacctgaaaagacactaaaaagactcgagaaataaaataaagactcgaaattctatacctaaaacatagatagaatcagtgaaaatcgggttatatcagcttgatcattccagccgaatccatatgcctaacaagtctaatcaattcctaaccaccatgtaattctccggaggcttacacgacattc

SEQ ID NO: 48265 - DNA, 590 bp, Arabidopsis thaliana columbia
attttgtattgcattgcatagcatacttacatttggagtgatttacaggtgaatcatgtacttttggatttaacttgggagtttctagcacaaggagtggactacctcgagtttgtgcgatccaaggaaggacatggagtatactcgggatatctactcggctggagatcgagcggagacacaagggagaaggaaggattatactcggccaatctactcggctggagctcgagtggtgcacatgaggaagaagggaagctgctcgattgaagctactcggcctgaagccgagtgatgtgaccaaaggaggctactcgacttttctactcggccaagacccgagtggtgcagcgccgactttcccattttgtcttttcccaattagggcatcctagtattgcctattaatagacctcttatgtttttgccaaaatatctttgctttgtctactggatattagggttcttagatttcttttgcattttctggttgttgtgctgagaatctgaatttcatttcttctgcatacttgtttatcttattgaaatctatcatttgctaagtttataatgatttctgggttttatga

SEQ ID NO: 48266 - DNA, 1221 bp, Arabidopsis thaliana columbia
tagataaaacatttcggagcgatgatgctaatggaggatgttggcacaacatcttcttgattatttgacagactatactaaatcaaatatcctataacaaaagaccaaacaaataaaaaaaactatcaattaattaataataattaaatatatagaaactgataattagccaatcatatattatttttttattttatcttatgaatttaattatacatagatatacatttgttcttggaagttttccggcgttatatttctcaaacattgtatgattcaaaatatataagaataacaccaactagtaaaaaagtaattgtactcgccaatttaaacatatattaatgtgtagcacaataataagattgacgacacaattttattagataaacaacaacaacgacaacatcaacaagcacaacatgtaaataagaagttcagaaacactcaaaaatgagtagaggatgaagctggataaggattcttgcgaacgtacttacgagcccaaacatgtttgccatcgatggtgaacttgtttctaaacctcgcactcacaatctcatccatcatcgacgcacactgcagtttcatcaccatcttcgcaaacaatggctgctcgtttgcttcaacttcttgcatctctaccgcttctatcacttccccgaatctcctagtgaagtaaacccttacttccgcttccgagatcggatacccttttgaaaacgtcaggaaaaccgtccgatcatctgccgccagcacaccttccttctcttttacctccattgtctctttctctctaagggccttttctgtttcgtcttcaactggaggatgaggacgaggaggaggaggagaagcaatttttacttgttgtacacttaacctattagatttttcttgttggagactcaacctgagtttcttcatatcctctatgaatttctctctctctaaagccaattgtttctccctgttgatcctatgagctgtctcgcataaatctgagaatgctcgagtgcaaacatcggtccaactctttgtcactccagcgcaaaagtttttgcgttgttggttgatcaatctgagagtaaactttcctccagtaatacgtaagagcaatggtatcatggagttatcatcgttgtcagcagcgaagaacgttgatgcaaactctacgttgtataacaaatttatacacacaccgatttcgttagccaccgc

SEQ ID NO: 48267 - DNA, 614 bp, Arabidopsis thaliana
ggcggcgatctgtaattttgttgccgctctgaccttcggtgctgaagaaggttacctagtaaacgtccgttgtttcgaagaaatgacgacgttgaaagctataaggtcgcccggctattgggtggtgaacaaccgcccaaagcataactttcttcccggtcctaaaatcagtaacttcaagaactgggaagaatattacttctacgtcagggtcgacctcgagtcgtatgagcgtccgttctcggggaggaaaaggatgtggacggagtttcctggtaaatttcttttaaatagatagggtaaagatatgtcgatcccgactagattctcatagctttttcttgttgcagatcgatacaggcctagtccggatttcccgtcgagttcgaaggagttatagaggcgatcttccgagctcgtcgtcgtacctggaaagacgtcacgaggtcgcgcgtcaacaggataatggggaaggtcaggaaatccttcattagtttcgatgctgggcttttaaacatgccaccacccccaagctccaccgaagaggaaagacagcctttagacggagaggcagctgcgtcaaatcctccgctagtgccgcccttccgatgttg

SEQ ID NO: 48268 - DNA, 624 bp, Arabidopsis thaliana
ccccatgagatggcgagaaccagcagaatggttgaattcaacaacagagaattcaatctgagtagaaacctccccgtcttgaacatcacagtccctagtgattaagtcagggacaggtcgagttggcagctctcgatcatggcagaaagtgatggcgtgagagttgcatactcctttggattctgtattgacttcccaggaagtcctgtaactttaggtgtagaggtagatgctgattggcgttccaagtatctgactttggtgttcaatgcctccactttggcattcaggtaattgtagctgcaatccagcttgtggtgcaatttagataacttcttagcaatttccatggagctagatgcttgtccctgtagcagctgttgtaccatctgtttcatttcagcatcaggagcagcaggaccttgtttttgctgagctgcaaacccaggtggtagttgcggctggtagtccccttgaattgctgcttgggaacgaaaccttggttgtagggaacaaaaggtttgttcggacttgttgttgctgtggaggatagacttggtcttgtggattagcaacgttggtgctgcggtaggagaggttcgggttgttagctttgaagttgtt

SEQ ID NO: 48269 - DNA, 619 bp, Arabidopsis thaliana columbia
taaaaatatacaaaaataactaaaatatccaaaaaaatcctaatattttttatatataagtataaataaaaaaaaaatatacagtacttatatttgagatatgtttgggtacctattcgggttcaggttcgggttttttgggttttaaagtttagacccgttcaggtattttaaaaaattcgggtttgggttcgaatcgggtttttcggatcgggttcggatcagttcttttggttcgggtattatgcccaggcctaataactcccagtagaccgctcggatcgaggcaaggtcggcttctttggaaagctgaatctcggggaaatctgtagataggtatatcgtagcttatttcatcaggagtttcaaggaaacgatcccgaagctgactggttttatagagttggatcttgtgacaaactgcacttgcctgagataaacgtttatatatctcatcatatatcttagattaaggcgaggtcgacttttccgaaaagatgactctgtgggcgatccgttgatttattactcctcatgagattctctgtgatttgttgggaaatcggccctaggcgagctggactattccgacggattatagtttactctcagcagatgt

SEQ ID NO: 48270 - DNA, 461 bp, Arabidopsis thaliana
atgatttactccctattatattcggatatattggtggttaattgcgtggattctatcacaaattgatggtctcttgctcttgagagcaagttccctttgtattggtaaagggagattcaatcaccaagtgattgtctactctctcttgtgagctttgtctcataaaacctaacatatgtgtgcgttgaaacggggatgggcgcgtgattgcgacaagctggagtggatgactacaacagtttggaatgatttggttgacatgtttattgaatttggcccagatgatgtcggtttcatatctttaatgcttttgtatctcttacttgtctttcctatgaacttaaaatgtaatggtttaatcgtcttctctataaaatcacttgttgtcacttgttaaaatttatcataaatcaggcgtaactaaaacttaactcaaccatatgaatagcttactctaccat

SEQ ID NO: 48271 - DNA, 531 bp, Arabidopsis thaliana columbia
aatatgctaaatcatagtttaaattttatgtgcactaatcataaacaattaacatagttttgttaagaaaattgtattaaatctaaactaaatgagaatttgttattaaattagattgaagtttccgatttatctaataacatattaccaaaataaataagtttacatatatataattaaaattaaaatagtctgatatgttatggaaacgtttttaaatgatttccgaaaatattgtgtagatattaatttattgatttaattcgttttttttaaagcaaaattcaagatatttatttagttgaagtagttgtttatttactaaattacccatgaaaaaaaatcatttacttagttttaaacctaccttacaatgttgtagttcacacaatgcttcccaattaatagtatagatacaaaattatttgtcataaatatctatatatacattttgtatcacttttttgaagataatttttgagatttgagccataattcaacaattaattcaaatgggtgggtataaccggt

SEQ ID NO: 48272 - DNA, 619 bp, Arabidopsis thaliana
tgaacgaatttgaagatgtgttcaagcccttggaaggattacctccaccgagaaatcatttgtttaccattaatcttgaaccgggggtgactccaattacaagggcaccatataggatgccaccagttgagcttgcagaacttaaaaaagaattggaggatctactcgaaaagagatttattcgtccaagttcatcgccatggggagcttcgatattgtttgttaagaagaaagatggaagtatgcggttatgtatagactaccgaggtcttaacaacatgaccataaggataagtacccattgccacgagttgatgaactattggatcagttgagaggagcaagttagttctcaaaaattgatctagcctctaggtatcatcaaatttcaatcttggagctggatgtaatgaagactgcctttcagacgaggtatgggcaatatgaatttgtagtcatgccatttgaacttacaaatgcacctccaggcttcatgagacttatgaacgaggtactccatgattatttggatagcttcgttatcatatttattgatgatatcttggtatattccggagtgcggaagagcatcgtgaacatcagtggaaagtgttggata

SEQ ID NO: 48273 - DNA, 507 bp, Arabidopsis thaliana columbia
tgaacagtctgaaaaaagctacttcttggttgtcggctccaatcatacacttcattgcccagagtaaagcttcgacttctgtgtggagaggagaaagacttctacgcagattagcagctcccatagttgatgaccctccattgactaatgagcaaaaccaccctagacctgaaacttttttgctttctttccatgaaccgtccacaaaacaacgaaggccagagtacctattatcttgtgagttgtccctcacccgaacttgtttttccgatcacaaggcgatatggttttcattgttgaactcaacttgaactaactgccacgattgtgcctctttttctgctagacataacacgtctaacggatctttttcgacattttcaaatactttttcatcccgtgctttccaaatatacaaaattatccacggatatgcgaatgaatcaaaatctgaaggaattcttgagaatcagtgatcaaattcacataatagagtctgtgggaaaa

SEQ ID NO: 48274 - DNA, 700 bp, Arabidopsis thaliana
ttcagtcagcaaatatgagtggagcaactgcgggctacagaacgatgctagatgcgctcatcccagcttcacaagttcttgaggaggtgacaaagagcaacttactttctttcacaatttagataattgcaacctgcgcaagtagtaatgagtttttgcttttgataagaacagaaactgagcgctggagaggatccaatatctgctttcattctatcaggcgaacggcaactgccggagcggaatcaaccatacagatgcaagcacaggtgagtttagcataccattatttcggtctgccattgtttatgctataagtggttttcatattttgaaatgacggatgagattgtgtaaaacaggctgggagatcaagctatgtatctgcagagaatcttgcaacggttccagatccaggtgcaatggcagcagcgggatggtacaatgcggcacgaagagccgtaaaggagcagtatgagggctcgtcatgatcccttctccggagtttcttcttttatttcccggatagacgaattgggattctggtgtatgtacgtttaaaagatgtctgactttgtgagggcgctctccgtttatgcaatttttttggtggtgcgtaatactgtgagagtttagaacttcctagagagaacaagacttatattggtattttgaattcttaattttgtttattctgtag

SEQ ID NO: 48275 - DNA, 565 bp, Arabidopsis thaliana
tcaagcggataatggatagtgagaacataaacatctggaaatcgtttctcaagactcctgcttccattgcactaataatctacactttcatttgcgtctggtttgttggtgggcttacctgtttccacttgtacctaatgagtaccaatcaggtaaaaatcattactctctaaaagctccttgttttgaaactgttggataatttagctacttgttaacattgtttctctgttgtttattatgttgtgatttggcagtcaacttacgaaaactttaggtatcggtatgatagacatgagaaccccttcaacaaaggaatagtggggaactttatggaagttttctgcacaaatgttgccgtatctcagaacagtttcagagaaaaggtttcaaaggagccagcaataccaccaaggacagtaaatggagggatgtcaagcccgagcttacagaaagtttccacgacatagagatggggagaaaaccagtgtggcacgagacagtagaagaagagctcggtgacatcgaaaaggacatggaagcaggggttgcatcacgggatttg

SEQ ID NO: 48276 - DNA, 510 bp, Arabidopsis thaliana
ctctagaggatgacgccctccaaggatagagttgttctcatactcagtatttctatctgccttttcctgaacttttgttgtcttcttcaaaaattcactacagaattggatgcactcttcagctaagtaacattcagcaatacacccttcaggtcttgctgtgtttctcacaaaatcctttgaggactttcatatatctctcaaaagggtacatccatctgaaatgaactggtcccgctaatcgagcttctctccctaaatgaactgtcaagtgcaccatgatgtcaaagaaactgggaggaaaaaacctttcaaacagacaaagggtttcaacaatctcagcttccatttccaaaagttgctccatatcaatcactctctgacataagtgattgaaaaatttgcataagcgtccaattgctaccctaggacctttaggtaacaaccctctcaaagctattggaagaagctgctgcattaagacgtgataacatgtgattcaatcctgta

SEQ ID NO: 48277 - DNA, 954 bp, Arabidopsis thaliana
tggattctacgtttagtaattgtggttccaatgattcggtttttgatttgttgattaggacttatgttcaggctaggaaacttagagaagcacatgaggcttttacattgctgagaagcaaaggttttacggtttctatcgatgcgtgtaacgtcttatcgggagcttggtgaggatcgggtgggttgaactggcttggggtgtttatcaggagatttctcggagtggtgttggtattaatgtctatactctcaatatcatggttaatgctttgtgcaaagatggtaaaatggaaaaagtcggaacctttttatcacaagtgcaagagaaaggggtttatccggatattgtaacatataatacattgattagtgcctactctagtaaaggtctcatggaagaggcatttgagttgatgaatgctatgccgggcaaagggtttagtcctggtgtttatacttataatactgtgataaatggactgtgtaagcatgggaaatatgagagagccaaggaagttttcgcggagatgttaagatccgggttgagtcctgactccactacctacagatcgttgctgatggaggcttgtaagaagggagatgtggttgaaacggaaaaggttttcagtgatatgagatctagagatgttgttcctgatttggtttgctttagctcgatgatgagtctttttactcggagtggaaatctcgataaggcattaatgtattttaacagtgtgaaggaggctggtctgattcctgacaatgtgatctataccattcttatccaagggtattgtagaaaaggtatgatctctgtagctatgaatttgagaaatgaaatgcttcagcagggttgtgctatggatgttgttacctacaacaccattttgcatggcttatgcaaacggaaaatgttgggtgaagcggataaattgttcaacgaaatgac

SEQ ID NO: 48278 - DNA, 735 bp, Arabidopsis thaliana columbia
gaactcatccgagtgacccttggtcctgggtaaaagaggccaatggacatggaaaacagagaactctgtctatctaactaggttaggtccagttttcgaagatttaaggggtccaccaaagtacatgctcacacagatttcaggaagcaatccactcaagcaacaagatgatcggatcatcgcatcagatgatgaaaacgaagatgctgaagctccttgcatacagaaactctttggaatccttagaatttactacacatttctcgaaactgtgaagagggtgtgtttggggattattgctggtgctttccttgacaatgaaactgcgaaaactccgatagtggtcttgttgagcatcacttcctttcagctgtttttccttcttctgaagaagccattcatcaagaaaaaggtacagcttgtagagatcatctctatagcatgtcaagtcggcgtattcgcctcatgtctaatgctcttggcgaaagactttcccgaggcaagcggaaagaaactcgggatattcatggtcgtattgttcttgattggattcattatgctgatgtgcaacgaatggtactcattgtacaaacaaacaaagcggttagaccaaatcaacagatctttcttgagtggtcttaagatgtttatcattggacttgccgcgttaatcctacctcagaaaatgatcaagaacaagatccccgtggctcaactagaagcacgaagcagcag

SEQ ID NO: 48279 - DNA, 630 bp, Arabidopsis thaliana
ctaaaggtgggtgaaatggcgaaacgcgcgggaggttaacgttggtgtgggtggcaatattggcctgcctgcgttgatgctactggatgatgagtgtgaactgtacgtgctggaactgtcgagcttccagctggaaaccacctccagcttacaggcggtacagcgaccattctgaacgtgactgaagatcatatggatcgctatccgtttggtttacaacagtatcgtgcagcaaaactgcgcatttacgaaaacgcgaaagtttgcgtggttaatgctgatgatgccttaacaatgccgattcgcggtgcggatgaacgctgcgtcacgtttggcgtcaacatgggtgactatcacctgaatcatcagcagggcgaaacctggctgcgggttaaaggcgagaaagtgctgaatgtgaaagagatgaaactttccgggcagcataactacaccaatgcgctggcggcgctggcgctggcagatgctgcagggttaccgcgtgccagcagcctgaaagcgttaaccacattcactggtctgccgcatcgctttgaagttgtcctggagcataacggcgtagtttggattaacgattcgaaagcgaccaacgccggaagtacggaagcggcg

SEQ ID NO: 48280 - DNA, 476 bp, Arabidopsis thaliana
ctaaaggtgctgttccgtggctatcgggtaggttcggttgaaaccagcaccttcgatacacaaaaacgcaatatcagctatcaactgttcatcaatgcaccttatgaccgactggtgaccaacaatgttcgcttctggaaagatagtggcattgcggttgatctgacgtcagcagggatgcgtgtggagatgggctcattgacaacgctgctgagtggcggtgtcagctttgatgtgccggaaggtctggatttagggcagccagtggcaccgaaaacagctttcgttttgtatgatgatcagaagagcattcaggattcgttgtacaccgatcacattgattatctgatgttctttaaagattcggtacgcggtctgcaaccgggagctccggtagagttccggggtattcgcctgggtaccgtaagcaaagtgccattctttgcgccgaatatgcgtcagacatttaacgatga

SEQ ID NO: 48281 - DNA, 750 bp, Arabidopsis thaliana
cttctgttaaaatcttttgatagatcttcactctctgaaagtcaagatcttagtctaggcaagtaaatatgtggtaaagcaaagcccttcttgaaattggtcatatatggctggtggtatcggaaaatggcaggatttttctcgttaggacacggcggaggaggaaacactccagacaaccacagaacaaacactaataatccttcttcatcgggaacagaatcttggctttggtgcagaaaccctaactctaacgctgacggtggagaagctggtccttcttacaaaggaacccttgagctatggcaacacccaaacaatcaagaaatcattttccagcagcagcagcaacagcaacaaaggctggatctttacacttccgctgcgggtttaggtgttggaccgagcaaccggagcttaattgaaacttccggcggtgcgttgatgatgatgagaagcggtcgggtacggcaggaccaagctgccaggattgtgggaatcaatctaagaaagactgctctcacatgagatgtaggacttgctgcaagagccgtggccttgactgtcccactcacgtgaagagcacgtgggttcctgccgctaaacgccgagaacgccagcagcagctttctaccggtcagcaaccgcagcaactgggagggagcgtccctaaacgacagagagagcgtatcccggcgagatcgacttccatggcctacactcgtataccttctaacaacacttcaggta

SEQ ID NO: 48282 - DNA, 572 bp, Arabidopsis thaliana
ggagacaacaacagcaacggagatccgagttttggatccagacgtggggtcttagcacgctcattatatttaggactcccgcttcgttttgaattaccaacttcagctacggatgctggtcgatcatctagtccatccattatcagaacggagatgatcttgtctgctgctgatattaagggggggcgtcaaattacacgtacactaattactaaacgttgataccaaaaaaaaaaaaacgtacgcaaattttgtcatctctaattaatgaacagtgttttcgttttataataaattgttttaaatcagtatatataaaagtttgcaaattatatctatctataaattatttttattttatagtttactgttgttattaagtaacgtcattccaaacccgttccgccaaacccgtcccgtaaaaaaaaaccgcagtacaccgctaatttaaatatataatgaaaataaatgttttacgggcttgcaattgtattttagtttgtcaaacaatattttgttttaaatagttgtcgaaatctagttcaaattttggagaataagtttagtgaatt

SEQ ID NO: 48283 - DNA, 497 bp, Arabidopsis thaliana
agagaaaaggcaacatcagaggtttactcgggacacaaactcaagacttgttaggaatatcactagagtgtttacaaacaaatttgatggtcccttctacagctggacatgtgtgcctcaagagagacaagagaaatacttcctcgagtttgctgttaagtgttctttcagcccttcttatatatatgatgacacttctttttttactgacattaccttttctatttgtagaaaacacaccattgggatcctttgatcacaaggactgttcagtttacttcaatgagatctgtttaaggcgaataaaaggcatggttagcactgcaagaactagtcgaaagaaacctaaatggatcggaaaaactctatggaaaacaatgatagcgtactgggacaccgaagaagctcaagaaagaagtcaaatctattcaaatgcccgtatgtctgatcgtaatagtctaggtcctcacatacacttctcagggtcgaagtcatat

SEQ ID NO: 48284 - DNA, 477 bp, Arabidopsis thaliana
tgaaattttcaagtaatttaataaatttgcacacaaaatttcatatttcaatatataaataaactcgaacccaaacccgaacccaaaccgaacccgacccaaaatcttaaattacccgaacgggtcctaaacttctaaacccgaaaacccgaacccgaaatacccgacccgaatacccaaacgcatagggctaataattaattaaaaaaaacaatccacaaaaatatttagaaaccaaacattgttgaaaatatattttttgtatatgccgtaatctcgtaagttaattttacatcatgcaaattaatattaaatgagttaaaattaataaatgaaaataattgaaaagttaaatcctataagctaagctatttttctcaaaatgttatatttttcacttatgattagatgagttaaagacaaatttgttaattttccttttgttgaataaatggtaattgtttataaatatataga

SEQ ID NO: 48285 - DNA, 459 bp, Arabidopsis thaliana columbia
gtatccagcaatgcatgtcagaatggtacaatcccagcattggttgatccaaaccatatacaaacataatatttacataataaactcgatagggatggtggcccctatcaaggtgataaagaagtatggtccacgacattaaccgacctcaataccactaacagactaacagaatatggaatacatctgttggcgatgccggccgccacagattgcctaatagagctagctaaatcagagtcgcatgctgatactggtcttagcagaataacatatttcatcatgagaatcatattcagaataatcaaactgaaacaaataatcaattttcagaatttacaactaattcttttattctttttatcatactcctaaaatattatttaaatatataagtcctaactccggagttagaagtcaccaggaaaagcttttaaaactgaacgaggtgtttcaaca

SEQ ID NO: 48286 - DNA, 587 bp, Arabidopsis thaliana
aagttgttggtgtctaaagaagggattgtccagctaaatttgataagactttatgggcctatagaactgcatacaaaacgcctattggaagaaccccattccagatgctatatgggaaatcttgtcatctactattcgaagtggaatataaagccatttgagcaaccaaacttttgaacttgaaaatcaagggtgatcaagaaaaaagagcagtcgaccagcataaactggaagagattagactcgaagcatatgagacttttaaatctacaaagaaaaaacaaatgcctttcatgacaaaaagatctcaccaaaatatttcaacattggagaccaagttctgctatgcaactccaggctcaagttgtttccaagaaagctaaaatccaggtggtccggatctttcaccatcaaagaagtatgtccatatggggcaattactattaccgagaagagaagttctgaatttattgtgaatggacagagggtcaagcgttacattacagattgccctattcctgaaggaacgtacagtcacctctaggagcccatcagtgcctaaaatagtaagaagtctagcttaagac

SEQ ID NO: 48287 - DNA, 473 bp, Arabidopsis thaliana columbia
agctgagtaatttaaatagggaagtcgaaaggttcggtcattttacatgttacggctaagttatttaaatagggaagtcgaaaggttcggttaatttacatgttacgactgagttatatctaaattatattactttacgagagttatgtgggtttacggctgagttatatctgaattatgttacttggcagctgagttattctattatacgggtgacttataatatagatcgaaaatgaacattttgaaggctaagacaatatgaaacttcccataaatatatgtttaagggatacataggaggaactaaaagtaaacaatatttaacttcaagcagcatgacccgattccttccatcttgcattaatcgacgaccatttttatctcttgcacttcttcaatattgggttcgacagtcacatctgatatggtcgaataattgaaaatcttcatgtgtttggggccagtatgat

SEQ ID NO: 48288 - DNA, 529 bp, Arabidopsis thaliana
tgtttacatgtgtcattcaaaatttaacttttttattgtctaaaaaaaatagaaaatcttaaaaagtaaacaaatttacatatactaatttatatgtctatatcaatacttatatgaaacacaaacttaacatttaataataagatatttataaacaattaacataaattcaacaaaaggaaaattaacaaatttgtctttaacttatgtaatcataagtgaaaatagaacattttgagaaaaatagcttagcttataggatttaacttttcaattatttttatttattaattttaacttatttaatattaataaacatgatgtaaaattaacttacgagattacgacatatatagaaactatattttcaacaatgtttggtttctaaatacttttgtggatttgtttttttattattattaaatcttagccctaggcgtttgggtattcgggtcgggtatttcgggttcgggtttttgggtttagaagtttaggacccgttcgggtaatttacgattttgggtcgggt

SEQ ID NO: 48289 - DNA, 593 bp, Arabidopsis thaliana
cagacaggtatgcttttaattgcttgaaggcttgttcgcagtcctcattcaagttgaactttttctcctttcggaggaggtgatagaaagggacgcatttgtcgctggacctgatatgaacctgttgagggctgcgatatggccaggtagtcgttggacctcccgtgccgtttttggtgatgacatttcgatgaaggcagcgatctactaaggattggccttgatgcctctttcggttactaggtatccgaggaattctcctgatggaactccgaaagagcatttctcggggtttagcttcattttgaatttgtttaggattttgaagcattctcttaattgtgggacgttgtctttttcgtgagctgatttgaccagcatgtcgtcgatgtagacctccatcgttttacctagcttgtcagcgaacattctgttcaccaatcgttggtaggtagctccacattttttaaccaaagggcattactttataacagtaggtgccttggtcggtaatgaaagctgttttttcttggtcatctcggcgcataagtatttggttgtaccggagaatgcgtcatgaaggcaatagtctt

SEQ ID NO: 48290 - DNA, 462 bp, Arabidopsis thaliana
tcgagtatcatcacgtccaccacatcaccttcactcgatcacactactcaaccacgtggtcgagtaccttcatcaccttcactcgatcactctaccaccaagccgagtaccaccatccctatcactcgactacatactcgactgccagcttcagagtcttctccattttgcactcaaccagacactcgagcagaaggaagaaaagaagactccagcttatcactcgaccactcactcgaccacctgggtcgagtgccgttcttaatccgtcgtaatactacgtcgttttgagtattagggttttggaatatttcgctataagtagcatgtactttatattttagtttatctaagttttattcgcagacactgtgttcttgactttttgtaatcaggatttctcttaatttattcggtattcagcattcgcttttgatttcgattactgttgttcacctgtta

SEQ ID NO: 48291 - DNA, 486 bp, Arabidopsis thaliana columbia
  unsure (1)..(486): unsure at all n locations
caatatttcaatatatatttatcatatctttgaaatatccttatgactctctttttgtttaatgcctatcctcttgagaatatcttcctaaacactttgagacgtgcatactctttcatatacagatcgatttaaagaaaaataatcttagcaaacgacatttccaaattaagggcctgactggtttaaacacagcggatgcggttgcgattgcgggagtttgcggaaacggacggttgcggttttaagcgttatcaagagttttgaacgactggttgagcgtttgataatgggtgcgtttgcggggtttgactggtaaaccagcggatgcgatagtaattaaataaaaaataaccaaaataaatataatatattactattagaagagataaaaatacaatatattatgacacctttgtgggangagacaatttgattctctgaccaaataaaaatacaatatatcatctcgtccgaccaaatgat

SEQ ID NO: 48292 - DNA, 955 bp, Arabidopsis thaliana
tccccattacctcacttttcaaatctgaagatgaatctaaacagatcaaggatgctgtaaacgcgtcttcgtacggaaaggacttcgttcatgctgctctttctgttgatcaaaaggtatactacgactacttctttagctggtctaaaaacctctttcctacttcacagtctgtgattttcatctctcatctgaccatttaataggcccataaaaacctctgtaacactgaaatttatgagccttgcaactaaattttgtcaggtaacattgattcacctcgaagatcagcctcgtccaggggtgtcaggagttatagcagaacttaaaagctgggccagactccgagtaatgatgttaactggggaccatgattcaagtgcttggagagttgcaaacgcagtgtgtattaccgaagtctactgcaacctaaagccagaggataagttaaatcatgtaaagaacattgctcgggaagcaggtgatcattcattactctcgccatagttcccaatcaaaaacatctatcaagagactgagaatttagagttgtgatttttgctaggtggaggtttaattatggtaggagaagggattaatgatgctccagctctagcagctgcaacagtggggattgttcttgctcaacgagcgagtgccactgcgattgccgttgctgacatcttactgcttcgagacaacatcaccggtgttccgttctgtgtcgctaaatcccgccagacaacatcattggtagataaaacataaaagtctttgttcttaaccagtttcagatgttagattgcctgatttaacaagaatgtatcatgttgcaggtcaagcaaaacgtagctcttgcattaacatcgatattcttggccgctcttccttcagttttagggtttgtccattgtggttgacggtacgtaagctaataccactacaagcttttgtt

SEQ ID NO: 48293 - DNA, 840 bp, Arabidopsis thaliana
cacaacttagctgtcttgaagactcggtcgctgtaaccgtcaaatatcggcggcaaatctcggagtttcgtcggagataaaccggggacgtaatcaacaacctcttcttctttagattccaaaacaaaccaagaatcaatactaacttttcaagaatcaatactaattaagtttcaacaagaatcaatatataccaagtttcaagaatcaaaactaattcactgatgctttacctgatggttcgaacagagcatggccatgacttatgagtagatcagagtggaggaagaaggagagaatcgtggctgacatggtccagagagaaaccaccggaatattcctttttctgccgactcgcacagcccaaatgacgtaagtgtcggcgaatattacactcggaggtggtgaattgaggctgtcaagaagcttctcgaatggttcttccaatcttgtgtagacggcatcaatgaagcctatgaagtctttggccctgacaagctcggaagggatgagattagggagagtggagaaatggatccggtcgggtttcgggtcgggtccaataaacccgagccattcttctgtgacgacgaaggtgacgtgaaggttagggtatcgacggacaaggcgtttgcagaggttcatcatagggttgatgtgtctcgacctggataaggcatgccaccacgtgcgaaattggtttggtggagatcatttggaccataggttgttcttgtgaagtgtgtgattttggcactgtgacttgaggaggtgaagaagagagtagtgggatgcaaaaaagaagttttacactaaagcaagttggtggcacatgttttt

SEQ ID NO: 48294 - DNA, 690 bp, Arabidopsis thaliana columbia
caagcttgcatctggttgcaacttgacttattattggctacggttccattattatgttttagggagagagtgaaccaacgttgattacgttcaggggggaaacgtaagcagacattgagacaactatctgtacgacctaagagtgatcgagtcgtataaagctcaggtgaaacaagactaaaactaaaccgataaccattggatctcattaattcacagtaaaccaaattgtacccaattaaaccggaaatagatagtaccatacggagaacattttctttttttgagagagtagtgagtgtcacaataattgacagatgacgaaaagaaaaccagagcggaatctacgagctgaaacacaagaactcactgttaagactcagtttcaagtaaaagtttctacaaagttcgaatgttttcaacatcgagtgaagtaaaccagatttcactgaaaaccttatcgtgtttctctctacttcacgagttttcttaatgcagattctggcgctgctcaaatcgaggtagtgcccaatcgtgctggattatgtctgaaccgtccttctctgcacccagactctgatcaattttgcaaggcaacgataccaaatcaggtatggccacggagcgaacaaaacaacaacacttagcaatcatatattcatatatagtttgattacctttgatgcatca

SEQ ID NO: 48295 - DNA, 490 bp, Arabidopsis thaliana
tgtggtgagccaagcagtagtgaaacgatctctctcatattcggccgcttagctggatcagggtgacaacaagccagacctaacttgagtaacaattcaacttcctccatcgtctcacactcgctccttactctctcgtccgctgcatcaaccactcttcctccaccgtacaaatccctaacccaatccacaagcaccatatcttcctcctccgcgtactctatcggtctcctcccactaacaacctccaacaccaccacaccaaaactatacacatcactcgcctccgtaggcgccgaagcagacgcaagctccggagccaaataccctaacgtgcccaccacgcgagtcgtgtttggagcccaccgtgctcatataacttagctaaaccgaagtccccaagcctcccacgcatctcagaatccaaaagaatgttacttgatttgatatctctatgaatcacacttgatccatccatggtggagataat

SEQ ID NO: 48296 - DNA, 658 bp, Arabidopsis thaliana
gataatgacgtttctgtagatgatgacaaaaacgcatctgattattgtcagccgaagcgaccgaagcttgacgatgaagctgttgatggtttaggtatgtctgattcctttcaaagtatggattttggtggatgcatatcgaaaagatttcacctttgttcttaatattcgttgttacggcattgtgttgtagggattgggggaactgtagaaaacagtggtgatgttgaatccaaggaggagggaactgagaaacccattgctcagagtgatgagaatcaagatggtaatcctttaattgagaaagttcaggagaccattgatgctgaggaatcggacaataagatggaagataacggtaagcctgaggataaccaactagttactcctgaggttgtaacctctcaggacgtttctgttgaagaaagtaaggaggtgaacattagcggttcacagaatgaaggtgaggatgatagtaaggaaacgaatgatgttgttgctcagaaagaagttgaaaacggaagcaaagaggtcactgattgtgactctcagaaggaagatgaagcaaatgctggtggcgagagtaaggaagtgaatggcagtgtttctcatgatgagattggtgacgagagtaaagaaactcgatcatcagagtcta

SEQ ID NO: 48297 - DNA, 1024 bp, Arabidopsis thaliana
  unsure (1)..(1024): unsure at all n locations
caactccctcctaaaatccccaacatgacacaacattggcctgatttctcttcccaaaagctctctcctttctctaccccaaccgcaaccgctgtcgccaccgctacaaccaccgtacaaaacccctcatgggtcgacgaattcctcgacttctcagcgtctcgccgtggcaaccaacgtcgatcctcaccttcattctgtgaaccgctaatgctcacctccttactttcttcaacagaaacgtcctgagaggttacaacctcaggagtaactagttggttatcctcaggcttaccgttatcttccatcttattgtccgattcctcaaaaataacaatgtggggcccacgggatcttcctcggatatataactggagtctcatcactccaacgacgataacaaagaattaccaccgtccgatcataacatgaacaataatatcaacaacaactataacgatgaagtccaaagccaatgcaagatggagccagaagatggtacggcgtcgaataacaattccggtgatagctccggcaaccggattctcgatcccaaaagggttaagaggtaacaaaattattcaagaacatgcatgcacgtaaaaatatcaactcatcagatttgattacgatgcaccaaatattttgaaaaatatgattactgaagattagcgtcacatcactaaccatataatgttttttaaattgttaacaaaaataaaataaatatttctgaatgtttctacagaatattagcaaatcggcaatcagcacagagatcaagggtgaggaaactgcaatacatatcagagctcgaacgtagcgtcacttcgttgcaggtacattatacaaacattcataaatcatgatcttttaattattcaaataatttcatgattataaatttattatgaccttaaatcatttttgtggcaaaaaaactgaaattaaaggcggaagtgtcagtgttacnccaagagttgcattcttggatcacaacgtttgcttcttaacgttgacaaca

SEQ ID NO: 48298 - DNA, 601 bp, Arabidopsis thaliana columbia
aagtggcagagtggcctcatctgttacaatttagccaatgttagaaaaagaaatacaaaaaatatccatttatgtacatatatatatatatataggtgctatgtctcatctcttcatgatatatgattttctaagtgcaaagattgtctatattctatgagaaagtttcaacgagttatgtatgcaagggataatgccaaactagatgaactaaaaaagatattatttgagacgaattccaaatcgcagtacctttgaattattagaatatctctgaatttatttaaaaaccccaccaaaacaattaaaattcttaatccattagagctcccttagttaattaagagacatatcacttagatccacacgagctgcaatatcatcactgcacatcaaacactctttatggaaccaagtgtttccatatgtgcagcgatcacagagccaaaaaagaccaccatagtcgtcgtaggacttcaccttcacgtcatccaaaccttcttgtaaagtcttgatgaaatgataaaagtagttcccaatgttgcttgtctcaatggttacttatgcttgacgcacaaaaattttcataagtagctgacga

SEQ ID NO: 48299 - DNA, 545 bp, Arabidopsis thaliana columbia
ttcgacattgaaagttggtagtccaatataaaactgcagaaagaaagaaagaaagaaagcaaaaaaaaaaacagaacttaaagagttgcaaggttactctgtctcctagaaccttttgttttatctttaagaaacctagttaagcgatcaatcacttagctcgtccatcttagacgcagtaggatcacagcacatcttacaggccctctggaaccaagagtttccatatgtgcagcgatcgcacaaccagtaaggaccaccatagttgtcgtacgactccgcctgtacctcgggcaaaccttctcgtaaagtcttgatgaaatgataaaagaagttcccaatgttggttgtctcgctcaatagcttaccgcaagtaagctctttggcttctgttcctcctttatactctgtgagaaactatggacaatgccagacgcgttttgttggaggaatcgcaggtactctctcttcgccatatcatactctgtgtggatatagtcgtacgcacagctccatttgaggaactgtctgcactgaacaatgag

SEQ ID NO: 48300 - DNA, 532 bp, Arabidopsis thaliana columbia
gtgtgctctagaggatagtgtaaatgcacctgcaacacatcaactaaccacacactcctccacctgtttgtatttacttcaaaaacttaattcaaaaatccctttgcttctttccttccctctatttataaaccctagtatccggtttttattctaccacacaataccatttgcaacaaacttctctctgaatctcagtgaattctcataaaatgagagggatggtgagttttgccgtttgggctctctttgctgctttactctcacagcagctctttgcttctgttgcttccgtaaggtttgaggatgccaaaacatactacttatctcctccctctggtaagaaaccaaacattgtaactttttttattcgcttgatgtaataagaatcttcactatgcttctttcacttaactcatgcaggctcacatggaactcctccatcacacacgcctccttcttctaactgtggaagtcaccttacgacccttctccttcaactccttctcacccttcacctccatcacatact

SEQ ID NO: 48301 - DNA, 564 bp, Arabidopsis thaliana columbia
cgccagtgtgctctaaaggatttgtttcaggatctagaaaataataatctagtaatactttattagtattttaaagtatttattcctagctaggcttatagctttctctgatagtaagaagaccttgccttgtttagttatagtaattatatatcctattaatattacttatactgatataatcctatccagaactttccctgcaagggtgacctagatactatatagtctaatagcctagagctagaggaggctgggaggcagaggaagatatagtagttagtcttgtttaactacttcagcttttattatgctggttatttagcttgtatacagtattctggggtaataatttgccagttcccctaaccagctcttagggctgtcaggaatgcccaggttataggctgcaaggtttgcctctttagggggcctttgcaagcttcaagagtaggaggttagtctagctgttctatctacctggatggctgtgggggtgcactactattatcagaggaatctgctgaggggagtcctgttttgctagggaaacagatctggctg

SEQ ID NO: 48302 - DNA, 544 bp, Arabidopsis thaliana columbia
ctcaagcagatcaagtttgttatattccatatccatatacaaagaaaccaaagaacatttggctcagtgttttaaaggtcaatccaaggggaaacatttctggacaatatgaaaatactgatccgacactgttgcaaaccgaggatgatgaagctgttttgcagactacaattgaagatcttgtaatagactatccggtagcagacgtaaccctaatcatcctcgattacgatattggagatgctgaaccagaagatgaattccgatgtaatttatcgtcatcggatgaagatgaaatagaagacgaagatgaataataattgtgtgaaatagatgtataattaattatttgaataaattttgtaatatacgatgtatttgaataagtatttgaataattattaaaaaattattaaataattttaaaacgcataaggtgacgaaattacgactattatgcgactaccatgtaagatgttgggcttcgaataacaaagcccaaacccaactcaggtggtgattaatatacgactacacagtgact

SEQ ID NO: 48303 - DNA, 559 bp, Arabidopsis thaliana columbia
atggctgctcaactcaaggacttccagagcaagccaaggccaacgtctcccactcccgaagtaagaagaagcggttcaacgagctcaactgcatggagagctgaaaggatcgatcaactctgagctacatcttttgagcctcgggaagtgatctccgagttgagagagccaaggagtaggcagagacgagcttccacacgctcgaccggacaaaacgagcaaaaccctcccgcctcaacttcagcccctgcctatactcaagagagtatggacgattatgtctccatctacttcacctgatcactgaggtaacaccaccgcaaccattgtacataccattggctttttatttttctttgtgtgttttgtgttttggtcttgaatttttcctcagatttttattacacaagggactgtgtaatttaagtttgggggagggtcaagacatgtttaacattgtcttctcttttcttatttcaaattttgcatcaatctaaggcatagaaaaaaaccataaaaaatttgaaaaaaattcagaaaatgattcacaaaaactgag

SEQ ID NO: 48304 - DNA, 527 bp, Arabidopsis thaliana columbia
ccactaacccgggacataccggtctacctagttgcttttgagactcatttactcgataaaatcttaagaaaatgtgtgtccggttagcatcctgaaccatgctcttaaaccaaaaattgcaacgcccttgaatcgctctatggccggacaagacaagggcaacccggaaatgctacgatgatagctcacacagacaacccaattgaggttccaaatgaaccatccctcacgaacgcggtttaggcttttcaacccttgccatgatcatgagttttgtttgtccggacaagactaatatcgaatgatacacactctttatagggaaataataatttataacatataaatcttcttaccaccaagtatccaaaacgttttaacaatggacccttgagcatacacgctcaaatccaacaaaaaaatcaaaatcattaagttttgcaaaaagcaaccaactctataccggctttctacgtccagagcatccctctaatggttccactaaggtttcctgtaaacaaaatgga

SEQ ID NO: 48305 - DNA, 549 bp, Arabidopsis thaliana columbia
tacacacatttatgtggggttggtggtgggtagataatgtgtggtgggagtaaacttattgagttctattaaaatatttcaagtgggactggaatcctatgtaaacagtgttcatcgcatgtgttgcagtataataacatgtattacgatttatctgcatggttggcaagaaaatagcatctgtacatggaaaataattatttaattgagcagtttttgcatcatggattaattgctacaatttgatatgtgtcttttaaaccttttggtctaagtgaagtaatagatgtgatgttctgtgtgtcattttacactacaacatgtacttttaattaaacactcgcgtctttacttaatatcatgggtctgtctacaaaagggggaattcaaagtttcttacacaaaatccaaaaaacaaaatatttccctttgcctggtagaacatcatcttcattaaggcaccaataggatttgggattccttgattgcattttgtacgtaacgtttaggcgtcacctaatcgcaacatctaattgcataatatgtaca

SEQ ID NO: 48306 - DNA, 552 bp, Arabidopsis thaliana columbia
  unsure (1)..(552): unsure at all n locations
cgtttttgtttgtttgtaacaagttgttactaacaactctttctttattctattgatacatgaataatgtgtactctccctctctctctcttcttcttcttctctctctctactgtatatagcttggtcttaaagaaacgaagatagtagctcattctaaaaaaattcatattgggtttattaggtcaatccgatcggttttagtgtggacttctcctcgaaggaccaccacactgtctgtcccgagtttggaatgctttccgactaataccaggagtagtcagaccgcctgcatttctgactacaggtaaaccaattgggccaagctgcaaaactgtaatggcaaattaggtgggactaaatggaagtttgatggcaacacaattaagttgtgtatatggattctagaagatgccgagaaacatgaatggtcgaaacatgtctacactttaggggatttggctgtgtntaatccaagaatcatttaatccttggagtgattgctacccggtgaaattgttctcaatgagatatcatcgaaacctttttatg

SEQ ID NO: 48307 - DNA, 707 bp, Arabidopsis thaliana columbia
tttttttaaaatatcaactagttataaactacgaggtggaaattttcaaaaggatatcttgtgaagtgagagactcttgcaaaatagaaaaagaaaaacaccttcataatgtatctatatcttctagaagctcatgatctctttgtctatagaaatcatgcattgatttcaaatcaaacaccataaaacttaatccttgaaacaaaataaaaataataagaacttctaaaaccttttgttgtagcaatgatcatttcaaaactcatatatgtactgattgggtccagatttcagaagctcatgccttattttgtatcacattaagcacggccttgggatagtctcttgtttgcaacattttaagagaattattataacctatgatctgtctgatcaaagtttcttgttaagtaaagattaacagtagagagaaccaacattaactaattaagtataaactaggtcttacttatggccgcccatagacccactaaaagtgaggttcaaatggagcttgtacgtatgcataaatcaatatccgactaagaccaaggaaacatatattaaaaacgttacaggaaaaattgttaaatacttttggtgggttaccttataagaccaagaaaccaatagccgaatctttatttcaaatggagcatgtgtacgtagcacgaacttattgaaccagtcaaccagatgcaaaacag

SEQ ID NO: 48308 - DNA, 541 bp, Arabidopsis thaliana columbia
taagaaaacatataaacacaccaaactttaaaatttcgaaacacaaaaatcgagaattggtacgacgtaggtaattgattgcaaagtgcgactgttttcttttgtcgtcgcaaataagttgcaaagagcgactggtttgtgacgttttggaaaacttcagaacacaaacttttgaaatccacatattttgatccaatctattgataaaaattactgaaaaccacccattttagtgatatagagaacatacagaactttaggtatataaatcatcggtttcgtaacttattttagaacttgtttaaaaatatcagtgatgacaatgaaagaacatggaacttattatatagattaggtttttttgaatgtttagtttgtaaatttccgtattgaagtgtttggttatgtttttatatctaatatctatcaaattaaagtatccacgtctaagaaatacaataaacacaccaaactttaaaatttcgaaatgcaaaaatcgagagttggtaatacgtcagtagttggttgcaaagtgcgactg

SEQ ID NO: 48309 - DNA, 569 bp, Arabidopsis thaliana columbia
gggtctaaggtaaattgattgtttaattatatttgttagacaaaagtttgctaactggtccgtgtttttaattcgattcaatatatttcttactgtaatatacaatattgaaaagttatcaatcaccactaagcatgtacatgtatatatatttgtttatacaaactgaattatgtgttgtgtattattgcaagattttgatggtgccaacaactgcaagcggtttggcgaggcttaagaggatgcagattttaaaaactataagagaaaataagcgcaaaagaggtgaagtgttcgttattaataactgatagttggataatactaattttattcttaaatgtcgaaaataatatgtttttgcgtgctgttaacgatgatttcgtgtgcttagttatcactgattcagagtcggaagatgatgacgatttgtctaaagagtcgtacgcagtggatggttgtgaagatcttgaggatcttaagccggacatgattacaaagaaaattaaagtcaaaattgttcgaaagttcgtatgcccggcgttacgcatagagtggtggaattatat

SEQ ID NO: 48310 - DNA, 536 bp, Arabidopsis thaliana
taaagataaaaacaatcaagtcataaaaatgcgattaccttgataacaccagtccccaaaggcaaggtctttgaactccaaggataaggatctattcatttagttgaaaagaaatggagaagaagacgaattgaagagtaaatcaccagaaattgatcttataatacaaaacaacatttcatacactgaaaaggataaaagtaataatacctcggcgatgaagctgcttggaatgaataaaatccaagcactcattaattttgtgagtctcaaacttgacaaaatgaagtctaccaccaagaacaggataacttctcaagttgccattggtaatacccaatctctccttgatcgtcctcttccgcttatcatcatcattagagtagtcctcatgtcgtgaaaaatacaacaactttatcaaagaacctgcaaataaacttaaaagggttcataattctcaaacatagcacttaagaaataaacatcgaaattgccaaaaccacgaagtgcaccaaatactactggaagaccacaag

SEQ ID NO: 48311 - DNA, 484 bp, Arabidopsis thaliana
tcaagaggctcaggtctccatctgacccaggttggtagaccaggtcctcgttattctcgcaggatcaaagctgtcgattgaatgacgatctactctgaagaagaagtacttggatcgccaattggtgtctcgacaagccttcaaactacctaggaccaggaatccgggacgaccactgatgtagtacgtcccctggtcgctcctagcattggtcttgacctggcagagctgaagaaggtcatggcagctgaattatcccgagcccaggtgaataacgccagtacatggcggacgaagtttgggcacatctggggaaaggcgaggccgagacagtagagcatctcgaagatacacgccggaatcgggaaaaataggccacatttatcgaagaaattagcataagcgcacgaccacccgaccgacacgttctcaggatgcagcggcggccttgggagtatcatagttagcccccccggaacctggc

SEQ ID NO: 48312 - DNA, 551 bp, Arabidopsis thaliana columbia
gtcgtctttgtcgggtggttctcttcgctgagtcttgacggactttggaggcttttgcttctctcttgacggctcgtttcttttctcccaaagctgcatctgtgcaacattggatcgcctcctcgatatctcggtatctccaatgtctctcatgtattcctcttttgtgtcgacttgttgctctgatcagttcgtctctgtgagatatggtaacatcagaggattaggtttaattgtctccctcgtttggacttccgtctcccttgtttgggctaatcttctcttcccgactaagttaatctttgttagtttggggttgagcactttgattatatttgagttttctctcatcgtgtagcagatgatggtttgcttaatttattgatcgttgtggcgttaaaacgtctaagtggttctcgattatcttacggttcatccggaagacccttgacaaaggcactcattgaaaaagaagcatttattgagaaggccaagttccactatcttgttattgccataagttatgaagaagccctcttcataatttgttg

SEQ ID NO: 48313 - DNA, 1092 bp, Arabidopsis thaliana
aaccccgaattaaatatcgtgcggatcggttcgttactcactcaagatgccggaatcatttacacaatgaaaacttttctttctccggcgatatgcttcgatcatggtcgatcgcgaaactacaaatcagtaaagtttattcatccgattctcgcttttgcacacacgttctcttcaatggagttgtcagacgacaattcacgagcactagcggcgaaagaagaacagtgatgagcttcggtgacggaaaccttggcgctcttggtctttcatcatcgtcgattccaggcatgggaatggacgcttacgaacccaccgtagtttctaatttgccttccgatatctcttccatatccgccggacattaccattctcttgccgttacatctagcggtgagatttgggcttggggtcgcaacgacgaaggccagctcggtcgaatcgtaattgattctaggtaaaatctctacctgagaacccaattttgaattgatttcatcagagtaaagtagtgattgaacttgaatttgataggtcaattagtgagaatactttaagaatcattaacatgaatttgctagtcatgatgttatttaggatttggtgggtctcttatgctagtaatgctactatacctgatgttttcatgatgtgattagtagagattcaaggagtgaacctaagagagtggaaggtctagagaatgtgaatgtccaggcagcgtttgcgtctggagttgtttcagctgctattggagatgatggctctttgtgggtttggggaagatctaaaagaggacagcttggtcttggaaatggtatcattgaagctcgagttccttcgagagttgaaaatttagctgcagagcacgttgttaaggtttggataatcaagtctttgtataatcagctttaaaatgattttaagttttcataggaaggggggtttgattttgataggtatcattaggttgggggcacgcacttgcgcttactgtggatggtaaagtttttggatggggttatgtagctgatggaagagtaggcaatgttggacttccacttgaagcatctctgctagattcaattacag

SEQ ID NO: 48314 - DNA, 884 bp, Arabidopsis thaliana
taagaagccggccgtgaagggatgcctccacataccctaaaccctaaaccctaaaccctaaaccctaaaccctaaactctaaaccctaaaccctataccctataccctaaaccctataccctaaaccctaaaccctaaaccctttaccctaaaccctaaatcctataccctaaaccctattattacttattgtaatcctaagtttgtaatctcacccaaaatcttctctttaccaacaacataagtagctacaagaaacaaaaccttctcctcactaattttatctatcacataaccacataatcaacagactcttcttgactcgggaaaacaaacttaggattacaataagtagtatccagaaaaacaccatcacaaccaacaaaaccattaagaaacgaatcaaatctcaactgtaccgctcctggacaatgattagcttcaatcaatacaacttcaaagccatcgatcttaaccatttggttcatatgtaaagcgaagacgaaatgtgaaggaacttgaaggatttcttcaacgagacgagcggttttgtgtgagcagtagataattcctttagaccaagtagaggagagaccggagtagtgatcagagtggaaatgtgagaggaagaaagcgacggagaaggattggtgtgggaggcggaagagatcgacgatgaagttagttttagggattcgttttgaattagggattgaaggagatgaagatgttggtttcggtggggggaattgtggggagatagaggaaattgctgatgagtagagtttcgtagtgttgagatttagggtttctgtgttgtcggagtttgggaagttgccggagattgtggctcggcggaatcggagtcgatgatgaggaagatg

SEQ ID NO: 48315 - DNA, 1116 bp, Arabidopsis thaliana columbia
tgcaatttgtgcaatatacattctagcatcataaacacaaaatgaaatccataagccttcttagctcacaactctcaagtctcaagcttgattataaaagcattcttctaatgcaacacataccaaaccaaaagacataatctttttacatgtaatagagaacagaacacatacataacgttaatggcaagaaggacattggtccatctccgtccgttaactgtgtttctcttggaagtctccgggttcgatgatccttcctcaccacctctagggtttaatctactctctccaccattaaagaaacatacaaatggcgaagattgggacaaccggatatcaactctagacttgagaaaattagccccattgaatacaaatactctttggtatcttgcaaacttcattcttgcatcatcagaaaaatgctgcagtttctgtagaagcagagcatagtcaaataaaatgagattaacccagaaatcagaagcgcctgacgaagcaatttaagctttgtgattccaggaattatactacaaacgagcgaagatgagtaggtgaaccttaagggaagagcgaagatggaaatcaaggcggaggtgacggctaacatggtggcaggcgtgtacggaagcggcggttgcgaaaccacgaaacgccgtagatccagattccggtggccagagattatgatgagataatgacactgataccatcttccccttcacgtttctaatttcccaacaaatggaccttttattttaggatcattttttacccttctcttacattttatgtcctactctttaacacactatttagtttgaatgtgttttgtttggggattttacttttcagactcgagcttaaatccttcctctctttgttcatttctatgaattttttccattgtattgccgtattggtttgccaatgttagtacaagattgagacttcaagaagaaccccatgtcgggtttcagacacatgattgtgtgttctttcttgttccatcatacattgttgtcaatgtgattcttagaagttagtacatgtaagattagtaaagactcctattaaatgtcaattgattagaatgagaagagatgtaatagt

SEQ ID NO: 48316 - DNA, 1356 bp, Arabidopsis thaliana
tccatttacattcttcacgttatcagaccaatctctctcttcttcttcttcacgttctctctctttccggataagggtagagatggctagagtttgtgtaatgatgatggctatggctatagctatggctatgaacatagctatgggtgatccaatagcaccatgttacttcatattcggtgactctttggttgatagtggaaacaacaatcggcttacctctctagcaagagctaattacttcccttacggtatcgacttccagtacggtccaaccggtcgcttctccaacggaaaaaccaccgtcgatgtcatcagtaatcttttaaccaacacccttcttttgtttacattctgttctttggtctaaaacatgtaatcaagaaaaagaactaactttatctgttttagctgagcttcttggtttcgatgactacattacaccgtattccgaagcaaggggagaagatatcctaagaggagtaaactacgcttctgcagctgccggaatccgagaagaaactggtcgacaattggtaatttagtccttaaaacagaatacacaattttggtttgatgtcatgagatatcatttagacttcagtttttaaaactaggaaacataaatctttttccatttttggttcagggagctagaataacatttgcagggcaagtagctaatcatgtaaacactgtgtcacaagttgtgaacatactcggagacgagaatgaagctgctaattacctaagtaaatgcatctactcaatcgggttaggcagtaacgactatctcaataactattttatgcctgtttattactccaccgggagccagtactcccaagatgtaacgccaacgacctcataaaccgctacaccgagcaactccgggtccgttcatttatttgctaatattctctgtttctttaaactctgtttcctctgtccgctgttcatatatactctgttttctctgtgtttgataagaatctttgtatttttgtatggagtagataatgtataacaacggagcgaggaagtttgcgctagttggtataggtgcaataggatgcagtccaaatgagctggctcaaaacagcagagacggggtgacttgtgacgaaaggatcaattccgctaacagaatcttcaacagtaagcttgtgtctctggttgatcacttcaaccaaaacacaccaggggccaagttcacttacattaatgcttatggtatcttccaagacatggtagctaatccttctcgctatggtaagagtcacctcttaaacaaactctatcaaatgttgcctgaaaactttgttgatggtttcatcaacgtcttgttaatggttt

SEQ ID NO: 48317 - DNA, 463 bp, Arabidopsis thaliana columbia
aacaaactatacaattcaatttgggatttgattctgcaagacctaatagagacatggctactacttgccaacgatagcatttcgccctgctttcttcttgcatttgaaactgaatagcaaaaagagaatcaacggttcgtgaaataggcgcagaaaaagcaaatcgcaagagagaagctactttattggcccaaatcctatttcatccagttttgtgtcttacaggcgatacataagctttgccaccattgccaatggagacaaagttcagacatttaagcaccgcacaatcaacagaagcaacgcaaacggatttgtaagctgtaaaagtctaatactttttatttatatacacgagggaagaacacttctgacaatgtgaggactctcagacaaatccttcaaccaagatcggtttcatctcctcttcttcatcttcatcactctgatccttcttctcact

SEQ ID NO: 48318 - DNA, 599 bp, Arabidopsis thaliana
tagtaaatgttggatattaaatccacatgggaacagttacataatgtacgaaagatgcaatgagggcttatttacagcaattaataggtagggataaaatcaagtaccgtgagtcattgagaaagacaaatttccagccgagaagaccagcacgaacggccaagtccatgtcctctacagtagtccggtcatgccatcctccagcttcttccatcgcggccattctccatacacccgcagttcctgaaagagatataccaaaaccatatttataaaataagtacctaaaatttatcaaaaattcaaaacatgtaatgataaccaaatacaccattgaagctaaagaaggcatgtctagtggatccagattcttgctctgccataaagtggtagttgagggacatctcttgcatcctcgtcatcaagcacttgtttgcgttcactgcaatgaaccccacacacacatacaatcactcagtttgaaaataaactttgttaggatccttaattatgtacatagcattgttacgaaagatataagttcagtttacacaacctagatatggagtaaaatttcaaatattgatagctcatataag

SEQ ID NO: 48319 - DNA, 451 bp, Arabidopsis thaliana
agccgattttctacgtctcagactttcaccggcgcggaactacgaccttactttcaatcccattccatcgtagtaatgggatccatgccactccgcgccatcttacacagtccaagccaatcaggacgtgtagctaagtgggcaatcgagctcagcgagtacgacatcgaatatcggaacaaaacatgcgcaaaatcgcaggtcctagctgatttcatcgtcgaattacccaccaaagaagctcgggaaacccactcgacacaacttggctcctacatgtagacggttcgtcatcaaaacaaggctcgggtgtaggcatcagctcacctcgccaacgggagaaatcctcgagcagtcattcaggttaaacttcgaagctaccaataatgtggccgagtacgaagctctcgttgccggacttaatctagctcgggggttaaagattgaaaaa

SEQ ID NO: 48320 - DNA, 461 bp, Arabidopsis thaliana columbia
ctgtctagtgaatgataaccaaaaccgcacccaaaatcgcatcgcaacagtgttgtaacagtatcaaaatctttacatatacatatgtatttacgtgttttcgttactatttgaaccgcaccgcacttgtcccgcactccttgaaaacgtcataacctaggatcgtgcgtgataaaaataatagagtagaaacgtcgaattcaccaaaattcttggttctcttaatttttctaaaataatactatctaaccatagtacagtcaacattcaatcctgacacacttctcaggatacattgccggtcgtatgagcccatcttattttcaaacaagtcctctttaaatattagtaatttagtactttcgaaaatacaataaaatatgttgtggtttttagtcaaactcagatcctttgaagttttattaaaaacagccgccaaaatggcatggcagctcgagaaa

SEQ ID NO: 48321 - DNA, 557 bp, Arabidopsis thaliana
agtcgattattaataatgacgggataagtatcatttggaccaagaaacgcgtacctcagaccttttggaagaggcttaaggtcaacctttggagctttgagttttgaccagtcatctgaacttatattctctcctccatggttgagtatatcagtagagttcgttttttcagcgataaggctcatggtgcatcctgatactgcttcttctaagggaacaatcaattcctcaaacacttatggtccttccattggcatgtgggcgtctagatactcattgtacccttgagtttctaagtgtacgtacccttcttttccgttgttggttaaggcacttgctaggtggtctccctctgtaagttcttccagtaattcgtcagccaatctatccatttcttcgatccaaaagacttgtccattaattgttggtttcttcatagctttgttgatgtcgaaggtcattttcatctccttccccaaggtttagttcgatctttccctttttgacatcgataatagcacatgcagtagctaggaacggtcttcctaggatcagtg

SEQ ID NO: 48322 - DNA, 619 bp, Arabidopsis thaliana columbia
taaaaagtagtcagcaaaacatatgttttttttgaaaatttttagataattaaatcagagaatagggttggacatatgagtaacccattcgagttcggatagaacccgttcgggtttgagattaatggtatatgatttactacccaatagaataattctaaacatatgttttgttgatattatctatattgtttagtgtttaacattatacacttgtagtttgattgttaatttaagagtttcacatgtagtataccatcttgtattaatatcgatctaaacccgtcaattctaggattttccagcttgtattaaaaattgaatcacatctaatatgttattaactattgtagtatataagattataaattttcaatataatatgtatgaaattgaatataaatatttcaaatttatgtcccgttactcagtagaaagttttcttaaatctatttttcacccgttataatattatttcatgtattgaacaatttatattcgtttttaaaaattcaaattatggcatatgcggaaaaactctaattatttttttataatgatgatattattattccgtaaaaatagaatcatataaagatgagaagtgactataataatt

SEQ ID NO: 48323 - DNA, 427 bp, Arabidopsis thaliana columbia
tcgatcaccccatccttaggaatttctcatccatttgatttctctgtttacttacatgcttcattcacttgctattgaattttagtattttctgttttcatccattctactcgatcacaccagtctactaacagtgagactgcgtgatagagtaaactggtccatttctgcattttgactctctgtcatcctgttgtactcgatcacagggtcccttttggcagtcgaccttgcgatcgagtatatcagtcatttctgtgactttttactgttttctgcatcaacactaggactgttagataaccaaccaaattctgcttggcttgacttagcaacttctgattatatctcatatgtctgcatcaaacccacttggattgacacctaaaatagtacaacgacaggatagtgtgttaggattaattga

SEQ ID NO: 48324 - DNA, 1272 bp, Arabidopsis thaliana columbia
aatcaatacactataaaccagtgaaaggaaggagatggtgtcgttgttcgtaatttacacctcaatatataacatataatagctttttaggtggtggcatagacgtggatgaatgatcctagaaaaaatatcaaaagtgaaggagaagcaaaggccaaaaggaaagcagagtggggacagacaagagcatgactagtggtgtaaggaatctatttaacttagcaaccacttttttttttttttacccgcattttttactcaaaaagtgtggtaatttctttgtcaaaagtgttcacactgcgctggttaggccagatcgctgagcgagcaaaatgcggggagaaaagaagggagaagaacctgaacacccggtgaatcgaaattcatgactcggatcttagcccccacgtctccgcggactgtgagctccactcggtcgttcaaggaagcatctctgacgagatcggcggcgtgggcttgcataagattgactctgtcgacggagatggtggcctcaacgttcttcgtactgtgcgcatcctggtagaatccaggcaccgtcgccctccccagtggcatgcctttgtacatgaccgtgaagctggactcaccgtacctgattccgaccttgtttgggttgacggcggtgaagagcatccggatggtgagggagagggaggcggtggttggatccagaacagcgcttgggttggagatcccatgtacacactgccacttgctgcagatcgaactgcggcttcttcggcttcaccgccagtattacgatgagcaccaccgccagtaccagcagcgccaggaacgcgaacagcaagaacaagcagcagcagcatcccgtcagcgacgccgacgacgacgatgagtagctccggtaatacggctgctggttctgagcagcaatcggatcgccgttgagacctgctctagaactagaaggaggaggaggcatagtaagtgaaagcaggaagctccctctcccttttcactcttcttctgtaatagcggtgttgaaattatacacaacaagagagagagaccctgtttccgtgtctggactctagtattattgacaaattaatgtttcacaattttaaccaccaataaaaatatcaataatgtaatttacagcaattttaggcaaatctcacactcagacaagggttagagatgactcaaaaaatgttggatctgatattaaaaaaacaaacaaatacaaacacacagttactatcctttagttacatcatatatatg

SEQ ID NO: 48325 - DNA, 549 bp, Arabidopsis thaliana
cttctaatatggcaaatgactgtcttacccttactgaatgattaggtttcacattcgtttcacaatcaaattcgttttggcacaaacttcttcgttttggccaacgaatttttctctccgatttcactcaaaatcgccgacgaatttcctctccgatttcactcaaaatcgccaacgaattttctctccgagaaaccccaaaatcgccgacgaatttcctctccgataaacctgttcttcgctgattgattcagatcatttctctacgacgcaaacaatccccagagatatcgatagatccgacggtaaccgtttttataatcgattttatagtcgattttatagtcgattttatagtagatctgacgatgtttcataacatgttttgcagatggattcagagagtgaaatccttacattgcctgaacagatctacagagaaggtgatgaatctattgcactgggaaccgttcaacaatactcggattggaatttagttagtaaagtagaggaagctttaggcgagtgtttatttcagaagattagaag

SEQ ID NO: 48326 - DNA, 576 bp, Arabidopsis thaliana
cactttagtttgtgtgtaagtgtaaggcgttggttctagttttatgtaatagctgggtaccaattttcgttgtgtttcacagatctaccctccgatcaatgtcttgccatctctgtctcgtctcatgaaggtaagtgtgggggattcaaaaataatagatgaagccaaatgatcgattgtaaacgtaacaatgactttgtattgcagagtgccattggtgagggtatgactcgcagggaccactctgatgtttctaatcaagtaagactttatttcttgtccattaccagcattgcagaaaagctttgtttatgtaagttttacttgtcaacttttttagcctgagcttaacttgttattatgtttttgtgatttcagttgtatgccaattacgctattggaaaggacgtgcaggccatgaaagccgtggttggagaagaagctctttcttccgaggatctggtctctcttcttttcttcttaccacagtctaaatgctttccgttttattcctcttaacactttttttatctgatgcaaacagctatatcttgagttcttggataagttcgagag

SEQ ID NO: 48327 - DNA, 779 bp, Arabidopsis thaliana
cacgttcgataagcggcggtacattacgagcatcaaagtgatttcccggtcgataggtacttaatcgaactcaaagacgaatcgtcaaagttacaatacatcttcgaatacataactctcagagatcttctcatcgattgcaactaccgcggcggagaaaataccgtcgatccgctcgctgcgaacaagcggacacaactgttacatcacacggttcggagacacgaacgggattcttgtcaaaagtggacacgagacttatatccgaaactcgtttcttggtcaacacataaccgccggtggagacagaggagaaagaagcttttccggcaccgccatcaatttgatgggaaacgataacgccgttactgacaccgttatattctccgccaggatcggagtaatggtatcgggacaagctaacttattgtccggcgtgcattgctataacaaagcaaccggttttggaggaaccgggatttatttgagattacccggtttaactcagaaccggattgtgaattcgtatttggattataccggtatcgtcgcggaagatccggttcagttacagatttcagggacgttttttttgggagatgcgtttattttgttgaaatcgatagccggatatattcgtggggttagtattgttgacaatatgttttccgggtcgggtcatggggtccagattgttcaattggatcagaggaacactgcgtttgatgacgttggccaggtggtcgttgactgtaacagtgtgaacggaatggtagaga

SEQ ID NO: 48328 - DNA, 574 bp, Arabidopsis thaliana columbia
tcagtgatttattacataaatatcaatataagagaatctaaatatcaatttaagagaataactaacttaaatcattaagtaatccacgactattatacactcatactttgagtttggattaaaaaaaatctccgagtatgagaaaactattaaaatggttttattgaaaggtcatgtaatattaaaacaaatttagtaatagtacaattaaatatataaaataaaatcgtatataaaattaaataataaatatatcattaacctataaatcagaagttgaagagcttacattaattatttaatagacacatggcaaatgctaaattgattatgtgtcaattttatggagagagttggtaagcttttatatatatgatttcaattgtaacgattataaataataaacaaacttcctcaaatctttatctaataaatcacaagttaatttacaaaaaactgtcacattctccttctcacacctgtcataagtctcatttttcacctttcaagattgtaatttgtaaaaggaaacacccttattgttaagttaaaaaaaaaattacgacaaaaagaa

SEQ ID NO: 48329 - DNA, 536 bp, Arabidopsis thaliana
aagcgaattctccaaagtgctgataggctataaaaacgtaagatttattgagtttaagttcagttttaaccatccatccaacgcgcttgtttgtgtacaatagaaatggttaatgtcttttactttatctttttgggttcagatgcttggaaaaaactcatgggaagaatgtctctctgttttggatcctcttgctaaggaaaggcttgctgcgaggtatcaagtgtgacattgatagtaaatcgattagtctcaaatgagagagatctcattgcaaacaatattcagtgtttttgcaaaagacgtttcagttgcattatttttataaacaaaatttgattatttggatttggatccatgatttatacacaaactaaattggaacaatgataacttttccaatcaagttgtgtgaaacctgctatgaaaaaaatataaaaaagaaacctgctatgagctattttctgtaacagtataatacatttatacttagtattataagcaacatgcttattgacgggggatcctcaggggat

SEQ ID NO: 48330 - DNA, 637 bp, Arabidopsis thaliana
aatctaaacttcaatctttacttaggggttgtgttcaacgccttgtctgagttcccagcttttctgataacgtttttcttcattgataaaatcaataggagagatgcgttgatcggatttacagctctaagtggaatctctagcgctctaatcgcggtgttaggacaacaactagggtcattacagattgtgttagagctcgtttcgtttttcagcgcatgcaccgcatttaacatgacgcttatttacacaattgaaatgtttccgacatgtgtgaggaactcggcgatttcgatggtgaggcaagcattggtgtttggcggcgtgtttagtccagtgatggttgctgctggtcgggaaaatcagttttggtcgtatgggttgtttggtttgatcataggattgtgtggattgtttgtgtttggattgccggagactagaggaagtgttttatgcgacactatggacgaggaggagtataagactttggcaaaaagacaatttattggttgatacttgatactgttgtcttttgttgtaatggttaaaaagtttgcaggcttaaaccagttcggtattgattcaaatcaattctgattttaatacttataaaccacgggttaactccttacattat

SEQ ID NO: 48331 - DNA, 1036 bp, Arabidopsis thaliana
caagaaaatcgatagggaaatcatcctcgggcagaatggttatttggtactcctttgacaagtaggtattaaaacccaaaagtaagtcgtcatggcccttgaacaaatcttttaatctggctatgacgccactagtgtcaactctacatccaacatgagtcaccacaaaaaattaatatatttcctgctgtaagaagagagacataatggaaagatagaagagagtacccctgatgtttacagtcattcaagacttcaaggaaagtgtcatatttctcactgtcttcaaacttgtccttcacagctttgagatagttcaaggcatcacctgttgttacccctcccatatttcctcctccatcaatcgttagaggccttttagttatgcatgctttgcagaacattttgctccctttcgctccttttgtgcatccaatagattgacatcgccgaccaccaccatgggatatgcagagtcccgaaagaccttcagcgcttttagtgcagttctctctttggcatctctttcccccaccgtgcatgagacagagtcctgatcttcccctagcaaatcctgtgcaatcttcatggctgcattttttaccaccaccatgggctcggcagaatggcaaaggaccactagcgctttttccgcagccgtatgttttgcatctcgctcctccaccgtgcttgacacagaattctgttcttccccaagcagatcgtgtgcaatcttcatggttgcatcttcgaccacctccatgagctatacaaaaatcagtactgccttctgcgcctttggtgcatccaagatattcacatctgcgaccacctccgtgggctttacagtacactgttttaccttcagctcccttctggcaatcaggtttctggcatctacgtccaccgccatgggaaatgcaacgaccagatgcatctcttgctcctttttgacatccttccacttgacataacttggaactagaagaattattaagctgctgagataaaccggaacctgagcttattggtggtg

SEQ ID NO: 48332 - DNA, 493 bp, Arabidopsis thaliana columbia
taaattcaaagaaaaacgtttatttttattttgaatataatttaacattaaattcaaaaagataaaaggtagttgtgtccagaacttgacttgagatcaatttgattgaggtactaattttcgagagggatagaaaatgcaattattatgaagaagacatcaagtacagaaaggcaaaaaaaaacattgtaaggaaaaaataagaaattattgaaagagacatctatcgtccaatttgttctttgtatacgctaataactataaagacacatctatacatgccctagcttgttcaactgcaaactaataagccaaattatagatttggaaaataacaccatattacgaattaagaaacaaaggcttataacattgtctaacataaaagaatataaatttgaatgcatgtgaagtagatgactgaccttgttgtttgtattctcccgcaatatacaaatgccaaaatttaatgtcttcatcgctgtaaactgta

SEQ ID NO: 48333 - DNA, 559 bp, Arabidopsis thaliana columbia
tactacaaaattacaaaatatttagacaatgattcataaacatatgataaagaagatcaacattaataaaataaatgagctttttttacgggatgggttggcgggacgagtttggcaggacgagtttggcaggacgagtttggcaggacgagtttggcaggacgttacttaataacaattctaaactataaaataaaaatattttatagatagttacatagattgttacaaattacaaacttttatatatactaattttaaaatataaattgtccctacggtatatcgcgggtgaaaatctagtattattattattaaccgaaagaaatttctttcaattttaaaaattctgtcagttataatgaaaatgtaaaactgtaataaggatttaatatacatattaacatgttatattgatatgttattactattatccaatttgctttttctattactgtttgttggatgtattgaaaatttaagattgtctccaaaatcgattattttggaattatatatcagaaataagatttaagagatttgttccaaaatattttga

SEQ ID NO: 48334 - DNA, 1410 bp, Arabidopsis thaliana
catgtgctttgcaaaagtcggtactaccttgagcacttttgccacagccttcagactgacatctctttcctccaccatgtctgacacagaaatcagttcttcctctagcactctttgtgcattcgggaaccgcacatctcttaccaccgccatgtgccacacagaaattggtacctccgtgaacactcttggagcaaggatcatctccttgaaaggcacatcttttacctcctccatgtcctttacagaacggcgtgcttccttctgctcctttggtgcaacctgagtgtgtacaccgttttccaccaccgtgtgctttgcagaacattgtactcccttgtgctccttttgtgcatccattagattgacatcgccgaccaccaccatgagagatacagagtcctgaaaggccttcagcgcttttagtgcagttctctctttggcatctctttcctccaccgtgcctgatacagagtcctgatcttcctctagcagctcgtgtgcaatcttcatggctgcaccttcgaccacctccatgggctatacagaagtcagtacggccttctgcacttttggtgcatccgagaaactcacatcgacgaccacctccatgggctttacagtacacagttcgaccttcggcacctttgtggcaaccatgtttctggcatctacgtccaccaccatgggaaatgcaacgaccagatgcgcctcttgctcccttatgacatccttcgacttgacataactttgaactagaagaattcttaagctgtggcttcagctgctgagataaaccggaagtacatgtacccgagcttattggtgttgttgctgccgtgttagatgacagttccagaacatgagcagcaggaatgatgacatttttgggaatatggcctaagaaggagcttgtttccttgcttgaagaggcttgcaatgtcggtaatccaaacccttgcctccaaccacacgttgcagattcttcattatttgcacgcagcatgtccgcaagagattgaaatcggttggcgtgctgctggaccgcagtgatctcagattgacaagatcctccaccagaaagactcaattcaagatcaaatttcggggaagggacctgcaaccctttcattttcaaattagctggttttttgttgctagccgtcggtttctcgttgccaagatggaggctaaagtcgagctcaatatccatggaggacgcctcctcagtttctctggcagaagataaactcgtgcaagcagttgccgaactccctttgctatcagaagagcttgaagagtgaccgagtcttaaggagagtaaaggatcagctccatcaatcaaattccatttccttttgattccttggcattagcaacggagaggcaagggaacaagcgcagagtagt

SEQ ID NO: 48335 - DNA, 649 bp, Arabidopsis thaliana columbia
  unsure (1)..(649): unsure at all n locations
gtgaaagtgcttcaaaatgattaacaaaatgcagaaaatatgttgtattaaataaaaaaatcgcatccaaatatttcggaggatgtatcagacgtctgaagcagttcttgtactagttccgacattattctattttttttttttaataccaagaagttttttttaatacaggaaatagtacatgaagctgagttgtgtgacttcttcgagagttggagtacaaaagtttgggaccgacttggacaaggaagagaaaccaaatccaaaaaatacttggactaagagcaaatccagtgattaatttctaagtaaagtttttatatatttttttattgataaatttggatagttttgtattttagagattttttagagtttttgaaaattttatggttcattggtggaatctttaagtgggtttttaaaacaaaaaaatttgaaaaagggaaaaactgaatctacatgagaataactgttgctggataagcttaaaggaagagaaaacatttttaatcattgtttgcatatgccattgacgttcacatccgggtaaggatgtataatcacaatatcagagaattagaagagttttagagagaagcgaagaaactcttatatgagntatggtcgcaagatggaattggtgacc

SEQ ID NO: 48336 - DNA, 514 bp, Arabidopsis thaliana columbia
tttaaattagtatatataaaagtttgcaaattaaatctatttatttttattttatagtttacaattgatattaagtaacgtcctaccaaacccgtctcgccaaatccgtcccgtaaaaaaaaaccgcggtacaccgctaatttaaatatataattaaaataaatatctcacgggattgaaattgtattttggtttttcaaacaaatatttgttttaaatagttgccaaaatctagttcaaattttggagaaaaaagatttactggatagataaagaatgtatttaggtgtgttttgctcattttaagagattgcaattatatttttgtttgtcaaacattttttgttttaaatagttgctgaatctatttggaatacttttagtttgttaatcaatttattgctggaaaaaatcaataattaaaagccaatggcaaccattgtaaataagtcccaactccaagatttattttacaaaatagctgcaaaaatgtatatatagatattaataatat

SEQ ID NO: 48337 - DNA, 580 bp, Arabidopsis thaliana columbia
ttttaaatataatttaacattaaattcaaaaagaaaaagacataccaagttaaattttaaacaagaattatacggaaaacgaagaacacctttaacatcaagaacaatgaagctttggtagcatactaaagtgatgagagtggtattatgaaaagttctattgacactgaaaaaatataaatttagaggagattatctacattctaatataatacttggtagtgattttatcggttacacttatcggtcataagtaatcatattgtgtcacaattcgtattacagaatatcaccacataattgtttttttttagatcaccacaatagtactgttaagagtcgtcagtaaaaaatgttttaattataattgaatcgaacataaataaataaataaattaaataaaaatgtacaaaattactctttatcggggaagcattttggtttcgatcggctagatgatcgttatgattcgccgatgattagcgtcaaacactcgcttttcttatccacaaagcgatgagacaggcaatgtattgactattgagtgtacgataattgcattaataatgtgattgtgac

SEQ ID NO: 48338 - DNA, 658 bp, Arabidopsis thaliana columbia
acggctgttaggcatgttttgtaatggttgttaggagcgctattaagaagtgttaacggtgagtcgatttggccgagtcaacgataaattataggttaaattagaagtcaacgataaagtataggttaaattagaagtcaattttttgttgaggtataaaacgacaatttcaagagtttacggttaatttgaccattttttgaaagttcaggtattaaataacatttttcccaaaaaaatacctcaacagatgacaaaaatggcatccacttggggaacatttctcgatctgcgtataacttgtaagccacggaagctggtgcatccaccaccatctttaccctgcttaatccaaaccaaagaatctctctgaaaagtatgaaacttaatgaaaacaagtatagttttgttgcctggaggaacttacgtgacgtcttgccattgcataacgggtctgaaaggtttaggagaagaggaaattaagagaccattgttagagttcagtagttttgcagagttagctgatgaagaagacaacaataataacattcgtggagaagaagaagaagatcgatgaagcatagattaaacagttgcagactttgggattttctgaacaaagtgcgatctggttgtgaactgtgcagaactatgatgc

SEQ ID NO: 48339 - DNA, 872 bp, Arabidopsis thaliana columbia
tacaaaaataatgaatttttgaaataaaaaagatgatcacagaaaaattgtttcgagtatataaagtaattaactaaaggaaaaataactattaactaatttcaaaaattattagtccctttgaagacctcctccaatgaagaaaaaacaaattatttttccagaaccggaaataatttacgccggataacttaaaaatcgcgaaactccgtcaagccatcgaagccagaagatgaagaagaagagaaagagcttctcatattaggcgcgaagaaaagcggatcatcaaaattcgcaaacggttgattaccgcataagaaattatcagctggattcgccggcgggaaaatcggaaatgtcggtaaataagcaccgtagtttatccccgcagcgtcgtacatagacggtggcggcggaggtggaggaggatgaggcggtggctgtggaggaatagccaccgctgaatacggaagagaagaattaacctgtccatgttctccgatgttctcctcagttgttatcaccgacgacgattcactatcttcacttatcatcgtgttattaaaaaatatcccctttccgtttccggcaccggagtagtttctaaggtaattattaccgccgccgcagcgattgcggttgttttttctgtcgacggttggttcagagacggttcggttgattgattttaccaccccgggatcggtcattgcgttaccaccgccgagatcttcgtcggagtgggtcattccggtgagtttttgaacaagagccatgaaatctttaggattagtgtgtatgattcttggagtgtgtgtgtaaatgatcaccgggtgacgaggcttagccgcggaggagaaagaagacggaga

SEQ ID NO: 48340 - DNA, 519 bp, Arabidopsis thaliana
ctaagaacactatagacaacaataaatagctcgagaacaaatggatcggggagagaaactattgctcctaactattagcaactaagaactacctgagcataattgagtgggttcttattcagctctgttacagagaggacaatgtcgttctttagtcacgaaacattatagcctttgctttctctccgacaataacaaactgaacttccttttcaggacctgcaatgatataagaattaatatcggatatgcaattcaggaaaactaaaccacggaaccatcgtagtgttttcaaacataccagcattcaatttgtacagagccctgctcactttaacgacagtggagttgattccaccacagagacccttgtcagaagagagagtgaccaccacactcttctttacatcaatgcctggtttttccatcaagtaacgctagaaatcagaaacacatccacaataacaacaagagatagcaagaggatggatatctcagctatagtaagacaacagattg

SEQ ID NO: 48341 - DNA, 1556 bp, Arabidopsis thaliana
ctgatgctgatcagattcaaacgaaactcagggagaaataaaacatttcgaagaagaatgttttcatttatctgtactgaacccactccactgattttaacacgtgatcctgttgggagattcacataactcaccacagaatgatccaaagaaacaaataggctcttatcatggcaaacatgatgagttgcaccagagtctatcacccaagtttcagtggaaagagtatgttgggatacattcaatataccaacaaagtagtatgtagagttagagaatgagataccagtgtaatcaataggagaacgtgaaattccagcatctgaagaagaagcagttggttgtgacttcagttgagaactgaacaaggctatgaagttctgaagttgatcattggagagattaccaagcagaccatctagagtagcctgagttggaaccatcggaggcaataaagagacctgagcagcaaccggttgaggtttggtacccttctctggtagtttgcctttaaaaccaggagggtaaccatgctttttgtaacatttctctgcaatatgtcccaccttgttgcagaatgaacagattggacgccctttattaggtccattctgaacatagcaaatcttaggagtcaaagcagtagaagatatcttagagacctgaaaagcagcaggaggagaaacattggtagagaaacctttctgactgtaatcctggtcaagaatattgtaaacttcaaccagagaaggcaaggctttctttgcaatgatctgtctcctgactatagagtaggactcattcaaacctgccaagaatttgacagttttagctctctctgccttctgttgcagacgaagaactttaccacaagtacaaggatcatcaggttcctctgtactgtccaacaaatcccaaagaatacgcaactgagtatagtactcagatagagaaagagaaccctggcgaaaatcctggatctcctgtgtcagattgtacgtacgaggaagattagtcatatgaaaacgtccataaatgtcacgccagatatctgtagcatcattcatgcgtagaatgctacgataaatctgcggagacacagagttcaacaaccatgatttcaccatactattacatctggaccaaaggcgaaagttcccatccgattcaagtggacgaggcaaagaaccatcaacaaaaccaatcttattcttagcatctaacgagatccgcaacgctgcactccaatcatcatagttagtctcatctaagcggatagagacgagattcaaacctggatgatcaccactgtgcataaaaaacggagactgagtcggatccatggaatctgaagtcacaacagctcgcgatgcgccagcagagagcagatctacagctggaggagagatcggaggagagactgtgagaccagtggatcgcgacgatttccatggaacggagcttatcgacgcctttgaacgagtggatttccgagttactcgagcaacagccaccatctttacagaaaaacgagtagtgaacaactattgcttttg

SEQ ID NO: 48342 - DNA, 941 bp, Arabidopsis thaliana columbia
ctatatttctcaatcatcatcttgaaataagcagcaattgttggtattgaaatgataaaaattcgattataaactccgattctcgtaagattcgattccgcttatgttcaaatatctcaagtgtcttaaacttcagtgtttttactcgatatggatttacgaaaaactctctactagaatcaacacatttcagacacagtgctaagaaacaaaacacgtaaacaacaaggtaatagtgtcactggattttacagacaccacagtattttcttctagaattttctgcatgttctccgtcctccgatgcgctgcaaataaaatcccccaaacgcagattaatgtctttctaaggtaaaccggtaactaactaaaggtgttcctaataatcggtaccaaaatattttttaagaaagttagtgtattgtgtgtatagattacctaagctcaaactcttgaacatgagcaatatctttgccataagcaatatcaggccagcttactttcctctgttcaaagcttttctcggcctccgtcttgatcttgaggttgcttttgagacggcaaggctcgctggagacggcagtgcagcttctcccgccgtgtctcttaggcggttgatgttgtcgccgccgtcttcctcctcctcctcggaagccaagttgaccatcttcgtctgtcgtgttggatatattaataatgtcgtcagaacaagtagtccttgacggtacgtaacaagaccggactaaagccgaacacttttctcttgttgatgtcgccaggtggtccaaactaatgatccgagtcacccgtagtagtactcaatcgaacacaaactagacaaagtacttcaaaataaaacttgtgtttggggtttgtgtgattaaggttgaaagaaaatgaaagaagaaaggcatgagaaaaggagaaagagagtaattagt

SEQ ID NO: 48343 - DNA, 576 bp, Arabidopsis thaliana
  unsure (1)..(576): unsure at all n locations
tgctatacaccctgcctattatgatcttgtatctagaggaaagtttagaggagctcctgataaatcactattagatcatttggaagtcttcgaagacattgtttcctctattaaagatgaaggtgtaccagctgattaccttctttgcaaactcttcccccactctctcgcgagaagaggaacatcatggttgcgtcaactggaaccaggttccttaaccaattggactgatacgaagaatgcattcatgaatcacttcttcgatgaatccgtgacaggggcaattcgtttgcaaatttcttcgttctcccaagctccagtagagtcccttagagcatcttggctccgattcaggtcttatcagcgtgagtgtccccaacatggcttccaagagatccaactcatcaacatattctacaaaggaatagacaagcaataccagaatcaacttgatgcagcaagctcctgtaacttcatgacaagaaccactagtgaagctttacttctcatcaccaatgcattaacttgtctttcgacgcagggatttgacaaangacaaagaatttcagctgagat

SEQ ID NO: 48344 - DNA, 416 bp, Arabidopsis thaliana columbia
ctgaggcggtttgggcgaatgtcgatcttggggatcgagtaatgagggtgctgcaaagtctgctcctttgtgtctatgctccgagtgatcaattgatcgagtagattgcttcttcctctcctatccgtatgctcagatgtctggttgagtggggaatgaggaggatccaaagacgctttgatagatcaacaagtcttgtagagttggtcacccttggtcgagtaaatgggtcgagtagaggatcgagtagaagggtcgagtagatcaatctgcttcttcttctaaggctgtcttgatcgagtaagagggtcgagtgaattgctgcctcctctgtggctgcttggatcgagtgaatggattgagtagaatgctctgctgcttccctccttgttggatagagtatagggtcgagtaga

SEQ ID NO: 48345 - DNA, 528 bp, Arabidopsis thaliana columbia
acatttgaagtttttgagatgaaattagattctaatgtagatatttaacttcctaatgattcagaataacgaatccgaatgattttaagtaaagttttcttgtattttttcaaattgattcaacaatgcgaggtctctgcgagggatttgcaaggctgtcgtagcactttccctcgcaaatatttaccctaaaccttaaattatttaaaatatttagtcatgtttttatttgctgagagtcttattcgaaataagagaatctaaatcagatctgagtcaaacactgaatcaaaatggtggagttaattggtttaaggattgcgagggaattgctagacgcactcgcacttccctcgcaaatattaccctaaatcctaaattatttaaaatcaaaggttgcgagggacttgctagaagatctcgcaattccctcgcagtatgtggtgcattttaattggtttaaaaatcctcctcgcaatttcaaagcaatctatgcgagggttttgcgaggaaatatatatctatata

SEQ ID NO: 48346 - DNA, 456 bp, Arabidopsis thaliana
ccctttattctgaaaaccgtagtgctgaaatttctgaccttgtgagccagcctgagttggatacacctgatcctgaggattttcaacattagtactcctttaagaaaggttgggatggttcttgtagttctggttgaaccctccgttctgatagttcccatacccattcacaaagtttatctctgcttgtagatcttcagaaccatctccgctgaactcttgatgcaccatacctttgctggaatcctcacaaaaattgacagatttttgatctctcctcataagttgctcaaccttagctgatagttcagcaaactgtttggattctcctcctccacctctattcgacctgtcatagtcaacattgtggctactgttgctacctgccaggttctcaattagctttgtagcttcagtctcagtcttggtcatgaattctccattgctagcagtgtc

SEQ ID NO: 48347 - DNA, 558 bp, Arabidopsis thaliana columbia
tgcccgaatagttgtacatatgtatttttttgttaagatcattttgatatttaagatactaaaaattctgcagaagacatgcatattttaaagtttaataaatggattactttagagattgagtctatgaaactgaatactaaacatttttggattccaacaaatatattatggctctgaatggtaatcaaaaccgcacttaaaaccgcaccgcaacagtactgtaacagtattaaaatctctacatattcatatgtatctatatattttcgttactatttgaaccgcaccgtacttctcccgcaccgcaaaacgcaatcaccattcggagcttatatcatggagatgtagctgggcaaacatatgatatcgatatccagaccctaaagaattttaacatatcaaaacattatctgtaccctcaaacaaatttcaattgaatttcattgacactttaacacgtgtaacagttaaattggacgactctttctaacacgatataaacaagagtttaacaagagattcgtttcagtttaagaagacaaacacacgagatta

SEQ ID NO: 48348 - DNA, 585 bp, Arabidopsis thaliana
tagcaatttggagatgttcgggctcttcatacagctggcaagaatcgtggctttatcatggtatcatactatgatataagagctgctcagaaagcggcaagagcactccacggtaggctcttaaggggaaggaagcttgatattcgctattctattccaaaggtgttgttcactcttcttatcccccttgtttgtatgctatgtgcgttgtacctgtcacttttactgtcttgcttactactcttttctgtgatatcaggaaaatcctaaagagaactccagcgaaggagccttgtgggtaaataatcttgattcttctatatccaatgaagagcttcacggtatattcagttcatatggagaaattagagaggtttgcttactagtgttttctttgttctttctttatgatattgacggttatgtgatattgttataactttgctacttcttttgtttgtaggttcgtagaacgatgcatgagaactcacaagtttacatagagttctttgatgttcgaaaggcaaaggttgcacttcaaggactaaatggacttgaggtcgctgggaggcagcttaaacttgc

SEQ ID NO: 48349 - DNA, 530 bp, Arabidopsis thaliana columbia
tggagcttactgggcccagcccgagtgcgagcaatgaatgcaaggcgctgccgatgcaaaatggcagcacacaaaacttgtccaaatatgtgaaattcgattttaatgttgtctttttatttagacccttctaagaacctttatttttcatgtattctctccgttcttttattaggttttagtatttaagatttggacaattctactaaacgtaacaaacctttattatatggttagtataaaataataatccacatatcctatatattttggatagatatatatggatggaacacaataatatgatatgggaaaaatgtcgtttaatctctcaactttcaaaaaatggccaatcaatacgtcaacttcgtaggaggccatttaaaacatcaacttacattgactaacatttaaaacacgaactttgcgttgactaggcctaataaaacacgacgttaaatcgattaacagatccaatagacgacgttaagaactgttatcactctctgttagtgaggaacgacgacatt

SEQ ID NO: 48350 - DNA, 810 bp, Arabidopsis thaliana
ccttgtttgagacaacctatgtgatccaatagccattgtgacagacaacacagtgggcatagcgattgggattcctccaatgagaaggacaagaagattgtcgattccatctctatactttcgatgttggatcggatacattataattatctcaatcaacattcctattccgattgaacagatacagaagttaccaatggcggttaagacctgcaacatttatcaagaccatattagagttatatcataagattgcttgcatcgcaaggaaatataattcagaggtcagtcatatataccttttggaaatggccaacattgttagtactatcaacaagatgagctgccttgccaaagaaggtatgcactccggttgcaatgacaacagcctcgatctcaccttgtttacaagtggagccagaaaaaacctcgtctccctggtgtttagtagctgggagagattcaccggtaagagcagattggtcgatcttcagaggatcaccttctaggagacgagcatccgcgggaacaatgtcacctaacttgatgctgattaagtcacctggaactagaatcgcagcttcttgctctccccatcacccatcccttaatacctttgtttttggtgcaagattggccatgagagctgcagctgcattaccggcattgttctcctcgatgaaactgattgtcgagttaatgatgagcaaacatgtgatccaacaaagtcttgccaatccggtgggctcgcactgcaattgccaacacaatggccatgattgcggccgttccatcaccgatgaaagaggg

SEQ ID NO: 48351 - DNA, 532 bp, Arabidopsis thaliana
tagatcgaagcaaaaatgtccacagcgccgtctccaggcactactccatcaccatctccaccgtctcctcccacaaactcgacaaccaccactcctcctccagcagcctcttctcctcctcccaccacaactccttcttctcctcctccgtcgccgtcaactaattcaacctctcctcctccttcttctcctttacctccttctcttcctcctccatctcctcctggatctttaactcctcctcttcctcaaccttccccctccgctcccatcactccttctccaccgtctcccaccacaccctcaaaccctcgaagccctccatctcctaaccaaggaccaccaaacactccctcaggatctactcctagaactccatcaaacactaaaccgtcgccgccgtctgattcttccgatggattgtctaccggagttgtggtaggaatcgccattggaggagtcgctattcttgttatactgactctgatttgtcttctctgtaagaagaaacgaagaagaagacacgacgatg

SEQ ID NO: 48352 - DNA, 471 bp, Arabidopsis thaliana columbia
agcacatacgagtagaaacaagatttagtttttagtaaatgttacctgggctgcttgcaatcaactaataacttctccaagtcatcgaacttcccgagatggtagttacgaagtcagctagcatcttaagggcgtcgataatggtttgatcggcaatatggcttgtttatgtcttgaaacttctgaaacgcttgagaacttcaggtccccacagacggcaccaaaatgtggatgtcggattcacacactcatgtatttatattatttgtgggctaaaactctcgagtacaaaagtacaagacaaatgtgcatagtaaaagtataatagagtatatagaaatgcaggaagaatttgtacataaaagatggtatagtatttcttgtataaagatcttacataaaaagggaagaagtaatcttttgtgtatttatcagaaaataacaatgtgtaatattaagatttgtggtgaa

SEQ ID NO: 48353 - DNA, 630 bp, Arabidopsis thaliana
aattgccatatacagaagttaccaattgatgtcaaaacctggaaaataaaaacccagccgtgagaccctaggtagaccaagagttacagtactcagatgttgttcatttctaaaataccttttggaaatggccaacattgttggtactgtcaacaagatgagcagccttgccaaaaaaggtgtggacacccgtggcaatgacaacagcctcaatctcaccttgcttgcaggttgagccagagaatacttcatctcctgggtgtttggtggttggaagggattcaccagtaagagcagattggtcaatttttaaaggatctccttcgaggagacgagcatcagcaggaacaatgtcacccaatttgatgcttatcaaatcacccggaaccaagattgaagcctcttgctccccccatttaccatctctcaacacctacattcacacataggttatataactctcctttttagaaaatacatacctatatatatgtattgagaaatttgcataccttagtctttggtgcaagatttgccatgagagcagcagcggcattgccagcattgttctcctcgatgaaacttatggtggagttgatgataagcacaccataataccgataaaatctt

SEQ ID NO: 48354 - DNA, 260 bp, Arabidopsis thaliana
ctttgtcagttgagcgagagatgatacggttaaggaccgcaactcttccggttaggcgctgcacttctcgcttgttctgaccgtgacgccattcccgacaatgcctcgattcgtttggatttgcctcgatgccgcggtgcgtgactaggtatccgaggaactcgccggatcttactctgaagcggcactttgcaggattgagcttgacgttgtagcggttaagctgcttgaaacattcgcgtcaatgggatatgtgatct

SEQ ID NO: 48355 - DNA, 554 bp, Arabidopsis thaliana columbia
catacatgtaaagaaaaacaaggattactactttatttcttcaaacttatagattcttctattgataggcaaaaatcttagcttcaatgtgtttatatgtatgccaaaactccaactaaagaaagaatgcacatactttttctctcaacttagccattatacagtgggacttaggattattgaaattttcaacacttaaaaatcttagagtttttagtatactaccaatttacagcaaaaaataactaaatttgttccatatgtgacacaagtatactagtgattataatcacaatcattatcaacattaagcacaagtacattctaatgattaacggaaaaaacaataatctgaagcaatagaaggaagagaagctactgcacatttggaatcgaatacccgataagggaatccgccgcagattctggagaagaatttgcagtttgtcgtagagagcttttgattgaagaaatcaaacaaaaatttaggaggagagatctcgaccggacaaaaatttatattggtattgaatacaattgattttgtgtttggt

SEQ ID NO: 48356 - DNA, 639 bp, Arabidopsis thaliana columbia
  unsure (1)..(639): unsure at all n locations
cggagctcggatctgggatctgaagttgcgaagtcggggagcgccctctgtctggtacattcggaatgtcctcatcgatcatcccgatcctcgaaaagtctgacatgggttccgaacatcggaggttaaaggacataactgcacaagaaaagaacgatattgttagtgaggaatgaagaaaaacctagagaggtaatttatagggaggtttcttagctttcaaagatgcgattccatttaaagtcggagtgattcgcggaacattcacgtcgccttgttcgccctgcattcaaagagtatctccaaaacgaatatttgatgaatcaaataaagtttgaaaattttcttaaataaaatgggccgaagcccaataagaaagtccatacgaaaataaaaaaagtttaactctcagggaacatctagggaaggggctcaggaacaggctccttcatcggcggttgaggtggaccctcgttcttaacatccactcgggttcgttctcacgcgcttcaagggctcgaaccatcgctggacagaacaatggagttcgggacgagggggaaacggtggaggttcttcgttttcattctagaggtgtnactaagtaaattttgagacatattttgagggagttagata

SEQ ID NO: 48357 - DNA, 811 bp, Arabidopsis thaliana
gtctgcaactaggaaacctctcgtcaaaatctctcaaggatcacaaataccttgacactaacacttggttttaattttgtggttagtgaaaaaagtaaaaatttgtatatttttcagttttagaacattgtgtacatagacttcttaaaaccagggatttagctcaacggctataagaggaacaataaaatcaagaatttgatgattgagaacaaataagaggaaaaacaaagaacaaagattatgaagaaaaaaacacacatctctcctttagtttcttcttgctttatatagaaagaaaacagcaacagaaacaacaatgcatcaagtaagaaaaaccagaaacagagaaaaacagagtgtttttgttttcgcaattgtccttagtttttttttttcagtttcacagagaaggagcagtagcagaagtattcatcagcgtggtcgggccaagcggatcttttccatcaccgttcttattgttgttatcgccaatgatggtgctgcttgccgagctgctgttagaaagagaaccaaatgtcgacttttgcaagacgcctgttggagaggaaccaaacttgggactattggtcgtgctgtttagtacctcgccgagtggacctcccatggagttgttattacccaggagattggtatccagttattcgtctttttccgggggtcaagaaactcggtgttgacgcctaatcccatgtggatcgcggggtcaaactcacgcgataaccttaaaggtgagagtgcaagtttatcttgaacaggggaagatggagccatagggattgacattgag

SEQ ID NO: 48358 - DNA, 1630 bp, Arabidopsis thaliana
tgctttgtgacctttgtcacattctagagttgagctgcaccttctgaatttaaagtttatagaagcctctgtttaaccttttcatttttgtaaacagcaataaattccatgttttaagacccaaatcagcctgcattttatcgtcttcagataatgattgatccaaaaaaacaaagatgtcgccattatacttaaaccctcgtccaaatcgtaaattcgtatgtttggggaccatcccacacacaaacatgtgattataataaatattatttaatggtttaatgcgagcaataatcttagggagaacacaagtgtaacgcctgacaaatttggttcgaatcaattattttcttcctatttaaaacagagacgcttcccttcacttcactccacttcacttgaaagtcccacacagtctccctagtgagcgatgatgaaagcaaaccagaaaccgaaaccccacgcgccaccgcgtcctctcttctcctgtggcttcttccgccgctgcacacaatccgtcctcagcccaacctctcctcaccagcagcaacctcgccgtaaagccaccaccacttcctcctcatcttcctcctcctcaacctcaacttcccaaagcttcactcaatggcgctttcctcatcatcttgatcaaactccatccaccgctcctcctcctcctcattcgcctcctccaccaccgcctcttccggtcaccaccactctccaagaaaccttccagatcgcagagcttcacctcacatccgtctctgaatccgacaagctcctcgctctacagctactcgagcgggtagtcgtacctgacccgccatctgatccgacttgtccaccgggtctcatgcgaggtctcgtctcttgccttcgtagcaacaacaagatcgtaacggcaaaatacgtcaccaagatcctactcgctctctgcctcgccgaagaaaccgccacgtggcggtcgaggctggagccgcacgagcggtggtggaaacagcggcaggactagagatctcagcggtggagcgagccttagctgctcttgagctaatgtgtacaacggcagaaggagcggcggaggttcgcgctcacgcgatgacggtgccggcgatggtagcggtgatggcgagattggctggtagagggagagaatacgccataagcatcctttccgtggtctacgggaaaggcggcgaaggaggggattccggcgaggaaatcgcggtggcgccggcggaagaagtggctcgggcggtggcgttggcgctggaaggagagtgtacggcgagaggaaaaagaaaaggggcccaactattgaagacactagaggaatatggacggttggatctgagtcagaatgggacctgagaaatgaaatctaacggttgcaattatgtcagatgaaaaataataaatctgaaagctagttttattttggggtcacgggcttgttgttcttttgttaaagatgtgtgggccttcgtctctgtctcccctatctttgtatatattacattataatcccttttaattattaatgtcaaaaattattaggtttttacagtggaacaaatttccacattttttaccctggaaagacgtatttgactgttagcaacgaact

SEQ ID NO: 48359 - DNA, 838 bp, Arabidopsis thaliana
aagcttatatttttctttactaactgcctctagtttatagatgctattttctgcagaataagcttaggctaagttgatacctcttatatgaagcagctattaggtgacctagaataatttgttagattttgaattttgagcatattattggcgactgttactttatagatgcaaatgttttaattctaggcgttatatttctttctaacacatgctttataacaataacttgttgaaggaagtgaaatcttcaatgaaactttaactgtttgtatatgtataacgggactaatgtgtgttatctggactctgaatttatgtcagcgctctagtcatggctgaagctgaagatcagcaaaatttcgttgcacacaatggagatcaggtaccagatcaagggtcagatgagttgcataatgggttacgtaccaggttcatgatgagaccttgttcaccaccatacgaggttgaagatccgattcttgaacctcagcagtacgaggtaccagatccgactcttgaaccacagcagtacgaggtaccagatcagactcttgaacctcagcagtacgaggttgatgatcagttagagtatcatcaataccagttgcaggaccaggctaatgaagatgtccaagatcattcgcaagatgacctacaatatcagccacaaaatcaggagcagtttcagttacaagacgaggctcatgatcaggctcagtatcaggcgcaaggtgatgtacaagatcacaatggtgatgaagtgcaagataaagtagaagatgaggaaggaattcctgagcatcttgagtctctacagaaatcagagcctgaagaa

SEQ ID NO: 48360 - DNA, 579 bp, Arabidopsis thaliana
gttttgtgaacaacatttcaggaaatttagctcagaagaccacctagtgttggtgagatatttcttaggactcataccaaaaaagatgggacttttgttgataggaaggcgtaggtaattcatgaggcatatttgaagaacaaggaagctaagttggctgccgttgagaatgatgaagggtctgatggtacttcccatggatcataactatctcaagagaaggatgatgagatcttccttcaggtaatgtggttaatcctttttttctttgtatcatcacttacttcatcttttaagaactaatcctcttgtctcaactatcacaaacgagtgaggcgtatacttcggaatgggaagcttagggaggtcattaatgggaagcggaagtacccaagaagcagttatgctttcacttccttgcaatcacatcttgaggaagccaatcgcaagatagaagaacaagcaactctccaagcacatcgtgaggcagaggcattgcgggtgaaagctgagcaaccaaagatcaagcgtgttgctaatgagcacaagaagagatcaacacttgaggatggtgaagag

SEQ ID NO: 48361 - DNA, 958 bp, Arabidopsis thaliana
ctacttggcgactaagtattggtgactgaattgcgactatttgacgactggttacaggttgaattatcgattatacattctgtttttagttaaaactgtaattaacaaacttgataaagcaactaaaaaactgtatttcacaaacaaaactgtaattaactaacaagctgtattttataaactccgaaccttaattcaaatacacacacattaatacaagttcttaagtttgataagaaaagcaactaaaggaaggggaaatgagatgttcactcctggggtggatcttgtgaagcagtagcagtctggacatcctctgtttgatcttccgaagcagaagcagtagcaccagcagactcgaggaatgcgagaaacttggggtctctttctgtcaagtacttcttaaccatcctcaagtgtttgatctcttcttgttgctcattagcaacacgcttgatatctgcttgctcagctttcaccctcaatgcctctgcctcacgatgtgcctggagagtcgcttgttcttctatcttgcagttggcttcctaaagctgtgactgcaaggtagtgaaagcagaactgcagcctgggtacttccgctttccattgatgtacctccctaagcttcccattccaaagtatacccatctcttgtttgtgacagttgactgcaaacaaaagacaagaggattattgtagaaaagatgaagcaagtgataatataaaaaaaagacaagaggaacaagaccattacctgaaggaagacctcatcatcctcctcctgagatagttctgatcgacgggaagtaccatctgacccttcatcattctcacgggcagccaacttagcttccttgttcctcaaatatgcctcatgaatttcatgcgcctgtctatcaacaaaagtcccatcttttttggtatgagtcttaacgaatatctcaccaatagtaggtgg

SEQ ID NO: 48362 - DNA, 987 bp, Arabidopsis thaliana columbia
  unsure (1)..(987): unsure at all n locations
taagttggttccccttgagaatgatgaagggtctgatggtacttcccgtcgattagaactatctcaagaggatgatgatgagattttccttcaggtaatgtggttaatacttttttttttaattcacttccttcatcttttaagaactaatcctccttgtcttttgtttgcattcaactgtcacaaacgagagagaggtatacttcggaatgggaagcttagggaggtacatcaatgagaagcggaagtacccatgaaacacttatgctttcacttcctttgcaatcacagtttgaggaagtcaaccgcaagatagaagaacaagcgactctccaattacatcgtaaggcagaggaattgcgggtaaaagttgagcaagcagatatcaagcgtgttgctaataagcaacaaacagagatcaaacagttgaggatggtgaagaagtacttgacagaaactaacccccatgtttctcgaattcctcgagtctgctggtttatgctttagaagatcaaactgaggatgtccaaactgctactgctttacaagattaaccccatgagtgaacatctattttccccttcttttagtttcttttcttatcaaacttacaaacttgaattatgttgtgtttagcttgaatattattatgttgtgaatatgtttgaggaatgttgtgtgtttgaatcaaggttctttgtatgttaaataaagcttgtttgttaaatacaactttgtttgttaaatacaatttcttaacattagtatttcataaaatagaatgtaaaatagataattacacctgtaatcaatcgtcagattgttgcaattaagtcaccaatacttaaacaaaacagttgccatgtagtggcaaaacagtcgatatatcagtcactanatagtcgccaaagtgtcactatatagtggcaataatgtcgcctaacagtcgctaaagagacgatcgatgactanaatagcgacacatgt

SEQ ID NO: 48363 - DNA, 738 bp, Arabidopsis thaliana
tctgaattgttttgtgacaacatttcagaaaattgagctaggaagaccacctactattggtgaggtattcgttaagactcataccaaaaaagatgggacttttgttgataagaaggcgcaggaaattcatgaggcatatttgaagaacaaggaagctaagttggctgcccgtgagaatgatgaagggtcagacggtacttcccgtcgatcagaactatctctaaaggaggaggatgaggtcttccttcaggtcatggtcttggtcttcttttatttcttctctattatcacttgcttcatcttttctgcaataattctcgtcttttgtttgcagtcaactatcacaaacgagagagggatatactttggaatgggaagcttagggaggtacatcaatgggaagcagaagtacccaggcagcaattttgctttcactaccttgcaatcacaacttgaggaagccaaccgcaagatagaagaacaagcgactctccaagcacatcgtgaggtagaggcattgcgcgtgaaagctgagcaagcagatatcaagcgtgttgctattgagcaacaagcagagatcaaacacttgaggatggttaagaagtacttgacagaaactgaccccaagtttctcgcattcctcgagactgctgatgctactgcttctgcttcggaagaacaaacagaggatgtccagactactactgtttcacagagtagagatgggatacatgctca

SEQ ID NO: 48364 - DNA, 577 bp, Arabidopsis thaliana
ggtacagacgataccaatattccaaatcctctgttcccttccctcagtaccttgaatgcatcttcatcggtcttgtcatctccgatgaagattgggaggaactcatcgttgttgcttaatccgagagactctaacagaaactctactgcttttcctttgttccactcaatcacaggacgcacctctaaaacctgatcatatcaacaaaactatgttaaggtatttggatctaatatgagaaaccagagtgatgtttattccacaagtacctttctaccgtgagttatacgcaaacgagggtatcgtttcaggtggtcatgaacgcgttgagcaacaagtggccagtccttctcgtcaacattacggtaatgtacagaagtacaaaacttatggttctctacttttgcacctttgatacatttagttatctcaacgaggttattataaacctcttcaatgacgggtatgaactctttagcaggctgaaagaggtttacctcctcacctattcataaagaaaagattagcatttacaaaagttgattcatatactgtttttaagcaaaatgaggtcatg

SEQ ID NO: 48365 - DNA, 656 bp, Arabidopsis thaliana
ccccaaagtcacaactttttatttttgaatctagcataatccaatcaaacttgtgatcttaagatgatgatgatgatgatgatgatgatgatgatatatcattcataggaacaacaccaccatcattgagcaatttctgctcagttttcttgggcgattgaacctccccaccaaacatttgcttcctgtattgctgatgtaatctcccaaacagctccttcttaacagactcaaaagccatatccaatctctccaactgttcaagagcattcggattatacataaacaaaccgtagaaaagctcaaagctatcactcgatgtgttctccaccaaatccaacaacgtctcataacctttggtgttaatcggcgaagactcaactccatatttctccaaaacccttcccatagtatgcgtcacgaattgcgatccagctgcgtaataatcatgcttctcacagctcatttcaaccatcttgcaaccttcattctcaaaaattcttagaaacttctcacacctctcttgtcttgaagctgcgtctccgattctcaccttatcgtagacaaagggcaagcagaccaagaatgcttacactctcaggccaaacattggatgagtcagagaatgtcaactccttaggaaggtattaatgaga

SEQ ID NO: 48366 - DNA, 532 bp, Arabidopsis thaliana columbia
caataaaaacttactatttttccatgtcatcctattaacttaacaaaattaaaattagacatgggcctagccaaccaaactattttcaaaactaaaatctgtataaaaatatgggtctaaacttcataatctagaaaacttagacctcggaaaataaaccgcagcgctgtaccaaaccaaaaccgatgaaaaaactaaaccgaaccgaacaaataatttgaaaataaccgcatggatattaaattctataactgaaaccgaatggatacagaccaaaatattttggataaccgaaactatccgaaatataattatatttttaaaattattagttatttttaaacctaataattaacaatagatatataatagtaaaacatagtcgacagtaaccaaaaatatatgacaatatcaaaataaccaagatatccaaaaatattttaaaacaataaccgaatagatataattttctaaaccgaaagaaccggaaccgaaccgaatccgaactcaaaccgaaccaaaattttaaaat

SEQ ID NO: 48367 - DNA, 626 bp, Arabidopsis thaliana columbia
  unsure (1)..(626): unsure at all n locations
gtccatggtccagcacacgcccatctcggccaaacttaggccagcgcgggtcctcacactgcctactgcgggcacactgcaggcgtaccacgggcatactacgggcacactgcgggcacactacgggcgaactggggcatactggggcaaactgcgggcgcatcacgggcaaagtcatactcaaggtgagggtcattacaacgcaattgatcagttaattgtcgagtgtgctcaagactatggtccgaatggggaagaaggaggagaaaatgggaacgatgggggtgattcctagtcggactcatttgaatccttaacgccagaacctaagagtccgagtgtgatcaacatctccttggacagtttgaaagctatcttgataatattgaaccctagcgaggcggattcatgctgggaggatgaaatgtttaaagggaatgaaccgagtgatgatgaaggaaatgggaggtgggatcgatgctacttgaaaaggaactgaatcagaagtctttgatgaatcgtttaagacttgatgaagaaaggtcaaaggaaagatggttgataaggagggagaagatgagaggcagaaggganagagagcggcagaattggaaatgggacagaga

SEQ ID NO: 48368 - DNA, 596 bp, Arabidopsis thaliana
  unsure (1)..(596): unsure at all n locations
cctgttttctctctttacttgttctaacttcttctttagtcaattcttattcttatgctgattatggaaagtgggagtgtagataacttgtggaactctcggtctctcaacatctactgtaaaacttgctgactccgatggcaaagagcatgtagcttgttctgttggaaccggacctgtagatgcagcttacaaggcagttgatcttatcgttaaggtacttcttttgctaggattgccgattatatatatatatatatatcaatgattacttgtttaatgctgatcattagctatgcatatacaggaacctgcgactctgcttgagtactcgatgaatgcagtaacagaaggcattgatgctattgcaaccacacgggttctaatccgcggagacaacaactactcatcaacaaacgcggtaacgggtgaatctgttgaaagaacttttaggtaaattcattttaacttcatcatccttgtttgaaacttgaaactaatctagcaactgaagctanagaacagacagcgcagtactactctgactcactgagtttgggttcttcagtggaccggagcaggaatggcattgttgt

SEQ ID NO: 48369 - DNA, 541 bp, Arabidopsis thaliana columbia
caagacaagaaagcaataaaagagattgaaggttcagatgattaagacgttcgggtttagggaaattctcaggagatatcagaatagtagatttagcagtaaattaggaatattatcgaaccattctagaactcaaatcactaatatagagtaaccgatggtgttccgcgaaactcactatgcttaatagtattgatcccaagtctcttgtaaatctctagaattaagcaagcattataatcaggtttgataagttcacctaagtaatcgacgctagcacgcatctaaatactaggctcatctaagatagttccagataatagatacctatggtgggtatacgtattatcctaaaatcaagttctagttaataactctaaaactagcattaagaacaatctaagatgaaaaattataaatatattatcctaacagggttttcgatctactaattcatccaaatccctaattaagaatcctaaacccaacaagagaactactcagacatgattatcaaagaacaaagcatgtatcacgtaga

SEQ ID NO: 48370 - DNA, 569 bp, Arabidopsis thaliana columbia
caaaaaccgggagaagcatatcaatgaaatccaaaagtagttgttttagaccctttagagcctttgtagcctttggagcctttagagccttttgtactctctggttttgtaaaacttgattaaacttggttttgtaaaggtacaactatgacaaatgtaacaaatgtgcttaatttgcaacaaaatttgaggtaatgttatttcttatacaaattataccacttatgttgagtactaaaactactgattgataaaatcataatttaatgaaacttcaaaaaattagtagttaccaaattcatttgttatagaagaaacaccttacactttcaagatgactttataattattatcatcataacattgcaaaacacacaaaattgaatttttcagacatatttttctatgaaaatatatggaatgtttataaaacatcaaaactctttggtataactaaatttatttagtttaaatttaagtatatctaataaaattaaaaaacctcctaaagtcaaactgtgtatatacaggttcaacctgttaacttagaatatctgtgtgcaaattta

SEQ ID NO: 48371 - DNA, 535 bp, Arabidopsis thaliana columbia
gttttgaatatctgatatgcttatatagtttacagatttttttaatatttatacgtatcaaagcggatatccgcaaatatcacaaaaaattccggatattcgaaattccggatatccggaaagtttcgaatcaaagcaaataataaaatcaagtattcgattaaaacgaatcgaataacaaatagtacaattttttccggatattcgcttcgtgcccaagcctagtaacgaaagtagaaaaagcaagtcatcctttaaccgacgtttttagggaatccacgaataaagttagcaaaacaaaaaaaggtttccccaaatggcaatagacaataggcaatgggaaaagaaaaacttagcctaagacgtcaaaacttccgttactatttggagtcaaaaatattgcgaataagttctaaccaaacaaaatcagtaattatcatcctacttaaaaattaaagaataatctcgccataaaaaattatgcgtcaaattaatttgtttttaatattcaaaaatctgaccaaggaaatatata

SEQ ID NO: 48372 - DNA, 536 bp, Arabidopsis thaliana columbia
caaccatatctaactccttccttcgctatcaacacataacatactaaacaaggaagaaacgaaggtttcattcgcgatctggcgataccacaagcccagctcccaaaatctggcaggtcccttgtgtgacatcccttcaacaggttcccgagataaaccactcaaacttactcaagtttgaacctacgaagaatataccatatcatatccgaaataacttggactttaaacaagtccaattattattcggaacatgaacaaaacgaggtgatcatacaccaaaatcgataaagtatcaacacacgaataaaagacaaaaagtacttgttaaaagggataaaagccttcctaggcatcaaagtacttaactgaacaaaggataaaagccttcctaggcaccaagttcaaaaagaaacaaacaaaaggatgaaagccttcccaggcactatgtccgaaacaaaaaacacaaaagcctaaaacgaggagcgtaagtgatcattccttcagttcccggccggcgtggaaaaacagtccag

SEQ ID NO: 48373 - DNA, 340 bp, Arabidopsis thaliana columbia
taagaacttacttttaagaagcaatagagagagaggagagactttagaatttagagtgttttgtgtttgagagcttgagaaataatgagaggctgggtctctttatatagtagagggagataggattttgcagaatatgcttaggataagcatgacatattttgagactatcctgagaatattctggagactatcctatcctgagaatattttatgactatcctgagaatatgtccataagattcaactcagcaagcccaataactcacaagcatgacggtccgcaagcccgacagcccttgagccgacgacgggacgtccgacaacccgcagcccggtt

SEQ ID NO: 48374 - DNA, 514 bp, Arabidopsis thaliana columbia
atggaatagccgatttttattacacatctataaaccaggtttatcaaatagcagttctggtaatagatatctatggtgggtatatctattatctggaatcaagttctagttaattactctagaactagcattaagaacaactaaagaagaagaatcctacatataacctagcggggtaatctactaaatcatatgactccctagtgagaaaccctaaccttaacaagcagactactcaaacatgatggatgaaacaaacatgtatgaataaggaagcataaacaaatcaatagagaaaagagttagaaaagatctcttcactgttattgaaatctctaatgaaactctgaaaacaggggtgaatagcttatgaaagtgctcaagaaaataacttggttgctaggaaacttgataaaaagcttggtaggtctaaacaatgacctttaagactatatatatgacctaaaaacgtgtagagactactaatgaaaataggggagtcttttggggcaaa

SEQ ID NO: 48375 - DNA, 1003 bp, Arabidopsis thaliana
tataaggttttggtttttttttggtgataacttaaagaatctgtgggcagtgggcatattcgttttctttctaacgtgaactttttatctcattcctattcagcgtctactacaaagtcttcactgcacgtgacgcatagacacggcacgtgttcgcgtctaaacaatggcaaggccacgagtccagaccatgtcgagatcctaagactcgaccaggctcgcgtaaactcaatccactcaaaactatcgaagaaactcgcaacagatcacgtcagtgaaagcaagtcaacggatctaccggctaaagacggaagcacactcggttcaggtaactacatcgtgacggtcggcctcgggacaccaaagaacgatctatcactaatcttcgacactggaagcgatttaacgtggactcagtgtcagccatgtgttcgaacttgctatgaccagaaggaaccaatctttaacccttctaagtctacttcttactacaacgtatcctgctcatcggctgcgtgtggttctctctcttctgctacaggttcaatttcagtttttgtagttccggttattacaaccattataaccgtatccgcttttgttaaccggtttttaattttttattaggaaacgccggaagctgttcggcttcgaattgcatctacggtattcaatacggcgatcaatcgttctccgtcggatttctcgccaaggagaagtttacactaacgaactccgacgtatttgacggcgtttatttcggttgcggcgagaacaaccaaggacttttcaccggtgtcgccggacttctcggtcttggtcgtgacaagctttcgtttccgtcgcagacgcaacggcttacaataagatcttctcttactgcctcccttcctccgctagctacaccggacatctcacattcggatccgccggaatctccagatccgttaaattcacaccaatttcaaccatcactgatggaacttccttctacggccttaat

SEQ ID NO: 48376 - DNA, 424 bp, Arabidopsis thaliana columbia
tgtatgaatcgaggtaaaaggaagagcagtgagattagctccagccttagtgttgtgttggaaactagcatatcctcaagactgttggtttgccatctagatttttcaatagtcggtttgagtcgaacctgtagcattaatcaaccaggcaataatctaaagaatgaagatcataattccttacaaaactttgactcaataaaacgactcaagaaaataagaacaataagagtaagaataagactcaaaaagaaaaacgtagttagtaagtgcctcccccaaacttaaacgacactgtccctagtggcattcaaattcggggtaagcgagaaaaatgaaagacaaacgtcaaatacaaggctcatctaagatagttccagtaatagatacctatggtgggcatacctattgacatacaatcagg

SEQ ID NO: 48377 - DNA, 654 bp, Arabidopsis thaliana
aaagcaaagccttgaacagcagataaggcagaaggagaatccgagggaaaagggaaggagtagaaccaagcatggatcccatctgctgggcagtttgccattcctttgcgtcaatgatggatttcataataacttcctgcttagagaaagaagtgatagcaaacaccacttgattgcgagcagtccataagttccatcaaatccaagggtatagaggtctccatcctaaacccgtaggagggagacattgtctcttcttcacaagagcaaagccttcttttgtattagagagggtaggcaattgacattctatactctctgagcaaaagggcagttgaataagatgtgagtgatggtttcaaagtctctgcatcgggtgcagaaaggttctatagaaatgttccgggaaagcagttgagccccaacaggaagagcattattgagcgctttccaaatgaggagtttgatttttggggagattttcaaggaccaaatatctccaatccagttgttcgtcatatgagggactggagggttctatcgcattatgttcttgcacatgatagcccgattttgtggtgtagagacatctgagctgaggaacaaacttttttgcaaggcataagtgtttgctgggcttgatggctagtgata

SEQ ID NO: 48378 - DNA, 1254 bp, Arabidopsis thaliana
aacaaaaaaaaaaaagtgaagaagaaaagacatatggcctgatacgggtaaacttgtcgactactgcacaaccaaaaaaaggttttttttcttctgattcttgatcaattaacatcgacgaccggctctgcagttaagagcacctgagtaagaggtcatggtgccgacgagtgaggatgatttggctgataaactcgaagctctggcatagttggctccagctccagctccagaacgtgtgaaaaatgctccgtttaagaaaagatctccttctgatctccaattccagtgcttccatttcgattctcctgtgtactctctcttagtcacctgccatacatattccacaatttcaccaatcattaatctcattgcaacaatgacatagaattaatgtcaaaacacaataaagatcgatcctttgaatcaagtggatagtcaaaagaaatatacctccttagcaaatgggttgactggagcaagaaatcgattgccctgactgttgatggttggaccagcactaccaccaattgcatacatttcccaatgagtgtagtcattgttaactacatggaaatatccatgcctacatctgcaaaaaccaaacgtttcttaagagtctacacaacttctctaatcacacaactaacagagcttgagattttcttcaagcaagtttggtaccttggcattctctggattaaaccttcaccaaaatggttgtaagcaattgtaacttgcatcaccttgtctcttgtgtatgaatcactatgccccaacaacataacctaataaacacattccctaattaacttactgctacaaaacccaaattctcaatcaatcatccaaatatgatttaggtcatacctcattgtggtgggtgaagaaattgtttgagacagtaatggcggtggagctcataacagcgtcaacaagtccatcagcacaattagaaagcgaattgtgatcaatccagatatgactcgatccaaaaatcgagatcgcgtcaccatcagccattgatctaaacccataatgggacggagagcttctaaccatagcgttacccgtaggcttacagtcatggacatgaatcccatggacaataatgttcgtaacgtattgaatcgtgagacaagctccattagcgatgtgaacattgacaccacgaccatcgatggttttgaagctgttcatgatcagctcttgcttcaaggttataccatgtcgcgtttgaagatgatcagagtg

SEQ ID NO: 48379 - DNA, 569 bp, Arabidopsis thaliana columbia
tatttttagaaagaaaaaaaaatagaactaaactcaaaaagtgttcaataaccttctagttcctttgaagagtcacatccttagttgagttccaacactctggtctatctgcccataatcctcaattctttctactttagaattttaaaaatgagcaataaagttgttgtttctctttaattagaaatagtatttagaagtagttaaatagccatccatttataggtctgtgatctattcatatttttacaaactacaataaagatcaatagttttgtgattttatcatcattagactattttagtagtataaaactagtatacaataattagaataaattagctgtagatttttacatgggagttatgttccctgatctggtctggtctcgtttaaggatatcattttgtacgttaaagaagaaaaatatccttatcctcccttttgtgtttatttgttcagatgttacaaaaaccaccaaaacgcaccaacatcccaaaacgcaaacgctaaaaacacgtagctgtcgtggactagtgtcaatcacccttgagtgtcccttcttttg

SEQ ID NO: 48380 - DNA, 324 bp, Arabidopsis thaliana
cctcgcgccaatgagctgagaagaatgctacgccaagagttaagcctcaacgtttcctattggaaatcatggcgggcacgggaaattgccatggacaatgctttagggtctgccatgggaagttacgccctaatccaaccttacttcaagcgtcttttagagacatgatgcatgtgttcaagggtatgcttacatgaggaaagtcattgtaattgatgggactcacttacgaggacgatatggcggatacttagttgcagctagtgcacaagacgcaaatttccaggtcttccccattgcatttcggatagtaaacagcgaaaa

SEQ ID NO: 48381 - DNA, 549 bp, Arabidopsis thaliana
tagcctagaacacaggcatgaagggtaaaaaacaagtacttgaatctctctacccctgaagcatccttttcagtttccattgccacaagtgagttgggatttgtctccaaaagcagcttaaagtatggttggtttagagcgtaactccccatagcagaccccattgcattgtccatcgttatttctcgtgtcctccatgccttccaataagagacgttgaggttaaactcttggcgtaacattcttctaagctcattaggtcgaggtccacggcccactcctatgtatttagttcccatcaacttcccaatcacagccgttgatgcttgcttgtggaagtccctttagcatccacgctacacgtgtgtgttgaagtcgtgctcctaaccgtcgaacgtatcactatctggcagcttagttgcataaacccaccatggacatgtatggctgacgcacacagccgccacaacatttggcccggactttacgtaaatgaaatggaacttcctccggatcgcatgaatagcgagcttagttgacaatcctctt

SEQ ID NO: 48382 - DNA, 496 bp, Arabidopsis thaliana
gtcgtcgacgcatgcttgtggaagtctcctcttgcatccacgctacatgtatgagtttgggtggtgctcctgacctcgaaccggtcgctatctggcagcttagtagcataaacccaccatggacatgtgttgctgacgcagacagccgccacgacgttcggtcctgatttcgtgtagatgaaatggaacttccggtgaattgcttggattcctagtttcgttgcgcagtcctctttgcttttaaaaatccgaccaatgtagatatcatctccctcataatcagcatcttttaggggacgataagagcatctgcgaggaagagaaaacatagctgttaatacttttagcgaagattgtttagttatcgagttaaacaattacctatcgaacataattagctatatataatacagggctaaatagttttttttatatcaaaattgctatataggtatgctttaccttcttcccctgggtcgtcaaaatatggtggggc

SEQ ID NO: 48383 - DNA, 640 bp, Arabidopsis thaliana
tgtcggatatttatggggttgcgagatatcacttatacacgttggtgtatttattagcagtatactctcttctttgcatcaaagaaaaacctaccagactaaagaccttagtctccgacaaaattaatgcgaaaggagctaaacacccagagaattcgagattgaaaggtaaaagtaaaataatagagtcatacgtatattattgttaagttccgtaagagtgatttttactttagggtttcatattaattgaaataaacggatactaacaagtttgttactgcgaatattggcccagcaggtgtaaatggcgttcgtggtcagactagtacctggggaatggaaaaaagatgagaacggctatttcgaacacgtttcacatgccgatggatttgcgttaggagtccgattgcgagacagcgatgggtttgctaaagttgttatggcggtaaaggaaaagttagcgctgggtgccgaagacgatatcgagttaacatatcaatggccacagtggatgatgggtcatgactggagacgcgctaacccgatcgatatattggacgatgaggatatgacactgtttatggcaatacgggcagatctagatgaagtgcactacgggtgaagataatcgaggagg

SEQ ID NO: 48384 - DNA, 536 bp, Arabidopsis thaliana columbia
tttatatggtaatactattaggatgtaaccatcgcttccatttgtagcgagcatcaagaaaaagatgctcacaatgcaagttattgggacataacagggtaacctgcaatggaccagtaccggtatgtcaaatattttctgttaatgactatattatggaatatttatatgatctgtttgagtgtagggaccgtagaaactatggttcaaggacgttttttggcgcggaaagtgatggatgctgccaggattaataagaaatgccctggagatgtgtataaataaggaaccttaagcgatcagaaattttaaatgtgtatacgtacggctattgatcgctaaatgtaatattatcggaactcatccacttttcaagtagaaatgttaaattataatgtcatattttatctacccaaacagatattctgataaacaaagtagtagccctaattcttagatattcgatgactcagtgctaaatagttatgatatgctgttaaacactaagttattaggaaaagaaattgacattgggg

SEQ ID NO: 48385 - DNA, 519 bp, Arabidopsis thaliana
cgttcttgctgtttactatcccaaatgcaatggaaaacacttggaaatttgcgtcttgtgcactagctgcaattaagcatcccccatatcgcctccttagttttgttccatcaataactatgactttcgtcatgaaagggtaacccaaaacacacgcatggagcgcaaagaacaagtacttgaatctctcgacacctgacgtatctttttcagtctccattgccacaagcgagtttggattcgtttctaaaagtagcttgaagtacggttggattagagcgtaactccccatagcagaccccattgcattgtccattgctatttctcttgctcgccatgctttccagtacgagacgttaaggctgaattcctggcgcaacatccgtctaagctcattaggtcgaggtcccggcctattcctatgtatttcgttcgtatcaactttccattcacagccgttgatgcttgcttgtggaagtccctctcgcatccacgctacatatgtgggttgaagttgtg

SEQ ID NO: 48386 - DNA, 845 bp, Arabidopsis thaliana
cctccatccttcaactttgctcgccaaaaaagttcttatcttcttctgttatggttcctgcattcaggatatgtattttaatatcaagtaattgatatgataatccgtaactcttttattaccgtgattggtccattgcaggttgccctgttatgacctaacgacttgcatcgtgagcatctttttcttgatgttctctacaaatgtgtcagaagtttataacctaataagtttagcatataagaattatattagcggttacaagctttagttaagctagttaccttgaactcgcctctggagaatagtcttcgtttcctcgggtgacctggtggtctccaagcatacggtggagctagtttacccctcccacatcatttggtgaaggagtccgcgtctccgtgtctggaaccggcagcgcttgatatgacaatctagttgaggggtggtgtgatggattccaaccatcgtgtccactaagagtccttcctgtattgccgcggctatggcatgagtgcaaggaatcgttagcagctgaaactccctacaagtacatgttcgttcccacagattaacagcaaatgctgcacctcttctctctggaacttcatagagcccatccccaatttttattacagcacatcctgctcccttctttgtaattttcgatcaccatgtcgtgtacctttggcggtaggatattctcctcaaactgggctgcttgcctccggagtgcaaaccatgtgactagagtagttcgaatggactctaatatcaagattaccggataatctcgtgccataattaacacattgtttagtcatgtagttatattgatttctgag

SEQ ID NO: 48387 - DNA, 850 bp, Arabidopsis thaliana
taagctttagagatagtatgtgaaggagactgaaatattttccatcttatttctctcttaatgttgtgattacattagactctctctatagtagtctctaagatgagtattaagctaaagtctctcacgtttgcagactattcgagcaatatcatcctgtacgaggatatcttcgtggtcgatcagttagaccctgatggcaagcagttcgataaaggtatacactttattagcctcactcacgatttctagtacttctcatggcttacatcgacgtttgttcatagctgtttagttcatgtatgtattgtgaatgagttcttccgtttatccttttttggtctgagtgtgtgggttttgtggaaaaatttaactttttaagtttttagtctcccccaagttttgttctgtcttcagattgagtggctttctcttaaacctacaatgatttttgttgtgtttgtggttacagttactcgcgttcaagctacgagccacaacttggaaatgtttatgcatttagatgttaacactgaggtttatccattggctgttggtgataagttcacgctggctatggctcccacgcttaatctcgatggaactcctgataccggatactttactccggtactgcatgctttttctatgtgagatttttggtgtatattgcatactcttttttacttgcttggataaatctcatgaatggttacagtaagttaggccagttaacttttcttaaggttttggttggggcataccattaagtgctaattgctcgatatgactaattccactggcttgattcaggagataggaataagactaatcatatgaaaacttgagc

SEQ ID NO: 48388 - DNA, 899 bp, Arabidopsis thaliana
cacattaagtccatattttaccttgaattctccttttgaaaataatctttgtttccttggtcgctcaggcggtcgacgcacatacggtggagccagttttccaccctctatatcatttggtgaaggagtcagcgttttcgtgtcgggtactggcattatcagtgcttggtatgacaatctaagctcggggttcgtgtgatggactccaaccatcgtgttcacgcagattcctttttctatagccgccactatggcatgagagcaagggatagttaggagctggaactccctgcacgtacatgttctctcccataggttaactgcaaatgctgagtctctcttttctctaacctcatatagcccatccccaatctttagcacggcacattctgctcctttctcgtaattttcgatcacgatatcgtgcactttaggcaggaggatattatcctcacttttgttagcttgcctcctaagcgcaaaccatgttacgagtgttgtgcaaattgactataatatggaaattaccggataatctcgagccatagttaacacattgtttagcgactccgcaatattacttgtcatgacgttatacctattcccaagaaaatgggactttgtccaatgctcgaacccgataccttccaagtagtctacgtacggtccatgtttagctcgaacttcagcaaatatcctattgaagtcagttagtcgataagctttagctgcactcaatatcaagaaaactagctgatcgtatttaaagtacgcctcaatgttccttttcaggtgtacgacgcaagcagcatgagatgacatggggtaacctgcgtaatgtttagataggaagctgaattttagaaacatgaaatattagaggctaatttgattagtat

SEQ ID NO: 48389 - DNA, 891 bp, Arabidopsis thaliana
gggtagtatctaaacgagttaatcaagaagaaagtactgataaacttgaaacttacacacctatagtacaaactcatactgtaaggactattcttcatgtagcaacaatcatgggtcgggaaatcaagcaaatagatgtgaaacacgccttcctccatggtgatctcacagaaaccgtctatatgacacaccctgctgggcttattgatcctgcaaaaagagatcatgtctgtcacttatagaaatcactctatggattaaaacagtcaccaagagcatggtttgacaagttcagcacttatcttttggagtttggcttcatctgcagtatgtctgacccttctctcttcatctacataacaggaaaagatataatcatgcttcttctttatgttgatgatatggcaatcacgggacatagctcagataccttagctactctccttgtggaactcagtaaacgcttcagaatgaaagacatgggtcagctacactattttcttggtatacaggcgcaattccattcagggggactgtttctctcgcaacagaagtacgcagaggacctccttgctgtagctggtatgcttgactgtgctcccatgccaacacccctgcctctacaattaaacaaggtatctcatcaagaccatcaatttgaacaaccaacatatttcagaagtttggcaggaaagcttcagtatcttaccttgactagacctgatatacaattcgctgtgaattatgtgtgccaaaagatgcatatgcctaccgtagcagacttcaatctcctgaaacgaatcatcaggtacataataggaactgtaaccatgggaattttcgtaacatggagacagactgtaccatgagagcttatagcgacaatgacta

SEQ ID NO: 48390 - DNA, 556 bp, Arabidopsis thaliana columbia
gcttatatcagggttgatttacagatcatatacttagtccgataacttatttatttggtatcatatatcttatctaggtgacggtgatggactggcagccatgggactggcagccatgggaaaggacaacagcatgggcgtacagaagggcaatgaccaacgaaacgcttatggggggtttatcataagagacaacgtcgagattacagctgggacaagcggtgtgccactaatagacacacaaccagactccattccaatctctaaaggaaaagagaaagttactgatgatgatgagagagaacgagatcgtttgtttgagatgtggcgaactcaacaacaggaagaaatatggcgagagatgtgtgcaacacaaatgaccctaggagcaactcaaattgacgcaacaaacgtgggcgacactggtaaaactgctagagctcttaacttcggaagtggcgggcacggaagtggcggacatttccaagggcaatccacgttaggacttgcaactcactctagcaagagcataaacacaagaagtttgacccaagtg

SEQ ID NO: 48391 - DNA, 820 bp, Arabidopsis thaliana columbia
cttggcgtaaagttggtcgctgaaatatactattctaccatttttcgcccacttttcttcatcaaatcaaaatttctcatcattgctgatcaagaagagaacgagaacagagttattctgaaacacgataacagaagcattctaaaacacaataacagagtgaattgcagccagcaatgatgaaacacgagaacgagagtgattctagcttttaaaatcaaattatgtcgctgcatatatttttaaggtatcaaatttgtatcattcaagatttgtatatctcttcgttctgcatttgttgttctgggtctcaattttagtatcatttagatataaattgtgaatatattgatgttgtagtatcaatggagacaagctagaagaaacaagaatgtttgggaaagagattgagaagactgaaaaaggtgaagaagacaaaagacctaattcagcttcagacacaactcaatacggtgtcgttgagtcagctctaccaaatcagatgaccaagcccaataacatggtctggaggcccaaagcagaaaagcagcccatttagcccatccaagagcaacggtcacctgcaaaacaagaagacaaaattaaggaagcttcaaggaaattgctaaaagatgaaagcaattccagctgtccaagtcaagacctaatcttgactaataggtttgaatgtctagagagtgaggacctagcttaacctaatctagagactatataagagagtctaatgtaatcacaacattaagagagaaataagatggaaaatatttcagtctccttcacatactatctctaaagctta

SEQ ID NO: 48392 - DNA, 711 bp, Arabidopsis thaliana
taaaaggaactgtaaccatgggaatttcttttaacaaggagacagactgtaccttgagagcttatagcgacagtgactatggaggttgtgaaacaacaagcagatcgactggtgggttctgtaccttccttggaaacaacattatctcctggcagtcacagaaacaaccaactgttgctaaaagttctacagaagcagaatatagagctctatcagaagcagcttcggaaattacctggctatgcaagattctgaaagaactcggtattcctcttcatcaaacaccagaactatacggggataatctctcctctgtttacctcactgcgaatccgactttccacaagaagagtaagcactttgccaatcattaccactacgttcgggaacaggttgctctgggaactcttcgggtcactcacatctcgaaccagtttcagatcgcagacatcttcaccaaatctctgcctcacggtcctttctcttctcttcgattcaaacttggcgtagatgttccacccactccaaatttgagggggactatcaatggagacaagctagaagaaacaagaatgtttgggaaagagatcgagaagactgaaaaaggtgaagaagacaaaagacctaattcagcttcagacacaactcaatacggtgtcgttgagtcagctctaccaaatcagatgaccaagcccaataacatggtctgga

SEQ ID NO: 48393 - DNA, 299 bp, Arabidopsis thaliana columbia
ttcttgttctctctttcaaaccttccgatatcttcgtggtagtgtactagatgtgaagagcctttgctacggtcatacacctgaaaacaccaaagaaaatacgaaaatgaatatcgataacagtaaataaaaatgttttagactagaaactaatcataaatccttaggtaacacaattgggccccgacaacggcgccaacttgattgctggaataattacccagaatatctaactgttaagtagaatattcgaggtcgatccacaaggacataagatactctatggatgtccgagactc

SEQ ID NO: 48394 - DNA, 551 bp, Arabidopsis thaliana columbia
tgtcatgtatttttaaattgtgtgtcatgtatgtttctaattttattatttgcaataattactatgttttcttaatttataaatgtttttgaaaataaaatcttaagaaccccaagtaagaacctaccattggacacataaaacttttacattcattacaccatctcttaagtctaactttttcagttttaatattaaatcaatgcttaagaaccaaaattaagaacctaccattggtcatgctcttaggatagtgagttggttggtttgatccgaacttaagggaagctatgtacctcctaattggtctgtgtgtcactgtgatttcgcataatgtcatgcatcagttacactttttgagaacccaaaacacttgagccaccaaataatagcctttttacctagcccataaaatgttcaatatcctctttgtaagagtacatgccactgctattgaatgttaaaatattaagttatctgattatgaaagttcttttagatctcgagacttaattttgtcgctacgcttatggcgaagtgatgcgtgtttt

SEQ ID NO: 48395 - DNA, 621 bp, Arabidopsis thaliana columbia
tcgatttgttgtagcagccggcgattttttatttttattttttacttaggtaaacgttgatttttgttttgggtctatttccttaattttttctttttcgatatagctcaaattaccctaagaactacactctcaaataagagatcaattgcagtacttaaggatcgaatttccacaaaataattttgttcacacagtgagttaattaagtgtcgagattaagctagaagaaaatgagaaaaataaaaagaaaacatagtaagcaaacaacagattagttggttgtaaaacaagataataaaaagttaggtttagggtattctcaagaaacaaatgattagtagatctaatgatagctaggttgttatcgaaccgttcttaaactcaaactctaatattagaataaccggtcgcgttttccaaaactcactatgcctagagctaagattcccagtggcgttctgtgaaaccctatcctagacatgcatgctaaacgagttcgataagtcaccttagtagatagaccgattcttattcacacctaaagcccggcaacaggaggctttttttatgttgtgttttgtaattttcgttttgtattcattgcttaatagaagatgt

SEQ ID NO: 48396 - DNA, 512 bp, Arabidopsis thaliana
cagaccactcgatcccctggtcgagtagaagacttcaccacttcacttcaccactcgaccacctagccgagtacaccatgagagtcactcgatcacttcactcgaccacctggtagagtatcatcacctccaccacctgaccatcactcgatcacgccactctaccacaaagtcgagtatcaccaaaaccatcactcgactacatactcgattgccagcttcagagtcttctcccttctgcactcaaccagacactcgagcacaaggaagaaaagatgactccagcttatcactcgaccactcactcgaccacctgggtcgagtacccttcttaatctgtcccaatactgcgtcgttttgagtattagggtttcagaatatttcgttataagtagcagtactttacattttcgtttatctaagttttattccgcagaccctgtgttcttgacattttgtaatccggatttctcttaatctatttagtatcagcattttgcttttaattttgt

SEQ ID NO: 48397 - DNA, 521 bp, Arabidopsis thaliana columbia
ggctatgcttatatggttgattgcgccaagtgttactcttgtggaggagtgggacatgtgtccatgtattgcccgtaccttgcgccgaatgcgggcgaaggatcctcgaggtgagccgggccattaatgactgcggcggcggaggagaagtgtttgaatgaagggatccctcgtttttatgggtaaggtgtgagtgtcccaagtgtaggaacccttgactgatggtccatgagatcttctaggaaagaatatagttaacgtttttagactaagtataaaatcgactaagtcatagtgaatttgtgtgtaaatatgctaaggcctagaacttgttgaatagtacatgtaagactaagtctaaaacccgatagttataacttgtataaacttttgaatgcataacaagttaagtatttgcttgtttgtgtggtggcctaccattatatgagtgagaaatcacttgtgtaagaatcggatgtttgtgtttggggtagaaccccatcggaagtacccagcaacga

SEQ ID NO: 48398 - DNA, 932 bp, Arabidopsis thaliana columbia
gcaaacaacaacacaagcaaggttgatgaagaagaggtggacttgcagttgcaggctaaggagacaaacaacaacacaagcaaggtggaaataagaactgaaagttctcgtagaagcagaatgagttttgatttaaagaacacaccagagaagagtggcagagacaaagtggtgaagagatcagagagtgctagaaccttcacaaggattccatcatctccatcactcatctttggaatgaaaaagggaatagactgcatcaggaagaagccagtggtttcaggaaacgacgatgagaatgagtatcttgtcaagaacaacttcatcaagtcttctcttcaaacaatcaaacgagctgtcaaattctagagccccaatacactcccactcccacatctctacatatatatatacacatgcatttgtttagtgtttgtgatcaatatggttttattcattgttgtgcataaaaagacttccccattgtttgctcctccatgtgtaataacagcttgttgtgttgttttcattaattcaagattaagacatagattttctccaccttgaaggtgttgttcttcctttgacaagccttgtcttcatattaccaggagtccgtggctcaaatccttcaccattgtcaccagattcttcctcgcccttttcaacactaacacttcctctaattgacggtactaacccgagcctcttccaccggaaaaaacctttactcccaccactactcttcttctccataagcctctccagctggaaatgcatagcgccacactgactctgcagcctcaccacatcctcccgtagccttcttatctctgcttgttgaacattcatctcacgtttagacaaacaccgcgctgcagaacctccctcgaggtaatgtgaacagaagcgtttgttggactctcgtagtg

SEQ ID NO: 48399 - DNA, 421 bp, Arabidopsis thaliana
cctgtaactcaggctttacttttacgcacacatgtttcccatccatagctccaacgaatccactaaaatatggccaatatcttcggtcgacttaaagtctttcaggaattcgataaagttcttgccttgtcggagttctaatataatcacatgctaataattcagttgccgtaagaacttctctaaatttttttgcgcagtttcttgattttgtacaaatcttataccaacatctctttgaacttcattgtgcccatatatccgtagtaacatcgcaacactttcttcaatacttatattcaatgttggctgaagaccataatttgtatgcaacatattacacaatatcgtgaaacatggaaatgacatccataataattgaagacaagcagcatcatcttgctgtagtcgacgccatata

SEQ ID NO: 48400 - DNA, 604 bp, Arabidopsis thaliana
ctccaatcttattggaagtttcatgtagtatatatgactaactggttttcactcggtggtggtgatgggcacgatagtgactccgatgctgtgaacaacatcactagcttgtccatggaatccaacgatcttgtggccttcctctccaagcgagaacttcttaccagaatccattccaaacggcattgactcccttttgttggtcttaaactgaagacatacaattattggttcctcaactccgaagatcttatcgtagtagccatctatgttcatgagatattcaccatcttcaagcacaaactgcaaagattcaaaaccaacaaaggataagtgtaaataatctagaatgaattgaaaaaaaaaaaaaaaaattgttgtttttaaatgacctcttcagctccgagtaatgtcttcttcccatggtcatctccgggtacaaggtctttgcccttactgtactcaaatttgacaaaggatacaccatcgttaccttgtcctacaagtatcttccttacaccgtcgtagaaccatcatcccatgtaactccttcgttgccgcctatcgctggtagtttcttagatggaatcagggagtaggagta

SEQ ID NO: 48401 - DNA, 523 bp, Arabidopsis thaliana
gaagagatagattatccaccagaagaaaaagaggcctatttcgaggaaagaggaattgagtattctgctgcacagctctcaagggagaatgctgagtatgatgatgagatcagagaggactatgcagaccctctctattactcattttcttcctaataagtgtgaggagttaagctagagactttaaacaagctcacttgggaggaaatcccatgactatacctgtaaataaatttttttttttttgttatttttgatttgctttagttgtgcttgtggttctaaggaacaaaggaacagcgtggagaaagagttaatattcaaaacttttactcttcagagagcctggggatcgagtataccagtccaaaggagtgcaaaaatttgaaaactccttgttgcactcggaaaccttgtgatcaagtaaggaggtcgagtaactgtaaaaatcatcactatattcgaccaacagaagctacagagacttacaggaggtttatcgaatttacggaggaatgcggaa

SEQ ID NO: 48402 - DNA, 569 bp, Arabidopsis thaliana
caagaattcgttgaccacaccaaatagacatgcccaatacatactcaaagcccaataaatctgaaaatgtccagaagatctttaaatgggcctaatgaatatatatattttgaaagccctaatgaagctttgatacaaagctttctttataaacgctgcgtcacatcactgaatcaaaaaccctagcgatacttcatctctcgagccggagccgcgttgcgaaagcatttcaatcgtagtctaaggtactctatcgatgattcttcatttctttctttcgaattttacaagcagatatattccttccgattattctcccattaaattttcagtgttgttttgatctgtgaataatgttggtttgttatgttactttgatggtttcagagaatgtcgacagtgggagagctcgcttgcagctacgctgttatgatcctcgaggatgagggtattgctatcacggtatgcttcctggctactttactattttcttaattttgattggtctcgttgtatcattgctcatggagtttaaggattttgagctgttctggtgacttgatagttag

SEQ ID NO: 48403 - DNA, 374 bp, Arabidopsis thaliana columbia
ggtagaggatcccctgatttcaatggtttaccaattaaaccatcaagttttgtaaaattgaatcaaaccaaccaaaatctctaaacaaataccaatttaagtttaaccaacacatctaaaccaatttaacaaaattaatattgttccaaatttcttaaatatacaagcgatgaaattgagaaaaagtagactcgtgattttcccgcaaaaaacgtaaacccgtgatttttccagccacaaacgaaaactcaagattttcccagcataagatataaactcgtgatttatccgcctaagacgtaaacccgtgacttttccgccataaacgagaacccgtgattttctcgccgaaatacgtaaacccgtgatttccc

SEQ ID NO: 48404 - DNA, 595 bp, Arabidopsis thaliana
ctcatctcctcctcctaaacctccagatatcatcaataagactttgaaatttccaaaaactgttttatggtaaagcgtgcaagccacgagtttttcgtcgagcgctttttcttgcttttgataattgtgcaggtaaaaggagtagaccacccatacctttgtcctgccttgctgatgttccacacttccttggtagacctcacacaccgactgcttatacgccaccttggatgatgcgaggttctacgatttacttccaccatctgatccacctgattcccaaactccatcatagtcaagctattgactctaaacaagcgcttagtgagaggtaacccactggtatggttttttttttctttttcttttattttacgtttttcttttatttttctcgcatacttcggatttgaatgccactggggacagtgacatttaactctgtgggaggcgcttactaactacgtttttctttttgagttttattcttactcttattttacttctttttgagtcgttttattgagtcaaaattttgtttgaaattatgatctttattctttcgattatttcctggttgattaatgttgtaggt

SEQ ID NO: 48405 - DNA, 188 bp, Arabidopsis thaliana columbia
tctgaattcggattaaggcttgatctcacctctcgtctgggtatccagcgaatcgtcgagcattgcagaattctctttttcattcaaaggagcttccgttcgacgaagtcctggcacattgagctcggctggtacaactgcctccatcccgtaaaccaatgaaaacgggatttcaccggtcgagcgcc

SEQ ID NO: 48406 - DNA, 983 bp, Arabidopsis thaliana
tcatggtctctttaatatagtatttaactttttggattgatacaattgttttgaaatccagaccaacctggccagttttgacctgtaaagattctttaacatatgttataattttttcaagtgaactcagtttgattttcgtttgagaattttaaaagaaatggagccatcagagctggggtatagtttatatattagcatggtctttcattttttatacataataaagtattcaagtatatcaatcttaatatatatgtaggtggatttgactggagttttagaagtaaaagcgacatcgtacacttcaaacgatcaaataacggagaacgtatacggtacactggtggcgaagaacactatcgccgttaaccacgaccattacctaacgtactacttggacctcgacgttgacggtaacggcaattccttggtgaaagccaaactcaaaacggtaagagtaacggaagttaacaaaacgtcttctcggaggaagagttactggacggtcgttaaagagacggcgaaaacggaagctgacggtagagttcgactcggctcggatccggttgagctgttaatagtaaacccgaacaagaagacgaaaataggaaatacagttggttaccggctgataccggaacatttacaagccacttcgcttttaaccgatgatgattaccccgagttaagagccggttacacgaaatatccggtttgggtgaccgcctatgaccggtccgagagatgggccggtgggttttatagtgatcggagccgtgcgatgacggtttagctgtatggagtagtaggtaattaatttaaagtaaaaataattaatctaaagtttaaaattatttttcatagtaagtaatttttttttttggtttattaaggaataaatttgtggtttgttatatgggaacaggaacagagagatagagacaaagacatagtgatgtggtcaacgttgggttcacaca

SEQ ID NO: 48407 - DNA, 1015 bp, Arabidopsis thaliana
tatattcacctagaacattataaaaaaagggaaaaaaaatcagaaaacattgaacctgagtagtgatgacaagaatccaactagccaagaaactaatcttccttttataaaaagccatgatgatatcaacaataccaacagcgtaacgagtaccagatccaaatccagcaccagcattagcaaacatagagatcaacacatgttccttgacgttaaagggacccggattaaaagaaaactcccacgaaccaatcttatacttggtctcaggcaaaaccctagccataagcttccctaaaggcaacgtaacaacttgaacagagatcatagtgatcatcagaggctgagttctgtatccgaagaaagtgttgagaaacgagaggagaatacaagagagaagccctaaaaaccacatccgaaacgtccacactggtagagaaggatcgtcgtggttcgatacagtgagacgaacctgctccaccggggattcgtcatcgtcgtcatcggcgttgatctccggcttgtgtaatcaatcgcagccattgtttgttgtggcgaaatctagggttatggaatttggtgaaggagacgacgtcagtgaatattggaggaatctttataaaaagagattcgtgaatctgttaaatgagaatctttttagtaattatattttcagagatctgagattttgatttatctgatagacattaaaattaaataaggaagagtaattatcgaaatttgttgcaaacaaaacacgttattccccgcctctttaagcgggaaataatcttattggtacttactaatgtgttttttttaacagttattattaaagtaacataattttaacccgatgttcgctggtttttacttaaatgaaaattgatatttatgactttattcattaggcattgttttcggcaatatctacgtgattcaatcatcattttttcataataattaaaaaaaaaaaaaaggaaaagcttttatatcatttgcaaacgttatcttt

SEQ ID NO: 48408 - DNA, 1440 bp, Arabidopsis thaliana columbia
tcttcccatacagtgtagagcgaggataatgccaaatatgttgatatggctactgtaaccgggaagtatctctgtttatcaccaaacccggataagagatcagagtcttggttcaggagaagtaagattggagccaggaagaatatcgcttggcttgagccgcctgagaggtggatgttgaggattaagcatatggcaaagcacatgatggtggcgacattaccaacagaaggcatccatgctgctccctcttctgacattttctctactgcaaagctttggatcgaggtggctcggcgttgctgcatcaacctcattcgtgtcgggaaaatccctcttgcgcctccttgggtttttgactgaccactcctctcagagaatttctcacgcaaaagcgaagtgagctcaaatttaatcaggagagctataagcataaatatcgctgcatagagacctagaagagatgttcttgcaccttcaatggccaacatggttgtgactttcttatcctcctcccttgtgtcccaaccccaggtaacattttcgttgagatcgtttttaattctgacttgcccttctaacaaatatgtcacaggaaatagagccacgagaagagcaaacacccagggaagcagctttgtgcttgaggcagatggaaaatgggtgaagatgacaaaaactgaggcacacaccagtgttacaacgatcagggcatgtagaacagcagcttgtagaaagaactctgctgatatataaacaccgagagctaaacccatggcaatggagtaaaatgctctcagttctactacgtatttgattgggataagagatgtggcagcagcaagaatcaagaggagtgacacaataagcaaccaagacggccaagtcggtttggatgccatgaatccatagatggaaatgtcatcagctgactggcgagcggccttgatcatatctgaatggtaactccacgtcataggcatcggtggctgcatcagaataaacatgcatccagttgccactactaataccaagcttctcttagctgactgaaaaaattataaaattatcttggtcagcagcattttttagcaatgataactggcttgatgcacaaatggatgatgggttctttttacagataattagacagaaatacatcgaacgagacataagaaaatagctaagcagacataccaggacatgcgaaaagtggaaggcaacaattggtatacaggccagaccaattaaaacgatgcaggaaccaagaagcaaaccatcagacggaggtcttccatgccaccactgtagagcatcaaatattgtttcccggcaaaaccagacagagacagcaaccactacggcatgagcataaccttgccatggcttcattttagaggcagatttcgacttctccctgcacattctaccactgaaatt

SEQ ID NO: 48409 - DNA, 509 bp, Arabidopsis thaliana columbia
cactctagagtatagaggatcccaataatatagaaacgactggagataacgtttgcccatacctcgacttcttcttcggattgattatcttcggattagagtgcgcgtacgtcacgacaaacccacgagtctttctactcggccgtctcgtcgccggtgaacatttatcagaacccaaaacaaagagaggtgattccgacggaagagtaaagagaattcgagggtttttaaaacagtacagtgagaaacccgccatttgcggtaggaacgaagaagaagataatgttaacagagtagaggaattatccgattagagtgattgcgaatataccctaaaaccctaattccaaaacaaacaaacaaaaaagttttgttttgagattcattattaacacacacaagactctaatggcgtttactgttttccgattacacgccgtcgttttaatgtattttagaatatatttcccattggcagcttttttaacgcacacgatggtatttgcggt

SEQ ID NO: 48410 - DNA, 244 bp, Arabidopsis thaliana columbia
  unsure (1)..(244): unsure at all n locations
tggagataacgtttgcccatacctcgacttcttcttcggattgattatcttcggattagagtgctcttacgtcattacaaacccactagtctttctacgttgccgtcttgtcgccggtgaataattatcataacccaaatctaagtgaggtgattcctacgtaagagtatatataattcgagggtcttttatacatnacagtgataaacccgccatttgctgtaggaacgaagttgaagataat

SEQ ID NO: 48411 - DNA, 541 bp, Arabidopsis thaliana columbia
gagttcctcatgtttcttggtcacagcctcagagcagtaatggtcatagtgcttttcttcttaaagttgtaaaactgattcaagcttgattcactgactggtttatgtgtttaataaactgtagataaaagaaagagcagaaaagctagagatgtggaagatgatgggccaaaagagggaagagaagatcaaagagagagagaagctactgcgtgaacagagttcactatggatcgagcaaaaagaactggagaggaagattacagaagccttggttgacaacgttgttctctaaaccaaagcttctcctctgaatctttgtttaagaaacaatcactttagtccttttgttgaagacaagtcttttttttttcttagagaagaaagcgaaggctgttttagcctttttgcatcaagcacataatgagaattgtggtcttgtgaccaatctcttgtttgttgtggttctggtgtcgtaatatcatcattaataagaagttttctcttgttgattgttatcagtagaagattgttttttggt

SEQ ID NO: 48412 - DNA, 581 bp, Arabidopsis thaliana columbia
agtcatagtttgactccaaaacactaaccaagcttcttagttgcttctcaatattttcatggtgttgccgaagtccgtaagagtctttggctttgtatcttctaacaaggaaacacaactttagcttttgggaaccggttgcggttctagttcttatactcaatactacatattacatacatcacctgaagtatacagggtctctactggtgggcaaaactcgatgttgccgcaatctctgatcgaagtggaggcggaatttagaaggagaaaaatagattgtcctgctgcagggtgatcgaacctatatttatataggtaattcttctgctgcgacaaaaattgtttggaatttatgaggtgttgcatatcaatccatctcggaggaatctgttttgaatgtagaggtacattgcatgctctgagaattagggtcgcaactcctcccatagccattcttcctggtttcttaagtcccttagtccatcctctgtagctcagcagatgttcgattaggtagaatgaaactgaagcttctgtctgatctcctgctagaacggtacatctgatgctaaccaagt

SEQ ID NO: 48413 - DNA, 542 bp, Arabidopsis thaliana columbia
agtttttacaatcactcgaccagtatactcgaccacacccagtgtctggcaacagactgtgcagtcgtgtatagctgtttcatatcctgtctgttactcgacctgttactcgaccacatcctacttctggcatcagcctgttgtggtcgagtgattttagtaattctgttattgcttctgttttctgcatgttcgcttaggactgttagaaaccccaaatctgttattgcttggcttgacttagagacttctgatcacatctcatctgtttgcatcacacccatttggattgacacctaaaatactacaatgacatgattggtgttttaggaataattggcctttaagatcaggttgcggtttaagtcttatactcaatcatacacatgacaacaagtcatattcgactcgaaaacactaaccaaccttcttctagcttctcttagctttcatggtgtagcaaagtccatataagtctttggctttgtgtcttctacaaggatcactacttaggttttaagctcgagttgcggtttaagttg

SEQ ID NO: 48414 - DNA, 529 bp, Arabidopsis thaliana columbia
tttggcatctcatagttcaaaactgaaagtttcttggtgcgacgaggagggctaactaatttgcattatctaatatatatacttctttatttttacgtatttaatatttcaatctatcaaagaatgtactttgtgcattgaggggtagcgaagctcatggttctcttttctgcaaaatgtctaccatagctgattgaaggaatctcgacacaaagccgaagaatgaaacttgatatctagtgttttttgttgttttaaaacctcttttctcttaggttttgttgctttgcattcatattttggcatatagtgttgcatttgcatttgcatttggttttcttaggtgcatgagtgcagtttagagttttggaagcaaatgaagcaaaaaaaggaactaagagaatgcaaagtgaccaaagaggagaagtgcaggacaacaaaccaagtggtcgatagcctggtcgattggtcaaggaccagagctacagaggaaatttgaatctatcaaagtggttgattatgtggtcga

SEQ ID NO: 48415 - DNA, 427 bp, Arabidopsis thaliana columbia
caccattatccacatctctaatagcaacaatttctagaggcttcaaaggctcaggaagttgttctcctagtggctcatctgcgtaaagagttatagcaccaacattagctctatcatcattatctataccaccgaaattctcctatacataattcacaccaactgaactctttccttgtactctcgaatgttgctcgtttaactaaaccatctaaacctcattacagactgatagtaggattttagtcaattaattcctaaaacactagtcatatcgttgtagtatttttaggttgtcaattcaacctggtgtatggcaaccagtgggatttggttaggaagccccaagttcaggccaacctagagttggttgaatcaaaagtcctaatatgccataacaggaatgaaattgaacctaaatccaaaa

SEQ ID NO: 48416 - DNA, 726 bp, Arabidopsis thaliana
gcttaatccagatcaagttccgggtccagatggtatgacagcccttttctatcaaaggttttgggatttgaccgggccagacctggttaaagtagttcaaaacttccattcatccagctcttttgatgagcgtttgaatgagacaaatatttgcatgattccaaaaacagatcgaccaaggaagatggcggaattctggccaatcagcctatgtaatgttagttataaagtaatttcaaaagttctcagctctcgtctgaaaaagattcttctggagttaaaactgagactcagtctgcctttgtggctgggagacttatcacagataatattcttatagctcaggaaaattttcatgccctccgaacaaacccggcttgtaggaaaaagttcatggctataaagactgatatgagtaaagcttatgatcgtgtggaatggtcatttctttgagctctcatgttgaaaatgggtttcgcccagaaatgggtggacttgattaatttttgtatatcctcagtctcttataaagttctcctaaatgggacaccaagaggttttatcaaaccaacaaggggaattagacaaggcgatcatatttctccgttcctttttatcttgtgtacggaagttttggtggcgaatctcaaagatgcggaatggaatggccgaatccaaggtcttcaaatctcacgcgcaagcccttctacttcgcatctcctgttt

SEQ ID NO: 48417 - DNA, 778 bp, Arabidopsis thaliana columbia
tattatattcagctaagaacaaatccattttcaattccagaatcagctaagagcaagtaccacattgcaacagaacttgattaaattagatcagacacactcctattaatgattatcaaagccaaacattcattgatatctattgcccggagctaaaattatcgcaattcaacaaactccagaaaagttcaacaacccaaaaagctgaattcaaaattcaaaattgaatagagaatatgagacggaacctccaacgctgttgcgattggtgcaaccggcgacggcacgaccgaggatcggaagaggatccgggaaacgttcaccaaacgaaaaaaatggaacgcaaacgcataccgttgaggtggcgccaccgtcaaggcccaagattacgccgtttacgaaaccgttctcctccgtggcttctcctcctccatcagcttcaagcttccgaacgtttccattgctatgtggattcctcattcaccaataaaaaccaacccagatgacgtcaaggaagatggagaaatgggtcgtcaagacttgagacacgccagtaagaaattagtgccctttcgatcggagatcaaggatacctgaaattttcaatttcgtcgaaagatatatatctctctgtctttgttgactttttcaggaaatattatggggaaagggtttatgaacgacagagggtggaggagtataggaaagtgtgtcatacacgatttttctttttataggtaacttttttaagaggagtagatttttagatattactaga

SEQ ID NO: 48418 - DNA, 544 bp, Arabidopsis thaliana columbia
agaagaagagatcatgtaaaataagattcttaacaaatttaaattatattagaggttctgaaatgaatttaagccggtttgatttcttgttgtagtcggaacgatcaagaagtccatctcctatgcgaacagatttctattccaatcgacctccatctcctatggtaactgagcaagaacctgcaaacactacaaaaaacttcccattgatagcattacggcataacacggtttactggactgctattgaagtttagctgtaatttttgtattcatatgatagcgttttagtgatgctaagaataataattaaaattatagcaattttcttatgctatgaaaatgttttcattaagcgagaaaataaaatcatttagtccgcctaatattctatcaaaacacttagtcaatttctgaatagacttattttccccaatttctcgaaaaccctagaactagccatctctcgtcaatctctctcaatccgacaattcgtcgtgattaatctctcctccgttgtccttgaaggtagcccaagacaaaa

SEQ ID NO: 48419 - DNA, 601 bp, Arabidopsis thaliana columbia
ctacagaagaggcatcattctacttgacctctttactcgatccaggataccacggaggaggctgcagtttactcgaccctcctactcgatcaaggcaacctcagatgaagcagcagattgatctactcgcccctcctactcgacccactactcgatccatttactcgaccaagggtgaccatccctacaagacttattgagctatcaaagcatcttcgaatcctcctcattccccactcaaccagacatcggagcatacggataggagagggtgaagcatctactcgaccaattgatcactcggagcatagacacaaaggtgcacactttgcagcaccctctttactcgatccccaaggtcgagtattcgcccaaaccgcctcaagtctcttgtcttctagtgaatctagggtttcatcattttagtataaatagatcactttggaatttgtccaagggatccatgctttatctttcagtgtttctttgtgtttatgaatcttgaaactttaattactcttaatctattttgtttttgcatttgattgttgaagtaaagttgtttagcttgtttagatctacattttggtatgattttagt

SEQ ID NO: 48420 - DNA, 510 bp, Arabidopsis thaliana columbia
cactattaccctgctagcttaatctcgacattcaactcactgtttgaacaaaagaacttcgtgaattcaatcctaaaatactgcaattgatctcctatttgagagagtagttttaggtaatttgaaccatatcagtataccaggaacctctgttgcagcaatgcatctcctataaactccatcagaacaatgcttatagagataaggttcatcccaataatatcgcctaatttctcttaggaatctcttcttgttgtaatctgtgaaattatccggttccacatctgcagctaggtaattaataatatcaccataccatgggttatccttctcgatcgctgtgatggtgcaattctcagttggtgaccaatttcttgtcgatttagaagggtgtcgatcgacaagtgtagtggtgtcgatcgacaagtgtagtggtgtcgatcgcaccatcgcgcaacttcgaatgtctacttcctctgaaatgtgagtgtcgatcgacatagtaagagt

SEQ ID NO: 48421 - DNA, 594 bp, Arabidopsis thaliana columbia
taatctccaaatgcatcccaaacatgtaaagacctgaaaggactcagaaaagactatagaaataacaaatagactctaaaacctatacctaaaacatagttaaaaatggtaaaaatagggatttatcagttaggataaggttaaagcttttaatatatagaatgtgttaaggtgtgatacaacttatgagatttgagagagattgagactttaggttttgagagagttccttaaagataataaaagagagatattcttttatacttttgttcttaatctttcttgaatactagaacctgaaagatgaaggagatgacatttgggagattatcgtctcgatgacattgataagcccgtcagatatatatcaatgagctaattggatatatatcaatgagctattgaagaaggtgaccacatacgtggacatttatgattggctcagtgaaatggattgggtcctaagcattagagtgcataacgtaaccttttaacgaatttgatatttttaaaaataatttagtgtcaagaaaaagtaattagtttgttctttaaagtatttggactcaagactccacgatatcagttattgat

SEQ ID NO: 48422 - DNA, 452 bp, Arabidopsis thaliana
cgcaaaaaaaaacgcaagaactgtttttgttgtggaggagatctttaaatcgccggagcaattgcccgaacaattgtctagagtttacgagcgtcaaatatctgtaatacagatattcttctcgattagaaggtacaataagatgcaaatttgcactcggctaagtaaagatagtagtaggatcaggaaaaggaaaggcaatcaacaattagtcgcaactcttcttcatgatcatttttcgggacaattggaaactcaggtttcaagggttatcatgaagctggttaagacgaaattaggtgtgaaagtatcatattcgacgggggaaatataatgcggtttgtgatttaaaaggtagcccggaagaaagctaaaaagatatcaatagttatttgtacatgttgcagaaggtaaatgatggtacaataacatatttgacattggatgagaat

SEQ ID NO: 48423 - DNA, 542 bp, Arabidopsis thaliana columbia
actctagatcaaggtcaagagacaaagatggtccctcacacaataggcttcagtaacaagggatctctcaaaatatgattgagctttagtagaatgctaaaggtaagtcccaagctatgcatacagagataagatcccatctacctagagtataacaatgaagctctaatgggtaatcccaactccagtcccaatacaagaactttactctaccctttgcactcgtgaatcttttaaactctttttttatatcattcttttcttttctcttaactctaggagaagctttctcgacactctgatacatctagcggatttggatttctttaacaactaaggttcctgttttgaatctttaaaaccaaaggcttttaacccttcttctttagctaacaagaacctcattcttttctttaacattcccaaaacctttactagattttttttctaacttctttagctcacttcccttagaattctttccctttccttatcaacaatgaattcacccttttcttttaaacacatccaccccatgatat

SEQ ID NO: 48424 - DNA, 1605 bp, Arabidopsis thaliana
gagttcgttgatttgagctgtaaccgtttcaacggtggcttatctttaccaatggagaacatttccagcatttccaacactctccgtcacttgaatttgagccacaatgcgttaaatggcaagtttttcagtgaggagtccattggttcgttcaagaatctcgagattgttgacttagagaataaccagatcaatggtgagttaccgcattttggatcacagccgagtttgagaatattgaagcttgctcgtaacgagttgttcggtttagtacctcaagagttgttgcagagttcgattcctttgctagagctagatctaagtcgaaacggttttacaggttaattcaaatcttacaacttttctcttcttgctacttttagggtatacaggaatagaattattgaactttatgtcattgagcattgatttgactggtttcatggtcttgactagacacttgtgtcacattgtctgaagctgttgtataaatgtatattaaaggagtttcttttggttcaaatgcaggatcaattagtgaaatcaattcatcaacgttaactatgttgaatctttcttctaacggcctgtctggggatcttccgtcgagttttaaaagttgctcagtgatagatttgagtgggaatactttctctggcgacgtgtctgttgttcaaaagtgggaagctactccagatgttcttgatcttagctcaaacaacttgtcgggaagcttgccgaactttacttctgcattttcaagattaagtgtgttgagcattaggaataattctgtctctggtagcttgccttctctgtggggtgattctcaattctctgtgattgatctcagttcaaataagttcagtggcttcattccagtgagtttcttcacttttgcaagcttgagaagtttgaatctttctaggaataacttggaggggccaattccttttcgaggttcacgtgcaagcgaacttttggttctaaattcttatccgcagatggagttacttgacctttcaaccaattctttgacgggtatgctgcctggggatataggtacaatggaaaaaattaaagtgctgaatcttgccaataataagctgtccggggaacttccaagcgacctcaacaagcttagtggccttttgttccttgacttgtcaaacaatactttcaagggtcaaattcccaataagcttccttcccaaatggtgggattcaatgtgtcgtataacgacctatcaggcataattccggaagaccttagaagctacccgccttcttcattttatcctggtaactccaagctaagtctcccaggacggattccagcggattcttctggtgatctgtctttacctgggaaaaaacatcattcgaagcttagcataagaatagcgattattgttgcttcagttggagctgctattatgattctttctgtcttgtttgcctatcatcgaacacagctcaaggactttcacgggaggaatagatttacagaccaagcaacgactagagacaccaagtttggacgctcttctcgtccctccttattcaacttcagctcaaatgttgagcagcagtcatcatctttga

SEQ ID NO: 48425 - DNA, 439 bp, Arabidopsis thaliana
gttaaagattcgggtggcttctattaacgatgctgctcttagacctccttgagggtctggtgccatccccatcgctttggctcatatgctccgccgaggggtttgacggatgacggaagtcaagcccagtggtttgtagatggtggagcagcttttgcagccattgctgcagcgattgaaaatgctaaatctgaggtctaccacttttcattactgggtgtggagactgatgatgtgttgaatgttatatattttcaactgatctgatttgccttatagattttcatctgtggctggtgggtgtgcccagaactctatcttaggcgtccttttgacccgcatacttcatccagacttgataacttgttggagaataaagctaagcaaggagttcaggtacttactacagaacatgcatgtacttaatagcgattatctt

SEQ ID NO: 48426 - DNA, 585 bp, Arabidopsis thaliana
ccagcatttggatcgcctagtcccccgctcccagtcgggccaagagtagtccccgggaacaccgaagatgacgatgaagttggcatcccgttggaatttggcatcccagtgttagtccctgtgtttggagtcccggtatttgggaagccactagttggagtcccactggttggagttccagtggtgggggttccggtggtcggagttccggtagtcggggtcccactggttggtgtcccagtagttggtgttcctgtggtaggagtgccactagagctgcaaagaatagtcaaaaacattagtgatcattcgtgacaagataattaataatgatgctcatctggatcatgtgaatgatggactgtttttttgatgtgagttctctttttagtaaaggtgaaattatcagaaatgatgaatggtaccaaataaaaacatttaatcaagattcctttgtctattcattaggtcttaaatcactatcattgtgtctcctcaaagacaaattagtaacaaaattcaacaataaaaaaaagttagtcggtggtaaaaatcaaatctaacctagaaagccaactttatgga

SEQ ID NO: 48427 - DNA, 1112 bp, Arabidopsis thaliana
gactaagtttctttctttttcatgggaaaattttcatcagatacaacaatttctcggacttggatattctaagcagtttcatcatggaaagatgtcagcgattcgaaagcaaagtttcttgcttccgttggtggaatgtgagtttaacttaacatctgcgtttgaagaaatcattcccttggttgatgtcaaaccaggtcatcggcctcataggtcaactggtgctgcgatctcaacagcattaggactgctcgagggatgttctgtaaccactggttctcggattatggttttcacatcggggcctgctacaagaggccctgggatcatcgtggactctgatttaagtaattcgatcagaactcacagggatattatcactggtcacgtgtcttattacgataaatcttgcgggttttacaagaaactagcgaagaggctctgtgattcgtccgttgttctcgatgtgttcgcttgctctcttgaccaagttggagcagcggaactgagatacgcagtggaaatgtctggtggatttatcttactgggagagacatttgaatccgagcaattcaaaaaatgtctgagacatatattcatccgcgatgcagatgggaacctgagtatgtactttgatgtgtctttggaagttgtgacgactaaggatatgagaatctgcggcgcacttggtccggttgtgtcgctaagacagaagaacgatatagtgagcgaaacagagatcggtgaaggcggaacatatatgtggaaaacgagcactgtcacgaataagacttgtgtttcattcttctttcatgtgagcaacgaacagaatcgaaaaccgcagccaggttctgcgttcttcattcagttcattactcggtatcggtatggaaatggagcaatgaggaaacgggttacaacggttgctaggagatgggttgctggtaaatcgccagaaatctcgtcaagttttgatcaagaaacagctgcgtcagttatggcgcggcttgcaattaaccgagcagaggagtgtcacgctagagacgttattacgtggttagataacggtttaatccggtttgcttcacggtttggagattatattcaagaag

SEQ ID NO: 48428 - DNA, 509 bp, Arabidopsis thaliana
cgtatcgtcaaaacaataagttgcttaagacgaataaagttgtccacattttcctacaatcatatgttccggtaataatttgctcgaacaaatcgattattatggtgctcaagaaacaagtaaaagtgggataattggcacactctagagaacatgccagatggatatactagcactcacaattggcacaaacaaagtatcttctggcaactcccatattggaaggatcttctcttgcggcaaaactttgatgtgatgcacatcgaaatttttttttccgataattacatgaatacgcttttgaatgtgcaggacaaaataaaaaatagtttaaaatcaaggttggacttggcagaaatatgcaatagactttacttgcatattcacgagatggcaaattaccggttgcaaagttttgattgtctcctgaggcaaagaaggcgttcgagtgggttactacaacagaagttaagtttccagatggatatgtgtcaaaaaatttaagatgc

SEQ ID NO: 48429 - DNA, 548 bp, Arabidopsis thaliana
caacaaagtgattccgagtttcctttgcctccgtcagagaagtattatctggttgattctggctacccaaacaaacaaggacttctagctccttatagatcgtcacgaaatcgagttgtgagatatcatatgtctcaattctattatggtcctcgtcctcgaaacaaacatgaattgttcaaccaatgtcacacatctttacgttctgttatcgagagaacttttagaatttggaaaaacaaaatggaggattctttctgattttctaagatataatgttcatgttaaaaaaagagtggtaatggctacaatgggattacataattttatcagaatttcaaacttctcagatgcagattttgcagatgtaatgacagagacaaatataaacaacagagattttgattatgatttagatgataaagaagcaacagagattacagatggagaacatataacgcagataggagataatgttgcaaatatgttatgggaaaatcaaagtaatagataaagaaattttttaatgatttttacgatgaaattag

SEQ ID NO: 48430 - DNA, 639 bp, Arabidopsis thaliana
ggtgatttggagctgctgatgagctgattggaagaagtgtacctgatcaaatcaccatactcgaccacgagctcgagtaccgtcatcctagccttcttgaagtactcggtcacgacctccgcagctagtccctcgaccgcaacactctggttcactactcgaccccctggtcgagtagaaagcatcatcgctttagagtcttctcgattccgcactcaaccagacactcgagcatgaggaagagaagaagactccgacttgtcactcgacccactactcgaccacctgggtcgagtaccgttcttaatccgtcccagtacgatgtcgttttgagtattagggtttcggaatatttcgctataagtagtatgtactttacatttccgagaacaagtttttattccgcagacagtttaagttcttgacattttggaatcgggatttctcttaatctattgagtatttgcttttcattgggtttactaagttgtgatcatcctgttatcatcttgcaattactttgttgctacgatgttttcattattgtcatcgtttatgtttctgcaatgaatgttgagtagtgctaggtttatgaggatgggtagagtagttagaatcgcaatatctagatggtgagtt

SEQ ID NO: 48431 - DNA, 928 bp, Arabidopsis thaliana
aacagatattggcgtcctggatgaatccaacgtcaaaagtcaacgatcatgtttgagaagtctcctatatcaatgtgggcgtggcctgtaatgtttgtgcatgccaatgcaacctccaatgattttagtcagcccttgacttctaaatgtgtatgattccgagaattgagctgtcactagttgttaactagcttgatgcattaatacgtaaaaattaaaataaagagtattacataattaatccttttaagaaaaatatttatatagtaacacacaaaaagtttcaaaacagagtaatcaaaacacctgcacccacgaagatagaatgtacattgtttcttcaaaacatacattgggaaatacacaaagaaacaaaataacaacaagattgctttcccataaaatcacataaaagaatttctcaaatttatctggctccaggagcaaagtcagaagtagaagagagactatagtcaacagaacccattgagtacatctcttcactaccttgccgccttgcattttctaaggccacacagtcgtttagctccatcacaacgtgtgccattgttggtctccggttcgaagatgggttcacacaggccagagctagctcaacaatcttccatgcaccgtttgtatcatagtcccccatcagttttgggtcaacgatgctcttgatgtcccctttagtgagcatggaccgaatccattcattgatgtgagttctctctcttgtgttatctgtcacaggctggtttgtgactagctctaataggactacaccgaagctgtacacatcactcttctcgcttagccagtttgtactgtagtacctgagagagaatagaaatattacattgacatcattgaatatgtatttgagaaacacaactaacatgagtgatgataactggttgatcactta

SEQ ID NO: 48432 - DNA, 572 bp, Arabidopsis thaliana columbia
atcggatctcggatcctggatcctagataataagtcagaggacttgtgagacccaaaccccacttaggcccaacaaaggcccaattccactagaaacaaaaacctaatacatacatgtgtatatatagtcttcctcatcaaccaagcagcagccatttacgtcttcttcatcaccatctcttctttatctctcatctcaatctcagccatcatcatcatcatcgttgtgacaccggagttgacgtcacattgtggtcgtgattattctacgtggttggtttcgttgtcgttcatcaccggattgttaggtaaggaaaacctatcatggttatgaattatactactgaaattggttcacttagcaagtggattcatggatcataacttcaactattggatttttgtgtgaatatgtgaaagaagaaaacagttcaagtaatggaattggtgatctgtttcccgtcacgtccggaggagtttgggcgagttcttaacggttctgagtagatctcgttcccaagttttcagaacagttttcggatccaaaatcggaggtaagatcgatcgggaaa

SEQ ID NO: 48433 - DNA, 553 bp, Arabidopsis thaliana
gagtcgtcatcttcaaggccagagagataacagagagaatatgaaagcttcagaaggaaagctgagatagcccgagggaagagagctatgacagagaggtatgagcttatagacgaagatctggaagacgagtacatgcctgaacagactcgcagagctaccaaacttctgcacaagcccgacgtattgcctgctgaggaatatgttaggcttttcaagctgaatgagttctgtagcacgaggtatccgtgctcgacctcacttgcacaactcggattgttggaagatgttcagcacctgtaccaaagttgtcatctggacactctgatggcttatccgtatgtagcgtatgaagatgagacaatacaattcctctccacgctgcgagtacagctctaccaaggtatgacctctgatgagttggattgtgaaggattgggattcttgcgattttctgtgtatggtcatgagtataggttatcaatcaagcgcttggaaggattgtttggctccccagtggaacgggatctaagcccaagtatgaagagaagag

SEQ ID NO: 48434 - DNA, 1004 bp, Arabidopsis thaliana
caaaatcaatttcgaaacttctataaaattacgaaaaaccccctttcgaaagaaatttaacgtacgtccaaatgttgagagtctcgttgtgccaagagaaagcactgagaaaagtatctttgagagaccattgacatcgataatggttgtgtataaactcgttgtccttcaaatactcaggcaagtcttcgaacttcatcaatctccttacgattctcgtctcttcgccgcaatctaaccctttccaatcggtaaccgtcaccatcgccggagatttcttcgccgatcttcgtctcttcatgctccggttagtttcgttttctctctagctgcggcgaatctgtgtccctcgctatctctctgtgtttatatatggagacgaatcctctttgaatgtcattgagggatcgtgaccgtccacgtgtaagatatctctgacgtggatttttattagtggatgaagagattttgcttggtgtgaggttgagtacacgtgattaattgttttttcccgatgtgccaggttttttgaatcatagcgacaagtgggaagatgagaaaatgcataaagtgtggtgcgtaaaaatggcctacactaatctactttagatttgagattacatatgcataacttaatctcaactatagtcaccaaccaaactacaacacctggacaaaactcataaaatttagattaatctagattaagtccccaagtcattcatttcatgtgtctttgtgtgattggttgcatggccaaattacatccaagaatttcttacaactggaaaataagtcaagaaacgtttcagttcctgagatagttacagtcattctttttgtcttgaatccttgataacacaaagaaaaaattactgttttatacaaattaaagcggaataaaactgatacataatacaacaagctcatttacacatacatagctatcacatgttgaaatttaggaactaaaagagtatttgaatgcattttcaaccaatatg

SEQ ID NO: 48435 - DNA, 584 bp, Arabidopsis thaliana
cgctcctcttcactaacagatccggtgaccttcttcggaaagagggtgttggcgatgcattggtggaggtatctaatcacgggatttcggattgaagaactcttgctcttggttggcgagaagggcttcggaccgacgattgtcttccaaagagatttcagctcttcttgatcatagtcttggcggattccttctccacttgggaacccgaaaatggtattaagatggcaaatatcaagagtatactcgacatccctaactttgaaagttatgtacccaagacctcctctctcttcttactctgaatcatcaacacagaaatgaaccttgaggttgcaaggagttggcagctctcctctttatatcccccacattggcagctcatgaatgttgcaagatttgccaattccatcaagtattccacatcaccacaaatacctcgctcttgcatcgttcccttatgagggtaactagttccctcaaacttcaactctttcaaatattgatagtactcgctcggggttggctctctctcctccttggccggtttcttctccaacaggggttggtgtacatcccgatga

SEQ ID NO: 48436 - DNA, 584 bp, Arabidopsis thaliana
gtactattattagttataactgtattatacagatatgtgtagtataactagttatacttgtgttacccagaattgtagtataactagtatatctgatagaggtttttgtattgattttgtaggatacaatggtggagaaggtgattatatattttatatggaaagatcgagcgtacaacttgttgatgaatacaccaggagggaaaataactctctccatgttagaaagtaggatttgcacgaagcttggattagataaaagtatggttaaattgcaaatgaagtgcaatgcagtgatgttgggaccaactcaagagatacacattagtgatgatgaggatgtcggtgtctatatatcttcaggtgaaatggttagtagatatcctttgactgttgacgtcatcactccaccggaattgcccaagtaactgtcgagagtggaggtcgtcaataaaagttctattggtaagaactatgctgatttgggttcaatgatgatgaaatgagagataatgctgccatcgtgatgggcgaattggagggacaagagacagaacaaaatgaggcaatagtggaggttgatg

SEQ ID NO: 48437 - DNA, 459 bp, Arabidopsis thaliana columbia
cctcgtctttgagtcgtgtgtcgtctctatttcgagaatatccactacagatcttccaagtgccgaaattgggattaattcctcatcaggatcatatcatgtgaatttttttttattttttttttgtgatggtcataaaatttgttggacttcatatatattctattgggccaacttctgaatgttataccatggtttggatcatcaaatgggtgatttgaatgtgaatcatttgcctcattaaaaaccttgtcaagaaaacccattgggacaaaacttgacaagggaaacagagtacaaatgagacacatgcccatttgatgatcatgtatcaaaaccaatgaggttaagataacatctttcacatactctttcatcgctataagtacattttctgtttcaaaatgctcctcagggtcaagctgctcctctgctttaaactcttcctcggctacgagc

SEQ ID NO: 48438 - DNA, 600 bp, Arabidopsis thaliana
ctcaagatataaccaaatcatcgatgaatccagaagatcaagagaaaacttcatttatcacagataggggcatctattgttacaaagttatgccattcgggttgaagaatgcaagagcaacttatcaacgaccggttaacaagatgttcaaagaacatctcggaaaaacaatggaagtctacatcgatgatatgctggtcaaatcattaaaaaaggaaaaccacgtaaaacatctagaagaatatttcgcgattcttaaccaatatcaaataaagttgaatccagcaaagtgtacatttggagtcccatccggggaatttctaggctacattgtcgcgaagagaggaattgaggcatatccaaatcaaatcaacacttatctcaacatgccatctccgaagaatttcaaggaagtacaacgactaacgggtcggattgcagcattgaatcgttttatttcgaggtcgaccgataaatctttacccttctatcaaatcttaaagggaaacaaataatttctttgggatgagaagtgtgaggaagcgttcggacagctaaaggcatatctaacttctccacctgtattgtccaaactagagg

SEQ ID NO: 48439 - DNA, 499 bp, Arabidopsis thaliana columbia
cctacaggttccaagatccttgggatgcaagaccgtctatcgaagagagcgggagatttcaagcagcggtttgaacttatccctcattacaattgggattttgataactatctagaagaagatgttccttctgcggtgaggtgacacctcttgttgttttccttctgtagaactgaaccgaaaaaaacatcaatttgacattctgttggagttatgtcttattatcatatgaaatgttggtctcagatggactatgtaaggactcaaaccaagtcaaaagatggaaagttgctagcagttggtcactcaatgggtggtatcttgttatatgccttgctctcaagatgtggtaagcttataggctgatgatttctcttaaaatgtaatgctcagattttggctgaatcatgtttcttcactaggctttaaaggaatggattcaggtttggctggtgtcacactctcgcatcaacatttgactattcatcctcaggaacac

SEQ ID NO: 48440 - DNA, 587 bp, Arabidopsis thaliana
tgatactctcaaggccgccgctgcatcttgagaacgtgtcggtcgggtggtgctgcgcttatgccaatttcttcgagaaatgtggcctatttttcccaattccggcgtgtatcctcgagatgctctactgtctcggcctcgcctttccccagatgtgtccgaacttcgtttgccatgtgctggcgttattcacagagcattcagctgccatgacctgcttcagctctgccaggtcaagaccaatgctaggagtgaccaagggacgtactacatcagtgcgcgtcccggatttctaagagccgttaaacacagaactgttgaagagttcaagaaaggccatgttgattcagaaaatgtcttcaatgttccttactggttatatactccacaaggtcaagagattaaccctaatttcttgaaacatgtttcatctctctgtaaccaaaccgatcatctcatcctggtaataacatagtcttgtcctgatcatgtgaaagtatatttcaattcactagatcttttttttttttatgttcactggatctgaatctagaaactgttgttatgatcttgttttgtagggatgt

SEQ ID NO: 48441 - DNA, 1257 bp, Arabidopsis thaliana columbia
gtcctggaacttcctgtggatcgtgctgtccagttcccatttcaaggaaaaagacatcctcagaccattcttctaagacagattcaatgtagtgaccagcattaatagagttcgagaccttgattagatcgttattttcagttaatgcagttagtccgtcggcgtcttggcacctgagaaggaggcaatccaagaacttatgaattgttggtgaggctgccagtctcaggaacctagccctcaaatataaggccggcactgatttggatcgttcgattattgatgacaaatgctgtagaaagatgctggaaatgattggtggtctgtaaaggttggaactggagatgagttcgtcttggaccttcgctgtccaatttctgtcgttatcaatctcctccttgaatttgacgagcctctcatctagctctatctctgcccataaatcaagccaatcaggtctgtcacagaaaactgagagagaggaaattctcaaaagattcccatcttcttgaagcgaaagtattcctgattgtgataccaaagactgaactcgcttatcaaaggagatcatcaggtcaatgagatggagccacgagaccttagcctcagaacgaagatcagtttcatttgcttcgtctagctgaccaacatatataggaaagatctctttcaccaagtacaaagacagtgagcttaccatagccgaaacccactcttctcggcaactgtacccagctagttttgcttcatccacaagcggttgtaacaactcatccatagaatcgacatagtcccttgtgattttatacacaagggcaaaaatgaattctggcttttcactccactttgtaaaatgtcgctgagatgcaactgtcagagggttgaccagctcttcaatagcccagagtggctggtggaaaagaacattttctcccttatggatcccaagctgccgcgactttctttgcaactgtaacccctgcaggctacacaaggcatgaaaacttccacagtattgacttttgaggctcccttccatgttgaaaagcggattttgaacattttctgactttgaatcaagacttgccgaagttagtgtagaaagctgaggtggccatcgaagagaagaaagcaacgctctgtaatcagcaattgcctgaggtctcatcacagctaaagctctatcaactctatgatcaacagcagaaacaagacgtgcccaccgaggatgtctctttgctactgaactcagtatct

SEQ ID NO: 48442 - DNA, 619 bp, Arabidopsis thaliana columbia
gtgatacctccttttcaaattttgagaaatttgctggattcagaagctagacgatttccacccatactttttcaacttcttggttttaagctattgctcttttttttctgttgcttcttgtgtttattttttttctgtgtggttcaagcctcattgctcttaatctgagacttagcacccagttgtcaagtcttggtattgagttcagaaaatgtaaaaagcttccctaattcagctttgctctttgattctgcatgtgcacatcaatatgtcactgaggcaggctgaaaaaggataaaagttgcgccccttgtcgcctccagtcccgaattcgtgtacatgttttcgtctaaaattaattgatggaaaccttccaatatcccaggttgcagattctgtcctttgaatttgaaacatctgtaaaggaatgtctgaaactgaaacctggtttcatttctgaaaatttcccccttgttatttccttttacatctgaatttgacatgtagtttgtctcaatatttttttacacctggtttggagccttctgcaaaaagcttctagctcactcttccagaagtgttgcattgtctttcttcaaatatcgttgttttagtggga

SEQ ID NO: 48443 - DNA, 635 bp, Arabidopsis thaliana columbia
tagtatactctctcacacagacagacatctctggatttatatataaatacagttcatcttctttaatccacaaactcacacacacacacacacactctgttttcttcgtccattctattaccagaaaacagagtttgatagagagaaaagaatggaactgtcgactcaaatgaatgtgttcgaagagcttcttgttccgacaaagcaagaaacaaccgacaacaacatcaacaatctgagctttaatggcggatttgatcatcatcatcatcaattcttcccaaatggatataatattgattacctctgtttcaacaatgaagaagaagacgaaaatacccttttgtatccttcttctttcatggatctaatctctcaacctcctccattgcttcttcaccaaccgccaccgttacaaccactgtcgccgccgttatcctcctccgcgaccgccggagcaacatttgactacccttttcttgaggctttgcaagagataattgactcttcttcctcatcgcctccattgatccttcaaaatggtcaagaagagaactttaataatccgatgtcgtatccctctccattgatggagtctgatcagagcaagagcttcagtgttggttactgtggag

SEQ ID NO: 48444 - DNA, 1145 bp, Arabidopsis thaliana
ccctaacatcaatttctataggtctgaatcattaatggttgctgctaagtgttgctatgtaaatgagctaggtgttaattgtccgtggagagtcttatgttcatatgacacgcagacgcataacacgcaaatcagacttcacttcaacgagcatatatgtgtgaggtccggttatacaaaaatgttgaagcggtctaccattgcagctttgtttgaggaaaggctgagagttaatccagagatgacaaaatatgagatggttgctgtgttgttgagtgggttgtcattggaagtcactctagatcagtgtgctaaggcgatcatcaaagttctaaaggcaagacatgctagtcatgatactcatttttcaaggatatgggactatcaagcagaggtattaaatcggaacccaaacagtgactttgacatcgagacaactgcgagaacgtttattggaagcaagcagaggttttttcgcttgtatatatgttttaattctcaaaaggtttcatggaaacaacattgtagaccagtcataggcatagatggagcgtttttgaaatgggacataaaaggtcatcttcttgctgcagttggaagagatggtgataataggattgttcctctagcttgggcagtggtagaaatagaaaacgatgataactgggactggtttttgaagaaactgtctgaaagtttagggctttgtgaaatggtgaatctagctttaatttcagataagcaatcggtaagcaatcaagctttagtttaagctttattcgtgtttatgcttcagtttgtattctttgtttagtttcagcttttattcatgctttagtttcagctttattcatgctttagtttcagctttattcatgctttgtttagtttcagcttttattcatggatcactttcagcttttattcttggtttagtttcagcttttaatgatggattcatatttctgtgatttttcagggtcttgtcaaagcaatccataatgtactgccacaagcggacgatcgccaatgttctaagcacataatggataattggaagagggacagccatgatatggagctacaacgtttgttttggaagatacccgcagttcaccatagaagagtcaacactcatatggcga

SEQ ID NO: 48445 - DNA, 560 bp, Arabidopsis thaliana columbia
ttcgcttagtctagctatgaatatctttctaacaccttcaaaattactcgcatcttctgagctagagactggggatcatttaatgttggcttgctgttttacagggtaatctggagcttcgttcagtccagactaaagctgcatcctatgcggttcatgaactgggatgagattttgtcatggattcgaatgacaaggacttttgctccttctacactaaggaaactagtatctcaagcgcgcggtgatttacgcgacttggaagcagagaaatagcatgttccataattcacaacatgttgctcctgcttttgtttttaagatccttgatcggaaattcatcaactctataaatgcaaggaggcaccgaagaaagttttttaaccttatgggcctttcacctttggctcgaatgaagtttctaccttgaaatttgtttacttccttgttttttttatccttatttttttagccaaggaactaaatcttagatatttacatgtaaatcataattcttcattttatatgatatttacccatttagcaacaacaacaacaaa

SEQ ID NO: 48446 - DNA, 594 bp, Arabidopsis thaliana columbia
aacatgttgttttatgttcagtttagcaaattagtgtggtaaatattttcttatttttgttttggtttattagcgggataaagttgttccaatggaccgcgttgaggcccctaacccacatctaccaatccccggcctccctgcggtgaagggaattctaacgtcaaggctagcgtgaatgagatcttatcttactacacgggaaaggtgccaattgatgttggttgtaaagaggcggaggtaaacatgtagttttatgttcagtttagcaaattattgtggtaaatattttattatttttgttttggtttattagcgggataaagttgttccaatggaagaaaacacatgctctgaccgcgttgaggcccctaacccacatgtgattaagttatttatataggcttaccagtgtagatgataattgttataatattacaagctaatctgtatagttttagttgctaacctgaatagatgctaatcgctgtaatttcaactaaagaataatggtgtttttatcgcgtgtttctttattggattgtaaacattgcgttatattgtttcgtagtccgcctccggagacacagttga

SEQ ID NO: 48447 - DNA, 767 bp, Arabidopsis thaliana
atatatatatatacttcccatatacattacctttttttgttaaaatttatatgcataactttgattctttgaagttatatttgttttctatcaatataatactaagaaataatataataataattaaagcgtggttgaaacttaaacaccaatacatacatgcgtacaagcaaacatgaaataatacatgttataacttacaatcaagcccataaaggcagtaatggtaactaataattacattggttgatatacacctatctaaataatgttgttctatgtagagcacaagtggtgggatggccacctgtgaggaactacaggaagaacatgatgactcagcagaagaccagtagtggtgcggaggaggccagcagtgagaaggccgggaactttggtggaggagcagccggagccggcttggtgaaggtctccatggacggtgctccatatctgaggaaagttgacctcaagatgtacaaaagctaccaggatctttctgatgcattggccaaaatgttcagctcctttactatgggtacgtattagaaatttcaaatcggaaagtgtgaaaaaactatattcgtatattaaagtatatcatttactacatttattcatacaaaactcatgaaccttaccgagttagagtcatagaactatacattcgaaccctatacatattaacaagatgagattttgctaaatgtatacaacttaaatatgtattatatatattacacaataatgacacataaatttatatg

SEQ ID NO: 48448 - DNA, 638 bp, Arabidopsis thaliana
tacattcagttataccgcctgtagcatgagtatggataaggaatatagaaaaaattctagtatcaagtgaagctacctgggggatgtcaattggccatctacaaaaaatggagccagcagaaagttactcatattagagttgaaagaacatcgtttaaaaggaatggcaccattactgctagtggcttaagctctgcctgaataacagaatctctgcgacgttggatgtttgagtcggaagtccggcttaagctggtgggaattggaagtccggtttggagttgcagcgagaaaatttaggtgctaccagcagaataaggaaacaaacttggaatcaaggacttcaacccgaagtttctctccatcagcatcatcggtactcaacaaatgacggctaaatttgatgagggcatccattaccttagggattgaaaaaaataaaaaattaaggcaacgactataactaaataactattaggatttttagagagatcagctaccttgcttgtaagagtttttttccggtcaattaaatccaagatatctttgttagacagtgcaacaccgccacaaatgctaatagaactgttaccatatacaaatacataagcaattataaatcacctagagaaaatgga

SEQ ID NO: 48449 - DNA, 1306 bp, Arabidopsis thaliana
ttaaatggtagacttatcattgacaaaagaaaagaaactgtattctttcttggttatgtataaacataaaaatcatctctttactatattgtcttacatttttgagttagaaaggcgagctctacacgcggtgtgcgtgttgagaaaaaaattcattgcacaaaagatctgagaaccccatttcagtttcaaatcttaaaccctcaaaatggcaaaaaaaaaggtcaacaaaataacaaaacaatctctttctaccaagaatatgaagtcaaaaaaagaaaagaatgaagactcttaaaatgggaaaaaatctctctagaagcaaagaaaatatctgtctcgctcgctaacactgcacttttggtatacctaaaaagaatgatactctggtccagaatcaggcttgtctttttgttttcaagttttcaaggaatcctctgttttggaacatactttacctttgtgcccttttcggctttcgtcctcagctttgatcttgcggttataacaccatttgaggactcgtgagtgttgttgcctgagatgtcggtttcctgagacagaaccaatgtcacgtgttctgcagaggttgcctctttccatcctgacaagccatttattcagattgagtaaacaacttccaaaatataaacgatagggagattaagataaaaagaaagggtaaaagaaggtttactctttgcaagaaacgcctttgcttcgtggttgttaaactgcaagcttatgtgatgagcgtttttcacttcgggtgtagttgggtttgatctcttatcttctttgtctgtgtttccattgactgttgaggtttttcttccctgactgctcactggtctccatatttttacagttgattgctcagatgcgggtttcacctcaacagtctttgttcttctctccccttcactgcatttggtttggttatgttcgccactgtttcggattgatacactcaacgatccaactataaattcgctgctctttgtctgatcctgctgagtcactgctgcatgttgtgatatcaatttggggttatcggattttcggctccaaactttagtagtattggctcttgcgtctctgttggttccattctttcgcatgcctccaaggtttggtgcatgatcagcatggaacccattcggcattccctgttgtgatctttgcatttcgtacggccacttcgcctttccatgttttggccattgtctaagccatcaaccattggcacttgcgtttcactgtttcttccattattagtttccaaaacttgaggttcctcgaggga

SEQ ID NO: 48450 - DNA, 764 bp, Arabidopsis thaliana columbia
ctcaactcaaccccccctgcagtttcgtcctctcacagtctctagatctcaaataacttgcagattcagccaatccggtgagacttatcgttttttctttctttttttcgatctaatgaaacattccaagtgattgtattagattcttagcaacatcttcttcatcttcaacgaaatcattgtaagttttgcagatattacgccacaatttgaattggataaagcaaaagacaatcgaaaatcacaaaagcgagcaaatggcatattttggatcatacttatcaatctgggcatatatcttgctgatcacttctttcaggtatgaaagcttgtctttagatatcaatcatctacactgtaaaacgttattcgtgtaatcccatctctttggattgtgacgtgcttatcttatcatacgttttatattgtttattcgatttaggttcgtgggatcaaatctttgtatttgtatcacaattttccggcatggtatcagtttgtgacggctacattctgtcatgctaactggtgagagagctctcttctttcttttttactttggcactgttcgtttcataatcgctagcggctgtggctgtggctgcgattgcgattgcgattttaaaatcgcaggatgttgttcgtttaccaatcgctgcgattaatcgccatttaaaaagccgcgtcgctcttttttcatgcgatcaaaaaattcagtcgcaagccgcagcgattgatcgcgcgattagttgcaggatcttgcg

SEQ ID NO: 48451 - DNA, 549 bp, Arabidopsis thaliana columbia
tactctggaagatggtttgaagtagcttctcttaagcgtggatttgcaggtcaaggccaagaagactgtcattgcactcaggtaattgtttcttcaagtccacaaattgtgaaaacacatcctctgctaacatagtgtgagaacctttcaactgttgcagggagtatacacgtttgatatgaaggaatcagccattagagtagatacattttgtgttcatggcagccctgatggatatataacaggaatcagagggaaagttcaatgcgtgggagcggaagacctcgagaaaagcgagactgacttagaaaagcaagagatgattaaagagaagtgtttcctacgatttcccaccattccttttatccccaagttgccttatgatgtcatagccacagactacgacaactacgcacttgtttctggagccaaagacaagggctttgttcaggtgattctaagagaaagaactcatgagtttgagaaatatctcttgcactgatctcttatataaacctaatgtgtttgatatgttaggtatactcaagg

SEQ ID NO: 48452 - DNA, 658 bp, Arabidopsis thaliana
  unsure (1)..(658): unsure at all n locations
tgggattggtatcaagagagtaacgcgtgaggaagggtttggtgctttttacgcttcgtatagaactactgtgttgatgaatgctccgtttaccgctgtgcatttcactacttatgaggcggttaagagaggtttgagggagatgttgcctgagcatgctgttggagcagaggatgaggaaggttggttgatttatgctactgctggagctgcggctggtgggttagcggctgctgtaactactccgcttgatgttgttaagacgcagttgcaatgtcaggtgattgaaatatctctaaagctactgacttttaagtatctgatagctaatgtggttatagattggccaagctactttaagtagttgtctcttgatcctatagatcacttgaatgaagaaagatatcttctttcttctctttggatattttgtgatttcacgagtatgattttataggtaacatgtagattgcatcaagcattgttagaactatggtcataaaacttaatattactgaatttacatgtgaaagtcgcatagataatgtttctatatttgtggtttagaatacttggtcaatagctatttcataggatttgggtttgtttgtntgtctgagaagttgtttgtggtgatgtccagggtgtgtgtggttgt

SEQ ID NO: 48453 - DNA, 727 bp, Arabidopsis thaliana
attaatgatagctcaaccacgaaatgtcattacctgaaacccttaaacacactctacctcaaacttactggtaaaaacattgaaaccaaataaccactcttcctacaacggtagctctatactagtgtcaaaccgtgatgaacataaaaccgcaaccacaaaattatgctgcagctctagcacatgattaccatctgccagtagtcctgatagctctttttacacaaaccactattcacaaaatacaacatctaaccacacaaggtgaaacaagtccatctaagaagctttagaccttcacatagactcgaaatccaacacaaatgcatcaactctcgagactaaaagcatcatttaaagaagcattctgcagcactacgcacacataaaagcataacacatataccgtttactagtaacactaacaccactgtgtacctaatcacatcgccaacattattctagccaaagatgtagagattagagacaaagagcaaccaatcctagagagaaggaatcattcacctgacattgcaactgcgtcttgacaacatcaagcggcgtagtcacagcagctgccaatccaccagcagcagctccagcggtagcgtgaaccaaccaaccttcctcatcactaattctatccggcgaaaactccatcaatcccttcttagcagcctcgtaagtggcaaagtgaacacgcgtaaacggcgcgttcatcagaacc

SEQ ID NO: 48454 - DNA, 791 bp, Arabidopsis thaliana
cctcaaagtgtgttcctttatcacacacaaaataataatatgcacttaccaagcttctgagcatctccaaaccacttgctcatcaggtttgaaaccctaacattaatgaaaacagctcctgactctttggcaatagccttagcaagcatagtctttccagtaccaggaggtccatagagcaagacacctttttgaggtccaagaagcttcccgtaagcaaaaagctcaggtcttttcagtggtaaaatcacaagctcatacaaagcctgcttgatggtctccaaccctccaatagaaccaaactccacatcaatgtggtctggatttatcacatcacatgcaattacatcctattcacaaaattagaaactagtgagcaatttctcgagctcatttcatgagtttgcgcaaaaagacgattggaactcaaaagtatccaaatttcaatattaaacagagagaccaatacaaattggttatcgaaaccacatatcgcattctcaggtagctaccaaccagtgaggattctaagatgcttaattcatagtagattacctcgtatggattggtctgaacaagaggacgacccaaacgtttagagatttccttcttatgctcgagagcttttttagaagcctcacgattaggatcgagatgacgaagacccgcaaagagaaccaagcagctgaaagcagcgtcgccgcgtaaagtatgagttcttgtaagatctatttctccgacgaacctcccatgtctcttctaaaaattcaacctttcaattacagagtatc

SEQ ID NO: 48455 - DNA, 755 bp, Arabidopsis thaliana columbia
tagaggagcaaggaaatggttgagcggatggtagttgataactaacctcagttttcctcgtacttgttcagctcttttgttaacatagaaggtttcacatgcccatggggaggtggtcttctcaatgaggtcttctctttggagttggtcgacttcttcgagagcaagattatagtggtttggattcattcctggaaggcttgcttttgttggatgacatcctcattcttcttgaagggtaatgatatgaaaaagtccggattctttcataaaggtgatgaaaatttggtgaggaactctgaatgtgaagtagcacaagaagccttgataatctcgtctttgatagaatttcatattccatggggtagagatgggagacattagtccatggtagcagttggttcttgtgcttaagtctttttggattccaagatactttcttaaggctatgaaggacatcaactccaagtatgaaatcttttccagggagttcagacctatatactttgctttgatcatgtatcctggaaagagttggatgtagatgggcttggtgattaaggagatgtggaagatctggccatttgccgccttgaaagctactgtacaggaattccagtgagaagctgcaagtatgtctggtttgattatagatgatgctgctccaatgtcgagataagctttgaatttgatgggcttgtcatatctgttggcaaagatgtagattttggcgtttggtgatggttgggatatgt

SEQ ID NO: 48456 - DNA, 593 bp, Arabidopsis thaliana columbia
gagaggatcccctttcaattggctgtggtcagggccagctctgctctcaatcgaaaccggccataggctttgttttgctatcggccggtttcatgtaaagaagcaacccctaggaagtgttattgatgtacaaaaatcagaatccaatatttctataccaaccaagcatacaacccctatatatgagttgtgctcacaaaccaaacaaagtcataatagtctaatcttgtgtattgaaacgaaggaacgttagtaaaattttcacataattgaaggtctaaattcgaggactaattaccaaattctttcacaagtgtgttgatgtttatgttcttaaattatttgcttattaagagacacacaagctgtttattgtctcttaaattctcgaattatactaaaaagactcctcacagaaaaaatctaaaaaaaacaaaaatacatcccattgatcaatatgtcacaaggacagaatccataacaaaatccgtaggagaatcacatcccttacatgtgaacacttttctagaccattctacaaatccccaaagctcttttaaaccgcgtctctcaaacgaaatctctgcacacca

SEQ ID NO: 48457 - DNA, 809 bp, Arabidopsis thaliana columbia
acactctagagtgcatcactaaattccactaaagagcatcataagtttgagataaaagaacatcacaaaaccttatgttgaagtaattatcaggatctcttgacgcttgctccctcgtaaacttcaaaacccaatgtaaacaaacttctcaattcataaaaaaaaatcagaatttcatagttctgagtagaggaaaccaaaagtgtaagcattgagattgtgggtttaaaaaccttctctccggtgagagaacgagagacgacacgggcgtgatctctacgagtggtggatttagtgagacgcttgatgagaagagcaccgccaattaaaaccagagtcttgacaactagaccacgagcacggctccacccgtttgagctcgattctggatccgaacccgactcggtacccattaaaaggtttcgaatttagttcaaagattccatctttagtatctctacttgtttctcaggagcagaaaattttgccgattagagaaagaggaagaggaggaggagtaaggttgtgacgatcgacgttttcgcctcgccgaaccagtggtgagattgtttgccacgtgtaatcgttttttaattcttttagtggattgaaaatgaaaattgttattcttctaatttttatttaaatttcttaaaacaattggtaataaaaacgaaatattaataaaaattatttagaaataattataaattgagatgatttgagtaaatttgaatttatttttgttatgagattgtgagtacaaaaataacaatttttttgtattttgtttggaattaaattgcgca

SEQ ID NO: 48458 - DNA, 654 bp, Arabidopsis thaliana
agtgctctagcttgtattctggaaacgccggtggaaacggcggagggattgccggagatatgacatcattcgcacggtgctgctgtggaatgaaatctctatgccagacgggagagacgccgagattcgtttggccgcacgatttctccgaccgcggtaaggaattgggccgctccaaggccgtcacaaattgcgtggcaaaatctaaggcccattacgaaaccgccgcaagagaattgggtcacctgcagtaacattataaaatccggttcagtttaacttcagtcgaatacagtcgtcaagctaatcggtttaatttataactgctttttattaaccgttgaaccggattttgaaaactaccgttcataattcaagatcggtactaattgtcaaacaaaccggttctagcggattgtagattaaatacttacctgcatttggacaagcggttctgcatcatcatctttagggatttgatcaggaaggagatcatcgtaaggtatttccattagattgtcgaaataaccaacactctctagcttaacatcagtaaccgcatcaacgaaccaaattccagttttcccggtacaatcgatctgaagtttacttggtttactcttcaatctaccggcaagggatagtaagagcaag

SEQ ID NO: 48459 - DNA, 598 bp, Arabidopsis thaliana columbia
catctaagggcatgttggctgttgattcacattgcaaattcaaacccgtaaaagcaaaaagaagttagtgaagtttataaagcacaggagtctttttccgataaacagtattaagaatcaacttacacttgtaacgatgctgcagaatgaaagtagacaatcgaataaggcttttgtatcacaggttcaaattcctgtacatttgcaccgtatgttagttttgagacagaactgcagtgagttagagaaccatcgaggtatgtgattgtgtgcttaccttaataacataaagtacaaaacgctccagatcaagacatcgcagcaaaaagtgagctcctacaacaaccattacaggatgaccctcggtgtcacaccaccacgatagctgaagaaagaaaacagaacgggctttgtcaatgtctgttccattaggcgattggctcaagggcatataaagtgaacttatgcaagggaaagtgagggaaagaaaaccaaggacatacacaattttcatctctgcaatctcggaaaggttgattgaattagctttcgctaggtatcgcgaatgaagtgagtatcgtctgcagcagagagaggg

SEQ ID NO: 48460 - DNA, 856 bp, Arabidopsis thaliana
gtggttgatgagtatgcccatatttcagtttttaacatcaatgtgtccaagtccacaatatttgatgcgggtcgagggaagatgactttggaaataggggccacatcagtagggttagtagtaagttctcttcccatttggtaccttgggctgcgctaaccacaaaagcaatgacgagacttgactacaaacctctacttgacaagataaggtctcgttttttaattggacaagcaagcacctctcacttgaggttgtctacaacttatgaactcagttatatgaagcatcttaattttctggtgttcagtcttcaggcttccaaaaaatgtttttagacattgaaaggaggtgtagttcattcctctagagtggatcatcgcttgatgcaactaaagcaaaagtgtcttgggaggaggtttgctactcaaaaaaggaagggggcttggggttccgcgtatgatggagatgtctttgatttatgcgttgagcctaatatggaggttatataccatgtcgggctctctatgggtggcatagataagtcattaccttctgcgccaagaatcattttgggatatcaaagcaacgtccttagggtcttcggttggacgtaagctgctcaagctttgcccacaagccattgagtttataagaatggaagtaaaagatggagttaagacacgatcctagtcggatacttggttgtcaatggggagtcttattgatcgtagttggagaaaggggaacatatgaattgggagtgcccgagatgctacagttgcagaggttgtagcaagaggtcactggtcaatccgtcgtggtcagaaccgacatataagtttgattgtggacc

SEQ ID NO: 48461 - DNA, 707 bp, Arabidopsis thaliana columbia
ataccggacaaagcgttaagctaagacactgtttgatgtttgaaggaatgttccaatgaattgatttggtttggtttcaaattcaatgtaggtttatctactgtttcatggcgattgggattttggtctgcattgtcactatcattggtttcattgcagctgaagctatcaatggatgttgcttgtgtttcgtatccttttatatatagactgcacctatatgtttctgttaatactattcagttgtgatgtttaatccttgataggtcttagtattcaattctcaaaactcttttaatcattatcgaagcagctctagtgggattcatagtgattgaccgtcactgggagaaggtgaggtgtttttttttttacagttgaagcttgtgtcttgtgtgttctgtttaacggtctggacttttgtttctgtaggatcttccttatgatccaactggagaactcaatagtcttcgagctttcatcgaagaaaacatcgatatttgcaaatgggtcggaattgttgtggtagcatccaggtaactaactaactgattttggtgcctttgagttcattcatgattcactcagtattcatatgtgagtatgtgtttcagtactgtcattgctactggctttggttttgagagctatggttcacctcggcatcagagcttgatgatgaagatgattttgagaatccgatgagt

SEQ ID NO: 48462 - DNA, 466 bp, Arabidopsis thaliana
gagagagctgttgaagcatttgatctgttcaggcagatgctacgagaatcgatacttccaaatcaatgtactttggcggccattcttgtttcttgctcgagcttgggatctctgaggcacgggaaaagtgttcatggctacatgataaggaatgggattgaaatggatgctgtaaattttacatcgttcatcgatatgtatgctagatgcggaaatatacagatggctcggacggtttttgatatgatgccagagagaaatgtgatatcttggagctcgatgatcaatgcttttgggataaatggtctgttcgaggaagctctggattgttttcataaaatgaagtcacaaaacgtagttcccaattctgtgacatttgtttcgcttttgtcggcctgtagccattccggaaacgtcaaagaaggatggaagcaatttgaatcgatgacgagagactatggggtag

SEQ ID NO: 48463 - DNA, 537 bp, Arabidopsis thaliana columbia
ttaaattgattttggataatttcaattttctttccaaaatgtgtgcctttttcaagaactttgaataatcatttatcaaattattaaggattcacgtggttataacatgatcacattacacaaaaggacaagaatattcgataattcaacttaaataaatttggttgtcaaaatgattacaaatttattgatagtgattagtgagagaaaataaaaataaaaaatacatgttacaaaattaatctccacgtcagcgattactttatttgtttaattgatcggacaaaaacgcggcgtttcgaaatcttttcccgatggagtgcgagcgaaacgatcaagtggtggattggataagcagagagtatcggaagacgacgacgacgggagatgatgacacctggcggaacggggaggttgagaccgttaccgacggcgatgtacgcggatattcaggaacggcgtcgtcttgggtagcgaagacttcagtttctgcgtcagggaagaggatacagagggagatggctgagcttaacattg

SEQ ID NO: 48464 - DNA, 574 bp, Arabidopsis thaliana
atgtttcagcaagctattggttacaagatgagaagaaacataatgggaactgaaattgatgctttagaagacaatcatacatggaatcttgaaactttgccccgaaagaaaaaaaggcaattgtgtgcaaatgaatatattatagtaaaatactgatctcatggaaccatagagtgagatatacaaacccagactcgtggcactcagaaaccgacagactgaatgtgttgattatggagatacatttgttctagtagctaaaatgggaattattctttatagcgagaagtgattggtcagtagatcagatgtatgtcgaacaatgtctttgtacatggagatctcttccaagaggtccatatgagattgcctataataagccattttttcttaagctataataagcctataacttagataataaataaaatgttcggagacatgaaggtgataaacaaatcatgccgttctcatattagaaaaccgaacatcttgccacttttgtagcggccggttcaaatttccagttctgatgaacggagtggtgagtgagccaaagccgccgacgagacga

SEQ ID NO: 48465 - DNA, 786 bp, Arabidopsis thaliana
attacaagagatggagacaacgccaaaacgatccaagactttgttaatgtcaaacggagaagagagaagaagcatgacgtttggtattgagatgcttcctgatgatttagtattaagttgtctagctcgtgtgccaagaatgtactatccaattctctccttagtctccaagagattccgttctttcctcacttcaacggagctttaccaaacccgaaacctcttaggcagcaccgagagttttctcttcgtgtgcttacgaatcgtcaacgattctaacccactacgtttgtttactctctgccggagaccaaatagcttgacgaaagttatggtcccaattttatctcccgattctattcccaagttcttgccagatgttgtactggttggttctaatatctatgtcattggcggtttaataaacaacaatgcatctcataaagtcatggtcatggactgtcgttctcacacatggcgtgaggcccaaggcacgtgtgtcgcccgtgtgagcccatctgcttgcgttcttgatggaaaaatatatgtagcaggaggctgcaaaaatctagatgcaactatgtggatggaggtattcgatacaaagactgaaagttgggagtttgtgtcgagtcctggcgaggaaatttgtagggaccttactagctgcgaaagcatagggtatgatggaaatgtctacgtggaatctatgaagacgtatggactttacgagctgcataaagggagatggagagaaggacaatactcgatgagtaggggtggtag

SEQ ID NO: 48466 - DNA, 1848 bp, Arabidopsis thaliana
actagcaacttgatctctctcttgtacaaactcatgaatcactttctatactctctacacatcttgaatatattgaatttgtctttacaaattctagagctgaaaacctgataaaattgatctcctctatttgatctaatataatattttggccacacatgtcaaaattagaaatatatagccaattatacaaactaaatgtaatatgtattgcatactcacatgtaccaactatatgacgatatgtagtcgcatcactactattttgttccggtacaccattcatagatatcaacttcaacaatcgttaaccaacaaaaatattaaaaaaacatattgttatcaaataatctgctcaacaaaaatattaaaaaaacatattgttatcaaataatctgcttgttacatttacttggatatttggatgatccactttttcattaatcagttttaaaatttctcatctaagcacaatatatataattttattcaaatactttataacctgaaattctttaatttcctacacccaaaaagaaaatttattttgcaaaatggaaaaaaaaaaaaaagtttcacccgagaaaagtctatttcttgacacaacgcatatcgaagcttctccttctccatatctctctctctccctccctctggcaatgctgtttcgatggcaacctcatttcctattcattaatgcctcacaaatcccctaagaaaacatcctcattgcgtagggtctaagaaaccgaaatcccacaaaaaaactcatgggtctctgtttctcctccgccgccaaatcctccggccacaaccgcagtagccggaatccccacccacatcctcctctcacggttgttaaatccagaccaccgcgatctccatgttccttcatggccgttacgatccaaaaggatcatagaacgcaaccgcgacgcaatgcaacggctaagaaaacgccgacgcggcatacgccaccgcacgggaaagtgagagagaaagttataagcaataacggtaggagacatggagaaacgatcccctacggtaagcgtgtagattttgggtacgctaaagattttgatcaccgttacaccattggaaaattgcttggacatggtcaatttggttatacatatgtcgctaccgataaaaaaaccggtgatcgtgtcgccgtcaagaagatcgataaggccaaggtatgatgatgaatcaatcatttttgctgtctttttctaatcattgagttttattttatttaagattcttcagattttggagcacaaagattattttatatatttaaaatatattcggattcttgcgtttcttgatttgatttttgttgggtagatgacaattccgatagctgtggaagatgtaaagagagaggtgaagatattacaagctttaactggtcatgaaaatgtggttcggttttataatgccttcgaggacaagaactctgtttatatagttatggagtaagtaaaaagccttttaggtcgtgtgtttttcttttcttgtaatgcaagaaaggcaaagggcgaaaacttctctgttgctaattagtttttccattgatgatatattgttctctaggttatgcgagggtggtgaattacttgatcgtattttagccaggtaactttagtaatacgtttacatgtgtgttactaaaattttagagtcttattactttttgagtaattaagctattgttgttgcttgtttccaggaaggatagccgttatagcgagagagacgcggccgtggtggtgagacaaatgctgaaagttgcggctgagtgtcatttacgcggtttggtcactgagatatgaaccagag

SEQ ID NO: 48467 - DNA, 577 bp, Arabidopsis thaliana columbia
  unsure (1)..(577): unsure at all n locations
ctgtggctctaaaaatctttgatgagcaagaaagaatgcagcaaacatatagaaaagaatcactcatcctctgctgatcacatgccagagaccttcaaacatggtaaacataaaacagcacaagaacaatcactaactgcttgtttgcatcactcaatgatcaaatcttgattaaccactagaaccattgtgaagaactaaaaaaatcacacaacaaggaaaatcactgaagtaaaacacaaaaaaatataagttattcaggttttgttcactccatttctggattcgtttgaagctactacattgcccgccaaaagagtatctctttgactctcaactaccaaacgacaatagtctctgacagccacgagtttcttcgtaccgattttattttatttcctccaaaaaacagaaaagtaaaagctagagagactagagaggttctccgtttatccacagccacacacaaaacacacactttatccaaattcagggaaactaaaaaaccatccttttgtctgatccatgtaatcgagctcctanaattcacacttgaacaaaaaatagtgtatacatg

SEQ ID NO: 48468 - DNA, 591 bp, Arabidopsis thaliana columbia
atggataatgtagatatatacaatgggaatgtgttaggccaacccgggaaggttggtgaggaaattgggcgacggtaatcaaaaacaaaatacaaaaaaggagagtaaagaacagtaggagtggttaaccaatcatctgcatgaaaaaggtaattttatacatgctcttaggtatcactttgctttctgcttgtggctgcaaatcatgtaaatggatatcttattttatgtaaaaacattaaactgcaagaaacaaatgtcccagtagcatgaccacttcagcacttctcaaacatattataatgttttaacatggataaagctatttcagatactaatccagtcgaaatagagtagttttgtcttagcagaatcaccaaactttatctcttgataccaatacagagtgactgcacaagtctgagaacaacacaataaaagtcagacctaacagtaataatatatatgaactcatcatgatttttatttcatatcttaataatacctaactggttttagtaaatccaaatatataaaattagagatagctttaacaaattgggggcgatgatcaatcacaaagattaaagg

SEQ ID NO: 48469 - DNA, 538 bp, Arabidopsis thaliana columbia
tccataactcaacatactccttaggacctacataaaaaggtagaaacatggctattttgtaacatcattcatatttgaaatcaaaaagccaatttcaaaagctgcaataagtgaatttaccaagccgaagcagagaatctacaggaatcttgtaaataaacaacagcaacctaatcgttctgttactaattccatcgtacccagataacgacaacgcttgccggagctccgattcttcgagaaatccgctccggtttctatccgccgactcaaagctcctcacaatctccggatgcgtttccggggaaaacatcccggagtaagagctgaattgctgagttggttgatatgatggatacgcgtaagtgtatctactttcaccatcgtgctgctgctgaacgaacgattctggtagctccggtgccgacggtgcgtaggcgtttgagtaagacattaatcagagtatgaaattcttagaaatggctcgaattcggagaatctggttattcgaagatgtctcaaattccagaggttgaag

SEQ ID NO: 48470 - DNA, 698 bp, Arabidopsis thaliana columbia
tccgtgagttttccggcaattttaatcttttcctatgaatttccccatccacattgaagttctaacttttgtttgaatatcgtaccataaccatcaattttatatatgtattgatatggttacatttgttgttgtagccatagtaacactttttgagtttcgacttgcaaaataggcacttttacactttttgtcttatatagaacataacaattcaggaagcgaaagtttgttgttcacggtctttcagcttccgtggatagaagaccaaagaagggattggcactcgcagagttcaacagaaacgcagcgtctcgaagccggttgatgtctgagtcacgtttcgatagagataagaactcagatccttcaactcttttgaatccacaaagctccatgaactcaataccttctttatatcttccaactctctcatggaacaagcggttcttgagacggattctcctgtatctttcttcgtctggcttcttcgctacgttcctcacaattgtcagaagcgtttcaaataccctcctcgtgattcttggatcttcatcctacaaaaacaaacaagatttcattatctctcttctttcgttttttgaatcatcctataacgttttcttactttgtggtttcgtcttaatgaccttacacattctctcatctcctctgctttcgagactacgcttggcgat

SEQ ID NO: 48471 - DNA, 1675 bp, Arabidopsis thaliana
ttttttttgttgaagtttgataaattataattttctgactaatgggattctttgtgcaggtacatcgctctgcttgtcatatcaatcgtgtgttacattgctacatataccttctcaggaatcctgttcatctggttcaacccatctggtcaggattgtggacttaatgttttcttcattgtcatgccgatgatcttggcttttgtttttgcgattattgctttacatcctgcggtgaatggcagtcttttaccggcatcagttatatcggtttactgtgcttatgtctgttacacgggcctctctagcgaaccacatgactatgtgtgcaatggccttaacaaatccaaggcagtgaacgcaagtactctcatccttggaatgctcactacggttctctcggttctatactccgccctccgagctggctcttccaccacattcctctcgccaccgtcttcacccagatcaggtacctgagccaacctcttcaacacgcctgggcattggttttttcggttttgtgaataataattctgaaccagactcggatttctgtttcttcttttttactggaaacgttttttttcaggtgtgaaggatgcattgttaggggaccctgaggacgggaagaagagtggtgaagccgaggcacggctgtgagttactcatactccttcttccatatcatctttgcgcttgcgagcatgtacgctgcaatgcttctctcgggatggactgactcatcagagagtgcgactctgatcgatgtgggatggacctcggtctgggtcaagatatgcacgggttgggtcacggccggactctacatatggacactcattgcaccactcatccttccagatcgcgagttctactaaacagagggtaacatgtatatagtccggtccgttgaatgttatgtatatgtttatgtagtcacttatagtgggtatggtcttgttataattatggtagtagtttgtgtcgcgttctagacttgtaattgaagaaacctcaactaaaagaccttggatgctgtttgaatgattgtgttgttttatgataaatagtaggccactaaatttggactatggtagaaatgctcaacttgaagtcaaagaatcattagagtcaacaggaaaatttcagtaagaatccaatcatagtttaaatttgatctaatcaatcattaaaataactaaaaccactagacattaagcagccttttcccttttgttatcattgctattagaattagttttagttatactattgttgattcttccttgggccttctccttggaataatcctcaaggacaaaatcttttatgttaatccgacaaaccatgttttttttcttaattctttaattgtatggcttatagcaattattcatatccttttacttatgaccaatgctttatacacacaaaaggttccaattctaatgtactcttaaattttcctatatctctctatcgacaaattgtacaatcatatgacaatgattagtatgtaaaatgttgttgtccccagtccccactatgatacggacacaaatttacattgtttaagaaaatactgataacaaaccatttaaatatctttaaacaactatttcgtatggataaaaaaaacgtagaacaattacacatatttgaccatcttcgc

SEQ ID NO: 48472 - DNA, 1026 bp, Arabidopsis thaliana columbia
gaggaagaggatcccgaatgtttgatgttattttaaatagagagatagaaggagaggcctttgtttcatgctctgacgtgacagtgggtctcctgcctgcgactggtgatcacggcaagatgattggtccggcaaggatgtgtcaggtgtcctagttttcttaaaacattataagtatagatctttggctcatgtaaagacttggaaaaccttatgttttgagcaatggagtgtttgttctttttggaattacattgttgtaagttttcaaaggttggacttgagatgtaagtggaagtttccacagttgtaacttttgaaacatctgctttatataaaatagtaccacttttttggaaaaaaagacaaaaaagaaaagacttgggaaaccttatgaatgttaaaagtgttgccacttcaatacaaacatcgtacttaaaaatacaagtaaccacttgggccattacaaagtaaatcaaccatcatatatatatacacaatcacgatgaataatgttttttgagtatattaatgagaaagcttgtatgagatgatcaagatgatggcgagaacgagagccacgattaccgatgtaatgatccatttgttcctagtcattctccttgacatagccgtcaacaccttcttgctcttgtcaatggcgtcatccacaccatgaagctgtgattcaaaatcagaaaagttagcttctcaatgatctaattcaaacaaatcattggcactgatagataccaaaccgagcaattgtagacggtaccttgttgtgcgcatgaaggagggtttggcgttgctgactcaaatcttggacaattgagatgccaacctcttctgtctccagcattagtcttctactctccctgattctgtcacttgattggtcaagcctctccacggacattgccaatcttcctctttgatcagcagatacctggaacatggacaataatgtagacacagcaaagtctttgccatctaaaagtttgtgtgaagatgaatataaaggag

SEQ ID NO: 48473 - DNA, 827 bp, Arabidopsis thaliana columbia
taaattaactcatggatgtatgaatatatagtttcacctaaataggtagttgtaatgttgtatagctaattatcgtgccatatatatgagaaatagatcagttacagttgtatgatatagtaacaactaacaacaatgacaaattaatggatggtgtcaagtagaagtttcgagatcatcgtcattaggtatagtcttaggcatgttccactcatgagctttccactctggcaattgttgtatgacaacctatgcggtgatttattaatatcaataaatcacatgcatgtatagaaaaaaatgaagattatatattatagacagagaaaaagagaggttatatattattaccaatccggtagaatctggatttcccacgttggtttgacaagctagtctccaattttttggtttctgtgaaaacattattcgattttactcccataaccaagatgatacaagattactaaatactataggataatttcttaaataaaactatacccttttgagtttctccttctcaatatcagttcgcggatttagaagctcctttccatttacaatctgaaaagaaatatccatcaatatctcataaaccatcatttgactgtttaatttagcttattgactatatataagagagagatatgtataccgtcgccatgcaagtagcgcaagttcctactcctgcgcagtttgacaaaggcttactctgcgaattaatgagacgttgacatatactccaaagtccaaactaactagattagattaagagaaaaaatcaaaccgagggagagaaaatatcatacataaggaccatagag

SEQ ID NO: 48474 - DNA, 523 bp, Arabidopsis thaliana
taaagtttgagacattccactcttgggtttggaaggtgaagtcataacgtttgggccatatttcaattgatattttgtccggagatggggagatggactctatataccaagtatcgaaaatgccaacgactagcatagaagccacggaccaattctgctcccatcgtccgctcgtcttggctacatagtaaattagtagcgtataagtatccctccgattaccaatttcgtgcaagtaatctgttatgaggcaagcataagtgttgttgtcacttggatttccggtgagtacaccgtaacggagtacacccgtgggatatgggctatcaagggtgagttcgggtagttgctgcagttctgaaatgaacgggttgtacaggaaagtttggtgggttttgcgtgggtttaagtccaaggactcggacataacaagccaacccaatgttgatcccaagaatcttgcatctgcaagacgtgggtcgtcccacgatgtacctctctctcacagggtcaaagaaacggg

SEQ ID NO: 48475 - DNA, 377 bp, Arabidopsis thaliana
gttcttatttgttaattcttatagtttatgctctcatctcacttctctcaaatttgtttctctcgcagggattcatggggaagtttgcctcaagatctcctcagaagttctacaaatttgctgaaccctaactttaccgaagtggtggcactaagaggtgtcatcactcattggaggatcacagttcttactttccgtgaaggaggtttcgtagaggaaaggccgtggttgttggaccgtgaaaggggatcccgagttgcccatttctatgaccctgtgagagaggagctacatcatgggaaagacccatatcgtgaaggggccaaattcttaggatcaacattgggttgggttgtgatgtccaactccagtgccat

SEQ ID NO: 48476 - DNA, 709 bp, Arabidopsis thaliana
ggagtaatgatgtttgcacttataggtattgttctctgcatggtaggcgtcatagccacgctgcggataacaatgctggtgttccctctttgaagcggtttgtgtcgatgaggaggaagtttatgaataggcagaagagtgtgaaccggagttggtgttattgaagaggactttgagtagaaagagagggcctttaggtggtcgggttgtgactgatcaagaatcaaaggaggtggatgataatgtagatggagattctgatgaagaggtgtttgaagaagaggtttccagctctgtggatggtggaaatgataatgaatcgattggaagatctagtgagacagtaatggttgatgttgatgataatgtggatagaggaatggatgcaatggagactgttgcatcaaaggttcaggaatctaaaacggagactgtaggtgccacactatggcgcgctatatgtgagcaaactgtgacgggtcacgatcatgatgatggtaaggtcgatggaacgacgagtgatggaactgtgggagataatgaagaagtttgcagagaaggttcctctggagaattgagagaagaggatggaaagaaaaccgaatatgtatggaatgaaactgtaacgctcgttaagcaagcgtttgatgagatacttgcggaaatcaccgatgatgactcgtctgatgatatttctatgacgaaggat

SEQ ID NO: 48477 - DNA, 357 bp, Arabidopsis thaliana columbia
ctgaaaatgatggtatctttttcaataaaatattgcctaattgtcttgaacaagttagagcttcttctcacatgtcttctctgtgatattgtgcaatctacagatcgtgcttgatgtcccggatatgattttttagttccaaatcttgaaacttttgattggataggaaatgaggaagcttagtattagagactccttgaaatctttctttgagcctcatcttcatcctgataatggtgaatcactcaaaggaacaaaaactggtaattctctttgtgcacttgttagtgtactttttgttttcattaaaatcattccaaatccataggtcttttggttttagacttgttttaatat

SEQ ID NO: 48478 - DNA, 783 bp, Arabidopsis thaliana columbia
tatgttaaagcgaaatagtatagtggaaagcttagactttggtacagacgttagcagccagttggagtttgtggatttacaatacaatgaaataactgattataaaccatcagctgaataaagtcctccaagtaatgtatgtatccttgtcactaatcaaacatgacttctatttgtctcaatcaactgcttaagtgtttatatatctacagattggcaaataatccagtgtgtctagaggcgggaaacgggccgagttactgttcagcaatccaacacaatacctcattttctacactcccaacaaactgttctccatgcgaaccgggcatggaagcgagtcccacgtgccgctgtgcgtatccattcatgggaacactctacttccggtctccttctttctcagggttgttcaactccaccaacttctcaattctacagaaggcaatcgcggatttctttaagaagttcaattatcctgtagactccgttggtgttcggaacataagagagaatccaactgatcatcagcttctaatagatctattggtctttccattgggaagagagagttttaatcagacaggaatgtcacttgttggttttgcatttagcaaccagacttataagcctcctccgatatttggcccttatattttcaaagctgatttgtacaaacagttctctggtatgatgaaccttgtcaacacacaatcaaactagaactaaaggttgttattgatactcatttgctctgcctttctttttgtccagatgtagaag

SEQ ID NO: 48479 - DNA, 724 bp, Arabidopsis thaliana
caaaatgtaaggccataacaagctgatgatataagagttaagtctctttatatacctggagctatgtagccataggttcccgcaacgacatgcgtggactctggaccgccattgctggcctgaagaatcttggcaagaccaaaatccgcaattctaggtttcaagaactcatctagcaatatgttactggacttaacatcacggtgaatcaccggtctctcatacccatgatgcaagtactaagcccttttgctgcaccaagagctatatcataccgtgtttcccaaccaagattcgacttcttgcaagagtgaagcatgtcccataagcttccattaggcaagtactcgtacaccagcaagctcgagtcatcgctcgtgatgctacaatagagtttcaccacgtttaagtgtcgtatcgaactaagcgtttgcacctctgtttcaaactctttcgatcttccctcccgttcagtgagaatcggcattgcactgctgaagtttctctgagtactactacaccggatgtgcttgaccgcaacttctttaccatcaccaagtactactctgtacacatccccacaacctcctctaccaatcaaattctcttctttgattgaatcaatgatatcatcttcagtgaaactcatctttcggaatgactttatactccaagattcgtgtttaagcgaacgtccctccttcttctctgttttcttcaggta

SEQ ID NO: 48480 - DNA, 866 bp, Arabidopsis thaliana columbia
ccatgatttgaataatttgaagaacgaacaagtatcgttgtatcttgatcaattgattagattgatttaaggaaattctccgaaaaccatctttactctatctgtcaaaatctcattatctttctgccgacaatctctgtgttgtttatttacttacacttatgtttgagttttgacttcttgaaagatcctttgagaaacatgggacaatgcattatcacatagactctattatcaaaatatataatggcaaataagtgggagtgaagagactatgtattagaaggcaagctatgtttaatgatttcagaacatcttagtggaagacaatggtgggcctaatagtttcctaatcatattcttgtgtttttttccagcttattgtggttcttgaccttctacatgtgaaatcctaattacatttttggtctttttagtcaataatggttatggtttagctaataatcatgccaccaagacataaagatgggaccaatgagaagcttttggaatgatacacttttaaagcgtgtcttgatgtttgaaatctcatgactatattttacagtgactgatcactgagctatactcaaaactgctttttctcttcaaacaccaaaatgtgtaggttacttttgtctgaaatccatgaaactgaagctctttcacctaaatcttcatctgcagcaacactaactcttatgaaccagaaagatccatcttcaagctctatagtgtctgttttatgtttagttatctctggtcttgctcttatcatcgtcttcctcggtgtcctctacttgatcttcaaatttctccgcaagtcctcgactttatttccattccccatttcaactacaacccag

SEQ ID NO: 48481 - DNA, 527 bp, Arabidopsis thaliana columbia
tgtaattcaaaaactgttatttcacttacaaatgtttctttaaaaaaatacaaaagttgcggtcctatacaaagaaaaaatgttgtcactaaattttaatctcccaaagaaagtgaaaacggacatgaaaatgtacaattactaatcagtagatggtaattaatgttttgacaaaaaaaaatatagacggtaattaatcttaacttatggctaatagtaatatcatcgctaattaggagaaaggaagtatctaaagtccggaaaaatgacctgcaaccgcccaagccactcttcagccgctcgtaacagcttttccgttctttggtttaaacttgtgggacacgaaaccagagatgggctgagattggtttgggtcgcttgtacctggaatcattggtttgaaccgtttgggtttggaatgtgtcttgagttgcgtcttgggtcttgtcacatgtgtgtgtgtgtatatgtatgtgcaagagatgggtgtacttctgacttctgagagctgaaaactacaatgacag

SEQ ID NO: 48482 - DNA, 1127 bp, Arabidopsis thaliana
caaagaaaatttatttaaactacgtgacattgttttttctaaacaaaataataataataataaattatatataaaaaacttaaagtttacggaaaaaaaatatctaaatgcataagaatttaaaattagtttaaattacgaccgcgcttgttactaccaacaaaagggtaaagctcatacctaaagttacgacccactaccaacactctagctccttgtttaccatgccagcaatcttgaaattttacggctatgtgtccaacacactctcgacaactattattatatatgtcaagcctacactgcaccatcccgtacaacttctttgtcccgaaccttgtatccccagcggcatacaaatgatctttgagggctatacctaccaaattgtcgaggaatgtcatccacttctctccaaacgaatctacgttcattttcttcttgttggacatacagaaatcattatctttgtcgaacttcccttgagtatcgaacggagaaatctggagagtacattggtcgtaccatattattgcccccttatatcgcgggcatcttctatacgaagcggtcatatacatttgtcatattaacgccaaaatcaatatcaacattgcatggagtaatttacatataaaatataagatataacgccaaaactgacatatatgtgtgcacaaatttatacatgtaataaagaaagacgtgaaagctaatcaataatgaaatagcgttacccttgcgatggcggtggcaaagcaggagcggcacatggacccgttggagtcgccacggcactggttggtgacggctacgtaatcagaatccttaccaagggccatcatgtcgtaaccaagggtaaaaccatcaccgctaccgatagagactataatactttggagttttttctcataccaacttcccggcttgtatttcccttgattggctaagcatttgtggttcagataggcattggtcatgttcaaggacgaaacggtgcgcataaagatcagttgtgttccaccacggcagatatagtgatcaaaacgaagcatgtcggcgatgaatagtacatttcattggatttttgtgtgagactcgaacggatttggatgttgaatggagat

SEQ ID NO: 48483 - DNA, 533 bp, Arabidopsis thaliana
tggaaaatccatggacaacaacataaggtttactctcgctagtactagctcaaatcgttggctcactataagatctgagagtcttgggggtgtcatgatttggttaactgcaacttttgcggttctgcgatatgggaatgcagagaaccaagctgtttttgcatctacgatgggtctccttcttagttacactctgaatatcactactctgttaagtggtgttctaaggcaagctagcaaagcagagaacagcttaaactctgttgagcgtgttggcaactatattgatcttccttctgaggctacagctataatcgagaacaatcgtccagtatctggctggccttcaagaggatcaattcaatttgaagacgttcacctgcgttatagacccgggcttcctccagtattgcatggactgtccttttttgtttatccgagtgagaaagtaggagtggtgggaagaactggggcaggaaagtcttccatgctgaatgcattataccggattgtggaattggaaaaaggaagaa

SEQ ID NO: 48484 - DNA, 623 bp, Arabidopsis thaliana
atctcacacatcctgcttatgtcaattgaattttgacattatggagggcgacacgagggcgttgagtgcaactggtcatgatgcgttaatggaggacgtcggacggccaccggatggttgcgtgccgatggcggctgtatcatgggtggataaggtgcagaagagtaatggcggtgggttacctgtcccggagagagtgatagatgatgagtttatcgcgtcaaggatgagggtggagttcccgaatggtgaggatggtgagccggtggtgaccattgatccagaggttgtggatgcgatgaatgggttgtggaagctgtgtatggttgtcaaagtgctgggtaggcatgtgtctatcgccgctttgagtcgaaaattacgggagttgtggaagccgagaggagggatgtatgtgttggatctgcctcggcaattcttcgtagtgcgtttcgacgtggaggaggattatctggcggcggtgacagggggtccgtggaggctcttcgggagtgttttgatgggtcaagcctggtctccggagttcaatccgctgaaagatgagatttcaaagacaccggtgtgggtgaggatttcgacctcccatttactttttattgaatgat

SEQ ID NO: 48485 - DNA, 832 bp, Arabidopsis thaliana
ataatgccactcctaatactgttttatgcagcatatctctactatcaggtaattttctaattcggggcaatgtcagatacatgcacaattgattttaagatatatggtccacttggaattaatatcacttctgtgatttgtagagcacatctcgtgaagttagacgtttggattccgttacaagatcgcctatttatgctcagtttggagaagctttaaatggtttgtcaagcatccgagcctataaagcctatgaccggatggccaagattaatggaaaatccatggacaataacataaggttcactcttgcaaatactagttccaatcgttggctcactataagattggagactcttgggggtgtcatgatttggttaactgcaacgtttgcggttctgcaaaatggtaatacaaataaccaagctggttttgcatctacgatgggtctccttcttagttacactctgaatatcactagtctgttaagtggtgttctaaggcaagctagcagagcggagaacagcttgaattctgttgagcgtgttggtaactatattgatcttccttctgaggctacagatataattgagaacaatcgtcctgtatgtggctggccttcaggaggatcaattaagtttgaagacgtccacctgcgttatcgacccgggcttcctccagtgttgcatggactgaccttttttgtttctcccagtgagaaagtaggagttgtgggaagaactggggcaggaaaatcttcaatgctgaatgcattatttcggatcgtggaagtggaaaagggaagaattatgattgatgattgtgatgtggc

SEQ ID NO: 48486 - DNA, 647 bp, Arabidopsis thaliana
tggttactttgttgttaccgtattaattaattatatactcgtacgtaatagtagcaaagcaacgtatgtacgaaccttggcgtgctttggctcagtagtgtcgagataaactccaacacgaacgccgccgtagaacccaaggctaggccggaagtctccgatgagaacatctcttttatcaactagatccatgtcaaaaagatggctaaaagacttgacgtcaagaacggcgacgatgttagggttaacgttgccgaagaaaggaaacgtcggaggaatatttgtacggaacacagtgctcttatacttctcagctcttgtccggaaaaacttatcgggtccttggaatctaaacggtccgataatggtccaaccaacggccagccgtacgatcccggcattgtacggaggggaagctgtgaggggggtgatggtggctgctgagatgttagggatgttgacggtggtggccgcggggaagtcgccgccatcgttctcaacaacatcttttgagcttagaggtttttcttgtttttggaaattatctcttcgccttctatttctatgcggttatagatatatcttggtaaggtataaataaataaataaagagaacattaattatacatgcagtatttgtagacttt

SEQ ID NO: 48487 - DNA, 1342 bp, Arabidopsis thaliana
tcaaacctaaaccatatgtcaaaccaaaacatcgggatcccaaccattctacctccaagactcggaaacaatttcgctgctcctccatcccaaaccagctctcccttgcagagaattagaaatgggcaaaatcaccatgttactccaagcgccaacccgtatggctggaataccgaacctcagaacgattcagcatggtaagctaaaacatggctctttcttttaagaccattgaacaatttaaaaccatttgaagtactatgatccctgtttatacatatcagattcctgtctcccctttttttgctcattttacaggccgaaaaaatgcgtggactgatcaaacaagaagcgggtttcgcactatattaatgtctatgcatctgtaatttgtaagtgttattaagttacgaatcatgagaaaacatcttgtgaaaatacagtctcatggcttatatatatatataagctctgtcttataacattacaagattcttatttgagaatcgtctttctatttatagctaataacagagtgtatatctgtttttatccaattttaaaaaagatagctcacatggctttactaatttcccctatcattaaattccgacaacctcggcgatttccatggtagatcgatcaagcattcacattttctcgtcagaaaacacaaaaaaaaaaaacagaggagaaaaagagacgacgacaaacaagtgaaagaaaaaagtcgtcgttcttccaatttttttctcctctctcttcctctgtttaacggcgtacgtaagtcaaaatgggttcaagtaagctaaaacgtgccataggagccgtgaaagatcaaacaagcgtaggattagccaaagtcggtggtcgaagcagttctttaacggaactcgaaatagctgtcgtgaaagcgacgcgacatgatgactatccagcggaggacaagtacattagagagattttatgcctaacttcttactcacgcaattacgtaagcgcttgtgtggcaactctctcgcgacggctcaacaagaccaagaactggtcggttgctctcaaaaccttgattttgatccaacggttgctaacagatggagatagagcctacgagcaagagatcttcttcgcgacgagacgaggaacgagattgcttaacatgtctgatttcagagatgcgagtcagtctgattcgtgggattactctgcttttgttcggacttatgctttgtatttggatgaacgtcttgattaccggatgcaaggaagacgagggaaaaaaaaaagtggtggtggtggtggcggtgatggtgattccggcgaggaagatgatcatcgaggg

SEQ ID NO: 48488 - DNA, 689 bp, Arabidopsis thaliana
ccggttgattgtttccctatccgaatccatttcgtccctagagctgcttggttctagtatctgctttgtattgttttcaggctaaagttagtgtcaacaaaagctggattcctctgacgagcttggtcgctgcaaaaacgttttcaggtggcgtactactgaattagtgaattctctcagccttgcaagctcacaagccccaagccaagtatccttcaaattctttattcattcataatctcacatggtaaatttctatgttcttgtcagtagttcagacttgtctttctttgacagctgttctcttggaccttttttctctatttttaggatccgaagaaagtgattgaaatctatgtcccacttactgtacttgcaaaccatgttatctttgcttatacatgtcttagtatatttgacgtgtcgcaagatctgagtatattaacaaaaacatttcaattattaataggtaatcaaagcataaccatacattagatttcccttattgataagagagtattatatgtgtcatttgcctctttttcagttgagcatcactggcagcaatgaccaccacctgagtttcaaagctgcttcatcttcctcctcttatgtctcttctcgctcgtctgtaactctctctttttcaagagaccaagctcaagacgggacgcccatggctgtgatct

SEQ ID NO: 48489 - DNA, 321 bp, Arabidopsis thaliana columbia
tacacaacaagtaaataattttacataatattcaaaaaaaaaaagaacatttaatcaaaaaaaaaattcaattgaactgatccaaaattcacacttaacaaaagaatattaaaaactaaaaaattaaagttattcgtaaatttaatatatagagcctgacaatgattagtttttctcagtattttttttgacagaatgtgaaattttattcccgcaaaaagctttggtacactgaatgcacccgtttgtttagaatatagccgcggacactgacattcccacactgagacacaaattcagggtggttgtggcgaagaatga

SEQ ID NO: 48490 - DNA, 498 bp, Arabidopsis thaliana columbia
  unsure (1)..(498): unsure at all n locations
tnnnnnnnnnnnnnnnnnnnnnnnctaaagggatggcgctgcgtacctgatttaacacgtcacccagtcgtttattactgctttgttgaccgattacggcaaggctctcttccaggggtaatgccgctgcgcttaaggttgccaactgccgggtgaaaagcgtcagttcactatggctgatcctcgggcgacgtgtttttactcccgaacttttttgggggcgaatatccagcaggaaaagcccttcttcacgcagccgcagtcgtgcctgacgttcatcgttagcatcaatgatcccttgcaatttttgaccatcctgggtcatggcgcgatacgataattcatgcttcgctctccagcgtggcactggcgacgcgcataacctcatcccaggaggtgtcacgcttatcactttttgcaggccatttttgattaaggccttgtgttgttgccggactagtcgctccagtgcttgttcaccacattttcatgaatagc

SEQ ID NO: 48491 - DNA, 531 bp, Arabidopsis thaliana columbia
attttgttggtaataagtctggtttcaatgacatctctccaaataatctctctgtgagctctatcccctccttggtacacaaactgatcaaaagatgatatgtcttcagagtgggttttattcctgatctcttcatctcttcatagagcgcgatacatctttgcacgtttccagcgaatccatatccagatattagtgagttatacgtgaatacatctggtttgagaccctttcttgagatttcaagaagtaagtcttcagcttctgataattttccggtcatggacaacccatcactgagggtgctacaagtcaccaggctcactactgtcccgaattttgagcatctccttagaaaaccggaaagcgtcttctatcttcccgtttgagcaacaaccatcgattagcatgttatacatccttactttcggtgaaaccctctatcttccatatcccgcttaacaatctgagcttcaagaagtttagaacctttgcacaaacaatttatcagagttccatagctaactacat

SEQ ID NO: 48492 - DNA, 521 bp, Arabidopsis thaliana columbia
ttatttgttggatttgagtgaaaaaacattaatgtctttgatcttaaatgctttaggagttagttgtgtgttggtttggttgagagaattgagaaagtaaaagaaattttctatgtttgggtgagaaaatgcgggaaaatcaagtatatcccggtaaaaaaactaacattagtgtcaaaatttttggtcggtaaatatatatttacttgtggagaaagttaactcaataaatattgtatagctattttggggtttatgtaatgaaccaaatactatttgaagaagaaaagtataaacttagttgaataggtaaactaactactattcaataattttccttattaatgttgattttgtaattagaccgtcatttattctttaatccttgtatgatggggattgacaaataagggatttattcagtgttgggtgggcgagaaaatgtggggcaatgatagcaacttcaagaaatcgcgaagtagagaaataataatagcatttgggttgacgagcaagtatgg

SEQ ID NO: 48493 - DNA, 1493 bp, Arabidopsis thaliana columbia
ccgttatactacttaaaaataaaaatttcgataaaacacagaaaacattaaaattagagtgagaaaggtaaatactgtgacatatcaatgtcttataagtttatttagtatgtgcaatatcacaaatctttttgtacttacttaattaaaagttgcgttacaaatcaataaaataaaaatccgcaactcatatattttctgagacaattttgttttacatcaactttgatttactaagttcattattgtatattgatttagtatagtcattaacatgttttgaatatatagaagaaaaaatggcaacaaaaatagagagggaaaaaatgaagaagacagaactatagtaaatgaaatttacaaattatcatgctcgattaccattgctcctctccatgtctctccggaggctacatcgacaggaacgagcattgacgttggacctgtgcacacgaagtaatgttgcttcccatacttgtcccacatcgatcctggggtcccacatacatctcttcgaacccaatccttatcatcctgaaaaacaatcctctcccctgaaaaattcaaattccaaactcatcagattctattgagttcatagttagcattagaaaatcttccttaagcaataaacagagagagaaaattatatataagatatagaagttaattgaaatagtttttggattgaaagttttgtgtaagacatcgtagataaaacaaaacttaaaagtaacatgttacatccacacattgagactctatatcaagattcaacatctaccaaaatagttttttttttttgcatcttgatgttgtatttggataaacagttgttttttgcttctttttctttctgagtttgctagaaaatctgaaaaaaaaacttatgaaattatgatattgatgatttaagttacgcttaaattatagcgttaaaatacagttttatcaccaatatagagttttacaatttttggaccaattttggtgagaatacataattccgctagcgtcaaaccgaaattctgatattttgtgtcaagatgcgattcataaatttttggaaattattaatttacaaaatgtatgatttattaatatatattttagtactaaatgagttggaaattccttttggtatttttattttgttttttgcatccaaaacttttttttttttctttttttttatgtaattggttttcattcgagatgcaacttggaacatatataccaaattgatgttgcatctaaatgcagaaacgaatggtcatactgaatataaacgaatggtacctgatctatagtttcaaatttggaaggtggagtgttatagactgcctttaatctctcagccggaggagcaccatatattctactcatctttttctcaagaagtgtaataacagaatcttctactgcccaaatccccggcttttccccttcttccgacccgaaccaccccgaagattccgccttcattgcctcag

SEQ ID NO: 48494 - DNA, 582 bp, Arabidopsis thaliana columbia
  unsure (1)..(582): unsure at all n locations
nnnnnnnnnnnnnnnnnnnnnnnctaaagacggcagtcaggtcgcctgcggtgatgtattcataccgcgtttcacggccctgtgcgtctttcaccgaggttaaccggccacggttgtcatagcggcggtaaaggctgatgccttcctcgcggtggaccgccgtcatctggccgaagcggtcgtattcataacgggtctggtagcccgagcagtcggtgaacgccagcaactgcccgtagcggctccaggtcatctgccgggtgctgcccgtcgcatccgttgtcgtcgccggtaactcactgtgcgcgtcatcgtagcggtacgtactgtctccccgctgcgcgatgtctccgataccagcctgcccggttcatcatattcccggcggctctccagcccgtccggggacaccaccgccgtcagctggttcccgtcgttatagtaaaatttcgtctcccgcccgtccggtgtggtgatgtcagtgatatcgccggacaccacattcagaccgtactctgtcctccgtcccgccgcgtccgtctgcgccgtgagccttcctgcgcgtcatacccgctgcgcgtg

SEQ ID NO: 48495 - DNA, 523 bp, Arabidopsis thaliana columbia
cttgatgatctgatacaaatacctagttagatcatattaattaatcctcttatggtcatcataaaatctaagcaaatgataaatcatactaatacaggggatatatgctattataatagaattccatacacgtactccattcctgtataaaataaaggtgacgtgatacagttgtatgcttaatatgatcgtcaactactgaatccctggaccacaacagaaaaaaaaacaattatttaatatatcttacatggttcaacttatcggcacataatccaatttcccacaactttacgcattgatagcatctttaaccaaacatcctttgagaactattttaaatatcgaattcattagtcgatatgtagcaggtggtccctctaaacgctcaagttatattaaaccttctggattcatatttacttctggatatttgtgactatctgtccatcggtattaatttagcgcaatgtgagagcaaaatttaatagttgtcatacattggagtttggagaataaatgg

SEQ ID NO: 48496 - DNA, 449 bp, Arabidopsis thaliana columbia
cctgatcaaatccgctgttctccgtaacctctccgatttcgttacctacgctcctgagattcctttcgctaaaccgttaccgagacgggaaagagacggatcgttcggaggagatttggatcacgtggcggtgactcgatcggtggatgtgacgtcagttccagcttggcttccgccttttcctgactctagtctctgctccgatcgttgttcaaaggataatagatctgatcacttgtgggaaaactctgattccgttattcgccgtgaaattctgccggagagtttgaaatctaacagcggaggaagattaccggtaatgagagataaagtgagattcaagatggaacaacgtgattggagtagtgcaggtgatacgagattcgagctgtcgcgtgacaatgacaatggcgaatctggccgtcatcttgaggttaagaagaaaatta

SEQ ID NO: 48497 - DNA, 1055 bp, Arabidopsis thaliana columbia
caatctccatcaacaacattcaagatttcactatcttacaatatttcaaaaaaaatgtatgttttgggtttttttaagtaaaggaaaagttgcaaactttaggactaacctcgagaatgctgaaaaagcaaagggaggggaactcaaaatcagcaaatgggtatttttgtcttttggaccaacgactggtctcctgcttgctttgtttttgagcctgcaaacaatatccaatcctcagttttaaaatatgttactttgagaacagaacctgatgcttcagaatgttcttagtttgcatgtgattaaaaatatttgttataaagaaatttaaatgacaacagttaagaaaagtgtagtcagataaagaaaaagatcttccctcatgaataaatcagataaggataaagaacatatcataattaagggagcaatatatcaaacagaagtggttctttttgaatcattgcattgaggattaagatctgttgatgaatcaacaaggtgggaaaaagtactaagagtaattagcataaccaaacacaaacaaagtactaatttcttgaactttggcaagcaaatattgaatccctcatgctagaatctaatggtaatttctacactagagacaatagattttatcttagactactattacatagtattgcaggcaaaagtgactatgtggagttatggtatgtgttttttcgatattggtgtgatatttgtgagaagatgtaaagatgaagtagcacaaataaacatgcagccgatgttgttgcttaaaaaagtgagctagggatcctaaagtgaaggggaggaagatcttagaataatataaagaatcattcttaaagaggaaaaaaataatgtatttgtttcttttcgaagagggttactctgttgtacctcttttttgccaaagtttaatgctttatatgagtagctcctgtaggctgtgtagtaatggaatagtaccacggtttgcatggccacggtccggtcctctgtgtcctgcagttttacaaacatcaacaaaccactttccttacacaaag

SEQ ID NO: 48498 - DNA, 451 bp, Arabidopsis thaliana columbia
gcagatcagtgtgctctaaagaccttaacgcaaaataattttgcaaatcgcgtcggcaacctgtggcgtggtggcattgcctttcatatcaggtgttttcggcccgtgagcaatcacttcttcaattgctgccagaataccgttatgcgcttgctggaaacgctcatcgccattgccgagaaaatcgagcatcattgccccggcccaaatcgtggcgatagggttagcaatatttttcccgtagatatccggcgcggaaccgtggacaggctcgaagaggactgggaaagtgcgttccggattcaggttggcggatggggcaatgcaatggtgccggtgcaggccgggccaagatcggaaaggatatcgccaaacaaattggacgccaccaccacatcgaatcgttccggctgcatcacaaaacgcgcgcagagaatatcaatatgctgct

SEQ ID NO: 48499 - DNA, 574 bp, Arabidopsis thaliana columbia
tgaatttgtgatggatcatcttcttcttgatacaatgtccttgtggtgctttaacagtaactcattcatttgagcaagttgatgcaaaagctgaactatcctctgtttcaaaatcagaaaacaatagtaatgtcacgtctcttaggcatttcatcaaacactttgtatgcacaaaaacatacctcgtctctctctttgatcacatctcgaagatgatccatgttttctcctttaacgcgtttccgaggagctcgtacacgcatccaccaccaaatcgcaatggcaagaactggataaaatgatcggatagtctttgagaaccaggtcaacaaattcttcaacttggagtataaacgtacaagaagaggctcccaccaatcgtggaggacatcaacttcacgattcaatggtttccccagtaatttccatctgaatcgcatggtggagacttgccgccttgttcagaaggtaatcgcggagatatctgttcaaatggcgactgttccccgaatcggacggtggagattcacgcttaacaacaacggcagagatttttcttcagtttccgacggag

SEQ ID NO: 48500 - DNA, 568 bp, Arabidopsis thaliana columbia
tccaaaaaaatccatttttaaaacgaataatgaaaagagatgcttcgatcgtagagtcaaaaagttaaataaatataagaatttacaagacgaatggaaaacacaaccgcgtgttagtcactaatcataatgataagtgaaagtttaggtcacattaattaattttaaaatttgattaatctttgaaaccttttaattcacgtggttagggcaggctttggcaacaacgcgtagttggtgttgggtcggtggtcgacgacctagccaaatccatggctcatatttttatctccatttgtttccatagttgttttaatgatacgtgtacgtatcacttatcagatgaaaataattaattacctcgactttcctaatcatatctacgtttccacaataacagtcttcaaacaaatccattagagtatgcaatttaggagtgtcaaaataagtcaacattcatggattactcgaactcgtcaataatgttaattggtttaagtaaaaatattttaccgatatatataaaggagttttaatagattaaactaataggattataagttaatgg

SEQ ID NO: 48501 - DNA, 902 bp, Arabidopsis thaliana
tccgagttcaatattacagtagtcgtcaagcgtgaagactgcatcagggcattaagagctgtgactcaagattttacctttcgagaaccactttggcagtgggaatcataggaccgggattaattggtggaaccttacttgatcagattagagatcaggtgagtatgtgatacttatatgcgagattatagtaaaatatggatcaatgttcaagctgcatcatctttaaatttcctttcacaggcggcagtgctcaaagaagaatttaaaattgacttgcgtgttatagggatcacgggctcaagtaaaatgttgatgagtgaatcgtaagccaacgaacctgatacattacctttttggtgaagtttctactgctgtaatctttacacaatcgtcatctttttagggggattgacttatcaagatggagagagcttatgaaagaagagggagaaaaagctgacatggagaagttcacccaatatgtgaagggaaatcatttcatcccaaactctgttatggttgattgtacagccgatgctgacatcgctagctgttactacgactggttgctacgaggaattcatgtggtcactccgaacaaaaaggctaactctggaccacttgatcaggtaaagtgtttgatatttgtttaaatgactgttggatcgggagctacatatatgttcatcttgatatatatccattaagattctgtgattttatgaacagagagactaattggtaacactcctgtaaatgcagtatctaaagatcagagatcttcaacgaaaatcgtacacacattacttttatgaagccaccgttggagctggtcttcaattattagcccttacgtggtccctcgaaacaggggataaaatactgcgaattgagggaat

SEQ ID NO: 48502 - DNA, 1291 bp, Arabidopsis thaliana
tagattttggtttcttagtcctgcagaggattctcttttacgatgaggtcaagtttggtaacggaggattctatttaaaaatgtgatcgttagttcaactgcaattacttgtttctctcattagtttactctcgcatcactgagcttgaagagaccttttgctccggcttttcattttgatcaatgcagttgtttagtagaaaattctgtttgtttggttttggttcttctatcttaacaattctgctatggttcttgtgtcccagccagagagtgcgggaagtataaggagacagatcgggcaaatgctgatgaagcatcatcatttaactgaaagaaatgaccatgctttgcagccggtatctcctacaagctacgatagctcattggagttccgtggaagaagacgagctggtgagcctaacaacaatatcaagacatcaaccgaacttcttaaagtgctgaaccgaatctggatcctcgaggagcagcattccgctaatatctccttaataaaatctttgaaaaccgagcttgtcactcacgtgcccggatcaaagaccttcttagatgcaagcaagccgataaacgcgatatggatgattttgtgaagcaactcgcggaagaaaagctgtcgaaaggtacgaaggaacacgatcggttaagctctgctgttcaatcgctagaagatgagcggaaactaaggaaacgttctgagagtctgtataggaaattggcacaagagctctcggaagtgaagtcaacgttgtctaactgcgttaaggagatggagagagggactgagtcaaagaaaattctggagagattatgtgatgagtttgcaaaagggatcaagagttacgaaagggagattcatggtttaaagcagaagttggataagaactggaaaggttgggatgaacaagatcatatgattctttgtattgcggaatcatggcttgatgaaaggattcagagtggcaacagatcggctttggagaagctcgagtttgagatagaaacatttcttaagactaatcagaacgcagactctaatgaaatagcgagaaatcgccgtacttcacttgagtcggttccatttaacgccatgagcgccccgatttgggaagtagaccgtgaggaggaggaagattctggcggaagcggttcgaattgttttgagctcaagaaacatgggagtgatgttgcaaagccaccacgtggcgatgaaactgaaaaaccggaactaataaaagttggtgttagtgaaagaccacaaagacggagtcaa

SEQ ID NO: 48503 - DNA, 531 bp, Arabidopsis thaliana
gttccaccgagaatttcaatggctgctgctagagaagaagctgaacaagtcatgtttggtgctttagataaccttttcgctaacactaatgtgaaaccaaaggatattggaatccttgttgtgaattgtagtctctttaatccaactccttcgttatctgcaatgattgtgaacaagtataagcttagaggtaacattagaagctacaatctaggcggtatgggttgcagcgcgggagttatcgctgtggatcttgctaaagacatgttgttggtacataggaacacttatgcggttgttgtttctactgagaacattactcagaattggtattttggtaacaagaaatcgatgttgataccgaactgcttgtttcgagttggtggctctgcggttttgctatcgaacaagtcgagggacaagagacggtctaagtacaggcttgtacatgtagtcaggactcaccgtggagcagatgataaagctttccgttgtgtttacaagagcaggatgatacagggagaactgggg

SEQ ID NO: 48504 - DNA, 537 bp, Arabidopsis thaliana columbia
ctaactttcctgtgtggttactcatcgtcggactcctgacttgcctcaagattccacatcaatcactattttgttgatataaacttgatgactcagaatcgagcttgttttcttgtactatgattttccaatataatatctgtctcaaaacatttgctaatcaagcgatacattatactccaccctttatttacattatactagaaagatggatttctctgaactcaacttgtgtgctatatatttagtgggtggctaaggaccagaagttgagaataaaggaaggagacacagcaaaccagctgatgaaggccattgctgtggcagtctcaaaccttgtgcagtgattcacgttacattgtccaagatcgttgatgagtacagttatgccagcagaagcagatgcagctgcaaacgtgagcgtcgatgtgacctgcaacacaataggggatgaaaaaaccgtcagtcacgatactccacttactaattaacacatcaaaaatgaaacattgaacaaccaagtgtgaggttgattta

SEQ ID NO: 48505 - DNA, 529 bp, Arabidopsis thaliana
tcattctaagttgattgaagatttcaatgagtcatctttagagtttcagaggaagattcttgaacgttctggtttaggagaagagacttatctccctgaagctttacattgtatccctccgaggcctacgatgatggcggctcgtgaggaatctgagcaggtaatgtttggtgctcttgataagcttttcgagaataccaagattaaccctagggatattggtgtgttggttgtgaattgtagcttgtttaatcctacaccttcgttgtcagctatgattgttaacaagtataagcttagagggaatgttaagagttttaaccttggtggaatggggtgtagtgctggtgttatctctatcgatttagctaaagatatgttgcaagttcataggaatacttatgctgttgtggttagtactgagaacattactcagaattggtattttgggaataagaaggctatgttgattccgaattgtttggttggtgttggtggttcggcgattttgttgtcgaacaaggggaaa

SEQ ID NO: 48506 - DNA, 626 bp, Arabidopsis thaliana columbia
tcacaattagtaatctatgtggagaacttatcagacacaaggcttattatgtattgttgcgtagagaaatgtgtttgaatcggtcaattttggtttattatatgtgttggtttggtttggtttgggtggaccacttaatttatggtttggttcgatttaattaatttggtttttattggtttctctgacggtgaagcagtatctcggagatcaagatctgacattgttatgtgcttgaattcttcatcaagctcgtcagaaaaacaccaaaaggtttcaaatttatctgaaattcgtgaaaccctaaaaagggttatgtcaaggtagaagagacagaacaaagatagatatggtaaggaagcagaagtacgggaaggtagtgttggtttcttgcatcgcgcttctagcaaccggactcattgccgactttctctgggctacttctcatcgattctcctccgccgcaatctccgccggattatctctaccttcttcacttaccaccgtaatcgttcctggccaggtgaattgtgatctgttattgatataattagatctcgacatctgaatttagcttcaaaagatgatttttactttaatgttatacctagttcaattgcttgagt

SEQ ID NO: 48507 - DNA, 522 bp, Arabidopsis thaliana columbia
cagcaaaatcaagcgaacggatctagagactcaccttgaagaagaagaagatgatacagaagattcgagaagcagcgagagagaaagatagagaaatggaggagaaacaacagcggcagagctaacactaaggaaagcgaaacgagtacatgtgcgaatatatagctctacgatttttctcactcttttatttttttctatttcttctattatttcccaaataaaaaatctgggagagacaatgctatggtgacctggctttcacactctttttagctcaccgacgcgtctatgttgccgttagattgttttgagtttgatctaaaccgttgattatgattcggttcaaatgaattagcccgggagccgtgactgatggttacgctaaagttaggctcggcttaggatttatcggctcggcttttgtggttcggacatcgttcaaattttattctcgagataacaaaaaactattaatagacaaataataaaaactagaagagcagacaaacggactgtggt

SEQ ID NO: 48508 - DNA, 979 bp, Arabidopsis thaliana
  unsure (1)..(979): unsure at all n locations
ttaaatgttattttctacttaatgaacagttgatgatacaattattttctttaaaattgtttccgtgtaaccaaaacatatttcagtatatgcaaaataaaaaatggatgttggtattcttattttgcaaggcttgtaatgggtgttgtgtagtctcttttacaaggtgttgtgaagtctacatgaagcaagtcagctaattacatgcatctttcacattgtaattaatttgatttcaattttgtaattttatttgcttttgtgtaccaaagctgaaatcaaattgtttacaatttcaatataaatgatataatttttacattacttctgtattcacattccactcaatgattcaaatttttctatatacattcgaaagcttctcatgaatcatacatagctttgcatatttaaagtttacaactgtactggttatccaataagttagactcaagcgttgacaaatagagtaaggggaaaaaatatgataattccaagtaggcctttttgaactatatttcaaaattcatggcaaatgaataatgaggaagcgttggtacaagcggtgtctcaacatcctgtttccatggggatagaggggacaggagctgcgtttaggcactactcgggagggatattcaacggagaatgtgagacggattttgcatcatgcggttacaattgttggttatgaaatgagtgaagaaggaactaagtattggatggtgaagaattcgtggggagaaaatggtttcatgaggatcaagagaaacgtggatgcaccccaaggaatgtattactacaactagcgaatctttgagctacgttcgtattattattaaccagaaccgatcagcaataattgtattaaacagagtaattcgacgagctggaaagagagagagagagtaataggttacaagttaaaatttggagtctgnagaaaacatgatcccataactagacatgtcgtgaagat

SEQ ID NO: 48509 - DNA, 468 bp, Arabidopsis thaliana columbia
caaaatgaatttcaaatttcatttcaaaatgtttgtttgcgagttgatatcaacaaataaagtatagtggtctatattctctctaaaatcctcctcaaaatatcctacaaatatttcctcagtgatccccctcaaattgtttacagaaatactgcccagatatttccctagtgatcctcttcaagttctttccagaaatactgcccaaatattccaccgatatatctccagatattttcctcctgagaaataccttcagaatcatttttcaagtccctataaatattttcttcataactttcctcatgctcatacgtatacgtatgcctccattgtcatacggtgagctctacaagcaaatctcacttatacaagacaaatacatgctaatctcccactaatcctctcatcctcccactaagcgcctcactccccaccctaatgccgccaccatggctataaatagag

SEQ ID NO: 48510 - DNA, 361 bp, Arabidopsis thaliana columbia
gatgaagtagaccggcctctggacgagcaatgcatgcccttcttctcgtctctcgaccacgatcgcggcgctgaccacctgagtggttgcagctacgtagatcaagagggcttctcccgcagcgggggcactaggatgggcgcgcttgtaaggagcgcctttaagttcccgagggcttcctcggcctcgggggtccaagtgaagcgctcggtcttccttaagaggcagtacaggggtaggcctctttcgccgaggcgcgagatgaagcggctcagagcccgaagcgatcccatgaccctctatactcctttcaagtccttgatgggccccatgttggtgatggccgcgattttctccgggt

SEQ ID NO: 48511 - DNA, 825 bp, Arabidopsis thaliana
cagttactcagaaagaaacttctgaactaataaattggattatagatgtttgaaaaatgatagtgatgataactttccaatcctaagttaatacggatatggatgttttcttgcaacattgcaggagatggccgaaaatgcttctactgtctttaacgttcatgtccctgaatttgtggatgctatctgggttgcacttagggacccccagttgcaagtgcgagaacgagctgttgaagctttgcgtgcatgccttcgtgttattgagaaaagggagactcgatggcgagtgcagtggtaagtattctcttatccttgaaaatgataatgtctgaaatgttttccttaggttatgtatttggtatgatatttttgatgcaaggcttttctttgtgttgttgcaatactttcatttgcaatcaccctcatttaagtactactttgtatattttattgtgtaaatgcaacttatattagctttttatgctgtggtcccccccccccccccaaaatggatgatattcgaatatatattcttcccatggtgatacgttttgcagactttctactgcatttatatatatcattgccaatgcaatgtttcaaattatcaataggggtttccatctttattaactgatcttctctcaatttggcttttacaggtactatcgaatgtttgaagctacacaggatgggttgggcagaaatgctccggttcacagtattcatggttctttacttgccgtgggggagctgttgaggtaaatgcagaagtggttatctattttgaaagcatccctttcttttagtcagacactcaag

SEQ ID NO: 48512 - DNA, 760 bp, Arabidopsis thaliana columbia
tatttcccaaaataagaatcggtaaaagggaatctttctttcctggccattttagtatgcacccattaggccatgaccccatatgtattaaaacatttaaatacattgttgcgagcaaaaaatacttggtagtataattctataaataccattaacttgtaaacatacactaatttatcaacatcaagacaaaacattacaaaaagccatgtctcgtgtcctcctctttctcttcatcttttctttatcggttttggttggatcaatcaatggtaacaatcttattatatcaaaccagttccttccaatctcagcaattcatatacaaaatataaatgccaagatatctacatttttgatataacaagaaaattttcaggacggtcatgtggatcatcgacgcccacttcagaggatatgtacaaaaagcagatggaaaggtccgaggaatcagcacgtgaaatgggaaggattggtttggagtgtgaacccgaaggtacacaggtggttcaggcaacacgaactctgttggtgatatgattctcggcttcttcattcttttctttattgttggtgcccccattatgatctgtctcgcgtgtgttcggagacaacaggctataaacgcagccaatctcaataacgtttccggttagtaatatgtaaataagaaataaataatttgttatggtaacgattaggaaataagtatataaagataatctttattgtaataggtcaagtggtaggagctcatgga

SEQ ID NO: 48513 - DNA, 314 bp, Arabidopsis thaliana columbia
gtttacgttttagtgttgcgcgtgcccaggtgtggaccgaggcttcccgcatgaatcgggaagtcgcagcgtgatgttccgaggggtacccctgcctttgggaggcggactctcggcccgtcggaccgcggcgtcctccaggagattcttgagctctccctggattcgtcgtccctcggtggttgatggctccggcatcgcgcggaggagcattgctgctgcagccaggttctggccgaccccactggatgtgggtggcggcctgaccctgacatcgtcggcgatgcggtgctagaagccctggggtagatgac

SEQ ID NO: 48514 - DNA, 452 bp, Arabidopsis thaliana columbia
taaaacttgcagttattcagcggattacactgggcctgtaaataacattgcatggacgcctgataattctgcttttgcagttgggtggaagtcgagaggacttgcagtttggtctgtttctggatgtagattaatgtcaactgtccgccaaattggactgacttctacatcttcccctaaaattaatccaaaacaagactgtaaatacgaaccactgatgagtggtacttcagccatccagtgggatgaatatggatatagactatttgctacagaggaggcatcatatgatagaattcttgcattttcttttgggaaatgttgcttacatagaggagtttcaggaaaaacttatgttcgtcaggtaatgtatggtgatgatagactactcatggttcaggcggaagacactgacgagcttaagcttttacatctaaaacttccagttgagt

SEQ ID NO: 48515 - DNA, 1235 bp, Arabidopsis thaliana
ttttctgtcgtcgtctcaacaaccaccaccgtcttctccggtgattccccaaggtcagacctgaagtttcaatctaacagacttcggtgtgtcggcgatgggtcacaatcaacactgaagctttcgagaaagctatttataagatctctaagcttgctaagaaaggaggtggtcaacttaatgttcctcctggtcgttggctcactgctccgtttaatctcactagttatatgactcttttcctctctgagaacgctgagattcttgctcttcaggttttgtttcctctgatttgaaattgtgatctatgtgtttgggatctgtttagggttttgatgcagagtttgttatttggttcactattgaattaagattgggttttgatgttgaaacgtttttaggatgaaaagtattggtctttgcttcctcctttaccttcatatggatatggaagagagcatcatggacctcgttatggaagtttcattcatggacagaatcttagagatgttgttgttacaggttagttgattggtttgtgaattttgcttctggggactattcttgtgtttgcaatgtaactcttcttgtgtttgcattgtccttgttgagctttttaggcagtagctgaaatgagggcttttcatgtagtaagactattcagaatgtttaagctctagttgtaaagtttttatgtctctcttagctgcttgaattgactaagttttggtattagatgatcaaagttgaattgactcaacttatgtggctaatagtattttctttctttgccaaacctgggagtttaatctgtcaactgtatgattgatggctaattgatgatggaaaacagggaataatggtagcatcaacgggcagggacaaacgtggtggaagaagtatcgccaaaagctgcttaaccacacgagaggaccactggtgcagataatgtggtcaagtgacattgtttttgccaatatcactttgcgtgattctccattttggacgcttcacccatatgactgcaaaaatgtcacaatcaccaatatgaccattttggcgcctgtgttcgaagccccaaacactgatggtatcgatccgggtaagtaattctgactttggctggatgttgcaactcagatatttacaaaggaattagatactaagctcatgtgatgcatataatacctgacagaaacagtcaagatggctagagctagtgtaattagtagtga

SEQ ID NO: 48516 - DNA, 944 bp, Arabidopsis thaliana
aaaaagtctttgattaataaatcaacagattacataagtctaaaacatgtgttctaagctaatgcttttcctgctaagatagaatcattcatggtagatttgatgtagatgggattgctttatctaggccaagaaatagttcatcgttcaacttctccggcaatgatgatggcatattcttccagtgctccgacacattctcattcaaactgtaatatcaaaaataaaattatgatataacttgattttatacatgatgacattttacagaaatgatgattatgttacttactctttgagaaggcttttgatgttctcccggatttttctgaaaaggtctaagttgtctgtgagctgtataagaaagaaacacaaaggaaattaagtaaactaagttttctttagcgattttggtgtctcaagagatcgaaattttggtcaatatatacttacgtttaagaatgtgagatttgcataaatctggttgaaccattgcttattatgattaagaagctcattgtgaacccctacatatcattaaatcagagcacttttatgaatattttcatatctgttttttttttttcgaaaaatttcctaaaatattgaagattcgttgaatcaatacttaccatgttgagatggttgaaacacctgtgatggttgatacacttgtgatgccagcaccatattaacaatctcctgaagaaatcaaacgtaaaaccgaaattacattagttcaaactaaatttggaaaattatagataaaaagaagatgttgttgataagaccagaacatagagagagagatttcatgactaaacctcgttgtcaactctggttgttccaatccattgtgatcttctttttttttcttggcgatttttttgttctgcaacaaaaacaaaataaattaaccaaaagggaaaaaatattaaagattg

SEQ ID NO: 48517 - DNA, 642 bp, Arabidopsis thaliana
tacataccttatttcgatttgtccatagatttttcagattattcgaatcttagggtttcaacaaacaaagagagatgagtgaagccaccgtgtggtctgatttacccggagaactcctcgatcatatagccaacggtctcttctccaaagtcgagcttctccgattccgtagcatctgcaaaaccttccgttccgcggttgactccgacaagaattttctcgaccacctcaaacgcaaccgtagacgccttctctctccttacagtactggtaaaacgtgttcgctctctcccgcagctttctatcgagtggttctgtcgtcatatccggacaaaggatggcttatcaaactccaagatgcctatgtctcctctcaaaagcagctcctttctcctctctctcgtttctgcatcaaatcatctggcaaaaccctagatctcttggagttcacggtttcagagattcatcaatcttacgacgtggaatacttatattataattcgactagagcatcgtttaatttcgctagagttgttctagcagaggactttgttttcatagttgataactacaagaaaatctggttgtgcgaatagtacgaaagtgatagtcattgggtaagaatcatggatgaagaagtta

SEQ ID NO: 48518 - DNA, 525 bp, Arabidopsis thaliana columbia
cagctcattacaaacacattgttataaaggaaggttggtacatgaacacctctttatggattaatttgtctaccatatatgctctaccattattcaaacctcaagagcttgcaaaattttttcaaatactaaatttaactatttgtaatatctcaattatctatccagacatatatatatacaaagtacaaacttctattttgccatctaaaatgattaatatggagaatacaagcttacaaagccttaactaattgggcttaccaaaagaaaaacagcccaagaatttataacataggatgtcactaagaaagagatggaaagaaactatctagatcatatacatttgtattgaaccttaacaaaaactaagactccgaatggatttcgaacctcacagtgtggtgtggttccacagtaacaaaaaaatatatatatatgtgtgtgtgtatgaatatattttggtactattagaccatctttattgcacaaaaaacatagtgtctttaaattttttttaaaaat

SEQ ID NO: 48519 - DNA, 582 bp, Arabidopsis thaliana
caaaattcaagagaaaaacatgatcaaactaaaggaggaataagcatctgaaaacaactctgaaaagaagaatcaaccatgttagtgatactaccatcaccaagcttgaacactttaacattgttttgctctgtaaaatagatcgaattctccaaacatccatagtactctctcgccaagacagagaaacaactatctgtagccatcacaaaagccttatctcccaaagacttaacctcaacatattcaaccaattcctcgtccatcttataaaccttgaaaccaactgtcatatctatatcaactcgctttatgcgaaatttcctagaaaatcgatgaacaatgcatagatctccgcaatactcaacgaacctcttgtctttgcactcatcaatgtcacagtagtccattggagtacttgaaggtccgaattgaaatattccaaactcagataaactaatccaccaaactgctcctgttaagtctaaggcatacatataacctttgtgaaatacaatatccgagaagagtttaacttcttcatcgatgattcttacccaatgactatcactttcgttacta

SEQ ID NO: 48520 - DNA, 577 bp, Arabidopsis thaliana columbia
ctctacggatcttgccatttgccttggattaaaccggcccggcccggcccattaccaaaaagaaagaaaggtctttcgtccccccactgaaaacagatagagagaaatagtaattattttggttttggtcttcctaaatttgttttgtcaaagatgtgttaaacttttcaagctttaaattgatgctatttctctctacagaaactcagataattaataaagagttttaggtaagaaaactttcgtttcgaaattactcccagagcgacaattcatcacattccctttgttagaccacgtaacgcatgaatcaagaaatgttgtagctcctcttcatgcgacatgatgatgataccatatgactttttgtttgttaaaaagtgacaacatggtatatgtacacactatttaacttctattaaagaatacatatctcaagcaatgatagaataaatgaaagaagaaactgacaatcatgaaagaagtaaaaaagaatagcttgtgttgcttattggatgagttgcgtagacatggctcctccttcgtcgcaggaccatcgtatcattactatatatat

SEQ ID NO: 48521 - DNA, 585 bp, Arabidopsis thaliana columbia
atacgatcactcacctggaaaaacaaagaatcctaaacttcaactcaaagctactacaccaatatatctctaaaccataaccataagttcatctaagaaccctacaaaatccaactactctatttcaaaagtaaaaacctgaagcttattactctatatcaatgtactgcataaaatctcaagaacaatcagtgtcgtgcatttcaaaattgaatagctaacgtaggatatagattctcatcaatccagaaatttaacagaattctggggaaattgaataatttagggatttgtaacgattgtgacaaatagagagaaaataacctgagcttgatcaatggattgagatttaggatcggaaacggagtcatggatgagttttctctgctcaaaaacgatgaatccagtcaaagcgctaccaagagtgtaaccaagaagacgttcctgtagaagaatcgttaaaaagcgatagagcaaatcaagtcttagatgaaaacgaatctggagaatggcgatgaggagagaacctgagcgagaatgctgatcatggtggaactatcttatcgaagtttgatttcctgggat

SEQ ID NO: 48522 - DNA, 971 bp, Arabidopsis thaliana columbia
tttgcataggggcagcgttctttacaaaaacagaggattggaagagcttaccttcatcactagaattggaccaacagcgttaacctcgtaagcaagcatcaacgatgatttttcgaccttgttcaatgttgtttctgtactgagatcaaaagggattaaagaacagtcctttattttcacaggtttcatttagttatcccaaattgcagataaaactgaaactaacttgtctaagacatgagtggaaagattactaattaaatgaaagattactcatacctggctgcaatacgccaggaattgaaagtataccagctgcatttataagtagattgagagaaccatatttttctctcacagattccgctgattcctagtaaacaggttcaacagtttcagaaacagttttgagtgtagcatttgagtgttgattaatgaaaggagacagatttgagtgtagagacaacctcaatggtagtttcatctgtaacatcaagcttttggatgaaaagtctttcagagaaacggttcttcaaatcagagagacttgttgcttcttttggatttcggcaagtagcaacaacatacccgttcttattgttctccagcaactgtcgtacctaaagagcaacgtcaaaaagctgaactaaatcagccaaatttagatctctctcaaatgagtcactaaatttcaggatttgggtaaatgaaagagagaaatggattaagaaagaggctcacaaattcgagaccaatgcctctggaagctccttggaccatggaaactccacctttccaattaggaacagaagatgatgatgacgtggctaaaccagacactctcatcctcttcagagccgccactgccattgacggcgataccagccacgcgccaccgctcctcaccagagtgttcattgaagaaatgggtaacgattggtaattcggatgtgtgattacataaaagggtg

SEQ ID NO: 48523 - DNA, 495 bp, Arabidopsis thaliana columbia
tatgtcaagcagggcattctcatataagtacttaagaaagcaacattattgattacggttagaaagttactatatttatcgattatgtcaacgaacatatgacaaataaagaatgttacaacaccattattacaaaacgtttaactaccttttatttgagcatataacggcttcgttctctaaccattaacttttcatatataacaagaaaaaatagataaaacctaaaagtaatttcaaaaagagttaaatggaaaacaagttggttcttggagccttgtgtatataccttgtgttacaaggcacctgcggcgaggagaacaaccctctgattaaccattacgctgattacgaaacgattcatcctagcgaatactacagctccgatttcgaactcaaagacggaaccaatgtgatcttcgaagccatcaatgaattgataggcatcaagaagccgaaagcaggctttatgtgcgactatggcaaaaaacaatg

SEQ ID NO: 48524 - DNA, 522 bp, Arabidopsis thaliana
agtaactgtgctgtaaagcatgatttggtagactctcagttagcatgtcgctcagctcctttctttcttcactattaatatctgtgcttacagattttgtttccgcttgcagaagcaatttctttagactctccatctgttttaaattcaccacaaaagttacatatagaagcagtattaagaagaaaacatcggtttaatttcagaccatgatcaagaaagtttaccatgatgtatcccatatgatcagggtcaagctcttccattatcattgctgcatattcatctgccttgttttggatgcatgacagatgattggcagaagaactaagcttgatgatctgccaaacacaaaaatacagagtagagttcaaaaactcttctaacaagtaaacatttttcaaaatttattattcattttttgttttcttaaagggacttgcaacctttagcaaaatttcggttgtgattaaatttcacgcataacgatgaaatcttttatttgttaaaaatgtgaaaatt

SEQ ID NO: 48525 - DNA, 492 bp, Arabidopsis thaliana columbia
atatcgacgagaaagataaggtttcgttttcctactttaaattaagtgggaaacacatacatcaacaaaaaaacaaacatcaaaaacaaaagagaatctgattctgtgtgttcttctttccaagaaatatcaaacctgagtataactatactaaacagatcaaaggtgagaatatacgaaaaacagaagatcagactcatatgtaccaaaaaagtcgaattctactcaactaatctaaaatggggcatacaagtggggacaaatcacgggaaaagcatatactacatagctttggattcaatgattcatgcaaaactagattctaattcgcagacaaaactagattctaattcgcagacaaacacaagcctatacccatttgaaagaaactatcacagatcacaaatattgatagaaaccaagtaaacccaaaacagtaagctgaaaaaagtttaaaaattcagaaaaaagtttggatctttagaaaacctg

SEQ ID NO: 48526 - DNA, 599 bp, Arabidopsis thaliana
tgctgcctgggggtggcgggtcaaagatggagagaagattgtcgatggtgaagtcaactaataaatcagctttgatgaggagtcagactggagattttgatcacaacaggtggttatttgagacgactggaacttatggttatgggaatgctttttggacaaaggacggggatttcgggagcggtaaggatggagatggagatggtgacggtatgggtatggaggcccaagatttgatgagcagaccgtggagaccgcttactcggaagctgaaaattcctgctggtgttattagtccatacaggtataaaaatagacaagtctattgtttgttgttattgtttaactttacgaaacctaaacatgttaaaagagttcttttttctttctatgcaggcttttgatatttatccgtatagttgttcttgcattgttcttgacttggagggttaaacatcaaaacccagacgctgtatggttatggggaatgtctgtggtttgtgagctatggtttgccttgtcttggcttcttgatcagctccctaagctatgcccgattaatcgtgccaccgatcttcaagtcttgaaggaaaagtttg

SEQ ID NO: 48527 - DNA, 924 bp, Arabidopsis thaliana
gtaaatataggtaatttatgagtggtcgtcgtacatacaatgttacagtcttggctggttttgttttcattgtttcagcaactggtaaagtcttggcttcggagcttccagagaaagttggcaaaaggtcctctgtcttatacccggcttctctaaaagcaggcaatgatattggtgtgtgttgttaggttttctcaattcagttgagcttattgtgttgaccacatagatgaaaagtattagcgctgaacaacaaaaatacaatagataattcgtatcctgtacagttttattaggcagtgggattgaagtatagatcttcatcaaattattaaatctttgatgagatgcagtaaatagatttggatatgcttaattaacttagtttatgtatgtattttttaagattttgaagtccatgactgaccagcttactctgcttcctgttcgacatatgaatcttagtggaagggttgtccaaacgtgggtttgaagttgtcaggctgaatacatacacaacagtaagccgtcgttacacttagtagacaagccctataaaaagtaactcattgcatatattatttggcttagtcataatttttatattggctcacatgttttagcccttggtatgtgcttatttaaagatattgtaatggtcattttctgtttttttttctattactaggttccggtgcagagtgttgatacggtgctcctgcaacaggcactatctgctcctgttctttctgtagcttctccttctgcagttcggtaagcgccatcaatcgtcatctgtctcttttttgatcactcagcaatacctcattcatataatctcttctattatgatcgagtgggtttggtccatcgcttacgtgattttgacagcgcctggctgcatctgattcaaaatgaggagca

SEQ ID NO: 48528 - DNA, 391 bp, Arabidopsis thaliana columbia
tattagaattgatatttagtagaataactttgagttccagagccaaggttctgatcatcaaaagtataagcagatattcaatacctggcaactgcaacatcctttgcttcagcagagaaaagccctgcaacagcttttggaacaccaagaaatggtccaccaatgttcatcaccgccttaatatactttgcacaccaatctggcccacccccgccacccagaggagctggtgcctcaacgcacttcataaaatgtagaaaatacaagacccccatggaatgcggaactataactgcttttttccaccattggtagaaaccatcaactctatattacttttcatacggctaagagtctgatcacggtcctattaattcaacatgaaacatat

SEQ ID NO: 48529 - DNA, 431 bp, Arabidopsis thaliana columbia
tgggacacacgtgttatccttgatgcagagaaggattcctggtcttcatcagatcacatctattggatcaacggacattacagatacctgggaacctacagaggaaggccttcaaacgtatgtggtcactagactttagtatcaagtttattgttttaagtgtaccggaacacatgtaaccatgttgtattcttaattttgttactttgacctgttatttattaaaactcatctttttctcctgaagaattgagaccacgaggcatgtgtcgatgataaccataacactttccaaggagcagttgaacacatcctcagttgggtgagtttctaggactggttgttttgctaattctcgtctattctcttacaggggattgtgtagtttcgtgtctagagaggtacattgtctccaatgctaatatatctta

SEQ ID NO: 48530 - DNA, 586 bp, Arabidopsis thaliana columbia
cttcttttttggtgaatcatttttacctttgatccttgcaaacttctctctttttctctttgatccttttcttctactaggaagaggaggtggtggtggtgcgattaccaacctgttagttgaatccatccaataattaccaacctgttagttgaatccatccaatatttgggtccccttaatggtaaggtggttgtatcataggtgcttctccataaatatgtggagaaataaccggatatgtagtcctccgcgttgaaaccagcttttaacatcgcaacataaacatgctcacaaggaaatttagttatttgccatttcccacagaaacattttttcttcggtatgtccactctattaccatttccatctaaatatacctcaaatatgccatgtgtgcaacagtatactgtgcatttatctacaactatcttctcagaggcaactatcttcataacatattttaaaaatcttccttggtgcttcaatgatttcttgttcctcttaacgatacgtgtcatttcttgcctccttatggttccagcattggaccaatgccttgtcttgcgttgatgatggtggattg

SEQ ID NO: 48531 - DNA, 462 bp, Arabidopsis thaliana columbia
  unsure (1)..(462): unsure at all n locations
nnnnnnnnnnnnnnnnnnnnnncttcagcacgaagtagttgctattgtgcatcacgatttgcggaccaaatttggtattgccgaaccgcgcattctggtctgcgggctgaatccgcacgcgggcgaaggcggtcatatgggtacggaagagatagacaccattattccggtgctcattgagctgcgggcgcaggggatgaaactcaacgggccgctgcctgccgataccctgtttcagccgaaatatcttgataacgccgacgccgtgctggcgatgtaccacgatcagggtcttcccgtgctaaaataccagggcttcgcgcgcggtgtgaacattacgctggggctgccctttatgcgcacatcagtggagcacggcaccgcgcttgaactggcgtgacgtggcaaagctgatgtcggcagttttattacggcgcttaatctcgccatcaaaatgattgt

SEQ ID NO: 48532 - DNA, 903 bp, Arabidopsis thaliana
ctttgactgttaggtgtttgtttaaattcccaagagagcacttgatactttgagttttagaataaagctaacctctatcttatttgttaaatgcattgtcttgtgtatactaggacacgagaactgatttggaattcttctttgttccagggttttctctagattgctgtttcggtggtgttttcttttgaggatttaagggaaacatggaacccaacaaggatgataatgtttcattagcagcaacagctcaaatttcagcacctccagttctacaagatgcctcgtctctgccaggtaattaattagcattcaagtaaattgttacatcaaagattatagtgcagttgaattccttaaatctgtttcactttttcctggttgagtttgtttttgtatttttctcgcaatgcatctagattagagcttaaggatttggtctgtagagtccagatactgtttcgttcttccaattattaaagaagtgcattgggttttctttggtttcgtgatcctttaactctagtaatttatgtttcacttttactgtaacttcaggtttctctgccattccacctgtggttcctccttcttttcccccaccaatggctccaatacctatgatgccacatcctccagttgcccgcccacctacttttaggccacctgtttcacaaaatggtggagtgaaaaccagtgactcggattcggaatcagatgatgaacatattgagatatctgaagagagtaagcaggtcagagaaagacaggaaaaggcattgcaagatttgttggtaaagcgtcgtgctgctgctatggcagttccaacaaatgacaaagctgttagggacgacttagacgacttggggagccattactctatttggagacaggaaatggaga

SEQ ID NO: 48533 - DNA, 919 bp, Arabidopsis thaliana columbia
gtgtagcatgttattgctctgcttccaagttgagtagacgacggaataagcaacaagcttcctcagaggatcttttttacgtacttttacttttattgtgtaatctccaacacttctttgtttgtctcaattaagtttagaatctaaaagaaacaaaactttcagtattctagtggtagataattctggaagaaactaaatataagaattaggttgagataaagaagaagtatcagttattattatcaagtcttgactctcaacatcattatagctaccgatgttaaaacttaaaagaaacgattaaaaaaaaccacaaactgatcaaactagctagaaaacatcaaaaccaaaagaccaaactaaaactcattaacgctactcctctatactgcgttctccttcacgtccgccgccgactccttcttatcggcctccaccacgttctccttcaagcccgtcgccgacttctcctccttgaagtactccttcttctttgtggccaactgttccatgaataggtctcgcttgcttgccataactgcgacggccgctgtaccaagagccataccgttggtcataggagccttaaagaactcggtcaccttggacatatactgtttcatcatgatgattgagagagagaaaaagagagatccgatagaagaagttaatgaagaaaaacttgtcttgagtcaatatttgctcttgagtttttaacaatgaacgaaactatgtattttataagaagtcttaaaacttggacgttactcagtaaacctaacttaacttggagcttacaccttcttgaatggtaattttacttttaaaaaattaccactttaagaaaaaaaatcaatccaataaaatggtgtttttcaattttaattaaattataatataattgtaaagcacgtat

SEQ ID NO: 48534 - DNA, 497 bp, Arabidopsis thaliana columbia
gaataatagaggcagttataacaagggaggttgtaacagaggaggctctaactagtaaaaaatctatgtatagccactttaattttcgtggttaagcatgaattttcgtggctataagtcgatataaccacgtttaatcacggaaaacattcgtggttatagcgtcgtaactttattttttcgtggcttttcgtggctgaagagtcacgaatcagtcactcttcattcgtggttatatatagccacgaatttgtcacgacgatttcgtgacaaatttagccacaacataagagcaacaatttcgtggctaaatttaggaagccacgatttgattatgtagcataatcgtggtaagtcatttaaagctacgaatatgagaagtagcattatcatgacaatgttgccaacattttgtatttttggtgacaatagtagtgacgttcaaataacgaaatttcttttgtattatcgtagctatgtataattttgaaagaaaa

SEQ ID NO: 48535 - DNA, 476 bp, Arabidopsis thaliana columbia
gtgatcttctattgatttttttcttctcacctttcacacgtgtggaacttctctgcaagtaatagaagaagaaaaaaaggggtcaataatattccagaaagtcaaagacatttcttaatattcaatatgtaacaaaagcaaatgaatggactgaaacattgcatgagttggatcaacaatcaacacacgtctaaaggtatataatctgatgtggtgtttgacaattaaaaaggtcacttttcatatatatacccaaataaaagtttaacaatccttgctccataagtaagaataagaacttccactttacattaaattgattagttgagaataaataaagactcttgcttacctcatgtttttcttttgctttgaaatccgggaccttgttccggtttgggggatcctggataaccccagccaaaagattacccccggccatttccctcatctcccttaccaatgggcccccccaa

SEQ ID NO: 48536 - DNA, 404 bp, Arabidopsis thaliana columbia
gactagtcagctaatatgaccgtgaagatataaaaatgtttctatatcgttaatattggttattgtttaagaaaaaagaacaaaagaatataaggatgttttcgatttctctattactttaacattttcatattttccgcataaaaaagaatacatttccagtttcctgttcaacacttgtgtttctctttaccattcttgtttcttagaggatttccaaaagcataaaactatcgtccctctgttctctatgaacctacgtttcatagttactatgatcaagaaccacacacagaagtccattgaagcgtatagagaagaaagcacgcatagcgatcgtaaagtctaaacgatgcagtagagggacgaagcaacgatgaagaaggatggaccaacgacgaaga

SEQ ID NO: 48537 - DNA, 461 bp, Arabidopsis thaliana columbia
taatttattccatcactacaatcgtttttcatagttacacgactcagattcacaaattaagcaggtaacaaaccggaaataaccaagatttcgctgagtccatgatcattgggaataaagagaggcaaaaatcaaatctttgtggaagtttcggtgtgcagtgtcttgacgtgcgcatagagtatcaaagtatctgtggtgactatatgattacagcaatctttgttgtagaattgctctggtaggaaacttttcatttgttgtacagtctttggaccaactattgcatttccgataccagtccaagatttagagtaaaggttttgacatcttcttttgcgatttcgcttaggtcatgtttggtgtcgttatcttcaccgggtagtttccccgaggctcgaacagagactccatgtagcagtttgcaacccgagggagctaagcttccatcagtgtgtctg

SEQ ID NO: 48538 - DNA, 272 bp, Arabidopsis thaliana columbia
ctcctaaggcctctcacggatctctcttaagatcaatcgccgcggctcatgacgcatcgcagtgttcaaccgcctccgccgctcccagctcagccgcattccgccgccggatgtgtaataagaggcgatgtacaggttacgtgcgcaggctgtcgcgtgattctgagggtgaaaacgggcgttgtagagttctcgtgtccgacttgtcaacttccccaaatgttgccgccggagctacactctagggcaatgccgcagttgtccgcagtctc

SEQ ID NO: 48539 - DNA, 447 bp, Arabidopsis thaliana columbia
  unsure (1)..(447): unsure at all n locations
nnnnnnnnnnnnnnnnnnctaaagttcagtctcgcccctggtcggccttgcttgacattcagcgccaactgaaccttcagggccaagttttggagtcgaatgtgactaatggcgttgttcgaaatgtcaagtacatcacacatgacaagttgcgcagtgtgtttggagtcgaggctgatatctccatgaaaccactgacggttggagggaaaatgccggaacggtcccgtccggacctgcaagatacattatcgcctgaagacgagaacacgttccacactttacgccagcttatgctagggtttcgcgagtaccgccgcaagaacggcgcaatggagtggcccaacaacattaacacacctgtctcaatgacagtcggaagacgcccgctagatccgccctcgatagaggtcacccatggaggctactacatcggctgaccaatca

SEQ ID NO: 48540 - DNA, 1738 bp, Arabidopsis thaliana
aaccaataccattcacaaactggaatattcaacggacgcattgataataataataagattcatcaacaatgtatctactttggcactgcgaatggatgtaatatgggagacagttgcacctatgttcatgaccggtataggcccaactttgaggccgcggctccgagggctaagagaatgaagtttggaaggtatgagagaaatggtttttgaacataaaaaaaaaaatagagttcacttttatagtcttgtctatcactggttaaggaacaaaacctgaggtgatacaactttcaattttgatcaatttgtgcgcaccaattttaattcatttaacaaagttatttgtttagagcaccagtttaatgacaccagtttaagaggtcgagaaagccggacaatattaatttaaatcatgatttcaaaactaatctgcgtaattaatttgtagtaaactatgtccggtcttttaaaacaaacgattaacggagttgagttttgtaatcgcttaaaaaaactgttgtaatatatagctagagtctggagatgtactgcaaagtataggtaatatgtagtaaaaaaataccatcaagatgaccgcaaaagatctcataaattaaagaattcaaaattctacctttaaagggcagattcgaaacgaagctcattagctttcaacacaaaaagaggttataactaaagtaaaaggctacaatggggtgttaacagaaataagaaattaaaatcaagaaagcagagaagagtgtgtctcaagtctagtagtctgccttggctgctaatgtggcagctgcacctctacgacgaccagttctccttgcagcaatttgaccaaccttagcaccagcagatttatcacgcctgaccgtactggcgtgaccaatgtgctggtggtttcctcctccgtggggatgttccactgggttcatcgcaacaccacgtacaacaggccaacagttcctcttcgctttgtacttgtggtatgcatttccagccttgagaagtggcttctctgttcttcctccacctgcaacttgcccaatcatggctctgcacgcacttggcaaaatcttcttcgatccagaaggaagcttaaccctttttatggtacaacaaacagatcaatcttgtaaattgctattcaagtcaagtaagacaatgatgttccagtaatatacttaggtttacgcataagataacaacagcacgcaacatgaagatataattatatactaataattggtttcccgaaattacctagtggtgttgctttcaggattgtgagcaattacgatggcgtaatcaccagaagccctagcgagacaccacggtcaccgacatggagctcaacgttacagataacagctccctcagggattgatccaaggggaagaacgttaccgaccataagattagccttcttaccacagtagaggtattgtccggtgtacataccttcggcggctacgaacagttccttctgcttcatgtagcggaaaggatgacggaacgcgacacgagcgagaggagcaccacggcctgggtcgtggatgatttcggtcaccaatcctttgaggtaaccgtttcgctctccgtaatcgaggctccggaacttagctggacccttgcggtggtgggtgtgggacttgaaaacggaaccagccgcacctttacgctgtgccctaatcacacgacccatttctttacctgcacgtaatat

SEQ ID NO: 48541 - DNA, 1108 bp, Arabidopsis thaliana
tgtagataatggttttttttcaaaagcctctaactaaattgtagtcgaatgtttatgtggaatctttatgtggtttacatgtctcaaacaaattttacatctcatagtttggccatcccatccataaacgttttaaataacacaaaaatatccgattttttttatagattctcaataacaaaaatcaccggcagagagaaagaaaaaagagtggatgaaataaaatctaaagaggcgtgtcaagagtaaacaagtctgaacaattctccgtagaaagtggtgggtctctccagccgttacgattcgacatctaattaacccacgtgcctaaattactctctcatatctctctatctttacctcctttatacccacatgcccaaatatcctctctcttcactcagcatccttttataaccaaaacaaactttatctccctctctctctctcacagacaagaacacaaagttatggacaatctccggaaacttaatcttctctctgtctctctaaccataatctttgtctctcttaccatagccaccaacttacctttctttgaagtgaaatatcccaacaacaacccttttgggatgttactacggccgacaccgatcaagaaccaatccttgggtctaccggctcatgtcgggtcagatgagtgtcgggtttggaccaaagcatgttctgatgagattcttaggctgacttatcagccggataacgttgcgtggcttaaacgcgttaggaggacgatccatgagaacccggagctagcgtttgaggagtatgagactagtaggcttattaggtcggagctggaccgtatgggtatcatgtatagatatccgttagcgaaaacgggtattcgggcttggatcggatccggtggaccgccttttgttgcggttcgggctgatatggacgcactacctattcaggtaatcacaacaaagaaaagtttattttttctaaattatatgttttgatgtatttactttttccttttgcatacatagcttaaaaacctacgtttacaaaatgtagctcgtagtctaattgggccgactatattatacgttacaaaatgtgggactaggtccatgtg

SEQ ID NO: 48542 - DNA, 543 bp, Arabidopsis thaliana
tacatcgatactctcagagacgaattcgcctctcatgacgaatatctacccgtacttcgcatacgcgtcagatccatatcacatctcactcgattacgctagtttcaaatccaatacaccggtagtgatagacggtgatttgtattacaacaatatgtttgaggcgatggttgacggattcaatgcggcgttggagaagatcaactccgcaaacgtggtggtgatggtggcggagactggatggccgacggagggaaatccaccgcacacgagtgttgataacgcgaaggcgtataatatggggattcgaacatgtgggagatctgcagaacggaagcggacccccgccggcaaaacacgccggttgacgtgtttctattcgcaatgttcaaagaaaatcagaaggatggtccggtggaacagagtttcggaatctttgcacctgatatgactccagtctacgatcttttttgtaaatggcgttaattaatttcccgcttaaatttttaaaatacgtttgtccattttacttattttttttta

SEQ ID NO: 48543 - DNA, 590 bp, Arabidopsis thaliana
tagtagccagtgtgctctaaagactccgacaaagttgtagaaggttcgccgaaaaacgcgattaggcaggttcctgtcatgccgtggcggcaataacagaggcgatttatgcaacgggaaacggtctggttagtggaagatgagcaagggatagccgacacgctggtctacatgttgcagcaggaaggttttgccgtcgaggtctttgagcgaggcttgccggtgctggataaagctcgcaagcaggtacccgacgtcatgattctcgatgttggtctgccggatattagcggctttgaattgtgccgccagttactggcgctccatccggcgttacctgtactgttcctgacggcccgaagtgaagaggtcgatcgcctgcttgggctggaaattggtgctgacgactacgtggctaaaccgttttcacccgcgaagtgtgcgccagggtgccaccttactgcgtcgggtgaagaagtctcgacgccgtctcccgtcatccgtattggacattttgaattgaatgaaccgcggcgcagatcagctggtttgacacgcattacgctgactcggtatgagttttattgttg

SEQ ID NO: 48544 - DNA, 788 bp, Arabidopsis thaliana
acactgttaaattgtattatgttcttatttgtctgtttgtgactattgtaaatgcacaggatggcgctgcagtggcaggtttggcaattcgtgccgcatctcttgtcgctgttaggatgacaggaaatcctatctatgatcctataggatcaattgtagtcggaaatttacttggaatggtatgtctgtgtctgtgctctccttaacttgttattatattactctatattacatttctaaactaaagagcaattcgactaggttgctatatttctaattcaacgaaaccgacatgccttgattggaagagcaatggatgatcaagacatgagtaaagttcttaaatttttgagaaatgactcggtacaaattcttcttatcataatttagaaatctcatatatgacgcatgtagaggtgggctcagaatcaaatattgtgttgtgtaggttgtagattctttatatgactgcaaaagtgaagtgattggtcctggatccttcagatttaaagctgaaataggtgcgtattttgaactgttattcgctctcaaagaattgatttgttccctatgcttgaaaataagaaggaaaaaggcaaagtcttagcgagtgaagatcattctatcgtattctgaacttcttgagtgattccattgggcactgtattaattgttgtatttaaacagatttcaacgggcagatggttgccaaaactatttgaagagaactgggcgtgaagagtgggcaaaaatggtatccaaatttgcattctttatctcatagttgt

SEQ ID NO: 48545 - DNA, 859 bp, Arabidopsis thaliana columbia
ctgcttcttgatatgttatcgaacatgcttatgaataaagaactgtctagtgaaaggtacttcacactgagaagactcttcatcaatttttaagtttcatattcaataacaattttaagtatcattattacttcaattaccataatgataccaaaaaaaaaaaaatgggctcaatagaatccaattaagcatggtcagtaaacgaaataaaaaatattaaattttccaaccacaccacgttgagaaacaattattgagccactaatttattactctctctctctctgtcgacctcacaattagttatgcttttgggattttgaatcatgaaggttctttgatcaagattactgtgttatctaatggtactcttagatcaagattccaatcttgcttcttccccatgggaaaactcgagcatttctcccactcatgccctttgacctcgccggagattgtagctgaaggcatctgcaacatttgcttccaagaccaagttgttgaatacgcatgtaagccttgcaattttgatatatgtaagacttgctccaagctgccgcaaaaggtgtcacatggttttcactcagatcatcctcttgagttttctctattccaatatgatcgaaaacctggttacattgtctgctcttgttgtgggaacatgtcttcttgctcattctatgaatgtaaagaatgtgagatctatcttgatctcggttgtgcactactgaagaacgttttcactggttgggacgttagagaaatgcttcattacagtcatgaacatttgcttcgaaggtgtaaaccaggacaagatgctagaggctcttgcctgctttgtgagctccctctttctccc

SEQ ID NO: 48546 - DNA, 1247 bp, Arabidopsis thaliana
ttcttcttccaaacatttcaggaagtcccaaatatttgcctaatccacctgttttttggattcccaggatttgcttgtgtctggctttagaagcttctgaagttttggaggagaatgtgatagcagacttggtcttattgatcatctgccccgacgcagcttcatatttctgcaggatggtcattcaaggctttgcagcttttagcatctgatctacagaaaaacattgtgtcgtctgcgaataagaggtaatttatcatggggctgccttttgacacacggataccaggtaggctgccatcttgttgagctttaagacatagtccagagagaacttcactgcatatgataaaaagatagggagatagaggatccccctgccggatacctctttgtggagtcactgatccttgagcagctccatttagtaggaaggagtatgaaactgtagtaatacactgcataatccaattgatccactttggatgaaatcccatagcttgtaggactagttgaataaaatcccactctaggcgatcatatgccttactcatgtcggttttaactgccatactgcatctctgtttagcatttgagacctttagataatgaagaacttcatgagttatcagaacattatcatttatagctctttttggtacaaaagctgactggttttcagaaataatatcttgcagcacaggttgaagccttttggccaggagcttggagattatcttgtagaaaacagtacagagagctataggtctatagtcaaccattcgctggggactttggatcttggggatgaggcggacatgtgtttgattaatgttgacttgcaggatcccggaggagaagaaggattggacttcaataacgatactggggcctacagtactccagtttgattgaaagaaactggctgaaaagcatcaggacctggcgctttgtcagcatgaatggagaaacaagggcctttatctcatcctctgtaggcattttggttaaaacagtgttggtatccggggttatgcaaggatggattgcttctttgattgtgtttgccttgtcaccaacttgggacgagaagaggttagagaagtattcagtgatgacgctgaggatgccttcttcttcaaaaacaggtacaccttcctcattctctattactgagaacttattaatggttgttcgtctctcgtaattgcatggacatatcgagtatttttatccctagagcaagc

SEQ ID NO: 48547 - DNA, 1027 bp, Arabidopsis thaliana columbia
taaaggtacttatgtgagttaggctgccgaaattacccttgcaatttcactcaatcagaagccatcttctccatctcttcttctccgacaactcacggcatcaaaacgttggttatgatgaactcaaataatcaattaatttttttttgatggaacaatactaaaccctaagaagataatttataggaaacccaaggatatcactcaaaaaaatgatcaaatcaattgaggagattagcccttcattctccatctccgacgtttacagcccatctccatcaaagggctagagaatcgaaaacttcacctgcctttaaattatcaaattctctatcaaattcgttgcaacacccacaattgttgaaattaagcttgaaactaccaatttaaagagtacgcaacactcggaatcgttcaaatcaagctcgaatctaccaaaccagataataggattacctctctcaaattcgtttgaatcaagcttagatctacttagaaatcgaatctaacaaactagagaagagcatttatctttacttcgacaaggccgaacgcgatctgcgattggagttgatggtacgccattttcactttcttggtgcgatcgaccagtgtcgcgagcttatctcggagatctggcgccgatactgctgcagcactttcctccgccgtgtattgcgccggagaggcctggaatctccgtggataaaacgctcttggcgggaactccattgtaggaggaaatcagttatcacacaagtccgaagagaaatggattcgaatttcaaacagtcgtttctcaaattctcttttgttttcttcgtttgcaatttctgacacacaagtttatatatccacggcccatctatttgtctcaaaccaggcccatatatttgtctcaaactggcccattattgattaattatactgatgacaccttcacagttctttctcgatgtatgaatggttattttcagtgctcttaactcaaatgtatcttagtacttttgagtttgaccaaattggt

SEQ ID NO: 48548 - DNA, 634 bp, Arabidopsis thaliana columbia
  unsure (1)..(634): unsure at all n locations
cacgaaatagttaaacaaaattacaagtttacataagatacgaaaattattccgtaggttaaatataatcccatatattagtcacaaactagtaaaatcatctccgttaattcccatttcaatataaaaaatgtaaatttcagtatattatatagaaagagatgattatagactatatatatgtacctgcatcaaaacccttgttacgtagaaacgccattaagtgacgcttagaagaactaatatctccgacgaacgttccagcaacctccatcgtcgctgacagtattctcatccgctcttcgccacaggataaaccttctagaagcttccgtaacctctcattcacatcttccaaattgttatcgtcggaagaagtttcttctgcttcacgtaatactatttgtccctctttctctataaaagatgcgaccaaatcggaaagatccggcgaatgatcgcttccgctactgttatcacacggtggatgtacacgangcgcggctacgttgaaagccgactcaattcttttgaatcttccctgaatctcaaccgactctttcttttgtcgttttgataaaactttttgacgatacacaaatgattcgaagaatttatgacgtatatttataat

SEQ ID NO: 48549 - DNA, 565 bp, Arabidopsis thaliana columbia
caggcaaacaactatacgaaatttacctccacaatatgattttgtgcatttatttccctatgacactcaaaagatattagatccaatagaaaacaataaatatgaatgaagaacatttagatttcacataaagaaagtctaaactctaaactatgaagaaggagaagtagagaaaaggaaaaaataatgttggcattattagtggttaaacataatcgtaattaatgatactccgcgtgcttcatatcgaattaatagaggttttaacatatatttatttccattagctcgttttcttggtccaaaaaaggaaagactcgagcttattaaaggactttagacattgcagtgaatcttctttttccttgtctcatcacttggaatccgagtatattaggtgagacttgtttatgtgaaccctaattaagttaatattttcttcaagttttctcggtatatatagagattaaactcaagatcggtttcctgtttttgtaggttattatatattttctctgaagaatatgatgaagtcttgttcctcaccgaagatgatgatgatgaa

SEQ ID NO: 48550 - DNA, 487 bp, Arabidopsis thaliana columbia
tcaatgcctctatatgagcttcaatcccgacgaatcactgaaattatttgatggggggaagagtttgtttgaaacatccttggcgatattttcaagcatttctgcttcgctacgcctacataaaagtaacaatagtcaactgttatcaaggaacatccctaatagcataacgagagtctatctataacgcatggactgccttttctagtgagcacccacgtctttactcaggctcgtgggacccacccctttccgacggttgatacattacagctgggaggctttaaaaacttgtttaccgacactacaatcaccacacgatctttctctgtgtttaatcctcatacacactgttccgacaatcacttatcggaagtttaccacctgaaactaatctatcccaagcacgtttaactatggagttctctcaaaacgtttgaccgaaaaaataaatgcaatttgatgatataagtagccaaatgaatta

SEQ ID NO: 48551 - DNA, 537 bp, Arabidopsis thaliana columbia
gaagttgaagaattactatttggaggtggaggtgttgctgctgatgaaccattgataagctgcagagttaggacagagagtgcagcaatacagaagacttggtaagtcttagtcttcttcatacttctgcatttttttaatctgattgatcttctcttatcttctatgtgacaaaagtccacgttcaaagaagtttggatagacgcgtgaagcttttatcatcaaaagtcaactccatgtatggatcctttcatctcaattatttagtttctgcagagtgcagatcattgacttgagatattttaaaatttgacttggtacctacagttatagactatctaacaattaacagttaagctaagcacaaagcccgtctagctcagttggtagagcgcaaggctcttaaccttgtggtcgtgggttcgagcccacggtgggcgataattcacttttcatttttgttctattgattggctggtggtccttatgaatctgagctgttgcgactactagtatacaaatgcaatgagactacta

SEQ ID NO: 48552 - DNA, 1067 bp, Arabidopsis thaliana columbia
gagctgtatatatctagattatggtacatccaaaaatgcgagtaggtatctgataccaattatgcaaaacactgattaaataacataaggacaaccaacaaacatagagaccatatatggctagagaaactgaacctctgaatttggattgtgggaacttgaatctccaagaagttcagaccaatttggctcagaaccatcgtcaacagaaatcagctgatctgcccaatcttgccattcacttttcttatgaagttccacggatgagtccacccttactccactactctctgcttgtagattctgaacaggaacatgatcagagaaatcaaagaactcatgaagtggatctatgaactcttgagggtgatgattaatcaacgaggattgagctatcaaaggacaatcctgcatagccaatctgtctctaggcacggtggaaacaggtggctggttttgcaaattccttccatgaggcaagacagctgaaacattgcagtatccagaggaagaaggaaacaaataaccaccagaattgccaccagagaccgactgacacggtacagggttattcatcagttcctgacctgatgaaacccaaaaagagttaggcaacttgtggtatctgtcttctacactagtatgaagagctgaataagatgaagacatagcggtcgaatatccgaaatcattagccagagtcatagcacaagagcagttttgcaaaacaccacacagtatcctaattcagagtgttgaatggcaacgagaaatgagacactaatacacagaatataactttatgcaaaggagatgaaccattgaatcaattcccttactatctagtcaaaagaaacaatctctcaagaatatttctaacgtttttgttttgctctagatcacaaactctacatggagaagcatctacatgtggatagtgaaaggacattacataaaggatatggaatcagtactcagagaatgaaatttatgtccacttaggcaaagttaaatatggcttttgatgaaccaaagagacgtgttaaagaagaagctaccatgaacag

SEQ ID NO: 48553 - DNA, 411 bp, Arabidopsis thaliana columbia
ttcttatgaaatctaacttatataattaagacacataaattttattaatatggactaaaataagggaaatcagcatgatttagctgtttaaagtattcatttaaaaaaataatcttctcgcgttatgatttgtttgaaatacttttctaaaacatatccgcatccaatgttttttgtttttggaagtttttaagagagagctttgttaaggcatgagcttctcgattcgtttctctaggaacaaaagaaaacgtaattgcttgaaaagacctaggattgccactcgcgtgcaagggagattgcttgagaccgggtttctctcggagagtcgtggcggtcgttgaaaattttctagtttcgggcaagtcagtgaagtatgatctcactccagctcaggtatcatggaacatg

SEQ ID NO: 48554 - DNA, 1043 bp, Arabidopsis thaliana
cagtggaaaaaaatgaaaatctcgaaaagtgtcttttttgttatgaatgacaaagaaagtatggcaaattgtaactcgccctttaattaagttgttgattagaaaaagacaaatataagtgatttgacaactttaattgtgtggagtaatgaatctatgacaagatgatttataaataccactaaagttttaactagtagttatcatactcaaatacatattcactacttagaaatattcgataatcctgataaggacgaagaagcaatacatcttgctattgctaataacaattcgataatccaattttccttccatcaacaagaaagccaggcgatgcatggtggttcagtccccggacggacgttctttcatctatcgtgattgagaaagcgcacattatagatttttcaacgattattttttggagactccaacgtacaatgatgttttgttccataggagatatcatatgtcttgttctctcttctttcgtattattggtgctgttgaaggtcatgacaactacttcacacaaagaagagatgtaatgggtaggcttggattatcgtctctacaaatccgcaggtgagtatgtaaagataggcgaatcaacgacaatcgagagcatgaaaatattttgtcgagccgtagtggaaatatttttagaccaatacctacgttccccaacacctaatgatgtttctaggcttttttacattggtggaaaacgaggttttccaagaatgcttggtagcttagattgcatgcattggaagtagaagaattgtcctactgcttgggctagataatatacaggtcgtagtggatctcctactataattcttgaagctgtggcggattatgatctttgaatatggcatgtatattttggattaccagacactaataatgatatcaatgtgttggagtcttcccacctcttctccaatctcgtttaaggtattgctcctcatgttcattatacaattcaaggaaaagaatataatatgtgatattatttgattgaggtatcctctaga

SEQ ID NO: 48555 - DNA, 522 bp, Arabidopsis thaliana columbia
cttaaaagacagttttggtttgttttcattttagaactgagaaactgagttttatcaatgcacttaagggttttgtgcaatggggaagtgaagcagtattcattgaatacaaagggaagcttgcttccattgtgagcgaccattatgatcggtttccatagtttcgatttatggatactagaagacgtcgagaaacatgaatggtcaaagcaaacatgtgtgtttccctcctctttttgggatgatgttgagtgtgctaaaatgtcatttccagacaccaacaaggctggtgagatcattattgccccaaagaggttgtcactcaattttcgacccttctacattttctactacaatgttgaaacaaaaaacataagaagagttaaagctcctaggatttggagacagtgaagagtttaggcgctcttatggattcgaaagaacctccggcgtccgtgaatctcttgttctgatcgcacataaccacacgtccagagtgttggcttttttaaggatcctaga

SEQ ID NO: 48556 - DNA, 460 bp, Arabidopsis thaliana columbia
ggtttgtttccttacaagattgtccaagacctaaccatgttatgttatgcaggctttgctggatatcattgaaaaggacttgtttcaagcccacatgaaaaggtgagtttcaacttgtggatttactctttttattgtcagtatatttctattggaggactttgtactgattaggtctcctaatttgtgacttgaaaagtctaaaactgatcagcctttttttcgcttaagttgatttgagcttagtttgttttttctaattccatgttcctctcttaatatatatccttaaatctggcttctacagctatattgcttatcggtctcatcttattcttacaacagtgtcacatatatgcgactagatggctcagatgtaccggagctaaggtttgcgctggtgaaagcctttaattcagatcctacaattgatgttctgctcctgacaacacatggtatg

SEQ ID NO: 48557 - DNA, 499 bp, Arabidopsis thaliana columbia
gaaattactagggagacttatgtcaaatccctgcaactgctcacatgagcatcacctgtcaaggtaattccatcacggagcttaaagtcatgggggacaagctttttaaaccatttggtatgtttgatgggtcttcacttccaaatcacactctgtctgaagcattcataattgattcgtttgttaccacattgacaaggcttacaagcttgagggttcttagcttagtgtctctaggtatctatggtgagttcccagggaaaatccatcggttgaattctcttgagtacttggatttgagttcaaattttctgtttggctctgtccctcctgatatttccagattggttatgcttcaaagtctgatgcttgatggaaatgacttcaacggtagtgttccagacacgttggattccttgaccaatcttactgtacttagtttaaagaacaatcgggtcaaaggtccatgtacttcttcaagttgcagaattggaagact

SEQ ID NO: 48558 - DNA, 523 bp, Arabidopsis thaliana columbia
gaataaagaggtctggaaatagagaaatgtgagctcttaagagttgttcttgaggagcttgtgagaaagattaattaacggttaattacattgttgaatcaaattactggtaaatggttaggtgaataatttaattttatgtatttgatatccaacattgatcgacgtacgtacgtagtgaggtagaggcttaggttaggaatcaatcgtgaatactatttcaacgttgattcccgcgagctgaatattttttgtgatgtatagtaaaacgcatatgattataggaatcatcataaagattcttgtcatgaagaacaatattaaaccaaattatgcattacgagcaaaataattatacaaaaatactgataattataacttgggtcattgtattttctgtgtaatgtctactatcccttaattagtcggtttaaatcaggaaaaagtataattaatgacactcataattgtatcgttaagacttgaaagtgacggccaagaatacaattaagagccaattagt

SEQ ID NO: 48559 - DNA, 543 bp, Arabidopsis thaliana columbia
tagtaacagccgccagtgtgctctaaagttggcgaatctggcggcggtgcggttgtacggcgaaatcgagttctggttcgcgatgatcaaagtcaccacgattatcgtgatgattgtcattggcctgggcgtgattttctttggctttggcaatggcgggcagtcgattggttttagcaatctcacagagcatggcggtttctttgcgggtggctggaaagggttcctgaccgctctgtgtattgtggtggcgtcctaccagggcgtggagctgattggcattactgccggtgaagcgaagaatccgcaggtgacgctgcgcagtgccgtacagaggtgctgtggcggatcctgattttctacgtaggcgcgattttcgttatcgtcaccatcttcccgtggaatgaaataggcagcaacggcagcccgttcgtactgacttttgccaaaatcggtattacgcagcggcgggcattatcaactttgtggtgctgacggctgcgctctctggctgtaacagcggcatgtacagttgcggacgta

SEQ ID NO: 48560 - DNA, 529 bp, Arabidopsis thaliana columbia
tccccttctcatattttgtttttgtttttaagatggtggttataaatattcgaatatcaagtttgcagcaacgatgttcaggttctttccacttcaagttttatttaacacaaaaccaactaaagatgaaaaagtagcttgctcaacgcgttcttattcaacaatgaggtaaatgcaacatagtggatggatgatgagctaaaaaatgatggtcagttcttatcttcaactacatttttgacgaccaaaaggaagatgttggtagtataagtattaagcattttacttactgtcgttacatgtccggtgtccctgtccaaggcaatcggcagttgtgtgttgaaattatcccaacgatgatgggtcgctatctaacgagatatttgtccatccgcataattttcttttgaatattttaaagaaaatcaaacactagcgttttgtctttgaagatatgaatgaatgagacaaatatcagattctttatcaaagtggataaacaaaagagcataatcgagcccatagtgaa

SEQ ID NO: 48561 - DNA, 579 bp, Arabidopsis thaliana columbia
tatgccatctctcttttttgacaatacataccaagatatattccaaaagtgaagaaatttacctgcatgccagaatcaaatctgccctttggtcgcgaccaacatacttatattcagccagtgcatcacacacaacatcaacgaatatctctcgtgaaacaacaacagttgtccgtcttttgtacatctcaaatggcttactcttattcttgtcaacatcaccagcaacaaccaaacagttaagtttctctacacaagttgaaccaccaacttccttagcaaattcagggttccttcccattctctggtgaagtattacaagatccctcacttcttattaactcaaaaaccctacggctgatctgccaacagagacaaaaatctatcaaggaatgcaaaactggttacttataaatatttacacacccaaagatcatcaaaggacctcataataagtctttcacatgaagaacaattcatgccagggcaacaaaagattttacatataactatatcaggcttgcagagaaaagtacaggactgagcacaaacacaccaatcttgaaatatactacgagt

SEQ ID NO: 48562 - DNA, 413 bp, Arabidopsis thaliana columbia
taacaaaaaatcgtatcttaactatagccaaggaaaacaaaatatatatgaaaaacgaaaatgcttccgatcatcattttatataaaaaactaaataataaataattattcacacacataaaagcattttagttttgagatattttgttttagtgttcagcttgaatgaataaaatattgattttggttcaaaagttcagtttacatttggttatatatatccctagatgtttcatcaaattgattgctttggcctttgagaaaaaaaaaaaaaaaaaaaagagattaaattaaagtcttcaataaatccaagatcggaaatttacaccagcgcaaaatgcaaaacttcaggggaaaaactttatttcttacaataagcaaatgtacgtatgacgtcttctggcatcactttt

SEQ ID NO: 48563 - DNA, 583 bp, Arabidopsis thaliana columbia
cacaaggagtttccttaagctactcctccaggttccaaatttgcctacaaaggtctcaaccagtaaaatcttggatacggcaacagaagaactagtactaaggaagtcatagagtcattggaaagagaagtctaagctaatagagatatatatacaggtatccaaaaaagggaaaatctttcatgttcaaaaccgataagaggaaaccaaagctccatagttgttatcattttctcaccatccagaaaaatgtgactactgtcaaaggacaatgcccaggttcctaaaaacacaagaaattgagaattaaagcaaacacgaaacctgcttctctgttaggaacagtgacatagacaacaatgctgggcacagttttgctgctctcctccattctgatcgacgaagaaaaagccttactgctaaacttagacctataaatttccaattcatgagctttattaacaaaactgaacaaaaagaatcgacgtttattcgaaaatactaaccttaagagaggacaacagagaagactgtgccaacctgatttgaagggagatgaagaagaagagaagagtttagagag

SEQ ID NO: 48564 - DNA, 982 bp, Arabidopsis thaliana
tccaagtttggattatggattcaagggagctgagattgcaatggcttcttattgttcagagcttcaatacttagctaatcctgtgactagccatgttcaatcagcagagcaacataaccaagatgtcaactctttgggactaatctcgtctcgcaaaacttctgaagctgttgatattctcaagcttatgtcaacaacgttcctcgttgcgatttgtcaagctgtggatttgagacatttggaggagaatttgagacagactgtgaagaacactgtctctcaagtggcgaagaaagttcttactactggagtcaatggtgagcttcatccttctcgcttctgcgaaaaggatttactcaaagttgtagaccgtgaacaagtctacacatacgcggatgatccttgtagcgcaacgtacccgttgattcagaagctgagacaagttattgttgaccatgctttgatcaatggtgagagtgagaagaatgcagtgacttcaatcttccataagattggagctttcgaggaggagcttaaggcagtgctaccgaaagaagtggaagcagcaagagcagcctacgataacggaacatcggctatcccgaacaggatcaaggaatgtaggtcgtatccattgtatagattcgtgagggaagagcttggaacagagcttttgaccggagagaaagtgacgtcgcctggagaagagttcgacaaggttttcacggcgatttgtgaaggtaaaatcattgatccgatgatggaatgtctcaacgagtggaacggagctcccattccaatatgttaagagtatagtcctctgtttttttcttaccataaagtctttttttttttacatgtctgaataattttaccaaatgattgtctgtgaagtggttttatgtctgtctaatttaaatttgtgtgtaaactcattgtaagttctcaaatgaacaatttttcttttacaaattaatgtgtg

SEQ ID NO: 48565 - DNA, 466 bp, Arabidopsis thaliana columbia
gaggatatcgccgcttaagttcatacaaaaacaaaacaagacttgggatcatacatcatggccttaatagctaccaaaataagttcacgttcttgttttgtttctgcttatccaaacaattctccaacgtttctgatatccaaatttcccaatacggtcgattctttgtcgcctgcaaatactgctaaaagatcgatcttgagaaacgtccatgcttcagtttctaacccttcgaagcagtttcataataagacatccttagtatatatattctgcttactttttgttgctcatgctgttttcagaactaagaatgtgtttgtacttgtacgtaggaatatttacacgagttgaatatcaagaagatcaagaatataataagtgcaaacgtagatgttccatccgagaacctggagatgatcgatgtcattcaaagtttaggcactggtctccattttcgacaaga

SEQ ID NO: 48566 - DNA, 485 bp, Arabidopsis thaliana columbia
agattattagagctgcaaagagtgaagctgaagctagatgaaacacaacccatgtatagctttcactattggtatcgttcaagccctgaaatactactttgctgtgttgacaactttagttgaaaaaaacttgaatatatctacaatcattggaggtaaaaatagctctttttatagctgccacaattagtcaagccgtgttgactctttacttggaaaagaaaacttagtataagtagaaccattggtcaagccgtgttgactctttatagactgctctttgtgtttcgaatcttcttgtctcttttacattactatgtacatgaaattggtctaattgctctttacctgtacaaggaaccatatagtattgaacttcgttacattctgtatctgaaagttatataatacgtatgggttttccttcttcctgtgatgctgtcagctggtggaatcttactcctctgttgccacaaaataaattg

SEQ ID NO: 48567 - DNA, 308 bp, Arabidopsis thaliana columbia
gaaaacaacgagaacgccaccattgttgacaatgatacaaatctcagacaaaaccctagcggtattccccaaagcgaattgaacaacctcgccgtaggatttggacttgtaaagaacagaaaatctaaccagaagctcaacactaatctcagacaaaagagccatgaggataatcaaaacaaaccctagaaccaagcggagaactttcatggtggcgggcaatgccatgatcccggcgccgataatagaagtggtgagattgaaaacagcaccgtgaagcccaggatcttgactcgacgacgaggaat

SEQ ID NO: 48568 - DNA, 850 bp, Arabidopsis thaliana
acctgcatatatttacacaataagactgatacacacatcgacacagattggaaacaaaaatgagagacaatgaaagtaaaagtagtacaagagtcgatatatacacacataccttggtctcaaaactgaaatcaagaagaatgtttgcagctttgatatctctgtggataatgcgagggtgacctataattgatgtaacatatacaatctttcaaatattgtagagagcgagatagaaactgatgcaaatatgtgagataaagattttcttacagtcttcatgcaaatatgcaaggcctctagctgatcccaatgcaatcttcactcttgtaggccaatccaaaaccggacgaccctttcctgaaatttcaatcatgttcctgattaaagagaaaccatacttaaaggttttgttaatacaagaaaacattctgttagatgaatgtaccatgaagatgaaattcaagagtgttgttaggtataaactcataaaccaaaagtctttgaccaccagagatgcaatatccaacaagagaaacgagatgacgatgatggacacggctaatgatatcaacctctgcttgaaactcgcgttccccttgtccacttccaagtttaagactcttcactgcaacttctttgccactaggcagaactcctttatgaacatacccaaatcctccttgtcctagcaaatttgactgagcgaaaccttctgttgcaatggacagttcatcgtatgtgaaagtgctttggttgtgaccaagagttgcagcttgaggtgacggtatagcagttcgaccggttaagttggaagcataagtgtgaggaccagactcaggttgctgtg

SEQ ID NO: 48569 - DNA, 572 bp, Arabidopsis thaliana columbia
ggagtttgtcctaccgtcggcgttggaggacacgttagcggtggtggatacggacacatgattcgaaaattcggactcactatagatcacgtcgtcgacgctacaatcgttgacgctaacggtcagattcacgatcggaaatcgatggaagaagatctcttctgggcgattcgcggcggaggcggcggaacgttcggcgtcgttttagctttcaaagtgaaactcgtgaccgttccaaaaaccgtaaccgttttcagagttgataagtctgtagacgaaaatgcccttgacatggtttacaaatggcaattcgtagctcctagaaccgacccgggtttattcatgagagtgttgttatcatctccgacgcagaacaaaacaagtacggtgaacactaaactcagggcgttgtatcttggaaaagcagacgacgtcgttttaaagatggcggaggagtttccggagttgggtttgaagaaagaagattgtaaggagatgacgtggatcaatcactcttatggtggatgatcatgtagacgtggcaaagcaaaccggagatatactcgagagag

SEQ ID NO: 48570 - DNA, 459 bp, Arabidopsis thaliana columbia
gggtacgagatgggttatgtgtgcgatttctgtggtgaacaaagatcaatggtgtattgtcgatctgatgcagcgtgtttgtgtctttcgtgtgaccgtaatgttcattctgctaatgctctatcgaaacgtcattcgcggactttggtatgtgagaggtgtaatgcacagccagcttctgtccggtgtagtgatgagagggtttctctatgtcaaaactgtgattggtcaggccatgacggcaagaattctactactacttcacatcataaaaggcaaaccatcaattgttattctggttgtccctcgagtgccgaattatcctcgatatggtctttctgtatggatttgaatatctcttctgctgaagaatccgcttgtgagcaaggaatgggtttgatgactatagatgaagatggcacaggagaaaaatctggctgccaaaaaattaatgtagaa

SEQ ID NO: 48571 - DNA, 536 bp, Arabidopsis thaliana columbia
atacaaaaccctaaagaagcaaactttcatggacggcactaagaaaatttcaccacgccaataaaactcgttcaaatcatgtagaaatcttaagactacgacttcaggagaaacaatgaaaccgcaatatagctttttcctaagacgaaattcttgactaaatctctgaaaattcgtaaagatggacactttatatcaaaatcaagaggagaatcatgtctttaactactccatctccactagaaacggaaaagaaaacaggtaaagatgtgatcataatcaataaactcgctacggaatctcaacttcgaaaactcttaataaatagcaaaccatattcatcaaattcaatcaaatctccagaaaagttctaagctcttccggtgacagaaaaaaaacagaagaatcgatcttaaatcctagaaaaacgatcaaaacggtataaaagacgaaattagtaacggagatgaatcgaatcctagaaaattgatcggagtcgtaatcagctgaggaagagagaaggagatttggggaag

SEQ ID NO: 48572 - DNA, 539 bp, Arabidopsis thaliana columbia
gattcaagatgaatatgtgaaaatatatactaccttttattcaatatcaaaaccactacatctaaccgttttgtatccgggattaaataaaagtggtatagatcaaatcacaaaccttcaaatgtaggctgaactggctcaaacataggtcccattggaggcataggtccaccttgctgtacctcatcccaagctgcacccaaaccattctgatcaacagagcgaaaaccacggaagaactctgacccctaatgtaaaaattgcaaacccatcagccatcacagaggctagataatcagagtcaatactaccattgtaaaaccaaaactttccacaacattaacctgagcacccggttgcagaagtggctgatctaactcagaaccaggaagtgaccttatctgttggtcttcagagtaaaattgtggccgaggacctgaccggtttgcattaggtatctccttgagcctttcctgcacaacaaatcaccaatcatcaacatttcttcaaattctcaggaaattttaacctttaacaat

SEQ ID NO: 48573 - DNA, 328 bp, Arabidopsis thaliana columbia
tctaaaggattgcctggcttccattctacacctttataggaacgcttccaaattgttgatatcttatatgaatacaattgcattgacgatacatgacaaatgggtgcaagaaaagaacagagatcaatctatgttcaacattgttatacgttctcctacacattatactctaattggatcgatctacgttcgaccatggtcacattctcaatacgctatcacaagcgggataacacttaggctaacctcactgcatcagccgtggtattatcggcttcaatatcgccgctaaccatagcgtaaacatgagtgctccggtagacggatc

SEQ ID NO: 48574 - DNA, 564 bp, Arabidopsis thaliana
gaatagtttgatcatcttgtgagaaaaataatggctgcttcagtgatgctatcttcggtgacattgaaaccagctggtttcacggtggagaagacggcggctagaggattaccgtcgctcacaagagctcgtccctccttcaaaattgtcgccagtggcgtcaagaagatcaagaccgacaagcccttcggttcgtttatattattattacacagacttttacaacatatacacgttaccgttcatgtatagcttatttccgttaatcgatgtgtgtgtaggaattaacggcagcatggacttgagggacggcgtcgacgcctccggcagaaagggcaaggtttgtagtaactgaaaacggtgttgtttaatatcctttttaataataatttggtgggttctctaaacaatgacgtataatcgcagggatacggtgtttacaagtacgtcgacaagtatggagctaacgtcgatggatacaggtgaattagaattatcatcctccataacattttttgtagataagaaagaaccatggattacgtagtagatgattgattttta

SEQ ID NO: 48575 - DNA, 581 bp, Arabidopsis thaliana columbia
atatattataccaattaatagtgttagaaaaaagaaataaagtaaatacaaaactatattttctctataaaattgcaagataattttttgctgtacaaaacttattttgaattatttagttaaaaaatatgttttcaaatgttaaatgtgaaagcataattcatatcattgctcgaacacaaaggagttacatgttgcatctgattggtttagctttctgttagacttcaaaaacatatgatcatcagttcatcacatagatctattacacatcaacaactttctaactagaaatcattacttaagcgttgtccgatcttttttacgggttatagcaaaatattttaccgcagcaattcacttaaaccgattcatttatatggatccaaaacaaaccgctactaaagtttcacgtgatttttaacattgagattataaacatcgaaaacctacaacagtataaactaaccaacacaagaaaccgtgttgttcattatgttttcagtcccatctaatgcggcaacacgagcatgaagcgtctcgagcaattccgatgagagcaagaatctgagaggtgcgag

SEQ ID NO: 48576 - DNA, 468 bp, Arabidopsis thaliana columbia
tgaaaattcagaaaacaaggaaaattagtgtctttcatatctagtaaaactacgtaccattgttttcgatttttggtaattttacaggtctgtcctgaccgccgacggtatatcctgaatcagccactcttaccctcttgctgtcgccacagtcgccgtcttcggcgattatgggtagagtagtatccgttttcatgataacaactcctctttaagtgttcgaaaactaacacatccgttgaaggcagaaagtattttatatacctaacacatgcttatatatatatacacaagctctcttgtcgtgtactattattaaaaatgaaaaaaattaaagaaaaaaacgtaaaagaatgaaatgacggtctagagacggccacttctatcgtgatacgttttttcatggaacaaggaaagcacttaaatagaaaccgtaatctagacatcttggtagacacattgtttgtg

SEQ ID NO: 48577 - DNA, 641 bp, Arabidopsis thaliana columbia
  unsure (1)..(641): unsure at all n locations
cagacacacatgcatgtgaagaaacgtggaacacaattgaagaaaggccatgaaaaacaaaagttgtacatatattcctcttatcatcatgtgaggaagcctcaaaaatataactacgatcctagctagtaagatgtgattgagtctaagagagtgagaaaggtgttttggtcacaaggaatggtgaggccgctctcttgcctaaacccagactcttcctccgatttttgcagcatcatcttgaaggttggatggttgagggatgtgattgggatgacgtggcggtctctgaagtggcccacgtagacagcgaaatagcccttcttgggcacgtcttcttcgttgctcttcttcacgaagcttgaacatctcttcatcagcatctgctttagtgacgatgctcctcgtctttctctttgagtcttacttgcttcctttatctccattatgtatatttatgtactcttatatacaggtgaatgggtatggtgtcaatatgtttttgtttattttgactccgatggagagatatatatacagatcgagcaagtgatgactgaataatcatgtctttggaatcaggaatattatttactttgttanaaataatgatggattaaattggtctgacactaaacaat

SEQ ID NO: 48578 - DNA, 1015 bp, Arabidopsis thaliana
ttatgcatatgcgtcttaaagcgttctatctccgataagtcattaccagccacaacaaaatcatcgacgtagacaagaacatgtagaattataccattttgaagaaaggaaaagggcgaataatcaggataactttgcttgaatccaaatgcgcgtagggtcttagcaagtttctcagaaccagcaacgaggagcctgtcaaagcctatcgagtgattttcgaagccgacaaaccttagtagaatcgttagagtgaataccaagaggtagtttcatataaacctcgtcgtctagatcaccgtgaagaaacgcgttatgaacatccatttgatggacttcccattttttagcagcatcaacaactaaaagaaagcgtaccgttgtcatcttagcaacatgtgctaaagtctcagtaaaatcggagccttaaacttgacaattctcgagagcaacgagacggaccttatgatgttccagcgtatcatcggaattgtatttgagtttatagacccacttgctgtcaatggctttctttcttggaggcaatgtagtgatatcccaagtgtgattttcttcaagagctgtgatttctaaccccatagaatcacaccattctttaatttgagaagcctgatggtagcttgttggttccgtgtcggatgtaattgctgccataaaatcttgatgcaactccgaaattttttcgttagaaataaagtcaagtatcttaccacataccgttttagagaagctagaattggcgagacaggagatgaagcgttggggggggggtgtggtggtggtggtgtagtagtagtagttgaagtagtaatagaaggagtaatgtagtttttgagaagaaccgatgaaaatttcttaggatgccttccctgagtaattcaggtaaactcggtgaagttgttggtgcgggagagcctgaatcaaagtactagtcgagctagtgggaagtggtgagctgggtgaggatggcgaccaggagtagagtgtggtattg

SEQ ID NO: 48579 - DNA, 535 bp, Arabidopsis thaliana columbia
gaagaagaaaattattttgtgtcaattggaggtggaacgaaatcaaggatcagaagaggtttgttttcgttttatcctcatatgattgtattgtctaatctcatattctttatgtttctgttcttgtgtcatagttcttataaaagcctttgaacaaagactatttcatacttatgtgtcaaactgctcattgtactctgaagtctctgaactgactgtatcctgacacttttcttcgcattagtaaacaaccagaaaaaaagaatttatttatttatttatttatttatatatccccctcccactgataaaataatgatgctgtaaatggaaccaaaactatggataatttatttaagaccggagagattattgtcggtctcgagcaaacaatccatggtcttggttccttgctcagctgcacgtccttttctgagtgggtactgagttcttattttcattgctgttatctcaaacttctgtctaatagtttttagttaaacaatatgcgatattttcagtgatgattttggga

SEQ ID NO: 48580 - DNA, 413 bp, Arabidopsis thaliana columbia
taattctgaattttgagagagttttaaaatcatcttttatgagctaatccatgtttgaagctagatctgcctttaactttggttttggttttaaacttttttgtgtgaacttgttgtaggctgaagaggctgggaatggctggtacagaggagactgatgtatctgtagaagggtctttaaccagggaggccactgagatatggaggagtgagttggaatctcgccggtttcaggcagatagtttagaagctgaacttgtggatgtcaaggcttaccttgagtctggctcagaagaagatgccagagaggagttaggagttctttcgggtagggtcagatcgactgcaactatgttgcgttatttgagatcaaaagctagagtcttggccattcctgatgatctagcaaatgt

SEQ ID NO: 48581 - DNA, 958 bp, Arabidopsis thaliana
ctaatacattcagtaaccgtggatctgtcacacattcccccggagagattaaagagatagtgtaagttgtttgtcatcctatgtcaagctgatttaggaatgtttctcattgtattgtctatagatacttaataagtggccttggttctgaactatttttatattggttttgggttttttagatatgaggctgcatttaacacatttgtcgacgaaatcaactctatagctgcatatcaatggtgggaaggtgctatatatagtattctttcagtagttggtatccgctcgcatggtcatggcagcaatggcggcggaagatgaagttgcaaaaattgcgtgagtttgtacgttcagaatatgatcactcctgtttacgctcctgtcgctcccgagctttatacgagggtctgacgctctcaggactacacattttgagaatatctaattccgtttacaaggatttgttggtgtaaggtttagtatatatatatatatatatatttattttaatataggtcgctgcaacctccgatttgatgcttgcgtatctggatttcttccttggtggggatgaaaaaaggacagaagtgcacgctcgacttcaccaaaggtttccaatgcccatattgtttggtggtgatggcagttacatggctcctttctcacttcaaaatgacaacattcttaccagtctgatgagtcaggttggttccttagttaacgagaagcagtttcagcagttaaatgaaaggttgtatcgattctttctcattgttttacattctcagcttggttcgcctactacttggtatagactggtggctggtgtaaatgctcaattacgtcttgttcgccgtggggtcatgagatcaacatttcattgtgttctgagatggttagaactcatgctaatcacgctctggaaacacatggcataagggttgatctggcctgg

SEQ ID NO: 48582 - DNA, 633 bp, Arabidopsis thaliana
gataccgaaatgcaagagcaagatgtgacttttggtgcccttgttgagacaaagtatttagaggaagaacctttggagccagaaaatgatcacaaccctagtgaaatcccgcagccccttcttcttggagatggtcaggctaataatggtcatggcatgaatggtggtgctgttggagttgttgaccactctgaaaggaagactcgtagggtgcaaatgttgagtcctaagactgaaggtgagaatgccaaaaagaggaagacttggctgctggattctgaggtactaggctatgtttctttcaatttggctcaaaaagcctgtgtctttttgttttctcaggattggatttcactgttttgtggtcgaaaattatgtggtgattgttcacttactggttcacctttctctacaggcacagggaactgatgaagcagggacactggtagaacaagtggcgtttctaagagaagtggaggccttttacaaagagagtttcctggaatttaaacctcctaagttttatggacagcctttaaacattctcaagtgagttgttggaaaagtggtgcttttgttcttaataaacccatatatctggttaatcagtgcctcacttttgcatccaatgta

SEQ ID NO: 48583 - DNA, 596 bp, Arabidopsis thaliana columbia
cggtttctttttctcagttaaaggtaactttaataggaataaaatgggatgtgctttttggaattctgtttttgtagcatggagggagcacaaatgcttatacttccagtgaagatacaaactaccatttcgatatcaacactgattctttttatgaagctttggacaggttgacttccatttgttttttgtttttttttatctcttgcttactaatttttcttttgacagtgttggatttttatgttattgcctgaccaggtttgcacagttctttatccagccactgatgtcaactgatgccaccatgagggagatcaaggcggtcgactctggttagcttttgactttctcggtagctttcctgttgaaatttgcttatataacaaattcctaacaagttctcctatccagagcatcagaataacttgttgtctgactcttggcgtatggccaggtattttccattctctcaagaacaaatatctgtgttaatcgtactatatctatccatctagttattggcactgaagcgtgcatttcacgggtttcttttaaacaagtctgttgatgcgtttgtagtactaacttggatt

SEQ ID NO: 48584 - DNA, 651 bp, Arabidopsis thaliana
cacatcttgtattctaactcctctaaacactacatcttccttcggaatcgtaaccgaaaactccgcgaattcggactccggtaaatgccatttgtactgcattttcgccgtttgatcctcgaaaaacaccggtatacatccggcgatgattccgtcgaatgtagctttccttgttggtgtatctcccggtggttgtaaacaaaacgatgattgtaacatcggtctcatgaatctaatcggatcatgctcacagattccgttagaacaatcgacgaaatcgcagattttattatccgattgtgttgcgtttatgctagtgcactctaagcggatactacgacggatgttaggagaagaggaggtaccaccaccgccggcgaatagcataagagaagttcgccgtgagcgacggacacgacggatccacgattccaaaaacggcaagctgtgtggatgaaacgacgtcggataaggaacggcttgttcttgccacggccagtaacgagattcgagagttaacgccgttagattgaaaaactcacggcgttctagaaacgacgttcccaaatcggagggtcaacggtcaacggctgagagaaatccaagcgggtcgagccatacgaggaaatgatcatgaccggagcgacgaga

SEQ ID NO: 48585 - DNA, 594 bp, Arabidopsis thaliana columbia
gagaaatgtgtgtataaataggaaaactcttatattaaaaaataaaaaaaaataaagaaagaatatatttattactcattggcgcttttgtattggaccacaagtaaaagcatgggtctgattttgaaacgcgttccactccattatctgtctaacaatttgcgtttttttcatttttttccgaaaaacgttaaatattatttaattgtcttgattgatgttaaagtgcgtttttcaaaaaaaaaatcaattccgccaatttaatgttaccaatcaagacctcagctaaagcagtggactctcatatatcagtttctccatcaaatgggcaacctccagtaaagcattttgatgatgccatcaaagaaaatttggtttctacatgtgtgtctgcatcagttaaactccttgttaaactataaattcactactaaggggtgtaggatctttgaaacgataattgcccttggcttgatctgcagattaattgggaacagcttgtcctgtgggaaggttgttaaagggtgaggtctttggttcgaggaatccaagcgccccaatacctacctggtggatttggtggcccaagagaga

SEQ ID NO: 48586 - DNA, 429 bp, Arabidopsis thaliana columbia
aatcgaatctttactctcgttgatactacagagattcaatctcttcaccaacttagagccgtgtaatcgccggaataaatctccgattaaactcacaacttgacgtccacaatcacgactcttcttctcctcttcttcttctgtggtgtctcgaccatcaccggtggctttaactcgccggattctgtcggtagtacgaaacagagatgatccatagccattggcgccatgtgaatgtgtaaagatatcgaaatgtggatgaatttaaagatgtgataatgctttataacattttgtgactatctatttgaccgaccaaaattgaatgatggattgttgccagccaggatgtcgtcacttatagtgtgacttctttctagagatatatgtgattttatcatctttaaaagtgtgtgtataatttgaaga

SEQ ID NO: 48587 - DNA, 378 bp, Arabidopsis thaliana columbia
tagaagatccctatatcagatgtctttcgttagtattacctgacatttctggcagtgaatttaattgtaaatgagttgtttaaccgttggattaggatcgacatgtgattgccatgaaattgcacgtttgatgataggattaaatttttatcatatgtatatgtaacaagaaaaagaaacctcaagacttctactatcaagaagaagaaaaatgatcaactaatgacttaatttttgccatcattgtcgtggttgaatttcttttatcgaattttgggctgccttcatgatacaaactagaaaacatcgaggtactcatctatgtttctttattggtagcgatgtcctcaaaaacgctctcccaagcaagatatagac

SEQ ID NO: 48588 - DNA, 935 bp, Arabidopsis thaliana columbia
agaaaagattcataggcccaattttgtgtgagttgtacttaggaggacctttggtagattttattcttgttgcagttggtttagttggagcgctcgataaacgaatatgtacatacatgggtatcaagatcaatgtagattcttctggctctgctttaatttaactttgataagtcatcatggcattttggtcttccatgtgaagcttaacagagaaagcttaatgggtctgattggtggtgacctaaaccattaaggatgattgtacgtactaccattttctgacagcgccaccgccacggttgcataaatcgaaatcactgttgtagtcttgtagaaggtgaaaaaaaaaagtaacctaaaggaaaatctaaaacgcagtcgttttgttttcttagtttggtatcaaaaactctgaaatcaaaagaaagaagaaaaaaaagtctctgttttttctctcttccctgtttttctgtgtctttctcctccgtgttccgtcgtcttctctctctgcgttccttcttgaagccggaggaagcccaaaacccttggaataaaaaacaacggcctctctgctactgattgatagaaaacaaaaatctcaaacctagagaagaaagcgacgtactgtatattctcaagactaactggatctctcgttgatcttcaataaaccctttttgcaatcagtctcataagagtctacaactcgtgggcttctatttttcttgttggggttcaacgttttcctctgtgaagaaagagattgactttcatggagatgaacctctgctggaatttgtagattcaattagggtgttttctgggttttgtggtgcttcgataggggtttttggtgcgttggtggtgggtgatgggtagtagtgatgagcgaaactgtaaggcgattgatgcgtcggtaggaggtttggttt

SEQ ID NO: 48589 - DNA, 678 bp, Arabidopsis thaliana
tcttttgttttcggccataaaggaaaaagcccaattaacacgtctcgcttataagcccataaagcaaacaatgggctgtctctgtctcactcacacacgcgttttcctactttttgactatttttataaccggcgggtctgacttaattagggttttctttaataatcagacactctctcactcgtttcgtcaacattgaacacagacaaaaccgcgtcacaaaacaaaactcgctacaaataaatacctttgtttccctcttcttctccttcactcacaacatctcaatttcattctctcttctctctccaatttcacaacaatgggagtcaaaagtttcgttgaaggtgggattgcctctgtaatcgccggttgctctactcaccctctcgatctaatcaaggttcgtcttcagcttcagcggtgaagcaccttccaccaccaccgtcactctcctccgtccagctctcgctttccccaattcttctcctgcagctttcctggaaacgacttcttcagtccccaaagtaggaccgatctcactcggaatcaacatagtcaaatcggaaggcgccgccgcgttattctcaggagtctccgctacacttctccgtcagacgttatagtccaccaccaggatgggtctatacgaagtgcttaagaacaatggactgatc

SEQ ID NO: 48590 - DNA, 527 bp, Arabidopsis thaliana columbia
tgcttattctcacttggaatggttcactatttggtcatctttgttacactttatcaacgcttaccaggcggaaacaatttcccaaccacgctaagaccggttttcttcttgtttttcgctgcacccgccacagcaagtctagcttggaactctatttgtggaaactttgatactatagccaagatgttattcttcctttcactcttcatcttcatatctctggtaagtttacatctttacgatacaccaagaaaccgaaaaccgacatttttacattctttttcttatacattttcaggtttgtaggccaaatcttttgaagaagtcgataaaaagattcaatgtcgcatggtgggcttactcgtttcctatcacatttctcgctttaaactcggttcagtacgcgcaagaggtgaaagaccatgtcgcttcggtcttgatgtttatcttctcatccatgtcagttttgatattcatcagtgtgatgttactgacagcagcaaatagcaaaagattacttagacgtg

SEQ ID NO: 48591 - DNA, 591 bp, Arabidopsis thaliana
aatcgttttttcagtctttcaaacagaaaattgttttggtgcttgattttttttttacattatcctaacagacattttctttgtcttgttgattagccatccttaggctaaaacaacataaactaattaagctgatacatgcatcagcttgagattggcacatgagtgattgatgatgatgatgctccattagcaatatctctcaaagagaaacccattctctcgagaagatgcaattgcaagaaggtgagagatgacaaatacgacatgatcaccatctgaaacaggagatcccattgggatctgcttaaaaagccacctccaaattccataaaatggggtagcttttagagcagagggagagaaactaagtgctgagattagccaggagcatcctttaaaccatagaatggctcttgacctgagaagaagaagatgatgatatgaagcttgatagctaccaaagactctaagcttctttaacggtaaggaataagaggtggttgaagcggaaagcctgttacgcctgtggacaacaaaacacactgccaacaatgttagtgtatgtgtatatctttgttgcctttggtg

SEQ ID NO: 48592 - DNA, 151 bp, Arabidopsis thaliana columbia
actgccaacaatgttagtgtatgtgtatatctttgttgcctttggtgtacacatgtctattatcatatacgaaccttgttgcatagaaaaggtcggaggagagtaatggtgagggttataagaagacaagtgatgataaaatggttgtggt

SEQ ID NO: 48593 - DNA, 402 bp, Arabidopsis thaliana columbia
ccaaaagtgacacttttttgtttgtcgtcataaaattgacaaacacttcaaactcaacgttgtaaagtgacctgtaaaattaaagaaaggtaaagcaaaacaaaaatagaaaaagaattaaactcaaaagcaaaaccgtgaacaaagaccaaaaagatggcaagattattagaaaacaaatttgattaaaaacacatacaacaatgttaaccagatctggcaaactctaaaaagcttcaacttttaacgaacttattataaacctgtttcagtttttatttttccttattttttttggaatcgccttgggacttttgtctggtttctaacaatacagagatgattgtattcaaattgaaaattttgtaagggaaacaaataaggaagaagaagaagaagcat

SEQ ID NO: 48594 - DNA, 618 bp, Arabidopsis thaliana columbia
  unsure (1)..(618): unsure at all n locations
gcatagaggctttcttgaagccatgatgagggcattggttggtgtaacccttgaaacgctctcatgcttcacagaagctttcaccagtcttctgtgaaaaacaagagatctcatttctgagtcttgcagttctggcgttggagaagaactttgccagaaaggccttcttgcaatcatcccaggttggtgattgagtcatgggacagattctttacccagatgtgtgctttgtcgcccaaggagaatggaaacaaccggagcttgaatccatctttactgacaccgttgattttggttaggctgcaaagcatatcaaatttatccaagtgatcgagtgggtcttccataggcagaccatggaacttgtttccctgaatcatcgagatgagaccactcttaatctcgaaattgttgttttagacagcaggaggtgcaactcttttcctcagacggtgattccttggtgcatctccagcaccaatgttggtgggtacattcgggtcatcttgttcatcagccattttgaatggatggtggtgtcaaggtcgaatgtgtttatcctttcctaagtcttctgttgaacagttgatgttacgttganaagagatctggttgtgt

SEQ ID NO: 48595 - DNA, 135 bp, Arabidopsis thaliana columbia
acacaacatatacaacacatacaacacaacatacagaacacaacagaagagatacaagacagatacatatacaatacaacacaatacaacacatagaacacaatacaacatacagaatgacaacaatacaagata

SEQ ID NO: 48596 - DNA, 888 bp, Arabidopsis thaliana columbia
cagtcacaatcatcctcataatcacatgcaaagatgcgagattcagatcttatctaatggcaaataaattgatcaaaactatctatggagctgaaaatttaacaaacaaatacatcacacatattttaatataatactaaaagatttgttatttcaaaattatatatggaaaaccatctcgttactcatctttcgtcccagcagtacggcccctagtttgagagcgaaggaaaatatactttaaaagactttggaacttattatacatactctttcaactataacaatctccaatattgctaaaagtggctcaagaactggacccacttagtctgatccaagtcacattattcaccatttcgaggctctaatttaatataaatacctaactttttatatatatttgcaatcatatacaagaaacttatgttatgtgcattttatttttatataaagatgagctaagccatgtgagccagatggatgacgggagggcccaacagcccacaactttttttttttttttttagtaatcaaaatatcgcatcgtactgtttttttagcattgaaagtcttttccttatcttgaagttacatactttaagttcactactataaatagaaacttcttcccctcgttgtctatcaagtcatttactttttaaaaaaatttacctaaacaaattgataagttccaaacataaataagaagacatgggtttaatgaggtcgatgcttccaaatgcaaagcaaatcttcaaatcacaatctatgaggaacaagaacggatcatcctcaccatcaacaacaacaacaacttcagggcttgttccgaaaggtcacgtagcggtttacgttggagacaaatggagaagaagaggtttgtgg

SEQ ID NO: 48597 - DNA, 504 bp, Arabidopsis thaliana columbia
tctagaggatgttgattgcgcctttcattactttttgattattctatttaatactatagactaaatgaacgaatcccaaaataggataattaaattaatttgtaatcgcaggagtatgttccaaaacacgacgattttgtatccaaaatggtgtgggacaataccacggatgctttcactttggaaggcgactcgttttagatatagttcatttgtatcttagtctacttttattttattattaaaaatctcgttttttattggccatttcaaatttttgatttttgtataccatgtattgagcttatataacaatggaacttgccaaaatcaaattacttacaagccacatgattacataatggataagaaaataacacaaaaccaagtccgtaaagtatcgacaactaattataagctaagaaaaaaccgatcattttccaagcattgagacttccattcttaaaataagaatatgaggcccaatggcgttggcaagaaagt

SEQ ID NO: 48598 - DNA, 574 bp, Arabidopsis thaliana columbia
ccatgtcgttaatatgttgctcttcgagttttgctcagaattgtttatttaaggttagtgttttcacatggatcctcaagttgaaactattaaatcactaaaccacacattaataggttcaaataagcataatgaaataggtgcaacaagtttcaaataaaataacaaaccgactcatagaagggaaaaatgactcgagaatgaaaaattaatcgaaagcaggaagcaaagatagggaagatggctaattctcatgctcggagccaaaagtgggtactggtgaacgttgacgatggcgagtaggagcaatgcaactacagcaagacaatgtagctattgcgttccaaatgcacttgaagctgtcgaccaagtactgctgaaaaatcggtggctccatagggataggcaaagtaacaggcaggtcatatggcatggctgaagaggatgcccaaaacgaagaacaccagcagggtcaatgaactcatcctctgtttgagtcgggactgatctatggatgtgcctctttgtcgcctagagcgtcgtgctgcgtgtaggagggaaagatcatgacgga

SEQ ID NO: 48599 - DNA, 507 bp, Arabidopsis thaliana columbia
ctttcaagtgttatttttccccctttttcaccggtggaagtttccggagatggtgtcacccgaaaacgctaattggatttgtgacttgatcgatgctgattacggaagtttcacaatccaaggtcctggtttctcttggcctgttcagcaacctattggtgtttcttctaactccaggtttttcttcttacttcccctttctctcttaagtgcttcaaattagggttccgatctggtttttaagaaattcaaattgatttgagtgaaatcagtgtgattgcttgaataattttatgtgggttttttctggtatgcgaaggtgtatcgttaaatcaagggaagggctaattttgttaaagtaacgaactttgtgattttaagcttgtgtgattgtttgagtaagttatagagaagaaactgagttcttattcatttgaattggtttctatgcttaaatttgggttcttttagcttgtgtagatatctttagagtgggtgaaatgatat

SEQ ID NO: 48600 - DNA, 388 bp, Arabidopsis thaliana columbia
ttttacctcgaacccttttctcaattctattatattgaagcttttattgcatttgaaactcccaatttataccgactttatgttttaaccctcaactttattttcgatatttaaactccaatccttaatagcctgataaaggcccaatggcgttgtacgacccaacatacttaaaccctttagttgatttttctcaacttattacactgttcttgttggaactaaaaccctttgccttctttcttcatctctctaaatccctaattctccaaattttggggttttacattttccttatcaagagaacacctgaatctgacaatgatcactacagtgctacgacgatctctccttgatgcgtcgaagaggaatctctccgcttcgttga

SEQ ID NO: 48601 - DNA, 295 bp, Arabidopsis thaliana columbia
cgccagtgtgcacgtttaaatttgtgactgatggagcacattgcaccgctgaggataagaccgttccattggtgtttctggcggagagtaatgtacagagcgattgcgccaccaagggattcagagtagaggaaggccgggagaaaggaggaagcgtgacgtttacggaagtcgtcaaagaaggaaatgcagtcgtcaacaatgaggttgatgtttgggatgtgagcggtcaaacccgtctgagaagccgtggccttggtggtcgatggcgcaagtgaggtatccggattttgcg

SEQ ID NO: 48602 - DNA, 457 bp, Arabidopsis thaliana columbia
gagaaaaatctcatgagctacatcaggtaatcttctctggcttaaagtttgaactaatggagcgtagtctacgatttgtatcttttgactgaagtccctagatagctttgattccttgatcaactgtacaaagtagagagatacctaaaattcaagatatgaagtgaactaagaaacagaagcaagtgtgtaggtacctttttcgcgattgaaggagcagacgaatccgtgtaacaagataagagcttgagatgttggggtttcaaagatagattgagcgacaacattgcgaccagtctcggttacggtacggtggtgacggaggaatcgaggagatttccggaggggagagagagagatttgggcctcagaagctataattagggtgttatttcagagaacgtttgggcctttattgggctttagaaacattatccccactagtaaataaatgttt

SEQ ID NO: 48603 - DNA, 1168 bp, Arabidopsis thaliana columbia
catttcctaatctttttttgttctcgaaaatatgaccccctcatatctaaaactcatgcactattttcttcaagaatcatataatataatataaaaaccataacaatgagcagagaagaaagaagaatatgaaaaagtatattcaattgtcatacaagatacaatattaaaaaagcaccaaaaggatttttccgctgtcgggcttcgaacccggaattctgatccagtattaaactagaatatttgcgttagacaatatgctactgcggatcttttgttagaatttagaatttatacggtatatatgttttatttgaaggttttattgaaaagagtatttgcttcttttctcccattcatttccttttctgtttttgttctcgaaaatatgaccccctcatatctaaaactcatgcactattttcttcaagaatcatataatatagtataaaaaccataacaatgagcagagaagaaagaacaatatgagaaagtatcttcaattgtcatacaagatacattataaaaagcaccaaaaggatttttccgctgccgggcatcgaaaaatgaattcttttctagtattaaacaagaatgattgctttcgactatgtgttaccgcggatcttttgttagaatttataatttatacggaatatatgttttatgtgaaggctttatagaatagagtatttgcttcttttctcccattcatttctttttcagtttttgttctcgaaactatgatccactcatatctaaaactcaagcacgattttcttcaagaatcatattatatagtataaaaaccataacaatgagtaaagaagaaagaaaaatatgaaaaagtatcttcaattgtcatacaagatacaatataaaaggcaccaaaaagatttttccgctgccgggcttcgaacccgaaattctgatcagttttaaactagaatgtttgctttagacaatgtgctacaacagatcttttgttaaaatttagaatttacacggtatatatgttttatgtgaaggttttattgaaaagagtatttgcttcttttcacccattcatttccaattctgtttttgtttttgaaaatatgactccctcatatctaaaactcaagcacgattttcttcaagaatcatataatatagtataaaaaccata

SEQ ID NO: 48604 - DNA, 504 bp, Arabidopsis thaliana columbia
ggttctacaaccaccaaatccttttagatcgattgcccctttatcaagtattcttcacttatagcatcgttttagggaagacgaataattaaaacggggagattaatcagaactattgaaaagactaatcagaacttaagaaagccaaacaattataggcacgaataaagtatatataagctaagctaagctaacacaaacaattacgccaagccctaatttaagcccccaaaaaaaacataattcttgaaatgaaaacaagtgttaaatatcgtttcgtgcattttagttaacatgaatcagccttttctaaaagcctaggggccttattggttaaaattccacacaaagcaaatttaaaaagaaaaccttcagtatagccgtatactacatgtttgattagtagtttagtagaacaaaatgtatttacttggaatgaagtgtaacaaccgttttattatgaaaactttttatggtaagttgactgacgtaaaagaaattgta

SEQ ID NO: 48605 - DNA, 622 bp, Arabidopsis thaliana
gtaatttctatagcaaattcacacttcttttcatgggttgtttagagagattgtcttccatcataccagttagcatctttaacttttcaattttatgtgtttgtaataaaaggattcggaagcgctttctgaggcagaacgagacctgaagagtttgaaagatgcactaaacgatgattttcctgttggtcctttaattaataagtgttgtacattggatcaggtatgtggtttagtcagctgtgcacattggattaagaagtgttgcacattggatcagtattgaattttctcttttgtagggtaaagctgttgtcacatttttcgatgcaatattggataagaccctccgtagcatagttgctctgattgctagtcgtgggcgtggaaaatctgctgcacttggtctagctgttgctggggctgttgctgctgggtaggcttgagttattttgagcttttattcatgtttgttaatagtatttattgtcttattaattctatatcgtattttctgttaggtactctaatatttacgtaacagcaccgagcccagataacttgaaaacagtcttcgagtttgtttgcaaaggttcgatgcacttgaatataaggtaatatg

SEQ ID NO: 48606 - DNA, 1325 bp, Arabidopsis thaliana
tatactcaggccaatttgacacaacatgacagaacacatacaaaactaaaaaaagtttagtagctttaagaactatacctgatgatcttccttatatgctgcaagatgcaaaggcgtgttgtgtgctaaatcttttctattcaagaaatcagattcggtggaagcagaatctttttggctcattctttggagccaaccggtgaggacttgaagaatttcaaatctatcattcatcacagcaaggtgaagagcgttatggccattcacactcacatcttgaatacatacagggcaatacttgagacactctgctacaagatttacgtctcctctaatcgctaagagatggaaaggtgtgattccttctctccctttaacgcgaacaagtccgggatcacgccaaagcagccatgttataaactctctatgatctttttccacagcaagatgcaatggactgtagccacttgtgttcagctttctggcaaacgatggcttaagattcagcatctccatggcaaatggaatgttgtcagaagctgcagctacatggagcggagtgttaacaaatggcacggcattgatgttatcaagaatgtaaggattctcctcaatcagagcataaaagtcattgatgcttccggtttcagcagcatgttgtagtctcggatccatggtgagagagagagggagcttttgatcagaaaaactctgaattcaagaaaaatgtttgtgatctaaattcagcaagaggacaacaaagaaattgtctttacctagaaccatcaaacaaatgtaagaaagaataaagaaacagagttcaaagaccgaagaacccacatgtacatgtgaagaagagacaatttaaaaacaagtgggactcttttatatggcagctggatatttcttcatggtatcacactcatttgatttgacattcacaacacaaatttcaaaggctcacgcttgatgaagcatattgaacgtactaacatgtatatagaaacaaactacctataattacaacattattatgatacaagaagaagaagtcagaagggacataacatatttttaatgtttgcacctctgcattctcaaagtcctctgagttgttgtatcaaactgtcaccactgcttacgaaagcttccatcaagatatggagaggaaaaagcaggtacaagggaaagcaaacagagagaaccagtaaggcatgcatactcggtagagagagcctctctttgcctcatttaccggattcatccggtaaggacttggacaagttcaaatctatttttcatatcacagagcattctgaccatta

SEQ ID NO: 48607 - DNA, 466 bp, Arabidopsis thaliana columbia
atcttcaaattccttaaaaagctcataagctgcttcagcctcaatttcacctctttcacacatatctccaagctcattaaactttgcttcaacctttttcttcaagtcatctgaatgaacatacacagttagagaaatgttcatatgtacgcatcacaggaacaaaccaatatattctctaaacggccctactgatccgagaagtaacatatctggcatagtacattaccttctacgagttaaaaaaacgaatggttctcaacttctcataccatgattcagaaaaatccaaatagaaaggttaactacaaaagctaagttccacgaagagattgtgtttagctataacgacgcacattagtctattaatcaacctaatctatgtctaaggatgtgagtcgatgaacgggaagattgaaaataaacgagccattaccaggaagaagctggtcccatttgagcatat

SEQ ID NO: 48608 - DNA, 575 bp, Arabidopsis thaliana columbia
gactcgggggccgctgtttgatcttttgtcatttttctgtgggtctgcatacaagtattcaaaaaatcaagaggagaaataaaagtgaggagagaaaatccatagattcatgctcaaacgcaaaactaaaactaccacggaccaaagaaaatgtaattgaaattgactggacagcgtaagaagcactttacggtactagtgtatatgaagccatttatacctgcatacgcgtaacaatcacccaaatcggattcgtcataagaacattaaccgatctgcacagtgagagtgttatcaaaattcacatgagccaacggaaacaatggaaaaaaaacaaattacaataatgaactatacatgcgaccaaagtttacaatcaaagaagaaaacagctatgacagtaggacctgacaggaaaagttaagaccatccacctagaagctccactagacaagtaacagtataatagcatagatgatagcattagaaatgtgaccgtggcgagccttccccacagccaatgtgaagtttatgagaaaactgaagcacctaagagctattttgaaattctgtat

SEQ ID NO: 48609 - DNA, 1655 bp, Arabidopsis thaliana
  unsure (1)..(1655): unsure at all n locations
gaccagttctatagtatacccgaggaattgtacggatttaaataaaaaaaatcaattttcgttgtaatctaagtaccaatcaatatatttaagattgtatgatgaatagtcatgaacaaaaatagaagtgtgtataaatgtatatacatttggacctaacaacgtgggactgataagttgggctaccaaacctattttgtacatcatgaggacaacgcaatccttcacgatcgcttgctcctttgcagttacgtatcgatttttttgaattacacatgcatacattcattcgtttttcggttagacatcaaattttcttattcatgtgttccgtcaatcctttgatatttttataagaaatacattgatattttctccttccaaattagatataaacataaatcatgagatggtatataacaataattgcataaccaaacgttgttggtactttataatatatatttaaaaaanaaaccccactgttgtactttcattgttccacactaaacgttgtttcatgagattaacatcggctgaaaaaaaaaaaaagtttctctcccaggcacgagtttcgaggtaactaaatgaagcaaatgttttcaaaaaaacgggatcttacccactttttttagctattcttggaaactcccacttctccctcgccgacatccccctcatctcccgttattccggcgtctcatctccgtccttttgctcacctatctatgatgatgaaggcgtacttctcaaaactgtgtgacattgtctcctcatcaaaatcaccggagtatccatctccctgctccccctttgctgcagccggctctggtttcactgactcctgcacttggtaacctcttcccctcccgctttgaacctcttaaaccccttaaaccttgtaaacttttgaaaactgtttaaccttgcaactgaactcccaaacttgtaaggaactctcccttttgtcttgtctggtttgttaacccctccctttatggacaaaagaatacccagttacctgaaagggaaaggaattgcccgtgtttctctccccccccccccttgtagaagaatccgagccccagagttggatacctcagaccttattcaagaaaattccctgactctcatagggcgccttaccaaccctgcatctcaacgtctctgggctctgttccccttcctatccaatcgctggaacctaaaagggaaagctgctggatcagatctgggtaagggatgcttccagttcaagtttaactatgaagaggatctacaatcagtcctaaagaacagaccctaccattttgatcaatggatggttattatccaaaagtgggaacctataatatctgatacctttccctccatgatccctttctggattgaacttcaaggactcccgaaacactattggcaacctaagatgcttgaagctattggtgatgatctaggggaaataatggatatggagatcacctcttcttctgtaaagctcagaattctcctcaatggtcttaaccctctcttaaaggaaacggtggtagaattctcagatggccaagaggccctggttagccttgagtacaagaacttgaagaaccattgcttacactgccagagaatcactcatgaccaaaagacttgcccgg

SEQ ID NO: 48610 - DNA, 399 bp, Arabidopsis thaliana columbia
aagtcatcggagatatcccgggacggatggtatatcagtatcacgaattgcctcccagattcctagcagtaaattcaatggaatcctgtccaaaagaaaccaacttacattcaaaactgtacactttcagggatatggatgctgtataatcaaacatagtttggtttgttgaaggaaaaagatcaaagagattggtcacaactcactcgaataagcgtagaaggaacttcaatctggtgatcttctttaaagtcgatgacataagaattacagatatcagggctcctccagcaagtaaaggatctacagagctctgtaaacaacaaattcttgttaaaaggatcaagtggttaacaggataagtatagattgagggacactgaaagaaacctgaaggat

SEQ ID NO: 48611 - DNA, 483 bp, Arabidopsis thaliana columbia
aattgaaataccttagctctatcagactcagacgttacgcatttcttgtcatctcgtctagcattagatttctttgtcaaggtgccctctcacctttctcttttggccaatgctaatttccaaatgtaatttgccagacaatcaagagtacaacaactttcgtatctgcctatctgcttgaataccaaagtctgtgcacaaagaagattacattgagagcaaagtggccgagtgttaccatcatttcgagcaatttcaacttcatatctaccagaaaccaatttgaagatgtagtggggcttcatgtacatatctttcccttgtaaacagttgacatggagagtgatgctgcaaaattcacatgtataaaaccatttgcttgcatctaattttgattcacatatctcacaccaatattggccacttgttgtatcttcatcaccgtagcatagggtgagtggatgcctacgtatttgtagtgtg

SEQ ID NO: 48612 - DNA, 636 bp, Arabidopsis thaliana columbia
  unsure (1)..(636): unsure at all n locations
nnnnnnnnnnnnnnnnnnnnnnctaaagaggcctttcgtcccataacgaccggacggatagcacgctcgcagatattgttgtgtgtgccttgaaatgcacgatctttccgtcggtgaaagtccgccccggctaactctcgctccgactggaaggacaagaagcggtccaggaggtaacaaaagggctgaatctctccctgaaacgacttcttcaggaagtcaacgggttatgcgggccgtaacgtgagtgaacactgagcagccatcgaaatgccgtcgagggtgctgacacgccacaataacggggaaggccgacgatgaccgggaagagagtgagaaaggcatcggtcatacccaccggggttagtggtgtcagcatgcataacaattgatcgatcgtgcaacaagagaagtccataacggtgtctgtccgggtgacgggcaacaacgcctcgcgcagggggtgaatcggttgttatggatggcagatggggtgtagtagtgaaaatactgagtaatgtcagaggagcgaaggcccctcttgcagtccagtgtacatgcaggaagacccggcgattgcatcacctcacaacccgctagaacggttcagaactacagaaacactacaggagaaag

SEQ ID NO: 48613 - DNA, 496 bp, Arabidopsis thaliana columbia
acttaaatagtgtattcctcgatgaacgttggaattatagaactcatagtaattctgcaaagcgtccaatacagctgctggcttctgagaagttgcagcactgtctaagtacacaagctttgacccattcacttcctgaaataaaaactcaatcaatggtaaaattgcttaattttcaaatccatacaattcaaagttaatcaggtttatggaaagtggacaaacctggtggagaattcggaaatcttttcgaacgcgatggccgagagagacggattcggaatcagtggagatggtggcggaggaagcggcggctgcggaacaaacggatagcgaagaggagcaacgaacgcgggagaagctccggtggccgatggagatcgcgttagggaacgacgggagtttcatagccacaccttccatggtggagaagacgaatgaacaagagtgagtcttcaaagtcacgagttcgaccacaggcggcggtcaaaagatt

SEQ ID NO: 48614 - DNA, 599 bp, Arabidopsis thaliana columbia
gatagaattaagtctggagctagacaggaagagaacaaaatggttagtagtgggtttcggttatcgaagagcaatccaggtagtagagaagtatttatcgatcttggtcctaaaagatgcgggttttcagctaggtctgtggacagggaaccaggcgagctctctagtgagagtgggtcggatgatttgattgagtcggaatcactggcgaaagttaatggagttgtgaaggaggtagagaatagagctcaaagtcctgtggaaaagaagagaaagttttcaccaatagtatgggatagggatgaccatgagagaagtaatttgagcagaaatgaaaaacctgtggaggtcactcctcttcctcccccaccaccactagttaagaggtcaagccagtcacctagtgtcagttgtggtggtaattctcattattcacctgcaaagagtgacatgcatcaagatcctgtggaagttggtgtttctgcggtttctatgcctgctttgtcaccttcggtagagatgtccctttgtgtgtggtagacagtcacaaatgctgagcaggatgcaaacaagagcatgcacacacctggaagaggatg

SEQ ID NO: 48615 - DNA, 582 bp, Arabidopsis thaliana columbia
ctaacataataatactccctcgccaaatggatattgtgtattcaagaagaagtatcgagagcaaagaaagagaagacagaaggagagagaccttgacaaggttatggtgttgaacgcgggacatcatattgacctcacggacgaaacggctctcgagagaagattgctggtcaggtttggagccccggttgacaactttgattgcaacaatctgacgaccataccttccttggtagactttgccgtgagcgccttcaccaatcttggagccgatgaacaacaatttgggatccacaagcaaactctcctcaatcgtatcatcgctactcattattattgttattattactccgttgatgagaaaaacactacatccaaaattcactactctatcattgagttcttttggttccaattcaatatctctatcaacaacaactataaaccctgattcgaggagagactagtcgtcgtcgtcgcaatctcccattcaaaattgctagcacaagacactaactgaccatatttttgcctaaatccttgttctaaacggctcagaagattcccagacaactatataat

SEQ ID NO: 48616 - DNA, 614 bp, Arabidopsis thaliana columbia
acagaagattccaacatgaaataaaagaacataccttttgaaactgtaatatcagagattctgtccagagaaacctgtggtgttttgaggcaacaaaaacaggttcattaaccaaaaagaagattcattaaactcacaaaagctcaagcgccgtcgtattcttcttctctgtcaagtgatttgctcttctttaagccttaaacgtgcaacaggctgttgatgattgaagttaaccgttgaggtgttgtgttgattgtttggtcttaactgatggctgctggttctagcagctggaacatcatggttatgtttaccttcatatgttgttacaacagcttttgggtcagttgctgctctctctacatgtttccttactccgcaatctggtgttgtacacttatagtagctcctgtggattagatcaaagagcattaaggaaacaagaaagaccaatgactatcttgaactagatgaccaggttttagtcttacctcggataaggattcctttgactactttctgaccatacttgcgccacctatatccatcatctaagaggcaacttcactcgtcgtttggacaataacctaggctctgcacagtctatgcgatga

SEQ ID NO: 48617 - DNA, 1004 bp, Arabidopsis thaliana columbia
ataaaacttatattgcagtaaagccaggcaagagaaaatagaaaaattgctctgctgctaacagcaagaggcagagagcatgtgtggtatgctaattctgcatcagtctctgtcaaatctcattctttttgcattctgcatatcagaagtgttgatattaccattgtttagattcctcggctggtagggtgtagcatcgtgctggtacatacaattagctccatggcgacaaccccttgcgctgttgaagtacatgcaagccttcattatcttgggttttgaatcccttggcctctggttattattactgctatttaccatctccgggttaggtcctcctccaggttggaggttgtatcgataaccgagatgttgaactggcggcgtctcttgtctatccccgccatgttgctgaatcaggttcttgtaataactagcatctcttgctggcggtgctcatagttcggttggtcttgaggagcgtgaggagtatacgccatgggaggaatatgagttatgggtggctgagcgtaaaattgtccatttgaggaaataggtgccgtggttactactccgttggcttcatgtgttgaagatgagtagaggctacttgtgttggaggagactgaacctgcactgccacgatttgcaacaagattctcgaccaacttagggttgcttaggattttaataagcagatcttggtcgatcatactgccttgttctttgctgtttgagattgcagataacgcagccattatatctggccctgcagggagggttgaagaagttgatgtgttctcatcggttattgatggctctgttcccacatccacgccagattgggttgggacaatcagatgctgaatccatcgctatgtcatcatcttctacaggtaggatgggtatgacaatggtttgctgatcatcatgatgtgagtcctcaacatcagctggaaccgaagggctgcagattggagtttaagaaaaggcccaagtcaaaa

SEQ ID NO: 48618 - DNA, 564 bp, Arabidopsis thaliana columbia
gtgaaggtaattccaatttttgaactttctgctgtatattccttctcctccttttgtttcatcaccaatgtcaatgacacattactcatggcattgttgcagcctgtttctatggaacttggtgggaagagccctctcattgtgtttgatgacgttgatcttgataaaggtgaatgtcacaaaaagtagtttagtggatttggagtttttttataataacttcttcttgtgctatattcaagatagtactaatgcttttgttgctttgagacgagtagacatgacttaaatttgcttaatcttaaaattaaactctttgtatgtcttgacgccggcaaatgatagctgctgaatgggctcttttgggttgcttctggacaaatggtcaaatctgcagtgcaactgtccggcttctggttcacgtaagtcccaatcttctacttgctttaaggttttacctgatcttcccaatatgacatgcgaatatttattactggagaagtgaatgtccaagtcatacgggaagatgtctcatgaaggtcaatgacaatgacatttattcag

SEQ ID NO: 48619 - DNA, 782 bp, Arabidopsis thaliana
cttcctttgcttcggaacacctcctgtggcctctacccgctttcttctgcaggatgaattcaacatccagacaacacaatgcgacaattgcataattgtactctcatactctctttttcttctacttttattggttttacacatgtgtgacactaacaaatctcatcttgtgtgtttgaagggatttatgttctgcctcagccaagttgcttgcatattctctatagttgcttgcattgttggtagtgatgaactttccgaggcttctcagatactctcttgctgtgctgatatggtctactgcacgtctgtatttacttcttgtgatttttagattctccctctaatctattcatgttcacgaattgctaatattttgcggtcttgattttcttgcagggtctgcgcatgtatgcaggtactagaaagcgagaattagaaacttatctgagcttctgaaactatcttctcttatggtatatatatataacccaaaatccaattttctgcttgcagacacaacacaaacttgagatggacaaaagagatggagtgtttggatcgcagccaatgggtgtgccaccagctcagcagatgtctcgttttgatcaacctgtccctcctccagtcggatacctcagtcctatccaccgcctgctcaaggctaccctcctgcatcttaccgcctcccggttacctcagcattaagaaatttaacagtatcttcattttatgtgcaaagtgttgttgtacttggtttaggtgtgcagactattatattg

SEQ ID NO: 48620 - DNA, 557 bp, Arabidopsis thaliana columbia
aggtcgactctgtcgactctactatgaaatatcaagtttataatcatgactctcctcaaacaaaaagttctcacaagtagaagccaagagatcaaggatgtgttgatctatttcactaatacctagcctgcccgctgtcagcaacgtttctgaaaaaacctcaacattctgcactagatgtgatgtgaatgtgatatttttgcaatccatattatatattcgagagattttactaatgatagtacttgattaatcattagagaaaactaaatcttacaaatataggtagacatgatgaataatatgcatgatttgcgtttcgtaaattgatagtaccacctcacctaaagggggtccaaacgagttgcttcatatcacaatatccaattttaccaacatacattaatatatgtgtattcacatatatacctcgtgattaatattttttttaaaatcatttttcgtttgttcctatacgtctaatcaacacacacgttacaactaaaattatattgacaatatagctcggttggtaaaagcaacgactactgcagttt

SEQ ID NO: 48621 - DNA, 853 bp, Arabidopsis thaliana
actctaggtctcctctcttcaaagggtctttagaggcattccctcattcggatcacaatctcctgaccctgttttacgatatccagcaccgggatagttagctcctcccgtctagagtcgttacgctaatggtgagaccggttaaagcatctataagagagactttcttctcgagaatcagatcgttaccgtctctcttgaataccgaatgcggtttctcgtcaaccacgaatataagatccgcaggagtgacaccaggttcttggttgcctttctctggaaaagtgatctttgtgcctttcttccaacctggttttatgtctatcttcaatatctcttggactgtctttggctttctgtaacacagattttatcagaaggtcataatcaaagctcattttgtttcaccagaagctcaatcacagagaaaacaacagttctagagaacctaatagctacaaaatcttattgtgaagatcatatgggcaaatggcataacctaatcattcactataatcaaaggaataaattgaccaatggcattcacgagatcaggatcatgagaaactaacccaaaatcatcaggaacaacgcgagaaattcgcatcttcttctttgcacctttgtagagctcctccaatgtgcaagccaatttactctcaatagccggagccttcctattcgccggcgcgtccgtttttttgttcgtcggcggcgtctttctattagcctggctccctgcttctgcacttttaaatctccgaccgccaccatcaccgccatctccacgtgtccttccgctactccctccgccaaaagcatcaccggattcgccgaaaaactcagcaaagat

SEQ ID NO: 48622 - DNA, 1040 bp, Arabidopsis thaliana
gagttaaagttgctgactttgggacatcttgtcttgagacgcaatgcagagaggccaagggtaacatgggaacttatagatggatggctccagagatgatcaaggagaagccttataccagaaaagtcgatgtttatagctttggcatcgttctatgggaactcaccaccgcgttgcttccgttccaaggcatgactcctgtgcaagccgcattcgcagtcgctgaaaaggtcagtctccattcatcttatttaccagattgttgtttttcttgggatacaagttattgatttttttggtttctttgatgagcagaacgaaagaccaccattgccggcgagctgtcaaccagcgctacgtcatctaatcaagaggtgttggtcagagaatccgtcgaagcggccagacttctcaaacatagtggcggtgctagagaagtacgacgagtgtgtcaaagaaggactgcctttgacgtcacacgcaagcctaacgaagacaaagaaagctattcttgatcaccttaaaggctgtgtcacatccattagctcaccattttcttcctcctctgttcctgtaaatgcctagtagtagataaaagttatttgaagtacctgtaacctggtctcattccaaagtttacaattcttctttttctttcactagttatttgattgtatatttgcatctacgtgatgttatgatttgatatacacgaacttaggctaactaatttgtatgatatataatgatacttattgatcactggtctctcgtttaaaagggaatgagctcaaaaagaatacgtaagtgtctaattatctaaatgtgtcgaaagtggataacttgaactcacaagaagtgacttcttagttatattgactcattgtttttaactttttttttctcaaggaattaaaatcataggctattacaatgtaaaggcagactttttcagtttataatgatattaacattcataactagaaaaaaaaatgatttacattggaaaacggagaccatctacatttataataatatca

SEQ ID NO: 48623 - DNA, 1263 bp, Arabidopsis thaliana
catatagagtgccatgccaaaggagtggaggtatgaggtttcaattccaaggtaattcttattggcttcttatcttcgtcatgaacgttggtggcgccggagacatcaagagcatggccgttaaaggtagccggacgaattggataagcatgagccacaattggggagcctcttaccaagctttttcctctctctatggtcaatctctctctttccgggtcacttcttacaccaccggtgaaaccatctatgcttggaacgttgctccggctaactggagcggcggtaagacttacaagagcaccgctaatttccgttaaaactaggcttttgcctaccaaacgaaaacggagttttctcttctccttctttttttgttaagagtttcggtggccttttgttgtggtggcccggctttatgttatacatctacatgtatgtataatgtatgtatgtatctaattgtgatataactcttcttataaatatcatgaagtcaacacttcttgatcaagagaattcgttttgtttctgaaaattttgttatttgtaaattttctaccaataaatcgcttgcttttgtttagaagacaaattaaaggtcttgaaccagaatttggaacagagttttgaaaattgggaatgagtctatacatatatttccgtatacatctcagtttggtctaataataagtaccaaacagaaattaccaagaacaatacatattcagctattaataacatcgattagtaatatcttgattcatttcatttttaatataacgttttcccaaaacccctgatccgattcaaaaccctacttcttggtgagtctctctctcaagatcttcacacccatatacctgccaaaatcattagcctttagtaaaaaaaaacaaaaaacatcaacataattaatatatatgattgattttacctgccaagcatcataaccgtggcttgaggatttgtcccgggacaataaccaacggtcgacatatcaatgactctaagccggtcgataccaataactttataatccccatcgaccactctgcccacaacgcatcctccatggtaatgccaaatggttgtaactgtatgttggcaaaattcctctgcggatggaggcaacgaggctccaggaccactgcgaggcggccttagattgacaggagtactcgccgtgaggttaagtaaatactcaaatgacacatctgcgtacttatacctcgaaaaagctttagattgcacgactctctc

SEQ ID NO: 48624 - DNA, 845 bp, Arabidopsis thaliana columbia
catagaacgtttcacagcctaaaagtggtagtattgactccaatattcaattaatactgttctggctctttcaaatacgatcatcttacaaggttcaaccagctccagtacttcatcaactctctgagatctgcttacgtctcatgaagaacttgttctctcaaatatcagaaccggagcttgtttctggaccctcttcaaataagttgcctgcttcttttgcaaagtggaagcatcaagtggccgagacagttctttgccacccagttgtgatggcactgttagagagtcccttggattgtggcacattacctccagtgcagaatgttgagattttttcagaaacatcgctgacaatgggcaggctagtatttagtgaaatagatcaacacatccttaatctattggtttctacttgtgaacactttttgtttgatgagaaaccccccaatctgtggaaagaggacctcaggaaaaataagtcaattatagcgtttaaggacttggttgaaaggcttctcttggaatttagggtcaagtttgagctttgtgttggttctcaaagttacgtttctcttctccaaccagcacaattgattcatgctttgttgagatttatatcaccttttaaactttttaatattgctcattccatgttgagtaaaattgatgaggaaggattaacaagcccaaattcaagtattattctcagtttgggattgggtattgcaggtggagcttttgaaatgcttgtattatatcacaccagccgactgctaagagaggggtatatgatttgctgtgggaatagaagacagaattatgccagtcacacattgagaagt

SEQ ID NO: 48625 - DNA, 650 bp, Arabidopsis thaliana
attatagaagaagtagcaaacttattaggcgtcttcaatcatacatatgttacaaatcgatcagaaatatacaacagtatttaattatacatacgttacaaatcgatcataaaggtcacaacagtactcattcatacatatgctacaaatcgatcagaaaggccacaacagtatttaatcacaatatataggagctttgatacttcctctcgtattctacattgttttgtctggactgggctgattttaactggactgggctgattttaactccattcatccgagaagtttcttcaatcctgtcttctgctctgaggttaacgttgtagggaacttgatgttaaatttgatcctcaagttgcctttcttagcctggtctttctgcaacggcattccttcatttggaaccacttccacatactcgggatggatcacagtgttgactgggatggtcagtctccgaccatcaagtgtagtcaggttgacggtgtagccggtaaaggccctcgagaactgagatcttctgtgtgacatacgaggtcattacctctcgagtgaaaacggatgaggctttcatctatgatgaagactaaatccgctggtatcacaccgggttgctcatttcctttctccgagaatgtgatctttgt

SEQ ID NO: 48626 - DNA, 531 bp, Arabidopsis thaliana columbia
tccttttccagtattacttaatgaaattatgagcatggatatatcttgcttaccagagtttccaagattaacagagctactactgcttaaagtttcgcaacctaaaagtgatagtattgaatcagatatccgattaatactattctggctcttccaaatacgatcattgtacaaggttcaaccacacccggtactctgtcaacaatctgagatctgcttacgtctaatgaggcacttgttctctcaaatatcaaagcttgaccttgtttctggaccttctgcagataagttgaagcatcaagtgccccagacagttctttcccacccagttgtgatggcactgttggagagtcccgctgattgtgacacattacctcgagtgcagaatgttgaggttttttcagaaacgttgctgacagcgggcaggctaggtattagtgaaatagatcaacacatccttgatctcttggcttctacttgtgagaactttttgtttgaggagagtcatattgagcggaaaggggggatcct

SEQ ID NO: 48627 - DNA, 1552 bp, Arabidopsis thaliana
atccgagaagtttcttcactcctgtcttctgctctgaggttaaccttgtagggaacttgatgttaaatttgatcctcaagttacctctcttagtctggtctttttgcaatggcatcccttccttcggtaccacttcctcgtactcgggatggaccacgttggtgactggaattgtcagtctccgaccatcaagagtagtcaggttcactgtgtaaccagtcaaggcctcaacaagtgagatcttctgtgtgactatgaggtcgttaccctctcgagtgaaaaccgggtgaggcttctcgtcgattatgaagactaaatccgctggaatcacaccgggttgctcattgcctttctctgggaacgtgatctttgtgcctttcttccatcctggtttcacatcaatggtcaaaatctcttccacctgcatcgtcttgctgcaagaaaacacacataaaatggtcagcctccccactaaacaaggttacgaactaggatcaacattctgctttcactatgaattaccaaagaaacacccaaaccaacggtttcttaactgaatagccaagctaacgtatagggttccattaggtttgatgatcacttacccactgacatcagcaatctccctagaaatcctcatctttttggtggttcctttgtaaagatcttcaaggctacaaggcaacttgttttcgataggagcagccttcctagctccaccgtgatgcatcgagccaccaccaccgcctcctccttcgccgaaagaagcaaacatattatcaccaaacatgctgctagagaatcttgtaccacctcttccgccgccaaatgggctagagaagccaaagaactcagcaaatatatcatccgcatttctcgggttgaacctgaaggacgttggaccatccccggtagagaagtaagtagctccacctgcatccggaggtggcacgttccctttcaaaccttcctcaccatattgatcatacacagctttcttctgaggatcacttagtacctgtaagcatccagagaatcagtaaacaggaacaaagactcaaaatcacaaatacgtgtacccaatagagacaagtaatcctaacaatcaatccacaacttcgaagatattttatgaaaatacagaggacgcagctaccatatgcaacagcacgaaataactaaagactataacagaatctacttaagacaataagttgaatttctcaaaagccctctagcaacaagattcataaagatgaatcttttgttggaattcagacatatatctatatgtacctcgtaagcttcggatatttgtttgaacatagcttcggcatcctttttgttgttgggatttttgtcgggatgccatttcatggcaagtttacgattaggctttcttgagatcatcgcccgttgcgctgcgatcgacttggaggactttgtagtaatccactcccatccgatcttcttctctctttcgcttcttcacttttcctgattctgattaatatgtatatacttgtattgatatttagtcattttgagggga

SEQ ID NO: 48628 - DNA, 549 bp, Arabidopsis thaliana columbia
tcattcaacatttggcactatataagggatacaaaggttagaatctgttgctcaaggtcatgcgcaccttgttatacatgtctcagtatctcaagtcacaaattaacctatacaaagtaccttgatgatccttcgcaataaaaagttatagctgaatattatgtttctgtagaatgaataagaaggccatgtcagtgtacaaaagtcagaactttcttctattttttctgatcatgttcatatgttgctgcttctactgcatgcagggtatttatttagatcttgctccatggtttttcttttcctatgttgacctattttctgaaccaatgtttttctagatgcctttgctgctcttaaggtcgcagaggaaaagttcttaaccgtatcgaaatcaaaagtattgttgctcaagttgcaactactacatgagcgtgccttgcattggtaaggtccctacctcctatgttgaacatgcactcaagttgcaaccaacaaagttgatccattatctgctctctgtgatcacttactatattgtttaagggt

SEQ ID NO: 48629 - DNA, 1014 bp, Arabidopsis thaliana columbia
tgacaataattaattcgaccgaatagaacagactgtgttgatctatctagatctaagttagagtacaatgttatgttcgagaaaaacaaaatcatgtaaccctatatgtattgtatcttttaactattgcctcacaccaatctagaaatctagaacaagaaatggaattagctaatggtctagacttcaactaaaactcgtatgtttcctataagtaaattaatcctctatttcttatcatttattggtcattttttcttttttcttttgtctcatattttgagactgagaatgttttataagaagcttttgaatagattatgtgaaatcgtgattttaagtataaaaaaatgacatggtgtactcacatgcatgcatgatcatatcaaacacatattctgtaattcggctttgaaaggtgaatttcatcagactattggactatgtagaagttttgcattcccttctttttatcaaacaaccctctctgaacttttattaccaaacaaaaaaaaattctcacaacctgagagtgtttcaggaaaatcccacgtgcggtcctcacgcgcgttgcgcgttgcgtcataaacgccagctatagtccacggatttaggccacttttaagcaaaatccacaactgagcccaatagacgcgcgtgggtcgagttttttcttttttcttttgtctcatattttgagactgagaatgtttaaaagaagtttttgaatagattatgtcaaattgtgattttaagtattaaaaaatgacatggtgtagtcacattcatgcatgatcatatcaaacacatactctgttattcggctttgaaaggtgaatttcatcactcttacaataacgatgcaaagtgtgttgcaaaatccaaagaaaagtagtatttcaaggagattccactagatcaattgatcttaataatggaatgatcgtcaattttggtgtttcaactggatccgggacaatggaactgaagttgaggaagtagagtgcatcactg

SEQ ID NO: 48630 - DNA, 566 bp, Arabidopsis thaliana columbia
aggtcgactctgtcgccatctgttgctgttgcaattgctgaaggtaatgttgatcccataaccatgaaagcttttaaccacttctcggtttctaggaaaccgttgaagacgcctgttcgatcattcaaggaacaggaaaagggaagctcctttttggtatgttctttgtctaaaagtgaaggaaataatagagctcaaaaggactgcagatgaagctatgattgatccagaagctattgtgaagaagaagatgtactctaaacaagattcagatctatacaaactgcttgcgcacgctaacagggatcaagtggttacccgacccagcaatccctcacttattccggacaacaacccgttcaagattagaaaaaccgatgaaatcaatctggaaatcgcagaatacggtgtgcaagacctcgctgattcgtttgtgaccaaaagcaaagcagtggacgtggcttcttcttcaccaaactctcacgaacacgaggatcaaaaagagtgtgttcaatcgatctgtcaaacttgatgcgctggaatatacaggacagtgagaagacaga

SEQ ID NO: 48631 - DNA, 578 bp, Arabidopsis thaliana columbia
accattgggtagattccatgcttgttttcgggacagttcttgcttatgtgcccttgtcccttgcatatgaaacaacttgcaaatttggtccctcctacaaaagaatcaatacagcaaccaaatctaatcttagtgactactcttaacaaacaaacaaacaagtgacagtatagcctcaaatacgttttcagagaatataatgttaaactctctaaataacatgaactacacttcagatcataagtcaaatatctgtgtacagaggtaaaaaaaaatacaaatttcgatgctaggtttcctgaaatcttgtaatatgagaaaagataaatattccggatccagagaagagaaaaattaccatcttccatagggtaaggacaatgggaaagtgaatgaccagtatctccacaattgtaacagagcttcttctcggagctctcattgttcttttcagggcagtttttaagactatggcctctcctcctacattgcaagcatatctacaaacaacaaaaccaaaaacattcattttctagtaacaacaagtctagtgatcatcaagtacaacaattcatgaa

SEQ ID NO: 48632 - DNA, 458 bp, Arabidopsis thaliana columbia
tgaactttttttacagtgtttttttcttaactgcagtaaactgtccatggaatatattccctacacaaactaaaatacaagttgatgccaaaattcaggactgtctatttcgggtaagaagtgatacatattggaccagtaatttgagtatctaaaattatcatcgaactatacccttcaagaatggttcgtataattctgagtactggatagggttcatacaaatagtttgggtacgtagttccttctaatcactatccaactcttattaattggaataatcgttggagtcgtgttttgatattttcagatatttcaagcaacccttacataattattagagattgtggacagtctaggcttaaagtccatgcatttatccgaggaaaccggtcatactaatcctaacgagtaatttcaacaatctaattaactcaaaagttggtgtcattcaggat

SEQ ID NO: 48633 - DNA, 423 bp, Arabidopsis thaliana columbia
tctcgccaggttttttttttttcgttttttgttttcaatcattttcaggtttcagcaaaaccactctagtttttctttgtcttttacgtcacagtatttgaaaccctctttgtgaaacagaggttcctacgctgtacactgtctatgaacggatgtgaggctgaccacaaagcaccacttggcacggtagaaacaaggactctatcaacggtgccatctccggcagccgcgacggagaggctgataaccgccgtctctgacctcaaatctcaaccgcctcaattcacctccggcaatgtgcgaatacaggtacgtaaattcggaataatttcggcaatagtttgtggctttgtgccatgcccaaaattcggtaggcacaccatgctttgaaaaccaatgagcttaagccacgcggagctctta

SEQ ID NO: 48634 - DNA, 901 bp, Arabidopsis thaliana columbia
aaaaatacatttcaaatctctttaacagaaacttttgcagtcacggttggagaaaagtaacgtggctatcgcccccgaaaaaaaaaacttttcagtaacatcattacgatggcacaatccgtaaatcagaatttgtttcgcaacctgacaaacatccctgtccatgggatcagtatcatctgatcgtaaacataatccaacgttccatattcaatcagtacaataccccgaaacaatccaacggcccagattccataagtacaataccctgaaaccgcctgacgagggtcgcgcgacaaacagtcgacaaaaaacatataacggaatcgtcttcgttcctcgtgtcgccgcctcctcttcaacacccaatcaccacaatccacgtgtatatctctcttttcttaattatttctttcttctatctccacccaataatcacaagccacgtggatatctctctgttttattctcttcttcacacagtcacgcatcattctcattttctcctctctctgttttttccctttcgccggagaaaatggagacaccagcttacgatttcgactcactcactgacttaccaccgcttcctccttccgatttcactccttccaacgccttcaccttccccgaccacaacctcgacttttccttcctcgactccactctgtctctcctcaatcggcaccatctctctgagtccactcgcttggaacagatttttttacgactccactcacactcagctctttcacaacgacgacaccaccaccaccaccacaccgtttctccaccttcctgatctcaaatccatcgacgccgttgaagaaccgacgacgatgaagctgtttccatctctctctcctcctcttcccgccgccaaacgtcagaagcttaactc

SEQ ID NO: 48635 - DNA, 506 bp, Arabidopsis thaliana columbia
tattataaaagtagaatcaaattataaacaaaattttgactacaaagaataaaaataaaataaagaactatattttacataaaattttcaaaaaattattattttacaatttactcgatttgtattattttttacattggttccaactcggaacctaggtgaattaccctccgatttaaccaaaatgcaatggttgtctctcttcatttaattggtctagatgagtcagagagactaccaaccttgcagttgaaaatctggaaaatgaaacatggatacgattgaacataaagttaaactggacttgtagaatgatcaagattagtttacaagtataaacaagggatgatgatggtaaattacatgtttattgtggtgtgattgtaattgcttggatgttgcgtttaattagtatattacagctactagttgctcctacagaaagagagctcaggccatgtaactgcaaaatccttaaacccatcaaagagacgggattcactgcg

SEQ ID NO: 48636 - DNA, 537 bp, Arabidopsis thaliana columbia
catcttcaatctaagtctctctgcctcttcttgtcttccaacactcatatatatcttccccaacaacacataattcgcgggattctctggctctaccatcaacaattctcttgcagcaatctctgctagctcaatctcaccgtagttcctacaagctccaagcaaagccccccatgtcttagccgttggcttctcaggcatagcttgaatcactttataagcttcttcaaatctccctactctgcttaagacatccaccaaacacgagtaatgatccttgcttgcacgcaaaccgtaatctccctgcattctcttaaagtatacaagagcctcatcagctaaaccagcgtgactacaagcctttagcacgttcagaaacgctatgtcatccggtgttactttcgccaattccatttcttgaaatgtttttagagcagattccgcgtcaccgtgaagtgcataagcggatatcaagctactccaagcaaccacatccctatcttccatgctatcaaacaccaattgcacatagacaat

SEQ ID NO: 48637 - DNA, 556 bp, Arabidopsis thaliana columbia
  unsure (1)..(556): unsure at all n locations
taagatattattaatgttcagtatacaattaattagttaccaaacagttgttatttatatccagccgacatagaaactcttgatttcattactcaaatagcttattcaagaatttattaaaaatcctgtatagataaagttccttaattgtcaaccagattaagttgttattaaagatggaggtagaacgaatttattagatctagatatttaaaggactaagataaatttatgtaatctactaatacattcatgttaatttatcaaattaatcattatcagaacaaaacctaccacaattattatagtttcttccttcataaatctttatattggtcaacaatcttcatatataagtttatctatattacagacgcatattacaaaaaaatagaatagaaatgaaatatgtttgaacttgttatttcgtagacgatattataataaagtctttccttattntccctccagttccacatcgagagccctttttgaaaaatattactttttcagaaaagccctcttattttatagagttacagaaacacccaaacat

SEQ ID NO: 48638 - DNA, 515 bp, Arabidopsis thaliana columbia
agagaagaggagataacctatctttctatggcaagaacaaaccgtaggtctcacataatctagagattttacaaaacattctctttacttcgtatcttatctccattaatcatctaataatatctaattaaacccacaatgattcgttggcatagttgcataaccgatatttagtctagatttacctctaaaccaaacctaaaccggaaactagaaatttcggggttctttttataaaagagaataaaagaagaaagaacatgcctggagaggagtgatcttagaggaggagaagaactgatcggcggtgatgaattcttggttgagtttaggacaaacattagtatcagccaaacaagcccttagccttccccagttcttggaatccacaacgttctccttaagccaattcgagaacccttcaagcctatactctttataacctctacccggaacccgatacgatccatcgggccgggtcacgacgaatgcaaatataagaaccaccagcaaaa

SEQ ID NO: 48639 - DNA, 534 bp, Arabidopsis thaliana
atgcaaaataaaaaaatcctctctaaaatggttagagcagatagcaacccttgtagaatttgatcgtccatctgtttagataatttctatctttcatttttccatttctcgtattgagtgtagaagtaacatagcttagattcgtcagtctcgtgcgaaacctgaataaaataagttccatggcagtgattaacattcttttatctacgatgcaaacactataaaatatttatgcgaagagaaagttaatctacttaccttcacatatggtgttaccaagacagttatgaacgacgatttcctcactaataaggtcggccaaaaagtgtggatgaagttgattataactttataagacccttaatgtgatatccatcgcaatcctcaacaaggtggaaagaatttcacggaattcaagaaggatttcacaaaattttggtcttgaatttctctatttttggattttaatttttcctttagatagattcaaaatgtgtttattagataagtttttgaaaattattgaaacaaact

SEQ ID NO: 48640 - DNA, 710 bp, Arabidopsis thaliana columbia
taacctcgaagttgcttggtttatatgagatcaagtttggctcttgtaagtgaagataataatttaaagagtattttaatcgtgataatctaaatgttagttgatagttaatacgtcacggaacatgtaccgaccgacggccgatttccatgatacaataaaaaaatgaaaattagcaatctcataacatgcgacgacgatacttatggtgttgccacgtagcaagcatcttcctcttaaccatgaggtgtcgcaacctcagaggacaacacggacaagaccgagaaaccgcatactaacgcttgcaacgtaaagcacaacacccctaaactcctatttttttaattttcttttaacctcaacacaccacgcagctatacacgtttcaatgtgctaatacgtgtcttcttctccgccgaccaagacacactacaaatgtcccgatggtttggggagacaaatcacagtttctactacaacaacaaatacttttacgaaaaaagcttttaaaacttatctagtttcgtttgatacacatttgaagaaagaaatggcatccaaccaacagagctacaaagctggtgagaccagaggcaaggcccaggtaataagaatatatgtttgtgtatgtgtatacgtaaaaccacattatataagctctaagatgatttgtctgtgtaataccaggagaagactggacaagctatggg

SEQ ID NO: 48641 - DNA, 453 bp, Arabidopsis thaliana columbia
atcttgtgactttctttgaggccttgatacaaggtctcggtggggaatcgaccgagtatgtaatgaggatcaacaattatcctcctgacccgaaacctgatttgactctaggagtgccggagcacactgacatcattggaatcacaatcattatcaccaatgaagttccagggcttcagattttcaaggacgatcattggttagatgtccactacattccctcctctataaccgtcaacattggcgatcagataatggtttgttagtcgaagttgtatgatttctttaattaatgaaaatgtctctatcatttggtttttgaagttttttgttttggaatttgtaaaggctgagcaatggaaagtacaagaatgtgttgcatagagcgatagtggataaggagaatcaaaggatgtcatggccggtttttgtggatgctaatcctgaatgtgg

SEQ ID NO: 48642 - DNA, 506 bp, Arabidopsis thaliana columbia
cataacctttcattattaattctatggacgaaacaaaaacatgtaactgatagaatgttttttttttttcagaccggccatgttttgcggtacctatgtcagttcatcgcgggatttgtcatcggttttttgtcagtatggcaactaacgttgcttacgttaggagtggttccactgatagcaattgcaggaggagggtatgctatagtcatgtctacaatatcagagaagagtgaggctgcttatgctgatgcaggaaaagttgcagaagaggtttgttttagacaccatggctgagattgtttcaaaaaaacaaatatatgcgtttacgtgtgaaaaaagttttcaaaaaaaaaaaaaaattaaagtacagtatgatcaaaaccattttaacattttaagtttatccaaaatatttttgcaatatatctctgaaaaacatatttctctatgaacttcaggtcatgtcacaggtgagaacagtgtatgcatttgtaggagaagag

SEQ ID NO: 48643 - DNA, 853 bp, Arabidopsis thaliana
tgatagatcagaagttaaatccttcattcttttcgtctaaatcatatatattaaacaattattctcttgctataaccaatcgttgaaatcccacgtagcaataattcttctcatgcatgtagaattgcacatgcaatatgtaatttttgttttaatttcttgtttcatgttcttcaagatcaaccaagaagaagacactatagaggcgtaaggcagagaccatggggtaaatgggcggcagaaatccgcgatccaaagaaagcagcccgtgtctggctcgggactttcgagacggcagaggaagctgctttagcctatgaccgagctgccctcaaattcaaaggcaccaaggctaaactgaacttccctgaacgggtccaaggccctactaccaccacaaccatttctcatgcaccaagaggagttagtgaatccatgaactcacctcctcctcgacctggtccaccttcaactactactacttcgtggccaatgacttataaccaggacatacttcaagacgctcagttgcttacgagtaacaatgaggttgatttatcatactacacgtcgactctcttcagtcaacctttttcaacgccttcttcatcttcttcttcctcccaacagacgcagcaacagcagctacaacaacaacaacagcagcgtgaagaagaagagaagaattatggttacaattattataactacccaagagaataatctaattattattgttggtcgaatcagttttataaatagctatcatagtttcatttttggtttccgtaacctttgttgcatggaaaatatgaatgaacgagggacatgtgtaacaatttgtttgtgtttc

SEQ ID NO: 48644 - DNA, 519 bp, Arabidopsis thaliana columbia
tgcatcgttttacctgaaacgacaatatatagtatactctttttgttttgcaaattttctctaaactatagaagcaatcatctcaaatgaatctccctttattaaaaatctcaatgactaacaaaaacaaacacacacacacaaaagtgagctctgattttactttaggtaaagtatagcttatatactaaaccaacctatatcacactcaatttttttagttaaaatatatattatatatgtagttcatgtatgtcttaattatgtacttaaaaccaaatgtgaaagctaaaaagaatataatcgagaagctgttccattgctttcacttgagaccatatataagtatatatcgtacaaatcaaacctttggtttgctctccgacatgattacactcacacttactcctgcatgaaaacatatatattgacatagtcaaacgagtcttcatatataatatgcacgtatatatatttgaaagggttttgagataatcaagaacgaacaatttgttatat

SEQ ID NO: 48645 - DNA, 521 bp, Arabidopsis thaliana columbia
cgccagtgtgctttaaagccatcatgtttatgttgctgttgtgcgtgttccgttttgaactccgccagcaaccttgcttgctcttcagtcagagccaggttttccagaagttcaggtcttctaagccaggtacggcccagcgactgtttcaaacgccagcgacgtatctcggcatggttgcccgacagtaacactggcggaacttccatcccttctaacacctcaggccgcgtatagtgcgggcaatccagcaatccttcagcaaaggaatcttccgttgccgaggcttcatgtcccagtactcccggaataaaccgggaaacggagtcaatcagcgtcattgctggtaactcaccaccactgagaacgtaatcgccgattgaccattcttcgtcaatttcggtttggatcacgcgctcatctataccttcgtagcgaccgcacaccagaatcaatttttgattcgttgccagttcgctgacgcccgcttgatcaagcttgcagtccctgtggtgacagat

SEQ ID NO: 48646 - DNA, 484 bp, Arabidopsis thaliana columbia
attatataatcaagaaacgtaattattattacttgatgtggtttgctttgcctgtagtggatttgggccataaattgtttacgagcccatttaaaaagctgacgtgttaaacgtatccgacgtgtcatcaaagctcgttttgggattggtcgttgtgacgatctttcatcgtttcctccgattttaataaagagagagcagtagaatagaaacagtgagattcaatttcaattttcagatcatttgaatcgaagctaaagaatcgccgccatggacgccattgattccgtcgttgatcctctcagagacgtcgctaaggatagtattcgtctcgtcaagcgttgccacaagccatatcgcaaaggttattttgagtatatatctccggtttcgtccttcgatttggatgatctgtggtttcgattattccgattgggcagatagatctgtggtattggggaatatggttttgatttttcatttg

SEQ ID NO: 48647 - DNA, 663 bp, Arabidopsis thaliana
ccctttagattgttttctcgccttagaattatttcgcaatcaatcaattcaattttgtctgtacagagattatgatggtaaggtaagcccagatgaagttgcattggctgcgatgtacctgaaggacacattgggcaaagagggtatccaagagcttatccaaaatctgtctaaagataaaggtcacactctccatttccaacttctctacttagattttccggttttctgatggaagtttttgtggtttttagatggcaaaatactggtggaagacttagtgaagttagcgagcgagattgaagatgctgaagctgaagaaacagacgagcctacaaccaagtcttgagattgtttgtttttgtgtcatatagacgaaaccttcttttttcatggttcatgtttttgtctactagtaaagaaaagagaagaacattcatattcagaggaaatatatcataataagtctcttgacacattttttgtttcaacattactggtgtcttcatgaagcttggtctcctttagaagggcttttggtatttttttgcatcatatgttgtattgggcttgcaattaccgaataacgtaaattccaagcccaatacaacttatgatgcagtattctgaataaatattttcttttattgatttattttttac

SEQ ID NO: 48648 - DNA, 526 bp, Arabidopsis thaliana columbia
tgctagtgagccaacagcagtgatggtgacaggaccattgtagcctaatttccttaaaatccgtttcatacacggaccaacccgacgagcatcatagtcatctggaccggacacctcttcatgtcccaatacacatatacaggggccaaagcaatctccttcgtaggcggaggctccatcatcattcacgaatcaaaaacttttaaccttaaaaaaaaattggttggatcgatctcgataattgactagggtttcgaaattcctgaatgaatgaagatataactctgaatgaagataatttagagttaacaatgggctttactttaatgggcttacagtttttatgaatcaacctttcccatgcacaaatctgacgcggtcgaaaaaccctaaaaaatgcaagcgccaaacctatatcggtttacaagtctacaagctatgaatttgaaaaataaaattctggaatccaccagaaactctataatccagtagaagagagaaaaactctatgcttcttaagaaaatt

SEQ ID NO: 48649 - DNA, 553 bp, Arabidopsis thaliana columbia
caaatattttttgcccaaaaaacaaaattcgtatattttgtgaaacaacttaatgtttagaacaacaaaaccctaacttacatgtttacttttcaagtgcaaaataaaaagaaaattttcctatatatagtatacataatccaactcaatcaaatcacaaagcaatggctcaagttcacttaaccatttttatattttcttccattttcgtaatctcatcatctagcttcatcccacctcctcaccccttcgatcccttgaccgagactgaactcaaacttgtccgtaacatcatcaacaagtcgtaccctattggtcataaccataagttcacgttccaatatgtgggtctcaacgagcctgaaaagtccctagtcttgtcgtggcactcatcaccagaccgcaacgtcaaaccaccaccacgtcaagcttttgtcatcgcccgagataagggcatgagcagagagatcgttattgactttccactcgagcaattgtctcgaacaagatccatgtaggcaatggtacccaatgctaactattgacgagcagc

SEQ ID NO: 48650 - DNA, 526 bp, Arabidopsis thaliana columbia
atcttcgaaacctgtctcaggaaacacagacacaaacctcacagctacacggagtctcaaagtatcaagcatggcttctgaaaaccatcctgatttatgctgcaaacaagaaacgaatcagatcataagcttgaagagtacttgccaaagtttatttattggcgtagatgcgacactttgtctgagcttaagctttaattcaacaggcaaaagaccatgattcatgggtattgatttcatgaaaaactaagctgagaactcacactacaagtagtttgcttgggaggctttcttatctctcgctggatgtactcgtcgtcaagttcaaacaactgcagaaacgtttggcatttaaaaggaaataacttaaaagcacaaatgtcgttccagcttggctttgagctgtagcaaagaaaagaaaaaacatataaatcggactttttcctgcataaatccaatggttcagctgcaaaacaaatcacgcttaatctattatacaatcctacaacaagtaccatagaatgct

SEQ ID NO: 48651 - DNA, 492 bp, Arabidopsis thaliana columbia
aatagatggggtttgtctaatctaactattggtgataaaacagagtgagggaggcgtcaataaccgatctcagcaaagttgaacacaatagagtagggtttgacaaaataagacatagaacagacctgggccacgttaatttaagggtccaaaacttacagcacttcatggaatgagggggaaacaataaagagccagcagataatgggcctagcacaaaggaatagcccaacttgaggattagggttttgtcagaagcttgttgccgccgcttcaacggaatgatcggtagctcactgacccgatttaacatcaccggaggcgaatgatcggagatggaggccatcaccggataagtggaaagagtgaatcttggctgagcagttgaagggacagatctataaaatccggttgcatgggagcaaaggctcaccatttttctctgatgaagcgctaacagaggacaagtggcttgcacccaaaagatagatc

SEQ ID NO: 48652 - DNA, 619 bp, Arabidopsis thaliana columbia
cttactatgtatgatcactttttaaaacactttcaatacttgcgaaactgtattttaaatattgggaaaacagagagaattagagaggaaacatgttctgaacattatatttattaccactcgtaagtcactttccatttgcaggatttacttatacctaatggtgtcagattgagtttgtgtctcttttacaacagtatcgcaccttctacatccaatagacaactaatgaaagctagaatcaatcaaaacagatttacactagaaagaaaaggatgataccacattgaaaaattgatgaatgtatgaacaggatggtaacaatttaacttagaatcgaaattttggtatgaaatcctctgaagtctgaagagttttaggtttagttgaaaattagagtactgtagtagtttgagatcctctagacgaagcagaaggttccatcaaattctatttgtttcgcgggccaacccgcaagcccgatattttatggacatatgtagagtcaagcccgccctgtgatgatgcttattggggcaagctggtgggtttgtgggccgcttgacaaaagaacattagagagagacaaatttgatggacagcatgattgttgtggtta

SEQ ID NO: 48653 - DNA, 559 bp, Arabidopsis thaliana columbia
aactaaaatgaagaatatttcataatctaaatcataaaactgtacattgtactatgatttacctaatatggcatatccaaaattatatcacaactaaaataatgagaacataaaagaagaaaatatattgtacatgctaacagaattcataaataagaatacttcatgatcataaaactaaaaccctgcatagttcatatgtcgtgtataatatattaccaccctctgtcatttccatatagtatatcagtcaaatgaagaattcttcatcatattacactgtatattgtactatggattatatctagtatgtgatctggaaaaatcgagtttaaaaggtcaaaactaagaagaggaaaaatccatatgcttatcatttatagattcttgtaaaacaagccccaagcttaagacaacttttaaaaaatcgaataaacttcaagtatatatgtcttattatacatataacagtagagcatattgaagagagagacataaagacttagaaatccagtcagtgatgttaggagacgtgatatgacaagtggagggaagatga

SEQ ID NO: 48654 - DNA, 576 bp, Arabidopsis thaliana columbia
ccttggccggctatcgaacagccggactcccatcaaaagatggttgccaagaacatcttcgttacggtttgctaattctcggaataacatcgacaaaactaggggaaggtttaaaaaacccacggtagtatgaagtgctactcgaaatctttgccacccgtctcgttccagttcctagccgcaaggtgtcgatgcccatgggcgacactcacacctcgctcacactcgggacagcctaggcggatccatgctttccaacgaagcacgcccatccaacctaggcgggtggaatcgatgcccatggggacatctcggtatttcgtgcgcaggacgactataccgcgacccaaacggcctagtacagtgcatgtcagcccatgcatgacacgcccattctcttcggcgacgaggtgaaaagatgcccgtcgggttggttaaatgctgttgtgaagtctctgagttctactttcattgttatgtctatagtgcagggaaagtggataggatcgtcaaatcataacacgcttctagatcctctaaatggagaacagtttatcaaagttgcggaagtggatg

SEQ ID NO: 48655 - DNA, 479 bp, Arabidopsis thaliana columbia
ctgtttgcattctcgatcactaaacttcagtttctctctcaacacttattctcctgttttcatttttaaaattttgctcagaaaagcatatattgcatgtaaccatgggtttttttaatgactaaattttacattcatacaaaaaaaaaaaacaaaacagtaccaccaaattacaaatatgagttaataatcgtaaaatatgcatgcacgttccccggatatgaccgtattagattctgtattgatatcctttaaccaaaaaaatcattctgtattgataaatgttggttctacttctacactttctctctacatcatcgtgcatttttaatattgaaagaagcatgagacaaatcgatcattttgccgacaaaatctatagtcatcagtgcctctagatttaacgggaatacacaagtttgactgatttttagactttggcaattaacggacacccaacagtttaaaatgcagtttaa

SEQ ID NO: 48656 - DNA, 397 bp, Arabidopsis thaliana columbia
gtctctatgatatgttttcaggcgacagatacaacggctatatcgcttgtagttgtagcagtaatattggcggtaatacctgttaagtacttaataacggttgcatttgtagagtggttcacgagggaagttgggtggaggaaagcgagtagtgaccggctagagatgcggataagagaatggtggtttagggtaccagcagctcctgttcagctcattagagccgaagatagcaagaagaagaagaaatgacgcttttcaattctctcgcacgcattgtctctctttctggacatattgttttgatgttaggatttaaaaatcttcttcttgaaaaatcccctttttaagtagggatagggtttattcgtgggtatggggcgagctagctcgtttt

SEQ ID NO: 48657 - DNA, 603 bp, Arabidopsis thaliana columbia
tacttctattagtttctatcattacatattgtcaatgaagtacaaaaagtgagctagaagtatacatatgcaggcggataggccaacattgtcaaacatcaacctggacatacctcttggcagcctagttgcggtagttggcagcacaggagaaggaaaaacctccctgatatctgctatgcttggggaacttcctgcaagatctgatgcgactgttactcttagaggatcagtcgcttatgttccacaagtttcatggatctttaacgcaacagtaagtttatatatgctactcagtttatagtatggttctcaatgcgaaaatgtcaaattctcctcttggattgttacttattttgtatgtattttatgttttgtatatgatgatgtgtgcttttagatacgtccacatgctgatggttgtaattaacatcgcgtaggtacgtgacaatatattgtttggggcccttttgaccaagaaaaatatgaaagggtgattgatgtgacagcactccagcatgaccttgagttactgcctgtaagttttgtggagagttacttagccatgtgcattgaaaatttcctgaggtgaaacgaccttga

SEQ ID NO: 48658 - DNA, 511 bp, Arabidopsis thaliana columbia
gtcattacattaattatttattttggaccagttaatgttacctcccattcccatgtcatttattaattaatccaactttttagcttatggtcatggaggatttatgatttgtaattccattatatgtgttacctaacagttgttccaaaccgaaagaggctttatctttcgtttaaagttgtgaaattccatttctatttcgtttcattgaacaactctcttgagtcttaaccaattccatttggggaacattccacctagagaagcataatctaaaagacaactaaaccccaatcagagaaggaagcaagttttcaacttttagaccggaccatgtaatgcaatgcagtctaatagtgaaaccggcaacaacgacaacaaccgaaacatgtgagaagcacacaaagagttttaggcatcgataaccacatcatgcagctacagttactactacagatccatgtttgcgggtactacagcccatgtataaggacctacaaggtttttttct

SEQ ID NO: 48659 - DNA, 455 bp, Arabidopsis thaliana columbia
taagacccattcacgtcagattcaaattctacacagagacagtgataaatgatctctgatcggttaaagacaaacctggaggttagagagttgacaatatgcttctgagaagacggtgctggcttctgtttgtagtagcgcatgaattctcgagacccaagagtcctagacgttactttgttatcggttctcttggtgatcacaagctcagacccaccaaaaagctctacagtgttcactgactcaccggacacaaccatctgattttcgtctccattgacatagctgtacaaacacacatcaaaagaagacacaattagttcaagcacatttagacaccaacaacagaggagaaagcagaagaaatggaacctgctgctgtagtcatagaactcttcaagttctgcatcttcttcatcaccaccatcaccataatgcactttgcaatgaccttt

SEQ ID NO: 48660 - DNA, 557 bp, Arabidopsis thaliana
taccaaacatccaattccactaatataggcgaaggctgtgcaagaacagttgcctagacaaccttgatagcactgttcggcattgagaaagcttgcaaattggtgcagatccggagtctttacatctgtcatacgatagaagatgtctgtgtctttgccttgtgttttcatagaagattttgcttggcaagataattttgtacgtctcacacacccacttgtccagtttccttttccccactcctcatcagactttggtacaaaccctttcaagcattcacactttgggggatcagatctcacacacaaaccataaggcccgcatctaccatatagatcacatgggttctctgggagagacaagtgaagcttccaattatttccatcatcccagaggatcttcattttcccttctggtgttagcgtaacatatgagagattatagtttcttaatgtggaataagagaaagatcctgtgccggctgctgtatcctggacaacgctgaatggacttacatatgatgcatcaattccagatatcccagagaatcttgttt

SEQ ID NO: 48661 - DNA, 614 bp, Arabidopsis thaliana columbia
tgagattgttgaaggaggtgaagagaataaggagaaggaaagtgaagggattgtgtctaatgaggattcgaatagtgagattgaggagaagaaagacagtggcggtgtagaggagagtgaggttgaagagaagagggataatggcggtggtacggaagagaatgagaagagtgggacagaggaaagtgaggttgaggagaggaaagacaatggcggtactgaagagaatgagaagagtgggacagaggaaagtgaggttgaggagaggaaagacaatggtggtactgaagagaatgagaagagtggtaccgaagagagtgaggttgaggagaggaaagaaaatggcggtaccgaagagaacgagaagagtggtagtgaagagagtgaggttgaagagaagaaagacaatggcggtactgaagagagtagggagaagagtggtaccgaagagagtgaggttgaagagaagaaagacaatggtagtagcgaagagagtgaggttgaagagaagaaagaaaacagaggtatagacgagagcgaggagagtaaagagaaagatatagatgagaaagcgaatattgaagaggcaagagagaataattacaagggagggg

SEQ ID NO: 48662 - DNA, 505 bp, Arabidopsis thaliana columbia
gatcatcacgacagagaactatggaaatgacacatactgtgtacggtgaacatatataactaaatatccattggagggactcgcttagtctttggtgtgcttgatgtgacacgagtatcgaagaagaggaacaaagaatgggctcttgaacaacatttgaacgtggctattgcacttcttgtccatattcacaacgatctcgcagcattcctcgtccattaatgtgatataatctgtctcttcccagctagacaatatttttgaaaaggatttctttgaggtctttgatccatctttcgtcaagcagttctccactttagccgatttcgacacaacttctgacttgacccacggtagaggaggaagtcccgggattctaggaatgctcgggaggttaggtaggcccggaatgttaggaagcccgggatgttaggaacctcggaatgtttggaatttaagggatggtgggaaaactcgggatattgggaagactcgggatgatggg

SEQ ID NO: 48663 - DNA, 1906 bp, Arabidopsis thaliana
aggtcgacacgatccccctacatatataaatactataacgagattcgatcttttaatctgtaattaaaactcacaaaaaccctcttaacattttttgcttcgactatatgtatagaaagttagaaggaaaagtagcggtcataaccggcggggcaagcggaatagggaaggccacagcggaggaatttgtgagccaaggtgcgcaagtgattatcgtagatatagatgaagaggctggtcatatggtcgcgaccgaacttggctcagccgcacatttcttaagatgtgatgtcactgaggaggaacaaatcgctaaggccgtggagaccgccgtgactcgtcatgggaagctcgacgtaatgctcaatagtgcgggaatatcatgtaagaacatattaaacaattataatgaatttattttaaactaaatatatgtatactaatacatcatatataagatttaaaaaataaaacattacttctataattctacatatacatatctttatataaataaattgcttatgtatacaatgcaggctccatatcaccaccaagcatagcgcacctagacatggacacttacgacaaagtgatgcgtctcaacgtgcgaggtactgtcttagggataaagcacgcggctcgagccatgatccccgctggctcgggctccatcctctgcctctctagcatcagcggcttgatgggtggtctaggcccacacgcatactcaatctctaaattcacaatcccgggtgtggtcaagacggttgcgagcgagctgtgtaagcacggactaagaatcaattgtatatcgcccgcaggcatcccgacgcctctaactttgaggatgtttcgagaggcgtttgcgggtcatagcattcgggaggaacaacttttggcgattgtgaacgcgacgggagaactaaagggagagaagtgtgaggagatagatgtggctaaagcggctttgtatttggcatcggatgatgctaagtttgtgacggggcataaccttgttgttgatggtggatttacttgtttcaagtctcttaatctcccttctgcttaattaatttatcaagttagttaaagttttttttttttttttagttttctgatgtggttattacgagtgttttggccttttgggtcattgctgatgtgatcgtttgtaatctatgggacattatatggttggaatttggaattataaatttagcctctctgtggagtttcgacatttcactagtatagttgattatatcagtcaacttagtattagataatcattatgtgtattgtgtaattctaagtgattcattgtttctgatgatttacgtaaagcttatcagaggtttcaaaacatattgcaagcagagttatctatcgtggcctcaggtgttgtaagaatagcttgtccatcagataacatgtatgtagaaccgttagttgtggtctatttaaaactttttaaatactttctttgagatagatgtatttctcctaaatcacatatgtttcttagttatggtcaaatatagaatattaaaatattgtacctaatagtgacactagtcactagagttaggtgccactacaccaagctcttctgactttgtatccatcaatactagaaactcttttgatctcaacaagcagtcttatggcggccatagtactgatcagatctatcgtcaggttaatttagatcatctctcgattactactaatttgtttcaataaatcagcttaattttgtttcttcttctcgttctttcagaaactttaaacggccagccaccgcagcctcagccgcttactcgacaggtggtggtggcggcggttgtacttgtacgaggtaagtttcttcttctgtctctcatatctgattttgattggccaa

SEQ ID NO: 48664 - DNA, 557 bp, Arabidopsis thaliana columbia
actggaaaatctctaagcattatctgcagtgctctccagtggcttactgaccgcaaggagaaacgaaactcaggattgaccgaagaatcccataaggttgatggaaacgatgatgaggacgagcccgattggatgaggaattttactctcaacgaagcagatggagccaatggtgacaagagcatcaaaaacaccaaatccccattttctctcaggaagcatgctaaggaagttttcacggaaggggaaaaggctgatgagctaaacgatcaagaatttttgttggatgaatacgaaagccaagatgaatcatctccgggcggaggcaactctaaaagaaaacctgcccgaggttttgacagtagttcatcagaggatgaggaagatgagaatgactgctcggatgacgaacaaggaggcttcaaggttttgttttgcagccgcacacattcacagctttcccagtttgtcaaggagttgagaaagactgtctttgccaaaaaactcaaagttgtgtgtctcggctcccgaaagaacttgtgcataaacgaaggtga

SEQ ID NO: 48665 - DNA, 595 bp, Arabidopsis thaliana columbia
cgaatgtgtgaaaatttaacccgtctgtaaaaacaaaaggtgttcattgttgctctacttggctgcaggagatccttctggtacctggacgcatactttcagcttgtggtgcatgaatcctgctgttgttttcaaagacttagctgatatatcattatccgtcattttaacatctgggtaagctgtagtatcctgttgcttacgattgcttctgcaaagagttatgtcatcctgtacaaagtcacctacacctttttccatctgatatttgcaagtaataacggcctgttatataagtcttgtttaaaaccacaacgtcttcagtgtaaaatgatcatacacatctcttttttgttaagtttgaccacacatttggtttttgtgcttcgcattctatatgtgcatagcattttactcccctccttaacccattggtaatggttagcttaatttttattgtttcttgagccatctctttgagtaataattaagttttgagtttcttggttgtgaaatataggactttgcaccaatgaattctttctcatctgaacttgggatgcagtttggacttctttagagggccacatgttat

SEQ ID NO: 48666 - DNA, 1169 bp, Arabidopsis thaliana columbia
ccactagtgacaagactctagccctaattatttcttctcattaaagcccagtatttaggcccacatagaaacgtatgaaatattataggccttattatttctgcgaattaaagcctaatttcttcagaaaggtgttaaacactaaacaaaacttgtttaaccaaatcaagaaatgttaagtagattgtgctaagcttttttatacgcaccacagggaaggtatgtatgaatgagatactctgaaggttaaaatacaaatgttatatatatatttaaatcatagttgaaacaatactcagcctagaaggccggccaatcattcctattcactacaaatctttctttatatacaaaactagttagaaaacaaaatcataagaatacttgtgggtgtgggtgtttgtgtcaagagtcaagaccaatttcgctcctgtcaaatgtggtttgttttctccttatccaaacataaacgagagatcatccataggaacctcatcaagacctgctgtatcaatatcctgaagaccctcgaaccagtttccaagatctgcctgttcatctatttcgtctagatcacggaacgctaatttcgagaaatctatgggagcttcgtcgtcgactgcaccatctccagaggtaactcctcggtttgaggcccctctgcttgctggtcctgttgggtgtgttgatgttgttgtcgaccttgattggtttccgttgttgttgttgttgttttcttttggttttggtttgttcttgttcctgaaaccatcttctctctcgcttcttttaccttgagcccctcctccactaagaacggcactgcctttgctcgttgtgactttggaggaagcgcatccgataacatcatctatcaatgcttctctcctctttgtactagacactgcacctacaaaacccaaataactcatcaaattttccgtcaaaaagatttaaagtataaccactgtcaaactattttatcaaggatgtgctctcgcattaatctgaaataatcttatcgatgttgtcatacaccatagaagaagaaactatagaaaaatcaattatagaatcaacatctaaagttcagattttgggtacctgaacccttggcctcagcctgatgattagaaggttcattgagcgtgttactagctgttccagaa

SEQ ID NO: 48667 - DNA, 583 bp, Arabidopsis thaliana columbia
ataaaaatagaagtataaagcgagttgcagtaacaatttttctatgataatcgcgcaagtgattttttcttcttctagagatattcttcattttgttcggtgaattttttctcttttttgctaataagacaacaaatttctacagatggattatggattgattctaatagcaaggcgggaatcagatggggactttttaacgctcaaggtcgttgccttctcaaaggctccacgtcaatagagccaacaaactcagctttggatatggaggccattgcactacgggaagctctactgcagatgagacgggtcagctatcagaaagtcatattttgagggaactcgcgcatgctatatggtcatttagagtaggtaattcaataacgtcaacctattggggacccttagaaaatccaagaatacattaaggatatagtcgttatgtccaaaaactcttatgcctttctacatgtaaatcgacaagagaaaacagtaacggacacactagctaaaacagttagacatcagaacttggtttgtgttgctcttggatttttaaatgtatgcaatgttaatctagtga

SEQ ID NO: 48668 - DNA, 593 bp, Arabidopsis thaliana
tctctaagttaagcaaaattggtgtgttgtagtggcgtttatatggaggtgacaaatacgagcagcatcatgtggttcttcagggacaaaggtttcgatgatccgagtatcgacaagatgttgagaaaatgcaaacagttggaaaaggctcaaagcgatgtggcatcagaaaactgggactacctgagtaacattgttggtatccaagagagaaaactcccttacatcgtctctcgatgccccaaaatcctgactttacgcctcgatgagagactcatcccgatggtcgagtgcctctccagtcttggaaggaatcctcgggaagttgcttccgccattaccaaatttcctccaatactctctcatagcgtggaggagaaactctgtccccttcttgctttctttcaagcgttaggtgtgcctgagactcaacttggcaaaatgatactttttaacccaaggcttatcagctacagcatcgacaccaagctgacagtgatcgtcagctttcttgctagccttgcgcttgatcaagatgggatgattggcaaagttctggtgaagaaccatttcttatggggtacagtgttgat

SEQ ID NO: 48669 - DNA, 1171 bp, Arabidopsis thaliana
ctctagtcaacgtttatgtgacgaatattgttacgctcatcctctttaatctttggaatcaccactttcaacacaccattcttcatttccgccttaatctcatcagtcttgtatactttctccggtaactcaatcctactcgtaaacctccgtccatctccagaaacatcttctccctcctctgtttccccttctcctctaatcaccaatgtgttctgttccaaagccaatttcacatcctctctgcttagtcccggcatatctatccttagatgcaacgcgtcgtctttctctttcacgttccaaccacgtctaactccagaagctcccattccacgagtagctgataccaaagggatttcgcttacctggtccatgaaattcagcatctggctcaagcttctcgttggagtaaacggatcgagtatatctgtttgaaaaaacaaccaaattttcagattcaacagatctccaaaacaaagttagatgtactctatacataaatcactaaacatgtatcaaattgggaaaatctatagcgaaattggacggaggaaccatggatttacgtgagaagaaatcgccgccgtggcgagaaacatgtcggtttgagtgatggttcctatcgacaccgtcttcatagtttctggcggcgttggtattgaagaggcgagatgaagcagccaccggacgaacggctcttaaggcgcgagggacggcgacggtggaagaagagagaagtctcctgagagctaaagccgatgatgacgccatttttggaaagagaagaagcttagaattagcaagtgattaattattttcaagctcgatgagatattttttatactctttgaacgaaaaaaaagctgttagagaaaggtttatatagaacagagagtagaagaagctgctagaggctagagagtcgcttaaggatggttctagaactgcgtggtctccaagtaaaataaagaaaaataaagaaaaagaaagaagaaaactttttccgtgacggcccatcactttggggcccagatttgtaaatttatcttccgtttactttggtttggttttaaagtcgaatttgaaagtcggtttagatcgatttggtttagtttcttcttcagtgtatctgcgaaatcagaggatcttcttctcttcaacatcatca

SEQ ID NO: 48670 - DNA, 562 bp, Arabidopsis thaliana columbia
  unsure (1)..(562): unsure at all n locations
atcccaaaattttccaatactataaggctatttattgtacacattctaatccacaaatgcattgaggggaactctaaggtatgtattacgaagaaaagaactgaatcagtaccttcctttgagtttatctgactaatcaactcgagctcggattacttctgatggcacggttgaagctatccaattctttggaatcagggccgtatatcgtcttaattgtgtcaatgcagcagctgcaacgtaaaaagatatttttcacatttatctcttccacatttgttatatcccctaattaagattcagatacacatttgatttaaacactctcagtgtgtaagagcttgtgaaatagagttatacaaccaaggagagttacctgacagcttccttgttgaatttcttttcttcaatcccgtagagtgacttgaaaacctctggctcaacccgacaaaaatatggacgatctgaactcaggaaaggaagaaaacgttcaaagtttcagtccataaacagagagaacaatctgatagctaataatgattgattgttanagcataaatag

SEQ ID NO: 48671 - DNA, 542 bp, Arabidopsis thaliana columbia
tttcttataagtagcttcaatgtggcatatttataaactcaaagatggatgaatggtcaacatctgagggcacttccaaatgagaaactaacaaaacttgttggtgagcgatggaagagcgctggtatcttaacagaatccgaggggagttttgtaaatgtatggtttctaatcatgactccgcactttcttctgatcctaacataaagctttggaattaggaacaacagattttttctgtatagacttacccagtttgagcttgttgttgaagtacaggaagctgtcgagcttctcaaggatgggattgagttggtgacagattcagacaaagtacttttgaacttgctttcatatcctctacacgctacattggctaggtaactatcaaaccgtttgttcctcctgcatcacctcttttctttcaataaatattttttacggttttctggagctctgcgcttgtgttgatttgagtttgctgcacctgatgcagccctgaagctaagcatgctgtggaagacaaacttcatgaagtagca

SEQ ID NO: 48672 - DNA, 574 bp, Arabidopsis thaliana columbia
gtccatataattgtttaggtcaaactttacagtttacacgatcacattgaaatgaaaattgtagtattgttttttagtggaaacgcgtaagttgacattaagaagttgactatgaaaaattctgctgctcttttgtattttgtggccatggtgtgtattggtgtttctaggaaacagataaaccagtttgcattctaggcgatgacagaagcgacaggcctgaggcgtttcttttctaagttcatttgctgtgtgtccaatgcacaagatccatttttatgaactttaagtttatatccagtaacttggttttttcttaccatttttccccaacatttctttgcaggtgatgcagacgattcgactattgaatatgaaccatatgtgtacattccagcgaatagttactcgtatgccgaggttacgaaaattacaaacaagtttaatagagttcatggcaaaggagggtttggtgtagtttatcgtggagttttaaacaagcaacaagtagcagtacagatgctaaaccgagcttccactacaatattgtacagtttacaaagaggtaattgga

SEQ ID NO: 48673 - DNA, 537 bp, Arabidopsis thaliana columbia
gggtaccgtgcttaatttatcttttcttcgtaaatgttttgtttgaatgtatgctgtgtttgaatgtatctttggtggcgcctattatttactggttatcacaccatatgcagactgaaacttctcaatatgagcggagtcctttaaattccaaaggcattaatgtggtgaatggaacatcagttaataatgggggaaaaccgttgggaattaagataggttcaagtgagatgctaatagaaggtgaagatgttcgtgtctcctccactgatgcaaatgaacgggctgttaatatctcttcacttctaggaatatctacagatacagttaataaggataaaagttttgaaaagctttcctcgatctcgactcctactgaaattcaggggtatcctataaaaagtgagaaagctacaatgacgctgggcaagaagaaaagcttggagcattcagatgggccatcaattctggataagatattcaacacggctataaatttgaatagtggtgaccctctaatatgaataaggtgagttt

SEQ ID NO: 48674 - DNA, 552 bp, Arabidopsis thaliana columbia
ctattaaagttaatctttgtgacaaatttaagcaacatgcaacaacagtcgtcatcttgaacaacccaaaggtaaaaatcctctaaattaacaattaagaaaatgaaagaattacatacatcggattcatccactcgagcccagtaatcctccacttcaaggcataactcctcggctttatcatccccatacctcataatcacactcatatccatattctcttcctcctcgctgtgtgattcgggaatttgttgttttcaggatttgttgagttttttacccatgcaggcgaaatgtcctttctcttctatatatccatccgaaattcatttatgggcttttgttgggccttgtcaacccaaaatacaagtttaaaaagaacatttattatataaataaaaggaaaattatctaataaattacagatagtataataataaaagtattacaatcactgttttttgaaaaagtgtattaaattatatcaattgaaataagataatataatagatttataatactaaaaagaaaagaatcacatatattatttat

SEQ ID NO: 48675 - DNA, 434 bp, Arabidopsis thaliana columbia
gagctagaggctcgagtctcactattacacgaacatctgcatattcagaaaaaaatctacctaacaaaataaaaatcgaaactttttactgcaaaaaccctacaaatctaagtgtggtaagcaaaggaatcaaagagtaaactactaacctcttcggaagtgataatagccttgatatgctgcataaagaagaaggaacaaaactaattacactctgaaacaaaaacaaaacccagaaacaatgaatgcctgaagaaccaaaaaacagaaccaaacctccaaattgagaacaatggctctctctcggccaagaatagtggaagggtaagataaattggggtctagaatccggagatcgcgagcgtggatctggacacggtgcatgatctcatacttatcaacatcgagtggctcactctgtcccgtcgcgtcaa

SEQ ID NO: 48676 - DNA, 514 bp, Arabidopsis thaliana columbia
tgttgcattgaaagaaatataaaattttgatgagcttacagttacagaagcagagactttctgtgtttcggtgatagtgttattctcgccggacatcgtccgattctttaatgtttatcagtttatgcgcttttccgattctcccgtccgtcacacagctctctgactctgaggaacaaagtgggctctcaaactgaactactctggcccaatggcgtttgatctaatacttttttttgtattgcgatatgtctgtgtgtcttattcataattttaatgtcccgccattttcaaataatacattcctatgtacatctccgttgttagcatgccattcatatttatttttttgacaatgcaagtcattcgtatttcaaactaaaaaattacattttttgatttttcatatacaatcaagtctactagtaactgcaagattttgccgaggtgtattttgataaatgtgcgataagaattagacccttaaaaataaatgaatgtgttacttaattat

SEQ ID NO: 48677 - DNA, 531 bp, Arabidopsis thaliana columbia
ctgcgtaaacaagaaaagagaaaatggtttttaggttaagatcatccgatttcagtagacctcgaaacaccatcaatccaaagaagagataatctaaggttttactatgtagccttgaatgttttctaatgtgaaaataaagggaatagacttttaatatacctgatagtacttgagaagctgaggtcttttcatcttgtaagaaggagtgatgagatctctttccatgtcgaacgggactgtgtccaaatgaacacctttgatcagctcaaatcccttcagctgtaagacaaaacccacaattttattagttaaaagaatgttgaaaatataaaacaagaatttataagtagaagaatcatgaacaaatcaaacctttttgtctttggctactctgttgaactctccaaggacaaactctttagtcttttggtttcggcagatagactcaaagtctcctgaaactttgtgttctttggcccaatgctcgatctggatcttgcttggacataccacagccactaagtaaga

SEQ ID NO: 48678 - DNA, 710 bp, Arabidopsis thaliana
catgtgtttttgttttttaagtataccggtgttgttttttatggtttcatgtggtttttatatgttttaagtgttaataaagaatcctgctctcattataagtaaaagtagttgagttatttgttacaaacccacatataacaatgcaacatagtagttgtagacaaatccaccacggggcattagatattacaaaagaatatttcacattctcttagtgttttaggataaaggaaaggtcgagttcgcgaagtcattttccacataaccaaattgcattgttgtctcttgcttagcatcgtctcgagcatcaattttcaatttaaaacacaaagaggagatatatatgtggaaaaattaggcagagaatcaaagatacttttcttgaacaagaccagtactaaatcgttttaaaaaggtactcaagtttcaactattacacttgctactgcttccttcactatcaaactacgaatcttaaagataaaacatgcgactaagcacacgcatgagatcaatcccaaaaggtaaacgtcactgggaaagttaagaacaaatccagagagcctatcgactcaatttatatagacagtgtcactatgtcttgggggtctatcaggaaccgtacctggtttgaatctggacgcttcatgtctcgccagctcaggaggcaccgcactgttgctctgaacaagcatctgcttcagatc

SEQ ID NO: 48679 - DNA, 471 bp, Arabidopsis thaliana columbia
aattgtacttagataatcgacgtataaagatacatgtatccgtagaccgtagcaaactatcttcgacctctaaagcaaagtgtgccgccttctttcttccttacataaaaaatttcaacttaaaaaatgtaatcaaaagtggacattcgtaatgttcatcacgactactagagatacacatgagattaatcattataaatttagaataataacataaacaactaaacccacaaatatatgcttctaatgatgaaatgattatgtggaagacgtataaaggttttcacttttcaccaactaaactcttcactaatcccccccaacccgcaccccacatatattgtctaatatttattatactattgtcatcagctatataagattgagaaaactagacatgagttataattcctttgaagtaaaattccatgagagcatactgaaactagctgatcgaattgttgatatatt

SEQ ID NO: 48680 - DNA, 495 bp, Arabidopsis thaliana columbia
tattttgtccacgtacttggaggatctaaatgcctgcagtaataagagataccaactttggtacttcaacacgtatcttctctcaatcctcctcacaacttcagtagtaaaaaagacaatcactttgacagggaaacacaaatgaaatgactgtcgaattcagtcaccggtatacactcttatatgttctgttattatctatatagtcccatacttataaatcaattcacaacaagacccatgattggagtcttctgattatttttaaaaacagtttcgagtgaataaaaaagctcagatgcaatcatcactttcattttcttgtggtgtcaagtctacgatggcgaaatctccggtggaagtgaatctgataccaatcgatgctacacctgagaccttcgcagagtatggtcaagtcatcgaagcctcatcgtgatggggccggttacggtccaacgacgctcaattggatctctctaaaggaatccacggtac

SEQ ID NO: 48681 - DNA, 530 bp, Arabidopsis thaliana columbia
atcttcgatatctttacaaataccgccatgaacatcctcaattttcttaataagctgatgaaacttagaaacactcatactatagagcagatttctcttcatctctgaagtaacaagagaacaagatcccatcttttcttcttcttcgtcgttcccagcattaatacccttctgataaaatcgttgaccagacaattctacagtttgtttaagtaaaggacatctctttacatgccattcgagattctcctgcaacacagagctaacaaaattcgaatcaaacagttgctacaatagcagaaaaattgcaaactataacctttgaaaaaaaaaacaaagtatttgactcactgagaaggatcaatagggcatggaatccattgaccttccaatctctggctatggtttcacaaaacctgtttgataactttgaaaaattagctcctcactaatttgaacagaagaaaaaaacgaaactttactctttcacttacatagaactctcgattcgagtattcgcgcatgatctt

SEQ ID NO: 48682 - DNA, 610 bp, Arabidopsis thaliana columbia
ccttcgtttgctaggtgcagctggaataataagctgcaaaccatacttctcttaattatcatatttctttatatgccaatagaaaatggtagagttgaacaaaaaagtacctggggtgtgcaggtcgtcatgaatgataaatcaaagtcagccaatactatgtgtccatccttcttgagcagtatattctcaggcttcaggtctcgatatacaattcctgtttatggaaaatatatacagatctttaaccgaaacaacagctaaaaaattattggaagaagagactactcaaggcatgtggcaatgtataaataagcaatgtttagatcaacagagacaatgattattattacctaagcagtgaagatattctaagccgataacaacctctgctgcatagaacctgatgacagagattgatcagattaactcataactgcagatataataatgacaatgggatttattgccttcatcagttatccgagtaaccgctaactgaatgcttgctagaaggtgatatgttttcttgctaacatagtgccctatttagttaaacatcccaggagatctctgttcacattatcgtttagatgaggaaagagggact

SEQ ID NO: 48683 - DNA, 464 bp, Arabidopsis thaliana columbia
ataaacttcttataaaataattgagatgtgtttctttaataaaataattctatttagtgtttaagattgtatatttatattttgattgttaattatatgattttacctatagtatagcgccccatattattatctacccatatccattaattctaagattttatctgtaatataaggtttcaatgtgagactcaatttctcactaagcccattataggcccaacaagaacctctcagcaatacctaatcatgaagtgtgtatatacatgtgtatataacgtcgtcttcgtccctgcaaccttgcttcatcaccattatcgatcataacattgagtaactaaggagagttacaacttcaagacactagcatttagatcggagtcgtcggtttggttcgtggatgcagtttctattgtgtagaggtggcaacgtcaagtagatcgccgctgtaacgtgagtcgtag

SEQ ID NO: 48684 - DNA, 543 bp, Arabidopsis thaliana columbia
tagcagtgatatataaacatttattgtcaattggttttgagttgaatgtccatgttaaaattacattttcatggtattaaagtcacccaatcgttggaccatcatgtggatgttgttcccacatatgtctacgctttaaatgtttatgcctgagcgtgagagagggtgttattgaaagtcccatatcgaaccacctcgtgaatgttgttcccacatatgcccgcgcttcaaaaccaatgattcctgaaagtaagaaaaattagatagtaatatataaaaggtttaaaccactccactcgttcctaattgattttgagttgaagctcatgttaaagtcctaatctgtcatagcttcaaaacaaaaaaaattagaattgatcaaattggtttagcttccatccattgccgttttttaaaacctttttagacaatttcagccactatatgttttttactgctcgttttattttgtttgtttcattttttgtactttaaattgtttgatagttggtcagcttgattgatcagaatcagatatgtgaa

SEQ ID NO: 48685 - DNA, 599 bp, Arabidopsis thaliana columbia
taatttttgatgatttactctctggttttggcattgataggttctttattcaccacgaagaaaaacccacatcggaattggctcggattactatgaggaggtcaccaagtgtcaagaacaaaaatgttgcatatcacctattcgacataatgcttcacagaggctaactagcgtattggaaattgcaacagatgatgcaggttgcgtggagaacatctcaggcttctgcagagaatgaagaattttgtttgagctctatccgtatgcaaacacatgtacacctctcggctgctaatcaggaacatctcagtggttgggttaagtcacgtttccgttgtcttctgatcaagttacccacttcccatcttttggttcaactcgtttggggatacgaaatcttctgtgttctgtctcatagtctgtgactgtagcctttgctttgttccagatgttattgaaatacaggaagtctatggcatttttgtgatccaacccatcagagcagagcagccacacattattgtcattactggggattaccctcactgaacgcaacaatggaagcttcgtgggaccagtggtagaaccagttacggttt

SEQ ID NO: 48686 - DNA, 520 bp, Arabidopsis thaliana columbia
gtactatatgatttggtgttttgtctttaaactcatctaaaagtaaaactataaattaatggaggcaagtgtgaaggagatttcacacgatgtacaattatatcaattcgcgaggattctacgcagaaaagatattgaagtgttcatcaagagcatggagaagaaaaaggagaaggaggtgtcgtctgtcgtggatctaatgagagtcgaaaggaattgtccgtgataaaatcgtttatataacagttctcataatttgcaatatataataaatttagatggtaaaaaaaaaaaaactcatttacataaaatatcatgttttatctatacacttataaaagaaaaacaaagtagttcaaaaccctaatttcctagttgaatgatacgactccgagaaaccgaagctattcggaggagatgacttcctctcccttctgatttccataacctttcgatgaaagttggagtgaacgttaggtttgaaatccggacttgaagcagggcggtactcgggaagtag

SEQ ID NO: 48687 - DNA, 134 bp, Arabidopsis thaliana columbia
gctccaccacgacggtgatggagagcatcgacccctcgggcaggcggtcgaatcgtgcgaacatcgtcgccctgtttgcgctcagctgtgaagtgaccgatgcccggctgcgaacgcaggttctgcagcgtcag

SEQ ID NO: 48688 - DNA, 772 bp, Arabidopsis thaliana columbia
atgttatcaacctccacatatctcctccgtttatgatcactcggctctatatcatggctcggcttattctttctagggtcaatagattgggtcgttaatgggccggcttgggctttagttggattccaaagctctccgaagagtgtgccattgttgagaaactcatgagccaagtaaccggctaagagctgattcgaacaaaccggctcggctaaggctacagtggcggtggtagttggtcgagggatgatcggcgttttcttgacgatggatttagtcggcggcggtggtggatttatcacggcggattccgtttgtttgccggcgacggcgccgtaggtaactcggcgtgggggaagacgcatcgtttttgtattcatggctgtttctttttaagtgcatgccacgtcatcgacagtaatttttaaattaattactgcggtgaaacagtatttttaaacaacccgagaaggctttttattttttaatctctgtttctttaacttaagaaataataagtagagatagagagagagatagagagagaattagacgatttgagagaggaggagaaatgaaaggacaaggagatttcaagtagggttacgacaatatatagaagaaggaagaataaattaccctttaatattgccaaaattacgaacaatgccattcgtgagtaaatgacttaattgtcctttcttctttaccatatcttctaatttgggttaccaatggaacaagtaaggaaaatatgaaagagcttttgggg

SEQ ID NO: 48689 - DNA, 461 bp, Arabidopsis thaliana columbia
tcatttgagaaaccactaaattaggtgtgcaaaaatccttttttttctctgtcaagtcaaaatgtgctctttctctcttgtttattcacaaatgcaggcttgtttttgtcggtcttcaagaagcttatttatataatctgaatcattgacgttgctttttatgttacttctgtctgttagtgaaaacaagaacccctaaatttgtctggaaaggaagcttttttattgatgtttctctgtttactttgtagagcttcaaaaaacttctaaaggaatgaatgtttctttgatttccaagagagttttggttcgttgactgagtttagttttggagatctagcaactgaaagctggttaaatacttaaatggacgtagcaggctactgtttgtgaatcctctcgatggcgatgttgtttgtgtggaaaaagtatggcctgtttcagatgtttctctgttgatt

SEQ ID NO: 48690 - DNA, 588 bp, Arabidopsis thaliana columbia
gggatctctatcagaagatattctcagagaggttgttcataccatcacagcacaagaggtttggacagctttagctcagcacttcaataaggtatcttcatcccgtctctttaagctgcaaagaaaactgcaaaccatagaaaagttagataaatctatggaagactatgttagagagatcaagagaatctgtgaacaacttgcatctattggtaatccggttagtcagaaaatgaagatttttgctgcattacatgacctaggaagagattatgaaccaatcaagacttctatagaaggatctatggacttacatcctccacctactttcgagtctgtgattcctaggttgactggttttgctgatagaatggctggttacaatgctggaaatgaggtgtcccccacttggcattcaacattaccacaactaatggttcccattactatagtagccaaggtcgtggaaatggaaaaccctggaaacaacaacaaagggagattaaattttacaacaaaaggaagaggctttcacagcaaatctcatcaggttcttcaggaggtgacagaataatatgtcagatatgt

SEQ ID NO: 48691 - DNA, 782 bp, Arabidopsis thaliana
atggagtaagctgacaatagagttgatggaatttaccttcttccaagcagcatttacgtcaccaatacgcatagctaactggggtcgtacggcttttccaacctctatatcctacaagagaagcacagtttttatgcttatcagtttaagatgatttcaataaatcgattgtatctcgaggaaatgaaacagtagtttgtaagttgtcattcaagaatttctaaatacaaaacctggcgcttgtgccgttggtgtcgatccctcaacttttcacagactagtttcaaatcacatgtgacattaaacaagtcctcagcatctggatggaactcctgaaaaatgctcttctcactcattcccagtttcaaatctgtaaaccatttcccaacaaaatcagattgatctcaataactttaaagaaaaaagatggaaactttatgtgaagaaactgcaaagttcctaccttttagaataatcctaatgacccacttcatctcctgagcatttgtcttctgaatcaatgtagaaagaaccaaagttttctccgctctagatcccaaaagaaaacaagataagagagtaaacagaaacaaaattgattctttatgattagagaagcacctgttctcacttgaagccaaacgatcaagcaaatcattcaattccttaatagtcaaaccgccagaagccattccttgtctacgttgcaatacctatgagcacaaaactgttcaaaaaccctaaatcccccaaaaaccaaaacccagaaagaaagtcaacaa

SEQ ID NO: 48692 - DNA, 518 bp, Arabidopsis thaliana columbia
gttcatcttcaattcacattcatggagaatcaaatttcatttgacaagaaaactcataccaggttttatatgctgcaaacactctgcattgagtatctgaaccgtgtcatttgttaatgcacaatgtagcgaaatgacatcacttgctgctagaagatcattcaatgtatccattcttcgagcagcacgtgggaatctcgagggcctgattcgttcttcatctccctgaacagacgcaaacgcaactattgacaacaaatataacatccaagggagaggaacttgaaagagagccatcatagtaagcagtttaggaatgtagtagctaagaagctcagcactttttttggtccctaaagagtcagtttacactaagatattaaaagcttagcgagacattgccaacaaacatacctctgggacatcgaagtagagcacactcatcttgaaagccaagcttctactagctaaataccgagccgatacagatctgccaacgatacccaaaaccataccac

SEQ ID NO: 48693 - DNA, 589 bp, Arabidopsis thaliana columbia
caggaatatattgatacacctaataattatgggttagaagtgatggatcctgaaaaactttccaacttcacaatggcagcagacaaatcagggcttcaggtatctccttgtttacttttgtccattgcttgctcatcgtcctatttagttttgtttataatcttgttctgctgtgatcaaggttgctatccatgctataggcgacaaagcaaatgacatgatccttgacatgtacgaatccgttgctgcagccaatggagaccgagatagaagatttagggtgatgtttgctattataaacctattcctctgagctatttgctacgtctgcttcttctgtctgtacttaatatctctgaactcctggtcacagatagagcatgcccaacatttggcaccaggatcagccaaccggttcggtcaacttcacattgttgcttcagttcaggttagttacttcccagcattaagcatctggcttaaaactcactttcttgatctaacttaatgctcgtgaacagccagaccatttgcttgatgatgctgattctgttgctaagaagctcggttctgaaagagccgtaaagga

SEQ ID NO: 48694 - DNA, 574 bp, Arabidopsis thaliana columbia
ggtgctgagacactcgctgcaatccaagcaatgaatgtcaacgactacgatctctggataaccggaagaagagaagggatcaacccaaagattcttgaaggtttatccacgtggagcgaagaccaccagctcggagtcattggagacaccgtggctgcgagcgtctttgcctcagaagggtcggtgttggtggtgcagcaacaagtgaggaaccaaaaaggtggtgatggtttcttgaatggcaagtttgattacaagaggttcttatctccttggtctcactctcataattgattaggttaattttttcttgaggattcttgtgaatcaaaaacatttgattaggtttcttttagtttgaatatcgtgttgtataatcttgtattattgagatgatttttttttttttttttttagttgtatccaaaatcgattacgacctaataataaataacttccaatatagaaacagcttaatttagctgatcatgtttcattttcattgttggctttagtaagttgttaaaggcccaatggcggagacagactatttctagaaaacaacctaaaaata

SEQ ID NO: 48695 - DNA, 515 bp, Arabidopsis thaliana columbia
  unsure (1)..(515): unsure at all n locations
nnnnnnnnnnnnnnnnnnnnnnctaaagctngggtgatgaaatcgcgcgaacgtggctgaagacggtgaatcagttctatctggaacagcacaaactgatcgaaaaataccatattgccgatggtgttccccgcgaaggcgcggtggcgagtatccgttgcaggatgggtttggctggactaacggtgtggtacgccgtttaattggtttgtacggcgaaccataatatttttacagccagccgctaacttcctgctggctgtaaaattatcctcttcaggaggagatatttaacatcattgccgcctgggtgcgatttttcacttccagacggcgatacagggattccagatgcgcttttaccgttccggtactgatattcagcgctctgccgatctccttatttgattcgcccgccgctaacatggttaaaatctcccgctggcgggcgcttaacgatttgagatctttaatgtccttttccggcgtcgtccgccagtctccaggcagaaaca

SEQ ID NO: 48696 - DNA, 642 bp, Arabidopsis thaliana columbia
atcaaatttgcatacttgaaatatagttacaaattcacataagaatcatgatatttatggtctgttttgtcatttgtgggagttttacgttagaatcgtaacgtccataaaaatcaaaaatcacaaaaagaaactctccatttcctcctccatgcgtaaactacactacgtccacccggcgatatatataggacttggagatgaacaagaacgtaaagaacccaacggcactaacaaccgcaagtaaccaatagaagtaatctagatgggctctgttcagattactgttgaaccagctgtttccggcgtctcctccagtggccaaatcgatcagatagatgagtaagctgcttaataagcttccaacgcccattgcacttaagtaaatcgcgagaccgaggcttctcagctcagtggggacttggctgtagaagaactcttgcattcctactaaagtgtgtacgtcagccaatcccagtaacatatactgagggaataccaccatatcgacattggaagagttgttttcggttggtctataagtcggtattcttttgcagtctcgagccgctttgactcaaccaaagcagccacaacatagtgagagttgtagtacattccggtccgaatctttgagagtgt

SEQ ID NO: 48697 - DNA, 501 bp, Arabidopsis thaliana columbia
gatccatatgattgtgaataagatctggcggcttggagacagatcttcactaattgatgtttttgaagtaaatgaatcaacaatcacgtttcgtgtccgaattggaagtatgaggcaacgaatactacacaggggtatgtggaatattacggacattcctatgatagtatctaaatggactccatttgcagaagaagctcagcctgcaatgagattgattcccctgtgggttaccctttccaacatatcctctgagcatgtttacagaccaagggcttgagttcctggcaagtgcagtgggaaagccaattaggcttcatccaaaaatagactcatgtgtgagtttcgatgaagctcaactattagtcgaagcggatcttactaagggattacctaaagagtgtgccattatgggtgaggaggatggagagttggattcagttatcaattactcctatccatgcgctacgccgagatgctcctattgtaagacatggggac

SEQ ID NO: 48698 - DNA, 590 bp, Arabidopsis thaliana columbia
cccttgtgcccttcccaccattttggagcttaattttggtgtgagcgttaaagggttatcaatcatacgcatgagaccaaagcccgttgcccccgtgtattttttcggaggattcatgattgacaccgaagacgaatcttggccggttacaatatcgtgccagtatactctgaaatgagttagtttctctttcttgtgatgcaagaaattagattcaagggtttctcctgtgacggaaattaggacgagggctagtgttcgagaagaaataagaaagaaggagagaaaactgcccatagtggagactggagagagatgactttcttaggttttgtgggtacaatttttgcattttatggtttgatgcgtgtagatatcataatatatggaggaggacattctcgaaagtgcacggtcgtatacatatgtaatgagatctagtgagggtgactttagtgggatttgtggctcccttattgcattttatgatttgatgcatgtatagagatagaataatatatggaggaggactggaggaggacattctagaaaagtgacggtcgtgttaatatgtaatgagatctggggtt

SEQ ID NO: 48699 - DNA, 577 bp, Arabidopsis thaliana columbia
ggatccccccactttctcagattttaatatttttcaactttttcaaattagaaattctctaacaagaaaatataaatataacataccaaaaaaaaaacgaaaatataaatataaatgagaaacagaggaaatgataattttgttacctgcgacgggaatctcaacggcgaactcggtgtaacaaaagacggagagcatggcggagacaccagagacaacgtaagacaacacgacggctggaccggaatgattacgtgcttcgagtccagtgagaacgaatatcccagagccgatgactgcaccgataccaaaccacatgagatcccaccacgtcaacgtcttcttcatctcgtgaccactacgagccttcatctcgttaatctcgtcggagtctagtgaccgagtcataatacgatccatgaaccgactcggtgtttctttaagggcttttaggtaatccccatgctttggaacgattcttccggtaagaaatcgtcttttgtgcatgaacagcctcgccgacgaagcccatcgtcaacacacccgaagccattttttttgttagaaaattatgttg

SEQ ID NO: 48700 - DNA, 877 bp, Arabidopsis thaliana
ttcttgtattgactggaaaattctggcagcattctcactcgcgagctttgcgttgtgaggtaccacctttatcactctcgtcactcctcccccatctcttgttgtctgagtaacagttgttcttgtcgtcgttgtggttgttgtcatcgtttgctcaggtgcattgttgatgttgctgtcctcatcaacggctgcgaatggccgaaaggacttgctaccagagattccctgtggcccacttggactgcttcctgtgctcccttgcctgctctttcttgctcgcggataagactttgttggctgttgctgttgctgtggagcaggttcattatcagatctctgttgttgttgttgggtgttctgaagatttccaggatgtccaaactggttcatttgctcattgggttgttgttgttgttgttgttggcttgaacaatatgggttcattatggtgggcatcattccatatggagggaagtagccattaccaggaggtgggaatcccatgccggggtgatattgaggcattaccattggtgtaggcatataatgaccataatatcctccataatgccccgtgtgtgccatacctgggtgaggcttgtatatcagtccttccgagggagacattacagggatcaaccattgctgatgatttcctgaaggaggaggctgaggaggaaagcaatatccatttggagccggtgaaggcggttggtttgtttgcaaaaggcatgtagttggattgttgatgatgaccttgatttgacaacctcccaactacgttctcagctgagctttccattttatgttggtcagtcttctccgagtcacccctttgtttgacgacaacatgtggtagaggaggctttaccag

SEQ ID NO: 48701 - DNA, 560 bp, Arabidopsis thaliana columbia
cgatcgaagcggctagagcttacgacaaagaagcgtttagactacgaggatcaaaggcgattctgaatttcccgcttgaagttgacaagtggaatccacgcgctgaagatggtcgtggcctgtacaacaaacggaagagagacggcgaggaggaggaagtgacggtggttgagaaagtgctaaagacggaggagagttacgacgttagcggcggcgagaatgttgagtcaggtttgacggcgatagatgactgggatttgacggagtttctgagcatgccgcttttatcgccgttatctccacacccaccgtttggttatccacaattgaccgttgtttgaattctatttttctgtttgggtcagcttgttgtatgctgacgtggaattatgctatatcttttgcttattttatgttcacattcgagcaaaatttattcattcgtttatttgttttttaatacaactcttgatatttctaaattctaaccaatcaccttatttagcggctactgagacaaaaatcgcatgtaaaggcgaatcaatatggaaagaacagag

SEQ ID NO: 48702 - DNA, 566 bp, Arabidopsis thaliana columbia
cctggacgagagtgtagtacaagcaatgaaacatggggtttggcctttcttccacagctcctccatcatctccattgctctaaccgccttgttttctccgcagagtttctcaaccaaactaccataatcaaactcactaggtaaaaccctcttgttcaaaagatcgagcaccaatccacaagcatcgtcaacccgaccttctctacacaacccatcaacaagaatctcacaagtagcttctgagaatctacaacctagctcaatcatctcataagccattttaacaccttcctcgattttaccactgctcaaaaaccctctaataagagtgttgaagctaaccacattcggttcacaacctttctccttcatctccctgaacaaatccaatgccaaatcaaacttagagcttctacaataaccattgatgagaatgttaaacgtgcatacatctggctttgctctttcctgttccatcctctggtaaaaccttaaagccttatccatatctccagatttcacatatccattcacaacagtgttataaactcaacatttggtttaca

SEQ ID NO: 48703 - DNA, 476 bp, Arabidopsis thaliana columbia
cgactctagacgattcagttatgttttgcgaggaacaaaacaaaattctgtttttaaagtgaatcggatagtttttctttataatcatattgaataattaggataaaatgttcatatagctaagcactcaatcaactatatgaatgatatttaagaagttaatatacacacatagagacaaaaatcatattaaaacccctaattgacaattatcaattaacctaccgtttaaccaaagggaaacataaaagagtggtaaccataatcgaacatggaagccacattgtagttgacatatcctaaaggtccaaattcattaattaattcatgaattcatcacttataaataatcactcaccaaagtcatttcccttcaccacccacaaagccatggcgaccacttcatcgacaaaacaagtcattgtcttcacaatttcccttctcttggttgctttccaagcagtccatgcagacta

SEQ ID NO: 48704 - DNA, 455 bp, Arabidopsis thaliana
aaagatgaaattttttttaactataatataataattagtctaaatatttaaatactataaaattggaaccacaataaaactttctaatataaagcaaagagtaaagtggtatttgacaatttttttgtcttttaacttattacacataaactctatctcacaaaaagtaaaaaagtgtctatttcacaaatttctaaaaaaactacctatttctcaaattacttttgaaaaagtgtctattttgttaataagcccttaaaataaagaccaaccatcttaagaagtcttctccagcaatgttgcccacatccttcaaagctttgctccaattctgcttgtcctcgtccgtcctatgtgcacacgtttcattaaaatggaacccgaattccccggtctgcttccgtacatcagatggctccactccgtagaagatggtcacactatgtgcccataac

SEQ ID NO: 48705 - DNA, 593 bp, Arabidopsis thaliana
catttcccgattggttcttcttaggaacaccctgtgaaaaatctcgtggaccttcacttacatccgttcgaggaccctcctttgactgttcttggaccactctgggacacgtatgtaccaagtgtccatacaagccacatgttgagcaaatgttggtcagaccctcataggccacatagtacctgtctccgttcaccattattgtccctttgagtggtttggctaagttcatttctacacaaactcttgcaaaacgagctctttcatgattcaacgtcatcgtatccactttgaagggcttacccaaacctcctgcgatactcatcaaaatagatggatgataaaaattcaccggcacattggttaaacgaatccacacaggtgttgtagcaatcacatcacgtaacgggtcaaactccggcaaccaagcttgaaccgtgagattgcttccaaacactctccatggatcgcctgttaaggcagctaaatactcttcctgcaactcaaacctgatcatgaagaattgacggggtagatccattactgtcatcatccccttaggattccacaactcccgaagtttcttattaaaa

SEQ ID NO: 48706 - DNA, 579 bp, Arabidopsis thaliana columbia
ttataccaaggatgcgtgcaagaaagttaaacgatcagagactccgtggctgattgttctggttcacgctccatggtacaacagcaataattatcactatatggaaggtgagagcatgagagttacgtttgagccatggttcgtcgaaaacaaagtcgatatcgtctttgctggtcatgttcatgcctacgagcgatcagagcgagtctccaacattcagtacaatatcactgacggaatgagtactccggtgaaagatcaaaatgctccggtttacataaccattggagatggaggcaacatagaaggaatcgctaacatgttaaaaaagctttatatagtgaatttgactaaagctttcgttttgtgaattgtttgattaagattatttatttttcatatagtttcaccgatccccaaccaagttactcggcgtttagggaggcgagtttcggacacgcccttttggaaataaaaaacaggacccatgcacattacacttggcatagaaataaagaagacgaagctgttattgcagactctatttggttgaaaatagatctacttgctggagaagag

SEQ ID NO: 48707 - DNA, 573 bp, Arabidopsis thaliana columbia
agctgggtatgcagaaaataatgaccccaatatatttgcaacaccaagaccaaacaactgtccagtgaaggtaaaaacagttgagctttcaataaaaacggtaaaaagaaccggaatattgtctatagcaattcggcttctagtcaagcacagtacctctgaatttgaatccaactcatatctgttttttgccgcaagcgctttggcaattcccacagattcctggatacaagaaaatgtagaactacttcattagagaacgaaaaaacataatatcaattgacatgcgctactgcatccaaatctaaacaagaaatccttttgttcttttttttataggaagtcagataaaccatgtccattcatttatagtttctcatgattaggttcagctctgcagtacgccagtacccatatgcctactttgacagaactaatgatgttgatactcaccaagatggcaacaccagtaatgagagctgatgttggaagcaacgtttttgcatgatcaaacttcttgggaaagaaatgttggaaggcctgaggtattctccacctgaaaacatctgaatt

SEQ ID NO: 48708 - DNA, 281 bp, Arabidopsis thaliana columbia
gttgatagttttctataattaatgtatcagaaagtaaattgataaatagtattataaaaaaaaagaccgaaatatttatcagagctaaggtccaaaaccgaaaactgaaaaaagtaaatgtgtaacatacaaattgacaagttttaagacatctggatgcagcgaatggtctctaaggccttatactaagcccaagcccagtagcccacaggctcctcaacaattccggttgactacttaaccgggcatatagatatggcatatagcggcaattaaacttc

SEQ ID NO: 48709 - DNA, 451 bp, Arabidopsis thaliana
cacatgaacacattacaataaataaatcaaaacgacatctatcctcaacatgagaaggatctgctccaatcagcatcgtcttgtcatgctgtgcaaaataacatctgtagaaaccagaagcaacattaagcaccagtcaagagcatacattaccctaaccataaccatccaaaatcatcaaacctcacctagaaacagtaatatccgtgctttgtctagtaatatcaataagcccatcatcgtaatcgcggagactacaccgatcaatccaaatgtgtctagactttggtttaatctgaataccatcaacatcatgacctctaccaccttcaaactccaaattgcaaatgatgatatgttcacattccttcaatcttattcctgtccctgtgagcttaattcgttgtcctcgtcaacaatcgtcttgtaagacgatacactcacgtatgaa

SEQ ID NO: 48710 - DNA, 632 bp, Arabidopsis thaliana columbia
ttttagtgtaacatattctgttaattacttaaatagtccgtataaatatgtgatgtgcacaacacaagaaaattgttttccacttcatacatgatttagtattaaaaaaactatattgaaaaagaaacctccaacggctatttattgcatatagatataaattgaaaaagtagacgaccgaccatatgacttttcacaggttggcttggcgctccttcttagatctaaaactcaaaacttttcatcttctataaatcttgaacattaatgtcccttccaagaatgaaaccatagaatactttaaatcaaaatgtcccaaagaagaagaccaattttccaaagagtttcgaaactactaaaaatctcgatcttgagaagacccatcatcccaagactcaagctaattcccataaaacaaagaagatccaaaagggtcaaactccttcagcaacacaactataaatttctccaagagtatcaattctctccttcaagtacatcctttatcaaatgctatgggaagagcattcagatatctagatcgggtcttaacgcatttacgggttattgttctatctcagtgtatcggcggtgatatgaaatgatgcacaatacgcgaagtggatggagat

SEQ ID NO: 48711 - DNA, 479 bp, Arabidopsis thaliana columbia
ctttccgacgattagggatttcgaaatcgatttggggatttctcagtttcgtttagtatgtaacaacgccattttcggctttaacagaaacaatttacgtctgctaacaggggttatcgaatccgtcaatgcatgttaacgtctcggaggggttttatctggtcaaaattttgatttgtattaaatggcgggtcaacgtttttatcatgttttatttgatcgaccccaaaattcacgtattgaaataccacgtttttaaaagttcgcgtataaagcaacattttccccaaagattgatcatcaacctacgattgattctttggtagatagctctgatttttaaatattctttttttaatagttataattttcttttttagctagtagctaagatcttcttgtcgtcgagacaattagtgaaggtacgcgtaaatcctatcatgccagcaccaaaatgatatatgccataacgaatattt

SEQ ID NO: 48712 - DNA, 545 bp, Arabidopsis thaliana columbia
tgtatcaaaaactttcaaccccaccccacactgagagacaaaacacacaagtgttgtgataactagttaaacacgcttataaacattaagcatctagatccgtaaggtgattattttcaatagaaggctccttgctttcagaacatatggccacataggagcatcactatcagcatccaaaccgaagaaacacacatctaagttatatagctctttgcttttcaccctactgcttttcacaaaatggcatagtatctgctcccctataatcttgataacaaactactatggatactaactactaagatggctaatagctttctccagaacttgttcacgaatcatacactatctaatccgctatctacgccaaattaacagaggtttggatcaacaacttatctagtctgctgtgaactacactatgtgtttcctcctcaattgcttttgaaagcttatatactcacatttacatcacatatagttttgtattaaaaacatgtatttactaaaggctatagttactggagtcacttagcagcagt

SEQ ID NO: 48713 - DNA, 507 bp, Arabidopsis thaliana columbia
tctaaaggttataaagtctcaaagttttaatcaaaaagaaaagaaaagagggatgcaacacgaggactttctaggaggtcacccatcctagtactactctcccccaagaatgcttagctgcgaagtttttatgggatctggtgcattagtgctagtatgatcgcatccgttagttcattcaatacaataatatttattcttttttgaagactctacaaaccattcaccgtgggttccacccgctacgtaaggataccccatctagttttgacgagctttgatacctgaaaaatatttttaaaaaattttcgaacaaataattttgggcccctaatatagtaaaggtcatggaaagacctaaaaagagtacctaaaggtcaaaattcggggtaaaaaaaagagaatggtactcttacccattgtcttgcttcttatattggatggctctcattgggcttccaaaaagttatccatgtcatgtttggctcatggtctaaaagttataga

SEQ ID NO: 48714 - DNA, 774 bp, Arabidopsis thaliana
  unsure (1)..(774): unsure at all n locations
atttaccctttcatatattcatacacacacttatatcattcgattattagactcacgtaccagtcactcaccaccatgtaaaaaaaagaaaccaagtgtataattaccttggtaaagaacattgctttggtttccatttcaatttctggaaatccacgtcaggtcttccgtttgagatacaattaaactgttcatcgatcagattacacgaaccgggtttgtagagcggatacgaatcgtctttgacccaatctccctcgaaaaactcacaactcttcagagactcgatcacctttctcagcgacgacttccttctctgttttcgcttcggagaagcagtcgaattgacagctagaacttccgacagaggtgctttccttgctccatgtgtgtccaaatctcgagcagttttgttgtcaggacacgatatgttttcctttgcatgaccggtctggaactgaatagtgatggttttagcatttgtgtccgttgtcccatttgcgacgggggactcaaaggttaagtttttagtaactgcagtgagattttccggcgccggtgtacgcaatgtggtgaaattagaatcgagactcgacggtgaagagttggatgaattcgagacagtgatattagggagaacataggaagaaatggaaggagcgagtgcgactgtgatgggagaaggactanaggctaagaaaacagtcaaggcaacganagttactacgaaagcgtagacgatagttgaagtttttcttggttcacggtggagaa

SEQ ID NO: 48715 - DNA, 566 bp, Arabidopsis thaliana columbia
taacccaaacgacattactaaaaactcgtagtgtccatacctagtccgaaaagcagtcttgcgaatatcatcctcgataatcgaaatctgatggtatcaagatgctccttgcagctggtccaataactcatcaattcgtggcagctgatacttattcttaatggtcatcttgttcaaccctcggtaatcaatgcaaattctaaaactaccatctttcttttttacaaatagcacaaatgctccccacggtgaactactcggtcaaataaatcctttatctgtaagatcctccaactagctcttcaattctgccatttctacaggcgccaatcggtaaggtgcttgagatacaggtgtcgtccctgcttccaattcgattgtgaaagcatctcctctactcggtggcggtccctttaagaactcaaaaacatctacatattcagccactataggaatttcacttactcctatatccatgtcctcccgtgctacagaaatagtcgcaaggaaagcgtcattccgtttttctatcaactcctctactttcatcatcgatatgattgaga

SEQ ID NO: 48716 - DNA, 784 bp, Arabidopsis thaliana
cccttcttcttcaagtcacagaacagagtaaacccagcctcagctcttccgttcctaaataacccgtcaattagaatgttgtatgtccagcaggaagctctaactccttcttgaaccatcttctcaaacaactgacaagcctcagtgacttttcttgccttgagtgtcccatctaaaagacaattatacacaatagtatcagggacaaacccgttatactgcatctcaccataaatcctcattgcatcatccatccggtaagatttacaacatccttgaatcagtatacgatatgtcgaattatcaggctcatggccagacaccttcagctcatcccatacaatcaaagcatctttagcttttccaaataaacacaacacatgaatcaggctgttatatgtgcatatatcaggaccaaaagaagacccatagaccgaacttcgctccttcatctccttgaacaaactcaatgcagcatccaagtctccccaacaaccaaatccatgaatacaaatgttataactccatgtatcaaacttgaatcttttcattccctttaacttttcaaatacccttttgaactccgacctcatatctgctctccttagaccaaccaagagctcattaacagcaacagttccaggaagataacttacaataataactctaccagtatcatcatcactatggttatcagaagcttctaaaagcttaaataatatagacagagcaagacgcaattcgtgtttcttcaccagagcaataagaacagaatcatatacac

SEQ ID NO: 48717 - DNA, 549 bp, Arabidopsis thaliana columbia
cccagtttagtggagctcttctcattatactaggcggagaacgttctttctcaactttatgttttgcactagctcttcacgagatgacagaagccccgtttcgagcaatggatgagtttgatgtgtttatggtattatgtccttttaagaattctctcttttacgagctttacgttgggatgagactaacatttttaactttctgattctgaaatataggatgcagtcagtcggaaaattagcttggacgcactggtggattttgcaattggagaaggatcgcagtggatgttcatcacccctcatgatatcaggtaaccaaccgatcaatttcaaaaaccatggaactcagtctgtgaagtgaataacttggatgaaactctttatctcttgtgctgttttacagcatggtgaagtcgcacgagaggataaagaaacagcgaatggctgctcctcgttcttgaaaacatagagaaactctcccttgtatagctccataaaggtacacacaagtctggcttgcatgacccattcaagcattttatgttt

SEQ ID NO: 48718 - DNA, 361 bp, Arabidopsis thaliana columbia
tcagtaattttccttttactctgttcttgtaaatgttatctaccggtatatttcacttcagtacttttcttttacaaaaattataactatgaccccatcttcctataattgaagtatggaaccctattgtcaataacaacccaaatcatcatcatttgactctgttcttaactctcattctgatgctgcttaagcaaataagcctcatcgtgttcttcagctccaaaacacttcacttcgatctcatcttcctcttcattgagttgttgcatctctgactcgatcaaggcttgcatttttgctctgtctcggtccctcgggtatgtgcaatataggaacgagtagattgtgcaacagatca

SEQ ID NO: 48719 - DNA, 508 bp, Arabidopsis thaliana columbia
cccttaacaaagactccataaagaaaagagaagaaaagactcataaacagagaaaaaaatggcaggagagagatcaaagttaacaacaaaccacttttataatcatcagattattctttgttactttcttatcatctcacaagtttccattgcctcaagcaacacgagtaatgtaggagttaactggggaataatggcgagtcaccagcttccaccagaaaaggttgtgaagatgctaatggacaatagtttcactaagctgaaactatttgaagccgaccaaaacatcttagacgctctaattggctcagacattgaagtcatgataggaataccaaaccggtttcttaaagaaatggctcaagatacatctgtagcagcttcatgggttgaagaaaacgttactgcttattcttacaacggtggagtcaacatcaagtacatagctgttggaaacgagcctttccttcagacatataatggaacttacgttgagttcacattacca

SEQ ID NO: 48720 - DNA, 523 bp, Arabidopsis thaliana columbia
ctttggacatgtctctaaatcggacaaataaaaacggccccatttctttgtgatttcgagggggtttttaggtccacatttaatacattaaagcatcagaagacgccatgagaggctggttcataatataagacatgttcatctgattcacgaagaaatcatcacactccaaaccaaccagagggttcgaacacatgcccatgttgttgttgttgttgttgttgctactgtcgaggaactcgatgatgtcgttgagagattggaacctgtggttaagttcatcaagctgagctctgagaacagagttctctgcttcaacggttaggtagtgttgcgttgtgatgctgacaacttgtcacgatctccgtgttctcttttttcagatgaattaacctgagccgttagatcgtctaggagcttttgtttctcattcttgatctctttgcagattcacggtttgagagcatccgtttacgtttcctctgctccatgagactctcctccgatcctgacgacgtttgaa

SEQ ID NO: 48721 - DNA, 306 bp, Arabidopsis thaliana columbia
atttattcaaatccggaaatatattaaaaatgttgaacaaaaagaaaaagaaatatattaaaatgacaccgtttcgctggagactgcttggtggtggaattcactacaacacgttaaaggtggaacacaacgaatctggaccattgagtttaaaggtaaagcaattgaatcgttagatgtacgtagagtccaagctaggaagatggacccaacaattgtacctttaccagttacctccactggctttgaagctgtacctctctcacatataagaagcaaacacttaacgagggagaaacacactca

SEQ ID NO: 48722 - DNA, 515 bp, Arabidopsis thaliana columbia
tacaacttcaaggtgagttccttctcttatgacttatgattcgattcgggttctctgaagaatttatctttctgctttctcggaatttgaattatcgatttgcgtctttaattttgctattctcggaaaaagtctcagatctctggtactcgttttttttattacttctatcgaaatttgtgagaaaattctgatcttttgtctcagttatatcggagattattgttaggaagatgatctctctgttttgattttaattggcgttgatgaatcgttttaagtatagaactaactatgctacattttttggattccattgctttttatttctctgatggaagttccttatttcgttgactttttgctagatttttggttccacattgatatcttggtccctgaagctgtcaaagagggcacctggtccgcttggtcctgagctcagatggatctgcatccaccaggttagtttctttttgaagattcaagtgttttttttttcactctagctgttt

SEQ ID NO: 48723 - DNA, 503 bp, Arabidopsis thaliana columbia
cctcctccttctcatcatcaagctccgcactttcaattttcacaatccgatcatctctctccactccctcattctgaagtattgctaactcaaggaaagactccctccgccgccgcctcctcctcttacggcgacaatagacgtgaacaatctccggtcgccgatgaggctgcaactcaaaactatcgctcattgggagcttgagggcattgaccttcttgtgggaaccagcggcggtcttgcaacacaatgaagacgaggaagaggaaacggagtaaacgctctcaagagaggcgtaacgaacaggattatcagcagcgtggtcgtggagttcggttttgatttgggtatcttctccttcttcttcttttgggacacacgacattgaaatcattcacaggaagagagtaagaaagttgttgggttaattgaaattgaaattgttaggttttgaaggatgtcgagaattagggttttagagaaagagggatggttttgagaga

SEQ ID NO: 48724 - DNA, 537 bp, Arabidopsis thaliana columbia
taattaatcagtgaacgatctctttcgccacaatagcaatattagaagccaaacctttgacgagtttgtacgttatcaatctctactaatccaagatgtaatctaaatacaggtttttctagtataagaaaaagtagagatctttccgataacttgaatacaatacaattgtatcagtgcttctaatggtattgttccaagaaaagaagtgaaaaaacaaacactaagatgcaaaaagcaataaaaagagcatcataagattatgaacaaaaaggagagaatattcatcaaaaagatttactaaaagtgttcagttttacaataaagaatcacttaaactagagttcgagcatcagtagatatactagaatcataagatagatagtaattggaaactcgggattataaatcaaacagtcaaccatgattaactaacctaaaccccaaatctcgaaactattgggttgaatcgtttattactggtaatttaactagtgatcatttggattcaatcataatttaatgaacaagtaaaga

SEQ ID NO: 48725 - DNA, 521 bp, Arabidopsis thaliana columbia
cattacttttgtcaccattcgtgggtatgcacatacccatgcggccatgcatagttactatatttctttgcacgacccagtgggagtatctttacggagtatgatcatcttttattgacatcgttacataatcataggatatactaagagatttttccatggtttaagtataaaaccaattaagatattgtataaaaatggattatcctggaacgtttccaaaaacgacgggtaatacttttgtatcacggtacaacgtagcaactaaaaaaatctttacagtagccatcagtaaactctttaagcgcatttgtatgcatggatgattaacatgttgaacaaaattcaaatatcttataggaaactatgtgattgggctccatgctcctctcgcaaagtaagactatctcaatgcaccactttgtggcaggcgttggcttcgtgtactttctctttccacgttcactcactttgtgaatatctgggtagtgaatctaggattagtcttaaatacttcttag

SEQ ID NO: 48726 - DNA, 610 bp, Arabidopsis thaliana columbia
ctttagagatgtgaggagcctcgccgaagaaggaaagaatacagaggagcccaaatgtagacgggaagcaaaaacaaagcagtagtaaagagaatgacccatgaacgttgcatatatattcccatcatcctaatctgtcccgcgccatatgcttgtccacacaacgtctccaatgcactccccatccctaactgccaccattttccatcatcaaaatgtttatattgtttgatctctaagcttttttcataggaaacttaaatgacaagcaacaaaattcaagagagcttacacaaggaccctcgtagagattacttgtataacaaatattataacactgaactcaactacattaatatatctactttatttgaatataaaacacactgttaggatttacttaatcacaattacgaaacaattttaaatgtatgggaaaatctacttcattgatattaacgaatattgatattaattaatacaaaaaaagtcctcaaatattgacttttatttctgtggctattattagacacattaccattccaagaacctgcacgtgtgaagggtgtttcgtacatacatgacccgaagcaagccggagatacagagt

SEQ ID NO: 48727 - DNA, 481 bp, Arabidopsis thaliana columbia
catgacaatatgacataaggcgtaagtaattaatataaagcccaattccagcccattcaagcccaaccatagtatctatatttctttggttataaaacgaaaaacgaaaccctagatcaatagagagtgatcggcaggttatcatcatggattcgccgaccgattcaacgagagaagagatgggacgaaaattgtatgaaaatcaagattggtccaaactctgtcccgatcttctgcgatcgatcctcgaaagattgagttttattgatttttgcagagcaaaaacggtttgctcagattggtataccgttgggaaaacatgcttaaagacgatataaatttgattattcatatgttaccaattttgtgaagaagcactggtggatgataaaatatatttttaaaatagtgatgggtctaaaaggttaaaatagttgtttaacttaatagcaattttagagaagtatttttttttaagatt

SEQ ID NO: 48728 - DNA, 546 bp, Arabidopsis thaliana
tctcatccagatagatctttgtccttgtgagtgagaccaccttcgagtagtctcctgatctttccgacactatcatcttaccgcctctgttccctccagccgagattggtttggcctcgggcggcggacagcagtagcagggtttccactcggactcgaagaagaaatcaagagtcttgtaggtaaagcaaagcaggaaatcaacaatgtcgaggatgaagaagacgaagacgcccacggtgcggttgagcgaccgtgagaatcccatgctgtggagtttgagtcttgtggaagacgtgtatgtatgtaagttgtatgtatgtatggtggtgatgttgcaaagacaaaatgcgtgagagagagaaattaagttaatgaagagagagaggaaaacagatggcagctgcatgaatttattgatcgcatttaacatacattgttggctaaaatgatgaaatttggtggccgttgaatcttcttcctttttttttgcaacactagaccacgcatatccagcacataccgtaatatcttttttaacttcaa

SEQ ID NO: 48729 - DNA, 585 bp, Arabidopsis thaliana columbia
tacgctggagcagcgtccaatagtaccgaaccatcgcacccctgtgttcacaaactatgacttcaatattttatgcatatctaacttttcaaattaaagaaacctaattccactaacaaaataaacctaattatgttttcttgacgaagactctatacttttcttagttaacgattagcgaaggaaaaaaaaggagatattttaatttgggttaagaaagaccgttactttctccatatgaaaccattaattaagacagaatctatagtcaaacatatatataatcaaacatcaaaaagaaattaacgtcaaatttgtccttgaaaaatgattccactaatgcaaactctaattttcatgttgcttttgtttgaaatccactttttggtcaaacaacgagtatgaactattattaatccccattaaacctaaagtaaagtcatgtttagttatattcattcataaatatatgctggtttggattcaagatgaatcataagatcacatggactgatgcacattaaacgattggtttcattactaaaccaaaaccaatcacaaacatatggtattgagtagaaatat

SEQ ID NO: 48730 - DNA, 559 bp, Arabidopsis thaliana columbia
tttgaaagtcttactttaaggtcaactgaatccagcatagatagttgctcttcaaaactcatctcaaagctagcaacaaatatgtctgctagtttatggataggaactgtctccaaaagcacttttgtccttccaccagttttttgtttctgaaacaagaatcaatgcatggttttactaattcaatcaagaatgatccagattccaccagatatagattatacaattgctcccatggaaagaaaaaatcccaaagaagaatcaatttcatgaaaacagacactaatagcttcagcgttgtcaatttgttatcttagaaactctaatgctgaagcaaaaacgaaacttgaaaaaggaggaaccaaaacagaaagccgtttactttcactagttacctgctcaagcacagagacaagctccatagctgtggttttaaactggcgtgacagtgctacaaaatctggatcttgttttacttgctccaactctgcagatggccagaaaggaaccagctaaagacattaatgaactaccatgtcgcgtaatgtaatagagaaat

SEQ ID NO: 48731 - DNA, 525 bp, Arabidopsis thaliana columbia
aacttgattaactttttaaaattctaaatattaaaatattttaataaaattttaatatttataatactttgaaattttttaaagcttcaattcttcaagataactaaaattgagatctttaaaactgaatcctacaccttcaaaactaaatcctaaattaaaaacgacgaatctagatactaaaaagtaaaccccaaacccaaaatactagacctaaacctaaatttttaaatataaattactagaaattatttgtactatttgtggtatttttggactaaatatatttgtagcggtattttttaaaaaacaaaacttagtttaattgtattttatgtcaatgttgaggaatgttgtttacataggtgacaaagatgcggttgagtgatagccttgattagtttcataaatgtttagatgtacacataaaatctcgaacattattcctgatcaacaacagctactagaatatggtaggcagaattctatgttcaagtgttgattatcaatgactatttgcatggg

SEQ ID NO: 48732 - DNA, 605 bp, Arabidopsis thaliana columbia
gatgtatacaggatacagctaagcttgatctatatgtttatcatttttaatttagttataattgacttattgtaattatcatttttttatggatcgtctatttattatttagaaagtttgatagagaaacattataagaacaaaagaagaaaagaaaaaaacttcaataacagtactatttgttgatgtgttaacgtgttagagcatactaaattatgattgatatactaatttatcttaaaaatttgaatttagaaaaaaaaaaactgaaaaaatgtgaatattaccttttctaaaaacaaactactctctctaagagcatcttttgtgggtaaaatcgaagagaatgtctacaaatgatttactttaactatttatttgatttttatttctttaaattatttaaactaattaataatactagttgatacgtggagatcccattaaagatcgtgttttcagtgtctccttagaaatttatctgttttgtgcaattaattttgaattcctttagttaaagatcctccattatttgccaatgggagtgttctacatggtctataattagaaatgatagcgtttagtatatagcaaattgcaacaaa

SEQ ID NO: 48733 - DNA, 667 bp, Arabidopsis thaliana
ctaaagagggataaaaagtcaagtaactcctcgttaaaacatgagaacacgcgcgtgaaaaggagaagaagagtgacgtgatctttcacactttttttggtttatggacatacataaaaagagaaaagtgttggctagcttaatgatagcgaagatggtaatagtaacaatgacagtgccgatggtgatggtgacgacaacaatagcggtgccgatggtaatagtgatgataacagtggtggtgccgatggcgatagtgagacaacaatggtggtgccgatggcgatggtgacgacaacagtggcagtgccggtggtgatggtgacgacaacaatcgcggtgttagtggcgatggtgacgataatggcggtgccggtgacgaaaagataattacaaatatatattgatataagacaactaaaccctaagatactatacatagaacccaaacaaaaatcattaaacgaaatgaaatcatctcaactttcaattttcaaaaatctaacagcaaaatacaatagtacaatggtgatgatggctccggtgacgatttccggcgatgtgctctggatacgattttctgcgacaatggtttcaaggtagtggtgttgtggtggtagtggagacaagagaaagaaagagaaatgtcaccgatagacagagagag

SEQ ID NO: 48734 - DNA, 618 bp, Arabidopsis thaliana columbia
cgactctagaccaataaactctcttattcgtaccaccaatatttcaaggaatgcttcagatctggtatgtttaacaatagatgttttcttactaattatctgtataagtagcttaagtatgagaaaagtccggtgaaatattttgggtactaaattgaagacacatgtaatgattaatttaacaatgtttactgcttattagtacgcttctagcactttccatatatttcattttttaatccatcattaggcttcatgttattgtaattattttgttcagaactctatgttattgtctgcttgttatttccgatgaaaacactaaaacccacgaatttttgagattaataattgttagaaactatgatctgtcaggcaaaaaacttttgttagtcataatcaagtctttggctttgatgaaatagtcggtaaaacctggcatgagttgaacaaaaccaaaatcttggatgagtacaggcgttttattgatgacatgatggttgaatgtagaactgatatgtataagacgtaatcaaaagtttgctttctctgttactacagttctcatactctgaactttattattctcaggaagagtatactggagatgaagttggg

SEQ ID NO: 48735 - DNA, 550 bp, Arabidopsis thaliana columbia
  unsure (1)..(550): unsure at all n locations
nnnnnnnnnnnnnnnnnnnnnnctaaagaagaacaacggcaataccgaccagcgcacgttggatctgccccatcgatttatgcgtcgcttccttcggcggtacttatcttccgcaatgacacgctcgacgttctccaccaccacgatggcgtcatccaccagtaaccctatcgccagcaccatcccgaacatagtcaacgtgttgatggtgaaacgaccgccgacaagatcgcaaacgtcccgagaataaccaccggtacggcaatcgtcgggatgattgtggcacggaaattctgcaaaaacagatacatgaccaggaagactaggatgatagcctcaaccagtgttttgaaaacttcctgaatagaaatttcgataaacggcgtggtgtcgtaaggataaaccgtcttcagacttgccgggaaataggctgataagcggttcagttcctctttgactgcccgcgaggtatccagggcgtttgctccggcagccagtttgatggcgatcccggcagcaggtttgccgttatagcgtgccacggtggaat

SEQ ID NO: 48736 - DNA, 630 bp, Arabidopsis thaliana columbia
taattagagtcgttgtggtctcgagcctctgtatagcaagcctacaaacaatgaaccaattagcagtacaaaaacaccaagctagtgtaatcttcgattcaagcatttaccaaagagatgaagtagtagtatagataatcaaagtatttcaagcaaaggaaacatttaaacttgaaaacttatggatagataatcacagtaaatgatagttttgctaagaaaatcaagaagttgcctatgaatacactagctagaagaaaatatatatatggagatggagaatacacccaagagttaaagccttactcgtcttctcctgaagaatcaaaagacccatctgtggatatctttctggcctgagacaaacaaagagaagaaaatattattccgttggctcattatctccatatgattcaacaaaggtgtgacacttctatcaaattggagaaaaagggttttgtctaatgcatccaattatatatgaactaatggaccaaatctgccgcgtgtacagaatcagaagtacttgatacagataagagaacacattcactgcctcgaccccagaatgttgcgcgttttgcatgaacagaggagggtgtgccttattcacggattcgcgcttggtga

SEQ ID NO: 48737 - DNA, 694 bp, Arabidopsis thaliana
taaaactaagtaaataacactagagagggatgaaaagttaagtaactcctcattaaaacatgagaacacgcgcgtgaaaagagaagaagagtgacgtgatccttgacactcttttcggtttatggacataaataaaagagaaaagtgttggctagcgtgatggtggcgaagatggcgatgatggtaatagtaacaatgacagtaccgatggtgatggtgacgacaacagtggcggtgccgatggtaatagtgatgataacagcgacggtgccgatggcgatagtaagacaacagtggcggtgccggtggcgatggtgacgacaacagtggcggtgctggtggtgatggtgacggcaacaatggcggtgtcagtggcgatggtgacgacaatggcggtgccggtaacgaaaagataagtacaaatatatattgatctaagaaaactaaaccttaagatactatacatggaactcaaacaaaaatcattaaacgaaatgaaatcatctcaagtttcaattttcaaaaatctagcagcaaaatagaatagtacaatggtgacgatggcttcggtgacgattttccggtgatgatggctccggtgacgatttttcggcggtggtggcttcggatacgattttccggcgacaatggctttaaaggtagtggtggttgtggtggtagtggaagaaaaaaa

SEQ ID NO: 48738 - DNA, 552 bp, Arabidopsis thaliana columbia
agatatataatggtataactgtagcagatgatttatctacaattcaaaagctttatcagtttcttttgtttttttctttgttagtcgtcgtacggcctagggaattgttagttaggaaaggtagatacataatgtatagagagggaagcaaccataaacatttacattcaccacatgctcttaaataattaattaatgcctcctaacctctccttttgctctatctatctactttaattaattacttgaatatatgctgcctatagagattcctttttctttcttccattcattccttttggctactgactctctctctcttttttgctctcgattaatacttctacttaattagggttttgggtaaaaaaattcgcccttttcaccattaatctattacccgtgttggcaaacttccaagaccagtcttctttcttttttggcttttcttattgagggccaatgaaagcaactaattaatttttaaagtagggtctacaaaattaattaagacaacccttaagttgatccaagatgcagaactgaccatat

SEQ ID NO: 48739 - DNA, 169 bp, Arabidopsis thaliana columbia
acccgcctggttcagttcaatattcagcagggcatcgacggtttatacgtgggtggttcgaccggcgaggcctttgtacaaagcctttccgagcgtgaacaggtactggaaatcgtcgccgaagaggcgaaaggtaagattaaactcatcgcccacgtcggttgcgtca

SEQ ID NO: 48740 - DNA, 542 bp, Arabidopsis thaliana columbia
agatttaaaaaaaagagagagaagaaaacaaaatctgtttcgtcttccacaagatcagaaatcaacgagatgagaagagaaatctggaatcgcagatgatcgactagtactactactcgacggagaaggacaaggcagagagaaaccaccaatccgtacaacgttactatcgcctcgccgtctcgatggaagaatcccggcggttagtttcgcgagaccgtcgtgtactctactagtaactcagcgatgattacgacggagatcatgatcgatttataaagttggaagattcaggtagatgaatttgcaggagaagaagaaggatctagaaatctctgatcttttttgagaagtgtgattggtgttgttgtggcttgtgagaaatgaagacctctcgatctctttatatatgtgtagctacgtctctgttagttagtgacacggtctcgtgttttattttattttaatatgtttgtttactttaaaaaaaaaagagaaaacaaaattaaccgcgtcgtaccgcgataaactacacattagcg

SEQ ID NO: 48741 - DNA, 572 bp, Arabidopsis thaliana columbia
tacaaagcttgtgaggtttaatcgaggatcgaatctataacataaaggattttaatttctttttgtctaattcacaatcttggtacaaaatcgaaatcgctatctctagtgtgaaacatttgtatctgagcagacaagaagtatgaaacaaagcattcaaagctatctagtgggttggaatctatcctgcttgtcgtaccctcaaggaaacacccacgagtcaatatatcccacaagatttatctaacaacatggtacatttctgtcttactctcccagtgtacgggatcattaccctaaacggcctacaagcttcaagaatttctgatgccttctccggatccacaatgctatcgtaccaatcaatgtggccatgaatcaatagaataaccacatatactaaagtctgaatattagcgtatataatgaaatatcagtttctctgtgaaaataaaataaaataagttatgctgctgaaatttagagtaaatccatcaaaaatgttttttcagtctttgtatctgggtattttgtatactttgactattcttttttttttcttagaaatatat

SEQ ID NO: 48742 - DNA, 458 bp, Arabidopsis thaliana columbia
cagagatatcaagcctgataatctgctactcgacagaagcggtcacatgaagttatccgattttggattatgtaagccattagattgtagtattctccaggaaaaagatttcgtagttgcacacaaccttagtggggctctacaaagtgatggccgccctgtggcaccgagacgtacccgctctcaaatggaacaattacaaaactggcagagaaatagaaggatgcttgtgagtttatcgttcttttcttgttctgagatttctacttgccagattgaacaaatcatcattactttattcatcttatggaagtttttctcactgatatataagttttctgttcaaatacagcttattaagtgaaatgctatcaattgcaggcttattctacagttggaactcctgactatattgctccagaagttttgttgaagaaaggatatggcatggaatgtga

SEQ ID NO: 48743 - DNA, 715 bp, Arabidopsis thaliana columbia
tttgtttatgttccatatatacatacatataagttctatatatgatctcgaacgtatatattggttataaattttggctaaagattatgatttttggtcgacagtttttgaaaaggtcaaaatgtcaatggagaagccacctttggcctccggtttagctcgaacacgatcggagcagctatatgagacggttgcagcagacataaggtcacctcacggctccatggacgctaatggtgtgcctgcgacggctccagcagccgttggaggaggaggaacgttgtcgaggaaatcaagccggaggttgatggggatgtctccggggaggagtagcggcgccggaacacacataaggaagtctaggagcgctcagcttaagctcgagctagaggaagtgagtagcggcgcacgtttgagccgtgcgtctagcgcatcgctcggtctttcattttccttcaccgggtttgctatgccgccggaggaaatctccgactctaaaccgttcagcgacgacgagatgatacgtaagtcgtgcgaactttatctcactagtcactagttttagtccaagggtagtttggtcatttgagttactatgttcccatactgagagggtagtatggtcattaagacatgcaattaaatgatacaataataatgataacaacggatacatgattggtgtgcgttgtttggttttttgcatgagagagtt

SEQ ID NO: 48744 - DNA, 522 bp, Arabidopsis thaliana columbia
cattattccaatgtcccatcccacaaaacatcgtaaccaaaagcctataagtattcacattcggctcaacttctttatcatccatctctttcttcatcttcagaaccatatcagtagattttgacccgacaaacatcctcatcagtatattataagtcaccgtattcggctcacatttcgcttccatcatcttcgaatacatcctatgagcgccattcacgtctctcttcttctcaatgtacctaaatatcgtattgaaagtcgaagcattcacttcacacttcttcttgatcatcgtgttcaaaaccttgaccgcgttttccagattctcgtctctgcaatgagcctcaataaggaagttataagtaatagtatcaggctcacatcctagcttcttcatctggttataaacctgcaaaaccttctctgttcttcctgctttcacatgaaccctcatcaagttgttaaaagtaatcgcattcggcgcacaacctgaatctaacatatccgcaaacacatcat

SEQ ID NO: 48745 - DNA, 284 bp, Arabidopsis thaliana columbia
gaggattctagaggatctgtccaagccaatgagcttacatattcaatattaatgtatttacaaataataataaatacatttataactgaaactatacttgaatttatccctaatttcaaaagaaagattaattattcaatagtttattatgtttataaacggtttaatactcgactggcaattttaaaaaataaaaatgaaaagtatcatgataatttcgcctaatatatatgttgttaagaaaaacaagattttaacatgattttttccaccggtttggccta

SEQ ID NO: 48746 - DNA, 398 bp, Arabidopsis thaliana columbia
gataaatgcttagaagctgcaaaattctcaagcaacaggaagaatgatataattgcaagaagcagagaatggaagaatatgaatgttaatggtggtttgtttcatggtatccacttttctccagacactgttcttcaaggtattttacctttgcaaccttggcttatcgtcatttcatagggattttcagacatgaccttctgggtcttatatcttgcttcttcgttgtagaacgtggttgttttcgtttacaaggagttgaaacagacaatgaaccaggaaggtgccgaagaacagatgggaagaagtggagatgcagcaaagatgttttgtctggtcagaagtactgcgataagcacatgcatagaggtatgaagaagaagcatccagttgatact

SEQ ID NO: 48747 - DNA, 367 bp, Arabidopsis thaliana columbia
tagctttgaacacactaatcaaacgaataaattctttatacatacacaatcacattatgtgtggcctatgatttagtcagatttatgacaaactgataaagtacaagaaatgataaccaaatagaattcaattcatatatactcttttcggataaacagtacagtgatcaaaattattagaattagtggccagataaaactacgaacgttatgtatatcaaatgacaactcgagagaagacgaatacttttctatatcaagatgtaccattccaaatatgaaatgccattgaattatatatctctataattagtgtactcgagttaaatatataattccctaccgtaatactaagatacaagaagtt

SEQ ID NO: 48748 - DNA, 322 bp, Arabidopsis thaliana columbia
tgaccttgtgctggaactggaaccaatactatccttctcttcactcctagttcttccattgtttttctctcttggagtcttggtctctctctttttttggtcaatgtgtgaatggaaaaatctcaaagacacataaggatgcttaaatgcttgaaccagatctaattaatatgaaatatagcacgtgggatatatattaactgtttcattggtctcatcgacatgttatttatttgtatccctaagtggaaaattatgaggttagggacagatctcaacattgtggaaggaaggacataccacaagaaaaagcacatggagt

SEQ ID NO: 48749 - DNA, 444 bp, Arabidopsis thaliana columbia
aaggcgattgatgacaagaactcagacattgaggggacaatacactatttgggagcgtgatgattctcggtttgaaatttgaaatattcagaagctaacattatattcattctctcgcaccaaaagtaatatatgagaaaataaaaatcttgttttttcttcacaccgcaaaatatcctcgcaaaatctagcgccgtcgttggcgattgcgttcaccgtcggttactctcatcttcttcaatcaagcccagaacttgattgtctcctagaaaccttcttctcgttcttgtcgccgtcagcaatccaagtatcaatttctgatcctccccttgccgacgaatctggtaaggtaagccattgattttcgattatttattgccgatcttcgtctaggtcgtccgctttatacttcaattgcatagagattaacgattgtggccagat

SEQ ID NO: 48750 - DNA, 572 bp, Arabidopsis thaliana columbia
tcagctcagataagatcaagtagttttgaagatttgattgatttggttgctcgagttttatagcctttggtcaaaaaccctaattcactaaatctcatcttgaaattccaaaattaccctcgtatatatataacgaaacagagccaaaattgttcgaatattataaagaaaccccacagcttctgaaacaacaaaactaatcctttcatcactctatagtctatatgagaatgagtgaatcaccattggcatccatgtacataaagcccgtgacacggattaagctttctttagcaccagatagttgtataagataagaagaatttacaccaagaagctctctctttcaaagaaaagatttgacatacaaaatgaagagaaataaataagaacaaaagagagagctgtgctgtgtgtgtcgtttacaaaggagaagtcgtagcttctgcattttgttaccttttgtgcttgtggtggctgagacgaatggactgcagctcggtatgaagatgaagcgagctgtcccagtgccggtacagtgccacctacaaacattccccaaaagaaagatg

SEQ ID NO: 48751 - DNA, 624 bp, Arabidopsis thaliana columbia
cactataatgattccaaaagcagaggagaagaagaagaagaaacaaaagagatagatatttggaaggaatgaaaacaagaaaaacacgaaggaagactctttaatcaaggaaaaaaaaacagagtttgagggtagtttggggattttcatgaggtcacgcgcccgtgttggtggagaattgttgggtaaagagaaagctggaggaggtgtagctgtcaggtacatattgagcactcaggctcgcatcttgtcgcacgtttcgtccaaccatctacacgcgcggctcattcttctgactgtacacataattatgttatcggttagtggcctcgatatttttaaaacattatagttttgttttaagtcataatcatacttaaccaatggtacttttttggctgtgactcagataattcatgttgtatcatcaaccttaaacagtttacctagtaaaaaacagatcatttcttgttcaaaaactaaaataccagacaccaggggaatatatgttcatagaagtgcaataacatgtccaaatagttaacgcatttcaaggtgatgatgatgatatgagggagagaggatttagtcgtctgagtaattgcagcgagatccagtagtgac

SEQ ID NO: 48752 - DNA, 504 bp, Arabidopsis thaliana columbia
ctgagaggtgatgtttggatacatggacagattaattcctatccaggataagaacgtaggaatactcgggacagattaattcctatccaggataaggacgtaagctttactcggagacattaaagacgtaatcgaacaaaaatgaactaacaatgatttaaagacgtaaatatcatttccattatattttcagacaagtattaacaatgagagatctgaaacagagaacccgcctacaaaaacccatgacttttgtctcccctgttagaacgctttcgatgacatgagtggtttgggaggtgacatagatctaagctcaggagccgagcttgggaacatcacgttcatcttatgcatcaatatatcagaccgtgatgggatctcgttcagaagaaactgttgcacgatcggtttcttgaaccactccatcaccaactctcctggtgccctcaagacgactttgctgacttcaaaaggcgactcaacagagctcagcatttgagc

SEQ ID NO: 48753 - DNA, 513 bp, Arabidopsis thaliana columbia
aaaattgattagtagtattagcttgttaagaccgtggagcaatgagcaatcacttcacaacttgaaagccaaacccaaacattagtaatatcaagaggaaggtcttgcaaaaaaactactgataagttatttgatcactaatattgaaaataatgtcataaatagtgtcttgctctatttgtgatttagaaatttttataaaaacatattttttaatctatgattttgaatattgttattctttcttttatttacaccacaccaaatatgttttttttttaatccaaaaataagccttttaaaaggagaaaaaagtaaaaaaactattgttattcaatgcatatggatttacaccaaaacaaatattgttattcaatccatatagacttacctttacagatgaccaaaaaaaaagaaagacttacctttacaccgaaaatttaatgttattcaatccatatggatttcaccaaagactaaattttatttatttccctcaaaaaagggaaaaca

SEQ ID NO: 48754 - DNA, 494 bp, Arabidopsis thaliana columbia
agttatctaaaataaacatttttttttgtcaaaggtctacagtaaaggccgtaaaacaaagcaaaacatgtgatttattttctgtgatgttaatcatgtgattaaatcattcacattgtgttgacattatactgtatatctaatgaatgctaatctttttaaggaaaaagtggaattaaattgtttttggagtataattttgtcagtttatggtggaaatcttatgctaatgagcacacgtaaacatgtgaatatatacatgtggggacaccctgacataaaccattcccgcgccccttcctcgataatctcaaccgcatgatttaaccctttccttcattctccaccgtccgatcatcttctctcccagggtcacaatctctctctctgtagcttttatgtgaatcgatcacttctctgtgttttgattttggatcttcacttttgcagattcatctccttagtatttttgaatctctgtttctcagtctctg

SEQ ID NO: 48755 - DNA, 581 bp, Arabidopsis thaliana columbia
gaacatatgacaatggtatgcaagaaaagcaggaaaagtcgaaatctttacgcaagagacaaaaacgtggaaacacaaattctaaaacaaaagcatctccgattgttagttctctcgatatctagacatagagcagtagcgttgcgagacaagaaaccccagaaagaggaaagcaaacccgaaaacatgaattgccaaacacggcaaaaggagatagatttgataacctgagttagtttatgagatgtctcaactttgcaatgttagagattgtggcactgtgggaatctggagttggcaacaggaacaaagacaacgaagaattgttcgtgtttgtggatagagagaaagagcactggtcgctctttcaacacgaagtcttcgagaggagaatgaggcacataaaaggagagcaaaatatgagagagtcgcaatataaagatctttttttttctttctatatgcacactttggagattttcattggctattttaagggtttattagagtgtttttattgttttcaattcttaagtgttcaatgttaagaaatattctaaagtcgtggacgtgttttgtgt

SEQ ID NO: 48756 - DNA, 570 bp, Arabidopsis thaliana columbia
tgctcaacgaaattgtgacagcaaagtttgtatttttagcccggattagtaaataagcttaaatttgttgtttacttcattgttttatgacactgtaaactgtttttctttccttgtttcatcaaattgggtttgtttctttgttgaaagatgatttcccttcactgggtctacgtataaatccagaaaggaagggactttaaacgatcacagagttacaattgattgaatatcggaaataaaccattttgcttgactatcggaaataaacgccttttcagtttgttttaagacctgttctacagatcctatatctatgaccatttcaaaactcttgttttacacaagcacttatgaaactttgagtatctcgtgctgctgcattctgcgtaaagaggagttctcatattaatctctttagtttttctacattcaaaagtgttgatttttttccttacactaatatcaggctcagaggggacagatcaaggtacaagtggtcttagtcataggaaggatcacaggatgtcctctcatggtgtcacctgcatgccatgatcgatatgtaat

SEQ ID NO: 48757 - DNA, 379 bp, Arabidopsis thaliana columbia
cctgcgagaatatctactcgttacggaaactcaggtgtcaaagtgtggatataatgtagtcaaaaaaaagggagacgtgctgtatccggaacgtgcggagtgtggtgaatatcgtgaaggcgggtgtagtaggggttgcaaaccgggtggtacgaagctgggttttggacggtgtggcgctgaacgttgtttgggtgtggtgtgttgctttcatgtgttcgtggccccgtggttggggcgggttgtcttgttgttggggctctcggtatgtcttctggggtttcttggggcccccggctttgtttgtcgttccgctggtatgcctgcctgcctggtccggtgggtgcgtggttgctctcggtccctccgtgtcgtcgtt

SEQ ID NO: 48758 - DNA, 463 bp, Arabidopsis thaliana columbia
gagtatccaagacgagataaacaaacccggtgaaaaagatggtccgcttgaaaacttttatggatattcttaataactatagtaaaatcgtgacggatataactaaacttcacgccaaaaagaccacgacgagattgtattcgagacaaagaatagtcatagaaaaacaatgtaataatggattaactttaatattatagttagtgcgataaacttatctatttaacttaggctggttattgtgaagaaatcaattatcaatataagtacctcaaaagaaattaggattaatattttaaaacaccaaaaaaaatgttgaaaacaaactaaaacccccgaaaaaggtatattttaggtcctaataagttatcacgccaatattaatccttacaggaagagaagaagtgaatttgggaaaggagttctaaagacaagatagcaatattgatggtaatttagctgc

SEQ ID NO: 48759 - DNA, 569 bp, Arabidopsis thaliana columbia
ggtgctctttcagtcgcttgccacgaggcaataactaaggaggacccaacaactccgactaccatcttgagtcttatctgttctgcatgcaaaaagaaactcaagaaatatcgcgagtcagccttttcttgtctggagaaggtaagtaaaagactagttgtggcttcctaatgaaaaaattttgagatcgatcatgatatctaaaactgctaataatgcagttcttacacagcatttcggttagtggatttatgagtattttgattatatttatcaggtcataatagcttttggcgatccaaagtttttccatgccgttttcccgatgttgtatgagatgtgtaatactgcctccatcaaaacgaacactcaagttcaggcagcaagtgatgctgtcaaaacaggttgttacacgaccactctagaatcccattagtcctatccttcgactgataacactcttacatttacatgggatatatgttgagtagtaactgttagttcttgtgttcttgtctaatccagctgggtgattattaacttagattaggaaatttgaagaagaaata

SEQ ID NO: 48760 - DNA, 535 bp, Arabidopsis thaliana columbia
tacaccatatatgaatcttactggcaatatatgagtacacggttgtgcaagagtccgtcccatgccctagttaatatatcctcgtcctcaatatcttcaaaagaaatttccctagaaaccaacaagacagttattcaaatagagttctgaaatagcaatagacaatgaatgatgaatgaatgaaggtataccgcggtaggcattttctatggtaggactttggacaacgccggcaaacagcaaattgcaaattagagtctgtcttaacctctccgttttcacagacactgcatttgtgcaatgggcatgtatactctccagcaatgatttgtctttctagtgcttcagactcttctttatttcctaaacgtagccgtcttgtgacacagtgaggatggtaaaagtagccacaggtggctgacacgcattggaaaacctatgaacatgtttaaaacacaaagctcaaccaattacttgtcagtcaccattatcaacaaaacatgtctgaacagcattcaacattagagatcaataa

SEQ ID NO: 48761 - DNA, 567 bp, Arabidopsis thaliana columbia
ggtttgatctggttcagaaagatataatacttatcctccagtttgaatttggatttaactgacttatcttatgattcaatccgtgttccacctctcatacatttgtttgcagaatccggtgtacattggtttagttctggtcaagaaacatatgtgagttttaaatcatcttccaatttaaatttgtatatgactgacataccagaagagttttcatagagaagagtaaattgtttcttgagatttctatgaagaagagtaaacttgggatacaaaatcactgtaaagaacaaaactttaatagcttcatcaaatatcaaattagttcgtcaaaatgaacagagcagaagagagtagagatctaaaatcacaaaagctaaaaagatctataacattcttgaggctcctccaaagcaagcataaggagaacaacagctcttcatgattcagctgcaatacgcccagcaacctgatccaaatcccgttgaccgctcgaagtgattcttctccctctgagacaaagaatgaacaaaggaggagagatgaaagtaagtcactaacaaggtc

SEQ ID NO: 48762 - DNA, 567 bp, Arabidopsis thaliana columbia
ctggatggaccggttaagggataaccaaaattgcctgtgatttctctctgtgacttggggaacaactccactgcaattacacctttgttttctttcctttttttaaagaagaagaagaaagtgcaatctaaaggcgtgactcgttagagcttttttgttgtccaaaagttacggtggtctctctgtctcttagtcggcaaaattccctctttaagagtatataagtaattttgggtattctttttttatttcattggcataacgaaacacacgacttgagcaacaacaaaccacgtcactcgatcacgctttcatgctttaccattttcccacacaaatcgactactatcacatgatttccctcattacctaactcacttgtgttctttgaccacatcaaaatttgtcctcaatacgtacacttggagaattttactacattacttggaatcaaaggtggtaattactatagtttgaccaatctgatcaagcattaaaaaaccgacgaggccatctcttcctcctccgatggcgctgggagatttagatctatcaagctaattatta

SEQ ID NO: 48763 - DNA, 402 bp, Arabidopsis thaliana columbia
ctagattaaactcatcagcatcaatatccgcaaacaactagaaactcaattacactaaattagcaacacgacaatgaattgaattcttaaattgagatgcatcaaactttcgatctaaacatacttcttcatcgtcaggtctgcagacagttccatgatgcttctcttgaattgccaatcgtcatcggaatcatcttttgtggatgctactaacgaataacactgacctaacttaatatctcaccttcatatacaggtctacaatctcgctcgccatgcttctccagatcgtgtacctcttctccgagctctatcgctcgtttctcagcagcatcacgagctctaatcttcttctgcttctccaatttcttctcatgcttctgcttcgcatacagttttgat

SEQ ID NO: 48764 - DNA, 594 bp, Arabidopsis thaliana columbia
tgtctttggtaatagagaggcagaaaaatcttggccatagatttgtcatctgttttcgattcgttttgattctttactttatcttcttcttcttcttcttcttcctctttttgaatcttttatcttctcacttttctttttcacttttgggaagctcgaagacgtgagaggagtgtgagagagaaaaggatctttgaagtcgccggaataatttgtttaaccggagctctgtctttgactctacgcttctctctcttcttcttccttcttcgtcttcttaatcgctttctgctctgtttttctcgttcatcaagctacatctactagctctctcagtgattgatttctcacagtttcatcgatttccatgcgtttaagacctaaaaggtaactgggtttgctaaagtttgttactttgaatggtttttatagtttctctgttcgaatctgaagtgggttgttgtgtttttgctggttattgaaacaggacttgttctggggtaaaggacttttcttgttcttgagagagttcattttgaggcttttctgggaattttgagaggttttttagggtttaagggggtttggttttga

SEQ ID NO: 48765 - DNA, 563 bp, Arabidopsis thaliana columbia
gggtatctgggaatctttaaaggtccaatttttacttatttaggtttacctgtgaagaaatttgattccttaagctgttgtttatatatataaagattgcatctttgttaagcttatgatgttggtcagcttaacaatgatagttaaagtgtttttgttcaataaaaactgcaacttgtgtggttctacaatatgatacttatcttgtatagaattgcttgttggctaggttgaggaaatgataatagcaaagcaatatcgttgcattcactcggcgacttgtcattgcacgaaaggacatcttagcgaagaagtattgtttcttatggttcagcatctaaactggaaccctaatgtgattgccactctatcttgtgtttgtaaatggtttgatgatctcgctaagcggttattgtggaaagaattctgtagagctagagcgcctaagatgatgagtgaccttcaatctagtggtagccatagtgttgatgggagttggagagcactagggaaacttttgatttactgctctggttcaagcaaaggtggactctttaatgatg

SEQ ID NO: 48766 - DNA, 596 bp, Arabidopsis thaliana columbia
gtccaaatctagaaaccctcatcttcgaagtaccatcgcatatccttttcttgcatgatctgacacatttcttttctaacacttagattctgagaaaccatttcctttgttatacttcagggactccattacggagatttaaatcaatgttttgacaaggattacagcttcaaagacacaaacgaatgttatggcgatcaaggtgacacgtgtcagtgcaaaccttggtatggcactccggtttggctatcatcaagcccagtgaagatactaaaggtattgaagtttggacaaatctctagttataaagatgacatggagaggcagacggatcttatcgagcactttttggagtcaatgccaaaccttgaacaggtgatattattctatgacactacatatgatgatgatctgaaaatagtatcaacccaacttcagatgcttgaaaaagtagcctcacccaaatgcaagatccaagtaatctctgataacatcagctactcatttactgtgtactcttcctcatcgacaaaagggccaacttcttcaaagacacattcccggtttgaagatcatatcaaagaattggtagttag

SEQ ID NO: 48767 - DNA, 596 bp, Arabidopsis thaliana columbia
gatagcaagagttgggtgagaatgttgaaatgtttttatgatagcttttaaagttctgtctttttagaagccctgtttataggaaagagaaatttatgtccactggttggtaggaatcagaatgattctattattaggttgggagcgtgttaggttcttaaagcaatttgcccataaaacccgtgggctctcccataacatgcccttggaatagaaagattttgaccattatataatattctagttcactaaacaaattgctgtatttgtgaaactgtagggacactcatcaagattggcagcacttgattacacagtatgcctccacagtgaagtgtttgtatccactcaaggtggaaacttcccacatttcttgataggtcaccgtcgctacctttacaaaggccacgctgagacaatcaaacccgataagcggaaactagtccagctcttagataaaccgagcattaggtacttgatttctttataactcttgacatcaagctcttagattcctctgctctaaagcattttcttcggtttggacgttttttttttttgtagatgggactacttcaagaaacaaatgcaagata

SEQ ID NO: 48768 - DNA, 596 bp, Arabidopsis thaliana columbia
gcaaattaaggtttacgagagtaagcatatttgtgtccgatcgggttacttcaagatgttaaagagaagaaccattgcttggttattttcggataggctgaggaagaatccaaagattaccaaacatgagatggttgatgagataaagagagagtacaatcttgttgtaagtgatgaacaatgttcaaaggcaaagaccaaaatcatgaaagaaagacgagctgttcatgaagatcatttctcaagaatatgggattatcaagcggaggtgttgcgaacaaatccaggactaagtttgagatagagactattccaggacaaaccattggaagcttacaaaggttttatcgtctctttatttgttttaattcacaaagagattcttggaaacagacttgcaggcctatcataggagtagatggtgcttttcttaactgggatgtcaaaggacatctcttagctgcaacagggagagatggagacaataggttagtcccattgcttgggcagtagttgaaatagagaacgatgataattgggattggtttattagaatgctcactacaactttagatcttcaagatggaagcaatgtg

SEQ ID NO: 48769 - DNA, 479 bp, Arabidopsis thaliana columbia
tagctgagcatgctctgcttccggttcttgcaaccgtctccaaagcttcgaaatcgcggttttaggcatcggttcttgaacaaaatcagaatcagccttgaaagccaacgatgctcgtgtacgtttagtaagaacattgattggttcttctcctaactcagcaaaccaaattactgactcaatccaactcatctctgtacaatcatcttcctccaaacccaattcaggaaattctttgtttaccattttcaacagattcttaaccgaaccaagatacaaacccggaaacgaagctcgaaccatgttcttgtatctctgcaacataactcttatgaataaatcatcagagactttatcagccacgaattgccaacgatgaatgatctttaaagcactctgttctgagaatttcgtgacgttgaagacagttactgttgatggaacattgattaaaccgatcttccatgaaagaacaacgc

SEQ ID NO: 48770 - DNA, 591 bp, Arabidopsis thaliana columbia
gcatgtttcaatgttacttcccactttctatcagacattccaggccccagaatctgtacatcaacaaacccctattcctattagttctctaataataataaaaatttaggggtcaaataagctaagaatttaaacctgacggagttcgtcgacgtcaacgacggatagtttcaaaaagtcttggacagtgttgatgtggcgagaggagagcttcttgtgaaaggccccatctttgcctatcttctctagccgccacacttcgtcttctaacattggtgggtgatgtttcttgtacacttcaccaaccccaagttgtacaaaacaaaactatttagaattatatctagttttctactatgtatcttctttatatgtattcgctttatgcatgtgtttgttgattgttataagattcggaaaatatacagagtattaattaatacgatataagcattgattgaccaaagacttataggctcttgtataaagtgggatagtcgtttgcatacggtccacatcgaaaatacttttagtaagtgttttctaattaagaattaaaaattgcatgtgtatatatattaagacaaatta

SEQ ID NO: 48771 - DNA, 595 bp, Arabidopsis thaliana columbia
ataggttgctttttgttaaaatttatcaggtgatcccatcgacctcaaaaacgcagcagcaaagaatcgtcgtgctcttggcgacattggaaacgtcgattctcttattggagtcgaaggaggaaagcttaaccgccccattactcgtaactttcgtgctcagttgctagaaaacgcacaagttgcagccgccgctaacaaaaaggctccgattcttgatggagttactaagaaacaagaagttgtaagagcggttcaaaagaaagcaagaggtgataagcgtgacgcgtcaaaaccaatcgaagtgattgtgataagtcctgatacaaacgaggttgctaaagctaaagagaacaagaagaaagtgacatactcttcggttcttgatgctcgaagcaaggtagattctttgttcaacattgaaagcataatgtgcaaagttctgattatttggttttgtgattggtgtacacacttaggctgcttctaagactttggatattgattatgtcgacaaagaaaatgatcttgctgctgtggaatacgttgaggatatgtacattttctacaaagaagttgtggtacacttcagtga

SEQ ID NO: 48772 - DNA, 518 bp, Arabidopsis thaliana columbia
tttattggtcacttttggatgctctgtctctctactttagcattcagtttcgtaagaccttgacctcctctttaactttggttatgtagtatggttctaacttatattctttgtctagaattgaaatttacgctctcttctgttcagggtttcgggttcttggcaatatcagcgtcaccaatactttcaggcaatggacaaaagggcctgttctacgtagcgctaacggttatatccgttggtatatttggacggtctatctctttgggagtatttacagaagaccaactagaagacggtaggaacaagggaaacccgccaagctcgttagctttgtcattggaaatgtggggaattttgtgttcttgttacttgctgctattgcaatgcctcagataagtccgtggtttgttaggttcacgatcccctcgggctgtgaggtattagcaatgctgatctttatttccggtgcgtgttcatacaaacgggttaaaccaggtgggagccctttgacaacg

SEQ ID NO: 48773 - DNA, 475 bp, Arabidopsis thaliana columbia
aggatcccggaacgtagagaaacaaagatagaaatgagaacgaggatgttgcagtgtgagaatatgaactggatgcaggcatggttttgtggctgcaaaaggacatcagaaagcgattattgtttaccaggatatgttgcagacaggaaaatatgactctgcgctgaaatcaacagtatggtccgactataaaaatgacaaactcactgacgctatctccctacgctacctggtacgtttcacgctggtggatgtggcaacaggtgagtgggctacctggtcgccggtgaattatgaatatagagtgcttccaccattgcccgacaagaatgaagccagtacgactgatatgacagagcagcaaatcatgcaacttaagcgaaagacctatagatcgatggtaaaagatttggttaaccgctatcaataataaattatatctgccgccagaaatttctggcggcaataatacaaa

SEQ ID NO: 48774 - DNA, 545 bp, Arabidopsis thaliana columbia
cattccgacttctcactgtttcctcagaaggaactaacaaacttatcggacgacgacacaagggacatttgcatggccgtaatgtagatccatgcctccaaactagcataatgcagttccctacaatgatagaattagagtttatatctcatgcactatattatgtgaacatacagaatcttaggaaacttagcaaacaaaatctaaaaatttatgttaccagtaaaacaactctgaatagttaatttacaagtccaaagcaaaattgtctagaaaacggaaccaagcttcaggggaaaacgaaattaagatcgtcacaactcgatttgatcccataaaggaagctaacgaagattcagagaagctagctacactcgaattctgtgactactgaaactaataaccgatcccgaaacgattcgagagaaggagaaacgaaagcaaataagaaggagatcgcaccgcagaaccagtgagagcaattggattggcaaggagcgttgaagtggccatggcatatcgaacaaagttcgttctccggtggc

SEQ ID NO: 48775 - DNA, 582 bp, Arabidopsis thaliana columbia
agaggataaatcactcaagcatttgatttagagacgagccagctttcaaaatggtgagccacggcgatgaactccactctgttgagtttggctcatcgatctctctcttggaagcgttctttatttcgttagcagtaactagtcatcagagttggtgtcaggaggaagaagaagaagaagtggttgtgatcggagattgtctgttaaagagagaaacaccggcgaagtacgcaacgaacccaccggtttctccaatcggtcgggtctagaggcagagagagttgggcttagacagtgttggatctggtttgggctgggctttaatataattgtaattaagaattacatggcataattaatcgtttagaatttgggtaatgtacaaaatagtgacatgcacgtatgaataatatagtgcttatggtttttcctatagtcctttgaaaaaaatcgaactgaaattattttcagataaactcatttcgagacgttttttcggttgaatcagaactattttagattttagtatttgatgataaaggaatagagaggcatgtgaggaagagcagtatttgacagaca

SEQ ID NO: 48776 - DNA, 403 bp, Arabidopsis thaliana columbia
gaaatcatttatcacatacgctaaatgggcccattttacatggttcactgttatcctccaagggagtttcctatgactacttgtgatagttactaaatcaagattttacattttaagtaagggtttgtgtctacttggaaactcaatctagggatatacatacctccattttacgcaaggtttctccaataatcactagctggtcctcaattttgtatttctttttcagcagatcagcgtagatttcctaagaaaaagcagcagagatgttcacaaagtagcataaaacattttcacaagagagaggcctcagctattgtttcgagctcttacctttgctggagtcatcagattatcattctgactagtaacacaagaattaggcgtagtcatgataacaagc

SEQ ID NO: 48777 - DNA, 860 bp, Arabidopsis thaliana columbia
cccagtgaaccttgtaaaatgggcccatttagcgtatgtgataaatgatttcctctgtctctatgagagaccactttgctgatagtcgaataatgatgaaacatttgtgttactataaatgcaaatattgcaggaagacatgggatggcttaagaaaacagtggacgagaactatcctaaaaagccagactcaacagagacacctttgctactagaggattcaccaccaatacagacactagaaggagaagtgaaggtggtgaacaagggtaaccaaatcacagagtcacctcaaaacagagaaaaaggaaggaagcatgatcaacaagaaagatcaccactttcactaataagcaacactggtttcagaatctgcaggcctgtggggatgttcgcatggccccaattgcctgctcttgctgctgctactgatactaatgcttcttcgccaagtcacagacaagcctacccatccccttttccagtcaagccacttgcagctaagcgtcctcttggcttgacgtttcccttcaccatcatacccgaagaagctcccaagaatctcttcaacgtttgaagttgtcactggaaactgatgcatcagatcttactttccctacaagtaagctgatgtgaactggtaaggtctcttccatgaaatatataataacttacaagcgagcaggtatttaaaagtaccacttatatttatataaggaactatatttatgggaataatttggcaactttttgaaattatcctctttaatttagggattttacgtctctggttattaattatatatagagagagatgatttgaaatagagaggcttatcataggaatatattcttttgaa

SEQ ID NO: 48778 - DNA, 562 bp, Arabidopsis thaliana columbia
cctcttcaaacgtttctccaagtgctcctctgttttaaaacattgtccaaccgccagctccaatgaagacacatctaaagtagcataagtagcttcttctttttcttcttcgatgaatatacctaaattttggagtagtaactgaggtttttcttcttcttcaggtggaattccgtacatgctaaatttctcatcttcgaaatcgattccgtcagaatcgtcgcagtaatcgaatctactttcatcatcttcaccatccacataaatattattaacttcagcttcttccatgttttcactggataaatcgatatctcattctaccttatggaatatattacttggtcgtaaagaacttgtcaaactgcactcaacgaaaccatcaattccttcctttgtggattgaactataaatttctccttcacctcagcacaaagtcgagtggtttcattcttcatatgcccaaaaaaagctgaaaattgtctattattaccaataataactggtggtgtactgctggtagtcttttttttttgagattttgaacccaaaactactttg

SEQ ID NO: 48779 - DNA, 376 bp, Arabidopsis thaliana columbia
  unsure (1)..(376): unsure at all n locations
nnnnnnnnnnnnnnnnnnnnnnctaaagggaacctgtagcgataggtgctagttattgacacgatgacctgacatcaaggttctctcacagagagcgtacgagacggacaacatgcagcgcaggctactatacacaggaacactgtgaatcccgatagacggcgaaangaaaatactgaggagaaaacgcccttcacagaatatctctttagaaatccagggctttaaaggaataataaaagggaaacatgnacnacagggagggacactaagncatataaacagcaagaaagtaaacttcgaacaaacgtccaagaagatagcgacatgaacaacattggaagggtaacaccaaacataagaggcagcaaccgtt

SEQ ID NO: 48780 - DNA, 612 bp, Arabidopsis thaliana
  unsure (1)..(612): unsure at all n locations
tttaattatttgcattctttttttgttgacggctaactatttgcattcatggaaacattaactataacgcttttggctaggcgagaattacatagaaaacgtaaaaattcagaaataattagatattgcacaaagattgatttatgtctaaacatgtatatcaacttttatagaaacacctgaaataaatcttttatgactagttgacgaattccattgttttttcttttaagctgaatattacagatttctttttctgctagctctagtatcaaatgactgttacaaacttacaatcataatttgagtatttaatttgtgttatttttaccaaaataaaaaagggaagaattgacgcaaaattactcatcatgtattcataataaagagctgtgtgtaacgtatagtaacgtttcaaatgaccaggatttcaaatacgtcgtagacgatgacgttttgccggacgggactttcgtgccaagaggctcgacggtgacctactcgatttactcgatcggacgtatgaaaacaatttggggcgaagattgtctcgagttccgtccggaacggtggctgacagcgacggtgaacggtttgagcncccaaagatgg

SEQ ID NO: 48781 - DNA, 430 bp, Arabidopsis thaliana columbia
caagactgaaaactaatggcaaaaataaaattcacagtagcaattacttccaatttactttttcaaataacaaaagaagttcaatacacagtccttatttcaatacagggagcataaagtcatagaacaagaggaagacttgggcaatagtgtttacctttatgaagcaaggctgcatttcaacaagagagactgtgtctactctctgtcccaagtccatgtttggtgatttctgccacgacgcatacagtgattgcagaggtattttgctccataaacaatgtcctcctatatctcctggcagaaaaaaacgcttccgatggtaagagttaatgaaaaaatagactttcagaaactcttataattggagtcaacgaatcctaattctattgttaatcaatagtgctgagattttccatactattacatg

SEQ ID NO: 48782 - DNA, 1017 bp, Arabidopsis thaliana
caaaaattacagaataagaaattagaaatcaagttttaagaaattctatagccattacgaattgaacaagtcaggtatgtaattttgagccaacaacacacagatatcgaaagtcgaaaaaaattaaagaggcgtaccggcctgttttttctcggcggaggaaccactctgttggagaatctcgagctcaacgagaccaagggacattagtccgagtgtgagacccgacattattccggcgaagagtacgaggaaacacgcgacaccgacgacgacgaaccaccacggagaaccgaatcggatgtcctcggcttcaaagacgaaactgttgagcgagtaagcggctcttaccaacgccaaagtgctcagaacaaccattgccgcgcttcgatgagagacaaaatcaaacagagacggagctagagagagagagtgtgtgttttctctgttggtaaggaagaagacgacgatgaatacctttgatacggggatacatggaccacctgacacgtcagcatcctacatgcgttatttccttatttttctctctctttttttaactcatgcgtttttttgcgttattcttcttttaattgatttgttggattattgatgacttctgagttttgctaatcatcttatttattcagcgtccaccggttttaacgcccgagaacgatatacaccttacctgattacctctaatcacattattcttgagattatcgaaggtacatttggaccgctagcaaaaaaaaatatgtaaatacttatttttcaagttacaaagctaatgttattgacaaaagaaaaaggaaaaaaaaggatgaaatcttggaaagctacagcattttgttctgcccaacgcaaattgtaacactaaagatttcgtatggtcaacgtgaatgataatttaatcgtaaatattttcttaagtgtaaaccggtatttaaattcccttaattcatcggaaagattttggtataaaattgatttactttctttgggcttttgggg

SEQ ID NO: 48783 - DNA, 597 bp, Arabidopsis thaliana columbia
cttgcagaatatgaggacagcacgagatggctgtgacatcctatccgcatacactttgagcttcatcttcttcttcctccgattttgtgtatcggaaaaagttttcagaacactgatgaacaaacagaacggtgataatctggggaagaaccaaattagctttgctgtttccacaatagagactaaaacgccgtgccgtttttctagacttctcttaaccggctggttagaccaaatgctccttcttcagtcttcacgaatcaaatcataaccggtccttaaccagctccagttgagatcacaaatatattttattttctgttctttgaaagtttgaaacaaatacatcataccaaactacaaaatttattttatatttatcgtatttgttcatcaaataaacaaataagaatggaccggagcaaatcataatgataatcacattcatgagcgcaaacattacaaaaaatgttataccactgacctgttgattttcttaagtaaacaatcaaaagtaatatcaaaagcatctcgaaacttttcaaacttagcattggagtcccatatactaaccaggcaaaactgttgactatgtac

SEQ ID NO: 48784 - DNA, 461 bp, Arabidopsis thaliana columbia
gctttgtcctttcatatcagagaatactactgggtggacataaaacagatcaatgagatataccgttacaagacagaagagtattccacggatgcgactaacaagttcaacatctatcctgagcaaattcctccatggctcatggactggatacccgagccaggtgggtatctccttgggaacctacaacctgcacacatggatttcagattcttcacgcttgggaacttttggtctattgtctcgtccttggctacaccaaagcagaatgaagctatattgaacttaattgaagctaaatgggacgatattattgggaatatgcctcttaagatctgttaccctgcattagagtacgatgattggcgtataataactggcagccgaccaaagaacacgtgagtctcgcttactctttactttctcctttgtgaaatcctgggcttgtgacaatatatgta

SEQ ID NO: 48785 - DNA, 397 bp, Arabidopsis thaliana columbia
atggctatgactattactctcagtagcagcagtactatcctctctgagtctccgcttcttattggcctcggttacatgcatattactatcagtctgcttctgtataaactgagagaggaaagtaggattctgtacagctttagcaatgaaagacataatctgttgttgcctctgctccataacctgaagatgtttaaccagaacctgaagtttatgagctgttgtttgtagctgcaggcgtcaattaacgagttccagcgtcaacacgtttttgtctcttttaagctgttcaacgtcatcctctaacccaaatttcccaacctcaacacatgaagataatgcagccattgaaccttgaccctgagataattgcagagattgtggattactactacta

SEQ ID NO: 48786 - DNA, 509 bp, Arabidopsis thaliana columbia
gaatctcagaatggatcacgagaagtttctcaatcacagtaacaaaagaaaaccctcatatcttaagagcacagtcatctcgatcaaacccaaaatgccctaaagcccaaatcgaattttaatttccaccgatcattaacctctcaaacagagcattcatataaaatgagaagagaaaaagcatacattttgtcggctttggacatcattttgtcaggatccgaagacatgactagctccaaatttcagtaaagttcccggcgatttagcaaacttggagatcgatcggcaatatagagagaatcgttttcactatctgatcaaaggaatttgcaaatcttctatttttagttaattttattattgaaattattggactttatctccagatatataatagaatcaaatattttattttaactccttgaaacattcttattcaaacaaaccaaaccatacttttgttatgtttcaaattacccatttccacgattctgttctttgtgaga

SEQ ID NO: 48787 - DNA, 329 bp, Arabidopsis thaliana columbia
gtctaccaacagtgccaccaccaccactaccaattcctcctccggctcctacgcttccactagctcctcctccggctcctacaccaccaccaactcctcctccagctccaccaccacttttaccgccacggccttttccacctccaccaactcctcctgatgcaccacctccaatggcaccgcttgccccaccaccaattcctcccccggctcctacgcttccaccagctcctcctccggctcctacaccaccaccaactcctcctccagctccgccaccacctttacggccacggccttttccacctccaccagctcctcctgatgca

SEQ ID NO: 48788 - DNA, 537 bp, Arabidopsis thaliana columbia
gtttcttaagtcaagtttcagatacatacctaaacacaattgtggatcgttatggagtatttttacaaatttacgacaatatatatgcgtaagaccagaggacctataggtatgggtttcttaggaaaccgatataaattgatatagattatagaactacatacaaacataggttttacacattgtttattagttttaagaaaaaacaataaaatcatttaaaagaagtagtgatttgatattttttttgttttgctgtaaatgaaccagaaaggtcttatttaaggaaatatattaaaacttctacattaaataacagtttataaaccttcacagatagaatcatagaaaagaaggaaaaaaaaagtgtggtggttaggaaaaaatatacgatgtgaaatgtttaactacaacttgctatatcgaaaacctttacttgtaagtccgtaatcatcgaaacttaattcttgttagagaaaataaaaacagtgcagccaaattaccctaaaattacgtgaaacatctcatgacatgaca

SEQ ID NO: 48789 - DNA, 389 bp, Arabidopsis thaliana columbia
tcaatggtgcctgagaactgattgttctgaagataactgtgaagttgaaaaagcacaatgttagtaactaagtattaactttaactggttcacttacagggagtttttatttatcaatacatagagacctacttataggagtcttacattgattttgcactcgtaagagagctacaagtgtttgggagagaccctataaaagcattggaagagaggtccctgaaaacacacaaaatcttgtcaaaacatttgtttattaacttattcctttgactcaggaaaaaaggatcttacaatatagagagagaggtgagttttgtgaagtcaatagctagctgcttcaaatggttgtgagcaaggttgctggacaaaaacaatggagcattaaa

SEQ ID NO: 48790 - DNA, 584 bp, Arabidopsis thaliana
tcgtcagggtcaacgttacgactgctaccgctatatcgtataagctttggaacattagatttcgatcgggtgatcgtcaaaccgagagtagtggttcctcgcaaataccttagactatctcattgccactccatgggatttctttggttcatgcatataacgagtcaaaactcccacacaagaagataattctggtcttgtgtgaagtaggtaccgaagagagcccacattctttctataccatgtagcatcaatccccttttcttcttcggcctttgatagttgtagcgccgactccattggtgtgtgcatcaagttacacttagcattccagcttcttctagaatattcaaagcataccgtgtttgattcaatattattcctccctcgatgttgacaaaatttgatccttcgatagtatgtcaatctttccaagtcactcatatcaaacttcgagctcatctctcccttaaactcttctatgattgcaacatttgttcccgtacaaataaatcgtcaacatatactgacacaatgagaaagttcttacttacccctttcgataaaaggatggttctttggaa

SEQ ID NO: 48791 - DNA, 175 bp, Arabidopsis thaliana columbia
taatgttccaaagcttatacgatatagcggtcgagtcgtaacgttgaccctgacgatgagagaagcacagctggtcatagcttcaacctcggtggatgcccggtatcgtggtgttaaaaaaaaagatatcatggcgatgtcttcgtgcgaggctgagttgatggctgggattgaa

SEQ ID NO: 48792 - DNA, 599 bp, Arabidopsis thaliana columbia
tgttcagctagagcgaaaccctagattcacatttgagctgagagatgctgcgtgtagcagggaggaggcttttctctgtctcgcagagatcttcgactgcgacctccttcgtcgtctcccgtgaccataccctttccgatggtggcggcgactcctcttcagctcccagatccctcccctctgcagatctctcatcttaccaccgtagccttatcagaggtttgccgatttataaccctttccctctctctctacattgatttttcattttcggtggttctttgcagttttatttgattgattgatttttgaaaaggtcttctttttttggttgtatgattcacgggaatgattgagatttctagtattgtatctgcaatgatccgtgggaacaaacgtgtcatctgatttgaattccatgagcttgatgtaccatttggctacattcttctccttgctggatttgtattgcatttgatgattacttctttcgtgtggattgtcagttctgagataacctttgttttactaggaaagttcctcttttcggtgcgttaacatagtatgattcccactggcttcttggtttttgaaatttg

SEQ ID NO: 48793 - DNA, 374 bp, Arabidopsis thaliana columbia
catagaggtaacaaaaagagtctataaaaacccctacaatacaaatatacaaagtcatgtagaagagtaataactcttgtttattctctgacgtccacaatattataaccaagatgaaatcactccttcatctcaattctctttcattcttcgtcagcctctttttattttcaatctcgtgactcaccgaagaagattcacgaacgacatgagtggatcaacatctctatgctctgaagggtacttaatagcccgtggagctcttttcggaaagaggagtatcgtcgggaagctccctcgctgaagctcttgcttagcgaactccttctgctcaccgtcagctcgggatttcgccgctttgactccttttcccg

SEQ ID NO: 48794 - DNA, 625 bp, Arabidopsis thaliana columbia
aggtcgactctcgcatctgtgtacgccacgcttcgcttaacgtttcatactcctctaactagtagccgtccgattagtttctggcttttcatgacctaaatctaaccgtcaattagagaagcttacaatacacttaaccgcaggaaagatattcaaaaccattaaaagcagtcaacacaaatgacgtgagtcttagtaatttccaaccaaaacacgccacgtgtgcggatactcttcttccttgagagcgcggacgtcaaaactaactatcaactgaaactttgaaactacctattggggtccgctctctctctctctctgccatcagaagaaaaaaccaaacaccgagacaaaacacatcacgaagaagagagagatttgccattttcggcaaggaagtgttttattctagggcttctctagttgctgcgtagacaagatggtggagtgaaattgcggcggtgacttttcaggtatgacggcgccacgacgtagtcggcgatttactttttgtgtttgtttacttgtttagcttgacgctgagagattatggaacaaaacatctagttttacagattagggaggtttgaggttgtggttactttggataaactattgtaaatgt

SEQ ID NO: 48795 - DNA, 586 bp, Arabidopsis thaliana
  unsure (1)..(586): unsure at all n locations
cattggattgctgacaacttgcagtcattcaggccttgtagaggaaggttgcatgattttcgaatccatggttaaagattatagaatcccattggaagtagatcatgtaacatgtatgatagatatgtttggaagaggtggacatttagcagaagcaaaagacttggcgacaacttacagttcacttgtcaccgactctagtaataatagttcatgggaaactcttttaggtgcttgttctacacattggcatacagaattaggtagagaagttagcaaagttctaaagatagcagaaccaagtgaagagatgagttttgttctgttatccaacttgtactgctcgactgggcggtggaaggaaggcgaagatgtgaggagagaaatggtcgagcgaggcatgaaaaaaactccgggatgtagctggatcgaagtaggaaaccaggtttctacttttgtagtcggtgactcttcacacccgcgcttggaggagctttctgaaactctaaactgccttcaacatgaaatgagaacccagagacgtttggacattgatcatttagtgatatagacaatganaaatatg

SEQ ID NO: 48796 - DNA, 645 bp, Arabidopsis thaliana
gctgaagcatatgcgaaaaggcttgtagagtatgatagaaattcggccgcacgtacaacggttattgatgaccaaagcgattactatgaatctgagagcagtacttggctctctgcggaggtatatagaatctccattgctaaactacatttggtttttgtttcgccattgacttaatatattggattctgttctcaggaaaaagagctagtgaggaagaagcgagaggagattgaagaagctgaacgagtaaaaaagagcaaagtggttatgacatttgatttaatcggccgtaaggtaactctcaagactcccctgttctcagcatgtttgaaactagaactagaagataagttataggtttcctttgaagtatcgagtcattttccctgtctcaagtctctctgcaatgttactatctatattcttcaaggtttacctacctttcttctccagtagggcatgcttgaattgctagatcaatatcgatttacttgtcctcggattattcttcatagagatactattcattcgaagtagtgatgattcatgatttgacacattacaggttctgttaaatgaagatgatatctcagaactagaatcagggaacaggattctgggaccacctgagactaaaaacgt

SEQ ID NO: 48797 - DNA, 560 bp, Arabidopsis thaliana columbia
gtatgaccacctttgtttatatgtctactaactgtgtatcctattatatatgcaggtggtgctaatggccctggaactcaggtaacacccaccaaactctatgaaaccaatgttttgttttccaagttattgactaggtttagtgagtttggtgattcttctggttagtttgtaaatgcaactttttaataatttcaaatgtactccatttgcaggcattgatgcaagcaattgagcatgagattgaagtcactgttcgggttcacgaagtgcgttctgaatatgagaggcaaacggaagagtatgtctttcatcagtatttgtttcataacttattaaggcctgacaagaagtaattcttaaaaaaatgatttcttactaacctgtctcaaataacactgactataattcaggagggcaagaatggctaaggaagttgcaaggctaagagaagaaaacgagcttctcaagaatgccaagataaggtgcgtaatcaggactgacaaagattttgcataaaccaagaccattcataatgaaatatatcgtaaacaattagt

SEQ ID NO: 48798 - DNA, 424 bp, Arabidopsis thaliana columbia
tattgtcaatcatatacgccagagaaaagaatacttaatggtatactaatatcatcttcacagcctgtaaccatgccgggtcaatagatctgagactaaaacttttccattaattaatttcactagttgcaccgtgatttgaggattaatgatggagcatgagggaagatcttcgttaccaaacaagtgacgtgtcaacctttatgtagaaatcatattcatggagatacaaagagagatagaaagatagaggacagagaaatatataggggttaaggaatgtagaataatgcagaggagactagaatagggttggttccatttccatgacaaggacatatcactccaatgatgccagttggtcaagcacttaacctgacaggcttctcgattaccgttgctcagggagattccaatcgagtaa

SEQ ID NO: 48799 - DNA, 444 bp, Arabidopsis thaliana columbia
tggcaaacatattgggaatagagaattttggaagaggcaggttgttgttacccgtaggaaaagtcagcctgccagttacgggttctactctccggctagagacgaagctgatgacgaaggaagctttactagaaaaaaggtaatcagcaaaaaaaaagttacagtttatgtacgtatttataatctgctcgtagctgttgtggtcctttctcccctgtgacactaaatcccttagcatgaagaacataagatcatatccgaatcaattatgcaggtgtatagtatggtatggctttttgaacagcgtcgtgaacatacacatcacttgatagacagcttctctttgtactcttttagagtttcagtatcttgtttcttttgtggtataaatacttactggaagcttattattggtctcttgtgtccctccacagacgaaaatct

SEQ ID NO: 48800 - DNA, 312 bp, Arabidopsis thaliana columbia
agaggatccccgaaacagcagactaaccaacaagtaacttcacaaactctaaaacttcttggtctaagctctctaaatgggtatttatgtcaccctaagcacaagacacgatgaaacccataaacgaggatcttggtctctctagtgtatatatatttttactttcttttgtcttcaggtcttgaagaaagccattaatgaagccggagctccaacggtgacacgattccagaggtttgtgtttggatgaaaacggcgtcgttacttaaagggtcgtgaaagagaggagttttagttttatgtagagaagaa

SEQ ID NO: 48801 - DNA, 524 bp, Arabidopsis thaliana columbia
caaggttagttggatccatattccatacacatatatattctatttagtgcattccaggtccttttgatgtcttaacttccacatttgtgactgtatgcggttgacaaatagtggattctgatactatatacatttttctatgattcagctcgcaatgtgcagaaagagcgaggaaaatatatcccttgtatatgaaatagatggcactgaagctctaggatcttgtttgcgagttagaccttgctccaatgatgcacctgatctttccaagtgtacgatacaatggtaccgttcatcttcagatggctccaagaaggagcttatatcaggtccactcacctttctcattgttttctttctcttattatatttgagttttaaaatgttctgttctgtgagctagtcgattacaaatcagattgtttcttctaactaatgattttggaattgtgaacaatatatttccaaaggcctggtgtaaatagggcaaaatcaagtttaacattgttccattgaggaaaatg

SEQ ID NO: 48802 - DNA, 548 bp, Arabidopsis thaliana columbia
  unsure (1)..(548): unsure at all n locations
nnnnnnnnnnnnnnnnnnnnnnctaaaggatggcactggcaccagcgggataggtgcccagaagaaaaaaatgtacgccaataacggcgctatagaccgaaagctgctttttgaagcgacgttcgtcacgattgaaaaatgttgtgataccaatcagaaaggcgatgacacccacgccctgggccagccaatacgcggtcatgataaatccttagcaggtatggaaaagcaaacggcgcttcacattatgaaacgccgttttttattaacaactcatttcgactttatagcgttacgccgcttttgaagatcgccagttcgcggaagtcgttacgctcgttacaggtttgcttaccgttggcaaactcaacgatggtgtcgataaattcttccagcaactgcggcatcgctttaccgtggatcaactgacccgcgtcaaagtcgatccagtgttttttcttcgccgccagttcactgttggtggcgattttcacgtcggcacaaatccccatacggcgtgcacgaccagtactgaacagcccatatgg

SEQ ID NO: 48803 - DNA, 538 bp, Arabidopsis thaliana columbia
gtgtgtaacagggaatgatttatgtaaaaagattctacacattttgacagcatagtttatgtcaaagaacaaaaattcaaggaaaaaagaagaaaaattaatacacatctttagccattattagcaatgacatcttccacgtattaggctaacatatatagatgcttctagctagcagtagaaaaagataaattttaatcccagatagttgccaactttcaagtaagtaaacaaatcaatcatgtgtgttagaatcgacgagatttgttgagatttcaaaataaatgaaccccatccctagatgatattatcatggagtggcaatattggaaataccaaaaatgagctcatctatgggcgtgtttgtgttacacggagttcattgaatcttgagacttggaaaagagataaaagaaagacaagttgagcaagtggactctacaaggctttgcgttgcccgacgtcccaccttgttaccacacagcttaagtcttaacgcacatcttcaaaactaaaagatcatcaactatttattgtt

SEQ ID NO: 48804 - DNA, 606 bp, Arabidopsis thaliana
cagtttccgagtaagtggtctccacggtctgctcatcagatcctgcggccccataccgtggccattcccatccttgtcactcccgaaattcccgtcttttgtccagaaagcattaccgaaaccgtaagtcccactagtctcaaacaaccatctattgtgatcaaaatccccggtttgactcctcatcaaaccagacttagttgacttcatcaatgacaatctcctgtccatcttggacccgcccgctggtggcggaagcataggccgttgctgcttgttgttatcagcaaaatccgccaaatccgtgttcctgtaaggctccttacacccgggacacatcccaccggttttcacagcatccataaagcaatccctacagattttgaaatcacactcacagggaagaagatcttgacctctctcatcactcatcaccttgacatcacaaccaggaaccgcgcaagaagatcctttagcacctgccatctgcggatggctagtctcagtatcgatcactttttccataagatgagcacgagtgacgctgttaaacagcacgtgaacaaggaattcgagacatactgctcctcaaccttctgagagatg

SEQ ID NO: 48805 - DNA, 790 bp, Arabidopsis thaliana
gaaaattggggcgctcaaagcctttgcaacatcagtgcaatactagtgaagaccttccttccctgggatcggttgtgaaagccacttgattattcaccacaatgtgcactgttccaccggtacagtagttaggaagtgcactaagatggagagtttcatacaccactccttgtccggcaaagctaccatccccatggatcaaaatacccatgttctttgttctgttctcgtctttcgtgtaatattgtttcgctctggttttacctatcacaacaggatctactgcttccaagtgactgggatttgctaccaaagacaagtggagatgtttgcctcctctagttggacgatcataagatgtacccaagtggtatttcacatcacctgttccggtgtaaagcccaacttcatctactggcctagtaccaccgctaaactcgctgaatatttggcgtagaggttttctaacaacattacccaaaacattaagtcgacccctatggggcataccgataactatgttctctaccccgagatctgcagacctatcgaacatctccttcatgccaggaatcaaagattcagcaccttccagtccaaaccttttagccgtggtccacttagtagccaagaaattctcaaactgtgtgctccaggtaagcctatcataaataaccatccgacgctcactattgtactgtcgaggagttggggtctcgatcttgtctctcaaccagttacatttatcctatcagcaatgtgcatgtactcataccctatagtccacagt

SEQ ID NO: 48806 - DNA, 573 bp, Arabidopsis thaliana columbia
ctatacgaaatttcgattttttactggaaatagagagagacgtgtacggtccctttttaagagagagggagatagagaagagagaagattccaatttctaaacacagtagagagagaaatataagttacgaataggagagagatagagtgtatgtattattctctgttgtgtaaatgaaagtacaaatggcgaatttatagccgttgatttaaagttactatctgagatctgaacagtttagtgtttggatttattgtggaacttatcgtagacgataaaacctgactgtactaagattcatgatttatctatttgatttgtcgagtacttttggttttgaagacaacaagttttttttgggtcaccgttttatttatttttttggaattttcttcaccttgatgctgaacttttttaaaattcataaaaaacctaaatacatagtgaaactctgatgcagtaaaagaaaatattatatggatgaatttgtgtagacgaaattatttataaaaaaaaagcgttaatggcaaactcaatgaacgaaaacaacaaaaaacaaaattttatcatga

SEQ ID NO: 48807 - DNA, 869 bp, Arabidopsis thaliana
aactttttgataggtaaccaaaattaattaaggtatttttcttccaaattaaatactagaggtattaaacgtccaaattaaaaataaatggcggtttttcactctaccatatatcaatcccttccccatcccctttttttactcttcttcatctccctctctttctatatatagatgatcaatatatctctgtctatatctacagctcaaatcataacagaggaacagctccaatccaacaatggtgattttgatgtggtgacacatgtcgtatatgtaaatgtgtgtagcagaggaggcagggctatagagcgagtcgtgtctttatcggcttgagttcaaccccatgttttcaggggagagaagctccggagagattcgggttgggctcaaaggacttcttggacttacgctctgtgtaggacgatacaggccatatcccatcaaaaagtattccattggtattatcatcgcctgtggctgttcttcgctcaccaacgacccgcttccctgcacctgttttatgtaatatgacttagaatggccataaaaaccataactgaagacatctgtattagtgatatggtacctcgactaatgcaccgtatcgtctgtctagtttggtggtcatgtgaacagcctcggagtggtaggcagaattttcaccaatggattattaacgttctgcattgcaatttccttaacccttcactaagatccactctcctgtttcaccaaaaccacaaaacatactattttatcagctttaagactatattctggaaaataaatcaacagagagaaactagagaattacccgttgattgcctcaaggaatctccatacatttgtactctgccgctcactaa

SEQ ID NO: 48808 - DNA, 542 bp, Arabidopsis thaliana columbia
agacatgttgttaatttaactatcaaattaatacgtatatagtctgaatttacttgtaagatggaaccaccgagtcccattccttcaaagagttgatggaaacaaagcgctgcggtgagtgattgtacggtacatttgttatcagaagcccccatagcaagaccgatcacaaccgagtgaactacgatacctagttccaatatctgcaccaaaatgatcgtttaaaaatattcattggactagattaaaaatagatctctagcttcaactacaaaacaagaattaagaaatgatattaaaaatatatatatacagttataaattcacctgagcaatgactttattcctaagaagttcacttgtcttatcttcgttgaccttttcttgtttctccacataactagatccattttctagggtttggatgtcgttttgtgtaccacagaattagatccattttctaacggtacgacttctccttcacgcttactagttccctcgcatacgcacacatcgcaaacgattcaatcattaaaacgagc

SEQ ID NO: 48809 - DNA, 1542 bp, Arabidopsis thaliana columbia
tcgactcaataatattcttccatcgaaactggtcgtcaatcgtaccggtaagagagtcgtacgaagattgggctccatattttgctatagcattattggtacagaaatttataattaacttgtccgtcaaattttgttttcttcttcgaccgacgaattagaaaaagaatcttcactgtttaaataatctagtacatatagtattaatgtacatgcatgatcattatatataaatagtttgaatagtctgcattataagggaatgaagaaagatggcgttggaatttgagtggagaggaacttgacaaaaggtacgacattgcctctctgtaaaagatgcttatcattgtgctaaaatttaataattcattgaaacactattacatcgactgataaactttagtgacaagaactaaattactaagataaattttttttggacaagtgctatcattgactattggcttctattgcgatgaaagtctaatatgacaaattctgcaaagtcatatacaagaagatagctacggaaagctcaaactcaagcacaagactatttctagtattttggaattcacatagaggaataaagtaactcctagtaaagacaagaactagagtttgtgtaatgttttgaacttttgacattttgcattgatcaatttgcttcttcttttttagtacaaaattgatatccaaagaaggaaagagagatatcagctgtgataagaaagttggaacaatgaatgatatatacacacttgcggttgagtgttagagccaatgtttggagaagtttgtaaacattaaacattggctctaaattacacatttacatttatactagatcttaaaatcaaaggataacctaccttttatttaattgatgaaataaggattaaggggtatttatagcaaatgtaatggttctgtacaatgaatggatatataaacacttgtggttgtgagttagagccaatgttttggagaaatttgtgaatatatcacaagaaatgccattgccaataaactttgtctacgatgcctccaccggttcgaactgcaaggtgaagcctttctgcagccggagaaccccccagagatatggaaccgcaactgtcatcgttagcttctcttgtaaaccacttgtgctctctgtctctgtagcaacaatctttaaaacacacagagtactgattcaattagacaaaaaaatgttaagagagaaagaaagagagatttcatggtaaatacaaacctctccaccgtgttctaagacagtatcttcaacaacatcactaagcatctcaacagaacgacagaatccaaagatacatagtcttcttcccatatccagtccctgacattgtttatacacaatgcactgcattatcatctgtatgttcaagtttaacaaaccaaaaaagtaagcgttgcatacatttgtcgctgcgatgtcaaagagagctccaagacatagaccttgagcaggatccatgtaagcactttcatgaaacttttgatgtttttctagtgatctag

SEQ ID NO: 48810 - DNA, 562 bp, Arabidopsis thaliana columbia
tttttattttctcttcctgcatcttctcaaataacctaacagcatcttcaaaccttccaatctgtgaatacccagcaaccatagcattccaagatactacgtccttcactgacatgttcgaaaacaccgtgtttgcctcatccatcatcccacactttgcatacatatccaccaagcaattccctacaaacatattctgtatcatctcacttgtgactgcaaaacaatgcaattgcttccctagtgaatgagttcctagggaagcacaaggaggaagaacattcacaagggtaatattatcaggtctacatccgaattcattggtcatcctgctaaacatttcaagcgccaccttaggtttgcctaactttgcataactttctattatagagttccacgatacaacatcccaaacagacatttcgtcgaacaccttccgtgcatcactcaatgaacgacaacgggaatacatagcaacaagcgcattcccaacaaagacattggagataaatccagttaccagagaaagcgctgtgcagattctccacaacgaacggaggat

SEQ ID NO: 48811 - DNA, 548 bp, Arabidopsis thaliana columbia
caactccaagtcaaggtgaatctctccctctctctcatatatttacagttattattttattaagtttgtttttcatacgtacaaggggtaattcttttacagagtgcaatttgttttattttattctcttcaatatagatggaagattcgtttttttgccttttagtttgacatattaaacaaaaagaaaagctgacatattagtacaatctttacataccaatatatcaaatttatgggcctctgcaactaaaattccttatgctccctcctcaaattttatatatacattctggattattatgtcatataaatacatacatgataaataatgtttttaagttataaattagtggaccagtgtacttaatcattctgttttgaatttaattatgcgttttaggtactgagcatgagcagattgggaggtgctgcttccgtttcttctcaaatctccgaggtaactaatatattactatctctacgtactcatttttcataaatttcaataaacatcaaagccaatggacgaaattaagaaattagac

SEQ ID NO: 48812 - DNA, 454 bp, Arabidopsis thaliana columbia
attgggtcttggatgcgttgatctggccaagaatctccgtaaacgaccatacccttcagataacgtgagattattacttcgtcttctgagtataacagttcgtgtttgattagatcataagctgcgtcgtcgtcctccataatgaaactaaatcgatcaataacattatctagagaaagatcaatcgcaagaatgagtgtttgtatcttggagatgaagggaagaggaagagagactcgtgttaataagttagtggcgaccgttatatataatctttgtgttgaccaatttacccctgatgatatctctttatttcgcaattatgaactaccctttccaccgcggataattttgttgtaaacgttcgtctcttcatctcttctggtgcttctgttaaaataaattactgtcagttatacgatagtgttgtctcgttgacatatgtatcagtaat

SEQ ID NO: 48813 - DNA, 440 bp, Arabidopsis thaliana columbia
gtatattattacgaagaaatactatagtgtattcttttaatatacgaaaagtgcatatccttcaaaaaggagttgaatcgtgcaaattcacatgctaaaaaggacatcgtgtcatgctgaaatagcgaatgatgagaccaatctctccaaatcaaataatttattccgaaatacttttcttttttacaacattctatatgatattaactatgtataatgaatttggatagttttttttaatttgtgttaaaagatcttatacggtctattctacacctacataggttatatccaaatcaagtatgatttcacctatcttttcttgcaaatatttgcatcatttttttgttaatgtttatatataactaggtctaggttggtagctatttatggtacaacaaatccaataaatgtatgtaagtatatatatatatatatat

SEQ ID NO: 48814 - DNA, 517 bp, Arabidopsis thaliana columbia
agaggatcccccctcattttattatgtcacaatgcaaaataagacctgattactctactccactcagtatttgtaagaagctaaccaaaatttctgctgaaatctggttttctttaaaaagaagtcacctggttgtgtaaagatccggtgacaggcactggaggtaggttgatgactcggccttgcacgaaattccgggggcatttgtggtgtttccttagagctgcctccttcatacatttggcctagcttgtatggaccgtcacttgtgttgttcttcgacttcggtttatgagacaaacccgtagaccatgagcctccgcttgatcctgccaaggccattatcacatccgcctgcaaaaaaataacattcatcagatgaacttctcaattctctacctttttagatatcaaaatgtagtcaaataacttgaatatcaagtgtataagtgttagggagaatcaccttgtttgggtgaacgtcatcaaagacatgagcttgaccgccatagaagat

SEQ ID NO: 48815 - DNA, 579 bp, Arabidopsis thaliana columbia
gtcttgagctagaggatcccgctctcctcaagaaacaagtcccaaagtgggaatctctcaaataacagacacatctctcaagtaccttcaggacatactcgaagaaatgatggcagttcatcagatcgtagagctcacagattttctggtctctctcagcaaagacattcagacaggagatcccttgactacagaaccccaagttacaggagatcaccttccaagtcccaagactactatagaggagattcaactagagatgctagaactcactcgaaaccgcaagaacgatatcatgacaaaccatcctctccaaaccttcaatggagagaaagagaaaaactctattcaaaagacaacattcatcaagaaatctcggaatcatctagaaacagaaggccacctctcgaacgcgaaatgactaatgacaacattctcaaaccaccgcctatccctacaactgcggaagttatgggagagctgcgagatgtaacggtacaatacattaattgtaatgaccctactgaaagtgctgcaagaagacacagagttaatcagggagaagaagtaggtctgatg

SEQ ID NO: 48816 - DNA, 224 bp, Arabidopsis thaliana columbia
atatcacgttccagcgaaaacatccccatctgccgcgatttcgccatcaaccgataaagcagagccagcagatccatatacattgctttggtgtatttggagcgacgaaacagcaacggcagcgccttcagcgtgcctttaatcgctttgccattattgccgacgataaacgacccaatccctgcaccggcaataatcaccagttcagcgggttgatagagtgc

SEQ ID NO: 48817 - DNA, 557 bp, Arabidopsis thaliana columbia
acattttactcaaccaaaacataaaaaaggaaatcgtgatcctcaaaaaaagatgcgaatttcagacaagaacagaggagattcaccagaaaaaaccaacaaaagcaagaacaaaaatcctcacaaacccgttaggataattcaatatagaacaagtagattcataccagagaaattcaaccaggttggaaagaaaagtaaattgttttaaggcaaaaccacatgcaagctctaatgggaggaatcagaggcaggggagaaatcacaaatgcaaacaaagtttcttgtgaaaaccatcggagaaaaaacgaatgagctctacgattataagaaaatacacaaacacacatgcatgacgctgatacataataatgggacttttgaaaaaaaaaaacaggaacaaaggaaataccttttacagatttttgtcaagaataataacgtataatgctgcgttcatagttgtaaaattctcttgggggaaaaaactggtaaaagggaaaagaaaaatgtgatgatccgagaaaattataacagactttgtggtaattgaagac

SEQ ID NO: 48818 - DNA, 636 bp, Arabidopsis thaliana
  unsure (1)..(636): unsure at all n locations
tattatattcatcttatgtatattgtaggaaacaacttgtatagttgatcgtacgaaagctacggtagaaaggagagtctcgtctgtgcctgagtgtttgttgtcatcgctggagtttgtagagataaaaaacagaatctcggtagatgatggtgcattggaagttgcaaggtactttgtagagaactctgtgaatctacagaaagttgttctgcgtttggcatcttcctttctaagacgaggaaatcaagctgtcttgaaggatatccttgaattgccgaggcgatctagcatgtgtcagatcgaagtctttaatgcgctaaacggccatgctctttgttttcgcaaaaacaaaataaccggccgtgttttcttagactattttgatgttgctgaatcctattatggtgccattgtgagttaaagtggcaaggtactttgtagagaactcggtagttctcaagaaacttgttgtgcatttgagtgactgttagaaagacttttaggtggtgctatgaccgagactagcactcctagagattggacttggattttgattttgttgaattctgttatcatgtctttgtanttatatatactttggacaaagctctcagggtcagatgatgatgttga

SEQ ID NO: 48819 - DNA, 1061 bp, Arabidopsis thaliana columbia
ccaatcatcattgccacgaggtattttgatacaaggccaacccttaatacctcataaaaagcacgtctacatcttcttcgatgacaatctcagactaaaccatgaaattcaaaccatcgagaacaacaaaaatcaaatcgcaaaaacgtttaacatatttgaggaccactaaccatttatggagccaccaaaaaaaacatcaacaacttaaccactataaacttgcaacataaattaaacagtagcttcactaaaaaatctactaatgcaaatccacaaccactagccaccaactaagatgtaaaaagctttgcgcaatccgagataaaatagaacaacacactagagatgacaaacacaaacacctaaagaataaaaattcacggtttcaagccagaagctgaaacacacgctcgcagcttgaacttttattgtacaccaagcaatgagaagacggcaataaaaacatggaaatgaaagtatgaccaccttgccacggaagcaaacgatgagcaaaacaaagccgaagaaaaatttacgaagagatagaactaaccacccacacttgacatagctatgaaaatcgtattccacttgaaaagggccaatcgttcccgaaaaaaaacctctcttctctctcttgaaaactagatgttaaatctactttttttgctttttcttttccgattgaagatcttcaaagatagttgatgggctgtagagttaagtggtggtgagcatctctcttctccggtggtgtgaggcgtggttaggtccatggctcgatgctagacggcagctctccttcacgacagccagagaaacggttcatgtgctctgctggtttatggactccagtggattagattttgtttctcacggttcggtggtttgtgaattgtagctccggcgagcggcggaagttgaaccatggattggtgggttcgctactttgcaaaggggttagcagtggatctttggccggatcctaaatggctaattgcgggtgatctttggccagatctcgagagtagatggtttgtttgagcaacatccatttt

SEQ ID NO: 48820 - DNA, 852 bp, Arabidopsis thaliana columbia
tttaaagcaaatgttatttattatttggtcggcaccatttaaagcaaatcttattgctggagtcccctattaattttggtaatcgtggtcaccctcccccacaaactatatctatacttatcaatgatgccgatagtcacctaaatatatttgattggaacaataatcaccttttcgataaacccatattcaattctcctaactccttcacataatcagctataaaaatgtttcgataagaaagcaaaaaaaacatctaagtcgagcagaaatttgaacaaaatcaagaccggacccaacgcaaaccagtctcacagtctgtgtcctcttaaccaatcagagtatctcttcaaacggaaacaaatagtcaggcaagaaccggtgtaatttattgggctatgacccatgaccaaagaactcggcccagcccataactcttagaaaagccttggaaaatccgtacagcgcggcgcaaacgcaaaaagcagagaaagagaggaaaaatcgcgatcggcttcttccagccacacccgtcacagagtggccactcaatcgctgtcgcgtttccatcagattcccggtaacgttttcccttcttcagcttcccaattcccgccggcgaaatcctaaccactatcgtagtttttcagtctcccgattaatcgagttagggtttcgtgcaattttcccatttttgtgttcggttactactgggattttgcagtaggcgaagtctcaggtcgcaaaatgatatttttcctgaaacacgtttcaagtaattgcgtctgcgttctctggttcaatgccttgtttatatgatttgtgtcaatatctagaattgttgggttaatg

SEQ ID NO: 48821 - DNA, 777 bp, Arabidopsis thaliana
tcttacaatttctaacaaatgttgttgttttgtatgtttggccgaatgttcatagatcagggaccatatatggaatctctatttctctcattatcatcaacttagcgactatgatgcaacgagcagatgaaaaactcattccttcaactgccaaagaattgaaagaagcgttccatgcaaagctgtccgatattggactcctttcgtttataagaaatattgttcaaggacttgcctcgcctttagccggtttatttgccatcagttatgatcgtcccacagtttttgcgttcggaagtttcttttgggtctcatcaactgttgcaactggagtcagccgctacttcatccaggtttttttccattaatttcagtctaattaattaccacaaaacattaacttcaagttttcttctcttacaatttaaacttttgcaccgaagttcataaatcttagaaacattatatgtttggtaattttcttttacaaatatgacaaaagcaataaccaaaaatatcaatgtgtcaaataaaaaattaaatgaaagttcagacaaaagaatatatcattaactataataaaatcacagaaacgagaattagaattactgagacttttaagtctagtaaaagtgtctttttatataaaagagattataacttagtcattagttgttttttttgctaaacaactagttgttacgaaaacttaaaagttaaaaggaagaaagatacttttaagataaaacacttgtgtgtcgacttatatttgttttg

SEQ ID NO: 48822 - DNA, 639 bp, Arabidopsis thaliana columbia
tctcctcttctccgattctctgcttctacctctgttcgttctcgttttccatccgcagccataagcgccgttgctcccaaatcggtgcgttctgcttttttgttaattcacttgatttgatttacaagctttgtatatgtatgtaaaccttgtacaatggtattttcaggacataaataaaaatgaaactccaaagatcgaaatagaggaaactcaagtgttcgcgtgtcctgtttgctacgaaccacttatgaggaaaggaccttcaggtatcaacctgtaagttctttacttacttcctcagattgtaaaatgatttcaaagttttgccctttttcttatttctctaaagcatttttgtgaatctgctgcagacaagcaatctacaggtctggattcaagtgtggacaatgtaacaagacatattctagcaaagatgaatacttggatcttactgtcactgctgatttggatgattataatgaagtcaaacccattactaccgagctctttcggtacaatttacatgattttacaatactaaccacactgctctcttagcttaagtgtcatgtgagcttctgcttttttttttggtgtgtgtgtaggagtcattagtatcatttttgtatgaaagag

SEQ ID NO: 48823 - DNA, 428 bp, Arabidopsis thaliana columbia
tcgtagagatagatccaacttggctcaagattctcgagaaaatgcgcaagaagtgttcgtacgaaggtctctgtcttcttcttctatcttaggttttccccaacagttggattgactaaaatatctccttacttgcctaggttgcagtaacgacctgtggattagcgagagaggcgtttaaggttggtgatggagcgtaaagatgggtatgtagagcgtgatcagcgatgtgaacatgcctgacatggatggtgtcaagcttcttgagcatgttggtcttgaattagacctgcctgtaataagtgagaagaaagatcttgacttgttgtgtagtaaaggagaaaggttagagatttttgtgtggtttgcggtgtagtgatgtcggtggacggcgaaacaagccgagggatgaagggagtgcaacacgg

SEQ ID NO: 48824 - DNA, 774 bp, Arabidopsis thaliana
atcaggatgaagtgttggaacttcctgagtctgctacactacttgcttcttctgaggtatgtaacgtcgagatgttctctattggagatcattttttctgtattcaagggcatccagagtataacaaagagattctgtttgagattgtggaccgagtccttaatatgaagctgatggaggtttgttctccatctctatgatctctatttttgctagataaacatttcggagtgttcttgttctcaatgtagttagccttatcaagaattgcaatgtgattgatttttttcagcaagagtttgcggataaggcaaagagtacgatggagactgcgcaaccagacaggattctatggcagaagctctgcaaaaacttcctgaaaggttgatgatccgagactatgttatctctgtatgaacttatcaaaaactatgtcatctctcaataaacctgcagtatctttcatattttatcttcaggaaacagaaagaaacacatataaaacaaatcacaatcacaaataatcttttatgttaccacctttttctttatcttaatgtagcaacacaaatcaaacaataaaattcaatccgagttatacaagttataagcgttcatagacattagcacttttctggtaaaatttggtcaactagtatcatcagcagagaaatcaggttctgaaggcttctgatatttcacaagttctatagtagactttgcttcaatacggttcttgtgaactttacgaagtgcatttgcagcaaactttga

SEQ ID NO: 48825 - DNA, 608 bp, Arabidopsis thaliana columbia
caaaatactagagcatagtttaattctagtctatgatcatagtagaaaacagttcactgatcttaaggcacctcagtaaagtagtcatgaaactcttaccaaattgcagaaaccaaagtacacaagcaatcaaagaaatgaactcaattcaaccagaaaaacaaacaaaaacgaatgaagcagccagcaagcccaaaaggattgagatctgaaaaaccaagattagggctatgcggagtaaagcttttaacttcacgctctaattaacaccaatcagcggcgaacacatgaaatagactcgctttcattcaaaactcaagtcaaaacctatcaactcgaaaccacagagccagaaaaaggtttcaaaagtcgcatcaaatcgagatcgcagagtcaaacagtttaaagaatgaaacatcgaaattgcatgaataaaactcgattcctgagaaagaaaagccaaggagatctgcttgtaacttctaaccaccaccaacccctaccctactcaaactcatcaagaattaaaacgaaagagagcgatgaaaatcgaagatccgtacgatttttgagcgacaaggcttggtgcaagtagtcaaacgagattg

SEQ ID NO: 48826 - DNA, 1289 bp, Arabidopsis thaliana columbia
atttagctacagcatgacgatgagtcttactttgattctgtcaacattattaacctgagacaatcccaaaagtctttcgtcccaatattgaatcttctaattttgatatctatgtgattttgcatatgcactacctgagagaccaacagtacctagaggccaacttgtcctttttaattcacctttcttgcatgacttttcctatgttgacacgttagactcctctttcacacttcatgtaccccactcctatacgtatttcatctaaatatatatacccaccaatcctctccatctacacaaacagcccaaatatcaaacctttcatctctatatctttcaccttgactgcttctcttcttctacaagaaaccagaaaaaaagaaaagaaaagaaaaagaagagattagggatgggtttcttagagttgttggaggtggcttcaatgccaatcgttcaagttcttcttatcagcgtccttggcgctttcttggcaaccgattactgctctcttctctctgctgacacccgaagatccgtgaacaaggtcaacctccgtctctgcttttcttttttctgtttggtgtcaactatgcatgcattcatatatcatcactaacaaacattttccctcgcagctcgtcttcgtggtattcaccccctgcatcatgtttgccaaccttgccgagactgtcacattgcaggacattatttcatggtatgcactaccagtctcctatcatccctctgagaatacatacgtgtggctttgatttgaccaaaattagttttgtaggtggtttatgccataaatgttggaatcacctttctagtaggaggcattcttggatggttggtggtcaagctactgaaccccaaacctcaacttcatggcctcataattgctacttgtgcctcaggtaacattaaaacctcaaaatttaatctcaaggaggagagatatatccctgaattctcacatgaatcatatttactgtcctgtctacgtaggcaatatggggaaccttatgcttatactggtccctgccatctgtgacgaggaaggcagtccttttgggaatcgtagtgtctgcagatccattgggctctcctacgcatctttctctatggccgtaagtcaaacgttacatacatatgatcttctgatctctgctcagacttaattgttgagttgatcgtgtgattaatttttgtcaagggcagctcgggggtttctacatatggacgtacagttaccaactggtaagaagctctgctacacagtttag

SEQ ID NO: 48827 - DNA, 153 bp, Arabidopsis thaliana columbia
gatactcaacaataatcaagtgcatgaatgcaatggcaagggccaaggaccaataaatcaaaaacgaataaaagatcgaaaccatccccatttaggagtaccaaataagagcatagagaccaagaagaagatgtagatagaatacgtatgtgg

SEQ ID NO: 48828 - DNA, 626 bp, Arabidopsis thaliana columbia
ttctatataaccaaaagttattttgatcatatgtgtccggatcagcctgacttttttggttcggtttgaatattctactaatcatagaggcgttttcgtaaataggagacaccagttagtggtttcataggaaggcagcatcagtaagtgcatataaagaaagtaataagtagatgagtttggtaattacatgagatcgacagaggaattacgacgttcttgccatcaaaaagagattccaaatttgtaaagagccatatgtttgttgggcaattgagattgagtcttgccaatccttctttggaagttgacaatttaaaaattcgaagccagatttactcctaattaattattgagcttgaagtcttaattaccgattacatctctgagcagtagtagtcgatgatctttcccggtcactaattttactcaagcgaatcgatttttactttagtttagctaaccgtacgccattacagtttagagagcagcaagggtaagaacattattaaaacataaagtaaacctctcatttattacggtgtagtgctaattacattagcctcaaacatcctaagcttacagttttataaacacacacgatgactgtgtatagtattacatac

SEQ ID NO: 48829 - DNA, 567 bp, Arabidopsis thaliana columbia
tgaagtgagcctgcagtcgtaatatcatccccatctgtagctacaacttaaacagtttaattcattataagaagaatacatcagagactattcattataagagtattctactttcagcaggtggttccgtgacttccgtctcttttctctttactttaaacaacggtatccgctccaatcgtcttttttctcttagcgcggcggacactaaaaaaagctacgaatagaagaaaaaggacagtgattggaacaacaacagcaataactatgacagaggagtttccgccttttcctgtatcataataacaactttgtgttagcaaaattcttatatgaaagttgtgttgaaaatatgtagtcaaaggaaagcgactgttcagaccaggtcgtggtgatgaatcttgaggtgtacaacgttgaattcgttgtaaaactcgtaattatcgtatcttgacgtacagctcggcaaaaaagttcttccccaattttgtcataggttacttgattgatgctttgttgtaggcagtctaagcagtcttgttccgtaagtcaggagtgcactgaaca

SEQ ID NO: 48830 - DNA, 629 bp, Arabidopsis thaliana columbia
aggtagactctagagtctagattgcatactctgtgcgattgtgaatggattcagtaagcaaagaggctttgctgaagcagttaaggtttatgaatgggctatgaaggaagaatgtgaggctgggcaagtgacttatgcaatagccatcaatgcatactgtcggcttgagaagtacaataaggctgagatgttgtttgatgagatggtgaagaaggggtttgataagtgtgttgttgcatactcaaacataatggatatgtatgggaaaacacggagactaagcgatgcagtgagactcatggctaagatgaaacaaagagggtgtaaaccaacatttggatttacaattccttgattgatatgcatggaagggctatggacttaaggagggctgaaaagatatggaaagagatgaagagggcgaaggtgttgccggacaaggtgagttacactagtatgatcagtgcatataacagatcaaaagagttggagagatgtgtggagctttaccaggagtttaggatgaacagaggaaagattgatagggccatggcaggaatcatggtcggtgtattcccaaaccagtaggattgatgactaatgaggctgttgcagacatgaagttgaag

SEQ ID NO: 48831 - DNA, 583 bp, Arabidopsis thaliana columbia
  unsure (1)..(583): unsure at all n locations
ccgtctcgcttcatctaccttaccgttctttgccaatccatcgaccatagcagtccatgaaacgacatcccttctaggcattctttcgaatagattcatcgcctcatctatcctcccacgctgcaccagcgctttaaccattgagttccaagaaacaatgtttctctcaggcatttcatcaaacagtttcaagggctttatcaattctcccactttgagcatacccatcaatcatagtattccaagaaactacatttctctcaggcatttcctgaaaaagcatctcagctatagaaagctgcttagatctcaagtacccactaaccatggctgtccaagtcaccacatttttcctagaatcaaccctatcgaacaattccctagcttctctcatatcccctaacttaatatacccagtaatcacatgcgtccatgtgaccacatctctctcaggcaatccgtcgaacagtttgcgtgcttctgcaattttacctactttgcacagctccccaatcagccattcgggttgtggcacacgtggtcttgagctggaagagtaaatcgaacgtacgagattanatag

SEQ ID NO: 48832 - DNA, 497 bp, Arabidopsis thaliana columbia
aggaggtgttgagaaaattggcgcaggtggaggcggagatggcaaagaaggcggtggtaacggcgttacaaccggaggacgaggcgacacagaacggccacgactaaacgatccacaatttaccggcggacgagacaaaaacgctttacattgccctggagacctctgagcaggtcttcccggcaaacaatttctccgatcatcaaactccggcaacctcaaacacacaggcgcttctccggtaaagaaattgtaactataagtgaaattctcaagcttcggtaactgacaaatactcgccggaatcttccccgacaacatattatgcgccacattaagctgctccaccgaaaccatctcagcaacactctccggtaacgcccaacaagttcattaaaactgacgtcaaacaccgtcacgttctttagacgtccgatatcagacggtaaacaaggattaagaccattgttcatgaagatgatctcgttaagattctt

SEQ ID NO: 48833 - DNA, 544 bp, Arabidopsis thaliana columbia
aacttaaatatcttctttcccgatttgccctctaaacttttaatatatttattactccaattaatggttttggacccaaaaaaaaattaacattaaaattcgatgtaaagaaatttatataaaattatacgaaagtaacttcgctaatgtaaaaatatgtatgtaggttcaggaatttaaaaccaaaaaagccacgcctagtaaattaatttagttttctttttatatattattatcaacaccattacggagataactgaagagagctacaaggaatgtcccatagattcaattcaagccaagagcatagtctccccacaggaacctgcaaaacagaccatataataccaaagttagagacgttttgttttgttttgcttagccaataatgagaaaagagtctggctttttcttacatagttcatgcatctcagtagctatgaccaggagttttctattttcttctgcaatctttgtcatcttctcaaactcttctgctgctagtttggcaacgtctattttattctccgctctacgactttac

SEQ ID NO: 48834 - DNA, 512 bp, Arabidopsis thaliana columbia
cacgatcttcggacactcagcttcgacagagaagtcaccacatttctcgagtgcgtagaaccaactgtaaaacgggacaagagttatgtctacataaccaaatgtctctcctccaaagtaagatttgtctccaagctcagcttcaagaaccttcaagctctcaagaaactctttcttgcctttctcttgttcttcccctttcttgtttccccaaatctttcttcctccttcaaatgatatctgcattttggtgaatttgatcaaaaccaagtagacatataaagcaaaccgaaacagaaacagatgaattataaacactaattaccgttttatcagcgtaatcagcccagaaccttgcagtggctctagattgaggatcagagggcaagaaagatgcagcatcagtccacgtctcgtcgatgtactgaacttggatgagcgattcagaaattggtgtgttgttgtggataagaacagggactttcttgtgaacagggtttgattcaacaaca

SEQ ID NO: 48835 - DNA, 866 bp, Arabidopsis thaliana
tgctctggtgcagaatggttaggatagtggagtctgtatgagcggctagacccatggctcgttctggttcaggacaaaccgggtagtggtttagtcgtatggcgcctctgcccacttttgatccagatttctctagcttgtgagcccattcaatgtcttccacggtgacaccaagtgagcctaatatgcaatacagaagtctgcttgctaatttttccatttcgtccacgtattcttggattataccgctgcacaataccaaaaatgaaaagcaaatacaatttacagtaattaaggtttttggtaatctaatgttaagacctcgacattagccaaattatcacatttcatagagactttggtactttaatttgctgtaatatgcaataagaagtactacttcataaaatataaggatgttgctcaaactatttaattagaaactttgaaggctacactctatgtgttatcagttatcactaatcataaacatcaattactcggaacatataaacacttttttatgaacagaaaaaaacatttaaacacttttaataataactaagtcttagtgcaaaaaaaaagtgtgcaatttcctttgccacacttttgcgaaataagcaaaaaatatatatatgtgtgtgtaatagacgttaccagtacttggtgtgatcatgaggccaaagagtattgaaatggttgcggtaggagtcatcggcaatagtaaacccttcagaccacattttcttctcgaaaaagggggagattcgaggttctccgtagccactaactcctttatcggaggaagccgcttcaagcttcctctctgacggcatgtcgaatagggttttggacagagactcgat

SEQ ID NO: 48836 - DNA, 1586 bp, Arabidopsis thaliana
tttgttttgtcaatattggtaagaagaatctcgttcattgaagaacaaaaattttggagttggtagtgaatgttctcctgaacttgcttctgttgctcagagaaagtggctttaccagccatctcaataatctcttcagcatcagcctcctcagcatctcgtcccaaacgattatagctatatcacagagaaactccgtgagccatatagtggaaaaaatctccaacaattacagagactgactctttgcttagtcaataaatagacaagttgatacttgataatcctacatccttgaacattataaatcttgttcaaaagctcttaatctataccaaaaaaataccaaccttgtaaacataaacaatttgttaatgtcggcttcaaattgcagttgccttggattcttagcaaaagtggtactctttgctagaacaccaacaccctgaaaagaaaattaaaagcaaattcaccattgaatcaaaattgacaatgcctattattatcgtatgagcaacttcaaattacattttatggacagaaagcaaatcattgagaattcaatcattttcaagtactcacatatgttctgaagtctatacaaggttcaaattctagtcaccaggaatcatattacagtgaagactaaatcctttgaaaagcctcgaactttcttcatacccaacatcaaaaaacacgtaccagagaggaagtttcaaaaataagtcagattagaagataagaacttcatatattcacctgctgaaattttccgaaaagaaacatcatttttgcaaacgccattcttttttctcctcacgttgaaacgacgggcagagaagaagatgaatcgcaggtgcttcagttgaaagatctctttcggtgattgattccaaaaaaacgaacgctactgcctcagctccatgactgggtttaatttgtgttaatgggccttaatggccctctaaatttataatgggccttaagggccgtctccccctaatttatttcattcatattaaaattaatttgaaaattttcattgagttccaaaattaatgaagtagactactgatttgttgattattgaaaattgaaatactggaaattattaaacaacgaaaaacgtgcgtagaaaggtaaaagccttattatataactaaaagttgaagaatctttattcatcaattgaaattcataaaatcaattgggagagtgctaaacgaaggttccaaaacaacaacaacaacttgccatcatgacttgacggtactgatatcagaaccgttttgaaggcaaggggacagaagaaatgaagtgagagaataatgtgagagattgcgccggagccaaggccggaacctggtgacaggctcctctcaccgtgacaaaatttagtccaccggcataagtctcaacccatccagctacttgactcttgtggaacatgacctcacggtgactcgaccttaagtccatcttttttatgctataaagtgtagatgttaccggaactcatccatccagtactccactatagccaacattgaaccagtgaacattaaagtagttgacaatatatatga

SEQ ID NO: 48837 - DNA, 506 bp, Arabidopsis thaliana
attgcatttatagataccagttttttacaatgtcggaaaccattatctcttacatatgttcaatcacattagtctgtgcttctatcttcttttgaaacatacaatttttggtgtttgcaatgagttcctttggaattctgcagtttttcataaagacttacatttttcatgcttgtgtttcagctgaagctattcttcttggattccaacattaccttgtgatgcttgggacaacggtgctcatacctactgctcttgttccccagatgggaggtggatatgtaaggcctcaacgatttaacttgtagtaaagaggaagatgaatcaaatgatgtcagtgactgaaaatgattttgattttctattgttctaatttcaggaagagaaggcaaaggtgatccagactattctctttgttgctggctatcaacacattgctccacacactgttcggtactagattgcctgctgttgttggagctcctacacattcgtgcaacaacgat

SEQ ID NO: 48838 - DNA, 507 bp, Arabidopsis thaliana columbia
taaaatgtttgattatgaataaaaatgaataaggaagagttcaatgagatgatgatattaaattatggtagaagaaaagttaataacaggtcagatatagaaactttccgtaaagtcaaggatttaaattattcacgtgaatactctgtctaggtcctatcttgaaatttatcattcaaacctttaatattatctatatgtttttactttaaaattaaattttaatatatgtagatataaaaattaatatttttaatttatatattctcaccatttatgtctagatagagtcatatcaaaacattttgtttgaatgcaaatttcaaaagataaattttggaataaacattttcaaagacgtaaattaaaaaagcaatttagaaataaagcattgcaaaaataaattcaactaaaatttagatgtagatgtatattgtgacccccaaaattaattataaaatcttttggaactgacatgtcaatatttgtttgattgatcaacctttt

SEQ ID NO: 48839 - DNA, 2171 bp, Arabidopsis thaliana
actctgttttcccggtcaagtgatgagtcgcaggtcgattccgaagccgctcctctgtgatgtctaagatggacttgccaaaatgacttgatggagaagtacttatgacgaaatggcgggcagctgcgagtgcatcttatgtcttcgattccatctgcgctcataggggttggtgccctgtttcattgagtgtattgagatgtgaaaccattaatcaatgttttcattgctcaactttgtgcttaagattataataatcaggtatgattaaggactaatattgacaaaccttttaactaaagaaaatcataaggtgacgcataaaagagccaaaactggatctctcccaagtattgtcctttctataaagaatcgaatcccgaatccactgtgaatgtacaattgactttgacaactactggtttacatgtttctataaatgcaatgctagagtgatctctatatacatcatcatcacctgaccttttggctatccagtccaatggactcacatgaagagcaatgcttacctatcctcgacttctccagcgataaactacgtgcgaggcacgagtcactggatcacgaccagggacgatgtcagaagagccatggaggggcagggttggtttgtggcagagttcagtggcgtctcatctgacctcagggacaacttgctggccggcatgaaggagatgtattatctcccagaccaaatcaaaatcaagaacgagaaccacaaggcgtcccatggctacatgtctatggtagttgacgattaccggatccatgagagcttggggatcgattatgcaaccgagcttcaagcttgcaaagacttctctaaactactctggccacagggaaacgatcccttctggtaaaaacacacacataaagactttctttcatttcatctatgtcgttcttgtcacatctcagatgatttgcagtcaaaccacacatatgtatgcaatgacaatggcggagctagaccagacggtgatgaggatgttgtatgaaagctatggaatggatgagaagaagcattctgtgagtcactccgagtcaactcgatacctgttgaggatgctgagttacaggagacagcaaaacggtgaagcaaacactggtttcgtgtcacacactgataagagcttcatgagtatcctccaccagaaccacgtcggaggtctccagttgaaaaccatgaccggccaatgggtcgggtttaaccgtccccaacaagattcgtcgttctctccggcatgggtctcacggtgagctctaaaccaaatccgattagtcgaaacacctagacatagcaataaatgtgaaatctttttgttggtgatgaaggcgtggagtaacgataggataaaggcatgttaccacaaggtagtgatgagtgcagatgagattcgatactctttagggtttttctccttccacaaaggaacgatccgtacgccggaggagctcgtcgatgaccaacatcccctccgctacaatcctttcgagcacgacggcctcttacgcttctacgagtcgtacatcaattctctcaagaaatccagcgaagatcttctccagatctactgcggcgtcacaccctaatcgccgccgtaattagataaatcgacggcgagattgtgtatgttaaatttggtcatcatcatgtgtttaatctataatacaactctttttcagtttttgtaataataatacaagattcgcatttaatttaggtttttcattaagagagtatttgagaaggagatttaattggtgggattaacgaccctaattgcgtccatggccttgtcgaaaacctcatactttatttggagatactctttccatgtaattgaccggtaaagagacggttcagccggaccggttaacttagagataggtgcgatttgcacatcaccagctggaccaccccataagtacgcaatcgaaattcttgaccgagtatggttaactttggctcgatgaaccacgcttgggattttcccgttcgataagatgtgaaagagatcaccaatgttgaccacgaggacaccaggagccggctcaaccgtgacccaaccggactcttccctgaacacttgtagccctcccgtgttgctctggtgcagaatggttaggatagtggagtctgtatg

SEQ ID NO: 48840 - DNA, 465 bp, Arabidopsis thaliana columbia
tcagagtctagccggtatgtgtggtctagtaaagatctctctccttcaaaactggctaattctgatagagcttcttctagctttccaattcgacaaagagctcttatgtaaattgagtaggccacagtgacagggaaacctatcttgccgagagaatccaaacaactttttgcatccttcgtgttaccaacttcacataagcatcccaagtagtcttggactagttctctatctgggacaaaacctgaacgaatcatctcccggaatgttctggtggcttcttcaacgtttctgcctttcttctcacaaagaactgtgattaaacacttgaaagtcgaagagctcgggatcagacccatatctttcatttccttgaacgttctaatagcaatgttggtaagaccggttctaccatactgcattatcatgattgcccaagtatcttgtgttatcaagcagccttgc

SEQ ID NO: 48841 - DNA, 643 bp, Arabidopsis thaliana
tgcaccatcaaggacaaaagactcgtggtttggaatccgtgtttgggggaaaccaagtggatccaactcaaagttgattaccggagatacgtctccaagttttgtctagggtatatccaaaacaacgaatctcgccgtagctataaaatcttgcggagttggtatagttacgatgacaaatcatcaccgcgccaaagagatttggggtttgaaatatacgagtttatctctgattcgtcatggagagttcttaatgacgtcaatcacgaattcgttataggaagtagtgtctttgaagggaaatacttacttgcttgcttatgatgttgaagaaaattctagagttgtactaatgtttgattttacaacagagagattcaaacgtctacgccttccgcatttccaagatgttggtaatatggatctatcagttgttagagaagaacaactctcaatattacattggactcgtaatacatcaaagatggagatttggataactaataacattgatactgatgctacattgttgtggagactgcacttacacactcaagtcttctcacgtaattgtgttcgagtctctcaagtctatatatcgacaaggagaagaaagttgtcttgtgttgaatgttaatgatga

SEQ ID NO: 48842 - DNA, 592 bp, Arabidopsis thaliana columbia
tgtctctgaccaagactactattcatttgtaaagcttccagaaacatgcaagcgaaagaacaaggaagaagaagcagttactggtcatgctgttagtggaacgagtaaaacccctgaaagatttcgtgagacatacaagagaagacggttcaagaactcatcaaaaaaggcaacaaacaagaatggtgaaactcttatggaaagagaaaaaacagataagcctatacctttttcttcggagatgaaggaaagcgatgcagaaccgtcggttgtaactactggaacagccagtaaagaaactctaggatcatctgttggtgttgttgacattggtgtcaacaaggttgcttacttttttcaggttgctttgcccggtgtccgcaaagattacggtattattacactttgttgcacatctaactacttccatacacgccacatcgggtctaagtgctaacacatgaattggtttggtccttttgtgtgcaggtgaattcagctgtgagattgaatcagatggaaaggttatactggagggatcacctcaagaggcgataacatatcaagagacatctcgggtgtcgagatgaat

SEQ ID NO: 48843 - DNA, 493 bp, Arabidopsis thaliana columbia
atgccttccgcatttcgaaaatgttggtcacatggttttatcatttgttagagaagaacaactctcagtattatattggagccgtgctacaccaaagatggagatatggataaccaataacattgatactgatgctacattgttgtggagactgcacttagacactcgctttaattgtgttcgaatcttctcaagtctctatttcgaggaggagaagaaagtcgtcttgtgttgtaatgttaaattgttaatgatgataagatcagcaagaacatggtatacattatcggagaggacgatggatatatagaaatccctttcgtacaacctttaaacatacaaagagttctacttaacagtaatagaaaatggcattcaattattatcagttatgttccgagtttggttcaaatccagtaatggtcctctgttattttttgtcttaagtatgtgtttatgaacaatgtagagcttttttttttgtaccaaattt

SEQ ID NO: 48844 - DNA, 304 bp, Arabidopsis thaliana columbia
gcttgagctaaagtcaccgccgtgttccccatccagattttatctataacatcatactaatactacctcctacctataaccaagctgaaacattgaaacacttgtgtaactgaagtacgagaatagaagtttgagggggattgagtaaaaactatttatggagaactatcattacactagtaatagtaaattagtaatcacagacagactcatggaggaggtggtgcatgttagcaaccatcgcgcattataaagacaaacattctctagtcttccttgtacaactttttttttagcttggatg

SEQ ID NO: 48845 - DNA, 450 bp, Arabidopsis thaliana columbia
ggggacaaagacaatatcttttgggtaaaagcataagaggtttattaataggaaatcgtaggaagccatgatcgggaaaaagacaaaatagctaaggcggcgcagcaccactcgactttgggacgagtagaaatcccgaatgacatgcactcgacttcctctcgagcagggagcttcaaatctttttccaagtgttccactcaacgtccgaccgagcatgtaccccgagcatagttccttgtctttcctttgatgcacgaactcgagcaagtccactctttgtgatagaaatgtccaaatcaatttcaaaattacctattttacctgacaaatactccaaatgccaatatgctatgcaatgcaatgcgaatcatgaaaagggagagaaatggactatgaatgcatgacaaaatgcctgaaactaagctaaatgcatgctaaataagggct

SEQ ID NO: 48846 - DNA, 536 bp, Arabidopsis thaliana columbia
cagtatatgcttctcttatcgctgactcgcttttcacaaattttaaaagcctctctaatctctacagttttatttaaccaattaaaaatgctgtataccttacacgttcaggtgaaaatattatttaaataacagcaattaactacattgaggtgacataaattggattcactaaatagtattacgatttttttgtgtggttagatttattttataaaataaattttgcagtctcagtgacttttgttcatatagagagactcgggtgattctacacatgttatcctgacttgaatttactaatgaatgatccttattccttggtggtttggttccaaaagtgtccagtcaaacagttgtgttgaattttgactgattcgtgctccaaggtctttctcaagagagaagaagaattaatagacaataattcttaagagaactaagacaaggagatccacggagattgaatctctccttatgtttcagacaagaagaaccctcacaaaaacatcttcttaacaattgttgatgaaagt

SEQ ID NO: 48847 - DNA, 542 bp, Arabidopsis thaliana columbia
aattttgtaactatcaattactgactttaattagagatttagtggactaaatattacatttccgtttgatgaaacatgtttgaaaagagagagtaaagttttcaatgtgaattcttgaaacttctattcaaacatgtttgttaattgctagtagttgttaaggatttgacttttaaggttcattttatttcttttctaatatgctatcgatcagacaatcagtaggtcaccacaacttgtgctacaatatatgtcatgaaatgacacggacgagagttttcttgaccaaatatttttacaaatttggcgtataattcttcgcaaaattctgtttttcaaggtgagaatatacataacgtgggttgttaatgttgcaagatggccaaaatcccttcgacttgacatctatttattgatcttagattggatcatatcaatggagaaaaggagaaaaaacaaaaacatgtcaattatcacaatgcgtcaaatgaatcacattggagagtaactaaaacagaatcaagagaaacattttgtgagtg

SEQ ID NO: 48848 - DNA, 541 bp, Arabidopsis thaliana columbia
gcttatggttcatacgtcatatcttatacgtactacacgtatttattggaagttaactagttctagtcttctagaagagtattagtttgaagtttcccttacatcaaaaccgtaagtttttaatgtatttcttctatcggattagtgttaaaaagaattaatcaatcggatcaataatccatttatttcatctctcggattagtatacagtatttacactatattatgagtagtttgtttatcaatatagaatttccaacattttgcttctccagtttctttgattaattgactccgattaatgcacaagaaatattttaatattgatatttgatattcaccgtaaacgataaccctagttcaattatacatgtatcaaagatatattaaattactaataaatatcatatattacgaacctcataattcatcatttgacttgggtttttgttcttacttacctacatacatcccaaatctcttaagcaccgaataaaatcctacatttaatgacgtggtccctccacactttgaccgattt

SEQ ID NO: 48849 - DNA, 544 bp, Arabidopsis thaliana columbia
tgaaaacaacgatttgaatatcgaagataaaaacagtgataattctctaaatcttcgagataactaacatacggtgaaaacaacgctgatgatcttaaatcttgatgcaaatattgcaaatccgacccgtaaattttttcactctataggtttgatttatatgtgggcttattatgagtaaattactaaattgtgtgttaataagttttagtaaccttgattttttgatatagaaagtatttaggtgtacgttagtattagaatgtgggcttccaactcaaaatcaattgttaataagtggagagactcatatcttatatatatatcactttatattttactcaacttctaatgtgggacattatcctaaaacgtctctccgaaatgatggtttttctaaccactgatctcgatatgttcgggctttgatatcatattagattgtgggcttccactcaaaataattggcaatgaatgaagattaaaatcatacttaacttccaatatgagagaatagccctaatagttagcacgtatatgtatg

SEQ ID NO: 48850 - DNA, 523 bp, Arabidopsis thaliana columbia
catcctcgaaatctgagcaagttgcttggaaacttccagtcatccctccaagagattacaattattgctacagaccaaacttctttcccctctgatgctgcaagtgaaataggtggaaaagctgttgagtttcggagctatgtggatcctaccaaaggttaggacacggaaatcatgataaaactggaatatccaggttccctgaggaaggctgctaagaattctcttttcaatccgcagatggtgactctttgttacatacacagctatggattgatccatcagaagaatttttgcagtatactcacgcaggtgatccagttgacatcacattttccttgaaggaactaaaggtttaacattcctcctttggaagtctggtttgaatttcatcacctctgtttgtgcaactaaatatcttcaataatttcaggcatttcttgcattctgcgagggctgtgaagcgatattcatctttttttcgaaaagctggcgagtaagaacctatgttttcatgctttga

SEQ ID NO: 48851 - DNA, 525 bp, Arabidopsis thaliana columbia
gttgcaaatgggagtggatcatatcctttctccgttgatgttcccagaaacacaagattcttgttctccaacaggactactactccatctaaatcaattgcacaatctattgtaagttcttttacattttcattttactgcattattctgctgtacctgactaataactctttatgggatggatttcctggcatctattcaggtatactttctgaaacctggaagttcggcacatgagcagttagagaaattggtcaatctcttagaacagtttgtttacttacacctttgacacccttttgtgtattgattacataaaccgcaaagttacaagtgttctacttactgtttctgtattgtttaaatgtaggtattatcatccttctaatggtggccgttggacttattccttggaacggtttttgcttcacctggtgatagctttccaaaagcgtttacatcgtgacgagcagtaagaatagagcaatatcaccattattttaatgcattcaatcaaattggcgg

SEQ ID NO: 48852 - DNA, 688 bp, Arabidopsis thaliana columbia
tcccctgacaatatgcgacttctctacttagggccggctttcagaaactctagaagaactagccactgatcgactatattagagtagttaattttatcaattacatttgaaatgtttatctctagtaagataaatatcaaacaaacaaaacttaatccaaggacttgtcttcatatcgtctattaagagtcgaatttaagaaatgaaaaataaacgattcaagcttaagttagttttaggaaaaagacatactgtttgctccatatagtttgtacatgtattaaatatagaataacaaaatattttaatgtttgctccattgacattacatgtattaaacagtttaatagaaaaacgaacatttttgtttgttcaatcattgggaaatcatagaattgttcaaaatatgaaacaaaagtgagaaatatcaattaatataatagttctgtttaacaagaaaattgaatttagaccaagtccacaatattcatcttgagtaagaacacgaccaaaagtcaaactcgtttcgaaatacataaatatgtaccccgctatacaaaaaagaaaaagacatttacatccacttatcccaatagacaaatgaccaaactacccaacatctacccctatatatacctcaccacctttgccctctcaaccacaaacaataacacaaaacatggctttc

SEQ ID NO: 48853 - DNA, 823 bp, Arabidopsis thaliana
ctgtcaccagtttatgaggtgccatggtcaataaatttgttttatgcaccctagatttattttcctcactcatttcatcttttagtgtgtttagtctactgatgggactgttttaccttctgtttgcagcatgattctgcttgtcgtgtgattgctagacttaaaaaagaaagagacgaagcacgccaattactggccgaggttgagattcatatacctgcggcccctgaagctgtgacagctaatgctgctctgagtaatggtaaacgaggtatgattgtacactttttactcaaaatatattggctagttattttttcctcttgtaacatgtcactatactcttttgttgtataatagctgccgttgacgaggaactgggtcctgatgcaaagaaattgtgtcctggaatttcagctgaaattattacggaattgactgattgtaatgctgctctttcccagaagcgaaaaaagcgacaggtactgcacatagactcgtatctatctctgaatatgcatttgaatgttagaaggcaagacctgacgacttgctacgtttatgtatttggtctggtttgtagaggcatgtgatttatactcactatatctatttagatcctagtattcggtttgaaacttaactaaaaaaatgttgccctcctgcctagtcttgtgattttccttgtattggttcctgctgtcttgataattttcatatttttctgtagattcctcaaacattggcgtcaatagatactgtggagaggttcactcagctatcaagccacccacttcacaagaccaacacaaccaggcatttg

SEQ ID NO: 48854 - DNA, 763 bp, Arabidopsis thaliana
tgacagagatgataggtactttgaaagcgcatgagaagcgcttgagtctccgagaagaacgtatcaatgagggtgcgttttatggagaaaagcttggctcaagaggagaaaacaagcaaaacaaaaatcgccatgggaagaccaacatgtggtgcggcgtgtgtaagaggaacaatcacaatgaggtagactgtttcagaaagaagagtgaaagcatttcacaaagaggtggaagctatgaaagaagatgctatgtgtgcgacaagccaggacacatagccagagattgcaaacttagaaaaggtgaaagagcacatctaagtagtgaagaatcagaagatgaagaagaagatgagtgtcatatgctctttagtgctgttgaagaaaaagagatctcaacaattggagaagaaacgtggttggtagatagcggatgtaccaatcacatgtctaaagatgttagacacttcatcgctttggatcgcagcaagaaaattatcatacggattggtaatggtggaaaggttgtgtctgaaggcaaaggagatataagagtatccacaaacaaaggagatcatgtcatcaaagatgtactttatgtacccgaactagcaagaaatttgcttagtgtctctcaaatgatatccaacgggtatcgagtcatctttgaagacaacaagtgtgtgatgcaagatttaaaaggaaggaagatcttagacatcaagatgaaggacagaagttttccaattatttggaaaaaatc

SEQ ID NO: 48855 - DNA, 1151 bp, Arabidopsis thaliana
caccgactccatattcagttttgccgtcggtaaattgcttaccattatctgaaacccaaccgttatcaacgaaccgctagctgatgcccgtcctgagctcgtcgaggctcctccttgttcagagtttgagccatttccatctggtgagattgtgaaacctgaggacaagagaggaatataagaaggatcttcaccgctcattgcgatgttcaatgctgctaaatccactggactgtagaccacaaatgctcctgatgagtctgttgagctttcttgcagaataagcatgttgttgctatgtgttgcattggatccctaatacacaaaaacaaatgagtcaaaagagaattaagcggaaacttttgtatcactctgttgtaaaagaggcttacacgtagaaccgatatgcagtttccaggatgtgatccgtttgagatgtgagcaacttcttgcactgcgtttccgtttgaaagaacatcccactagtatcacaaacaagaaggaaacaatatatacattatcaaatgaatctttcgtatgaagattttgaatcttgtgttgttgttacctgaggacgggttctttcgtctttgaggaaattgaagacattttgaggagaattgggaagccagaaagtggtggctgcacataggactgtgccgtttggttcagggctcttatgtgcagtcacacggattccaacttcgttcagttccgaaacaacggttgagcgtgtgttgttggatctgctgacacttaaacagtagttgctgatcatcctctgagcaagtctcatcatgcttctcttcccttccggtgatagaatcactgcaaaaagttgctcaacaaatgttagttatatggagtttaaaactttgaggttcgcaatggaaaattatgtttacctccaccgagatcacgagatgaagacgctggtaccgatagagaagcaaatctttcacacattctctggagagtggtaacccaacgatcagccccaaaagcaatccctctgtgaataatctctctgtatagctcatgaaccagttctttttcttcagtttcaatatgttcaacccaagtaacctgtttcaattcatcagtttagggatattctaacatgaaaacatgatttagttgacagaggaaaa

SEQ ID NO: 48856 - DNA, 416 bp, Arabidopsis thaliana columbia
ctaaaaagttttaaattaactttatgaagaagtaaggcaatacaaaatcgtcatcgtttcgaagaattgtttctactctctgccataaaaacacagaggacgaagcttatgaagggaaacgtagaataactaaacaattcactaatcctaattagacatttatactctcttagcttaaatcaacaaataaacctcagaagattttgaaccattggcttgcaggttcaccagtagtatctccggtcaaacagttgcaagaaatagccaccaccttgttatccgaatccacgtctaagcattaccacgaaccgtcactagtgttggacggccaattgctcctttgtggccgtaatttgctcaatctttgtgcatatcctgccaagtttcacactttttccgaccgctgtttctccttc

SEQ ID NO: 48857 - DNA, 449 bp, Arabidopsis thaliana columbia
aaactttttttttttttatatatctttcatcgaatggaagtctctcttccgtaggtaatgtggacattggggtttatttttctggcaatacaaaacacacaacactaaagcccacagtgtttgaagcaggcccaataagaagctctcttcaaatttttagactcttgcgtgtccgctagtatcacgactggatatgtggtaacacacgtagacgaacctgaagcaatcactcaaactcaagacttctcgttaatcctcctcccaaaaatctcagaggatcctccttcaattccaattcaaagctccttccttttttcacatctctctgcttcaaattcaatcatcataaaaatcgaatctttattcttcagagagcttcaatggcgaccacatcatcaaacccattactactttcttcagatttcctcggttctcaaattataatctca

SEQ ID NO: 48858 - DNA, 768 bp, Arabidopsis thaliana columbia
tgctgctctctcggcatctttaggttcatctgctccagaggccatagcttttttatctcaaggagggtttggtaacaaagaaagcaatgataggactaagttaacttcttctgaccacagcgccacaaccagtttagaaaagaaaactttggagtttccttcttttgggggaggagagaggacaagtagcactaaccattctccatctcagtattcagattcacgcggtcaagacactagatcgagcttatctctacaactattcacctcttcaccagaagaggagagtcgaccaaaagttgcatcttcaacaaagtattattcttctgcgagcagtaaccctgttgaggatagatcaccatcatcatctccagtcatgcaagagttattccctttgcatacttctcctgaaaccaggaggtataacaattacaaagacactagtaccagtcccaggaccagttgtttgcccctagagctctttggtgcatcaaatagagagctactgcaaatcctaattacaatgttttgaggcatcaatctggttatgcttcatctggttcggattattctctcctagcttaaactctaatgctcaggtatgctgctcccatattctatttgtaaactaaactcaaggtcttagcaaagcaggtctaaagccacttgtatgggtttgtaaacaggagcgcacaggaaagatatcttcagactatttgaaaagacctagtcagctcctagcacattgcgaccgaggtaatattctgg

SEQ ID NO: 48859 - DNA, 1066 bp, Arabidopsis thaliana columbia
tcttcaaaagacttggtctgtgactttgtgagtgttgtgtgtctcaaagccttatttaataacctctctctcaactttatgttactcgcatttaaatttgtttctctgcttcactcttttgatttctttctacttctttttttcacacagatcttaagatactacaactgcgaccatggagcttccatctccttacagctcaagaaaggaggaatcaactgttcctccgaagagaggccgagtcaagatcatgatctttcgtgatctagtcagatcggaaacctcgatggcaccgactccgaggagaggccgaatcaagaaaatgatcgcgggtgatctagtcggatcagggaaacagaacaactacgacggagacggtaagagaggaggctagttaagcagactctccgactacatacactttatctccatgccagcttccagacaatccctttctctgagaagatgatcggattttcatattcatttgaaaatcttgtatgaaatgtaatatagttgttggctttggcttcttctttcgaatatgttatacaaaaagtttattatttttgttggggtaaattaaagatttaaaggtaagttactctgtttcatacaaagtttgggcctctgggctaatattttggtatctatgtaaaaatgtaaatattatgtttctttagaagtttatttttgtatctttgtagtaaattgtatctttgtgaaaatgtaaatctacttaacattttgatgaagtcaacaaaaaaaatctgattttaactgagggatgaaattgtagttactccaaatttgaggataaatgtcgtaataaataaacatagatggctaaatctgtaattaacctttttagaaagagggtttattgtataattttttctcccaaatctttattttttccgccgccgtgaaaaaatgaatcatcttctaatcttagcgagaaactcgctgcggcgagcggaattttaatctccgaccaccgtctcgttccttcagtagcaccatctcaccggaatcgaatcggtgagctctcctctcccgcttctgc

SEQ ID NO: 48860 - DNA, 538 bp, Arabidopsis thaliana columbia
tatggaacgtaaacatatcttaaataattcaatatccaaccaataataaaaataatacatatccggatatgatagcatatgtgaattatttatatcaacatttaatgcatccaattttctgaataaaatatttgatatttctcaagccaaatactaaacctaattttgtttgcagcaatactttaattatgattatcagattcttagaacttgtaagttgcaacacctttatatacttaaaagtaaatattatcaataatgatgaattgtggcataatttgattagatatacaatttcggaagaaacttcaaaatgtatttttcatttttaatctttttgttatgagaaatatcttcttttttttttgtatgttatgagaaattttataaactaaaataaacagggatgtgaagcatcagtgctgctagctggatcagccagtggaccaggagaacaatcatcaatcccaaatctgacactacgacaacaagcctttgtcgtcattaataccttcgtgcctcgtccaaaagaagtgcg

SEQ ID NO: 48861 - DNA, 518 bp, Arabidopsis thaliana columbia
taatgcgttctccgactggagaagttatttttggaggagaaacaatgcgtttttgggatctgcgtgctccctggttagaacctttaaggggtcctaacggtttggacttgagtaggttgaaaaaagacatacaaccttggcaagaacgacgttcggcagaatatatgactcatgctcctttaggttcgttaaattctgtagggggcgtacgtactgagatcaatgcagtcaattatgtctctccgagaagttggttatctacctctcattttgttctaggatttttcctattcgtgggtcatttatggcacgcgggaagggctcgggcagcggcacgagattttgacatgggaattggtcccgaaagagaaccgtatctcaccaaatcttttgttttacccttactgaatcatggttcagtgcccgaaaacaaaaggagtcatctcaaacaaagtaacaaatagctccattgattaaaataaaaacagacagcaaaccacctgaaacaaagcttaatg

SEQ ID NO: 48862 - DNA, 517 bp, Arabidopsis thaliana columbia
tatcatccttctcatggtaaaggcatacatcactgctctgctctgtccctaatttatgtaaccaaacctgttacaaagaatatatgaagatcagaacatgaaagccaaaaatattgacgtatctcataataagtacagtcaaatttggtaagaaaatatggcatctatgaggtgtataatgtcaacaattgatcgaaacggtaaaatctatattcatgcaaaagttaatcccttcctccagtactatacactaagacagtagggtgggaaaagattgaaggtaaaccttatcaggtcgcaggatttcgtccattgttatgtagagcaaagcatcattaccagcccattcaagataagaagtaagtcctttaagctgttgccccactggttttagggcttcagagtcgatgacattcactgtatatatctcatcacctttagtgtcctctgcatatgccaccaatttatgatcgggactcgctataaaaagaatcaagaaaatgaaacatcaagttag

SEQ ID NO: 48863 - DNA, 475 bp, Arabidopsis thaliana columbia
tttgtaacgacttgtaattttcaagtctattcaatatttaattgtctaacattttcaggtgtattcagtccatttactttgtcttcccttatcctaaacgatcacgtaccctctgttttgtacatttgtcagattctacttgacaacctaggaaattaagacccaactcagatttccttaggttttaaacttttcttgttaactaggagagggcccggccgaggcagtgttcctcccatggctcggtattatagcctttgctaatactttatgatatgacgtaatgtgcatccctagctctcaccaaggtttcaactacgagaacaacatgataaaccactagccaaaagcatccggtggtgacttctctcagttgtttctttctaaccaatcctagattgtaaactatattaaagaatgaaaatatgttgtaagtattttcatgattagaattgaagtgacaaaagtctactaa

SEQ ID NO: 48864 - DNA, 424 bp, Arabidopsis thaliana columbia
gtctatgttttgcgttttgaaagccgatcattttgcttcacacaccgagtttttcatttgcattgctttcgcatcgaaatcatccgaaatttgttgaatattctctgatccaaggattattgtttatgcagtaccatatagacaagttatggcagcgtatggatgtgttgtccagctaaaggttttgtaagtgtcgtagtaacctgaactaacgttatgtgcatgttggtgtcccagcttacttatggttacaagcttacttttggttttggattattaaactccattggtacaagcttacttcttggttgtggaatgtagcactgcattctccgtagttctcggagttggtagcaatgtaggaatgttctctgccgtattgtcgtggaaaggtcagtgactgtctggcattagtctggacatt

SEQ ID NO: 48865 - DNA, 548 bp, Arabidopsis thaliana columbia
ctactcactttgtttccgtaaatatcacttctttcgagtgacctaaatcacttccacgatctcttaaaaaagctccttttcttgcttttttctgtgtttttctttttgcaagaattcatcttgatggatccaattaagtttcaacacttgaagatggagaaatccagaggaatcttgaatttccaagcaataagatcgttcacgagcttgttcagactgttcgagcttcttcttcttgtaatcttgatctccaaactctctttcccttctgtaaaaatctctggggacattttcaaggaagcagcagtgtttctcgttagcccgagattcgttttcttcatcggaaacgcaattgtaattactcttcttgcgaaatccggacgatacagctcgagtcacgagccttcaaagacagcaacagaagctgcaagagacgatctttaccaagaatttcttcacaagagtgagaagaagaaacccgtagtttacgctacgaaaacagaacaactaaagaagccgagtggagggaagagggttagtttcgggag

SEQ ID NO: 48866 - DNA, 465 bp, Arabidopsis thaliana columbia
atcccccttgcatataacctccaaacccttatccgtaaacatcgacggtggaacattcttgagaatgatccataagggaatggatttcatagctggctgtgtctcctccgcaaaaggggtccatttagatacgagcataggaattccaactatatttcacatacctctattcaaaatcctctttcgaatgccttcacttctaattcaaaacttaacagtcgtctcattaacagcaaaaacatcaatcatagaagatttatctcccaacctccagattttgttcacaatcatatagatctttcccacatgtggtgctgttgtatgaagaaattttccaagcaggaagtcctccagagcggttttgctcttcaaaaactccttaggtacactacctttgctgccttcaacttccgagaccacaacttttgctttgtaacatatgcttttgtgctgcttcagccatag

SEQ ID NO: 48867 - DNA, 592 bp, Arabidopsis thaliana columbia
ttcattttgtgaacggtgtctatagtttttctagctcccattcatatttttaaacgttactctataattaattacgtacaaacaaaaattaagggtgcgtcagaaaaaagaaaagaaaagacagaatattttgggaatcatggggaaagtgaagcaccgatttggtaaatgtaaataaatgttgggttagtttatgtaaataaagacaaaatatgggaccgaaacaaaaaacgaattcaggtctgtgtaacctcgaaagtgagaccgttgtcgcccacaaaacacaaaccctatcttttcttcttcttcttcttcgttcagtcttcactttcttttcttttctccgccaccacacaaatacattcttcattctttgtaactttcacgctattcttcctcaatatattcattcgacctcctctcttcattcttaatttctcaaaaatcttatctttctccctcatttttcccgtcgagggttccttaatctccttcctaggaacgtttcatcgatttcatatttgctttccttaatccacaacgtttcttccttcgtttttttctgcaattttgttttcctttacacaaattc

SEQ ID NO: 48868 - DNA, 377 bp, Arabidopsis thaliana columbia
ttgtggagtttttattggcactagttggattttcgtggtcggatcaaaatccatacacattttcatcatactgagtccaattttttaataaatggtttgaacaattctgacatacgggagctcttattttggacttaaccgtctcttttacattatcactttagttccactgagccgttttactcaaattacataagcattttgttttctacaaacattgacattcctaatacaatgagtttctccatgaaatttcttttcctttttcactctctacataatactttcgtactgttggacatttttcaagatgatgacaataaagttgccaataataatgttctaaaagctaaaatgtcaaaaatgacagatcaata

SEQ ID NO: 48869 - DNA, 534 bp, Arabidopsis thaliana
cacgtcagaacactcgccgtcgtgtctcttgcggcgaagattactccgatgatgttatcggcgatttgttcgtcggttaatcctgctttgtcttccatgaatgatccgaggagatctgtgtgtgatgatgggttttgtcttcttttggataagatgttagcgaggatttgagctagctccttgcgagctttcatggctttgtggaataatgttcctggaagattaatcggcatcgaattgtaacctttctctagaatgtagtagcatcgttttagatcttctcggtaataaacttcgtctttgccgagtattgagattaacgcaacattgaaagtgtactgatgaaacaaaaaatgaacaaaatttagtcagaaacagttttttcaagtgtcagttataaaacagagtatagtgatagagaaaaacagaggatgctctgtttttaagacagagaaaataaacaggggacactctgtttttaagagagaggggttggggcttactgttttctttcctggtaagtgttgagttgag

SEQ ID NO: 48870 - DNA, 469 bp, Arabidopsis thaliana columbia
taattgaggtttttaaatatcaaagacaaatgcttcacatttaagaaaaaaaaaagtgttaatggtggggcagtcgaggccgcaacaaggccccgggcaataccgacagccacaactctctgcatcctcttctaattttatatttatcacaaaatccgacaaaagtatacaaaaatcaataaatatttaacctataatatttatctttgcatattataataattattattttaaaatcgaaatggttctacaataaaaatatccattataaatacagaaccctaactctcttttcagttgctgactcaaatctccaaactcctagaaaatctccaaattcccaagtttgtgtctttaatctctgtattcctcacaaactcatcaatttccaacgaacccacaagatcgaatatttatccttttttcctcgttgagatcgatcacacacacacaaatctgaaatctgaga

SEQ ID NO: 48871 - DNA, 1803 bp, Arabidopsis thaliana
gttttatgacaggtatggatcggtgtttaagactcatgtattgggatgtccatgtgtgatgatctcgagtccagaggctgctaagttcgtgctggtgacgaaatctcatctctttaaaccaacttttccggcgagtaaagagaggatgttggggaaacaagccatcttcttccaccagggtggataacacggtaaactccgggagcctggtcttcgtgcttttatgcctgaatctatcagaaacatggttcctgatattgaatccatcgctcaagactctctccgaagttgggagggaacaatgatcaacacttaccaagaaatgaaaacagtaagctcctctgttttgtttttcctctgctagaaacagagctacacacataattcccctgtttttgaaaacagagcataacgttactttcctctgttttgatctttttttgtttgatcagtacaccttcaacgttgcgttgctatcgatcttcggaaaagacgaggttttatacagagaagatctaaaacgatgctactacattctcgagaaaggttacaattcgatgccagtgaatctccctggaacacttttccacaaatcaatgaaagctcggaaggaactctcacagatcctcgctagaatcttatcagagagaagacagaacggttcctcacacaacgatcttctcggatcattcatgggagacaaagaagagctaaccgacgaacagatcgccgacaacataatcggagtaatcttcgccgctagagacacgacggcgagtgtgatgtcgtggatcctcaagtacctagccgagaatcccaacgttctagaagccgttactgtaagtacatatacggacacgtatttgtcgtcttttggtaatataaaaaacagagaagtggcagtttcgtagttttgtttgtgttcttatgggtaattttggtattttaaacaggaagaacaaatggcaataaggaaagacaaagaagaaggagagtctctaacttggggagatacaaagaagatgccattaacttcaagagttattcaagaaacattaagagtcgcttcaatcttatctttcacattcagagaagctgtcgaagatgtcgaatacgaaggtactaaacatacacaattaaaccgataaatgatgacgatctcgagtcgaaattcgaactaacattctatggttttacaggatatttgatacctaaaggatggaaagtgttacccctattcagaaacattcatcatagtgctgatattttttctaatccggggaaatttgatccatcaagattcgaggtaattatcatttgtttgatagtttgtagtactgtttttaatgttttggagtatgatgttatatttaacatgatttggttgctaatataggtggctccaaaacccaatacgttcatgccatttggcaatggaacccactcgtgtcctggaaatgaattagccaagcttgagatgtctattatgattcatcatctcaccaccaagtacaggtgtgtgtgtgtgtactacttacttattaccttctctttcactcattttgttcttttctttcaaatgtatgtgtagaattgtctgtgataaggggtatatttgtaatgtcagctggtcaattgttggagcgagcgacgggattcagtatgggccattcgcgcttccccaaaacggactgccctattgtgctggcccggaagccggttaacgtttcgttcatcgcccttgtcgcctttagcttttctatatttggaaagaggagactagagacgaagggtctagagtcg

SEQ ID NO: 48872 - DNA, 435 bp, Arabidopsis thaliana columbia
  unsure (1)..(435): unsure at all n locations
gaggannnnnnnnnnnnnnnnnnnnnnctaaagattcgcgaggttccagatggacaaaagccccaggcgatatttctatcaacctgaggccagcgttcgaacccaaacaattcgaatgttagtctcttctttgcagggaggcaagacatgtgtatatcactgtaattcgatatttatgagcagcatcgaaaaatagcccgctgatatcatcgataatactaaaaaaacagggaggctattaatggaaccttttaaatatatatgccattactggggaaaatcctcaaaaagcttgacgaaaggaaatgatattcatctgttaatttatcattgccttgatgttgctgctgttgcagattgcatggtgggatcaatcagtcagtactgcaaaatactttttgccgaaatgaaatgctatcaaaacagagggtgaag

SEQ ID NO: 48873 - DNA, 426 bp, Arabidopsis thaliana columbia
ccctagatctacgagaaacgacgacttttgtagttgatctaagtcacgagactcgatcgcaactatttcagggggaaaaataatctattttcaaatttttcatcacaaaaagttgtattatatatttaacgtaagttgttttaatataattcaagttaaccagacgaaaaaaatcattctataaagcgagacgatacatgtaacaacaatcagaaacaagaaaatgaaactcgatcaagaaaaaaaaacttttaatgttacagagaaaaagaggagtttaaagtctttaacaagctttacagctacgtctgcaattcccagggatctctggagttccaaccatatactctggattctttccacattctccaagcactgcccatctctcacagctctcgtttacgtcagtacagttacgatcatgtg

SEQ ID NO: 48874 - DNA, 506 bp, Arabidopsis thaliana columbia
ctgcatatagtctgtatgattcagaaatcagaagcagcctcagatactaaattttctcttatactgtaacaggagtggccagaagctgtgtatcctccttatgccaatggacccggatacataatctcaagcaacattgctaaatatattgtttctcagaattcaagacataagcttagggtctgaccctttatcatcgtcctacgttcatctccatcttttactgtcatgaacataagagtctcctaacattttcaaactatttcgactttgttgtcacagctattcaagatggaagatgtgagcatgggattgtgggtggagcaattcaacgcctctatgcagcctgtcgaatactcacacagctggaaattttgccaatacggatgcacactgaactattacactgcacattatcgatctccgagtcgaatgatgtgcctgtgggataatttgttgaaaggtcgaccacaatgttgcaatttcagatgaccacaacatagcac

SEQ ID NO: 48875 - DNA, 522 bp, Arabidopsis thaliana columbia
caatgacagattatttgttgtaagttttcttggaaccagcagctcatgactttgccaaaaaatgtgtacttattcgttaagtgtaattaaaacacgtttcttgagcttgtttggtgttttcttttgttttcttgcagggtcattaacgaatcaccctattacgtggacaacaagtcatcaacagactattgaacacggttgtccgattgcgttattaagctctcctccagctcatcatctgcactaagacaaatttagaccccgaccattttgagtatatatatgaacgtatcgtaactatagtatagtgtatagcttttgtttcttcagattttgataggaaggtttagttttggaaattgtatctatttgtcttaactcttgtatatgtgtacaaaagctttaaataagactacatgcatcctggcattctcacatcggaaaaacgttttgagctaagaatccgacaataaactttgcaccatcttcgttggagttttcaagggacttatcgatgagcag

SEQ ID NO: 48876 - DNA, 748 bp, Arabidopsis thaliana
ccgtgaaatgcagtgctgttacatggtgaatgctctgtttttttaaactcaaggtatatcttgctaaacaagtaacttccggtgaaaccctaaatatgttcattttttcgcaggttgtagtaggagtaacactagccttgaagtttggggaaggtaaggagctaccaaaatcgctcggtctgattcttgtggtccttatctgtctatttgtattggcgtatggtcgatcttggggtccaatgggatggttagttccgagcgagcttttccctctagagactcgatcagccggtcagagcgttgtggtgtgcgtgaaccttttcttcacggctctaatcgcgcagtgtttcctggtgtcgctgtgccatctcaagtacggaatattccttttattcgccggacttatattggggatgggaagcttcgtttactttctgttgccggagacgaaacaggttccgattgaagaggtttatcttctttggagacagcattggttatggaagaaatatgtcgaagatgttgatgaataagatcaatcgataaatgaataaacattttcttgtttgtcaaaaaataagcattttttgtcacaaaaatacaaaatgaataaaacattttaaattcgttagtttagcagcattgatatattatcgtattagtaagataatagtattagactatgatagatcaatactaaacaagtacggcataaaaaatgcaataaacagttttagaattattaaat

SEQ ID NO: 48877 - DNA, 278 bp, Arabidopsis thaliana columbia
gttacaggaagaagtccgcacgtatctgcacatcttggaccgttagctcgagtcctgaagactttttgtattttgaccgcagcccaccgctcctccttcgtgatgatgatatctcccgctcttccttcacttgtcagtctaaccacgatccgccgaaaccgatgagtctgccgcactggacgtagccattgcaacccagatagttctcctgtactcgatttcatctgtatcagacgtaatcgtacccaaggttacagatcccctgagtcctatgaagt

SEQ ID NO: 48878 - DNA, 592 bp, Arabidopsis thaliana columbia
gggtaatgccatccaagttcctgaaaggatcccatcttctgtcatgttggtaattgcgaccttacactgatcacctatccgctttgaatattcaaagacctataaacattcactctataaaactatgcaacctgatggctaaaaattacaacacacacaacactcgagtcttgcggacctcaggaaaccaatttcaaaacctgcagtcttctttcccaaaatattgcttttggtaagaatctgagaatgccttgctttgtgatcgatctcttggaaggagtatccctgccgatctgagtcataagattatgtatagggctgactgctgagtagagcactattcttctgtttcactctcttggccgggcaagccacaaggaactaagagcacgtaatcgagatgaataatcgtgtatagcaagaagagcacgagctgactgacgtgttgttaatactcgaagcatctgttgtagtgtttgcagcctcaagttatcagcctgccaccaagaaatgccctatgaactccataacagacggattcatatataaaatcaaatatttatctcattgtgacgatgacaagatatggtat

SEQ ID NO: 48879 - DNA, 553 bp, Arabidopsis thaliana columbia
tgtctttactaatttagaatatccgtttatttttaagattcttagtttaggtttaatttaatggttagatgatatattaattaaagtacaagaataattttaaaaaaccatacgggtggcattgttgatacttccaaactgattaataataagggcagacaaatgtcaaatacatatcaagaacatagttttctttaatagtagaccatattacaaattcgttgttatccatttttgtaaaatatgaaatgtatatacaaagatttggttacgtgtttttttttattgtcgctaattctacgtctttgttcctctcaaatttggattatatatttatttatttaatttgtatttatcttataagatgtatataacaaaattttgttccgataagagaaatggatcttttgtgaaagaaaagtctataactctttatttatttaatatgatgagtcatgcgagtttgcttttcataaaattgaaatcaattttatcttaaatttgaagtaaagaaattgtcatgtgatagagagaaagagagaggaaaaggaga

SEQ ID NO: 48880 - DNA, 497 bp, Arabidopsis thaliana columbia
taccttttgaagagaaggtatggtcacatacattagtgttttaaaattataagaatagatataggtttctcatcaaaaatgttttgatttgatatattatttatcataaattgaaagtggtaaccgaggttatttaagactttgtggggttaatttactttttttgtaaggcaagggtaaactttttttttcacaaaacccatattaattaggagggttttagtaatgcaacaaaaagttatgttagtgttgtagatcttccatgttaattaggatttagggtttcaaaacccaaaaaaaaaaacgaacggagacataatgaagagaggaagcgaagagatcaaagaagagacctcaccattgccggctaaacattttcagcgccgggaagtttccatcgccgaagatatcggtattcctatcgatctaatggtggaaatactcaagaaactccctgcaaagtctctcataaagttccaatgcgtctccaaacaatg

SEQ ID NO: 48881 - DNA, 522 bp, Arabidopsis thaliana columbia
tattggagacatcacttttagtatctgagactcatatttggatgtataatgtcatcattggtagatatatatctgatgatgtcaaatgtctttgtttttaggttcatccagtgatgatggtgattggactcatactcttcaatggagaaggtaagcaaacaatctccttcacatgttaagagtttgtagtatattaccgtcttaacttcatattttagacttcaaatttgtagtatattaccgtctggcgactattctaatgtcaagaggttttagtattcgttgtatcggttttcatgttcgatttccgcatacttcatttgtcaaagagactgaactgttgaattgccctttttaacatttgagtacattgaaattttatgtcaagagggttaggactcataggattagttttttttgtttttagttacggcattgttaattcggtaaagagaccatggacatgttttcgtttctaacatgaacggtaccttcaacttatgcagctatgttagcatataa

SEQ ID NO: 48882 - DNA, 667 bp, Arabidopsis thaliana
gataacggaagatggcttccacaagaagtaaatcggattcgaaggaagaagtgaaacaaaccctaaactccaaaaaccctaagaatgtctaccaaatcggaggccttcaagttgaattcccttaccaaccctacggaacacagcttgcgttcatgagccgggtcatatctacgcttgatcgtgcccagagagatggtcactcccacgcattgctcgagtctcccacgggtacaggcaaatctctgtctttgctctgctccgttctcgcttggcaaaagagctacaaatctcggtttcctaatggaaatttgtctcattcgaaaacgcagccctcaggtttgtcatgacactaatgaaattgcgtctatgattggttggggagattaattagttctagtagttgttaaatattggttatatttctgaacagatattgctggatctagtaatgtggagccacatgaacctcagattcccaccatatactatgcttcgtaagcattacattagttttgaaaaaatgttccaaataatgtttatgtttttcttattgttattgattgattgtttgtttttgttttatagacgaactcatgctcagatcactcaagtcattcgtgagtatcgaaaaaccggttacagagttcccatgactgtaaagggatcc

SEQ ID NO: 48883 - DNA, 337 bp, Arabidopsis thaliana columbia
tgggattgtcggtgttcgtttagtggaggactttggaagcttcacatgaacattggtttagatgaagcatcagaaacaggtatcaccatccttggtaataaatgttaagcattcgacgaagatccgggcgaggtggtagagctcaagctcgtattgctcgtagatgaaggtaccggtgaatgagatcgacataactgtccaagcaaagcgtcagagaaaatgtgatttataaagaagttgttaatcatgcttatgaagttggtaatcaggtgactgaagtgtgtaaacaaaagctttggtcgacgtccagtgtatagacgtgctgccaatgaacggg

SEQ ID NO: 48884 - DNA, 468 bp, Arabidopsis thaliana columbia
tgcttctgaagttgtagatagtgcagttaacagagcgttttctacgctagaccaaacgggagatgtagctggagacaagttttcgagtttttctactggcttgaaggaagcttcaaacagagcagctgttattgccattgatctgctgaggcaatcagttagtcttcgagagagatctgtaacaaatggagtctcttttgttgtgtactcttatggatcagcaaaagaattacttcctccagatgtaaagagtgcccttaactcgtcagaagatgttgctctaaaagtatcgagtcccgtgggagctgtattgcagcaggtgcttatgtcttatatactgaaggttcattcatattgtcgtcgaagaaaattcagtcattatggactacagttgctaacagtatcatgatgaacacgtatctgttgccactggaggtttggagcgaaatatgggtttggatccagatg

SEQ ID NO: 48885 - DNA, 949 bp, Arabidopsis thaliana columbia
cttgggtgtcaaacacttgattgggcattccagaatcgtcaaacacttaatgggtcattcatagaatcttcaaacacttagttgggcatttcaaaaatatttaggattgggctttgtacaattttctaattctaaagccacagcaatagtgcgattttgcccttccatttcaccatatttaaacactttctcgaattttgatgtgattcaagtgaaatggaaatggtatgaatcatacaacactctttattgtacataatgtttttgcacactcactctcacaatgtatacgaacgttgagtgtatatctaagattgaatctcagaacctaaattctctattcaatcatttgaattgcctgccatgccgactagtttgagcatgttgcgatcttccttaaacctctccagaacagtacctttcatggcgttatgtttggtgtcttgttcatttgaggcctgaacgattccccagcattctatcacttctggctgaattctgctcgtcttggaaaggctcgggctaccaaacgttgtgcattcgaatgtctggccttgatcgaagcttgctgatataaacaggccaaagtgatttatcttacctccaaatcctatcccattcggaatgttctccgatgtgaaattagtagcacactgcccgaccgagtgaacttatattagaatatgcttatactcacattctcatatgtagaagtaacagagtgtctgtagaggccatacccattgaatgttggtgtttgctccagttggtcggtaaatggctgctttagggttaagctggaaaagaaaagacttcatgtctccatagaaatcgctgtacctctcccaaggttgagaggcgtaccctccatacacatatccttctgtgtctctgatgattagccgagcgagagttcgatagcgaacaagtaccgcggctctagagtcga

SEQ ID NO: 48886 - DNA, 460 bp, Arabidopsis thaliana columbia
gttctgtgacaaagtttcaaacatttggatcgaaaacgttacaacataaatacacaagtgaacattataatgacgcgtgaatcattcgccgatacatataaactgcgaaaacagaacttcattcgtgtttgaaaccaggactagttgtatcttcttcatctttacagtgtgtgattacactgtcttttgaatcaagagtatttaaagtatctatcttccgcccggttattcaatagcatcttgattattagtggagtcttcgcccctgtcaaatctcctctgcatcctctgagactcttcttgtctcgtcacttctggattctgcctctcttcccgtctctctgctggcccttctccttctggcgttcttgctgcttccggcgtcgctggtcgttcttccggtgctgcttgtgtgcgttctgagctgcttgtctcgtcgtttctgcttcttcctttgtgt

SEQ ID NO: 48887 - DNA, 576 bp, Arabidopsis thaliana columbia
gagtgatcagaaatacatgacgatagatgctaaccggagtaactcatccaaagcagtcgacgaaaacttgcgagcaaagagaaagcaaagtctcatcttattttctccatttttcttacaatcaccaacactcttcatccttagccactccaagaactccacattaacctcccactcaccaaacaatctcgggtgagccctacgcttgctccagtcagtccaagtaagcgtcctattcgcgttacgcaacccaaggctcggcctcatgttgagtagcgtcgggatatagtgctcgtcggggcagcgagagtaagctttaaagattggccagtagaacgtatcagagactacctcgagggccatggctcggtctagctcgaaccactgagagccttttcgccattggtgcatgcggatgtgaggatacatgcggcggtcatagcggacgcgaccgattgtgaggtcgtaggagtcgacgtgggttagagtggagtcgatgaggaaagagtaaactgtggagaagttgaagagagggatgcatgattcggagagaagaatgaaacgttcgttgttgat

SEQ ID NO: 48888 - DNA, 477 bp, Arabidopsis thaliana columbia
tgaagatgattgatagtgtccaagcctttacttatttatataggagaagcagaagcggctgcagaggaagaagaagaaaccctaatttcattgtttttatcaaagccacgaaatcgaaattaatgggccaaaaagcctacttttgattcaaaatgggcccagatccacaaagtagactaacgatgatgtaataaaatatgcgtgcaggtgaagaaagctataatagagtcacaacttggaaataagttttttagactctacgcatatatagaactttccggtagccagcttctccggaggaagcaacaccaacttggctacaatggcagcagcctcatccgccgtgtgagtcccctgaccaccggtcatagacgtacgagtgaaaccagggcataaacaattcacactcagttttttgccgtcgtaacgtcgagccaaaaccctagagtaagcgtttaaggcaactttgagatggcg

SEQ ID NO: 48889 - DNA, 469 bp, Arabidopsis thaliana columbia
gagagaaagaggtaagagttgtccacgagaacgagaagcggcttgagtggctgaagttataccgtttccggaaactccgatgaaaaagtctggccggaaaagaaaagaactgggagaggaacgtgagctgaagtgagcacaggcatatagggggcgagaacgaaggaggagagaagatgaattggaacaagaaggagcttggtttagtgttttaaaagaagaggaagattgaggttttaagatgcttggagaagaagcaaactagtgtttggtgaagaagcaaaaaagtgtttttgtaataaatattcgtacatatgtcataaaggaaacgtttttatggcagaaatagaaagtttaaaacgagatagaagattatatatcagaaatgaaaataattattcattaatctagattttccattttaccggtaaatacagcaaaaattagaatgatgcatttacaatgtttt

SEQ ID NO: 48890 - DNA, 665 bp, Arabidopsis thaliana columbia
actgtcttcttccctgtggatctagtgcataaacatctaaacatattatatctgatgtaattcaggaacaggaccaagagctgtacagtgttcctgcagtatcggcaatgttgcagtcaatccgagattctttcactgaaagtcgccgtgggatatgcaagttcagacaatggctcgattccacaacttagagacttagcttaggcattcagtaatcagcaatggcttattatacctaattgctcaataccatttccttcactggaactgtaatagtttgatatatagctttaactaagtgttgtcaacattctgtgggcacataacatccttaaaaatcacttgtcagagaaaggaaaattcattttggtattatttctaatactgtaatgaagctataacttttggatgctagactcatagatggagatggacttgaaaagcctgaggcagcagagtacctgcaaattccgatatgctcaatatacaaggtatagagagacagagaaccaataaactcatggtcgaaatagaggaactaataaatcgcatctcttcgtgagaccccactttgtttacaaactcgtgaagccatgaagccaaaggaaaatctcaaggctgggaatgcaatcttctacatcagtttcagggactgtggtctgacc

SEQ ID NO: 48891 - DNA, 488 bp, Arabidopsis thaliana columbia
atgcggattctgagggagaagagcaacaccatgctgatcaaccgatacagaaccctcacgaatcttctaccgtttcaaacgaatcagatgggaaaggtaatgcagaagctactggagacttttctggaatggctcaagcctttcacatttcttccacaacagcaagggcaatctctatagtcatcgccttctctgctctcacccttccaatcttcatgaagtccctgggacaaggactggctctcaagaccaagcttctctcttacgcaacactactctttggtttctacatggcctggaacatcggagctaatgatgtcgcaaatgccatggggacttctgttggatctggagccttgacaatccggcaagctgtgatgacagctgcagttctcgaattctcaggtgctcttttgatgggaactcacgtgactagcacgatgcagaaaggaattctcatggctaatgtgtccaagggaaagatatgt

SEQ ID NO: 48892 - DNA, 308 bp, Arabidopsis thaliana columbia
ttttaaatccgaaaattataatttgctaaacccaaaaaaattatttcaaaatttttgttttgccaatgtctttcagctattctgtatcggttaactctttcagcaataaggattccgacacgactgatgttattaggcgtaacgaacattaaattaataataaaagctctgaaagatatcatgtgggtgtgttggacaaatcgcttttctctcttcagtgagtacacagatctgttccgacatcaacggcttgactagcgtagattagtcggctcgactccgaaatcgtctgagtatcacagcaacga

SEQ ID NO: 48893 - DNA, 480 bp, Arabidopsis thaliana columbia
caggatccttccgccgtcgcgacgtcagctcctgacgtcacctcaacacgtaaaccaacacaattaagtttattcctctctctctccgtcaacttaaaccggtgtttgtatataaatctgattgatatagaaatcgaaactcaaattggagaacattcgagaagctttggattttttgaatcacgaagacatggaaaaaacagaatctgtatcaggaaaggggaagagagtgattgttatcggcggcggaatcgccggctctctcgcttcgaaatttcttcaattcgattccgatctcaccctcattgatccgtaagcttttggttcattaatttcaaatgttggagacattgtgtgtttatttgtcttaaatcttgattaatttcaattaggacatgacatagtttgatcagtttagatgtgtcttaatcttgattaatctcaatttaggaaggagtattttgagattatttgggcaag

SEQ ID NO: 48894 - DNA, 438 bp, Arabidopsis thaliana columbia
taacaattacaaagacggaaccaatagatttgatgtaccatgtttcgaaaatgctactatagaggttgaaattgtgatttcttggtatatttgatcgatataccactgctattttaaatgaatgttgaaattaggtgtgatatgcgttgttagttactagataacagtggacgaaaaaaaaactttaaaggaaaaaatggatatgtatcgactccaatcttcttttattgatcaattatccatcaattatccatgcatgatacatacatcagaatcaacacatatagttaactttgtttttttaggaaccatattaacatttttagtgatcttggatcctgtgagaacgtacacatcacacaaattgaaggaatacaaattattacgaatcagcaatatgtatgatccctgaaatatgatcaaagatccaggagtgca

SEQ ID NO: 48895 - DNA, 544 bp, Arabidopsis thaliana columbia
ctgcttcactttcaattggtggttactctttcgaagtctctaattgactaattgagacagctaattaacagattggtttgctataatatctgttgttgttgcaggtataccccgtatctttacgggtgaagaaaatgcggatattggtgcacttgaatcagaattgtcccatgagagtggacattttttcgcagagtatatcaaaacttcgaggatcaacataaacatcaggcaagttttctgaattgcctgaattctcctgctttcgagcaaaaaaatttgtattactagtcgcatcgagccagaagatttgagaagcagcaactacttctttcgcactttcttggtttcttatgttcttattgtcatagaatctctttatcatgtaagatatgaccggaactcgagtacaatagcagatcaatttctgctgaaattttgaggttttaggccatttttaaaaagaattgtataattacaaaaaggaaatatcatttttcagatagcatacatattttacattgtggttaaggaaatcaaaggg

SEQ ID NO: 48896 - DNA, 871 bp, Arabidopsis thaliana
  unsure (1)..(871): unsure at all n locations
gccatcatctcctcacaatgcaattgttcctcataataactccggcactgcgcaaatagaaaattccccatgggctaataagctagtccttgcagcaaacggccatggcgaagaggtaacttgtagattctatcaccatggtattttccggtttttcaagttttcgatttcatgaatagcagccactgtataacaactctactatggctcagtttatatggtttcggttttaatacgttatatatatcttagccaaattaagacctgtttgatttttaaatcgttcgtttcaagtttggttcggtttatctagattaaacaccctaatagcagcctacttgttgggtaatcgttttcacaggttgatcgtggagtcgtcaaagaaccaacaccgagcgggcctggaccgtggggaggtgacggaggtcaagcttgggacgatggagtattttcagggatcaagcagatatttgtgacaagaggaaatgatgctatcacttcaatacaaattgagtacgataggaatggacaatctgtttggtccattaaacatggtggtgacagcaatggagtcgctacacacagagtaaacaacaatatttctcctttcacataaagctacttttgtgtttgatgctttagaaccatttctaatgctctcaaatctgtgttgcagattaaatttgagtatccagatgaatcgatcacctgcatttcagggtattacggacctctgaacaattcagaccgatataatgttgtcaagtctctgagttctacacgagccgtgggaggtacgggcatacggtgaagaacagggacgttttcacttcgactanacacaaggaaagttttggggtccatggaggag

SEQ ID NO: 48897 - DNA, 716 bp, Arabidopsis thaliana
ctttgtgagctgaaatgtgttttctttgatggctctcaccgccttctcataagcctcctttctcatagggtcccatttatccatgtcattgtcccacttgtacattttgaggtagtcatcaaactcttgcactcctatagccttccatatccccaatggctctttcggggccttcttagagcggtggaactcagcgatctcctcgaacatacctgacttcatcataagatccaaacgtaaagaaagatactcgaataacacagactgatccacatctatccaaatgaaacaacaatcatatttcaactcggagcagattgagcccttgtgatcagaaaacggatagttttcagggtcataagattttgcaaggagagcatgaatgtatgagttggatccaccggcaaggattgggagctttttacgttgagtaatctcggagatggcttcagccgccataacgcgaaattctgccgctgtgacttctccagcctccgggtttagttcaccgagaaggtgatgtggcactccacgtcgatcttcaatggtcgattgattcgtggtgatcttcaagccatcgtagaactgcattttgtcagagttgatgatctcggctttaaaatgtaaagcgagatcaacagagagtgatgacttgccagaaccggtggcacccatgatcacaaccattttgtcattacacttcatgtcgtaaattg

SEQ ID NO: 48898 - DNA, 704 bp, Arabidopsis thaliana
tcagctatcgaatcttttgctctggaacagctagaatccaatgctggtcctgctgaagtaactgaactaactgggccggtactgttctgttccctaacattgttttctacttgtatccaacgcaagccattgaccctatttgttctgtcctgattggataggatgtcatggaagataagtgtggttctgctgctatttgttttgtttctttcttacctgacattttggactcaaaagctgaaggaaggaacaagtatctagagatgttattatcagttgcagacaagtttaagaaagacccttacgggtgagcttagaacacatctcttccctctttgttactatcatcatattccagctgcgagttactctgtttttgcagaaactagacaaatactcgaattttgattgtgtgttgcagctttgtgtgggtggctgctgggaagcaacctgatttggagaagcgtgttggtgttggaggatatggttatccagcaatggtagccttaaacgcaaagaaaggagcttatgctccacttaaaagcggttttgaggttaaacacctacaagtaagtgcaccttttgtcttctctctgtcctatatgacgaaccaatggtccatgcatcttattagctcaacgggtatttttcttatttgtgttacagagatttcgttaaggggctgcgaaaggaggaaaaggatt

SEQ ID NO: 48899 - DNA, 737 bp, Arabidopsis thaliana
atctcacccgcagcactcactccaacaatggaaacgtaatgagccgagaatttctcatccttcaacttgtaggcatactttgaccactctattttctccttgtcctctagaacccacagacgcaactcaatagcatcatcagtgtaatcatcacaaaaaaccaaacccaactttcccttgtagtttatcacttcacaatagcttccagggtaaataaagctgaatgtctcagacctcacatcaaagcaaacaaccacaaaagcagtcataaactcagacgtatcgcctaagtaatacatgaccccattgatacatatcccatcactcacaatgtcatgttttacagaacattctatctttctccaactcatttctccagttccaaatgttagaactgtatgatgatcaggaccagaagggtaagccatgaacaacaccttgtactgcttctcaatcggatcaaacccgaaaaagctaaacgcctttctatacctttccagaaaaggcaagctcgcataccgtcctgttaaagggttgcatatcacaggcactccatcgtaatcgtgctcgttgatccacataccatagaaatacatcataccagaggcatagctaaatgaaaaccgtcggtcatgacgaggatagatcagcataccatctggagggaacttcatgtgaaattcaggggttactacaacagacgacgtagaagacttctcatatggagtcagacgctg

SEQ ID NO: 48900 - DNA, 502 bp, Arabidopsis thaliana columbia
tatgaaactaagactgaccctttttatatgtcacatctgtctctgtcagtaatgagtatccaccttgtgtacaaccttaatttttacttccatggaccattcaagatcgcatgtttttgtctacaacacatcttcttactttcgtagtttatctattgattctccatttggttgccacaatgttcatagtttcatatgatggtttgtaaagccctcaaaactagcctagaagtcgaaccagaaacatcattttagggaatatacttgaatttgtgtcgagtcttaactcatctaatcttcttgttaccatctcatctctaaattcagatccatatttctaacatttgtggttggctaaacgaaagtgagcaaaagataaggatgagagagagacgggacagagaggaagatgggtaactaaaagaatagatctggcctgaatctattaaaggcttgagtttcagtctacacactcacatgcagatgctcttttctggatatg

SEQ ID NO: 48901 - DNA, 520 bp, Arabidopsis thaliana columbia
caaaaatattaattatagagagataaagtgaattctccatatattctccttaatgattaaatgaatcatacatgttccttatatacacttagagtaaactaaaggaatttttactctaattataaacatcatatacatatgttaatagccccccacaaatcactctttaggaaggaagaggtttgaaactccaagacgattaagaagtgatttgaaagggccaggatgcaatggcttggtcagtatatcggccagctgattctctgttccaatgtgatgcacttgcaagaatccaaacttcatttgatctctcgttgtgtgacaatcgatttcaacatgtttggtcctctcgtgaaaaactggattgtttgctatatgcatcgcagacttattatcgcagaaaagctttgccttcgtttcaactttaatatgcaaatccttcaacatataactgaaccataaaagatcctttgtagccactgccatactgcgatactcagcctctgtgctactactacta

SEQ ID NO: 48902 - DNA, 535 bp, Arabidopsis thaliana columbia
tatcttctgcatcactatgatgtatgcgttgatatgccatcatctcttctatctcgtttaacagactagtgcgatggcgccgacgacttcttctagtccaagcatctgccactgaagcctccctgggtatcccgagatctatggttcctttgtcaccaacggtatcaatcaatctcccatgagcggaccaatgatcataccagaaagatgcactttctccattccccacctcaactctactaaacgatttagctacatccctgattttaagaatctttctccaaatccaagagcccatactcgtgctctgttttaacgaccatatagacttctttctgattaagtattcagcaacccatttggtccaaagtgaattgctattagagatgattcgccataccagttttagacaacttacatcatttgcttcctttaaatttcgtaaacccagacccccctcagcttttggtttgcacactatatgcatgaaatttcgccttatgtgactcattcagacctgacaaaggacgatgac

SEQ ID NO: 48903 - DNA, 575 bp, Arabidopsis thaliana columbia
cagtgactgagacattgcagacgacaaattcaactttatgggtatacgaagctttgcatttgtgaatcagttatgaaattggaaatgagaatcgagagaaaagattgaagctttgaagcagaaggatgaagctaaaaccctaaaccttttggttcaccggtgatgagaatcgagagaactctgccgttgtttggtcatgccgatttgtcgacgtgagtgatgtgagatttacatatgatatgacgtcgttttcctatttgggttctaaaaccccactgggctttatagtgggttgcttttaaatccatgtaataagtaagttcgatttatttaccgtttgaattcggtcagaattcgatccggactttgtaacgtttaatatgactgagcaatactaattaagctgactgacggaacaataccaattaacccaatttatgatagttatgttcaattttttttttttgtttatcgttttaaacattattattgtaggtaaactacttcataataggattagatcaaatatttctaatgatgatataatagataacaaaactaaaaaatatatattt

SEQ ID NO: 48904 - DNA, 343 bp, Arabidopsis thaliana columbia
cggctctgattggtaacattgggtaatagactaatagcatactagtataagttgcaaagtaaaaattcgcaaaatgaaaacttgtagatgaaaaaccgtaaatgaaatcaatttaaaaatatgttgatacatttttcagaatatttgataataaaaaaatatttaaaaatagtatataagttttttctattattatttgaatgataaaattttcatgtaaagaattacctattttcctttacaatttctaatatttagtaaacgtatgataatcaaaatttattatgcaactacgcaacttttttaatttttttggacaaaaacttttgatttcactcattct

SEQ ID NO: 48905 - DNA, 456 bp, Arabidopsis thaliana columbia
cctcacccctaaccgatcaggcatagcggttgttagaagctttctaatggaggctcttaggattgataggctgaaccactcggcttggtacaatcttggaaagatgttcaaagctgaagggtccgtctcgtcgatgcaagaagccgttgagtgttttcaagccgccgttactttggaggaaacaatgccagtggagccattcagatgattttgccctctcaaatcatatttttattgtctttggttatgatttctccttttctgattctttttttttgtgtttgtctttgatagatgaatataagaagatataaagatgtatgtgtacgagtatatcatttgatgtcaagtttataaacattttgtaatacacagttaaacaaaaattaatataggttttggtgaggtaaattttataagccaggtttactatttactcataaaagattataaatt

SEQ ID NO: 48906 - DNA, 477 bp, Arabidopsis thaliana columbia
aatcatgtaactatttgccctaaaagttatataacatcctttaataactacgacgtttgctttaacaaaaaaaaaaaataactacagtacgacgtttgaagtaagaagattatatatttatgttttgtaacccccagaactaatacatatcacgttatagcccataacttttatttaattatgctgtgctttttagtcaatgggcctattttaatggacctacacaatcatggaaataaatctggaaataaatctgtccacgacggaaaaacataatctggttacaattgtatgtgtactcacgcgcgacgccgtgatacagagatactgtggaaaagtgtgtttaacatggatctgttttagggtatttatcaattcgaaaatcgagtagtttactaatttcgtgagctttcacagaaagttcgaactctttgcatgcaatcattcgccgtcttcttccacaattgtgttttttag

SEQ ID NO: 48907 - DNA, 237 bp, Arabidopsis thaliana columbia
gaagaagagtgtcgagagaaaccgaagaatgacgatcatggcaaaaataagagaagtaacatcaagtgttacaagtgtgtgaagatcggccattacgcaaatgagtgtcgctcgaagaacaaagagagagctcatgtaagtcttgaagaagaatacgtcaatgaagatcatatgtagtcaagtgcaagtggagaagaaccaacaacgctaaaagaagatgtctggttggtagacagt

SEQ ID NO: 48908 - DNA, 604 bp, Arabidopsis thaliana columbia
caattccaataactgcaatagaatctccaggacggatctcagcagcatgagccatagcaccatatgctgtaaaaacagcacatcccagaatggcagattcagagtagggcaaagactctggtagaggagctaaaccatgagctggtgtaacacagtactcagccatccctcccatactatacatatacactggtgaatctgccagaaattaagaaatgtaattaggtaaaacaatcacagttctcctaatatgccacctgatgtttaaaaagtcttcaaatttaccatcatgtcgcaaaaagagacgagtttcgccatcgtaaagagttcccttggctctgttgtaagcaaagaagtcttcacatagatcatcatggccctgtatccaaattaaaatatcagctaaaaagctacagttctcagattagagaatccgatgaaagcaatacaatttcgttctcaccttagcacaataagaacaggtccacaaggcataatgaaagctccaactacacgagacccgattggaaatctgaagaaaagttgagacatttaggatttctgcaaaccatatgattccattagtgtggaggtgaagtaagtt

SEQ ID NO: 48909 - DNA, 476 bp, Arabidopsis thaliana columbia
tgcagtacagctgatactggtgcttggtttgactttgggttggatttcgacttatatctttagagtcggtaacaaggagatgacttatgcccagcaacttcgtgactacgagtctcaagtcatgcaggtttctgctttttcgttaatctctttatcagggtttatctactttacctaacataagtttggtttggttggttggtaatgagcagaaacgattggagagcttatcggaggcagagttagaggcattgatggcacaggttgatgaagagaagaccaaggttgagtaggttcctccattgtgttactgttacatcacctgcaaaagtttgtaaaacgaagaatagcacaggctttcaaagtaaaaatctagatattaatctgattttctttcttcatccttgctgtttgttgtatgaacgatacacactaaaaatatacaaatcgaagaatattttggacacaccacagga

SEQ ID NO: 48910 - DNA, 1261 bp, Arabidopsis thaliana
  unsure (1)..(1261): unsure at all n locations
gacatgaactaggaatccaaaaagacatttataaatgcaacgacgcaaatttaaagaataaccaaagtacatgttaaataaaattctaagtcagcaacggaacaaagtcaaggctttgttaaagtgtgttgctttggctgcaaggtactcttcccatatcaaacgcctgtaaataggaggatggttcttgtcgctggtcaacggtccgatctgaaggttcttgggagggccagcgaaataagcggctgagacacggtggtgcgtcttgttcaccaccgcacggtgcattgtacttctgaactgtccattggatatgatatgagataaatctcccattataacaacgagactaccttctattggctctactccaatccatctcgacccttcttcttgtggactttcaatctctagacctgaccaatgcaatgcatgcaacataatttatgttacttggaatgaatatacatatatttgtgatatccacgacccattcagttttagagtttttatgtttgtcatataacaaatattcaaatttcaagctattcattacaattgttatttttttggtgagtattagtactatgtcgttttcaattacatcatatttttttttttttgtatatatcacgaaaacctgtgtgtcatttataagtaaatttgatataaaaataaaaatttaaactgtaaatttgatatatagcactatttgtttttgctttcctctatttctcgttcatttagttgaaaggtaactagtttagtccgaattctagatctagatttacttaattttcgttctaaactttattcctttagactggcaaccaatttaggaactctttataagtattaatgtgtggttgttgaaaaactattgattaatcgaaaaacaaaaaatgataaaatggtatatatattctaataatatttctaacctggaatattgccttggtagagaatggtaagtagggaggagtcggtgtgaggggctaaacccatagctagatgagggtcagggcaaaccgggtaggagttcaactgcagaaaggattggatcgagtcagttcctgaaccagttttgtctggtacaagccatcccaaatcttcatgtgttagccctaacgagcccatcaacatgcttattagtctatgacttaaatcatccattgccttctgatactcttccatcacattgctgcatttgcaaaaaacgatcatgtattttttattttcttgattagttantatattaagt

SEQ ID NO: 48911 - DNA, 957 bp, Arabidopsis thaliana columbia
ttttgggtttaggttccttagaaaagttgacatcgaagttgttctgacatcattcccgacgcttcgtgcggtggaattgtagttaaaagaaggaactaaagacggtggagatggaggtaaagctaattccaaagttttcatctgaaattttcttttgcagtcgcagagcttaaagagaagaaagattcataacgaatattttgtagaagaagaagatgaacaaagctacaaaagccaagccggttcggttcttttgtttgaaataattttaggtccggtttgattataaatccactaattaacgttaaatatgacgaactacgcacagatttcgcgcgtgtacatcactgccacaaaacttgcttatgtttgcaggcgcgtgtgtttgtttatgtgttatataaacgtgtttaaggaaactaattaaaataaaaatccattggattttgtactaaacaaaggtaattaatagtgacacctcttaaagagataatgagtgtacgttagtaaaatgcacacgtcacatctcttcttcttcttcttctttaccacttcagtctctatattaagctctgtgatttgagtatttattttgcggtggcgttgtctggctctggcctttcctctttctcctcctccgccgcttcccgttccccccgttccggtactctcggagctcgtactttgtcgttctctcgtcgtgttctagtggccgcgctcctttagcggaggcttcagtacctattggtgtgccacgcttggcgacgcttctcgccgcgaagcgtcgtgctgcgttctctgctaggcttgcttctggcgctttccctgtacggccctctaggtgccttcccatttcccacctccagccgcctgtcttgtccgtctggcgccttgcttctgtccctgtcttgtcttgcttctctttcggttcttgtgtgtctctctcttggtttgtcc

SEQ ID NO: 48912 - DNA, 584 bp, Arabidopsis thaliana columbia
ttgaattttatttgtgaaggtggattatttattatgactggagacgtccttccttgttttgatgcttttaaaatgactctccctgaagacgcagcttccatagttactgtgcctattactctcgatattgcctccaaccatggtgttattgtcacatcaaaatctgagtcacttgctgaaagctatacagttagtttagtcaatgatcttctgcagaagcctacagtagaggatcttgtcaagaaagatgcaattttacatgatggacggacactccttgacactgggataatatctgctaggggcagagcatggtcggacctggtcgctcttggatgctcgtgccaacccatgatcttagagcttataggtagtaagaaagaggtaagtttctcatattatgcagcttattcctaaagaatgatattgtacttcttcaacagactttgacctcttatacatgttttgtaattgaatgggtttttgactttgcagatgagtttgtatgaagatttggtggctgcttgggtccttcaaggcatgattggctgcgaaccagaccctttgggtgacttcttgttaac

SEQ ID NO: 48913 - DNA, 503 bp, Arabidopsis thaliana columbia
gtcttgttcctctcctttttgatcatattcttgctaccgcttcatgtgcaagataagctttcaaagacaacggtgatttccttttttaagctatgtaaaacagacaaggatgtgtggatgctgatttttgagtttcatttgtgaaggtggattatttattggagacgtccttccttgttttgatgcttttaaaatcactcccctaaagaggcagcttccatagttactgtgcctaacactctcgatattgcctccaaccatggtgttattgtcacatccaaatctgagtctctttctgaaagctatacaatcagtttagtcaatgatcttctagagaagcctatagtagagaagcttgtcaagacagatgcgatcttacatgatggacggacactcctaattaacacttggataatatctggggcagagcatggttagacttgatcgctcttggatgcttgtgccaaccatgatcttagggcttattcctaaagaatgacatt

SEQ ID NO: 48914 - DNA, 762 bp, Arabidopsis thaliana columbia
aggatcccccaaaatcttccatctatatatttacaaagtcaacagagattgagtggatatccacaagtaaaagaacatcaatcatatgcatgtattatatatagacatccttttttcataaaacaaggaaaaacgctctttattaattgttataagctgtgactgagttttgctatacgatctcgatggttcgtatgttttgtggaatcctcagccggaagaataaaaagccttcgtcgtctccgtcttcaccgtcgcgagatattaaaaagggtaagacgggagagaaagatggagggcttcgtgtgatgacgtcaggtagtaagaccagaactagcagggcttttagccgcggcaatggctgctgttgtggtggtggtgccggctgtcgcgctctgtggagcttaaagctttcgtggttatgtaataatgctttcttgttcgtgtgatcgtaatttccgtatacatgtaaggtttaggtatgtatgtgtgatcatcttttgtgtgtgcggaaattatagatgctctattatattgtataatgaaatatatacgtaaaattactattttgtagctgtgaaatttgtgaattacaatagtttttcttttttctttttcgaacacctacaatttgttattattcactttattttacacatatatttatgctacatggtaaattttcacggatcaataatgagattgcacaaaaaactttatcccattgttggatgcagcatttctaaagtgattcaagattga

SEQ ID NO: 48915 - DNA, 345 bp, Arabidopsis thaliana columbia
gaggagccgaataaaggagtacttgaagcaccaaaagcaggcgtgtttgtggagccaaagcatggcgtgcttgatgccccaaacccaggtgtgctactgccaccaaaccctgttgtgtttgtggcaccaaatccgggtgtgtttgtggctccaaacccggaagtgtttgagacaccacatgcaggcgtgctagaggcaccaaaggcaggcgtggttgatgcaccaaaaggcgctgatgaaccaaaagtgctgtctccaaaggcaggctgtgattggtgtgtggtgcttccaagacgacttgactgatcgtgttgagaggccaaacagcatctgaccacacgtaga

SEQ ID NO: 48916 - DNA, 572 bp, Arabidopsis thaliana columbia
taaactatggttacttaaaagagcagaagccatcgttttctattgttactcttaggtcttttcacatcatgatcgcatcatttaactgccaaaaaagtggaatgcagcttctctgagaaactaatgtgttctttaacagaactatatcgtaaaaacttaaacttggtgttgttgttttgatcatctttgtttcttgcaggagggtgcggtttttatctttggaaggatgctcaatcctaacaacaagcggtttagagtcagtaattctacactgggaagagcttgagagcatgagagtagtatcatgtaagaacataaaagacagcgaaatttcagccgcactctcgtctttgttctcccttctcaaagaactaacgtggagaccggacacaaggtctcatctctcatccagtcttgaaggtactggaattggtaagagaggtagcaaattcttcaagaagagatgatgttctacattgaacataatgttatataatgtaatgtaagtcctcgcatctcatgtgccctgaaaattcttatacacacaaactcttcttattgtacgggcatta

SEQ ID NO: 48917 - DNA, 918 bp, Arabidopsis thaliana
  unsure (1)..(918): unsure at all n locations
taatgtatcaacatcatcattcattttctttactcttatgcatttgcaacattatcgtaattcatgagttcgaacaatcaaatattgacgttgaacagctacaaaaactgataatctaaagaagattcaagagaagacattagaggcctgagcagttctagcaaccttaatgaaaacgtcttcaagagttgtgtctgcaagtccccaagcaaacaccctaaaattgtcctttgccttctccaccgcctgaaacacttccgagatccgaacttcctcttttggtatctcaaatttttgtgtccctgcgatgtgatatattttcttggcgtttggagaaacatcttgaaccaacatctccacatccttttcatgttccgatggtgttgtcatagttaaaacataagatccaccataccttgcctttagctcttttggattccctacgcattgtaaccttccgtctacaaaaatgcctaatcggtcacatagaaactctgcttcttccattgagtgagtcgtgaggattatcgcagtgtggttttttgcacgtttgatggctgtccataagctccttcttgaagccggatcaagtcctgtgcttggctcatccatataaaccaccttttaaaaacacataaaccaaatataaaattggatttgttaaaaggctctctgaataccaagatattagtagtaagagaaaatggtgtaccttaggactcccaataagtgaaattgctacgcttagtctccttttcatgcctccactatatttcccagcaggtttatcagcaactccaccacgaaataggttcacactcttaagagattcttctacggcgtaataaccatgaataaacattttgatgcttttggagtgatataggnaacaattagtaagattgnatacatatatac

SEQ ID NO: 48918 - DNA, 455 bp, Arabidopsis thaliana columbia
ctaaattgtacagtctaaaagcgagagtatgatgaaaatagtttgacagttaatagagaaagagatagatggagacagagagagagagagagagagagagagagagagagagagatagagagagagagagagagactattccatcaagacttcccaaaacaagctctgggaacacattggaacatatgggtcagtgtgagattataggcagacaaggttgttatataccctcaagagatgtaatgctgaaaccagagactccacttatcagatcactcttcctcgagtcccaagacactgtaccattctctgttccacactccctctactgataataagccgttcccccaccatattacctaacactacaaagactgataagcacatacccttatcagccacttgcccttatgcagttcccaggtaacaagtatttgtaactctcagctttttct

SEQ ID NO: 48919 - DNA, 355 bp, Arabidopsis thaliana columbia
  unsure (1)..(355): unsure at all n locations
ggctctatctcttgtgtgccggtccatgtcgacattgaggtctttgcgtttggttttatggtcttgtgagcgcagttagttgtcgcggttgaaggagtacagtttaaatgttttctcttgtagatgcatgcatggatatgtagcacatagcgctgtcccgttgntttcgttctcttatgggttcacaatcctgctgtattngcacgacattgtgtctcgatgtctgtgccagcattgttgtcgtttggcncgggntgcctgcgtttccgtgtttggtagctatagctgnaagagcttagtgttggtatgtgctttggcntcggatcgcgtggtaattcagttagtggttgtttgt

SEQ ID NO: 48920 - DNA, 759 bp, Arabidopsis thaliana
gattggttagtaatcataacttcattcaaagttagtccactagaaaccatcaaaaaaaaactttcaaatgaaaaaagatagaaacagaacttgtaagtaatttaaccaaacaagattattttttaaaatataactaataaatttatattcaaacgtaccaagaaattatcgagctcgtgacgatcatgatggtatccaacggccgtggaagcgtaagaacggagaagatgatgagattgagaaagctgagcttcaatgatcggaagttgatctattggagtagctactcttaaacacgccacgtgtgcggctaataattgctcatacatcggatgtgtcgctatctcacctttcaactgtctattctcgtccgccacgaccgcggtgtctccgtctccgcctacggtggctcccatcatacctagtgccgcttcttgcataaccttgacacaagaccggagagagatactttttgtgtctgatcaaaaccctaattcttgaagcagattgtgttcgtatgattagaaaaagagagagagagagaattgtcagatgaaatcaacctatataaagctgtcctgatttctttcccctttaattgtttttcactccattcttttctaaaaatatacattatttgtttatagattattttgtcttatttgtatacaaaatacatttaaaacaatgtttgttatacacgggtctggtccggccataccatatattatttttacatagatcaaattatattgaaag

SEQ ID NO: 48921 - DNA, 518 bp, Arabidopsis thaliana columbia
catatttttcagtgtcgaccgcggcttcgctcttgcttctaccactttccggtcttctcctcctctgtccattcccatctcttgtgccttgagaatcgctagaagcttcatataaggttacagactttcccctactatgaagattagtcatgacttcctcctgagcatctcccgtggtccttgagagtctcaagaacttctacaacatgattcatgagaggccttcctttcgggttttggcttaggcattggtatgccaaaccagctactttcatcaacgccttagtgccgtactgtccatccattcgagggtctatgatcctcaaaagctttttgttgtgattcaaaagaggtcgtgcccactctaccaagttatgctccctgcaagctctgcttttgtccattgccctcttcccaaggagcatctcaaggagaagtacaccgaatccatacacatcacttctggatgtcaaatgccctattacaacaatcacatatatgacccatttacataatgt

SEQ ID NO: 48922 - DNA, 433 bp, Arabidopsis thaliana columbia
ccctacactacttagacctaccgctgaagaatgccgagacgtaagggatgctttgttgtctctccatggattccctcccgaattcgctaattaccgccgtcaaagactccgatcattctccgccgtcgatgatcacgatacacagtgtaatctgaaatctgagacattgaatgaaacggaagaggagagtgtacttgatgggcttgttaagattcttctctcgcagaatacaactgagagcaattcccaaagggcttttgcttctcttaaagctacatttccgaaatgggatgacgtaagtgctatgtattgtgaaggtttaagtattgtgatgttaattatagttatgagcttaggttaagatttagttatggatcaatcatcaatgcatagaaatacgtccattagagcatgttcttggacaaaattggga

SEQ ID NO: 48923 - DNA, 538 bp, Arabidopsis thaliana columbia
ggtggtggtgtaggaggtggagtcggcggaggtgtgggtggtgctgtcggaggagccgttggtggcgctgttggaggaggtggaggcggcagtgttggtggagggggacgtggtagtggtggagctggtggcggaactggtggtagtgttggagcgggaggaggtgtaggagttggtggaggagggggtataggaggcggtgctgggggtggtgtaggaggtggagtcggcggaggtgttggtggtggtgttagaggagccgttggtggtgcagttggcggaggtgttggtggagcgggacgtggtagtggtggagctagtggcggacgaggagccaggagaggagctggtgggggtgttggaggcggacgaaatgttggtgtaggagttggagccgggggtagtacaggaggaggagctgctggtggcggtggcgtgggaaacgacgacgctaaatataaaccggcagtgtgtactgttacaatttagtcgccatgcacgttgctctttatagtgacttcatcacactcgttgctat

SEQ ID NO: 48924 - DNA, 308 bp, Arabidopsis thaliana columbia
caaaagtattgtagatattaattatatttatattttttatataataactatataaaaatatctgtagcatattgttatccaatacaggagtctcactgttaagatcagtggatcttacttaaataaaagtctcgcacctaagttattctggttttacagcataatatgtaacacgtatgagaaagtaataggtattggtgggagcaaatagacatattgcgcacactagtactatgtggtatgatttcactatctcaccacttgccagtcgtcgagatgtcgctggacaacttcgactggctattact

SEQ ID NO: 48925 - DNA, 368 bp, Arabidopsis thaliana columbia
atgatcgccttgagcaacatgctctccacgtggagatgtatcaggagtaatcaaaataagacttaatcttgctgccatgcgttgtgcatgtgcttttattgcaaatgtttcttcagtacacgtaagccctgcaagataaaaaagcgcagaacaaggtttgccatctaaagcagctggtgggagataaacaccaacgcggcttgagcctttgaggtgttgtgattcaagttgataaatcctttgctcaccctcaaaacaacgatttttttgcagtagctgcatgttgatcatcctgtgtttttgtaatgtctgttgttgtaatattttgagtagggaataaatatggttctaattgcggcacgatgagt

SEQ ID NO: 48926 - DNA, 298 bp, Arabidopsis thaliana columbia
actacaatgtagtttgcattcatatggttataaaaactcaaacatatttaaataacaagtaacaaaagatatggttttaacctaattaaaaaaagactaagcaccttaatttggtgtagttaaattctatatataggaacctaaaaaatttttaaccacataaatattatgaatccatatctagtctaaacttattatgttgaaacatatcgcattaggtgatatgaaattgatccacagtttaaccatgtatattaatcaactttatatgatcacatttcaatttatattgcatgga

SEQ ID NO: 48927 - DNA, 510 bp, Arabidopsis thaliana columbia
tgaatgattaccttgtactctgcaaaataaacacaatcaaaaacggatgatacattacaagccaggccagtaattacaaaaacaaaagtcttgagcttagctaatacctaacttacgtaataaaagacataatattcttaacacagatagaaaaggagcggagaggaatccagagaaaaatcaaatttggttttcagagataagacactacataatacacatatgattgcagaattttatttaaaggctttttatcttttaagaggaaaaacaataatggtaataagatattcaacaataatggccccttcatcatatagtatcgtatcacctgcagatattactatataggctccaaatttaatcaatggggtatgtctctctaaatggtaaagataaaggattctactaagcaatgagaaacatataattatcattcccccaggcagacagagagacgcacccttcgtcgtcctgactacgtgagcggacattgtcgcgattagtggt

SEQ ID NO: 48928 - DNA, 553 bp, Arabidopsis thaliana columbia
taattcatatcttctgcttttctgtaggctgcagcatattgcatattatgaatataagaaaaaaattcaagataacatgtggtttttagatatgtaaagaagggacagataatttcaagaagcaacgaatagtcgtttgacagatcagttacaattatgctgactctctctttcaactaatcttcgtactgattctatcttaaccaaacacccttacttctttggctttaaagcgaaaactgacaagggtggccaatttctacaaatgaataccaaagccaccaacaaaggctatatcaaaatataaagcagcgtatgagcatcaattcatacaagtctaaacagaacttaaaatgcagagaaaaacataccaatattgacacgagcataattccggaaaaaccaaacacctagtaggttcacctagcagatttgttaccgctgatacaatcaaataatgcctacataaaggaaatctcagtaaatcacactactgaaaggaacaagagggaacaagtactgtaaacttagtaagtgctagagatatatatag

SEQ ID NO: 48929 - DNA, 519 bp, Arabidopsis thaliana
gtttccataatatatgtatttgataactaaatctaatccaaatattacagcagcctttttaatatttttgtatccatagcttgcaacaaaagagacgaaaaaaagaaacgaaaacaaaacatcccgtgtgaaatgagtgtagtgaggtcactgtgactaaatcttcatctagaatttagtactgaagtcaagtcgtccccttcacaatcagaccattagcatcgtcaaatatttaacgtgtattataactagtgtcaaccatgctgcccttttagagttaatttacaccaaaaagtacaaacacatttttctcaaattagctatcaaaacactaaatatcagagtcgtccctgatgacgattttgtctctcgccaatgacgacttccatcgagtattcctcagtttccgaggagatcagttgcgctacagctttgtcagccaacttcttgacgcctttgagagacatggaatcttgtgttttgtagacaaagacgagctaaggggaaaaaccatgacaa

SEQ ID NO: 48930 - DNA, 510 bp, Arabidopsis thaliana
tgataccataccggtgtgcagccaatatctgttcatcgatttaacatatgttttgaattgtcccaaaaaccatgaatgatggtactcaattttggtttttatttttaaccacatgtgaagctccgggatgctagaactagaagcagcttaccttatctttgatgccaccaacaggcagaacgagacctctgagtgtcatctctccggtcatggctgtgtctgctctaactcgtttctgactgaacaacgaaaccaaagctgtcaccaaagtcactcccgcagaaggcccgtctttcggcactgcaccagcaggaaagtgaatgtggatgtctcgtccatcaagaacattcatatcccctgcaagtgccagcttaaaatccgacgcacgagctcttacctaaaaaacatcaatagattatcaactaaaaagttctcaagtattttacagtctgtaatgagcaaggtttcaagtgaagataatgtacccatgtaagagctaattgagcagat

SEQ ID NO: 48931 - DNA, 745 bp, Arabidopsis thaliana columbia
gtagtaatcagatattccgagtgcgatgcagtggtttaattacagctatatatgtttttaataatagactttgtagtttggatgtatttcatgcatgttggaacaaagtttgatattatcacaataattatctgcacataaaagtagcatgcgtgtgtatacacaagttaattgacggttaaggcgatgcaaaaaggtaaggaagagtaaaacttacgacaagaattccatgttgtattaggacaggttgtctctttcccccatctccggcgacggctccggctcgtccttccggtatcctttgcatattcaatatgtacccatcttgagtcaccaccttcataatttaacaattaaaatagcagctttatcagttaatatatcgatgagtaatcatcatcaatagctatatagaaaaaaaaagaatgtcgtacgtacatcatgttcttcgcacttgtaaccaaatatgtgaacagaagaagcgcatatgccgccggagcagtcctctgcggtggctgtccggcaagcctgccgaaggttccacgagcttcaagggtcttgagggaaagagcgaagaagattaagacagataaggctaaaccgattgaaacggacggaaccataaccgaaccggccattgagatatatataggggttatcacgtacgtttataggaaagtgaaaatggtgttatatagagagaaggggctgcggataagataatagaaaatggaattattagcta

SEQ ID NO: 48932 - DNA, 597 bp, Arabidopsis thaliana
aaacatacaatataggaaaggtgagtggggagaagagaaaaaaaagggtatgcaaagattctgattccttaccatatgggccaacacagtccgagtctgacaatatggtcttaaagacggaagaagtaaggatttgtcataatttagagtagttgttccgccatggacaacctccttcgaatgcattttccaggacgtcttccattctctttgccaatatcacctgtttccaccattcacaccaattttaaaactactcaaaaacatttctagtgtttggtggttaccggcagactaatccgcaagaggtaaccagggtcaaattaaaaccgggtatcatatggactgaactaggccggagtagcatagcgcaacatttctacccccaatgcaataccgagaacaagactaaaggttgaagttaacaacttacctccagactggaaagtacagcggcgggtacttcaactaagtctttcgagttcctttgcggtagaatcactcttttgataccataccggtgtgcagcaatatctgttcacgatttaacatatgttttgaattgtcgaaaaccatgaatgatggtctcaattttgg

SEQ ID NO: 48933 - DNA, 833 bp, Arabidopsis thaliana columbia
tgctcgttaatctccttcccgtggagaatttgcttgaaaccacgtatacgtcgctctctccttagatctaacgcaaatggcctttagctggtgtgtctcgttcgtttgaaccaaaaaaaactgctagatgaaaacgcgacgcgatttaacctcacacagacgtcgatttgaagcgaagagaagaattcctaaacactactacttcaaaagtaaagagacaactcatactgggccttaaaagcccaatctaaaacggattagacgattacacgaaacagtatttggtcaatggaagcatacaaaagatgtccttctatttcttccaaaattacaaatttacagcagaagaaagctcggccacaataaaataatctgctctcaacttaaaatggtaactgtaatgaggtttttgattcatcatccgttttttctttacaaaatgatcaaacggtaatgtaaaaccagtaactacaactataaacgggactaggaaaggctacacgcttaaattttcttatacaaaacacaacatgtattacagttacaacgtctattcccatcatgaagaagctgtgtgtgcgtttttaaacttcacgtttaggccggttacgtgttcgttgaagcacaggttcttgaatcacatcgtccagtgagatatcaccttctccattctctcccttttctgctgcttttatcgcttggttcaacgcaatctacagaagcagaaaaataatagtacaaagcagttagttttacagaccttatagatgatacaataacactgtttctatccatccacctcaaggatataagaatgagctcttccagaaaga

SEQ ID NO: 48934 - DNA, 563 bp, Arabidopsis thaliana columbia
tctactataaataaataaaagtgaattttaatttccttttcttctttgtaattgcgtcaatactcaatatcatctgaagactaaaactgattacaaaccatgcactcagctaatgggcccatattataaaaggcctgtcaatgttcattttttttttgccaatctttttcgcaaataaatttatagttatttttaaaattaacaagtatattgattgtagtatcattgtatcaaaggttttgaatgagagaccttctcaaccgctccaaccacaaaatatcctcattataacactaaattaattgctgaagtttattaaaatttgaacactttgtatcaaaaatgaaaaataataattgaacactaaattaattatcgataaagaaaggaagaaaatggggtcgaaatgtcaggtgggaagaaactgaatctgcatcattgtctcattgaaattgtgttgtcggccaactttaactatgtagcccatatgtcttatgtactcatctacactacacctatagtttattttgtcatgtacatatgaatatatatatatatatata

SEQ ID NO: 48935 - DNA, 708 bp, Arabidopsis thaliana columbia
cgagcttctaaagtacttggattttacaggttaacataaacaaaaagaagaaagatgcttttcagattcttaaacctcaactggaagcagatctaaaagaaaacccctattttgacacaaggatgggtattgatgaaaaaaagattctgagacctaaacgtatgagtttccagtttgttgaggaaggtaaatggacaagagatgctgaaaatttgaagtttaaggtatgcattgtcttttgtatggattctttttgacgatattctctcttggtggtcttttagatgtctcattgtgtgtatttctgtcttttctttatagagtcattttggtgaagcaaaagcgaaggagctgaaggtgaagcaagcacaactggctaaggcaaacgatgatataaatccaaatttgatagaggtatccgaacgtgtcccgagaaaagagaagcccaaggagccaattccagatgttgagtggtggtacgtaatttctctcaccttaccctttctgttaatgctaagttgttttgtttctgatttgacattcacttggcataaccttggtggaaacaagtcatcctgcacttaaaaactgaacttgtaacgattggagtatttgatgactgtgatgaatcaccataacaataactttagtttgctctcagctacggatgacattcatataatttgtttggtgttcttgttgctcatg

SEQ ID NO: 48936 - DNA, 568 bp, Arabidopsis thaliana
gatttcattgtgacatactatataaactaaataaacgcaactgtgacatgaaatacaaatttgtcaaaaaagattacctcactgtgcaatttatcaaggataagttccagtccattgacaacttctttgattgatcccgatatcataataattctgtcagtcgtccccgggaaaaactcttgattacgtgaaagctgaatccttgccccagactttgcctgaaattcagtgatggtcgagccacctttcccaatgacggaaccagctgccgcattggatacaagaaaccgaatgtgtgttggcttctcagcagaatctgaaaagaggaaaacacattagatagtcaaatagatagcatggttcactaaaccgcatcagtattgagctaatcattgaattgaaacagcgtaatttaaccatccttggaaaatgaatctatcacacaggaaacattctcacaagttttcatcagcaaaaaaagacattaatcacacatgtccgttgacatatcacagagtacttaaacgagatccgattcacgaatgctgcgaaataccgaaacaattga

SEQ ID NO: 48937 - DNA, 905 bp, Arabidopsis thaliana columbia
gtattgtagagtggcgttaaggggaattgagattggcatggttgctctccctcggtgacggaggagagagatggtcggcggatataattgcacaaagctaggccgttataaatatcccagtgtacacgtggatactcacaaatttcaaatttaattaaaaaataatagccggaattatttattacactcaaagatgttttttatttgctatttaatatttatacagacagaaagagaaatttgctttgtagtctcttctgatgcctctagcaggtttagagggattagtcctttgcttattgttgttacttcttgatttgcttcaagagagcagctacagatccacaatgtgttgactcgttattgcatctctcacaacatgcctgtaacatctctatcactctctggcacctgccacccccaacaaatccacacaaaagtcttattagcatctccagtaaaactattctacagtgtattatttgaatgataacattatgtagaaaactatcatatcgaaagtgatgttgtcgttgttgttcttcaacatctcttaactgagttaatcatgatgctatttctcaaacttttcatggaactgtctaaagtaaggcatagagacatgaatgattactaaagataattctatgcacaaaacatgataaaacctggagatcctgtagtcatgtagatcaaagagtcaagagccttatgaaaaatcgttaatcaaaagaagaaaaccagattcgttttcttatagtagctcataagtgaaaccaaggtaagtacatgcaaacaaagtgacaatgcattcaatttttttccctcaagagaagccaacttttaacacaatccaaagacgaatatacaatatatagtgaggatatctataccagcctgatttt

SEQ ID NO: 48938 - DNA, 499 bp, Arabidopsis thaliana columbia
atattaacagtcataagttaccctaaatttaaaccgtgccaaattccaacagcagcatctaaattgattttaaaattcaaacagaaatgcggaccctcgataaaagaatggcggagtagtcactgctgttttctcgtgtacacgagcttcttgtgttcgttccacctcttgaagatgaagaagttcaactacgaaatcgttcttctctcgatctcggatttttctgatcgatggcggttcccacactctgtatcgccgatggaatctaccccactgcttttttctaccggaattcagtccgacgactgacctccgtcgcgcatgatcggtttacgaacccgaaattcggaatcgatggacgtctacggaacggaccgaagtgacggcaacggtgaatccatatacgtacacggaggcggcgcacgcgaagagcggaagagtttgacggatttcctggtggaagctagagacttcgttagatctgacggcggagatggtg

SEQ ID NO: 48939 - DNA, 690 bp, Arabidopsis thaliana
caattcgacgcatccctcacgaatgacgacttgaaaccgacaactccaagccagagaacgttttcatggttggatatgtcaagtttatggatcggtctcgtagttggtgtgcctacttactacctcgccgggagcctagtggatcttggcatggcgtggtggcaagggatcgccacagttgttacagccaatctaatactacttgtgccgctggtcctcaccgctcagcctggcactctgtacggaatttccttccctgtccttgctagatcatcatttggtatccgtggagctcacatcccgactctactcagagcattagtcggttgcggatggtatggtatcgagacatggatcggaggtgaagctatcttcttgctcttaccgggtcatattaagaagtctgctttgtctcatacactaccttggctcggcacttctccccttgagttctcttgttttattgtcttctggttggctcagctttgtattgtctggagaggtatggatggaatcagaaagctggaaaagtactcagctccaattctgatcagtctcacgtcctgcctccttgcctggtcctatctcaaagccggtggatttggtcacatgctttccttatcatccaagctaacctctgctcagttctggactctcttcttcccgtccctaaccgcaaacataagcttc

SEQ ID NO: 48940 - DNA, 563 bp, Arabidopsis thaliana
ttgactgtgctgcctcgttgtcttgatatcatcccttgcagatgttgtttctgttgaagcaccgattatatcttcatataacgatcggataaggccgttgcttgacactgtggacagacttaggaacctcaatgtcatgagagaagggatccatcttcccaccattgtcgtggttggagaccagtcctcagggaagtcaagtgttcttgaatccttggcaggaatcagtttacctcgtggccaaggaatctgcactagggttcctcttgtcatgaggcttcagcgaacgtctagccctgaacctgagatttggcttgagtataacgacaaagtggttcctacggacgaggaacacatcgctgaagctattcgtgctgcaacagatgtgattgctggtatgttctctttctctctctctaagtgttaagtgtattttgctgctaacctgacagagacatttatctgaccacaagtgcctagaggtgttatatgagctactagtttggtctttaccatctgattctgttacaagtcttgctatttgatgaactgatcaaagttat

SEQ ID NO: 48941 - DNA, 550 bp, Arabidopsis thaliana
ttctgtcttttatatcttctactcttgtcttatctctaaaagaacacaaatgggaggtagtaagaagcatgttgtcactagaacctcttctccttctcttgcaattgtccaggcgaatcctcatgacaacagagaagttgttcccatcgaagcaccgattatatcttcatataacgataggattaggccgttgcttgacacggttgaccgtctaaggaacctcaatgtgatgagagaaggcattcagcttcccaccattgtcgtggttggagaccagtcctcggggaagtcaagtgtcctcgactcgttggcaggaatcagtctacctcgtggccaaggaatctgcactagggttcctcttgtcatgcgacttcagcgaacgtcgtagccctgtacctgagatatggcttgagtacagtgacaagattgttcccacggatgaggagcacatcgctgaagctatctgtgctgcaacagagtgtgattgctggtaagttcactctcttacttgggattaagtgtgtttagctgcaagagagattactgagag

SEQ ID NO: 48942 - DNA, 570 bp, Arabidopsis thaliana
gctgtggaaactgtttagcttgctagacttcttattgaatctcttttgcttactgggtttcttactcgaatgtttgttgttcttgatttacttgcaaatgggatattgattacaacaagctctcttcttgttccttttgcaggctgctgattctcaagttgtatctgactatgtccgctacttccttcaccagcatacgtgagtgtcttgattgacgaagctgcatgacttgatacttatgctatcttatatatccggatgatttaataattcgttttcttatgatttgcagaattcagcatggacaacccgcaactgttaaggtttctgccaaccttatcaggatgctcgcatataataacaaggtacaagtttgcttttaagcttgccgtttggtttggttgttttaccagcaatttagactaagagtagtgaggaatgtggatgttgtccattttcttgtagagaaaacatacccatactcgactcaatcacggataacttttgtttggaagtttgaccctgggacatatgacagtttgcttatgtttttaatgctttattatgact

SEQ ID NO: 48943 - DNA, 388 bp, Arabidopsis thaliana columbia
tatgacagtttgcttatgtttttattgctttattatgactaaagctgaaaattttggggcatagagattgatgttacatgtcaaacctaggatgctagtatttatgaatctcttgttgttcgtagtgttactgttatggttgttctctagtctaaagtacgaacactattaatggaaatgtagaaagtctctgttgtaatgctactgtatgtagtgctcaagaagtatctcagttttctatactccaaatcatatccagtttgttattgtatggtgattccttgttttgattacatggattgttaactgaaacattgtatgtctttgttgagcagaacatgctccaaactggtctcatcgttggaggatgggataaatatgagggtgg

SEQ ID NO: 48944 - DNA, 481 bp, Arabidopsis thaliana
gtatgagtccctgtgcagtacctgtgttgcttgtacctaagaaggatggaagctggaggatgtgtgttgattgtagagccatcaacaatataacagtgaagtatcgccatcctatacctagattagatgatatgttagacgaattgcatggttctagcatcttttctaaggttgatttaaaaagtgggtatcatcaaattaggatgaaagaaggcgatgaatggaaaactgcatttaaaactagacaaggtttatatgaatggttagtgatgccattcaggctgacaaatgcacctagtacattcatgagactgatgaatcatgttcttagagcttttataggacgttttgttgttgtttattttgatgacatcctagtttacagcaagagtctagaagagcatgttgaacatttgaaaatggttttagaagtacttaggaaggaaaagctttatgccaatcttaagacatgtacttttgg

SEQ ID NO: 48945 - DNA, 790 bp, Arabidopsis thaliana
agtagatctgagggagaagagatcgcagagataagagaacgttatgctcgagtttttcgaaagtgttgatgaagatcgcagaagctcttttgattcttccggttacatgaaggatgaaactaatcatcggatcttgaggattcgtcgtggtgacgaaatctggaaaatccttaagcttaatcttcttcatcgacggtatccaatcaatctccgtctctaaatgcttctttcaagtcactcgaatctgatggaattcgaaattgttaattgagaatttttcagttgatgatcttcaatcgattcgtacctttgaggggaattatctctttctcgatgagtttttggtaatggagatacaagattaaagcagtagcactgttggtccagaggagaactaccggaattttaagctcctccgctgcgtcaattgtgaagctcattgaagcgtcggagatgatacagctaaccggtggtatatcagaaccggagtttaaccggaggatgaggtctttgaatggagctaaacagttgtttattgtggagtcaataagcttgagcatgtcttgcttagcgtcgacgtctgtccaaggaagaccgtcggggatagtctcgaagcgaaacgaggggagaccgttgagagcgtgagggccacgtgattggaggatacggcggtggttgtagtaggtgttgacgaaagtgacgtggaagcctctagcgtggaggagcttggctagtttcagcattgggttgatgtggccttgtgctggataaggtatgcacattgcgtgag

SEQ ID NO: 48946 - DNA, 573 bp, Arabidopsis thaliana columbia
ttggaacaagtagaagcaaaactaataagtaaaagtggtctgaaatcgtcccgggatgatactcagaacgaaggtattagcattgatgatgaaaaatattttttcgctgacaacgacaaagaggaaattaaagtagagatggaaaagcttgattatagtatgccctgtggcggttatgataaggaattttggtcaaatttcttagcagatgattatggtggctccaatgttgaggagttgatggcaacgggaggtttagatgtaaggtacgggtcttacaataaggttgtgggcaccaatccggatgaagtagttttgtgtactggcagcagagtctttgaccacgttgtatatgtcaatggggctggagcagggataaagacagagcatgcaaaaaagaaagaacatgttatgaaagataagatggttggtcgagttggaagctctcagggactgaagaagggggtcagaaagttagaggaagtggatgacgaggagtttgacatccacctttgtttgaggacatcgagtatgaagtagataacttatctgatttggacattgatgatgatg

SEQ ID NO: 48947 - DNA, 1147 bp, Arabidopsis thaliana
accaatcgttggcatgaactcttcgattgcacataagacatggacctgttcccctctacaaaagtgagaaacaaacagaatgaactaagaaaataccacagagaggaacaaagatgaatagagaacttctcggcgcactcttttcgtcgccaaatgcttagcctgccatcgaggtgaaggcagtatagaaactcctggcttgggtcaggcaaaacatctacaaactttgcgtagccacgaggtaatgctactacgtagagggctgcttcatattttaaatcaaacacgaaaagctctctgggaaatgtggcgaagaggatgtgtttccaatgcggtgagaaagagaatttagcggaatagagaggaaaaacggctgatgcaggacatgttgagtgactgctgctagcaacaacttcccgttctagcttctgtagatcgctgcaatctgtttggatttgaaactcctttgtagggacgtcattctcggttgtcccaagaagtttcaaagagagaagaaaccctttgaggccaaggacacaaaaatggcgggaatcaaaggggtcacaacgaatgcatgataaatattcaggtgatgcgtcatatttccagaataattgtcctgaatccgtgtatagcgagagagaagatggaccggtaatggcagcgaggacgtaggagtctggccgagccaatacccaacataggtcctgtacgccaccacaaccaaggctcttccctctagcactagcactgtcacagctttgttcaagccatagacgaacagaacagaggcggaagtcaacgagagcaatgcggccgaggtggtcacccacagcgatgaggagatcagaggagaagagatcacgctggacagggacaggagcccaacgaacagaggtgaccgtagaaaatgcacaagagatgggagacgggagagagacggaggaaatgagctggagagagcgtgagtcgacgagagagacagaagaaccagaggcaaatgccaagaggccggaagggctcaggtcagcagccgataggttgcttcggctcggtgggccaggaagaatacagtcggaggaggaacacatttttgaattttgtcgctatgagcagcattacgtaatatgtaagtttgtgaatttgg

SEQ ID NO: 48948 - DNA, 507 bp, Arabidopsis thaliana
taagataccaaaaacaatgacaatgataataaaggcaagacaaaagcagcaaagtttgatcatcaatttccatttctggttttctctttcgctcctcatcacttcttccttcagttctttcaccatcgcctgtaacgcttctagctcgacagaaacctcggacttggccgcgcttaactcactgtcgaagccggccaatttcggccaactgtctacaaccacttcgtatgtaccatcttcgacccatttaaacagatggtcctgtatattcaattacatccgcaattaacaacgaaaccaataaaaccctcaaatcaattatatacttacatctaaacgcgtaggacaacggaagtatggtcttccagggttctttgctgacgacgacgtatagatgaccacgtctaatccgcaatgacacttcgatggtaaccacgtccccaacggctgacggattgcgtactcgcaatcgagttctcggaattgctactcatatctttaattttt

SEQ ID NO: 48949 - DNA, 551 bp, Arabidopsis thaliana
aaatccaagatggggagaatctgactattgaggaggtgagctacctacagaatcaaggtggctacaatagaggtttcaacaattacaaaccccctcatcctaatctctcctacaaaagcaacaatgtggccaacccacaagatcaagtataccctcaacagaaccaacaaactcaagctaagccctttgtaccgtacaatcaaggttacaaccaaaagcagaactttggacctccaggtttcacctagcaaccacaaactacttctgcacaagtctcagagatgaaaactctacttcaacaacttgtgcaatgacaagtctcatgctccatgaccatggataagaagctggttgagctcaccactaggattgattcctcttataatgacttgaacatcaagatcgatgcacttaacactagagtcaagagcatggagggacacattgcttctacttcagctcctaagcaccccggagtatgcccatgctatctccacagttcatacttctgaaactgaggactgcgagattcaagagggggaggttttgag

SEQ ID NO: 48950 - DNA, 556 bp, Arabidopsis thaliana
ggcatggagtcgttaatagggacctcgtcttcaattctcatcctagacagatgatcagctacaccgttttcaattcccttcttatcaactatctccatgtcaaactcttggagcaataagatccatctcaacagcctaggtttggtatccttcttcgcatatatatgccttagagcatgatgatcagtgtagactgtcaccttagagcccactaggtagcttctaaatttctcgaatgcaaatatcacagctagcagttctttctctgtggtggcataccttacctgtgcatcatccatcgttctgctcgcgtagtagatcacatgcagctttttatcaatccgctggcccagaactgctcctactgcataatttgaagcatcgcacatgatctcgaatgggaagtcccagtttggagcttggactattggggcagtgaccaaatcttccttgattaacttaaaggctgtcaaacattcttcatcaaatgcaaactcgatttctttgcacagcagtctggtgagcggtcttccaacttggagaaatccttgatgaa

SEQ ID NO: 48951 - DNA, 531 bp, Arabidopsis thaliana
ctcttgcgtaggatttctaattctggttatggtaagcgtgcaatcgtacgcttcggtgatgacacgacgtatgatatcaaggatggagagtctagggcaattgatgaagtgattaattgtggtccttttaagatttatagagacttttcagatgaagatcaagggtatttgctgaattacaacttttataatctctaccttaatgataatcgtggtaagaataaaggtcttcaagattatcgtttacttatatggaacccgtacgacattattaatatagatatattttatgatgaaatgaagatatggtgcaaaactaatgatttagggatatatcaatcggatggacatctgaaatattataagtctgttattgcacgtcatcgtgaagaaggaggtattagcgttataggttttgaaacagccgaaggagcgactactgcagctgttaaaaaggaagaagatgaaaatgaagaagcattggctaaggtgaacgaagcaaatgcataagacggccaacccaaagtagca

SEQ ID NO: 48952 - DNA, 324 bp, Arabidopsis thaliana
gtaaatggatccagaagaaattgactcataagaggattgaaggttgcttgtttgaaaagatatggcagcattactgcgagaggcataagcacatcatgaatggcagaatccttgcggcgtttgatattcgaatccaagacaatgattttccggcattttagatcaacagctaaagcaacccagtgtttagtgtcgaatccaaggggatggatgccaactaacaatttcgtttacttgtcgtactggaaccgaccatctaacttgttatagagagtacggagccttttacttctgctcccacgcatactctcgacattatcaaca

SEQ ID NO: 48953 - DNA, 555 bp, Arabidopsis thaliana columbia
atatttaaaataatatttaagaacttgaaaaaaatgtgacgtaaattgttagaaaaccccataaaattgggtttttagattctatgaacaaataggcaaaatcttttaaaatcaggttttcctagtttttaggaaatctactttttgtagaatcatgattggataatatttggtttttgcaaaatcaaaatccaaaaactatgccaaaaactgcagccattcaaggcctaggtctaacaatgaccaaacaattaggtatataaccctaaaaacgtgcagggattattttgcaaataaggaagactttagggcttttcaaagacttggtgaaaaacgaatattctcttggcagcgataagagtgtcgatcgacaccagcttttgaaaaacgtccttcaagatctttattgctgaaaagcttccaaaattcctttttgtgctccatagttcccaaatgtgtgagtgtcctgaaatgactcaaaacatacgaaaagactagagagactctaaaaaacattctgagactgtgttagaaatcagtaaaaacggggacata

SEQ ID NO: 48954 - DNA, 517 bp, Arabidopsis thaliana
cgagatctttccagccaaaactggttgcttgatagttccgagagacattgctaattcacttgtaaaagccactaagggtgatggaggtcctaccacgtccgccctgcttatccccattctttccaaagtgctaagaaagattagatctatcgaactgccagtatcaatgaggatcctcgacacttcgaagttggctacatccaacgtaattacgagtgcatcatcatgaggtctttcgagatgttgtgtctccttttcctcgaacaatatcgaagtgccttgaaagtctacttcttcacttaagcttgatttcaaatgaacattgcgtctatgcttcttgattgcactgatggaatcacggtagagtttagatcctccaagaattacattgattttaccctttgaagctcttggttcctcttcgccagccggtcttggtcttttagagttttgagcctctagattatcccttgattcatgatattgcttgatgaagtctccatgttgaattttgaaa

SEQ ID NO: 48955 - DNA, 624 bp, Arabidopsis thaliana columbia
tcattcttgcttctgtccacagatgaagagccagaggtactaggaaggttttctttagctacagcagtaaagtcttcagctgagataacttctgtttcacaatggactttaaagggattattatctttcagaaggatatgagcagcactgatattggttctgttttgctttttgttccgcacactgtccttctctctttgttgagcagagccattcaagaagcctgtatcggtaagtaatacgctagattctgcaagcagggaatccactttctcagataatgtattcatagaacaattactagcatattccttggtcacatttccatccccagtctcagatttttcgatgtctttactatgctgctcttgatcttgaagaggaacaaaattctccgatgctgacgttgttgcatttgacaaatttgttggagatgacacaaacttctcaggggtgctggctgcctgatttctctgttgttgtttacagagcagtgaaccttctatctcagaattagtatttccttctggacttctccgtgcaaacacatcgctaatgtcaacagcaggaatcaatgcaccgcaactgtgttgatctggtatgctttcttttcagaaactggtg

SEQ ID NO: 48956 - DNA, 578 bp, Arabidopsis thaliana columbia
tatatatatcatacgagaaatggttaccaaaacgtatatagtttccggatcctctttgaaaaccatacataatatacttagtaagaatttacaaaaaaacatacataatatacttagtaaaacctacattagttcgtcctaagtcatcagcaccctctacaaggttggtcaactaagatttcctgaaaaagataagtaacgtcataagtaatctagtattacttagtgaaccccggatctagacaatgttatcctaatacccttccttaccccctaagcagcaacaacacgtaacaataatactacctaacaagcaagacataaacaaagataacacgcaacatacaacacaagcaaaatataatgcaccatgcagaatgcatgtagactcgaatttccttatattcaacggataactaatgcaagcatgcttctatcaacctaggtaaggctttgtacgaatccatgatctcccaaggacatgactccatactcttagacacaaagtctataagagacatagcattcctttatactacatcgtcgtgtagcgccggtcggtagcattcagcctcgag

SEQ ID NO: 48957 - DNA, 537 bp, Arabidopsis thaliana
attgattaaacaagagaacaacattgagccattaacaaccagaacttttgattcgaagacagattcataagattactttacaacggagaatgataattaaagcttaataaaacgaaagagaaatcctaacacaagttatgacaacatcagaatcaaattcagagtatacaaaccctaatttactaattcaagagcttgtgaatttggtaacagccttggttccttcagaaacagcgtgtttagcgagctcaccaggaagaacgagtctaacagcagtctgaatctcccgagaagtaatcgtcggcttcttgttatacctagcgagctttgaagattccgatgccaatttctcgaagatgtcgttgatgaaactgttcataatacccatagccttgcttgaaataccaatatctggatgaacttgtttcagaaccttgaagatgtagatcttgtaagtttcacactcttcttcttcatcttcttcttcttatcgccgccggcccggcttccttcgggagtttcttgccggcttttggt

SEQ ID NO: 48958 - DNA, 561 bp, Arabidopsis thaliana
gcacatacggaactgggataaagaattattttctcggctgcttgttcctggagaagttgctgcaacagtgaccccggttcctccgtaactagctaatccattattattgttgatagaattatttgcagccccagcaaaacccttgttggttatattcacaggcgcagaaaatgctacgtttgcttgtttaggaaaaatggtttgaggcagccgctgctgtggatgaggctgattcagctgctgcatctgctgttgttgctgctgaagcaactgctgttgttgttgttgctgctgcattgttccacccattttgagccctaaaccaggtggctgattcaagatcatagaatcattagtaccattgaatgttatgctgttttgatttggctgaccaaatccaaaacctaagccgccagcagcagtgctgttaccataaaacccattgttattgtttccgttgacctgacccatctgttgaacacagttatcttctcttacaaccccagcacggaacagaaattcttcaagtgtcatttcccctaaagtctgttgccttccagg

SEQ ID NO: 48959 - DNA, 589 bp, Arabidopsis thaliana
aagatctacatcttcaaggttctgaaacaagttcatccagatattggtatttcaagcaaagctatggggattatgaacagtttcatcaacgacatctttgagaaattggcatcggaatcgtcgaagctcgcgaggtataataagaagccgacgattacttctcgggagattcagactgctgttagacttgttcttcctggtgagcttgcgaaacatgctgtttctgaaggaactaaggcggtgactaagtttactagctcttgaattgtggatcttgttgaaatcgatgtttgtaaaattagggttttttagatttgatggttgttgttgactctttgatcgatttctgtttcgttttcttgttgcgatgttaatcaaatcggatccgatttctttcttaaatcaaatctatcaagtaaaatcttttgctgaaacgtctgctaaattatctcttcttcactgcaaatgaatcggttgttgaattagcctctcgcagcatttaaaaacgtcgtcgtttcgttgggtatctgtgttcttctgaaaacggcgtcgccgctcgagcatttacctagaaaagctttatgtttga

SEQ ID NO: 48960 - DNA, 470 bp, Arabidopsis thaliana columbia
tcacaaaaatcatcaacaaacatgctttcatttcacattttcagtctgtgtttctaaagaacgcttagccctaaatctttttatccacaatacagtgatacacaaactcatatataaaatccacaaattcagtggccgtccaggaaaaatatacatataaactttctaattcctaagtgcaaagacagaaatggcaggtgacggacagtccaatccaaccaagtaaacaaacagttactaaaattataaccttttgtatactctttcaatcggtttaaattgattgtatacatataagccttgttcaaaaaatcggccgcatagagatcagatggagtctgcaacgattttatctaaattgggaaaattaatcgttgatccgattatagtcggtttagacccgcctaaatctgtctagaggatggctagcccaattttataatttttatatataaattataataatttta

SEQ ID NO: 48961 - DNA, 1060 bp, Arabidopsis thaliana
gtcggttcttgtgtacctagccaatcgcgatgattcctgagctagtttctcgaagatgtcgttgatgaaactgttcatgatccccatcgctttcccggagattccgatatcaggatgaacttgtttcagaaccttgaagatgtagatcttgtacgtctcgatgttcttcttcgatttcttcttcttcttttcgcttccaccttccttggtgatcttcttctccgcctttggtaatttctctgccggagctttttctgctggcttcttcccagccggtttcttctctgccgctttcggagccattgatgctgactttagagatgagaagaaattgtggttaaatacaatcacttgacaattgaaagatgcgtctgatggaaaaactgaggagacatttgtttatatagaggcttctgctggctttcattggttacccgagtttcttgcggatcgatgacgtgtcatccatccatcggaaaggtttcgaataatcaacggacatgatggctctatcctcttaatcatttattattaatgggcctgggccctttgtttttttaaatagacgattctgatttccttttaatttgccgatgccgactgtaatttttatataatgtgaatttttttaatggaagtctgttgttcacggagacagagagagcgcgggagaaaatcgaaccctaaccctaattttgcgattgtctatcttttccgacgatctgatggtgagcgataagatagtagaatcaagccaccgcaaacaccgtaggtcgtattctccttccgacgaagcgttaaatcttccaagcggcacaagcaccatcatcacaagcatcgacacagtcatcatcttgatgaggacggcaatgaaaagaatgtttatccatttttggggaatcgtggtaacgatggtgaacttgatttggaggaaggggagaatttgaagaagaagggaagcattgatagagaaagcaatagagacaactacagaggtaggagtagtagagataaagctaggtctagtagtagagagactgggaaggagaatgaaagagag

SEQ ID NO: 48962 - DNA, 1320 bp, Arabidopsis thaliana
cattagaagcaccgtccacgtggcagcctgagcgatgaccggccaacggtcagagacactccgtagaaacggctccattagcgatggaagacgggatacatcttgatcagaagaaatggggattgttttagcgtggatcaaaagaaattaggtgttggtttgcgaggaaacgaaaagattgtgagatcgatgagcaaaaaccagagcttgtttgattggtgcggtttatgtgtttggaaacggaaatgaaaatggaaaggctgcttctttgcacgtttaactaactactcttctttcccatacacacacagagagttgttaattacgaatttgcccttccctttgaactcttctcttcttcttttgcccttccgggtcgtctccgtcccctttgacactcccacgttttcagcaatatcaatttttgtttaatcgacggctgtattagttggttgttaagaaatttcagactcgttcctccataattcagatataggaggagaacataaactatattatatgattatggagtaatgacagtgatttatgctttatgttgttcaccaaaaactattcattaaaattaagcgggttcacctaaatctgatgcttatagcctgcttgtggcacaacgataacgataggtaattcaactactaatcttcaattttatctatttcaatgactccaatcatatcataattagactctgttcgttataagaaggtaagaaagcaacatcattcaaggaaaagtaggccaatttcgcgtatcacataatatacacacacacatataacatatacttcaatagagacacatttcaatatagtgattaggtaaatgacattgaaatggaaaaacaaatcgttaaaaatatataatccaacattgaaattcataaaaggaaggaacaatcttctctacttcctagagttacaaagccacaaaatacgaagttaagcgaataatgcatctaatttcctacaagtactaaaaaccaaaccgaaattgaaatccctaaaaaccctaaccgggtctcttcaagagctagtaaacttggtaaccgccttggtaccttcagagacggcgtgtttagcgagttcaccggggaggacgagtctcacagccgtctggatctcgcgagatgtaatggtcggcttcttgttgtacctagcgagtttcgaagattcctgagctagcttctcgaatatgtcgttgatgaaactgttcataatccccatggctttgcgtgaaattccgatatctggatgaacctgcttcagcaccttgaagatgtagatcttgtaggtttcgacg

SEQ ID NO: 48963 - DNA, 1005 bp, Arabidopsis thaliana
taaaggacattctaaaaccctaactcagatcttccaaattccattaaccctaaagcagagcaacatccatatgataagaaccctaactcaattattcaagagctggtgaatttcgtgacggctttagtcccctcagaaacggcatgcatcgccaactctccaggaagcaccaatctcacagcagtctgaatctcccgagaagtgatcgtaggtttcttattgtacctcgcaagcttcgacgcctcttgagcaagcttctcgaagatatcgttaatgaaactgttcatgatccccatcgctttgctggagattccgatatcgggatgaacttgcttaagcaccttgaagatgtagatcttgtaagtctcgacactcttcttcttcatctttttcttcttgtcgcctccggcaccagcttccttcgggagcttctttccggcctttggtttcttctccgccggagctttctcggcttttgatttctcctccaccggcttctcggaagctggtttcttctcagcgggcttcttctctgctttcggcgccattgatacggtttttctcgaggtttctaggtttaacgagatctgagattgagtaggtttaatcgctttggattgcttgatgacctagaaaaaattgagatattgcttttatatagatcctatggagtgatatgattggatacattaagttgacgcggatcgatatctgtaccgtttgatctgctttttaatagaatgatatcgacggttgaaaaggaatcttgaaaaggaggaaagctctcacacgtgacggttcttattggatacatttggtggccaggactattgacgtgtcccagattggcgctatctagtgaaattttccattcccgccatcctcgaaaaattctgcatcggcccatgtattgtaatgagcccagttgtaggcccaattataaccagtgagatcgactccgaccgtccgggtccccagatatcggttcgttgttgcgacactaac

SEQ ID NO: 48964 - DNA, 1184 bp, Arabidopsis thaliana
aatccgcataacgaaagtttaaaaatcttccctcgaacgaaaatgataaacgttcattactacaaaaccataaagcttgaaattctttcccacaagagaaatcagatagaggaacgatggatcccgatccatgagatcgacgcaataagaagaaggggcattgatgcgaatcggttaaatcaaaaatcactcgttaatttctatctagaagaacaatcgaaacaaactagcaaatctagaaatcaaaagaaaaggagagagagagatgagtctggggatttaccaagtcggagtgtggaggtgtagacgacgaccggaacgaatgaagacgaggattcaggtgtgcgcaagagattaatcaatttaatttagtcactctcatggatcatacattttctctgtcaacctattgggctaacatctgagaccggcccattactgttcaactccagtcaattttgtctaaaaataataatatcatcaaaatttcaaaacacctaacatttgatgcgacccaaagaaagcaaaaccacaaattattatattgacagaaattaattctaataaataagaaaacacgatacaactatattaaaaaaaaacgtgtcaaattgaatattttctcaactgtatgaagtaaatggcccaaatgatattttcagctcacctaatatataaccaacttgtgaatttaaagcttcaacggaaatagtatagggcattaaattggtaaaaaggtacaaacatgaaacaacagtaatcaaaaatacaaaatgtaactattcgtattgaattctggacacagattctgggcccaatgatacattcaacgggccgccaaaactagtgcaaggttgtatgtgcatctaagtaagtgggccccatattttccaaatgttcgctcaccaaccaaactctctctgtatctattccacactttcttaaggtggtcttcctcgcacccaatttattactctctataactgtctttttcaaaattgtcgccgtcctgctgctccggcaaatactccgtcgctctcttcttcttcattctctccgccgttccaatagcttatattatctcttcagagaaagctgttccttccacgcacgtcatctcttaccacagctccggcttcctccgcgagtgcgccaaatgggacgacgttggtcggagattcctc

SEQ ID NO: 48965 - DNA, 515 bp, Arabidopsis thaliana columbia
tattttcggaataaaaaatgaaaaaaataatgatctgctcaaaacgtatatgaacaaggggaggtagaggaaaaaaagcggcgaccagagtaaacaagtttctctgttgcgtcatctttccggcgaaaattatcacctttttgccctaaatctcaccgtcactcttcaagtttctctctttctcaaccgattcaactccttcctctcactcgttacggtgaagcccttgctgtctccattctctttaacgggtgtgggaagaaaaatctccggtgaagagttggactttcttattgattctcgggttttgcttgggatttgtgattcatatctgagctgtgattagggtttgtagtcagtttcgccaatggctcctgggcgtaaaagaggagcgaacaaagctatggcgataggagagatgagattgggtgatctcgttcttgctacagttcaaggactccctgcttggcctgctaaggtgtgtgtcctcgctctctcggtatcatcacgctttg

SEQ ID NO: 48966 - DNA, 597 bp, Arabidopsis thaliana columbia
ggtttggcaacttccaattgcctactcagtaaaaaaataccaaagctcgcagaaaacgccggcttattcagaaaatccaaaagtccccaagcgaactattaaggacgaaggaccgctcttcatcgtcaagggtgtttataatgccgcatagggtttcgattttgtgatagacattaaccctctcgccgagaggttcttctccaaaggcaatcaaacgattcggtaaatcaacttcacccatctgcaaaaaaaaaagggttttatcaccaacggcagagccaacgaaaaccctaaatcagagcaaattgaaatcaaatccatactgtacaagcgaatcccagcggtaaccgagttagatcagatataaaggagtatactgcctaaacaatgaaagattgagcacggtattgaacaacgaaattcctgctatgaaagacggtttactctttcactctttctagggtacttcaataaacgaagataagaacagataagtagagatgaaaggtgacgacgcttcgggtttctagtaaagttcaactcagttcattattaggatcacgtttcttcaaacaaatttacgaaaaagattatgtt

SEQ ID NO: 48967 - DNA, 999 bp, Arabidopsis thaliana
  unsure (1)..(999): unsure at all n locations
atgtcctcttcttcgtgcttgccacaaacgactctggttcagagatctgagtcttgtgctcaaactcagacgcgagagtcgtcgtttcttgaggttaacttcctcctttttcttcaagaaatcgaacattccccgctccttaatctctggcgccgatgattcctctgttgcaaccttaggggtctcctgctctggaacggtgttcttgtactcttctgccatacttaatcttgattcgattgaacacttagcgtgaatgataaagagaaactagaaatttcgatttgagctttgagttgctttaagatggttttcaagagctgtgtgatgaatattgttgtgatgagtgggactttatagtgtgtgaagtagagggtccaggccaacgcggaggtcacacgctgttaaagatttcattagttttttaaattatggcaaaggacgtttactatttcttaagttgcagagtgaacccattttcttttacgtcggtcggtcggtggatgaatatcaatgaaatcaccccatattttttcttaatttaaggatttatgtttttaatatattgatatagagttaacttatattagatatttgcatagtaatgtacttttagttcacgggagacgtatggaagtttggttgcatggtacttccttctaatttattgtttgattgtatattataacattatatagatatgatatataatgtataattaatgaatttgaatggattagaatatataatgtagtggtttgaattagtggttgtgtcattctcacgatttaagtttgcatactatatgttgaaatataaactcttacaataatttttgtgggaaatatgtgtaatttatagacttcatatatgtatccaactaggagaattggagaagaatgcatatattatttccaatgttaagcagattcttatgcacatagaaagcctgtagaggaccttcaaagggatgtntccactcattttgagaattttagg

SEQ ID NO: 48968 - DNA, 622 bp, Arabidopsis thaliana columbia
ccaatcctgacacaagaaagcaacattttgttgtgaactagttgtcgaaggctagagaagctgcattgtctagaaaatcttctcttgcattcttatcaaacggttcttcaccaatgtacaagtctaagattgatctacacaagagatggctcttcacactcccgacatggttcccctcaactgacaataataaaagataaggaagagtttaagaatctatcggaaacaatttaatccagaaaggtgaaagataggtagaatcttacttgcaacgctgagtacatggcccggatcttttgtcaaatcaatggtggagtttcttggaatcttatactcatctttgaagaggctagtgaagctgcaagtgatatcaaagtaaacttattaagcagccaaatacagaatcagatgtgaagtccaacgatcaagccgaagctgaaatgtaagtgagtacctttgaagcaactcgtcattgtctgagccaccgaacttcttgagtctgtttccaacagactcttggaaagcattacgcacggatcggatgttgagtttgccgtagacaatctgtagccttatcgtcatcttaatatcggcttccatgagatcatccatgaatgactgg

SEQ ID NO: 48969 - DNA, 581 bp, Arabidopsis thaliana
tggtccccagaagatttacccggagtaagtgttgacatcgtatcgcacgagctcaacatcgatccgactttcaaacccatcaagcaaaagaggaaaaaattgggtcgggagcgagcagaagccgtgaaagccgaggtagagaaattattgaggatcggatccatcaccgaggcaaaatgtcccgattggatcgcaaacccggtcgtagtaaaaaagaaaaatggcaaatggagagtctgcgtagatttcacagaccttaacaaagcctgcccgaaagacagcttcccattaccacacatcgatcgcctcgtagaatcaacttttggaaacaagctactgtcattcatggacgctttcgctggttacaaccagatcatgatgaacctcgaagatcaagaaaaaaccgctttttacacagaacaaggcatcttttgttaccgagtgatgcccttcggactcaagaacgccggggcaacctatcagcgcttcgtcaacaaaatcttcgcattacagattgggaagacaatggaagtttacatcgacgacatgttggtgaaatctatgacagagaaagatcacat

SEQ ID NO: 48970 - DNA, 586 bp, Arabidopsis thaliana columbia
  unsure (1)..(586): unsure at all n locations
tgtcccganttgtttccaaacgttaacaataaaccatccttcacctgactccaactattgaacggaatccacgattgttccttgtggaaccaacattttgcttggctaccgagaaaaccggaaacacacgccaacttgtctttctcactatactcaccaccaagaaattgagcttcagtcattgtaatccactcttcggattacctttaatgaaaatggggagatccaactgtttacagtcatctgaaatcgattgagattcaattctctccactgcacaaaccactcgcttcaaggtttcctccatcaaagtcaacatctccgaaaattgcacctccgattggcatagtaccttgaatccacccatgagaaactctaattgattcttcgcaacatcattatccatcatagcgtttgaccggaacaagtttcactacaccaatgttaagttgttgatatccaaactccaattttaaatacaatactcaaatataaagatgatccaactgattataaaaaaaataatcaatacaaatccagaaacacaatcgtttgcgtgaccattcaagctcacgataacatagag

SEQ ID NO: 48971 - DNA, 493 bp, Arabidopsis thaliana columbia
ttattaaaaataaaataatcaagagtgttaattgtaattacacaaatactcaaaatatatgagtaatttttaaaacatgtataatatcactacaagaaaacagacaaacaacgactacagaaagcaacaacagatgtagtcgtcgtttttggcgactacgtcacgacagttttacgacacatatacgacaacctgaacattagtagtcaaatagtcgttattttacgactaaatatgttagtcggcaaatactcgtatagtaacgactatttaacgattatattattgaagggagacgtttgtcgttacatagtcgcaaatggacgactacaatttccgactgcgacaggttagtcgccaaatcggcgactaaaatacgacacatttctgtaatcgtaaaatagtcgcaactgagtcgcagagtagtcgcattaagttgttggaaaacgttttccgcattgccaagtaggtacacgtaatttgtttgttgtag

SEQ ID NO: 48972 - DNA, 1480 bp, Arabidopsis thaliana columbia
ggtggataatgatgctgcgaagaaacaattggagttcctcatgggcggattcaagctactatgccaatcggaggtgcaatttttggagatgttgacttcgatggaggaaaccttgaagcgaatggtttgcgcagtagagaggattgaatctcgatcgatttcagatgacggtagacagctggacctccggatcttcactaaaggtaatccgaagagtggattgcgatgactgaagctcaatttcttggtggtgactatagtgagaaagacaagttggcatgtgtttctggtttttttggtggccaagcaaaattttgattccacaaggaactatcgtggattccgttcaatagttggagccaggtgaaggatggtttattgttaacgtttggaaacaatcgggacaaaaagcgagtacttatggaactcgatctggaaatgaagcattggatcaaagattttgatcgcaagagggagccacataaatttcttgaatcataagctatcgttgtaagcgcatcaagttaggagatagtttcgaacaaaaatgttgaagcaattcaggatactgaattgtcgggtggaggtgacttgattgacaaagattcaccgattcaggagatcgctcaagttcaaagaaggaattgattgagtcattggttgtttttgagaaattgcaatgtgcatttgtaaagaacaatcgggtatatccaccatttgttcatcaaattctcaatgagaagcaagaggctaaccatgtgttagataaactgtcccttagaagacacaaacatcaaagtgagaagagaagtatatctcctaaggacatttccaaccctactttattttagaaataaaactctaaatttttctccaaccctactctatatagaactctaaaatagagaaatcagcagaattgttttatatatagagtgactatattttccctatgttttagagttgattgttttatttatactttagtccttcaaatttaatttaattgaaccgtccttctcttctttgactttctttctcttctctgccacgttatcatccacgtcatccttcgcttcctctaaagaatgctgaatccgttttctcacatacgtctgatgaaccttatcacccttctcgtgtggcatttgcggtgagcttttggctgtaaagggcgattggtgaacacatgagaagaactgtgggaaatattgggtttgccgtttgcgattagggttctgattttaaacacaaacgtttgggcctggttgtgggccttatccgactggtttttttaatagcagacttctaatttatttgtctccaaaactttgttcttttaaatttgggcatctttttctcttcgcttatgcagtatctatttactttagaataataatacaatgtggtatcttattgttccaaattaggaacacgaagtctaccattacatttttcatctctatattagttaataaca

SEQ ID NO: 48973 - DNA, 603 bp, Arabidopsis thaliana
ttctgtctgctctatcaagtatgtcttttgtgttaatgtttttgttaacaacgtcttagaacatcagctgttcctctagcatagtgtcatatatcgggattgaatcctcaatcctcattctagagagatgatctacaactcctttttcaactcctttcttatcagtgatttccatatcaaatttcatgtagtagttgtatccaccttagaagtcatgacttggtttccttcttggcgtaaatgttccttagagcgacaagattggtgtagactttcaccttagaaccaaccaaataacttcaaaattctcaaaggcaaaaactacagttaaaagctccgtttttgttgtagcatatcttgtctgagcttcgtctattgttttactggcgtagtagatgatgtgaagcttgccatcaatcctttggcccagtactgctccaactgcacaatcggatgcatcacacataatatcaaatggatagtccagttaggtgcttgaacgatgggagcagacacaacgcttcttttatcgaatggaaagctttaaggcagtcttcattgaaattgaacttagtttcttgcaaagaagtcgagtgagaggtt

SEQ ID NO: 48974 - DNA, 1904 bp, Arabidopsis thaliana columbia
tggacaagacaatgccatggcctttgagttttgtagatcccggtatggagattctgcattctcactttgtaatgtttatatataaagtgccaagacttgctacacttcctcttcagtgctgaattcatcaaagtggcatcatccaatcttagcaactgtgcagaatctatcgtagcaaaattagcttcccctaacctccgaagatcagattgcaacgctaccatatcttcatcaccaagtgtttcaacaattggtaatgcaggctgtaactcctcggaagatatagattctaacttcttaagatcccgtgacatgtgtgcttgcttctttagtctcaggctctgaaatgatttgttcttcctcaccaatccaacgttagcactaaaacaaagatacatgtaatggatattgctgaattcaatggcttgacatggatccatttttgacctattttgctgtaaattcctgtttttgaacttaaacatccaatttttaggagacaaactcaacttcctccgtctgttttaggttgtgacttcgaatgagaattttgtcgagcaccttgtaggcaccaaacttcagcttactatcagatgaattgttggcttcattgtcctttgatttgtcgtcaaagaaccatgttccctcctggaattcgccaactactatagtggcaacattctgaaaccgtggaaacgatttcttttgggtaatcaaaacaatctccggatttgatttctttctcacacttgattcatcttcctcaatcaattcttctgtacatcttgattcagtttcatgagcaaccacatgaatcaatgtcgtcggcataagaacctcaggggaagaatgaattttaactggatcaaatcgagccaacaacctttgctcaaaggaattccaatctctaaactccaatgtcgacatctcccgaagaaaccatttcaacgcaactccttctaaactcaacgctaccaaatccaacttatctgaatcctgatacctccctacacgaaaaaaacgttctaccttcgagaaccattcatacactcccgatccatcaaatacaggcatctctatgcgtctgatcaagctagatctattatccaacaagatcggagactcaccagcaccgcgttgaggcatagaggaagaaaacgagtgacgtggtgactgacaagagtgctcaccttgctccacccgtttaccttcgcggatctccatcctctccaacgttgcaaccacctgtcgtaacacgctatccatagattcaagcttctcttcatgttgaaccttatcagcacacagacgcttgaaacctccgaacaacaccttcatgttacgctctgtttcatcgccgtgacagttctccgactcaaacacctccgattcatcacccaaggccattgcgacttaaatcgaccagtttcaccgcaccaatgttaagttttcaatatcgataccaccgattccttaaccaaactggcacacactaacacaccatacaagagagagactagcacatcactagctcagctctcaatacaccatacgagagagactagcacatcactagctctgctcttaagtctctcataccattcaacaacaaacaacataaacctctctaaacattcagagccattatttatactagaactcagtttgttcatgatatttttagatcctaaaaatatcttcttcttcaagcaagtttcttctcacgtgcctcctcacttgaacgtgtcttcttttgctttctctcattcacattcttcttgatacatcaatcgtatcaataagccctctctgtctcagagattcttaggcataagtcgatcgatgatgcatttttgcggtgttattgtgcagtttgatgagcagaaggatcaagtagcagtgga

SEQ ID NO: 48975 - DNA, 445 bp, Arabidopsis thaliana columbia
tcgattttcactgcttttagctatgatttaggtatagtttttagagttcttttgttatttgtagagtcttttctagtctttttcaggtctttacatgtttgggatgcatttggagattatggagcattctggagcaaaacagacaacctaagctgcagaagcaatccggagacgaaatttgacgtaggtgtcgatcgacacaacccctggtgtcgagcgacaccaatacctaatgccaattcaattgcgcaacttattgatgttttgaagatttccaaattcggtccagaactttctcttatttctaaagaagtccctgcacgttttaggttatatacatatattttaaaggtcattgtttagacctaactcttattatctattctgtacttgggagaaaaagcttgttgacactccctttagagaagatctctctaaactctat

SEQ ID NO: 48976 - DNA, 2819 bp, Arabidopsis thaliana columbia
tcgccgctttcaagcactcgttttgtgcacaatgtttcacacacattgttataccgtttggttgagcaatgtgtgctgaaaacatcatcgtcaatatagatacgattattaaaacactgtttgtttgaatccccataacgtatcgtttttaagtattagtgatgatttaatacaaatgagtattacaaaatgttttactccttgtttatatttgtgaagaagatgatttggtgggtaatgttgggttagtcttgatgatttatatagtgaaactaatgttgtccatttttagcaattgttttaaatatgtttcttgtttctctctctagcaaacaaattctgtagagtttcgttgtgctttacttttttagttgtccaaacaaattattgctatgaaaagagatcgtagcttgcagatgtacccatatgccattttggttttcttttgtagtcacatgttgttaagagttgttacgaatatttatttgtagagcagcatagatctattagattaaatctattaaatggttcagtgatatatgtgaatatgaatacagtaacggttccaatcgcctctattttctctcttagacaccattttcaagacacgccaagtgcaagtgggaaggaagattgcttgaagaagaagatatttttaggatctataaatatctttaacagactctgttctattataaataaggagagagatcgatttagagggattatgcttttgatgttgtgagagttttttttgttagactttggccaagcgatgtgtttgaggagagattaatgttgatctctatgttatcgtgaggttgaatgttcaggcgaatgataatgtttctggatttgcattggttattgttttgataatcagtcggatcatctttctatttgagtattgtatttgaaattggagtttgggatatcaacaacttgacattggtgcagtgaaactggttttggtcaaacgttatgatggataatgatgctgcgaaaaaacaattggagtttctctagggcggattcaagttactatgccaatccggaggtgcaatttttggagttgttgacttcgatggaggaaaccttgaagcaagtggtttgcgcagtagagaggattgaatctcgatcgatttcagatgacattagacagctggacctccggatcttcactaaaggtaatccgaagaggggattgcgatgactgaagctcaatttcttggtggtgactatagtgagaaagacaagttggcgtgtgtttctggtttttttggtggtcaagcaaaattttggttccacaaggaactatcgtggattccgttccatagttggagccaggtgaaggatggtttattgttaacgtttggaaacaatcgggacaaaaagcgagtacttatggaactcgatcttgaaatgaaacattggatcaaagattttgatcgcaagagggaggcacataaatttcttgaatcagaagctatcgttgtaagcgcatcaagttaggagatagtttcgaacaaaaatgttgaagcaattcaagatacagagttgtcgggtggaggtgacttgattgacaaagattcaccgattcaggagatcgctcaagttcaaagaaggaattgattgagtcattggttgtttttgagaaattgcaaggtgcatttgtaaagaacaatcgggtatatccaccatttgttcatcaaattctcaatgagaagcaagaggcaaaccatgtgttagataaactgtcccttagaagacacaaacatcaaagtgggaagagaagtatatctcctaaggacatttccaaccctactttattttagagaaaaaactctaaattcttctccaaccctactctatatagaactctaaaatagaaaaatcagcagaattgttttatatatagagtgactatattttcttctatgttttagagttgattgttttatttatactttagtccttcaaatttaatttaattgaatcgtccttctcttctttgactttccttctcttctctgccacgtcatcatccacgtcatccttcgcttcctctaaagaatgctgaatccgttttctcacatacgtctgatgaaccttatcacccttctcatgtcgcatttgcggtgagcttttggctgtaaagggcgattggtgaacacatgagaagaactgtgggaaatattgggtttgccgtttgcggttgcggttctgattttaaacacaaacgtttgggcctggttgtgggccttatcagactggtttttttaataacagacttctaatttatctgtctcccagactttgttcttttaaatttgggcatctttttctcttcgcttatggagtatctatttactttagaataataatacaatgtggtatctaattgttccaaattaggaacacaaagtctaccattacatttttcatctctatattagttaataacacaaatgtataaatgagaaaattgccttcattgtttataataattactacaaatgtaattcaaagaaaattattattaattgtttcgtttaagatagaatagggtttgaatttatcaaatatgaaaaacagatcaatacaaaattgaccatacatatgcacttaaatattctgatttctttatagtgtaatctcattcaagaaaagctttggaaaaattccaacaaaaaaagaactattttatatctgtgaataattaaacccctgaattttttttattctaattggaaaattggaaaatcaactgatctatttgtgtatttttcttcttgaattaattgagaaattaactaata

SEQ ID NO: 48977 - DNA, 539 bp, Arabidopsis thaliana
ccttttttcaattctaccctttcctatttgccatttttatttagagatatttgccttctcggacactttttcaaaacaatttacgtgttacaacacttacaaaaaatcaggcactttgtacaaacaaagttactattataccctaaaaccaaattttgatttataaatcaaaccaaatttgttttctttaaaccaaatccggtttacgtgcacgacgactttacagttaccatcgaagtttattttttgaattctacaaaatatctaaatccagtaaaaaaaactaaattacagtttctcgactccggatctctattctaaaaacgctttcttcctcatttttcactctcatcaacaacttttgatttcagatctcaacgatgcaaagctccgccatattttctctctctgtcactccctctcctaaaaccacaacggctctctctccgccaccatcccataaccgtcgcttcttcaagcgatctaaacatttttccaaatgtggtccaactccttctttatctcgtcgatctttgcgt

SEQ ID NO: 48978 - DNA, 618 bp, Arabidopsis thaliana
cattacccataggaggacttgtagacgcagggctatagacttcaccaccccattcgacacctgtaccaaaactttctttgaacctatgtgttggccagaacccaatttctttccaagttgagctgctactgttacccatcaaaagccaccaatgcccgtatattttgtcctgtactcaacaaaatccatatagaaaaccaagtatcgttagctcaattggtaaagaccctaggcgaaacttagaggtcgccgattcgagtgacgtttgggacgaaactaatgttaaatgatttggctttgggtctgagaagattatgggtttcggcccagaacctcatggatttcaaaaaaaaaaaaaaaacccatatagaaaaggcaaagattatagacaaaaagcttacaattaattttaataactatttttatcaatgtttaattatttttatgcaaatgtttttgcaatatctaatatgaaaaagtaaaaagtaagatatatatattgaatggaatacaagtaccctaacactagatctcaccaaaaaaacactaacactacatatccatactatacttaaaaatccctaaacacacagagttatgtctttaatagtttttgga

SEQ ID NO: 48979 - DNA, 521 bp, Arabidopsis thaliana columbia
aggatatctcaatgagcctatggtctcctctttcatgtaggcctagccatgcgttttgggttagctaggactaggtggagacttgtatttgggattgggattgtgtatggaatgaatgggaaagagaatgagaatgaaaagaaaagaaaaaaaggagtaagagtttagagttcttaaggggaatacaaaagaaagtgttagtctagtaaaggggttggaattcaaagaaagttaggcattgtaattcaaagaaaagggtaaaacgcccgctgtgctaagattagaagaaaagccttaaccttgtaaaagtttaaaaccaaacccgctagactcttgaatcgttttaaagaagcaccccttagaacttgaaccaaaaaagagaaagaatgggaaaaagggtagagttaggacacctaagggactgggatcatcttctgagctatcacactatgtatcattgggtagatgggagtctgttcttgtatgggtccgttagcttttatctgtagcactctgctgaa

SEQ ID NO: 48980 - DNA, 434 bp, Arabidopsis thaliana columbia
caaaatctgctattgcttactttttgtttctttttatttttattactattttacttagcttaattcgatagtcattagtttactgcgtgatctgagaactttgtgaattcgatccctaagtgctgcaactgacctctttatttgagagagtggtcttaggattaatttgacttatatcgtcgttgccaaagttctctgtgattcaacattagactaagtgtagaatttagcctaagtgtttattttctttattttgttactcacgcgttttctttcttctttttcttgtgacaagggaactacaagatggaatgtaacaaactgctggcaaatttcgacgacagtgtcgaacgacaccattagggtgtcgatcgacacaatttgcagaatagaccagctaccataggcgacttcaacagagctgatcttttcta

SEQ ID NO: 48981 - DNA, 507 bp, Arabidopsis thaliana columbia
ctgcccactgaaacatagaacattttataaagctatacaaccatcatcataacatataaacttagacacaagcaatcaacctaacatgttttaacttctaataacacattcataataagcatcttatccataatagcacatacatacgtatcgctaggtccagtcatcctcgtgacgactagaacctcatgagtggaggttggccctcgtagctcagacactcccgtgcatcccgggctcgtcagcgtttcttgacctgcatgtaactcgccagcctatcactatccacattactagggagaccacggcccatagctcgattcgctctagtctttcatacaaacatacataatcatcatacatacatactatacttaacattctcatacataatatatcatagtcaaacatcataatcatacatatcatacaataatcgatcagatcatatcatcatagaattttatcctatgcaatcagatctaagcctacatatcatgcgtcaaa

SEQ ID NO: 48982 - DNA, 500 bp, Arabidopsis thaliana columbia
gaaatcaataatgaatataacaagagaaaagagtttagaaggatcttctcttaagggagtctccacaggattttacacccaagattagaagagaaaaatagaatagcctcccaaaaccttaggtctaaacaatgaccttaaaactatatatataagtttctaaaacgtgatgggttttctttaaaaataagggaaagttcagggctgaatctgcaaatcttcataacttcaatgaaacgcgaaattgaattgccatcagatattggtgtcgctcgacacccgaggttgtatcgatcgacacctacgtgatttttggtctctggatttcatcgcggtatacgttctctgtttttcattaggatgctccattatgtctaaatgcatcccaaatgtgtaaaaacctgaaaaggactagaaaagaatctagaaataacaaaagactctagacctatccctaaatcatagctaaaagcagtataaatagaggtatacaaatacaa

SEQ ID NO: 48983 - DNA, 1167 bp, Arabidopsis thaliana
caacgttacagagaatttttttggaaaatatactcctaaagttagtgcaacagagaaaatgtagaagtcatattctaatcaatgctctgtttctacatttagttgatactctgttttaaattagtaccattgttttaagagaaggcttaagagaagtaataataacctggacttgttgtgaggcaaacaaggcttaagagaagtgatggtgagtaactgcaaatcccaatctttctccacattcggaaaccttctcatcatcttctcataaacctcgttgctcgtcgtcgctccgatcaaccacactcttctcccgtgtcgccgcaacagctccgaaatccgattcacgatgtaattcgccgccggtacgtttccttcgccgttggtgaaaaccctaagatcaccgtagtgtaagagtagtccaggtcctgaaccttgctctgcaagcttccctagatcatgaaacctagtgtcggtgtaggttttatcgaatttgacgctgatttggtcggagatttctgaaccgatgttaaccgccgttaaaccgtgaagcttcgtcgggagaatcatcccgtcggtttggtttttctctagcgaatttaaataactggttagtacaccgtaagctgatacaccaacaagcagaggattcctccctttatctttcgtgaaaaccgcgctaatcctccggtaatccaaatctccgttaaaattcaggcttggtacggtgaaaccccatcgaaccggattcggttcaggattcccggttaggttacagagaaacagaggctgttgtgatgaataacgaagaagatgaggaacaggtcgaataatggaaagctttaactcggagctccgaaaacccgcttcaccaaaaacccggctcacaaccggatcatccaagatcgaaagaatcaactgacgaagctccactttcacacaagaaagtgagttctgattctgactctgtgacatttcttgatagatcctgaagttctcaggtaaacgacgttgatgcgcttgagatcgtttaattgcagccattagagagttagaaacaggtggtgaatcatcagatccaagttgatgacccgactggatccggtctaaagaaacgcttaagcaaagatctaaagctttgaattgaagacgaggagagtaagcaga

SEQ ID NO: 48984 - DNA, 740 bp, Arabidopsis thaliana
ggtaccgagcacaatgtgtcttttggagtgaaagttttgattttcatgatcgagtaagagttttcattcaaaaaatcaggagactggaggttggcaatgttgtgatggtgactgagtaagaagcagagggcgtgttggtgtgatcaagaaccgtgaaaaaacaaaagggaagctttgagaccatccacattcaagactcaacaaatttgcgacaaggttagggaatgtgtttaccattgggaaaagaacaaagccatgggtttctcttccaaagggaaaatgtattaagcttaccatcattgaagaagctaagaagaggctttctgctcaacaagccgcttaaactgtgtatttttcttcttcttcagtttcagaaaactatgtttcctctggttttgcatcttatttttttatgtttatgagttctctgtattcagactttgttagtgttccttttgagattattatgaactctgtttttattgaacctatctactatctgaagaatccaaattctatatgcttcaaataccatttggcccacatgcaagccataactaatggtttacgtcctatgaggttccgtccttggagtcagagaagtagtgtcacggccatgggctctggtgcactcttaagagctctgcaaatgtgccaggccttcaagtgtattagaccaaccaacaaccacacagctcatgctaagagagatgggtatggagagctaatgactggattgg

SEQ ID NO: 48985 - DNA, 496 bp, Arabidopsis thaliana columbia
ctcttttcactcttacctaaacctcaatcccctctctcacttctctcgcttcgaattctgtgacttgttagttttcaccctaaaaatcccaatctcctggttggattctgggttttgacttcgacgttgctcaatctgacgccgcgttcgagctactgaagtagctaacatcaacttttaagaacatcgctgcgatctcactcccagggatgcaaatccaaggtaagcgccatgatttagtgattttagggttccactatttccccattcaggacgagctactgtcccttgcctagtttacctatctataagtttgttttcatgccttcaaagtctcacagtttttggtctatggttggttctgacagatgatgagaaaagatattagcagaaaggatataattgaggagattccatattctggttcttcgagaatggaattaaagcggagtcatcatcagtggttgacagaagagtctagctcagaactattcag

SEQ ID NO: 48986 - DNA, 868 bp, Arabidopsis thaliana
taaaaagaagagaaatgcttcttaaaactttctgcctcgcatataatcgttattttcctagaaaaaaaatcgtagcttaacttcacatcaaacgtaatagaagtttacgtttgattgtgacattatcaatatatatcatctgcattgcacgcggatcaaatatttggccagtctaaatagaattagaggagaataaagtaaaataaaacaacaggtttgaccaattaattaaaaaaggggcgagccaacttgtcgtatatcattcgtacagtggccatttactaagtgtgtgaccctatatatataaatcatatccttcatgcaaagtcacctgaacatttcatatataagaagatatacaagcctaccaaacataacaaaacatattttaaacaccagcaagtttatattgcaaagcgtttcatcatgatcatgaagatatctatggctatgtgcaaacaaccattgcctccttcgccgactttagacttccctccagcgagatttggtcccaatatgctaactctaaacccatacggtccaaaggacaaagttgtggtcatcatgggtgctaccgggacaggcaagtcacgactctccgtggatatagccacacgttttcgggctgagatcataaactcagacaagatacaagtccaccaaggtctagacattgtaaccaacaagatcacgagcaaggagagctgcggggtaccgacacatctccacggcgtcttgccgcctgaagccgacttaaccgccgcgaataactgtcacatggcgaatcatctcattgaatccgtcctaaacagtggaaagcttccaatcatcgttggaggttcgactcattcgtggaggctctagtgga

SEQ ID NO: 48987 - DNA, 510 bp, Arabidopsis thaliana
cgtttctttggttttgtctgaattggctatcacaattttgcgtaaggagaaaatatagggaactcagaaaatttagggattggtttttttttgtttaaccacaataatattttgttttctgataagtattatcatattaaatgtagaacctagcataatttattgatctgatgcatcttagtggagttcgtggccaatgactaccttaaatatttataacttcaactatgaaataataattagggtttcaaagactaatgttttctgagctttcttgagacaatttttaatctcatgggtcatggttttgtatatatttcatgtcttacggctccaaaaacaaacccatatataagttaattttatgttcgaaatctatatttatgtaggtcaaacgaagatgtcagtaacaatgggatggagaagaaggctctcactactgctgaatcagttcgggttgtggaaaagcatccatgggttatcacctttctgaaccatgaagacttgact

SEQ ID NO: 48988 - DNA, 937 bp, Arabidopsis thaliana
tgcatgtacggctcaaatccatgagagcaagaaaaatcttgagtaatccactcagttgctccaggaaagcaaatgcttatacgaatgataaatctcgtaaaaggtcttaacgctattaccgcacaagtacctgatgtaggtaccgaagagaaagcaacagcctgaaaggacaactcacactttggcaagtttaataagctccctagtatacgggttgaggaagaacatgtccactaaactggatcttcgcataagcaaccatccgtctttcgagtaacaaacatcggttccaactaactcgggtaaattcagtgtgtaactcttccttcccaatggatcgaagagaatagtcacgccgtaatgtctcggaaagctgataacccatggatgcttctccacaacccgaactgattcagcggctttacgccatgctcggcagaccgcggatgcacgaatgttatcttttaaaccaagataagacattattatttccaaaaggcttgatgtaaggtcagcaatagtaagaacttcttcttcagcccattgttactaacatcttcgtttgaccttcataattaaagatttcgatcattaaattaactgaaataaatatatattgcttttggagccgtaagacatgaaataccacaaaaccatgagattgaaaattgtctcaaaccaagatgctacaagaaagccgagaaaacaataaaagttgtcccaaactcatcttagaaaccctaattgtttcatagtggaagttataattatttacgggaataattggccacgaactccacgaagatgcatcagatcaataaatcatgctatagattctacatttaatatggcatcttgttcataaaaccaaaaacctttgatagagatgggatagagagtattgagagagagatagagatgggatactcaccaaatg

SEQ ID NO: 48989 - DNA, 1513 bp, Arabidopsis thaliana
tgtgtcaaatgcggtgaatccttttgcatcaagtgcaaagttccgtggcatgataacttgtcgtgcaaacgttacaaaaagttgcattcaaatcgtacaacaaacgataaacagcttaacgaactagcaaatcaggaaagttggcgtcaatgcagcaagtgtaaacatatgattgaacttactcaaggatgcgtccgcgtaatttgcaggtatcatctctaatcacatctcttttcgaatttcttttgtttcgaattgtatgatcacaagttactttataaattggcagatgtggacatgagttttgctatggatgtggagctgatgctggatgttgctctcatggtcatgtaccgtatttttcagttgaacgtcgagagccagaagtccaagcactagtgttaatcggtgttgttgttgttactatgatattcttctttagatagtttaatcagtgcacgtagtttaataaggacttgctttgagcaggaagcgattagactagagttagaccaataacaagagactataaaatttattgcattgagtcttacaagcaggctttagaatttagtgtaacctgaaactgtacgagccaaacttctaaataacatcccacgagattccgaaaacatttagagaaaaagtgaacacataccatttcgcagcgagattccgtgtgtacgagatagagatagagaaaaacctgagatgttaatctcattgtcctaagcttaatgctcttaaccctcaccagcctctcactgattctaaaaactctcaaaataaagagttattcccaattcaattaccccaacatacacaaatacatgaaaacgccttctctaccaaacgctagctcctttatttttacgatactggcgccatgtctttacctttggttgcggctgttgcagctgctgcggcggcggcggctgcagctgcggcagctgctgcggctgctgatgatgctgagctaggggttgatggaggaaccgggttgctttgctttgtaaccacttcttgacgcttttgcagcagtggagagttgagatcggtaagcaattctttaatctgcttaccggacagagtttcgtgctgaagcaaagcatttgcaagggcatgaagctctttgttgtaaaccgtgaggattgtttttgcattgttataagccttttccagaagttgtttcacttcactctcaatgagaagccttgtctcggtgctcatgcttttcccattgtcgtcgtagttatgtgccacaagacccacctctttgctcataccgaatttcgtgaccatatgtctcgcgagtttggttgcctgctcaagatcagaagatgcacccgaagttacttcactttccccaaaaatcaactcttcggctacccggcctcccatacaaacatcaagcctagcaagcatctgtttcctagaaatgctcgtctcatctttatctggtagttgagaaaccatgccaagagccataccacgaggcacaatggttgctttg

SEQ ID NO: 48990 - DNA, 529 bp, Arabidopsis thaliana columbia
ctttgatagtttatctccataaaaacttgtccaacaagatgtgaccatgtggaaataatttattctcatgtgcgaagtaaagtgctcttagcttagaggttaaacgaaacatcaatttatcaagctagaatcaaatggtaccaaacaagttgatcatatggatatgaaattcaatactggaatttgccaatctggtgctccatagaaaagaacagagtaacgaggacctcgcatctctgtaaccctgtaatatcgaggttactccaaacaatttttgttctcacggaatctcttccatgtacgatgccatttcttcttctttttcaagagagagttcgaattctcagatcgaatttcaaaacccaaattaagtaagtcgagaaacgtcccacgttatgttatcaccgcctctctcgtcgccttcttgcaacagatctgaaacaaaggagagtaaggaaagaggaacttttgatctgcaaccgatctcatcgtctttacaaacacaatttcgctaatatgaataagatat

SEQ ID NO: 48991 - DNA, 587 bp, Arabidopsis thaliana
tgcatagatctccaatgtctttagtgtaaacagcatttccttcgtcgtctagcctaaacaccattaaagcttttgtgctcaatttcgacatacctctccagacggccttcctgtaccacttaaccaagaaagtttcaccggtggttcttgactccaccaagtgttcgcttttgtagcacgaatccataacctctcgtttggtctttgtcagctttggaaggttttggaaccgcaacctctgaaacttgggatttttgtgcttgtctttgtggagatcccatgaagcaatgatatggcctcctgatccgggaatgcgaaacaagtcatgtttctccgaaaacatgacacgagaggagtagaaacaagggtttgcgattctgacattgatccactcagagttacgttgagccggtctgcaaaagctgatttgaggtccaagaacttgacagccacaacacagttttcatcctcgggagaagatgaggacattgacacattggtgacgatttgagtttggcaatgaggcagagtacaagaggaggcaagggaatgcgtttagggtttgtatccgatgcagccgggtttag

SEQ ID NO: 48992 - DNA, 453 bp, Arabidopsis thaliana columbia
cacttcaacaggtccccgagataaaaccacgcaaacttacttaagtttgaacctacgaagaacatatcatatcacatccgaaataacttggatttaaaacaagtccaaatattaaccggaacatgaacaaaacgaggtgatcatacaccaaaatcgacaaagtgtcaacacgcgaacaagaaacgaaaagtacttgttaaacgagataaaagccttcccagttataaaagtacttaaccgaacaaaggataaaacccttcccaggcaccaagttcaaaaagaaacaaacaaaggatgaaagccttcccaggcactaagtcggaaacgaaaacacaaaagcttaaaacaaggaggataagtaatcactccttcggttccctggccggcatggcgaagtcagtatcaagatcctccccgagaccttccgaaaacgcatccttgttgctcccgaac

SEQ ID NO: 48993 - DNA, 575 bp, Arabidopsis thaliana
  unsure (1)..(575): unsure at all n locations
ccatcaaaatcatataagggcggttttggagagactaagaggacataagctgtttacaaaactaagcaaatgttccttttggcaaaggcgagttaggtttctcgggcacattgtgtcggataagggagtctccgtggatcctgagaaaattaagtctataaaggactagccttggcaaagagtgcgaccgagattaggagttttctgggtttggccgggtactatcagagatgtgtgaaaggatttgcgagcatggctcaacccatgactagacttaccagcaaggacactaagttccaatggtcggatgagtgcaaaaagagcttcgccgacttgaagttgatgttaacaagtgctccggtgctaaccttgccggaagcggatgagccatacatggtgtacacagacgcatcaataacgggattaagatgtgtccttatgcaaaaatgtagtgtgattgcttatacctcacggcaattgcggaacacngagggcaattatcctacgcatgatttggaaatggctgccgtagtgttcgcattgaagatttgacgatcttacctctatggtgccaa

SEQ ID NO: 48994 - DNA, 484 bp, Arabidopsis thaliana columbia
  unsure (1)..(484): unsure at all n locations
atcaaaataaaaataaaaaataaaattatgtaaacaaattaagtactactttcattatactctttttattttattaattttttatcatcaataatcatgactaatttttttattgtgttgtaattgtttgctacctaacctcttattagtttagtaatttaattttgagtatttgataaccttgacattcaagttttttcaaataataaaccttcaaaatattagacctaccaaataatgtaatacacgatcatttctcttatattgatatatgcaatgacagacgatataaaagtattgactttaatgatactttaatttttgcattctttttattcttttcatatgaatactcttgaaatcttgttcagtttatatcaattctatatatttaatcatgagcctataacatagttgttggagtattatatctagagaatanatagaaccatagatagtttatttataatcaagttgaacaatt

SEQ ID NO: 48995 - DNA, 601 bp, Arabidopsis thaliana columbia
tggtgagtgaacaaagagagcacacggctgttgctgtgtttgtgagctgggtagtttttaggttctgacagtagcaaatcaggttgttgatgttgcataatactgtccaaacttatctgtgattgatcagtttgttctaataaaatatgtttattgaagttgtgttctttatcttgtcaaagtatttagggttcttttacttcaaacatgtcatttgcgaggtaggtattcctctcggatgcatcgcaaatagcacttgcatgtaatttgcgacgaatttgaattcgtccgaatctcttgtcgcaaacttgaattcgtcgcaattgtgtcgccattgttgcgataaaacagatccctcgcagagcccacgctaacgtcgcaaaatacatggaactttgcaatgaaataggattgaatgtttccgacgcaatattgcgtcgaattggcgtcgaacgttttcttgcaagttcgtcgctagttagcgatgaatacgctagtaaatgtgtcgtgtagagcgagaattttgcgagagatagttcaagaatcgaatttaaactttgtttcacaaatttggtttttggttgaatttaacattaaaagt

SEQ ID NO: 48996 - DNA, 444 bp, Arabidopsis thaliana columbia
  unsure (1)..(444): unsure at all n locations
aagtcactaaaacagtgacaaattgtgacatcgtagttacaaaattctcgtaactatacgtgacataaattcagtcacaattattgtataatttagtaaccatatttggtcgcaaatccgtacttatatttatgactatataatttgtaacaaattcgacataattagtgacaaacattagttacattcaattaagtcataatattattacaaaatagtaacgtttttatgaccaaataaataggtcacaattttgtatgaaaatggtcacaattttctgacgaaaataatgatcacaatttttccgtaagaatattcagtttttttgtagtggtcccactttaataacttgactagggacttcaataatttattacatctcttacttatagaatttcatgatcaagtcacggacttaatgantctatagaatgatataaatta

SEQ ID NO: 48997 - DNA, 543 bp, Arabidopsis thaliana
caatgttctcatttagtacatctcccataacaaactttcctagacttggtctccacaaatatgcggctttgttaaacaccttttcaaccttaacaattgcagcagaaggaccaagaggcatattgttcacaagttcttttcagtctgttgaacacaatcgaccctcaccaaccacagaatcagccatattccaatcaattatgatgattttaacggttgatgaatctttagcctaaagcatgatgcataaataataagtgattgggtatagtgtttaggttcagctagataattgacaagtgatgggaaaaagacattaccgaagatcctgcagtctgattctcagaaggggaagatacatcactgtctagaatgatcttatcgaaaggccagacaatcttgttccttaaagcttcaccaagtgtgaaaactgatggtgtaggccccacaaagaagctgtggcgtctaacactgacttcgcaataacagccgcaacattacgtccaagtggaatacgaccaatcttgtacatttgtttagcag

SEQ ID NO: 48998 - DNA, 540 bp, Arabidopsis thaliana
  unsure (1)..(540): unsure at all n locations
ctctcttatagctgtgtcgtgccaatttgacctctccttgagttctaaccaatcatttgatgccctcacgcttgactctagctgtttggttgagcattctagtcgagtatcagttgagccttcctcgttcaatgtaacatcctctgtttctgacgcaatgacacctttaaagatctttgatcctggtacttcgttgtgtgagtctattgacatctcatagctcaaggtctcacaagagagaaatccagcttcattacttttggtcaaagcagtttgaaggtgatctttgtcagtaagctcctctagcagttcattagctagctgacccatttcttcaactaagaagctttgtccttctattgttggcttcttcatagtgtccctgatttcaaacttcattttgaaatcctccccaagattaagattaatgtttccttgcttaacatctatgactgctccagctgaagccaagaaaggtcttcctaagattagaggaccttagattcttcatcatctcaagcacaacaanatcagtaggga

SEQ ID NO: 48999 - DNA, 571 bp, Arabidopsis thaliana columbia
cgatttgccgtgggtcccaccagctatgtagaaataccctatcttatttattagaacttttatacatgcaaaatagtcaaaaacaatgtccgaacatataattctcgccccgtaatatagcaaagatcacgaaatgcacgaaaaagtacattaagatcaaaatttggagtagaaaaaaaacaagagaagaattccattttccttcctcattcttcggagagctctctttgggctttccgagaaggtatcacatgccaagtttggcctcacggtctaaaagttctagagtcatacatttttaacaaaaaaaaaaaaaaaccgaaaaagagggattcaacacgaggactttcctggaggtaacacatcctagtactactctcgcccaagcacgcttaactgcggagttctgatgggatccggtgcattagtgctggtatgatcgcatcagttactacatgcaatccaatcgtatatattattttcctaaggctttatgatcaatttgtcgtgggtccaccatctatgtaggaatacctatcttgtttataagagctttgatacatgcaaaata

SEQ ID NO: 49000 - DNA, 582 bp, Arabidopsis thaliana
acagacataccgacaaagaattttaagtaataaagttagcataaagctatctgatttgtcagaatgtaaaaacgagtccaagttgactccttcgagctttgattctcgttccaataatacttcctccaccatctctcctcctctcgttagatctaagaaacagagaaaacaagagagatagaatgagaaagggagttctaaatcctgacagagatcgtcagatagtggaacatgagttgcaggaaactgggtttagtccagaaacagagaaagtcaagaacaagaattttgaagaagatgaagaggaagaagatgaatctgtggagaagatatttgagagtagagaagtaccttcttggaagaagcagttgacggtgagggcttttgtggtgagctttatgctaagcatcttgtttagtttcattgttatgaagcttaacctcacaacgggaatcatcccttcgctcaatgtctctgctggtcttttgggtttctctttgcaagacatggactaagatgaccataggtctggtccttgaacagccatttcacgccaggagaatctgttatcagactgtgttg

SEQ ID NO: 49001 - DNA, 983 bp, Arabidopsis thaliana
ggaattattgttaaaaaagaagtcatgattttttaaattgtggtctcaattaggaccagagctttatcccagctttgaaaaaagtaagactcggatttcgattcatctaaaactaagtcggatatttccatgtgttagatttttattttacgtttccttcatagaaattctgattaacccgacgtttccatttctataaacatcattatatttgaacgttacaaagttttctcagttctaacttaggggcaataataaaatacaatctttggacgtgtggtggtttaaggagacaatcataaactaaacaatgatcttttgaagggtaatcaaccctcaagaaccagaccgaacaaaaacaaaccgaaacgacctctagtttggtttcaaatcctcaaaccgaaaccaaaccaagccaaaataaaattatctctgaaacaaagctttgatacaaaatccacctcaatctatagccaaatgaatatttcaatatccacctttccaattcgaagtcacaccataactatgcttatacaaaattcactaccaaaacctcgaaagtcaatagagatgaagaagagtatttcacctatcagttcctagtttcaatctcttcctcctcctgctctgccttgaagctttgcgagtaatgataagaagagtcttctttagttttgtggtcttttagtttccacttttgtatttgtaaaactctaacatctcttcttccacgggatgagtctcgcctactatcacaagacaatgcaacggtgctccaaaatcaacgctttcgagttgcttcatcgtccctgcaactatcgtctggtcctcagagccaagccgggaaagcccacacactgtgtgtcttcaccataaacagaatctccatgcttttgctcaacttccagaagctgctcgattgctgtattaacactcatatacctcggcggttcatactgtttcttccctcctctgcatagaga

SEQ ID NO: 49002 - DNA, 564 bp, Arabidopsis thaliana columbia
taattaacggggataatttgcacaagaaaatcattggacaagaatataagcccacaaaattatacggcccacatactatgaattcggcccaaaataaaaatgtcaacagatccaaactctacgacgtttttataagtaaataaaacaacacgaattgtaataagcaaacacgaaaacggcaatggagtaagtccgttcaggtcgatcataataattccgacgaattagaaagcgaaaaaacaaatctacgaaattctcctctttccgaagatgcagattgaagaagaaggagaagaatcataagaataaagctttgaattatcccgttttgctccaccttcgttcttctgattccatatagatccgtttaatagcagcaacgttgttcaattgagaaggtggaaacatgtttaagttcttaaaaggagtagtggctggatctgggacgggactcaaggatctaccttataacatcggtgatccttatccttctgcttggggttcatggagtcactttcgtggtaccccaaggttattctctttcacccctctctccggatgttt

SEQ ID NO: 49003 - DNA, 723 bp, Arabidopsis thaliana columbia
agaaattgaaaaaaagaattcggcaaggaacacttaccgacatcggaaaattagggtttactgagtgaagcttcgggagttttcctatcggagaagaaatctgagcaagagaagaacaattattaaagtcgacgatggcttggacgaaactctagacaattttttattttttttggttcttattgatgggcctcgatattattgggctttcagatgacttttatgtctttattttttcttgctctgcttttacttttttactacgagataaattttgctttggtcataaaagttggggaaacgtttttgtgcaggcatgtcctcaaactctacttatttggtcactgtcgccgacattatgcactgcgacctgctcatggtattagaagtgatggttcggtacatggttcaccaagggactcgttcacacgcccctattcgctgcaatgttagctgagtgcattgtcgtgcaatgcataccggtcttgttttcacccaaaaccatggtacatttggtatcttcggaagtaattacttggtgttcacagagtttttcggagctcctgctatgcaacttttcatatgtacggtttcctctgtctgtgctttagaccgggcctgtccattgacaaaatacactcaaatagacacaagatttcaaggatctgtcagagcaatatggttcaatgagatcagcacaatttgatctgagctgacttatgt

SEQ ID NO: 49004 - DNA, 541 bp, Arabidopsis thaliana columbia
ctctaaaggagtcagatcgtcacgccgtcttccagaaatcttgctatgccgtcgacagcaacatctacagcgtctaaaacacgaaatcagttctctacgtatcagcagcaattttcccccaagaagacacaggaaccaacggcttcgacacccgacaacggctccgacgaggcctcttccctgataccttcgtcctggccagaggtagcagcgctacagaccgagcttcttcagcttagtcttttataccagtccatgcagcaacgcaatgaccgatggcaacgagatgcgcaggcgacctaaggaagaaatatacctccgtagccggtgactacaaggctattctgaacgaggagaaagagttgcagagaagactcaatggacaggccttgcattcctggctcagaaactcgggcgagcacaacgggcagcagagatttgcagaacatgttcagcttctatcccaagtcgccgacgaggtgtatggtcttagcgacagtcatggacggcacgcaatagccatcttggagttcgaggaatg

SEQ ID NO: 49005 - DNA, 523 bp, Arabidopsis thaliana columbia
gaacactttgccaccttcctatctttatagactttcttgtaagtttccaatcatctgataaaaaaacatattctaaatgactgatgcaggtccaaaatttgatagaaagatgtctccagttgtacatgagcagagatgaggtcgtaaagacactcttgacccgtgcaaggattgaccctggttttacaacattaggtacaatcacttttgtttatttccatatcaaagtaacattgtgttagtaacttaccctttatgataacgttcttttgaattttagtatggcaaaaactggaagaagaaaacgcagagtttttcagggcatattacatcagactgaaactgaagaagcaaatagttgtattcaatcatttgcttgagcatcagtatcacctcacgaagtataatgtacattcaaaagttcctctggtcccaatgcagaacggtattcatcctatggcatctggtaagtctgactccttatatcacttgttggtgtagatggttcaatgatttgtttgtg

SEQ ID NO: 49006 - DNA, 463 bp, Arabidopsis thaliana
cccccgtttctgagccaactctcctaagtccgggcgaacataggtcggtcaaaactcttgccgacgaggtgggagttaccgatcaatacggttggcatttgctggctgctgacgtccttcccttcgagcctcaagaatatacttcgattgattttttcttttttacttttgtgcctgcatggctttatcccttgtttagaacctatgaattcatgcctggatggccttatccattaatcaattctgaagtattcgatctctatttaaatccgaacccttttctgattatgacaagtacagttgaattgaattttggagtgaaacattttcggttgcgatctgatccgattcactttcagcgtttcgacacgagctggaataccggcgtttatagtataactgggtttctgaagataaaagttctgatcagaggttatttgatagattttatctcgttatttgt

SEQ ID NO: 49007 - DNA, 407 bp, Arabidopsis thaliana columbia
ccgctaacacagttgtgtgtaacacccatcccgccatataggccaagacgacatgttattcatctgatcttgccaaaaacgttttctttaacttcacacacgaacaaaatattgcacacaactcctcacttttactaacttgaggaaaaaggagaaaaagggggtgagtaaagaatactcagtgaggggaatcaactctgcccactgaaacatagaacactttctaaagctatacaaccatcatcataacatataaactttgacacatgcaatcaacctaacatgctttaacttctaagaacagattcataaccgacatagtatccgtaaatccataatagcacatacgtacggatacatccttaggtccagtcatgctcgatgacaactagagcctcgatgagtgg

SEQ ID NO: 49008 - DNA, 406 bp, Arabidopsis thaliana columbia
cttttcacttaggcaatctttactgtaaccacatgctcatcagctttaacttggttctccatcaaccaggatctgaatccatgagtcataaaagctcctgcaaagcttcatccccatccgagctcgtttgcgccatcaaacaataaaactcgttacgatttactccatataaaactgtctcgtaaacatagttttaggtcaataactaaccgttagaaacttaatcccaccgttgattatcgacccagtaataccatgaagcgctccaccaaatttcgttccgatcagagttgttacggacctccaaacgttggctcgaagaagctagtacgaaactgttttctaggattccacatatttcgtcagttacttgtcctgaaagaaacgcacataacttctctaacat

SEQ ID NO: 49009 - DNA, 484 bp, Arabidopsis thaliana columbia
cccaataccaaataaaaagatttggggcttaatgttaggggttagatttgggcttgcttttcccaaggcccaaatccaagtcaaaggcctaagcagaatgttaagtcaagagggtaggctcgtcaaaaccctggaggaatgccctacacgcagaaggctataaatacggaatagcatgtcttgtcaaagggggggaggacacttagagacaaagagaagctcgtcagctctcccgtctaaccagctcgtcagctcacccgtctgaagcgcctcgtcagccggtccgtctcaagtagctcgtcagctctcccgtctaaccagctcgtcagctcacccgtctgaagcgtctcgtcagccggtccgtctcaagtagctcgtcagctctcccgtctaaccagctcgtcagcttacccgtctgaagcatctcgtcagccggtccgtctcaagtagctcgtcagctctcccgtctaaccagctcgtcagc

SEQ ID NO: 49010 - DNA, 504 bp, Arabidopsis thaliana columbia
tctctgaaaacaggggatgaatagcttatgaaagtattttgtagcaagttgcaaaagactttgttgctagaaaagaacttaggtctaaacaatgaccattaaaactatatctatgacctaaaaaacgtgcatagactaataatgaaaataaaaagtcttctgaggcaaatttccttatcttcaaactctaaagcgtgatggacttctctgggccgcaattggtgttgatcgatacaaagggtgtgtcgattgacactctcgagttgatctggcagtgaattcgtcatttggcttattttcctcagcttatgctccaaaatgtcttattatctccattgttgtccctttcaataaaatacctgaaaagactctaaaaggactctagaaataacaaaaagactcaaaaacccatatctagaacatagctaaaacagtaaaaatagggttatatcactaagcaacatgtaattctttgcaagcttacacaacattctagattccata

SEQ ID NO: 49011 - DNA, 750 bp, Arabidopsis thaliana
cgccagtgtgctctaaagtctatgaaatgttgcaggtgtacggtacaaccctgaaagcgttggttcatgagaaatttggcgatggcattattagcgcgattaacttcaaactcgacgttaagaaagtggcggacccggaaggtggcgaacgtgcggtcatcaccttagatggtaaatatctgccgaccaaaccgttctgacagccatgcgcaaccatcaaaagacgttcacgatgctgctggtactggtgctgattggtcttaatatgcgaccactgctcacctccgtcgggccactgctaccgcaattgcgccaggcgagcggaatgagctttagcgtggctgccctgttgaccgctctgccggtggttaccatgggcgggctggcgctggccggaagctggcttcatcagcatgtcagcgaacgtcgcagtgtcgccatcagtctgttgctgattgccgtcggtgcattgatgcgtgactttacccgcaaagtgcgctgctgcttagcacgcacatgcttggtggggtggggatcggcatcattcaggcggtgatgccttcggtgattaaacggcggtttcagcagcgcacgccacatggtgatggggctgtggtccgcggctctgatgggcggcggtgggcttggtgcgccataacgccctggttagtcaacatagcgaaacctggtatcaaacactcgcctggtgggcgctgcatgccgttgttgcgctctttgcatggtggtggc

SEQ ID NO: 49012 - DNA, 548 bp, Arabidopsis thaliana columbia
ggtagagtctagccgggtagcattctcccaagtcttaaatgtgaccgctctcttttgacgacttcacgagcatgtctacatagacctccatcattttccgaggtgattcttgatcatcttgttcgcaaatggttggtatgtcacacctacatttttagttcaatcgatatgatcgtaaaatagtatatacctcggttggtggtgaacgatgtatttttcttaatcgtgaggattcatcattatttggttgtaactagatgctacgtcctttccgaactcttcgctcatgatctttttcatcgatggccacttcgattatgacgtcatccactacttgcctgcttgataattctagaatcacttcttgattcgataaatccacggtgctccaactatgtcagtctagctactttccactctctccaagcatactcaagaatagtagatcgaccaaacttccatcatcgatcacaatccttgaaactccgacgtcagccacgtctaaggtgaggacaaaaatcaacgtcatgaggttctgcgaggtgacg

SEQ ID NO: 49013 - DNA, 498 bp, Arabidopsis thaliana columbia
taaagttagagattagatgataattgattagatgatgagaccagagctatgaggcaggaatacaattttacaaataaggtttaataaagctcatgcagtttgcatcttatcaagaaatgacgagtattgaaggtattatggcatgtccttgtgtcaaatgttgtaatgattgtggatgtcggattcacacactcaagtatttatttatttagtgagaaggattattcttgaggacaaatgtactagaaaatagattgacgattatagaaaaaactatgagttttgtaagaaaatgtgtatagtaagtttgcacaaaaatgcgtgtgtctttacatggtctttaacccataatttatactcaaagaatacatttaattctcatttacacgtaattattctctcttaaatgtatctgtttcagtcttcgaattaactattcaaacgttcgaatctgaattgactctgaacttcttgtgcttcatcttctagcccacttga

SEQ ID NO: 49014 - DNA, 125 bp, Arabidopsis thaliana
cggtggctcatgcctgtaatcccagcactttgggaggccgaagagggcagatcacgaggtctggtgattgagaccatcctggccaaaatggtgaaaccctgtctctactaaaaatacaaatatta

SEQ ID NO: 49015 - DNA, 491 bp, Arabidopsis thaliana columbia
cgagcaccacgcaaccagacccaaaatttcaagatattatgagacatatggttactcaaacacatagaatcatcaatatccttacttaccacaacctaccaaccataagcctttaagcataggaatctaaaagatctcatatgcggcttagtatcatcattcacatcattaatcaatactcatatagttcaagacatcattcaatgaatgacagagtatatgatcatgcaaccaaacaagcaatcaatcatccaaataaacactcaaacctatcatgtgccatataacatgcttcgaaactcactgagattcggctaaaggtttaaggctagcttcaacggttctcggacacctcacgacttctccacatcattcgcgtcttgatctagcttctttctagctaacctccctcattcttgacttttaccacgaatcgacaaatcaaatgttttgccaagattcttgattctgatcaacaagattcacgtact

SEQ ID NO: 49016 - DNA, 1287 bp, Arabidopsis thaliana columbia
tgggaggaggcgacatcatctttggtggtcaatggttggcttccctcgagatgtgattgcaaactggaaaaccatgtttttaagcttcactcgagatggccgcaatatacgattgaatggtgacccttcgttagcttgctcagaaatctcagctcgtggacctgaaaagttgcatgaagatcattgtgcttggttatggacggtgtgagacaaattatagacttagaacgttgatagagtgtgattcagctgtgtttctttttccatcttcagtaatgagtcggtatttgtttttgttttggagttgtgtttatatactaaagagaaaagactagactaagggttgatttggttttttgttttgggttacatttagcagttaaggtcttaggaagtttaggttttgtaagaactttttacttagaaataaaaatacttgttttcttcttgtgatttgagtgttcttgtgatggtttaaagatctaaaaatacgaaagtttctcttgattctggtgcttgtttagcttcatctcggggtgaatagcggacggcgaaaattcgccattgaaagacaggcagtgaacgaagctcatttccgttgtcctgatgaattgggctggcaaccgcaggtaaaccactagtaatttgcttatgaattcactccattatgatccgctatgcaatccgagaaataagctaactgcgcctttctttaacgttttctttacacagcggcttcccatagttgttgaagatggaggcatttcaaaggcaaaagaggtaacatacatataatatacatgcttcaccacaaaacctggatttgaatattgtttttttggatgtcttgaagacttcatgctcgacggagtccattttccagttattaaagaagaaaggctttgaggttgttcaatcagacgatgctggacgttttgtatgcaactacgtgtactatcactctctaaggttcgcagagcaaaagggacacaagtctctgttcgttcacgttcctctcttctccaaaatcgatgaagatactcaaatgcagttcgtggcttcactcttggaggcaattgcagctacttgctagtgtttataagaatccactaaagccaaatattgtaagtatacaatgtatatgatccatttgtctttctatgaagctctttgtgttcttttgttggaaggtttggggatataaaaagacgattgcttttggttctcaaagatcctttgtgattgtctctgactctctgtaataaaagaagtctctctctattcata

SEQ ID NO: 49017 - DNA, 836 bp, Arabidopsis thaliana
tgatcgaaatgattaatattgaatccaaaatttgtatacaatttccatatatatatatatacacacttatttacacatacacttagcaaaaagcttcactgaaacagaggagctctgttttcaacaaatttcatctccttcccaattatccttctcctttggtcctgtaggacttcctcaccgtaaagctcaataggaaacagactctcaaaagaattcctcagaatcagtggaagtagatcaatgatcttattgatctcagctgctgaatcatatactatagttggtccccattctctcataaactgcagccagtacggttctgaaaccgctccttcgcctaaatactctgctgctacgattctgtacctttgactagaatccaccatatacttgcttttcgcaacatcgtttcttactccaatcccgagcttcgacgggccttgaagatacattcccgggtgtgggaaactagcgtgaccgtgtttggatgagtacacaaccggtttattgcttcctttgacaaactcaagatccgatacatcaacccatcctccaccactatgctgtgagaagaacatctgtgtaagatcgccgttgaagttgcttatccggaatgtgaaatgttcccaatcaccaacatgattgcatatgcggttcattggtaccgtgagaagcccgattttgagagtggctggaccattaaatggacaggatctcccaattacaacgtccgtgaaaataccgccaagcgcgggtttcacgtggacgtaaagctctgagctttctatataccccttctttagattacttctaacttcttcatcttcagggag

SEQ ID NO: 49018 - DNA, 574 bp, Arabidopsis thaliana columbia
tgcttatctttatctttattgtcttcttctgcaggtagccattgtgtgataggaaactgattagtacaagtattgttgggcttggagatgggctttggtctgtacacagtcttgacaatcttcttgggccaaacattctttgagcctgtttgcaagacagtttcgttttgacctgctgatgtttgcgtcttcaatatcgctttgacttctcttttctcagatctagattgtacttgctcaacttctgtctgcttcttctcattctcttcttttgtaaccacagaactttgcagtggtctggtttcactaatagtatcgtcatgtaaatatcaacaagtttcagttcaataaagagttctttttgttcttgtcttctttacaagagaagagacaaatgtctcttgctctgtttttcttctttctctcaatattcaacaagggtgagctagtctccgatgccatatgtcagacaattgaggtagaaaagcagaagcttgagcagaagttttattgaaagctggaaaaattggatagagatctccactgttatcactgcggagaagagtcctcttgg

SEQ ID NO: 49019 - DNA, 420 bp, Arabidopsis thaliana columbia
tagtaaacacagccacaaggtctatcctttaaatatggttactggtttcctccaggttcgattggtatccatacttgaagattataaattgacaaggaaacaacaggaagaggaaaagagacgataccgggtttgtcaaaaagctctcttttacataacccttgaagatttgtaatactgcttgcctttttaaacaattttatttcattttctctgcaggatcaaaagaagatgcaggatctgttaataaagcggagggaatcaatttatggatcaaaaccgagtccaagaagaagcaacagtgtaagaaagaccaacggatacaatggggatgcatctgctgcctcctacgccccgcagaaactcagctggagcaacaaataacgacataatgaccaccccaagatcatactcaagcca

SEQ ID NO: 49020 - DNA, 912 bp, Arabidopsis thaliana
acccatgtttcaagaatatggtgttgaatgtaaaaaggtttaaatgaattgatttagctacctatgtcatcaaagtccacttatcttttcggtcaaaagtctttagagaatttcatagttaaaattattattcagttttaaagtttgttctctttcaattttaaaattattgtgttagaatttgagtccatgattaaatcttatgatatctttatgttagttcgtatgtaaagtcaatcggtttgtgttaatcgtgacttgttaagaaagggcgtgagtaagagttgtgtcttgttggataagtgcaagtgttttcctaatgtaaagtatcgtcgagtaaataatcaaatttcagattcaataaagagttatccttgttcttgtcttctttacaagagaagatacaaatgtctcttgatctgtttttcttctttctctaaacattccaacataacccaggaggatacttgaattcttgaagcatataaagagatgggaacaacagaccatgaccatcaatgtattaatagtgtgaaagatgaaattagaaactccgtatagtttcattacaaagttggtatccttcaacaaaaataaaggacatatcaaacacgaaatcattttggctactaagcacaatggaaactacaagctctcaataaagaaacttctatagtttgtgctggtcacattcatattccactgttactatatattttgacaacattatcacatcttaacgtaacttgtttagcaaacaacaattttcagtggtttctgttggcaatgaagttagtaagagctatcaaaggtttgactttgtcagaatcaaacccttgaagatgttctctcgcatctctcttcaacttctccacaaactccttagatttctcacaccaatcacttttggat

SEQ ID NO: 49021 - DNA, 822 bp, Arabidopsis thaliana columbia
taaacgaggagagagacagagagagctttcaagaaaatggtgacattgggtttgtttttatagcgttgacagaaagtctcaatgcgtcggcatgatcttcccgctcaaattcattaacggtcataacagaaacccgagtgagagccaaagaatctagccaaatattaatgtcttctttgttcctttgtgctgtatttgactaaacaccgtttcaagataagagaaatctgtttggttttgtttatggctttttgtttaagattgaaagatgcaagttcaaatttacaagagaatcctaccgataaactattaccttttgttcttgcaactttttcagtcaaaagaagaatccggattttaaaaaaccaaaaaaaatcttttgttcctttcattctttctcctagcaaacctatcctagtgaccgatatgagaaaatttagattcagaaattcgcctgatgctgtgcgaattccgacaaaaatctcaaaattgaatgcttaggattattatcatcatcacgaagccctttgtccagagtctcaagaacacccttcatgattcgagtgtaaagcctctccatctgcggaatgctgtagttgtcagtacgttccatgaatactccctttacagattctgttcggcttgaaatttctttatccgacttggccgcagacccttgcaagaatcacactcatatcttctgcagatgcctctttacttggtggccgctttggtctttctatcacatctgttggagaaggactgctgactgtgggttggcgcaccggagatggcattcttggctgaacttggtctgtgatt

SEQ ID NO: 49022 - DNA, 990 bp, Arabidopsis thaliana
tttctgaattgcctctgcattgggctcccatgaagtattctctcttgaaaagagaactgcagagacactgatacagaaaccagtcacataactcatataaccaaggatagttttagtatagtatgattctccaaatgatgtgtacataccaatttaactacttattactctaatccaagttgagttaaaaaaaaaaacactatgtaaagattgatactttatggactaaaaattgaaaaagttgacaacttggagccgcccacagttaaaaaagtaaaaacctaatcctaagacccgaaaccactcaaccaaaaaactagggttctgtttctcgtctctctctcaaacccacattgcacaatccatttctcgtttctctgatttagatccaaagatggatgggatgaagctttcgttcccaccggaaagtccaccactttcagtcatcgttgctctttctctctcagcttctccggtgacgattgattcttccgccgctgcaacaaccgtcccttcttttgtcttctccgacgggtactttccgttttcttagtctggttccttctttgatttctatgaaagtttaaacctttttgttaatttcttgatgtaggaggaaattgaatggagccaccgttcttcttcgctatgttggtcgatcagcgaaaaagcttcctgatttctatggcaacaatgcttttgattcttctcaggtctcgattctttgtattaacatgaaagttcgaatcttctgatgtaaattttgaatctttgtaactttgtttgttcttgtgggtggttccagattgatgagtgggtagattacgcatctgtcttctcttctggttcagagtttgagaatgcttgtggtcgtgttgataagtatctcgagagtagcacgtttcttgttggccattctcttccattgctgatgcgctatttggtcactcttgctggtaaaaatttgttactttgtatgtgttggtggag

SEQ ID NO: 49023 - DNA, 989 bp, Arabidopsis thaliana
ataataaatgtagtacatatctatgcaagtgtactttgtcagagtacggagatttagctgtcgaaccaaacaagttgtctgaatttgataattacgtttcccattaacaaataattacgttttaagacaaaatgattagggattaatgtaaaataatcagaaaaaacagagcaaagaagaaaaacagaggaattaggcttacgtgagatgttggtaaagatttggcagcttcaatggttcgaatgaattgttgcatgttatcatcacaagatacagcgtcatcggcgtgttcgacgccatagacaagcatccctttaagaccagtagcttcataaacgcttctcacgcgctcagcggctgcgtcggcatcttcaccggcgcaaaaatggtcataaaacgtacttttcacaagccctaaaaccatgccacgcgtcaccgaagcgtccataagtttagagctcatgacccacgtccctaggtcgaccataggacctatcgccgccgcatgcaacacggcggtggaacggaggagatcagaggttgggatagaggagaaaagacgggcttgatcggagagatcgagaccatcgtgagattgctcggtgggttttgggtggtgaagaggtggttccggtgcttgttgtccaaaggagagaatctccgggacgacggcggtggaagcagtcacggtgggaggacccaccgggctaaaagcgggtaaacggtaagatcgccggataaagtttgttcggagaagacgggttgccataaaattcaaagattttgtttttgaaaacgaaaacaaaaaaaaataatttctcttctcttttttatttgtttgcttgatgtttcggttttatcgctgtttttttctaaacgctttggttgtgtgattttctcctatggttactgcacatatatttatagaagccgtaaaccttatggatgtacatcacgtttacgtgttagatatatatagatgccatgtg

SEQ ID NO: 49024 - DNA, 1106 bp, Arabidopsis thaliana
ctcgtctctcggttgctgcattctctgttggtttcactgctgttgtcgtaacagtttcaggcggcgctgttgtaataggttcaggtggcgctgttgtaacactttcaggcgttgttgttgtttggctagtattttctgtggacgtagctgtttctgtgtttggagttgaagacggatcgcttttttcttccaaagaagtttcctccttctctacgggaggaggctcagacacagtctccgtcactggtccatccacaggtgctgctgcagtctcagatgctggtgcctcagcaacggctgcggttccaggtgctggtgactcagcaacggctgcggtttcaggtgctggtgactcagcagcggctgcggtttcaggcgctgattcggtctgtggtgcctcggaagatggaggagcttcaatagccaatggtttcgtaggttcttcgagcgccaatggcttagctacttctggctgtgcagtcttctgcgtgagtagaggttttttgggagccgtaatggaaacaaagattgaagacattccaggaggtagaatctcgataggaggttttctagatgcatcagataaactagtgagctttggatcctcgagagaagccagaaacgcacttgcagcatcggttttagaagacggagctttctcaacttccttctgcagcgttttattccaagcctggaccaagttctttagagttgggcgaccatgtgcctgtggaaataattacagtaggcgtagtcagaaacaatacaagtttaatttataaactgcaaaaagaaaaaccaaaatacaaaaacaatcttacatgggcatgaagcacggcttctgcgagcattcccgtgtcttgccatgccttctccatgagcgcattgtctcccagaactgcagcagaaaatgctgattctcgtccaaggcctatggagatcagattgtttacaagtccctgcaacaaagttaataaagtatttcaattaggaaccagaagatacaaagtataaaatcaaagcataaattcgtctatagttatgtcgatcctatctagtgaacaagacaaaggtctttagatttctgtaggtatcctaaaatacga

SEQ ID NO: 49025 - DNA, 777 bp, Arabidopsis thaliana
tgtagacagggcaaaaggacgggcaccaacaacttttctgcaacatgctcacttggtgtacatccctatgaaatggtacacctgacattgggtaggtctggtaattaacttgaggttgcatatagttcaggtctttgaccctttaattgaagcaacatcggatgaggaagtacaaggtttgatggcgcctgttttagagatgattccatggttggttaaagaggttgtaggtaggaagtatacaaagaacttctcaacaaacccactgacattggagagggttataagagtataccagaaccagagaggaggtgatagttgaccccttgcaacaaaataccttgagatgcactcgtttgggcttgacatagatgatatgggtgagattacagaggaggtggtcaatgagttaaggaaaggatacgcactggatgcatacgctgagttcattgagagtgttgaagctacaaaaacttgactggatttgcaaatgaatctaaagttcttttgtttaccttctttaaaaacgttaatcgagacattgctggtgttttcatcacttgttgactttaaactttggatgtacctgtctatatggatattgaaatgttatgcgttttatgacttttaaatttgttgcttctataagtagtacacgataatctctaaacgtatactcttttgtacactggtataagtacaccaagtatgtactacatcatacactagaattgtacacacatgagtagagtagagtactacaccacatacatacac

SEQ ID NO: 49026 - DNA, 589 bp, Arabidopsis thaliana
aaaatcaaatcgtttggctaagttgtcccgtttggccggtcaataatacaagagtggctaagttgtcccagttggccggtcaataatacaatagtggctaagttgtcccagttggccggtcaaaacacacaacttaaaatacaagagttgctaagttgttccaattggccggtcaatacacataacttaaaataggaaaatacatgtctaattaggttcaactattacacaaaatccagaaacataatataattaggttcaaatattacataaaatccagaaacataacataattaggttcaaatgccatacaccatcctcaataacataaaacacatcataatcaccatgtagaaagtaatgccctaagcctatcaatctcgacttctttggcgagtaacctttctttaaggatttcaatttcgccttgcatgagatgaacagtttcccggatggacgccaaagcatgattacatgctagttgtccatgtcttagtgcggaataaggtttgtgatttccttctcaagctcctcagttaccgcctgatcccccactgaataaggtggtttcgggactcgtagggtacga

SEQ ID NO: 49027 - DNA, 607 bp, Arabidopsis thaliana
ctcacatctaaaatgacatacatggaatgacaagctgttttcaatacctcctcaacgtatacaggacaacatctaggaaaggccattcaaaattccaaggaatatgcacacgcagtcacactccgtagtgaaaggaaattgatcaacaaccagccaacagaaaagatcactgaggacaatgaagttcaagaaggggaggaccagcatcaaaacgaagttcaaactaatgaaccaattaaacttgatcaaccttcagactcactcgaccctctactcgatcgagcaaagcctacttttgaggaaagaaaagtcgcagcttcagaaaaaaataaagaatttgctccgccacccttcaaaccgactttgcctttcccatgaagattcaagaaggaattgatagaaaaatacaaaaccctttttgataagcaattaaaggagattgagctaagaatgccgttaatggatgctttcacgctcattccacactcccacaagtacctcaaagatctgattatggaaagaaccaaggaggtgcagggaatggtgttaataggccatgaatgcagcaccatcatccagaaaaatataatacgaagaaagttgagag

SEQ ID NO: 49028 - DNA, 564 bp, Arabidopsis thaliana
atatccatagatggctatgatctgggaagaagcacacaacacaactcaccacaaacatacaatttaattccaaaagataaaaacaatcaaaagatgaatgccacaaagtttgttgtgcttctcgtgattagcgttttgtgtgccattgtcaccgcaaggcatgtcgaagaagtgtctaaagagaccaaattaggcacctctcttccaaaaagtactaccaaaggcattggagctcagctttctgctgctggtattacttccagcagtagtgatgtctatagctctgctactggtttcaacaatcccaaaggtccagacgctaatgcatacgaaaatggctacacaagtaccagcggacaagtcattgccaagggtcgcaaggcaagagtttcttctgcaagtgcttctaccgctaaaggtgatgctaaagctgcagtgactcgcaaagctgctgctgcacgagcaaatggtaaggtagcttcggcatcaagggtgaagggtcctctgagaagaagaagggcaaaggaaagaagggcaaaggaaaaaaggattgagcgtgaggtg

SEQ ID NO: 49029 - DNA, 615 bp, Arabidopsis thaliana
caatctttgaacagtgtgtttctcaacgcaaggaagtactcgttaataccaatgcttgatgcattaggcgctctcattagtaatattgatgatgaaactagaagaagaggtttggaattacctgatttggtttcaaaatattattgggcggagttttggacattggcgtattatagaactatttatttagtgtcgaatagttcacagtggaaagtctcagatgaaatcaaagcgttcaagatagtgccactatctaaaaaacataggaatgaaaaaaaaatgctaaaagtttccatcaaccggggaaaagcgtccacaacgatgaaagacgcaaaacaaatggcgtccaaggcaatcgtgtcaatggttattatttggaaatacgagtatttaatttgtttctacagttgttttgtttatgtttgactggacaactatgtaatattggattcttcgttttgtaatactatgtatgtttctgttgttttttggtactactggtagaacaagtaacactatgtatgtatctattatttttttgtaatagtggtaaacaagtaatactatattcactttaatttttggttatatagttcaaataaaatagtgggtatg

SEQ ID NO: 49030 - DNA, 523 bp, Arabidopsis thaliana columbia
gaattgagtattctgctacgcatctctcaacagaggatgctgaatatgatgatgagatcagagaggactatgcagatcctctctatcacccattttcttcttaatgagtgtgagaggtcaagctagtgactttaaacaagctcactttggaggaattcccaagaatgttcatgtaaataaaacttttattttcttgttatttttgatttgtttttggttatgtttgtgattctcaggaacacagaaacaacgtggaggtagagtaaaaattcaaaaattttactctacagagcaacagagaatcgagtatgtcagtatagagaaattcaaaaatttgaaaatgttctgttgcactcagagaaccatgagatcgagtaggttggtcgagtattagtgatgattttaaaacccaaaattttgaaaatatctttatactgcgcctacaaaagctacaaagacttacagggagtttcagaggattcagaaggtctagtcaaagggacaatcttcaggacaacagcag

SEQ ID NO: 49031 - DNA, 966 bp, Arabidopsis thaliana
gccgcatattccgatgtgaagcctgatattgtggtggcacaggacgggagcggtcaatacaagacgatcaatgaagcgttgcagtttgtccccaagaagaggaacacaactttcgtggttcacattaaggctggactctacaaggagtatgttcaggtgaacaagaccatgtcgcatcttgtgttcatcggtgatggtcccgacaaaactatcatttccggcaacaaaaattacaaggatggtatcaccacctaccgtaccgccactgtcggtaagatatatattttggggatttttactcgttagattacaaagtcttagaagtcatctatgtaaaatgatgaatgtaatgtttattgcagccattgttggaaactacttcattgccaagaacattgggttcgaaaacaccgctggggcaataaaacatcaagcggttgcagttagggttcaatcagatgagtccatatttttcaactgtagattcgatggctaccaagacacgctctacactcactcccaccgtcagttcttccgtgattgtaccatttcaggcaccattgatttcctctttggagatgcggctgctgtattccaaaactgtacgttgttggtgaggaaagcactcccaaaccaagcatgccctatcacagcccacggtcgaaaagacccaagggaatccactggatttgtgttccaagggtgcaccattgccggtgaaccagattacttggctgtcaaggaaaccagcaaagcctatctcggtaggccatggaaggaatattcaaggactatcatcatgaacactttcatcccagattttgttcagcctcaaggatggcaaccatggctcggggacttcggcctcaagacattgttctactctgaggtccaaaacacaggaccgggatccgccttgcaaactgggttacttgggctggaatcaagacattgagcgaagaagat

SEQ ID NO: 49032 - DNA, 576 bp, Arabidopsis thaliana columbia
aaagaagtcttggacctcaacaagactacagctcgtggtggcgaaacaacaaccttgtcacctccgaaaaatgagcacaagtttaggtagaagcaaggctgagtctactaaggtcaactcaatcgatcaagccatggcacaatgatacatagaagttttcatggtatttcttcggaaatcattagcggatgaccttcaacaattacaaccttgacatgacaagatcatatttgctcaaaaacatttggatcatgtatgaagcatcgaaaataagttcaactatggtgtacacgttgactccttaacgtaaaaagtctccatcttaagttacgcaaaattgttataacgaaaagcatacatatctaagaccaaaacggtgggggcgtcttccaaataatacaaagcaacgtcaagccgcttcggaggtggcccataacatctatgggatgaagataactgaagtcattatctacaagcaaataaagcgaatcttctccgaagtataggagaattttatggcattatcacttgacgtgattaacgaatggttgctacaaatttggagtcgttatttat

SEQ ID NO: 49033 - DNA, 761 bp, Arabidopsis thaliana columbia
tgatttgatgcattgattcgattctcgtcctctcatcaggacaagtatgtgacttttggatgtttaatatagatccacctgattacctgcattgatagttggtgcttatcttagttatgtagctgttgagaatggtatatgaaccctttgtcttgcctcttagtcacatcttgtggagtttttgtcattagtcatgtaaaggtttcgttactggttgattttaaggtattagagataagatgggttcaaaaggtttcgttactggttgattttaaggtattagagataagatgggttcaaaaggtttcatgaacaatgctgggttgctttctaattctgctctggaatatatgttaaggtttttgccccagagtctctggcaacaatctagaattttatattggactgaacaagttcacattttagagtaactgtttaatgtagcgtaaccagattagaaaacctttgatagcgttttgtgtcacaccaatgaaatagttagcataactaagaagtgaacagattttgtctcattcttctgctggtaatcttaaagctgacagtgattgatggtgtaaattaagtttaggataagagatgaaatgtagaaatgtagataatgcaaaagggccatatagttgcgggttttggtctttcctgtgtataaatccatgaagacatatatctatctgactaaactgataagacttgtgatttatataggcatcagtagttgagacatcgaaaaggccactcccaaa

SEQ ID NO: 49034 - DNA, 585 bp, Arabidopsis thaliana columbia
ggactaacacaacttacggacatggtacgggttgaaaagccttaggccgtgttcgtgaggaacgatgttcaaggatggcctgaccttagtaccagatgtgttcggggaactcggtcggatcgtctacgggcatcacaagtaacgcttccggattcgttcttagtcctagaatggttcgggggtgttacaagagtggtatcagagcgtggttttgttcatgcttaagggacacaagttttcaaacgttttatcgagtcaaaatgagtcgcaaagaaaactttaggaaaccggtgcgtccatgtactataggtagagggattaggtagagggattaggttttactatttggatgttagtgcagattttgaggtaatggatgaaaggacgacggatgtggtgaccactacaaggctatgaatcaatgggagagaactcataaggagacgatattggagttaatagagggaagcaaataaagatggttatgcggagatggatcttgctaaagtattcaaggaggtgttctatactagttgaagaacgccgttcaagaaatggtgtgtcgcaaacaccagagaagaggat

SEQ ID NO: 49035 - DNA, 524 bp, Arabidopsis thaliana columbia
taattattttctattttaaaataaaaaaggaaagaacatagaccactgaccactaaaaataattaacatagtatttaaaagaaaaaaggtacattgaccctaaattaagtaataataagggaattttgcaaaatcttccatattcccctctgaaacttacattccctaccatattctacctcaccttataaagtctaccacatttggtaattcgtggacgaaaatgcccttaaggtgggtcagggactctgacttagatggtgacagcttttggcagatgtgatgatacaggacgacaaatcatgatggaagcataaaggattaggagaaaaaataatagagaacagatgtcttctactgttgttattgggtatttaaaattgacttgtataagaaaattggttatccaaaattttgcgggggacaacgtaatagataatacattagaagatatgattacctgctagcgggggataacgtaatacataatgcattaggagacatgattacctgttagcggagaa

SEQ ID NO: 49036 - DNA, 422 bp, Arabidopsis thaliana columbia
tgattaaagcaaacaacattattgagtatgaaagcataaacacaacaaacagattaagggaaagaagggatctcttcattgtattaggaactgaatcaatctctgacaacaatcgatgaataggttatgtctctcttaaacagggtttgcaaaaagcttgataaaaacttgataaacaaaacttaggtttaaacaatgtatataaaccctataaaacatctaaggactaataatgtaaatagagaagtcttctggggcaaatttcctcttctgtaaacttgaaagcatctgggactttgctgggctgaaactagtgtcgatcgagactagtagtgtgtcgatcgagactagtagtgtgtcgatcgacactcctcttaatctggaactgaaaatcttccttagcttcctttttcttagttttt

SEQ ID NO: 49037 - DNA, 495 bp, Arabidopsis thaliana
agccagtgtgctttaaagcatgatttcatggctacgaggttctctgtgaagaaacggctgtgacctgcttcattttcctcattagtcaggtacgctcatgttatagccaggcagaaggctctcagttgagcttttgggtctgttgttttgtcgtaatccgggaaatggagtctcccggcgtctcggatgcgacaatgggcgatcctatccatgaatggggtgcgcctcgtttctccaatcacccgatctatgtcgggagcattgctcacgattagatgcattcgtgaatgcatttgagccatgttcgcgtttgtttgagctgcgtaattgcagaatgtttccatatccacgatgttacgcgggtcgaatagctacacctgtctagaaggctgcgttgacaaggagttgttaggtgcaccgttggtcggcgccaggggattggttggaccgttaaggaggtcgctctctgatatcaggggaaacgatgggaagttg

SEQ ID NO: 49038 - DNA, 784 bp, Arabidopsis thaliana
caggagcaatataataagaatacaaccaatattatcagtgtaatgatgctttttaccttttccccttgaatggatcatggaagaattcacaagattccctcgggcctaggctaactagagttccaatttctgtaacagacaatgagaacacctgcaattttgacatgaagctttaccaaattcataatagaaaaaagactgccttttaacaccaaatccagtcaaatggtcttaacaaagttacagctcaaggatcatctgaagttaaagagataaaaccaaacctgtttcttgctccaatcatattgtcgtacaccagcagaaggagcaaactggagcaataagaaaccatcttttgacaacttgaaagctccagactgcagaaaaacaacagaaatcaaatggaaaactcaaagcatgattattcagttagagctctttgatctttaattttgggatagagacttacgtctaaagccacaaactctggtgctcttgggtccactgttaacgcagctttccctttgtatatcgaatgacccacgtaaaatctagcaggcaatccttcagctatcaaatcgaaacaaagaacacaagtaaacatcacctacgagctccatctatagatataaaaagagttctctttttggatttcaagcttcaaggttacaaatttctcgtaattaagagtacccttttgtgttttaagctccaattcttaataagcaagctaaaaccctaaagtaccaagtgagatggcttacaggtgaaggagaagagaaga

SEQ ID NO: 49039 - DNA, 625 bp, Arabidopsis thaliana
agtgtgctgtaaaggatggggacagcagtaatcccgtttatcttcatttactttgcaggttacgatatagctttgtgagctcaatccttctcgtttttatcttcttttactagacccgtgatcctaatttgccgcaatagaacccctttgttggtcgcatacccctgtgagatctggccgttcgcacttcgatcccgtggtctgagtgtcgcctggttctcagcaatcggagcattgatttttaacactttcgttaaccccatcgcgctgtcagctatcgggtggaggtactatttcgtgtttgttgctatcctcatttgctacggtctcacgtcatggttcgtttaccctgagacaaaagggtataatctagaaagtatatcccatattttcgatggcaatcaccagcctggccatgattcggaaaaggccacttcatctgaagactgtattgagaaggttccgaatctcgtgaagtggagcgcgtataagcgtgtatatgcgtgtggaaggtgtcgactagatgggaatataataaaatatgtacgttattcgtatctaaagactcgtcagttacatatgagcgcgaaccagatggactaaatgtggtgctgaggtgatcctg

SEQ ID NO: 49040 - DNA, 1138 bp, Arabidopsis thaliana columbia
ctaaattagttgttaaaaaaaacttaatgaccaattgtttttcattttctgctcagctgcttcttttttatcaactaattttcttcaattcaaatatcaaaatggttacagcaaatatatgcaccatctgatataccctgaggcaattagccaattagctagagcattagagcaaacaaaagcgataaaaagaatatacacaaactcatccaagtttgctaatatgcgaaagaagttgtcgaaaagaacaaatacgaaaaatatcggggaaagaggtcactctcaatcctattcttacaatcgacttgaagattgtcaccttaacttgtggcttaatgacatgtgtcagttataggaataatcattctttaacaccccatatacatagaaaatgtaattaaacatcctctgtttttacaggttacaagcaaagaatatgaaagcaacttaacctccaaattaacttaaagtgaaccactgttttggagtgattaaaactcaaaaggcattcttcttaccaataagccataaccaatccaaagcaactcctgcaaatatccctcctaacagaaatatcaccagtaagttccctaacgcattctgctccggacccttcaccaaatcaaaaccaaagtttgattttttgttacaatatagaacaaatgtgagattacttgtcttaaacgcaaagattgtactcgtttgtatttgcctttaaatattcaaacttgtatgctttatctttcttaaaaataaacaatcaaatctgacacctttaattagtaaaaggtgaaaatagattaccttgtatcctttaggagctatagtcataatgcaaacagtgagatgtccattagtcaatcccaaaacagaaacgagcataatcatccatccttgatcaccatatttcgcagtgaagtagaacgccggaatgaggagataacgtgacaaaaccgcaattgtgatcaattttctattctcaatattgagccatttaaccagtggtgtgtacctcccgccaaatccaacaattgtacatcgctactaagacaagtgcgtaccaagcaccctagcccgtgttgtcctgtgttttcatcaagaacccgggaagaatggataatgtacaacgtagatgggg

SEQ ID NO: 49041 - DNA, 522 bp, Arabidopsis thaliana columbia
gacttgagagtaatgcaccattaagtgggatctttaaaagcaaagatgcaaatttgattatatataaaaactgaaaagttgatttttaaaatttcccacttttttaatttagggaattgggattgtctaaatagggacactttaactctttgtgggtgggtgggttggtgtgggctagacactcttttattttctcaaaggttatatgaaaaatggtaggtatatcacatatctcaatgataaatcataaatgtcacaaattggtcttcgaagagtccaattacttggagtgtctaaaatagtgagattatgatggattggtttattattattttgcgtgtacccttgttttttttttgaagactcaaacgtaaacggaatgaaacaatcgtgggttatatgacagagactatagaaaacaaaaaatatcgaagagaaatagatggactatggagatgaactattagtgatccacttctcacgttggatattgcttcaaattgtgagagtatatatattggt

SEQ ID NO: 49042 - DNA, 1196 bp, Arabidopsis thaliana columbia
tcacattgtgtatcaaaactggctcgggtacttgttaaggaaattcaactcctatttcgagcaaagcttgcaggcctagaccgtcagtttatccagaacagaattagtccgtcttcaacctgctaattcatttaagacctatcttgcttcatggtttcgctcctttcagcgataacgagtcctatctttgcgtcattgatcttcatctattgctttgctttagtttgttgtcttgtttttcgatttctttgacctttttcattttccggatcaaaattataatttttaaatggtaacttgtttttaaggcatcagaaaaatgaataaagtaagttttttataaaaaaaatattagtcatcggtgactatttagtagatatctaaacaaataaaaattaaaaattaaaaattaaaaaggaggagagagaataaaactagtatactcactaaataccctcctgccgtataccatcttttcattggcttatttatttttaaaataaaatttcaatgttatttaattaattaatactgaaataacaatattgattgttaagagacccccccaatcgatggagatactcttatggaataatgaaatggcatccttgttgtggtcacttaatcaaaataaaataaaaaataatcagagtctctaacaataaaataaaaaataattaaaataattaaaaggtaagagtaagaggaaagagaggttctaaaaccaaccttatcagtaatttcttaattgattcttaccaattaaaaaaaaaaagaaaaataattaaaacttaagagaaagaagagagagaaacgaaaaaatctcttagctaagagacataataacaaactaagagacactttatagtttagttattggtttatttaactgtagaattaaaatattagtatttttatctcttaagagattttcattatatatccacgataatgatgctctaagagcacgtctaatagatgtcccttatgggtttcttagtgtaataggccctttagaaggtccaaaattaaatacaaaatgtgaaaatagattagggccgcttccaatcgaagagattttgtgacacttcagggacgcatacgtggccaaatatgattggcccttaaaattttgtcgacaaacctaaattcttacacgtttgtggtttattatttttggcattcgcgtatttggt

SEQ ID NO: 49043 - DNA, 960 bp, Arabidopsis thaliana
ggttcttagatgggaagaagagcttccatctccagaagaactcatccctatctctcaaaccttaatcactcctcatctagctctcgctttccaaatcggaagtcctaatcatcatctcggatcaaagagaaccaccgcgatttatcaccagaagcttcaatcctccaccactccaacaactccaactccaactcctccaccgatgatgatgaattctgatttcggcggtggcgattccacggatcttggttcaggatcaataggaggagagccagcaagaacgttgaaacggccgcgtctagtgtggacgcctcagctacacaaacgtttcgtggatgcggttggacacttagggatcaaaaacgcagttccaaagactataatgcagcttatgagcgttgaaggattgactagagagaacgttgcgagtcatcttcagaaatatcgtctttaccttaggagaatgcaaggcgggaacggtaacggaatcactggaggacacgtcatcgtctctgattcggctactgatcggctatttgctagctcaccggttccagctcatttcttgagcccggattacttgatgccgccattagagcattcgtatatggggaaacatgtgattacgcagcaaaaccaagtggttcgtaatctgaggtatgaagattcggaatatggtcatggtagtatgaagatgcttaagctcttccctgccggaaattaatgaaatatttgaattcttaacttcatttttatggaagtaataatgtttaaggtatgtggattatctctgtaatttgcatttgtcgtcaggatcaataatctattgttagtgtatattatttgttacgcgaacaatttaacctttgtatgatgttatcatttgaattcactacaacacagtagcttgtttttatttctttcgtctattcattagtttccctggacaagtttgattat

SEQ ID NO: 49044 - DNA, 547 bp, Arabidopsis thaliana
tacaaaagtgactatcataatatatctaagtaataataataataaaaaccgaaattaatgtcattaagagagacgtaccatacgtttaaaatattttggttttccacatcaaatattttcttaaaattatagttttctcatcaccaagcgatcgacgaagatgaacaccaccaaaaccctaaaatctcaagacggatcaacagtacggcgaccatcatctccagcggcggctctcggctgctgaaactgagtgatctgtccaatggcaagaatcccaccgtcgtagttgttaccggccggaacatccaagccaccaaacatttgttctctaggaaaaaactggtggtggtgatagtggtctctcacggcggtggctgttccatctgctgctccggcgagtaagttgatgccaagactctgatgagtggcggcgaggataccgaggctttggtacttagagagctcagatttagcacagctgagatctatctgaagctgacgaagctgatgttggaggagagagatgacgccgacgcagccgtagaca

SEQ ID NO: 49045 - DNA, 523 bp, Arabidopsis thaliana
ggaggagagagatgacgccgacgcagccgtagacagggtcacggaggcgcatgtcggcttcataggccaaagagttcactgcgtcttcacgttgtgaagggtgaagctcgttgaggagctttgtcacgttacttgctccaaacactttgtgaacgtttgcgaatttttgtggctggtccggtgggaaatagggcgcgaatacacattccggttgacattttcgccggaggaatttgcaagcggcgcatggtgagtttgttgaagaagatgccattttaatgacttgaaaatggagtttttcaattttttctcttttccctctccctacacaaagccgccattgaaaattgagagaaataagggtttttgaatttagtttttggaggtagaaggtataaggaaacaataaaagatattatgaaatcaattgtgattttggagatattacattatctgtttttgtaatcaaatatgaaatttaagtgagaaaataaagagagaaataatttagagaagttgctca

SEQ ID NO: 49046 - DNA, 943 bp, Arabidopsis thaliana
tcaagaggtactaccaatacaaaggcatgaaaagagatatagcggaatggatatcctagtgcccgacctgaaagtcggtaaaagccgaacaacaagtctgagtggcttgttacaaacgatgtcaatgcccaaatggaaatgggaccacattacaatggactttgtaactgggctgcccactacacgggcaaagaaggacgcaatatgggtgaaagtcaatagactaaccaagtcagcccatctcattgcaatcaagaaaatggatggagtgaaagctatagccgatgagtacattgatgagattgtaagatttcacggtgtaccggtgagcatagtacccgttggagactcacgattcacttcccatttttggaaggcattccaaaaagctttgggaacaagaatcaacatgagtaggacctatcaccagcaaacggacaagcagtcggaaaagactatacggacgttggaggaatgtctacaacaacagtttccaagtgagtatagggatgtctccatatgaagctttatacggctgaccatgccgcacaccaatgtgttggacacaagtaggagagcaaagcatgattggggcggacttataaatacaacccattcggcaaagcttgtggacacaacactatacaccaaaactttcaccaaaacttaagagagaaattggaagagaaacactattctttcgaagggtacaagcgacggaaagagatagtggatgccttggagatcaaacctttggtaactcccggatcgatgaatccggcggaggccgagaaaacaactggtctaatgaccatggtgaggcataactgtaccaacgtgagattgaacgatctatgaggggctagggaatttggttaacgcatcctacttatgatattttgttctaacgatatgtgatatgtctgggggtgaacatggggag

SEQ ID NO: 49047 - DNA, 605 bp, Arabidopsis thaliana
aggacccagttcgctccttcgtcctcctcagtagccacaaaagctgcaccaacgagagccgctcgtgacattaccctccagagccttgagctcctcagtattgggaacagcaagaggaagtgactgtctgcattttgccgcccgccaggttcacagttggatcatcttttatccatctttgtttcagaaattattggtaagtaagaaacaaacatgatttgttaaaagatataaatatatattatacatggcttttcttcgtaagatcagtgttgttcaatttatattattctctctagcgccaataattttatggcaatcataatcaataatgtgtctgaactctaaaagagtttgaaacaagccaatcttgcaattacaatgaatttaatttctcttaacagataaaaaatatataaatatactttaatcatgctgactttttaaattatttcttattatgtatccaaattaattcttgtattgaaataaatttacaatctaataaaataatgtaattacatgtatgtggattacaaaactaattaatattgtttttggtcaactttcaagattttcttaaaatttatatcttagtatagcaa

SEQ ID NO: 49048 - DNA, 651 bp, Arabidopsis thaliana
tcggtgcaccatcgatctcagcaacttccataccggtaacaatcataccaggaacaacctctctggtcaacctcacaatagcgtcctgggcagtgttcatgtccaaagctttcatcccaggaacattattaatcatcccaatactcttcaacctcttaacaccagtagctccaaaaggaccatcatgaccacaagagctaaccacaatcttcgcttccataacattagggtccatacacgattgtgtgtggtggttctgagccacaagagcccagttagtcaccacaccaccaactctgtttcctttcacaatcaaatcctcagcagccacagcgttgaagagcttcacattaggacgagccaaaagcttgctcatgatggttgatgtgaacagagccgcgtgcttaaccacaacgtaggtgtcttgctcatcgtaagccacaccaatctcgtcaaggaacaagtgagctggtttgcgacaatctaccataagcacaagcaatcaatactcataatgattcaatctaaaccctaattctccattaaaacagagacagaactcaaaacttcaacaaaatcacacatgcaaatgaatctaaatcttaccatggcggagaaaagctgaccaccgagccaagcaccaccaccagg

SEQ ID NO: 49049 - DNA, 498 bp, Arabidopsis thaliana columbia
atcattcgtaagaaaaagaaacaatcaaaatattttaattgtcttatgaattagagcaaagactatacgtgttgactttatccataagataaatatattactatatcaaagccaacactacagaacctactcacttttcactcttgagattagagacagtttaacttcttctttttggcaatcacattaactattattactttttaattacttaagctagttaaccttaggcggatcagctcctagccttagctcaagatccaactcctcatgatggccgttgatctcggtccttccaatgaccaaccctaacatcattggaaatcttgacacatccgtctttgccctcttccatgacgaagatgatccgttgattagttgcttcttccgaggatcaaactcagtactcagtagaccgaccgataagtcagtcttgacttcaccattgtcatgttcatatcttttcatagaactttctaaaaagttgttattaaaaca

SEQ ID NO: 49050 - DNA, 427 bp, Arabidopsis thaliana columbia
ctgataagtagtttagccctacaggaagtggtttcaattcgattttaggagcctttgctggatcccaatctcaattattagtcggcgttggagtcacagatggaagagcttcttcaactgtaagttgcattacatgttcggtctcatctagcagcttagtatatgtagaagtttcactgtccaaatctgcactatcctctatggaagagaccaaaactcgctctagtgggtcttctaatttcttctctgaaatactatctgaagctgatgaagtgaaagaatctatcgagaatgttttcccttcttgaccaaagtgttcatatcgaactgcatagtgagatcgccaacattcagccctatcctcccttgtcgaacatctatcattgctccaactatgtgaacgaaggatctcccaaagattaatgga

SEQ ID NO: 49051 - DNA, 590 bp, Arabidopsis thaliana
taccaaagttgtatccatgtaacatcgaccaaatggatatagtgtaaaaaatgacggtgtatccacctagcgccgaacaaatggatatacatctttgtgtgtttctcgtaaacctttcttgacatccatgagccaccttaatagatcggtgttgtcaatcagcttcttcagcttttgacctcaactctgacctagagttactagacaagacactgcatctttctctttctcactttcatttttaacatgtttttcttaggtaattgagctttcatagcagtgttttttttaaatctgaaagatcaggaaatctgataaatctagttctcactattgttcttaaattaagcctttgaaatcaacaagacaagaccacattaggtacctctttgcaaacaagtgtctcagttagtgcggcaagaccccatttttcaaatctccaccaatttttcggttgggtaaaccgacagattctctacatctttaatggaaactccatactcatggaaaagtttccatagtcacatcaattccattatctactatttatatgtaccagaactatgttaatttagcatcatggggtacga

SEQ ID NO: 49052 - DNA, 584 bp, Arabidopsis thaliana columbia
ttctagcccatgtaattctaaacggacgccattagatatgtaagagcatcttcatcagtagtctttcaatgagatacccaataaaaaaaatataataaaaaaggaaaaagtaagagagaaggaagaaaaagtaggagagaaggagaattaagtttcttggaggagaaactttgagaaactattctcattcaatttggacagctgttatcctattattagtttaactattaaataacaattaatatatctgtcttaattaaaatattaatattttaattttctcaaaaactttccttactgatggagatggtctaacagtattgagcatacacatctttgtacgcgtcagtcccttcgccggcgcttaataccaccgccacacttgccgccaattagaagcaaaccggtttaaagtggcgtatcaccaacattacgatcttaactacgtctatcgacatcatcctcatccccataatcttatccactcaagactcaagtacactggacgtggcagaccaagtttttctatttaattcttccaacttcatattccaggaactcgatcgactttcagacattgacca

SEQ ID NO: 49053 - DNA, 627 bp, Arabidopsis thaliana columbia
caagtgtaaaagtatatgtgtgaatgtaaagctgagtgaatgtgtcttccaagtcttacttgcttccttatataggtctacgcacgtggtagctccgtccgggatctacagagattctcctggatattcggcaggtcagttccgagatatcaggtccactccgcgaatatctccatgttagttcctaggttattactcgcttatctcccttcatcaggtgatcaggcttatcaggcccaaataccctttcgcgtatgtaggctcatcagttgcgcaggtcctctacttggtgggcttggtgggcttagtgggctggcctggtatcttcgcagatgaattcctggaggaaaatccagctccaacagacctcaatcatttcatgtagtttaaatagcttttctttacactagacatgtaatcatgattaatagtgccatcccaatgtcttataatgttacaattgactttaaaaagaccatgatatacatatttattacaaaaaaattcatcaaacaaaatatacaaatgaatatgtatacaaaatcgttaaaaaaaattaaagcatcaaagataaataaggttttttttacaaagattggtttgttcattgtggaagacagacaggag

SEQ ID NO: 49054 - DNA, 534 bp, Arabidopsis thaliana
tgcactaacccctggaaaaaaaaatgcatcatctcaagtgcatatatgatataaagagtaaattatattcttattttacctgataatccaaggtgaacgttccggtcgaggagttctgcaaagataaatggaagtaactgctccataaaaatatggcaatcgtgactcttcatacctgataacttcccattctcaatatcaacacaactactcaaatcagacgaataaacattagggaatttgattgcatgtttaacacattgcaataaactcattttggcttcatttgtcaatgtataagctggaaatggagcttttcccttactatcaatatgtaagtcaggccgagaacaaaatcgttctatatccattcttgacattatgttgtcctttgatttaccctctacgctcataagagtattcactatgttatccaaaaaattcttctctgtatgcatcacatcgatacaatgtcggagattcatatccttccaatatggaagccccataatatgcttccttatgccagttatg
